United States Patent Application Publication US 2022/0090207 A1 - sequence listing, part 30

SEQ ID NO: 432089 - DNA, 620 bp, Homo sapiens; identical to SEQ ID NO: 282494
  chr4:125633097-125633717
  hypo

SEQ ID NO: 432090 - DNA, 283 bp, Homo sapiens; identical to SEQ ID NO: 282495
  chr4:125633784-125634067
  hypo

SEQ ID NO: 432091 - DNA, 118 bp, Homo sapiens; identical to SEQ ID NO: 282499
  chr4:126238436-126238554
  hypo

SEQ ID NO: 432092 - DNA, 218 bp, Homo sapiens; identical to SEQ ID NO: 253952
  chr4:128651504-128651722
  hypo

SEQ ID NO: 432093 - DNA, 137 bp, Homo sapiens; identical to SEQ ID NO: 199594
  chr4:128703235-128703372
  hypo

SEQ ID NO: 432094 - DNA, 568 bp, Homo sapiens; identical to SEQ ID NO: 253954
  chr4:128764580-128765148
  hypo

SEQ ID NO: 432095 - DNA, 31 bp, Homo sapiens; identical to SEQ ID NO: 209780
  chr4:128889349-128889380
  hypo

SEQ ID NO: 432096 - DNA, 42 bp, Homo sapiens; identical to SEQ ID NO: 253958
  chr4:129697834-129697876
  hypo

SEQ ID NO: 432097 - DNA, 43 bp, Homo sapiens; identical to SEQ ID NO: 253962
  chr4:138974561-138974604
  hypo

SEQ ID NO: 432098 - DNA, 35 bp, Homo sapiens; identical to SEQ ID NO: 253963
  chr4:139707316-139707351
  hypo

SEQ ID NO: 432099 - DNA, 31 bp, Homo sapiens; identical to SEQ ID NO: 253964
  chr4:139946032-139946063
  hypo

SEQ ID NO: 432100 - DNA, 102 bp, Homo sapiens; identical to SEQ ID NO: 199600
  chr4:140097254-140097356
  hypo

SEQ ID NO: 432101 - DNA, 286 bp, Homo sapiens; identical to SEQ ID NO: 253966
  chr4:140357386-140357672
  hypo

SEQ ID NO: 432102 - DNA, 180 bp, Homo sapiens; identical to SEQ ID NO: 222492
  chr4:140587058-140587238
  hypo

SEQ ID NO: 432103 - DNA, 40 bp, Homo sapiens; identical to SEQ ID NO: 253968
  chr4:140592642-140592682
  hypo

SEQ ID NO: 432104 - DNA, 82 bp, Homo sapiens; identical to SEQ ID NO: 253969
  chr4:140640071-140640153
  hypo

SEQ ID NO: 432105 - DNA, 39 bp, Homo sapiens; identical to SEQ ID NO: 209784
  chr4:140641398-140641437
  hypo

SEQ ID NO: 432106 - DNA, 90 bp, Homo sapiens; identical to SEQ ID NO: 253971
  chr4:140701211-140701301
  hypo

SEQ ID NO: 432107 - DNA, 531 bp, Homo sapiens; identical to SEQ ID NO: 253972
  chr4:140705006-140705537
  hypo

SEQ ID NO: 432108 - DNA, 35 bp, Homo sapiens; identical to SEQ ID NO: 253973
  chr4:140705888-140705923
  hypo

SEQ ID NO: 432109 - DNA, 141 bp, Homo sapiens; identical to SEQ ID NO: 209785
  chr4:140751843-140751984
  hypo

SEQ ID NO: 432110 - DNA, 287 bp, Homo sapiens; identical to SEQ ID NO: 209786
  chr4:140754365-140754652
  hypo

SEQ ID NO: 432111 - DNA, 407 bp, Homo sapiens; identical to SEQ ID NO: 253976
  chr4:140780992-140781399
  hypo

SEQ ID NO: 432112 - DNA, 108 bp, Homo sapiens; identical to SEQ ID NO: 253977
  chr4:140929945-140930053
  hypo

SEQ ID NO: 432113 - DNA, 37 bp, Homo sapiens; identical to SEQ ID NO: 209787
  chr4:141014855-141014892
  hypo

SEQ ID NO: 432114 - DNA, 138 bp, Homo sapiens; identical to SEQ ID NO: 209788
  chr4:141067295-141067433
  hypo

SEQ ID NO: 432115 - DNA, 1319 bp, Homo sapiens; identical to SEQ ID NO: 199602
  chr4:141071488-141072807
  hypo

SEQ ID NO: 432116 - DNA, 2282 bp, Homo sapiens; identical to SEQ ID NO: 282529
  chr4:141073109-141075391
  hypo

SEQ ID NO: 432117 - DNA, 154 bp, Homo sapiens; identical to SEQ ID NO: 253982
  chr4:141266288-141266442
  hypo

SEQ ID NO: 432118 - DNA, 1308 bp, Homo sapiens; identical to SEQ ID NO: 222498
  chr4:141676913-141678221
  hypo

SEQ ID NO: 432119 - DNA, 84 bp, Homo sapiens; identical to SEQ ID NO: 253984
  chr4:142134704-142134788
  hypo

SEQ ID NO: 432120 - DNA, 185 bp, Homo sapiens; identical to SEQ ID NO: 209802
  chr4:142677009-142677194
  hypo

SEQ ID NO: 432121 - DNA, 38 bp, Homo sapiens; identical to SEQ ID NO: 253986
  chr4:143073506-143073544
  hypo

SEQ ID NO: 432122 - DNA, 196 bp, Homo sapiens; identical to SEQ ID NO: 209803
  chr4:143477972-143478168
  hypo

SEQ ID NO: 432123 - DNA, 74 bp, Homo sapiens; identical to SEQ ID NO: 209804
  chr4:144141584-144141658
  hypo

SEQ ID NO: 432124 - DNA, 540 bp, Homo sapiens; identical to SEQ ID NO: 199619
  chr4:144256959-144257499
  hypo

SEQ ID NO: 432125 - DNA, 189 bp, Homo sapiens; identical to SEQ ID NO: 199620
  chr4:144257937-144258126
  hypo

SEQ ID NO: 432126 - DNA, 300 bp, Homo sapiens; identical to SEQ ID NO: 199621
  chr4:144258375-144258675
  hypo

SEQ ID NO: 432127 - DNA, 117 bp, Homo sapiens; identical to SEQ ID NO: 253989
  chr4:144265400-144265517
  hypo

SEQ ID NO: 432128 - DNA, 124 bp, Homo sapiens; identical to SEQ ID NO: 253990
  chr4:144507008-144507132
  hypo

SEQ ID NO: 432129 - DNA, 41 bp, Homo sapiens; identical to SEQ ID NO: 253991
  chr4:146047172-146047213
  hypo

SEQ ID NO: 432130 - DNA, 1185 bp, Homo sapiens; identical to SEQ ID NO: 282558
  chr4:146402704-146403889
  hypo

SEQ ID NO: 432131 - DNA, 63 bp, Homo sapiens; identical to SEQ ID NO: 253993
  chr4:146694922-146694985
  hypo

SEQ ID NO: 432132 - DNA, 181 bp, Homo sapiens; identical to SEQ ID NO: 253994
  chr4:146825846-146826027
  hypo

SEQ ID NO: 432133 - DNA, 33 bp, Homo sapiens; identical to SEQ ID NO: 199629
  chr4:148538935-148538968
  hypo

SEQ ID NO: 432134 - DNA, 99 bp, Homo sapiens; identical to SEQ ID NO: 209812
  chr4:148782279-148782378
  hypo

SEQ ID NO: 432135 - DNA, 93 bp, Homo sapiens; identical to SEQ ID NO: 199632
  chr4:149364560-149364653
  hypo

SEQ ID NO: 432136 - DNA, 37 bp, Homo sapiens; identical to SEQ ID NO: 209816
  chr4:149905345-149905382
  hypo

SEQ ID NO: 432137 - DNA, 33 bp, Homo sapiens; identical to SEQ ID NO: 253998
  chr4:151020124-151020157
  hypo

SEQ ID NO: 432138 - DNA, 75 bp, Homo sapiens; identical to SEQ ID NO: 253999
  chr4:151435900-151435975
  hypo

SEQ ID NO: 432139 - DNA, 213 bp, Homo sapiens; identical to SEQ ID NO: 209817
  chr4:151897750-151897963
  hypo

SEQ ID NO: 432140 - DNA, 33 bp, Homo sapiens; identical to SEQ ID NO: 254001
  chr4:151960720-151960753
  hypo

SEQ ID NO: 432141 - DNA, 33 bp, Homo sapiens; identical to SEQ ID NO: 254003
  chr4:152157386-152157419
  hypo

SEQ ID NO: 432142 - DNA, 36 bp, Homo sapiens; identical to SEQ ID NO: 254004
  chr4:152448689-152448725
  hypo

SEQ ID NO: 432143 - DNA, 297 bp, Homo sapiens; identical to SEQ ID NO: 254006
  chr4:152640710-152641007
  hypo

SEQ ID NO: 432144 - DNA, 62 bp, Homo sapiens; identical to SEQ ID NO: 254008
  chr4:153460846-153460908
  hypo

SEQ ID NO: 432145 - DNA, 37 bp, Homo sapiens; identical to SEQ ID NO: 303559
  chr4:153821326-153821363
  hypo

SEQ ID NO: 432146 - DNA, 86 bp, Homo sapiens; identical to SEQ ID NO: 209819
  chr4:153889785-153889871
  hypo

SEQ ID NO: 432147 - DNA, 251 bp, Homo sapiens; identical to SEQ ID NO: 254013
  chr4:153896021-153896272
  hypo

SEQ ID NO: 432148 - DNA, 648 bp, Homo sapiens; identical to SEQ ID NO: 254014
  chr4:153897072-153897720
  hypo

SEQ ID NO: 432149 - DNA, 233 bp, Homo sapiens; identical to SEQ ID NO: 254017
  chr4:153985892-153986125
  hypo

SEQ ID NO: 432150 - DNA, 150 bp, Homo sapiens; identical to SEQ ID NO: 254019
  chr4:154218327-154218477
  hypo

SEQ ID NO: 432151 - DNA, 226 bp, Homo sapiens; identical to SEQ ID NO: 282589
  chr4:154387970-154388196
  hypo

SEQ ID NO: 432152 - DNA, 40 bp, Homo sapiens; identical to SEQ ID NO: 209825
  chr4:154394646-154394686
  hypo

SEQ ID NO: 432153 - DNA, 96 bp, Homo sapiens; identical to SEQ ID NO: 209826
  chr4:154410569-154410665
  hypo

SEQ ID NO: 432154 - DNA, 222 bp, Homo sapiens; identical to SEQ ID NO: 254023
  chr4:154420387-154420609
  hypo

SEQ ID NO: 432155 - DNA, 102 bp, Homo sapiens; identical to SEQ ID NO: 254024
  chr4:154420849-154420951
  hypo

SEQ ID NO: 432156 - DNA, 85 bp, Homo sapiens; identical to SEQ ID NO: 254026
  chr4:154454428-154454513
  hypo

SEQ ID NO: 432157 - DNA, 230 bp, Homo sapiens; identical to SEQ ID NO: 254027
  chr4:154456109-154456339
  hypo

SEQ ID NO: 432158 - DNA, 103 bp, Homo sapiens; identical to SEQ ID NO: 209829
  chr4:154469359-154469462
  hypo

SEQ ID NO: 432159 - DNA, 143 bp, Homo sapiens; identical to SEQ ID NO: 209830
  chr4:154520339-154520482
  hypo

SEQ ID NO: 432160 - DNA, 137 bp, Homo sapiens; identical to SEQ ID NO: 254030
  chr4:154554211-154554348
  hypo

SEQ ID NO: 432161 - DNA, 246 bp, Homo sapiens; identical to SEQ ID NO: 199660
  chr4:157892475-157892721
  hypo

SEQ ID NO: 432162 - DNA, 465 bp, Homo sapiens; identical to SEQ ID NO: 282608
  chr4:157892762-157893227
  hypo

SEQ ID NO: 432163 - DNA, 76 bp, Homo sapiens; identical to SEQ ID NO: 254032
  chr4:157974483-157974559
  hypo

SEQ ID NO: 432164 - DNA, 41 bp, Homo sapiens; identical to SEQ ID NO: 303586
  chr4:158740621-158740662
  hypo

SEQ ID NO: 432165 - DNA, 34 bp, Homo sapiens; identical to SEQ ID NO: 254035
  chr4:159018075-159018109
  hypo

SEQ ID NO: 432166 - DNA, 104 bp, Homo sapiens; identical to SEQ ID NO: 254036
  chr4:159488285-159488389
  hypo

SEQ ID NO: 432167 - DNA, 45 bp, Homo sapiens; identical to SEQ ID NO: 254037
  chr4:159680339-159680384
  hypo

SEQ ID NO: 432168 - DNA, 41 bp, Homo sapiens; identical to SEQ ID NO: 254038
  chr4:159749469-159749510
  hypo

SEQ ID NO: 432169 - DNA, 195 bp, Homo sapiens; identical to SEQ ID NO: 254039
  chr4:159919845-159920040
  hypo

SEQ ID NO: 432170 - DNA, 46 bp, Homo sapiens; identical to SEQ ID NO: 303593
  chr4:159927208-159927254
  hypo

SEQ ID NO: 432171 - DNA, 32 bp, Homo sapiens; identical to SEQ ID NO: 254041
  chr4:162799090-162799122
  hypo

SEQ ID NO: 432172 - DNA, 111 bp, Homo sapiens; identical to SEQ ID NO: 209836
  chr4:164394802-164394913
  hypo

SEQ ID NO: 432173 - DNA, 568 bp, Homo sapiens; identical to SEQ ID NO: 254043
  chr4:165109363-165109931
  hypo

SEQ ID NO: 432174 - DNA, 321 bp, Homo sapiens; identical to SEQ ID NO: 254044
  chr4:165850787-165851108
  hypo

SEQ ID NO: 432175 - DNA, 42 bp, Homo sapiens; identical to SEQ ID NO: 303598
  chr4:165854268-165854310
  hypo

SEQ ID NO: 432176 - DNA, 234 bp, Homo sapiens; identical to SEQ ID NO: 303599
  chr4:165854346-165854580
  hypo

SEQ ID NO: 432177 - DNA, 161 bp, Homo sapiens; identical to SEQ ID NO: 254046
  chr4:166035044-166035205
  hypo

SEQ ID NO: 432178 - DNA, 180 bp, Homo sapiens; identical to SEQ ID NO: 254047
  chr4:166337214-166337394
  hypo

SEQ ID NO: 432179 - DNA, 92 bp, Homo sapiens; identical to SEQ ID NO: 254048
  chr4:169105970-169106062
  hypo

SEQ ID NO: 432180 - DNA, 43 bp, Homo sapiens; identical to SEQ ID NO: 209837
  chr4:169198694-169198737
  hypo

SEQ ID NO: 432181 - DNA, 32 bp, Homo sapiens; identical to SEQ ID NO: 209838
  chr4:169224159-169224191
  hypo

SEQ ID NO: 432182 - DNA, 37 bp, Homo sapiens; identical to SEQ ID NO: 254051
  chr4:169315725-169315762
  hypo

SEQ ID NO: 432183 - DNA, 33 bp, Homo sapiens; identical to SEQ ID NO: 209839
  chr4:169358978-169359011
  hypo

SEQ ID NO: 432184 - DNA, 163 bp, Homo sapiens; identical to SEQ ID NO: 209840
  chr4:169377152-169377315
  hypo

SEQ ID NO: 432185 - DNA, 118 bp, Homo sapiens; identical to SEQ ID NO: 254054
  chr4:169459971-169460089
  hypo

SEQ ID NO: 432186 - DNA, 33 bp, Homo sapiens; identical to SEQ ID NO: 209841
  chr4:169562060-169562093
  hypo

SEQ ID NO: 432187 - DNA, 205 bp, Homo sapiens; identical to SEQ ID NO: 254056
  chr4:169667598-169667803
  hypo

SEQ ID NO: 432188 - DNA, 92 bp, Homo sapiens; identical to SEQ ID NO: 254057
  chr4:169744533-169744625
  hypo

SEQ ID NO: 432189 - DNA, 124 bp, Homo sapiens; identical to SEQ ID NO: 254058
  chr4:169751969-169752093
  hypo

SEQ ID NO: 432190 - DNA, 150 bp, Homo sapiens; identical to SEQ ID NO: 254059
  chr4:169952682-169952832
  hypo

SEQ ID NO: 432191 - DNA, 44 bp, Homo sapiens; identical to SEQ ID NO: 254060
  chr4:169957541-169957585
  hypo

SEQ ID NO: 432192 - DNA, 78 bp, Homo sapiens; identical to SEQ ID NO: 254061
  chr4:169978256-169978334
  hypo

SEQ ID NO: 432193 - DNA, 209 bp, Homo sapiens; identical to SEQ ID NO: 254062
  chr4:170037586-170037795
  hypo

SEQ ID NO: 432194 - DNA, 89 bp, Homo sapiens; identical to SEQ ID NO: 254064
  chr4:170064508-170064597
  hypo

SEQ ID NO: 432195 - DNA, 214 bp, Homo sapiens; identical to SEQ ID NO: 209843
  chr4:170105281-170105495
  hypo

SEQ ID NO: 432196 - DNA, 45 bp, Homo sapiens; identical to SEQ ID NO: 254066
  chr4:170125972-170126017
  hypo

SEQ ID NO: 432197 - DNA, 73 bp, Homo sapiens; identical to SEQ ID NO: 199677
  chr4:170192274-170192347
  hypo

SEQ ID NO: 432198 - DNA, 76 bp, Homo sapiens; identical to SEQ ID NO: 209845
  chr4:170566083-170566159
  hypo

SEQ ID NO: 432199 - DNA, 75 bp, Homo sapiens; identical to SEQ ID NO: 209846
  chr4:170566219-170566294
  hypo

SEQ ID NO: 432200 - DNA, 37 bp, Homo sapiens; identical to SEQ ID NO: 209847
  chr4:170612105-170612142
  hypo

SEQ ID NO: 432201 - DNA, 70 bp, Homo sapiens; identical to SEQ ID NO: 254070
  chr4:170641910-170641980
  hypo

SEQ ID NO: 432202 - DNA, 215 bp, Homo sapiens; identical to SEQ ID NO: 209848
  chr4:170652116-170652331
  hypo

SEQ ID NO: 432203 - DNA, 41 bp, Homo sapiens; identical to SEQ ID NO: 254072
  chr4:170845921-170845962
  hypo

SEQ ID NO: 432204 - DNA, 67 bp, Homo sapiens; identical to SEQ ID NO: 209849
  chr4:170865287-170865354
  hypo

SEQ ID NO: 432205 - DNA, 122 bp, Homo sapiens; identical to SEQ ID NO: 254074
  chr4:170937655-170937777
  hypo

SEQ ID NO: 432206 - DNA, 120 bp, Homo sapiens; identical to SEQ ID NO: 254075
  chr4:173298723-173298843
  hypo

SEQ ID NO: 432207 - DNA, 41 bp, Homo sapiens; identical to SEQ ID NO: 254076
  chr4:173467910-173467951
  hypo

SEQ ID NO: 432208 - DNA, 51 bp, Homo sapiens; identical to SEQ ID NO: 209851
  chr4:174136653-174136704
  hypo

SEQ ID NO: 432209 - DNA, 52 bp, Homo sapiens; identical to SEQ ID NO: 209852
  chr4:175940748-175940800
  hypo

SEQ ID NO: 432210 - DNA, 99 bp, Homo sapiens; identical to SEQ ID NO: 199694
  chr4:177240753-177240852
  hypo

SEQ ID NO: 432211 - DNA, 48 bp, Homo sapiens; identical to SEQ ID NO: 222534
  chr4:179699960-179700008
  hypo

SEQ ID NO: 432212 - DNA, 184 bp, Homo sapiens; identical to SEQ ID NO: 254079
  chr4:181454371-181454555
  hypo

SEQ ID NO: 432213 - DNA, 92 bp, Homo sapiens; identical to SEQ ID NO: 254081
  chr4:183673079-183673171
  hypo

SEQ ID NO: 432214 - DNA, 274 bp, Homo sapiens; identical to SEQ ID NO: 254082
  chr4:183768991-183769265
  hypo

SEQ ID NO: 432215 - DNA, 39 bp, Homo sapiens; identical to SEQ ID NO: 254084
  chr4:183808323-183808362
  hypo

SEQ ID NO: 432216 - DNA, 203 bp, Homo sapiens; identical to SEQ ID NO: 209856
  chr4:183824599-183824802
  hypo

SEQ ID NO: 432217 - DNA, 32 bp, Homo sapiens; identical to SEQ ID NO: 209858
  chr4:184051481-184051513
  hypo

SEQ ID NO: 432218 - DNA, 41 bp, Homo sapiens; identical to SEQ ID NO: 209859
  chr4:184160138-184160179
  hypo

SEQ ID NO: 432219 - DNA, 82 bp, Homo sapiens; identical to SEQ ID NO: 209860
  chr4:184166102-184166184
  hypo

SEQ ID NO: 432220 - DNA, 179 bp, Homo sapiens; identical to SEQ ID NO: 254091
  chr4:184277759-184277938
  hypo

SEQ ID NO: 432221 - DNA, 150 bp, Homo sapiens; identical to SEQ ID NO: 209861
  chr4:184289435-184289585
  hypo

SEQ ID NO: 432222 - DNA, 321 bp, Homo sapiens; identical to SEQ ID NO: 282688
  chr4:184328290-184328611
  hypo

SEQ ID NO: 432223 - DNA, 109 bp, Homo sapiens; identical to SEQ ID NO: 254094
  chr4:184331205-184331314
  hypo

SEQ ID NO: 432224 - DNA, 37 bp, Homo sapiens; identical to SEQ ID NO: 254095
  chr4:184339996-184340033
  hypo

SEQ ID NO: 432225 - DNA, 223 bp, Homo sapiens; identical to SEQ ID NO: 254096
  chr4:184343147-184343370
  hypo

SEQ ID NO: 432226 - DNA, 133 bp, Homo sapiens; identical to SEQ ID NO: 254098
  chr4:184404652-184404785
  hypo

SEQ ID NO: 432227 - DNA, 32 bp, Homo sapiens; identical to SEQ ID NO: 254099
  chr4:184554620-184554652
  hypo

SEQ ID NO: 432228 - DNA, 200 bp, Homo sapiens; identical to SEQ ID NO: 254101
  chr4:184670515-184670715
  hypo

SEQ ID NO: 432229 - DNA, 180 bp, Homo sapiens; identical to SEQ ID NO: 254102
  chr4:184675874-184676054
  hypo

SEQ ID NO: 432230 - DNA, 325 bp, Homo sapiens; identical to SEQ ID NO: 209863
  chr4:184678229-184678554
  hypo

SEQ ID NO: 432231 - DNA, 146 bp, Homo sapiens; identical to SEQ ID NO: 254104
  chr4:184679181-184679327
  hypo

SEQ ID NO: 432232 - DNA, 81 bp, Homo sapiens; identical to SEQ ID NO: 254105
  chr4:184740848-184740929
  hypo

SEQ ID NO: 432233 - DNA, 35 bp, Homo sapiens; identical to SEQ ID NO: 254107
  chr4:185121434-185121469
  hypo

SEQ ID NO: 432234 - DNA, 245 bp, Homo sapiens; identical to SEQ ID NO: 254108
  chr4:185121499-185121744
  hypo

SEQ ID NO: 432235 - DNA, 37 bp, Homo sapiens; identical to SEQ ID NO: 209864
  chr4:185185202-185185239
  hypo

SEQ ID NO: 432236 - DNA, 386 bp, Homo sapiens; identical to SEQ ID NO: 254110
  chr4:185238062-185238448
  hypo

SEQ ID NO: 432237 - DNA, 124 bp, Homo sapiens; identical to SEQ ID NO: 209865
  chr4:185239992-185240116
  hypo

SEQ ID NO: 432238 - DNA, 36 bp, Homo sapiens; identical to SEQ ID NO: 209866
  chr4:185241303-185241339
  hypo

SEQ ID NO: 432239 - DNA, 89 bp, Homo sapiens; identical to SEQ ID NO: 254113
  chr4:185322205-185322294
  hypo

SEQ ID NO: 432240 - DNA, 228 bp, Homo sapiens; identical to SEQ ID NO: 254114
  chr4:185344286-185344514
  hypo

SEQ ID NO: 432241 - DNA, 156 bp, Homo sapiens; identical to SEQ ID NO: 209868
  chr4:185352799-185352955
  hypo

SEQ ID NO: 432242 - DNA, 280 bp, Homo sapiens; identical to SEQ ID NO: 209869
  chr4:185353277-185353557
  hypo

SEQ ID NO: 432243 - DNA, 170 bp, Homo sapiens; identical to SEQ ID NO: 254117
  chr4:185355394-185355564
  hypo

SEQ ID NO: 432244 - DNA, 181 bp, Homo sapiens; identical to SEQ ID NO: 209870
  chr4:185386797-185386978
  hypo

SEQ ID NO: 432245 - DNA, 57 bp, Homo sapiens; identical to SEQ ID NO: 254119
  chr4:185425792-185425849
  hypo

SEQ ID NO: 432246 - DNA, 89 bp, Homo sapiens; identical to SEQ ID NO: 209871
  chr4:185426628-185426717
  hypo

SEQ ID NO: 432247 - DNA, 47 bp, Homo sapiens; identical to SEQ ID NO: 209872
  chr4:185480839-185480886
  hypo

SEQ ID NO: 432248 - DNA, 196 bp, Homo sapiens; identical to SEQ ID NO: 254122
  chr4:185491195-185491391
  hypo

SEQ ID NO: 432249 - DNA, 165 bp, Homo sapiens; identical to SEQ ID NO: 254123
  chr4:185684718-185684883
  hypo

SEQ ID NO: 432250 - DNA, 162 bp, Homo sapiens; identical to SEQ ID NO: 254124
  chr4:185688832-185688994
  hypo

SEQ ID NO: 432251 - DNA, 159 bp, Homo sapiens; identical to SEQ ID NO: 254125
  chr4:185709701-185709860
  hypo

SEQ ID NO: 432252 - DNA, 145 bp, Homo sapiens; identical to SEQ ID NO: 254127
  chr4:185872174-185872319
  hypo

SEQ ID NO: 432253 - DNA, 211 bp, Homo sapiens; identical to SEQ ID NO: 254128
  chr4:185872523-185872734
  hypo

SEQ ID NO: 432254 - DNA, 69 bp, Homo sapiens; identical to SEQ ID NO: 209874
  chr4:185873079-185873148
  hypo

SEQ ID NO: 432255 - DNA, 44 bp, Homo sapiens; identical to SEQ ID NO: 254130
  chr4:185886250-185886294
  hypo

SEQ ID NO: 432256 - DNA, 402 bp, Homo sapiens; identical to SEQ ID NO: 282703
  chr4:185938975-185939377
  hypo

SEQ ID NO: 432257 - DNA, 78 bp, Homo sapiens; identical to SEQ ID NO: 254131
  chr4:186066016-186066094
  hypo

SEQ ID NO: 432258 - DNA, 68 bp, Homo sapiens; identical to SEQ ID NO: 199713
  chr4:186130483-186130551
  hypo

SEQ ID NO: 432259 - DNA, 130 bp, Homo sapiens; identical to SEQ ID NO: 254132
  chr4:186150229-186150359
  hypo

SEQ ID NO: 432260 - DNA, 158 bp, Homo sapiens; identical to SEQ ID NO: 254133
  chr4:186203943-186204101
  hypo

SEQ ID NO: 432261 - DNA, 330 bp, Homo sapiens; identical to SEQ ID NO: 254134
  chr4:186220274-186220604
  hypo

SEQ ID NO: 432262 - DNA, 37 bp, Homo sapiens; identical to SEQ ID NO: 254135
  chr4:186224524-186224561
  hypo

SEQ ID NO: 432263 - DNA, 157 bp, Homo sapiens; identical to SEQ ID NO: 254136
  chr4:186224801-186224958
  hypo

SEQ ID NO: 432264 - DNA, 95 bp, Homo sapiens; identical to SEQ ID NO: 209878
  chr4:186319410-186319505
  hypo

SEQ ID NO: 432265 - DNA, 501 bp, Homo sapiens; identical to SEQ ID NO: 282712
  chr4:186456226-186456727
  hypo

SEQ ID NO: 432266 - DNA, 34 bp, Homo sapiens; identical to SEQ ID NO: 254140
  chr4:186933526-186933560
  hypo

SEQ ID NO: 432267 - DNA, 42 bp, Homo sapiens; identical to SEQ ID NO: 254141
  chr4:187027798-187027840
  hypo

SEQ ID NO: 432268 - DNA, 41 bp, Homo sapiens; identical to SEQ ID NO: 254142
  chr4:187028080-187028121
  hypo

SEQ ID NO: 432269 - DNA, 179 bp, Homo sapiens; identical to SEQ ID NO: 254143
  chr4:187206902-187207081
  hypo

SEQ ID NO: 432270 - DNA, 103 bp, Homo sapiens; identical to SEQ ID NO: 254144
  chr4:187404906-187405009
  hypo

SEQ ID NO: 432271 - DNA, 36 bp, Homo sapiens; identical to SEQ ID NO: 254145
  chr4:187509900-187509936
  hypo

SEQ ID NO: 432272 - DNA, 199 bp, Homo sapiens; identical to SEQ ID NO: 254146
  chr4:187527079-187527278
  hypo

SEQ ID NO: 432273 - DNA, 177 bp, Homo sapiens; identical to SEQ ID NO: 209881
  chr4:187550654-187550831
  hypo

SEQ ID NO: 432274 - DNA, 35 bp, Homo sapiens; identical to SEQ ID NO: 254148
  chr4:187680708-187680743
  hypo

SEQ ID NO: 432275 - DNA, 267 bp, Homo sapiens; identical to SEQ ID NO: 254149
  chr4:187762170-187762437
  hypo

SEQ ID NO: 432276 - DNA, 42 bp, Homo sapiens; identical to SEQ ID NO: 209884
  chr4:187796040-187796082
  hypo

SEQ ID NO: 432277 - DNA, 302 bp, Homo sapiens; identical to SEQ ID NO: 254151
  chr4:187840652-187840954
  hypo

SEQ ID NO: 432278 - DNA, 94 bp, Homo sapiens; identical to SEQ ID NO: 209886
  chr4:189100360-189100454
  hypo

SEQ ID NO: 432279 - DNA, 284 bp, Homo sapiens; identical to SEQ ID NO: 209888
  chr4:189956760-189957044
  hypo

SEQ ID NO: 432280 - DNA, 171 bp, Homo sapiens; identical to SEQ ID NO: 254158
  chr4:190434295-190434466
  hypo

SEQ ID NO: 432281 - DNA, 149 bp, Homo sapiens; identical to SEQ ID NO: 254160
  chr4:190509469-190509618
  hypo

SEQ ID NO: 432282 - DNA, 43 bp, Homo sapiens; identical to SEQ ID NO: 209891
  chr4:190767154-190767197
  hypo

SEQ ID NO: 432283 - DNA, 37 bp, Homo sapiens
  chr5:110465-110502
  hypo
ggccactctgcaacacacatgcacacatccacacaat

SEQ ID NO: 432284 - DNA, 124 bp, Homo sapiens; identical to SEQ ID NO: 254165
  chr5:141500-141624
  hypo

SEQ ID NO: 432285 - DNA, 531 bp, Homo sapiens; identical to SEQ ID NO: 254166
  chr5:142773-143304
  hypo

SEQ ID NO: 432286 - DNA, 120 bp, Homo sapiens; identical to SEQ ID NO: 254167
  chr5:164483-164603
  hypo

SEQ ID NO: 432287 - DNA, 120 bp, Homo sapiens; identical to SEQ ID NO: 209895
  chr5:164903-165023
  hypo

SEQ ID NO: 432288 - DNA, 111 bp, Homo sapiens; identical to SEQ ID NO: 254169
  chr5:181712-181823
  hypo

SEQ ID NO: 432289 - DNA, 177 bp, Homo sapiens; identical to SEQ ID NO: 254170
  chr5:183414-183591
  hypo

SEQ ID NO: 432290 - DNA, 115 bp, Homo sapiens; identical to SEQ ID NO: 254172
  chr5:230941-231056
  hypo

SEQ ID NO: 432291 - DNA, 122 bp, Homo sapiens; identical to SEQ ID NO: 209897
  chr5:233693-233815
  hypo

SEQ ID NO: 432292 - DNA, 47 bp, Homo sapiens; identical to SEQ ID NO: 209898
  chr5:235348-235395
  hypo

SEQ ID NO: 432293 - DNA, 92 bp, Homo sapiens; identical to SEQ ID NO: 254176
  chr5:279481-279573
  hypo

SEQ ID NO: 432294 - DNA, 149 bp, Homo sapiens; identical to SEQ ID NO: 254177
  chr5:285688-285837
  hypo

SEQ ID NO: 432295 - DNA, 97 bp, Homo sapiens; identical to SEQ ID NO: 254178
  chr5:286140-286237
  hypo

SEQ ID NO: 432296 - DNA, 216 bp, Homo sapiens; identical to SEQ ID NO: 254179
  chr5:286417-286633
  hypo

SEQ ID NO: 432297 - DNA, 81 bp, Homo sapiens; identical to SEQ ID NO: 254180
  chr5:306772-306853
  hypo

SEQ ID NO: 432298 - DNA, 470 bp, Homo sapiens; identical to SEQ ID NO: 254181
  chr5:309029-309499
  hypo

SEQ ID NO: 432299 - DNA, 194 bp, Homo sapiens; identical to SEQ ID NO: 254182
  chr5:310508-310702
  hypo

SEQ ID NO: 432300 - DNA, 189 bp, Homo sapiens; identical to SEQ ID NO: 254183
  chr5:312943-313132
  hypo

SEQ ID NO: 432301 - DNA, 118 bp, Homo sapiens; identical to SEQ ID NO: 254184
  chr5:314539-314657
  hypo

SEQ ID NO: 432302 - DNA, 84 bp, Homo sapiens; identical to SEQ ID NO: 254185
  chr5:325119-325203
  hypo

SEQ ID NO: 432303 - DNA, 64 bp, Homo sapiens; identical to SEQ ID NO: 282726
  chr5:343971-344035
  hypo

SEQ ID NO: 432304 - DNA, 207 bp, Homo sapiens; identical to SEQ ID NO: 282727
  chr5:344297-344504
  hypo

SEQ ID NO: 432305 - DNA, 82 bp, Homo sapiens; identical to SEQ ID NO: 199724
  chr5:368381-368463
  hypo

SEQ ID NO: 432306 - DNA, 259 bp, Homo sapiens; identical to SEQ ID NO: 199725
  chr5:373104-373363
  hypo

SEQ ID NO: 432307 - DNA, 285 bp, Homo sapiens; identical to SEQ ID NO: 199726
  chr5:374579-374864
  hypo

SEQ ID NO: 432308 - DNA, 249 bp, Homo sapiens; identical to SEQ ID NO: 254186
  chr5:375541-375790
  hypo

SEQ ID NO: 432309 - DNA, 267 bp, Homo sapiens; identical to SEQ ID NO: 222548
  chr5:377105-377372
  hypo

SEQ ID NO: 432310 - DNA, 102 bp, Homo sapiens; identical to SEQ ID NO: 254187
  chr5:387246-387348
  hypo

SEQ ID NO: 432311 - DNA, 159 bp, Homo sapiens; identical to SEQ ID NO: 254188
  chr5:387838-387997
  hypo

SEQ ID NO: 432312 - DNA, 166 bp, Homo sapiens; identical to SEQ ID NO: 254189
  chr5:405762-405928
  hypo

SEQ ID NO: 432313 - DNA, 164 bp, Homo sapiens; identical to SEQ ID NO: 303764
  chr5:427991-428155
  hypo

SEQ ID NO: 432314 - DNA, 163 bp, Homo sapiens; identical to SEQ ID NO: 254192
  chr5:447732-447895
  hypo

SEQ ID NO: 432315 - DNA, 44 bp, Homo sapiens; identical to SEQ ID NO: 209904
  chr5:457006-457050
  hypo

SEQ ID NO: 432316 - DNA, 164 bp, Homo sapiens; identical to SEQ ID NO: 254195
  chr5:458631-458795
  hypo

SEQ ID NO: 432317 - DNA, 59 bp, Homo sapiens; identical to SEQ ID NO: 209906
  chr5:463463-463522
  hypo

SEQ ID NO: 432318 - DNA, 76 bp, Homo sapiens; identical to SEQ ID NO: 209907
  chr5:463552-463628
  hypo

SEQ ID NO: 432319 - DNA, 104 bp, Homo sapiens; identical to SEQ ID NO: 254199
  chr5:464586-464690
  hypo

SEQ ID NO: 432320 - DNA, 82 bp, Homo sapiens; identical to SEQ ID NO: 254201
  chr5:466515-466597
  hypo

SEQ ID NO: 432321 - DNA, 93 bp, Homo sapiens; identical to SEQ ID NO: 254203
  chr5:480653-480746
  hypo

SEQ ID NO: 432322 - DNA, 40 bp, Homo sapiens; identical to SEQ ID NO: 209914
  chr5:500465-500505
  hypo

SEQ ID NO: 432323 - DNA, 57 bp, Homo sapiens; identical to SEQ ID NO: 209915
  chr5:500535-500592
  hypo

SEQ ID NO: 432324 - DNA, 37 bp, Homo sapiens; identical to SEQ ID NO: 254211
  chr5:519702-519739
  hypo

SEQ ID NO: 432325 - DNA, 164 bp, Homo sapiens; identical to SEQ ID NO: 254213
  chr5:532005-532169
  hypo

SEQ ID NO: 432326 - DNA, 36 bp, Homo sapiens; identical to SEQ ID NO: 209917
  chr5:537376-537412
  hypo

SEQ ID NO: 432327 - DNA, 100 bp, Homo sapiens; identical to SEQ ID NO: 404423
  chr5:555071-555171
  hypo

SEQ ID NO: 432328 - DNA, 162 bp, Homo sapiens; identical to SEQ ID NO: 303794
  chr5:559439-559601
  hypo

SEQ ID NO: 432329 - DNA, 265 bp, Homo sapiens; identical to SEQ ID NO: 254220
  chr5:572063-572328
  hypo

SEQ ID NO: 432330 - DNA, 90 bp, Homo sapiens; identical to SEQ ID NO: 303797
  chr5:583241-583331
  hypo

SEQ ID NO: 432331 - DNA, 197 bp, Homo sapiens; identical to SEQ ID NO: 303798
  chr5:595103-595300
  hypo

SEQ ID NO: 432332 - DNA, 114 bp, Homo sapiens; identical to SEQ ID NO: 303799
  chr5:595330-595444
  hypo

SEQ ID NO: 432333 - DNA, 196 bp, Homo sapiens; identical to SEQ ID NO: 254224
  chr5:608783-608979
  hypo

SEQ ID NO: 432334 - DNA, 83 bp, Homo sapiens; identical to SEQ ID NO: 254225
  chr5:609241-609324
  hypo

SEQ ID NO: 432335 - DNA, 37 bp, Homo sapiens; identical to SEQ ID NO: 254226
  chr5:609577-609614
  hypo

SEQ ID NO: 432336 - DNA, 51 bp, Homo sapiens; identical to SEQ ID NO: 222554
  chr5:612241-612292
  hypo

SEQ ID NO: 432337 - DNA, 189 bp, Homo sapiens; identical to SEQ ID NO: 209923
  chr5:623330-623519
  hypo

SEQ ID NO: 432338 - DNA, 319 bp, Homo sapiens; identical to SEQ ID NO: 254228
  chr5:628859-629178
  hypo

SEQ ID NO: 432339 - DNA, 89 bp, Homo sapiens; identical to SEQ ID NO: 209924
  chr5:633969-634058
  hypo

SEQ ID NO: 432340 - DNA, 565 bp, Homo sapiens; identical to SEQ ID NO: 254230
  chr5:640118-640683
  hypo

SEQ ID NO: 432341 - DNA, 97 bp, Homo sapiens; identical to SEQ ID NO: 209926
  chr5:646057-646154
  hypo

SEQ ID NO: 432342 - DNA, 262 bp, Homo sapiens; identical to SEQ ID NO: 209927
  chr5:652921-653183
  hypo

SEQ ID NO: 432343 - DNA, 39 bp, Homo sapiens; identical to SEQ ID NO: 303813
  chr5:675592-675631
  hypo

SEQ ID NO: 432344 - DNA, 59 bp, Homo sapiens; identical to SEQ ID NO: 209931
  chr5:677571-677630
  hypo

SEQ ID NO: 432345 - DNA, 61 bp, Homo sapiens; identical to SEQ ID NO: 209932
  chr5:678094-678155
  hypo

SEQ ID NO: 432346 - DNA, 35 bp, Homo sapiens; identical to SEQ ID NO: 199731
  chr5:693798-693833
  hypo

SEQ ID NO: 432347 - DNA, 145 bp, Homo sapiens; identical to SEQ ID NO: 209934
  chr5:750521-750666
  hypo

SEQ ID NO: 432348 - DNA, 40 bp, Homo sapiens; identical to SEQ ID NO: 254240
  chr5:760084-760124
  hypo

SEQ ID NO: 432349 - DNA, 673 bp, Homo sapiens; identical to SEQ ID NO: 254241
  chr5:850086-850759
  hypo

SEQ ID NO: 432350 - DNA, 120 bp, Homo sapiens; identical to SEQ ID NO: 254243
  chr5:855237-855357
  hypo

SEQ ID NO: 432351 - DNA, 117 bp, Homo sapiens; identical to SEQ ID NO: 254244
  chr5:864283-864400
  hypo

SEQ ID NO: 432352 - DNA, 153 bp, Homo sapiens; identical to SEQ ID NO: 209935
  chr5:873761-873914
  hypo

SEQ ID NO: 432353 - DNA, 204 bp, Homo sapiens; identical to SEQ ID NO: 209936
  chr5:876062-876266
  hypo

SEQ ID NO: 432354 - DNA, 256 bp, Homo sapiens; identical to SEQ ID NO: 209937
  chr5:881857-882113
  hypo

SEQ ID NO: 432355 - DNA, 135 bp, Homo sapiens; identical to SEQ ID NO: 254249
  chr5:884916-885051
  hypo

SEQ ID NO: 432356 - DNA, 215 bp, Homo sapiens; identical to SEQ ID NO: 209938
  chr5:885339-885554
  hypo

SEQ ID NO: 432357 - DNA, 692 bp, Homo sapiens; identical to SEQ ID NO: 254251
  chr5:885757-886449
  hypo

SEQ ID NO: 432358 - DNA, 396 bp, Homo sapiens; identical to SEQ ID NO: 209940
  chr5:887038-887434
  hypo

SEQ ID NO: 432359 - DNA, 164 bp, Homo sapiens; identical to SEQ ID NO: 254253
  chr5:888864-889028
  hypo

SEQ ID NO: 432360 - DNA, 192 bp, Homo sapiens; identical to SEQ ID NO: 209941
  chr5:902318-902510
  hypo

SEQ ID NO: 432361 - DNA, 117 bp, Homo sapiens; identical to SEQ ID NO: 303835
  chr5:909087-909204
  hypo

SEQ ID NO: 432362 - DNA, 45 bp, Homo sapiens; identical to SEQ ID NO: 209942
  chr5:909638-909683
  hypo

SEQ ID NO: 432363 - DNA, 454 bp, Homo sapiens; identical to SEQ ID NO: 303837
  chr5:912352-912806
  hypo

SEQ ID NO: 432364 - DNA, 139 bp, Homo sapiens; identical to SEQ ID NO: 209945
  chr5:919456-919595
  hypo

SEQ ID NO: 432365 - DNA, 150 bp, Homo sapiens; identical to SEQ ID NO: 254261
  chr5:948029-948179
  hypo

SEQ ID NO: 432366 - DNA, 134 bp, Homo sapiens; identical to SEQ ID NO: 254262
  chr5:961624-961758
  hypo

SEQ ID NO: 432367 - DNA, 155 bp, Homo sapiens; identical to SEQ ID NO: 254264
  chr5:993134-993289
  hypo

SEQ ID NO: 432368 - DNA, 62 bp, Homo sapiens; identical to SEQ ID NO: 303844
  chr5:1003043-1003105
  hypo

SEQ ID NO: 432369 - DNA, 86 bp, Homo sapiens; identical to SEQ ID NO: 254266
  chr5:1026900-1026986
  hypo

SEQ ID NO: 432370 - DNA, 163 bp, Homo sapiens; identical to SEQ ID NO: 254267
  chr5:1027310-1027473
  hypo

SEQ ID NO: 432371 - DNA, 242 bp, Homo sapiens; identical to SEQ ID NO: 254268
  chr5:1027769-1028011
  hypo

SEQ ID NO: 432372 - DNA, 52 bp, Homo sapiens; identical to SEQ ID NO: 303848
  chr5:1028326-1028378
  hypo

SEQ ID NO: 432373 - DNA, 115 bp, Homo sapiens; identical to SEQ ID NO: 303849
  chr5:1028408-1028523
  hypo

SEQ ID NO: 432374 - DNA, 239 bp, Homo sapiens; identical to SEQ ID NO: 209947
  chr5:1029657-1029896
  hypo

SEQ ID NO: 432375 - DNA, 36 bp, Homo sapiens; identical to SEQ ID NO: 254271
  chr5:1031041-1031077
  hypo

SEQ ID NO: 432376 - DNA, 248 bp, Homo sapiens; identical to SEQ ID NO: 254272
  chr5:1031561-1031809
  hypo

SEQ ID NO: 432377 - DNA, 32 bp, Homo sapiens; identical to SEQ ID NO: 254274
  chr5:1032887-1032919
  hypo

SEQ ID NO: 432378 - DNA, 183 bp, Homo sapiens; identical to SEQ ID NO: 254277
  chr5:1036265-1036448
  hypo

SEQ ID NO: 432379 - DNA, 403 bp, Homo sapiens; identical to SEQ ID NO: 254278
  chr5:1036739-1037142
  hypo

SEQ ID NO: 432380 - DNA, 370 bp, Homo sapiens; identical to SEQ ID NO: 254281
  chr5:1039853-1040223
  hypo

SEQ ID NO: 432381 - DNA, 189 bp, Homo sapiens; identical to SEQ ID NO: 254282
  chr5:1045515-1045704
  hypo

SEQ ID NO: 432382 - DNA, 78 bp, Homo sapiens; identical to SEQ ID NO: 209955
  chr5:1046857-1046935
  hypo

SEQ ID NO: 432383 - DNA, 557 bp, Homo sapiens; identical to SEQ ID NO: 254285
  chr5:1050399-1050956
  hypo

SEQ ID NO: 432384 - DNA, 32 bp, Homo sapiens; identical to SEQ ID NO: 385522
  chr5:1056006-1056038
  hypo

SEQ ID NO: 432385 - DNA, 40 bp, Homo sapiens; identical to SEQ ID NO: 391173
  chr5:1056068-1056108
  hypo

SEQ ID NO: 432386 - DNA, 128 bp, Homo sapiens; identical to SEQ ID NO: 209964
  chr5:1057974-1058102
  hypo

SEQ ID NO: 432387 - DNA, 244 bp, Homo sapiens; identical to SEQ ID NO: 254293
  chr5:1058147-1058391
  hypo

SEQ ID NO: 432388 - DNA, 182 bp, Homo sapiens; identical to SEQ ID NO: 209969
  chr5:1060413-1060595
  hypo

SEQ ID NO: 432389 - DNA, 46 bp, Homo sapiens; identical to SEQ ID NO: 385524
  chr5:1060818-1060864
  hypo

SEQ ID NO: 432390 - DNA, 370 bp, Homo sapiens; identical to SEQ ID NO: 388174
  chr5:1064042-1064412
  hypo

SEQ ID NO: 432391 - DNA, 563 bp, Homo sapiens; identical to SEQ ID NO: 254302
  chr5:1066841-1067404
  hypo

SEQ ID NO: 432392 - DNA, 218 bp, Homo sapiens; identical to SEQ ID NO: 209977
  chr5:1068045-1068263
  hypo

SEQ ID NO: 432393 - DNA, 64 bp, Homo sapiens
  chr5:1068563-1068627
  hypo
attaaaaaacaaataaataaaaaagatttgcccagatttctctaatttcacactaacatagcca

SEQ ID NO: 432394 - DNA, 89 bp, Homo sapiens; identical to SEQ ID NO: 209981
  chr5:1080415-1080504
  hypo

SEQ ID NO: 432395 - DNA, 166 bp, Homo sapiens; identical to SEQ ID NO: 209988
  chr5:1091065-1091231
  hypo

SEQ ID NO: 432396 - DNA, 37 bp, Homo sapiens; identical to SEQ ID NO: 209989
  chr5:1092774-1092811
  hypo

SEQ ID NO: 432397 - DNA, 78 bp, Homo sapiens; identical to SEQ ID NO: 254323
  chr5:1114068-1114146
  hypo

SEQ ID NO: 432398 - DNA, 42 bp, Homo sapiens; identical to SEQ ID NO: 254327
  chr5:1119925-1119967
  hypo

SEQ ID NO: 432399 - DNA, 31 bp, Homo sapiens; identical to SEQ ID NO: 209998
  chr5:1121007-1121038
  hypo

SEQ ID NO: 432400 - DNA, 222 bp, Homo sapiens; identical to SEQ ID NO: 254331
  chr5:1122179-1122401
  hypo

SEQ ID NO: 432401 - DNA, 159 bp, Homo sapiens; identical to SEQ ID NO: 254333
  chr5:1124659-1124818
  hypo

SEQ ID NO: 432402 - DNA, 813 bp, Homo sapiens; identical to SEQ ID NO: 254334
  chr5:1128888-1129701
  hypo

SEQ ID NO: 432403 - DNA, 70 bp, Homo sapiens; identical to SEQ ID NO: 254335
  chr5:1140155-1140225
  hypo

SEQ ID NO: 432404 - DNA, 322 bp, Homo sapiens; identical to SEQ ID NO: 254337
  chr5:1154638-1154960
  hypo

SEQ ID NO: 432405 - DNA, 284 bp, Homo sapiens; identical to SEQ ID NO: 254338
  chr5:1161169-1161453
  hypo

SEQ ID NO: 432406 - DNA, 86 bp, Homo sapiens; identical to SEQ ID NO: 210001
  chr5:1177291-1177377
  hypo

SEQ ID NO: 432407 - DNA, 231 bp, Homo sapiens; identical to SEQ ID NO: 254341
  chr5:1201777-1202008
  hypo

SEQ ID NO: 432408 - DNA, 414 bp, Homo sapiens; identical to SEQ ID NO: 254342
  chr5:1207166-1207580
  hypo

SEQ ID NO: 432409 - DNA, 52 bp, Homo sapiens; identical to SEQ ID NO: 303925
  chr5:1210303-1210355
  hypo

SEQ ID NO: 432410 - DNA, 155 bp, Homo sapiens; identical to SEQ ID NO: 303926
  chr5:1210385-1210540
  hypo

SEQ ID NO: 432411 - DNA, 236 bp, Homo sapiens; identical to SEQ ID NO: 254344
  chr5:1212420-1212656
  hypo

SEQ ID NO: 432412 - DNA, 287 bp, Homo sapiens; identical to SEQ ID NO: 210002
  chr5:1215723-1216010
  hypo

SEQ ID NO: 432413 - DNA, 162 bp, Homo sapiens; identical to SEQ ID NO: 254347
  chr5:1216578-1216740
  hypo

SEQ ID NO: 432414 - DNA, 147 bp, Homo sapiens; identical to SEQ ID NO: 210003
  chr5:1216988-1217135
  hypo

SEQ ID NO: 432415 - DNA, 266 bp, Homo sapiens; identical to SEQ ID NO: 303931
  chr5:1218542-1218808
  hypo

SEQ ID NO: 432416 - DNA, 462 bp, Homo sapiens; identical to SEQ ID NO: 303932
  chr5:1218838-1219300
  hypo

SEQ ID NO: 432417 - DNA, 527 bp, Homo sapiens; identical to SEQ ID NO: 254350
  chr5:1219330-1219857
  hypo

SEQ ID NO: 432418 - DNA, 129 bp, Homo sapiens; identical to SEQ ID NO: 254351
  chr5:1219887-1220016
  hypo

SEQ ID NO: 432419 - DNA, 118 bp, Homo sapiens; identical to SEQ ID NO: 254353
  chr5:1222816-1222934
  hypo

SEQ ID NO: 432420 - DNA, 75 bp, Homo sapiens; identical to SEQ ID NO: 303936
  chr5:1223196-1223271
  hypo

SEQ ID NO: 432421 - DNA, 84 bp, Homo sapiens; identical to SEQ ID NO: 254355
  chr5:1223582-1223666
  hypo

SEQ ID NO: 432422 - DNA, 295 bp, Homo sapiens; identical to SEQ ID NO: 210004
  chr5:1232524-1232819
  hypo

SEQ ID NO: 432423 - DNA, 51 bp, Homo sapiens; identical to SEQ ID NO: 210005
  chr5:1233291-1233342
  hypo

SEQ ID NO: 432424 - DNA, 105 bp, Homo sapiens; identical to SEQ ID NO: 210006
  chr5:1253819-1253924
  hypo

SEQ ID NO: 432425 - DNA, 228 bp, Homo sapiens; identical to SEQ ID NO: 254358
  chr5:1261770-1261998
  hypo

SEQ ID NO: 432426 - DNA, 303 bp, Homo sapiens; identical to SEQ ID NO: 210007
  chr5:1264407-1264710
  hypo

SEQ ID NO: 432427 - DNA, 54 bp, Homo sapiens; identical to SEQ ID NO: 254360
  chr5:1266473-1266527
  hypo

SEQ ID NO: 432428 - DNA, 399 bp, Homo sapiens; identical to SEQ ID NO: 254361
  chr5:1269045-1269444
  hypo

SEQ ID NO: 432429 - DNA, 421 bp, Homo sapiens; identical to SEQ ID NO: 254362
  chr5:1270694-1271115
  hypo

SEQ ID NO: 432430 - DNA, 192 bp, Homo sapiens; identical to SEQ ID NO: 210008
  chr5:1272061-1272253
  hypo

SEQ ID NO: 432431 - DNA, 100 bp, Homo sapiens; identical to SEQ ID NO: 303947
  chr5:1272283-1272383
  hypo

SEQ ID NO: 432432 - DNA, 548 bp, Homo sapiens; identical to SEQ ID NO: 254364
  chr5:1277142-1277690
  hypo

SEQ ID NO: 432433 - DNA, 369 bp, Homo sapiens; identical to SEQ ID NO: 282750
  chr5:1279435-1279804
  hypo

SEQ ID NO: 432434 - DNA, 242 bp, Homo sapiens; identical to SEQ ID NO: 254366
  chr5:1282495-1282737
  hypo

SEQ ID NO: 432435 - DNA, 111 bp, Homo sapiens; identical to SEQ ID NO: 282751
  chr5:1294071-1294182
  hypo

SEQ ID NO: 432436 - DNA, 111 bp, Homo sapiens; identical to SEQ ID NO: 210010
  chr5:1318452-1318563
  hypo

SEQ ID NO: 432437 - DNA, 69 bp, Homo sapiens; identical to SEQ ID NO: 254369
  chr5:1319612-1319681
  hypo

SEQ ID NO: 432438 - DNA, 213 bp, Homo sapiens; identical to SEQ ID NO: 210011
  chr5:1326183-1326396
  hypo

SEQ ID NO: 432439 - DNA, 278 bp, Homo sapiens; identical to SEQ ID NO: 254371
  chr5:1330258-1330536
  hypo

SEQ ID NO: 432440 - DNA, 112 bp, Homo sapiens; identical to SEQ ID NO: 254373
  chr5:1335182-1335294
  hypo

SEQ ID NO: 432441 - DNA, 234 bp, Homo sapiens; identical to SEQ ID NO: 254374
  chr5:1342379-1342613
  hypo

SEQ ID NO: 432442 - DNA, 277 bp, Homo sapiens; identical to SEQ ID NO: 303959
  chr5:1346306-1346583
  hypo

SEQ ID NO: 432443 - DNA, 245 bp, Homo sapiens; identical to SEQ ID NO: 254379
  chr5:1416071-1416316
  hypo

SEQ ID NO: 432444 - DNA, 74 bp, Homo sapiens; identical to SEQ ID NO: 254380
  chr5:1416944-1417018
  hypo

SEQ ID NO: 432445 - DNA, 87 bp, Homo sapiens; identical to SEQ ID NO: 303963
  chr5:1431283-1431370
  hypo

SEQ ID NO: 432446 - DNA, 165 bp, Homo sapiens; identical to SEQ ID NO: 254382
  chr5:1432518-1432683
  hypo

SEQ ID NO: 432447 - DNA, 241 bp, Homo sapiens; identical to SEQ ID NO: 254383
  chr5:1439038-1439279
  hypo

SEQ ID NO: 432448 - DNA, 105 bp, Homo sapiens; identical to SEQ ID NO: 254384
  chr5:1462598-1462703
  hypo

SEQ ID NO: 432449 - DNA, 235 bp, Homo sapiens; identical to SEQ ID NO: 254385
  chr5:1462733-1462968
  hypo

SEQ ID NO: 432450 - DNA, 242 bp, Homo sapiens; identical to SEQ ID NO: 254386
  chr5:1463474-1463716
  hypo

SEQ ID NO: 432451 - DNA, 236 bp, Homo sapiens; identical to SEQ ID NO: 254387
  chr5:1467132-1467368
  hypo

SEQ ID NO: 432452 - DNA, 159 bp, Homo sapiens; identical to SEQ ID NO: 210014
  chr5:1468060-1468219
  hypo

SEQ ID NO: 432453 - DNA, 95 bp, Homo sapiens; identical to SEQ ID NO: 210016
  chr5:1490331-1490426
  hypo

SEQ ID NO: 432454 - DNA, 72 bp, Homo sapiens; identical to SEQ ID NO: 254391
  chr5:1497221-1497293
  hypo

SEQ ID NO: 432455 - DNA, 145 bp, Homo sapiens; identical to SEQ ID NO: 254392
  chr5:1510456-1510601
  hypo

SEQ ID NO: 432456 - DNA, 202 bp, Homo sapiens; identical to SEQ ID NO: 210017
  chr5:1517524-1517726
  hypo

SEQ ID NO: 432457 - DNA, 189 bp, Homo sapiens; identical to SEQ ID NO: 210018
  chr5:1546897-1547086
  hypo

SEQ ID NO: 432458 - DNA, 271 bp, Homo sapiens; identical to SEQ ID NO: 254395
  chr5:1548856-1549127
  hypo

SEQ ID NO: 432459 - DNA, 57 bp, Homo sapiens; identical to SEQ ID NO: 254396
  chr5:1549947-1550004
  hypo

SEQ ID NO: 432460 - DNA, 114 bp, Homo sapiens; identical to SEQ ID NO: 254397
  chr5:1550654-1550768
  hypo

SEQ ID NO: 432461 - DNA, 163 bp, Homo sapiens; identical to SEQ ID NO: 254400
  chr5:1554246-1554409
  hypo

SEQ ID NO: 432462 - DNA, 82 bp, Homo sapiens; identical to SEQ ID NO: 210020
  chr5:1704649-1704731
  hypo

SEQ ID NO: 432463 - DNA, 172 bp, Homo sapiens; identical to SEQ ID NO: 254404
  chr5:1707499-1707671
  hypo

SEQ ID NO: 432464 - DNA, 112 bp, Homo sapiens; identical to SEQ ID NO: 254406
  chr5:1745628-1745740
  hypo

SEQ ID NO: 432465 - DNA, 148 bp, Homo sapiens; identical to SEQ ID NO: 210024
  chr5:1747177-1747325
  hypo

SEQ ID NO: 432466 - DNA, 114 bp, Homo sapiens; identical to SEQ ID NO: 254409
  chr5:1752559-1752673
  hypo

SEQ ID NO: 432467 - DNA, 882 bp, Homo sapiens; identical to SEQ ID NO: 254410
  chr5:1769198-1770080
  hypo

SEQ ID NO: 432468 - DNA, 327 bp, Homo sapiens; identical to SEQ ID NO: 210025
  chr5:1786634-1786961
  hypo

SEQ ID NO: 432469 - DNA, 132 bp, Homo sapiens; identical to SEQ ID NO: 303997
  chr5:1795101-1795233
  hypo

SEQ ID NO: 432470 - DNA, 243 bp, Homo sapiens; identical to SEQ ID NO: 254417
  chr5:1809726-1809969
  hypo

SEQ ID NO: 432471 - DNA, 116 bp, Homo sapiens; identical to SEQ ID NO: 254418
  chr5:1813758-1813874
  hypo

SEQ ID NO: 432472 - DNA, 164 bp, Homo sapiens; identical to SEQ ID NO: 254419
  chr5:1814740-1814904
  hypo

SEQ ID NO: 432473 - DNA, 185 bp, Homo sapiens; identical to SEQ ID NO: 210027
  chr5:1815267-1815452
  hypo

SEQ ID NO: 432474 - DNA, 98 bp, Homo sapiens; identical to SEQ ID NO: 254421
  chr5:1826983-1827081
  hypo

SEQ ID NO: 432475 - DNA, 173 bp, Homo sapiens; identical to SEQ ID NO: 254422
  chr5:1858632-1858805
  hypo

SEQ ID NO: 432476 - DNA, 53 bp, Homo sapiens; identical to SEQ ID NO: 254423
  chr5:1864431-1864484
  hypo

SEQ ID NO: 432477 - DNA, 197 bp, Homo sapiens; identical to SEQ ID NO: 304007
  chr5:1865341-1865538
  hypo

SEQ ID NO: 432478 - DNA, 42 bp, Homo sapiens; identical to SEQ ID NO: 254425
  chr5:1900863-1900905
  hypo

SEQ ID NO: 432479 - DNA, 282 bp, Homo sapiens; identical to SEQ ID NO: 254427
  chr5:1911955-1912237
  hypo

SEQ ID NO: 432480 - DNA, 154 bp, Homo sapiens; identical to SEQ ID NO: 254430
  chr5:1923520-1923674
  hypo

SEQ ID NO: 432481 - DNA, 95 bp, Homo sapiens; identical to SEQ ID NO: 254431
  chr5:1924125-1924220
  hypo

SEQ ID NO: 432482 - DNA, 65 bp, Homo sapiens; identical to SEQ ID NO: 254434
  chr5:2006866-2006931
  hypo

SEQ ID NO: 432483 - DNA, 101 bp, Homo sapiens; identical to SEQ ID NO: 254436
  chr5:2041329-2041430
  hypo

SEQ ID NO: 432484 - DNA, 328 bp, Homo sapiens; identical to SEQ ID NO: 254437
  chr5:2052998-2053326
  hypo

SEQ ID NO: 432485 - DNA, 31 bp, Homo sapiens; identical to SEQ ID NO: 254438
  chr5:2054410-2054441
  hypo

SEQ ID NO: 432486 - DNA, 375 bp, Homo sapiens; identical to SEQ ID NO: 210033
  chr5:2111864-2112239
  hypo

SEQ ID NO: 432487 - DNA, 214 bp, Homo sapiens; identical to SEQ ID NO: 304024
  chr5:2112274-2112488
  hypo

SEQ ID NO: 432488 - DNA, 69 bp, Homo sapiens; identical to SEQ ID NO: 304025
  chr5:2136841-2136910
  hypo

SEQ ID NO: 432489 - DNA, 165 bp, Homo sapiens; identical to SEQ ID NO: 210035
  chr5:2155744-2155909
  hypo

SEQ ID NO: 432490 - DNA, 154 bp, Homo sapiens; identical to SEQ ID NO: 254442
  chr5:2181762-2181916
  hypo

SEQ ID NO: 432491 - DNA, 119 bp, Homo sapiens; identical to SEQ ID NO: 254443
  chr5:2224967-2225086
  hypo

SEQ ID NO: 432492 - DNA, 45 bp, Homo sapiens; identical to SEQ ID NO: 254446
  chr5:2302693-2302738
  hypo

SEQ ID NO: 432493 - DNA, 325 bp, Homo sapiens; identical to SEQ ID NO: 254447
  chr5:2338565-2338890
  hypo

SEQ ID NO: 432494 - DNA, 77 bp, Homo sapiens; identical to SEQ ID NO: 304034
  chr5:2369537-2369614
  hypo

SEQ ID NO: 432495 - DNA, 112 bp, Homo sapiens; identical to SEQ ID NO: 304035
  chr5:2369682-2369794
  hypo

SEQ ID NO: 432496 - DNA, 55 bp, Homo sapiens; identical to SEQ ID NO: 254452
  chr5:2495120-2495175
  hypo

SEQ ID NO: 432497 - DNA, 48 bp, Homo sapiens; identical to SEQ ID NO: 254455
  chr5:2542212-2542260
  hypo

SEQ ID NO: 432498 - DNA, 163 bp, Homo sapiens; identical to SEQ ID NO: 254457
  chr5:2557178-2557341
  hypo

SEQ ID NO: 432499 - DNA, 68 bp, Homo sapiens; identical to SEQ ID NO: 254458
  chr5:2561183-2561251
  hypo

SEQ ID NO: 432500 - DNA, 45 bp, Homo sapiens; identical to SEQ ID NO: 254459
  chr5:2564558-2564603
  hypo

SEQ ID NO: 432501 - DNA, 113 bp, Homo sapiens; identical to SEQ ID NO: 254460
  chr5:2579041-2579154
  hypo

SEQ ID NO: 432502 - DNA, 118 bp, Homo sapiens; identical to SEQ ID NO: 254461
  chr5:2634150-2634268
  hypo

SEQ ID NO: 432503 - DNA, 300 bp, Homo sapiens; identical to SEQ ID NO: 254462
  chr5:2668651-2668951
  hypo

SEQ ID NO: 432504 - DNA, 86 bp, Homo sapiens; identical to SEQ ID NO: 254463
  chr5:2669179-2669265
  hypo

SEQ ID NO: 432505 - DNA, 200 bp, Homo sapiens; identical to SEQ ID NO: 254464
  chr5:2708350-2708550
  hypo

SEQ ID NO: 432506 - DNA, 126 bp, Homo sapiens; identical to SEQ ID NO: 254465
  chr5:2708903-2709029
  hypo

SEQ ID NO: 432507 - DNA, 109 bp, Homo sapiens; identical to SEQ ID NO: 254466
  chr5:2808978-2809087
  hypo

SEQ ID NO: 432508 - DNA, 119 bp, Homo sapiens; identical to SEQ ID NO: 254467
  chr5:2823299-2823418
  hypo

SEQ ID NO: 432509 - DNA, 186 bp, Homo sapiens; identical to SEQ ID NO: 254468
  chr5:2831543-2831729
  hypo

SEQ ID NO: 432510 - DNA, 166 bp, Homo sapiens; identical to SEQ ID NO: 304057
  chr5:2889747-2889913
  hypo

SEQ ID NO: 432511 - DNA, 52 bp, Homo sapiens; identical to SEQ ID NO: 304058
  chr5:2890917-2890969
  hypo

SEQ ID NO: 432512 - DNA, 389 bp, Homo sapiens; identical to SEQ ID NO: 254471
  chr5:2896879-2897268
  hypo

SEQ ID NO: 432513 - DNA, 52 bp, Homo sapiens; identical to SEQ ID NO: 254472
  chr5:2903649-2903701
  hypo

SEQ ID NO: 432514 - DNA, 115 bp, Homo sapiens; identical to SEQ ID NO: 254473
  chr5:2904033-2904148
  hypo

SEQ ID NO: 432515 - DNA, 32 bp, Homo sapiens; identical to SEQ ID NO: 210039
  chr5:2990179-2990211
  hypo

SEQ ID NO: 432516 - DNA, 230 bp, Homo sapiens; identical to SEQ ID NO: 304063
  chr5:3027111-3027341
  hypo

SEQ ID NO: 432517 - DNA, 38 bp, Homo sapiens; identical to SEQ ID NO: 254476
  chr5:3028123-3028161
  hypo

SEQ ID NO: 432518 - DNA, 41 bp, Homo sapiens; identical to SEQ ID NO: 304065
  chr5:3028191-3028232
  hypo

SEQ ID NO: 432519 - DNA, 45 bp, Homo sapiens; identical to SEQ ID NO: 254478
  chr5:3029916-3029961
  hypo

SEQ ID NO: 432520 - DNA, 52 bp, Homo sapiens; identical to SEQ ID NO: 304067
  chr5:3032074-3032126
  hypo

SEQ ID NO: 432521 - DNA, 82 bp, Homo sapiens; identical to SEQ ID NO: 254481
  chr5:3042022-3042104
  hypo

SEQ ID NO: 432522 - DNA, 136 bp, Homo sapiens; identical to SEQ ID NO: 254482
  chr5:3051522-3051658
  hypo

SEQ ID NO: 432523 - DNA, 101 bp, Homo sapiens; identical to SEQ ID NO: 304070
  chr5:3078556-3078657
  hypo

SEQ ID NO: 432524 - DNA, 67 bp, Homo sapiens; identical to SEQ ID NO: 304071
  chr5:3078698-3078765
  hypo

SEQ ID NO: 432525 - DNA, 32 bp, Homo sapiens; identical to SEQ ID NO: 254484
  chr5:3098404-3098436
  hypo

SEQ ID NO: 432526 - DNA, 92 bp, Homo sapiens; identical to SEQ ID NO: 254485
  chr5:3114549-3114641
  hypo

SEQ ID NO: 432527 - DNA, 190 bp, Homo sapiens; identical to SEQ ID NO: 254486
  chr5:3143537-3143727
  hypo

SEQ ID NO: 432528 - DNA, 42 bp, Homo sapiens; identical to SEQ ID NO: 254487
  chr5:3152257-3152299
  hypo

SEQ ID NO: 432529 - DNA, 359 bp, Homo sapiens; identical to SEQ ID NO: 254488
  chr5:3155670-3156029
  hypo

SEQ ID NO: 432530 - DNA, 263 bp, Homo sapiens; identical to SEQ ID NO: 254489
  chr5:3188087-3188350
  hypo

SEQ ID NO: 432531 - DNA, 55 bp, Homo sapiens; identical to SEQ ID NO: 254490
  chr5:3203778-3203833
  hypo

SEQ ID NO: 432532 - DNA, 114 bp, Homo sapiens; identical to SEQ ID NO: 254491
  chr5:3212680-3212794
  hypo

SEQ ID NO: 432533 - DNA, 112 bp, Homo sapiens; identical to SEQ ID NO: 254492
  chr5:3213161-3213273
  hypo

SEQ ID NO: 432534 - DNA, 230 bp, Homo sapiens; identical to SEQ ID NO: 254497
  chr5:3339351-3339581
  hypo

SEQ ID NO: 432535 - DNA, 147 bp, Homo sapiens; identical to SEQ ID NO: 254498
  chr5:3346708-3346855
  hypo

SEQ ID NO: 432536 - DNA, 45 bp, Homo sapiens; identical to SEQ ID NO: 254500
  chr5:3489720-3489765
  hypo

SEQ ID NO: 432537 - DNA, 149 bp, Homo sapiens; identical to SEQ ID NO: 304091
  chr5:3535478-3535627
  hypo

SEQ ID NO: 432538 - DNA, 612 bp, Homo sapiens; identical to SEQ ID NO: 210045
  chr5:3535785-3536397
  hypo

SEQ ID NO: 432539 - DNA, 208 bp, Homo sapiens; identical to SEQ ID NO: 282771
  chr5:3590903-3591111
  hypo

SEQ ID NO: 432540 - DNA, 94 bp, Homo sapiens; identical to SEQ ID NO: 199747
  chr5:3591458-3591552
  hypo

SEQ ID NO: 432541 - DNA, 149 bp, Homo sapiens; identical to SEQ ID NO: 254503
  chr5:3630989-3631138
  hypo

SEQ ID NO: 432542 - DNA, 218 bp, Homo sapiens; identical to SEQ ID NO: 254504
  chr5:3659551-3659769
  hypo

SEQ ID NO: 432543 - DNA, 67 bp, Homo sapiens; identical to SEQ ID NO: 254508
  chr5:3805791-3805858
  hypo

SEQ ID NO: 432544 - DNA, 49 bp, Homo sapiens; identical to SEQ ID NO: 304105
  chr5:4144250-4144299
  hypo

SEQ ID NO: 432545 - DNA, 35 bp, Homo sapiens; identical to SEQ ID NO: 254512
  chr5:4195642-4195677
  hypo

SEQ ID NO: 432546 - DNA, 116 bp, Homo sapiens; identical to SEQ ID NO: 210052
  chr5:4580998-4581114
  hypo

SEQ ID NO: 432547 - DNA, 267 bp, Homo sapiens; identical to SEQ ID NO: 210053
  chr5:4581329-4581596
  hypo

SEQ ID NO: 432548 - DNA, 237 bp, Homo sapiens; identical to SEQ ID NO: 254514
  chr5:4886500-4886737
  hypo

SEQ ID NO: 432549 - DNA, 390 bp, Homo sapiens; identical to SEQ ID NO: 254515
  chr5:5303189-5303579
  hypo

SEQ ID NO: 432550 - DNA, 71 bp, Homo sapiens; identical to SEQ ID NO: 254516
  chr5:5652238-5652309
  hypo

SEQ ID NO: 432551 - DNA, 60 bp, Homo sapiens; identical to SEQ ID NO: 304114
  chr5:6228485-6228545
  hypo

SEQ ID NO: 432552 - DNA, 42 bp, Homo sapiens; identical to SEQ ID NO: 304115
  chr5:6228575-6228617
  hypo

SEQ ID NO: 432553 - DNA, 31 bp, Homo sapiens; identical to SEQ ID NO: 254519
  chr5:6322027-6322058
  hypo

SEQ ID NO: 432554 - DNA, 507 bp, Homo sapiens; identical to SEQ ID NO: 254520
  chr5:6349464-6349971
  hypo

SEQ ID NO: 432555 - DNA, 115 bp, Homo sapiens; identical to SEQ ID NO: 254521
  chr5:6420112-6420227
  hypo

SEQ ID NO: 432556 - DNA, 51 bp, Homo sapiens; identical to SEQ ID NO: 254522
  chr5:6527276-6527327
  hypo

SEQ ID NO: 432557 - DNA, 87 bp, Homo sapiens; identical to SEQ ID NO: 210055
  chr5:6758954-6759041
  hypo

SEQ ID NO: 432558 - DNA, 76 bp, Homo sapiens; identical to SEQ ID NO: 254524
  chr5:6760002-6760078
  hypo

SEQ ID NO: 432559 - DNA, 72 bp, Homo sapiens; identical to SEQ ID NO: 254525
  chr5:6762500-6762572
  hypo

SEQ ID NO: 432560 - DNA, 215 bp, Homo sapiens; identical to SEQ ID NO: 210056
  chr5:6846210-6846425
  hypo

SEQ ID NO: 432561 - DNA, 34 bp, Homo sapiens; identical to SEQ ID NO: 254527
  chr5:6846845-6846879
  hypo

SEQ ID NO: 432562 - DNA, 47 bp, Homo sapiens; identical to SEQ ID NO: 254528
  chr5:6857839-6857886
  hypo

SEQ ID NO: 432563 - DNA, 42 bp, Homo sapiens; identical to SEQ ID NO: 254529
  chr5:6906771-6906813
  hypo

SEQ ID NO: 432564 - DNA, 36 bp, Homo sapiens; identical to SEQ ID NO: 210057
  chr5:7704693-7704729
  hypo

SEQ ID NO: 432565 - DNA, 42 bp, Homo sapiens; identical to SEQ ID NO: 254531
  chr5:7802432-7802474
  hypo

SEQ ID NO: 432566 - DNA, 139 bp, Homo sapiens; identical to SEQ ID NO: 254533
  chr5:7867953-7868092
  hypo

SEQ ID NO: 432567 - DNA, 78 bp, Homo sapiens; identical to SEQ ID NO: 254534
  chr5:8424507-8424585
  hypo

SEQ ID NO: 432568 - DNA, 92 bp, Homo sapiens; identical to SEQ ID NO: 210059
  chr5:8649803-8649895
  hypo

SEQ ID NO: 432569 - DNA, 120 bp, Homo sapiens; identical to SEQ ID NO: 254536
  chr5:8841451-8841571
  hypo

SEQ ID NO: 432570 - DNA, 160 bp, Homo sapiens; identical to SEQ ID NO: 254537
  chr5:8841691-8841851
  hypo

SEQ ID NO: 432571 - DNA, 195 bp, Homo sapiens; identical to SEQ ID NO: 254538
  chr5:9040384-9040579
  hypo

SEQ ID NO: 432572 - DNA, 42 bp, Homo sapiens; identical to SEQ ID NO: 254539
  chr5:9044652-9044694
  hypo

SEQ ID NO: 432573 - DNA, 199 bp, Homo sapiens; identical to SEQ ID NO: 254540
  chr5:9051992-9052191
  hypo

SEQ ID NO: 432574 - DNA, 166 bp, Homo sapiens; identical to SEQ ID NO: 254541
  chr5:9054171-9054337
  hypo

SEQ ID NO: 432575 - DNA, 155 bp, Homo sapiens; identical to SEQ ID NO: 210060
  chr5:9066591-9066746
  hypo

SEQ ID NO: 432576 - DNA, 255 bp, Homo sapiens; identical to SEQ ID NO: 210061
  chr5:9119015-9119270
  hypo

SEQ ID NO: 432577 - DNA, 155 bp, Homo sapiens; identical to SEQ ID NO: 254545
  chr5:9136512-9136667
  hypo

SEQ ID NO: 432578 - DNA, 70 bp, Homo sapiens; identical to SEQ ID NO: 254546
  chr5:9183702-9183772
  hypo

SEQ ID NO: 432579 - DNA, 106 bp, Homo sapiens; identical to SEQ ID NO: 254547
  chr5:9220793-9220899
  hypo

SEQ ID NO: 432580 - DNA, 41 bp, Homo sapiens; identical to SEQ ID NO: 254548
  chr5:9330247-9330288
  hypo

SEQ ID NO: 432581 - DNA, 42 bp, Homo sapiens; identical to SEQ ID NO: 254549
  chr5:9445440-9445482
  hypo

SEQ ID NO: 432582 - DNA, 42 bp, Homo sapiens; identical to SEQ ID NO: 254551
  chr5:9498629-9498671
  hypo

SEQ ID NO: 432583 - DNA, 42 bp, Homo sapiens; identical to SEQ ID NO: 254552
  chr5:9629931-9629973
  hypo

SEQ ID NO: 432584 - DNA, 144 bp, Homo sapiens; identical to SEQ ID NO: 254553
  chr5:9725136-9725280
  hypo

SEQ ID NO: 432585 - DNA, 216 bp, Homo sapiens; identical to SEQ ID NO: 254554
  chr5:10080575-10080791
  hypo

SEQ ID NO: 432586 - DNA, 78 bp, Homo sapiens; identical to SEQ ID NO: 254557
  chr5:10268930-10269008
  hypo

SEQ ID NO: 432587 - DNA, 190 bp, Homo sapiens; identical to SEQ ID NO: 254558
  chr5:10278515-10278705
  hypo

SEQ ID NO: 432588 - DNA, 40 bp, Homo sapiens; identical to SEQ ID NO: 254559
  chr5:10283590-10283630
  hypo

SEQ ID NO: 432589 - DNA, 56 bp, Homo sapiens; identical to SEQ ID NO: 254560
  chr5:10322104-10322160
  hypo

SEQ ID NO: 432590 - DNA, 157 bp, Homo sapiens; identical to SEQ ID NO: 254561
  chr5:10352280-10352437
  hypo

SEQ ID NO: 432591 - DNA, 902 bp, Homo sapiens; identical to SEQ ID NO: 282794
  chr5:10441403-10442305
  hypo

SEQ ID NO: 432592 - DNA, 498 bp, Homo sapiens; identical to SEQ ID NO: 254562
  chr5:10453378-10453876
  hypo

SEQ ID NO: 432593 - DNA, 106 bp, Homo sapiens; identical to SEQ ID NO: 210065
  chr5:10486101-10486207
  hypo

SEQ ID NO: 432594 - DNA, 40 bp, Homo sapiens; identical to SEQ ID NO: 210066
  chr5:10548513-10548553
  hypo

SEQ ID NO: 432595 - DNA, 36 bp, Homo sapiens; identical to SEQ ID NO: 210068
  chr5:10618606-10618642
  hypo

SEQ ID NO: 432596 - DNA, 100 bp, Homo sapiens; identical to SEQ ID NO: 210070
  chr5:10936742-10936842
  hypo

SEQ ID NO: 432597 - DNA, 60 bp, Homo sapiens; identical to SEQ ID NO: 254569
  chr5:10972031-10972091
  hypo

SEQ ID NO: 432598 - DNA, 39 bp, Homo sapiens; identical to SEQ ID NO: 254570
  chr5:11074314-11074353
  hypo

SEQ ID NO: 432599 - DNA, 75 bp, Homo sapiens; identical to SEQ ID NO: 254571
  chr5:11130332-11130407
  hypo

SEQ ID NO: 432600 - DNA, 152 bp, Homo sapiens; identical to SEQ ID NO: 254572
  chr5:11130729-11130881
  hypo

SEQ ID NO: 432601 - DNA, 36 bp, Homo sapiens; identical to SEQ ID NO: 254574
  chr5:13037956-13037992
  hypo

SEQ ID NO: 432602 - DNA, 32 bp, Homo sapiens; identical to SEQ ID NO: 254575
  chr5:13416579-13416611
  hypo

SEQ ID NO: 432603 - DNA, 80 bp, Homo sapiens; identical to SEQ ID NO: 254576
  chr5:13884614-13884694
  hypo

SEQ ID NO: 432604 - DNA, 240 bp, Homo sapiens; identical to SEQ ID NO: 254577
  chr5:13946864-13947104
  hypo

SEQ ID NO: 432605 - DNA, 99 bp, Homo sapiens; identical to SEQ ID NO: 210072
  chr5:14122606-14122705
  hypo

SEQ ID NO: 432606 - DNA, 572 bp, Homo sapiens; identical to SEQ ID NO: 417959
  chr5:14143533-14144105
  hypo

SEQ ID NO: 432607 - DNA, 124 bp, Homo sapiens; identical to SEQ ID NO: 3833
  chr5:14144285-14144409
  hypo

SEQ ID NO: 432608 - DNA, 40 bp, Homo sapiens; identical to SEQ ID NO: 254579
  chr5:14173630-14173670
  hypo

SEQ ID NO: 432609 - DNA, 93 bp, Homo sapiens; identical to SEQ ID NO: 254580
  chr5:14253721-14253814
  hypo

SEQ ID NO: 432610 - DNA, 134 bp, Homo sapiens; identical to SEQ ID NO: 254581
  chr5:14269364-14269498
  hypo

SEQ ID NO: 432611 - DNA, 181 bp, Homo sapiens; identical to SEQ ID NO: 210075
  chr5:14273915-14274096
  hypo

SEQ ID NO: 432612 - DNA, 86 bp, Homo sapiens; identical to SEQ ID NO: 254583
  chr5:14286806-14286892
  hypo

SEQ ID NO: 432613 - DNA, 190 bp, Homo sapiens; identical to SEQ ID NO: 210076
  chr5:14303326-14303516
  hypo

SEQ ID NO: 432614 - DNA, 41 bp, Homo sapiens; identical to SEQ ID NO: 254585
  chr5:14315628-14315669
  hypo

SEQ ID NO: 432615 - DNA, 191 bp, Homo sapiens; identical to SEQ ID NO: 210077
  chr5:14319946-14320137
  hypo

SEQ ID NO: 432616 - DNA, 105 bp, Homo sapiens; identical to SEQ ID NO: 210078
  chr5:14325452-14325557
  hypo

SEQ ID NO: 432617 - DNA, 159 bp, Homo sapiens; identical to SEQ ID NO: 210081
  chr5:14338464-14338623
  hypo

SEQ ID NO: 432618 - DNA, 314 bp, Homo sapiens; identical to SEQ ID NO: 210082
  chr5:14348848-14349162
  hypo

SEQ ID NO: 432619 - DNA, 142 bp, Homo sapiens; identical to SEQ ID NO: 254592
  chr5:14369627-14369769
  hypo

SEQ ID NO: 432620 - DNA, 175 bp, Homo sapiens; identical to SEQ ID NO: 210083
  chr5:14378048-14378223
  hypo

SEQ ID NO: 432621 - DNA, 102 bp, Homo sapiens; identical to SEQ ID NO: 210084
  chr5:14381249-14381351
  hypo

SEQ ID NO: 432622 - DNA, 263 bp, Homo sapiens; identical to SEQ ID NO: 254595
  chr5:14390712-14390975
  hypo

SEQ ID NO: 432623 - DNA, 188 bp, Homo sapiens; identical to SEQ ID NO: 254596
  chr5:14405986-14406174
  hypo

SEQ ID NO: 432624 - DNA, 435 bp, Homo sapiens; identical to SEQ ID NO: 210086
  chr5:14409998-14410433
  hypo

SEQ ID NO: 432625 - DNA, 100 bp, Homo sapiens; identical to SEQ ID NO: 254598
  chr5:14414264-14414364
  hypo

SEQ ID NO: 432626 - DNA, 145 bp, Homo sapiens; identical to SEQ ID NO: 254599
  chr5:14420065-14420210
  hypo

SEQ ID NO: 432627 - DNA, 138 bp, Homo sapiens; identical to SEQ ID NO: 254600
  chr5:14426765-14426903
  hypo

SEQ ID NO: 432628 - DNA, 327 bp, Homo sapiens; identical to SEQ ID NO: 210087
  chr5:14427574-14427901
  hypo

SEQ ID NO: 432629 - DNA, 39 bp, Homo sapiens; identical to SEQ ID NO: 254602
  chr5:14431087-14431126
  hypo

SEQ ID NO: 432630 - DNA, 105 bp, Homo sapiens; identical to SEQ ID NO: 210088
  chr5:14435287-14435392
  hypo

SEQ ID NO: 432631 - DNA, 136 bp, Homo sapiens; identical to SEQ ID NO: 254604
  chr5:14441380-14441516
  hypo

SEQ ID NO: 432632 - DNA, 160 bp, Homo sapiens; identical to SEQ ID NO: 210089
  chr5:14454341-14454501
  hypo

SEQ ID NO: 432633 - DNA, 317 bp, Homo sapiens; identical to SEQ ID NO: 254606
  chr5:14459375-14459692
  hypo

SEQ ID NO: 432634 - DNA, 155 bp, Homo sapiens; identical to SEQ ID NO: 210090
  chr5:14460339-14460494
  hypo

SEQ ID NO: 432635 - DNA, 187 bp, Homo sapiens; identical to SEQ ID NO: 210092
  chr5:14485223-14485410
  hypo

SEQ ID NO: 432636 - DNA, 122 bp, Homo sapiens; identical to SEQ ID NO: 254610
  chr5:14487503-14487625
  hypo

SEQ ID NO: 432637 - DNA, 709 bp, Homo sapiens; identical to SEQ ID NO: 210093
  chr5:14487989-14488698
  hypo

SEQ ID NO: 432638 - DNA, 183 bp, Homo sapiens; identical to SEQ ID NO: 210094
  chr5:14489508-14489691
  hypo

SEQ ID NO: 432639 - DNA, 175 bp, Homo sapiens; identical to SEQ ID NO: 210096
  chr5:14493321-14493496
  hypo

SEQ ID NO: 432640 - DNA, 537 bp, Homo sapiens; identical to SEQ ID NO: 254615
  chr5:14498253-14498790
  hypo

SEQ ID NO: 432641 - DNA, 46 bp, Homo sapiens; identical to SEQ ID NO: 304216
  chr5:14501759-14501805
  hypo

SEQ ID NO: 432642 - DNA, 87 bp, Homo sapiens; identical to SEQ ID NO: 304217
  chr5:14501861-14501948
  hypo

SEQ ID NO: 432643 - DNA, 141 bp, Homo sapiens; identical to SEQ ID NO: 254617
  chr5:14502171-14502312
  hypo

SEQ ID NO: 432644 - DNA, 98 bp, Homo sapiens; identical to SEQ ID NO: 210098
  chr5:14504056-14504154
  hypo

SEQ ID NO: 432645 - DNA, 369 bp, Homo sapiens; identical to SEQ ID NO: 254619
  chr5:14507312-14507681
  hypo

SEQ ID NO: 432646 - DNA, 142 bp, Homo sapiens; identical to SEQ ID NO: 210100
  chr5:14508326-14508468
  hypo

SEQ ID NO: 432647 - DNA, 76 bp, Homo sapiens; identical to SEQ ID NO: 254621
  chr5:14523713-14523789
  hypo

SEQ ID NO: 432648 - DNA, 321 bp, Homo sapiens; identical to SEQ ID NO: 254623
  chr5:14725552-14725873
  hypo

SEQ ID NO: 432649 - DNA, 277 bp, Homo sapiens; identical to SEQ ID NO: 254624
  chr5:14726310-14726587
  hypo

SEQ ID NO: 432650 - DNA, 222 bp, Homo sapiens; identical to SEQ ID NO: 254625
  chr5:14734656-14734878
  hypo

SEQ ID NO: 432651 - DNA, 157 bp, Homo sapiens; identical to SEQ ID NO: 304227
  chr5:14756485-14756642
  hypo

SEQ ID NO: 432652 - DNA, 161 bp, Homo sapiens; identical to SEQ ID NO: 254629
  chr5:14780229-14780390
  hypo

SEQ ID NO: 432653 - DNA, 132 bp, Homo sapiens; identical to SEQ ID NO: 254630
  chr5:14780932-14781064
  hypo

SEQ ID NO: 432654 - DNA, 85 bp, Homo sapiens; identical to SEQ ID NO: 254631
  chr5:14789325-14789410
  hypo

SEQ ID NO: 432655 - DNA, 34 bp, Homo sapiens; identical to SEQ ID NO: 254632
  chr5:14839001-14839035
  hypo

SEQ ID NO: 432656 - DNA, 212 bp, Homo sapiens; identical to SEQ ID NO: 254633
  chr5:14846242-14846454
  hypo

SEQ ID NO: 432657 - DNA, 110 bp, Homo sapiens; identical to SEQ ID NO: 210101
  chr5:14849840-14849950
  hypo

SEQ ID NO: 432658 - DNA, 39 bp, Homo sapiens; identical to SEQ ID NO: 254635
  chr5:14934638-14934677
  hypo

SEQ ID NO: 432659 - DNA, 33 bp, Homo sapiens; identical to SEQ ID NO: 254636
  chr5:14959676-14959709
  hypo

SEQ ID NO: 432660 - DNA, 44 bp, Homo sapiens; identical to SEQ ID NO: 254637
  chr5:15343332-15343376
  hypo

SEQ ID NO: 432661 - DNA, 93 bp, Homo sapiens; identical to SEQ ID NO: 199768
  chr5:15499745-15499838
  hypo

SEQ ID NO: 432662 - DNA, 129 bp, Homo sapiens; identical to SEQ ID NO: 396955
  chr5:15499947-15500076
  hypo

SEQ ID NO: 432663 - DNA, 872 bp, Homo sapiens; identical to SEQ ID NO: 254638
  chr5:15936621-15937493
  hypo

SEQ ID NO: 432664 - DNA, 35 bp, Homo sapiens; identical to SEQ ID NO: 254641
  chr5:16488904-16488939
  hypo

SEQ ID NO: 432665 - DNA, 35 bp, Homo sapiens; identical to SEQ ID NO: 254642
  chr5:16503482-16503517
  hypo

SEQ ID NO: 432666 - DNA, 292 bp, Homo sapiens; identical to SEQ ID NO: 282813
  chr5:16616791-16617083
  hypo

SEQ ID NO: 432667 - DNA, 204 bp, Homo sapiens; identical to SEQ ID NO: 254643
  chr5:16668250-16668454
  hypo

SEQ ID NO: 432668 - DNA, 384 bp, Homo sapiens; identical to SEQ ID NO: 210104
  chr5:16670787-16671171
  hypo

SEQ ID NO: 432669 - DNA, 36 bp, Homo sapiens; identical to SEQ ID NO: 254645
  chr5:16671882-16671918
  hypo

SEQ ID NO: 432670 - DNA, 34 bp, Homo sapiens; identical to SEQ ID NO: 254647
  chr5:16680075-16680109
  hypo

SEQ ID NO: 432671 - DNA, 311 bp, Homo sapiens; identical to SEQ ID NO: 210106
  chr5:16681935-16682246
  hypo

SEQ ID NO: 432672 - DNA, 803 bp, Homo sapiens; identical to SEQ ID NO: 254649
  chr5:16701010-16701813
  hypo

SEQ ID NO: 432673 - DNA, 31 bp, Homo sapiens; identical to SEQ ID NO: 210108
  chr5:16729562-16729593
  hypo

SEQ ID NO: 432674 - DNA, 58 bp, Homo sapiens; identical to SEQ ID NO: 304251
  chr5:16744687-16744745
  hypo

SEQ ID NO: 432675 - DNA, 148 bp, Homo sapiens; identical to SEQ ID NO: 254652
  chr5:16745035-16745183
  hypo

SEQ ID NO: 432676 - DNA, 134 bp, Homo sapiens; identical to SEQ ID NO: 254653
  chr5:16750563-16750697
  hypo

SEQ ID NO: 432677 - DNA, 161 bp, Homo sapiens; identical to SEQ ID NO: 254654
  chr5:16766144-16766305
  hypo

SEQ ID NO: 432678 - DNA, 42 bp, Homo sapiens; identical to SEQ ID NO: 254656
  chr5:16814253-16814295
  hypo

SEQ ID NO: 432679 - DNA, 42 bp, Homo sapiens; identical to SEQ ID NO: 254657
  chr5:16814535-16814577
  hypo

SEQ ID NO: 432680 - DNA, 32 bp, Homo sapiens; identical to SEQ ID NO: 210110
  chr5:16816658-16816690
  hypo

SEQ ID NO: 432681 - DNA, 33 bp, Homo sapiens; identical to SEQ ID NO: 210115
  chr5:16952528-16952561
  hypo

SEQ ID NO: 432682 - DNA, 120 bp, Homo sapiens; identical to SEQ ID NO: 254661
  chr5:16964573-16964693
  hypo

SEQ ID NO: 432683 - DNA, 88 bp, Homo sapiens; identical to SEQ ID NO: 254662
  chr5:16968119-16968207
  hypo

SEQ ID NO: 432684 - DNA, 120 bp, Homo sapiens; identical to SEQ ID NO: 210116
  chr5:16969886-16970006
  hypo

SEQ ID NO: 432685 - DNA, 37 bp, Homo sapiens; identical to SEQ ID NO: 254664
  chr5:17006738-17006775
  hypo

SEQ ID NO: 432686 - DNA, 32 bp, Homo sapiens; identical to SEQ ID NO: 210117
  chr5:17032024-17032056
  hypo

SEQ ID NO: 432687 - DNA, 35 bp, Homo sapiens; identical to SEQ ID NO: 254666
  chr5:17159691-17159726
  hypo

SEQ ID NO: 432688 - DNA, 35 bp, Homo sapiens; identical to SEQ ID NO: 210118
  chr5:17161190-17161225
  hypo

SEQ ID NO: 432689 - DNA, 44 bp, Homo sapiens; identical to SEQ ID NO: 254669
  chr5:17298136-17298180
  hypo

SEQ ID NO: 432690 - DNA, 183 bp, Homo sapiens; identical to SEQ ID NO: 254671
  chr5:17491366-17491549
  hypo

SEQ ID NO: 432691 - DNA, 42 bp, Homo sapiens; identical to SEQ ID NO: 254672
  chr5:17491985-17492027
  hypo

SEQ ID NO: 432692 - DNA, 48 bp, Homo sapiens; identical to SEQ ID NO: 304279
  chr5:17512144-17512192
  hypo

SEQ ID NO: 432693 - DNA, 159 bp, Homo sapiens; identical to SEQ ID NO: 210123
  chr5:17670364-17670523
  hypo

SEQ ID NO: 432694 - DNA, 42 bp, Homo sapiens; identical to SEQ ID NO: 254675
  chr5:17670808-17670850
  hypo

SEQ ID NO: 432695 - DNA, 34 bp, Homo sapiens; identical to SEQ ID NO: 254676
  chr5:17924526-17924560
  hypo

SEQ ID NO: 432696 - DNA, 34 bp, Homo sapiens; identical to SEQ ID NO: 254677
  chr5:17924800-17924834
  hypo

SEQ ID NO: 432697 - DNA, 76 bp, Homo sapiens; identical to SEQ ID NO: 199779
  chr5:17987028-17987104
  hypo

SEQ ID NO: 432698 - DNA, 137 bp, Homo sapiens; identical to SEQ ID NO: 254678
  chr5:18034128-18034265
  hypo

SEQ ID NO: 432699 - DNA, 66 bp, Homo sapiens; identical to SEQ ID NO: 254679
  chr5:18119293-18119359
  hypo

SEQ ID NO: 432700 - DNA, 31 bp, Homo sapiens; identical to SEQ ID NO: 254680
  chr5:18296459-18296490
  hypo

SEQ ID NO: 432701 - DNA, 36 bp, Homo sapiens; identical to SEQ ID NO: 254681
  chr5:18380066-18380102
  hypo

SEQ ID NO: 432702 - DNA, 110 bp, Homo sapiens; identical to SEQ ID NO: 210125
  chr5:18482130-18482240
  hypo

SEQ ID NO: 432703 - DNA, 226 bp, Homo sapiens; identical to SEQ ID NO: 254683
  chr5:18793520-18793746
  hypo

SEQ ID NO: 432704 - DNA, 31 bp, Homo sapiens; identical to SEQ ID NO: 254684
  chr5:19289324-19289355
  hypo

SEQ ID NO: 432705 - DNA, 94 bp, Homo sapiens; identical to SEQ ID NO: 254685
  chr5:23726883-23726977
  hypo

SEQ ID NO: 432706 - DNA, 42 bp, Homo sapiens; identical to SEQ ID NO: 254686
  chr5:24294250-24294292
  hypo

SEQ ID NO: 432707 - DNA, 42 bp, Homo sapiens; identical to SEQ ID NO: 254687
  chr5:26324223-26324265
  hypo

SEQ ID NO: 432708 - DNA, 33 bp, Homo sapiens; identical to SEQ ID NO: 210126
  chr5:27121727-27121760
  hypo

SEQ ID NO: 432709 - DNA, 33 bp, Homo sapiens; identical to SEQ ID NO: 210127
  chr5:27121940-27121973
  hypo

SEQ ID NO: 432710 - DNA, 137 bp, Homo sapiens; identical to SEQ ID NO: 254690
  chr5:27217838-27217975
  hypo

SEQ ID NO: 432711 - DNA, 121 bp, Homo sapiens; identical to SEQ ID NO: 199781
  chr5:29296854-29296975
  hypo

SEQ ID NO: 432712 - DNA, 55 bp, Homo sapiens; identical to SEQ ID NO: 254692
  chr5:29379762-29379817
  hypo

SEQ ID NO: 432713 - DNA, 32 bp, Homo sapiens; identical to SEQ ID NO: 210129
  chr5:30864345-30864377
  hypo

SEQ ID NO: 432714 - DNA, 160 bp, Homo sapiens; identical to SEQ ID NO: 254695
  chr5:31424609-31424769
  hypo

SEQ ID NO: 432715 - DNA, 160 bp, Homo sapiens; identical to SEQ ID NO: 254696
  chr5:31435824-31435984
  hypo

SEQ ID NO: 432716 - DNA, 46 bp, Homo sapiens; identical to SEQ ID NO: 254697
  chr5:31599717-31599763
  hypo

SEQ ID NO: 432717 - DNA, 31 bp, Homo sapiens; identical to SEQ ID NO: 210130
  chr5:31670494-31670525
  hypo

SEQ ID NO: 432718 - DNA, 31 bp, Homo sapiens; identical to SEQ ID NO: 210131
  chr5:31724694-31724725
  hypo

SEQ ID NO: 432719 - DNA, 63 bp, Homo sapiens; identical to SEQ ID NO: 304308
  chr5:31750713-31750776
  hypo

SEQ ID NO: 432720 - DNA, 42 bp, Homo sapiens; identical to SEQ ID NO: 254702
  chr5:31758533-31758575
  hypo

SEQ ID NO: 432721 - DNA, 42 bp, Homo sapiens; identical to SEQ ID NO: 254703
  chr5:31797549-31797591
  hypo

SEQ ID NO: 432722 - DNA, 41 bp, Homo sapiens; identical to SEQ ID NO: 254704
  chr5:31797711-31797752
  hypo

SEQ ID NO: 432723 - DNA, 57 bp, Homo sapiens; identical to SEQ ID NO: 210133
  chr5:31908394-31908451
  hypo

SEQ ID NO: 432724 - DNA, 92 bp, Homo sapiens; identical to SEQ ID NO: 254706
  chr5:32004111-32004203
  hypo

SEQ ID NO: 432725 - DNA, 32 bp, Homo sapiens; identical to SEQ ID NO: 254707
  chr5:32012491-32012523
  hypo

SEQ ID NO: 432726 - DNA, 101 bp, Homo sapiens; identical to SEQ ID NO: 210134
  chr5:32314457-32314558
  hypo

SEQ ID NO: 432727 - DNA, 44 bp, Homo sapiens; identical to SEQ ID NO: 210135
  chr5:32333128-32333172
  hypo

SEQ ID NO: 432728 - DNA, 228 bp, Homo sapiens; identical to SEQ ID NO: 210136
  chr5:32445349-32445577
  hypo

SEQ ID NO: 432729 - DNA, 33 bp, Homo sapiens; identical to SEQ ID NO: 210137
  chr5:32446098-32446131
  hypo

SEQ ID NO: 432730 - DNA, 43 bp, Homo sapiens; identical to SEQ ID NO: 304322
  chr5:32526515-32526558
  hypo

SEQ ID NO: 432731 - DNA, 217 bp, Homo sapiens; identical to SEQ ID NO: 254715
  chr5:32584344-32584561
  hypo

SEQ ID NO: 432732 - DNA, 88 bp, Homo sapiens; identical to SEQ ID NO: 254716
  chr5:32640983-32641071
  hypo

SEQ ID NO: 432733 - DNA, 214 bp, Homo sapiens; identical to SEQ ID NO: 199785
  chr5:32709879-32710093
  hypo

SEQ ID NO: 432734 - DNA, 72 bp, Homo sapiens; identical to SEQ ID NO: 282839
  chr5:32713505-32713577
  hypo

SEQ ID NO: 432735 - DNA, 37 bp, Homo sapiens; identical to SEQ ID NO: 254717
  chr5:32754968-32755005
  hypo

SEQ ID NO: 432736 - DNA, 37 bp, Homo sapiens; identical to SEQ ID NO: 254718
  chr5:32755245-32755282
  hypo

SEQ ID NO: 432737 - DNA, 35 bp, Homo sapiens; identical to SEQ ID NO: 210139
  chr5:32764594-32764629
  hypo

SEQ ID NO: 432738 - DNA, 359 bp, Homo sapiens; identical to SEQ ID NO: 210140
  chr5:32782525-32782884
  hypo

SEQ ID NO: 432739 - DNA, 111 bp, Homo sapiens; identical to SEQ ID NO: 254721
  chr5:32793679-32793790
  hypo

SEQ ID NO: 432740 - DNA, 326 bp, Homo sapiens; identical to SEQ ID NO: 254723
  chr5:32934066-32934392
  hypo

SEQ ID NO: 432741 - DNA, 34 bp, Homo sapiens; identical to SEQ ID NO: 254724
  chr5:33035691-33035725
  hypo

SEQ ID NO: 432742 - DNA, 271 bp, Homo sapiens; identical to SEQ ID NO: 210141
  chr5:33162235-33162506
  hypo

SEQ ID NO: 432743 - DNA, 126 bp, Homo sapiens; identical to SEQ ID NO: 210142
  chr5:33162602-33162728
  hypo

SEQ ID NO: 432744 - DNA, 91 bp, Homo sapiens; identical to SEQ ID NO: 304336
  chr5:33297914-33298005
  hypo

SEQ ID NO: 432745 - DNA, 61 bp, Homo sapiens; identical to SEQ ID NO: 304337
  chr5:33298177-33298238
  hypo

SEQ ID NO: 432746 - DNA, 38 bp, Homo sapiens; identical to SEQ ID NO: 210143
  chr5:33311279-33311317
  hypo

SEQ ID NO: 432747 - DNA, 37 bp, Homo sapiens; identical to SEQ ID NO: 304339
  chr5:33442929-33442966
  hypo

SEQ ID NO: 432748 - DNA, 179 bp, Homo sapiens; identical to SEQ ID NO: 210144
  chr5:33502053-33502232
  hypo

SEQ ID NO: 432749 - DNA, 40 bp, Homo sapiens; identical to SEQ ID NO: 210145
  chr5:33509454-33509494
  hypo

SEQ ID NO: 432750 - DNA, 119 bp, Homo sapiens; identical to SEQ ID NO: 254732
  chr5:33530561-33530680
  hypo

SEQ ID NO: 432751 - DNA, 39 bp, Homo sapiens; identical to SEQ ID NO: 254733
  chr5:33724926-33724965
  hypo

SEQ ID NO: 432752 - DNA, 359 bp, Homo sapiens; identical to SEQ ID NO: 210147
  chr5:33984387-33984746
  hypo

SEQ ID NO: 432753 - DNA, 91 bp, Homo sapiens; identical to SEQ ID NO: 254735
  chr5:34147860-34147951
  hypo

SEQ ID NO: 432754 - DNA, 39 bp, Homo sapiens; identical to SEQ ID NO: 254736
  chr5:34440316-34440355
  hypo

SEQ ID NO: 432755 - DNA, 126 bp, Homo sapiens; identical to SEQ ID NO: 254737
  chr5:34491443-34491569
  hypo

SEQ ID NO: 432756 - DNA, 182 bp, Homo sapiens; identical to SEQ ID NO: 254738
  chr5:34530162-34530344
  hypo

SEQ ID NO: 432757 - DNA, 83 bp, Homo sapiens; identical to SEQ ID NO: 210148
  chr5:34551767-34551850
  hypo

SEQ ID NO: 432758 - DNA, 38 bp, Homo sapiens; identical to SEQ ID NO: 210149
  chr5:34586707-34586745
  hypo

SEQ ID NO: 432759 - DNA, 163 bp, Homo sapiens; identical to SEQ ID NO: 254741
  chr5:34591003-34591166
  hypo

SEQ ID NO: 432760 - DNA, 33 bp, Homo sapiens; identical to SEQ ID NO: 254742
  chr5:34736210-34736243
  hypo

SEQ ID NO: 432761 - DNA, 34 bp, Homo sapiens; identical to SEQ ID NO: 254743
  chr5:34756421-34756455
  hypo

SEQ ID NO: 432762 - DNA, 218 bp, Homo sapiens; identical to SEQ ID NO: 254744
  chr5:36035944-36036162
  hypo

SEQ ID NO: 432763 - DNA, 147 bp, Homo sapiens; identical to SEQ ID NO: 254745
  chr5:36526936-36527083
  hypo

SEQ ID NO: 432764 - DNA, 42 bp, Homo sapiens; identical to SEQ ID NO: 254746
  chr5:37022498-37022540
  hypo

SEQ ID NO: 432765 - DNA, 79 bp, Homo sapiens; identical to SEQ ID NO: 254747
  chr5:37042504-37042583
  hypo

SEQ ID NO: 432766 - DNA, 106 bp, Homo sapiens; identical to SEQ ID NO: 254748
  chr5:37052539-37052645
  hypo

SEQ ID NO: 432767 - DNA, 76 bp, Homo sapiens; identical to SEQ ID NO: 254749
  chr5:37064066-37064142
  hypo

SEQ ID NO: 432768 - DNA, 36 bp, Homo sapiens; identical to SEQ ID NO: 254750
  chr5:37082175-37082211
  hypo

SEQ ID NO: 432769 - DNA, 55 bp, Homo sapiens; identical to SEQ ID NO: 254751
  chr5:37170189-37170244
  hypo

SEQ ID NO: 432770 - DNA, 31 bp, Homo sapiens; identical to SEQ ID NO: 254752
  chr5:37230262-37230293
  hypo

SEQ ID NO: 432771 - DNA, 38 bp, Homo sapiens; identical to SEQ ID NO: 254753
  chr5:37338512-37338550
  hypo

SEQ ID NO: 432772 - DNA, 37 bp, Homo sapiens; identical to SEQ ID NO: 254754
  chr5:37338790-37338827
  hypo

SEQ ID NO: 432773 - DNA, 33 bp, Homo sapiens; identical to SEQ ID NO: 254755
  chr5:37347339-37347372
  hypo

SEQ ID NO: 432774 - DNA, 65 bp, Homo sapiens; identical to SEQ ID NO: 254756
  chr5:37806566-37806631
  hypo

SEQ ID NO: 432775 - DNA, 33 bp, Homo sapiens; identical to SEQ ID NO: 254757
  chr5:38198897-38198930
  hypo

SEQ ID NO: 432776 - DNA, 31 bp, Homo sapiens; identical to SEQ ID NO: 254758
  chr5:38631851-38631882
  hypo

SEQ ID NO: 432777 - DNA, 36 bp, Homo sapiens; identical to SEQ ID NO: 254759
  chr5:38635820-38635856
  hypo

SEQ ID NO: 432778 - DNA, 42 bp, Homo sapiens; identical to SEQ ID NO: 210150
  chr5:39053667-39053709
  hypo

SEQ ID NO: 432779 - DNA, 213 bp, Homo sapiens; identical to SEQ ID NO: 254761
  chr5:39186060-39186273
  hypo

SEQ ID NO: 432780 - DNA, 102 bp, Homo sapiens; identical to SEQ ID NO: 210151
  chr5:39209363-39209465
  hypo

SEQ ID NO: 432781 - DNA, 87 bp, Homo sapiens; identical to SEQ ID NO: 254763
  chr5:39576392-39576479
  hypo

SEQ ID NO: 432782 - DNA, 228 bp, Homo sapiens; identical to SEQ ID NO: 254764
  chr5:39665680-39665908
  hypo

SEQ ID NO: 432783 - DNA, 369 bp, Homo sapiens; identical to SEQ ID NO: 254765
  chr5:39721486-39721855
  hypo

SEQ ID NO: 432784 - DNA, 129 bp, Homo sapiens; identical to SEQ ID NO: 210152
  chr5:39740632-39740761
  hypo

SEQ ID NO: 432785 - DNA, 40 bp, Homo sapiens; identical to SEQ ID NO: 254767
  chr5:39802883-39802923
  hypo

SEQ ID NO: 432786 - DNA, 40 bp, Homo sapiens; identical to SEQ ID NO: 254768
  chr5:39803163-39803203
  hypo

SEQ ID NO: 432787 - DNA, 223 bp, Homo sapiens; identical to SEQ ID NO: 210153
  chr5:39808822-39809045
  hypo

SEQ ID NO: 432788 - DNA, 214 bp, Homo sapiens; identical to SEQ ID NO: 210154
  chr5:40066713-40066927
  hypo

SEQ ID NO: 432789 - DNA, 148 bp, Homo sapiens; identical to SEQ ID NO: 210155
  chr5:40066955-40067103
  hypo

SEQ ID NO: 432790 - DNA, 42 bp, Homo sapiens; identical to SEQ ID NO: 254772
  chr5:40823270-40823312
  hypo

SEQ ID NO: 432791 - DNA, 42 bp, Homo sapiens; identical to SEQ ID NO: 254773
  chr5:40957872-40957914
  hypo

SEQ ID NO: 432792 - DNA, 50 bp, Homo sapiens; identical to SEQ ID NO: 254774
  chr5:41588037-41588087
  hypo

SEQ ID NO: 432793 - DNA, 39 bp, Homo sapiens; identical to SEQ ID NO: 210157
  chr5:41991877-41991916
  hypo

SEQ ID NO: 432794 - DNA, 39 bp, Homo sapiens; identical to SEQ ID NO: 210158
  chr5:41992156-41992195
  hypo

SEQ ID NO: 432795 - DNA, 81 bp, Homo sapiens; identical to SEQ ID NO: 254777
  chr5:42140523-42140604
  hypo

SEQ ID NO: 432796 - DNA, 567 bp, Homo sapiens; identical to SEQ ID NO: 254778
  chr5:42468532-42469099
  hypo

SEQ ID NO: 432797 - DNA, 36 bp, Homo sapiens; identical to SEQ ID NO: 210160
  chr5:42476009-42476045
  hypo

SEQ ID NO: 432798 - DNA, 140 bp, Homo sapiens; identical to SEQ ID NO: 254780
  chr5:42582811-42582951
  hypo

SEQ ID NO: 432799 - DNA, 37 bp, Homo sapiens; identical to SEQ ID NO: 254781
  chr5:42638260-42638297
  hypo

SEQ ID NO: 432800 - DNA, 93 bp, Homo sapiens; identical to SEQ ID NO: 254782
  chr5:42697695-42697788
  hypo

SEQ ID NO: 432801 - DNA, 34 bp, Homo sapiens; identical to SEQ ID NO: 254783
  chr5:42760113-42760147
  hypo

SEQ ID NO: 432802 - DNA, 42 bp, Homo sapiens; identical to SEQ ID NO: 254784
  chr5:42975839-42975881
  hypo

SEQ ID NO: 432803 - DNA, 31 bp, Homo sapiens; identical to SEQ ID NO: 210161
  chr5:42984043-42984074
  hypo

SEQ ID NO: 432804 - DNA, 34 bp, Homo sapiens; identical to SEQ ID NO: 254786
  chr5:43069386-43069420
  hypo

SEQ ID NO: 432805 - DNA, 43 bp, Homo sapiens; identical to SEQ ID NO: 254787
  chr5:43120111-43120154
  hypo

SEQ ID NO: 432806 - DNA, 105 bp, Homo sapiens; identical to SEQ ID NO: 210162
  chr5:43147787-43147892
  hypo

SEQ ID NO: 432807 - DNA, 36 bp, Homo sapiens; identical to SEQ ID NO: 210163
  chr5:43233244-43233280
  hypo

SEQ ID NO: 432808 - DNA, 52 bp, Homo sapiens; identical to SEQ ID NO: 210164
  chr5:43233310-43233362
  hypo

SEQ ID NO: 432809 - DNA, 89 bp, Homo sapiens; identical to SEQ ID NO: 254791
  chr5:43387666-43387755
  hypo

SEQ ID NO: 432810 - DNA, 34 bp, Homo sapiens; identical to SEQ ID NO: 254792
  chr5:43850518-43850552
  hypo

SEQ ID NO: 432811 - DNA, 31 bp, Homo sapiens; identical to SEQ ID NO: 254793
  chr5:43950021-43950052
  hypo

SEQ ID NO: 432812 - DNA, 48 bp, Homo sapiens; identical to SEQ ID NO: 254794
  chr5:44708954-44709002
  hypo

SEQ ID NO: 432813 - DNA, 98 bp, Homo sapiens; identical to SEQ ID NO: 254795
  chr5:44811149-44811247
  hypo

SEQ ID NO: 432814 - DNA, 79 bp, Homo sapiens; identical to SEQ ID NO: 210166
  chr5:45196607-45196686
  hypo

SEQ ID NO: 432815 - DNA, 44 bp, Homo sapiens; identical to SEQ ID NO: 210167
  chr5:45225672-45225716
  hypo

SEQ ID NO: 432816 - DNA, 33 bp, Homo sapiens; identical to SEQ ID NO: 210169
  chr5:49903305-49903338
  hypo

SEQ ID NO: 432817 - DNA, 31 bp, Homo sapiens; identical to SEQ ID NO: 254799
  chr5:51793955-51793986
  hypo

SEQ ID NO: 432818 - DNA, 119 bp, Homo sapiens; identical to SEQ ID NO: 254801
  chr5:52941754-52941873
  hypo

SEQ ID NO: 432819 - DNA, 46 bp, Homo sapiens; identical to SEQ ID NO: 254802
  chr5:53241084-53241130
  hypo

SEQ ID NO: 432820 - DNA, 78 bp, Homo sapiens; identical to SEQ ID NO: 210170
  chr5:53821871-53821949
  hypo

SEQ ID NO: 432821 - DNA, 40 bp, Homo sapiens; identical to SEQ ID NO: 254804
  chr5:53959228-53959268
  hypo

SEQ ID NO: 432822 - DNA, 139 bp, Homo sapiens; identical to SEQ ID NO: 210171
  chr5:54069074-54069213
  hypo

SEQ ID NO: 432823 - DNA, 107 bp, Homo sapiens; identical to SEQ ID NO: 199844
  chr5:54469036-54469143
  hypo

SEQ ID NO: 432824 - DNA, 98 bp, Homo sapiens; identical to SEQ ID NO: 210173
  chr5:54665639-54665737
  hypo

SEQ ID NO: 432825 - DNA, 32 bp, Homo sapiens; identical to SEQ ID NO: 210174
  chr5:54734440-54734472
  hypo

SEQ ID NO: 432826 - DNA, 32 bp, Homo sapiens; identical to SEQ ID NO: 254808
  chr5:54734712-54734744
  hypo

SEQ ID NO: 432827 - DNA, 44 bp, Homo sapiens; identical to SEQ ID NO: 254809
  chr5:54850288-54850332
  hypo

SEQ ID NO: 432828 - DNA, 40 bp, Homo sapiens; identical to SEQ ID NO: 254810
  chr5:54952935-54952975
  hypo

SEQ ID NO: 432829 - DNA, 284 bp, Homo sapiens; identical to SEQ ID NO: 254811
  chr5:55033681-55033965
  hypo

SEQ ID NO: 432830 - DNA, 165 bp, Homo sapiens; identical to SEQ ID NO: 254812
  chr5:55229393-55229558
  hypo

SEQ ID NO: 432831 - DNA, 95 bp, Homo sapiens; identical to SEQ ID NO: 304429
  chr5:55309217-55309312
  hypo

SEQ ID NO: 432832 - DNA, 34 bp, Homo sapiens; identical to SEQ ID NO: 210175
  chr5:55330547-55330581
  hypo

SEQ ID NO: 432833 - DNA, 33 bp, Homo sapiens; identical to SEQ ID NO: 210176
  chr5:55330821-55330854
  hypo

SEQ ID NO: 432834 - DNA, 94 bp, Homo sapiens; identical to SEQ ID NO: 254816
  chr5:55379300-55379394
  hypo

SEQ ID NO: 432835 - DNA, 31 bp, Homo sapiens; identical to SEQ ID NO: 254817
  chr5:55705173-55705204
  hypo

SEQ ID NO: 432836 - DNA, 133 bp, Homo sapiens; identical to SEQ ID NO: 254818
  chr5:55789717-55789850
  hypo

SEQ ID NO: 432837 - DNA, 146 bp, Homo sapiens; identical to SEQ ID NO: 254819
  chr5:56011132-56011278
  hypo

SEQ ID NO: 432838 - DNA, 43 bp, Homo sapiens; identical to SEQ ID NO: 254820
  chr5:56487659-56487702
  hypo

SEQ ID NO: 432839 - DNA, 155 bp, Homo sapiens; identical to SEQ ID NO: 254821
  chr5:56568064-56568219
  hypo

SEQ ID NO: 432840 - DNA, 206 bp, Homo sapiens; identical to SEQ ID NO: 254822
  chr5:56718795-56719001
  hypo

SEQ ID NO: 432841 - DNA, 1274 bp, Homo sapiens; identical to SEQ ID NO: 282961
  chr5:57755330-57756604
  hypo

SEQ ID NO: 432842 - DNA, 203 bp, Homo sapiens; identical to SEQ ID NO: 199868
  chr5:60626141-60626344
  hypo

SEQ ID NO: 432843 - DNA, 252 bp, Homo sapiens; identical to SEQ ID NO: 282976
  chr5:60626723-60626975
  hypo

SEQ ID NO: 432844 - DNA, 45 bp, Homo sapiens; identical to SEQ ID NO: 210181
  chr5:60676638-60676683
  hypo

SEQ ID NO: 432845 - DNA, 39 bp, Homo sapiens; identical to SEQ ID NO: 254824
  chr5:60700056-60700095
  hypo

SEQ ID NO: 432846 - DNA, 200 bp, Homo sapiens; identical to SEQ ID NO: 210182
  chr5:60821632-60821832
  hypo

SEQ ID NO: 432847 - DNA, 136 bp, Homo sapiens; identical to SEQ ID NO: 254826
  chr5:60866394-60866530
  hypo

SEQ ID NO: 432848 - DNA, 83 bp, Homo sapiens; identical to SEQ ID NO: 210183
  chr5:61690791-61690874
  hypo

SEQ ID NO: 432849 - DNA, 39 bp, Homo sapiens; identical to SEQ ID NO: 254829
  chr5:61704349-61704388
  hypo

SEQ ID NO: 432850 - DNA, 31 bp, Homo sapiens; identical to SEQ ID NO: 254830
  chr5:61849887-61849918
  hypo

SEQ ID NO: 432851 - DNA, 342 bp, Homo sapiens; identical to SEQ ID NO: 254831
  chr5:61910224-61910566
  hypo

SEQ ID NO: 432852 - DNA, 42 bp, Homo sapiens; identical to SEQ ID NO: 254832
  chr5:62080933-62080975
  hypo

SEQ ID NO: 432853 - DNA, 387 bp, Homo sapiens; identical to SEQ ID NO: 41580
  chr5:63255315-63255702
  hypo

SEQ ID NO: 432854 - DNA, 132 bp, Homo sapiens; identical to SEQ ID NO: 282986
  chr5:63462119-63462251
  hypo

SEQ ID NO: 432855 - DNA, 156 bp, Homo sapiens; identical to SEQ ID NO: 254833
  chr5:64103541-64103697
  hypo

SEQ ID NO: 432856 - DNA, 138 bp, Homo sapiens; identical to SEQ ID NO: 210184
  chr5:64339982-64340120
  hypo

SEQ ID NO: 432857 - DNA, 39 bp, Homo sapiens; identical to SEQ ID NO: 254835
  chr5:64516272-64516311
  hypo

SEQ ID NO: 432858 - DNA, 38 bp, Homo sapiens; identical to SEQ ID NO: 254836
  chr5:64516551-64516589
  hypo

SEQ ID NO: 432859 - DNA, 41 bp, Homo sapiens; identical to SEQ ID NO: 210185
  chr5:65020927-65020968
  hypo

SEQ ID NO: 432860 - DNA, 40 bp, Homo sapiens; identical to SEQ ID NO: 210186
  chr5:65107351-65107391
  hypo

SEQ ID NO: 432861 - DNA, 77 bp, Homo sapiens; identical to SEQ ID NO: 210187
  chr5:65465907-65465984
  hypo

SEQ ID NO: 432862 - DNA, 42 bp, Homo sapiens; identical to SEQ ID NO: 254840
  chr5:65505217-65505259
  hypo

SEQ ID NO: 432863 - DNA, 205 bp, Homo sapiens; identical to SEQ ID NO: 210188
  chr5:65988337-65988542
  hypo

SEQ ID NO: 432864 - DNA, 186 bp, Homo sapiens; identical to SEQ ID NO: 210189
  chr5:66441263-66441449
  hypo

SEQ ID NO: 432865 - DNA, 119 bp, Homo sapiens; identical to SEQ ID NO: 254843
  chr5:66448539-66448658
  hypo

SEQ ID NO: 432866 - DNA, 622 bp, Homo sapiens; identical to SEQ ID NO: 254844
  chr5:66459032-66459654
  hypo

SEQ ID NO: 432867 - DNA, 761 bp, Homo sapiens; identical to SEQ ID NO: 254845
  chr5:66460859-66461620
  hypo

SEQ ID NO: 432868 - DNA, 212 bp, Homo sapiens; identical to SEQ ID NO: 254846
  chr5:66534133-66534345
  hypo

SEQ ID NO: 432869 - DNA, 58 bp, Homo sapiens; identical to SEQ ID NO: 254847
  chr5:66790234-66790292
  hypo

SEQ ID NO: 432870 - DNA, 34 bp, Homo sapiens; identical to SEQ ID NO: 210190
  chr5:66911431-66911465
  hypo

SEQ ID NO: 432871 - DNA, 162 bp, Homo sapiens; identical to SEQ ID NO: 210191
  chr5:66938604-66938766
  hypo

SEQ ID NO: 432872 - DNA, 37 bp, Homo sapiens; identical to SEQ ID NO: 254850
  chr5:66987570-66987607
  hypo

SEQ ID NO: 432873 - DNA, 36 bp, Homo sapiens; identical to SEQ ID NO: 210192
  chr5:67015513-67015549
  hypo

SEQ ID NO: 432874 - DNA, 35 bp, Homo sapiens; identical to SEQ ID NO: 254852
  chr5:67021470-67021505
  hypo

SEQ ID NO: 432875 - DNA, 37 bp, Homo sapiens; identical to SEQ ID NO: 254853
  chr5:67488205-67488242
  hypo

SEQ ID NO: 432876 - DNA, 174 bp, Homo sapiens; identical to SEQ ID NO: 210193
  chr5:67617620-67617794
  hypo

SEQ ID NO: 432877 - DNA, 80 bp, Homo sapiens; identical to SEQ ID NO: 254856
  chr5:67708116-67708196
  hypo

SEQ ID NO: 432878 - DNA, 36 bp, Homo sapiens; identical to SEQ ID NO: 210196
  chr5:67753366-67753402
  hypo

SEQ ID NO: 432879 - DNA, 160 bp, Homo sapiens; identical to SEQ ID NO: 254860
  chr5:67771773-67771933
  hypo

SEQ ID NO: 432880 - DNA, 42 bp, Homo sapiens; identical to SEQ ID NO: 254861
  chr5:67845323-67845365
  hypo

SEQ ID NO: 432881 - DNA, 156 bp, Homo sapiens; identical to SEQ ID NO: 254862
  chr5:68238653-68238809
  hypo

SEQ ID NO: 432882 - DNA, 43 bp, Homo sapiens; identical to SEQ ID NO: 254864
  chr5:68363914-68363957
  hypo

SEQ ID NO: 432883 - DNA, 156 bp, Homo sapiens; identical to SEQ ID NO: 304488
  chr5:68370825-68370981
  hypo

SEQ ID NO: 432884 - DNA, 181 bp, Homo sapiens; identical to SEQ ID NO: 304489
  chr5:68371030-68371211
  hypo

SEQ ID NO: 432885 - DNA, 127 bp, Homo sapiens; identical to SEQ ID NO: 254868
  chr5:70945906-70946033
  hypo

SEQ ID NO: 432886 - DNA, 107 bp, Homo sapiens; identical to SEQ ID NO: 254869
  chr5:70958355-70958462
  hypo

SEQ ID NO: 432887 - DNA, 319 bp, Homo sapiens; identical to SEQ ID NO: 254870
  chr5:70994055-70994374
  hypo

SEQ ID NO: 432888 - DNA, 37 bp, Homo sapiens; identical to SEQ ID NO: 254871
  chr5:71313585-71313622
  hypo

SEQ ID NO: 432889 - DNA, 39 bp, Homo sapiens; identical to SEQ ID NO: 210197
  chr5:71780024-71780063
  hypo

SEQ ID NO: 432890 - DNA, 269 bp, Homo sapiens; identical to SEQ ID NO: 254874
  chr5:72197881-72198150
  hypo

SEQ ID NO: 432891 - DNA, 45 bp, Homo sapiens; identical to SEQ ID NO: 254876
  chr5:72242483-72242528
  hypo

SEQ ID NO: 432892 - DNA, 252 bp, Homo sapiens; identical to SEQ ID NO: 254877
  chr5:72292520-72292772
  hypo

SEQ ID NO: 432893 - DNA, 181 bp, Homo sapiens; identical to SEQ ID NO: 210198
  chr5:72388279-72388460
  hypo

SEQ ID NO: 432894 - DNA, 1143 bp, Homo sapiens; identical to SEQ ID NO: 199891
  chr5:72921423-72922566
  hypo

SEQ ID NO: 432895 - DNA, 196 bp, Homo sapiens; identical to SEQ ID NO: 254879
  chr5:72980654-72980850
  hypo

SEQ ID NO: 432896 - DNA, 194 bp, Homo sapiens; identical to SEQ ID NO: 210201
  chr5:73081113-73081307
  hypo

SEQ ID NO: 432897 - DNA, 38 bp, Homo sapiens; identical to SEQ ID NO: 254881
  chr5:73102526-73102564
  hypo

SEQ ID NO: 432898 - DNA, 41 bp, Homo sapiens; identical to SEQ ID NO: 254882
  chr5:73192671-73192712
  hypo

SEQ ID NO: 432899 - DNA, 136 bp, Homo sapiens; identical to SEQ ID NO: 254884
  chr5:73228902-73229038
  hypo

SEQ ID NO: 432900 - DNA, 45 bp, Homo sapiens; identical to SEQ ID NO: 210203
  chr5:73247793-73247838
  hypo

SEQ ID NO: 432901 - DNA, 176 bp, Homo sapiens; identical to SEQ ID NO: 254886
  chr5:73623643-73623819
  hypo

SEQ ID NO: 432902 - DNA, 178 bp, Homo sapiens; identical to SEQ ID NO: 210204
  chr5:73627934-73628112
  hypo

SEQ ID NO: 432903 - DNA, 35 bp, Homo sapiens; identical to SEQ ID NO: 210205
  chr5:73665486-73665521
  hypo

SEQ ID NO: 432904 - DNA, 31 bp, Homo sapiens; identical to SEQ ID NO: 254889
  chr5:73687766-73687797
  hypo

SEQ ID NO: 432905 - DNA, 191 bp, Homo sapiens; identical to SEQ ID NO: 254890
  chr5:73855841-73856032
  hypo

SEQ ID NO: 432906 - DNA, 264 bp, Homo sapiens; identical to SEQ ID NO: 199893
  chr5:73935724-73935988
  hypo

SEQ ID NO: 432907 - DNA, 516 bp, Homo sapiens; identical to SEQ ID NO: 41639
  chr5:73936032-73936548
  hypo

SEQ ID NO: 432908 - DNA, 285 bp, Homo sapiens; identical to SEQ ID NO: 283039
  chr5:73936774-73937059
  hypo

SEQ ID NO: 432909 - DNA, 103 bp, Homo sapiens; identical to SEQ ID NO: 199897
  chr5:74162616-74162719
  hypo

SEQ ID NO: 432910 - DNA, 260 bp, Homo sapiens; identical to SEQ ID NO: 199898
  chr5:74348635-74348895
  hypo

SEQ ID NO: 432911 - DNA, 222 bp, Homo sapiens; identical to SEQ ID NO: 418117
  chr5:74348906-74349128
  hypo

SEQ ID NO: 432912 - DNA, 39 bp, Homo sapiens; identical to SEQ ID NO: 254892
  chr5:74628696-74628735
  hypo

SEQ ID NO: 432913 - DNA, 37 bp, Homo sapiens; identical to SEQ ID NO: 210213
  chr5:74652649-74652686
  hypo

SEQ ID NO: 432914 - DNA, 89 bp, Homo sapiens; identical to SEQ ID NO: 254895
  chr5:74753808-74753897
  hypo

SEQ ID NO: 432915 - DNA, 37 bp, Homo sapiens; identical to SEQ ID NO: 254897
  chr5:76159635-76159672
  hypo

SEQ ID NO: 432916 - DNA, 202 bp, Homo sapiens; identical to SEQ ID NO: 283063
  chr5:76250150-76250352
  hypo

SEQ ID NO: 432917 - DNA, 36 bp, Homo sapiens
  chr5:76327377-76327413
  hypo
gtttccaagatggtaggggcaaatgttaatacttaa

SEQ ID NO: 432918 - DNA, 37 bp, Homo sapiens; identical to SEQ ID NO: 210218
  chr5:76328105-76328142
  hypo

SEQ ID NO: 432919 - DNA, 169 bp, Homo sapiens; identical to SEQ ID NO: 210219
  chr5:76372312-76372481
  hypo

SEQ ID NO: 432920 - DNA, 197 bp, Homo sapiens; identical to SEQ ID NO: 254901
  chr5:76399986-76400183
  hypo

SEQ ID NO: 432921 - DNA, 32 bp, Homo sapiens; identical to SEQ ID NO: 254902
  chr5:76738423-76738455
  hypo

SEQ ID NO: 432922 - DNA, 118 bp, Homo sapiens; identical to SEQ ID NO: 254903
  chr5:77288993-77289111
  hypo

SEQ ID NO: 432923 - DNA, 108 bp, Homo sapiens; identical to SEQ ID NO: 254906
  chr5:77300047-77300155
  hypo

SEQ ID NO: 432924 - DNA, 93 bp, Homo sapiens; identical to SEQ ID NO: 254908
  chr5:77655148-77655241
  hypo

SEQ ID NO: 432925 - DNA, 111 bp, Homo sapiens; identical to SEQ ID NO: 210222
  chr5:77816710-77816821
  hypo

SEQ ID NO: 432926 - DNA, 34 bp, Homo sapiens; identical to SEQ ID NO: 210223
  chr5:77848659-77848693
  hypo

SEQ ID NO: 432927 - DNA, 85 bp, Homo sapiens; identical to SEQ ID NO: 254912
  chr5:77912255-77912340
  hypo

SEQ ID NO: 432928 - DNA, 180 bp, Homo sapiens; identical to SEQ ID NO: 254913
  chr5:78068862-78069042
  hypo

SEQ ID NO: 432929 - DNA, 139 bp, Homo sapiens; identical to SEQ ID NO: 210226
  chr5:78264451-78264590
  hypo

SEQ ID NO: 432930 - DNA, 45 bp, Homo sapiens; identical to SEQ ID NO: 254917
  chr5:78445631-78445676
  hypo

SEQ ID NO: 432931 - DNA, 80 bp, Homo sapiens; identical to SEQ ID NO: 210228
  chr5:78469179-78469259
  hypo

SEQ ID NO: 432932 - DNA, 43 bp, Homo sapiens; identical to SEQ ID NO: 254919
  chr5:78535318-78535361
  hypo

SEQ ID NO: 432933 - DNA, 36 bp, Homo sapiens; identical to SEQ ID NO: 210229
  chr5:78882208-78882244
  hypo

SEQ ID NO: 432934 - DNA, 37 bp, Homo sapiens; identical to SEQ ID NO: 304560
  chr5:78985059-78985096
  hypo

SEQ ID NO: 432935 - DNA, 214 bp, Homo sapiens; identical to SEQ ID NO: 254925
  chr5:78986242-78986456
  hypo

SEQ ID NO: 432936 - DNA, 95 bp, Homo sapiens; identical to SEQ ID NO: 254927
  chr5:79393212-79393307
  hypo

SEQ ID NO: 432937 - DNA, 86 bp, Homo sapiens; identical to SEQ ID NO: 254928
  chr5:79438045-79438131
  hypo

SEQ ID NO: 432938 - DNA, 38 bp, Homo sapiens; identical to SEQ ID NO: 254929
  chr5:79448991-79449029
  hypo

SEQ ID NO: 432939 - DNA, 118 bp, Homo sapiens; identical to SEQ ID NO: 210231
  chr5:79498689-79498807
  hypo

SEQ ID NO: 432940 - DNA, 291 bp, Homo sapiens; identical to SEQ ID NO: 283086
  chr5:79551152-79551443
  hypo

SEQ ID NO: 432941 - DNA, 78 bp, Homo sapiens; identical to SEQ ID NO: 254931
  chr5:79552929-79553007
  hypo

SEQ ID NO: 432942 - DNA, 39 bp, Homo sapiens; identical to SEQ ID NO: 254935
  chr5:79786095-79786134
  hypo

SEQ ID NO: 432943 - DNA, 447 bp, Homo sapiens; identical to SEQ ID NO: 254937
  chr5:79974517-79974964
  hypo

SEQ ID NO: 432944 - DNA, 163 bp, Homo sapiens; identical to SEQ ID NO: 210236
  chr5:79986401-79986564
  hypo

SEQ ID NO: 432945 - DNA, 80 bp, Homo sapiens; identical to SEQ ID NO: 210237
  chr5:80076659-80076739
  hypo

SEQ ID NO: 432946 - DNA, 48 bp, Homo sapiens; identical to SEQ ID NO: 210238
  chr5:80550827-80550875
  hypo

SEQ ID NO: 432947 - DNA, 183 bp, Homo sapiens; identical to SEQ ID NO: 210239
  chr5:80652824-80653007
  hypo

SEQ ID NO: 432948 - DNA, 101 bp, Homo sapiens; identical to SEQ ID NO: 254942
  chr5:80717292-80717393
  hypo

SEQ ID NO: 432949 - DNA, 34 bp, Homo sapiens; identical to SEQ ID NO: 254943
  chr5:80728272-80728306
  hypo

SEQ ID NO: 432950 - DNA, 152 bp, Homo sapiens; identical to SEQ ID NO: 254944
  chr5:81058593-81058745
  hypo

SEQ ID NO: 432951 - DNA, 42 bp, Homo sapiens; identical to SEQ ID NO: 254945
  chr5:81067109-81067151
  hypo

SEQ ID NO: 432952 - DNA, 140 bp, Homo sapiens; identical to SEQ ID NO: 210240
  chr5:81570369-81570509
  hypo

SEQ ID NO: 432953 - DNA, 75 bp, Homo sapiens; identical to SEQ ID NO: 254947
  chr5:82808025-82808100
  hypo

SEQ ID NO: 432954 - DNA, 60 bp, Homo sapiens; identical to SEQ ID NO: 254948
  chr5:83095505-83095565
  hypo

SEQ ID NO: 432955 - DNA, 550 bp, Homo sapiens; identical to SEQ ID NO: 254949
  chr5:86547819-86548369
  hypo

SEQ ID NO: 432956 - DNA, 31 bp, Homo sapiens; identical to SEQ ID NO: 254951
  chr5:88097575-88097606
  hypo

SEQ ID NO: 432957 - DNA, 36 bp, Homo sapiens; identical to SEQ ID NO: 254952
  chr5:88139904-88139940
  hypo

SEQ ID NO: 432958 - DNA, 38 bp, Homo sapiens; identical to SEQ ID NO: 254953
  chr5:88161980-88162018
  hypo

SEQ ID NO: 432959 - DNA, 264 bp, Homo sapiens; identical to SEQ ID NO: 254954
  chr5:88233030-88233294
  hypo

SEQ ID NO: 432960 - DNA, 34 bp, Homo sapiens; identical to SEQ ID NO: 210242
  chr5:90257315-90257349
  hypo

SEQ ID NO: 432961 - DNA, 35 bp, Homo sapiens; identical to SEQ ID NO: 254958
  chr5:93032774-93032809
  hypo

SEQ ID NO: 432962 - DNA, 100 bp, Homo sapiens; identical to SEQ ID NO: 254959
  chr5:93076896-93076996
  hypo

SEQ ID NO: 432963 - DNA, 144 bp, Homo sapiens; identical to SEQ ID NO: 210243
  chr5:93077276-93077420
  hypo

SEQ ID NO: 432964 - DNA, 157 bp, Homo sapiens; identical to SEQ ID NO: 254961
  chr5:93143746-93143903
  hypo

SEQ ID NO: 432965 - DNA, 38 bp, Homo sapiens; identical to SEQ ID NO: 210244
  chr5:94762453-94762491
  hypo

SEQ ID NO: 432966 - DNA, 37 bp, Homo sapiens; identical to SEQ ID NO: 210245
  chr5:94762731-94762768
  hypo

SEQ ID NO: 432967 - DNA, 86 bp, Homo sapiens; identical to SEQ ID NO: 254964
  chr5:94776919-94777005
  hypo

SEQ ID NO: 432968 - DNA, 94 bp, Homo sapiens; identical to SEQ ID NO: 210246
  chr5:94981773-94981867
  hypo

SEQ ID NO: 432969 - DNA, 277 bp, Homo sapiens; identical to SEQ ID NO: 222646
  chr5:95066554-95066831
  hypo

SEQ ID NO: 432970 - DNA, 155 bp, Homo sapiens; identical to SEQ ID NO: 254967
  chr5:95213826-95213981
  hypo

SEQ ID NO: 432971 - DNA, 32 bp, Homo sapiens; identical to SEQ ID NO: 210247
  chr5:95290421-95290453
  hypo

SEQ ID NO: 432972 - DNA, 98 bp, Homo sapiens; identical to SEQ ID NO: 210248
  chr5:95515382-95515480
  hypo

SEQ ID NO: 432973 - DNA, 33 bp, Homo sapiens; identical to SEQ ID NO: 210253
  chr5:96173522-96173555
  hypo

SEQ ID NO: 432974 - DNA, 60 bp, Homo sapiens; identical to SEQ ID NO: 254975
  chr5:96378907-96378967
  hypo

SEQ ID NO: 432975 - DNA, 55 bp, Homo sapiens; identical to SEQ ID NO: 254976
  chr5:96397786-96397841
  hypo

SEQ ID NO: 432976 - DNA, 42 bp, Homo sapiens; identical to SEQ ID NO: 254977
  chr5:96742642-96742684
  hypo

SEQ ID NO: 432977 - DNA, 82 bp, Homo sapiens; identical to SEQ ID NO: 254978
  chr5:97912104-97912186
  hypo

SEQ ID NO: 432978 - DNA, 447 bp, Homo sapiens; identical to SEQ ID NO: 199958
  chr5:98109213-98109660
  hypo

SEQ ID NO: 432979 - DNA, 695 bp, Homo sapiens; identical to SEQ ID NO: 283177
  chr5:98109927-98110622
  hypo

SEQ ID NO: 432980 - DNA, 76 bp, Homo sapiens; identical to SEQ ID NO: 210258
  chr5:98242969-98243045
  hypo

SEQ ID NO: 432981 - DNA, 39 bp, Homo sapiens; identical to SEQ ID NO: 254982
  chr5:100247924-100247963
  hypo

SEQ ID NO: 432982 - DNA, 518 bp, Homo sapiens; identical to SEQ ID NO: 222651
  chr5:102201407-102201925
  hypo

SEQ ID NO: 432983 - DNA, 80 bp, Homo sapiens; identical to SEQ ID NO: 254983
  chr5:103289777-103289857
  hypo

SEQ ID NO: 432984 - DNA, 102 bp, Homo sapiens; identical to SEQ ID NO: 199971
  chr5:107007963-107008065
  hypo

SEQ ID NO: 432985 - DNA, 206 bp, Homo sapiens; identical to SEQ ID NO: 199973
  chr5:107359033-107359239
  hypo

SEQ ID NO: 432986 - DNA, 215 bp, Homo sapiens; identical to SEQ ID NO: 254985
  chr5:108586386-108586601
  hypo

SEQ ID NO: 432987 - DNA, 38 bp, Homo sapiens; identical to SEQ ID NO: 210265
  chr5:108730038-108730076
  hypo

SEQ ID NO: 432988 - DNA, 43 bp, Homo sapiens; identical to SEQ ID NO: 254987
  chr5:109024574-109024617
  hypo

SEQ ID NO: 432989 - DNA, 53 bp, Homo sapiens; identical to SEQ ID NO: 418203
  chr5:109024677-109024730
  hypo

SEQ ID NO: 432990 - DNA, 41 bp, Homo sapiens; identical to SEQ ID NO: 254988
  chr5:109032071-109032112
  hypo

SEQ ID NO: 432991 - DNA, 42 bp, Homo sapiens; identical to SEQ ID NO: 254989
  chr5:109040408-109040450
  hypo

SEQ ID NO: 432992 - DNA, 289 bp, Homo sapiens; identical to SEQ ID NO: 210267
  chr5:109162076-109162365
  hypo

SEQ ID NO: 432993 - DNA, 1028 bp, Homo sapiens; identical to SEQ ID NO: 111805
  chr5:110074272-110075300
  hypo

SEQ ID NO: 432994 - DNA, 279 bp, Homo sapiens; identical to SEQ ID NO: 418206
  chr5:110848376-110848655
  hypo

SEQ ID NO: 432995 - DNA, 122 bp, Homo sapiens; identical to SEQ ID NO: 210270
  chr5:111065740-111065862
  hypo

SEQ ID NO: 432996 - DNA, 78 bp, Homo sapiens; identical to SEQ ID NO: 283200
  chr5:111093930-111094008
  hypo

SEQ ID NO: 432997 - DNA, 123 bp, Homo sapiens; identical to SEQ ID NO: 254992
  chr5:111675709-111675832
  hypo

SEQ ID NO: 432998 - DNA, 180 bp, Homo sapiens; identical to SEQ ID NO: 283224
  chr5:114938164-114938344
  hypo

SEQ ID NO: 432999 - DNA, 241 bp, Homo sapiens; identical to SEQ ID NO: 210272
  chr5:115570379-115570620
  hypo

SEQ ID NO: 433000 - DNA, 100 bp, Homo sapiens; identical to SEQ ID NO: 254994
  chr5:115717687-115717787
  hypo

SEQ ID NO: 433001 - DNA, 42 bp, Homo sapiens; identical to SEQ ID NO: 391303
  chr5:115783684-115783726
  hypo

SEQ ID NO: 433002 - DNA, 61 bp, Homo sapiens; identical to SEQ ID NO: 254996
  chr5:115824596-115824657
  hypo

SEQ ID NO: 433003 - DNA, 38 bp, Homo sapiens; identical to SEQ ID NO: 254997
  chr5:116177882-116177920
  hypo

SEQ ID NO: 433004 - DNA, 33 bp, Homo sapiens; identical to SEQ ID NO: 254998
  chr5:116238695-116238728
  hypo

SEQ ID NO: 433005 - DNA, 156 bp, Homo sapiens; identical to SEQ ID NO: 210274
  chr5:118309319-118309475
  hypo

SEQ ID NO: 433006 - DNA, 34 bp, Homo sapiens; identical to SEQ ID NO: 210276
  chr5:118717629-118717663
  hypo

SEQ ID NO: 433007 - DNA, 41 bp, Homo sapiens; identical to SEQ ID NO: 255002
  chr5:119517817-119517858
  hypo

SEQ ID NO: 433008 - DNA, 131 bp, Homo sapiens; identical to SEQ ID NO: 255003
  chr5:121187431-121187562
  hypo

SEQ ID NO: 433009 - DNA, 149 bp, Homo sapiens; identical to SEQ ID NO: 210277
  chr5:121187995-121188144
  hypo

SEQ ID NO: 433010 - DNA, 165 bp, Homo sapiens; identical to SEQ ID NO: 255005
  chr5:121874457-121874622
  hypo

SEQ ID NO: 433011 - DNA, 203 bp, Homo sapiens; identical to SEQ ID NO: 255006
  chr5:121906794-121906997
  hypo

SEQ ID NO: 433012 - DNA, 41 bp, Homo sapiens; identical to SEQ ID NO: 255007
  chr5:122150760-122150801
  hypo

SEQ ID NO: 433013 - DNA, 54 bp, Homo sapiens; identical to SEQ ID NO: 210278
  chr5:122152701-122152755
  hypo

SEQ ID NO: 433014 - DNA, 38 bp, Homo sapiens; identical to SEQ ID NO: 255010
  chr5:122189087-122189125
  hypo

SEQ ID NO: 433015 - DNA, 31 bp, Homo sapiens; identical to SEQ ID NO: 255011
  chr5:122906339-122906370
  hypo

SEQ ID NO: 433016 - DNA, 88 bp, Homo sapiens; identical to SEQ ID NO: 255012
  chr5:123929400-123929488
  hypo

SEQ ID NO: 433017 - DNA, 298 bp, Homo sapiens; identical to SEQ ID NO: 222668
  chr5:123987437-123987735
  hypo

SEQ ID NO: 433018 - DNA, 39 bp, Homo sapiens; identical to SEQ ID NO: 210283
  chr5:125911666-125911705
  hypo

SEQ ID NO: 433019 - DNA, 200 bp, Homo sapiens; identical to SEQ ID NO: 210284
  chr5:126073559-126073759
  hypo

SEQ ID NO: 433020 - DNA, 152 bp, Homo sapiens; identical to SEQ ID NO: 210285
  chr5:126193333-126193485
  hypo

SEQ ID NO: 433021 - DNA, 40 bp, Homo sapiens; identical to SEQ ID NO: 255019
  chr5:126479575-126479615
  hypo

SEQ ID NO: 433022 - DNA, 42 bp, Homo sapiens; identical to SEQ ID NO: 255020
  chr5:127808517-127808559
  hypo

SEQ ID NO: 433023 - DNA, 298 bp, Homo sapiens; identical to SEQ ID NO: 255021
  chr5:130330814-130331112
  hypo

SEQ ID NO: 433024 - DNA, 422 bp, Homo sapiens; identical to SEQ ID NO: 255022
  chr5:130331393-130331815
  hypo

SEQ ID NO: 433025 - DNA, 97 bp, Homo sapiens; identical to SEQ ID NO: 210290
  chr5:130636510-130636607
  hypo

SEQ ID NO: 433026 - DNA, 65 bp, Homo sapiens; identical to SEQ ID NO: 210291
  chr5:130661706-130661771
  hypo

SEQ ID NO: 433027 - DNA, 42 bp, Homo sapiens; identical to SEQ ID NO: 210292
  chr5:130723958-130724000
  hypo

SEQ ID NO: 433028 - DNA, 43 bp, Homo sapiens; identical to SEQ ID NO: 255026
  chr5:130951290-130951333
  hypo

SEQ ID NO: 433029 - DNA, 55 bp, Homo sapiens; identical to SEQ ID NO: 200023
  chr5:130970375-130970430
  hypo

SEQ ID NO: 433030 - DNA, 197 bp, Homo sapiens; identical to SEQ ID NO: 200025
  chr5:131133198-131133395
  hypo

SEQ ID NO: 433031 - DNA, 40 bp, Homo sapiens; identical to SEQ ID NO: 255028
  chr5:131133935-131133975
  hypo

SEQ ID NO: 433032 - DNA, 55 bp, Homo sapiens; identical to SEQ ID NO: 255029
  chr5:131410606-131410661
  hypo

SEQ ID NO: 433033 - DNA, 82 bp, Homo sapiens; identical to SEQ ID NO: 255030
  chr5:131517613-131517695
  hypo

SEQ ID NO: 433034 - DNA, 278 bp, Homo sapiens; identical to SEQ ID NO: 41939
  chr5:131563558-131563836
  hypo

SEQ ID NO: 433035 - DNA, 57 bp, Homo sapiens; identical to SEQ ID NO: 210298
  chr5:131608260-131608317
  hypo

SEQ ID NO: 433036 - DNA, 108 bp, Homo sapiens; identical to SEQ ID NO: 255032
  chr5:131608347-131608455
  hypo

SEQ ID NO: 433037 - DNA, 131 bp, Homo sapiens; identical to SEQ ID NO: 210300
  chr5:131609888-131610019
  hypo

SEQ ID NO: 433038 - DNA, 60 bp, Homo sapiens; identical to SEQ ID NO: 255034
  chr5:131628975-131629035
  hypo

SEQ ID NO: 433039 - DNA, 52 bp, Homo sapiens; identical to SEQ ID NO: 255035
  chr5:131629083-131629135
  hypo

SEQ ID NO: 433040 - DNA, 136 bp, Homo sapiens; identical to SEQ ID NO: 255036
  chr5:131701219-131701355
  hypo

SEQ ID NO: 433041 - DNA, 179 bp, Homo sapiens; identical to SEQ ID NO: 255037
  chr5:131712816-131712995
  hypo

SEQ ID NO: 433042 - DNA, 131 bp, Homo sapiens; identical to SEQ ID NO: 210301
  chr5:131725264-131725395
  hypo

SEQ ID NO: 433043 - DNA, 56 bp, Homo sapiens; identical to SEQ ID NO: 304706
  chr5:131787118-131787174
  hypo

SEQ ID NO: 433044 - DNA, 91 bp, Homo sapiens; identical to SEQ ID NO: 304707
  chr5:131787204-131787295
  hypo

SEQ ID NO: 433045 - DNA, 37 bp, Homo sapiens; identical to SEQ ID NO: 255040
  chr5:131859639-131859676
  hypo

SEQ ID NO: 433046 - DNA, 101 bp, Homo sapiens; identical to SEQ ID NO: 210303
  chr5:131982464-131982565
  hypo

SEQ ID NO: 433047 - DNA, 45 bp, Homo sapiens; identical to SEQ ID NO: 255042
  chr5:131991177-131991222
  hypo

SEQ ID NO: 433048 - DNA, 159 bp, Homo sapiens; identical to SEQ ID NO: 210304
  chr5:132001670-132001829
  hypo

SEQ ID NO: 433049 - DNA, 316 bp, Homo sapiens; identical to SEQ ID NO: 255044
  chr5:132015482-132015798
  hypo

SEQ ID NO: 433050 - DNA, 219 bp, Homo sapiens; identical to SEQ ID NO: 255046
  chr5:132095767-132095986
  hypo

SEQ ID NO: 433051 - DNA, 68 bp, Homo sapiens; identical to SEQ ID NO: 210306
  chr5:132167162-132167230
  hypo

SEQ ID NO: 433052 - DNA, 160 bp, Homo sapiens; identical to SEQ ID NO: 255048
  chr5:132167447-132167607
  hypo

SEQ ID NO: 433053 - DNA, 42 bp, Homo sapiens; identical to SEQ ID NO: 255050
  chr5:132585271-132585313
  hypo

SEQ ID NO: 433054 - DNA, 206 bp, Homo sapiens; identical to SEQ ID NO: 255052
  chr5:132654500-132654706
  hypo

SEQ ID NO: 433055 - DNA, 197 bp, Homo sapiens; identical to SEQ ID NO: 255053
  chr5:132664450-132664647
  hypo

SEQ ID NO: 433056 - DNA, 92 bp, Homo sapiens; identical to SEQ ID NO: 210310
  chr5:133240405-133240497
  hypo

SEQ ID NO: 433057 - DNA, 42 bp, Homo sapiens; identical to SEQ ID NO: 255055
  chr5:133280965-133281007
  hypo

SEQ ID NO: 433058 - DNA, 190 bp, Homo sapiens; identical to SEQ ID NO: 255056
  chr5:133362904-133363094
  hypo

SEQ ID NO: 433059 - DNA, 100 bp, Homo sapiens; identical to SEQ ID NO: 255057
  chr5:133422878-133422978
  hypo

SEQ ID NO: 433060 - DNA, 198 bp, Homo sapiens; identical to SEQ ID NO: 210311
  chr5:133456100-133456298
  hypo

SEQ ID NO: 433061 - DNA, 90 bp, Homo sapiens; identical to SEQ ID NO: 210312
  chr5:133457288-133457378
  hypo

SEQ ID NO: 433062 - DNA, 141 bp, Homo sapiens; identical to SEQ ID NO: 255060
  chr5:133458996-133459137
  hypo

SEQ ID NO: 433063 - DNA, 207 bp, Homo sapiens; identical to SEQ ID NO: 210313
  chr5:133459375-133459582
  hypo

SEQ ID NO: 433064 - DNA, 77 bp, Homo sapiens; identical to SEQ ID NO: 210314
  chr5:133464194-133464271
  hypo

SEQ ID NO: 433065 - DNA, 207 bp, Homo sapiens; identical to SEQ ID NO: 210315
  chr5:133465710-133465917
  hypo

SEQ ID NO: 433066 - DNA, 110 bp, Homo sapiens; identical to SEQ ID NO: 210316
  chr5:133469215-133469325
  hypo

SEQ ID NO: 433067 - DNA, 379 bp, Homo sapiens; identical to SEQ ID NO: 255065
  chr5:133703366-133703745
  hypo

SEQ ID NO: 433068 - DNA, 32 bp, Homo sapiens; identical to SEQ ID NO: 255066
  chr5:133730848-133730880
  hypo

SEQ ID NO: 433069 - DNA, 240 bp, Homo sapiens; identical to SEQ ID NO: 255067
  chr5:133819200-133819440
  hypo

SEQ ID NO: 433070 - DNA, 266 bp, Homo sapiens; identical to SEQ ID NO: 255069
  chr5:133845348-133845614
  hypo

SEQ ID NO: 433071 - DNA, 61 bp, Homo sapiens; identical to SEQ ID NO: 255070
  chr5:133887785-133887846
  hypo

SEQ ID NO: 433072 - DNA, 318 bp, Homo sapiens; identical to SEQ ID NO: 210319
  chr5:133907414-133907732
  hypo

SEQ ID NO: 433073 - DNA, 135 bp, Homo sapiens; identical to SEQ ID NO: 255072
  chr5:133914459-133914594
  hypo

SEQ ID NO: 433074 - DNA, 47 bp, Homo sapiens; identical to SEQ ID NO: 255073
  chr5:134099605-134099652
  hypo

SEQ ID NO: 433075 - DNA, 91 bp, Homo sapiens; identical to SEQ ID NO: 255074
  chr5:134202026-134202117
  hypo

SEQ ID NO: 433076 - DNA, 60 bp, Homo sapiens; identical to SEQ ID NO: 304747
  chr5:134242242-134242302
  hypo

SEQ ID NO: 433077 - DNA, 146 bp, Homo sapiens; identical to SEQ ID NO: 255076
  chr5:134253080-134253226
  hypo

SEQ ID NO: 433078 - DNA, 39 bp, Homo sapiens; identical to SEQ ID NO: 210320
  chr5:134256617-134256656
  hypo

SEQ ID NO: 433079 - DNA, 85 bp, Homo sapiens; identical to SEQ ID NO: 255078
  chr5:134273246-134273331
  hypo

SEQ ID NO: 433080 - DNA, 166 bp, Homo sapiens; identical to SEQ ID NO: 210322
  chr5:134303558-134303724
  hypo

SEQ ID NO: 433081 - DNA, 81 bp, Homo sapiens; identical to SEQ ID NO: 255082
  chr5:134411890-134411971
  hypo

SEQ ID NO: 433082 - DNA, 223 bp, Homo sapiens; identical to SEQ ID NO: 210324
  chr5:134436703-134436926
  hypo

SEQ ID NO: 433083 - DNA, 186 bp, Homo sapiens; identical to SEQ ID NO: 210325
  chr5:134453700-134453886
  hypo

SEQ ID NO: 433084 - DNA, 42 bp, Homo sapiens; identical to SEQ ID NO: 255085
  chr5:134462416-134462458
  hypo

SEQ ID NO: 433085 - DNA, 219 bp, Homo sapiens; identical to SEQ ID NO: 200039
  chr5:134463605-134463824
  hypo

SEQ ID NO: 433086 - DNA, 154 bp, Homo sapiens; identical to SEQ ID NO: 210327
  chr5:134513710-134513864
  hypo

SEQ ID NO: 433087 - DNA, 84 bp, Homo sapiens; identical to SEQ ID NO: 210328
  chr5:134582958-134583042
  hypo

SEQ ID NO: 433088 - DNA, 76 bp, Homo sapiens; identical to SEQ ID NO: 210329
  chr5:134583162-134583238
  hypo

SEQ ID NO: 433089 - DNA, 204 bp, Homo sapiens; identical to SEQ ID NO: 255090
  chr5:134585645-134585849
  hypo

SEQ ID NO: 433090 - DNA, 151 bp, Homo sapiens; identical to SEQ ID NO: 210330
  chr5:134608288-134608439
  hypo

SEQ ID NO: 433091 - DNA, 152 bp, Homo sapiens; identical to SEQ ID NO: 255093
  chr5:134666319-134666471
  hypo

SEQ ID NO: 433092 - DNA, 38 bp, Homo sapiens; identical to SEQ ID NO: 210331
  chr5:134673488-134673526
  hypo

SEQ ID NO: 433093 - DNA, 237 bp, Homo sapiens; identical to SEQ ID NO: 255096
  chr5:135120902-135121139
  hypo

SEQ ID NO: 433094 - DNA, 230 bp, Homo sapiens; identical to SEQ ID NO: 200047
  chr5:135468336-135468566
  hypo

SEQ ID NO: 433095 - DNA, 749 bp, Homo sapiens; identical to SEQ ID NO: 210334
  chr5:135692313-135693062
  hypo

SEQ ID NO: 433096 - DNA, 34 bp, Homo sapiens; identical to SEQ ID NO: 210335
  chr5:135989645-135989679
  hypo

SEQ ID NO: 433097 - DNA, 35 bp, Homo sapiens; identical to SEQ ID NO: 210337
  chr5:137470416-137470451
  hypo

SEQ ID NO: 433098 - DNA, 81 bp, Homo sapiens; identical to SEQ ID NO: 210338
  chr5:137529621-137529702
  hypo

SEQ ID NO: 433099 - DNA, 220 bp, Homo sapiens; identical to SEQ ID NO: 255103
  chr5:137721787-137722007
  hypo

SEQ ID NO: 433100 - DNA, 77 bp, Homo sapiens; identical to SEQ ID NO: 255104
  chr5:137727077-137727154
  hypo

SEQ ID NO: 433101 - DNA, 285 bp, Homo sapiens; identical to SEQ ID NO: 70203
  chr5:137727661-137727946
  hypo

SEQ ID NO: 433102 - DNA, 161 bp, Homo sapiens; identical to SEQ ID NO: 283341
  chr5:137774493-137774654
  hypo

SEQ ID NO: 433103 - DNA, 192 bp, Homo sapiens; identical to SEQ ID NO: 222693
  chr5:137774864-137775056
  hypo

SEQ ID NO: 433104 - DNA, 141 bp, Homo sapiens; identical to SEQ ID NO: 255106
  chr5:137791022-137791163
  hypo

SEQ ID NO: 433105 - DNA, 95 bp, Homo sapiens; identical to SEQ ID NO: 222694
  chr5:137801267-137801362
  hypo

SEQ ID NO: 433106 - DNA, 134 bp, Homo sapiens; identical to SEQ ID NO: 255107
  chr5:137802660-137802794
  hypo

SEQ ID NO: 433107 - DNA, 466 bp, Homo sapiens; identical to SEQ ID NO: 210339
  chr5:137803075-137803541
  hypo

SEQ ID NO: 433108 - DNA, 42 bp, Homo sapiens; identical to SEQ ID NO: 255109
  chr5:137824665-137824707
  hypo

SEQ ID NO: 433109 - DNA, 96 bp, Homo sapiens; identical to SEQ ID NO: 210340
  chr5:137865653-137865749
  hypo

SEQ ID NO: 433110 - DNA, 64 bp, Homo sapiens; identical to SEQ ID NO: 210341
  chr5:137911812-137911876
  hypo

SEQ ID NO: 433111 - DNA, 101 bp, Homo sapiens; identical to SEQ ID NO: 210343
  chr5:137945777-137945878
  hypo

SEQ ID NO: 433112 - DNA, 81 bp, Homo sapiens; identical to SEQ ID NO: 200054
  chr5:138088596-138088677
  hypo

SEQ ID NO: 433113 - DNA, 302 bp, Homo sapiens; identical to SEQ ID NO: 283348
  chr5:138089642-138089944
  hypo

SEQ ID NO: 433114 - DNA, 35 bp, Homo sapiens; identical to SEQ ID NO: 255115
  chr5:138101350-138101385
  hypo

SEQ ID NO: 433115 - DNA, 92 bp, Homo sapiens; identical to SEQ ID NO: 210346
  chr5:138119912-138120004
  hypo

SEQ ID NO: 433116 - DNA, 33 bp, Homo sapiens; identical to SEQ ID NO: 210347
  chr5:138179955-138179988
  hypo

SEQ ID NO: 433117 - DNA, 92 bp, Homo sapiens; identical to SEQ ID NO: 255118
  chr5:138268302-138268394
  hypo

SEQ ID NO: 433118 - DNA, 61 bp, Homo sapiens; identical to SEQ ID NO: 304800
  chr5:138273756-138273817
  hypo

SEQ ID NO: 433119 - DNA, 390 bp, Homo sapiens; identical to SEQ ID NO: 304801
  chr5:138273854-138274244
  hypo

SEQ ID NO: 433120 - DNA, 91 bp, Homo sapiens; identical to SEQ ID NO: 255120
  chr5:138280519-138280610
  hypo

SEQ ID NO: 433121 - DNA, 292 bp, Homo sapiens; identical to SEQ ID NO: 255121
  chr5:138280640-138280932
  hypo

SEQ ID NO: 433122 - DNA, 77 bp, Homo sapiens; identical to SEQ ID NO: 255122
  chr5:138286151-138286228
  hypo

SEQ ID NO: 433123 - DNA, 67 bp, Homo sapiens; identical to SEQ ID NO: 255123
  chr5:138290872-138290939
  hypo

SEQ ID NO: 433124 - DNA, 251 bp, Homo sapiens; identical to SEQ ID NO: 255124
  chr5:138441364-138441615
  hypo

SEQ ID NO: 433125 - DNA, 120 bp, Homo sapiens; identical to SEQ ID NO: 255125
  chr5:138627523-138627643
  hypo

SEQ ID NO: 433126 - DNA, 152 bp, Homo sapiens; identical to SEQ ID NO: 255127
  chr5:138668934-138669086
  hypo

SEQ ID NO: 433127 - DNA, 43 bp, Homo sapiens; identical to SEQ ID NO: 255129
  chr5:138741278-138741321
  hypo

SEQ ID NO: 433128 - DNA, 55 bp, Homo sapiens; identical to SEQ ID NO: 210350
  chr5:138928998-138929053
  hypo

SEQ ID NO: 433129 - DNA, 33 bp, Homo sapiens; identical to SEQ ID NO: 210351
  chr5:138945975-138946008
  hypo

SEQ ID NO: 433130 - DNA, 120 bp, Homo sapiens; identical to SEQ ID NO: 255132
  chr5:138959965-138960085
  hypo

SEQ ID NO: 433131 - DNA, 1166 bp, Homo sapiens; identical to SEQ ID NO: 283354
  chr5:139016856-139018022
  hypo

SEQ ID NO: 433132 - DNA, 64 bp, Homo sapiens; identical to SEQ ID NO: 200058
  chr5:139039951-139040015
  hypo

SEQ ID NO: 433133 - DNA, 51 bp, Homo sapiens; identical to SEQ ID NO: 210354
  chr5:139060689-139060740
  hypo

SEQ ID NO: 433134 - DNA, 144 bp, Homo sapiens; identical to SEQ ID NO: 283359
  chr5:139089534-139089678
  hypo

SEQ ID NO: 433135 - DNA, 33 bp, Homo sapiens; identical to SEQ ID NO: 255134
  chr5:139091838-139091871
  hypo

SEQ ID NO: 433136 - DNA, 235 bp, Homo sapiens; identical to SEQ ID NO: 283363
  chr5:139143822-139144057
  hypo

SEQ ID NO: 433137 - DNA, 91 bp, Homo sapiens; identical to SEQ ID NO: 283367
  chr5:139283459-139283550
  hypo

SEQ ID NO: 433138 - DNA, 122 bp, Homo sapiens; identical to SEQ ID NO: 200065
  chr5:139284463-139284585
  hypo

SEQ ID NO: 433139 - DNA, 105 bp, Homo sapiens; identical to SEQ ID NO: 210358
  chr5:139632450-139632555
  hypo

SEQ ID NO: 433140 - DNA, 164 bp, Homo sapiens; identical to SEQ ID NO: 255138
  chr5:139633303-139633467
  hypo

SEQ ID NO: 433141 - DNA, 38 bp, Homo sapiens; identical to SEQ ID NO: 255139
  chr5:139640453-139640491
  hypo

SEQ ID NO: 433142 - DNA, 63 bp, Homo sapiens; identical to SEQ ID NO: 222706
  chr5:139725675-139725738
  hypo

SEQ ID NO: 433143 - DNA, 151 bp, Homo sapiens; identical to SEQ ID NO: 200068
  chr5:139725997-139726148
  hypo

SEQ ID NO: 433144 - DNA, 274 bp, Homo sapiens; identical to SEQ ID NO: 283377
  chr5:139726430-139726704
  hypo

SEQ ID NO: 433145 - DNA, 32 bp, Homo sapiens; identical to SEQ ID NO: 255140
  chr5:139945503-139945535
  hypo

SEQ ID NO: 433146 - DNA, 120 bp, Homo sapiens; identical to SEQ ID NO: 255141
  chr5:140045562-140045682
  hypo

SEQ ID NO: 433147 - DNA, 32 bp, Homo sapiens; identical to SEQ ID NO: 210360
  chr5:140088250-140088282
  hypo

SEQ ID NO: 433148 - DNA, 32 bp, Homo sapiens; identical to SEQ ID NO: 210361
  chr5:140088522-140088554
  hypo

SEQ ID NO: 433149 - DNA, 34 bp, Homo sapiens; identical to SEQ ID NO: 210362
  chr5:141002378-141002412
  hypo

SEQ ID NO: 433150 - DNA, 60 bp, Homo sapiens; identical to SEQ ID NO: 200076
  chr5:141030747-141030807
  hypo

SEQ ID NO: 433151 - DNA, 216 bp, Homo sapiens; identical to SEQ ID NO: 200077
  chr5:141030884-141031100
  hypo

SEQ ID NO: 433152 - DNA, 80 bp, Homo sapiens; identical to SEQ ID NO: 200078
  chr5:141031150-141031230
  hypo

SEQ ID NO: 433153 - DNA, 144 bp, Homo sapiens; identical to SEQ ID NO: 210366
  chr5:141051473-141051617
  hypo

SEQ ID NO: 433154 - DNA, 93 bp, Homo sapiens; identical to SEQ ID NO: 210367
  chr5:141052407-141052500
  hypo

SEQ ID NO: 433155 - DNA, 68 bp, Homo sapiens; identical to SEQ ID NO: 255148
  chr5:141072799-141072867
  hypo

SEQ ID NO: 433156 - DNA, 265 bp, Homo sapiens; identical to SEQ ID NO: 255149
  chr5:141244706-141244971
  hypo

SEQ ID NO: 433157 - DNA, 881 bp, Homo sapiens; identical to SEQ ID NO: 283402
  chr5:141257149-141258030
  hypo

SEQ ID NO: 433158 - DNA, 58 bp, Homo sapiens; identical to SEQ ID NO: 255151
  chr5:141295480-141295538
  hypo

SEQ ID NO: 433159 - DNA, 32 bp, Homo sapiens; identical to SEQ ID NO: 255153
  chr5:141468242-141468274
  hypo

SEQ ID NO: 433160 - DNA, 41 bp, Homo sapiens; identical to SEQ ID NO: 255154
  chr5:141581708-141581749
  hypo

SEQ ID NO: 433161 - DNA, 31 bp, Homo sapiens; identical to SEQ ID NO: 255155
  chr5:141610129-141610160
  hypo

SEQ ID NO: 433162 - DNA, 244 bp, Homo sapiens; identical to SEQ ID NO: 255156
  chr5:141663282-141663526
  hypo

SEQ ID NO: 433163 - DNA, 34 bp, Homo sapiens; identical to SEQ ID NO: 210370
  chr5:141674168-141674202
  hypo

SEQ ID NO: 433164 - DNA, 34 bp, Homo sapiens; identical to SEQ ID NO: 210371
  chr5:141674502-141674536
  hypo

SEQ ID NO: 433165 - DNA, 265 bp, Homo sapiens; identical to SEQ ID NO: 200082
  chr5:141704448-141704713
  hypo

SEQ ID NO: 433166 - DNA, 341 bp, Homo sapiens; identical to SEQ ID NO: 200084
  chr5:141736299-141736640
  hypo

SEQ ID NO: 433167 - DNA, 317 bp, Homo sapiens; identical to SEQ ID NO: 255159
  chr5:141788585-141788902
  hypo

SEQ ID NO: 433168 - DNA, 33 bp, Homo sapiens; identical to SEQ ID NO: 210375
  chr5:141803864-141803897
  hypo

SEQ ID NO: 433169 - DNA, 150 bp, Homo sapiens; identical to SEQ ID NO: 210376
  chr5:141850813-141850963
  hypo

SEQ ID NO: 433170 - DNA, 37 bp, Homo sapiens; identical to SEQ ID NO: 255162
  chr5:141903297-141903334
  hypo

SEQ ID NO: 433171 - DNA, 147 bp, Homo sapiens; identical to SEQ ID NO: 255163
  chr5:142170486-142170633
  hypo

SEQ ID NO: 433172 - DNA, 171 bp, Homo sapiens; identical to SEQ ID NO: 255164
  chr5:142239513-142239684
  hypo

SEQ ID NO: 433173 - DNA, 57 bp, Homo sapiens; identical to SEQ ID NO: 255165
  chr5:142259164-142259221
  hypo

SEQ ID NO: 433174 - DNA, 216 bp, Homo sapiens; identical to SEQ ID NO: 255166
  chr5:142552917-142553133
  hypo

SEQ ID NO: 433175 - DNA, 188 bp, Homo sapiens; identical to SEQ ID NO: 255167
  chr5:142623955-142624143
  hypo

SEQ ID NO: 433176 - DNA, 39 bp, Homo sapiens; identical to SEQ ID NO: 255169
  chr5:143182536-143182575
  hypo

SEQ ID NO: 433177 - DNA, 158 bp, Homo sapiens; identical to SEQ ID NO: 210380
  chr5:145379611-145379769
  hypo

SEQ ID NO: 433178 - DNA, 350 bp, Homo sapiens; identical to SEQ ID NO: 283421
  chr5:145718045-145718395
  hypo

SEQ ID NO: 433179 - DNA, 301 bp, Homo sapiens; identical to SEQ ID NO: 283422
  chr5:145718501-145718802
  hypo

SEQ ID NO: 433180 - DNA, 120 bp, Homo sapiens; identical to SEQ ID NO: 255172
  chr5:146085994-146086114
  hypo

SEQ ID NO: 433181 - DNA, 42 bp, Homo sapiens; identical to SEQ ID NO: 255173
  chr5:146685046-146685088
  hypo

SEQ ID NO: 433182 - DNA, 84 bp, Homo sapiens; identical to SEQ ID NO: 255174
  chr5:147015583-147015667
  hypo

SEQ ID NO: 433183 - DNA, 346 bp, Homo sapiens; identical to SEQ ID NO: 255175
  chr5:147040615-147040961
  hypo

SEQ ID NO: 433184 - DNA, 31 bp, Homo sapiens; identical to SEQ ID NO: 210384
  chr5:147055597-147055628
  hypo

SEQ ID NO: 433185 - DNA, 43 bp, Homo sapiens; identical to SEQ ID NO: 210385
  chr5:147274326-147274369
  hypo

SEQ ID NO: 433186 - DNA, 39 bp, Homo sapiens; identical to SEQ ID NO: 255178
  chr5:147439593-147439632
  hypo

SEQ ID NO: 433187 - DNA, 98 bp, Homo sapiens; identical to SEQ ID NO: 255179
  chr5:147439812-147439910
  hypo

SEQ ID NO: 433188 - DNA, 100 bp, Homo sapiens; identical to SEQ ID NO: 255180
  chr5:147610059-147610159
  hypo

SEQ ID NO: 433189 - DNA, 42 bp, Homo sapiens; identical to SEQ ID NO: 255181
  chr5:148222774-148222816
  hypo

SEQ ID NO: 433190 - DNA, 197 bp, Homo sapiens; identical to SEQ ID NO: 255182
  chr5:148409735-148409932
  hypo

SEQ ID NO: 433191 - DNA, 82 bp, Homo sapiens; identical to SEQ ID NO: 255183
  chr5:148520459-148520541
  hypo

SEQ ID NO: 433192 - DNA, 35 bp, Homo sapiens; identical to SEQ ID NO: 255184
  chr5:148686935-148686970
  hypo

SEQ ID NO: 433193 - DNA, 99 bp, Homo sapiens; identical to SEQ ID NO: 255185
  chr5:148695865-148695964
  hypo

SEQ ID NO: 433194 - DNA, 71 bp, Homo sapiens; identical to SEQ ID NO: 255186
  chr5:148702156-148702227
  hypo

SEQ ID NO: 433195 - DNA, 49 bp, Homo sapiens; identical to SEQ ID NO: 255187
  chr5:148754033-148754082
  hypo

SEQ ID NO: 433196 - DNA, 33 bp, Homo sapiens; identical to SEQ ID NO: 255188
  chr5:148772455-148772488
  hypo

SEQ ID NO: 433197 - DNA, 92 bp, Homo sapiens; identical to SEQ ID NO: 255189
  chr5:148772608-148772700
  hypo

SEQ ID NO: 433198 - DNA, 33 bp, Homo sapiens; identical to SEQ ID NO: 210388
  chr5:148868824-148868857
  hypo

SEQ ID NO: 433199 - DNA, 120 bp, Homo sapiens; identical to SEQ ID NO: 255192
  chr5:148925772-148925892
  hypo

SEQ ID NO: 433200 - DNA, 58 bp, Homo sapiens; identical to SEQ ID NO: 255193
  chr5:148938522-148938580
  hypo

SEQ ID NO: 433201 - DNA, 61 bp, Homo sapiens; identical to SEQ ID NO: 210389
  chr5:148980120-148980181
  hypo

SEQ ID NO: 433202 - DNA, 41 bp, Homo sapiens; identical to SEQ ID NO: 210390
  chr5:148981578-148981619
  hypo

SEQ ID NO: 433203 - DNA, 88 bp, Homo sapiens; identical to SEQ ID NO: 255196
  chr5:148982437-148982525
  hypo

SEQ ID NO: 433204 - DNA, 144 bp, Homo sapiens; identical to SEQ ID NO: 210391
  chr5:148989228-148989372
  hypo

SEQ ID NO: 433205 - DNA, 36 bp, Homo sapiens; identical to SEQ ID NO: 210392
  chr5:148999330-148999366
  hypo

SEQ ID NO: 433206 - DNA, 43 bp, Homo sapiens; identical to SEQ ID NO: 210393
  chr5:149006876-149006919
  hypo

SEQ ID NO: 433207 - DNA, 136 bp, Homo sapiens; identical to SEQ ID NO: 255200
  chr5:149144786-149144922
  hypo

SEQ ID NO: 433208 - DNA, 334 bp, Homo sapiens; identical to SEQ ID NO: 255201
  chr5:149189244-149189578
  hypo

SEQ ID NO: 433209 - DNA, 326 bp, Homo sapiens; identical to SEQ ID NO: 255202
  chr5:149230003-149230329
  hypo

SEQ ID NO: 433210 - DNA, 41 bp, Homo sapiens; identical to SEQ ID NO: 255203
  chr5:149262327-149262368
  hypo

SEQ ID NO: 433211 - DNA, 33 bp, Homo sapiens; identical to SEQ ID NO: 210396
  chr5:149375068-149375101
  hypo

SEQ ID NO: 433212 - DNA, 42 bp, Homo sapiens; identical to SEQ ID NO: 255207
  chr5:149405660-149405702
  hypo

SEQ ID NO: 433213 - DNA, 51 bp, Homo sapiens; identical to SEQ ID NO: 255208
  chr5:149449459-149449510
  hypo

SEQ ID NO: 433214 - DNA, 185 bp, Homo sapiens; identical to SEQ ID NO: 255209
  chr5:149497194-149497379
  hypo

SEQ ID NO: 433215 - DNA, 39 bp, Homo sapiens; identical to SEQ ID NO: 210398
  chr5:149501436-149501475
  hypo

SEQ ID NO: 433216 - DNA, 143 bp, Homo sapiens; identical to SEQ ID NO: 255211
  chr5:149502537-149502680
  hypo

SEQ ID NO: 433217 - DNA, 126 bp, Homo sapiens; identical to SEQ ID NO: 255212
  chr5:149503640-149503766
  hypo

SEQ ID NO: 433218 - DNA, 229 bp, Homo sapiens; identical to SEQ ID NO: 255213
  chr5:149523408-149523637
  hypo

SEQ ID NO: 433219 - DNA, 187 bp, Homo sapiens; identical to SEQ ID NO: 255214
  chr5:149573355-149573542
  hypo

SEQ ID NO: 433220 - DNA, 133 bp, Homo sapiens; identical to SEQ ID NO: 255215
  chr5:149637115-149637248
  hypo

SEQ ID NO: 433221 - DNA, 188 bp, Homo sapiens; identical to SEQ ID NO: 210399
  chr5:149725941-149726129
  hypo

SEQ ID NO: 433222 - DNA, 319 bp, Homo sapiens; identical to SEQ ID NO: 255217
  chr5:149754247-149754566
  hypo

SEQ ID NO: 433223 - DNA, 147 bp, Homo sapiens; identical to SEQ ID NO: 210400
  chr5:149800713-149800860
  hypo

SEQ ID NO: 433224 - DNA, 77 bp, Homo sapiens; identical to SEQ ID NO: 255220
  chr5:150014717-150014794
  hypo

SEQ ID NO: 433225 - DNA, 54 bp, Homo sapiens; identical to SEQ ID NO: 210401
  chr5:150028668-150028722
  hypo

SEQ ID NO: 433226 - DNA, 32 bp, Homo sapiens; identical to SEQ ID NO: 255222
  chr5:150060537-150060569
  hypo

SEQ ID NO: 433227 - DNA, 39 bp, Homo sapiens; identical to SEQ ID NO: 210402
  chr5:150066938-150066977
  hypo

SEQ ID NO: 433228 - DNA, 184 bp, Homo sapiens; identical to SEQ ID NO: 255224
  chr5:150446152-150446336
  hypo

SEQ ID NO: 433229 - DNA, 37 bp, Homo sapiens; identical to SEQ ID NO: 255225
  chr5:150452468-150452505
  hypo

SEQ ID NO: 433230 - DNA, 99 bp, Homo sapiens; identical to SEQ ID NO: 255226
  chr5:150834191-150834290
  hypo

SEQ ID NO: 433231 - DNA, 479 bp, Homo sapiens; identical to SEQ ID NO: 255228
  chr5:150945538-150946017
  hypo

SEQ ID NO: 433232 - DNA, 38 bp, Homo sapiens; identical to SEQ ID NO: 304935
  chr5:151082162-151082200
  hypo

SEQ ID NO: 433233 - DNA, 42 bp, Homo sapiens; identical to SEQ ID NO: 151633
  chr5:151082218-151082260
  hypo

SEQ ID NO: 433234 - DNA, 39 bp, Homo sapiens; identical to SEQ ID NO: 255230
  chr5:153454424-153454463
  hypo

SEQ ID NO: 433235 - DNA, 145 bp, Homo sapiens; identical to SEQ ID NO: 255231
  chr5:153675965-153676110
  hypo

SEQ ID NO: 433236 - DNA, 213 bp, Homo sapiens; identical to SEQ ID NO: 255232
  chr5:153734233-153734446
  hypo

SEQ ID NO: 433237 - DNA, 36 bp, Homo sapiens; identical to SEQ ID NO: 210406
  chr5:153798341-153798377
  hypo

SEQ ID NO: 433238 - DNA, 34 bp, Homo sapiens; identical to SEQ ID NO: 210407
  chr5:154218388-154218422
  hypo

SEQ ID NO: 433239 - DNA, 43 bp, Homo sapiens; identical to SEQ ID NO: 255239
  chr5:155438698-155438741
  hypo

SEQ ID NO: 433240 - DNA, 42 bp, Homo sapiens; identical to SEQ ID NO: 210408
  chr5:156485285-156485327
  hypo

SEQ ID NO: 433241 - DNA, 33 bp, Homo sapiens; identical to SEQ ID NO: 283480
  chr5:156887016-156887049
  hypo

SEQ ID NO: 433242 - DNA, 339 bp, Homo sapiens; identical to SEQ ID NO: 304953
  chr5:157078068-157078407
  hypo

SEQ ID NO: 433243 - DNA, 40 bp, Homo sapiens; identical to SEQ ID NO: 304954
  chr5:157078449-157078489
  hypo

SEQ ID NO: 433244 - DNA, 31 bp, Homo sapiens; identical to SEQ ID NO: 210413
  chr5:158884900-158884931
  hypo

SEQ ID NO: 433245 - DNA, 41 bp, Homo sapiens; identical to SEQ ID NO: 255250
  chr5:159658703-159658744
  hypo

SEQ ID NO: 433246 - DNA, 44 bp, Homo sapiens; identical to SEQ ID NO: 210415
  chr5:159669397-159669441
  hypo

SEQ ID NO: 433247 - DNA, 424 bp, Homo sapiens; identical to SEQ ID NO: 255254
  chr5:159679760-159680184
  hypo

SEQ ID NO: 433248 - DNA, 406 bp, Homo sapiens; identical to SEQ ID NO: 255255
  chr5:159686736-159687142
  hypo

SEQ ID NO: 433249 - DNA, 173 bp, Homo sapiens; identical to SEQ ID NO: 200134
  chr5:159826416-159826589
  hypo

SEQ ID NO: 433250 - DNA, 32 bp, Homo sapiens; identical to SEQ ID NO: 255259
  chr5:166374191-166374223
  hypo

SEQ ID NO: 433251 - DNA, 103 bp, Homo sapiens; identical to SEQ ID NO: 210420
  chr5:166477138-166477241
  hypo

SEQ ID NO: 433252 - DNA, 229 bp, Homo sapiens; identical to SEQ ID NO: 255261
  chr5:167531535-167531764
  hypo

SEQ ID NO: 433253 - DNA, 155 bp, Homo sapiens; identical to SEQ ID NO: 255262
  chr5:167536298-167536453
  hypo

SEQ ID NO: 433254 - DNA, 56 bp, Homo sapiens; identical to SEQ ID NO: 210421
  chr5:167652913-167652969
  hypo

SEQ ID NO: 433255 - DNA, 48 bp, Homo sapiens; identical to SEQ ID NO: 210422
  chr5:167671586-167671634
  hypo

SEQ ID NO: 433256 - DNA, 32 bp, Homo sapiens; identical to SEQ ID NO: 255265
  chr5:167680720-167680752
  hypo

SEQ ID NO: 433257 - DNA, 125 bp, Homo sapiens; identical to SEQ ID NO: 304981
  chr5:167689119-167689244
  hypo

SEQ ID NO: 433258 - DNA, 312 bp, Homo sapiens; identical to SEQ ID NO: 304982
  chr5:167689343-167689655
  hypo

SEQ ID NO: 433259 - DNA, 35 bp, Homo sapiens; identical to SEQ ID NO: 255267
  chr5:167698411-167698446
  hypo

SEQ ID NO: 433260 - DNA, 223 bp, Homo sapiens; identical to SEQ ID NO: 200143
  chr5:167718508-167718731
  hypo

SEQ ID NO: 433261 - DNA, 377 bp, Homo sapiens; identical to SEQ ID NO: 200144
  chr5:167718952-167719329
  hypo

SEQ ID NO: 433262 - DNA, 149 bp, Homo sapiens; identical to SEQ ID NO: 255268
  chr5:167729413-167729562
  hypo

SEQ ID NO: 433263 - DNA, 102 bp, Homo sapiens; identical to SEQ ID NO: 255269
  chr5:167825008-167825110
  hypo

SEQ ID NO: 433264 - DNA, 42 bp, Homo sapiens; identical to SEQ ID NO: 210425
  chr5:167847701-167847743
  hypo

SEQ ID NO: 433265 - DNA, 178 bp, Homo sapiens; identical to SEQ ID NO: 210426
  chr5:167853641-167853819
  hypo

SEQ ID NO: 433266 - DNA, 44 bp, Homo sapiens; identical to SEQ ID NO: 210427
  chr5:167897879-167897923
  hypo

SEQ ID NO: 433267 - DNA, 42 bp, Homo sapiens; identical to SEQ ID NO: 210429
  chr5:168124523-168124565
  hypo

SEQ ID NO: 433268 - DNA, 83 bp, Homo sapiens; identical to SEQ ID NO: 210430
  chr5:168184345-168184428
  hypo

SEQ ID NO: 433269 - DNA, 44 bp, Homo sapiens; identical to SEQ ID NO: 210431
  chr5:168189441-168189485
  hypo

SEQ ID NO: 433270 - DNA, 41 bp, Homo sapiens; identical to SEQ ID NO: 304996
  chr5:168192429-168192470
  hypo

SEQ ID NO: 433271 - DNA, 305 bp, Homo sapiens; identical to SEQ ID NO: 210434
  chr5:168199738-168200043
  hypo

SEQ ID NO: 433272 - DNA, 74 bp, Homo sapiens; identical to SEQ ID NO: 210435
  chr5:168244376-168244450
  hypo

SEQ ID NO: 433273 - DNA, 73 bp, Homo sapiens; identical to SEQ ID NO: 305000
  chr5:168250182-168250255
  hypo

SEQ ID NO: 433274 - DNA, 188 bp, Homo sapiens; identical to SEQ ID NO: 255283
  chr5:168273345-168273533
  hypo

SEQ ID NO: 433275 - DNA, 152 bp, Homo sapiens; identical to SEQ ID NO: 255285
  chr5:168296874-168297026
  hypo

SEQ ID NO: 433276 - DNA, 95 bp, Homo sapiens; identical to SEQ ID NO: 255286
  chr5:169116210-169116305
  hypo

SEQ ID NO: 433277 - DNA, 72 bp, Homo sapiens; identical to SEQ ID NO: 305005
  chr5:169157538-169157610
  hypo

SEQ ID NO: 433278 - DNA, 319 bp, Homo sapiens; identical to SEQ ID NO: 210437
  chr5:169484411-169484730
  hypo

SEQ ID NO: 433279 - DNA, 420 bp, Homo sapiens; identical to SEQ ID NO: 305007
  chr5:169659749-169660169
  hypo

SEQ ID NO: 433280 - DNA, 383 bp, Homo sapiens; identical to SEQ ID NO: 305008
  chr5:169660220-169660603
  hypo

SEQ ID NO: 433281 - DNA, 33 bp, Homo sapiens; identical to SEQ ID NO: 255290
  chr5:170060060-170060093
  hypo

SEQ ID NO: 433282 - DNA, 84 bp, Homo sapiens; identical to SEQ ID NO: 210440
  chr5:170863092-170863176
  hypo

SEQ ID NO: 433283 - DNA, 185 bp, Homo sapiens; identical to SEQ ID NO: 210441
  chr5:170883647-170883832
  hypo

SEQ ID NO: 433284 - DNA, 178 bp, Homo sapiens; identical to SEQ ID NO: 255293
  chr5:170894273-170894451
  hypo

SEQ ID NO: 433285 - DNA, 39 bp, Homo sapiens; identical to SEQ ID NO: 255294
  chr5:170937770-170937809
  hypo

SEQ ID NO: 433286 - DNA, 206 bp, Homo sapiens; identical to SEQ ID NO: 255295
  chr5:170972877-170973083
  hypo

SEQ ID NO: 433287 - DNA, 131 bp, Homo sapiens; identical to SEQ ID NO: 255296
  chr5:171095093-171095224
  hypo

SEQ ID NO: 433288 - DNA, 154 bp, Homo sapiens; identical to SEQ ID NO: 255297
  chr5:171209464-171209618
  hypo

SEQ ID NO: 433289 - DNA, 461 bp, Homo sapiens; identical to SEQ ID NO: 255298
  chr5:171351590-171352051
  hypo

SEQ ID NO: 433290 - DNA, 42 bp, Homo sapiens; identical to SEQ ID NO: 255299
  chr5:171395984-171396026
  hypo

SEQ ID NO: 433291 - DNA, 218 bp, Homo sapiens; identical to SEQ ID NO: 255302
  chr5:171479925-171480143
  hypo

SEQ ID NO: 433292 - DNA, 81 bp, Homo sapiens; identical to SEQ ID NO: 255304
  chr5:171529693-171529774
  hypo

SEQ ID NO: 433293 - DNA, 48 bp, Homo sapiens; identical to SEQ ID NO: 255306
  chr5:171533670-171533718
  hypo

SEQ ID NO: 433294 - DNA, 42 bp, Homo sapiens; identical to SEQ ID NO: 255307
  chr5:171534420-171534462
  hypo

SEQ ID NO: 433295 - DNA, 85 bp, Homo sapiens; identical to SEQ ID NO: 200154
  chr5:171541758-171541843
  hypo

SEQ ID NO: 433296 - DNA, 72 bp, Homo sapiens; identical to SEQ ID NO: 210447
  chr5:171769329-171769401
  hypo

SEQ ID NO: 433297 - DNA, 92 bp, Homo sapiens; identical to SEQ ID NO: 210448
  chr5:171777275-171777367
  hypo

SEQ ID NO: 433298 - DNA, 110 bp, Homo sapiens; identical to SEQ ID NO: 70538
  chr5:171808699-171808809
  hypo

SEQ ID NO: 433299 - DNA, 201 bp, Homo sapiens; identical to SEQ ID NO: 210449
  chr5:171821579-171821780
  hypo

SEQ ID NO: 433300 - DNA, 229 bp, Homo sapiens; identical to SEQ ID NO: 255314
  chr5:171846001-171846230
  hypo

SEQ ID NO: 433301 - DNA, 44 bp, Homo sapiens; identical to SEQ ID NO: 210450
  chr5:171858873-171858917
  hypo

SEQ ID NO: 433302 - DNA, 187 bp, Homo sapiens; identical to SEQ ID NO: 255317
  chr5:171867143-171867330
  hypo

SEQ ID NO: 433303 - DNA, 56 bp, Homo sapiens; identical to SEQ ID NO: 255318
  chr5:171890094-171890150
  hypo

SEQ ID NO: 433304 - DNA, 71 bp, Homo sapiens; identical to SEQ ID NO: 255319
  chr5:171909811-171909882
  hypo

SEQ ID NO: 433305 - DNA, 284 bp, Homo sapiens; identical to SEQ ID NO: 255321
  chr5:171981548-171981832
  hypo

SEQ ID NO: 433306 - DNA, 65 bp, Homo sapiens; identical to SEQ ID NO: 255322
  chr5:172016615-172016680
  hypo

SEQ ID NO: 433307 - DNA, 32 bp, Homo sapiens; identical to SEQ ID NO: 210452
  chr5:172062315-172062347
  hypo

SEQ ID NO: 433308 - DNA, 340 bp, Homo sapiens; identical to SEQ ID NO: 305048
  chr5:172074242-172074582
  hypo

SEQ ID NO: 433309 - DNA, 94 bp, Homo sapiens; identical to SEQ ID NO: 210454
  chr5:172097651-172097745
  hypo

SEQ ID NO: 433310 - DNA, 39 bp, Homo sapiens; identical to SEQ ID NO: 210455
  chr5:172105004-172105043
  hypo

SEQ ID NO: 433311 - DNA, 483 bp, Homo sapiens; identical to SEQ ID NO: 210456
  chr5:172113599-172114082
  hypo

SEQ ID NO: 433312 - DNA, 293 bp, Homo sapiens; identical to SEQ ID NO: 255328
  chr5:172117802-172118095
  hypo

SEQ ID NO: 433313 - DNA, 217 bp, Homo sapiens; identical to SEQ ID NO: 305053
  chr5:172123413-172123630
  hypo

SEQ ID NO: 433314 - DNA, 199 bp, Homo sapiens; identical to SEQ ID NO: 210457
  chr5:172264179-172264378
  hypo

SEQ ID NO: 433315 - DNA, 97 bp, Homo sapiens; identical to SEQ ID NO: 255333
  chr5:172307699-172307796
  hypo

SEQ ID NO: 433316 - DNA, 208 bp, Homo sapiens; identical to SEQ ID NO: 210458
  chr5:172346278-172346486
  hypo

SEQ ID NO: 433317 - DNA, 209 bp, Homo sapiens; identical to SEQ ID NO: 255336
  chr5:172366892-172367101
  hypo

SEQ ID NO: 433318 - DNA, 132 bp, Homo sapiens; identical to SEQ ID NO: 210459
  chr5:172367589-172367721
  hypo

SEQ ID NO: 433319 - DNA, 446 bp, Homo sapiens; identical to SEQ ID NO: 200158
  chr5:172385502-172385948
  hypo

SEQ ID NO: 433320 - DNA, 249 bp, Homo sapiens; identical to SEQ ID NO: 283551
  chr5:172386283-172386532
  hypo

SEQ ID NO: 433321 - DNA, 102 bp, Homo sapiens; identical to SEQ ID NO: 283553
  chr5:172444179-172444281
  hypo

SEQ ID NO: 433322 - DNA, 34 bp, Homo sapiens; identical to SEQ ID NO: 210461
  chr5:172454588-172454622
  hypo

SEQ ID NO: 433323 - DNA, 196 bp, Homo sapiens; identical to SEQ ID NO: 255342
  chr5:172765671-172765867
  hypo

SEQ ID NO: 433324 - DNA, 279 bp, Homo sapiens; identical to SEQ ID NO: 255343
  chr5:173180489-173180768
  hypo

SEQ ID NO: 433325 - DNA, 137 bp, Homo sapiens; identical to SEQ ID NO: 255344
  chr5:173383099-173383236
  hypo

SEQ ID NO: 433326 - DNA, 77 bp, Homo sapiens; identical to SEQ ID NO: 255345
  chr5:173389973-173390050
  hypo

SEQ ID NO: 433327 - DNA, 124 bp, Homo sapiens; identical to SEQ ID NO: 305075
  chr5:173396938-173397062
  hypo

SEQ ID NO: 433328 - DNA, 57 bp, Homo sapiens; identical to SEQ ID NO: 210466
  chr5:173415949-173416006
  hypo

SEQ ID NO: 433329 - DNA, 246 bp, Homo sapiens; identical to SEQ ID NO: 255348
  chr5:173416551-173416797
  hypo

SEQ ID NO: 433330 - DNA, 34 bp, Homo sapiens; identical to SEQ ID NO: 255349
  chr5:173539168-173539202
  hypo

SEQ ID NO: 433331 - DNA, 35 bp, Homo sapiens; identical to SEQ ID NO: 255350
  chr5:173978713-173978748
  hypo

SEQ ID NO: 433332 - DNA, 40 bp, Homo sapiens; identical to SEQ ID NO: 255351
  chr5:174029708-174029748
  hypo

SEQ ID NO: 433333 - DNA, 149 bp, Homo sapiens; identical to SEQ ID NO: 255352
  chr5:174350058-174350207
  hypo

SEQ ID NO: 433334 - DNA, 43 bp, Homo sapiens; identical to SEQ ID NO: 255353
  chr5:174667550-174667593
  hypo

SEQ ID NO: 433335 - DNA, 78 bp, Homo sapiens; identical to SEQ ID NO: 255354
  chr5:174920753-174920831
  hypo

SEQ ID NO: 433336 - DNA, 198 bp, Homo sapiens; identical to SEQ ID NO: 255355
  chr5:175110260-175110458
  hypo

SEQ ID NO: 433337 - DNA, 166 bp, Homo sapiens; identical to SEQ ID NO: 210469
  chr5:175139689-175139855
  hypo

SEQ ID NO: 433338 - DNA, 271 bp, Homo sapiens; identical to SEQ ID NO: 255357
  chr5:175329248-175329519
  hypo

SEQ ID NO: 433339 - DNA, 190 bp, Homo sapiens; identical to SEQ ID NO: 255358
  chr5:175387362-175387552
  hypo

SEQ ID NO: 433340 - DNA, 53 bp, Homo sapiens; identical to SEQ ID NO: 255359
  chr5:175559713-175559766
  hypo

SEQ ID NO: 433341 - DNA, 35 bp, Homo sapiens
  chr5:175578296-175578331
  hypo
ttattacttttaaagtttgtttaggctcagaccct

SEQ ID NO: 433342 - DNA, 36 bp, Homo sapiens; identical to SEQ ID NO: 210473
  chr5:175871772-175871808
  hypo

SEQ ID NO: 433343 - DNA, 36 bp, Homo sapiens; identical to SEQ ID NO: 255365
  chr5:175872857-175872893
  hypo

SEQ ID NO: 433344 - DNA, 204 bp, Homo sapiens; identical to SEQ ID NO: 210474
  chr5:176003232-176003436
  hypo

SEQ ID NO: 433345 - DNA, 162 bp, Homo sapiens; identical to SEQ ID NO: 210475
  chr5:176012687-176012849
  hypo

SEQ ID NO: 433346 - DNA, 76 bp, Homo sapiens; identical to SEQ ID NO: 210476
  chr5:176016153-176016229
  hypo

SEQ ID NO: 433347 - DNA, 62 bp, Homo sapiens; identical to SEQ ID NO: 255371
  chr5:176035935-176035997
  hypo

SEQ ID NO: 433348 - DNA, 97 bp, Homo sapiens; identical to SEQ ID NO: 210478
  chr5:176066073-176066170
  hypo

SEQ ID NO: 433349 - DNA, 51 bp, Homo sapiens; identical to SEQ ID NO: 210479
  chr5:176077110-176077161
  hypo

SEQ ID NO: 433350 - DNA, 187 bp, Homo sapiens; identical to SEQ ID NO: 255374
  chr5:176081965-176082152
  hypo

SEQ ID NO: 433351 - DNA, 55 bp, Homo sapiens; identical to SEQ ID NO: 255375
  chr5:176175541-176175596
  hypo

SEQ ID NO: 433352 - DNA, 96 bp, Homo sapiens; identical to SEQ ID NO: 255377
  chr5:176285035-176285131
  hypo

SEQ ID NO: 433353 - DNA, 178 bp, Homo sapiens; identical to SEQ ID NO: 305110
  chr5:176295608-176295786
  hypo

SEQ ID NO: 433354 - DNA, 44 bp, Homo sapiens; identical to SEQ ID NO: 305111
  chr5:176295892-176295936
  hypo

SEQ ID NO: 433355 - DNA, 132 bp, Homo sapiens; identical to SEQ ID NO: 255379
  chr5:176296713-176296845
  hypo

SEQ ID NO: 433356 - DNA, 119 bp, Homo sapiens; identical to SEQ ID NO: 255380
  chr5:176314523-176314642
  hypo

SEQ ID NO: 433357 - DNA, 190 bp, Homo sapiens; identical to SEQ ID NO: 255382
  chr5:176520327-176520517
  hypo

SEQ ID NO: 433358 - DNA, 164 bp, Homo sapiens; identical to SEQ ID NO: 210481
  chr5:176544212-176544376
  hypo

SEQ ID NO: 433359 - DNA, 147 bp, Homo sapiens; identical to SEQ ID NO: 255386
  chr5:176602186-176602333
  hypo

SEQ ID NO: 433360 - DNA, 76 bp, Homo sapiens; identical to SEQ ID NO: 255387
  chr5:176611704-176611780
  hypo

SEQ ID NO: 433361 - DNA, 92 bp, Homo sapiens; identical to SEQ ID NO: 255388
  chr5:176613630-176613722
  hypo

SEQ ID NO: 433362 - DNA, 32 bp, Homo sapiens; identical to SEQ ID NO: 391379
  chr5:176663949-176663981
  hypo

SEQ ID NO: 433363 - DNA, 76 bp, Homo sapiens; identical to SEQ ID NO: 210485
  chr5:176674064-176674140
  hypo

SEQ ID NO: 433364 - DNA, 162 bp, Homo sapiens; identical to SEQ ID NO: 210486
  chr5:176694903-176695065
  hypo

SEQ ID NO: 433365 - DNA, 152 bp, Homo sapiens; identical to SEQ ID NO: 210487
  chr5:176757377-176757529
  hypo

SEQ ID NO: 433366 - DNA, 42 bp, Homo sapiens; identical to SEQ ID NO: 255395
  chr5:176780528-176780570
  hypo

SEQ ID NO: 433367 - DNA, 90 bp, Homo sapiens; identical to SEQ ID NO: 222761
  chr5:176827093-176827183
  hypo

SEQ ID NO: 433368 - DNA, 288 bp, Homo sapiens; identical to SEQ ID NO: 222762
  chr5:176830417-176830705
  hypo

SEQ ID NO: 433369 - DNA, 147 bp, Homo sapiens; identical to SEQ ID NO: 222763
  chr5:176830933-176831080
  hypo

SEQ ID NO: 433370 - DNA, 31 bp, Homo sapiens; identical to SEQ ID NO: 255397
  chr5:176865066-176865097
  hypo

SEQ ID NO: 433371 - DNA, 279 bp, Homo sapiens; identical to SEQ ID NO: 210493
  chr5:176965874-176966153
  hypo

SEQ ID NO: 433372 - DNA, 43 bp, Homo sapiens; identical to SEQ ID NO: 210494
  chr5:176976123-176976166
  hypo

SEQ ID NO: 433373 - DNA, 265 bp, Homo sapiens; identical to SEQ ID NO: 210497
  chr5:177393139-177393404
  hypo

SEQ ID NO: 433374 - DNA, 120 bp, Homo sapiens; identical to SEQ ID NO: 255409
  chr5:177482544-177482664
  hypo

SEQ ID NO: 433375 - DNA, 201 bp, Homo sapiens; identical to SEQ ID NO: 210498
  chr5:177482724-177482925
  hypo

SEQ ID NO: 433376 - DNA, 130 bp, Homo sapiens; identical to SEQ ID NO: 210499
  chr5:177548899-177549029
  hypo

SEQ ID NO: 433377 - DNA, 103 bp, Homo sapiens; identical to SEQ ID NO: 255413
  chr5:177571342-177571445
  hypo

SEQ ID NO: 433378 - DNA, 48 bp, Homo sapiens; identical to SEQ ID NO: 210500
  chr5:177637070-177637118
  hypo

SEQ ID NO: 433379 - DNA, 409 bp, Homo sapiens; identical to SEQ ID NO: 255416
  chr5:177651332-177651741
  hypo

SEQ ID NO: 433380 - DNA, 34 bp, Homo sapiens; identical to SEQ ID NO: 391384
  chr5:177653975-177654009
  hypo

SEQ ID NO: 433381 - DNA, 297 bp, Homo sapiens; identical to SEQ ID NO: 210503
  chr5:177708331-177708628
  hypo

SEQ ID NO: 433382 - DNA, 162 bp, Homo sapiens; identical to SEQ ID NO: 255420
  chr5:177735754-177735916
  hypo

SEQ ID NO: 433383 - DNA, 125 bp, Homo sapiens; identical to SEQ ID NO: 255421
  chr5:177737219-177737344
  hypo

SEQ ID NO: 433384 - DNA, 349 bp, Homo sapiens; identical to SEQ ID NO: 255422
  chr5:177746584-177746933
  hypo

SEQ ID NO: 433385 - DNA, 207 bp, Homo sapiens; identical to SEQ ID NO: 255423
  chr5:177749734-177749941
  hypo

SEQ ID NO: 433386 - DNA, 160 bp, Homo sapiens; identical to SEQ ID NO: 255424
  chr5:177778269-177778429
  hypo

SEQ ID NO: 433387 - DNA, 189 bp, Homo sapiens; identical to SEQ ID NO: 255425
  chr5:177794189-177794378
  hypo

SEQ ID NO: 433388 - DNA, 150 bp, Homo sapiens; identical to SEQ ID NO: 255427
  chr5:177808937-177809087
  hypo

SEQ ID NO: 433389 - DNA, 90 bp, Homo sapiens; identical to SEQ ID NO: 210504
  chr5:177852084-177852174
  hypo

SEQ ID NO: 433390 - DNA, 210 bp, Homo sapiens; identical to SEQ ID NO: 255429
  chr5:177852474-177852684
  hypo

SEQ ID NO: 433391 - DNA, 113 bp, Homo sapiens; identical to SEQ ID NO: 255430
  chr5:177853494-177853607
  hypo

SEQ ID NO: 433392 - DNA, 461 bp, Homo sapiens; identical to SEQ ID NO: 255431
  chr5:177862607-177863068
  hypo

SEQ ID NO: 433393 - DNA, 67 bp, Homo sapiens; identical to SEQ ID NO: 305170
  chr5:177868496-177868563
  hypo

SEQ ID NO: 433394 - DNA, 131 bp, Homo sapiens; identical to SEQ ID NO: 305171
  chr5:177868593-177868724
  hypo

SEQ ID NO: 433395 - DNA, 53 bp, Homo sapiens; identical to SEQ ID NO: 210506
  chr5:177875102-177875155
  hypo

SEQ ID NO: 433396 - DNA, 37 bp, Homo sapiens; identical to SEQ ID NO: 255434
  chr5:177882256-177882293
  hypo

SEQ ID NO: 433397 - DNA, 33 bp, Homo sapiens; identical to SEQ ID NO: 255436
  chr5:177883394-177883427
  hypo

SEQ ID NO: 433398 - DNA, 151 bp, Homo sapiens; identical to SEQ ID NO: 255439
  chr5:177961363-177961514
  hypo

SEQ ID NO: 433399 - DNA, 36 bp, Homo sapiens; identical to SEQ ID NO: 255440
  chr5:177964385-177964421
  hypo

SEQ ID NO: 433400 - DNA, 40 bp, Homo sapiens; identical to SEQ ID NO: 255441
  chr5:177969295-177969335
  hypo

SEQ ID NO: 433401 - DNA, 95 bp, Homo sapiens; identical to SEQ ID NO: 255443
  chr5:177981479-177981574
  hypo

SEQ ID NO: 433402 - DNA, 116 bp, Homo sapiens; identical to SEQ ID NO: 255444
  chr5:178002879-178002995
  hypo

SEQ ID NO: 433403 - DNA, 87 bp, Homo sapiens; identical to SEQ ID NO: 255445
  chr5:178039469-178039556
  hypo

SEQ ID NO: 433404 - DNA, 141 bp, Homo sapiens; identical to SEQ ID NO: 305185
  chr5:178108495-178108636
  hypo

SEQ ID NO: 433405 - DNA, 34 bp, Homo sapiens; identical to SEQ ID NO: 255447
  chr5:178113316-178113350
  hypo

SEQ ID NO: 433406 - DNA, 34 bp, Homo sapiens; identical to SEQ ID NO: 255448
  chr5:178113590-178113624
  hypo

SEQ ID NO: 433407 - DNA, 214 bp, Homo sapiens; identical to SEQ ID NO: 255449
  chr5:178146440-178146654
  hypo

SEQ ID NO: 433408 - DNA, 31 bp, Homo sapiens; identical to SEQ ID NO: 210507
  chr5:178195542-178195573
  hypo

SEQ ID NO: 433409 - DNA, 85 bp, Homo sapiens; identical to SEQ ID NO: 255451
  chr5:178196657-178196742
  hypo

SEQ ID NO: 433410 - DNA, 37 bp, Homo sapiens; identical to SEQ ID NO: 255453
  chr5:178226974-178227011
  hypo

SEQ ID NO: 433411 - DNA, 564 bp, Homo sapiens; identical to SEQ ID NO: 200196
  chr5:178287036-178287600
  hypo

SEQ ID NO: 433412 - DNA, 166 bp, Homo sapiens; identical to SEQ ID NO: 210509
  chr5:178289146-178289312
  hypo

SEQ ID NO: 433413 - DNA, 84 bp, Homo sapiens; identical to SEQ ID NO: 255456
  chr5:178292218-178292302
  hypo

SEQ ID NO: 433414 - DNA, 45 bp, Homo sapiens; identical to SEQ ID NO: 210510
  chr5:178295550-178295595
  hypo

SEQ ID NO: 433415 - DNA, 376 bp, Homo sapiens; identical to SEQ ID NO: 210511
  chr5:178295949-178296325
  hypo

SEQ ID NO: 433416 - DNA, 43 bp, Homo sapiens; identical to SEQ ID NO: 255459
  chr5:178298335-178298378
  hypo

SEQ ID NO: 433417 - DNA, 37 bp, Homo sapiens; identical to SEQ ID NO: 255460
  chr5:178369101-178369138
  hypo

SEQ ID NO: 433418 - DNA, 134 bp, Homo sapiens; identical to SEQ ID NO: 255461
  chr5:178397976-178398110
  hypo

SEQ ID NO: 433419 - DNA, 116 bp, Homo sapiens; identical to SEQ ID NO: 255462
  chr5:178411213-178411329
  hypo

SEQ ID NO: 433420 - DNA, 214 bp, Homo sapiens; identical to SEQ ID NO: 200197
  chr5:178423619-178423833
  hypo

SEQ ID NO: 433421 - DNA, 50 bp, Homo sapiens; identical to SEQ ID NO: 255465
  chr5:178426059-178426109
  hypo

SEQ ID NO: 433422 - DNA, 88 bp, Homo sapiens; identical to SEQ ID NO: 283634
  chr5:178450491-178450579
  hypo

SEQ ID NO: 433423 - DNA, 102 bp, Homo sapiens; identical to SEQ ID NO: 255467
  chr5:178540329-178540431
  hypo

SEQ ID NO: 433424 - DNA, 225 bp, Homo sapiens; identical to SEQ ID NO: 255468
  chr5:178551041-178551266
  hypo

SEQ ID NO: 433425 - DNA, 358 bp, Homo sapiens; identical to SEQ ID NO: 210513
  chr5:178551488-178551846
  hypo

SEQ ID NO: 433426 - DNA, 205 bp, Homo sapiens; identical to SEQ ID NO: 210514
  chr5:178551923-178552128
  hypo

SEQ ID NO: 433427 - DNA, 82 bp, Homo sapiens; identical to SEQ ID NO: 210515
  chr5:178564804-178564886
  hypo

SEQ ID NO: 433428 - DNA, 75 bp, Homo sapiens; identical to SEQ ID NO: 210516
  chr5:178576526-178576601
  hypo

SEQ ID NO: 433429 - DNA, 38 bp, Homo sapiens; identical to SEQ ID NO: 255473
  chr5:178585237-178585275
  hypo

SEQ ID NO: 433430 - DNA, 255 bp, Homo sapiens; identical to SEQ ID NO: 210517
  chr5:178585631-178585886
  hypo

SEQ ID NO: 433431 - DNA, 178 bp, Homo sapiens; identical to SEQ ID NO: 255475
  chr5:178589360-178589538
  hypo

SEQ ID NO: 433432 - DNA, 137 bp, Homo sapiens; identical to SEQ ID NO: 210520
  chr5:178665271-178665408
  hypo

SEQ ID NO: 433433 - DNA, 329 bp, Homo sapiens; identical to SEQ ID NO: 255480
  chr5:178734177-178734506
  hypo

SEQ ID NO: 433434 - DNA, 109 bp, Homo sapiens; identical to SEQ ID NO: 255481
  chr5:178735325-178735434
  hypo

SEQ ID NO: 433435 - DNA, 133 bp, Homo sapiens; identical to SEQ ID NO: 255482
  chr5:178742628-178742761
  hypo

SEQ ID NO: 433436 - DNA, 166 bp, Homo sapiens; identical to SEQ ID NO: 255483
  chr5:178801533-178801699
  hypo

SEQ ID NO: 433437 - DNA, 146 bp, Homo sapiens; identical to SEQ ID NO: 210522
  chr5:178854898-178855044
  hypo

SEQ ID NO: 433438 - DNA, 164 bp, Homo sapiens; identical to SEQ ID NO: 255485
  chr5:178857574-178857738
  hypo

SEQ ID NO: 433439 - DNA, 36 bp, Homo sapiens; identical to SEQ ID NO: 255486
  chr5:178882638-178882674
  hypo

SEQ ID NO: 433440 - DNA, 35 bp, Homo sapiens; identical to SEQ ID NO: 255487
  chr5:178975530-178975565
  hypo

SEQ ID NO: 433441 - DNA, 251 bp, Homo sapiens; identical to SEQ ID NO: 255488
  chr5:179004521-179004772
  hypo

SEQ ID NO: 433442 - DNA, 175 bp, Homo sapiens; identical to SEQ ID NO: 255490
  chr5:179026668-179026843
  hypo

SEQ ID NO: 433443 - DNA, 46 bp, Homo sapiens; identical to SEQ ID NO: 210524
  chr5:179030602-179030648
  hypo

SEQ ID NO: 433444 - DNA, 120 bp, Homo sapiens; identical to SEQ ID NO: 255492
  chr5:179064356-179064476
  hypo

SEQ ID NO: 433445 - DNA, 32 bp, Homo sapiens; identical to SEQ ID NO: 255493
  chr5:179076781-179076813
  hypo

SEQ ID NO: 433446 - DNA, 43 bp, Homo sapiens; identical to SEQ ID NO: 210525
  chr5:179106627-179106670
  hypo

SEQ ID NO: 433447 - DNA, 34 bp, Homo sapiens; identical to SEQ ID NO: 255495
  chr5:179110846-179110880
  hypo

SEQ ID NO: 433448 - DNA, 283 bp, Homo sapiens; identical to SEQ ID NO: 283640
  chr5:179223440-179223723
  hypo

SEQ ID NO: 433449 - DNA, 50 bp, Homo sapiens; identical to SEQ ID NO: 255496
  chr5:179225523-179225573
  hypo

SEQ ID NO: 433450 - DNA, 149 bp, Homo sapiens; identical to SEQ ID NO: 200200
  chr5:179234473-179234622
  hypo

SEQ ID NO: 433451 - DNA, 149 bp, Homo sapiens; identical to SEQ ID NO: 255497
  chr5:179234922-179235071
  hypo

SEQ ID NO: 433452 - DNA, 203 bp, Homo sapiens; identical to SEQ ID NO: 210528
  chr5:179293876-179294079
  hypo

SEQ ID NO: 433453 - DNA, 148 bp, Homo sapiens; identical to SEQ ID NO: 255499
  chr5:179343374-179343522
  hypo

SEQ ID NO: 433454 - DNA, 150 bp, Homo sapiens; identical to SEQ ID NO: 255500
  chr5:179358103-179358253
  hypo

SEQ ID NO: 433455 - DNA, 139 bp, Homo sapiens; identical to SEQ ID NO: 255501
  chr5:179393861-179394000
  hypo

SEQ ID NO: 433456 - DNA, 123 bp, Homo sapiens; identical to SEQ ID NO: 210529
  chr5:179401180-179401303
  hypo

SEQ ID NO: 433457 - DNA, 60 bp, Homo sapiens; identical to SEQ ID NO: 210530
  chr5:179401333-179401393
  hypo

SEQ ID NO: 433458 - DNA, 345 bp, Homo sapiens; identical to SEQ ID NO: 210533
  chr5:179402748-179403093
  hypo

SEQ ID NO: 433459 - DNA, 170 bp, Homo sapiens; identical to SEQ ID NO: 210534
  chr5:179473085-179473255
  hypo

SEQ ID NO: 433460 - DNA, 188 bp, Homo sapiens; identical to SEQ ID NO: 255507
  chr5:179503669-179503857
  hypo

SEQ ID NO: 433461 - DNA, 41 bp, Homo sapiens; identical to SEQ ID NO: 255508
  chr5:179545455-179545496
  hypo

SEQ ID NO: 433462 - DNA, 147 bp, Homo sapiens; identical to SEQ ID NO: 255510
  chr5:179547319-179547466
  hypo

SEQ ID NO: 433463 - DNA, 200 bp, Homo sapiens; identical to SEQ ID NO: 305263
  chr5:179564842-179565042
  hypo

SEQ ID NO: 433464 - DNA, 115 bp, Homo sapiens; identical to SEQ ID NO: 210537
  chr5:179643356-179643471
  hypo

SEQ ID NO: 433465 - DNA, 105 bp, Homo sapiens; identical to SEQ ID NO: 255514
  chr5:179666255-179666360
  hypo

SEQ ID NO: 433466 - DNA, 164 bp, Homo sapiens; identical to SEQ ID NO: 210538
  chr5:179726331-179726495
  hypo

SEQ ID NO: 433467 - DNA, 193 bp, Homo sapiens; identical to SEQ ID NO: 255517
  chr5:179731619-179731812
  hypo

SEQ ID NO: 433468 - DNA, 31 bp, Homo sapiens; identical to SEQ ID NO: 255518
  chr5:179742137-179742168
  hypo

SEQ ID NO: 433469 - DNA, 311 bp, Homo sapiens; identical to SEQ ID NO: 255520
  chr5:179762746-179763057
  hypo

SEQ ID NO: 433470 - DNA, 94 bp, Homo sapiens; identical to SEQ ID NO: 255521
  chr5:179796987-179797081
  hypo

SEQ ID NO: 433471 - DNA, 132 bp, Homo sapiens; identical to SEQ ID NO: 255522
  chr5:179806435-179806567
  hypo

SEQ ID NO: 433472 - DNA, 157 bp, Homo sapiens; identical to SEQ ID NO: 255523
  chr5:179824174-179824331
  hypo

SEQ ID NO: 433473 - DNA, 152 bp, Homo sapiens; identical to SEQ ID NO: 305275
  chr5:179824636-179824788
  hypo

SEQ ID NO: 433474 - DNA, 160 bp, Homo sapiens; identical to SEQ ID NO: 255525
  chr5:179855729-179855889
  hypo

SEQ ID NO: 433475 - DNA, 234 bp, Homo sapiens; identical to SEQ ID NO: 255526
  chr5:179866444-179866678
  hypo

SEQ ID NO: 433476 - DNA, 60 bp, Homo sapiens; identical to SEQ ID NO: 255527
  chr5:179923390-179923450
  hypo

SEQ ID NO: 433477 - DNA, 38 bp, Homo sapiens; identical to SEQ ID NO: 255528
  chr5:180030298-180030336
  hypo

SEQ ID NO: 433478 - DNA, 384 bp, Homo sapiens; identical to SEQ ID NO: 255530
  chr5:180038083-180038467
  hypo

SEQ ID NO: 433479 - DNA, 216 bp, Homo sapiens; identical to SEQ ID NO: 255531
  chr5:180039813-180040029
  hypo

SEQ ID NO: 433480 - DNA, 112 bp, Homo sapiens; identical to SEQ ID NO: 255532
  chr5:180043366-180043478
  hypo

SEQ ID NO: 433481 - DNA, 83 bp, Homo sapiens; identical to SEQ ID NO: 255533
  chr5:180043957-180044040
  hypo

SEQ ID NO: 433482 - DNA, 70 bp, Homo sapiens; identical to SEQ ID NO: 305287
  chr5:180047650-180047720
  hypo

SEQ ID NO: 433483 - DNA, 221 bp, Homo sapiens; identical to SEQ ID NO: 305288
  chr5:180047750-180047971
  hypo

SEQ ID NO: 433484 - DNA, 152 bp, Homo sapiens; identical to SEQ ID NO: 255537
  chr5:180056384-180056536
  hypo

SEQ ID NO: 433485 - DNA, 64 bp, Homo sapiens; identical to SEQ ID NO: 210542
  chr5:180057671-180057735
  hypo

SEQ ID NO: 433486 - DNA, 42 bp, Homo sapiens; identical to SEQ ID NO: 255539
  chr5:180093828-180093870
  hypo

SEQ ID NO: 433487 - DNA, 35 bp, Homo sapiens; identical to SEQ ID NO: 255540
  chr5:180098113-180098148
  hypo

SEQ ID NO: 433488 - DNA, 444 bp, Homo sapiens; identical to SEQ ID NO: 255543
  chr5:180219601-180220045
  hypo

SEQ ID NO: 433489 - DNA, 142 bp, Homo sapiens; identical to SEQ ID NO: 210545
  chr5:180255234-180255376
  hypo

SEQ ID NO: 433490 - DNA, 78 bp, Homo sapiens; identical to SEQ ID NO: 255546
  chr5:180502178-180502256
  hypo

SEQ ID NO: 433491 - DNA, 104 bp, Homo sapiens; identical to SEQ ID NO: 210549
  chr5:180657110-180657214
  hypo

SEQ ID NO: 433492 - DNA, 153 bp, Homo sapiens; identical to SEQ ID NO: 210550
  chr5:180661378-180661531
  hypo

SEQ ID NO: 433493 - DNA, 182 bp, Homo sapiens; identical to SEQ ID NO: 210551
  chr5:180661628-180661810
  hypo

SEQ ID NO: 433494 - DNA, 338 bp, Homo sapiens; identical to SEQ ID NO: 200216
  chr5:180673932-180674270
  hypo

SEQ ID NO: 433495 - DNA, 43 bp, Homo sapiens; identical to SEQ ID NO: 255549
  chr5:180680861-180680904
  hypo

SEQ ID NO: 433496 - DNA, 120 bp, Homo sapiens; identical to SEQ ID NO: 210553
  chr5:180681264-180681384
  hypo

SEQ ID NO: 433497 - DNA, 139 bp, Homo sapiens; identical to SEQ ID NO: 255552
  chr6:223799-223938
  hypo

SEQ ID NO: 433498 - DNA, 176 bp, Homo sapiens; identical to SEQ ID NO: 255553
  chr6:226031-226207
  hypo

SEQ ID NO: 433499 - DNA, 60 bp, Homo sapiens; identical to SEQ ID NO: 255554
  chr6:356759-356819
  hypo

SEQ ID NO: 433500 - DNA, 42 bp, Homo sapiens; identical to SEQ ID NO: 255555
  chr6:358267-358309
  hypo

SEQ ID NO: 433501 - DNA, 160 bp, Homo sapiens; identical to SEQ ID NO: 255557
  chr6:394827-394987
  hypo

SEQ ID NO: 433502 - DNA, 213 bp, Homo sapiens; identical to SEQ ID NO: 255558
  chr6:402006-402219
  hypo

SEQ ID NO: 433503 - DNA, 131 bp, Homo sapiens; identical to SEQ ID NO: 255559
  chr6:504235-504366
  hypo

SEQ ID NO: 433504 - DNA, 78 bp, Homo sapiens; identical to SEQ ID NO: 255561
  chr6:625318-625396
  hypo

SEQ ID NO: 433505 - DNA, 136 bp, Homo sapiens; identical to SEQ ID NO: 210556
  chr6:736613-736749
  hypo

SEQ ID NO: 433506 - DNA, 148 bp, Homo sapiens; identical to SEQ ID NO: 255563
  chr6:968511-968659
  hypo

SEQ ID NO: 433507 - DNA, 115 bp, Homo sapiens; identical to SEQ ID NO: 255564
  chr6:972333-972448
  hypo

SEQ ID NO: 433508 - DNA, 39 bp, Homo sapiens; identical to SEQ ID NO: 255565
  chr6:999947-999986
  hypo

SEQ ID NO: 433509 - DNA, 224 bp, Homo sapiens; identical to SEQ ID NO: 255567
  chr6:1082985-1083209
  hypo

SEQ ID NO: 433510 - DNA, 255 bp, Homo sapiens; identical to SEQ ID NO: 255568
  chr6:1097959-1098214
  hypo

SEQ ID NO: 433511 - DNA, 113 bp, Homo sapiens; identical to SEQ ID NO: 200228
  chr6:1379978-1380091
  hypo

SEQ ID NO: 433512 - DNA, 105 bp, Homo sapiens; identical to SEQ ID NO: 255569
  chr6:1408644-1408749
  hypo

SEQ ID NO: 433513 - DNA, 285 bp, Homo sapiens; identical to SEQ ID NO: 255570
  chr6:1446292-1446577
  hypo

SEQ ID NO: 433514 - DNA, 74 bp, Homo sapiens; identical to SEQ ID NO: 255573
  chr6:1574420-1574494
  hypo

SEQ ID NO: 433515 - DNA, 100 bp, Homo sapiens; identical to SEQ ID NO: 255574
  chr6:1587933-1588033
  hypo

SEQ ID NO: 433516 - DNA, 633 bp, Homo sapiens; identical to SEQ ID NO: 283692
  chr6:1610183-1610816
  hypo

SEQ ID NO: 433517 - DNA, 334 bp, Homo sapiens; identical to SEQ ID NO: 200232
  chr6:1610864-1611198
  hypo

SEQ ID NO: 433518 - DNA, 65 bp, Homo sapiens; identical to SEQ ID NO: 283694
  chr6:1612131-1612196
  hypo

SEQ ID NO: 433519 - DNA, 186 bp, Homo sapiens; identical to SEQ ID NO: 112753
  chr6:1612300-1612486
  hypo

SEQ ID NO: 433520 - DNA, 172 bp, Homo sapiens; identical to SEQ ID NO: 255575
  chr6:1631279-1631451
  hypo

SEQ ID NO: 433521 - DNA, 73 bp, Homo sapiens; identical to SEQ ID NO: 255576
  chr6:1666397-1666470
  hypo

SEQ ID NO: 433522 - DNA, 159 bp, Homo sapiens; identical to SEQ ID NO: 255577
  chr6:1679665-1679824
  hypo

SEQ ID NO: 433523 - DNA, 34 bp, Homo sapiens; identical to SEQ ID NO: 305340
  chr6:1702254-1702288
  hypo

SEQ ID NO: 433524 - DNA, 70 bp, Homo sapiens; identical to SEQ ID NO: 152413
  chr6:1702366-1702436
  hypo

SEQ ID NO: 433525 - DNA, 101 bp, Homo sapiens; identical to SEQ ID NO: 255581
  chr6:1874237-1874338
  hypo

SEQ ID NO: 433526 - DNA, 150 bp, Homo sapiens; identical to SEQ ID NO: 255582
  chr6:1923749-1923899
  hypo

SEQ ID NO: 433527 - DNA, 281 bp, Homo sapiens; identical to SEQ ID NO: 210566
  chr6:1953249-1953530
  hypo

SEQ ID NO: 433528 - DNA, 96 bp, Homo sapiens; identical to SEQ ID NO: 210568
  chr6:2233026-2233122
  hypo

SEQ ID NO: 433529 - DNA, 68 bp, Homo sapiens; identical to SEQ ID NO: 255586
  chr6:2244787-2244855
  hypo

SEQ ID NO: 433530 - DNA, 121 bp, Homo sapiens; identical to SEQ ID NO: 255587
  chr6:2377321-2377442
  hypo

SEQ ID NO: 433531 - DNA, 167 bp, Homo sapiens; identical to SEQ ID NO: 255589
  chr6:2447382-2447549
  hypo

SEQ ID NO: 433532 - DNA, 40 bp, Homo sapiens; identical to SEQ ID NO: 305355
  chr6:2510117-2510157
  hypo

SEQ ID NO: 433533 - DNA, 81 bp, Homo sapiens; identical to SEQ ID NO: 305356
  chr6:2510187-2510268
  hypo

SEQ ID NO: 433534 - DNA, 140 bp, Homo sapiens; identical to SEQ ID NO: 255591
  chr6:2530903-2531043
  hypo

SEQ ID NO: 433535 - DNA, 385 bp, Homo sapiens; identical to SEQ ID NO: 210569
  chr6:2559179-2559564
  hypo

SEQ ID NO: 433536 - DNA, 67 bp, Homo sapiens; identical to SEQ ID NO: 255593
  chr6:2697706-2697773
  hypo

SEQ ID NO: 433537 - DNA, 395 bp, Homo sapiens; identical to SEQ ID NO: 255594
  chr6:2701264-2701659
  hypo

SEQ ID NO: 433538 - DNA, 79 bp, Homo sapiens; identical to SEQ ID NO: 255596
  chr6:2870699-2870778
  hypo

SEQ ID NO: 433539 - DNA, 289 bp, Homo sapiens; identical to SEQ ID NO: 255597
  chr6:2891875-2892164
  hypo

SEQ ID NO: 433540 - DNA, 33 bp, Homo sapiens; identical to SEQ ID NO: 210570
  chr6:2906982-2907015
  hypo

SEQ ID NO: 433541 - DNA, 92 bp, Homo sapiens; identical to SEQ ID NO: 210571
  chr6:2907135-2907227
  hypo

SEQ ID NO: 433542 - DNA, 63 bp, Homo sapiens; identical to SEQ ID NO: 255600
  chr6:2907533-2907596
  hypo

SEQ ID NO: 433543 - DNA, 180 bp, Homo sapiens; identical to SEQ ID NO: 255602
  chr6:2939519-2939699
  hypo

SEQ ID NO: 433544 - DNA, 134 bp, Homo sapiens; identical to SEQ ID NO: 305369
  chr6:2985173-2985307
  hypo

SEQ ID NO: 433545 - DNA, 43 bp, Homo sapiens; identical to SEQ ID NO: 210573
  chr6:2986010-2986053
  hypo

SEQ ID NO: 433546 - DNA, 208 bp, Homo sapiens; identical to SEQ ID NO: 283705
  chr6:2999193-2999401
  hypo

SEQ ID NO: 433547 - DNA, 38 bp, Homo sapiens; identical to SEQ ID NO: 305372
  chr6:3053001-3053039
  hypo

SEQ ID NO: 433548 - DNA, 230 bp, Homo sapiens; identical to SEQ ID NO: 305373
  chr6:3053069-3053299
  hypo

SEQ ID NO: 433549 - DNA, 383 bp, Homo sapiens; identical to SEQ ID NO: 210574
  chr6:3115566-3115949
  hypo

SEQ ID NO: 433550 - DNA, 128 bp, Homo sapiens; identical to SEQ ID NO: 255608
  chr6:3132220-3132348
  hypo

SEQ ID NO: 433551 - DNA, 254 bp, Homo sapiens; identical to SEQ ID NO: 200241
  chr6:3162842-3163096
  hypo

SEQ ID NO: 433552 - DNA, 40 bp, Homo sapiens; identical to SEQ ID NO: 255609
  chr6:3177387-3177427
  hypo

SEQ ID NO: 433553 - DNA, 40 bp, Homo sapiens; identical to SEQ ID NO: 210576
  chr6:3179684-3179724
  hypo

SEQ ID NO: 433554 - DNA, 215 bp, Homo sapiens; identical to SEQ ID NO: 255611
  chr6:3193808-3194023
  hypo

SEQ ID NO: 433555 - DNA, 44 bp, Homo sapiens; identical to SEQ ID NO: 255612
  chr6:3194436-3194480
  hypo

SEQ ID NO: 433556 - DNA, 352 bp, Homo sapiens; identical to SEQ ID NO: 255613
  chr6:3195390-3195742
  hypo

SEQ ID NO: 433557 - DNA, 218 bp, Homo sapiens; identical to SEQ ID NO: 255614
  chr6:3218509-3218727
  hypo

SEQ ID NO: 433558 - DNA, 149 bp, Homo sapiens; identical to SEQ ID NO: 255615
  chr6:3250843-3250992
  hypo

SEQ ID NO: 433559 - DNA, 44 bp, Homo sapiens; identical to SEQ ID NO: 255617
  chr6:3263844-3263888
  hypo

SEQ ID NO: 433560 - DNA, 90 bp, Homo sapiens; identical to SEQ ID NO: 255618
  chr6:3267969-3268059
  hypo

SEQ ID NO: 433561 - DNA, 68 bp, Homo sapiens; identical to SEQ ID NO: 255619
  chr6:3269488-3269556
  hypo

SEQ ID NO: 433562 - DNA, 248 bp, Homo sapiens; identical to SEQ ID NO: 255620
  chr6:3273206-3273454
  hypo

SEQ ID NO: 433563 - DNA, 96 bp, Homo sapiens; identical to SEQ ID NO: 210579
  chr6:3281277-3281373
  hypo

SEQ ID NO: 433564 - DNA, 36 bp, Homo sapiens; identical to SEQ ID NO: 210581
  chr6:3289595-3289631
  hypo

SEQ ID NO: 433565 - DNA, 152 bp, Homo sapiens; identical to SEQ ID NO: 255624
  chr6:3290703-3290855
  hypo

SEQ ID NO: 433566 - DNA, 120 bp, Homo sapiens; identical to SEQ ID NO: 255625
  chr6:3302110-3302230
  hypo

SEQ ID NO: 433567 - DNA, 69 bp, Homo sapiens; identical to SEQ ID NO: 255627
  chr6:3312767-3312836
  hypo

SEQ ID NO: 433568 - DNA, 69 bp, Homo sapiens; identical to SEQ ID NO: 255628
  chr6:3315028-3315097
  hypo

SEQ ID NO: 433569 - DNA, 157 bp, Homo sapiens; identical to SEQ ID NO: 255629
  chr6:3315694-3315851
  hypo

SEQ ID NO: 433570 - DNA, 76 bp, Homo sapiens; identical to SEQ ID NO: 210582
  chr6:3316815-3316891
  hypo

SEQ ID NO: 433571 - DNA, 200 bp, Homo sapiens; identical to SEQ ID NO: 255631
  chr6:3321383-3321583
  hypo

SEQ ID NO: 433572 - DNA, 178 bp, Homo sapiens; identical to SEQ ID NO: 255632
  chr6:3322742-3322920
  hypo

SEQ ID NO: 433573 - DNA, 527 bp, Homo sapiens; identical to SEQ ID NO: 255633
  chr6:3328432-3328959
  hypo

SEQ ID NO: 433574 - DNA, 210 bp, Homo sapiens; identical to SEQ ID NO: 255635
  chr6:3346366-3346576
  hypo

SEQ ID NO: 433575 - DNA, 169 bp, Homo sapiens; identical to SEQ ID NO: 210584
  chr6:3405476-3405645
  hypo

SEQ ID NO: 433576 - DNA, 92 bp, Homo sapiens; identical to SEQ ID NO: 210585
  chr6:3405713-3405805
  hypo

SEQ ID NO: 433577 - DNA, 556 bp, Homo sapiens; identical to SEQ ID NO: 255637
  chr6:3441846-3442402
  hypo

SEQ ID NO: 433578 - DNA, 46 bp, Homo sapiens; identical to SEQ ID NO: 255638
  chr6:3445257-3445303
  hypo

SEQ ID NO: 433579 - DNA, 43 bp, Homo sapiens; identical to SEQ ID NO: 255639
  chr6:3450542-3450585
  hypo

SEQ ID NO: 433580 - DNA, 42 bp, Homo sapiens; identical to SEQ ID NO: 255640
  chr6:3450825-3450867
  hypo

SEQ ID NO: 433581 - DNA, 1366 bp, Homo sapiens; identical to SEQ ID NO: 283714
  chr6:3455898-3457264
  hypo

SEQ ID NO: 433582 - DNA, 216 bp, Homo sapiens; identical to SEQ ID NO: 255641
  chr6:3468953-3469169
  hypo

SEQ ID NO: 433583 - DNA, 96 bp, Homo sapiens; identical to SEQ ID NO: 255642
  chr6:3471226-3471322
  hypo

SEQ ID NO: 433584 - DNA, 272 bp, Homo sapiens; identical to SEQ ID NO: 255643
  chr6:3515169-3515441
  hypo

SEQ ID NO: 433585 - DNA, 139 bp, Homo sapiens; identical to SEQ ID NO: 255644
  chr6:3540898-3541037
  hypo

SEQ ID NO: 433586 - DNA, 100 bp, Homo sapiens; identical to SEQ ID NO: 255645
  chr6:3543266-3543366
  hypo

SEQ ID NO: 433587 - DNA, 140 bp, Homo sapiens; identical to SEQ ID NO: 255646
  chr6:3572618-3572758
  hypo

SEQ ID NO: 433588 - DNA, 256 bp, Homo sapiens; identical to SEQ ID NO: 255647
  chr6:3578544-3578800
  hypo

SEQ ID NO: 433589 - DNA, 71 bp, Homo sapiens; identical to SEQ ID NO: 255649
  chr6:3590114-3590185
  hypo

SEQ ID NO: 433590 - DNA, 43 bp, Homo sapiens; identical to SEQ ID NO: 255652
  chr6:3633705-3633748
  hypo

SEQ ID NO: 433591 - DNA, 34 bp, Homo sapiens; identical to SEQ ID NO: 255653
  chr6:3646462-3646496
  hypo

SEQ ID NO: 433592 - DNA, 198 bp, Homo sapiens; identical to SEQ ID NO: 255656
  chr6:3711994-3712192
  hypo

SEQ ID NO: 433593 - DNA, 577 bp, Homo sapiens; identical to SEQ ID NO: 255658
  chr6:3724871-3725448
  hypo

SEQ ID NO: 433594 - DNA, 129 bp, Homo sapiens; identical to SEQ ID NO: 255661
  chr6:3738059-3738188
  hypo

SEQ ID NO: 433595 - DNA, 127 bp, Homo sapiens; identical to SEQ ID NO: 255662
  chr6:3784841-3784968
  hypo

SEQ ID NO: 433596 - DNA, 52 bp, Homo sapiens; identical to SEQ ID NO: 210595
  chr6:3821400-3821452
  hypo

SEQ ID NO: 433597 - DNA, 35 bp, Homo sapiens; identical to SEQ ID NO: 255664
  chr6:3850718-3850753
  hypo

SEQ ID NO: 433598 - DNA, 101 bp, Homo sapiens; identical to SEQ ID NO: 385642
  chr6:3880267-3880368
  hypo

SEQ ID NO: 433599 - DNA, 67 bp, Homo sapiens; identical to SEQ ID NO: 255666
  chr6:3900289-3900356
  hypo

SEQ ID NO: 433600 - DNA, 187 bp, Homo sapiens; identical to SEQ ID NO: 210596
  chr6:4020369-4020556
  hypo

SEQ ID NO: 433601 - DNA, 101 bp, Homo sapiens; identical to SEQ ID NO: 255670
  chr6:4189172-4189273
  hypo

SEQ ID NO: 433602 - DNA, 187 bp, Homo sapiens; identical to SEQ ID NO: 210598
  chr6:4254744-4254931
  hypo

SEQ ID NO: 433603 - DNA, 201 bp, Homo sapiens; identical to SEQ ID NO: 210599
  chr6:4494278-4494479
  hypo

SEQ ID NO: 433604 - DNA, 368 bp, Homo sapiens; identical to SEQ ID NO: 255673
  chr6:4549977-4550345
  hypo

SEQ ID NO: 433605 - DNA, 68 bp, Homo sapiens; identical to SEQ ID NO: 255675
  chr6:4563333-4563401
  hypo

SEQ ID NO: 433606 - DNA, 42 bp, Homo sapiens; identical to SEQ ID NO: 255676
  chr6:4689095-4689137
  hypo

SEQ ID NO: 433607 - DNA, 95 bp, Homo sapiens; identical to SEQ ID NO: 255677
  chr6:4724690-4724785
  hypo

SEQ ID NO: 433608 - DNA, 61 bp, Homo sapiens; identical to SEQ ID NO: 255678
  chr6:4782240-4782301
  hypo

SEQ ID NO: 433609 - DNA, 124 bp, Homo sapiens; identical to SEQ ID NO: 305454
  chr6:4836458-4836582
  hypo

SEQ ID NO: 433610 - DNA, 112 bp, Homo sapiens; identical to SEQ ID NO: 255680
  chr6:4854165-4854277
  hypo

SEQ ID NO: 433611 - DNA, 70 bp, Homo sapiens; identical to SEQ ID NO: 255681
  chr6:4854537-4854607
  hypo

SEQ ID NO: 433612 - DNA, 91 bp, Homo sapiens; identical to SEQ ID NO: 305457
  chr6:4858682-4858773
  hypo

SEQ ID NO: 433613 - DNA, 42 bp, Homo sapiens; identical to SEQ ID NO: 255683
  chr6:4872578-4872620
  hypo

SEQ ID NO: 433614 - DNA, 110 bp, Homo sapiens; identical to SEQ ID NO: 210606
  chr6:4874532-4874642
  hypo

SEQ ID NO: 433615 - DNA, 573 bp, Homo sapiens; identical to SEQ ID NO: 255687
  chr6:4905023-4905596
  hypo

SEQ ID NO: 433616 - DNA, 198 bp, Homo sapiens; identical to SEQ ID NO: 210609
  chr6:4909052-4909250
  hypo

SEQ ID NO: 433617 - DNA, 91 bp, Homo sapiens; identical to SEQ ID NO: 210610
  chr6:4909755-4909846
  hypo

SEQ ID NO: 433618 - DNA, 31 bp, Homo sapiens; identical to SEQ ID NO: 255690
  chr6:4910086-4910117
  hypo

SEQ ID NO: 433619 - DNA, 75 bp, Homo sapiens; identical to SEQ ID NO: 405079
  chr6:4910984-4911059
  hypo

SEQ ID NO: 433620 - DNA, 48 bp, Homo sapiens; identical to SEQ ID NO: 255693
  chr6:4936320-4936368
  hypo

SEQ ID NO: 433621 - DNA, 277 bp, Homo sapiens; identical to SEQ ID NO: 210613
  chr6:4950659-4950936
  hypo

SEQ ID NO: 433622 - DNA, 113 bp, Homo sapiens; identical to SEQ ID NO: 255697
  chr6:4954218-4954331
  hypo

SEQ ID NO: 433623 - DNA, 33 bp, Homo sapiens; identical to SEQ ID NO: 210614
  chr6:5003274-5003307
  hypo

SEQ ID NO: 433624 - DNA, 206 bp, Homo sapiens; identical to SEQ ID NO: 255699
  chr6:5107468-5107674
  hypo

SEQ ID NO: 433625 - DNA, 223 bp, Homo sapiens; identical to SEQ ID NO: 210616
  chr6:5507940-5508163
  hypo

SEQ ID NO: 433626 - DNA, 132 bp, Homo sapiens; identical to SEQ ID NO: 210617
  chr6:5510683-5510815
  hypo

SEQ ID NO: 433627 - DNA, 126 bp, Homo sapiens; identical to SEQ ID NO: 255704
  chr6:5537758-5537884
  hypo

SEQ ID NO: 433628 - DNA, 141 bp, Homo sapiens; identical to SEQ ID NO: 255705
  chr6:5556543-5556684
  hypo

SEQ ID NO: 433629 - DNA, 154 bp, Homo sapiens; identical to SEQ ID NO: 255706
  chr6:5663764-5663918
  hypo

SEQ ID NO: 433630 - DNA, 156 bp, Homo sapiens; identical to SEQ ID NO: 255707
  chr6:5746473-5746629
  hypo

SEQ ID NO: 433631 - DNA, 440 bp, Homo sapiens; identical to SEQ ID NO: 255708
  chr6:5783577-5784017
  hypo

SEQ ID NO: 433632 - DNA, 128 bp, Homo sapiens; identical to SEQ ID NO: 255709
  chr6:5784047-5784175
  hypo

SEQ ID NO: 433633 - DNA, 73 bp, Homo sapiens; identical to SEQ ID NO: 255710
  chr6:5839914-5839987
  hypo

SEQ ID NO: 433634 - DNA, 399 bp, Homo sapiens; identical to SEQ ID NO: 283730
  chr6:5999609-6000008
  hypo

SEQ ID NO: 433635 - DNA, 93 bp, Homo sapiens; identical to SEQ ID NO: 283731
  chr6:6000046-6000139
  hypo

SEQ ID NO: 433636 - DNA, 147 bp, Homo sapiens; identical to SEQ ID NO: 305488
  chr6:6045510-6045657
  hypo

SEQ ID NO: 433637 - DNA, 113 bp, Homo sapiens; identical to SEQ ID NO: 255712
  chr6:6167628-6167741
  hypo

SEQ ID NO: 433638 - DNA, 90 bp, Homo sapiens; identical to SEQ ID NO: 305490
  chr6:6199260-6199350
  hypo

SEQ ID NO: 433639 - DNA, 87 bp, Homo sapiens; identical to SEQ ID NO: 210620
  chr6:6199380-6199467
  hypo

SEQ ID NO: 433640 - DNA, 57 bp, Homo sapiens; identical to SEQ ID NO: 255714
  chr6:6250343-6250400
  hypo

SEQ ID NO: 433641 - DNA, 340 bp, Homo sapiens; identical to SEQ ID NO: 255715
  chr6:6614432-6614772
  hypo

SEQ ID NO: 433642 - DNA, 128 bp, Homo sapiens; identical to SEQ ID NO: 255716
  chr6:6737010-6737138
  hypo

SEQ ID NO: 433643 - DNA, 122 bp, Homo sapiens; identical to SEQ ID NO: 305497
  chr6:6745316-6745438
  hypo

SEQ ID NO: 433644 - DNA, 56 bp, Homo sapiens; identical to SEQ ID NO: 305498
  chr6:6745468-6745524
  hypo

SEQ ID NO: 433645 - DNA, 92 bp, Homo sapiens; identical to SEQ ID NO: 255718
  chr6:6753685-6753777
  hypo

SEQ ID NO: 433646 - DNA, 193 bp, Homo sapiens; identical to SEQ ID NO: 255720
  chr6:6824564-6824757
  hypo

SEQ ID NO: 433647 - DNA, 197 bp, Homo sapiens; identical to SEQ ID NO: 210622
  chr6:6898399-6898596
  hypo

SEQ ID NO: 433648 - DNA, 130 bp, Homo sapiens; identical to SEQ ID NO: 210623
  chr6:6901361-6901491
  hypo

SEQ ID NO: 433649 - DNA, 38 bp, Homo sapiens; identical to SEQ ID NO: 255723
  chr6:6934020-6934058
  hypo

SEQ ID NO: 433650 - DNA, 98 bp, Homo sapiens; identical to SEQ ID NO: 255724
  chr6:6969970-6970068
  hypo

SEQ ID NO: 433651 - DNA, 85 bp, Homo sapiens; identical to SEQ ID NO: 210624
  chr6:6971301-6971386
  hypo

SEQ ID NO: 433652 - DNA, 93 bp, Homo sapiens; identical to SEQ ID NO: 255726
  chr6:6982819-6982912
  hypo

SEQ ID NO: 433653 - DNA, 739 bp, Homo sapiens; identical to SEQ ID NO: 283735
  chr6:7051921-7052660
  hypo

SEQ ID NO: 433654 - DNA, 94 bp, Homo sapiens; identical to SEQ ID NO: 255728
  chr6:7058379-7058473
  hypo

SEQ ID NO: 433655 - DNA, 98 bp, Homo sapiens; identical to SEQ ID NO: 255729
  chr6:7132660-7132758
  hypo

SEQ ID NO: 433656 - DNA, 117 bp, Homo sapiens; identical to SEQ ID NO: 210626
  chr6:7204766-7204883
  hypo

SEQ ID NO: 433657 - DNA, 82 bp, Homo sapiens; identical to SEQ ID NO: 210627
  chr6:7230353-7230435
  hypo

SEQ ID NO: 433658 - DNA, 156 bp, Homo sapiens; identical to SEQ ID NO: 210629
  chr6:7246886-7247042
  hypo

SEQ ID NO: 433659 - DNA, 112 bp, Homo sapiens; identical to SEQ ID NO: 255736
  chr6:7267437-7267549
  hypo

SEQ ID NO: 433660 - DNA, 180 bp, Homo sapiens; identical to SEQ ID NO: 255737
  chr6:7268060-7268240
  hypo

SEQ ID NO: 433661 - DNA, 134 bp, Homo sapiens; identical to SEQ ID NO: 210630
  chr6:7269314-7269448
  hypo

SEQ ID NO: 433662 - DNA, 55 bp, Homo sapiens; identical to SEQ ID NO: 255739
  chr6:7271971-7272026
  hypo

SEQ ID NO: 433663 - DNA, 102 bp, Homo sapiens; identical to SEQ ID NO: 210631
  chr6:7294551-7294653
  hypo

SEQ ID NO: 433664 - DNA, 170 bp, Homo sapiens; identical to SEQ ID NO: 255741
  chr6:7415147-7415317
  hypo

SEQ ID NO: 433665 - DNA, 1272 bp, Homo sapiens; identical to SEQ ID NO: 418519
  chr6:7541428-7542700
  hypo

SEQ ID NO: 433666 - DNA, 202 bp, Homo sapiens; identical to SEQ ID NO: 255742
  chr6:7691935-7692137
  hypo

SEQ ID NO: 433667 - DNA, 37 bp, Homo sapiens; identical to SEQ ID NO: 255743
  chr6:7767221-7767258
  hypo

SEQ ID NO: 433668 - DNA, 79 bp, Homo sapiens; identical to SEQ ID NO: 255744
  chr6:7879856-7879935
  hypo

SEQ ID NO: 433669 - DNA, 322 bp, Homo sapiens; identical to SEQ ID NO: 255745
  chr6:7880271-7880593
  hypo

SEQ ID NO: 433670 - DNA, 559 bp, Homo sapiens; identical to SEQ ID NO: 210634
  chr6:7883236-7883795
  hypo

SEQ ID NO: 433671 - DNA, 534 bp, Homo sapiens; identical to SEQ ID NO: 255748
  chr6:7884119-7884653
  hypo

SEQ ID NO: 433672 - DNA, 203 bp, Homo sapiens; identical to SEQ ID NO: 210636
  chr6:7885608-7885811
  hypo

SEQ ID NO: 433673 - DNA, 69 bp, Homo sapiens; identical to SEQ ID NO: 210639
  chr6:7889726-7889795
  hypo

SEQ ID NO: 433674 - DNA, 195 bp, Homo sapiens; identical to SEQ ID NO: 255757
  chr6:7893046-7893241
  hypo

SEQ ID NO: 433675 - DNA, 90 bp, Homo sapiens; identical to SEQ ID NO: 210643
  chr6:7976897-7976987
  hypo

SEQ ID NO: 433676 - DNA, 46 bp, Homo sapiens; identical to SEQ ID NO: 210644
  chr6:7986658-7986704
  hypo

SEQ ID NO: 433677 - DNA, 180 bp, Homo sapiens; identical to SEQ ID NO: 255764
  chr6:9041150-9041330
  hypo

SEQ ID NO: 433678 - DNA, 43 bp, Homo sapiens; identical to SEQ ID NO: 255766
  chr6:10491329-10491372
  hypo

SEQ ID NO: 433679 - DNA, 99 bp, Homo sapiens; identical to SEQ ID NO: 255767
  chr6:10527664-10527763
  hypo

SEQ ID NO: 433680 - DNA, 148 bp, Homo sapiens; identical to SEQ ID NO: 210646
  chr6:10538235-10538383
  hypo

SEQ ID NO: 433681 - DNA, 41 bp, Homo sapiens; identical to SEQ ID NO: 210647
  chr6:10539696-10539737
  hypo

SEQ ID NO: 433682 - DNA, 35 bp, Homo sapiens; identical to SEQ ID NO: 255771
  chr6:10549001-10549036
  hypo

SEQ ID NO: 433683 - DNA, 257 bp, Homo sapiens; identical to SEQ ID NO: 255772
  chr6:10560601-10560858
  hypo

SEQ ID NO: 433684 - DNA, 180 bp, Homo sapiens; identical to SEQ ID NO: 210648
  chr6:10693035-10693215
  hypo

SEQ ID NO: 433685 - DNA, 120 bp, Homo sapiens; identical to SEQ ID NO: 210649
  chr6:10693275-10693395
  hypo

SEQ ID NO: 433686 - DNA, 35 bp, Homo sapiens; identical to SEQ ID NO: 255776
  chr6:10700561-10700596
  hypo

SEQ ID NO: 433687 - DNA, 87 bp, Homo sapiens; identical to SEQ ID NO: 210650
  chr6:10735102-10735189
  hypo

SEQ ID NO: 433688 - DNA, 250 bp, Homo sapiens; identical to SEQ ID NO: 255778
  chr6:10785248-10785498
  hypo

SEQ ID NO: 433689 - DNA, 83 bp, Homo sapiens; identical to SEQ ID NO: 255779
  chr6:11029460-11029543
  hypo

SEQ ID NO: 433690 - DNA, 90 bp, Homo sapiens; identical to SEQ ID NO: 255780
  chr6:11052342-11052432
  hypo

SEQ ID NO: 433691 - DNA, 65 bp, Homo sapiens; identical to SEQ ID NO: 255783
  chr6:11324665-11324730
  hypo

SEQ ID NO: 433692 - DNA, 608 bp, Homo sapiens; identical to SEQ ID NO: 112888
  chr6:11538299-11538907
  hypo

SEQ ID NO: 433693 - DNA, 63 bp, Homo sapiens; identical to SEQ ID NO: 255784
  chr6:11633530-11633593
  hypo

SEQ ID NO: 433694 - DNA, 105 bp, Homo sapiens; identical to SEQ ID NO: 255785
  chr6:11711665-11711770
  hypo

SEQ ID NO: 433695 - DNA, 47 bp, Homo sapiens; identical to SEQ ID NO: 255786
  chr6:11789746-11789793
  hypo

SEQ ID NO: 433696 - DNA, 73 bp, Homo sapiens; identical to SEQ ID NO: 255787
  chr6:11789823-11789896
  hypo

SEQ ID NO: 433697 - DNA, 116 bp, Homo sapiens; identical to SEQ ID NO: 255788
  chr6:11926204-11926320
  hypo

SEQ ID NO: 433698 - DNA, 37 bp, Homo sapiens; identical to SEQ ID NO: 255789
  chr6:12029574-12029611
  hypo

SEQ ID NO: 433699 - DNA, 593 bp, Homo sapiens; identical to SEQ ID NO: 305570
  chr6:12222894-12223487
  hypo

SEQ ID NO: 433700 - DNA, 95 bp, Homo sapiens; identical to SEQ ID NO: 210652
  chr6:12287832-12287927
  hypo

SEQ ID NO: 433701 - DNA, 82 bp, Homo sapiens; identical to SEQ ID NO: 255795
  chr6:12456683-12456765
  hypo

SEQ ID NO: 433702 - DNA, 105 bp, Homo sapiens; identical to SEQ ID NO: 255796
  chr6:12965812-12965917
  hypo

SEQ ID NO: 433703 - DNA, 296 bp, Homo sapiens; identical to SEQ ID NO: 255797
  chr6:13295931-13296227
  hypo

SEQ ID NO: 433704 - DNA, 183 bp, Homo sapiens; identical to SEQ ID NO: 210653
  chr6:13296596-13296779
  hypo

SEQ ID NO: 433705 - DNA, 135 bp, Homo sapiens; identical to SEQ ID NO: 210654
  chr6:13333029-13333164
  hypo

SEQ ID NO: 433706 - DNA, 100 bp, Homo sapiens; identical to SEQ ID NO: 255801
  chr6:13351756-13351856
  hypo

SEQ ID NO: 433707 - DNA, 83 bp, Homo sapiens; identical to SEQ ID NO: 210655
  chr6:13397453-13397536
  hypo

SEQ ID NO: 433708 - DNA, 389 bp, Homo sapiens; identical to SEQ ID NO: 210656
  chr6:13456727-13457116
  hypo

SEQ ID NO: 433709 - DNA, 380 bp, Homo sapiens; identical to SEQ ID NO: 305583
  chr6:13510021-13510401
  hypo

SEQ ID NO: 433710 - DNA, 146 bp, Homo sapiens; identical to SEQ ID NO: 200285
  chr6:13574018-13574164
  hypo

SEQ ID NO: 433711 - DNA, 37 bp, Homo sapiens; identical to SEQ ID NO: 210658
  chr6:13631319-13631356
  hypo

SEQ ID NO: 433712 - DNA, 84 bp, Homo sapiens; identical to SEQ ID NO: 255807
  chr6:13780584-13780668
  hypo

SEQ ID NO: 433713 - DNA, 126 bp, Homo sapiens; identical to SEQ ID NO: 210659
  chr6:14002319-14002445
  hypo

SEQ ID NO: 433714 - DNA, 54 bp, Homo sapiens; identical to SEQ ID NO: 210660
  chr6:14002475-14002529
  hypo

SEQ ID NO: 433715 - DNA, 89 bp, Homo sapiens; identical to SEQ ID NO: 255809
  chr6:14002889-14002978
  hypo

SEQ ID NO: 433716 - DNA, 100 bp, Homo sapiens; identical to SEQ ID NO: 210661
  chr6:14099382-14099482
  hypo

SEQ ID NO: 433717 - DNA, 41 bp, Homo sapiens; identical to SEQ ID NO: 255811
  chr6:14116492-14116533
  hypo

SEQ ID NO: 433718 - DNA, 292 bp, Homo sapiens; identical to SEQ ID NO: 283782
  chr6:14117386-14117678
  hypo

SEQ ID NO: 433719 - DNA, 40 bp, Homo sapiens; identical to SEQ ID NO: 255812
  chr6:14130664-14130704
  hypo

SEQ ID NO: 433720 - DNA, 94 bp, Homo sapiens; identical to SEQ ID NO: 255813
  chr6:14139162-14139256
  hypo

SEQ ID NO: 433721 - DNA, 111 bp, Homo sapiens; identical to SEQ ID NO: 210663
  chr6:14203412-14203523
  hypo

SEQ ID NO: 433722 - DNA, 128 bp, Homo sapiens; identical to SEQ ID NO: 200288
  chr6:14211103-14211231
  hypo

SEQ ID NO: 433723 - DNA, 172 bp, Homo sapiens; identical to SEQ ID NO: 255815
  chr6:14273201-14273373
  hypo

SEQ ID NO: 433724 - DNA, 144 bp, Homo sapiens; identical to SEQ ID NO: 255816
  chr6:14274907-14275051
  hypo

SEQ ID NO: 433725 - DNA, 434 bp, Homo sapiens; identical to SEQ ID NO: 210665
  chr6:14282463-14282897
  hypo

SEQ ID NO: 433726 - DNA, 148 bp, Homo sapiens; identical to SEQ ID NO: 210666
  chr6:14324570-14324718
  hypo

SEQ ID NO: 433727 - DNA, 36 bp, Homo sapiens; identical to SEQ ID NO: 255819
  chr6:14726132-14726168
  hypo

SEQ ID NO: 433728 - DNA, 136 bp, Homo sapiens; identical to SEQ ID NO: 255820
  chr6:14772274-14772410
  hypo

SEQ ID NO: 433729 - DNA, 36 bp, Homo sapiens; identical to SEQ ID NO: 255821
  chr6:14777340-14777376
  hypo

SEQ ID NO: 433730 - DNA, 36 bp, Homo sapiens; identical to SEQ ID NO: 255822
  chr6:14916087-14916123
  hypo

SEQ ID NO: 433731 - DNA, 31 bp, Homo sapiens; identical to SEQ ID NO: 255823
  chr6:14930077-14930108
  hypo

SEQ ID NO: 433732 - DNA, 32 bp, Homo sapiens; identical to SEQ ID NO: 255824
  chr6:14934115-14934147
  hypo

SEQ ID NO: 433733 - DNA, 81 bp, Homo sapiens; identical to SEQ ID NO: 255825
  chr6:14941362-14941443
  hypo

SEQ ID NO: 433734 - DNA, 87 bp, Homo sapiens; identical to SEQ ID NO: 210667
  chr6:14966820-14966907
  hypo

SEQ ID NO: 433735 - DNA, 102 bp, Homo sapiens; identical to SEQ ID NO: 255827
  chr6:14986858-14986960
  hypo

SEQ ID NO: 433736 - DNA, 39 bp, Homo sapiens; identical to SEQ ID NO: 210668
  chr6:15083849-15083888
  hypo

SEQ ID NO: 433737 - DNA, 209 bp, Homo sapiens; identical to SEQ ID NO: 210669
  chr6:15227670-15227879
  hypo

SEQ ID NO: 433738 - DNA, 43 bp, Homo sapiens; identical to SEQ ID NO: 210670
  chr6:15282318-15282361
  hypo

SEQ ID NO: 433739 - DNA, 43 bp, Homo sapiens; identical to SEQ ID NO: 210671
  chr6:15282481-15282524
  hypo

SEQ ID NO: 433740 - DNA, 120 bp, Homo sapiens; identical to SEQ ID NO: 210672
  chr6:15283483-15283603
  hypo

SEQ ID NO: 433741 - DNA, 38 bp, Homo sapiens; identical to SEQ ID NO: 255834
  chr6:15469670-15469708
  hypo

SEQ ID NO: 433742 - DNA, 149 bp, Homo sapiens; identical to SEQ ID NO: 255835
  chr6:15501255-15501404
  hypo

SEQ ID NO: 433743 - DNA, 128 bp, Homo sapiens; identical to SEQ ID NO: 255836
  chr6:15503289-15503417
  hypo

SEQ ID NO: 433744 - DNA, 152 bp, Homo sapiens; identical to SEQ ID NO: 210673
  chr6:15512506-15512658
  hypo

SEQ ID NO: 433745 - DNA, 41 bp, Homo sapiens; identical to SEQ ID NO: 210676
  chr6:15518530-15518571
  hypo

SEQ ID NO: 433746 - DNA, 53 bp, Homo sapiens; identical to SEQ ID NO: 210677
  chr6:15523495-15523548
  hypo

SEQ ID NO: 433747 - DNA, 300 bp, Homo sapiens; identical to SEQ ID NO: 255841
  chr6:15525179-15525479
  hypo

SEQ ID NO: 433748 - DNA, 41 bp, Homo sapiens; identical to SEQ ID NO: 255842
  chr6:15530495-15530536
  hypo

SEQ ID NO: 433749 - DNA, 31 bp, Homo sapiens; identical to SEQ ID NO: 210678
  chr6:15907074-15907105
  hypo

SEQ ID NO: 433750 - DNA, 146 bp, Homo sapiens; identical to SEQ ID NO: 255845
  chr6:16197607-16197753
  hypo

SEQ ID NO: 433751 - DNA, 146 bp, Homo sapiens; identical to SEQ ID NO: 255847
  chr6:16298907-16299053
  hypo

SEQ ID NO: 433752 - DNA, 45 bp, Homo sapiens; identical to SEQ ID NO: 255849
  chr6:16733498-16733543
  hypo

SEQ ID NO: 433753 - DNA, 42 bp, Homo sapiens; identical to SEQ ID NO: 255850
  chr6:16841589-16841631
  hypo

SEQ ID NO: 433754 - DNA, 204 bp, Homo sapiens; identical to SEQ ID NO: 255852
  chr6:17508425-17508629
  hypo

SEQ ID NO: 433755 - DNA, 120 bp, Homo sapiens; identical to SEQ ID NO: 255853
  chr6:17756939-17757059
  hypo

SEQ ID NO: 433756 - DNA, 42 bp, Homo sapiens; identical to SEQ ID NO: 210683
  chr6:17761882-17761924
  hypo

SEQ ID NO: 433757 - DNA, 76 bp, Homo sapiens; identical to SEQ ID NO: 210684
  chr6:17788886-17788962
  hypo

SEQ ID NO: 433758 - DNA, 95 bp, Homo sapiens; identical to SEQ ID NO: 210685
  chr6:17797155-17797250
  hypo

SEQ ID NO: 433759 - DNA, 254 bp, Homo sapiens; identical to SEQ ID NO: 255857
  chr6:17799566-17799820
  hypo

SEQ ID NO: 433760 - DNA, 67 bp, Homo sapiens; identical to SEQ ID NO: 210686
  chr6:17800168-17800235
  hypo

SEQ ID NO: 433761 - DNA, 94 bp, Homo sapiens; identical to SEQ ID NO: 255859
  chr6:17801739-17801833
  hypo

SEQ ID NO: 433762 - DNA, 51 bp, Homo sapiens; identical to SEQ ID NO: 255860
  chr6:17837137-17837188
  hypo

SEQ ID NO: 433763 - DNA, 36 bp, Homo sapiens; identical to SEQ ID NO: 255861
  chr6:17934558-17934594
  hypo

SEQ ID NO: 433764 - DNA, 329 bp, Homo sapiens; identical to SEQ ID NO: 210687
  chr6:17940369-17940698
  hypo

SEQ ID NO: 433765 - DNA, 38 bp, Homo sapiens; identical to SEQ ID NO: 255863
  chr6:18024631-18024669
  hypo

SEQ ID NO: 433766 - DNA, 120 bp, Homo sapiens; identical to SEQ ID NO: 210688
  chr6:18030874-18030994
  hypo

SEQ ID NO: 433767 - DNA, 104 bp, Homo sapiens; identical to SEQ ID NO: 255866
  chr6:18129286-18129390
  hypo

SEQ ID NO: 433768 - DNA, 40 bp, Homo sapiens; identical to SEQ ID NO: 255867
  chr6:18205884-18205924
  hypo

SEQ ID NO: 433769 - DNA, 87 bp, Homo sapiens; identical to SEQ ID NO: 255868
  chr6:18220400-18220487
  hypo

SEQ ID NO: 433770 - DNA, 77 bp, Homo sapiens; identical to SEQ ID NO: 255869
  chr6:18220965-18221042
  hypo

SEQ ID NO: 433771 - DNA, 76 bp, Homo sapiens; identical to SEQ ID NO: 255870
  chr6:18247862-18247938
  hypo

SEQ ID NO: 433772 - DNA, 98 bp, Homo sapiens; identical to SEQ ID NO: 210689
  chr6:18250345-18250443
  hypo

SEQ ID NO: 433773 - DNA, 41 bp, Homo sapiens; identical to SEQ ID NO: 210690
  chr6:18259258-18259299
  hypo

SEQ ID NO: 433774 - DNA, 33 bp, Homo sapiens; identical to SEQ ID NO: 210692
  chr6:18275933-18275966
  hypo

SEQ ID NO: 433775 - DNA, 39 bp, Homo sapiens; identical to SEQ ID NO: 200302
  chr6:18278043-18278082
  hypo

SEQ ID NO: 433776 - DNA, 38 bp, Homo sapiens; identical to SEQ ID NO: 255874
  chr6:18294411-18294449
  hypo

SEQ ID NO: 433777 - DNA, 43 bp, Homo sapiens; identical to SEQ ID NO: 210695
  chr6:18458440-18458483
  hypo

SEQ ID NO: 433778 - DNA, 180 bp, Homo sapiens; identical to SEQ ID NO: 210696
  chr6:19676997-19677177
  hypo

SEQ ID NO: 433779 - DNA, 42 bp, Homo sapiens; identical to SEQ ID NO: 210697
  chr6:19677237-19677279
  hypo

SEQ ID NO: 433780 - DNA, 38 bp, Homo sapiens; identical to SEQ ID NO: 255879
  chr6:19828887-19828925
  hypo

SEQ ID NO: 433781 - DNA, 83 bp, Homo sapiens; identical to SEQ ID NO: 255880
  chr6:19892212-19892295
  hypo

SEQ ID NO: 433782 - DNA, 35 bp, Homo sapiens; identical to SEQ ID NO: 255882
  chr6:19967405-19967440
  hypo

SEQ ID NO: 433783 - DNA, 66 bp, Homo sapiens; identical to SEQ ID NO: 255883
  chr6:20124517-20124583
  hypo

SEQ ID NO: 433784 - DNA, 41 bp, Homo sapiens; identical to SEQ ID NO: 255884
  chr6:20228878-20228919
  hypo

SEQ ID NO: 433785 - DNA, 32 bp, Homo sapiens; identical to SEQ ID NO: 255885
  chr6:20239105-20239137
  hypo

SEQ ID NO: 433786 - DNA, 120 bp, Homo sapiens; identical to SEQ ID NO: 255886
  chr6:20239437-20239557
  hypo

SEQ ID NO: 433787 - DNA, 43 bp, Homo sapiens; identical to SEQ ID NO: 255887
  chr6:20395766-20395809
  hypo

SEQ ID NO: 433788 - DNA, 362 bp, Homo sapiens; identical to SEQ ID NO: 255888
  chr6:20479819-20480181
  hypo

SEQ ID NO: 433789 - DNA, 141 bp, Homo sapiens; identical to SEQ ID NO: 305675
  chr6:20691377-20691518
  hypo

SEQ ID NO: 433790 - DNA, 102 bp, Homo sapiens; identical to SEQ ID NO: 305676
  chr6:20691548-20691650
  hypo

SEQ ID NO: 433791 - DNA, 150 bp, Homo sapiens; identical to SEQ ID NO: 255892
  chr6:20745519-20745669
  hypo

SEQ ID NO: 433792 - DNA, 181 bp, Homo sapiens; identical to SEQ ID NO: 210701
  chr6:21277794-21277975
  hypo

SEQ ID NO: 433793 - DNA, 280 bp, Homo sapiens; identical to SEQ ID NO: 255895
  chr6:21342661-21342941
  hypo

SEQ ID NO: 433794 - DNA, 95 bp, Homo sapiens; identical to SEQ ID NO: 255896
  chr6:21406919-21407014
  hypo

SEQ ID NO: 433795 - DNA, 87 bp, Homo sapiens; identical to SEQ ID NO: 255897
  chr6:21423807-21423894
  hypo

SEQ ID NO: 433796 - DNA, 206 bp, Homo sapiens; identical to SEQ ID NO: 255898
  chr6:21423954-21424160
  hypo

SEQ ID NO: 433797 - DNA, 33 bp, Homo sapiens; identical to SEQ ID NO: 255899
  chr6:21494919-21494952
  hypo

SEQ ID NO: 433798 - DNA, 93 bp, Homo sapiens; identical to SEQ ID NO: 210702
  chr6:21570592-21570685
  hypo

SEQ ID NO: 433799 - DNA, 1131 bp, Homo sapiens; identical to SEQ ID NO: 200308
  chr6:21594475-21595606
  hypo

SEQ ID NO: 433800 - DNA, 120 bp, Homo sapiens; identical to SEQ ID NO: 255902
  chr6:21622714-21622834
  hypo

SEQ ID NO: 433801 - DNA, 44 bp, Homo sapiens; identical to SEQ ID NO: 255903
  chr6:21633880-21633924
  hypo

SEQ ID NO: 433802 - DNA, 54 bp, Homo sapiens; identical to SEQ ID NO: 255904
  chr6:21918789-21918843
  hypo

SEQ ID NO: 433803 - DNA, 34 bp, Homo sapiens; identical to SEQ ID NO: 210705
  chr6:22037569-22037603
  hypo

SEQ ID NO: 433804 - DNA, 263 bp, Homo sapiens; identical to SEQ ID NO: 200314
  chr6:22146853-22147116
  hypo

SEQ ID NO: 433805 - DNA, 70 bp, Homo sapiens; identical to SEQ ID NO: 255906
  chr6:22294673-22294743
  hypo

SEQ ID NO: 433806 - DNA, 36 bp, Homo sapiens; identical to SEQ ID NO: 210707
  chr6:22331079-22331115
  hypo

SEQ ID NO: 433807 - DNA, 254 bp, Homo sapiens; identical to SEQ ID NO: 210708
  chr6:22349413-22349667
  hypo

SEQ ID NO: 433808 - DNA, 367 bp, Homo sapiens; identical to SEQ ID NO: 255909
  chr6:22569529-22569896
  hypo

SEQ ID NO: 433809 - DNA, 32 bp, Homo sapiens; identical to SEQ ID NO: 255910
  chr6:24035312-24035344
  hypo

SEQ ID NO: 433810 - DNA, 43 bp, Homo sapiens; identical to SEQ ID NO: 255911
  chr6:24343551-24343594
  hypo

SEQ ID NO: 433811 - DNA, 161 bp, Homo sapiens; identical to SEQ ID NO: 210709
  chr6:24425299-24425460
  hypo

SEQ ID NO: 433812 - DNA, 230 bp, Homo sapiens; identical to SEQ ID NO: 255913
  chr6:24432978-24433208
  hypo

SEQ ID NO: 433813 - DNA, 34 bp, Homo sapiens; identical to SEQ ID NO: 255914
  chr6:24476567-24476601
  hypo

SEQ ID NO: 433814 - DNA, 125 bp, Homo sapiens; identical to SEQ ID NO: 210711
  chr6:24523039-24523164
  hypo

SEQ ID NO: 433815 - DNA, 138 bp, Homo sapiens; identical to SEQ ID NO: 210712
  chr6:24647204-24647342
  hypo

SEQ ID NO: 433816 - DNA, 51 bp, Homo sapiens; identical to SEQ ID NO: 305705
  chr6:24761555-24761606
  hypo

SEQ ID NO: 433817 - DNA, 79 bp, Homo sapiens; identical to SEQ ID NO: 255919
  chr6:24847769-24847848
  hypo

SEQ ID NO: 433818 - DNA, 41 bp, Homo sapiens; identical to SEQ ID NO: 255920
  chr6:25023690-25023731
  hypo

SEQ ID NO: 433819 - DNA, 69 bp, Homo sapiens; identical to SEQ ID NO: 255921
  chr6:25103772-25103841
  hypo

SEQ ID NO: 433820 - DNA, 173 bp, Homo sapiens; identical to SEQ ID NO: 210714
  chr6:25153408-25153581
  hypo

SEQ ID NO: 433821 - DNA, 280 bp, Homo sapiens; identical to SEQ ID NO: 305710
  chr6:25218581-25218861
  hypo

SEQ ID NO: 433822 - DNA, 54 bp, Homo sapiens; identical to SEQ ID NO: 255926
  chr6:26018520-26018574
  hypo

SEQ ID NO: 433823 - DNA, 505 bp, Homo sapiens; identical to SEQ ID NO: 200317
  chr6:26027158-26027663
  hypo

SEQ ID NO: 433824 - DNA, 52 bp, Homo sapiens; identical to SEQ ID NO: 305716
  chr6:26047741-26047793
  hypo

SEQ ID NO: 433825 - DNA, 36 bp, Homo sapiens; identical to SEQ ID NO: 255929
  chr6:26095303-26095339
  hypo

SEQ ID NO: 433826 - DNA, 96 bp, Homo sapiens; identical to SEQ ID NO: 255933
  chr6:26294597-26294693
  hypo

SEQ ID NO: 433827 - DNA, 160 bp, Homo sapiens; identical to SEQ ID NO: 255934
  chr6:26386083-26386243
  hypo

SEQ ID NO: 433828 - DNA, 110 bp, Homo sapiens; identical to SEQ ID NO: 255935
  chr6:26423339-26423449
  hypo

SEQ ID NO: 433829 - DNA, 120 bp, Homo sapiens; identical to SEQ ID NO: 255936
  chr6:26549975-26550095
  hypo

SEQ ID NO: 433830 - DNA, 72 bp, Homo sapiens; identical to SEQ ID NO: 210720
  chr6:26970361-26970433
  hypo

SEQ ID NO: 433831 - DNA, 34 bp, Homo sapiens; identical to SEQ ID NO: 255938
  chr6:27102663-27102697
  hypo

SEQ ID NO: 433832 - DNA, 168 bp, Homo sapiens; identical to SEQ ID NO: 418607
  chr6:27219427-27219595
  hypo

SEQ ID NO: 433833 - DNA, 171 bp, Homo sapiens; identical to SEQ ID NO: 200372
  chr6:27219656-27219827
  hypo

SEQ ID NO: 433834 - DNA, 533 bp, Homo sapiens; identical to SEQ ID NO: 283917
  chr6:27440466-27440999
  hypo

SEQ ID NO: 433835 - DNA, 159 bp, Homo sapiens; identical to SEQ ID NO: 210724
  chr6:27441962-27442121
  hypo

SEQ ID NO: 433836 - DNA, 216 bp, Homo sapiens; identical to SEQ ID NO: 200375
  chr6:27447357-27447573
  hypo

SEQ ID NO: 433837 - DNA, 42 bp, Homo sapiens; identical to SEQ ID NO: 255941
  chr6:27631247-27631289
  hypo

SEQ ID NO: 433838 - DNA, 120 bp, Homo sapiens; identical to SEQ ID NO: 210726
  chr6:27770799-27770919
  hypo

SEQ ID NO: 433839 - DNA, 40 bp, Homo sapiens; identical to SEQ ID NO: 397303
  chr6:27806471-27806511
  hypo

SEQ ID NO: 433840 - DNA, 43 bp, Homo sapiens; identical to SEQ ID NO: 255943
  chr6:28031402-28031445
  hypo

SEQ ID NO: 433841 - DNA, 109 bp, Homo sapiens; identical to SEQ ID NO: 255944
  chr6:28192714-28192823
  hypo

SEQ ID NO: 433842 - DNA, 233 bp, Homo sapiens; identical to SEQ ID NO: 255946
  chr6:28397694-28397927
  hypo

SEQ ID NO: 433843 - DNA, 31 bp, Homo sapiens; identical to SEQ ID NO: 255947
  chr6:33549226-33549257
  hypo

SEQ ID NO: 433844 - DNA, 289 bp, Homo sapiens; identical to SEQ ID NO: 305742
  chr6:33578945-33579234
  hypo

SEQ ID NO: 433845 - DNA, 98 bp, Homo sapiens; identical to SEQ ID NO: 305743
  chr6:33579264-33579362
  hypo

SEQ ID NO: 433846 - DNA, 40 bp, Homo sapiens; identical to SEQ ID NO: 255949
  chr6:33597878-33597918
  hypo

SEQ ID NO: 433847 - DNA, 76 bp, Homo sapiens; identical to SEQ ID NO: 255950
  chr6:33606110-33606186
  hypo

SEQ ID NO: 433848 - DNA, 178 bp, Homo sapiens; identical to SEQ ID NO: 210731
  chr6:33609019-33609197
  hypo

SEQ ID NO: 433849 - DNA, 38 bp, Homo sapiens; identical to SEQ ID NO: 210732
  chr6:33609227-33609265
  hypo

SEQ ID NO: 433850 - DNA, 266 bp, Homo sapiens; identical to SEQ ID NO: 210733
  chr6:33638299-33638565
  hypo

SEQ ID NO: 433851 - DNA, 37 bp, Homo sapiens; identical to SEQ ID NO: 255953
  chr6:33645952-33645989
  hypo

SEQ ID NO: 433852 - DNA, 124 bp, Homo sapiens; identical to SEQ ID NO: 210734
  chr6:33653397-33653521
  hypo

SEQ ID NO: 433853 - DNA, 245 bp, Homo sapiens; identical to SEQ ID NO: 210735
  chr6:33674159-33674404
  hypo

SEQ ID NO: 433854 - DNA, 67 bp, Homo sapiens; identical to SEQ ID NO: 255956
  chr6:33684640-33684707
  hypo

SEQ ID NO: 433855 - DNA, 139 bp, Homo sapiens; identical to SEQ ID NO: 255957
  chr6:33687282-33687421
  hypo

SEQ ID NO: 433856 - DNA, 253 bp, Homo sapiens; identical to SEQ ID NO: 255958
  chr6:33694498-33694751
  hypo

SEQ ID NO: 433857 - DNA, 141 bp, Homo sapiens; identical to SEQ ID NO: 255959
  chr6:33701973-33702114
  hypo

SEQ ID NO: 433858 - DNA, 41 bp, Homo sapiens; identical to SEQ ID NO: 255960
  chr6:33740514-33740555
  hypo

SEQ ID NO: 433859 - DNA, 152 bp, Homo sapiens; identical to SEQ ID NO: 255961
  chr6:33745239-33745391
  hypo

SEQ ID NO: 433860 - DNA, 97 bp, Homo sapiens; identical to SEQ ID NO: 255962
  chr6:33745989-33746086
  hypo

SEQ ID NO: 433861 - DNA, 130 bp, Homo sapiens; identical to SEQ ID NO: 210737
  chr6:33748502-33748632
  hypo

SEQ ID NO: 433862 - DNA, 83 bp, Homo sapiens; identical to SEQ ID NO: 210738
  chr6:33771001-33771084
  hypo

SEQ ID NO: 433863 - DNA, 343 bp, Homo sapiens; identical to SEQ ID NO: 255965
  chr6:33802493-33802836
  hypo

SEQ ID NO: 433864 - DNA, 78 bp, Homo sapiens; identical to SEQ ID NO: 255966
  chr6:33871408-33871486
  hypo

SEQ ID NO: 433865 - DNA, 107 bp, Homo sapiens; identical to SEQ ID NO: 210739
  chr6:33907853-33907960
  hypo

SEQ ID NO: 433866 - DNA, 65 bp, Homo sapiens; identical to SEQ ID NO: 305765
  chr6:33955752-33955817
  hypo

SEQ ID NO: 433867 - DNA, 40 bp, Homo sapiens; identical to SEQ ID NO: 210740
  chr6:33962224-33962264
  hypo

SEQ ID NO: 433868 - DNA, 35 bp, Homo sapiens; identical to SEQ ID NO: 210741
  chr6:33985261-33985296
  hypo

SEQ ID NO: 433869 - DNA, 104 bp, Homo sapiens; identical to SEQ ID NO: 210743
  chr6:34100884-34100988
  hypo

SEQ ID NO: 433870 - DNA, 256 bp, Homo sapiens; identical to SEQ ID NO: 255975
  chr6:34208661-34208917
  hypo

SEQ ID NO: 433871 - DNA, 49 bp, Homo sapiens; identical to SEQ ID NO: 405199
  chr6:34219881-34219930
  hypo

SEQ ID NO: 433872 - DNA, 41 bp, Homo sapiens; identical to SEQ ID NO: 210746
  chr6:34231475-34231516
  hypo

SEQ ID NO: 433873 - DNA, 249 bp, Homo sapiens; identical to SEQ ID NO: 200412
  chr6:34359487-34359736
  hypo

SEQ ID NO: 433874 - DNA, 32 bp, Homo sapiens; identical to SEQ ID NO: 255978
  chr6:34395946-34395978
  hypo

SEQ ID NO: 433875 - DNA, 76 bp, Homo sapiens; identical to SEQ ID NO: 200413
  chr6:34405060-34405136
  hypo

SEQ ID NO: 433876 - DNA, 39 bp, Homo sapiens; identical to SEQ ID NO: 200414
  chr6:34405256-34405295
  hypo

SEQ ID NO: 433877 - DNA, 213 bp, Homo sapiens; identical to SEQ ID NO: 255982
  chr6:34503446-34503659
  hypo

SEQ ID NO: 433878 - DNA, 243 bp, Homo sapiens; identical to SEQ ID NO: 255983
  chr6:34507099-34507342
  hypo

SEQ ID NO: 433879 - DNA, 243 bp, Homo sapiens; identical to SEQ ID NO: 210750
  chr6:34512043-34512286
  hypo

SEQ ID NO: 433880 - DNA, 42 bp, Homo sapiens; identical to SEQ ID NO: 255985
  chr6:34513308-34513350
  hypo

SEQ ID NO: 433881 - DNA, 200 bp, Homo sapiens; identical to SEQ ID NO: 255986
  chr6:34513709-34513909
  hypo

SEQ ID NO: 433882 - DNA, 591 bp, Homo sapiens; identical to SEQ ID NO: 255988
  chr6:34519689-34520280
  hypo

SEQ ID NO: 433883 - DNA, 115 bp, Homo sapiens; identical to SEQ ID NO: 255990
  chr6:34524257-34524372
  hypo

SEQ ID NO: 433884 - DNA, 89 bp, Homo sapiens; identical to SEQ ID NO: 255992
  chr6:34563973-34564062
  hypo

SEQ ID NO: 433885 - DNA, 100 bp, Homo sapiens; identical to SEQ ID NO: 210753
  chr6:34683317-34683417
  hypo

SEQ ID NO: 433886 - DNA, 206 bp, Homo sapiens; identical to SEQ ID NO: 255995
  chr6:34690600-34690806
  hypo

SEQ ID NO: 433887 - DNA, 37 bp, Homo sapiens; identical to SEQ ID NO: 255997
  chr6:34726098-34726135
  hypo

SEQ ID NO: 433888 - DNA, 36 bp, Homo sapiens; identical to SEQ ID NO: 255998
  chr6:34854519-34854555
  hypo

SEQ ID NO: 433889 - DNA, 35 bp, Homo sapiens; identical to SEQ ID NO: 255999
  chr6:34870302-34870337
  hypo

SEQ ID NO: 433890 - DNA, 88 bp, Homo sapiens; identical to SEQ ID NO: 256000
  chr6:34953050-34953138
  hypo

SEQ ID NO: 433891 - DNA, 204 bp, Homo sapiens; identical to SEQ ID NO: 256001
  chr6:35019282-35019486
  hypo

SEQ ID NO: 433892 - DNA, 108 bp, Homo sapiens; identical to SEQ ID NO: 256002
  chr6:35027133-35027241
  hypo

SEQ ID NO: 433893 - DNA, 81 bp, Homo sapiens; identical to SEQ ID NO: 210754
  chr6:35033867-35033948
  hypo

SEQ ID NO: 433894 - DNA, 201 bp, Homo sapiens; identical to SEQ ID NO: 256004
  chr6:35044731-35044932
  hypo

SEQ ID NO: 433895 - DNA, 95 bp, Homo sapiens; identical to SEQ ID NO: 256005
  chr6:35045149-35045244
  hypo

SEQ ID NO: 433896 - DNA, 180 bp, Homo sapiens; identical to SEQ ID NO: 256006
  chr6:35045559-35045739
  hypo

SEQ ID NO: 433897 - DNA, 44 bp, Homo sapiens; identical to SEQ ID NO: 256007
  chr6:35048225-35048269
  hypo

SEQ ID NO: 433898 - DNA, 324 bp, Homo sapiens; identical to SEQ ID NO: 256008
  chr6:35048591-35048915
  hypo

SEQ ID NO: 433899 - DNA, 696 bp, Homo sapiens; identical to SEQ ID NO: 256012
  chr6:35374508-35375204
  hypo

SEQ ID NO: 433900 - DNA, 81 bp, Homo sapiens
  chr6:35454834-35454915
  hypo
ggtaacaacaatgcctcataccaacacagcacttttgtagggaaaaggcattttcatattcattcaaacctcacaaaacta

SEQ ID NO: 433901 - DNA, 54 bp, Homo sapiens; identical to SEQ ID NO: 256015
  chr6:35911713-35911767
  hypo

SEQ ID NO: 433902 - DNA, 38 bp, Homo sapiens; identical to SEQ ID NO: 210760
  chr6:35944304-35944342
  hypo

SEQ ID NO: 433903 - DNA, 50 bp, Homo sapiens; identical to SEQ ID NO: 256017
  chr6:36060522-36060572
  hypo

SEQ ID NO: 433904 - DNA, 35 bp, Homo sapiens; identical to SEQ ID NO: 256018
  chr6:36092696-36092731
  hypo

SEQ ID NO: 433905 - DNA, 81 bp, Homo sapiens; identical to SEQ ID NO: 256024
  chr6:36314473-36314554
  hypo

SEQ ID NO: 433906 - DNA, 64 bp, Homo sapiens; identical to SEQ ID NO: 256025
  chr6:36336750-36336814
  hypo

SEQ ID NO: 433907 - DNA, 145 bp, Homo sapiens; identical to SEQ ID NO: 256026
  chr6:36339126-36339271
  hypo

SEQ ID NO: 433908 - DNA, 83 bp, Homo sapiens; identical to SEQ ID NO: 256027
  chr6:36343600-36343683
  hypo

SEQ ID NO: 433909 - DNA, 71 bp, Homo sapiens; identical to SEQ ID NO: 305823
  chr6:36344553-36344624
  hypo

SEQ ID NO: 433910 - DNA, 120 bp, Homo sapiens; identical to SEQ ID NO: 210765
  chr6:36392402-36392522
  hypo

SEQ ID NO: 433911 - DNA, 38 bp, Homo sapiens; identical to SEQ ID NO: 210766
  chr6:36406489-36406527
  hypo

SEQ ID NO: 433912 - DNA, 80 bp, Homo sapiens; identical to SEQ ID NO: 256031
  chr6:36545729-36545809
  hypo

SEQ ID NO: 433913 - DNA, 102 bp, Homo sapiens; identical to SEQ ID NO: 210767
  chr6:36599663-36599765
  hypo

SEQ ID NO: 433914 - DNA, 41 bp, Homo sapiens; identical to SEQ ID NO: 256033
  chr6:36600065-36600106
  hypo

SEQ ID NO: 433915 - DNA, 130 bp, Homo sapiens; identical to SEQ ID NO: 256034
  chr6:36657808-36657938
  hypo

SEQ ID NO: 433916 - DNA, 229 bp, Homo sapiens; identical to SEQ ID NO: 210768
  chr6:36713048-36713277
  hypo

SEQ ID NO: 433917 - DNA, 45 bp, Homo sapiens; identical to SEQ ID NO: 210769
  chr6:36831606-36831651
  hypo

SEQ ID NO: 433918 - DNA, 45 bp, Homo sapiens; identical to SEQ ID NO: 256037
  chr6:36897107-36897152
  hypo

SEQ ID NO: 433919 - DNA, 148 bp, Homo sapiens; identical to SEQ ID NO: 256038
  chr6:36926814-36926962
  hypo

SEQ ID NO: 433920 - DNA, 177 bp, Homo sapiens; identical to SEQ ID NO: 256039
  chr6:36936701-36936878
  hypo

SEQ ID NO: 433921 - DNA, 257 bp, Homo sapiens; identical to SEQ ID NO: 256040
  chr6:36937179-36937436
  hypo

SEQ ID NO: 433922 - DNA, 97 bp, Homo sapiens; identical to SEQ ID NO: 256042
  chr6:36992805-36992902
  hypo

SEQ ID NO: 433923 - DNA, 94 bp, Homo sapiens; identical to SEQ ID NO: 210771
  chr6:37033766-37033860
  hypo

SEQ ID NO: 433924 - DNA, 118 bp, Homo sapiens; identical to SEQ ID NO: 256045
  chr6:37060659-37060777
  hypo

SEQ ID NO: 433925 - DNA, 40 bp, Homo sapiens; identical to SEQ ID NO: 210772
  chr6:37100545-37100585
  hypo

SEQ ID NO: 433926 - DNA, 31 bp, Homo sapiens; identical to SEQ ID NO: 256047
  chr6:37102029-37102060
  hypo

SEQ ID NO: 433927 - DNA, 44 bp, Homo sapiens; identical to SEQ ID NO: 256048
  chr6:37131659-37131703
  hypo

SEQ ID NO: 433928 - DNA, 629 bp, Homo sapiens; identical to SEQ ID NO: 283995
  chr6:37138570-37139199
  hypo

SEQ ID NO: 433929 - DNA, 38 bp, Homo sapiens; identical to SEQ ID NO: 256050
  chr6:37340458-37340496
  hypo

SEQ ID NO: 433930 - DNA, 86 bp, Homo sapiens; identical to SEQ ID NO: 210774
  chr6:37352725-37352811
  hypo

SEQ ID NO: 433931 - DNA, 597 bp, Homo sapiens; identical to SEQ ID NO: 256055
  chr6:37460887-37461484
  hypo

SEQ ID NO: 433932 - DNA, 153 bp, Homo sapiens; identical to SEQ ID NO: 256056
  chr6:37605017-37605170
  hypo

SEQ ID NO: 433933 - DNA, 36 bp, Homo sapiens; identical to SEQ ID NO: 256057
  chr6:37608135-37608171
  hypo

SEQ ID NO: 433934 - DNA, 103 bp, Homo sapiens; identical to SEQ ID NO: 256058
  chr6:37642012-37642115
  hypo

SEQ ID NO: 433935 - DNA, 102 bp, Homo sapiens; identical to SEQ ID NO: 210780
  chr6:37721653-37721755
  hypo

SEQ ID NO: 433936 - DNA, 197 bp, Homo sapiens; identical to SEQ ID NO: 256062
  chr6:37841059-37841256
  hypo

SEQ ID NO: 433937 - DNA, 151 bp, Homo sapiens; identical to SEQ ID NO: 305863
  chr6:38101972-38102123
  hypo

SEQ ID NO: 433938 - DNA, 104 bp, Homo sapiens; identical to SEQ ID NO: 256067
  chr6:38121253-38121357
  hypo

SEQ ID NO: 433939 - DNA, 82 bp, Homo sapiens; identical to SEQ ID NO: 210783
  chr6:38122002-38122084
  hypo

SEQ ID NO: 433940 - DNA, 63 bp, Homo sapiens; identical to SEQ ID NO: 210784
  chr6:38134384-38134447
  hypo

SEQ ID NO: 433941 - DNA, 186 bp, Homo sapiens; identical to SEQ ID NO: 210785
  chr6:38646372-38646558
  hypo

SEQ ID NO: 433942 - DNA, 93 bp, Homo sapiens; identical to SEQ ID NO: 210786
  chr6:39127059-39127152
  hypo

SEQ ID NO: 433943 - DNA, 41 bp, Homo sapiens; identical to SEQ ID NO: 256073
  chr6:39154859-39154900
  hypo

SEQ ID NO: 433944 - DNA, 239 bp, Homo sapiens; identical to SEQ ID NO: 256074
  chr6:39158097-39158336
  hypo

SEQ ID NO: 433945 - DNA, 103 bp, Homo sapiens; identical to SEQ ID NO: 210788
  chr6:39162023-39162126
  hypo

SEQ ID NO: 433946 - DNA, 66 bp, Homo sapiens; identical to SEQ ID NO: 256077
  chr6:39162448-39162514
  hypo

SEQ ID NO: 433947 - DNA, 42 bp, Homo sapiens; identical to SEQ ID NO: 256078
  chr6:39185583-39185625
  hypo

SEQ ID NO: 433948 - DNA, 37 bp, Homo sapiens; identical to SEQ ID NO: 256079
  chr6:39691931-39691968
  hypo

SEQ ID NO: 433949 - DNA, 667 bp, Homo sapiens; identical to SEQ ID NO: 284010
  chr6:39692723-39693390
  hypo

SEQ ID NO: 433950 - DNA, 35 bp, Homo sapiens; identical to SEQ ID NO: 256081
  chr6:39907360-39907395
  hypo

SEQ ID NO: 433951 - DNA, 184 bp, Homo sapiens; identical to SEQ ID NO: 256082
  chr6:40359821-40360005
  hypo

SEQ ID NO: 433952 - DNA, 31 bp, Homo sapiens; identical to SEQ ID NO: 256085
  chr6:40624387-40624418
  hypo

SEQ ID NO: 433953 - DNA, 120 bp, Homo sapiens; identical to SEQ ID NO: 256086
  chr6:40846066-40846186
  hypo

SEQ ID NO: 433954 - DNA, 73 bp, Homo sapiens; identical to SEQ ID NO: 210793
  chr6:41001834-41001907
  hypo

SEQ ID NO: 433955 - DNA, 46 bp, Homo sapiens; identical to SEQ ID NO: 256088
  chr6:41303868-41303914
  hypo

SEQ ID NO: 433956 - DNA, 320 bp, Homo sapiens; identical to SEQ ID NO: 418666
  chr6:41340387-41340707
  hypo

SEQ ID NO: 433957 - DNA, 230 bp, Homo sapiens; identical to SEQ ID NO: 256089
  chr6:41490965-41491195
  hypo

SEQ ID NO: 433958 - DNA, 158 bp, Homo sapiens; identical to SEQ ID NO: 210796
  chr6:41511550-41511708
  hypo

SEQ ID NO: 433959 - DNA, 70 bp, Homo sapiens; identical to SEQ ID NO: 305896
  chr6:41709760-41709830
  hypo

SEQ ID NO: 433960 - DNA, 52 bp, Homo sapiens; identical to SEQ ID NO: 305898
  chr6:41715520-41715572
  hypo

SEQ ID NO: 433961 - DNA, 80 bp, Homo sapiens; identical to SEQ ID NO: 256095
  chr6:41753206-41753286
  hypo

SEQ ID NO: 433962 - DNA, 42 bp, Homo sapiens; identical to SEQ ID NO: 256098
  chr6:41956742-41956784
  hypo

SEQ ID NO: 433963 - DNA, 47 bp, Homo sapiens; identical to SEQ ID NO: 256099
  chr6:42017469-42017516
  hypo

SEQ ID NO: 433964 - DNA, 203 bp, Homo sapiens; identical to SEQ ID NO: 210799
  chr6:42047606-42047809
  hypo

SEQ ID NO: 433965 - DNA, 367 bp, Homo sapiens; identical to SEQ ID NO: 256102
  chr6:42073935-42074302
  hypo

SEQ ID NO: 433966 - DNA, 39 bp, Homo sapiens; identical to SEQ ID NO: 256104
  chr6:42105772-42105811
  hypo

SEQ ID NO: 433967 - DNA, 39 bp, Homo sapiens; identical to SEQ ID NO: 256106
  chr6:42510150-42510189
  hypo

SEQ ID NO: 433968 - DNA, 76 bp, Homo sapiens; identical to SEQ ID NO: 405247
  chr6:42762703-42762779
  hypo

SEQ ID NO: 433969 - DNA, 85 bp, Homo sapiens; identical to SEQ ID NO: 210801
  chr6:43057813-43057898
  hypo

SEQ ID NO: 433970 - DNA, 125 bp, Homo sapiens; identical to SEQ ID NO: 222857
  chr6:43081636-43081761
  hypo

SEQ ID NO: 433971 - DNA, 34 bp, Homo sapiens; identical to SEQ ID NO: 256113
  chr6:43104148-43104182
  hypo

SEQ ID NO: 433972 - DNA, 31 bp, Homo sapiens; identical to SEQ ID NO: 210803
  chr6:43118951-43118982
  hypo

SEQ ID NO: 433973 - DNA, 42 bp, Homo sapiens; identical to SEQ ID NO: 210804
  chr6:43119871-43119913
  hypo

SEQ ID NO: 433974 - DNA, 130 bp, Homo sapiens; identical to SEQ ID NO: 256116
  chr6:43191028-43191158
  hypo

SEQ ID NO: 433975 - DNA, 215 bp, Homo sapiens; identical to SEQ ID NO: 256117
  chr6:43230737-43230952
  hypo

SEQ ID NO: 433976 - DNA, 168 bp, Homo sapiens; identical to SEQ ID NO: 305917
  chr6:43251622-43251790
  hypo

SEQ ID NO: 433977 - DNA, 65 bp, Homo sapiens; identical to SEQ ID NO: 210805
  chr6:43325214-43325279
  hypo

SEQ ID NO: 433978 - DNA, 101 bp, Homo sapiens; identical to SEQ ID NO: 210806
  chr6:43334539-43334640
  hypo

SEQ ID NO: 433979 - DNA, 83 bp, Homo sapiens; identical to SEQ ID NO: 256121
  chr6:43364279-43364362
  hypo

SEQ ID NO: 433980 - DNA, 319 bp, Homo sapiens; identical to SEQ ID NO: 210807
  chr6:43456970-43457289
  hypo

SEQ ID NO: 433981 - DNA, 92 bp, Homo sapiens; identical to SEQ ID NO: 222858
  chr6:43477369-43477461
  hypo

SEQ ID NO: 433982 - DNA, 98 bp, Homo sapiens; identical to SEQ ID NO: 200449
  chr6:43596713-43596811
  hypo

SEQ ID NO: 433983 - DNA, 136 bp, Homo sapiens; identical to SEQ ID NO: 305926
  chr6:43706686-43706822
  hypo

SEQ ID NO: 433984 - DNA, 115 bp, Homo sapiens; identical to SEQ ID NO: 305927
  chr6:43706852-43706967
  hypo

SEQ ID NO: 433985 - DNA, 334 bp, Homo sapiens; identical to SEQ ID NO: 305930
  chr6:43749594-43749928
  hypo

SEQ ID NO: 433986 - DNA, 83 bp, Homo sapiens; identical to SEQ ID NO: 256132
  chr6:43753108-43753191
  hypo

SEQ ID NO: 433987 - DNA, 76 bp, Homo sapiens; identical to SEQ ID NO: 210811
  chr6:43755593-43755669
  hypo

SEQ ID NO: 433988 - DNA, 195 bp, Homo sapiens; identical to SEQ ID NO: 256134
  chr6:43755969-43756164
  hypo

SEQ ID NO: 433989 - DNA, 33 bp, Homo sapiens; identical to SEQ ID NO: 256136
  chr6:43857893-43857926
  hypo

SEQ ID NO: 433990 - DNA, 117 bp, Homo sapiens; identical to SEQ ID NO: 210812
  chr6:43890879-43890996
  hypo

SEQ ID NO: 433991 - DNA, 189 bp, Homo sapiens; identical to SEQ ID NO: 256138
  chr6:43891389-43891578
  hypo

SEQ ID NO: 433992 - DNA, 165 bp, Homo sapiens; identical to SEQ ID NO: 210813
  chr6:43893235-43893400
  hypo

SEQ ID NO: 433993 - DNA, 92 bp, Homo sapiens; identical to SEQ ID NO: 256140
  chr6:43894169-43894261
  hypo

SEQ ID NO: 433994 - DNA, 50 bp, Homo sapiens; identical to SEQ ID NO: 256141
  chr6:43894752-43894802
  hypo

SEQ ID NO: 433995 - DNA, 55 bp, Homo sapiens; identical to SEQ ID NO: 256142
  chr6:43895090-43895145
  hypo

SEQ ID NO: 433996 - DNA, 133 bp, Homo sapiens; identical to SEQ ID NO: 256143
  chr6:43917992-43918125
  hypo

SEQ ID NO: 433997 - DNA, 192 bp, Homo sapiens; identical to SEQ ID NO: 256144
  chr6:43990914-43991106
  hypo

SEQ ID NO: 433998 - DNA, 126 bp, Homo sapiens; identical to SEQ ID NO: 256145
  chr6:44030801-44030927
  hypo

SEQ ID NO: 433999 - DNA, 40 bp, Homo sapiens; identical to SEQ ID NO: 256148
  chr6:44089393-44089433
  hypo

SEQ ID NO: 434000 - DNA, 34 bp, Homo sapiens; identical to SEQ ID NO: 256149
  chr6:44090098-44090132
  hypo

SEQ ID NO: 434001 - DNA, 270 bp, Homo sapiens; identical to SEQ ID NO: 200451
  chr6:44095871-44096141
  hypo

SEQ ID NO: 434002 - DNA, 167 bp, Homo sapiens; identical to SEQ ID NO: 256151
  chr6:44121130-44121297
  hypo

SEQ ID NO: 434003 - DNA, 32 bp, Homo sapiens; identical to SEQ ID NO: 256152
  chr6:44150584-44150616
  hypo

SEQ ID NO: 434004 - DNA, 36 bp, Homo sapiens; identical to SEQ ID NO: 210817
  chr6:44166169-44166205
  hypo

SEQ ID NO: 434005 - DNA, 564 bp, Homo sapiens; identical to SEQ ID NO: 256154
  chr6:44222494-44223058
  hypo

SEQ ID NO: 434006 - DNA, 237 bp, Homo sapiens; identical to SEQ ID NO: 210819
  chr6:44227780-44228017
  hypo

SEQ ID NO: 434007 - DNA, 170 bp, Homo sapiens; identical to SEQ ID NO: 256156
  chr6:44229401-44229571
  hypo

SEQ ID NO: 434008 - DNA, 75 bp, Homo sapiens; identical to SEQ ID NO: 305960
  chr6:44250124-44250199
  hypo

SEQ ID NO: 434009 - DNA, 31 bp, Homo sapiens; identical to SEQ ID NO: 256158
  chr6:44375066-44375097
  hypo

SEQ ID NO: 434010 - DNA, 127 bp, Homo sapiens; identical to SEQ ID NO: 256159
  chr6:44449535-44449662
  hypo

SEQ ID NO: 434011 - DNA, 254 bp, Homo sapiens; identical to SEQ ID NO: 256160
  chr6:44451224-44451478
  hypo

SEQ ID NO: 434012 - DNA, 143 bp, Homo sapiens; identical to SEQ ID NO: 305964
  chr6:44695620-44695763
  hypo

SEQ ID NO: 434013 - DNA, 73 bp, Homo sapiens; identical to SEQ ID NO: 305965
  chr6:44695795-44695868
  hypo

SEQ ID NO: 434014 - DNA, 235 bp, Homo sapiens; identical to SEQ ID NO: 305966
  chr6:44695919-44696154
  hypo

SEQ ID NO: 434015 - DNA, 42 bp, Homo sapiens; identical to SEQ ID NO: 256162
  chr6:45030134-45030176
  hypo

SEQ ID NO: 434016 - DNA, 43 bp, Homo sapiens; identical to SEQ ID NO: 232110
  chr6:45390376-45390419
  hypo

SEQ ID NO: 434017 - DNA, 39 bp, Homo sapiens; identical to SEQ ID NO: 256163
  chr6:45492176-45492215
  hypo

SEQ ID NO: 434018 - DNA, 130 bp, Homo sapiens; identical to SEQ ID NO: 256165
  chr6:45544535-45544665
  hypo

SEQ ID NO: 434019 - DNA, 264 bp, Homo sapiens; identical to SEQ ID NO: 305972
  chr6:45608783-45609047
  hypo

SEQ ID NO: 434020 - DNA, 87 bp, Homo sapiens; identical to SEQ ID NO: 200463
  chr6:46816765-46816852
  hypo

SEQ ID NO: 434021 - DNA, 31 bp, Homo sapiens; identical to SEQ ID NO: 256168
  chr6:46952093-46952124
  hypo

SEQ ID NO: 434022 - DNA, 152 bp, Homo sapiens; identical to SEQ ID NO: 256169
  chr6:47084373-47084525
  hypo

SEQ ID NO: 434023 - DNA, 80 bp, Homo sapiens; identical to SEQ ID NO: 256171
  chr6:47221022-47221102
  hypo

SEQ ID NO: 434024 - DNA, 41 bp, Homo sapiens; identical to SEQ ID NO: 210827
  chr6:47412331-47412372
  hypo

SEQ ID NO: 434025 - DNA, 42 bp, Homo sapiens; identical to SEQ ID NO: 305983
  chr6:47539956-47539998
  hypo

SEQ ID NO: 434026 - DNA, 95 bp, Homo sapiens; identical to SEQ ID NO: 256174
  chr6:49221778-49221873
  hypo

SEQ ID NO: 434027 - DNA, 144 bp, Homo sapiens; identical to SEQ ID NO: 256175
  chr6:49453725-49453869
  hypo

SEQ ID NO: 434028 - DNA, 98 bp, Homo sapiens; identical to SEQ ID NO: 210828
  chr6:49708447-49708545
  hypo

SEQ ID NO: 434029 - DNA, 142 bp, Homo sapiens; identical to SEQ ID NO: 256178
  chr6:52171805-52171947
  hypo

SEQ ID NO: 434030 - DNA, 318 bp, Homo sapiens; identical to SEQ ID NO: 418719
  chr6:52226797-52227115
  hypo

SEQ ID NO: 434031 - DNA, 289 bp, Homo sapiens; identical to SEQ ID NO: 210830
  chr6:52267886-52268175
  hypo

SEQ ID NO: 434032 - DNA, 199 bp, Homo sapiens; identical to SEQ ID NO: 284118
  chr6:52441278-52441477
  hypo

SEQ ID NO: 434033 - DNA, 97 bp, Homo sapiens; identical to SEQ ID NO: 256182
  chr6:52769065-52769162
  hypo

SEQ ID NO: 434034 - DNA, 43 bp, Homo sapiens; identical to SEQ ID NO: 256183
  chr6:52856825-52856868
  hypo

SEQ ID NO: 434035 - DNA, 140 bp, Homo sapiens; identical to SEQ ID NO: 222868
  chr6:52859558-52859698
  hypo

SEQ ID NO: 434036 - DNA, 56 bp, Homo sapiens; identical to SEQ ID NO: 210833
  chr6:53052103-53052159
  hypo

SEQ ID NO: 434037 - DNA, 206 bp, Homo sapiens; identical to SEQ ID NO: 210834
  chr6:53111001-53111207
  hypo

SEQ ID NO: 434038 - DNA, 43 bp, Homo sapiens; identical to SEQ ID NO: 256188
  chr6:53154515-53154558
  hypo

SEQ ID NO: 434039 - DNA, 86 bp, Homo sapiens; identical to SEQ ID NO: 256189
  chr6:53188589-53188675
  hypo

SEQ ID NO: 434040 - DNA, 120 bp, Homo sapiens; identical to SEQ ID NO: 256190
  chr6:53219594-53219714
  hypo

SEQ ID NO: 434041 - DNA, 708 bp, Homo sapiens; identical to SEQ ID NO: 256191
  chr6:53385075-53385783
  hypo

SEQ ID NO: 434042 - DNA, 80 bp, Homo sapiens; identical to SEQ ID NO: 256192
  chr6:53406020-53406100
  hypo

SEQ ID NO: 434043 - DNA, 539 bp, Homo sapiens; identical to SEQ ID NO: 43077
  chr6:53409552-53410091
  hypo

SEQ ID NO: 434044 - DNA, 470 bp, Homo sapiens; identical to SEQ ID NO: 284129
  chr6:53660404-53660874
  hypo

SEQ ID NO: 434045 - DNA, 62 bp, Homo sapiens; identical to SEQ ID NO: 113504
  chr6:53660908-53660970
  hypo

SEQ ID NO: 434046 - DNA, 87 bp, Homo sapiens; identical to SEQ ID NO: 256193
  chr6:53787620-53787707
  hypo

SEQ ID NO: 434047 - DNA, 99 bp, Homo sapiens; identical to SEQ ID NO: 256194
  chr6:55010120-55010219
  hypo

SEQ ID NO: 434048 - DNA, 112 bp, Homo sapiens; identical to SEQ ID NO: 256195
  chr6:56295532-56295644
  hypo

SEQ ID NO: 434049 - DNA, 74 bp, Homo sapiens; identical to SEQ ID NO: 256196
  chr6:56297181-56297255
  hypo

SEQ ID NO: 434050 - DNA, 145 bp, Homo sapiens; identical to SEQ ID NO: 284134
  chr6:56820270-56820415
  hypo

SEQ ID NO: 434051 - DNA, 60 bp, Homo sapiens; identical to SEQ ID NO: 210838
  chr6:57042600-57042660
  hypo

SEQ ID NO: 434052 - DNA, 155 bp, Homo sapiens; identical to SEQ ID NO: 210839
  chr6:57096923-57097078
  hypo

SEQ ID NO: 434053 - DNA, 91 bp, Homo sapiens; identical to SEQ ID NO: 256201
  chr6:57111928-57112019
  hypo

SEQ ID NO: 434054 - DNA, 144 bp, Homo sapiens; identical to SEQ ID NO: 256202
  chr6:57726146-57726290
  hypo

SEQ ID NO: 434055 - DNA, 51 bp, Homo sapiens; identical to SEQ ID NO: 256203
  chr6:58002345-58002396
  hypo

SEQ ID NO: 434056 - DNA, 96 bp, Homo sapiens; identical to SEQ ID NO: 256205
  chr6:64151088-64151184
  hypo

SEQ ID NO: 434057 - DNA, 52 bp, Homo sapiens; identical to SEQ ID NO: 200489
  chr6:64283088-64283140
  hypo

SEQ ID NO: 434058 - DNA, 100 bp, Homo sapiens; identical to SEQ ID NO: 210841
  chr6:64354747-64354847
  hypo

SEQ ID NO: 434059 - DNA, 489 bp, Homo sapiens; identical to SEQ ID NO: 256207
  chr6:66497655-66498144
  hypo

SEQ ID NO: 434060 - DNA, 42 bp, Homo sapiens; identical to SEQ ID NO: 256208
  chr6:66948547-66948589
  hypo

SEQ ID NO: 434061 - DNA, 42 bp, Homo sapiens; identical to SEQ ID NO: 256209
  chr6:69882240-69882282
  hypo

SEQ ID NO: 434062 - DNA, 41 bp, Homo sapiens; identical to SEQ ID NO: 256210
  chr6:70515895-70515936
  hypo

SEQ ID NO: 434063 - DNA, 62 bp, Homo sapiens; identical to SEQ ID NO: 256211
  chr6:71521663-71521725
  hypo

SEQ ID NO: 434064 - DNA, 38 bp, Homo sapiens; identical to SEQ ID NO: 256212
  chr6:71544653-71544691
  hypo

SEQ ID NO: 434065 - DNA, 183 bp, Homo sapiens; identical to SEQ ID NO: 256213
  chr6:71556091-71556274
  hypo

SEQ ID NO: 434066 - DNA, 38 bp, Homo sapiens; identical to SEQ ID NO: 210847
  chr6:71874697-71874735
  hypo

SEQ ID NO: 434067 - DNA, 87 bp, Homo sapiens; identical to SEQ ID NO: 71805
  chr6:71874758-71874845
  hypo

SEQ ID NO: 434068 - DNA, 106 bp, Homo sapiens; identical to SEQ ID NO: 210850
  chr6:72806769-72806875
  hypo

SEQ ID NO: 434069 - DNA, 93 bp, Homo sapiens; identical to SEQ ID NO: 210851
  chr6:72806905-72806998
  hypo

SEQ ID NO: 434070 - DNA, 65 bp, Homo sapiens; identical to SEQ ID NO: 256217
  chr6:73319961-73320026
  hypo

SEQ ID NO: 434071 - DNA, 70 bp, Homo sapiens; identical to SEQ ID NO: 256218
  chr6:73843279-73843349
  hypo

SEQ ID NO: 434072 - DNA, 242 bp, Homo sapiens; identical to SEQ ID NO: 256219
  chr6:73934979-73935221
  hypo

SEQ ID NO: 434073 - DNA, 104 bp, Homo sapiens; identical to SEQ ID NO: 256220
  chr6:73940904-73941008
  hypo

SEQ ID NO: 434074 - DNA, 42 bp, Homo sapiens; identical to SEQ ID NO: 256221
  chr6:74016436-74016478
  hypo

SEQ ID NO: 434075 - DNA, 90 bp, Homo sapiens; identical to SEQ ID NO: 256223
  chr6:74097680-74097770
  hypo

SEQ ID NO: 434076 - DNA, 207 bp, Homo sapiens; identical to SEQ ID NO: 256224
  chr6:74191759-74191966
  hypo

SEQ ID NO: 434077 - DNA, 37 bp, Homo sapiens; identical to SEQ ID NO: 256227
  chr6:75995669-75995706
  hypo

SEQ ID NO: 434078 - DNA, 86 bp, Homo sapiens; identical to SEQ ID NO: 200513
  chr6:76458864-76458950
  hypo

SEQ ID NO: 434079 - DNA, 42 bp, Homo sapiens; identical to SEQ ID NO: 256228
  chr6:76468481-76468523
  hypo

SEQ ID NO: 434080 - DNA, 177 bp, Homo sapiens; identical to SEQ ID NO: 256230
  chr6:79767963-79768140
  hypo

SEQ ID NO: 434081 - DNA, 35 bp, Homo sapiens; identical to SEQ ID NO: 256231
  chr6:80380890-80380925
  hypo

SEQ ID NO: 434082 - DNA, 41 bp, Homo sapiens; identical to SEQ ID NO: 210857
  chr6:82588584-82588625
  hypo

SEQ ID NO: 434083 - DNA, 42 bp, Homo sapiens; identical to SEQ ID NO: 256233
  chr6:82936653-82936695
  hypo

SEQ ID NO: 434084 - DNA, 43 bp, Homo sapiens; identical to SEQ ID NO: 210858
  chr6:83901419-83901462
  hypo

SEQ ID NO: 434085 - DNA, 82 bp, Homo sapiens; identical to SEQ ID NO: 256238
  chr6:86653351-86653433
  hypo

SEQ ID NO: 434086 - DNA, 46 bp, Homo sapiens; identical to SEQ ID NO: 256239
  chr6:86915708-86915754
  hypo

SEQ ID NO: 434087 - DNA, 81 bp, Homo sapiens; identical to SEQ ID NO: 256240
  chr6:87725863-87725944
  hypo

SEQ ID NO: 434088 - DNA, 145 bp, Homo sapiens; identical to SEQ ID NO: 222892
  chr6:87832386-87832531
  hypo

SEQ ID NO: 434089 - DNA, 120 bp, Homo sapiens; identical to SEQ ID NO: 210860
  chr6:87890686-87890806
  hypo

SEQ ID NO: 434090 - DNA, 31 bp, Homo sapiens; identical to SEQ ID NO: 210861
  chr6:88039271-88039302
  hypo

SEQ ID NO: 434091 - DNA, 101 bp, Homo sapiens; identical to SEQ ID NO: 210862
  chr6:88280033-88280134
  hypo

SEQ ID NO: 434092 - DNA, 35 bp, Homo sapiens; identical to SEQ ID NO: 256244
  chr6:88461840-88461875
  hypo

SEQ ID NO: 434093 - DNA, 120 bp, Homo sapiens; identical to SEQ ID NO: 256245
  chr6:88553999-88554119
  hypo

SEQ ID NO: 434094 - DNA, 120 bp, Homo sapiens; identical to SEQ ID NO: 210863
  chr6:89376382-89376502
  hypo

SEQ ID NO: 434095 - DNA, 200 bp, Homo sapiens; identical to SEQ ID NO: 256247
  chr6:89376682-89376882
  hypo

SEQ ID NO: 434096 - DNA, 332 bp, Homo sapiens; identical to SEQ ID NO: 284237
  chr6:89827121-89827453
  hypo

SEQ ID NO: 434097 - DNA, 244 bp, Homo sapiens; identical to SEQ ID NO: 284238
  chr6:89827501-89827745
  hypo

SEQ ID NO: 434098 - DNA, 142 bp, Homo sapiens; identical to SEQ ID NO: 200550
  chr6:89827793-89827935
  hypo

SEQ ID NO: 434099 - DNA, 195 bp, Homo sapiens; identical to SEQ ID NO: 256251
  chr6:89913946-89914141
  hypo

SEQ ID NO: 434100 - DNA, 63 bp, Homo sapiens; identical to SEQ ID NO: 210865
  chr6:90052741-90052804
  hypo

SEQ ID NO: 434101 - DNA, 337 bp, Homo sapiens; identical to SEQ ID NO: 284241
  chr6:90062614-90062951
  hypo

SEQ ID NO: 434102 - DNA, 182 bp, Homo sapiens; identical to SEQ ID NO: 256253
  chr6:90095593-90095775
  hypo

SEQ ID NO: 434103 - DNA, 35 bp, Homo sapiens; identical to SEQ ID NO: 256256
  chr6:90522085-90522120
  hypo

SEQ ID NO: 434104 - DNA, 147 bp, Homo sapiens; identical to SEQ ID NO: 306091
  chr6:90644672-90644819
  hypo

SEQ ID NO: 434105 - DNA, 104 bp, Homo sapiens; identical to SEQ ID NO: 256258
  chr6:90685940-90686044
  hypo

SEQ ID NO: 434106 - DNA, 45 bp, Homo sapiens; identical to SEQ ID NO: 256259
  chr6:91291934-91291979
  hypo

SEQ ID NO: 434107 - DNA, 44 bp, Homo sapiens; identical to SEQ ID NO: 256260
  chr6:91304006-91304050
  hypo

SEQ ID NO: 434108 - DNA, 41 bp, Homo sapiens; identical to SEQ ID NO: 256261
  chr6:91316404-91316445
  hypo

SEQ ID NO: 434109 - DNA, 94 bp, Homo sapiens; identical to SEQ ID NO: 210870
  chr6:96085019-96085113
  hypo

SEQ ID NO: 434110 - DNA, 34 bp, Homo sapiens; identical to SEQ ID NO: 256263
  chr6:96552675-96552709
  hypo

SEQ ID NO: 434111 - DNA, 82 bp, Homo sapiens; identical to SEQ ID NO: 256264
  chr6:98148229-98148311
  hypo

SEQ ID NO: 434112 - DNA, 66 bp, Homo sapiens; identical to SEQ ID NO: 200588
  chr6:99962859-99962925
  hypo

SEQ ID NO: 434113 - DNA, 219 bp, Homo sapiens; identical to SEQ ID NO: 232287
  chr6:99963448-99963667
  hypo

SEQ ID NO: 434114 - DNA, 167 bp, Homo sapiens; identical to SEQ ID NO: 284298
  chr6:100054672-100054839
  hypo

SEQ ID NO: 434115 - DNA, 146 bp, Homo sapiens; identical to SEQ ID NO: 210873
  chr6:100841322-100841468
  hypo

SEQ ID NO: 434116 - DNA, 192 bp, Homo sapiens; identical to SEQ ID NO: 284308
  chr6:101841974-101842166
  hypo

SEQ ID NO: 434117 - DNA, 59 bp, Homo sapiens; identical to SEQ ID NO: 222906
  chr6:105307082-105307141
  hypo

SEQ ID NO: 434118 - DNA, 32 bp, Homo sapiens; identical to SEQ ID NO: 256268
  chr6:106582673-106582705
  hypo

SEQ ID NO: 434119 - DNA, 34 bp, Homo sapiens; identical to SEQ ID NO: 210879
  chr6:107010364-107010398
  hypo

SEQ ID NO: 434120 - DNA, 77 bp, Homo sapiens; identical to SEQ ID NO: 256270
  chr6:107078765-107078842
  hypo

SEQ ID NO: 434121 - DNA, 53 bp, Homo sapiens; identical to SEQ ID NO: 256271
  chr6:107537665-107537718
  hypo

SEQ ID NO: 434122 - DNA, 120 bp, Homo sapiens; identical to SEQ ID NO: 210880
  chr6:107562426-107562546
  hypo

SEQ ID NO: 434123 - DNA, 36 bp, Homo sapiens; identical to SEQ ID NO: 210881
  chr6:107563806-107563842
  hypo

SEQ ID NO: 434124 - DNA, 183 bp, Homo sapiens; identical to SEQ ID NO: 200616
  chr6:108882164-108882347
  hypo

SEQ ID NO: 434125 - DNA, 44 bp, Homo sapiens; identical to SEQ ID NO: 210884
  chr6:108984287-108984331
  hypo

SEQ ID NO: 434126 - DNA, 31 bp, Homo sapiens; identical to SEQ ID NO: 256276
  chr6:108997762-108997793
  hypo

SEQ ID NO: 434127 - DNA, 39 bp, Homo sapiens; identical to SEQ ID NO: 256283
  chr6:109551797-109551836
  hypo

SEQ ID NO: 434128 - DNA, 429 bp, Homo sapiens; identical to SEQ ID NO: 200619
  chr6:109777177-109777606
  hypo

SEQ ID NO: 434129 - DNA, 143 bp, Homo sapiens; identical to SEQ ID NO: 210889
  chr6:109798005-109798148
  hypo

SEQ ID NO: 434130 - DNA, 70 bp, Homo sapiens; identical to SEQ ID NO: 306131
  chr6:110437751-110437821
  hypo

SEQ ID NO: 434131 - DNA, 68 bp, Homo sapiens; identical to SEQ ID NO: 256287
  chr6:110670276-110670344
  hypo

SEQ ID NO: 434132 - DNA, 44 bp, Homo sapiens; identical to SEQ ID NO: 256289
  chr6:110798286-110798330
  hypo

SEQ ID NO: 434133 - DNA, 86 bp, Homo sapiens; identical to SEQ ID NO: 256290
  chr6:110817991-110818077
  hypo

SEQ ID NO: 434134 - DNA, 48 bp, Homo sapiens; identical to SEQ ID NO: 210891
  chr6:110843341-110843389
  hypo

SEQ ID NO: 434135 - DNA, 187 bp, Homo sapiens; identical to SEQ ID NO: 210892
  chr6:110872232-110872419
  hypo

SEQ ID NO: 434136 - DNA, 425 bp, Homo sapiens; identical to SEQ ID NO: 256294
  chr6:110966935-110967360
  hypo

SEQ ID NO: 434137 - DNA, 82 bp, Homo sapiens; identical to SEQ ID NO: 256295
  chr6:110968047-110968129
  hypo

SEQ ID NO: 434138 - DNA, 120 bp, Homo sapiens; identical to SEQ ID NO: 256296
  chr6:111014240-111014360
  hypo

SEQ ID NO: 434139 - DNA, 86 bp, Homo sapiens; identical to SEQ ID NO: 210893
  chr6:111022042-111022128
  hypo

SEQ ID NO: 434140 - DNA, 45 bp, Homo sapiens; identical to SEQ ID NO: 210894
  chr6:111085015-111085060
  hypo

SEQ ID NO: 434141 - DNA, 177 bp, Homo sapiens; identical to SEQ ID NO: 256299
  chr6:111244972-111245149
  hypo

SEQ ID NO: 434142 - DNA, 104 bp, Homo sapiens; identical to SEQ ID NO: 256300
  chr6:111546768-111546872
  hypo

SEQ ID NO: 434143 - DNA, 41 bp, Homo sapiens; identical to SEQ ID NO: 256301
  chr6:111579404-111579445
  hypo

SEQ ID NO: 434144 - DNA, 32 bp, Homo sapiens; identical to SEQ ID NO: 256302
  chr6:111581423-111581455
  hypo

SEQ ID NO: 434145 - DNA, 138 bp, Homo sapiens; identical to SEQ ID NO: 256303
  chr6:111581990-111582128
  hypo

SEQ ID NO: 434146 - DNA, 195 bp, Homo sapiens; identical to SEQ ID NO: 210897
  chr6:111673961-111674156
  hypo

SEQ ID NO: 434147 - DNA, 245 bp, Homo sapiens; identical to SEQ ID NO: 256305
  chr6:111750920-111751165
  hypo

SEQ ID NO: 434148 - DNA, 34 bp, Homo sapiens; identical to SEQ ID NO: 256308
  chr6:111860206-111860240
  hypo

SEQ ID NO: 434149 - DNA, 156 bp, Homo sapiens; identical to SEQ ID NO: 210900
  chr6:111872274-111872430
  hypo

SEQ ID NO: 434150 - DNA, 153 bp, Homo sapiens; identical to SEQ ID NO: 306157
  chr6:111874474-111874627
  hypo

SEQ ID NO: 434151 - DNA, 87 bp, Homo sapiens; identical to SEQ ID NO: 210901
  chr6:111886815-111886902
  hypo

SEQ ID NO: 434152 - DNA, 102 bp, Homo sapiens; identical to SEQ ID NO: 256312
  chr6:111955506-111955608
  hypo

SEQ ID NO: 434153 - DNA, 186 bp, Homo sapiens; identical to SEQ ID NO: 256313
  chr6:111993235-111993421
  hypo

SEQ ID NO: 434154 - DNA, 86 bp, Homo sapiens; identical to SEQ ID NO: 256315
  chr6:112128161-112128247
  hypo

SEQ ID NO: 434155 - DNA, 39 bp, Homo sapiens; identical to SEQ ID NO: 256316
  chr6:114153359-114153398
  hypo

SEQ ID NO: 434156 - DNA, 34 bp, Homo sapiens; identical to SEQ ID NO: 256317
  chr6:116800745-116800779
  hypo

SEQ ID NO: 434157 - DNA, 40 bp, Homo sapiens; identical to SEQ ID NO: 256318
  chr6:116873934-116873974
  hypo

SEQ ID NO: 434158 - DNA, 130 bp, Homo sapiens; identical to SEQ ID NO: 256319
  chr6:116905294-116905424
  hypo

SEQ ID NO: 434159 - DNA, 34 bp, Homo sapiens; identical to SEQ ID NO: 256320
  chr6:117100692-117100726
  hypo

SEQ ID NO: 434160 - DNA, 166 bp, Homo sapiens; identical to SEQ ID NO: 284395
  chr6:117592207-117592373
  hypo

SEQ ID NO: 434161 - DNA, 821 bp, Homo sapiens; identical to SEQ ID NO: 284396
  chr6:117803613-117804434
  hypo

SEQ ID NO: 434162 - DNA, 62 bp, Homo sapiens; identical to SEQ ID NO: 256321
  chr6:117894655-117894717
  hypo

SEQ ID NO: 434163 - DNA, 44 bp, Homo sapiens; identical to SEQ ID NO: 256322
  chr6:118848429-118848473
  hypo

SEQ ID NO: 434164 - DNA, 83 bp, Homo sapiens; identical to SEQ ID NO: 256323
  chr6:118898186-118898269
  hypo

SEQ ID NO: 434165 - DNA, 33 bp, Homo sapiens; identical to SEQ ID NO: 210903
  chr6:119023866-119023899
  hypo

SEQ ID NO: 434166 - DNA, 81 bp, Homo sapiens; identical to SEQ ID NO: 256325
  chr6:119162952-119163033
  hypo

SEQ ID NO: 434167 - DNA, 70 bp, Homo sapiens; identical to SEQ ID NO: 256326
  chr6:119240581-119240651
  hypo

SEQ ID NO: 434168 - DNA, 92 bp, Homo sapiens; identical to SEQ ID NO: 210904
  chr6:119254299-119254391
  hypo

SEQ ID NO: 434169 - DNA, 86 bp, Homo sapiens; identical to SEQ ID NO: 256329
  chr6:119462544-119462630
  hypo

SEQ ID NO: 434170 - DNA, 31 bp, Homo sapiens; identical to SEQ ID NO: 256330
  chr6:119482932-119482963
  hypo

SEQ ID NO: 434171 - DNA, 31 bp, Homo sapiens; identical to SEQ ID NO: 256331
  chr6:119483263-119483294
  hypo

SEQ ID NO: 434172 - DNA, 41 bp, Homo sapiens; identical to SEQ ID NO: 256334
  chr6:119620032-119620073
  hypo

SEQ ID NO: 434173 - DNA, 40 bp, Homo sapiens; identical to SEQ ID NO: 222921
  chr6:119762016-119762056
  hypo

SEQ ID NO: 434174 - DNA, 92 bp, Homo sapiens; identical to SEQ ID NO: 256335
  chr6:119834901-119834993
  hypo

SEQ ID NO: 434175 - DNA, 90 bp, Homo sapiens; identical to SEQ ID NO: 256336
  chr6:121364079-121364169
  hypo

SEQ ID NO: 434176 - DNA, 210 bp, Homo sapiens; identical to SEQ ID NO: 256337
  chr6:121654738-121654948
  hypo

SEQ ID NO: 434177 - DNA, 105 bp, Homo sapiens; identical to SEQ ID NO: 222922
  chr6:123110275-123110380
  hypo

SEQ ID NO: 434178 - DNA, 420 bp, Homo sapiens; identical to SEQ ID NO: 222923
  chr6:123110438-123110858
  hypo

SEQ ID NO: 434179 - DNA, 376 bp, Homo sapiens; identical to SEQ ID NO: 284416
  chr6:124123917-124124293
  hypo

SEQ ID NO: 434180 - DNA, 131 bp, Homo sapiens; identical to SEQ ID NO: 256338
  chr6:125087371-125087502
  hypo

SEQ ID NO: 434181 - DNA, 39 bp, Homo sapiens; identical to SEQ ID NO: 256339
  chr6:125207462-125207501
  hypo

SEQ ID NO: 434182 - DNA, 278 bp, Homo sapiens; identical to SEQ ID NO: 284418
  chr6:125282855-125283133
  hypo

SEQ ID NO: 434183 - DNA, 210 bp, Homo sapiens; identical to SEQ ID NO: 256340
  chr6:125299462-125299672
  hypo

SEQ ID NO: 434184 - DNA, 78 bp, Homo sapiens; identical to SEQ ID NO: 284420
  chr6:125420731-125420809
  hypo

SEQ ID NO: 434185 - DNA, 151 bp, Homo sapiens; identical to SEQ ID NO: 210907
  chr6:126242092-126242243
  hypo

SEQ ID NO: 434186 - DNA, 57 bp, Homo sapiens; identical to SEQ ID NO: 256343
  chr6:126243892-126243949
  hypo

SEQ ID NO: 434187 - DNA, 150 bp, Homo sapiens; identical to SEQ ID NO: 210908
  chr6:126426570-126426720
  hypo

SEQ ID NO: 434188 - DNA, 82 bp, Homo sapiens; identical to SEQ ID NO: 256345
  chr6:128830109-128830191
  hypo

SEQ ID NO: 434189 - DNA, 81 bp, Homo sapiens; identical to SEQ ID NO: 256347
  chr6:129635704-129635785
  hypo

SEQ ID NO: 434190 - DNA, 32 bp, Homo sapiens; identical to SEQ ID NO: 256348
  chr6:130472587-130472619
  hypo

SEQ ID NO: 434191 - DNA, 143 bp, Homo sapiens; identical to SEQ ID NO: 256351
  chr6:132601694-132601837
  hypo

SEQ ID NO: 434192 - DNA, 41 bp, Homo sapiens; identical to SEQ ID NO: 256352
  chr6:133118418-133118459
  hypo

SEQ ID NO: 434193 - DNA, 193 bp, Homo sapiens; identical to SEQ ID NO: 222933
  chr6:133146628-133146821
  hypo

SEQ ID NO: 434194 - DNA, 697 bp, Homo sapiens; identical to SEQ ID NO: 284465
  chr6:134212421-134213118
  hypo

SEQ ID NO: 434195 - DNA, 43 bp, Homo sapiens; identical to SEQ ID NO: 256353
  chr6:134502445-134502488
  hypo

SEQ ID NO: 434196 - DNA, 32 bp, Homo sapiens; identical to SEQ ID NO: 256354
  chr6:134545871-134545903
  hypo

SEQ ID NO: 434197 - DNA, 174 bp, Homo sapiens; identical to SEQ ID NO: 256356
  chr6:134669115-134669289
  hypo

SEQ ID NO: 434198 - DNA, 74 bp, Homo sapiens; identical to SEQ ID NO: 256357
  chr6:134749836-134749910
  hypo

SEQ ID NO: 434199 - DNA, 82 bp, Homo sapiens; identical to SEQ ID NO: 210914
  chr6:134817633-134817715
  hypo

SEQ ID NO: 434200 - DNA, 36 bp, Homo sapiens; identical to SEQ ID NO: 256359
  chr6:135305600-135305636
  hypo

SEQ ID NO: 434201 - DNA, 110 bp, Homo sapiens; identical to SEQ ID NO: 256360
  chr6:135427927-135428037
  hypo

SEQ ID NO: 434202 - DNA, 44 bp, Homo sapiens; identical to SEQ ID NO: 200662
  chr6:135503608-135503652
  hypo

SEQ ID NO: 434203 - DNA, 34 bp, Homo sapiens; identical to SEQ ID NO: 256361
  chr6:135930509-135930543
  hypo

SEQ ID NO: 434204 - DNA, 120 bp, Homo sapiens; identical to SEQ ID NO: 256364
  chr6:136655688-136655808
  hypo

SEQ ID NO: 434205 - DNA, 31 bp, Homo sapiens; identical to SEQ ID NO: 256365
  chr6:136682124-136682155
  hypo

SEQ ID NO: 434206 - DNA, 154 bp, Homo sapiens; identical to SEQ ID NO: 256367
  chr6:136809005-136809159
  hypo

SEQ ID NO: 434207 - DNA, 563 bp, Homo sapiens; identical to SEQ ID NO: 200664
  chr6:136870742-136871305
  hypo

SEQ ID NO: 434208 - DNA, 212 bp, Homo sapiens; identical to SEQ ID NO: 256371
  chr6:137147517-137147729
  hypo

SEQ ID NO: 434209 - DNA, 227 bp, Homo sapiens; identical to SEQ ID NO: 284494
  chr6:138428363-138428590
  hypo

SEQ ID NO: 434210 - DNA, 190 bp, Homo sapiens; identical to SEQ ID NO: 256372
  chr6:138518767-138518957
  hypo

SEQ ID NO: 434211 - DNA, 327 bp, Homo sapiens; identical to SEQ ID NO: 256373
  chr6:138745335-138745662
  hypo

SEQ ID NO: 434212 - DNA, 57 bp, Homo sapiens; identical to SEQ ID NO: 306236
  chr6:138790362-138790419
  hypo

SEQ ID NO: 434213 - DNA, 49 bp, Homo sapiens; identical to SEQ ID NO: 306237
  chr6:138790576-138790625
  hypo

SEQ ID NO: 434214 - DNA, 41 bp, Homo sapiens; identical to SEQ ID NO: 256375
  chr6:138812078-138812119
  hypo

SEQ ID NO: 434215 - DNA, 161 bp, Homo sapiens; identical to SEQ ID NO: 210924
  chr6:138883861-138884022
  hypo

SEQ ID NO: 434216 - DNA, 184 bp, Homo sapiens; identical to SEQ ID NO: 256377
  chr6:138884363-138884547
  hypo

SEQ ID NO: 434217 - DNA, 154 bp, Homo sapiens; identical to SEQ ID NO: 256378
  chr6:138905937-138906091
  hypo

SEQ ID NO: 434218 - DNA, 483 bp, Homo sapiens; identical to SEQ ID NO: 284501
  chr6:139013361-139013844
  hypo

SEQ ID NO: 434219 - DNA, 379 bp, Homo sapiens; identical to SEQ ID NO: 256380
  chr6:139564048-139564427
  hypo

SEQ ID NO: 434220 - DNA, 407 bp, Homo sapiens; identical to SEQ ID NO: 284507
  chr6:139694964-139695371
  hypo

SEQ ID NO: 434221 - DNA, 48 bp, Homo sapiens; identical to SEQ ID NO: 256381
  chr6:139697344-139697392
  hypo

SEQ ID NO: 434222 - DNA, 61 bp, Homo sapiens; identical to SEQ ID NO: 256382
  chr6:139697463-139697524
  hypo

SEQ ID NO: 434223 - DNA, 64 bp, Homo sapiens; identical to SEQ ID NO: 306248
  chr6:139858225-139858289
  hypo

SEQ ID NO: 434224 - DNA, 78 bp, Homo sapiens; identical to SEQ ID NO: 256384
  chr6:139858705-139858783
  hypo

SEQ ID NO: 434225 - DNA, 33 bp, Homo sapiens; identical to SEQ ID NO: 210927
  chr6:139871210-139871243
  hypo

SEQ ID NO: 434226 - DNA, 33 bp, Homo sapiens; identical to SEQ ID NO: 256386
  chr6:139871483-139871516
  hypo

SEQ ID NO: 434227 - DNA, 31 bp, Homo sapiens; identical to SEQ ID NO: 256387
  chr6:139908685-139908716
  hypo

SEQ ID NO: 434228 - DNA, 212 bp, Homo sapiens; identical to SEQ ID NO: 210928
  chr6:140300532-140300744
  hypo

SEQ ID NO: 434229 - DNA, 35 bp, Homo sapiens; identical to SEQ ID NO: 256389
  chr6:141150320-141150355
  hypo

SEQ ID NO: 434230 - DNA, 32 bp, Homo sapiens; identical to SEQ ID NO: 256390
  chr6:142237865-142237897
  hypo

SEQ ID NO: 434231 - DNA, 86 bp, Homo sapiens; identical to SEQ ID NO: 256391
  chr6:142509608-142509694
  hypo

SEQ ID NO: 434232 - DNA, 77 bp, Homo sapiens; identical to SEQ ID NO: 256392
  chr6:142543125-142543202
  hypo

SEQ ID NO: 434233 - DNA, 54 bp, Homo sapiens; identical to SEQ ID NO: 397499
  chr6:142622529-142622583
  hypo

SEQ ID NO: 434234 - DNA, 65 bp, Homo sapiens; identical to SEQ ID NO: 210930
  chr6:143031708-143031773
  hypo

SEQ ID NO: 434235 - DNA, 38 bp, Homo sapiens; identical to SEQ ID NO: 256395
  chr6:143239181-143239219
  hypo

SEQ ID NO: 434236 - DNA, 198 bp, Homo sapiens; identical to SEQ ID NO: 200681
  chr6:143266117-143266315
  hypo

SEQ ID NO: 434237 - DNA, 39 bp, Homo sapiens; identical to SEQ ID NO: 256397
  chr6:143947371-143947410
  hypo

SEQ ID NO: 434238 - DNA, 39 bp, Homo sapiens; identical to SEQ ID NO: 256398
  chr6:143947650-143947689
  hypo

SEQ ID NO: 434239 - DNA, 713 bp, Homo sapiens; identical to SEQ ID NO: 222946
  chr6:143998943-143999656
  hypo

SEQ ID NO: 434240 - DNA, 173 bp, Homo sapiens; identical to SEQ ID NO: 256399
  chr6:144067584-144067757
  hypo

SEQ ID NO: 434241 - DNA, 250 bp, Homo sapiens; identical to SEQ ID NO: 256400
  chr6:144271186-144271436
  hypo

SEQ ID NO: 434242 - DNA, 72 bp, Homo sapiens; identical to SEQ ID NO: 210933
  chr6:144330175-144330247
  hypo

SEQ ID NO: 434243 - DNA, 79 bp, Homo sapiens; identical to SEQ ID NO: 210934
  chr6:144508671-144508750
  hypo

SEQ ID NO: 434244 - DNA, 173 bp, Homo sapiens; identical to SEQ ID NO: 256403
  chr6:144534399-144534572
  hypo

SEQ ID NO: 434245 - DNA, 46 bp, Homo sapiens; identical to SEQ ID NO: 200686
  chr6:144537939-144537985
  hypo

SEQ ID NO: 434246 - DNA, 487 bp, Homo sapiens; identical to SEQ ID NO: 200687
  chr6:144606893-144607380
  hypo

SEQ ID NO: 434247 - DNA, 177 bp, Homo sapiens; identical to SEQ ID NO: 256404
  chr6:144973591-144973768
  hypo

SEQ ID NO: 434248 - DNA, 31 bp, Homo sapiens; identical to SEQ ID NO: 210937
  chr6:146011352-146011383
  hypo

SEQ ID NO: 434249 - DNA, 254 bp, Homo sapiens; identical to SEQ ID NO: 200691
  chr6:146864508-146864762
  hypo

SEQ ID NO: 434250 - DNA, 399 bp, Homo sapiens; identical to SEQ ID NO: 284533
  chr6:146864878-146865277
  hypo

SEQ ID NO: 434251 - DNA, 69 bp, Homo sapiens; identical to SEQ ID NO: 256406
  chr6:147519322-147519391
  hypo

SEQ ID NO: 434252 - DNA, 163 bp, Homo sapiens; identical to SEQ ID NO: 256407
  chr6:147728142-147728305
  hypo

SEQ ID NO: 434253 - DNA, 42 bp, Homo sapiens; identical to SEQ ID NO: 256408
  chr6:148062632-148062674
  hypo

SEQ ID NO: 434254 - DNA, 137 bp, Homo sapiens; identical to SEQ ID NO: 210942
  chr6:148200360-148200497
  hypo

SEQ ID NO: 434255 - DNA, 39 bp, Homo sapiens; identical to SEQ ID NO: 210943
  chr6:148648689-148648728
  hypo

SEQ ID NO: 434256 - DNA, 157 bp, Homo sapiens; identical to SEQ ID NO: 256411
  chr6:148710316-148710473
  hypo

SEQ ID NO: 434257 - DNA, 198 bp, Homo sapiens; identical to SEQ ID NO: 256412
  chr6:148819897-148820095
  hypo

SEQ ID NO: 434258 - DNA, 210 bp, Homo sapiens; identical to SEQ ID NO: 256413
  chr6:148869356-148869566
  hypo

SEQ ID NO: 434259 - DNA, 195 bp, Homo sapiens; identical to SEQ ID NO: 256414
  chr6:149177572-149177767
  hypo

SEQ ID NO: 434260 - DNA, 92 bp, Homo sapiens; identical to SEQ ID NO: 256415
  chr6:149198424-149198516
  hypo

SEQ ID NO: 434261 - DNA, 32 bp, Homo sapiens; identical to SEQ ID NO: 256416
  chr6:149198576-149198608
  hypo

SEQ ID NO: 434262 - DNA, 311 bp, Homo sapiens; identical to SEQ ID NO: 256417
  chr6:149409546-149409857
  hypo

SEQ ID NO: 434263 - DNA, 110 bp, Homo sapiens; identical to SEQ ID NO: 256418
  chr6:149721362-149721472
  hypo

SEQ ID NO: 434264 - DNA, 324 bp, Homo sapiens; identical to SEQ ID NO: 284546
  chr6:149771949-149772273
  hypo

SEQ ID NO: 434265 - DNA, 169 bp, Homo sapiens; identical to SEQ ID NO: 114190
  chr6:149772292-149772461
  hypo

SEQ ID NO: 434266 - DNA, 169 bp, Homo sapiens; identical to SEQ ID NO: 256421
  chr6:149813263-149813432
  hypo

SEQ ID NO: 434267 - DNA, 55 bp, Homo sapiens; identical to SEQ ID NO: 306295
  chr6:149868387-149868442
  hypo

SEQ ID NO: 434268 - DNA, 84 bp, Homo sapiens; identical to SEQ ID NO: 210945
  chr6:150081971-150082055
  hypo

SEQ ID NO: 434269 - DNA, 122 bp, Homo sapiens; identical to SEQ ID NO: 256425
  chr6:150174429-150174551
  hypo

SEQ ID NO: 434270 - DNA, 286 bp, Homo sapiens; identical to SEQ ID NO: 284554
  chr6:150185355-150185641
  hypo

SEQ ID NO: 434271 - DNA, 210 bp, Homo sapiens; identical to SEQ ID NO: 256426
  chr6:150209155-150209365
  hypo

SEQ ID NO: 434272 - DNA, 99 bp, Homo sapiens; identical to SEQ ID NO: 256427
  chr6:150420027-150420126
  hypo

SEQ ID NO: 434273 - DNA, 39 bp, Homo sapiens; identical to SEQ ID NO: 256428
  chr6:150420186-150420225
  hypo

SEQ ID NO: 434274 - DNA, 120 bp, Homo sapiens; identical to SEQ ID NO: 256429
  chr6:150421767-150421887
  hypo

SEQ ID NO: 434275 - DNA, 120 bp, Homo sapiens; identical to SEQ ID NO: 256430
  chr6:150437046-150437166
  hypo

SEQ ID NO: 434276 - DNA, 43 bp, Homo sapiens; identical to SEQ ID NO: 256431
  chr6:150437286-150437329
  hypo

SEQ ID NO: 434277 - DNA, 31 bp, Homo sapiens; identical to SEQ ID NO: 306306
  chr6:150487186-150487217
  hypo

SEQ ID NO: 434278 - DNA, 118 bp, Homo sapiens; identical to SEQ ID NO: 256433
  chr6:150498913-150499031
  hypo

SEQ ID NO: 434279 - DNA, 31 bp, Homo sapiens; identical to SEQ ID NO: 256434
  chr6:150499232-150499263
  hypo

SEQ ID NO: 434280 - DNA, 169 bp, Homo sapiens; identical to SEQ ID NO: 256435
  chr6:150518591-150518760
  hypo

SEQ ID NO: 434281 - DNA, 39 bp, Homo sapiens; identical to SEQ ID NO: 210947
  chr6:150596883-150596922
  hypo

SEQ ID NO: 434282 - DNA, 66 bp, Homo sapiens; identical to SEQ ID NO: 256438
  chr6:151125834-151125900
  hypo

SEQ ID NO: 434283 - DNA, 125 bp, Homo sapiens; identical to SEQ ID NO: 256439
  chr6:151306909-151307034
  hypo

SEQ ID NO: 434284 - DNA, 34 bp, Homo sapiens; identical to SEQ ID NO: 210952
  chr6:151546982-151547016
  hypo

SEQ ID NO: 434285 - DNA, 34 bp, Homo sapiens; identical to SEQ ID NO: 210953
  chr6:151547076-151547110
  hypo

SEQ ID NO: 434286 - DNA, 369 bp, Homo sapiens; identical to SEQ ID NO: 256443
  chr6:151662637-151663006
  hypo

SEQ ID NO: 434287 - DNA, 38 bp, Homo sapiens; identical to SEQ ID NO: 256445
  chr6:151770486-151770524
  hypo

SEQ ID NO: 434288 - DNA, 142 bp, Homo sapiens; identical to SEQ ID NO: 210955
  chr6:152099113-152099255
  hypo

SEQ ID NO: 434289 - DNA, 44 bp, Homo sapiens; identical to SEQ ID NO: 256447
  chr6:152457829-152457873
  hypo

SEQ ID NO: 434290 - DNA, 177 bp, Homo sapiens; identical to SEQ ID NO: 256449
  chr6:152539828-152540005
  hypo

SEQ ID NO: 434291 - DNA, 165 bp, Homo sapiens; identical to SEQ ID NO: 256450
  chr6:152644581-152644746
  hypo

SEQ ID NO: 434292 - DNA, 39 bp, Homo sapiens; identical to SEQ ID NO: 256451
  chr6:153337061-153337100
  hypo

SEQ ID NO: 434293 - DNA, 110 bp, Homo sapiens; identical to SEQ ID NO: 256452
  chr6:153355448-153355558
  hypo

SEQ ID NO: 434294 - DNA, 80 bp, Homo sapiens; identical to SEQ ID NO: 256453
  chr6:153572990-153573070
  hypo

SEQ ID NO: 434295 - DNA, 37 bp, Homo sapiens; identical to SEQ ID NO: 256454
  chr6:154709415-154709452
  hypo

SEQ ID NO: 434296 - DNA, 73 bp, Homo sapiens; identical to SEQ ID NO: 256456
  chr6:154757104-154757177
  hypo

SEQ ID NO: 434297 - DNA, 136 bp, Homo sapiens; identical to SEQ ID NO: 210957
  chr6:154764334-154764470
  hypo

SEQ ID NO: 434298 - DNA, 96 bp, Homo sapiens; identical to SEQ ID NO: 256458
  chr6:154785476-154785572
  hypo

SEQ ID NO: 434299 - DNA, 183 bp, Homo sapiens; identical to SEQ ID NO: 256459
  chr6:154799040-154799223
  hypo

SEQ ID NO: 434300 - DNA, 121 bp, Homo sapiens; identical to SEQ ID NO: 256460
  chr6:154806723-154806844
  hypo

SEQ ID NO: 434301 - DNA, 1435 bp, Homo sapiens; identical to SEQ ID NO: 284580
  chr6:154830765-154832200
  hypo

SEQ ID NO: 434302 - DNA, 175 bp, Homo sapiens; identical to SEQ ID NO: 210959
  chr6:154842637-154842812
  hypo

SEQ ID NO: 434303 - DNA, 341 bp, Homo sapiens; identical to SEQ ID NO: 256463
  chr6:154863131-154863472
  hypo

SEQ ID NO: 434304 - DNA, 152 bp, Homo sapiens; identical to SEQ ID NO: 210960
  chr6:154894708-154894860
  hypo

SEQ ID NO: 434305 - DNA, 38 bp, Homo sapiens; identical to SEQ ID NO: 210961
  chr6:154970832-154970870
  hypo

SEQ ID NO: 434306 - DNA, 41 bp, Homo sapiens; identical to SEQ ID NO: 210962
  chr6:155077849-155077890
  hypo

SEQ ID NO: 434307 - DNA, 111 bp, Homo sapiens; identical to SEQ ID NO: 210963
  chr6:155281630-155281741
  hypo

SEQ ID NO: 434308 - DNA, 206 bp, Homo sapiens; identical to SEQ ID NO: 256469
  chr6:155353325-155353531
  hypo

SEQ ID NO: 434309 - DNA, 60 bp, Homo sapiens; identical to SEQ ID NO: 256470
  chr6:155396836-155396896
  hypo

SEQ ID NO: 434310 - DNA, 392 bp, Homo sapiens; identical to SEQ ID NO: 256471
  chr6:155509028-155509420
  hypo

SEQ ID NO: 434311 - DNA, 450 bp, Homo sapiens; identical to SEQ ID NO: 256472
  chr6:155534949-155535399
  hypo

SEQ ID NO: 434312 - DNA, 66 bp, Homo sapiens; identical to SEQ ID NO: 256476
  chr6:155838705-155838771
  hypo

SEQ ID NO: 434313 - DNA, 40 bp, Homo sapiens; identical to SEQ ID NO: 256477
  chr6:155991045-155991085
  hypo

SEQ ID NO: 434314 - DNA, 65 bp, Homo sapiens; identical to SEQ ID NO: 256478
  chr6:156030251-156030316
  hypo

SEQ ID NO: 434315 - DNA, 32 bp, Homo sapiens; identical to SEQ ID NO: 210966
  chr6:156156136-156156168
  hypo

SEQ ID NO: 434316 - DNA, 120 bp, Homo sapiens; identical to SEQ ID NO: 256480
  chr6:156199683-156199803
  hypo

SEQ ID NO: 434317 - DNA, 130 bp, Homo sapiens; identical to SEQ ID NO: 256481
  chr6:156374934-156375064
  hypo

SEQ ID NO: 434318 - DNA, 139 bp, Homo sapiens; identical to SEQ ID NO: 256482
  chr6:156710186-156710325
  hypo

SEQ ID NO: 434319 - DNA, 117 bp, Homo sapiens; identical to SEQ ID NO: 306361
  chr6:156817580-156817697
  hypo

SEQ ID NO: 434320 - DNA, 163 bp, Homo sapiens; identical to SEQ ID NO: 256484
  chr6:156876717-156876880
  hypo

SEQ ID NO: 434321 - DNA, 244 bp, Homo sapiens; identical to SEQ ID NO: 256485
  chr6:156883161-156883405
  hypo

SEQ ID NO: 434322 - DNA, 120 bp, Homo sapiens; identical to SEQ ID NO: 256488
  chr6:157283777-157283897
  hypo

SEQ ID NO: 434323 - DNA, 166 bp, Homo sapiens; identical to SEQ ID NO: 256489
  chr6:157336127-157336293
  hypo

SEQ ID NO: 434324 - DNA, 144 bp, Homo sapiens; identical to SEQ ID NO: 256492
  chr6:157411050-157411194
  hypo

SEQ ID NO: 434325 - DNA, 45 bp, Homo sapiens; identical to SEQ ID NO: 306372
  chr6:157431600-157431645
  hypo

SEQ ID NO: 434326 - DNA, 98 bp, Homo sapiens; identical to SEQ ID NO: 306373
  chr6:157431675-157431773
  hypo

SEQ ID NO: 434327 - DNA, 86 bp, Homo sapiens; identical to SEQ ID NO: 256495
  chr6:157447664-157447750
  hypo

SEQ ID NO: 434328 - DNA, 166 bp, Homo sapiens; identical to SEQ ID NO: 256496
  chr6:157472013-157472179
  hypo

SEQ ID NO: 434329 - DNA, 224 bp, Homo sapiens; identical to SEQ ID NO: 210970
  chr6:157477823-157478047
  hypo

SEQ ID NO: 434330 - DNA, 180 bp, Homo sapiens; identical to SEQ ID NO: 256499
  chr6:157484363-157484543
  hypo

SEQ ID NO: 434331 - DNA, 279 bp, Homo sapiens; identical to SEQ ID NO: 256500
  chr6:157498984-157499263
  hypo

SEQ ID NO: 434332 - DNA, 51 bp, Homo sapiens; identical to SEQ ID NO: 256502
  chr6:157502910-157502961
  hypo

SEQ ID NO: 434333 - DNA, 66 bp, Homo sapiens; identical to SEQ ID NO: 210973
  chr6:157548327-157548393
  hypo

SEQ ID NO: 434334 - DNA, 79 bp, Homo sapiens; identical to SEQ ID NO: 210974
  chr6:157549784-157549863
  hypo

SEQ ID NO: 434335 - DNA, 31 bp, Homo sapiens; identical to SEQ ID NO: 210975
  chr6:157550095-157550126
  hypo

SEQ ID NO: 434336 - DNA, 59 bp, Homo sapiens; identical to SEQ ID NO: 200718
  chr6:157802884-157802943
  hypo

SEQ ID NO: 434337 - DNA, 168 bp, Homo sapiens; identical to SEQ ID NO: 222962
  chr6:157803299-157803467
  hypo

SEQ ID NO: 434338 - DNA, 82 bp, Homo sapiens; identical to SEQ ID NO: 256508
  chr6:157837762-157837844
  hypo

SEQ ID NO: 434339 - DNA, 138 bp, Homo sapiens; identical to SEQ ID NO: 256509
  chr6:157849557-157849695
  hypo

SEQ ID NO: 434340 - DNA, 363 bp, Homo sapiens; identical to SEQ ID NO: 256510
  chr6:157892374-157892737
  hypo

SEQ ID NO: 434341 - DNA, 547 bp, Homo sapiens; identical to SEQ ID NO: 256511
  chr6:158017916-158018463
  hypo

SEQ ID NO: 434342 - DNA, 275 bp, Homo sapiens; identical to SEQ ID NO: 256514
  chr6:158070271-158070546
  hypo

SEQ ID NO: 434343 - DNA, 56 bp, Homo sapiens; identical to SEQ ID NO: 256516
  chr6:158094784-158094840
  hypo

SEQ ID NO: 434344 - DNA, 276 bp, Homo sapiens; identical to SEQ ID NO: 256517
  chr6:158116417-158116693
  hypo

SEQ ID NO: 434345 - DNA, 571 bp, Homo sapiens; identical to SEQ ID NO: 284588
  chr6:158244130-158244701
  hypo

SEQ ID NO: 434346 - DNA, 302 bp, Homo sapiens; identical to SEQ ID NO: 256518
  chr6:158296042-158296344
  hypo

SEQ ID NO: 434347 - DNA, 199 bp, Homo sapiens; identical to SEQ ID NO: 210981
  chr6:158328733-158328932
  hypo

SEQ ID NO: 434348 - DNA, 228 bp, Homo sapiens; identical to SEQ ID NO: 256521
  chr6:158412178-158412406
  hypo

SEQ ID NO: 434349 - DNA, 165 bp, Homo sapiens; identical to SEQ ID NO: 256522
  chr6:158454488-158454653
  hypo

SEQ ID NO: 434350 - DNA, 183 bp, Homo sapiens; identical to SEQ ID NO: 210983
  chr6:158488744-158488927
  hypo

SEQ ID NO: 434351 - DNA, 37 bp, Homo sapiens; identical to SEQ ID NO: 256524
  chr6:158563786-158563823
  hypo

SEQ ID NO: 434352 - DNA, 35 bp, Homo sapiens; identical to SEQ ID NO: 256525
  chr6:158567710-158567745
  hypo

SEQ ID NO: 434353 - DNA, 35 bp, Homo sapiens; identical to SEQ ID NO: 210984
  chr6:158593346-158593381
  hypo

SEQ ID NO: 434354 - DNA, 50 bp, Homo sapiens; identical to SEQ ID NO: 256527
  chr6:158619761-158619811
  hypo

SEQ ID NO: 434355 - DNA, 31 bp, Homo sapiens
  chr6:158651785-158651816
  hypo
tgggaccacagttaaatgcattatatttata

SEQ ID NO: 434356 - DNA, 219 bp, Homo sapiens; identical to SEQ ID NO: 256529
  chr6:158708293-158708512
  hypo

SEQ ID NO: 434357 - DNA, 41 bp, Homo sapiens; identical to SEQ ID NO: 210985
  chr6:158734071-158734112
  hypo

SEQ ID NO: 434358 - DNA, 120 bp, Homo sapiens; identical to SEQ ID NO: 256531
  chr6:158794424-158794544
  hypo

SEQ ID NO: 434359 - DNA, 157 bp, Homo sapiens; identical to SEQ ID NO: 256532
  chr6:158806007-158806164
  hypo

SEQ ID NO: 434360 - DNA, 181 bp, Homo sapiens; identical to SEQ ID NO: 256533
  chr6:158873203-158873384
  hypo

SEQ ID NO: 434361 - DNA, 55 bp, Homo sapiens; identical to SEQ ID NO: 256534
  chr6:158925050-158925105
  hypo

SEQ ID NO: 434362 - DNA, 75 bp, Homo sapiens; identical to SEQ ID NO: 200723
  chr6:158957207-158957282
  hypo

SEQ ID NO: 434363 - DNA, 391 bp, Homo sapiens; identical to SEQ ID NO: 419045
  chr6:158957317-158957708
  hypo

SEQ ID NO: 434364 - DNA, 79 bp, Homo sapiens; identical to SEQ ID NO: 306421
  chr6:158982652-158982731
  hypo

SEQ ID NO: 434365 - DNA, 133 bp, Homo sapiens; identical to SEQ ID NO: 210990
  chr6:159049612-159049745
  hypo

SEQ ID NO: 434366 - DNA, 212 bp, Homo sapiens; identical to SEQ ID NO: 306424
  chr6:159049883-159050095
  hypo

SEQ ID NO: 434367 - DNA, 124 bp, Homo sapiens; identical to SEQ ID NO: 256539
  chr6:159086527-159086651
  hypo

SEQ ID NO: 434368 - DNA, 185 bp, Homo sapiens; identical to SEQ ID NO: 210992
  chr6:159135764-159135949
  hypo

SEQ ID NO: 434369 - DNA, 206 bp, Homo sapiens; identical to SEQ ID NO: 306428
  chr6:159151686-159151892
  hypo

SEQ ID NO: 434370 - DNA, 103 bp, Homo sapiens; identical to SEQ ID NO: 256542
  chr6:159175774-159175877
  hypo

SEQ ID NO: 434371 - DNA, 306 bp, Homo sapiens; identical to SEQ ID NO: 256543
  chr6:159176740-159177046
  hypo

SEQ ID NO: 434372 - DNA, 92 bp, Homo sapiens; identical to SEQ ID NO: 256544
  chr6:159177387-159177479
  hypo

SEQ ID NO: 434373 - DNA, 162 bp, Homo sapiens; identical to SEQ ID NO: 256545
  chr6:159180413-159180575
  hypo

SEQ ID NO: 434374 - DNA, 112 bp, Homo sapiens; identical to SEQ ID NO: 256546
  chr6:159182970-159183082
  hypo

SEQ ID NO: 434375 - DNA, 114 bp, Homo sapiens; identical to SEQ ID NO: 256547
  chr6:159188289-159188403
  hypo

SEQ ID NO: 434376 - DNA, 194 bp, Homo sapiens; identical to SEQ ID NO: 210994
  chr6:159190317-159190511
  hypo

SEQ ID NO: 434377 - DNA, 178 bp, Homo sapiens; identical to SEQ ID NO: 256549
  chr6:159193321-159193499
  hypo

SEQ ID NO: 434378 - DNA, 172 bp, Homo sapiens; identical to SEQ ID NO: 256553
  chr6:159211979-159212151
  hypo

SEQ ID NO: 434379 - DNA, 35 bp, Homo sapiens; identical to SEQ ID NO: 256554
  chr6:159213572-159213607
  hypo

SEQ ID NO: 434380 - DNA, 130 bp, Homo sapiens; identical to SEQ ID NO: 256555
  chr6:159215619-159215749
  hypo

SEQ ID NO: 434381 - DNA, 143 bp, Homo sapiens; identical to SEQ ID NO: 256556
  chr6:159219542-159219685
  hypo

SEQ ID NO: 434382 - DNA, 37 bp, Homo sapiens; identical to SEQ ID NO: 256557
  chr6:159223564-159223601
  hypo

SEQ ID NO: 434383 - DNA, 37 bp, Homo sapiens; identical to SEQ ID NO: 256558
  chr6:159223841-159223878
  hypo

SEQ ID NO: 434384 - DNA, 139 bp, Homo sapiens; identical to SEQ ID NO: 284596
  chr6:159290684-159290823
  hypo

SEQ ID NO: 434385 - DNA, 311 bp, Homo sapiens; identical to SEQ ID NO: 284597
  chr6:159290852-159291163
  hypo

SEQ ID NO: 434386 - DNA, 63 bp, Homo sapiens; identical to SEQ ID NO: 210996
  chr6:159299254-159299317
  hypo

SEQ ID NO: 434387 - DNA, 119 bp, Homo sapiens; identical to SEQ ID NO: 256561
  chr6:159345138-159345257
  hypo

SEQ ID NO: 434388 - DNA, 105 bp, Homo sapiens; identical to SEQ ID NO: 405453
  chr6:159419499-159419604
  hypo

SEQ ID NO: 434389 - DNA, 145 bp, Homo sapiens; identical to SEQ ID NO: 256563
  chr6:159423619-159423764
  hypo

SEQ ID NO: 434390 - DNA, 34 bp, Homo sapiens; identical to SEQ ID NO: 306453
  chr6:159653184-159653218
  hypo

SEQ ID NO: 434391 - DNA, 179 bp, Homo sapiens; identical to SEQ ID NO: 306454
  chr6:159653248-159653427
  hypo

SEQ ID NO: 434392 - DNA, 130 bp, Homo sapiens; identical to SEQ ID NO: 256565
  chr6:159653853-159653983
  hypo

SEQ ID NO: 434393 - DNA, 287 bp, Homo sapiens; identical to SEQ ID NO: 256566
  chr6:159876779-159877066
  hypo

SEQ ID NO: 434394 - DNA, 42 bp, Homo sapiens; identical to SEQ ID NO: 256567
  chr6:159877096-159877138
  hypo

SEQ ID NO: 434395 - DNA, 253 bp, Homo sapiens; identical to SEQ ID NO: 256568
  chr6:160220483-160220736
  hypo

SEQ ID NO: 434396 - DNA, 180 bp, Homo sapiens; identical to SEQ ID NO: 256569
  chr6:160328046-160328226
  hypo

SEQ ID NO: 434397 - DNA, 470 bp, Homo sapiens; identical to SEQ ID NO: 284607
  chr6:160389587-160390057
  hypo

SEQ ID NO: 434398 - DNA, 133 bp, Homo sapiens; identical to SEQ ID NO: 256570
  chr6:160418650-160418783
  hypo

SEQ ID NO: 434399 - DNA, 263 bp, Homo sapiens; identical to SEQ ID NO: 256573
  chr6:160459515-160459778
  hypo

SEQ ID NO: 434400 - DNA, 217 bp, Homo sapiens; identical to SEQ ID NO: 256574
  chr6:160463628-160463845
  hypo

SEQ ID NO: 434401 - DNA, 86 bp, Homo sapiens; identical to SEQ ID NO: 211002
  chr6:160475955-160476041
  hypo

SEQ ID NO: 434402 - DNA, 162 bp, Homo sapiens; identical to SEQ ID NO: 211003
  chr6:160491754-160491916
  hypo

SEQ ID NO: 434403 - DNA, 71 bp, Homo sapiens; identical to SEQ ID NO: 256577
  chr6:160509961-160510032
  hypo

SEQ ID NO: 434404 - DNA, 31 bp, Homo sapiens; identical to SEQ ID NO: 256579
  chr6:160513374-160513405
  hypo

SEQ ID NO: 434405 - DNA, 111 bp, Homo sapiens; identical to SEQ ID NO: 256580
  chr6:160527214-160527325
  hypo

SEQ ID NO: 434406 - DNA, 195 bp, Homo sapiens; identical to SEQ ID NO: 256582
  chr6:160680141-160680336
  hypo

SEQ ID NO: 434407 - DNA, 98 bp, Homo sapiens; identical to SEQ ID NO: 256583
  chr6:161430268-161430366
  hypo

SEQ ID NO: 434408 - DNA, 168 bp, Homo sapiens; identical to SEQ ID NO: 211006
  chr6:161522588-161522756
  hypo

SEQ ID NO: 434409 - DNA, 64 bp, Homo sapiens; identical to SEQ ID NO: 256585
  chr6:161547843-161547907
  hypo

SEQ ID NO: 434410 - DNA, 75 bp, Homo sapiens; identical to SEQ ID NO: 256586
  chr6:161549953-161550028
  hypo

SEQ ID NO: 434411 - DNA, 34 bp, Homo sapiens; identical to SEQ ID NO: 256587
  chr6:161556868-161556902
  hypo

SEQ ID NO: 434412 - DNA, 39 bp, Homo sapiens; identical to SEQ ID NO: 256588
  chr6:161558061-161558100
  hypo

SEQ ID NO: 434413 - DNA, 128 bp, Homo sapiens; identical to SEQ ID NO: 256589
  chr6:161559035-161559163
  hypo

SEQ ID NO: 434414 - DNA, 362 bp, Homo sapiens; identical to SEQ ID NO: 256590
  chr6:161559597-161559959
  hypo

SEQ ID NO: 434415 - DNA, 47 bp, Homo sapiens; identical to SEQ ID NO: 256591
  chr6:161560591-161560638
  hypo

SEQ ID NO: 434416 - DNA, 113 bp, Homo sapiens; identical to SEQ ID NO: 256592
  chr6:161572342-161572455
  hypo

SEQ ID NO: 434417 - DNA, 644 bp, Homo sapiens; identical to SEQ ID NO: 306484
  chr6:161575239-161575883
  hypo

SEQ ID NO: 434418 - DNA, 187 bp, Homo sapiens; identical to SEQ ID NO: 306485
  chr6:161575913-161576100
  hypo

SEQ ID NO: 434419 - DNA, 276 bp, Homo sapiens; identical to SEQ ID NO: 256595
  chr6:161637994-161638270
  hypo

SEQ ID NO: 434420 - DNA, 99 bp, Homo sapiens; identical to SEQ ID NO: 256596
  chr6:161642104-161642203
  hypo

SEQ ID NO: 434421 - DNA, 141 bp, Homo sapiens; identical to SEQ ID NO: 256599
  chr6:161788278-161788419
  hypo

SEQ ID NO: 434422 - DNA, 221 bp, Homo sapiens; identical to SEQ ID NO: 306491
  chr6:162253713-162253934
  hypo

SEQ ID NO: 434423 - DNA, 41 bp, Homo sapiens; identical to SEQ ID NO: 256601
  chr6:162938563-162938604
  hypo

SEQ ID NO: 434424 - DNA, 37 bp, Homo sapiens; identical to SEQ ID NO: 211008
  chr6:163009855-163009892
  hypo

SEQ ID NO: 434425 - DNA, 45 bp, Homo sapiens; identical to SEQ ID NO: 256603
  chr6:163032923-163032968
  hypo

SEQ ID NO: 434426 - DNA, 290 bp, Homo sapiens; identical to SEQ ID NO: 256604
  chr6:163321044-163321334
  hypo

SEQ ID NO: 434427 - DNA, 59 bp, Homo sapiens; identical to SEQ ID NO: 306496
  chr6:163558514-163558573
  hypo

SEQ ID NO: 434428 - DNA, 209 bp, Homo sapiens; identical to SEQ ID NO: 211009
  chr6:163591723-163591932
  hypo

SEQ ID NO: 434429 - DNA, 153 bp, Homo sapiens; identical to SEQ ID NO: 256607
  chr6:163607798-163607951
  hypo

SEQ ID NO: 434430 - DNA, 144 bp, Homo sapiens; identical to SEQ ID NO: 256608
  chr6:163710196-163710340
  hypo

SEQ ID NO: 434431 - DNA, 50 bp, Homo sapiens; identical to SEQ ID NO: 256611
  chr6:164112161-164112211
  hypo

SEQ ID NO: 434432 - DNA, 126 bp, Homo sapiens; identical to SEQ ID NO: 306502
  chr6:164170160-164170286
  hypo

SEQ ID NO: 434433 - DNA, 56 bp, Homo sapiens; identical to SEQ ID NO: 306503
  chr6:164170324-164170380
  hypo

SEQ ID NO: 434434 - DNA, 180 bp, Homo sapiens; identical to SEQ ID NO: 256613
  chr6:164183098-164183278
  hypo

SEQ ID NO: 434435 - DNA, 249 bp, Homo sapiens; identical to SEQ ID NO: 306505
  chr6:164245494-164245743
  hypo

SEQ ID NO: 434436 - DNA, 42 bp, Homo sapiens; identical to SEQ ID NO: 306506
  chr6:164283377-164283419
  hypo

SEQ ID NO: 434437 - DNA, 42 bp, Homo sapiens; identical to SEQ ID NO: 256617
  chr6:164299008-164299050
  hypo

SEQ ID NO: 434438 - DNA, 38 bp, Homo sapiens; identical to SEQ ID NO: 256619
  chr6:164320871-164320909
  hypo

SEQ ID NO: 434439 - DNA, 130 bp, Homo sapiens; identical to SEQ ID NO: 256621
  chr6:164339933-164340063
  hypo

SEQ ID NO: 434440 - DNA, 135 bp, Homo sapiens; identical to SEQ ID NO: 256623
  chr6:164506147-164506282
  hypo

SEQ ID NO: 434441 - DNA, 52 bp, Homo sapiens; identical to SEQ ID NO: 256624
  chr6:165747832-165747884
  hypo

SEQ ID NO: 434442 - DNA, 41 bp, Homo sapiens; identical to SEQ ID NO: 306513
  chr6:166128526-166128567
  hypo

SEQ ID NO: 434443 - DNA, 40 bp, Homo sapiens; identical to SEQ ID NO: 306514
  chr6:166128614-166128654
  hypo

SEQ ID NO: 434444 - DNA, 89 bp, Homo sapiens; identical to SEQ ID NO: 256626
  chr6:166144516-166144605
  hypo

SEQ ID NO: 434445 - DNA, 445 bp, Homo sapiens; identical to SEQ ID NO: 256627
  chr6:166240451-166240896
  hypo

SEQ ID NO: 434446 - DNA, 151 bp, Homo sapiens; identical to SEQ ID NO: 5249
  chr6:166402752-166402903
  hypo

SEQ ID NO: 434447 - DNA, 200 bp, Homo sapiens; identical to SEQ ID NO: 256630
  chr6:166731254-166731454
  hypo

SEQ ID NO: 434448 - DNA, 289 bp, Homo sapiens; identical to SEQ ID NO: 256631
  chr6:166731848-166732137
  hypo

SEQ ID NO: 434449 - DNA, 48 bp, Homo sapiens; identical to SEQ ID NO: 211013
  chr6:166748326-166748374
  hypo

SEQ ID NO: 434450 - DNA, 203 bp, Homo sapiens; identical to SEQ ID NO: 256634
  chr6:166868890-166869093
  hypo

SEQ ID NO: 434451 - DNA, 354 bp, Homo sapiens; identical to SEQ ID NO: 306525
  chr6:166943992-166944346
  hypo

SEQ ID NO: 434452 - DNA, 44 bp, Homo sapiens; identical to SEQ ID NO: 256636
  chr6:166944738-166944782
  hypo

SEQ ID NO: 434453 - DNA, 48 bp, Homo sapiens; identical to SEQ ID NO: 306527
  chr6:167038321-167038369
  hypo

SEQ ID NO: 434454 - DNA, 96 bp, Homo sapiens; identical to SEQ ID NO: 211014
  chr6:167051700-167051796
  hypo

SEQ ID NO: 434455 - DNA, 87 bp, Homo sapiens; identical to SEQ ID NO: 256639
  chr6:167089923-167090010
  hypo

SEQ ID NO: 434456 - DNA, 67 bp, Homo sapiens; identical to SEQ ID NO: 256640
  chr6:167091815-167091882
  hypo

SEQ ID NO: 434457 - DNA, 37 bp, Homo sapiens; identical to SEQ ID NO: 256641
  chr6:167092252-167092289
  hypo

SEQ ID NO: 434458 - DNA, 115 bp, Homo sapiens; identical to SEQ ID NO: 211015
  chr6:167136191-167136306
  hypo

SEQ ID NO: 434459 - DNA, 90 bp, Homo sapiens; identical to SEQ ID NO: 306533
  chr6:167136408-167136498
  hypo

SEQ ID NO: 434460 - DNA, 55 bp, Homo sapiens; identical to SEQ ID NO: 256646
  chr6:167169077-167169132
  hypo

SEQ ID NO: 434461 - DNA, 49 bp, Homo sapiens; identical to SEQ ID NO: 284644
  chr6:167276260-167276309
  hypo

SEQ ID NO: 434462 - DNA, 204 bp, Homo sapiens; identical to SEQ ID NO: 256647
  chr6:167284359-167284563
  hypo

SEQ ID NO: 434463 - DNA, 849 bp, Homo sapiens
  chr6:167313423-167314272
  hypo
aggagagaacctccagtgagcgcacagaaagaagaacgccacaggaacgcacagtggagagaatgccatgtgaaggcacaaagaacggagaacgctgcgtgaacgcacacacgtgggggagaaagccaggggaacgcacagagtaaatagaacgcaatgggaacgcacaggaaagagaacgccacgggaacacaccgggggagaacgccaggagaacacactgaggagagaactccgcgtgaacacaatgcgggagaactccaggtcaacgcacggagaggagaacgcctgctgaatgcacggggttggagaacgccggtgaacgccggtgaacgcacggggaagagaacgccacgtgaacacacgggggagacgccgcacgaacacacagaagggagaatgccgggtgaacacacacgggggagaacgcccacgcgaacgcacagggtagagaattccgggtgaaggcacaggagggaaacggcgcgcgaacgctcagcggggagaacgcctggtgaatgcacgggagggagaaggccaggtgaacgcacagggggaaaatgccgcgctaaagcacacgggaaataacgccgagcaaacacacaggtgggagaacgtcgcacgaacgcacagcgtggagaacgcgacgtgaacgcacacggggaagaacactgcgcgaacgcacagcagggagaacgccacttgaaagcaaagtgaggggagaatgccgcgttgaacgcacagtggggagaacaacccgcgaactcataaaggggagaacgcagcgtgaaagcacacagcggggagaacgcctggggaacgcaaagagtaaagagaatgccttgggaa

SEQ ID NO: 434464 - DNA, 176 bp, Homo sapiens; identical to SEQ ID NO: 256649
  chr6:167354231-167354407
  hypo

SEQ ID NO: 434465 - DNA, 65 bp, Homo sapiens; identical to SEQ ID NO: 211017
  chr6:167384339-167384404
  hypo

SEQ ID NO: 434466 - DNA, 217 bp, Homo sapiens; identical to SEQ ID NO: 256651
  chr6:167391010-167391227
  hypo

SEQ ID NO: 434467 - DNA, 196 bp, Homo sapiens; identical to SEQ ID NO: 211018
  chr6:167511715-167511911
  hypo

SEQ ID NO: 434468 - DNA, 127 bp, Homo sapiens; identical to SEQ ID NO: 256653
  chr6:167649278-167649405
  hypo

SEQ ID NO: 434469 - DNA, 86 bp, Homo sapiens; identical to SEQ ID NO: 256654
  chr6:167707449-167707535
  hypo

SEQ ID NO: 434470 - DNA, 138 bp, Homo sapiens; identical to SEQ ID NO: 256655
  chr6:167813214-167813352
  hypo

SEQ ID NO: 434471 - DNA, 545 bp, Homo sapiens; identical to SEQ ID NO: 211020
  chr6:167880207-167880752
  hypo

SEQ ID NO: 434472 - DNA, 51 bp, Homo sapiens; identical to SEQ ID NO: 211021
  chr6:168054236-168054287
  hypo

SEQ ID NO: 434473 - DNA, 36 bp, Homo sapiens; identical to SEQ ID NO: 211022
  chr6:168131201-168131237
  hypo

SEQ ID NO: 434474 - DNA, 47 bp, Homo sapiens; identical to SEQ ID NO: 211023
  chr6:168156341-168156388
  hypo

SEQ ID NO: 434475 - DNA, 277 bp, Homo sapiens; identical to SEQ ID NO: 256664
  chr6:168167927-168168204
  hypo

SEQ ID NO: 434476 - DNA, 930 bp, Homo sapiens; identical to SEQ ID NO: 284647
  chr6:168226538-168227468
  hypo

SEQ ID NO: 434477 - DNA, 33 bp, Homo sapiens; identical to SEQ ID NO: 200752
  chr6:168227910-168227943
  hypo

SEQ ID NO: 434478 - DNA, 84 bp, Homo sapiens; identical to SEQ ID NO: 200753
  chr6:168228222-168228306
  hypo

SEQ ID NO: 434479 - DNA, 130 bp, Homo sapiens; identical to SEQ ID NO: 306559
  chr6:168377608-168377738
  hypo

SEQ ID NO: 434480 - DNA, 31 bp, Homo sapiens
  chr6:168379265-168379296
  hypo
gaagagtcaaactctgtaaaatatttgaaga

SEQ ID NO: 434481 - DNA, 40 bp, Homo sapiens; identical to SEQ ID NO: 256667
  chr6:168387062-168387102
  hypo

SEQ ID NO: 434482 - DNA, 86 bp, Homo sapiens; identical to SEQ ID NO: 211029
  chr6:168387333-168387419
  hypo

SEQ ID NO: 434483 - DNA, 188 bp, Homo sapiens; identical to SEQ ID NO: 256669
  chr6:168389684-168389872
  hypo

SEQ ID NO: 434484 - DNA, 100 bp, Homo sapiens; identical to SEQ ID NO: 256670
  chr6:168390655-168390755
  hypo

SEQ ID NO: 434485 - DNA, 99 bp, Homo sapiens; identical to SEQ ID NO: 256671
  chr6:168390875-168390974
  hypo

SEQ ID NO: 434486 - DNA, 305 bp, Homo sapiens; identical to SEQ ID NO: 256672
  chr6:168391271-168391576
  hypo

SEQ ID NO: 434487 - DNA, 201 bp, Homo sapiens; identical to SEQ ID NO: 256673
  chr6:168401780-168401981
  hypo

SEQ ID NO: 434488 - DNA, 97 bp, Homo sapiens; identical to SEQ ID NO: 256674
  chr6:168416725-168416822
  hypo

SEQ ID NO: 434489 - DNA, 127 bp, Homo sapiens; identical to SEQ ID NO: 256675
  chr6:168417026-168417153
  hypo

SEQ ID NO: 434490 - DNA, 200 bp, Homo sapiens; identical to SEQ ID NO: 256676
  chr6:168420280-168420480
  hypo

SEQ ID NO: 434491 - DNA, 45 bp, Homo sapiens; identical to SEQ ID NO: 211031
  chr6:168428432-168428477
  hypo

SEQ ID NO: 434492 - DNA, 167 bp, Homo sapiens; identical to SEQ ID NO: 211032
  chr6:168434610-168434777
  hypo

SEQ ID NO: 434493 - DNA, 153 bp, Homo sapiens; identical to SEQ ID NO: 256679
  chr6:168450069-168450222
  hypo

SEQ ID NO: 434494 - DNA, 552 bp, Homo sapiens; identical to SEQ ID NO: 256680
  chr6:168450728-168451280
  hypo

SEQ ID NO: 434495 - DNA, 210 bp, Homo sapiens; identical to SEQ ID NO: 256681
  chr6:168453027-168453237
  hypo

SEQ ID NO: 434496 - DNA, 351 bp, Homo sapiens; identical to SEQ ID NO: 256682
  chr6:168458057-168458408
  hypo

SEQ ID NO: 434497 - DNA, 203 bp, Homo sapiens; identical to SEQ ID NO: 256683
  chr6:168458627-168458830
  hypo

SEQ ID NO: 434498 - DNA, 66 bp, Homo sapiens; identical to SEQ ID NO: 256684
  chr6:168461832-168461898
  hypo

SEQ ID NO: 434499 - DNA, 37 bp, Homo sapiens
  chr6:168462707-168462744
  hypo
gctagccacaggaaaggatgattttaaatgtcagcca

SEQ ID NO: 434500 - DNA, 54 bp, Homo sapiens; identical to SEQ ID NO: 256686
  chr6:168462774-168462828
  hypo

SEQ ID NO: 434501 - DNA, 202 bp, Homo sapiens; identical to SEQ ID NO: 211035
  chr6:168463427-168463629
  hypo

SEQ ID NO: 434502 - DNA, 119 bp, Homo sapiens; identical to SEQ ID NO: 211036
  chr6:168467750-168467869
  hypo

SEQ ID NO: 434503 - DNA, 53 bp, Homo sapiens; identical to SEQ ID NO: 256689
  chr6:168482041-168482094
  hypo

SEQ ID NO: 434504 - DNA, 172 bp, Homo sapiens; identical to SEQ ID NO: 256690
  chr6:168482714-168482886
  hypo

SEQ ID NO: 434505 - DNA, 103 bp, Homo sapiens; identical to SEQ ID NO: 256691
  chr6:168490178-168490281
  hypo

SEQ ID NO: 434506 - DNA, 118 bp, Homo sapiens; identical to SEQ ID NO: 256692
  chr6:168517650-168517768
  hypo

SEQ ID NO: 434507 - DNA, 38 bp, Homo sapiens; identical to SEQ ID NO: 256694
  chr6:168561523-168561561
  hypo

SEQ ID NO: 434508 - DNA, 209 bp, Homo sapiens; identical to SEQ ID NO: 256695
  chr6:168591119-168591328
  hypo

SEQ ID NO: 434509 - DNA, 108 bp, Homo sapiens; identical to SEQ ID NO: 211038
  chr6:168613294-168613402
  hypo

SEQ ID NO: 434510 - DNA, 252 bp, Homo sapiens; identical to SEQ ID NO: 256697
  chr6:168633686-168633938
  hypo

SEQ ID NO: 434511 - DNA, 193 bp, Homo sapiens; identical to SEQ ID NO: 256698
  chr6:168664088-168664281
  hypo

SEQ ID NO: 434512 - DNA, 56 bp, Homo sapiens; identical to SEQ ID NO: 256700
  chr6:168700436-168700492
  hypo

SEQ ID NO: 434513 - DNA, 453 bp, Homo sapiens; identical to SEQ ID NO: 256701
  chr6:168708247-168708700
  hypo

SEQ ID NO: 434514 - DNA, 622 bp, Homo sapiens; identical to SEQ ID NO: 284651
  chr6:168720072-168720694
  hypo

SEQ ID NO: 434515 - DNA, 133 bp, Homo sapiens; identical to SEQ ID NO: 211043
  chr6:168813949-168814082
  hypo

SEQ ID NO: 434516 - DNA, 354 bp, Homo sapiens; identical to SEQ ID NO: 211044
  chr6:168936432-168936786
  hypo

SEQ ID NO: 434517 - DNA, 156 bp, Homo sapiens; identical to SEQ ID NO: 256706
  chr6:168956125-168956281
  hypo

SEQ ID NO: 434518 - DNA, 87 bp, Homo sapiens; identical to SEQ ID NO: 256707
  chr6:169013509-169013596
  hypo

SEQ ID NO: 434519 - DNA, 185 bp, Homo sapiens; identical to SEQ ID NO: 211045
  chr6:169106757-169106942
  hypo

SEQ ID NO: 434520 - DNA, 42 bp, Homo sapiens; identical to SEQ ID NO: 256709
  chr6:169448769-169448811
  hypo

SEQ ID NO: 434521 - DNA, 177 bp, Homo sapiens; identical to SEQ ID NO: 256710
  chr6:169465183-169465360
  hypo

SEQ ID NO: 434522 - DNA, 117 bp, Homo sapiens; identical to SEQ ID NO: 211046
  chr6:169539421-169539538
  hypo

SEQ ID NO: 434523 - DNA, 350 bp, Homo sapiens; identical to SEQ ID NO: 211047
  chr6:169539703-169540053
  hypo

SEQ ID NO: 434524 - DNA, 45 bp, Homo sapiens; identical to SEQ ID NO: 256713
  chr6:169585505-169585550
  hypo

SEQ ID NO: 434525 - DNA, 240 bp, Homo sapiens; identical to SEQ ID NO: 211049
  chr6:169592278-169592518
  hypo

SEQ ID NO: 434526 - DNA, 212 bp, Homo sapiens; identical to SEQ ID NO: 211050
  chr6:169592578-169592790
  hypo

SEQ ID NO: 434527 - DNA, 368 bp, Homo sapiens; identical to SEQ ID NO: 256716
  chr6:169625141-169625509
  hypo

SEQ ID NO: 434528 - DNA, 34 bp, Homo sapiens; identical to SEQ ID NO: 211051
  chr6:169634743-169634777
  hypo

SEQ ID NO: 434529 - DNA, 269 bp, Homo sapiens; identical to SEQ ID NO: 211052
  chr6:169634807-169635076
  hypo

SEQ ID NO: 434530 - DNA, 106 bp, Homo sapiens; identical to SEQ ID NO: 211053
  chr6:169641783-169641889
  hypo

SEQ ID NO: 434531 - DNA, 193 bp, Homo sapiens; identical to SEQ ID NO: 211054
  chr6:169642005-169642198
  hypo

SEQ ID NO: 434532 - DNA, 745 bp, Homo sapiens; identical to SEQ ID NO: 211055
  chr6:169648464-169649209
  hypo

SEQ ID NO: 434533 - DNA, 193 bp, Homo sapiens; identical to SEQ ID NO: 256721
  chr6:169803235-169803428
  hypo

SEQ ID NO: 434534 - DNA, 120 bp, Homo sapiens; identical to SEQ ID NO: 256722
  chr6:169880473-169880593
  hypo

SEQ ID NO: 434535 - DNA, 103 bp, Homo sapiens; identical to SEQ ID NO: 256723
  chr6:169971578-169971681
  hypo

SEQ ID NO: 434536 - DNA, 158 bp, Homo sapiens; identical to SEQ ID NO: 306622
  chr6:170047309-170047467
  hypo

SEQ ID NO: 434537 - DNA, 231 bp, Homo sapiens; identical to SEQ ID NO: 306623
  chr6:170047499-170047730
  hypo

SEQ ID NO: 434538 - DNA, 178 bp, Homo sapiens; identical to SEQ ID NO: 211056
  chr6:170059400-170059578
  hypo

SEQ ID NO: 434539 - DNA, 36 bp, Homo sapiens; identical to SEQ ID NO: 211057
  chr6:170061018-170061054
  hypo

SEQ ID NO: 434540 - DNA, 113 bp, Homo sapiens; identical to SEQ ID NO: 306626
  chr6:170065254-170065367
  hypo

SEQ ID NO: 434541 - DNA, 555 bp, Homo sapiens; identical to SEQ ID NO: 306627
  chr6:170065397-170065952
  hypo

SEQ ID NO: 434542 - DNA, 42 bp, Homo sapiens; identical to SEQ ID NO: 256730
  chr6:170365710-170365752
  hypo

SEQ ID NO: 434543 - DNA, 222 bp, Homo sapiens; identical to SEQ ID NO: 306633
  chr6:170402059-170402281
  hypo

SEQ ID NO: 434544 - DNA, 47 bp, Homo sapiens; identical to SEQ ID NO: 256732
  chr6:170413530-170413577
  hypo

SEQ ID NO: 434545 - DNA, 72 bp, Homo sapiens; identical to SEQ ID NO: 306635
  chr6:170413607-170413679
  hypo

SEQ ID NO: 434546 - DNA, 42 bp, Homo sapiens; identical to SEQ ID NO: 306636
  chr6:170413793-170413835
  hypo

SEQ ID NO: 434547 - DNA, 229 bp, Homo sapiens; identical to SEQ ID NO: 211062
  chr6:170453833-170454062
  hypo

SEQ ID NO: 434548 - DNA, 902 bp, Homo sapiens; identical to SEQ ID NO: 256736
  chr6:170491589-170492491
  hypo

SEQ ID NO: 434549 - DNA, 35 bp, Homo sapiens; identical to SEQ ID NO: 256737
  chr6:170492521-170492556
  hypo

SEQ ID NO: 434550 - DNA, 276 bp, Homo sapiens; identical to SEQ ID NO: 256738
  chr6:170492586-170492862
  hypo

SEQ ID NO: 434551 - DNA, 120 bp, Homo sapiens; identical to SEQ ID NO: 211065
  chr6:170500862-170500982
  hypo

SEQ ID NO: 434552 - DNA, 227 bp, Homo sapiens; identical to SEQ ID NO: 256741
  chr6:170578601-170578828
  hypo

SEQ ID NO: 434553 - DNA, 74 bp, Homo sapiens; identical to SEQ ID NO: 256742
  chr6:170578858-170578932
  hypo

SEQ ID NO: 434554 - DNA, 56 bp, Homo sapiens; identical to SEQ ID NO: 211067
  chr6:170579426-170579482
  hypo

SEQ ID NO: 434555 - DNA, 98 bp, Homo sapiens; identical to SEQ ID NO: 284661
  chr6:170605422-170605520
  hypo

SEQ ID NO: 434556 - DNA, 132 bp, Homo sapiens; identical to SEQ ID NO: 284662
  chr6:170605940-170606072
  hypo

SEQ ID NO: 434557 - DNA, 112 bp, Homo sapiens; identical to SEQ ID NO: 256746
  chr6:170713941-170714053
  hypo

SEQ ID NO: 434558 - DNA, 120 bp, Homo sapiens; identical to SEQ ID NO: 211068
  chr6:170894913-170895033
  hypo

SEQ ID NO: 434559 - DNA, 33 bp, Homo sapiens; identical to SEQ ID NO: 256749
  chr7:62937-62970
  hypo

SEQ ID NO: 434560 - DNA, 139 bp, Homo sapiens; identical to SEQ ID NO: 211069
  chr7:85450-85589
  hypo

SEQ ID NO: 434561 - DNA, 46 bp, Homo sapiens; identical to SEQ ID NO: 256752
  chr7:118252-118298
  hypo

SEQ ID NO: 434562 - DNA, 94 bp, Homo sapiens; identical to SEQ ID NO: 256753
  chr7:139618-139712
  hypo

SEQ ID NO: 434563 - DNA, 155 bp, Homo sapiens; identical to SEQ ID NO: 256754
  chr7:153660-153815
  hypo

SEQ ID NO: 434564 - DNA, 66 bp, Homo sapiens; identical to SEQ ID NO: 256755
  chr7:154289-154355
  hypo

SEQ ID NO: 434565 - DNA, 217 bp, Homo sapiens; identical to SEQ ID NO: 256756
  chr7:158843-159060
  hypo

SEQ ID NO: 434566 - DNA, 262 bp, Homo sapiens; identical to SEQ ID NO: 256757
  chr7:161869-162131
  hypo

SEQ ID NO: 434567 - DNA, 529 bp, Homo sapiens; identical to SEQ ID NO: 256761
  chr7:175273-175802
  hypo

SEQ ID NO: 434568 - DNA, 254 bp, Homo sapiens; identical to SEQ ID NO: 256762
  chr7:178590-178844
  hypo

SEQ ID NO: 434569 - DNA, 334 bp, Homo sapiens; identical to SEQ ID NO: 256763
  chr7:181259-181593
  hypo

SEQ ID NO: 434570 - DNA, 148 bp, Homo sapiens; identical to SEQ ID NO: 256764
  chr7:199426-199574
  hypo

SEQ ID NO: 434571 - DNA, 202 bp, Homo sapiens; identical to SEQ ID NO: 256765
  chr7:204779-204981
  hypo

SEQ ID NO: 434572 - DNA, 202 bp, Homo sapiens; identical to SEQ ID NO: 256766
  chr7:208838-209040
  hypo

SEQ ID NO: 434573 - DNA, 155 bp, Homo sapiens; identical to SEQ ID NO: 256768
  chr7:217102-217257
  hypo

SEQ ID NO: 434574 - DNA, 314 bp, Homo sapiens; identical to SEQ ID NO: 256769
  chr7:217590-217904
  hypo

SEQ ID NO: 434575 - DNA, 120 bp, Homo sapiens; identical to SEQ ID NO: 211074
  chr7:223534-223654
  hypo

SEQ ID NO: 434576 - DNA, 354 bp, Homo sapiens; identical to SEQ ID NO: 211075
  chr7:226184-226538
  hypo

SEQ ID NO: 434577 - DNA, 166 bp, Homo sapiens; identical to SEQ ID NO: 256772
  chr7:228056-228222
  hypo

SEQ ID NO: 434578 - DNA, 124 bp, Homo sapiens; identical to SEQ ID NO: 256774
  chr7:230453-230577
  hypo

SEQ ID NO: 434579 - DNA, 305 bp, Homo sapiens; identical to SEQ ID NO: 256775
  chr7:284816-285121
  hypo

SEQ ID NO: 434580 - DNA, 113 bp, Homo sapiens; identical to SEQ ID NO: 256778
  chr7:289727-289840
  hypo

SEQ ID NO: 434581 - DNA, 233 bp, Homo sapiens; identical to SEQ ID NO: 256780
  chr7:291025-291258
  hypo

SEQ ID NO: 434582 - DNA, 665 bp, Homo sapiens; identical to SEQ ID NO: 211079
  chr7:292736-293401
  hypo

SEQ ID NO: 434583 - DNA, 1233 bp, Homo sapiens; identical to SEQ ID NO: 211082
  chr7:295710-296943
  hypo

SEQ ID NO: 434584 - DNA, 315 bp, Homo sapiens; identical to SEQ ID NO: 256784
  chr7:297158-297473
  hypo

SEQ ID NO: 434585 - DNA, 674 bp, Homo sapiens; identical to SEQ ID NO: 211083
  chr7:298605-299279
  hypo

SEQ ID NO: 434586 - DNA, 38 bp, Homo sapiens; identical to SEQ ID NO: 256786
  chr7:299617-299655
  hypo

SEQ ID NO: 434587 - DNA, 102 bp, Homo sapiens; identical to SEQ ID NO: 306702
  chr7:312490-312592
  hypo

SEQ ID NO: 434588 - DNA, 259 bp, Homo sapiens; identical to SEQ ID NO: 306703
  chr7:312638-312897
  hypo

SEQ ID NO: 434589 - DNA, 224 bp, Homo sapiens; identical to SEQ ID NO: 306704
  chr7:322815-323039
  hypo

SEQ ID NO: 434590 - DNA, 45 bp, Homo sapiens; identical to SEQ ID NO: 211085
  chr7:328541-328586
  hypo

SEQ ID NO: 434591 - DNA, 55 bp, Homo sapiens; identical to SEQ ID NO: 211086
  chr7:328625-328680
  hypo

SEQ ID NO: 434592 - DNA, 159 bp, Homo sapiens; identical to SEQ ID NO: 256793
  chr7:337220-337379
  hypo

SEQ ID NO: 434593 - DNA, 63 bp, Homo sapiens; identical to SEQ ID NO: 256794
  chr7:337996-338059
  hypo

SEQ ID NO: 434594 - DNA, 34 bp, Homo sapiens; identical to SEQ ID NO: 211087
  chr7:339204-339238
  hypo

SEQ ID NO: 434595 - DNA, 292 bp, Homo sapiens; identical to SEQ ID NO: 256797
  chr7:357936-358228
  hypo

SEQ ID NO: 434596 - DNA, 56 bp, Homo sapiens; identical to SEQ ID NO: 256798
  chr7:361849-361905
  hypo

SEQ ID NO: 434597 - DNA, 180 bp, Homo sapiens; identical to SEQ ID NO: 256799
  chr7:367650-367830
  hypo

SEQ ID NO: 434598 - DNA, 100 bp, Homo sapiens; identical to SEQ ID NO: 256804
  chr7:388190-388290
  hypo

SEQ ID NO: 434599 - DNA, 412 bp, Homo sapiens; identical to SEQ ID NO: 306723
  chr7:414503-414915
  hypo

SEQ ID NO: 434600 - DNA, 211 bp, Homo sapiens; identical to SEQ ID NO: 211092
  chr7:414945-415156
  hypo

SEQ ID NO: 434601 - DNA, 428 bp, Homo sapiens; identical to SEQ ID NO: 256807
  chr7:418417-418845
  hypo

SEQ ID NO: 434602 - DNA, 146 bp, Homo sapiens; identical to SEQ ID NO: 211094
  chr7:429737-429883
  hypo

SEQ ID NO: 434603 - DNA, 51 bp, Homo sapiens; identical to SEQ ID NO: 256810
  chr7:432226-432277
  hypo

SEQ ID NO: 434604 - DNA, 190 bp, Homo sapiens; identical to SEQ ID NO: 256811
  chr7:438533-438723
  hypo

SEQ ID NO: 434605 - DNA, 158 bp, Homo sapiens; identical to SEQ ID NO: 256812
  chr7:442389-442547
  hypo

SEQ ID NO: 434606 - DNA, 35 bp, Homo sapiens; identical to SEQ ID NO: 256813
  chr7:453594-453629
  hypo

SEQ ID NO: 434607 - DNA, 533 bp, Homo sapiens; identical to SEQ ID NO: 256818
  chr7:465353-465886
  hypo

SEQ ID NO: 434608 - DNA, 34 bp, Homo sapiens; identical to SEQ ID NO: 256819
  chr7:466110-466144
  hypo

SEQ ID NO: 434609 - DNA, 39 bp, Homo sapiens; identical to SEQ ID NO: 306738
  chr7:466508-466547
  hypo

SEQ ID NO: 434610 - DNA, 241 bp, Homo sapiens; identical to SEQ ID NO: 306739
  chr7:466577-466818
  hypo

SEQ ID NO: 434611 - DNA, 512 bp, Homo sapiens; identical to SEQ ID NO: 211095
  chr7:469699-470211
  hypo

SEQ ID NO: 434612 - DNA, 450 bp, Homo sapiens; identical to SEQ ID NO: 256823
  chr7:480950-481400
  hypo

SEQ ID NO: 434613 - DNA, 35 bp, Homo sapiens; identical to SEQ ID NO: 211098
  chr7:485248-485283
  hypo

SEQ ID NO: 434614 - DNA, 60 bp, Homo sapiens; identical to SEQ ID NO: 256827
  chr7:531100-531160
  hypo

SEQ ID NO: 434615 - DNA, 107 bp, Homo sapiens; identical to SEQ ID NO: 256829
  chr7:532034-532141
  hypo

SEQ ID NO: 434616 - DNA, 102 bp, Homo sapiens; identical to SEQ ID NO: 256830
  chr7:533202-533304
  hypo

SEQ ID NO: 434617 - DNA, 188 bp, Homo sapiens; identical to SEQ ID NO: 256831
  chr7:534692-534880
  hypo

SEQ ID NO: 434618 - DNA, 159 bp, Homo sapiens; identical to SEQ ID NO: 256833
  chr7:544945-545104
  hypo

SEQ ID NO: 434619 - DNA, 201 bp, Homo sapiens; identical to SEQ ID NO: 211101
  chr7:545346-545547
  hypo

SEQ ID NO: 434620 - DNA, 36 bp, Homo sapiens; identical to SEQ ID NO: 222989
  chr7:558727-558763
  hypo

SEQ ID NO: 434621 - DNA, 505 bp, Homo sapiens; identical to SEQ ID NO: 222990
  chr7:558986-559491
  hypo

SEQ ID NO: 434622 - DNA, 73 bp, Homo sapiens; identical to SEQ ID NO: 256838
  chr7:576731-576804
  hypo

SEQ ID NO: 434623 - DNA, 150 bp, Homo sapiens; identical to SEQ ID NO: 256839
  chr7:577692-577842
  hypo

SEQ ID NO: 434624 - DNA, 112 bp, Homo sapiens; identical to SEQ ID NO: 211106
  chr7:578810-578922
  hypo

SEQ ID NO: 434625 - DNA, 190 bp, Homo sapiens; identical to SEQ ID NO: 306764
  chr7:579048-579238
  hypo

SEQ ID NO: 434626 - DNA, 31 bp, Homo sapiens; identical to SEQ ID NO: 210108
  chr7:587416-587447
  hypo

SEQ ID NO: 434627 - DNA, 148 bp, Homo sapiens; identical to SEQ ID NO: 256842
  chr7:589082-589230
  hypo

SEQ ID NO: 434628 - DNA, 131 bp, Homo sapiens; identical to SEQ ID NO: 256843
  chr7:593561-593692
  hypo

SEQ ID NO: 434629 - DNA, 208 bp, Homo sapiens; identical to SEQ ID NO: 211108
  chr7:601255-601463
  hypo

SEQ ID NO: 434630 - DNA, 359 bp, Homo sapiens; identical to SEQ ID NO: 20843
  chr7:601503-601862
  hypo

SEQ ID NO: 434631 - DNA, 233 bp, Homo sapiens; identical to SEQ ID NO: 306770
  chr7:612444-612677
  hypo

SEQ ID NO: 434632 - DNA, 57 bp, Homo sapiens; identical to SEQ ID NO: 306771
  chr7:612745-612802
  hypo

SEQ ID NO: 434633 - DNA, 868 bp, Homo sapiens; identical to SEQ ID NO: 256847
  chr7:622700-623568
  hypo

SEQ ID NO: 434634 - DNA, 39 bp, Homo sapiens; identical to SEQ ID NO: 211110
  chr7:635126-635165
  hypo

SEQ ID NO: 434635 - DNA, 36 bp, Homo sapiens; identical to SEQ ID NO: 211111
  chr7:636569-636605
  hypo

SEQ ID NO: 434636 - DNA, 42 bp, Homo sapiens; identical to SEQ ID NO: 256850
  chr7:649823-649865
  hypo

SEQ ID NO: 434637 - DNA, 76 bp, Homo sapiens; identical to SEQ ID NO: 256853
  chr7:661919-661995
  hypo

SEQ ID NO: 434638 - DNA, 68 bp, Homo sapiens; identical to SEQ ID NO: 211115
  chr7:671703-671771
  hypo

SEQ ID NO: 434639 - DNA, 151 bp, Homo sapiens; identical to SEQ ID NO: 211116
  chr7:675431-675582
  hypo

SEQ ID NO: 434640 - DNA, 346 bp, Homo sapiens; identical to SEQ ID NO: 256858
  chr7:716115-716461
  hypo

SEQ ID NO: 434641 - DNA, 101 bp, Homo sapiens; identical to SEQ ID NO: 256860
  chr7:738373-738474
  hypo

SEQ ID NO: 434642 - DNA, 31 bp, Homo sapiens; identical to SEQ ID NO: 256861
  chr7:744080-744111
  hypo

SEQ ID NO: 434643 - DNA, 92 bp, Homo sapiens; identical to SEQ ID NO: 256862
  chr7:746773-746865
  hypo

SEQ ID NO: 434644 - DNA, 82 bp, Homo sapiens; identical to SEQ ID NO: 211118
  chr7:799679-799761
  hypo

SEQ ID NO: 434645 - DNA, 432 bp, Homo sapiens; identical to SEQ ID NO: 256866
  chr7:807333-807765
  hypo

SEQ ID NO: 434646 - DNA, 266 bp, Homo sapiens; identical to SEQ ID NO: 256867
  chr7:807795-808061
  hypo

SEQ ID NO: 434647 - DNA, 69 bp, Homo sapiens; identical to SEQ ID NO: 256872
  chr7:825191-825260
  hypo

SEQ ID NO: 434648 - DNA, 106 bp, Homo sapiens; identical to SEQ ID NO: 256874
  chr7:872193-872299
  hypo

SEQ ID NO: 434649 - DNA, 141 bp, Homo sapiens; identical to SEQ ID NO: 256875
  chr7:874775-874916
  hypo

SEQ ID NO: 434650 - DNA, 35 bp, Homo sapiens; identical to SEQ ID NO: 211128
  chr7:878053-878088
  hypo

SEQ ID NO: 434651 - DNA, 122 bp, Homo sapiens; identical to SEQ ID NO: 211129
  chr7:882990-883112
  hypo

SEQ ID NO: 434652 - DNA, 463 bp, Homo sapiens; identical to SEQ ID NO: 256879
  chr7:899731-900194
  hypo

SEQ ID NO: 434653 - DNA, 382 bp, Homo sapiens; identical to SEQ ID NO: 256880
  chr7:902843-903225
  hypo

SEQ ID NO: 434654 - DNA, 92 bp, Homo sapiens; identical to SEQ ID NO: 256883
  chr7:920453-920545
  hypo

SEQ ID NO: 434655 - DNA, 133 bp, Homo sapiens; identical to SEQ ID NO: 211134
  chr7:920785-920918
  hypo

SEQ ID NO: 434656 - DNA, 44 bp, Homo sapiens; identical to SEQ ID NO: 211136
  chr7:921709-921753
  hypo

SEQ ID NO: 434657 - DNA, 221 bp, Homo sapiens; identical to SEQ ID NO: 256886
  chr7:923637-923858
  hypo

SEQ ID NO: 434658 - DNA, 68 bp, Homo sapiens; identical to SEQ ID NO: 211138
  chr7:931095-931163
  hypo

SEQ ID NO: 434659 - DNA, 66 bp, Homo sapiens; identical to SEQ ID NO: 256889
  chr7:931798-931864
  hypo

SEQ ID NO: 434660 - DNA, 473 bp, Homo sapiens; identical to SEQ ID NO: 284694
  chr7:932819-933292
  hypo

SEQ ID NO: 434661 - DNA, 33 bp, Homo sapiens
  chr7:943949-943982
  hypo
gtccaagctcaagggagcaggaagggcagaccc

SEQ ID NO: 434662 - DNA, 117 bp, Homo sapiens; identical to SEQ ID NO: 211140
  chr7:944012-944129
  hypo

SEQ ID NO: 434663 - DNA, 152 bp, Homo sapiens; identical to SEQ ID NO: 211141
  chr7:955105-955257
  hypo

SEQ ID NO: 434664 - DNA, 301 bp, Homo sapiens; identical to SEQ ID NO: 256894
  chr7:955484-955785
  hypo

SEQ ID NO: 434665 - DNA, 102 bp, Homo sapiens; identical to SEQ ID NO: 211142
  chr7:959972-960074
  hypo

SEQ ID NO: 434666 - DNA, 210 bp, Homo sapiens; identical to SEQ ID NO: 211143
  chr7:960104-960314
  hypo

SEQ ID NO: 434667 - DNA, 180 bp, Homo sapiens; identical to SEQ ID NO: 256897
  chr7:960590-960770
  hypo

SEQ ID NO: 434668 - DNA, 120 bp, Homo sapiens; identical to SEQ ID NO: 256900
  chr7:984884-985004
  hypo

SEQ ID NO: 434669 - DNA, 182 bp, Homo sapiens; identical to SEQ ID NO: 256901
  chr7:985370-985552
  hypo

SEQ ID NO: 434670 - DNA, 110 bp, Homo sapiens; identical to SEQ ID NO: 211146
  chr7:986124-986234
  hypo

SEQ ID NO: 434671 - DNA, 186 bp, Homo sapiens; identical to SEQ ID NO: 211147
  chr7:986336-986522
  hypo

SEQ ID NO: 434672 - DNA, 98 bp, Homo sapiens; identical to SEQ ID NO: 211148
  chr7:986582-986680
  hypo

SEQ ID NO: 434673 - DNA, 42 bp, Homo sapiens; identical to SEQ ID NO: 256905
  chr7:988731-988773
  hypo

SEQ ID NO: 434674 - DNA, 317 bp, Homo sapiens; identical to SEQ ID NO: 256906
  chr7:996951-997268
  hypo

SEQ ID NO: 434675 - DNA, 804 bp, Homo sapiens; identical to SEQ ID NO: 284696
  chr7:1007358-1008162
  hypo

SEQ ID NO: 434676 - DNA, 57 bp, Homo sapiens; identical to SEQ ID NO: 256909
  chr7:1011971-1012028
  hypo

SEQ ID NO: 434677 - DNA, 45 bp, Homo sapiens; identical to SEQ ID NO: 256910
  chr7:1024995-1025040
  hypo

SEQ ID NO: 434678 - DNA, 91 bp, Homo sapiens; identical to SEQ ID NO: 256912
  chr7:1029387-1029478
  hypo

SEQ ID NO: 434679 - DNA, 37 bp, Homo sapiens; identical to SEQ ID NO: 256913
  chr7:1029508-1029545
  hypo

SEQ ID NO: 434680 - DNA, 206 bp, Homo sapiens; identical to SEQ ID NO: 256915
  chr7:1045397-1045603
  hypo

SEQ ID NO: 434681 - DNA, 212 bp, Homo sapiens; identical to SEQ ID NO: 211152
  chr7:1052679-1052891
  hypo

SEQ ID NO: 434682 - DNA, 440 bp, Homo sapiens; identical to SEQ ID NO: 256917
  chr7:1059664-1060104
  hypo

SEQ ID NO: 434683 - DNA, 402 bp, Homo sapiens; identical to SEQ ID NO: 256918
  chr7:1061547-1061949
  hypo

SEQ ID NO: 434684 - DNA, 135 bp, Homo sapiens; identical to SEQ ID NO: 306850
  chr7:1066392-1066527
  hypo

SEQ ID NO: 434685 - DNA, 332 bp, Homo sapiens; identical to SEQ ID NO: 284697
  chr7:1069637-1069969
  hypo

SEQ ID NO: 434686 - DNA, 48 bp, Homo sapiens; identical to SEQ ID NO: 211154
  chr7:1071763-1071811
  hypo

SEQ ID NO: 434687 - DNA, 42 bp, Homo sapiens; identical to SEQ ID NO: 211155
  chr7:1071841-1071883
  hypo

SEQ ID NO: 434688 - DNA, 338 bp, Homo sapiens; identical to SEQ ID NO: 284698
  chr7:1083896-1084234
  hypo

SEQ ID NO: 434689 - DNA, 38 bp, Homo sapiens; identical to SEQ ID NO: 211156
  chr7:1097390-1097428
  hypo

SEQ ID NO: 434690 - DNA, 242 bp, Homo sapiens; identical to SEQ ID NO: 256925
  chr7:1097706-1097948
  hypo

SEQ ID NO: 434691 - DNA, 188 bp, Homo sapiens; identical to SEQ ID NO: 256926
  chr7:1103862-1104050
  hypo

SEQ ID NO: 434692 - DNA, 44 bp, Homo sapiens; identical to SEQ ID NO: 211157
  chr7:1113683-1113727
  hypo

SEQ ID NO: 434693 - DNA, 63 bp, Homo sapiens; identical to SEQ ID NO: 391638
  chr7:1115545-1115608
  hypo

SEQ ID NO: 434694 - DNA, 178 bp, Homo sapiens; identical to SEQ ID NO: 211159
  chr7:1124308-1124486
  hypo

SEQ ID NO: 434695 - DNA, 127 bp, Homo sapiens; identical to SEQ ID NO: 211160
  chr7:1132022-1132149
  hypo

SEQ ID NO: 434696 - DNA, 149 bp, Homo sapiens; identical to SEQ ID NO: 256931
  chr7:1133748-1133897
  hypo

SEQ ID NO: 434697 - DNA, 148 bp, Homo sapiens; identical to SEQ ID NO: 256932
  chr7:1141332-1141480
  hypo

SEQ ID NO: 434698 - DNA, 444 bp, Homo sapiens; identical to SEQ ID NO: 256933
  chr7:1141910-1142354
  hypo

SEQ ID NO: 434699 - DNA, 320 bp, Homo sapiens; identical to SEQ ID NO: 256934
  chr7:1148237-1148557
  hypo

SEQ ID NO: 434700 - DNA, 150 bp, Homo sapiens; identical to SEQ ID NO: 256935
  chr7:1164416-1164566
  hypo

SEQ ID NO: 434701 - DNA, 93 bp, Homo sapiens; identical to SEQ ID NO: 256936
  chr7:1184625-1184718
  hypo

SEQ ID NO: 434702 - DNA, 37 bp, Homo sapiens
  chr7:1203070-1203107
  hypo
gtctttttctcccttaggcacatgacagccttcttgc

SEQ ID NO: 434703 - DNA, 46 bp, Homo sapiens; identical to SEQ ID NO: 256938
  chr7:1215557-1215603
  hypo

SEQ ID NO: 434704 - DNA, 48 bp, Homo sapiens; identical to SEQ ID NO: 256939
  chr7:1220822-1220870
  hypo

SEQ ID NO: 434705 - DNA, 77 bp, Homo sapiens; identical to SEQ ID NO: 211162
  chr7:1225056-1225133
  hypo

SEQ ID NO: 434706 - DNA, 68 bp, Homo sapiens; identical to SEQ ID NO: 211163
  chr7:1225226-1225294
  hypo

SEQ ID NO: 434707 - DNA, 86 bp, Homo sapiens; identical to SEQ ID NO: 256941
  chr7:1234856-1234942
  hypo

SEQ ID NO: 434708 - DNA, 89 bp, Homo sapiens; identical to SEQ ID NO: 256946
  chr7:1318804-1318893
  hypo

SEQ ID NO: 434709 - DNA, 91 bp, Homo sapiens; identical to SEQ ID NO: 256947
  chr7:1324738-1324829
  hypo

SEQ ID NO: 434710 - DNA, 236 bp, Homo sapiens; identical to SEQ ID NO: 211168
  chr7:1347154-1347390
  hypo

SEQ ID NO: 434711 - DNA, 406 bp, Homo sapiens; identical to SEQ ID NO: 306883
  chr7:1347435-1347841
  hypo

SEQ ID NO: 434712 - DNA, 39 bp, Homo sapiens; identical to SEQ ID NO: 211170
  chr7:1351444-1351483
  hypo

SEQ ID NO: 434713 - DNA, 411 bp, Homo sapiens; identical to SEQ ID NO: 306885
  chr7:1351606-1352017
  hypo

SEQ ID NO: 434714 - DNA, 54 bp, Homo sapiens; identical to SEQ ID NO: 256952
  chr7:1354098-1354152
  hypo

SEQ ID NO: 434715 - DNA, 154 bp, Homo sapiens; identical to SEQ ID NO: 256953
  chr7:1357986-1358140
  hypo

SEQ ID NO: 434716 - DNA, 265 bp, Homo sapiens; identical to SEQ ID NO: 256954
  chr7:1358498-1358763
  hypo

SEQ ID NO: 434717 - DNA, 119 bp, Homo sapiens; identical to SEQ ID NO: 306889
  chr7:1360167-1360286
  hypo

SEQ ID NO: 434718 - DNA, 35 bp, Homo sapiens; identical to SEQ ID NO: 306890
  chr7:1365511-1365546
  hypo

SEQ ID NO: 434719 - DNA, 32 bp, Homo sapiens
  chr7:1475372-1475404
  hypo
gtggccttggaagttcaagttaaaaactaaga

SEQ ID NO: 434720 - DNA, 929 bp, Homo sapiens; identical to SEQ ID NO: 256963
  chr7:1478541-1479470
  hypo

SEQ ID NO: 434721 - DNA, 301 bp, Homo sapiens; identical to SEQ ID NO: 256965
  chr7:1480645-1480946
  hypo

SEQ ID NO: 434722 - DNA, 515 bp, Homo sapiens; identical to SEQ ID NO: 256966
  chr7:1488212-1488727
  hypo

SEQ ID NO: 434723 - DNA, 821 bp, Homo sapiens; identical to SEQ ID NO: 211182
  chr7:1491121-1491942
  hypo

SEQ ID NO: 434724 - DNA, 347 bp, Homo sapiens; identical to SEQ ID NO: 256968
  chr7:1492393-1492740
  hypo

SEQ ID NO: 434725 - DNA, 95 bp, Homo sapiens; identical to SEQ ID NO: 256969
  chr7:1493403-1493498
  hypo

SEQ ID NO: 434726 - DNA, 95 bp, Homo sapiens; identical to SEQ ID NO: 256970
  chr7:1496414-1496509
  hypo

SEQ ID NO: 434727 - DNA, 221 bp, Homo sapiens; identical to SEQ ID NO: 306908
  chr7:1505248-1505469
  hypo

SEQ ID NO: 434728 - DNA, 67 bp, Homo sapiens; identical to SEQ ID NO: 306909
  chr7:1505499-1505566
  hypo

SEQ ID NO: 434729 - DNA, 220 bp, Homo sapiens; identical to SEQ ID NO: 256972
  chr7:1514362-1514582
  hypo

SEQ ID NO: 434730 - DNA, 280 bp, Homo sapiens; identical to SEQ ID NO: 211184
  chr7:1519129-1519409
  hypo

SEQ ID NO: 434731 - DNA, 236 bp, Homo sapiens; identical to SEQ ID NO: 256974
  chr7:1520865-1521101
  hypo

SEQ ID NO: 434732 - DNA, 244 bp, Homo sapiens; identical to SEQ ID NO: 256975
  chr7:1524903-1525147
  hypo

SEQ ID NO: 434733 - DNA, 44 bp, Homo sapiens; identical to SEQ ID NO: 211185
  chr7:1533021-1533065
  hypo

SEQ ID NO: 434734 - DNA, 144 bp, Homo sapiens; identical to SEQ ID NO: 211187
  chr7:1534752-1534896
  hypo

SEQ ID NO: 434735 - DNA, 213 bp, Homo sapiens; identical to SEQ ID NO: 256979
  chr7:1535457-1535670
  hypo

SEQ ID NO: 434736 - DNA, 68 bp, Homo sapiens; identical to SEQ ID NO: 211189
  chr7:1537961-1538029
  hypo

SEQ ID NO: 434737 - DNA, 34 bp, Homo sapiens; identical to SEQ ID NO: 256982
  chr7:1553100-1553134
  hypo

SEQ ID NO: 434738 - DNA, 68 bp, Homo sapiens; identical to SEQ ID NO: 256983
  chr7:1554245-1554313
  hypo

SEQ ID NO: 434739 - DNA, 135 bp, Homo sapiens; identical to SEQ ID NO: 256985
  chr7:1560607-1560742
  hypo

SEQ ID NO: 434740 - DNA, 351 bp, Homo sapiens; identical to SEQ ID NO: 256987
  chr7:1574077-1574428
  hypo

SEQ ID NO: 434741 - DNA, 210 bp, Homo sapiens; identical to SEQ ID NO: 211192
  chr7:1575803-1576013
  hypo

SEQ ID NO: 434742 - DNA, 1040 bp, Homo sapiens; identical to SEQ ID NO: 155292
  chr7:1578254-1579294
  hypo

SEQ ID NO: 434743 - DNA, 55 bp, Homo sapiens; identical to SEQ ID NO: 211194
  chr7:1579574-1579629
  hypo

SEQ ID NO: 434744 - DNA, 293 bp, Homo sapiens; identical to SEQ ID NO: 256991
  chr7:1581944-1582237
  hypo

SEQ ID NO: 434745 - DNA, 63 bp, Homo sapiens; identical to SEQ ID NO: 211195
  chr7:1582574-1582637
  hypo

SEQ ID NO: 434746 - DNA, 68 bp, Homo sapiens
  chr7:1583986-1584054
  hypo
ctggggattttcagctggaccatctcccagagaaggatactgaggccaggagaggctagagagcttgg

SEQ ID NO: 434747 - DNA, 383 bp, Homo sapiens; identical to SEQ ID NO: 256994
  chr7:1585839-1586222
  hypo

SEQ ID NO: 434748 - DNA, 590 bp, Homo sapiens; identical to SEQ ID NO: 256995
  chr7:1589281-1589871
  hypo

SEQ ID NO: 434749 - DNA, 57 bp, Homo sapiens; identical to SEQ ID NO: 211198
  chr7:1590461-1590518
  hypo

SEQ ID NO: 434750 - DNA, 838 bp, Homo sapiens; identical to SEQ ID NO: 306934
  chr7:1599700-1600538
  hypo

SEQ ID NO: 434751 - DNA, 144 bp, Homo sapiens; identical to SEQ ID NO: 306937
  chr7:1620359-1620503
  hypo

SEQ ID NO: 434752 - DNA, 56 bp, Homo sapiens; identical to SEQ ID NO: 306938
  chr7:1620539-1620595
  hypo

SEQ ID NO: 434753 - DNA, 124 bp, Homo sapiens; identical to SEQ ID NO: 257004
  chr7:1625535-1625659
  hypo

SEQ ID NO: 434754 - DNA, 254 bp, Homo sapiens; identical to SEQ ID NO: 306940
  chr7:1627150-1627404
  hypo

SEQ ID NO: 434755 - DNA, 123 bp, Homo sapiens; identical to SEQ ID NO: 306941
  chr7:1627434-1627557
  hypo

SEQ ID NO: 434756 - DNA, 76 bp, Homo sapiens; identical to SEQ ID NO: 211201
  chr7:1650398-1650474
  hypo

SEQ ID NO: 434757 - DNA, 179 bp, Homo sapiens; identical to SEQ ID NO: 211202
  chr7:1659734-1659913
  hypo

SEQ ID NO: 434758 - DNA, 350 bp, Homo sapiens; identical to SEQ ID NO: 257010
  chr7:1660350-1660700
  hypo

SEQ ID NO: 434759 - DNA, 72 bp, Homo sapiens; identical to SEQ ID NO: 211203
  chr7:1681117-1681189
  hypo

SEQ ID NO: 434760 - DNA, 38 bp, Homo sapiens; identical to SEQ ID NO: 211204
  chr7:1681239-1681277
  hypo

SEQ ID NO: 434761 - DNA, 203 bp, Homo sapiens; identical to SEQ ID NO: 257013
  chr7:1692786-1692989
  hypo

SEQ ID NO: 434762 - DNA, 186 bp, Homo sapiens; identical to SEQ ID NO: 419122
  chr7:1706753-1706939
  hypo

SEQ ID NO: 434763 - DNA, 310 bp, Homo sapiens; identical to SEQ ID NO: 284727
  chr7:1707309-1707619
  hypo

SEQ ID NO: 434764 - DNA, 146 bp, Homo sapiens; identical to SEQ ID NO: 284729
  chr7:1710370-1710516
  hypo

SEQ ID NO: 434765 - DNA, 226 bp, Homo sapiens; identical to SEQ ID NO: 211208
  chr7:1718471-1718697
  hypo

SEQ ID NO: 434766 - DNA, 61 bp, Homo sapiens; identical to SEQ ID NO: 306958
  chr7:1719696-1719757
  hypo

SEQ ID NO: 434767 - DNA, 147 bp, Homo sapiens; identical to SEQ ID NO: 306961
  chr7:1778728-1778875
  hypo

SEQ ID NO: 434768 - DNA, 214 bp, Homo sapiens; identical to SEQ ID NO: 306962
  chr7:1778914-1779128
  hypo

SEQ ID NO: 434769 - DNA, 294 bp, Homo sapiens; identical to SEQ ID NO: 211209
  chr7:1783932-1784226
  hypo

SEQ ID NO: 434770 - DNA, 463 bp, Homo sapiens; identical to SEQ ID NO: 284730
  chr7:1785930-1786393
  hypo

SEQ ID NO: 434771 - DNA, 103 bp, Homo sapiens; identical to SEQ ID NO: 284731
  chr7:1786899-1787002
  hypo

SEQ ID NO: 434772 - DNA, 187 bp, Homo sapiens; identical to SEQ ID NO: 257025
  chr7:1794935-1795122
  hypo

SEQ ID NO: 434773 - DNA, 188 bp, Homo sapiens; identical to SEQ ID NO: 306969
  chr7:1800912-1801100
  hypo

SEQ ID NO: 434774 - DNA, 142 bp, Homo sapiens; identical to SEQ ID NO: 257027
  chr7:1801400-1801542
  hypo

SEQ ID NO: 434775 - DNA, 143 bp, Homo sapiens; identical to SEQ ID NO: 257028
  chr7:1827531-1827674
  hypo

SEQ ID NO: 434776 - DNA, 154 bp, Homo sapiens; identical to SEQ ID NO: 257029
  chr7:1846092-1846246
  hypo

SEQ ID NO: 434777 - DNA, 75 bp, Homo sapiens; identical to SEQ ID NO: 211211
  chr7:1847553-1847628
  hypo

SEQ ID NO: 434778 - DNA, 280 bp, Homo sapiens; identical to SEQ ID NO: 306974
  chr7:1849796-1850076
  hypo

SEQ ID NO: 434779 - DNA, 363 bp, Homo sapiens; identical to SEQ ID NO: 211212
  chr7:1855556-1855919
  hypo

SEQ ID NO: 434780 - DNA, 539 bp, Homo sapiens; identical to SEQ ID NO: 257033
  chr7:1856753-1857292
  hypo

SEQ ID NO: 434781 - DNA, 283 bp, Homo sapiens; identical to SEQ ID NO: 257034
  chr7:1864266-1864549
  hypo

SEQ ID NO: 434782 - DNA, 289 bp, Homo sapiens; identical to SEQ ID NO: 211213
  chr7:1865909-1866198
  hypo

SEQ ID NO: 434783 - DNA, 122 bp, Homo sapiens; identical to SEQ ID NO: 211214
  chr7:1885181-1885303
  hypo

SEQ ID NO: 434784 - DNA, 72 bp, Homo sapiens; identical to SEQ ID NO: 306980
  chr7:1888787-1888859
  hypo

SEQ ID NO: 434785 - DNA, 166 bp, Homo sapiens; identical to SEQ ID NO: 306981
  chr7:1888889-1889055
  hypo

SEQ ID NO: 434786 - DNA, 136 bp, Homo sapiens; identical to SEQ ID NO: 257038
  chr7:1906702-1906838
  hypo

SEQ ID NO: 434787 - DNA, 190 bp, Homo sapiens; identical to SEQ ID NO: 211215
  chr7:1913834-1914024
  hypo

SEQ ID NO: 434788 - DNA, 235 bp, Homo sapiens; identical to SEQ ID NO: 257042
  chr7:1937725-1937960
  hypo

SEQ ID NO: 434789 - DNA, 79 bp, Homo sapiens; identical to SEQ ID NO: 211218
  chr7:1946383-1946462
  hypo

SEQ ID NO: 434790 - DNA, 152 bp, Homo sapiens; identical to SEQ ID NO: 211219
  chr7:1950266-1950418
  hypo

SEQ ID NO: 434791 - DNA, 180 bp, Homo sapiens; identical to SEQ ID NO: 211220
  chr7:1950693-1950873
  hypo

SEQ ID NO: 434792 - DNA, 78 bp, Homo sapiens; identical to SEQ ID NO: 257046
  chr7:1961803-1961881
  hypo

SEQ ID NO: 434793 - DNA, 147 bp, Homo sapiens; identical to SEQ ID NO: 211222
  chr7:1969179-1969326
  hypo

SEQ ID NO: 434794 - DNA, 118 bp, Homo sapiens; identical to SEQ ID NO: 211223
  chr7:1995853-1995971
  hypo

SEQ ID NO: 434795 - DNA, 148 bp, Homo sapiens; identical to SEQ ID NO: 257052
  chr7:1997548-1997696
  hypo

SEQ ID NO: 434796 - DNA, 107 bp, Homo sapiens; identical to SEQ ID NO: 257053
  chr7:1999009-1999116
  hypo

SEQ ID NO: 434797 - DNA, 196 bp, Homo sapiens; identical to SEQ ID NO: 257054
  chr7:2004876-2005072
  hypo

SEQ ID NO: 434798 - DNA, 223 bp, Homo sapiens; identical to SEQ ID NO: 257056
  chr7:2007846-2008069
  hypo

SEQ ID NO: 434799 - DNA, 151 bp, Homo sapiens; identical to SEQ ID NO: 284732
  chr7:2018616-2018767
  hypo

SEQ ID NO: 434800 - DNA, 73 bp, Homo sapiens; identical to SEQ ID NO: 211228
  chr7:2027225-2027298
  hypo

SEQ ID NO: 434801 - DNA, 100 bp, Homo sapiens; identical to SEQ ID NO: 257060
  chr7:2034835-2034935
  hypo

SEQ ID NO: 434802 - DNA, 217 bp, Homo sapiens; identical to SEQ ID NO: 257061
  chr7:2035958-2036175
  hypo

SEQ ID NO: 434803 - DNA, 96 bp, Homo sapiens; identical to SEQ ID NO: 211229
  chr7:2040770-2040866
  hypo

SEQ ID NO: 434804 - DNA, 72 bp, Homo sapiens; identical to SEQ ID NO: 257065
  chr7:2046906-2046978
  hypo

SEQ ID NO: 434805 - DNA, 300 bp, Homo sapiens; identical to SEQ ID NO: 257066
  chr7:2053261-2053561
  hypo

SEQ ID NO: 434806 - DNA, 36 bp, Homo sapiens; identical to SEQ ID NO: 307013
  chr7:2056518-2056554
  hypo

SEQ ID NO: 434807 - DNA, 118 bp, Homo sapiens; identical to SEQ ID NO: 257068
  chr7:2056937-2057055
  hypo

SEQ ID NO: 434808 - DNA, 42 bp, Homo sapiens; identical to SEQ ID NO: 257069
  chr7:2067734-2067776
  hypo

SEQ ID NO: 434809 - DNA, 144 bp, Homo sapiens; identical to SEQ ID NO: 257074
  chr7:2076008-2076152
  hypo

SEQ ID NO: 434810 - DNA, 105 bp, Homo sapiens; identical to SEQ ID NO: 257075
  chr7:2083091-2083196
  hypo

SEQ ID NO: 434811 - DNA, 203 bp, Homo sapiens; identical to SEQ ID NO: 257076
  chr7:2091644-2091847
  hypo

SEQ ID NO: 434812 - DNA, 31 bp, Homo sapiens; identical to SEQ ID NO: 257077
  chr7:2092074-2092105
  hypo

SEQ ID NO: 434813 - DNA, 640 bp, Homo sapiens; identical to SEQ ID NO: 72943
  chr7:2094462-2095102
  hypo

SEQ ID NO: 434814 - DNA, 47 bp, Homo sapiens; identical to SEQ ID NO: 211235
  chr7:2099514-2099561
  hypo

SEQ ID NO: 434815 - DNA, 169 bp, Homo sapiens; identical to SEQ ID NO: 257080
  chr7:2100209-2100378
  hypo

SEQ ID NO: 434816 - DNA, 46 bp, Homo sapiens; identical to SEQ ID NO: 211236
  chr7:2105354-2105400
  hypo

SEQ ID NO: 434817 - DNA, 239 bp, Homo sapiens; identical to SEQ ID NO: 257083
  chr7:2108164-2108403
  hypo

SEQ ID NO: 434818 - DNA, 94 bp, Homo sapiens; identical to SEQ ID NO: 307030
  chr7:2110060-2110154
  hypo

SEQ ID NO: 434819 - DNA, 137 bp, Homo sapiens; identical to SEQ ID NO: 257088
  chr7:2122563-2122700
  hypo

SEQ ID NO: 434820 - DNA, 47 bp, Homo sapiens; identical to SEQ ID NO: 257089
  chr7:2130636-2130683
  hypo

SEQ ID NO: 434821 - DNA, 79 bp, Homo sapiens; identical to SEQ ID NO: 257090
  chr7:2138295-2138374
  hypo

SEQ ID NO: 434822 - DNA, 158 bp, Homo sapiens; identical to SEQ ID NO: 257091
  chr7:2147799-2147957
  hypo

SEQ ID NO: 434823 - DNA, 49 bp, Homo sapiens; identical to SEQ ID NO: 211238
  chr7:2148951-2149000
  hypo

SEQ ID NO: 434824 - DNA, 170 bp, Homo sapiens; identical to SEQ ID NO: 211240
  chr7:2160716-2160886
  hypo

SEQ ID NO: 434825 - DNA, 163 bp, Homo sapiens; identical to SEQ ID NO: 211241
  chr7:2162503-2162666
  hypo

SEQ ID NO: 434826 - DNA, 34 bp, Homo sapiens; identical to SEQ ID NO: 405671
  chr7:2162966-2163000
  hypo

SEQ ID NO: 434827 - DNA, 375 bp, Homo sapiens; identical to SEQ ID NO: 257098
  chr7:2169012-2169387
  hypo

SEQ ID NO: 434828 - DNA, 158 bp, Homo sapiens; identical to SEQ ID NO: 257099
  chr7:2183890-2184048
  hypo

SEQ ID NO: 434829 - DNA, 202 bp, Homo sapiens; identical to SEQ ID NO: 200791
  chr7:2195725-2195927
  hypo

SEQ ID NO: 434830 - DNA, 693 bp, Homo sapiens; identical to SEQ ID NO: 257103
  chr7:2211989-2212682
  hypo

SEQ ID NO: 434831 - DNA, 121 bp, Homo sapiens; identical to SEQ ID NO: 211253
  chr7:2233470-2233591
  hypo

SEQ ID NO: 434832 - DNA, 110 bp, Homo sapiens; identical to SEQ ID NO: 257109
  chr7:2241774-2241884
  hypo

SEQ ID NO: 434833 - DNA, 100 bp, Homo sapiens; identical to SEQ ID NO: 257111
  chr7:2256931-2257031
  hypo

SEQ ID NO: 434834 - DNA, 72 bp, Homo sapiens; identical to SEQ ID NO: 211256
  chr7:2259945-2260017
  hypo

SEQ ID NO: 434835 - DNA, 92 bp, Homo sapiens; identical to SEQ ID NO: 211257
  chr7:2262278-2262370
  hypo

SEQ ID NO: 434836 - DNA, 457 bp, Homo sapiens; identical to SEQ ID NO: 257116
  chr7:2292991-2293448
  hypo

SEQ ID NO: 434837 - DNA, 194 bp, Homo sapiens; identical to SEQ ID NO: 211261
  chr7:2293743-2293937
  hypo

SEQ ID NO: 434838 - DNA, 490 bp, Homo sapiens; identical to SEQ ID NO: 257118
  chr7:2294448-2294938
  hypo

SEQ ID NO: 434839 - DNA, 265 bp, Homo sapiens; identical to SEQ ID NO: 257120
  chr7:2299116-2299381
  hypo

SEQ ID NO: 434840 - DNA, 149 bp, Homo sapiens; identical to SEQ ID NO: 211264
  chr7:2300173-2300322
  hypo

SEQ ID NO: 434841 - DNA, 142 bp, Homo sapiens; identical to SEQ ID NO: 257123
  chr7:2313678-2313820
  hypo

SEQ ID NO: 434842 - DNA, 552 bp, Homo sapiens; identical to SEQ ID NO: 257124
  chr7:2328672-2329224
  hypo

SEQ ID NO: 434843 - DNA, 152 bp, Homo sapiens; identical to SEQ ID NO: 257126
  chr7:2360917-2361069
  hypo

SEQ ID NO: 434844 - DNA, 127 bp, Homo sapiens; identical to SEQ ID NO: 257127
  chr7:2412473-2412600
  hypo

SEQ ID NO: 434845 - DNA, 165 bp, Homo sapiens; identical to SEQ ID NO: 307075
  chr7:2420148-2420313
  hypo

SEQ ID NO: 434846 - DNA, 191 bp, Homo sapiens; identical to SEQ ID NO: 307076
  chr7:2420396-2420587
  hypo

SEQ ID NO: 434847 - DNA, 90 bp, Homo sapiens; identical to SEQ ID NO: 257130
  chr7:2464829-2464919
  hypo

SEQ ID NO: 434848 - DNA, 214 bp, Homo sapiens; identical to SEQ ID NO: 257131
  chr7:2471874-2472088
  hypo

SEQ ID NO: 434849 - DNA, 33 bp, Homo sapiens; identical to SEQ ID NO: 257133
  chr7:2476917-2476950
  hypo

SEQ ID NO: 434850 - DNA, 33 bp, Homo sapiens; identical to SEQ ID NO: 307084
  chr7:2499648-2499681
  hypo

SEQ ID NO: 434851 - DNA, 479 bp, Homo sapiens; identical to SEQ ID NO: 307085
  chr7:2499718-2500197
  hypo

SEQ ID NO: 434852 - DNA, 175 bp, Homo sapiens; identical to SEQ ID NO: 211272
  chr7:2539250-2539425
  hypo

SEQ ID NO: 434853 - DNA, 43 bp, Homo sapiens; identical to SEQ ID NO: 155554
  chr7:2540075-2540118
  hypo

SEQ ID NO: 434854 - DNA, 50 bp, Homo sapiens; identical to SEQ ID NO: 307088
  chr7:2544413-2544463
  hypo

SEQ ID NO: 434855 - DNA, 157 bp, Homo sapiens; identical to SEQ ID NO: 307089
  chr7:2544627-2544784
  hypo

SEQ ID NO: 434856 - DNA, 77 bp, Homo sapiens; identical to SEQ ID NO: 223010
  chr7:2555344-2555421
  hypo

SEQ ID NO: 434857 - DNA, 140 bp, Homo sapiens; identical to SEQ ID NO: 307091
  chr7:2565080-2565220
  hypo

SEQ ID NO: 434858 - DNA, 36 bp, Homo sapiens; identical to SEQ ID NO: 211273
  chr7:2565883-2565919
  hypo

SEQ ID NO: 434859 - DNA, 309 bp, Homo sapiens; identical to SEQ ID NO: 257142
  chr7:2583247-2583556
  hypo

SEQ ID NO: 434860 - DNA, 37 bp, Homo sapiens; identical to SEQ ID NO: 257143
  chr7:2593553-2593590
  hypo

SEQ ID NO: 434861 - DNA, 53 bp, Homo sapiens; identical to SEQ ID NO: 257144
  chr7:2609245-2609298
  hypo

SEQ ID NO: 434862 - DNA, 301 bp, Homo sapiens; identical to SEQ ID NO: 211276
  chr7:2611215-2611516
  hypo

SEQ ID NO: 434863 - DNA, 41 bp, Homo sapiens; identical to SEQ ID NO: 257146
  chr7:2611944-2611985
  hypo

SEQ ID NO: 434864 - DNA, 152 bp, Homo sapiens; identical to SEQ ID NO: 211277
  chr7:2612209-2612361
  hypo

SEQ ID NO: 434865 - DNA, 42 bp, Homo sapiens; identical to SEQ ID NO: 211278
  chr7:2629286-2629328
  hypo

SEQ ID NO: 434866 - DNA, 269 bp, Homo sapiens; identical to SEQ ID NO: 257150
  chr7:2632066-2632335
  hypo

SEQ ID NO: 434867 - DNA, 103 bp, Homo sapiens; identical to SEQ ID NO: 257153
  chr7:2658659-2658762
  hypo

SEQ ID NO: 434868 - DNA, 173 bp, Homo sapiens; identical to SEQ ID NO: 211280
  chr7:2679580-2679753
  hypo

SEQ ID NO: 434869 - DNA, 52 bp, Homo sapiens; identical to SEQ ID NO: 257156
  chr7:2680524-2680576
  hypo

SEQ ID NO: 434870 - DNA, 140 bp, Homo sapiens; identical to SEQ ID NO: 257158
  chr7:2690602-2690742
  hypo

SEQ ID NO: 434871 - DNA, 184 bp, Homo sapiens; identical to SEQ ID NO: 257159
  chr7:2691942-2692126
  hypo

SEQ ID NO: 434872 - DNA, 55 bp, Homo sapiens; identical to SEQ ID NO: 211283
  chr7:2695698-2695753
  hypo

SEQ ID NO: 434873 - DNA, 271 bp, Homo sapiens; identical to SEQ ID NO: 211284
  chr7:2697946-2698217
  hypo

SEQ ID NO: 434874 - DNA, 182 bp, Homo sapiens; identical to SEQ ID NO: 211285
  chr7:2698474-2698656
  hypo

SEQ ID NO: 434875 - DNA, 151 bp, Homo sapiens; identical to SEQ ID NO: 257163
  chr7:2699684-2699835
  hypo

SEQ ID NO: 434876 - DNA, 34 bp, Homo sapiens; identical to SEQ ID NO: 257164
  chr7:2705240-2705274
  hypo

SEQ ID NO: 434877 - DNA, 167 bp, Homo sapiens; identical to SEQ ID NO: 211286
  chr7:2731703-2731870
  hypo

SEQ ID NO: 434878 - DNA, 242 bp, Homo sapiens; identical to SEQ ID NO: 257166
  chr7:2740188-2740430
  hypo

SEQ ID NO: 434879 - DNA, 159 bp, Homo sapiens; identical to SEQ ID NO: 257167
  chr7:2741198-2741357
  hypo

SEQ ID NO: 434880 - DNA, 239 bp, Homo sapiens; identical to SEQ ID NO: 211287
  chr7:2742260-2742499
  hypo

SEQ ID NO: 434881 - DNA, 32 bp, Homo sapiens; identical to SEQ ID NO: 257171
  chr7:2783184-2783216
  hypo

SEQ ID NO: 434882 - DNA, 120 bp, Homo sapiens; identical to SEQ ID NO: 257172
  chr7:2796665-2796785
  hypo

SEQ ID NO: 434883 - DNA, 49 bp, Homo sapiens; identical to SEQ ID NO: 257173
  chr7:2796965-2797014
  hypo

SEQ ID NO: 434884 - DNA, 37 bp, Homo sapiens; identical to SEQ ID NO: 211290
  chr7:2815344-2815381
  hypo

SEQ ID NO: 434885 - DNA, 60 bp, Homo sapiens; identical to SEQ ID NO: 257177
  chr7:2844840-2844900
  hypo

SEQ ID NO: 434886 - DNA, 44 bp, Homo sapiens; identical to SEQ ID NO: 257178
  chr7:2871310-2871354
  hypo

SEQ ID NO: 434887 - DNA, 101 bp, Homo sapiens; identical to SEQ ID NO: 257179
  chr7:2884994-2885095
  hypo

SEQ ID NO: 434888 - DNA, 42 bp, Homo sapiens; identical to SEQ ID NO: 257180
  chr7:2900160-2900202
  hypo

SEQ ID NO: 434889 - DNA, 227 bp, Homo sapiens; identical to SEQ ID NO: 211291
  chr7:2931116-2931343
  hypo

SEQ ID NO: 434890 - DNA, 240 bp, Homo sapiens; identical to SEQ ID NO: 211292
  chr7:2935118-2935358
  hypo

SEQ ID NO: 434891 - DNA, 49 bp, Homo sapiens; identical to SEQ ID NO: 211293
  chr7:2946305-2946354
  hypo

SEQ ID NO: 434892 - DNA, 243 bp, Homo sapiens; identical to SEQ ID NO: 257184
  chr7:2951742-2951985
  hypo

SEQ ID NO: 434893 - DNA, 69 bp, Homo sapiens; identical to SEQ ID NO: 257185
  chr7:2952965-2953034
  hypo

SEQ ID NO: 434894 - DNA, 160 bp, Homo sapiens; identical to SEQ ID NO: 257186
  chr7:2953809-2953969
  hypo

SEQ ID NO: 434895 - DNA, 127 bp, Homo sapiens; identical to SEQ ID NO: 73097
  chr7:2958269-2958396
  hypo

SEQ ID NO: 434896 - DNA, 322 bp, Homo sapiens; identical to SEQ ID NO: 307140
  chr7:2967959-2968281
  hypo

SEQ ID NO: 434897 - DNA, 93 bp, Homo sapiens; identical to SEQ ID NO: 211296
  chr7:2972305-2972398
  hypo

SEQ ID NO: 434898 - DNA, 216 bp, Homo sapiens; identical to SEQ ID NO: 211297
  chr7:2976623-2976839
  hypo

SEQ ID NO: 434899 - DNA, 176 bp, Homo sapiens; identical to SEQ ID NO: 257192
  chr7:2983576-2983752
  hypo

SEQ ID NO: 434900 - DNA, 505 bp, Homo sapiens; identical to SEQ ID NO: 257193
  chr7:3012740-3013245
  hypo

SEQ ID NO: 434901 - DNA, 42 bp, Homo sapiens; identical to SEQ ID NO: 257194
  chr7:3015334-3015376
  hypo

SEQ ID NO: 434902 - DNA, 222 bp, Homo sapiens; identical to SEQ ID NO: 211299
  chr7:3026339-3026561
  hypo

SEQ ID NO: 434903 - DNA, 293 bp, Homo sapiens; identical to SEQ ID NO: 307147
  chr7:3033184-3033477
  hypo

SEQ ID NO: 434904 - DNA, 176 bp, Homo sapiens; identical to SEQ ID NO: 307148
  chr7:3033798-3033974
  hypo

SEQ ID NO: 434905 - DNA, 215 bp, Homo sapiens; identical to SEQ ID NO: 211300
  chr7:3049091-3049306
  hypo

SEQ ID NO: 434906 - DNA, 125 bp, Homo sapiens; identical to SEQ ID NO: 257198
  chr7:3054280-3054405
  hypo

SEQ ID NO: 434907 - DNA, 77 bp, Homo sapiens; identical to SEQ ID NO: 257199
  chr7:3081166-3081243
  hypo

SEQ ID NO: 434908 - DNA, 42 bp, Homo sapiens; identical to SEQ ID NO: 257200
  chr7:3150400-3150442
  hypo

SEQ ID NO: 434909 - DNA, 44 bp, Homo sapiens; identical to SEQ ID NO: 211302
  chr7:3179217-3179261
  hypo

SEQ ID NO: 434910 - DNA, 42 bp, Homo sapiens; identical to SEQ ID NO: 257203
  chr7:3239123-3239165
  hypo

SEQ ID NO: 434911 - DNA, 90 bp, Homo sapiens; identical to SEQ ID NO: 257204
  chr7:3243216-3243306
  hypo

SEQ ID NO: 434912 - DNA, 35 bp, Homo sapiens; identical to SEQ ID NO: 257206
  chr7:3513739-3513774
  hypo

SEQ ID NO: 434913 - DNA, 42 bp, Homo sapiens; identical to SEQ ID NO: 257207
  chr7:3624123-3624165
  hypo

SEQ ID NO: 434914 - DNA, 33 bp, Homo sapiens; identical to SEQ ID NO: 211303
  chr7:3727109-3727142
  hypo

SEQ ID NO: 434915 - DNA, 111 bp, Homo sapiens; identical to SEQ ID NO: 211304
  chr7:3727180-3727291
  hypo

SEQ ID NO: 434916 - DNA, 42 bp, Homo sapiens; identical to SEQ ID NO: 257209
  chr7:3864237-3864279
  hypo

SEQ ID NO: 434917 - DNA, 157 bp, Homo sapiens; identical to SEQ ID NO: 211305
  chr7:3880279-3880436
  hypo

SEQ ID NO: 434918 - DNA, 176 bp, Homo sapiens; identical to SEQ ID NO: 257211
  chr7:3947953-3948129
  hypo

SEQ ID NO: 434919 - DNA, 88 bp, Homo sapiens; identical to SEQ ID NO: 257212
  chr7:3982615-3982703
  hypo

SEQ ID NO: 434920 - DNA, 97 bp, Homo sapiens; identical to SEQ ID NO: 211306
  chr7:3991158-3991255
  hypo

SEQ ID NO: 434921 - DNA, 131 bp, Homo sapiens; identical to SEQ ID NO: 257214
  chr7:3991580-3991711
  hypo

SEQ ID NO: 434922 - DNA, 117 bp, Homo sapiens; identical to SEQ ID NO: 257215
  chr7:4011096-4011213
  hypo

SEQ ID NO: 434923 - DNA, 301 bp, Homo sapiens; identical to SEQ ID NO: 257216
  chr7:4030056-4030357
  hypo

SEQ ID NO: 434924 - DNA, 42 bp, Homo sapiens; identical to SEQ ID NO: 257217
  chr7:4047169-4047211
  hypo

SEQ ID NO: 434925 - DNA, 192 bp, Homo sapiens; identical to SEQ ID NO: 307172
  chr7:4056949-4057141
  hypo

SEQ ID NO: 434926 - DNA, 169 bp, Homo sapiens; identical to SEQ ID NO: 211307
  chr7:4116727-4116896
  hypo

SEQ ID NO: 434927 - DNA, 47 bp, Homo sapiens; identical to SEQ ID NO: 307174
  chr7:4139331-4139378
  hypo

SEQ ID NO: 434928 - DNA, 39 bp, Homo sapiens; identical to SEQ ID NO: 307175
  chr7:4139408-4139447
  hypo

SEQ ID NO: 434929 - DNA, 94 bp, Homo sapiens; identical to SEQ ID NO: 257221
  chr7:4140699-4140793
  hypo

SEQ ID NO: 434930 - DNA, 34 bp, Homo sapiens; identical to SEQ ID NO: 211308
  chr7:4141093-4141127
  hypo

SEQ ID NO: 434931 - DNA, 178 bp, Homo sapiens; identical to SEQ ID NO: 257223
  chr7:4146923-4147101
  hypo

SEQ ID NO: 434932 - DNA, 257 bp, Homo sapiens; identical to SEQ ID NO: 211309
  chr7:4152827-4153084
  hypo

SEQ ID NO: 434933 - DNA, 42 bp, Homo sapiens; identical to SEQ ID NO: 257226
  chr7:4171198-4171240
  hypo

SEQ ID NO: 434934 - DNA, 200 bp, Homo sapiens; identical to SEQ ID NO: 257227
  chr7:4171860-4172060
  hypo

SEQ ID NO: 434935 - DNA, 92 bp, Homo sapiens; identical to SEQ ID NO: 257228
  chr7:4177336-4177428
  hypo

SEQ ID NO: 434936 - DNA, 54 bp, Homo sapiens; identical to SEQ ID NO: 211311
  chr7:4183234-4183288
  hypo

SEQ ID NO: 434937 - DNA, 152 bp, Homo sapiens; identical to SEQ ID NO: 211312
  chr7:4183448-4183600
  hypo

SEQ ID NO: 434938 - DNA, 238 bp, Homo sapiens; identical to SEQ ID NO: 211313
  chr7:4185350-4185588
  hypo

SEQ ID NO: 434939 - DNA, 72 bp, Homo sapiens; identical to SEQ ID NO: 307187
  chr7:4187738-4187810
  hypo

SEQ ID NO: 434940 - DNA, 229 bp, Homo sapiens; identical to SEQ ID NO: 211315
  chr7:4187866-4188095
  hypo

SEQ ID NO: 434941 - DNA, 140 bp, Homo sapiens; identical to SEQ ID NO: 257232
  chr7:4198502-4198642
  hypo

SEQ ID NO: 434942 - DNA, 561 bp, Homo sapiens; identical to SEQ ID NO: 257233
  chr7:4201343-4201904
  hypo

SEQ ID NO: 434943 - DNA, 135 bp, Homo sapiens; identical to SEQ ID NO: 257234
  chr7:4203270-4203405
  hypo

SEQ ID NO: 434944 - DNA, 362 bp, Homo sapiens; identical to SEQ ID NO: 211316
  chr7:4214559-4214921
  hypo

SEQ ID NO: 434945 - DNA, 231 bp, Homo sapiens; identical to SEQ ID NO: 307194
  chr7:4215093-4215324
  hypo

SEQ ID NO: 434946 - DNA, 127 bp, Homo sapiens; identical to SEQ ID NO: 307195
  chr7:4215384-4215511
  hypo

SEQ ID NO: 434947 - DNA, 138 bp, Homo sapiens; identical to SEQ ID NO: 257237
  chr7:4218110-4218248
  hypo

SEQ ID NO: 434948 - DNA, 42 bp, Homo sapiens; identical to SEQ ID NO: 257239
  chr7:4230171-4230213
  hypo

SEQ ID NO: 434949 - DNA, 171 bp, Homo sapiens; identical to SEQ ID NO: 257241
  chr7:4246746-4246917
  hypo

SEQ ID NO: 434950 - DNA, 199 bp, Homo sapiens; identical to SEQ ID NO: 211318
  chr7:4247841-4248040
  hypo

SEQ ID NO: 434951 - DNA, 188 bp, Homo sapiens; identical to SEQ ID NO: 257243
  chr7:4249811-4249999
  hypo

SEQ ID NO: 434952 - DNA, 93 bp, Homo sapiens; identical to SEQ ID NO: 257245
  chr7:4256587-4256680
  hypo

SEQ ID NO: 434953 - DNA, 263 bp, Homo sapiens; identical to SEQ ID NO: 211320
  chr7:4265023-4265286
  hypo

SEQ ID NO: 434954 - DNA, 85 bp, Homo sapiens; identical to SEQ ID NO: 307206
  chr7:4265508-4265593
  hypo

SEQ ID NO: 434955 - DNA, 316 bp, Homo sapiens; identical to SEQ ID NO: 211321
  chr7:4272745-4273061
  hypo

SEQ ID NO: 434956 - DNA, 240 bp, Homo sapiens; identical to SEQ ID NO: 211322
  chr7:4273570-4273810
  hypo

SEQ ID NO: 434957 - DNA, 139 bp, Homo sapiens; identical to SEQ ID NO: 257250
  chr7:4275903-4276042
  hypo

SEQ ID NO: 434958 - DNA, 209 bp, Homo sapiens; identical to SEQ ID NO: 211323
  chr7:4277417-4277626
  hypo

SEQ ID NO: 434959 - DNA, 183 bp, Homo sapiens; identical to SEQ ID NO: 211324
  chr7:4285297-4285480
  hypo

SEQ ID NO: 434960 - DNA, 182 bp, Homo sapiens; identical to SEQ ID NO: 257253
  chr7:4286818-4287000
  hypo

SEQ ID NO: 434961 - DNA, 42 bp, Homo sapiens; identical to SEQ ID NO: 257254
  chr7:4299321-4299363
  hypo

SEQ ID NO: 434962 - DNA, 115 bp, Homo sapiens; identical to SEQ ID NO: 257255
  chr7:4307407-4307522
  hypo

SEQ ID NO: 434963 - DNA, 101 bp, Homo sapiens; identical to SEQ ID NO: 257256
  chr7:4308003-4308104
  hypo

SEQ ID NO: 434964 - DNA, 289 bp, Homo sapiens; identical to SEQ ID NO: 307216
  chr7:4308194-4308483
  hypo

SEQ ID NO: 434965 - DNA, 78 bp, Homo sapiens; identical to SEQ ID NO: 257258
  chr7:4323516-4323594
  hypo

SEQ ID NO: 434966 - DNA, 155 bp, Homo sapiens; identical to SEQ ID NO: 257259
  chr7:4348038-4348193
  hypo

SEQ ID NO: 434967 - DNA, 81 bp, Homo sapiens; identical to SEQ ID NO: 211326
  chr7:4540651-4540732
  hypo

SEQ ID NO: 434968 - DNA, 79 bp, Homo sapiens; identical to SEQ ID NO: 257263
  chr7:4546534-4546613
  hypo

SEQ ID NO: 434969 - DNA, 219 bp, Homo sapiens; identical to SEQ ID NO: 257264
  chr7:4730596-4730815
  hypo

SEQ ID NO: 434970 - DNA, 35 bp, Homo sapiens; identical to SEQ ID NO: 257266
  chr7:4753919-4753954
  hypo

SEQ ID NO: 434971 - DNA, 147 bp, Homo sapiens; identical to SEQ ID NO: 211329
  chr7:4754252-4754399
  hypo

SEQ ID NO: 434972 - DNA, 130 bp, Homo sapiens; identical to SEQ ID NO: 257268
  chr7:4762728-4762858
  hypo

SEQ ID NO: 434973 - DNA, 257 bp, Homo sapiens; identical to SEQ ID NO: 257269
  chr7:4767338-4767595
  hypo

SEQ ID NO: 434974 - DNA, 50 bp, Homo sapiens; identical to SEQ ID NO: 200795
  chr7:4770079-4770129
  hypo

SEQ ID NO: 434975 - DNA, 119 bp, Homo sapiens; identical to SEQ ID NO: 284747
  chr7:4770153-4770272
  hypo

SEQ ID NO: 434976 - DNA, 439 bp, Homo sapiens; identical to SEQ ID NO: 307233
  chr7:4781492-4781931
  hypo

SEQ ID NO: 434977 - DNA, 144 bp, Homo sapiens; identical to SEQ ID NO: 257273
  chr7:4783196-4783340
  hypo

SEQ ID NO: 434978 - DNA, 69 bp, Homo sapiens; identical to SEQ ID NO: 257276
  chr7:4803494-4803563
  hypo

SEQ ID NO: 434979 - DNA, 831 bp, Homo sapiens; identical to SEQ ID NO: 257277
  chr7:4806263-4807094
  hypo

SEQ ID NO: 434980 - DNA, 152 bp, Homo sapiens; identical to SEQ ID NO: 257278
  chr7:4807419-4807571
  hypo

SEQ ID NO: 434981 - DNA, 51 bp, Homo sapiens; identical to SEQ ID NO: 307241
  chr7:4813870-4813921
  hypo

SEQ ID NO: 434982 - DNA, 127 bp, Homo sapiens; identical to SEQ ID NO: 257280
  chr7:4823843-4823970
  hypo

SEQ ID NO: 434983 - DNA, 151 bp, Homo sapiens; identical to SEQ ID NO: 211335
  chr7:4824492-4824643
  hypo

SEQ ID NO: 434984 - DNA, 225 bp, Homo sapiens; identical to SEQ ID NO: 257282
  chr7:4825103-4825328
  hypo

SEQ ID NO: 434985 - DNA, 97 bp, Homo sapiens; identical to SEQ ID NO: 257283
  chr7:4828437-4828534
  hypo

SEQ ID NO: 434986 - DNA, 188 bp, Homo sapiens; identical to SEQ ID NO: 257285
  chr7:4839816-4840004
  hypo

SEQ ID NO: 434987 - DNA, 363 bp, Homo sapiens; identical to SEQ ID NO: 257289
  chr7:4861934-4862297
  hypo

SEQ ID NO: 434988 - DNA, 216 bp, Homo sapiens; identical to SEQ ID NO: 257290
  chr7:4864847-4865063
  hypo

SEQ ID NO: 434989 - DNA, 34 bp, Homo sapiens; identical to SEQ ID NO: 211341
  chr7:4867284-4867318
  hypo

SEQ ID NO: 434990 - DNA, 167 bp, Homo sapiens; identical to SEQ ID NO: 211342
  chr7:4874066-4874233
  hypo

SEQ ID NO: 434991 - DNA, 201 bp, Homo sapiens; identical to SEQ ID NO: 211343
  chr7:4874263-4874464
  hypo

SEQ ID NO: 434992 - DNA, 175 bp, Homo sapiens; identical to SEQ ID NO: 257293
  chr7:4878540-4878715
  hypo

SEQ ID NO: 434993 - DNA, 37 bp, Homo sapiens; identical to SEQ ID NO: 257294
  chr7:4902242-4902279
  hypo

SEQ ID NO: 434994 - DNA, 258 bp, Homo sapiens; identical to SEQ ID NO: 257296
  chr7:4913719-4913977
  hypo

SEQ ID NO: 434995 - DNA, 269 bp, Homo sapiens; identical to SEQ ID NO: 211344
  chr7:4915141-4915410
  hypo

SEQ ID NO: 434996 - DNA, 281 bp, Homo sapiens; identical to SEQ ID NO: 257298
  chr7:4916207-4916488
  hypo

SEQ ID NO: 434997 - DNA, 35 bp, Homo sapiens; identical to SEQ ID NO: 257301
  chr7:4932640-4932675
  hypo

SEQ ID NO: 434998 - DNA, 77 bp, Homo sapiens; identical to SEQ ID NO: 211346
  chr7:4985613-4985690
  hypo

SEQ ID NO: 434999 - DNA, 108 bp, Homo sapiens; identical to SEQ ID NO: 211347
  chr7:4985899-4986007
  hypo

SEQ ID NO: 435000 - DNA, 40 bp, Homo sapiens; identical to SEQ ID NO: 257304
  chr7:5041595-5041635
  hypo

SEQ ID NO: 435001 - DNA, 456 bp, Homo sapiens; identical to SEQ ID NO: 257305
  chr7:5157464-5157920
  hypo

SEQ ID NO: 435002 - DNA, 263 bp, Homo sapiens; identical to SEQ ID NO: 257307
  chr7:5237698-5237961
  hypo

SEQ ID NO: 435003 - DNA, 88 bp, Homo sapiens; identical to SEQ ID NO: 257309
  chr7:5240285-5240373
  hypo

SEQ ID NO: 435004 - DNA, 121 bp, Homo sapiens; identical to SEQ ID NO: 257310
  chr7:5242891-5243012
  hypo

SEQ ID NO: 435005 - DNA, 114 bp, Homo sapiens; identical to SEQ ID NO: 211350
  chr7:5253973-5254087
  hypo

SEQ ID NO: 435006 - DNA, 271 bp, Homo sapiens; identical to SEQ ID NO: 257313
  chr7:5265609-5265880
  hypo

SEQ ID NO: 435007 - DNA, 514 bp, Homo sapiens; identical to SEQ ID NO: 211353
  chr7:5272774-5273288
  hypo

SEQ ID NO: 435008 - DNA, 98 bp, Homo sapiens; identical to SEQ ID NO: 211354
  chr7:5334869-5334967
  hypo

SEQ ID NO: 435009 - DNA, 110 bp, Homo sapiens; identical to SEQ ID NO: 211355
  chr7:5353278-5353388
  hypo

SEQ ID NO: 435010 - DNA, 395 bp, Homo sapiens; identical to SEQ ID NO: 257319
  chr7:5372388-5372783
  hypo

SEQ ID NO: 435011 - DNA, 42 bp, Homo sapiens; identical to SEQ ID NO: 257320
  chr7:5373542-5373584
  hypo

SEQ ID NO: 435012 - DNA, 118 bp, Homo sapiens; identical to SEQ ID NO: 257321
  chr7:5384805-5384923
  hypo

SEQ ID NO: 435013 - DNA, 319 bp, Homo sapiens; identical to SEQ ID NO: 257322
  chr7:5390477-5390796
  hypo

SEQ ID NO: 435014 - DNA, 55 bp, Homo sapiens; identical to SEQ ID NO: 257323
  chr7:5391379-5391434
  hypo

SEQ ID NO: 435015 - DNA, 103 bp, Homo sapiens; identical to SEQ ID NO: 257325
  chr7:5398875-5398978
  hypo

SEQ ID NO: 435016 - DNA, 286 bp, Homo sapiens; identical to SEQ ID NO: 211359
  chr7:5446686-5446972
  hypo

SEQ ID NO: 435017 - DNA, 81 bp, Homo sapiens; identical to SEQ ID NO: 211360
  chr7:5449226-5449307
  hypo

SEQ ID NO: 435018 - DNA, 160 bp, Homo sapiens; identical to SEQ ID NO: 211361
  chr7:5453845-5454005
  hypo

SEQ ID NO: 435019 - DNA, 221 bp, Homo sapiens; identical to SEQ ID NO: 200801
  chr7:5462090-5462311
  hypo

SEQ ID NO: 435020 - DNA, 249 bp, Homo sapiens; identical to SEQ ID NO: 257331
  chr7:5488162-5488411
  hypo

SEQ ID NO: 435021 - DNA, 190 bp, Homo sapiens; identical to SEQ ID NO: 211363
  chr7:5491669-5491859
  hypo

SEQ ID NO: 435022 - DNA, 91 bp, Homo sapiens; identical to SEQ ID NO: 257333
  chr7:5521407-5521498
  hypo

SEQ ID NO: 435023 - DNA, 74 bp, Homo sapiens; identical to SEQ ID NO: 211364
  chr7:5521784-5521858
  hypo

SEQ ID NO: 435024 - DNA, 156 bp, Homo sapiens; identical to SEQ ID NO: 257335
  chr7:5528281-5528437
  hypo

SEQ ID NO: 435025 - DNA, 69 bp, Homo sapiens; identical to SEQ ID NO: 257336
  chr7:5528739-5528808
  hypo

SEQ ID NO: 435026 - DNA, 100 bp, Homo sapiens; identical to SEQ ID NO: 307299
  chr7:5529739-5529839
  hypo

SEQ ID NO: 435027 - DNA, 120 bp, Homo sapiens; identical to SEQ ID NO: 307300
  chr7:5529955-5530075
  hypo

SEQ ID NO: 435028 - DNA, 189 bp, Homo sapiens; identical to SEQ ID NO: 257338
  chr7:5530811-5531000
  hypo

SEQ ID NO: 435029 - DNA, 254 bp, Homo sapiens; identical to SEQ ID NO: 257339
  chr7:5541327-5541581
  hypo

SEQ ID NO: 435030 - DNA, 633 bp, Homo sapiens; identical to SEQ ID NO: 284764
  chr7:5594638-5595271
  hypo

SEQ ID NO: 435031 - DNA, 32 bp, Homo sapiens; identical to SEQ ID NO: 257341
  chr7:5655102-5655134
  hypo

SEQ ID NO: 435032 - DNA, 93 bp, Homo sapiens; identical to SEQ ID NO: 257342
  chr7:5655367-5655460
  hypo

SEQ ID NO: 435033 - DNA, 153 bp, Homo sapiens; identical to SEQ ID NO: 257343
  chr7:5692777-5692930
  hypo

SEQ ID NO: 435034 - DNA, 194 bp, Homo sapiens; identical to SEQ ID NO: 257344
  chr7:5697663-5697857
  hypo

SEQ ID NO: 435035 - DNA, 138 bp, Homo sapiens; identical to SEQ ID NO: 257345
  chr7:5730673-5730811
  hypo

SEQ ID NO: 435036 - DNA, 301 bp, Homo sapiens; identical to SEQ ID NO: 257346
  chr7:5870805-5871106
  hypo

SEQ ID NO: 435037 - DNA, 222 bp, Homo sapiens; identical to SEQ ID NO: 257347
  chr7:5877162-5877384
  hypo

SEQ ID NO: 435038 - DNA, 94 bp, Homo sapiens; identical to SEQ ID NO: 211368
  chr7:5920562-5920656
  hypo

SEQ ID NO: 435039 - DNA, 83 bp, Homo sapiens; identical to SEQ ID NO: 257350
  chr7:5997467-5997550
  hypo

SEQ ID NO: 435040 - DNA, 125 bp, Homo sapiens; identical to SEQ ID NO: 257352
  chr7:6054904-6055029
  hypo

SEQ ID NO: 435041 - DNA, 48 bp, Homo sapiens
  chr7:6058807-6058855
  hypo
ggtgtgagcagctaattcatctctccaggaaattgcatgttgcagtca

SEQ ID NO: 435042 - DNA, 41 bp, Homo sapiens; identical to SEQ ID NO: 211369
  chr7:6059658-6059699
  hypo

SEQ ID NO: 435043 - DNA, 185 bp, Homo sapiens; identical to SEQ ID NO: 211373
  chr7:6076894-6077079
  hypo

SEQ ID NO: 435044 - DNA, 240 bp, Homo sapiens; identical to SEQ ID NO: 257358
  chr7:6099499-6099739
  hypo

SEQ ID NO: 435045 - DNA, 142 bp, Homo sapiens; identical to SEQ ID NO: 257359
  chr7:6124191-6124333
  hypo

SEQ ID NO: 435046 - DNA, 217 bp, Homo sapiens; identical to SEQ ID NO: 257363
  chr7:6193772-6193989
  hypo

SEQ ID NO: 435047 - DNA, 238 bp, Homo sapiens; identical to SEQ ID NO: 257364
  chr7:6204760-6204998
  hypo

SEQ ID NO: 435048 - DNA, 44 bp, Homo sapiens; identical to SEQ ID NO: 211375
  chr7:6229682-6229726
  hypo

SEQ ID NO: 435049 - DNA, 147 bp, Homo sapiens; identical to SEQ ID NO: 257368
  chr7:6235848-6235995
  hypo

SEQ ID NO: 435050 - DNA, 41 bp, Homo sapiens; identical to SEQ ID NO: 257369
  chr7:6295662-6295703
  hypo

SEQ ID NO: 435051 - DNA, 82 bp, Homo sapiens; identical to SEQ ID NO: 211376
  chr7:6308101-6308183
  hypo

SEQ ID NO: 435052 - DNA, 188 bp, Homo sapiens; identical to SEQ ID NO: 307333
  chr7:6386234-6386422
  hypo

SEQ ID NO: 435053 - DNA, 49 bp, Homo sapiens; identical to SEQ ID NO: 307334
  chr7:6386468-6386517
  hypo

SEQ ID NO: 435054 - DNA, 94 bp, Homo sapiens; identical to SEQ ID NO: 257372
  chr7:6405541-6405635
  hypo

SEQ ID NO: 435055 - DNA, 160 bp, Homo sapiens; identical to SEQ ID NO: 211377
  chr7:6432515-6432675
  hypo

SEQ ID NO: 435056 - DNA, 48 bp, Homo sapiens; identical to SEQ ID NO: 211381
  chr7:6444143-6444191
  hypo

SEQ ID NO: 435057 - DNA, 69 bp, Homo sapiens; identical to SEQ ID NO: 257379
  chr7:6449561-6449630
  hypo

SEQ ID NO: 435058 - DNA, 99 bp, Homo sapiens; identical to SEQ ID NO: 257380
  chr7:6450104-6450203
  hypo

SEQ ID NO: 435059 - DNA, 88 bp, Homo sapiens; identical to SEQ ID NO: 211383
  chr7:6484556-6484644
  hypo

SEQ ID NO: 435060 - DNA, 177 bp, Homo sapiens; identical to SEQ ID NO: 211384
  chr7:6500829-6501006
  hypo

SEQ ID NO: 435061 - DNA, 92 bp, Homo sapiens; identical to SEQ ID NO: 284777
  chr7:6575941-6576033
  hypo

SEQ ID NO: 435062 - DNA, 126 bp, Homo sapiens; identical to SEQ ID NO: 257387
  chr7:6597055-6597181
  hypo

SEQ ID NO: 435063 - DNA, 41 bp, Homo sapiens; identical to SEQ ID NO: 211385
  chr7:6619099-6619140
  hypo

SEQ ID NO: 435064 - DNA, 332 bp, Homo sapiens; identical to SEQ ID NO: 211386
  chr7:6644210-6644542
  hypo

SEQ ID NO: 435065 - DNA, 203 bp, Homo sapiens; identical to SEQ ID NO: 211387
  chr7:6645603-6645806
  hypo

SEQ ID NO: 435066 - DNA, 52 bp, Homo sapiens; identical to SEQ ID NO: 257391
  chr7:6646146-6646198
  hypo

SEQ ID NO: 435067 - DNA, 1290 bp, Homo sapiens; identical to SEQ ID NO: 211388
  chr7:6647171-6648461
  hypo

SEQ ID NO: 435068 - DNA, 42 bp, Homo sapiens; identical to SEQ ID NO: 257393
  chr7:6650217-6650259
  hypo

SEQ ID NO: 435069 - DNA, 101 bp, Homo sapiens; identical to SEQ ID NO: 257394
  chr7:6661790-6661891
  hypo

SEQ ID NO: 435070 - DNA, 133 bp, Homo sapiens; identical to SEQ ID NO: 257395
  chr7:6662671-6662804
  hypo

SEQ ID NO: 435071 - DNA, 132 bp, Homo sapiens; identical to SEQ ID NO: 257397
  chr7:6683068-6683200
  hypo

SEQ ID NO: 435072 - DNA, 190 bp, Homo sapiens; identical to SEQ ID NO: 211390
  chr7:6686203-6686393
  hypo

SEQ ID NO: 435073 - DNA, 186 bp, Homo sapiens; identical to SEQ ID NO: 211391
  chr7:6692859-6693045
  hypo

SEQ ID NO: 435074 - DNA, 71 bp, Homo sapiens; identical to SEQ ID NO: 284782
  chr7:6966984-6967055
  hypo

SEQ ID NO: 435075 - DNA, 80 bp, Homo sapiens; identical to SEQ ID NO: 307366
  chr7:7097584-7097664
  hypo

SEQ ID NO: 435076 - DNA, 148 bp, Homo sapiens; identical to SEQ ID NO: 307367
  chr7:7097928-7098076
  hypo

SEQ ID NO: 435077 - DNA, 148 bp, Homo sapiens; identical to SEQ ID NO: 307368
  chr7:7098156-7098304
  hypo

SEQ ID NO: 435078 - DNA, 104 bp, Homo sapiens; identical to SEQ ID NO: 307369
  chr7:7099575-7099679
  hypo

SEQ ID NO: 435079 - DNA, 43 bp, Homo sapiens; identical to SEQ ID NO: 257405
  chr7:7103152-7103195
  hypo

SEQ ID NO: 435080 - DNA, 114 bp, Homo sapiens; identical to SEQ ID NO: 257406
  chr7:7109415-7109529
  hypo

SEQ ID NO: 435081 - DNA, 90 bp, Homo sapiens; identical to SEQ ID NO: 257407
  chr7:7109912-7110002
  hypo

SEQ ID NO: 435082 - DNA, 36 bp, Homo sapiens; identical to SEQ ID NO: 211393
  chr7:7249348-7249384
  hypo

SEQ ID NO: 435083 - DNA, 165 bp, Homo sapiens; identical to SEQ ID NO: 73410
  chr7:7621497-7621662
  hypo

SEQ ID NO: 435084 - DNA, 89 bp, Homo sapiens; identical to SEQ ID NO: 257416
  chr7:7666892-7666981
  hypo

SEQ ID NO: 435085 - DNA, 86 bp, Homo sapiens; identical to SEQ ID NO: 257417
  chr7:7799055-7799141
  hypo

SEQ ID NO: 435086 - DNA, 81 bp, Homo sapiens; identical to SEQ ID NO: 211397
  chr7:7807037-7807118
  hypo

SEQ ID NO: 435087 - DNA, 82 bp, Homo sapiens; identical to SEQ ID NO: 257419
  chr7:7822313-7822395
  hypo

SEQ ID NO: 435088 - DNA, 97 bp, Homo sapiens; identical to SEQ ID NO: 257421
  chr7:7880864-7880961
  hypo

SEQ ID NO: 435089 - DNA, 100 bp, Homo sapiens; identical to SEQ ID NO: 257422
  chr7:7935069-7935169
  hypo

SEQ ID NO: 435090 - DNA, 90 bp, Homo sapiens; identical to SEQ ID NO: 257423
  chr7:7998934-7999024
  hypo

SEQ ID NO: 435091 - DNA, 36 bp, Homo sapiens; identical to SEQ ID NO: 211398
  chr7:8954796-8954832
  hypo

SEQ ID NO: 435092 - DNA, 42 bp, Homo sapiens; identical to SEQ ID NO: 257425
  chr7:9707913-9707955
  hypo

SEQ ID NO: 435093 - DNA, 434 bp, Homo sapiens; identical to SEQ ID NO: 307391
  chr7:9766087-9766521
  hypo

SEQ ID NO: 435094 - DNA, 240 bp, Homo sapiens; identical to SEQ ID NO: 307392
  chr7:9766551-9766791
  hypo

SEQ ID NO: 435095 - DNA, 284 bp, Homo sapiens; identical to SEQ ID NO: 257427
  chr7:10516004-10516288
  hypo

SEQ ID NO: 435096 - DNA, 32 bp, Homo sapiens; identical to SEQ ID NO: 257428
  chr7:11281035-11281067
  hypo

SEQ ID NO: 435097 - DNA, 136 bp, Homo sapiens; identical to SEQ ID NO: 257429
  chr7:12510651-12510787
  hypo

SEQ ID NO: 435098 - DNA, 98 bp, Homo sapiens; identical to SEQ ID NO: 211399
  chr7:12750832-12750930
  hypo

SEQ ID NO: 435099 - DNA, 32 bp, Homo sapiens; identical to SEQ ID NO: 211400
  chr7:12763983-12764015
  hypo

SEQ ID NO: 435100 - DNA, 44 bp, Homo sapiens; identical to SEQ ID NO: 211401
  chr7:12795792-12795836
  hypo

SEQ ID NO: 435101 - DNA, 34 bp, Homo sapiens; identical to SEQ ID NO: 257433
  chr7:13761024-13761058
  hypo

SEQ ID NO: 435102 - DNA, 31 bp, Homo sapiens; identical to SEQ ID NO: 257434
  chr7:15128782-15128813
  hypo

SEQ ID NO: 435103 - DNA, 89 bp, Homo sapiens; identical to SEQ ID NO: 257435
  chr7:15436141-15436230
  hypo

SEQ ID NO: 435104 - DNA, 78 bp, Homo sapiens; identical to SEQ ID NO: 257436
  chr7:16189282-16189360
  hypo

SEQ ID NO: 435105 - DNA, 37 bp, Homo sapiens; identical to SEQ ID NO: 257437
  chr7:16256011-16256048
  hypo

SEQ ID NO: 435106 - DNA, 88 bp, Homo sapiens; identical to SEQ ID NO: 257438
  chr7:16313198-16313286
  hypo

SEQ ID NO: 435107 - DNA, 38 bp, Homo sapiens; identical to SEQ ID NO: 211402
  chr7:16370912-16370950
  hypo

SEQ ID NO: 435108 - DNA, 131 bp, Homo sapiens; identical to SEQ ID NO: 211403
  chr7:16436345-16436476
  hypo

SEQ ID NO: 435109 - DNA, 135 bp, Homo sapiens; identical to SEQ ID NO: 211404
  chr7:16438008-16438143
  hypo

SEQ ID NO: 435110 - DNA, 161 bp, Homo sapiens; identical to SEQ ID NO: 257442
  chr7:16439151-16439312
  hypo

SEQ ID NO: 435111 - DNA, 481 bp, Homo sapiens; identical to SEQ ID NO: 257443
  chr7:16439979-16440460
  hypo

SEQ ID NO: 435112 - DNA, 337 bp, Homo sapiens; identical to SEQ ID NO: 257445
  chr7:17214726-17215063
  hypo

SEQ ID NO: 435113 - DNA, 1038 bp, Homo sapiens; identical to SEQ ID NO: 200834
  chr7:17338062-17339100
  hypo

SEQ ID NO: 435114 - DNA, 33 bp, Homo sapiens; identical to SEQ ID NO: 257447
  chr7:18041863-18041896
  hypo

SEQ ID NO: 435115 - DNA, 39 bp, Homo sapiens; identical to SEQ ID NO: 211409
  chr7:18927745-18927784
  hypo

SEQ ID NO: 435116 - DNA, 40 bp, Homo sapiens; identical to SEQ ID NO: 257449
  chr7:19379034-19379074
  hypo

SEQ ID NO: 435117 - DNA, 68 bp, Homo sapiens; identical to SEQ ID NO: 257450
  chr7:19740986-19741054
  hypo

SEQ ID NO: 435118 - DNA, 185 bp, Homo sapiens; identical to SEQ ID NO: 211411
  chr7:20628397-20628582
  hypo

SEQ ID NO: 435119 - DNA, 38 bp, Homo sapiens; identical to SEQ ID NO: 257452
  chr7:20719883-20719921
  hypo

SEQ ID NO: 435120 - DNA, 79 bp, Homo sapiens; identical to SEQ ID NO: 397603
  chr7:20826019-20826098
  hypo

SEQ ID NO: 435121 - DNA, 70 bp, Homo sapiens; identical to SEQ ID NO: 200851
  chr7:20837557-20837627
  hypo

SEQ ID NO: 435122 - DNA, 182 bp, Homo sapiens; identical to SEQ ID NO: 43954
  chr7:20837650-20837832
  hypo

SEQ ID NO: 435123 - DNA, 120 bp, Homo sapiens; identical to SEQ ID NO: 211418
  chr7:20855065-20855185
  hypo

SEQ ID NO: 435124 - DNA, 37 bp, Homo sapiens; identical to SEQ ID NO: 211419
  chr7:21409421-21409458
  hypo

SEQ ID NO: 435125 - DNA, 37 bp, Homo sapiens; identical to SEQ ID NO: 211420
  chr7:21501380-21501417
  hypo

SEQ ID NO: 435126 - DNA, 91 bp, Homo sapiens; identical to SEQ ID NO: 257457
  chr7:21924279-21924370
  hypo

SEQ ID NO: 435127 - DNA, 31 bp, Homo sapiens; identical to SEQ ID NO: 257458
  chr7:22028252-22028283
  hypo

SEQ ID NO: 435128 - DNA, 37 bp, Homo sapiens; identical to SEQ ID NO: 257459
  chr7:22083773-22083810
  hypo

SEQ ID NO: 435129 - DNA, 184 bp, Homo sapiens; identical to SEQ ID NO: 284851
  chr7:22143358-22143542
  hypo

SEQ ID NO: 435130 - DNA, 38 bp, Homo sapiens; identical to SEQ ID NO: 257460
  chr7:22143965-22144003
  hypo

SEQ ID NO: 435131 - DNA, 160 bp, Homo sapiens; identical to SEQ ID NO: 257461
  chr7:22881609-22881769
  hypo

SEQ ID NO: 435132 - DNA, 75 bp, Homo sapiens; identical to SEQ ID NO: 257462
  chr7:22903374-22903449
  hypo

SEQ ID NO: 435133 - DNA, 104 bp, Homo sapiens; identical to SEQ ID NO: 211426
  chr7:23211637-23211741
  hypo

SEQ ID NO: 435134 - DNA, 39 bp, Homo sapiens; identical to SEQ ID NO: 257464
  chr7:23345800-23345839
  hypo

SEQ ID NO: 435135 - DNA, 76 bp, Homo sapiens; identical to SEQ ID NO: 257466
  chr7:23529548-23529624
  hypo

SEQ ID NO: 435136 - DNA, 40 bp, Homo sapiens; identical to SEQ ID NO: 211429
  chr7:23550217-23550257
  hypo

SEQ ID NO: 435137 - DNA, 42 bp, Homo sapiens; identical to SEQ ID NO: 211430
  chr7:23556807-23556849
  hypo

SEQ ID NO: 435138 - DNA, 37 bp, Homo sapiens; identical to SEQ ID NO: 257469
  chr7:23568876-23568913
  hypo

SEQ ID NO: 435139 - DNA, 146 bp, Homo sapiens; identical to SEQ ID NO: 200870
  chr7:24323183-24323329
  hypo

SEQ ID NO: 435140 - DNA, 155 bp, Homo sapiens; identical to SEQ ID NO: 200871
  chr7:24323343-24323498
  hypo

SEQ ID NO: 435141 - DNA, 235 bp, Homo sapiens; identical to SEQ ID NO: 200872
  chr7:24323528-24323763
  hypo

SEQ ID NO: 435142 - DNA, 89 bp, Homo sapiens; identical to SEQ ID NO: 200873
  chr7:24323939-24324028
  hypo

SEQ ID NO: 435143 - DNA, 34 bp, Homo sapiens; identical to SEQ ID NO: 200874
  chr7:24324151-24324185
  hypo

SEQ ID NO: 435144 - DNA, 441 bp, Homo sapiens; identical to SEQ ID NO: 284872
  chr7:24324248-24324689
  hypo

SEQ ID NO: 435145 - DNA, 37 bp, Homo sapiens; identical to SEQ ID NO: 257474
  chr7:24990042-24990079
  hypo

SEQ ID NO: 435146 - DNA, 146 bp, Homo sapiens; identical to SEQ ID NO: 211439
  chr7:25158787-25158933
  hypo

SEQ ID NO: 435147 - DNA, 571 bp, Homo sapiens; identical to SEQ ID NO: 200876
  chr7:25219529-25220100
  hypo

SEQ ID NO: 435148 - DNA, 49 bp, Homo sapiens; identical to SEQ ID NO: 257479
  chr7:25607208-25607257
  hypo

SEQ ID NO: 435149 - DNA, 83 bp, Homo sapiens; identical to SEQ ID NO: 257480
  chr7:25783409-25783492
  hypo

SEQ ID NO: 435150 - DNA, 128 bp, Homo sapiens; identical to SEQ ID NO: 257481
  chr7:26098333-26098461
  hypo

SEQ ID NO: 435151 - DNA, 180 bp, Homo sapiens; identical to SEQ ID NO: 257484
  chr7:26259534-26259714
  hypo

SEQ ID NO: 435152 - DNA, 36 bp, Homo sapiens; identical to SEQ ID NO: 211445
  chr7:26291675-26291711
  hypo

SEQ ID NO: 435153 - DNA, 33 bp, Homo sapiens; identical to SEQ ID NO: 257487
  chr7:26298989-26299022
  hypo

SEQ ID NO: 435154 - DNA, 126 bp, Homo sapiens; identical to SEQ ID NO: 257488
  chr7:26417608-26417734
  hypo

SEQ ID NO: 435155 - DNA, 138 bp, Homo sapiens; identical to SEQ ID NO: 211446
  chr7:26439682-26439820
  hypo

SEQ ID NO: 435156 - DNA, 151 bp, Homo sapiens; identical to SEQ ID NO: 211447
  chr7:26439850-26440001
  hypo

SEQ ID NO: 435157 - DNA, 95 bp, Homo sapiens; identical to SEQ ID NO: 257491
  chr7:26687816-26687911
  hypo

SEQ ID NO: 435158 - DNA, 44 bp, Homo sapiens; identical to SEQ ID NO: 257492
  chr7:26753490-26753534
  hypo

SEQ ID NO: 435159 - DNA, 87 bp, Homo sapiens; identical to SEQ ID NO: 211448
  chr7:27032268-27032355
  hypo

SEQ ID NO: 435160 - DNA, 32 bp, Homo sapiens; identical to SEQ ID NO: 114773
  chr7:27146541-27146573
  hypo

SEQ ID NO: 435161 - DNA, 477 bp, Homo sapiens; identical to SEQ ID NO: 284901
  chr7:27191584-27192061
  hypo

SEQ ID NO: 435162 - DNA, 320 bp, Homo sapiens; identical to SEQ ID NO: 284902
  chr7:27192098-27192418
  hypo

SEQ ID NO: 435163 - DNA, 35 bp, Homo sapiens; identical to SEQ ID NO: 257494
  chr7:27336400-27336435
  hypo

SEQ ID NO: 435164 - DNA, 38 bp, Homo sapiens; identical to SEQ ID NO: 257495
  chr7:27514343-27514381
  hypo

SEQ ID NO: 435165 - DNA, 71 bp, Homo sapiens; identical to SEQ ID NO: 257497
  chr7:27591612-27591683
  hypo

SEQ ID NO: 435166 - DNA, 188 bp, Homo sapiens; identical to SEQ ID NO: 257499
  chr7:27679515-27679703
  hypo

SEQ ID NO: 435167 - DNA, 57 bp, Homo sapiens; identical to SEQ ID NO: 405829
  chr7:27686860-27686917
  hypo

SEQ ID NO: 435168 - DNA, 193 bp, Homo sapiens; identical to SEQ ID NO: 223061
  chr7:27701810-27702003
  hypo

SEQ ID NO: 435169 - DNA, 41 bp, Homo sapiens; identical to SEQ ID NO: 257501
  chr7:27782388-27782429
  hypo

SEQ ID NO: 435170 - DNA, 225 bp, Homo sapiens; identical to SEQ ID NO: 257503
  chr7:27882584-27882809
  hypo

SEQ ID NO: 435171 - DNA, 393 bp, Homo sapiens; identical to SEQ ID NO: 307503
  chr7:27903423-27903816
  hypo

SEQ ID NO: 435172 - DNA, 184 bp, Homo sapiens; identical to SEQ ID NO: 257507
  chr7:27984539-27984723
  hypo

SEQ ID NO: 435173 - DNA, 329 bp, Homo sapiens; identical to SEQ ID NO: 257508
  chr7:28109347-28109676
  hypo

SEQ ID NO: 435174 - DNA, 38 bp, Homo sapiens; identical to SEQ ID NO: 257510
  chr7:28176530-28176568
  hypo

SEQ ID NO: 435175 - DNA, 129 bp, Homo sapiens; identical to SEQ ID NO: 257511
  chr7:28190080-28190209
  hypo

SEQ ID NO: 435176 - DNA, 36 bp, Homo sapiens; identical to SEQ ID NO: 257512
  chr7:28266793-28266829
  hypo

SEQ ID NO: 435177 - DNA, 202 bp, Homo sapiens; identical to SEQ ID NO: 257513
  chr7:28811874-28812076
  hypo

SEQ ID NO: 435178 - DNA, 49 bp, Homo sapiens; identical to SEQ ID NO: 257515
  chr7:29105618-29105667
  hypo

SEQ ID NO: 435179 - DNA, 135 bp, Homo sapiens; identical to SEQ ID NO: 257516
  chr7:29210728-29210863
  hypo

SEQ ID NO: 435180 - DNA, 160 bp, Homo sapiens; identical to SEQ ID NO: 257517
  chr7:29362350-29362510
  hypo

SEQ ID NO: 435181 - DNA, 34 bp, Homo sapiens; identical to SEQ ID NO: 257518
  chr7:29372516-29372550
  hypo

SEQ ID NO: 435182 - DNA, 100 bp, Homo sapiens; identical to SEQ ID NO: 257520
  chr7:29410049-29410149
  hypo

SEQ ID NO: 435183 - DNA, 32 bp, Homo sapiens; identical to SEQ ID NO: 257521
  chr7:29452225-29452257
  hypo

SEQ ID NO: 435184 - DNA, 34 bp, Homo sapiens; identical to SEQ ID NO: 307524
  chr7:29482542-29482576
  hypo

SEQ ID NO: 435185 - DNA, 103 bp, Homo sapiens; identical to SEQ ID NO: 257523
  chr7:29682478-29682581
  hypo

SEQ ID NO: 435186 - DNA, 56 bp, Homo sapiens; identical to SEQ ID NO: 257524
  chr7:29689982-29690038
  hypo

SEQ ID NO: 435187 - DNA, 369 bp, Homo sapiens; identical to SEQ ID NO: 200920
  chr7:29724332-29724701
  hypo

SEQ ID NO: 435188 - DNA, 54 bp, Homo sapiens; identical to SEQ ID NO: 200921
  chr7:29725077-29725131
  hypo

SEQ ID NO: 435189 - DNA, 369 bp, Homo sapiens; identical to SEQ ID NO: 200924
  chr7:30028879-30029248
  hypo

SEQ ID NO: 435190 - DNA, 400 bp, Homo sapiens; identical to SEQ ID NO: 284951
  chr7:30029302-30029702
  hypo

SEQ ID NO: 435191 - DNA, 246 bp, Homo sapiens; identical to SEQ ID NO: 200927
  chr7:30067778-30068024
  hypo

SEQ ID NO: 435192 - DNA, 149 bp, Homo sapiens; identical to SEQ ID NO: 211472
  chr7:30516406-30516555
  hypo

SEQ ID NO: 435193 - DNA, 256 bp, Homo sapiens; identical to SEQ ID NO: 200928
  chr7:30517956-30518212
  hypo

SEQ ID NO: 435194 - DNA, 40 bp, Homo sapiens; identical to SEQ ID NO: 257528
  chr7:30596671-30596711
  hypo

SEQ ID NO: 435195 - DNA, 412 bp, Homo sapiens; identical to SEQ ID NO: 257533
  chr7:30817952-30818364
  hypo

SEQ ID NO: 435196 - DNA, 117 bp, Homo sapiens; identical to SEQ ID NO: 211476
  chr7:30857292-30857409
  hypo

SEQ ID NO: 435197 - DNA, 95 bp, Homo sapiens; identical to SEQ ID NO: 257535
  chr7:30902138-30902233
  hypo

SEQ ID NO: 435198 - DNA, 50 bp, Homo sapiens; identical to SEQ ID NO: 211477
  chr7:30921727-30921777
  hypo

SEQ ID NO: 435199 - DNA, 173 bp, Homo sapiens; identical to SEQ ID NO: 257537
  chr7:30922908-30923081
  hypo

SEQ ID NO: 435200 - DNA, 79 bp, Homo sapiens; identical to SEQ ID NO: 257538
  chr7:30925107-30925186
  hypo

SEQ ID NO: 435201 - DNA, 42 bp, Homo sapiens; identical to SEQ ID NO: 257539
  chr7:30928162-30928204
  hypo

SEQ ID NO: 435202 - DNA, 120 bp, Homo sapiens; identical to SEQ ID NO: 257540
  chr7:30934601-30934721
  hypo

SEQ ID NO: 435203 - DNA, 139 bp, Homo sapiens; identical to SEQ ID NO: 211478
  chr7:30944106-30944245
  hypo

SEQ ID NO: 435204 - DNA, 115 bp, Homo sapiens; identical to SEQ ID NO: 257542
  chr7:30946539-30946654
  hypo

SEQ ID NO: 435205 - DNA, 42 bp, Homo sapiens; identical to SEQ ID NO: 257543
  chr7:30971902-30971944
  hypo

SEQ ID NO: 435206 - DNA, 115 bp, Homo sapiens; identical to SEQ ID NO: 257545
  chr7:31018779-31018894
  hypo

SEQ ID NO: 435207 - DNA, 163 bp, Homo sapiens; identical to SEQ ID NO: 257547
  chr7:31068265-31068428
  hypo

SEQ ID NO: 435208 - DNA, 137 bp, Homo sapiens; identical to SEQ ID NO: 257548
  chr7:31939010-31939147
  hypo

SEQ ID NO: 435209 - DNA, 100 bp, Homo sapiens; identical to SEQ ID NO: 257549
  chr7:32128068-32128168
  hypo

SEQ ID NO: 435210 - DNA, 31 bp, Homo sapiens; identical to SEQ ID NO: 257550
  chr7:32416317-32416348
  hypo

SEQ ID NO: 435211 - DNA, 31 bp, Homo sapiens; identical to SEQ ID NO: 257551
  chr7:32416588-32416619
  hypo

SEQ ID NO: 435212 - DNA, 196 bp, Homo sapiens; identical to SEQ ID NO: 211482
  chr7:32630925-32631121
  hypo

SEQ ID NO: 435213 - DNA, 375 bp, Homo sapiens; identical to SEQ ID NO: 284966
  chr7:32768220-32768595
  hypo

SEQ ID NO: 435214 - DNA, 32 bp, Homo sapiens; identical to SEQ ID NO: 211487
  chr7:33026795-33026827
  hypo

SEQ ID NO: 435215 - DNA, 186 bp, Homo sapiens; identical to SEQ ID NO: 211488
  chr7:33139663-33139849
  hypo

SEQ ID NO: 435216 - DNA, 207 bp, Homo sapiens; identical to SEQ ID NO: 257556
  chr7:33542772-33542979
  hypo

SEQ ID NO: 435217 - DNA, 73 bp, Homo sapiens; identical to SEQ ID NO: 307572
  chr7:33725730-33725803
  hypo

SEQ ID NO: 435218 - DNA, 79 bp, Homo sapiens; identical to SEQ ID NO: 307573
  chr7:33725938-33726017
  hypo

SEQ ID NO: 435219 - DNA, 42 bp, Homo sapiens; identical to SEQ ID NO: 257558
  chr7:33737759-33737801
  hypo

SEQ ID NO: 435220 - DNA, 227 bp, Homo sapiens; identical to SEQ ID NO: 257559
  chr7:33877124-33877351
  hypo

SEQ ID NO: 435221 - DNA, 36 bp, Homo sapiens; identical to SEQ ID NO: 257560
  chr7:33899153-33899189
  hypo

SEQ ID NO: 435222 - DNA, 42 bp, Homo sapiens; identical to SEQ ID NO: 211489
  chr7:34034217-34034259
  hypo

SEQ ID NO: 435223 - DNA, 140 bp, Homo sapiens; identical to SEQ ID NO: 211490
  chr7:34349352-34349492
  hypo

SEQ ID NO: 435224 - DNA, 44 bp, Homo sapiens; identical to SEQ ID NO: 257563
  chr7:34526629-34526673
  hypo

SEQ ID NO: 435225 - DNA, 97 bp, Homo sapiens; identical to SEQ ID NO: 211491
  chr7:35042666-35042763
  hypo

SEQ ID NO: 435226 - DNA, 31 bp, Homo sapiens; identical to SEQ ID NO: 257565
  chr7:35066801-35066832
  hypo

SEQ ID NO: 435227 - DNA, 36 bp, Homo sapiens; identical to SEQ ID NO: 211492
  chr7:35190412-35190448
  hypo

SEQ ID NO: 435228 - DNA, 115 bp, Homo sapiens; identical to SEQ ID NO: 307583
  chr7:35349991-35350106
  hypo

SEQ ID NO: 435229 - DNA, 41 bp, Homo sapiens; identical to SEQ ID NO: 257569
  chr7:35994751-35994792
  hypo

SEQ ID NO: 435230 - DNA, 133 bp, Homo sapiens; identical to SEQ ID NO: 257570
  chr7:36008765-36008898
  hypo

SEQ ID NO: 435231 - DNA, 41 bp, Homo sapiens; identical to SEQ ID NO: 257572
  chr7:36134137-36134178
  hypo

SEQ ID NO: 435232 - DNA, 41 bp, Homo sapiens; identical to SEQ ID NO: 257573
  chr7:36134208-36134249
  hypo

SEQ ID NO: 435233 - DNA, 1059 bp, Homo sapiens; identical to SEQ ID NO: 284978
  chr7:36192233-36193292
  hypo

SEQ ID NO: 435234 - DNA, 34 bp, Homo sapiens; identical to SEQ ID NO: 257575
  chr7:36343958-36343992
  hypo

SEQ ID NO: 435235 - DNA, 35 bp, Homo sapiens; identical to SEQ ID NO: 257576
  chr7:36349959-36349994
  hypo

SEQ ID NO: 435236 - DNA, 43 bp, Homo sapiens; identical to SEQ ID NO: 257579
  chr7:36823504-36823547
  hypo

SEQ ID NO: 435237 - DNA, 240 bp, Homo sapiens; identical to SEQ ID NO: 257580
  chr7:36825465-36825705
  hypo

SEQ ID NO: 435238 - DNA, 109 bp, Homo sapiens; identical to SEQ ID NO: 257581
  chr7:36836027-36836136
  hypo

SEQ ID NO: 435239 - DNA, 177 bp, Homo sapiens; identical to SEQ ID NO: 257583
  chr7:36901365-36901542
  hypo

SEQ ID NO: 435240 - DNA, 45 bp, Homo sapiens; identical to SEQ ID NO: 257584
  chr7:36941501-36941546
  hypo

SEQ ID NO: 435241 - DNA, 54 bp, Homo sapiens; identical to SEQ ID NO: 257585
  chr7:36985067-36985121
  hypo

SEQ ID NO: 435242 - DNA, 104 bp, Homo sapiens; identical to SEQ ID NO: 211497
  chr7:37250876-37250980
  hypo

SEQ ID NO: 435243 - DNA, 72 bp, Homo sapiens; identical to SEQ ID NO: 211498
  chr7:37264539-37264611
  hypo

SEQ ID NO: 435244 - DNA, 332 bp, Homo sapiens; identical to SEQ ID NO: 257589
  chr7:37458222-37458554
  hypo

SEQ ID NO: 435245 - DNA, 142 bp, Homo sapiens; identical to SEQ ID NO: 257590
  chr7:38089576-38089718
  hypo

SEQ ID NO: 435246 - DNA, 275 bp, Homo sapiens; identical to SEQ ID NO: 257592
  chr7:38726298-38726573
  hypo

SEQ ID NO: 435247 - DNA, 66 bp, Homo sapiens; identical to SEQ ID NO: 257593
  chr7:38787793-38787859
  hypo

SEQ ID NO: 435248 - DNA, 132 bp, Homo sapiens; identical to SEQ ID NO: 257594
  chr7:38943827-38943959
  hypo

SEQ ID NO: 435249 - DNA, 131 bp, Homo sapiens; identical to SEQ ID NO: 257595
  chr7:38974187-38974318
  hypo

SEQ ID NO: 435250 - DNA, 37 bp, Homo sapiens; identical to SEQ ID NO: 257597
  chr7:39942871-39942908
  hypo

SEQ ID NO: 435251 - DNA, 166 bp, Homo sapiens; identical to SEQ ID NO: 257598
  chr7:40027212-40027378
  hypo

SEQ ID NO: 435252 - DNA, 32 bp, Homo sapiens; identical to SEQ ID NO: 257599
  chr7:40156753-40156785
  hypo

SEQ ID NO: 435253 - DNA, 60 bp, Homo sapiens; identical to SEQ ID NO: 307616
  chr7:40157025-40157085
  hypo

SEQ ID NO: 435254 - DNA, 106 bp, Homo sapiens; identical to SEQ ID NO: 211502
  chr7:40766265-40766371
  hypo

SEQ ID NO: 435255 - DNA, 38 bp, Homo sapiens; identical to SEQ ID NO: 257602
  chr7:40840156-40840194
  hypo

SEQ ID NO: 435256 - DNA, 189 bp, Homo sapiens; identical to SEQ ID NO: 307619
  chr7:40938943-40939132
  hypo

SEQ ID NO: 435257 - DNA, 145 bp, Homo sapiens; identical to SEQ ID NO: 257604
  chr7:40939651-40939796
  hypo

SEQ ID NO: 435258 - DNA, 299 bp, Homo sapiens; identical to SEQ ID NO: 257605
  chr7:41176259-41176558
  hypo

SEQ ID NO: 435259 - DNA, 153 bp, Homo sapiens; identical to SEQ ID NO: 257606
  chr7:41764777-41764930
  hypo

SEQ ID NO: 435260 - DNA, 36 bp, Homo sapiens; identical to SEQ ID NO: 211503
  chr7:41840523-41840559
  hypo

SEQ ID NO: 435261 - DNA, 517 bp, Homo sapiens; identical to SEQ ID NO: 211504
  chr7:42004852-42005369
  hypo

SEQ ID NO: 435262 - DNA, 689 bp, Homo sapiens; identical to SEQ ID NO: 211505
  chr7:42005528-42006217
  hypo

SEQ ID NO: 435263 - DNA, 57 bp, Homo sapiens; identical to SEQ ID NO: 257609
  chr7:42142438-42142495
  hypo

SEQ ID NO: 435264 - DNA, 31 bp, Homo sapiens; identical to SEQ ID NO: 211506
  chr7:42169114-42169145
  hypo

SEQ ID NO: 435265 - DNA, 31 bp, Homo sapiens; identical to SEQ ID NO: 211507
  chr7:42169385-42169416
  hypo

SEQ ID NO: 435266 - DNA, 42 bp, Homo sapiens; identical to SEQ ID NO: 257613
  chr7:42353124-42353166
  hypo

SEQ ID NO: 435267 - DNA, 143 bp, Homo sapiens; identical to SEQ ID NO: 257614
  chr7:42440833-42440976
  hypo

SEQ ID NO: 435268 - DNA, 178 bp, Homo sapiens; identical to SEQ ID NO: 257615
  chr7:42812190-42812368
  hypo

SEQ ID NO: 435269 - DNA, 144 bp, Homo sapiens; identical to SEQ ID NO: 257619
  chr7:43237314-43237458
  hypo

SEQ ID NO: 435270 - DNA, 32 bp, Homo sapiens; identical to SEQ ID NO: 257621
  chr7:43279920-43279952
  hypo

SEQ ID NO: 435271 - DNA, 77 bp, Homo sapiens; identical to SEQ ID NO: 257622
  chr7:43313712-43313789
  hypo

SEQ ID NO: 435272 - DNA, 32 bp, Homo sapiens; identical to SEQ ID NO: 257623
  chr7:43409045-43409077
  hypo

SEQ ID NO: 435273 - DNA, 93 bp, Homo sapiens; identical to SEQ ID NO: 257624
  chr7:43594218-43594311
  hypo

SEQ ID NO: 435274 - DNA, 185 bp, Homo sapiens; identical to SEQ ID NO: 257626
  chr7:43827245-43827430
  hypo

SEQ ID NO: 435275 - DNA, 36 bp, Homo sapiens; identical to SEQ ID NO: 257631
  chr7:44250466-44250502
  hypo

SEQ ID NO: 435276 - DNA, 322 bp, Homo sapiens; identical to SEQ ID NO: 257632
  chr7:44256925-44257247
  hypo

SEQ ID NO: 435277 - DNA, 95 bp, Homo sapiens; identical to SEQ ID NO: 307647
  chr7:44258654-44258749
  hypo

SEQ ID NO: 435278 - DNA, 91 bp, Homo sapiens; identical to SEQ ID NO: 257634
  chr7:44279651-44279742
  hypo

SEQ ID NO: 435279 - DNA, 37 bp, Homo sapiens; identical to SEQ ID NO: 257635
  chr7:44301708-44301745
  hypo

SEQ ID NO: 435280 - DNA, 99 bp, Homo sapiens; identical to SEQ ID NO: 257636
  chr7:44311757-44311856
  hypo

SEQ ID NO: 435281 - DNA, 144 bp, Homo sapiens; identical to SEQ ID NO: 211511
  chr7:44582326-44582470
  hypo

SEQ ID NO: 435282 - DNA, 272 bp, Homo sapiens; identical to SEQ ID NO: 307655
  chr7:44582529-44582801
  hypo

SEQ ID NO: 435283 - DNA, 39 bp, Homo sapiens; identical to SEQ ID NO: 211512
  chr7:44583394-44583433
  hypo

SEQ ID NO: 435284 - DNA, 66 bp, Homo sapiens; identical to SEQ ID NO: 211514
  chr7:44612063-44612129
  hypo

SEQ ID NO: 435285 - DNA, 31 bp, Homo sapiens; identical to SEQ ID NO: 211515
  chr7:44740322-44740353
  hypo

SEQ ID NO: 435286 - DNA, 148 bp, Homo sapiens; identical to SEQ ID NO: 257646
  chr7:44750444-44750592
  hypo

SEQ ID NO: 435287 - DNA, 428 bp, Homo sapiens; identical to SEQ ID NO: 307664
  chr7:44801215-44801643
  hypo

SEQ ID NO: 435288 - DNA, 32 bp, Homo sapiens; identical to SEQ ID NO: 257649
  chr7:44844994-44845026
  hypo

SEQ ID NO: 435289 - DNA, 96 bp, Homo sapiens; identical to SEQ ID NO: 257650
  chr7:44912167-44912263
  hypo

SEQ ID NO: 435290 - DNA, 623 bp, Homo sapiens; identical to SEQ ID NO: 223093
  chr7:45026005-45026628
  hypo

SEQ ID NO: 435291 - DNA, 138 bp, Homo sapiens; identical to SEQ ID NO: 257653
  chr7:45115574-45115712
  hypo

SEQ ID NO: 435292 - DNA, 166 bp, Homo sapiens; identical to SEQ ID NO: 211522
  chr7:45125709-45125875
  hypo

SEQ ID NO: 435293 - DNA, 103 bp, Homo sapiens; identical to SEQ ID NO: 257656
  chr7:45252688-45252791
  hypo

SEQ ID NO: 435294 - DNA, 153 bp, Homo sapiens; identical to SEQ ID NO: 211525
  chr7:45262245-45262398
  hypo

SEQ ID NO: 435295 - DNA, 96 bp, Homo sapiens; identical to SEQ ID NO: 257658
  chr7:45431198-45431294
  hypo

SEQ ID NO: 435296 - DNA, 240 bp, Homo sapiens; identical to SEQ ID NO: 257659
  chr7:45439018-45439258
  hypo

SEQ ID NO: 435297 - DNA, 180 bp, Homo sapiens; identical to SEQ ID NO: 257660
  chr7:45632339-45632519
  hypo

SEQ ID NO: 435298 - DNA, 61 bp, Homo sapiens; identical to SEQ ID NO: 211526
  chr7:45743036-45743097
  hypo

SEQ ID NO: 435299 - DNA, 45 bp, Homo sapiens; identical to SEQ ID NO: 257662
  chr7:45809383-45809428
  hypo

SEQ ID NO: 435300 - DNA, 147 bp, Homo sapiens; identical to SEQ ID NO: 211527
  chr7:47088919-47089066
  hypo

SEQ ID NO: 435301 - DNA, 153 bp, Homo sapiens; identical to SEQ ID NO: 223096
  chr7:47293661-47293814
  hypo

SEQ ID NO: 435302 - DNA, 173 bp, Homo sapiens; identical to SEQ ID NO: 200965
  chr7:47294081-47294254
  hypo

SEQ ID NO: 435303 - DNA, 282 bp, Homo sapiens; identical to SEQ ID NO: 257664
  chr7:47338286-47338568
  hypo

SEQ ID NO: 435304 - DNA, 84 bp, Homo sapiens; identical to SEQ ID NO: 257665
  chr7:47340361-47340445
  hypo

SEQ ID NO: 435305 - DNA, 319 bp, Homo sapiens; identical to SEQ ID NO: 211529
  chr7:47343228-47343547
  hypo

SEQ ID NO: 435306 - DNA, 44 bp, Homo sapiens; identical to SEQ ID NO: 257668
  chr7:47384308-47384352
  hypo

SEQ ID NO: 435307 - DNA, 255 bp, Homo sapiens; identical to SEQ ID NO: 257670
  chr7:47410354-47410609
  hypo

SEQ ID NO: 435308 - DNA, 428 bp, Homo sapiens; identical to SEQ ID NO: 211530
  chr7:47440318-47440746
  hypo

SEQ ID NO: 435309 - DNA, 87 bp, Homo sapiens; identical to SEQ ID NO: 257673
  chr7:47446856-47446943
  hypo

SEQ ID NO: 435310 - DNA, 149 bp, Homo sapiens; identical to SEQ ID NO: 257676
  chr7:47544599-47544748
  hypo

SEQ ID NO: 435311 - DNA, 71 bp, Homo sapiens; identical to SEQ ID NO: 211533
  chr7:47581607-47581678
  hypo

SEQ ID NO: 435312 - DNA, 35 bp, Homo sapiens; identical to SEQ ID NO: 257678
  chr7:47591522-47591557
  hypo

SEQ ID NO: 435313 - DNA, 69 bp, Homo sapiens; identical to SEQ ID NO: 257680
  chr7:47612934-47613003
  hypo

SEQ ID NO: 435314 - DNA, 38 bp, Homo sapiens; identical to SEQ ID NO: 211535
  chr7:47615110-47615148
  hypo

SEQ ID NO: 435315 - DNA, 31 bp, Homo sapiens; identical to SEQ ID NO: 257682
  chr7:47628646-47628677
  hypo

SEQ ID NO: 435316 - DNA, 151 bp, Homo sapiens; identical to SEQ ID NO: 211537
  chr7:47679854-47680005
  hypo

SEQ ID NO: 435317 - DNA, 62 bp, Homo sapiens; identical to SEQ ID NO: 257685
  chr7:47711089-47711151
  hypo

SEQ ID NO: 435318 - DNA, 33 bp, Homo sapiens; identical to SEQ ID NO: 257686
  chr7:48093728-48093761
  hypo

SEQ ID NO: 435319 - DNA, 262 bp, Homo sapiens; identical to SEQ ID NO: 200969
  chr7:48127995-48128257
  hypo

SEQ ID NO: 435320 - DNA, 31 bp, Homo sapiens; identical to SEQ ID NO: 257688
  chr7:48212093-48212124
  hypo

SEQ ID NO: 435321 - DNA, 49 bp, Homo sapiens; identical to SEQ ID NO: 211539
  chr7:48964017-48964066
  hypo

SEQ ID NO: 435322 - DNA, 51 bp, Homo sapiens; identical to SEQ ID NO: 257691
  chr7:49842430-49842481
  hypo

SEQ ID NO: 435323 - DNA, 95 bp, Homo sapiens; identical to SEQ ID NO: 257692
  chr7:50221917-50222012
  hypo

SEQ ID NO: 435324 - DNA, 349 bp, Homo sapiens; identical to SEQ ID NO: 307715
  chr7:50341935-50342284
  hypo

SEQ ID NO: 435325 - DNA, 348 bp, Homo sapiens; identical to SEQ ID NO: 307716
  chr7:50342314-50342662
  hypo

SEQ ID NO: 435326 - DNA, 153 bp, Homo sapiens; identical to SEQ ID NO: 257698
  chr7:50415431-50415584
  hypo

SEQ ID NO: 435327 - DNA, 180 bp, Homo sapiens; identical to SEQ ID NO: 257700
  chr7:50443887-50444067
  hypo

SEQ ID NO: 435328 - DNA, 56 bp, Homo sapiens; identical to SEQ ID NO: 211543
  chr7:50447754-50447810
  hypo

SEQ ID NO: 435329 - DNA, 167 bp, Homo sapiens; identical to SEQ ID NO: 257702
  chr7:50450251-50450418
  hypo

SEQ ID NO: 435330 - DNA, 108 bp, Homo sapiens; identical to SEQ ID NO: 257703
  chr7:50460166-50460274
  hypo

SEQ ID NO: 435331 - DNA, 103 bp, Homo sapiens; identical to SEQ ID NO: 211544
  chr7:50514846-50514949
  hypo

SEQ ID NO: 435332 - DNA, 43 bp, Homo sapiens; identical to SEQ ID NO: 257705
  chr7:50537914-50537957
  hypo

SEQ ID NO: 435333 - DNA, 250 bp, Homo sapiens; identical to SEQ ID NO: 257707
  chr7:50611649-50611899
  hypo

SEQ ID NO: 435334 - DNA, 355 bp, Homo sapiens; identical to SEQ ID NO: 257708
  chr7:50654699-50655054
  hypo

SEQ ID NO: 435335 - DNA, 112 bp, Homo sapiens; identical to SEQ ID NO: 211549
  chr7:50658396-50658508
  hypo

SEQ ID NO: 435336 - DNA, 103 bp, Homo sapiens; identical to SEQ ID NO: 211550
  chr7:50659743-50659846
  hypo

SEQ ID NO: 435337 - DNA, 89 bp, Homo sapiens; identical to SEQ ID NO: 257712
  chr7:50667300-50667389
  hypo

SEQ ID NO: 435338 - DNA, 166 bp, Homo sapiens; identical to SEQ ID NO: 257714
  chr7:50695454-50695620
  hypo

SEQ ID NO: 435339 - DNA, 203 bp, Homo sapiens; identical to SEQ ID NO: 257715
  chr7:50709530-50709733
  hypo

SEQ ID NO: 435340 - DNA, 108 bp, Homo sapiens; identical to SEQ ID NO: 211553
  chr7:50720336-50720444
  hypo

SEQ ID NO: 435341 - DNA, 46 bp, Homo sapiens; identical to SEQ ID NO: 257718
  chr7:50734033-50734079
  hypo

SEQ ID NO: 435342 - DNA, 37 bp, Homo sapiens; identical to SEQ ID NO: 257719
  chr7:50740987-50741024
  hypo

SEQ ID NO: 435343 - DNA, 82 bp, Homo sapiens; identical to SEQ ID NO: 257720
  chr7:50769974-50770056
  hypo

SEQ ID NO: 435344 - DNA, 257 bp, Homo sapiens; identical to SEQ ID NO: 257721
  chr7:50801206-50801463
  hypo

SEQ ID NO: 435345 - DNA, 210 bp, Homo sapiens; identical to SEQ ID NO: 257722
  chr7:50816099-50816309
  hypo

SEQ ID NO: 435346 - DNA, 81 bp, Homo sapiens; identical to SEQ ID NO: 257723
  chr7:50821773-50821854
  hypo

SEQ ID NO: 435347 - DNA, 77 bp, Homo sapiens
  chr7:50823230-50823307
  hypo
gtgacccaggaggcaggcagcatcacccccaccatatggaagggcacaaggagaccagtgaggcccagaggcatgtc

SEQ ID NO: 435348 - DNA, 172 bp, Homo sapiens; identical to SEQ ID NO: 257725
  chr7:50853192-50853364
  hypo

SEQ ID NO: 435349 - DNA, 204 bp, Homo sapiens; identical to SEQ ID NO: 257726
  chr7:50876168-50876372
  hypo

SEQ ID NO: 435350 - DNA, 42 bp, Homo sapiens; identical to SEQ ID NO: 257727
  chr7:50905759-50905801
  hypo

SEQ ID NO: 435351 - DNA, 191 bp, Homo sapiens; identical to SEQ ID NO: 211554
  chr7:50935531-50935722
  hypo

SEQ ID NO: 435352 - DNA, 159 bp, Homo sapiens; identical to SEQ ID NO: 211555
  chr7:51083468-51083627
  hypo

SEQ ID NO: 435353 - DNA, 184 bp, Homo sapiens; identical to SEQ ID NO: 211557
  chr7:51098965-51099149
  hypo

SEQ ID NO: 435354 - DNA, 40 bp, Homo sapiens; identical to SEQ ID NO: 257732
  chr7:51111296-51111336
  hypo

SEQ ID NO: 435355 - DNA, 125 bp, Homo sapiens; identical to SEQ ID NO: 257733
  chr7:51113097-51113222
  hypo

SEQ ID NO: 435356 - DNA, 167 bp, Homo sapiens; identical to SEQ ID NO: 257734
  chr7:51126558-51126725
  hypo

SEQ ID NO: 435357 - DNA, 173 bp, Homo sapiens; identical to SEQ ID NO: 257735
  chr7:51130438-51130611
  hypo

SEQ ID NO: 435358 - DNA, 69 bp, Homo sapiens; identical to SEQ ID NO: 257736
  chr7:51323448-51323517
  hypo

SEQ ID NO: 435359 - DNA, 42 bp, Homo sapiens; identical to SEQ ID NO: 257737
  chr7:51374681-51374723
  hypo

SEQ ID NO: 435360 - DNA, 94 bp, Homo sapiens; identical to SEQ ID NO: 257740
  chr7:53071290-53071384
  hypo

SEQ ID NO: 435361 - DNA, 149 bp, Homo sapiens; identical to SEQ ID NO: 257742
  chr7:53155253-53155402
  hypo

SEQ ID NO: 435362 - DNA, 42 bp, Homo sapiens; identical to SEQ ID NO: 257744
  chr7:54332183-54332225
  hypo

SEQ ID NO: 435363 - DNA, 80 bp, Homo sapiens; identical to SEQ ID NO: 257745
  chr7:54842471-54842551
  hypo

SEQ ID NO: 435364 - DNA, 32 bp, Homo sapiens; identical to SEQ ID NO: 257747
  chr7:55147017-55147049
  hypo

SEQ ID NO: 435365 - DNA, 50 bp, Homo sapiens; identical to SEQ ID NO: 211560
  chr7:55212336-55212386
  hypo

SEQ ID NO: 435366 - DNA, 60 bp, Homo sapiens; identical to SEQ ID NO: 257750
  chr7:55312949-55313009
  hypo

SEQ ID NO: 435367 - DNA, 172 bp, Homo sapiens; identical to SEQ ID NO: 257751
  chr7:55323877-55324049
  hypo

SEQ ID NO: 435368 - DNA, 226 bp, Homo sapiens; identical to SEQ ID NO: 257752
  chr7:55464081-55464307
  hypo

SEQ ID NO: 435369 - DNA, 61 bp, Homo sapiens; identical to SEQ ID NO: 257753
  chr7:55468907-55468968
  hypo

SEQ ID NO: 435370 - DNA, 216 bp, Homo sapiens; identical to SEQ ID NO: 257754
  chr7:55473623-55473839
  hypo

SEQ ID NO: 435371 - DNA, 97 bp, Homo sapiens; identical to SEQ ID NO: 257755
  chr7:55495726-55495823
  hypo

SEQ ID NO: 435372 - DNA, 176 bp, Homo sapiens; identical to SEQ ID NO: 257757
  chr7:55540710-55540886
  hypo

SEQ ID NO: 435373 - DNA, 116 bp, Homo sapiens; identical to SEQ ID NO: 257758
  chr7:55541146-55541262
  hypo

SEQ ID NO: 435374 - DNA, 206 bp, Homo sapiens; identical to SEQ ID NO: 257759
  chr7:55541705-55541911
  hypo

SEQ ID NO: 435375 - DNA, 205 bp, Homo sapiens; identical to SEQ ID NO: 257760
  chr7:55542790-55542995
  hypo

SEQ ID NO: 435376 - DNA, 229 bp, Homo sapiens; identical to SEQ ID NO: 211562
  chr7:55552439-55552668
  hypo

SEQ ID NO: 435377 - DNA, 68 bp, Homo sapiens; identical to SEQ ID NO: 257763
  chr7:55554250-55554318
  hypo

SEQ ID NO: 435378 - DNA, 223 bp, Homo sapiens; identical to SEQ ID NO: 211564
  chr7:55557173-55557396
  hypo

SEQ ID NO: 435379 - DNA, 51 bp, Homo sapiens; identical to SEQ ID NO: 257765
  chr7:55570141-55570192
  hypo

SEQ ID NO: 435380 - DNA, 42 bp, Homo sapiens; identical to SEQ ID NO: 211565
  chr7:55585937-55585979
  hypo

SEQ ID NO: 435381 - DNA, 137 bp, Homo sapiens; identical to SEQ ID NO: 257768
  chr7:55588552-55588689
  hypo

SEQ ID NO: 435382 - DNA, 42 bp, Homo sapiens; identical to SEQ ID NO: 257769
  chr7:55589957-55589999
  hypo

SEQ ID NO: 435383 - DNA, 115 bp, Homo sapiens; identical to SEQ ID NO: 200983
  chr7:55593336-55593451
  hypo

SEQ ID NO: 435384 - DNA, 65 bp, Homo sapiens; identical to SEQ ID NO: 211567
  chr7:55619129-55619194
  hypo

SEQ ID NO: 435385 - DNA, 34 bp, Homo sapiens; identical to SEQ ID NO: 257771
  chr7:55638346-55638380
  hypo

SEQ ID NO: 435386 - DNA, 145 bp, Homo sapiens; identical to SEQ ID NO: 257772
  chr7:55923002-55923147
  hypo

SEQ ID NO: 435387 - DNA, 82 bp, Homo sapiens; identical to SEQ ID NO: 257773
  chr7:55960568-55960650
  hypo

SEQ ID NO: 435388 - DNA, 388 bp, Homo sapiens; identical to SEQ ID NO: 257775
  chr7:56030889-56031277
  hypo

SEQ ID NO: 435389 - DNA, 76 bp, Homo sapiens; identical to SEQ ID NO: 211568
  chr7:56031537-56031613
  hypo

SEQ ID NO: 435390 - DNA, 90 bp, Homo sapiens; identical to SEQ ID NO: 257780
  chr7:56078752-56078842
  hypo

SEQ ID NO: 435391 - DNA, 135 bp, Homo sapiens; identical to SEQ ID NO: 307801
  chr7:56144536-56144671
  hypo

SEQ ID NO: 435392 - DNA, 120 bp, Homo sapiens; identical to SEQ ID NO: 257782
  chr7:56332924-56333044
  hypo

SEQ ID NO: 435393 - DNA, 32 bp, Homo sapiens; identical to SEQ ID NO: 257783
  chr7:56362765-56362797
  hypo

SEQ ID NO: 435394 - DNA, 120 bp, Homo sapiens; identical to SEQ ID NO: 257784
  chr7:56363037-56363157
  hypo

SEQ ID NO: 435395 - DNA, 104 bp, Homo sapiens; identical to SEQ ID NO: 211570
  chr7:56636909-56637013
  hypo

SEQ ID NO: 435396 - DNA, 155 bp, Homo sapiens; identical to SEQ ID NO: 257786
  chr7:56665470-56665625
  hypo

SEQ ID NO: 435397 - DNA, 141 bp, Homo sapiens; identical to SEQ ID NO: 257791
  chr7:57711530-57711671
  hypo

SEQ ID NO: 435398 - DNA, 39 bp, Homo sapiens; identical to SEQ ID NO: 257792
  chr7:57712631-57712670
  hypo

SEQ ID NO: 435399 - DNA, 68 bp, Homo sapiens; identical to SEQ ID NO: 211575
  chr7:57878613-57878681
  hypo

SEQ ID NO: 435400 - DNA, 64 bp, Homo sapiens; identical to SEQ ID NO: 285055
  chr7:57928159-57928223
  hypo

SEQ ID NO: 435401 - DNA, 80 bp, Homo sapiens; identical to SEQ ID NO: 285056
  chr7:57928240-57928320
  hypo

SEQ ID NO: 435402 - DNA, 149 bp, Homo sapiens; identical to SEQ ID NO: 257794
  chr7:63027890-63028039
  hypo

SEQ ID NO: 435403 - DNA, 149 bp, Homo sapiens; identical to SEQ ID NO: 257795
  chr7:63392780-63392929
  hypo

SEQ ID NO: 435404 - DNA, 35 bp, Homo sapiens; identical to SEQ ID NO: 211576
  chr7:63423514-63423549
  hypo

SEQ ID NO: 435405 - DNA, 34 bp, Homo sapiens; identical to SEQ ID NO: 211577
  chr7:63423789-63423823
  hypo

SEQ ID NO: 435406 - DNA, 44 bp, Homo sapiens; identical to SEQ ID NO: 211581
  chr7:63667110-63667154
  hypo

SEQ ID NO: 435407 - DNA, 169 bp, Homo sapiens; identical to SEQ ID NO: 257802
  chr7:63757331-63757500
  hypo

SEQ ID NO: 435408 - DNA, 103 bp, Homo sapiens; identical to SEQ ID NO: 211582
  chr7:63864996-63865099
  hypo

SEQ ID NO: 435409 - DNA, 42 bp, Homo sapiens; identical to SEQ ID NO: 257804
  chr7:63867873-63867915
  hypo

SEQ ID NO: 435410 - DNA, 179 bp, Homo sapiens; identical to SEQ ID NO: 211584
  chr7:64330555-64330734
  hypo

SEQ ID NO: 435411 - DNA, 204 bp, Homo sapiens; identical to SEQ ID NO: 211585
  chr7:64330833-64331037
  hypo

SEQ ID NO: 435412 - DNA, 42 bp, Homo sapiens; identical to SEQ ID NO: 257808
  chr7:64336401-64336443
  hypo

SEQ ID NO: 435413 - DNA, 35 bp, Homo sapiens; identical to SEQ ID NO: 257810
  chr7:64358373-64358408
  hypo

SEQ ID NO: 435414 - DNA, 44 bp, Homo sapiens; identical to SEQ ID NO: 257811
  chr7:64358740-64358784
  hypo

SEQ ID NO: 435415 - DNA, 99 bp, Homo sapiens; identical to SEQ ID NO: 307839
  chr7:64450790-64450889
  hypo

SEQ ID NO: 435416 - DNA, 210 bp, Homo sapiens; identical to SEQ ID NO: 257814
  chr7:64459456-64459666
  hypo

SEQ ID NO: 435417 - DNA, 138 bp, Homo sapiens; identical to SEQ ID NO: 257815
  chr7:64478038-64478176
  hypo

SEQ ID NO: 435418 - DNA, 42 bp, Homo sapiens; identical to SEQ ID NO: 211590
  chr7:64851808-64851850
  hypo

SEQ ID NO: 435419 - DNA, 411 bp, Homo sapiens; identical to SEQ ID NO: 257818
  chr7:64895203-64895614
  hypo

SEQ ID NO: 435420 - DNA, 120 bp, Homo sapiens; identical to SEQ ID NO: 200991
  chr7:64974034-64974154
  hypo

SEQ ID NO: 435421 - DNA, 67 bp, Homo sapiens; identical to SEQ ID NO: 307847
  chr7:65441721-65441788
  hypo

SEQ ID NO: 435422 - DNA, 99 bp, Homo sapiens; identical to SEQ ID NO: 257820
  chr7:65442036-65442135
  hypo

SEQ ID NO: 435423 - DNA, 144 bp, Homo sapiens; identical to SEQ ID NO: 257821
  chr7:65474282-65474426
  hypo

SEQ ID NO: 435424 - DNA, 38 bp, Homo sapiens; identical to SEQ ID NO: 200996
  chr7:65541037-65541075
  hypo

SEQ ID NO: 435425 - DNA, 46 bp, Homo sapiens; identical to SEQ ID NO: 385809
  chr7:65562643-65562689
  hypo

SEQ ID NO: 435426 - DNA, 264 bp, Homo sapiens; identical to SEQ ID NO: 257824
  chr7:65611005-65611269
  hypo

SEQ ID NO: 435427 - DNA, 159 bp, Homo sapiens; identical to SEQ ID NO: 257825
  chr7:65647879-65648038
  hypo

SEQ ID NO: 435428 - DNA, 183 bp, Homo sapiens; identical to SEQ ID NO: 257826
  chr7:65841299-65841482
  hypo

SEQ ID NO: 435429 - DNA, 86 bp, Homo sapiens; identical to SEQ ID NO: 307858
  chr7:65879509-65879595
  hypo

SEQ ID NO: 435430 - DNA, 61 bp, Homo sapiens; identical to SEQ ID NO: 257829
  chr7:65938576-65938637
  hypo

SEQ ID NO: 435431 - DNA, 204 bp, Homo sapiens; identical to SEQ ID NO: 211596
  chr7:65939523-65939727
  hypo

SEQ ID NO: 435432 - DNA, 36 bp, Homo sapiens; identical to SEQ ID NO: 257832
  chr7:66064299-66064335
  hypo

SEQ ID NO: 435433 - DNA, 40 bp, Homo sapiens; identical to SEQ ID NO: 257833
  chr7:66076556-66076596
  hypo

SEQ ID NO: 435434 - DNA, 137 bp, Homo sapiens; identical to SEQ ID NO: 200998
  chr7:66094049-66094186
  hypo

SEQ ID NO: 435435 - DNA, 160 bp, Homo sapiens; identical to SEQ ID NO: 307864
  chr7:66105998-66106158
  hypo

SEQ ID NO: 435436 - DNA, 38 bp, Homo sapiens; identical to SEQ ID NO: 257835
  chr7:66150978-66151016
  hypo

SEQ ID NO: 435437 - DNA, 188 bp, Homo sapiens; identical to SEQ ID NO: 211598
  chr7:66265794-66265982
  hypo

SEQ ID NO: 435438 - DNA, 129 bp, Homo sapiens; identical to SEQ ID NO: 211600
  chr7:66369062-66369191
  hypo

SEQ ID NO: 435439 - DNA, 210 bp, Homo sapiens; identical to SEQ ID NO: 257840
  chr7:66423291-66423501
  hypo

SEQ ID NO: 435440 - DNA, 696 bp, Homo sapiens; identical to SEQ ID NO: 257841
  chr7:66423830-66424526
  hypo

SEQ ID NO: 435441 - DNA, 36 bp, Homo sapiens; identical to SEQ ID NO: 211601
  chr7:66626984-66627020
  hypo

SEQ ID NO: 435442 - DNA, 31 bp, Homo sapiens; identical to SEQ ID NO: 257843
  chr7:66694225-66694256
  hypo

SEQ ID NO: 435443 - DNA, 88 bp, Homo sapiens; identical to SEQ ID NO: 211602
  chr7:66766508-66766596
  hypo

SEQ ID NO: 435444 - DNA, 180 bp, Homo sapiens; identical to SEQ ID NO: 257845
  chr7:66847453-66847633
  hypo

SEQ ID NO: 435445 - DNA, 141 bp, Homo sapiens; identical to SEQ ID NO: 257846
  chr7:66880056-66880197
  hypo

SEQ ID NO: 435446 - DNA, 140 bp, Homo sapiens; identical to SEQ ID NO: 257847
  chr7:66960265-66960405
  hypo

SEQ ID NO: 435447 - DNA, 241 bp, Homo sapiens; identical to SEQ ID NO: 211603
  chr7:67006548-67006789
  hypo

SEQ ID NO: 435448 - DNA, 32 bp, Homo sapiens; identical to SEQ ID NO: 211604
  chr7:67027848-67027880
  hypo

SEQ ID NO: 435449 - DNA, 170 bp, Homo sapiens; identical to SEQ ID NO: 257850
  chr7:67067246-67067416
  hypo

SEQ ID NO: 435450 - DNA, 50 bp, Homo sapiens; identical to SEQ ID NO: 257851
  chr7:67093767-67093817
  hypo

SEQ ID NO: 435451 - DNA, 80 bp, Homo sapiens; identical to SEQ ID NO: 211605
  chr7:67103482-67103562
  hypo

SEQ ID NO: 435452 - DNA, 133 bp, Homo sapiens; identical to SEQ ID NO: 257853
  chr7:67113980-67114113
  hypo

SEQ ID NO: 435453 - DNA, 36 bp, Homo sapiens; identical to SEQ ID NO: 257854
  chr7:67180647-67180683
  hypo

SEQ ID NO: 435454 - DNA, 110 bp, Homo sapiens; identical to SEQ ID NO: 257855
  chr7:67202219-67202329
  hypo

SEQ ID NO: 435455 - DNA, 32 bp, Homo sapiens; identical to SEQ ID NO: 257856
  chr7:67252810-67252842
  hypo

SEQ ID NO: 435456 - DNA, 42 bp, Homo sapiens; identical to SEQ ID NO: 257857
  chr7:67274834-67274876
  hypo

SEQ ID NO: 435457 - DNA, 98 bp, Homo sapiens; identical to SEQ ID NO: 257858
  chr7:67318539-67318637
  hypo

SEQ ID NO: 435458 - DNA, 42 bp, Homo sapiens; identical to SEQ ID NO: 257859
  chr7:67322985-67323027
  hypo

SEQ ID NO: 435459 - DNA, 109 bp, Homo sapiens; identical to SEQ ID NO: 257860
  chr7:67323057-67323166
  hypo

SEQ ID NO: 435460 - DNA, 91 bp, Homo sapiens; identical to SEQ ID NO: 257862
  chr7:67355827-67355918
  hypo

SEQ ID NO: 435461 - DNA, 98 bp, Homo sapiens; identical to SEQ ID NO: 211606
  chr7:67375596-67375694
  hypo

SEQ ID NO: 435462 - DNA, 33 bp, Homo sapiens; identical to SEQ ID NO: 257864
  chr7:67388760-67388793
  hypo

SEQ ID NO: 435463 - DNA, 420 bp, Homo sapiens; identical to SEQ ID NO: 257865
  chr7:67405588-67406008
  hypo

SEQ ID NO: 435464 - DNA, 90 bp, Homo sapiens; identical to SEQ ID NO: 257866
  chr7:67417184-67417274
  hypo

SEQ ID NO: 435465 - DNA, 50 bp, Homo sapiens; identical to SEQ ID NO: 257867
  chr7:67424155-67424205
  hypo

SEQ ID NO: 435466 - DNA, 42 bp, Homo sapiens; identical to SEQ ID NO: 257868
  chr7:67451827-67451869
  hypo

SEQ ID NO: 435467 - DNA, 162 bp, Homo sapiens; identical to SEQ ID NO: 257869
  chr7:67482477-67482639
  hypo

SEQ ID NO: 435468 - DNA, 39 bp, Homo sapiens; identical to SEQ ID NO: 257870
  chr7:67534656-67534695
  hypo

SEQ ID NO: 435469 - DNA, 115 bp, Homo sapiens; identical to SEQ ID NO: 257871
  chr7:67540136-67540251
  hypo

SEQ ID NO: 435470 - DNA, 140 bp, Homo sapiens; identical to SEQ ID NO: 257872
  chr7:67563070-67563210
  hypo

SEQ ID NO: 435471 - DNA, 34 bp, Homo sapiens; identical to SEQ ID NO: 257873
  chr7:67579760-67579794
  hypo

SEQ ID NO: 435472 - DNA, 35 bp, Homo sapiens; identical to SEQ ID NO: 257874
  chr7:67637855-67637890
  hypo

SEQ ID NO: 435473 - DNA, 42 bp, Homo sapiens; identical to SEQ ID NO: 257875
  chr7:67642884-67642926
  hypo

SEQ ID NO: 435474 - DNA, 31 bp, Homo sapiens; identical to SEQ ID NO: 257877
  chr7:67659057-67659088
  hypo

SEQ ID NO: 435475 - DNA, 91 bp, Homo sapiens; identical to SEQ ID NO: 257878
  chr7:67659328-67659419
  hypo

SEQ ID NO: 435476 - DNA, 200 bp, Homo sapiens; identical to SEQ ID NO: 257880
  chr7:67737923-67738123
  hypo

SEQ ID NO: 435477 - DNA, 44 bp, Homo sapiens; identical to SEQ ID NO: 211608
  chr7:67812980-67813024
  hypo

SEQ ID NO: 435478 - DNA, 176 bp, Homo sapiens; identical to SEQ ID NO: 257882
  chr7:67858437-67858613
  hypo

SEQ ID NO: 435479 - DNA, 283 bp, Homo sapiens; identical to SEQ ID NO: 257884
  chr7:68003149-68003432
  hypo

SEQ ID NO: 435480 - DNA, 81 bp, Homo sapiens; identical to SEQ ID NO: 257885
  chr7:68008895-68008976
  hypo

SEQ ID NO: 435481 - DNA, 90 bp, Homo sapiens; identical to SEQ ID NO: 257886
  chr7:68058866-68058956
  hypo

SEQ ID NO: 435482 - DNA, 130 bp, Homo sapiens; identical to SEQ ID NO: 257887
  chr7:68111546-68111676
  hypo

SEQ ID NO: 435483 - DNA, 42 bp, Homo sapiens; identical to SEQ ID NO: 257888
  chr7:68135058-68135100
  hypo

SEQ ID NO: 435484 - DNA, 55 bp, Homo sapiens; identical to SEQ ID NO: 211609
  chr7:68185672-68185727
  hypo

SEQ ID NO: 435485 - DNA, 42 bp, Homo sapiens; identical to SEQ ID NO: 257890
  chr7:68263365-68263407
  hypo

SEQ ID NO: 435486 - DNA, 44 bp, Homo sapiens; identical to SEQ ID NO: 257891
  chr7:68303945-68303989
  hypo

SEQ ID NO: 435487 - DNA, 41 bp, Homo sapiens; identical to SEQ ID NO: 211610
  chr7:68418436-68418477
  hypo

SEQ ID NO: 435488 - DNA, 100 bp, Homo sapiens; identical to SEQ ID NO: 211611
  chr7:68418717-68418817
  hypo

SEQ ID NO: 435489 - DNA, 80 bp, Homo sapiens; identical to SEQ ID NO: 257894
  chr7:68564601-68564681
  hypo

SEQ ID NO: 435490 - DNA, 85 bp, Homo sapiens; identical to SEQ ID NO: 257895
  chr7:68912781-68912866
  hypo

SEQ ID NO: 435491 - DNA, 95 bp, Homo sapiens; identical to SEQ ID NO: 257896
  chr7:68960050-68960145
  hypo

SEQ ID NO: 435492 - DNA, 112 bp, Homo sapiens; identical to SEQ ID NO: 257897
  chr7:69056912-69057024
  hypo

SEQ ID NO: 435493 - DNA, 80 bp, Homo sapiens; identical to SEQ ID NO: 211616
  chr7:69478666-69478746
  hypo

SEQ ID NO: 435494 - DNA, 152 bp, Homo sapiens; identical to SEQ ID NO: 257899
  chr7:69501075-69501227
  hypo

SEQ ID NO: 435495 - DNA, 68 bp, Homo sapiens; identical to SEQ ID NO: 257900
  chr7:69736941-69737009
  hypo

SEQ ID NO: 435496 - DNA, 140 bp, Homo sapiens; identical to SEQ ID NO: 211617
  chr7:70255442-70255582
  hypo

SEQ ID NO: 435497 - DNA, 227 bp, Homo sapiens; identical to SEQ ID NO: 257902
  chr7:70255790-70256017
  hypo

SEQ ID NO: 435498 - DNA, 88 bp, Homo sapiens; identical to SEQ ID NO: 307935
  chr7:70311133-70311221
  hypo

SEQ ID NO: 435499 - DNA, 202 bp, Homo sapiens; identical to SEQ ID NO: 257904
  chr7:70340709-70340911
  hypo

SEQ ID NO: 435500 - DNA, 187 bp, Homo sapiens; identical to SEQ ID NO: 257905
  chr7:70378264-70378451
  hypo

SEQ ID NO: 435501 - DNA, 36 bp, Homo sapiens; identical to SEQ ID NO: 257906
  chr7:70482807-70482843
  hypo

SEQ ID NO: 435502 - DNA, 89 bp, Homo sapiens; identical to SEQ ID NO: 285088
  chr7:70596058-70596147
  hypo

SEQ ID NO: 435503 - DNA, 39 bp, Homo sapiens; identical to SEQ ID NO: 285089
  chr7:70597367-70597406
  hypo

SEQ ID NO: 435504 - DNA, 56 bp, Homo sapiens; identical to SEQ ID NO: 257908
  chr7:70921261-70921317
  hypo

SEQ ID NO: 435505 - DNA, 31 bp, Homo sapiens; identical to SEQ ID NO: 257909
  chr7:71048822-71048853
  hypo

SEQ ID NO: 435506 - DNA, 37 bp, Homo sapiens; identical to SEQ ID NO: 211618
  chr7:71119293-71119330
  hypo

SEQ ID NO: 435507 - DNA, 88 bp, Homo sapiens; identical to SEQ ID NO: 223123
  chr7:71198521-71198609
  hypo

SEQ ID NO: 435508 - DNA, 162 bp, Homo sapiens; identical to SEQ ID NO: 257911
  chr7:71251956-71252118
  hypo

SEQ ID NO: 435509 - DNA, 85 bp, Homo sapiens; identical to SEQ ID NO: 257912
  chr7:71276627-71276712
  hypo

SEQ ID NO: 435510 - DNA, 38 bp, Homo sapiens; identical to SEQ ID NO: 211619
  chr7:71287516-71287554
  hypo

SEQ ID NO: 435511 - DNA, 43 bp, Homo sapiens; identical to SEQ ID NO: 257914
  chr7:71335072-71335115
  hypo

SEQ ID NO: 435512 - DNA, 42 bp, Homo sapiens; identical to SEQ ID NO: 257915
  chr7:71396557-71396599
  hypo

SEQ ID NO: 435513 - DNA, 35 bp, Homo sapiens; identical to SEQ ID NO: 211620
  chr7:71397499-71397534
  hypo

SEQ ID NO: 435514 - DNA, 34 bp, Homo sapiens; identical to SEQ ID NO: 257917
  chr7:71403494-71403528
  hypo

SEQ ID NO: 435515 - DNA, 98 bp, Homo sapiens; identical to SEQ ID NO: 257918
  chr7:71598019-71598117
  hypo

SEQ ID NO: 435516 - DNA, 238 bp, Homo sapiens; identical to SEQ ID NO: 257919
  chr7:71656030-71656268
  hypo

SEQ ID NO: 435517 - DNA, 72 bp, Homo sapiens; identical to SEQ ID NO: 307955
  chr7:71870980-71871052
  hypo

SEQ ID NO: 435518 - DNA, 117 bp, Homo sapiens; identical to SEQ ID NO: 307956
  chr7:71871082-71871199
  hypo

SEQ ID NO: 435519 - DNA, 93 bp, Homo sapiens; identical to SEQ ID NO: 257921
  chr7:71913527-71913620
  hypo

SEQ ID NO: 435520 - DNA, 43 bp, Homo sapiens; identical to SEQ ID NO: 257922
  chr7:75935606-75935649
  hypo

SEQ ID NO: 435521 - DNA, 192 bp, Homo sapiens; identical to SEQ ID NO: 257923
  chr7:75958854-75959046
  hypo

SEQ ID NO: 435522 - DNA, 240 bp, Homo sapiens; identical to SEQ ID NO: 307962
  chr7:76604357-76604597
  hypo

SEQ ID NO: 435523 - DNA, 159 bp, Homo sapiens; identical to SEQ ID NO: 211621
  chr7:76632095-76632254
  hypo

SEQ ID NO: 435524 - DNA, 90 bp, Homo sapiens; identical to SEQ ID NO: 257929
  chr7:77036055-77036145
  hypo

SEQ ID NO: 435525 - DNA, 421 bp, Homo sapiens; identical to SEQ ID NO: 285099
  chr7:77167456-77167877
  hypo

SEQ ID NO: 435526 - DNA, 39 bp, Homo sapiens; identical to SEQ ID NO: 211622
  chr7:77184920-77184959
  hypo

SEQ ID NO: 435527 - DNA, 111 bp, Homo sapiens; identical to SEQ ID NO: 257932
  chr7:77296782-77296893
  hypo

SEQ ID NO: 435528 - DNA, 120 bp, Homo sapiens; identical to SEQ ID NO: 257933
  chr7:77305019-77305139
  hypo

SEQ ID NO: 435529 - DNA, 120 bp, Homo sapiens; identical to SEQ ID NO: 211624
  chr7:77323833-77323953
  hypo

SEQ ID NO: 435530 - DNA, 34 bp, Homo sapiens; identical to SEQ ID NO: 211626
  chr7:77413233-77413267
  hypo

SEQ ID NO: 435531 - DNA, 37 bp, Homo sapiens; identical to SEQ ID NO: 211627
  chr7:77413297-77413334
  hypo

SEQ ID NO: 435532 - DNA, 88 bp, Homo sapiens; identical to SEQ ID NO: 257939
  chr7:77459676-77459764
  hypo

SEQ ID NO: 435533 - DNA, 31 bp, Homo sapiens; identical to SEQ ID NO: 257940
  chr7:79851712-79851743
  hypo

SEQ ID NO: 435534 - DNA, 153 bp, Homo sapiens; identical to SEQ ID NO: 211628
  chr7:80168619-80168772
  hypo

SEQ ID NO: 435535 - DNA, 34 bp, Homo sapiens; identical to SEQ ID NO: 211629
  chr7:80541273-80541307
  hypo

SEQ ID NO: 435536 - DNA, 36 bp, Homo sapiens; identical to SEQ ID NO: 257943
  chr7:80544781-80544817
  hypo

SEQ ID NO: 435537 - DNA, 97 bp, Homo sapiens; identical to SEQ ID NO: 257944
  chr7:80572493-80572590
  hypo

SEQ ID NO: 435538 - DNA, 92 bp, Homo sapiens; identical to SEQ ID NO: 307984
  chr7:80790225-80790317
  hypo

SEQ ID NO: 435539 - DNA, 53 bp, Homo sapiens; identical to SEQ ID NO: 307985
  chr7:80896252-80896305
  hypo

SEQ ID NO: 435540 - DNA, 34 bp, Homo sapiens; identical to SEQ ID NO: 307986
  chr7:80896335-80896369
  hypo

SEQ ID NO: 435541 - DNA, 36 bp, Homo sapiens; identical to SEQ ID NO: 211630
  chr7:80917900-80917936
  hypo

SEQ ID NO: 435542 - DNA, 36 bp, Homo sapiens; identical to SEQ ID NO: 211631
  chr7:80918176-80918212
  hypo

SEQ ID NO: 435543 - DNA, 31 bp, Homo sapiens; identical to SEQ ID NO: 257949
  chr7:80965882-80965913
  hypo

SEQ ID NO: 435544 - DNA, 140 bp, Homo sapiens; identical to SEQ ID NO: 257950
  chr7:81066982-81067122
  hypo

SEQ ID NO: 435545 - DNA, 83 bp, Homo sapiens; identical to SEQ ID NO: 257951
  chr7:82176346-82176429
  hypo

SEQ ID NO: 435546 - DNA, 415 bp, Homo sapiens; identical to SEQ ID NO: 285116
  chr7:82791563-82791978
  hypo

SEQ ID NO: 435547 - DNA, 297 bp, Homo sapiens; identical to SEQ ID NO: 44343
  chr7:82792128-82792425
  hypo

SEQ ID NO: 435548 - DNA, 109 bp, Homo sapiens; identical to SEQ ID NO: 201027
  chr7:86849527-86849636
  hypo

SEQ ID NO: 435549 - DNA, 481 bp, Homo sapiens; identical to SEQ ID NO: 201030
  chr7:87849420-87849901
  hypo

SEQ ID NO: 435550 - DNA, 41 bp, Homo sapiens; identical to SEQ ID NO: 257953
  chr7:88858571-88858612
  hypo

SEQ ID NO: 435551 - DNA, 184 bp, Homo sapiens; identical to SEQ ID NO: 211639
  chr7:90635233-90635417
  hypo

SEQ ID NO: 435552 - DNA, 377 bp, Homo sapiens; identical to SEQ ID NO: 285155
  chr7:90894561-90894938
  hypo

SEQ ID NO: 435553 - DNA, 145 bp, Homo sapiens; identical to SEQ ID NO: 257955
  chr7:91531327-91531472
  hypo

SEQ ID NO: 435554 - DNA, 80 bp, Homo sapiens; identical to SEQ ID NO: 257956
  chr7:91655605-91655685
  hypo

SEQ ID NO: 435555 - DNA, 40 bp, Homo sapiens; identical to SEQ ID NO: 211641
  chr7:92075854-92075894
  hypo

SEQ ID NO: 435556 - DNA, 143 bp, Homo sapiens; identical to SEQ ID NO: 201043
  chr7:92219764-92219907
  hypo

SEQ ID NO: 435557 - DNA, 119 bp, Homo sapiens; identical to SEQ ID NO: 211643
  chr7:92370087-92370206
  hypo

SEQ ID NO: 435558 - DNA, 1229 bp, Homo sapiens; identical to SEQ ID NO: 44386
  chr7:92462187-92463416
  hypo

SEQ ID NO: 435559 - DNA, 247 bp, Homo sapiens; identical to SEQ ID NO: 201045
  chr7:92463701-92463948
  hypo

SEQ ID NO: 435560 - DNA, 262 bp, Homo sapiens; identical to SEQ ID NO: 285162
  chr7:92464877-92465139
  hypo

SEQ ID NO: 435561 - DNA, 55 bp, Homo sapiens; identical to SEQ ID NO: 257959
  chr7:92465542-92465597
  hypo

SEQ ID NO: 435562 - DNA, 47 bp, Homo sapiens; identical to SEQ ID NO: 201046
  chr7:92466481-92466528
  hypo

SEQ ID NO: 435563 - DNA, 88 bp, Homo sapiens; identical to SEQ ID NO: 257960
  chr7:92745365-92745453
  hypo

SEQ ID NO: 435564 - DNA, 129 bp, Homo sapiens; identical to SEQ ID NO: 211647
  chr7:92939972-92940101
  hypo

SEQ ID NO: 435565 - DNA, 94 bp, Homo sapiens; identical to SEQ ID NO: 211648
  chr7:94138372-94138466
  hypo

SEQ ID NO: 435566 - DNA, 63 bp, Homo sapiens; identical to SEQ ID NO: 211649
  chr7:94293684-94293747
  hypo

SEQ ID NO: 435567 - DNA, 89 bp, Homo sapiens; identical to SEQ ID NO: 257964
  chr7:94732597-94732686
  hypo

SEQ ID NO: 435568 - DNA, 437 bp, Homo sapiens; identical to SEQ ID NO: 201052
  chr7:95064141-95064578
  hypo

SEQ ID NO: 435569 - DNA, 365 bp, Homo sapiens; identical to SEQ ID NO: 285191
  chr7:96746747-96747112
  hypo

SEQ ID NO: 435570 - DNA, 417 bp, Homo sapiens; identical to SEQ ID NO: 285192
  chr7:96747151-96747568
  hypo

SEQ ID NO: 435571 - DNA, 43 bp, Homo sapiens; identical to SEQ ID NO: 257965
  chr7:97137338-97137381
  hypo

SEQ ID NO: 435572 - DNA, 674 bp, Homo sapiens; identical to SEQ ID NO: 223150
  chr7:97501249-97501923
  hypo

SEQ ID NO: 435573 - DNA, 92 bp, Homo sapiens; identical to SEQ ID NO: 257966
  chr7:97591811-97591903
  hypo

SEQ ID NO: 435574 - DNA, 80 bp, Homo sapiens; identical to SEQ ID NO: 308028
  chr7:97600009-97600089
  hypo

SEQ ID NO: 435575 - DNA, 36 bp, Homo sapiens; identical to SEQ ID NO: 308029
  chr7:97600249-97600285
  hypo

SEQ ID NO: 435576 - DNA, 186 bp, Homo sapiens; identical to SEQ ID NO: 257970
  chr7:97670351-97670537
  hypo

SEQ ID NO: 435577 - DNA, 33 bp, Homo sapiens; identical to SEQ ID NO: 257971
  chr7:97706016-97706049
  hypo

SEQ ID NO: 435578 - DNA, 225 bp, Homo sapiens; identical to SEQ ID NO: 257972
  chr7:97748929-97749154
  hypo

SEQ ID NO: 435579 - DNA, 78 bp, Homo sapiens; identical to SEQ ID NO: 308033
  chr7:97804194-97804272
  hypo

SEQ ID NO: 435580 - DNA, 115 bp, Homo sapiens; identical to SEQ ID NO: 308034
  chr7:97804302-97804417
  hypo

SEQ ID NO: 435581 - DNA, 151 bp, Homo sapiens; identical to SEQ ID NO: 211652
  chr7:97806161-97806312
  hypo

SEQ ID NO: 435582 - DNA, 159 bp, Homo sapiens; identical to SEQ ID NO: 257975
  chr7:97807169-97807328
  hypo

SEQ ID NO: 435583 - DNA, 146 bp, Homo sapiens; identical to SEQ ID NO: 308037
  chr7:97807596-97807742
  hypo

SEQ ID NO: 435584 - DNA, 89 bp, Homo sapiens; identical to SEQ ID NO: 308038
  chr7:97807772-97807861
  hypo

SEQ ID NO: 435585 - DNA, 48 bp, Homo sapiens; identical to SEQ ID NO: 257977
  chr7:97808578-97808626
  hypo

SEQ ID NO: 435586 - DNA, 122 bp, Homo sapiens; identical to SEQ ID NO: 211653
  chr7:97832525-97832647
  hypo

SEQ ID NO: 435587 - DNA, 301 bp, Homo sapiens; identical to SEQ ID NO: 211654
  chr7:97833194-97833495
  hypo

SEQ ID NO: 435588 - DNA, 207 bp, Homo sapiens; identical to SEQ ID NO: 308042
  chr7:97833960-97834167
  hypo

SEQ ID NO: 435589 - DNA, 499 bp, Homo sapiens; identical to SEQ ID NO: 257981
  chr7:97841577-97842076
  hypo

SEQ ID NO: 435590 - DNA, 111 bp, Homo sapiens; identical to SEQ ID NO: 257982
  chr7:97844377-97844488
  hypo

SEQ ID NO: 435591 - DNA, 94 bp, Homo sapiens; identical to SEQ ID NO: 211656
  chr7:97847038-97847132
  hypo

SEQ ID NO: 435592 - DNA, 184 bp, Homo sapiens; identical to SEQ ID NO: 257984
  chr7:97855417-97855601
  hypo

SEQ ID NO: 435593 - DNA, 165 bp, Homo sapiens; identical to SEQ ID NO: 211657
  chr7:97857342-97857507
  hypo

SEQ ID NO: 435594 - DNA, 67 bp, Homo sapiens; identical to SEQ ID NO: 308048
  chr7:97882281-97882348
  hypo

SEQ ID NO: 435595 - DNA, 132 bp, Homo sapiens; identical to SEQ ID NO: 257989
  chr7:97968886-97969018
  hypo

SEQ ID NO: 435596 - DNA, 224 bp, Homo sapiens; identical to SEQ ID NO: 257990
  chr7:97984208-97984432
  hypo

SEQ ID NO: 435597 - DNA, 42 bp, Homo sapiens; identical to SEQ ID NO: 211658
  chr7:97989649-97989691
  hypo

SEQ ID NO: 435598 - DNA, 35 bp, Homo sapiens; identical to SEQ ID NO: 211659
  chr7:98012255-98012290
  hypo

SEQ ID NO: 435599 - DNA, 142 bp, Homo sapiens; identical to SEQ ID NO: 308055
  chr7:98088535-98088677
  hypo

SEQ ID NO: 435600 - DNA, 343 bp, Homo sapiens; identical to SEQ ID NO: 211661
  chr7:98115911-98116254
  hypo

SEQ ID NO: 435601 - DNA, 139 bp, Homo sapiens; identical to SEQ ID NO: 257995
  chr7:98147931-98148070
  hypo

SEQ ID NO: 435602 - DNA, 116 bp, Homo sapiens; identical to SEQ ID NO: 257996
  chr7:98254320-98254436
  hypo

SEQ ID NO: 435603 - DNA, 530 bp, Homo sapiens; identical to SEQ ID NO: 257997
  chr7:98586157-98586687
  hypo

SEQ ID NO: 435604 - DNA, 497 bp, Homo sapiens; identical to SEQ ID NO: 258000
  chr7:98599730-98600227
  hypo

SEQ ID NO: 435605 - DNA, 81 bp, Homo sapiens; identical to SEQ ID NO: 258001
  chr7:98601684-98601765
  hypo

SEQ ID NO: 435606 - DNA, 397 bp, Homo sapiens; identical to SEQ ID NO: 258002
  chr7:98602532-98602929
  hypo

SEQ ID NO: 435607 - DNA, 183 bp, Homo sapiens; identical to SEQ ID NO: 258003
  chr7:98605991-98606174
  hypo

SEQ ID NO: 435608 - DNA, 232 bp, Homo sapiens; identical to SEQ ID NO: 258004
  chr7:98636065-98636297
  hypo

SEQ ID NO: 435609 - DNA, 221 bp, Homo sapiens; identical to SEQ ID NO: 258005
  chr7:98639038-98639259
  hypo

SEQ ID NO: 435610 - DNA, 43 bp, Homo sapiens; identical to SEQ ID NO: 211664
  chr7:98704238-98704281
  hypo

SEQ ID NO: 435611 - DNA, 162 bp, Homo sapiens; identical to SEQ ID NO: 211665
  chr7:98704341-98704503
  hypo

SEQ ID NO: 435612 - DNA, 41 bp, Homo sapiens; identical to SEQ ID NO: 258009
  chr7:98705848-98705889
  hypo

SEQ ID NO: 435613 - DNA, 102 bp, Homo sapiens; identical to SEQ ID NO: 258010
  chr7:98735269-98735371
  hypo

SEQ ID NO: 435614 - DNA, 44 bp, Homo sapiens; identical to SEQ ID NO: 258011
  chr7:98738342-98738386
  hypo

SEQ ID NO: 435615 - DNA, 129 bp, Homo sapiens; identical to SEQ ID NO: 258012
  chr7:98775355-98775484
  hypo

SEQ ID NO: 435616 - DNA, 41 bp, Homo sapiens; identical to SEQ ID NO: 258013
  chr7:98814530-98814571
  hypo

SEQ ID NO: 435617 - DNA, 235 bp, Homo sapiens; identical to SEQ ID NO: 258014
  chr7:98845139-98845374
  hypo

SEQ ID NO: 435618 - DNA, 72 bp, Homo sapiens; identical to SEQ ID NO: 211667
  chr7:98870778-98870850
  hypo

SEQ ID NO: 435619 - DNA, 186 bp, Homo sapiens; identical to SEQ ID NO: 258016
  chr7:98876193-98876379
  hypo

SEQ ID NO: 435620 - DNA, 195 bp, Homo sapiens; identical to SEQ ID NO: 211668
  chr7:98879380-98879575
  hypo

SEQ ID NO: 435621 - DNA, 118 bp, Homo sapiens; identical to SEQ ID NO: 258018
  chr7:98885541-98885659
  hypo

SEQ ID NO: 435622 - DNA, 34 bp, Homo sapiens; identical to SEQ ID NO: 258019
  chr7:98889891-98889925
  hypo

SEQ ID NO: 435623 - DNA, 37 bp, Homo sapiens; identical to SEQ ID NO: 258020
  chr7:98901753-98901790
  hypo

SEQ ID NO: 435624 - DNA, 216 bp, Homo sapiens; identical to SEQ ID NO: 258021
  chr7:98904287-98904503
  hypo

SEQ ID NO: 435625 - DNA, 44 bp, Homo sapiens; identical to SEQ ID NO: 258023
  chr7:98960332-98960376
  hypo

SEQ ID NO: 435626 - DNA, 48 bp, Homo sapiens; identical to SEQ ID NO: 211670
  chr7:98966332-98966380
  hypo

SEQ ID NO: 435627 - DNA, 47 bp, Homo sapiens; identical to SEQ ID NO: 211672
  chr7:98966739-98966786
  hypo

SEQ ID NO: 435628 - DNA, 43 bp, Homo sapiens; identical to SEQ ID NO: 308089
  chr7:98970871-98970914
  hypo

SEQ ID NO: 435629 - DNA, 86 bp, Homo sapiens; identical to SEQ ID NO: 211675
  chr7:98985728-98985814
  hypo

SEQ ID NO: 435630 - DNA, 222 bp, Homo sapiens; identical to SEQ ID NO: 258029
  chr7:98994224-98994446
  hypo

SEQ ID NO: 435631 - DNA, 180 bp, Homo sapiens; identical to SEQ ID NO: 258030
  chr7:98997417-98997597
  hypo

SEQ ID NO: 435632 - DNA, 32 bp, Homo sapiens; identical to SEQ ID NO: 258031
  chr7:99019874-99019906
  hypo

SEQ ID NO: 435633 - DNA, 76 bp, Homo sapiens; identical to SEQ ID NO: 211677
  chr7:99020629-99020705
  hypo

SEQ ID NO: 435634 - DNA, 120 bp, Homo sapiens; identical to SEQ ID NO: 258034
  chr7:99032514-99032634
  hypo

SEQ ID NO: 435635 - DNA, 70 bp, Homo sapiens; identical to SEQ ID NO: 258035
  chr7:99065118-99065188
  hypo

SEQ ID NO: 435636 - DNA, 36 bp, Homo sapiens; identical to SEQ ID NO: 258036
  chr7:99073693-99073729
  hypo

SEQ ID NO: 435637 - DNA, 59 bp, Homo sapiens; identical to SEQ ID NO: 308101
  chr7:99103806-99103865
  hypo

SEQ ID NO: 435638 - DNA, 259 bp, Homo sapiens; identical to SEQ ID NO: 258040
  chr7:99135320-99135579
  hypo

SEQ ID NO: 435639 - DNA, 450 bp, Homo sapiens; identical to SEQ ID NO: 258041
  chr7:99140777-99141227
  hypo

SEQ ID NO: 435640 - DNA, 189 bp, Homo sapiens; identical to SEQ ID NO: 258042
  chr7:99161482-99161671
  hypo

SEQ ID NO: 435641 - DNA, 74 bp, Homo sapiens; identical to SEQ ID NO: 258043
  chr7:99191695-99191769
  hypo

SEQ ID NO: 435642 - DNA, 238 bp, Homo sapiens; identical to SEQ ID NO: 211680
  chr7:99227292-99227530
  hypo

SEQ ID NO: 435643 - DNA, 38 bp, Homo sapiens; identical to SEQ ID NO: 258045
  chr7:99391324-99391362
  hypo

SEQ ID NO: 435644 - DNA, 98 bp, Homo sapiens; identical to SEQ ID NO: 258046
  chr7:99391422-99391520
  hypo

SEQ ID NO: 435645 - DNA, 144 bp, Homo sapiens; identical to SEQ ID NO: 258047
  chr7:99552784-99552928
  hypo

SEQ ID NO: 435646 - DNA, 93 bp, Homo sapiens; identical to SEQ ID NO: 258048
  chr7:99602415-99602508
  hypo

SEQ ID NO: 435647 - DNA, 126 bp, Homo sapiens; identical to SEQ ID NO: 285209
  chr7:99613133-99613259
  hypo

SEQ ID NO: 435648 - DNA, 269 bp, Homo sapiens; identical to SEQ ID NO: 211681
  chr7:99691590-99691859
  hypo

SEQ ID NO: 435649 - DNA, 254 bp, Homo sapiens; identical to SEQ ID NO: 258050
  chr7:99696722-99696976
  hypo

SEQ ID NO: 435650 - DNA, 169 bp, Homo sapiens; identical to SEQ ID NO: 285215
  chr7:99725637-99725806
  hypo

SEQ ID NO: 435651 - DNA, 120 bp, Homo sapiens; identical to SEQ ID NO: 258052
  chr7:99734871-99734991
  hypo

SEQ ID NO: 435652 - DNA, 37 bp, Homo sapiens; identical to SEQ ID NO: 258054
  chr7:99782063-99782100
  hypo

SEQ ID NO: 435653 - DNA, 87 bp, Homo sapiens; identical to SEQ ID NO: 258055
  chr7:99796109-99796196
  hypo

SEQ ID NO: 435654 - DNA, 186 bp, Homo sapiens; identical to SEQ ID NO: 211683
  chr7:99839732-99839918
  hypo

SEQ ID NO: 435655 - DNA, 38 bp, Homo sapiens; identical to SEQ ID NO: 211684
  chr7:99839959-99839997
  hypo

SEQ ID NO: 435656 - DNA, 92 bp, Homo sapiens; identical to SEQ ID NO: 258058
  chr7:99849463-99849555
  hypo

SEQ ID NO: 435657 - DNA, 141 bp, Homo sapiens; identical to SEQ ID NO: 258059
  chr7:99964960-99965101
  hypo

SEQ ID NO: 435658 - DNA, 76 bp, Homo sapiens; identical to SEQ ID NO: 211685
  chr7:100024904-100024980
  hypo

SEQ ID NO: 435659 - DNA, 115 bp, Homo sapiens; identical to SEQ ID NO: 211686
  chr7:100025340-100025455
  hypo

SEQ ID NO: 435660 - DNA, 37 bp, Homo sapiens; identical to SEQ ID NO: 258065
  chr7:100065387-100065424
  hypo

SEQ ID NO: 435661 - DNA, 228 bp, Homo sapiens; identical to SEQ ID NO: 258066
  chr7:100086232-100086460
  hypo

SEQ ID NO: 435662 - DNA, 180 bp, Homo sapiens; identical to SEQ ID NO: 258068
  chr7:100098054-100098234
  hypo

SEQ ID NO: 435663 - DNA, 111 bp, Homo sapiens; identical to SEQ ID NO: 258069
  chr7:100100530-100100641
  hypo

SEQ ID NO: 435664 - DNA, 33 bp, Homo sapiens; identical to SEQ ID NO: 211689
  chr7:100170149-100170182
  hypo

SEQ ID NO: 435665 - DNA, 36 bp, Homo sapiens; identical to SEQ ID NO: 258073
  chr7:100189309-100189345
  hypo

SEQ ID NO: 435666 - DNA, 86 bp, Homo sapiens; identical to SEQ ID NO: 211690
  chr7:100198415-100198501
  hypo

SEQ ID NO: 435667 - DNA, 291 bp, Homo sapiens; identical to SEQ ID NO: 258075
  chr7:100218441-100218732
  hypo

SEQ ID NO: 435668 - DNA, 95 bp, Homo sapiens; identical to SEQ ID NO: 258076
  chr7:100246355-100246450
  hypo

SEQ ID NO: 435669 - DNA, 32 bp, Homo sapiens; identical to SEQ ID NO: 258077
  chr7:100258217-100258249
  hypo

SEQ ID NO: 435670 - DNA, 253 bp, Homo sapiens; identical to SEQ ID NO: 258078
  chr7:100275849-100276102
  hypo

SEQ ID NO: 435671 - DNA, 119 bp, Homo sapiens; identical to SEQ ID NO: 211693
  chr7:100279781-100279900
  hypo

SEQ ID NO: 435672 - DNA, 282 bp, Homo sapiens; identical to SEQ ID NO: 258080
  chr7:100281492-100281774
  hypo

SEQ ID NO: 435673 - DNA, 113 bp, Homo sapiens; identical to SEQ ID NO: 258081
  chr7:100284949-100285062
  hypo

SEQ ID NO: 435674 - DNA, 681 bp, Homo sapiens; identical to SEQ ID NO: 258082
  chr7:100285461-100286142
  hypo

SEQ ID NO: 435675 - DNA, 49 bp, Homo sapiens; identical to SEQ ID NO: 211694
  chr7:100388725-100388774
  hypo

SEQ ID NO: 435676 - DNA, 244 bp, Homo sapiens; identical to SEQ ID NO: 258084
  chr7:100400266-100400510
  hypo

SEQ ID NO: 435677 - DNA, 38 bp, Homo sapiens; identical to SEQ ID NO: 391804
  chr7:100405249-100405287
  hypo

SEQ ID NO: 435678 - DNA, 80 bp, Homo sapiens; identical to SEQ ID NO: 211696
  chr7:100407982-100408062
  hypo

SEQ ID NO: 435679 - DNA, 514 bp, Homo sapiens; identical to SEQ ID NO: 258088
  chr7:100410407-100410921
  hypo

SEQ ID NO: 435680 - DNA, 44 bp, Homo sapiens; identical to SEQ ID NO: 211698
  chr7:100417052-100417096
  hypo

SEQ ID NO: 435681 - DNA, 98 bp, Homo sapiens; identical to SEQ ID NO: 258090
  chr7:100420026-100420124
  hypo

SEQ ID NO: 435682 - DNA, 1470 bp, Homo sapiens; identical to SEQ ID NO: 285228
  chr7:100424341-100425811
  hypo

SEQ ID NO: 435683 - DNA, 122 bp, Homo sapiens; identical to SEQ ID NO: 211701
  chr7:100480482-100480604
  hypo

SEQ ID NO: 435684 - DNA, 43 bp, Homo sapiens; identical to SEQ ID NO: 258094
  chr7:100490911-100490954
  hypo

SEQ ID NO: 435685 - DNA, 143 bp, Homo sapiens; identical to SEQ ID NO: 258095
  chr7:100512579-100512722
  hypo

SEQ ID NO: 435686 - DNA, 91 bp, Homo sapiens; identical to SEQ ID NO: 258096
  chr7:100514709-100514800
  hypo

SEQ ID NO: 435687 - DNA, 152 bp, Homo sapiens; identical to SEQ ID NO: 201076
  chr7:100608956-100609108
  hypo

SEQ ID NO: 435688 - DNA, 137 bp, Homo sapiens; identical to SEQ ID NO: 285232
  chr7:100609361-100609498
  hypo

SEQ ID NO: 435689 - DNA, 38 bp, Homo sapiens; identical to SEQ ID NO: 258097
  chr7:100650571-100650609
  hypo

SEQ ID NO: 435690 - DNA, 58 bp, Homo sapiens; identical to SEQ ID NO: 258098
  chr7:100731011-100731069
  hypo

SEQ ID NO: 435691 - DNA, 343 bp, Homo sapiens; identical to SEQ ID NO: 258099
  chr7:100732095-100732438
  hypo

SEQ ID NO: 435692 - DNA, 562 bp, Homo sapiens; identical to SEQ ID NO: 285240
  chr7:100808502-100809064
  hypo

SEQ ID NO: 435693 - DNA, 36 bp, Homo sapiens; identical to SEQ ID NO: 258100
  chr7:100834973-100835009
  hypo

SEQ ID NO: 435694 - DNA, 84 bp, Homo sapiens; identical to SEQ ID NO: 258102
  chr7:100840809-100840893
  hypo

SEQ ID NO: 435695 - DNA, 69 bp, Homo sapiens; identical to SEQ ID NO: 258104
  chr7:100860161-100860230
  hypo

SEQ ID NO: 435696 - DNA, 94 bp, Homo sapiens; identical to SEQ ID NO: 211705
  chr7:100865918-100866012
  hypo

SEQ ID NO: 435697 - DNA, 157 bp, Homo sapiens; identical to SEQ ID NO: 258106
  chr7:100866248-100866405
  hypo

SEQ ID NO: 435698 - DNA, 103 bp, Homo sapiens; identical to SEQ ID NO: 258107
  chr7:100870052-100870155
  hypo

SEQ ID NO: 435699 - DNA, 91 bp, Homo sapiens; identical to SEQ ID NO: 258108
  chr7:100961430-100961521
  hypo

SEQ ID NO: 435700 - DNA, 157 bp, Homo sapiens; identical to SEQ ID NO: 258109
  chr7:101086134-101086291
  hypo

SEQ ID NO: 435701 - DNA, 34 bp, Homo sapiens; identical to SEQ ID NO: 258110
  chr7:101086746-101086780
  hypo

SEQ ID NO: 435702 - DNA, 105 bp, Homo sapiens; identical to SEQ ID NO: 211706
  chr7:101132023-101132128
  hypo

SEQ ID NO: 435703 - DNA, 77 bp, Homo sapiens; identical to SEQ ID NO: 211707
  chr7:101195310-101195387
  hypo

SEQ ID NO: 435704 - DNA, 59 bp, Homo sapiens; identical to SEQ ID NO: 258113
  chr7:101210706-101210765
  hypo

SEQ ID NO: 435705 - DNA, 165 bp, Homo sapiens; identical to SEQ ID NO: 211708
  chr7:101241666-101241831
  hypo

SEQ ID NO: 435706 - DNA, 57 bp, Homo sapiens; identical to SEQ ID NO: 258115
  chr7:101279964-101280021
  hypo

SEQ ID NO: 435707 - DNA, 336 bp, Homo sapiens; identical to SEQ ID NO: 201086
  chr7:101457433-101457769
  hypo

SEQ ID NO: 435708 - DNA, 467 bp, Homo sapiens; identical to SEQ ID NO: 201087
  chr7:101458246-101458713
  hypo

SEQ ID NO: 435709 - DNA, 190 bp, Homo sapiens; identical to SEQ ID NO: 201088
  chr7:101459183-101459373
  hypo

SEQ ID NO: 435710 - DNA, 146 bp, Homo sapiens; identical to SEQ ID NO: 258116
  chr7:101465441-101465587
  hypo

SEQ ID NO: 435711 - DNA, 37 bp, Homo sapiens; identical to SEQ ID NO: 211715
  chr7:101476346-101476383
  hypo

SEQ ID NO: 435712 - DNA, 139 bp, Homo sapiens; identical to SEQ ID NO: 258119
  chr7:101497175-101497314
  hypo

SEQ ID NO: 435713 - DNA, 152 bp, Homo sapiens; identical to SEQ ID NO: 211716
  chr7:101504316-101504468
  hypo

SEQ ID NO: 435714 - DNA, 42 bp, Homo sapiens; identical to SEQ ID NO: 258121
  chr7:101521621-101521663
  hypo

SEQ ID NO: 435715 - DNA, 56 bp, Homo sapiens; identical to SEQ ID NO: 258122
  chr7:101533919-101533975
  hypo

SEQ ID NO: 435716 - DNA, 274 bp, Homo sapiens; identical to SEQ ID NO: 258124
  chr7:101543484-101543758
  hypo

SEQ ID NO: 435717 - DNA, 50 bp, Homo sapiens; identical to SEQ ID NO: 258125
  chr7:101556168-101556218
  hypo

SEQ ID NO: 435718 - DNA, 111 bp, Homo sapiens; identical to SEQ ID NO: 201091
  chr7:101559394-101559505
  hypo

SEQ ID NO: 435719 - DNA, 283 bp, Homo sapiens; identical to SEQ ID NO: 211720
  chr7:101583547-101583830
  hypo

SEQ ID NO: 435720 - DNA, 121 bp, Homo sapiens; identical to SEQ ID NO: 308204
  chr7:101586046-101586167
  hypo

SEQ ID NO: 435721 - DNA, 200 bp, Homo sapiens; identical to SEQ ID NO: 211721
  chr7:101595976-101596176
  hypo

SEQ ID NO: 435722 - DNA, 213 bp, Homo sapiens; identical to SEQ ID NO: 258131
  chr7:101610608-101610821
  hypo

SEQ ID NO: 435723 - DNA, 234 bp, Homo sapiens; identical to SEQ ID NO: 258132
  chr7:101615800-101616034
  hypo

SEQ ID NO: 435724 - DNA, 45 bp, Homo sapiens; identical to SEQ ID NO: 211725
  chr7:101624113-101624158
  hypo

SEQ ID NO: 435725 - DNA, 163 bp, Homo sapiens; identical to SEQ ID NO: 258136
  chr7:101629392-101629555
  hypo

SEQ ID NO: 435726 - DNA, 102 bp, Homo sapiens; identical to SEQ ID NO: 211728
  chr7:101630576-101630678
  hypo

SEQ ID NO: 435727 - DNA, 215 bp, Homo sapiens; identical to SEQ ID NO: 258140
  chr7:101653175-101653390
  hypo

SEQ ID NO: 435728 - DNA, 111 bp, Homo sapiens; identical to SEQ ID NO: 308219
  chr7:101656270-101656381
  hypo

SEQ ID NO: 435729 - DNA, 46 bp, Homo sapiens; identical to SEQ ID NO: 308220
  chr7:101656459-101656505
  hypo

SEQ ID NO: 435730 - DNA, 48 bp, Homo sapiens; identical to SEQ ID NO: 201092
  chr7:101671377-101671425
  hypo

SEQ ID NO: 435731 - DNA, 31 bp, Homo sapiens; identical to SEQ ID NO: 211732
  chr7:101694628-101694659
  hypo

SEQ ID NO: 435732 - DNA, 82 bp, Homo sapiens; identical to SEQ ID NO: 308223
  chr7:101706969-101707051
  hypo

SEQ ID NO: 435733 - DNA, 40 bp, Homo sapiens; identical to SEQ ID NO: 308224
  chr7:101707081-101707121
  hypo

SEQ ID NO: 435734 - DNA, 79 bp, Homo sapiens; identical to SEQ ID NO: 201093
  chr7:101713618-101713697
  hypo

SEQ ID NO: 435735 - DNA, 138 bp, Homo sapiens; identical to SEQ ID NO: 201094
  chr7:101740643-101740781
  hypo

SEQ ID NO: 435736 - DNA, 124 bp, Homo sapiens; identical to SEQ ID NO: 201095
  chr7:101747615-101747739
  hypo

SEQ ID NO: 435737 - DNA, 77 bp, Homo sapiens; identical to SEQ ID NO: 201096
  chr7:101754977-101755054
  hypo

SEQ ID NO: 435738 - DNA, 67 bp, Homo sapiens; identical to SEQ ID NO: 201097
  chr7:101758486-101758553
  hypo

SEQ ID NO: 435739 - DNA, 49 bp, Homo sapiens; identical to SEQ ID NO: 201098
  chr7:101801839-101801888
  hypo

SEQ ID NO: 435740 - DNA, 105 bp, Homo sapiens; identical to SEQ ID NO: 201099
  chr7:101813725-101813830
  hypo

SEQ ID NO: 435741 - DNA, 189 bp, Homo sapiens; identical to SEQ ID NO: 201100
  chr7:101821748-101821937
  hypo

SEQ ID NO: 435742 - DNA, 59 bp, Homo sapiens; identical to SEQ ID NO: 201101
  chr7:101833092-101833151
  hypo

SEQ ID NO: 435743 - DNA, 49 bp, Homo sapiens; identical to SEQ ID NO: 201102
  chr7:101837121-101837170
  hypo

SEQ ID NO: 435744 - DNA, 97 bp, Homo sapiens; identical to SEQ ID NO: 201103
  chr7:101838786-101838883
  hypo

SEQ ID NO: 435745 - DNA, 672 bp, Homo sapiens; identical to SEQ ID NO: 201104
  chr7:101839913-101840585
  hypo

SEQ ID NO: 435746 - DNA, 66 bp, Homo sapiens; identical to SEQ ID NO: 201105
  chr7:101842081-101842147
  hypo

SEQ ID NO: 435747 - DNA, 102 bp, Homo sapiens; identical to SEQ ID NO: 201106
  chr7:101843350-101843452
  hypo

SEQ ID NO: 435748 - DNA, 845 bp, Homo sapiens; identical to SEQ ID NO: 201107
  chr7:101844639-101845484
  hypo

SEQ ID NO: 435749 - DNA, 166 bp, Homo sapiens; identical to SEQ ID NO: 201108
  chr7:101847670-101847836
  hypo

SEQ ID NO: 435750 - DNA, 57 bp, Homo sapiens; identical to SEQ ID NO: 201109
  chr7:101848393-101848450
  hypo

SEQ ID NO: 435751 - DNA, 303 bp, Homo sapiens; identical to SEQ ID NO: 201110
  chr7:101870646-101870949
  hypo

SEQ ID NO: 435752 - DNA, 189 bp, Homo sapiens; identical to SEQ ID NO: 201111
  chr7:101877331-101877520
  hypo

SEQ ID NO: 435753 - DNA, 265 bp, Homo sapiens; identical to SEQ ID NO: 201112
  chr7:101882599-101882864
  hypo

SEQ ID NO: 435754 - DNA, 9822 bp, Homo sapiens; identical to SEQ ID NO: 201113
  chr7:101891691-101901513
  hypo

SEQ ID NO: 435755 - DNA, 128 bp, Homo sapiens; identical to SEQ ID NO: 201114
  chr7:101916636-101916764
  hypo

SEQ ID NO: 435756 - DNA, 67 bp, Homo sapiens; identical to SEQ ID NO: 201115
  chr7:101917514-101917581
  hypo

SEQ ID NO: 435757 - DNA, 113 bp, Homo sapiens; identical to SEQ ID NO: 201116
  chr7:101918517-101918630
  hypo

SEQ ID NO: 435758 - DNA, 117 bp, Homo sapiens; identical to SEQ ID NO: 201117
  chr7:101921219-101921336
  hypo

SEQ ID NO: 435759 - DNA, 84 bp, Homo sapiens; identical to SEQ ID NO: 201118
  chr7:101923328-101923412
  hypo

SEQ ID NO: 435760 - DNA, 57 bp, Homo sapiens; identical to SEQ ID NO: 201119
  chr7:101924095-101924152
  hypo

SEQ ID NO: 435761 - DNA, 81 bp, Homo sapiens; identical to SEQ ID NO: 201120
  chr7:101925131-101925212
  hypo

SEQ ID NO: 435762 - DNA, 65 bp, Homo sapiens; identical to SEQ ID NO: 201121
  chr7:101926003-101926068
  hypo

SEQ ID NO: 435763 - DNA, 938 bp, Homo sapiens; identical to SEQ ID NO: 201122
  chr7:101926312-101927250
  hypo

SEQ ID NO: 435764 - DNA, 586 bp, Homo sapiens; identical to SEQ ID NO: 258145
  chr7:102087175-102087761
  hypo

SEQ ID NO: 435765 - DNA, 66 bp, Homo sapiens; identical to SEQ ID NO: 211764
  chr7:102088066-102088132
  hypo

SEQ ID NO: 435766 - DNA, 38 bp, Homo sapiens; identical to SEQ ID NO: 258147
  chr7:102094841-102094879
  hypo

SEQ ID NO: 435767 - DNA, 544 bp, Homo sapiens; identical to SEQ ID NO: 285294
  chr7:102920838-102921382
  hypo

SEQ ID NO: 435768 - DNA, 93 bp, Homo sapiens; identical to SEQ ID NO: 258151
  chr7:103778100-103778193
  hypo

SEQ ID NO: 435769 - DNA, 44 bp, Homo sapiens; identical to SEQ ID NO: 258152
  chr7:103778513-103778557
  hypo

SEQ ID NO: 435770 - DNA, 151 bp, Homo sapiens; identical to SEQ ID NO: 258153
  chr7:104464163-104464314
  hypo

SEQ ID NO: 435771 - DNA, 31 bp, Homo sapiens; identical to SEQ ID NO: 258154
  chr7:104564547-104564578
  hypo

SEQ ID NO: 435772 - DNA, 84 bp, Homo sapiens; identical to SEQ ID NO: 258155
  chr7:104566592-104566676
  hypo

SEQ ID NO: 435773 - DNA, 95 bp, Homo sapiens; identical to SEQ ID NO: 258157
  chr7:104764717-104764812
  hypo

SEQ ID NO: 435774 - DNA, 141 bp, Homo sapiens; identical to SEQ ID NO: 258158
  chr7:104845020-104845161
  hypo

SEQ ID NO: 435775 - DNA, 95 bp, Homo sapiens; identical to SEQ ID NO: 258159
  chr7:104860662-104860757
  hypo

SEQ ID NO: 435776 - DNA, 309 bp, Homo sapiens; identical to SEQ ID NO: 258160
  chr7:104869027-104869336
  hypo

SEQ ID NO: 435777 - DNA, 141 bp, Homo sapiens; identical to SEQ ID NO: 258161
  chr7:104869939-104870080
  hypo

SEQ ID NO: 435778 - DNA, 120 bp, Homo sapiens; identical to SEQ ID NO: 258163
  chr7:104988783-104988903
  hypo

SEQ ID NO: 435779 - DNA, 37 bp, Homo sapiens; identical to SEQ ID NO: 211769
  chr7:105016768-105016805
  hypo

SEQ ID NO: 435780 - DNA, 40 bp, Homo sapiens; identical to SEQ ID NO: 258165
  chr7:105137529-105137569
  hypo

SEQ ID NO: 435781 - DNA, 130 bp, Homo sapiens; identical to SEQ ID NO: 211770
  chr7:105278333-105278463
  hypo

SEQ ID NO: 435782 - DNA, 120 bp, Homo sapiens; identical to SEQ ID NO: 258168
  chr7:105278913-105279033
  hypo

SEQ ID NO: 435783 - DNA, 189 bp, Homo sapiens; identical to SEQ ID NO: 258171
  chr7:105399236-105399425
  hypo

SEQ ID NO: 435784 - DNA, 68 bp, Homo sapiens; identical to SEQ ID NO: 308283
  chr7:105432454-105432522
  hypo

SEQ ID NO: 435785 - DNA, 336 bp, Homo sapiens; identical to SEQ ID NO: 308284
  chr7:105432552-105432888
  hypo

SEQ ID NO: 435786 - DNA, 156 bp, Homo sapiens; identical to SEQ ID NO: 258173
  chr7:105445968-105446124
  hypo

SEQ ID NO: 435787 - DNA, 241 bp, Homo sapiens; identical to SEQ ID NO: 285309
  chr7:105517690-105517931
  hypo

SEQ ID NO: 435788 - DNA, 161 bp, Homo sapiens; identical to SEQ ID NO: 258174
  chr7:105586619-105586780
  hypo

SEQ ID NO: 435789 - DNA, 38 bp, Homo sapiens; identical to SEQ ID NO: 211774
  chr7:105722825-105722863
  hypo

SEQ ID NO: 435790 - DNA, 40 bp, Homo sapiens; identical to SEQ ID NO: 308289
  chr7:105753778-105753818
  hypo

SEQ ID NO: 435791 - DNA, 186 bp, Homo sapiens; identical to SEQ ID NO: 308290
  chr7:105753848-105754034
  hypo

SEQ ID NO: 435792 - DNA, 411 bp, Homo sapiens; identical to SEQ ID NO: 201129
  chr7:106508245-106508656
  hypo

SEQ ID NO: 435793 - DNA, 85 bp, Homo sapiens; identical to SEQ ID NO: 258177
  chr7:106574561-106574646
  hypo

SEQ ID NO: 435794 - DNA, 37 bp, Homo sapiens; identical to SEQ ID NO: 211777
  chr7:106675696-106675733
  hypo

SEQ ID NO: 435795 - DNA, 86 bp, Homo sapiens; identical to SEQ ID NO: 211778
  chr7:106683489-106683575
  hypo

SEQ ID NO: 435796 - DNA, 37 bp, Homo sapiens; identical to SEQ ID NO: 211781
  chr7:106836715-106836752
  hypo

SEQ ID NO: 435797 - DNA, 37 bp, Homo sapiens; identical to SEQ ID NO: 211782
  chr7:106836992-106837029
  hypo

SEQ ID NO: 435798 - DNA, 41 bp, Homo sapiens; identical to SEQ ID NO: 211783
  chr7:106837817-106837858
  hypo

SEQ ID NO: 435799 - DNA, 42 bp, Homo sapiens; identical to SEQ ID NO: 258186
  chr7:107060907-107060949
  hypo

SEQ ID NO: 435800 - DNA, 90 bp, Homo sapiens; identical to SEQ ID NO: 258188
  chr7:107202440-107202530
  hypo

SEQ ID NO: 435801 - DNA, 115 bp, Homo sapiens; identical to SEQ ID NO: 258189
  chr7:107430184-107430299
  hypo

SEQ ID NO: 435802 - DNA, 201 bp, Homo sapiens; identical to SEQ ID NO: 258191
  chr7:107524448-107524649
  hypo

SEQ ID NO: 435803 - DNA, 322 bp, Homo sapiens; identical to SEQ ID NO: 201135
  chr7:107531675-107531997
  hypo

SEQ ID NO: 435804 - DNA, 44 bp, Homo sapiens; identical to SEQ ID NO: 211787
  chr7:107633907-107633951
  hypo

SEQ ID NO: 435805 - DNA, 57 bp, Homo sapiens; identical to SEQ ID NO: 258193
  chr7:107773016-107773073
  hypo

SEQ ID NO: 435806 - DNA, 130 bp, Homo sapiens; identical to SEQ ID NO: 308311
  chr7:108168536-108168666
  hypo

SEQ ID NO: 435807 - DNA, 37 bp, Homo sapiens; identical to SEQ ID NO: 258195
  chr7:108298193-108298230
  hypo

SEQ ID NO: 435808 - DNA, 89 bp, Homo sapiens; identical to SEQ ID NO: 258196
  chr7:110163602-110163691
  hypo

SEQ ID NO: 435809 - DNA, 81 bp, Homo sapiens; identical to SEQ ID NO: 258197
  chr7:110471985-110472066
  hypo

SEQ ID NO: 435810 - DNA, 34 bp, Homo sapiens; identical to SEQ ID NO: 258198
  chr7:112187148-112187182
  hypo

SEQ ID NO: 435811 - DNA, 214 bp, Homo sapiens; identical to SEQ ID NO: 258199
  chr7:112187242-112187456
  hypo

SEQ ID NO: 435812 - DNA, 199 bp, Homo sapiens; identical to SEQ ID NO: 258200
  chr7:112431880-112432079
  hypo

SEQ ID NO: 435813 - DNA, 57 bp, Homo sapiens; identical to SEQ ID NO: 258201
  chr7:114410865-114410922
  hypo

SEQ ID NO: 435814 - DNA, 43 bp, Homo sapiens; identical to SEQ ID NO: 258202
  chr7:115430130-115430173
  hypo

SEQ ID NO: 435815 - DNA, 102 bp, Homo sapiens; identical to SEQ ID NO: 258204
  chr7:116914129-116914231
  hypo

SEQ ID NO: 435816 - DNA, 120 bp, Homo sapiens; identical to SEQ ID NO: 258205
  chr7:120521915-120522035
  hypo

SEQ ID NO: 435817 - DNA, 130 bp, Homo sapiens; identical to SEQ ID NO: 201163
  chr7:121863466-121863596
  hypo

SEQ ID NO: 435818 - DNA, 157 bp, Homo sapiens; identical to SEQ ID NO: 201170
  chr7:123174506-123174663
  hypo

SEQ ID NO: 435819 - DNA, 93 bp, Homo sapiens; identical to SEQ ID NO: 258206
  chr7:123175850-123175943
  hypo

SEQ ID NO: 435820 - DNA, 180 bp, Homo sapiens; identical to SEQ ID NO: 258207
  chr7:124940679-124940859
  hypo

SEQ ID NO: 435821 - DNA, 38 bp, Homo sapiens; identical to SEQ ID NO: 258208
  chr7:125532056-125532094
  hypo

SEQ ID NO: 435822 - DNA, 32 bp, Homo sapiens; identical to SEQ ID NO: 258209
  chr7:126013969-126014001
  hypo

SEQ ID NO: 435823 - DNA, 134 bp, Homo sapiens; identical to SEQ ID NO: 258210
  chr7:126173534-126173668
  hypo

SEQ ID NO: 435824 - DNA, 36 bp, Homo sapiens; identical to SEQ ID NO: 258211
  chr7:127231013-127231049
  hypo

SEQ ID NO: 435825 - DNA, 245 bp, Homo sapiens; identical to SEQ ID NO: 258212
  chr7:127235457-127235702
  hypo

SEQ ID NO: 435826 - DNA, 100 bp, Homo sapiens; identical to SEQ ID NO: 258213
  chr7:127240011-127240111
  hypo

SEQ ID NO: 435827 - DNA, 163 bp, Homo sapiens; identical to SEQ ID NO: 258215
  chr7:127452506-127452669
  hypo

SEQ ID NO: 435828 - DNA, 32 bp, Homo sapiens; identical to SEQ ID NO: 258216
  chr7:127497484-127497516
  hypo

SEQ ID NO: 435829 - DNA, 54 bp, Homo sapiens; identical to SEQ ID NO: 258217
  chr7:127502788-127502842
  hypo

SEQ ID NO: 435830 - DNA, 125 bp, Homo sapiens; identical to SEQ ID NO: 211796
  chr7:127544866-127544991
  hypo

SEQ ID NO: 435831 - DNA, 172 bp, Homo sapiens; identical to SEQ ID NO: 258219
  chr7:127583867-127584039
  hypo

SEQ ID NO: 435832 - DNA, 83 bp, Homo sapiens; identical to SEQ ID NO: 308344
  chr7:127615838-127615921
  hypo

SEQ ID NO: 435833 - DNA, 287 bp, Homo sapiens; identical to SEQ ID NO: 211799
  chr7:127693923-127694210
  hypo

SEQ ID NO: 435834 - DNA, 46 bp, Homo sapiens; identical to SEQ ID NO: 258225
  chr7:127721780-127721826
  hypo

SEQ ID NO: 435835 - DNA, 42 bp, Homo sapiens; identical to SEQ ID NO: 258226
  chr7:127984395-127984437
  hypo

SEQ ID NO: 435836 - DNA, 105 bp, Homo sapiens; identical to SEQ ID NO: 211800
  chr7:128097963-128098068
  hypo

SEQ ID NO: 435837 - DNA, 215 bp, Homo sapiens; identical to SEQ ID NO: 258229
  chr7:128441280-128441495
  hypo

SEQ ID NO: 435838 - DNA, 257 bp, Homo sapiens; identical to SEQ ID NO: 211801
  chr7:128484037-128484294
  hypo

SEQ ID NO: 435839 - DNA, 46 bp, Homo sapiens; identical to SEQ ID NO: 308355
  chr7:128484885-128484931
  hypo

SEQ ID NO: 435840 - DNA, 254 bp, Homo sapiens; identical to SEQ ID NO: 308356
  chr7:128484981-128485235
  hypo

SEQ ID NO: 435841 - DNA, 341 bp, Homo sapiens; identical to SEQ ID NO: 258232
  chr7:128488723-128489064
  hypo

SEQ ID NO: 435842 - DNA, 222 bp, Homo sapiens; identical to SEQ ID NO: 258233
  chr7:128489418-128489640
  hypo

SEQ ID NO: 435843 - DNA, 381 bp, Homo sapiens; identical to SEQ ID NO: 308359
  chr7:128492721-128493102
  hypo

SEQ ID NO: 435844 - DNA, 75 bp, Homo sapiens; identical to SEQ ID NO: 308360
  chr7:128494167-128494242
  hypo

SEQ ID NO: 435845 - DNA, 275 bp, Homo sapiens; identical to SEQ ID NO: 258236
  chr7:128494588-128494863
  hypo

SEQ ID NO: 435846 - DNA, 112 bp, Homo sapiens; identical to SEQ ID NO: 285410
  chr7:128509598-128509710
  hypo

SEQ ID NO: 435847 - DNA, 108 bp, Homo sapiens; identical to SEQ ID NO: 258238
  chr7:128532126-128532234
  hypo

SEQ ID NO: 435848 - DNA, 42 bp, Homo sapiens; identical to SEQ ID NO: 258239
  chr7:128533896-128533938
  hypo

SEQ ID NO: 435849 - DNA, 42 bp, Homo sapiens; identical to SEQ ID NO: 258240
  chr7:128534159-128534201
  hypo

SEQ ID NO: 435850 - DNA, 74 bp, Homo sapiens; identical to SEQ ID NO: 211803
  chr7:128587332-128587406
  hypo

SEQ ID NO: 435851 - DNA, 84 bp, Homo sapiens; identical to SEQ ID NO: 258245
  chr7:128767406-128767490
  hypo

SEQ ID NO: 435852 - DNA, 36 bp, Homo sapiens; identical to SEQ ID NO: 258246
  chr7:128853698-128853734
  hypo

SEQ ID NO: 435853 - DNA, 128 bp, Homo sapiens; identical to SEQ ID NO: 258247
  chr7:129050168-129050296
  hypo

SEQ ID NO: 435854 - DNA, 94 bp, Homo sapiens; identical to SEQ ID NO: 211806
  chr7:129096502-129096596
  hypo

SEQ ID NO: 435855 - DNA, 81 bp, Homo sapiens; identical to SEQ ID NO: 258249
  chr7:129172367-129172448
  hypo

SEQ ID NO: 435856 - DNA, 129 bp, Homo sapiens; identical to SEQ ID NO: 258250
  chr7:129245415-129245544
  hypo

SEQ ID NO: 435857 - DNA, 44 bp, Homo sapiens; identical to SEQ ID NO: 258251
  chr7:129287558-129287602
  hypo

SEQ ID NO: 435858 - DNA, 71 bp, Homo sapiens; identical to SEQ ID NO: 308379
  chr7:129297203-129297274
  hypo

SEQ ID NO: 435859 - DNA, 45 bp, Homo sapiens; identical to SEQ ID NO: 308380
  chr7:129297304-129297349
  hypo

SEQ ID NO: 435860 - DNA, 184 bp, Homo sapiens; identical to SEQ ID NO: 258254
  chr7:129392673-129392857
  hypo

SEQ ID NO: 435861 - DNA, 75 bp, Homo sapiens; identical to SEQ ID NO: 258255
  chr7:129410252-129410327
  hypo

SEQ ID NO: 435862 - DNA, 330 bp, Homo sapiens; identical to SEQ ID NO: 258256
  chr7:129414553-129414883
  hypo

SEQ ID NO: 435863 - DNA, 112 bp, Homo sapiens; identical to SEQ ID NO: 211810
  chr7:129435134-129435246
  hypo

SEQ ID NO: 435864 - DNA, 39 bp, Homo sapiens; identical to SEQ ID NO: 258259
  chr7:129483110-129483149
  hypo

SEQ ID NO: 435865 - DNA, 33 bp, Homo sapiens; identical to SEQ ID NO: 258261
  chr7:129501458-129501491
  hypo

SEQ ID NO: 435866 - DNA, 143 bp, Homo sapiens; identical to SEQ ID NO: 258262
  chr7:129504689-129504832
  hypo

SEQ ID NO: 435867 - DNA, 154 bp, Homo sapiens; identical to SEQ ID NO: 258263
  chr7:129518100-129518254
  hypo

SEQ ID NO: 435868 - DNA, 176 bp, Homo sapiens; identical to SEQ ID NO: 258264
  chr7:129565205-129565381
  hypo

SEQ ID NO: 435869 - DNA, 31 bp, Homo sapiens; identical to SEQ ID NO: 258265
  chr7:129665425-129665456
  hypo

SEQ ID NO: 435870 - DNA, 45 bp, Homo sapiens; identical to SEQ ID NO: 211813
  chr7:129689365-129689410
  hypo

SEQ ID NO: 435871 - DNA, 240 bp, Homo sapiens; identical to SEQ ID NO: 211814
  chr7:129689710-129689950
  hypo

SEQ ID NO: 435872 - DNA, 147 bp, Homo sapiens; identical to SEQ ID NO: 211815
  chr7:129778855-129779002
  hypo

SEQ ID NO: 435873 - DNA, 74 bp, Homo sapiens; identical to SEQ ID NO: 258269
  chr7:129780114-129780188
  hypo

SEQ ID NO: 435874 - DNA, 180 bp, Homo sapiens; identical to SEQ ID NO: 258274
  chr7:129833437-129833617
  hypo

SEQ ID NO: 435875 - DNA, 78 bp, Homo sapiens; identical to SEQ ID NO: 258277
  chr7:129851262-129851340
  hypo

SEQ ID NO: 435876 - DNA, 274 bp, Homo sapiens; identical to SEQ ID NO: 211819
  chr7:129948129-129948403
  hypo

SEQ ID NO: 435877 - DNA, 281 bp, Homo sapiens; identical to SEQ ID NO: 258282
  chr7:131422550-131422831
  hypo

SEQ ID NO: 435878 - DNA, 249 bp, Homo sapiens; identical to SEQ ID NO: 211821
  chr7:131864448-131864697
  hypo

SEQ ID NO: 435879 - DNA, 38 bp, Homo sapiens; identical to SEQ ID NO: 285434
  chr7:132262442-132262480
  hypo

SEQ ID NO: 435880 - DNA, 31 bp, Homo sapiens; identical to SEQ ID NO: 385849
  chr7:132419108-132419139
  hypo

SEQ ID NO: 435881 - DNA, 32 bp, Homo sapiens; identical to SEQ ID NO: 406172
  chr7:132527796-132527828
  hypo

SEQ ID NO: 435882 - DNA, 45 bp, Homo sapiens; identical to SEQ ID NO: 211823
  chr7:132527948-132527993
  hypo

SEQ ID NO: 435883 - DNA, 173 bp, Homo sapiens; identical to SEQ ID NO: 258287
  chr7:132610412-132610585
  hypo

SEQ ID NO: 435884 - DNA, 203 bp, Homo sapiens; identical to SEQ ID NO: 211824
  chr7:132637910-132638113
  hypo

SEQ ID NO: 435885 - DNA, 92 bp, Homo sapiens; identical to SEQ ID NO: 211825
  chr7:133234086-133234178
  hypo

SEQ ID NO: 435886 - DNA, 102 bp, Homo sapiens; identical to SEQ ID NO: 258291
  chr7:133828852-133828954
  hypo

SEQ ID NO: 435887 - DNA, 42 bp, Homo sapiens; identical to SEQ ID NO: 258292
  chr7:134135183-134135225
  hypo

SEQ ID NO: 435888 - DNA, 59 bp, Homo sapiens; identical to SEQ ID NO: 211826
  chr7:134377919-134377978
  hypo

SEQ ID NO: 435889 - DNA, 50 bp, Homo sapiens; identical to SEQ ID NO: 211827
  chr7:134378383-134378433
  hypo

SEQ ID NO: 435890 - DNA, 144 bp, Homo sapiens; identical to SEQ ID NO: 211829
  chr7:134673287-134673431
  hypo

SEQ ID NO: 435891 - DNA, 184 bp, Homo sapiens; identical to SEQ ID NO: 211830
  chr7:134853337-134853521
  hypo

SEQ ID NO: 435892 - DNA, 242 bp, Homo sapiens; identical to SEQ ID NO: 258298
  chr7:134860914-134861156
  hypo

SEQ ID NO: 435893 - DNA, 32 bp, Homo sapiens; identical to SEQ ID NO: 385851
  chr7:134880722-134880754
  hypo

SEQ ID NO: 435894 - DNA, 238 bp, Homo sapiens; identical to SEQ ID NO: 211833
  chr7:134890670-134890908
  hypo

SEQ ID NO: 435895 - DNA, 83 bp, Homo sapiens
  chr7:134918793-134918876
  hypo
gtcactgtggctacctacatttttgagagtgattctggatgatgatgatgatgatgatgatgattattattattatcattttg

SEQ ID NO: 435896 - DNA, 36 bp, Homo sapiens; identical to SEQ ID NO: 258304
  chr7:134922346-134922382
  hypo

SEQ ID NO: 435897 - DNA, 97 bp, Homo sapiens; identical to SEQ ID NO: 211837
  chr7:135360968-135361065
  hypo

SEQ ID NO: 435898 - DNA, 197 bp, Homo sapiens; identical to SEQ ID NO: 258307
  chr7:135390900-135391097
  hypo

SEQ ID NO: 435899 - DNA, 120 bp, Homo sapiens; identical to SEQ ID NO: 258308
  chr7:135401689-135401809
  hypo

SEQ ID NO: 435900 - DNA, 87 bp, Homo sapiens; identical to SEQ ID NO: 74795
  chr7:135440342-135440429
  hypo

SEQ ID NO: 435901 - DNA, 85 bp, Homo sapiens; identical to SEQ ID NO: 258312
  chr7:135751659-135751744
  hypo

SEQ ID NO: 435902 - DNA, 96 bp, Homo sapiens; identical to SEQ ID NO: 211839
  chr7:136437909-136438005
  hypo

SEQ ID NO: 435903 - DNA, 42 bp, Homo sapiens; identical to SEQ ID NO: 308445
  chr7:136849129-136849171
  hypo

SEQ ID NO: 435904 - DNA, 31 bp, Homo sapiens; identical to SEQ ID NO: 258315
  chr7:137107612-137107643
  hypo

SEQ ID NO: 435905 - DNA, 67 bp, Homo sapiens; identical to SEQ ID NO: 258316
  chr7:137499014-137499081
  hypo

SEQ ID NO: 435906 - DNA, 185 bp, Homo sapiens; identical to SEQ ID NO: 258318
  chr7:137593862-137594047
  hypo

SEQ ID NO: 435907 - DNA, 37 bp, Homo sapiens; identical to SEQ ID NO: 211841
  chr7:137637556-137637593
  hypo

SEQ ID NO: 435908 - DNA, 37 bp, Homo sapiens; identical to SEQ ID NO: 211842
  chr7:137637833-137637870
  hypo

SEQ ID NO: 435909 - DNA, 40 bp, Homo sapiens; identical to SEQ ID NO: 258321
  chr7:137658137-137658177
  hypo

SEQ ID NO: 435910 - DNA, 204 bp, Homo sapiens; identical to SEQ ID NO: 211843
  chr7:137670025-137670229
  hypo

SEQ ID NO: 435911 - DNA, 194 bp, Homo sapiens; identical to SEQ ID NO: 211844
  chr7:137706784-137706978
  hypo

SEQ ID NO: 435912 - DNA, 37 bp, Homo sapiens; identical to SEQ ID NO: 258325
  chr7:137742304-137742341
  hypo

SEQ ID NO: 435913 - DNA, 119 bp, Homo sapiens; identical to SEQ ID NO: 258326
  chr7:138010002-138010121
  hypo

SEQ ID NO: 435914 - DNA, 39 bp, Homo sapiens; identical to SEQ ID NO: 211846
  chr7:138042568-138042607
  hypo

SEQ ID NO: 435915 - DNA, 83 bp, Homo sapiens; identical to SEQ ID NO: 258329
  chr7:138044359-138044442
  hypo

SEQ ID NO: 435916 - DNA, 120 bp, Homo sapiens; identical to SEQ ID NO: 258330
  chr7:138044851-138044971
  hypo

SEQ ID NO: 435917 - DNA, 152 bp, Homo sapiens; identical to SEQ ID NO: 258331
  chr7:138125641-138125793
  hypo

SEQ ID NO: 435918 - DNA, 34 bp, Homo sapiens; identical to SEQ ID NO: 211847
  chr7:138247007-138247041
  hypo

SEQ ID NO: 435919 - DNA, 293 bp, Homo sapiens; identical to SEQ ID NO: 258333
  chr7:138554218-138554511
  hypo

SEQ ID NO: 435920 - DNA, 37 bp, Homo sapiens; identical to SEQ ID NO: 258334
  chr7:138588489-138588526
  hypo

SEQ ID NO: 435921 - DNA, 36 bp, Homo sapiens; identical to SEQ ID NO: 258335
  chr7:138588586-138588622
  hypo

SEQ ID NO: 435922 - DNA, 38 bp, Homo sapiens; identical to SEQ ID NO: 258336
  chr7:138636038-138636076
  hypo

SEQ ID NO: 435923 - DNA, 40 bp, Homo sapiens; identical to SEQ ID NO: 258337
  chr7:138647454-138647494
  hypo

SEQ ID NO: 435924 - DNA, 325 bp, Homo sapiens; identical to SEQ ID NO: 285450
  chr7:138720460-138720785
  hypo

SEQ ID NO: 435925 - DNA, 43 bp, Homo sapiens; identical to SEQ ID NO: 201201
  chr7:138720909-138720952
  hypo

SEQ ID NO: 435926 - DNA, 84 bp, Homo sapiens; identical to SEQ ID NO: 211850
  chr7:138721475-138721559
  hypo

SEQ ID NO: 435927 - DNA, 33 bp, Homo sapiens; identical to SEQ ID NO: 211851
  chr7:138778536-138778569
  hypo

SEQ ID NO: 435928 - DNA, 93 bp, Homo sapiens; identical to SEQ ID NO: 258341
  chr7:138912954-138913047
  hypo

SEQ ID NO: 435929 - DNA, 41 bp, Homo sapiens; identical to SEQ ID NO: 258342
  chr7:138913397-138913438
  hypo

SEQ ID NO: 435930 - DNA, 120 bp, Homo sapiens; identical to SEQ ID NO: 211852
  chr7:138974788-138974908
  hypo

SEQ ID NO: 435931 - DNA, 98 bp, Homo sapiens; identical to SEQ ID NO: 308476
  chr7:139112527-139112625
  hypo

SEQ ID NO: 435932 - DNA, 87 bp, Homo sapiens; identical to SEQ ID NO: 308477
  chr7:139112655-139112742
  hypo

SEQ ID NO: 435933 - DNA, 42 bp, Homo sapiens; identical to SEQ ID NO: 258346
  chr7:139123708-139123750
  hypo

SEQ ID NO: 435934 - DNA, 180 bp, Homo sapiens; identical to SEQ ID NO: 308479
  chr7:139245529-139245709
  hypo

SEQ ID NO: 435935 - DNA, 45 bp, Homo sapiens; identical to SEQ ID NO: 258348
  chr7:139256590-139256635
  hypo

SEQ ID NO: 435936 - DNA, 180 bp, Homo sapiens; identical to SEQ ID NO: 211854
  chr7:139298887-139299067
  hypo

SEQ ID NO: 435937 - DNA, 545 bp, Homo sapiens; identical to SEQ ID NO: 285456
  chr7:139477943-139478488
  hypo

SEQ ID NO: 435938 - DNA, 40 bp, Homo sapiens; identical to SEQ ID NO: 258352
  chr7:139709787-139709827
  hypo

SEQ ID NO: 435939 - DNA, 58 bp, Homo sapiens; identical to SEQ ID NO: 258353
  chr7:139710188-139710246
  hypo

SEQ ID NO: 435940 - DNA, 213 bp, Homo sapiens; identical to SEQ ID NO: 258355
  chr7:139727808-139728021
  hypo

SEQ ID NO: 435941 - DNA, 346 bp, Homo sapiens; identical to SEQ ID NO: 211856
  chr7:139733611-139733957
  hypo

SEQ ID NO: 435942 - DNA, 142 bp, Homo sapiens; identical to SEQ ID NO: 258357
  chr7:139763645-139763787
  hypo

SEQ ID NO: 435943 - DNA, 42 bp, Homo sapiens; identical to SEQ ID NO: 258358
  chr7:139842731-139842773
  hypo

SEQ ID NO: 435944 - DNA, 44 bp, Homo sapiens; identical to SEQ ID NO: 258359
  chr7:139866424-139866468
  hypo

SEQ ID NO: 435945 - DNA, 65 bp, Homo sapiens; identical to SEQ ID NO: 258360
  chr7:139897108-139897173
  hypo

SEQ ID NO: 435946 - DNA, 160 bp, Homo sapiens; identical to SEQ ID NO: 211857
  chr7:139992308-139992468
  hypo

SEQ ID NO: 435947 - DNA, 226 bp, Homo sapiens; identical to SEQ ID NO: 258362
  chr7:140006659-140006885
  hypo

SEQ ID NO: 435948 - DNA, 64 bp, Homo sapiens; identical to SEQ ID NO: 211858
  chr7:140026944-140027008
  hypo

SEQ ID NO: 435949 - DNA, 123 bp, Homo sapiens; identical to SEQ ID NO: 211859
  chr7:140027079-140027202
  hypo

SEQ ID NO: 435950 - DNA, 160 bp, Homo sapiens; identical to SEQ ID NO: 211860
  chr7:140027767-140027927
  hypo

SEQ ID NO: 435951 - DNA, 346 bp, Homo sapiens; identical to SEQ ID NO: 258365
  chr7:140029901-140030247
  hypo

SEQ ID NO: 435952 - DNA, 31 bp, Homo sapiens; identical to SEQ ID NO: 258366
  chr7:140045118-140045149
  hypo

SEQ ID NO: 435953 - DNA, 137 bp, Homo sapiens; identical to SEQ ID NO: 258367
  chr7:140045706-140045843
  hypo

SEQ ID NO: 435954 - DNA, 169 bp, Homo sapiens; identical to SEQ ID NO: 258368
  chr7:140048397-140048566
  hypo

SEQ ID NO: 435955 - DNA, 190 bp, Homo sapiens; identical to SEQ ID NO: 258369
  chr7:140050012-140050202
  hypo

SEQ ID NO: 435956 - DNA, 92 bp, Homo sapiens; identical to SEQ ID NO: 211861
  chr7:140063543-140063635
  hypo

SEQ ID NO: 435957 - DNA, 190 bp, Homo sapiens; identical to SEQ ID NO: 285459
  chr7:140098064-140098254
  hypo

SEQ ID NO: 435958 - DNA, 179 bp, Homo sapiens; identical to SEQ ID NO: 115791
  chr7:140098296-140098475
  hypo

SEQ ID NO: 435959 - DNA, 54 bp, Homo sapiens; identical to SEQ ID NO: 258371
  chr7:140105280-140105334
  hypo

SEQ ID NO: 435960 - DNA, 36 bp, Homo sapiens; identical to SEQ ID NO: 258372
  chr7:140105364-140105400
  hypo

SEQ ID NO: 435961 - DNA, 42 bp, Homo sapiens; identical to SEQ ID NO: 258373
  chr7:140130676-140130718
  hypo

SEQ ID NO: 435962 - DNA, 117 bp, Homo sapiens; identical to SEQ ID NO: 258377
  chr7:140205262-140205379
  hypo

SEQ ID NO: 435963 - DNA, 77 bp, Homo sapiens; identical to SEQ ID NO: 258378
  chr7:140217363-140217440
  hypo

SEQ ID NO: 435964 - DNA, 37 bp, Homo sapiens; identical to SEQ ID NO: 258379
  chr7:140219801-140219838
  hypo

SEQ ID NO: 435965 - DNA, 280 bp, Homo sapiens; identical to SEQ ID NO: 211866
  chr7:140221611-140221891
  hypo

SEQ ID NO: 435966 - DNA, 75 bp, Homo sapiens; identical to SEQ ID NO: 308517
  chr7:140227201-140227276
  hypo

SEQ ID NO: 435967 - DNA, 205 bp, Homo sapiens; identical to SEQ ID NO: 258382
  chr7:140402597-140402802
  hypo

SEQ ID NO: 435968 - DNA, 32 bp, Homo sapiens; identical to SEQ ID NO: 211867
  chr7:140427687-140427719
  hypo

SEQ ID NO: 435969 - DNA, 42 bp, Homo sapiens; identical to SEQ ID NO: 258384
  chr7:140643306-140643348
  hypo

SEQ ID NO: 435970 - DNA, 175 bp, Homo sapiens; identical to SEQ ID NO: 211868
  chr7:140710244-140710419
  hypo

SEQ ID NO: 435971 - DNA, 37 bp, Homo sapiens; identical to SEQ ID NO: 258386
  chr7:140988502-140988539
  hypo

SEQ ID NO: 435972 - DNA, 188 bp, Homo sapiens; identical to SEQ ID NO: 258387
  chr7:141096128-141096316
  hypo

SEQ ID NO: 435973 - DNA, 62 bp, Homo sapiens; identical to SEQ ID NO: 258388
  chr7:141273455-141273517
  hypo

SEQ ID NO: 435974 - DNA, 180 bp, Homo sapiens; identical to SEQ ID NO: 258389
  chr7:142906905-142907085
  hypo

SEQ ID NO: 435975 - DNA, 161 bp, Homo sapiens; identical to SEQ ID NO: 211871
  chr7:143000867-143001028
  hypo

SEQ ID NO: 435976 - DNA, 144 bp, Homo sapiens; identical to SEQ ID NO: 258391
  chr7:143013314-143013458
  hypo

SEQ ID NO: 435977 - DNA, 57 bp, Homo sapiens; identical to SEQ ID NO: 211872
  chr7:143096713-143096770
  hypo

SEQ ID NO: 435978 - DNA, 79 bp, Homo sapiens; identical to SEQ ID NO: 211873
  chr7:143097073-143097152
  hypo

SEQ ID NO: 435979 - DNA, 257 bp, Homo sapiens; identical to SEQ ID NO: 223241
  chr7:144100839-144101096
  hypo

SEQ ID NO: 435980 - DNA, 76 bp, Homo sapiens; identical to SEQ ID NO: 258394
  chr7:145021289-145021365
  hypo

SEQ ID NO: 435981 - DNA, 75 bp, Homo sapiens; identical to SEQ ID NO: 258395
  chr7:145021425-145021500
  hypo

SEQ ID NO: 435982 - DNA, 128 bp, Homo sapiens; identical to SEQ ID NO: 258396
  chr7:145280166-145280294
  hypo

SEQ ID NO: 435983 - DNA, 152 bp, Homo sapiens; identical to SEQ ID NO: 201215
  chr7:145981901-145982053
  hypo

SEQ ID NO: 435984 - DNA, 35 bp, Homo sapiens; identical to SEQ ID NO: 258397
  chr7:146228910-146228945
  hypo

SEQ ID NO: 435985 - DNA, 132 bp, Homo sapiens; identical to SEQ ID NO: 211875
  chr7:146425093-146425225
  hypo

SEQ ID NO: 435986 - DNA, 42 bp, Homo sapiens; identical to SEQ ID NO: 258399
  chr7:146656356-146656398
  hypo

SEQ ID NO: 435987 - DNA, 38 bp, Homo sapiens; identical to SEQ ID NO: 258400
  chr7:147179513-147179551
  hypo

SEQ ID NO: 435988 - DNA, 31 bp, Homo sapiens; identical to SEQ ID NO: 258401
  chr7:147216090-147216121
  hypo

SEQ ID NO: 435989 - DNA, 67 bp, Homo sapiens; identical to SEQ ID NO: 258403
  chr7:147954381-147954448
  hypo

SEQ ID NO: 435990 - DNA, 33 bp, Homo sapiens; identical to SEQ ID NO: 258404
  chr7:147975333-147975366
  hypo

SEQ ID NO: 435991 - DNA, 115 bp, Homo sapiens; identical to SEQ ID NO: 258405
  chr7:148077004-148077119
  hypo

SEQ ID NO: 435992 - DNA, 83 bp, Homo sapiens; identical to SEQ ID NO: 406232
  chr7:148079389-148079472
  hypo

SEQ ID NO: 435993 - DNA, 51 bp, Homo sapiens; identical to SEQ ID NO: 406233
  chr7:148079674-148079725
  hypo

SEQ ID NO: 435994 - DNA, 157 bp, Homo sapiens; identical to SEQ ID NO: 211878
  chr7:148079755-148079912
  hypo

SEQ ID NO: 435995 - DNA, 261 bp, Homo sapiens; identical to SEQ ID NO: 258408
  chr7:148162146-148162407
  hypo

SEQ ID NO: 435996 - DNA, 128 bp, Homo sapiens; identical to SEQ ID NO: 258409
  chr7:148296995-148297123
  hypo

SEQ ID NO: 435997 - DNA, 64 bp, Homo sapiens; identical to SEQ ID NO: 308554
  chr7:148500530-148500594
  hypo

SEQ ID NO: 435998 - DNA, 102 bp, Homo sapiens; identical to SEQ ID NO: 308555
  chr7:148500624-148500726
  hypo

SEQ ID NO: 435999 - DNA, 79 bp, Homo sapiens; identical to SEQ ID NO: 201217
  chr7:148506412-148506491
  hypo

SEQ ID NO: 436000 - DNA, 89 bp, Homo sapiens; identical to SEQ ID NO: 201218
  chr7:148507424-148507513
  hypo

SEQ ID NO: 436001 - DNA, 71 bp, Homo sapiens; identical to SEQ ID NO: 201219
  chr7:148508741-148508812
  hypo

SEQ ID NO: 436002 - DNA, 184 bp, Homo sapiens; identical to SEQ ID NO: 201220
  chr7:148511050-148511234
  hypo

SEQ ID NO: 436003 - DNA, 107 bp, Homo sapiens; identical to SEQ ID NO: 201221
  chr7:148512014-148512121
  hypo

SEQ ID NO: 436004 - DNA, 34 bp, Homo sapiens; identical to SEQ ID NO: 201222
  chr7:148513818-148513852
  hypo

SEQ ID NO: 436005 - DNA, 121 bp, Homo sapiens; identical to SEQ ID NO: 201223
  chr7:148514301-148514422
  hypo

SEQ ID NO: 436006 - DNA, 76 bp, Homo sapiens; identical to SEQ ID NO: 201224
  chr7:148515086-148515162
  hypo

SEQ ID NO: 436007 - DNA, 119 bp, Homo sapiens; identical to SEQ ID NO: 201226
  chr7:148526816-148526935
  hypo

SEQ ID NO: 436008 - DNA, 42 bp, Homo sapiens; identical to SEQ ID NO: 258413
  chr7:148625816-148625858
  hypo

SEQ ID NO: 436009 - DNA, 42 bp, Homo sapiens; identical to SEQ ID NO: 258414
  chr7:148626098-148626140
  hypo

SEQ ID NO: 436010 - DNA, 143 bp, Homo sapiens; identical to SEQ ID NO: 258415
  chr7:148692793-148692936
  hypo

SEQ ID NO: 436011 - DNA, 225 bp, Homo sapiens; identical to SEQ ID NO: 211892
  chr7:148703454-148703679
  hypo

SEQ ID NO: 436012 - DNA, 135 bp, Homo sapiens; identical to SEQ ID NO: 258417
  chr7:148717800-148717935
  hypo

SEQ ID NO: 436013 - DNA, 33 bp, Homo sapiens; identical to SEQ ID NO: 258418
  chr7:148819752-148819785
  hypo

SEQ ID NO: 436014 - DNA, 127 bp, Homo sapiens; identical to SEQ ID NO: 211893
  chr7:148846224-148846351
  hypo

SEQ ID NO: 436015 - DNA, 48 bp, Homo sapiens; identical to SEQ ID NO: 406243
  chr7:148884147-148884195
  hypo

SEQ ID NO: 436016 - DNA, 84 bp, Homo sapiens; identical to SEQ ID NO: 211895
  chr7:148901648-148901732
  hypo

SEQ ID NO: 436017 - DNA, 246 bp, Homo sapiens; identical to SEQ ID NO: 258424
  chr7:148921396-148921642
  hypo

SEQ ID NO: 436018 - DNA, 45 bp, Homo sapiens; identical to SEQ ID NO: 211897
  chr7:148930559-148930604
  hypo

SEQ ID NO: 436019 - DNA, 158 bp, Homo sapiens; identical to SEQ ID NO: 201228
  chr7:148936558-148936716
  hypo

SEQ ID NO: 436020 - DNA, 266 bp, Homo sapiens; identical to SEQ ID NO: 285502
  chr7:148959355-148959621
  hypo

SEQ ID NO: 436021 - DNA, 394 bp, Homo sapiens; identical to SEQ ID NO: 258427
  chr7:148984552-148984946
  hypo

SEQ ID NO: 436022 - DNA, 319 bp, Homo sapiens; identical to SEQ ID NO: 258428
  chr7:148992084-148992403
  hypo

SEQ ID NO: 436023 - DNA, 178 bp, Homo sapiens; identical to SEQ ID NO: 258429
  chr7:149005005-149005183
  hypo

SEQ ID NO: 436024 - DNA, 105 bp, Homo sapiens; identical to SEQ ID NO: 258430
  chr7:149084384-149084489
  hypo

SEQ ID NO: 436025 - DNA, 32 bp, Homo sapiens; identical to SEQ ID NO: 211900
  chr7:149114320-149114352
  hypo

SEQ ID NO: 436026 - DNA, 430 bp, Homo sapiens; identical to SEQ ID NO: 258433
  chr7:149171587-149172017
  hypo

SEQ ID NO: 436027 - DNA, 77 bp, Homo sapiens; identical to SEQ ID NO: 258434
  chr7:149257399-149257476
  hypo

SEQ ID NO: 436028 - DNA, 101 bp, Homo sapiens; identical to SEQ ID NO: 258435
  chr7:149257709-149257810
  hypo

SEQ ID NO: 436029 - DNA, 328 bp, Homo sapiens; identical to SEQ ID NO: 258436
  chr7:149416660-149416988
  hypo

SEQ ID NO: 436030 - DNA, 432 bp, Homo sapiens; identical to SEQ ID NO: 211902
  chr7:149420320-149420752
  hypo

SEQ ID NO: 436031 - DNA, 969 bp, Homo sapiens; identical to SEQ ID NO: 258440
  chr7:149462308-149463277
  hypo

SEQ ID NO: 436032 - DNA, 98 bp, Homo sapiens; identical to SEQ ID NO: 258441
  chr7:149489458-149489556
  hypo

SEQ ID NO: 436033 - DNA, 131 bp, Homo sapiens; identical to SEQ ID NO: 258442
  chr7:149516460-149516591
  hypo

SEQ ID NO: 436034 - DNA, 43 bp, Homo sapiens; identical to SEQ ID NO: 211906
  chr7:150039378-150039421
  hypo

SEQ ID NO: 436035 - DNA, 43 bp, Homo sapiens; identical to SEQ ID NO: 258449
  chr7:150079846-150079889
  hypo

SEQ ID NO: 436036 - DNA, 57 bp, Homo sapiens; identical to SEQ ID NO: 258451
  chr7:150097104-150097161
  hypo

SEQ ID NO: 436037 - DNA, 232 bp, Homo sapiens; identical to SEQ ID NO: 211909
  chr7:150098291-150098523
  hypo

SEQ ID NO: 436038 - DNA, 89 bp, Homo sapiens; identical to SEQ ID NO: 258453
  chr7:150099969-150100058
  hypo

SEQ ID NO: 436039 - DNA, 181 bp, Homo sapiens; identical to SEQ ID NO: 211910
  chr7:150100654-150100835
  hypo

SEQ ID NO: 436040 - DNA, 154 bp, Homo sapiens; identical to SEQ ID NO: 211911
  chr7:150104947-150105101
  hypo

SEQ ID NO: 436041 - DNA, 53 bp, Homo sapiens; identical to SEQ ID NO: 211912
  chr7:150105548-150105601
  hypo

SEQ ID NO: 436042 - DNA, 152 bp, Homo sapiens; identical to SEQ ID NO: 258457
  chr7:150269706-150269858
  hypo

SEQ ID NO: 436043 - DNA, 359 bp, Homo sapiens; identical to SEQ ID NO: 258458
  chr7:150325090-150325449
  hypo

SEQ ID NO: 436044 - DNA, 552 bp, Homo sapiens; identical to SEQ ID NO: 201234
  chr7:150497095-150497647
  hypo

SEQ ID NO: 436045 - DNA, 318 bp, Homo sapiens; identical to SEQ ID NO: 285517
  chr7:150497885-150498203
  hypo

SEQ ID NO: 436046 - DNA, 188 bp, Homo sapiens; identical to SEQ ID NO: 258459
  chr7:150720588-150720776
  hypo

SEQ ID NO: 436047 - DNA, 50 bp, Homo sapiens; identical to SEQ ID NO: 258460
  chr7:150745459-150745509
  hypo

SEQ ID NO: 436048 - DNA, 54 bp, Homo sapiens; identical to SEQ ID NO: 211918
  chr7:150773442-150773496
  hypo

SEQ ID NO: 436049 - DNA, 53 bp, Homo sapiens; identical to SEQ ID NO: 406262
  chr7:150774213-150774266
  hypo

SEQ ID NO: 436050 - DNA, 61 bp, Homo sapiens; identical to SEQ ID NO: 211921
  chr7:150776689-150776750
  hypo

SEQ ID NO: 436051 - DNA, 185 bp, Homo sapiens; identical to SEQ ID NO: 308627
  chr7:150811101-150811286
  hypo

SEQ ID NO: 436052 - DNA, 292 bp, Homo sapiens; identical to SEQ ID NO: 308628
  chr7:150811359-150811651
  hypo

SEQ ID NO: 436053 - DNA, 623 bp, Homo sapiens; identical to SEQ ID NO: 211926
  chr7:150813836-150814459
  hypo

SEQ ID NO: 436054 - DNA, 209 bp, Homo sapiens; identical to SEQ ID NO: 258471
  chr7:150817629-150817838
  hypo

SEQ ID NO: 436055 - DNA, 197 bp, Homo sapiens; identical to SEQ ID NO: 258472
  chr7:150828089-150828286
  hypo

SEQ ID NO: 436056 - DNA, 35 bp, Homo sapiens; identical to SEQ ID NO: 211928
  chr7:150828563-150828598
  hypo

SEQ ID NO: 436057 - DNA, 33 bp, Homo sapiens; identical to SEQ ID NO: 201242
  chr7:150869804-150869837
  hypo

SEQ ID NO: 436058 - DNA, 109 bp, Homo sapiens; identical to SEQ ID NO: 258474
  chr7:150878305-150878414
  hypo

SEQ ID NO: 436059 - DNA, 202 bp, Homo sapiens; identical to SEQ ID NO: 258476
  chr7:150934636-150934838
  hypo

SEQ ID NO: 436060 - DNA, 235 bp, Homo sapiens; identical to SEQ ID NO: 258477
  chr7:150936103-150936338
  hypo

SEQ ID NO: 436061 - DNA, 64 bp, Homo sapiens; identical to SEQ ID NO: 223266
  chr7:150948746-150948810
  hypo

SEQ ID NO: 436062 - DNA, 217 bp, Homo sapiens; identical to SEQ ID NO: 258478
  chr7:151073504-151073721
  hypo

SEQ ID NO: 436063 - DNA, 51 bp, Homo sapiens; identical to SEQ ID NO: 258479
  chr7:151074139-151074190
  hypo

SEQ ID NO: 436064 - DNA, 34 bp, Homo sapiens; identical to SEQ ID NO: 211931
  chr7:151074643-151074677
  hypo

SEQ ID NO: 436065 - DNA, 237 bp, Homo sapiens; identical to SEQ ID NO: 258481
  chr7:151124256-151124493
  hypo

SEQ ID NO: 436066 - DNA, 244 bp, Homo sapiens; identical to SEQ ID NO: 258482
  chr7:151129034-151129278
  hypo

SEQ ID NO: 436067 - DNA, 173 bp, Homo sapiens; identical to SEQ ID NO: 258483
  chr7:151133222-151133395
  hypo

SEQ ID NO: 436068 - DNA, 33 bp, Homo sapiens; identical to SEQ ID NO: 211932
  chr7:151134320-151134353
  hypo

SEQ ID NO: 436069 - DNA, 36 bp, Homo sapiens; identical to SEQ ID NO: 211934
  chr7:151214439-151214475
  hypo

SEQ ID NO: 436070 - DNA, 347 bp, Homo sapiens; identical to SEQ ID NO: 285540
  chr7:151217153-151217500
  hypo

SEQ ID NO: 436071 - DNA, 97 bp, Homo sapiens; identical to SEQ ID NO: 258487
  chr7:151266427-151266524
  hypo

SEQ ID NO: 436072 - DNA, 31 bp, Homo sapiens; identical to SEQ ID NO: 308654
  chr7:151298839-151298870
  hypo

SEQ ID NO: 436073 - DNA, 270 bp, Homo sapiens; identical to SEQ ID NO: 258489
  chr7:151326270-151326540
  hypo

SEQ ID NO: 436074 - DNA, 304 bp, Homo sapiens; identical to SEQ ID NO: 211935
  chr7:151358568-151358872
  hypo

SEQ ID NO: 436075 - DNA, 207 bp, Homo sapiens; identical to SEQ ID NO: 258492
  chr7:151412757-151412964
  hypo

SEQ ID NO: 436076 - DNA, 48 bp, Homo sapiens; identical to SEQ ID NO: 258493
  chr7:151421902-151421950
  hypo

SEQ ID NO: 436077 - DNA, 94 bp, Homo sapiens; identical to SEQ ID NO: 258494
  chr7:151423343-151423437
  hypo

SEQ ID NO: 436078 - DNA, 74 bp, Homo sapiens; identical to SEQ ID NO: 308661
  chr7:151423497-151423571
  hypo

SEQ ID NO: 436079 - DNA, 72 bp, Homo sapiens; identical to SEQ ID NO: 308662
  chr7:151423639-151423711
  hypo

SEQ ID NO: 436080 - DNA, 107 bp, Homo sapiens; identical to SEQ ID NO: 258496
  chr7:151436199-151436306
  hypo

SEQ ID NO: 436081 - DNA, 147 bp, Homo sapiens; identical to SEQ ID NO: 258497
  chr7:151476539-151476686
  hypo

SEQ ID NO: 436082 - DNA, 35 bp, Homo sapiens; identical to SEQ ID NO: 258498
  chr7:151496736-151496771
  hypo

SEQ ID NO: 436083 - DNA, 248 bp, Homo sapiens; identical to SEQ ID NO: 258499
  chr7:151505823-151506071
  hypo

SEQ ID NO: 436084 - DNA, 117 bp, Homo sapiens; identical to SEQ ID NO: 258501
  chr7:151554550-151554667
  hypo

SEQ ID NO: 436085 - DNA, 206 bp, Homo sapiens; identical to SEQ ID NO: 258502
  chr7:151556275-151556481
  hypo

SEQ ID NO: 436086 - DNA, 276 bp, Homo sapiens; identical to SEQ ID NO: 258504
  chr7:151592134-151592410
  hypo

SEQ ID NO: 436087 - DNA, 214 bp, Homo sapiens; identical to SEQ ID NO: 211939
  chr7:151624665-151624879
  hypo

SEQ ID NO: 436088 - DNA, 84 bp, Homo sapiens; identical to SEQ ID NO: 258506
  chr7:151648967-151649051
  hypo

SEQ ID NO: 436089 - DNA, 86 bp, Homo sapiens; identical to SEQ ID NO: 211940
  chr7:151712356-151712442
  hypo

SEQ ID NO: 436090 - DNA, 107 bp, Homo sapiens; identical to SEQ ID NO: 211941
  chr7:151720362-151720469
  hypo

SEQ ID NO: 436091 - DNA, 131 bp, Homo sapiens; identical to SEQ ID NO: 258509
  chr7:151781606-151781737
  hypo

SEQ ID NO: 436092 - DNA, 280 bp, Homo sapiens; identical to SEQ ID NO: 211946
  chr7:151812521-151812801
  hypo

SEQ ID NO: 436093 - DNA, 205 bp, Homo sapiens; identical to SEQ ID NO: 258513
  chr7:151826350-151826555
  hypo

SEQ ID NO: 436094 - DNA, 114 bp, Homo sapiens; identical to SEQ ID NO: 211947
  chr7:151874697-151874811
  hypo

SEQ ID NO: 436095 - DNA, 41 bp, Homo sapiens; identical to SEQ ID NO: 258515
  chr7:151876085-151876126
  hypo

SEQ ID NO: 436096 - DNA, 80 bp, Homo sapiens; identical to SEQ ID NO: 258517
  chr7:152159225-152159305
  hypo

SEQ ID NO: 436097 - DNA, 212 bp, Homo sapiens; identical to SEQ ID NO: 258519
  chr7:152221107-152221319
  hypo

SEQ ID NO: 436098 - DNA, 44 bp, Homo sapiens; identical to SEQ ID NO: 258520
  chr7:152243973-152244017
  hypo

SEQ ID NO: 436099 - DNA, 31 bp, Homo sapiens; identical to SEQ ID NO: 406285
  chr7:152273472-152273503
  hypo

SEQ ID NO: 436100 - DNA, 75 bp, Homo sapiens; identical to SEQ ID NO: 211949
  chr7:152374303-152374378
  hypo

SEQ ID NO: 436101 - DNA, 47 bp, Homo sapiens; identical to SEQ ID NO: 211950
  chr7:152374397-152374444
  hypo

SEQ ID NO: 436102 - DNA, 42 bp, Homo sapiens; identical to SEQ ID NO: 211951
  chr7:152455925-152455967
  hypo

SEQ ID NO: 436103 - DNA, 78 bp, Homo sapiens; identical to SEQ ID NO: 211952
  chr7:152543573-152543651
  hypo

SEQ ID NO: 436104 - DNA, 135 bp, Homo sapiens; identical to SEQ ID NO: 258526
  chr7:152549237-152549372
  hypo

SEQ ID NO: 436105 - DNA, 180 bp, Homo sapiens; identical to SEQ ID NO: 211953
  chr7:152551646-152551826
  hypo

SEQ ID NO: 436106 - DNA, 173 bp, Homo sapiens; identical to SEQ ID NO: 211954
  chr7:152555646-152555819
  hypo

SEQ ID NO: 436107 - DNA, 162 bp, Homo sapiens; identical to SEQ ID NO: 258530
  chr7:152564284-152564446
  hypo

SEQ ID NO: 436108 - DNA, 309 bp, Homo sapiens; identical to SEQ ID NO: 258531
  chr7:152569304-152569613
  hypo

SEQ ID NO: 436109 - DNA, 39 bp, Homo sapiens; identical to SEQ ID NO: 211955
  chr7:152647711-152647750
  hypo

SEQ ID NO: 436110 - DNA, 235 bp, Homo sapiens; identical to SEQ ID NO: 258534
  chr7:152716533-152716768
  hypo

SEQ ID NO: 436111 - DNA, 42 bp, Homo sapiens; identical to SEQ ID NO: 258535
  chr7:152738787-152738829
  hypo

SEQ ID NO: 436112 - DNA, 31 bp, Homo sapiens; identical to SEQ ID NO: 258536
  chr7:152789902-152789933
  hypo

SEQ ID NO: 436113 - DNA, 59 bp, Homo sapiens; identical to SEQ ID NO: 258537
  chr7:152796593-152796652
  hypo

SEQ ID NO: 436114 - DNA, 253 bp, Homo sapiens; identical to SEQ ID NO: 258538
  chr7:153109299-153109552
  hypo

SEQ ID NO: 436115 - DNA, 447 bp, Homo sapiens; identical to SEQ ID NO: 258539
  chr7:153110538-153110985
  hypo

SEQ ID NO: 436116 - DNA, 86 bp, Homo sapiens; identical to SEQ ID NO: 258540
  chr7:153111045-153111131
  hypo

SEQ ID NO: 436117 - DNA, 36 bp, Homo sapiens; identical to SEQ ID NO: 258541
  chr7:154018578-154018614
  hypo

SEQ ID NO: 436118 - DNA, 91 bp, Homo sapiens; identical to SEQ ID NO: 258542
  chr7:154062697-154062788
  hypo

SEQ ID NO: 436119 - DNA, 205 bp, Homo sapiens; identical to SEQ ID NO: 258543
  chr7:154072003-154072208
  hypo

SEQ ID NO: 436120 - DNA, 336 bp, Homo sapiens; identical to SEQ ID NO: 308712
  chr7:154087908-154088244
  hypo

SEQ ID NO: 436121 - DNA, 34 bp, Homo sapiens; identical to SEQ ID NO: 308713
  chr7:154088284-154088318
  hypo

SEQ ID NO: 436122 - DNA, 69 bp, Homo sapiens; identical to SEQ ID NO: 258545
  chr7:154128040-154128109
  hypo

SEQ ID NO: 436123 - DNA, 68 bp, Homo sapiens; identical to SEQ ID NO: 258546
  chr7:154150170-154150238
  hypo

SEQ ID NO: 436124 - DNA, 35 bp, Homo sapiens; identical to SEQ ID NO: 258547
  chr7:154382567-154382602
  hypo

SEQ ID NO: 436125 - DNA, 233 bp, Homo sapiens; identical to SEQ ID NO: 258550
  chr7:154646528-154646761
  hypo

SEQ ID NO: 436126 - DNA, 276 bp, Homo sapiens; identical to SEQ ID NO: 258551
  chr7:154673974-154674250
  hypo

SEQ ID NO: 436127 - DNA, 211 bp, Homo sapiens; identical to SEQ ID NO: 258552
  chr7:154875881-154876092
  hypo

SEQ ID NO: 436128 - DNA, 68 bp, Homo sapiens; identical to SEQ ID NO: 258553
  chr7:154922371-154922439
  hypo

SEQ ID NO: 436129 - DNA, 95 bp, Homo sapiens; identical to SEQ ID NO: 258555
  chr7:155016945-155017040
  hypo

SEQ ID NO: 436130 - DNA, 152 bp, Homo sapiens; identical to SEQ ID NO: 211958
  chr7:155017976-155018128
  hypo

SEQ ID NO: 436131 - DNA, 204 bp, Homo sapiens; identical to SEQ ID NO: 258557
  chr7:155077346-155077550
  hypo

SEQ ID NO: 436132 - DNA, 359 bp, Homo sapiens; identical to SEQ ID NO: 211959
  chr7:155130273-155130632
  hypo

SEQ ID NO: 436133 - DNA, 83 bp, Homo sapiens; identical to SEQ ID NO: 308729
  chr7:155130794-155130877
  hypo

SEQ ID NO: 436134 - DNA, 35 bp, Homo sapiens; identical to SEQ ID NO: 201251
  chr7:155170943-155170978
  hypo

SEQ ID NO: 436135 - DNA, 94 bp, Homo sapiens; identical to SEQ ID NO: 258560
  chr7:155274563-155274657
  hypo

SEQ ID NO: 436136 - DNA, 156 bp, Homo sapiens; identical to SEQ ID NO: 258561
  chr7:155343623-155343779
  hypo

SEQ ID NO: 436137 - DNA, 79 bp, Homo sapiens; identical to SEQ ID NO: 211962
  chr7:155352613-155352692
  hypo

SEQ ID NO: 436138 - DNA, 209 bp, Homo sapiens; identical to SEQ ID NO: 211963
  chr7:155385399-155385608
  hypo

SEQ ID NO: 436139 - DNA, 155 bp, Homo sapiens; identical to SEQ ID NO: 258566
  chr7:155503998-155504153
  hypo

SEQ ID NO: 436140 - DNA, 177 bp, Homo sapiens; identical to SEQ ID NO: 211965
  chr7:155530782-155530959
  hypo

SEQ ID NO: 436141 - DNA, 195 bp, Homo sapiens; identical to SEQ ID NO: 211966
  chr7:155532479-155532674
  hypo

SEQ ID NO: 436142 - DNA, 111 bp, Homo sapiens; identical to SEQ ID NO: 258569
  chr7:155559197-155559308
  hypo

SEQ ID NO: 436143 - DNA, 126 bp, Homo sapiens; identical to SEQ ID NO: 211967
  chr7:155559943-155560069
  hypo

SEQ ID NO: 436144 - DNA, 213 bp, Homo sapiens; identical to SEQ ID NO: 258571
  chr7:155573670-155573883
  hypo

SEQ ID NO: 436145 - DNA, 62 bp, Homo sapiens; identical to SEQ ID NO: 258572
  chr7:155574316-155574378
  hypo

SEQ ID NO: 436146 - DNA, 57 bp, Homo sapiens; identical to SEQ ID NO: 285567
  chr7:155580355-155580412
  hypo

SEQ ID NO: 436147 - DNA, 31 bp, Homo sapiens; identical to SEQ ID NO: 211969
  chr7:155581211-155581242
  hypo

SEQ ID NO: 436148 - DNA, 256 bp, Homo sapiens; identical to SEQ ID NO: 258574
  chr7:155582651-155582907
  hypo

SEQ ID NO: 436149 - DNA, 266 bp, Homo sapiens; identical to SEQ ID NO: 258576
  chr7:155637256-155637522
  hypo

SEQ ID NO: 436150 - DNA, 119 bp, Homo sapiens; identical to SEQ ID NO: 258577
  chr7:155638079-155638198
  hypo

SEQ ID NO: 436151 - DNA, 169 bp, Homo sapiens; identical to SEQ ID NO: 258579
  chr7:155706980-155707149
  hypo

SEQ ID NO: 436152 - DNA, 158 bp, Homo sapiens; identical to SEQ ID NO: 258580
  chr7:155793926-155794084
  hypo

SEQ ID NO: 436153 - DNA, 583 bp, Homo sapiens; identical to SEQ ID NO: 258581
  chr7:155797745-155798328
  hypo

SEQ ID NO: 436154 - DNA, 278 bp, Homo sapiens; identical to SEQ ID NO: 211973
  chr7:155828028-155828306
  hypo

SEQ ID NO: 436155 - DNA, 97 bp, Homo sapiens; identical to SEQ ID NO: 211974
  chr7:155828366-155828463
  hypo

SEQ ID NO: 436156 - DNA, 318 bp, Homo sapiens; identical to SEQ ID NO: 258584
  chr7:155855975-155856293
  hypo

SEQ ID NO: 436157 - DNA, 73 bp, Homo sapiens; identical to SEQ ID NO: 258585
  chr7:155859954-155860027
  hypo

SEQ ID NO: 436158 - DNA, 311 bp, Homo sapiens; identical to SEQ ID NO: 258586
  chr7:155868045-155868356
  hypo

SEQ ID NO: 436159 - DNA, 166 bp, Homo sapiens; identical to SEQ ID NO: 258588
  chr7:155897787-155897953
  hypo

SEQ ID NO: 436160 - DNA, 206 bp, Homo sapiens; identical to SEQ ID NO: 211976
  chr7:155900805-155901011
  hypo

SEQ ID NO: 436161 - DNA, 109 bp, Homo sapiens; identical to SEQ ID NO: 211979
  chr7:155920258-155920367
  hypo

SEQ ID NO: 436162 - DNA, 286 bp, Homo sapiens; identical to SEQ ID NO: 211980
  chr7:155935866-155936152
  hypo

SEQ ID NO: 436163 - DNA, 148 bp, Homo sapiens; identical to SEQ ID NO: 211981
  chr7:155948645-155948793
  hypo

SEQ ID NO: 436164 - DNA, 254 bp, Homo sapiens; identical to SEQ ID NO: 258596
  chr7:155985233-155985487
  hypo

SEQ ID NO: 436165 - DNA, 42 bp, Homo sapiens; identical to SEQ ID NO: 258597
  chr7:156000101-156000143
  hypo

SEQ ID NO: 436166 - DNA, 40 bp, Homo sapiens; identical to SEQ ID NO: 211982
  chr7:156012928-156012968
  hypo

SEQ ID NO: 436167 - DNA, 72 bp, Homo sapiens; identical to SEQ ID NO: 211983
  chr7:156013006-156013078
  hypo

SEQ ID NO: 436168 - DNA, 52 bp, Homo sapiens; identical to SEQ ID NO: 258599
  chr7:156154858-156154910
  hypo

SEQ ID NO: 436169 - DNA, 63 bp, Homo sapiens; identical to SEQ ID NO: 258600
  chr7:156255036-156255099
  hypo

SEQ ID NO: 436170 - DNA, 168 bp, Homo sapiens; identical to SEQ ID NO: 258601
  chr7:156255129-156255297
  hypo

SEQ ID NO: 436171 - DNA, 50 bp, Homo sapiens; identical to SEQ ID NO: 308774
  chr7:156290627-156290677
  hypo

SEQ ID NO: 436172 - DNA, 306 bp, Homo sapiens; identical to SEQ ID NO: 258605
  chr7:156371322-156371628
  hypo

SEQ ID NO: 436173 - DNA, 87 bp, Homo sapiens; identical to SEQ ID NO: 258606
  chr7:156393241-156393328
  hypo

SEQ ID NO: 436174 - DNA, 222 bp, Homo sapiens; identical to SEQ ID NO: 258607
  chr7:156397739-156397961
  hypo

SEQ ID NO: 436175 - DNA, 405 bp, Homo sapiens; identical to SEQ ID NO: 258609
  chr7:156507228-156507633
  hypo

SEQ ID NO: 436176 - DNA, 187 bp, Homo sapiens; identical to SEQ ID NO: 258610
  chr7:156613330-156613517
  hypo

SEQ ID NO: 436177 - DNA, 163 bp, Homo sapiens; identical to SEQ ID NO: 258611
  chr7:156733207-156733370
  hypo

SEQ ID NO: 436178 - DNA, 120 bp, Homo sapiens; identical to SEQ ID NO: 211986
  chr7:156733810-156733930
  hypo

SEQ ID NO: 436179 - DNA, 37 bp, Homo sapiens; identical to SEQ ID NO: 211987
  chr7:156733990-156734027
  hypo

SEQ ID NO: 436180 - DNA, 123 bp, Homo sapiens; identical to SEQ ID NO: 211989
  chr7:156760916-156761039
  hypo

SEQ ID NO: 436181 - DNA, 972 bp, Homo sapiens; identical to SEQ ID NO: 397839
  chr7:156802750-156803722
  hypo

SEQ ID NO: 436182 - DNA, 173 bp, Homo sapiens; identical to SEQ ID NO: 308792
  chr7:156880358-156880531
  hypo

SEQ ID NO: 436183 - DNA, 196 bp, Homo sapiens; identical to SEQ ID NO: 308793
  chr7:156880599-156880795
  hypo

SEQ ID NO: 436184 - DNA, 45 bp, Homo sapiens; identical to SEQ ID NO: 308794
  chr7:156883643-156883688
  hypo

SEQ ID NO: 436185 - DNA, 197 bp, Homo sapiens; identical to SEQ ID NO: 258622
  chr7:156918515-156918712
  hypo

SEQ ID NO: 436186 - DNA, 86 bp, Homo sapiens; identical to SEQ ID NO: 211992
  chr7:156937634-156937720
  hypo

SEQ ID NO: 436187 - DNA, 337 bp, Homo sapiens; identical to SEQ ID NO: 258626
  chr7:157057954-157058291
  hypo

SEQ ID NO: 436188 - DNA, 179 bp, Homo sapiens; identical to SEQ ID NO: 258627
  chr7:157062218-157062397
  hypo

SEQ ID NO: 436189 - DNA, 222 bp, Homo sapiens; identical to SEQ ID NO: 258628
  chr7:157072934-157073156
  hypo

SEQ ID NO: 436190 - DNA, 73 bp, Homo sapiens; identical to SEQ ID NO: 258629
  chr7:157073389-157073462
  hypo

SEQ ID NO: 436191 - DNA, 326 bp, Homo sapiens; identical to SEQ ID NO: 308803
  chr7:157074072-157074398
  hypo

SEQ ID NO: 436192 - DNA, 61 bp, Homo sapiens; identical to SEQ ID NO: 308804
  chr7:157074428-157074489
  hypo

SEQ ID NO: 436193 - DNA, 165 bp, Homo sapiens; identical to SEQ ID NO: 308805
  chr7:157075019-157075184
  hypo

SEQ ID NO: 436194 - DNA, 311 bp, Homo sapiens; identical to SEQ ID NO: 308806
  chr7:157084099-157084410
  hypo

SEQ ID NO: 436195 - DNA, 402 bp, Homo sapiens; identical to SEQ ID NO: 308807
  chr7:157084622-157085024
  hypo

SEQ ID NO: 436196 - DNA, 57 bp, Homo sapiens; identical to SEQ ID NO: 258636
  chr7:157102726-157102783
  hypo

SEQ ID NO: 436197 - DNA, 136 bp, Homo sapiens; identical to SEQ ID NO: 211998
  chr7:157106437-157106573
  hypo

SEQ ID NO: 436198 - DNA, 108 bp, Homo sapiens; identical to SEQ ID NO: 211999
  chr7:157110670-157110778
  hypo

SEQ ID NO: 436199 - DNA, 149 bp, Homo sapiens; identical to SEQ ID NO: 258639
  chr7:157122530-157122679
  hypo

SEQ ID NO: 436200 - DNA, 42 bp, Homo sapiens; identical to SEQ ID NO: 258641
  chr7:157139858-157139900
  hypo

SEQ ID NO: 436201 - DNA, 104 bp, Homo sapiens; identical to SEQ ID NO: 223290
  chr7:157150797-157150901
  hypo

SEQ ID NO: 436202 - DNA, 253 bp, Homo sapiens; identical to SEQ ID NO: 258645
  chr7:157219101-157219354
  hypo

SEQ ID NO: 436203 - DNA, 60 bp, Homo sapiens; identical to SEQ ID NO: 308821
  chr7:157220412-157220472
  hypo

SEQ ID NO: 436204 - DNA, 96 bp, Homo sapiens; identical to SEQ ID NO: 258647
  chr7:157233128-157233224
  hypo

SEQ ID NO: 436205 - DNA, 74 bp, Homo sapiens; identical to SEQ ID NO: 308823
  chr7:157255322-157255396
  hypo

SEQ ID NO: 436206 - DNA, 90 bp, Homo sapiens; identical to SEQ ID NO: 308827
  chr7:157294321-157294411
  hypo

SEQ ID NO: 436207 - DNA, 154 bp, Homo sapiens; identical to SEQ ID NO: 258654
  chr7:157332354-157332508
  hypo

SEQ ID NO: 436208 - DNA, 123 bp, Homo sapiens; identical to SEQ ID NO: 308829
  chr7:157332825-157332948
  hypo

SEQ ID NO: 436209 - DNA, 115 bp, Homo sapiens; identical to SEQ ID NO: 308830
  chr7:157332978-157333093
  hypo

SEQ ID NO: 436210 - DNA, 215 bp, Homo sapiens; identical to SEQ ID NO: 258657
  chr7:157335452-157335667
  hypo

SEQ ID NO: 436211 - DNA, 149 bp, Homo sapiens; identical to SEQ ID NO: 212003
  chr7:157340247-157340396
  hypo

SEQ ID NO: 436212 - DNA, 310 bp, Homo sapiens; identical to SEQ ID NO: 212004
  chr7:157340426-157340736
  hypo

SEQ ID NO: 436213 - DNA, 520 bp, Homo sapiens; identical to SEQ ID NO: 258661
  chr7:157344958-157345478
  hypo

SEQ ID NO: 436214 - DNA, 161 bp, Homo sapiens; identical to SEQ ID NO: 212005
  chr7:157346267-157346428
  hypo

SEQ ID NO: 436215 - DNA, 109 bp, Homo sapiens; identical to SEQ ID NO: 258664
  chr7:157364282-157364391
  hypo

SEQ ID NO: 436216 - DNA, 102 bp, Homo sapiens; identical to SEQ ID NO: 308842
  chr7:157367335-157367437
  hypo

SEQ ID NO: 436217 - DNA, 33 bp, Homo sapiens; identical to SEQ ID NO: 308843
  chr7:157367476-157367509
  hypo

SEQ ID NO: 436218 - DNA, 99 bp, Homo sapiens; identical to SEQ ID NO: 258667
  chr7:157372247-157372346
  hypo

SEQ ID NO: 436219 - DNA, 134 bp, Homo sapiens; identical to SEQ ID NO: 258668
  chr7:157372651-157372785
  hypo

SEQ ID NO: 436220 - DNA, 155 bp, Homo sapiens; identical to SEQ ID NO: 258669
  chr7:157386352-157386507
  hypo

SEQ ID NO: 436221 - DNA, 239 bp, Homo sapiens; identical to SEQ ID NO: 212009
  chr7:157387164-157387403
  hypo

SEQ ID NO: 436222 - DNA, 378 bp, Homo sapiens; identical to SEQ ID NO: 308850
  chr7:157402241-157402619
  hypo

SEQ ID NO: 436223 - DNA, 83 bp, Homo sapiens; identical to SEQ ID NO: 308851
  chr7:157402654-157402737
  hypo

SEQ ID NO: 436224 - DNA, 287 bp, Homo sapiens; identical to SEQ ID NO: 258673
  chr7:157403100-157403387
  hypo

SEQ ID NO: 436225 - DNA, 817 bp, Homo sapiens; identical to SEQ ID NO: 308855
  chr7:157407768-157408585
  hypo

SEQ ID NO: 436226 - DNA, 115 bp, Homo sapiens; identical to SEQ ID NO: 212014
  chr7:157408760-157408875
  hypo

SEQ ID NO: 436227 - DNA, 249 bp, Homo sapiens; identical to SEQ ID NO: 258678
  chr7:157413023-157413272
  hypo

SEQ ID NO: 436228 - DNA, 42 bp, Homo sapiens; identical to SEQ ID NO: 258680
  chr7:157434605-157434647
  hypo

SEQ ID NO: 436229 - DNA, 488 bp, Homo sapiens; identical to SEQ ID NO: 258681
  chr7:157436258-157436746
  hypo

SEQ ID NO: 436230 - DNA, 54 bp, Homo sapiens; identical to SEQ ID NO: 258685
  chr7:157447781-157447835
  hypo

SEQ ID NO: 436231 - DNA, 216 bp, Homo sapiens; identical to SEQ ID NO: 212018
  chr7:157448958-157449174
  hypo

SEQ ID NO: 436232 - DNA, 50 bp, Homo sapiens; identical to SEQ ID NO: 212019
  chr7:157449405-157449455
  hypo

SEQ ID NO: 436233 - DNA, 452 bp, Homo sapiens; identical to SEQ ID NO: 258690
  chr7:157467102-157467554
  hypo

SEQ ID NO: 436234 - DNA, 193 bp, Homo sapiens; identical to SEQ ID NO: 258691
  chr7:157502240-157502433
  hypo

SEQ ID NO: 436235 - DNA, 333 bp, Homo sapiens; identical to SEQ ID NO: 258697
  chr7:157528457-157528790
  hypo

SEQ ID NO: 436236 - DNA, 541 bp, Homo sapiens; identical to SEQ ID NO: 308878
  chr7:157544023-157544564
  hypo

SEQ ID NO: 436237 - DNA, 342 bp, Homo sapiens; identical to SEQ ID NO: 212026
  chr7:157549923-157550265
  hypo

SEQ ID NO: 436238 - DNA, 61 bp, Homo sapiens; identical to SEQ ID NO: 308882
  chr7:157565439-157565500
  hypo

SEQ ID NO: 436239 - DNA, 155 bp, Homo sapiens; identical to SEQ ID NO: 212027
  chr7:157567209-157567364
  hypo

SEQ ID NO: 436240 - DNA, 47 bp, Homo sapiens; identical to SEQ ID NO: 212028
  chr7:157568321-157568368
  hypo

SEQ ID NO: 436241 - DNA, 138 bp, Homo sapiens; identical to SEQ ID NO: 258704
  chr7:157570973-157571111
  hypo

SEQ ID NO: 436242 - DNA, 110 bp, Homo sapiens; identical to SEQ ID NO: 258705
  chr7:157571413-157571523
  hypo

SEQ ID NO: 436243 - DNA, 180 bp, Homo sapiens; identical to SEQ ID NO: 258709
  chr7:157602212-157602392
  hypo

SEQ ID NO: 436244 - DNA, 151 bp, Homo sapiens; identical to SEQ ID NO: 308890
  chr7:157602964-157603115
  hypo

SEQ ID NO: 436245 - DNA, 314 bp, Homo sapiens; identical to SEQ ID NO: 308891
  chr7:157603148-157603462
  hypo

SEQ ID NO: 436246 - DNA, 44 bp, Homo sapiens; identical to SEQ ID NO: 258711
  chr7:157605781-157605825
  hypo

SEQ ID NO: 436247 - DNA, 406 bp, Homo sapiens; identical to SEQ ID NO: 212030
  chr7:157606033-157606439
  hypo

SEQ ID NO: 436248 - DNA, 123 bp, Homo sapiens; identical to SEQ ID NO: 258714
  chr7:157620461-157620584
  hypo

SEQ ID NO: 436249 - DNA, 153 bp, Homo sapiens; identical to SEQ ID NO: 258717
  chr7:157630455-157630608
  hypo

SEQ ID NO: 436250 - DNA, 165 bp, Homo sapiens; identical to SEQ ID NO: 258718
  chr7:157638211-157638376
  hypo

SEQ ID NO: 436251 - DNA, 512 bp, Homo sapiens; identical to SEQ ID NO: 258719
  chr7:157641413-157641925
  hypo

SEQ ID NO: 436252 - DNA, 84 bp, Homo sapiens; identical to SEQ ID NO: 258721
  chr7:157643707-157643791
  hypo

SEQ ID NO: 436253 - DNA, 413 bp, Homo sapiens; identical to SEQ ID NO: 212036
  chr7:157645533-157645946
  hypo

SEQ ID NO: 436254 - DNA, 94 bp, Homo sapiens; identical to SEQ ID NO: 212037
  chr7:157646590-157646684
  hypo

SEQ ID NO: 436255 - DNA, 263 bp, Homo sapiens; identical to SEQ ID NO: 308907
  chr7:157656414-157656677
  hypo

SEQ ID NO: 436256 - DNA, 143 bp, Homo sapiens; identical to SEQ ID NO: 258726
  chr7:157657815-157657958
  hypo

SEQ ID NO: 436257 - DNA, 58 bp, Homo sapiens; identical to SEQ ID NO: 258727
  chr7:157658189-157658247
  hypo

SEQ ID NO: 436258 - DNA, 115 bp, Homo sapiens; identical to SEQ ID NO: 258728
  chr7:157658676-157658791
  hypo

SEQ ID NO: 436259 - DNA, 40 bp, Homo sapiens; identical to SEQ ID NO: 308913
  chr7:157660158-157660198
  hypo

SEQ ID NO: 436260 - DNA, 259 bp, Homo sapiens; identical to SEQ ID NO: 258731
  chr7:157660637-157660896
  hypo

SEQ ID NO: 436261 - DNA, 164 bp, Homo sapiens; identical to SEQ ID NO: 212039
  chr7:157666019-157666183
  hypo

SEQ ID NO: 436262 - DNA, 107 bp, Homo sapiens; identical to SEQ ID NO: 258733
  chr7:157666383-157666490
  hypo

SEQ ID NO: 436263 - DNA, 368 bp, Homo sapiens; identical to SEQ ID NO: 258735
  chr7:157711203-157711571
  hypo

SEQ ID NO: 436264 - DNA, 169 bp, Homo sapiens; identical to SEQ ID NO: 201274
  chr7:157731890-157732059
  hypo

SEQ ID NO: 436265 - DNA, 324 bp, Homo sapiens; identical to SEQ ID NO: 258738
  chr7:157734698-157735022
  hypo

SEQ ID NO: 436266 - DNA, 41 bp, Homo sapiens; identical to SEQ ID NO: 308925
  chr7:157776962-157777003
  hypo

SEQ ID NO: 436267 - DNA, 128 bp, Homo sapiens; identical to SEQ ID NO: 308926
  chr7:157778518-157778646
  hypo

SEQ ID NO: 436268 - DNA, 239 bp, Homo sapiens; identical to SEQ ID NO: 212045
  chr7:157794264-157794503
  hypo

SEQ ID NO: 436269 - DNA, 456 bp, Homo sapiens; identical to SEQ ID NO: 308928
  chr7:157794648-157795104
  hypo

SEQ ID NO: 436270 - DNA, 60 bp, Homo sapiens; identical to SEQ ID NO: 212047
  chr7:157795358-157795418
  hypo

SEQ ID NO: 436271 - DNA, 143 bp, Homo sapiens; identical to SEQ ID NO: 212048
  chr7:157795448-157795591
  hypo

SEQ ID NO: 436272 - DNA, 182 bp, Homo sapiens; identical to SEQ ID NO: 212049
  chr7:157847115-157847297
  hypo

SEQ ID NO: 436273 - DNA, 110 bp, Homo sapiens; identical to SEQ ID NO: 212050
  chr7:157849576-157849686
  hypo

SEQ ID NO: 436274 - DNA, 193 bp, Homo sapiens; identical to SEQ ID NO: 258751
  chr7:157861007-157861200
  hypo

SEQ ID NO: 436275 - DNA, 50 bp, Homo sapiens; identical to SEQ ID NO: 258754
  chr7:157903545-157903595
  hypo

SEQ ID NO: 436276 - DNA, 104 bp, Homo sapiens; identical to SEQ ID NO: 258755
  chr7:157903815-157903919
  hypo

SEQ ID NO: 436277 - DNA, 210 bp, Homo sapiens; identical to SEQ ID NO: 212055
  chr7:157916055-157916265
  hypo

SEQ ID NO: 436278 - DNA, 112 bp, Homo sapiens; identical to SEQ ID NO: 308945
  chr7:157931998-157932110
  hypo

SEQ ID NO: 436279 - DNA, 51 bp, Homo sapiens; identical to SEQ ID NO: 406381
  chr7:157949122-157949173
  hypo

SEQ ID NO: 436280 - DNA, 70 bp, Homo sapiens; identical to SEQ ID NO: 258766
  chr7:157957666-157957736
  hypo

SEQ ID NO: 436281 - DNA, 252 bp, Homo sapiens; identical to SEQ ID NO: 258767
  chr7:157958023-157958275
  hypo

SEQ ID NO: 436282 - DNA, 134 bp, Homo sapiens; identical to SEQ ID NO: 258769
  chr7:157959397-157959531
  hypo

SEQ ID NO: 436283 - DNA, 129 bp, Homo sapiens; identical to SEQ ID NO: 258771
  chr7:157967881-157968010
  hypo

SEQ ID NO: 436284 - DNA, 55 bp, Homo sapiens; identical to SEQ ID NO: 258772
  chr7:157980855-157980910
  hypo

SEQ ID NO: 436285 - DNA, 151 bp, Homo sapiens; identical to SEQ ID NO: 212062
  chr7:157981292-157981443
  hypo

SEQ ID NO: 436286 - DNA, 122 bp, Homo sapiens; identical to SEQ ID NO: 212063
  chr7:157987148-157987270
  hypo

SEQ ID NO: 436287 - DNA, 36 bp, Homo sapiens; identical to SEQ ID NO: 212065
  chr7:158039728-158039764
  hypo

SEQ ID NO: 436288 - DNA, 58 bp, Homo sapiens; identical to SEQ ID NO: 212066
  chr7:158039794-158039852
  hypo

SEQ ID NO: 436289 - DNA, 34 bp, Homo sapiens; identical to SEQ ID NO: 212068
  chr7:158040316-158040350
  hypo

SEQ ID NO: 436290 - DNA, 290 bp, Homo sapiens; identical to SEQ ID NO: 258778
  chr7:158044818-158045108
  hypo

SEQ ID NO: 436291 - DNA, 127 bp, Homo sapiens; identical to SEQ ID NO: 258780
  chr7:158060880-158061007
  hypo

SEQ ID NO: 436292 - DNA, 499 bp, Homo sapiens; identical to SEQ ID NO: 258781
  chr7:158061260-158061759
  hypo

SEQ ID NO: 436293 - DNA, 175 bp, Homo sapiens; identical to SEQ ID NO: 258785
  chr7:158087289-158087464
  hypo

SEQ ID NO: 436294 - DNA, 104 bp, Homo sapiens; identical to SEQ ID NO: 258788
  chr7:158107194-158107298
  hypo

SEQ ID NO: 436295 - DNA, 96 bp, Homo sapiens; identical to SEQ ID NO: 212071
  chr7:158109478-158109574
  hypo

SEQ ID NO: 436296 - DNA, 89 bp, Homo sapiens; identical to SEQ ID NO: 212072
  chr7:158113046-158113135
  hypo

SEQ ID NO: 436297 - DNA, 94 bp, Homo sapiens; identical to SEQ ID NO: 212073
  chr7:158113271-158113365
  hypo

SEQ ID NO: 436298 - DNA, 151 bp, Homo sapiens; identical to SEQ ID NO: 258793
  chr7:158185087-158185238
  hypo

SEQ ID NO: 436299 - DNA, 41 bp, Homo sapiens; identical to SEQ ID NO: 308982
  chr7:158188491-158188532
  hypo

SEQ ID NO: 436300 - DNA, 54 bp, Homo sapiens; identical to SEQ ID NO: 308983
  chr7:158188577-158188631
  hypo

SEQ ID NO: 436301 - DNA, 143 bp, Homo sapiens; identical to SEQ ID NO: 258796
  chr7:158198933-158199076
  hypo

SEQ ID NO: 436302 - DNA, 331 bp, Homo sapiens; identical to SEQ ID NO: 212074
  chr7:158216892-158217223
  hypo

SEQ ID NO: 436303 - DNA, 167 bp, Homo sapiens; identical to SEQ ID NO: 212075
  chr7:158235876-158236043
  hypo

SEQ ID NO: 436304 - DNA, 482 bp, Homo sapiens; identical to SEQ ID NO: 258799
  chr7:158240243-158240725
  hypo

SEQ ID NO: 436305 - DNA, 409 bp, Homo sapiens; identical to SEQ ID NO: 258800
  chr7:158267276-158267685
  hypo

SEQ ID NO: 436306 - DNA, 130 bp, Homo sapiens; identical to SEQ ID NO: 258801
  chr7:158267715-158267845
  hypo

SEQ ID NO: 436307 - DNA, 756 bp, Homo sapiens; identical to SEQ ID NO: 258804
  chr7:158281108-158281864
  hypo

SEQ ID NO: 436308 - DNA, 153 bp, Homo sapiens; identical to SEQ ID NO: 406396
  chr7:158283035-158283188
  hypo

SEQ ID NO: 436309 - DNA, 224 bp, Homo sapiens; identical to SEQ ID NO: 212083
  chr7:158283236-158283460
  hypo

SEQ ID NO: 436310 - DNA, 117 bp, Homo sapiens; identical to SEQ ID NO: 258807
  chr7:158307739-158307856
  hypo

SEQ ID NO: 436311 - DNA, 141 bp, Homo sapiens; identical to SEQ ID NO: 258808
  chr7:158315944-158316085
  hypo

SEQ ID NO: 436312 - DNA, 109 bp, Homo sapiens; identical to SEQ ID NO: 258809
  chr7:158330971-158331080
  hypo

SEQ ID NO: 436313 - DNA, 231 bp, Homo sapiens; identical to SEQ ID NO: 212084
  chr7:158331366-158331597
  hypo

SEQ ID NO: 436314 - DNA, 37 bp, Homo sapiens; identical to SEQ ID NO: 258812
  chr7:158414042-158414079
  hypo

SEQ ID NO: 436315 - DNA, 110 bp, Homo sapiens; identical to SEQ ID NO: 258814
  chr7:158516191-158516301
  hypo

SEQ ID NO: 436316 - DNA, 236 bp, Homo sapiens; identical to SEQ ID NO: 212091
  chr7:158564138-158564374
  hypo

SEQ ID NO: 436317 - DNA, 113 bp, Homo sapiens; identical to SEQ ID NO: 212092
  chr7:158564404-158564517
  hypo

SEQ ID NO: 436318 - DNA, 34 bp, Homo sapiens; identical to SEQ ID NO: 406404
  chr7:158584041-158584075
  hypo

SEQ ID NO: 436319 - DNA, 83 bp, Homo sapiens; identical to SEQ ID NO: 258822
  chr7:158598728-158598811
  hypo

SEQ ID NO: 436320 - DNA, 43 bp, Homo sapiens; identical to SEQ ID NO: 258823
  chr7:158598841-158598884
  hypo

SEQ ID NO: 436321 - DNA, 33 bp, Homo sapiens; identical to SEQ ID NO: 212095
  chr7:158624108-158624141
  hypo

SEQ ID NO: 436322 - DNA, 49 bp, Homo sapiens; identical to SEQ ID NO: 258826
  chr7:158659174-158659223
  hypo

SEQ ID NO: 436323 - DNA, 52 bp, Homo sapiens; identical to SEQ ID NO: 212096
  chr7:158766776-158766828
  hypo

SEQ ID NO: 436324 - DNA, 199 bp, Homo sapiens; identical to SEQ ID NO: 212097
  chr7:158767105-158767304
  hypo

SEQ ID NO: 436325 - DNA, 196 bp, Homo sapiens; identical to SEQ ID NO: 212098
  chr7:158792183-158792379
  hypo

SEQ ID NO: 436326 - DNA, 257 bp, Homo sapiens; identical to SEQ ID NO: 258830
  chr7:158817162-158817419
  hypo

SEQ ID NO: 436327 - DNA, 186 bp, Homo sapiens; identical to SEQ ID NO: 258831
  chr7:158820419-158820605
  hypo

SEQ ID NO: 436328 - DNA, 222 bp, Homo sapiens; identical to SEQ ID NO: 258832
  chr7:158856804-158857026
  hypo

SEQ ID NO: 436329 - DNA, 158 bp, Homo sapiens; identical to SEQ ID NO: 258833
  chr7:158881371-158881529
  hypo

SEQ ID NO: 436330 - DNA, 42 bp, Homo sapiens; identical to SEQ ID NO: 258834
  chr7:158890572-158890614
  hypo

SEQ ID NO: 436331 - DNA, 179 bp, Homo sapiens; identical to SEQ ID NO: 258835
  chr7:158933386-158933565
  hypo

SEQ ID NO: 436332 - DNA, 114 bp, Homo sapiens; identical to SEQ ID NO: 258836
  chr7:158940025-158940139
  hypo

SEQ ID NO: 436333 - DNA, 42 bp, Homo sapiens; identical to SEQ ID NO: 258837
  chr7:158945568-158945610
  hypo

SEQ ID NO: 436334 - DNA, 187 bp, Homo sapiens; identical to SEQ ID NO: 258838
  chr7:158951178-158951365
  hypo

SEQ ID NO: 436335 - DNA, 106 bp, Homo sapiens; identical to SEQ ID NO: 258840
  chr8:287940-288046
  hypo

SEQ ID NO: 436336 - DNA, 93 bp, Homo sapiens; identical to SEQ ID NO: 285610
  chr8:495072-495165
  hypo

SEQ ID NO: 436337 - DNA, 101 bp, Homo sapiens; identical to SEQ ID NO: 258841
  chr8:566300-566401
  hypo

SEQ ID NO: 436338 - DNA, 33 bp, Homo sapiens; identical to SEQ ID NO: 309040
  chr8:566474-566507
  hypo

SEQ ID NO: 436339 - DNA, 143 bp, Homo sapiens; identical to SEQ ID NO: 258844
  chr8:592172-592315
  hypo

SEQ ID NO: 436340 - DNA, 284 bp, Homo sapiens; identical to SEQ ID NO: 212102
  chr8:636732-637016
  hypo

SEQ ID NO: 436341 - DNA, 285 bp, Homo sapiens; identical to SEQ ID NO: 258848
  chr8:651179-651464
  hypo

SEQ ID NO: 436342 - DNA, 451 bp, Homo sapiens; identical to SEQ ID NO: 258849
  chr8:667715-668166
  hypo

SEQ ID NO: 436343 - DNA, 150 bp, Homo sapiens; identical to SEQ ID NO: 258850
  chr8:716398-716548
  hypo

SEQ ID NO: 436344 - DNA, 85 bp, Homo sapiens; identical to SEQ ID NO: 212104
  chr8:833589-833674
  hypo

SEQ ID NO: 436345 - DNA, 324 bp, Homo sapiens; identical to SEQ ID NO: 212105
  chr8:893356-893680
  hypo

SEQ ID NO: 436346 - DNA, 53 bp, Homo sapiens; identical to SEQ ID NO: 212106
  chr8:923935-923988
  hypo

SEQ ID NO: 436347 - DNA, 231 bp, Homo sapiens; identical to SEQ ID NO: 309054
  chr8:976028-976259
  hypo

SEQ ID NO: 436348 - DNA, 96 bp, Homo sapiens; identical to SEQ ID NO: 258856
  chr8:977339-977435
  hypo

SEQ ID NO: 436349 - DNA, 76 bp, Homo sapiens; identical to SEQ ID NO: 258857
  chr8:978468-978544
  hypo

SEQ ID NO: 436350 - DNA, 268 bp, Homo sapiens; identical to SEQ ID NO: 212107
  chr8:1047978-1048246
  hypo

SEQ ID NO: 436351 - DNA, 74 bp, Homo sapiens; identical to SEQ ID NO: 212108
  chr8:1048772-1048846
  hypo

SEQ ID NO: 436352 - DNA, 147 bp, Homo sapiens; identical to SEQ ID NO: 258863
  chr8:1104691-1104838
  hypo

SEQ ID NO: 436353 - DNA, 69 bp, Homo sapiens; identical to SEQ ID NO: 258864
  chr8:1105155-1105224
  hypo

SEQ ID NO: 436354 - DNA, 43 bp, Homo sapiens; identical to SEQ ID NO: 258865
  chr8:1108701-1108744
  hypo

SEQ ID NO: 436355 - DNA, 150 bp, Homo sapiens; identical to SEQ ID NO: 258868
  chr8:1207574-1207724
  hypo

SEQ ID NO: 436356 - DNA, 226 bp, Homo sapiens; identical to SEQ ID NO: 258870
  chr8:1251026-1251252
  hypo

SEQ ID NO: 436357 - DNA, 223 bp, Homo sapiens; identical to SEQ ID NO: 309069
  chr8:1303163-1303386
  hypo

SEQ ID NO: 436358 - DNA, 135 bp, Homo sapiens; identical to SEQ ID NO: 212112
  chr8:1308186-1308321
  hypo

SEQ ID NO: 436359 - DNA, 128 bp, Homo sapiens; identical to SEQ ID NO: 309071
  chr8:1308368-1308496
  hypo

SEQ ID NO: 436360 - DNA, 185 bp, Homo sapiens; identical to SEQ ID NO: 258875
  chr8:1324842-1325027
  hypo

SEQ ID NO: 436361 - DNA, 60 bp, Homo sapiens; identical to SEQ ID NO: 309073
  chr8:1326031-1326091
  hypo

SEQ ID NO: 436362 - DNA, 154 bp, Homo sapiens; identical to SEQ ID NO: 309074
  chr8:1326121-1326275
  hypo

SEQ ID NO: 436363 - DNA, 150 bp, Homo sapiens; identical to SEQ ID NO: 258879
  chr8:1411609-1411759
  hypo

SEQ ID NO: 436364 - DNA, 188 bp, Homo sapiens; identical to SEQ ID NO: 309079
  chr8:1443511-1443699
  hypo

SEQ ID NO: 436365 - DNA, 154 bp, Homo sapiens; identical to SEQ ID NO: 309080
  chr8:1443754-1443908
  hypo

SEQ ID NO: 436366 - DNA, 298 bp, Homo sapiens; identical to SEQ ID NO: 258882
  chr8:1475085-1475383
  hypo

SEQ ID NO: 436367 - DNA, 213 bp, Homo sapiens; identical to SEQ ID NO: 309084
  chr8:1501387-1501600
  hypo

SEQ ID NO: 436368 - DNA, 263 bp, Homo sapiens; identical to SEQ ID NO: 309085
  chr8:1578880-1579143
  hypo

SEQ ID NO: 436369 - DNA, 79 bp, Homo sapiens; identical to SEQ ID NO: 212118
  chr8:1579182-1579261
  hypo

SEQ ID NO: 436370 - DNA, 209 bp, Homo sapiens; identical to SEQ ID NO: 258885
  chr8:1581635-1581844
  hypo

SEQ ID NO: 436371 - DNA, 243 bp, Homo sapiens; identical to SEQ ID NO: 309088
  chr8:1615950-1616193
  hypo

SEQ ID NO: 436372 - DNA, 121 bp, Homo sapiens; identical to SEQ ID NO: 258887
  chr8:1616694-1616815
  hypo

SEQ ID NO: 436373 - DNA, 284 bp, Homo sapiens; identical to SEQ ID NO: 258888
  chr8:1721745-1722029
  hypo

SEQ ID NO: 436374 - DNA, 106 bp, Homo sapiens; identical to SEQ ID NO: 258889
  chr8:1723929-1724035
  hypo

SEQ ID NO: 436375 - DNA, 226 bp, Homo sapiens; identical to SEQ ID NO: 258891
  chr8:1725081-1725307
  hypo

SEQ ID NO: 436376 - DNA, 44 bp, Homo sapiens; identical to SEQ ID NO: 258892
  chr8:1759476-1759520
  hypo

SEQ ID NO: 436377 - DNA, 235 bp, Homo sapiens; identical to SEQ ID NO: 212119
  chr8:1777141-1777376
  hypo

SEQ ID NO: 436378 - DNA, 33 bp, Homo sapiens; identical to SEQ ID NO: 258894
  chr8:1777967-1778000
  hypo

SEQ ID NO: 436379 - DNA, 382 bp, Homo sapiens; identical to SEQ ID NO: 258896
  chr8:1791891-1792273
  hypo

SEQ ID NO: 436380 - DNA, 307 bp, Homo sapiens; identical to SEQ ID NO: 212120
  chr8:1796262-1796569
  hypo

SEQ ID NO: 436381 - DNA, 162 bp, Homo sapiens; identical to SEQ ID NO: 212121
  chr8:1797380-1797542
  hypo

SEQ ID NO: 436382 - DNA, 42 bp, Homo sapiens; identical to SEQ ID NO: 258900
  chr8:1798701-1798743
  hypo

SEQ ID NO: 436383 - DNA, 201 bp, Homo sapiens; identical to SEQ ID NO: 258901
  chr8:1801273-1801474
  hypo

SEQ ID NO: 436384 - DNA, 50 bp, Homo sapiens; identical to SEQ ID NO: 258902
  chr8:1805144-1805194
  hypo

SEQ ID NO: 436385 - DNA, 281 bp, Homo sapiens; identical to SEQ ID NO: 258903
  chr8:1807458-1807739
  hypo

SEQ ID NO: 436386 - DNA, 75 bp, Homo sapiens; identical to SEQ ID NO: 258904
  chr8:1814165-1814240
  hypo

SEQ ID NO: 436387 - DNA, 189 bp, Homo sapiens; identical to SEQ ID NO: 258905
  chr8:1821224-1821413
  hypo

SEQ ID NO: 436388 - DNA, 54 bp, Homo sapiens; identical to SEQ ID NO: 212123
  chr8:1826001-1826055
  hypo

SEQ ID NO: 436389 - DNA, 175 bp, Homo sapiens; identical to SEQ ID NO: 258907
  chr8:1830207-1830382
  hypo

SEQ ID NO: 436390 - DNA, 300 bp, Homo sapiens; identical to SEQ ID NO: 212124
  chr8:1830728-1831028
  hypo

SEQ ID NO: 436391 - DNA, 46 bp, Homo sapiens; identical to SEQ ID NO: 258909
  chr8:1850870-1850916
  hypo

SEQ ID NO: 436392 - DNA, 727 bp, Homo sapiens; identical to SEQ ID NO: 258910
  chr8:1877722-1878449
  hypo

SEQ ID NO: 436393 - DNA, 109 bp, Homo sapiens; identical to SEQ ID NO: 258911
  chr8:1879662-1879771
  hypo

SEQ ID NO: 436394 - DNA, 151 bp, Homo sapiens; identical to SEQ ID NO: 258913
  chr8:1902126-1902277
  hypo

SEQ ID NO: 436395 - DNA, 33 bp, Homo sapiens; identical to SEQ ID NO: 212126
  chr8:1926963-1926996
  hypo

SEQ ID NO: 436396 - DNA, 283 bp, Homo sapiens; identical to SEQ ID NO: 258915
  chr8:1942393-1942676
  hypo

SEQ ID NO: 436397 - DNA, 91 bp, Homo sapiens; identical to SEQ ID NO: 258916
  chr8:2522805-2522896
  hypo

SEQ ID NO: 436398 - DNA, 32 bp, Homo sapiens; identical to SEQ ID NO: 258917
  chr8:2536389-2536421
  hypo

SEQ ID NO: 436399 - DNA, 38 bp, Homo sapiens; identical to SEQ ID NO: 258918
  chr8:2609653-2609691
  hypo

SEQ ID NO: 436400 - DNA, 48 bp, Homo sapiens; identical to SEQ ID NO: 258920
  chr8:4110697-4110745
  hypo

SEQ ID NO: 436401 - DNA, 42 bp, Homo sapiens; identical to SEQ ID NO: 258921
  chr8:4123574-4123616
  hypo

SEQ ID NO: 436402 - DNA, 31 bp, Homo sapiens; identical to SEQ ID NO: 258922
  chr8:4218294-4218325
  hypo

SEQ ID NO: 436403 - DNA, 42 bp, Homo sapiens; identical to SEQ ID NO: 258923
  chr8:4880493-4880535
  hypo

SEQ ID NO: 436404 - DNA, 253 bp, Homo sapiens; identical to SEQ ID NO: 258924
  chr8:5829440-5829693
  hypo

SEQ ID NO: 436405 - DNA, 134 bp, Homo sapiens; identical to SEQ ID NO: 258925
  chr8:5909951-5910085
  hypo

SEQ ID NO: 436406 - DNA, 42 bp, Homo sapiens; identical to SEQ ID NO: 258926
  chr8:6302322-6302364
  hypo

SEQ ID NO: 436407 - DNA, 376 bp, Homo sapiens; identical to SEQ ID NO: 258927
  chr8:6313799-6314175
  hypo

SEQ ID NO: 436408 - DNA, 270 bp, Homo sapiens; identical to SEQ ID NO: 258928
  chr8:6322707-6322977
  hypo

SEQ ID NO: 436409 - DNA, 272 bp, Homo sapiens; identical to SEQ ID NO: 258929
  chr8:6323187-6323459
  hypo

SEQ ID NO: 436410 - DNA, 70 bp, Homo sapiens; identical to SEQ ID NO: 258930
  chr8:6345659-6345729
  hypo

SEQ ID NO: 436411 - DNA, 38 bp, Homo sapiens; identical to SEQ ID NO: 212127
  chr8:6361545-6361583
  hypo

SEQ ID NO: 436412 - DNA, 169 bp, Homo sapiens; identical to SEQ ID NO: 258932
  chr8:6400935-6401104
  hypo

SEQ ID NO: 436413 - DNA, 102 bp, Homo sapiens; identical to SEQ ID NO: 212129
  chr8:6456168-6456270
  hypo

SEQ ID NO: 436414 - DNA, 159 bp, Homo sapiens; identical to SEQ ID NO: 212130
  chr8:6465692-6465851
  hypo

SEQ ID NO: 436415 - DNA, 84 bp, Homo sapiens; identical to SEQ ID NO: 258937
  chr8:6535110-6535194
  hypo

SEQ ID NO: 436416 - DNA, 43 bp, Homo sapiens; identical to SEQ ID NO: 258938
  chr8:6559148-6559191
  hypo

SEQ ID NO: 436417 - DNA, 90 bp, Homo sapiens; identical to SEQ ID NO: 258939
  chr8:6590044-6590134
  hypo

SEQ ID NO: 436418 - DNA, 473 bp, Homo sapiens; identical to SEQ ID NO: 212131
  chr8:6630575-6631048
  hypo

SEQ ID NO: 436419 - DNA, 229 bp, Homo sapiens; identical to SEQ ID NO: 212133
  chr8:6636292-6636521
  hypo

SEQ ID NO: 436420 - DNA, 102 bp, Homo sapiens; identical to SEQ ID NO: 258943
  chr8:6637651-6637753
  hypo

SEQ ID NO: 436421 - DNA, 69 bp, Homo sapiens; identical to SEQ ID NO: 258944
  chr8:6664120-6664189
  hypo

SEQ ID NO: 436422 - DNA, 93 bp, Homo sapiens; identical to SEQ ID NO: 212134
  chr8:6707719-6707812
  hypo

SEQ ID NO: 436423 - DNA, 209 bp, Homo sapiens; identical to SEQ ID NO: 212135
  chr8:6756662-6756871
  hypo

SEQ ID NO: 436424 - DNA, 77 bp, Homo sapiens; identical to SEQ ID NO: 258947
  chr8:8102810-8102887
  hypo

SEQ ID NO: 436425 - DNA, 36 bp, Homo sapiens; identical to SEQ ID NO: 258948
  chr8:8122017-8122053
  hypo

SEQ ID NO: 436426 - DNA, 547 bp, Homo sapiens; identical to SEQ ID NO: 258949
  chr8:8176211-8176758
  hypo

SEQ ID NO: 436427 - DNA, 157 bp, Homo sapiens; identical to SEQ ID NO: 258950
  chr8:8456541-8456698
  hypo

SEQ ID NO: 436428 - DNA, 328 bp, Homo sapiens; identical to SEQ ID NO: 258951
  chr8:8471121-8471449
  hypo

SEQ ID NO: 436429 - DNA, 235 bp, Homo sapiens; identical to SEQ ID NO: 258952
  chr8:8522696-8522931
  hypo

SEQ ID NO: 436430 - DNA, 39 bp, Homo sapiens; identical to SEQ ID NO: 212138
  chr8:8634037-8634076
  hypo

SEQ ID NO: 436431 - DNA, 39 bp, Homo sapiens; identical to SEQ ID NO: 212139
  chr8:8634316-8634355
  hypo

SEQ ID NO: 436432 - DNA, 155 bp, Homo sapiens; identical to SEQ ID NO: 258958
  chr8:8642145-8642300
  hypo

SEQ ID NO: 436433 - DNA, 200 bp, Homo sapiens; identical to SEQ ID NO: 258959
  chr8:8643103-8643303
  hypo

SEQ ID NO: 436434 - DNA, 76 bp, Homo sapiens; identical to SEQ ID NO: 258961
  chr8:8669105-8669181
  hypo

SEQ ID NO: 436435 - DNA, 129 bp, Homo sapiens; identical to SEQ ID NO: 212142
  chr8:8673405-8673534
  hypo

SEQ ID NO: 436436 - DNA, 159 bp, Homo sapiens; identical to SEQ ID NO: 212146
  chr8:8690237-8690396
  hypo

SEQ ID NO: 436437 - DNA, 174 bp, Homo sapiens; identical to SEQ ID NO: 212147
  chr8:8692863-8693037
  hypo

SEQ ID NO: 436438 - DNA, 105 bp, Homo sapiens; identical to SEQ ID NO: 212148
  chr8:8698610-8698715
  hypo

SEQ ID NO: 436439 - DNA, 141 bp, Homo sapiens; identical to SEQ ID NO: 258969
  chr8:8699972-8700113
  hypo

SEQ ID NO: 436440 - DNA, 252 bp, Homo sapiens; identical to SEQ ID NO: 309172
  chr8:8709481-8709733
  hypo

SEQ ID NO: 436441 - DNA, 120 bp, Homo sapiens; identical to SEQ ID NO: 212150
  chr8:8712566-8712686
  hypo

SEQ ID NO: 436442 - DNA, 78 bp, Homo sapiens; identical to SEQ ID NO: 212151
  chr8:8712746-8712824
  hypo

SEQ ID NO: 436443 - DNA, 159 bp, Homo sapiens; identical to SEQ ID NO: 212152
  chr8:8725341-8725500
  hypo

SEQ ID NO: 436444 - DNA, 61 bp, Homo sapiens
  chr8:8731249-8731310
  hypo
gtttagaaaacagatgggacagaaaggcagatgcaatgttttgagtcaatgagatacagtt

SEQ ID NO: 436445 - DNA, 375 bp, Homo sapiens; identical to SEQ ID NO: 285633
  chr8:8750284-8750659
  hypo

SEQ ID NO: 436446 - DNA, 39 bp, Homo sapiens; identical to SEQ ID NO: 258977
  chr8:8803669-8803708
  hypo

SEQ ID NO: 436447 - DNA, 462 bp, Homo sapiens; identical to SEQ ID NO: 223306
  chr8:8820810-8821272
  hypo

SEQ ID NO: 436448 - DNA, 31 bp, Homo sapiens; identical to SEQ ID NO: 258978
  chr8:8850535-8850566
  hypo

SEQ ID NO: 436449 - DNA, 36 bp, Homo sapiens; identical to SEQ ID NO: 212159
  chr8:8922915-8922951
  hypo

SEQ ID NO: 436450 - DNA, 119 bp, Homo sapiens; identical to SEQ ID NO: 258981
  chr8:9637606-9637725
  hypo

SEQ ID NO: 436451 - DNA, 185 bp, Homo sapiens; identical to SEQ ID NO: 223311
  chr8:10058672-10058857
  hypo

SEQ ID NO: 436452 - DNA, 141 bp, Homo sapiens; identical to SEQ ID NO: 309189
  chr8:10192957-10193098
  hypo

SEQ ID NO: 436453 - DNA, 176 bp, Homo sapiens; identical to SEQ ID NO: 212161
  chr8:10261662-10261838
  hypo

SEQ ID NO: 436454 - DNA, 188 bp, Homo sapiens; identical to SEQ ID NO: 212162
  chr8:10261986-10262174
  hypo

SEQ ID NO: 436455 - DNA, 141 bp, Homo sapiens; identical to SEQ ID NO: 258984
  chr8:10283196-10283337
  hypo

SEQ ID NO: 436456 - DNA, 232 bp, Homo sapiens; identical to SEQ ID NO: 258985
  chr8:10466917-10467149
  hypo

SEQ ID NO: 436457 - DNA, 202 bp, Homo sapiens; identical to SEQ ID NO: 212164
  chr8:10683500-10683702
  hypo

SEQ ID NO: 436458 - DNA, 75 bp, Homo sapiens; identical to SEQ ID NO: 309196
  chr8:10694914-10694989
  hypo

SEQ ID NO: 436459 - DNA, 42 bp, Homo sapiens; identical to SEQ ID NO: 258988
  chr8:10798364-10798406
  hypo

SEQ ID NO: 436460 - DNA, 180 bp, Homo sapiens; identical to SEQ ID NO: 258989
  chr8:11143735-11143915
  hypo

SEQ ID NO: 436461 - DNA, 88 bp, Homo sapiens; identical to SEQ ID NO: 258990
  chr8:11144656-11144744
  hypo

SEQ ID NO: 436462 - DNA, 87 bp, Homo sapiens; identical to SEQ ID NO: 258991
  chr8:11163743-11163830
  hypo

SEQ ID NO: 436463 - DNA, 136 bp, Homo sapiens; identical to SEQ ID NO: 258992
  chr8:11182858-11182994
  hypo

SEQ ID NO: 436464 - DNA, 332 bp, Homo sapiens; identical to SEQ ID NO: 258993
  chr8:11218929-11219261
  hypo

SEQ ID NO: 436465 - DNA, 60 bp, Homo sapiens; identical to SEQ ID NO: 258994
  chr8:11366265-11366325
  hypo

SEQ ID NO: 436466 - DNA, 149 bp, Homo sapiens; identical to SEQ ID NO: 258995
  chr8:11483117-11483266
  hypo

SEQ ID NO: 436467 - DNA, 66 bp, Homo sapiens; identical to SEQ ID NO: 212167
  chr8:11612347-11612413
  hypo

SEQ ID NO: 436468 - DNA, 179 bp, Homo sapiens; identical to SEQ ID NO: 258997
  chr8:11645475-11645654
  hypo

SEQ ID NO: 436469 - DNA, 75 bp, Homo sapiens; identical to SEQ ID NO: 258998
  chr8:11646750-11646825
  hypo

SEQ ID NO: 436470 - DNA, 286 bp, Homo sapiens; identical to SEQ ID NO: 258999
  chr8:11647194-11647480
  hypo

SEQ ID NO: 436471 - DNA, 41 bp, Homo sapiens; identical to SEQ ID NO: 259000
  chr8:11657164-11657205
  hypo

SEQ ID NO: 436472 - DNA, 68 bp, Homo sapiens; identical to SEQ ID NO: 259001
  chr8:11669212-11669280
  hypo

SEQ ID NO: 436473 - DNA, 54 bp, Homo sapiens; identical to SEQ ID NO: 259002
  chr8:11704225-11704279
  hypo

SEQ ID NO: 436474 - DNA, 73 bp, Homo sapiens; identical to SEQ ID NO: 309215
  chr8:11704674-11704747
  hypo

SEQ ID NO: 436475 - DNA, 72 bp, Homo sapiens; identical to SEQ ID NO: 212168
  chr8:11706508-11706580
  hypo

SEQ ID NO: 436476 - DNA, 120 bp, Homo sapiens; identical to SEQ ID NO: 212169
  chr8:11706613-11706733
  hypo

SEQ ID NO: 436477 - DNA, 151 bp, Homo sapiens; identical to SEQ ID NO: 259007
  chr8:11711013-11711164
  hypo

SEQ ID NO: 436478 - DNA, 92 bp, Homo sapiens; identical to SEQ ID NO: 259008
  chr8:11712326-11712418
  hypo

SEQ ID NO: 436479 - DNA, 35 bp, Homo sapiens; identical to SEQ ID NO: 259009
  chr8:11883053-11883088
  hypo

SEQ ID NO: 436480 - DNA, 225 bp, Homo sapiens; identical to SEQ ID NO: 212171
  chr8:12623675-12623900
  hypo

SEQ ID NO: 436481 - DNA, 91 bp, Homo sapiens; identical to SEQ ID NO: 212172
  chr8:12869539-12869630
  hypo

SEQ ID NO: 436482 - DNA, 211 bp, Homo sapiens; identical to SEQ ID NO: 259012
  chr8:12950150-12950361
  hypo

SEQ ID NO: 436483 - DNA, 346 bp, Homo sapiens; identical to SEQ ID NO: 259013
  chr8:12957816-12958162
  hypo

SEQ ID NO: 436484 - DNA, 33 bp, Homo sapiens; identical to SEQ ID NO: 259015
  chr8:13189949-13189982
  hypo

SEQ ID NO: 436485 - DNA, 34 bp, Homo sapiens; identical to SEQ ID NO: 259016
  chr8:16459748-16459782
  hypo

SEQ ID NO: 436486 - DNA, 100 bp, Homo sapiens; identical to SEQ ID NO: 309230
  chr8:16459902-16460002
  hypo

SEQ ID NO: 436487 - DNA, 101 bp, Homo sapiens; identical to SEQ ID NO: 259018
  chr8:17360874-17360975
  hypo

SEQ ID NO: 436488 - DNA, 399 bp, Homo sapiens; identical to SEQ ID NO: 285682
  chr8:17434527-17434926
  hypo

SEQ ID NO: 436489 - DNA, 122 bp, Homo sapiens; identical to SEQ ID NO: 259019
  chr8:17478545-17478667
  hypo

SEQ ID NO: 436490 - DNA, 34 bp, Homo sapiens; identical to SEQ ID NO: 259020
  chr8:17574339-17574373
  hypo

SEQ ID NO: 436491 - DNA, 100 bp, Homo sapiens; identical to SEQ ID NO: 259021
  chr8:17648492-17648592
  hypo

SEQ ID NO: 436492 - DNA, 210 bp, Homo sapiens; identical to SEQ ID NO: 259022
  chr8:17767556-17767766
  hypo

SEQ ID NO: 436493 - DNA, 99 bp, Homo sapiens; identical to SEQ ID NO: 212175
  chr8:17910135-17910234
  hypo

SEQ ID NO: 436494 - DNA, 36 bp, Homo sapiens; identical to SEQ ID NO: 212176
  chr8:18381897-18381933
  hypo

SEQ ID NO: 436495 - DNA, 37 bp, Homo sapiens; identical to SEQ ID NO: 259025
  chr8:18474405-18474442
  hypo

SEQ ID NO: 436496 - DNA, 77 bp, Homo sapiens; identical to SEQ ID NO: 212178
  chr8:19068613-19068690
  hypo

SEQ ID NO: 436497 - DNA, 335 bp, Homo sapiens; identical to SEQ ID NO: 259028
  chr8:19094994-19095329
  hypo

SEQ ID NO: 436498 - DNA, 35 bp, Homo sapiens; identical to SEQ ID NO: 259029
  chr8:19192506-19192541
  hypo

SEQ ID NO: 436499 - DNA, 38 bp, Homo sapiens; identical to SEQ ID NO: 259030
  chr8:19335638-19335676
  hypo

SEQ ID NO: 436500 - DNA, 60 bp, Homo sapiens; identical to SEQ ID NO: 259031
  chr8:19460933-19460993
  hypo

SEQ ID NO: 436501 - DNA, 291 bp, Homo sapiens; identical to SEQ ID NO: 212180
  chr8:19690583-19690874
  hypo

SEQ ID NO: 436502 - DNA, 62 bp, Homo sapiens; identical to SEQ ID NO: 212181
  chr8:19706754-19706816
  hypo

SEQ ID NO: 436503 - DNA, 64 bp, Homo sapiens; identical to SEQ ID NO: 259034
  chr8:19715650-19715714
  hypo

SEQ ID NO: 436504 - DNA, 70 bp, Homo sapiens; identical to SEQ ID NO: 201324
  chr8:19798019-19798089
  hypo

SEQ ID NO: 436505 - DNA, 358 bp, Homo sapiens; identical to SEQ ID NO: 259035
  chr8:20107412-20107770
  hypo

SEQ ID NO: 436506 - DNA, 54 bp, Homo sapiens; identical to SEQ ID NO: 212184
  chr8:20110391-20110445
  hypo

SEQ ID NO: 436507 - DNA, 158 bp, Homo sapiens; identical to SEQ ID NO: 212185
  chr8:20110479-20110637
  hypo

SEQ ID NO: 436508 - DNA, 158 bp, Homo sapiens; identical to SEQ ID NO: 259037
  chr8:20793601-20793759
  hypo

SEQ ID NO: 436509 - DNA, 195 bp, Homo sapiens; identical to SEQ ID NO: 259038
  chr8:21590921-21591116
  hypo

SEQ ID NO: 436510 - DNA, 82 bp, Homo sapiens; identical to SEQ ID NO: 212186
  chr8:21608213-21608295
  hypo

SEQ ID NO: 436511 - DNA, 87 bp, Homo sapiens; identical to SEQ ID NO: 259041
  chr8:21718693-21718780
  hypo

SEQ ID NO: 436512 - DNA, 232 bp, Homo sapiens; identical to SEQ ID NO: 259042
  chr8:21769765-21769997
  hypo

SEQ ID NO: 436513 - DNA, 82 bp, Homo sapiens; identical to SEQ ID NO: 285701
  chr8:21868699-21868781
  hypo

SEQ ID NO: 436514 - DNA, 124 bp, Homo sapiens; identical to SEQ ID NO: 201326
  chr8:21906319-21906443
  hypo

SEQ ID NO: 436515 - DNA, 202 bp, Homo sapiens; identical to SEQ ID NO: 212188
  chr8:21910414-21910616
  hypo

SEQ ID NO: 436516 - DNA, 166 bp, Homo sapiens; identical to SEQ ID NO: 212189
  chr8:21960397-21960563
  hypo

SEQ ID NO: 436517 - DNA, 894 bp, Homo sapiens; identical to SEQ ID NO: 212190
  chr8:21961297-21962191
  hypo

SEQ ID NO: 436518 - DNA, 87 bp, Homo sapiens; identical to SEQ ID NO: 259049
  chr8:21977140-21977227
  hypo

SEQ ID NO: 436519 - DNA, 379 bp, Homo sapiens; identical to SEQ ID NO: 259050
  chr8:21977566-21977945
  hypo

SEQ ID NO: 436520 - DNA, 225 bp, Homo sapiens; identical to SEQ ID NO: 259051
  chr8:21978253-21978478
  hypo

SEQ ID NO: 436521 - DNA, 70 bp, Homo sapiens; identical to SEQ ID NO: 212192
  chr8:21981256-21981326
  hypo

SEQ ID NO: 436522 - DNA, 95 bp, Homo sapiens; identical to SEQ ID NO: 259053
  chr8:22005942-22006037
  hypo

SEQ ID NO: 436523 - DNA, 81 bp, Homo sapiens; identical to SEQ ID NO: 259054
  chr8:22006313-22006394
  hypo

SEQ ID NO: 436524 - DNA, 40 bp, Homo sapiens; identical to SEQ ID NO: 212193
  chr8:22052966-22053006
  hypo

SEQ ID NO: 436525 - DNA, 40 bp, Homo sapiens; identical to SEQ ID NO: 259056
  chr8:22073146-22073186
  hypo

SEQ ID NO: 436526 - DNA, 405 bp, Homo sapiens; identical to SEQ ID NO: 212194
  chr8:22078961-22079366
  hypo

SEQ ID NO: 436527 - DNA, 44 bp, Homo sapiens; identical to SEQ ID NO: 259058
  chr8:22132540-22132584
  hypo

SEQ ID NO: 436528 - DNA, 187 bp, Homo sapiens; identical to SEQ ID NO: 259059
  chr8:22133209-22133396
  hypo

SEQ ID NO: 436529 - DNA, 297 bp, Homo sapiens; identical to SEQ ID NO: 259061
  chr8:22255560-22255857
  hypo

SEQ ID NO: 436530 - DNA, 70 bp, Homo sapiens; identical to SEQ ID NO: 259062
  chr8:22256253-22256323
  hypo

SEQ ID NO: 436531 - DNA, 107 bp, Homo sapiens; identical to SEQ ID NO: 285712
  chr8:22408652-22408759
  hypo

SEQ ID NO: 436532 - DNA, 142 bp, Homo sapiens; identical to SEQ ID NO: 285713
  chr8:22409076-22409218
  hypo

SEQ ID NO: 436533 - DNA, 142 bp, Homo sapiens; identical to SEQ ID NO: 116287
  chr8:22409253-22409395
  hypo

SEQ ID NO: 436534 - DNA, 92 bp, Homo sapiens; identical to SEQ ID NO: 259064
  chr8:22440003-22440095
  hypo

SEQ ID NO: 436535 - DNA, 31 bp, Homo sapiens; identical to SEQ ID NO: 259065
  chr8:22440395-22440426
  hypo

SEQ ID NO: 436536 - DNA, 75 bp, Homo sapiens; identical to SEQ ID NO: 259066
  chr8:22477223-22477298
  hypo

SEQ ID NO: 436537 - DNA, 83 bp, Homo sapiens; identical to SEQ ID NO: 259067
  chr8:22479976-22480059
  hypo

SEQ ID NO: 436538 - DNA, 115 bp, Homo sapiens; identical to SEQ ID NO: 259068
  chr8:22480089-22480204
  hypo

SEQ ID NO: 436539 - DNA, 145 bp, Homo sapiens; identical to SEQ ID NO: 212196
  chr8:22485267-22485412
  hypo

SEQ ID NO: 436540 - DNA, 229 bp, Homo sapiens; identical to SEQ ID NO: 259070
  chr8:22494911-22495140
  hypo

SEQ ID NO: 436541 - DNA, 69 bp, Homo sapiens; identical to SEQ ID NO: 259071
  chr8:22499362-22499431
  hypo

SEQ ID NO: 436542 - DNA, 217 bp, Homo sapiens; identical to SEQ ID NO: 223331
  chr8:22550331-22550548
  hypo

SEQ ID NO: 436543 - DNA, 256 bp, Homo sapiens; identical to SEQ ID NO: 223332
  chr8:22550912-22551168
  hypo

SEQ ID NO: 436544 - DNA, 54 bp, Homo sapiens; identical to SEQ ID NO: 259072
  chr8:22773287-22773341
  hypo

SEQ ID NO: 436545 - DNA, 166 bp, Homo sapiens; identical to SEQ ID NO: 259073
  chr8:22851898-22852064
  hypo

SEQ ID NO: 436546 - DNA, 196 bp, Homo sapiens; identical to SEQ ID NO: 259074
  chr8:22864845-22865041
  hypo

SEQ ID NO: 436547 - DNA, 309 bp, Homo sapiens; identical to SEQ ID NO: 223333
  chr8:22925472-22925781
  hypo

SEQ ID NO: 436548 - DNA, 53 bp, Homo sapiens; identical to SEQ ID NO: 259076
  chr8:22984120-22984173
  hypo

SEQ ID NO: 436549 - DNA, 41 bp, Homo sapiens; identical to SEQ ID NO: 159495
  chr8:23201725-23201766
  hypo

SEQ ID NO: 436550 - DNA, 156 bp, Homo sapiens; identical to SEQ ID NO: 259078
  chr8:23298419-23298575
  hypo

SEQ ID NO: 436551 - DNA, 338 bp, Homo sapiens; identical to SEQ ID NO: 285732
  chr8:23386092-23386430
  hypo

SEQ ID NO: 436552 - DNA, 151 bp, Homo sapiens; identical to SEQ ID NO: 406525
  chr8:23399724-23399875
  hypo

SEQ ID NO: 436553 - DNA, 350 bp, Homo sapiens; identical to SEQ ID NO: 212202
  chr8:23409903-23410253
  hypo

SEQ ID NO: 436554 - DNA, 125 bp, Homo sapiens; identical to SEQ ID NO: 212205
  chr8:23429103-23429228
  hypo

SEQ ID NO: 436555 - DNA, 172 bp, Homo sapiens; identical to SEQ ID NO: 309313
  chr8:23430698-23430870
  hypo

SEQ ID NO: 436556 - DNA, 117 bp, Homo sapiens; identical to SEQ ID NO: 309314
  chr8:23430923-23431040
  hypo

SEQ ID NO: 436557 - DNA, 102 bp, Homo sapiens; identical to SEQ ID NO: 259086
  chr8:25084011-25084113
  hypo

SEQ ID NO: 436558 - DNA, 216 bp, Homo sapiens; identical to SEQ ID NO: 212206
  chr8:25105393-25105609
  hypo

SEQ ID NO: 436559 - DNA, 202 bp, Homo sapiens; identical to SEQ ID NO: 259088
  chr8:25107887-25108089
  hypo

SEQ ID NO: 436560 - DNA, 179 bp, Homo sapiens; identical to SEQ ID NO: 259089
  chr8:25174516-25174695
  hypo

SEQ ID NO: 436561 - DNA, 84 bp, Homo sapiens; identical to SEQ ID NO: 212207
  chr8:25249436-25249520
  hypo

SEQ ID NO: 436562 - DNA, 89 bp, Homo sapiens; identical to SEQ ID NO: 259091
  chr8:25252803-25252892
  hypo

SEQ ID NO: 436563 - DNA, 169 bp, Homo sapiens; identical to SEQ ID NO: 259092
  chr8:25265513-25265682
  hypo

SEQ ID NO: 436564 - DNA, 257 bp, Homo sapiens; identical to SEQ ID NO: 259093
  chr8:25336999-25337256
  hypo

SEQ ID NO: 436565 - DNA, 38 bp, Homo sapiens; identical to SEQ ID NO: 212208
  chr8:25338912-25338950
  hypo

SEQ ID NO: 436566 - DNA, 147 bp, Homo sapiens; identical to SEQ ID NO: 259095
  chr8:25376165-25376312
  hypo

SEQ ID NO: 436567 - DNA, 144 bp, Homo sapiens; identical to SEQ ID NO: 285758
  chr8:25902185-25902329
  hypo

SEQ ID NO: 436568 - DNA, 52 bp, Homo sapiens; identical to SEQ ID NO: 212209
  chr8:26053988-26054040
  hypo

SEQ ID NO: 436569 - DNA, 119 bp, Homo sapiens; identical to SEQ ID NO: 259098
  chr8:26148091-26148210
  hypo

SEQ ID NO: 436570 - DNA, 270 bp, Homo sapiens; identical to SEQ ID NO: 201360
  chr8:26372150-26372420
  hypo

SEQ ID NO: 436571 - DNA, 64 bp, Homo sapiens; identical to SEQ ID NO: 223345
  chr8:26435020-26435084
  hypo

SEQ ID NO: 436572 - DNA, 211 bp, Homo sapiens; identical to SEQ ID NO: 259103
  chr8:26444972-26445183
  hypo

SEQ ID NO: 436573 - DNA, 148 bp, Homo sapiens; identical to SEQ ID NO: 259105
  chr8:26515708-26515856
  hypo

SEQ ID NO: 436574 - DNA, 135 bp, Homo sapiens; identical to SEQ ID NO: 259106
  chr8:27145421-27145556
  hypo

SEQ ID NO: 436575 - DNA, 78 bp, Homo sapiens; identical to SEQ ID NO: 201364
  chr8:27168528-27168606
  hypo

SEQ ID NO: 436576 - DNA, 54 bp, Homo sapiens; identical to SEQ ID NO: 259107
  chr8:27279918-27279972
  hypo

SEQ ID NO: 436577 - DNA, 250 bp, Homo sapiens; identical to SEQ ID NO: 285782
  chr8:27327202-27327452
  hypo

SEQ ID NO: 436578 - DNA, 226 bp, Homo sapiens; identical to SEQ ID NO: 212216
  chr8:27337092-27337318
  hypo

SEQ ID NO: 436579 - DNA, 127 bp, Homo sapiens; identical to SEQ ID NO: 212217
  chr8:27516398-27516525
  hypo

SEQ ID NO: 436580 - DNA, 168 bp, Homo sapiens; identical to SEQ ID NO: 212218
  chr8:27516773-27516941
  hypo

SEQ ID NO: 436581 - DNA, 66 bp, Homo sapiens; identical to SEQ ID NO: 259113
  chr8:27530312-27530378
  hypo

SEQ ID NO: 436582 - DNA, 124 bp, Homo sapiens; identical to SEQ ID NO: 212220
  chr8:27845168-27845292
  hypo

SEQ ID NO: 436583 - DNA, 45 bp, Homo sapiens; identical to SEQ ID NO: 309351
  chr8:27931039-27931084
  hypo

SEQ ID NO: 436584 - DNA, 159 bp, Homo sapiens; identical to SEQ ID NO: 212221
  chr8:27931114-27931273
  hypo

SEQ ID NO: 436585 - DNA, 353 bp, Homo sapiens; identical to SEQ ID NO: 259117
  chr8:28206805-28207158
  hypo

SEQ ID NO: 436586 - DNA, 612 bp, Homo sapiens; identical to SEQ ID NO: 259120
  chr8:28208626-28209238
  hypo

SEQ ID NO: 436587 - DNA, 226 bp, Homo sapiens; identical to SEQ ID NO: 285789
  chr8:28242659-28242885
  hypo

SEQ ID NO: 436588 - DNA, 78 bp, Homo sapiens; identical to SEQ ID NO: 201368
  chr8:28258795-28258873
  hypo

SEQ ID NO: 436589 - DNA, 43 bp, Homo sapiens; identical to SEQ ID NO: 259122
  chr8:28265545-28265588
  hypo

SEQ ID NO: 436590 - DNA, 38 bp, Homo sapiens; identical to SEQ ID NO: 259123
  chr8:28266309-28266347
  hypo

SEQ ID NO: 436591 - DNA, 61 bp, Homo sapiens; identical to SEQ ID NO: 259124
  chr8:28269021-28269082
  hypo

SEQ ID NO: 436592 - DNA, 144 bp, Homo sapiens; identical to SEQ ID NO: 259125
  chr8:28573489-28573633
  hypo

SEQ ID NO: 436593 - DNA, 208 bp, Homo sapiens; identical to SEQ ID NO: 259126
  chr8:28610787-28610995
  hypo

SEQ ID NO: 436594 - DNA, 76 bp, Homo sapiens; identical to SEQ ID NO: 259127
  chr8:28737393-28737469
  hypo

SEQ ID NO: 436595 - DNA, 333 bp, Homo sapiens; identical to SEQ ID NO: 201370
  chr8:28748909-28749242
  hypo

SEQ ID NO: 436596 - DNA, 320 bp, Homo sapiens; identical to SEQ ID NO: 259128
  chr8:28918856-28919176
  hypo

SEQ ID NO: 436597 - DNA, 168 bp, Homo sapiens; identical to SEQ ID NO: 259129
  chr8:28928119-28928287
  hypo

SEQ ID NO: 436598 - DNA, 213 bp, Homo sapiens; identical to SEQ ID NO: 212230
  chr8:28950156-28950369
  hypo

SEQ ID NO: 436599 - DNA, 175 bp, Homo sapiens; identical to SEQ ID NO: 259132
  chr8:28960025-28960200
  hypo

SEQ ID NO: 436600 - DNA, 142 bp, Homo sapiens; identical to SEQ ID NO: 259134
  chr8:29127380-29127522
  hypo

SEQ ID NO: 436601 - DNA, 98 bp, Homo sapiens; identical to SEQ ID NO: 259135
  chr8:29160770-29160868
  hypo

SEQ ID NO: 436602 - DNA, 390 bp, Homo sapiens; identical to SEQ ID NO: 419756
  chr8:29207871-29208261
  hypo

SEQ ID NO: 436603 - DNA, 149 bp, Homo sapiens; identical to SEQ ID NO: 259136
  chr8:29212822-29212971
  hypo

SEQ ID NO: 436604 - DNA, 331 bp, Homo sapiens; identical to SEQ ID NO: 259137
  chr8:29926952-29927283
  hypo

SEQ ID NO: 436605 - DNA, 210 bp, Homo sapiens; identical to SEQ ID NO: 212232
  chr8:29949204-29949414
  hypo

SEQ ID NO: 436606 - DNA, 41 bp, Homo sapiens; identical to SEQ ID NO: 212233
  chr8:29951802-29951843
  hypo

SEQ ID NO: 436607 - DNA, 99 bp, Homo sapiens; identical to SEQ ID NO: 212234
  chr8:29958255-29958354
  hypo

SEQ ID NO: 436608 - DNA, 43 bp, Homo sapiens; identical to SEQ ID NO: 212235
  chr8:29962165-29962208
  hypo

SEQ ID NO: 436609 - DNA, 1018 bp, Homo sapiens; identical to SEQ ID NO: 201376
  chr8:30241612-30242630
  hypo

SEQ ID NO: 436610 - DNA, 361 bp, Homo sapiens; identical to SEQ ID NO: 201377
  chr8:30242697-30243058
  hypo

SEQ ID NO: 436611 - DNA, 213 bp, Homo sapiens; identical to SEQ ID NO: 201378
  chr8:30243175-30243388
  hypo

SEQ ID NO: 436612 - DNA, 160 bp, Homo sapiens; identical to SEQ ID NO: 259142
  chr8:30419851-30420011
  hypo

SEQ ID NO: 436613 - DNA, 49 bp, Homo sapiens; identical to SEQ ID NO: 259144
  chr8:30432995-30433044
  hypo

SEQ ID NO: 436614 - DNA, 119 bp, Homo sapiens
  chr8:30561836-30561955
  hypo
tctctcaaaaagactggtgtgtctggaggagaggcagaaggctaagaaagacaacaggataatggtgaaatgaacagaggcaagagcaagagaggaatactctggccaagggagggaaa

SEQ ID NO: 436615 - DNA, 43 bp, Homo sapiens; identical to SEQ ID NO: 259146
  chr8:30599240-30599283
  hypo

SEQ ID NO: 436616 - DNA, 38 bp, Homo sapiens; identical to SEQ ID NO: 259147
  chr8:30889695-30889733
  hypo

SEQ ID NO: 436617 - DNA, 319 bp, Homo sapiens; identical to SEQ ID NO: 259148
  chr8:33580344-33580663
  hypo

SEQ ID NO: 436618 - DNA, 142 bp, Homo sapiens; identical to SEQ ID NO: 259149
  chr8:36179410-36179552
  hypo

SEQ ID NO: 436619 - DNA, 32 bp, Homo sapiens; identical to SEQ ID NO: 259150
  chr8:36636712-36636744
  hypo

SEQ ID NO: 436620 - DNA, 120 bp, Homo sapiens; identical to SEQ ID NO: 259151
  chr8:36636804-36636924
  hypo

SEQ ID NO: 436621 - DNA, 120 bp, Homo sapiens; identical to SEQ ID NO: 259152
  chr8:36636984-36637104
  hypo

SEQ ID NO: 436622 - DNA, 91 bp, Homo sapiens; identical to SEQ ID NO: 397928
  chr8:37552811-37552902
  hypo

SEQ ID NO: 436623 - DNA, 33 bp, Homo sapiens; identical to SEQ ID NO: 259153
  chr8:37673307-37673340
  hypo

SEQ ID NO: 436624 - DNA, 266 bp, Homo sapiens; identical to SEQ ID NO: 259154
  chr8:37688849-37689115
  hypo

SEQ ID NO: 436625 - DNA, 47 bp, Homo sapiens; identical to SEQ ID NO: 259156
  chr8:37708576-37708623
  hypo

SEQ ID NO: 436626 - DNA, 121 bp, Homo sapiens; identical to SEQ ID NO: 259157
  chr8:37720438-37720559
  hypo

SEQ ID NO: 436627 - DNA, 80 bp, Homo sapiens; identical to SEQ ID NO: 259158
  chr8:37721474-37721554
  hypo

SEQ ID NO: 436628 - DNA, 182 bp, Homo sapiens; identical to SEQ ID NO: 259159
  chr8:37946122-37946304
  hypo

SEQ ID NO: 436629 - DNA, 59 bp, Homo sapiens; identical to SEQ ID NO: 309405
  chr8:38020272-38020331
  hypo

SEQ ID NO: 436630 - DNA, 32 bp, Homo sapiens; identical to SEQ ID NO: 212243
  chr8:38032247-38032279
  hypo

SEQ ID NO: 436631 - DNA, 275 bp, Homo sapiens; identical to SEQ ID NO: 259163
  chr8:38146029-38146304
  hypo

SEQ ID NO: 436632 - DNA, 32 bp, Homo sapiens; identical to SEQ ID NO: 259164
  chr8:38223006-38223038
  hypo

SEQ ID NO: 436633 - DNA, 240 bp, Homo sapiens; identical to SEQ ID NO: 212245
  chr8:38223278-38223518
  hypo

SEQ ID NO: 436634 - DNA, 72 bp, Homo sapiens; identical to SEQ ID NO: 259166
  chr8:38260116-38260188
  hypo

SEQ ID NO: 436635 - DNA, 97 bp, Homo sapiens; identical to SEQ ID NO: 309411
  chr8:38274864-38274961
  hypo

SEQ ID NO: 436636 - DNA, 34 bp, Homo sapiens; identical to SEQ ID NO: 259168
  chr8:38279097-38279131
  hypo

SEQ ID NO: 436637 - DNA, 70 bp, Homo sapiens; identical to SEQ ID NO: 259169
  chr8:38280652-38280722
  hypo

SEQ ID NO: 436638 - DNA, 135 bp, Homo sapiens; identical to SEQ ID NO: 259170
  chr8:38282093-38282228
  hypo

SEQ ID NO: 436639 - DNA, 42 bp, Homo sapiens; identical to SEQ ID NO: 259171
  chr8:38361680-38361722
  hypo

SEQ ID NO: 436640 - DNA, 269 bp, Homo sapiens; identical to SEQ ID NO: 285837
  chr8:38614519-38614788
  hypo

SEQ ID NO: 436641 - DNA, 103 bp, Homo sapiens; identical to SEQ ID NO: 285838
  chr8:38615060-38615163
  hypo

SEQ ID NO: 436642 - DNA, 143 bp, Homo sapiens; identical to SEQ ID NO: 212247
  chr8:38643832-38643975
  hypo

SEQ ID NO: 436643 - DNA, 113 bp, Homo sapiens; identical to SEQ ID NO: 212248
  chr8:38644035-38644148
  hypo

SEQ ID NO: 436644 - DNA, 44 bp, Homo sapiens; identical to SEQ ID NO: 212249
  chr8:38692767-38692811
  hypo

SEQ ID NO: 436645 - DNA, 42 bp, Homo sapiens; identical to SEQ ID NO: 259176
  chr8:38735772-38735814
  hypo

SEQ ID NO: 436646 - DNA, 288 bp, Homo sapiens; identical to SEQ ID NO: 212251
  chr8:38786180-38786468
  hypo

SEQ ID NO: 436647 - DNA, 104 bp, Homo sapiens; identical to SEQ ID NO: 259179
  chr8:38859453-38859557
  hypo

SEQ ID NO: 436648 - DNA, 394 bp, Homo sapiens; identical to SEQ ID NO: 259180
  chr8:39380183-39380577
  hypo

SEQ ID NO: 436649 - DNA, 86 bp, Homo sapiens; identical to SEQ ID NO: 259181
  chr8:39978288-39978374
  hypo

SEQ ID NO: 436650 - DNA, 393 bp, Homo sapiens; identical to SEQ ID NO: 259182
  chr8:40790349-40790742
  hypo

SEQ ID NO: 436651 - DNA, 86 bp, Homo sapiens; identical to SEQ ID NO: 212252
  chr8:41290578-41290664
  hypo

SEQ ID NO: 436652 - DNA, 63 bp, Homo sapiens; identical to SEQ ID NO: 212253
  chr8:41325383-41325446
  hypo

SEQ ID NO: 436653 - DNA, 92 bp, Homo sapiens; identical to SEQ ID NO: 259186
  chr8:41486828-41486920
  hypo

SEQ ID NO: 436654 - DNA, 122 bp, Homo sapiens; identical to SEQ ID NO: 259188
  chr8:41488513-41488635
  hypo

SEQ ID NO: 436655 - DNA, 46 bp, Homo sapiens; identical to SEQ ID NO: 309436
  chr8:41582866-41582912
  hypo

SEQ ID NO: 436656 - DNA, 275 bp, Homo sapiens; identical to SEQ ID NO: 259192
  chr8:41590545-41590820
  hypo

SEQ ID NO: 436657 - DNA, 34 bp, Homo sapiens; identical to SEQ ID NO: 212254
  chr8:41602335-41602369
  hypo

SEQ ID NO: 436658 - DNA, 192 bp, Homo sapiens; identical to SEQ ID NO: 259196
  chr8:41688593-41688785
  hypo

SEQ ID NO: 436659 - DNA, 59 bp, Homo sapiens; identical to SEQ ID NO: 259197
  chr8:41910398-41910457
  hypo

SEQ ID NO: 436660 - DNA, 69 bp, Homo sapiens; identical to SEQ ID NO: 259198
  chr8:41910487-41910556
  hypo

SEQ ID NO: 436661 - DNA, 36 bp, Homo sapiens; identical to SEQ ID NO: 259199
  chr8:41960685-41960721
  hypo

SEQ ID NO: 436662 - DNA, 205 bp, Homo sapiens; identical to SEQ ID NO: 259200
  chr8:42011673-42011878
  hypo

SEQ ID NO: 436663 - DNA, 34 bp, Homo sapiens; identical to SEQ ID NO: 201399
  chr8:42040329-42040363
  hypo

SEQ ID NO: 436664 - DNA, 275 bp, Homo sapiens; identical to SEQ ID NO: 259201
  chr8:42053906-42054181
  hypo

SEQ ID NO: 436665 - DNA, 138 bp, Homo sapiens; identical to SEQ ID NO: 309449
  chr8:42144494-42144632
  hypo

SEQ ID NO: 436666 - DNA, 142 bp, Homo sapiens; identical to SEQ ID NO: 259205
  chr8:42145510-42145652
  hypo

SEQ ID NO: 436667 - DNA, 85 bp, Homo sapiens; identical to SEQ ID NO: 212260
  chr8:42148195-42148280
  hypo

SEQ ID NO: 436668 - DNA, 43 bp, Homo sapiens; identical to SEQ ID NO: 212261
  chr8:42255793-42255836
  hypo

SEQ ID NO: 436669 - DNA, 42 bp, Homo sapiens; identical to SEQ ID NO: 212262
  chr8:42256016-42256058
  hypo

SEQ ID NO: 436670 - DNA, 462 bp, Homo sapiens; identical to SEQ ID NO: 259211
  chr8:42268280-42268742
  hypo

SEQ ID NO: 436671 - DNA, 297 bp, Homo sapiens; identical to SEQ ID NO: 259212
  chr8:42293859-42294156
  hypo

SEQ ID NO: 436672 - DNA, 63 bp, Homo sapiens; identical to SEQ ID NO: 259213
  chr8:42306697-42306760
  hypo

SEQ ID NO: 436673 - DNA, 42 bp, Homo sapiens; identical to SEQ ID NO: 259214
  chr8:42315266-42315308
  hypo

SEQ ID NO: 436674 - DNA, 102 bp, Homo sapiens; identical to SEQ ID NO: 406590
  chr8:42316750-42316852
  hypo

SEQ ID NO: 436675 - DNA, 41 bp, Homo sapiens; identical to SEQ ID NO: 259216
  chr8:42318196-42318237
  hypo

SEQ ID NO: 436676 - DNA, 120 bp, Homo sapiens; identical to SEQ ID NO: 259220
  chr8:42544829-42544949
  hypo

SEQ ID NO: 436677 - DNA, 61 bp, Homo sapiens; identical to SEQ ID NO: 309464
  chr8:42600787-42600848
  hypo

SEQ ID NO: 436678 - DNA, 133 bp, Homo sapiens; identical to SEQ ID NO: 309465
  chr8:42600878-42601011
  hypo

SEQ ID NO: 436679 - DNA, 82 bp, Homo sapiens; identical to SEQ ID NO: 259222
  chr8:42651995-42652077
  hypo

SEQ ID NO: 436680 - DNA, 432 bp, Homo sapiens; identical to SEQ ID NO: 285852
  chr8:42996735-42997167
  hypo

SEQ ID NO: 436681 - DNA, 233 bp, Homo sapiens; identical to SEQ ID NO: 212267
  chr8:43059742-43059975
  hypo

SEQ ID NO: 436682 - DNA, 263 bp, Homo sapiens; identical to SEQ ID NO: 259227
  chr8:48091762-48092025
  hypo

SEQ ID NO: 436683 - DNA, 297 bp, Homo sapiens; identical to SEQ ID NO: 259228
  chr8:48172269-48172566
  hypo

SEQ ID NO: 436684 - DNA, 36 bp, Homo sapiens; identical to SEQ ID NO: 259229
  chr8:48255177-48255213
  hypo

SEQ ID NO: 436685 - DNA, 203 bp, Homo sapiens; identical to SEQ ID NO: 212269
  chr8:48348567-48348770
  hypo

SEQ ID NO: 436686 - DNA, 41 bp, Homo sapiens; identical to SEQ ID NO: 259234
  chr8:48523967-48524008
  hypo

SEQ ID NO: 436687 - DNA, 230 bp, Homo sapiens; identical to SEQ ID NO: 212271
  chr8:48585773-48586003
  hypo

SEQ ID NO: 436688 - DNA, 40 bp, Homo sapiens; identical to SEQ ID NO: 212272
  chr8:48593635-48593675
  hypo

SEQ ID NO: 436689 - DNA, 1723 bp, Homo sapiens; identical to SEQ ID NO: 285856
  chr8:48649725-48651448
  hypo

SEQ ID NO: 436690 - DNA, 58 bp, Homo sapiens; identical to SEQ ID NO: 212275
  chr8:48675290-48675348
  hypo

SEQ ID NO: 436691 - DNA, 120 bp, Homo sapiens; identical to SEQ ID NO: 212276
  chr8:48683807-48683927
  hypo

SEQ ID NO: 436692 - DNA, 116 bp, Homo sapiens; identical to SEQ ID NO: 259239
  chr8:48694944-48695060
  hypo

SEQ ID NO: 436693 - DNA, 180 bp, Homo sapiens; identical to SEQ ID NO: 212277
  chr8:48711778-48711958
  hypo

SEQ ID NO: 436694 - DNA, 179 bp, Homo sapiens; identical to SEQ ID NO: 259242
  chr8:48793718-48793897
  hypo

SEQ ID NO: 436695 - DNA, 161 bp, Homo sapiens; identical to SEQ ID NO: 259244
  chr8:48854509-48854670
  hypo

SEQ ID NO: 436696 - DNA, 75 bp, Homo sapiens; identical to SEQ ID NO: 212279
  chr8:48854908-48854983
  hypo

SEQ ID NO: 436697 - DNA, 83 bp, Homo sapiens; identical to SEQ ID NO: 259246
  chr8:48985104-48985187
  hypo

SEQ ID NO: 436698 - DNA, 169 bp, Homo sapiens; identical to SEQ ID NO: 212280
  chr8:49055453-49055622
  hypo

SEQ ID NO: 436699 - DNA, 162 bp, Homo sapiens; identical to SEQ ID NO: 309493
  chr8:49172622-49172784
  hypo

SEQ ID NO: 436700 - DNA, 509 bp, Homo sapiens; identical to SEQ ID NO: 309494
  chr8:49172814-49173323
  hypo

SEQ ID NO: 436701 - DNA, 42 bp, Homo sapiens; identical to SEQ ID NO: 259249
  chr8:49187833-49187875
  hypo

SEQ ID NO: 436702 - DNA, 275 bp, Homo sapiens; identical to SEQ ID NO: 159868
  chr8:49493912-49494187
  hypo

SEQ ID NO: 436703 - DNA, 44 bp, Homo sapiens; identical to SEQ ID NO: 259257
  chr8:49520279-49520323
  hypo

SEQ ID NO: 436704 - DNA, 157 bp, Homo sapiens; identical to SEQ ID NO: 309506
  chr8:49546882-49547039
  hypo

SEQ ID NO: 436705 - DNA, 240 bp, Homo sapiens; identical to SEQ ID NO: 309507
  chr8:49547084-49547324
  hypo

SEQ ID NO: 436706 - DNA, 43 bp, Homo sapiens; identical to SEQ ID NO: 212290
  chr8:49572364-49572407
  hypo

SEQ ID NO: 436707 - DNA, 80 bp, Homo sapiens; identical to SEQ ID NO: 259261
  chr8:49588260-49588340
  hypo

SEQ ID NO: 436708 - DNA, 114 bp, Homo sapiens; identical to SEQ ID NO: 309512
  chr8:49747144-49747258
  hypo

SEQ ID NO: 436709 - DNA, 40 bp, Homo sapiens
  chr8:49747318-49747358
  hypo
ttctagaagcaggcttgactggcatgcatgtgcatagatg

SEQ ID NO: 436710 - DNA, 38 bp, Homo sapiens; identical to SEQ ID NO: 259265
  chr8:49747863-49747901
  hypo

SEQ ID NO: 436711 - DNA, 35 bp, Homo sapiens; identical to SEQ ID NO: 212293
  chr8:49797125-49797160
  hypo

SEQ ID NO: 436712 - DNA, 160 bp, Homo sapiens; identical to SEQ ID NO: 259267
  chr8:49803111-49803271
  hypo

SEQ ID NO: 436713 - DNA, 104 bp, Homo sapiens; identical to SEQ ID NO: 259269
  chr8:49809397-49809501
  hypo

SEQ ID NO: 436714 - DNA, 470 bp, Homo sapiens; identical to SEQ ID NO: 259270
  chr8:49890418-49890888
  hypo

SEQ ID NO: 436715 - DNA, 71 bp, Homo sapiens; identical to SEQ ID NO: 309520
  chr8:49959159-49959230
  hypo

SEQ ID NO: 436716 - DNA, 87 bp, Homo sapiens; identical to SEQ ID NO: 259272
  chr8:49983880-49983967
  hypo

SEQ ID NO: 436717 - DNA, 37 bp, Homo sapiens; identical to SEQ ID NO: 212295
  chr8:50014663-50014700
  hypo

SEQ ID NO: 436718 - DNA, 31 bp, Homo sapiens; identical to SEQ ID NO: 259275
  chr8:50053019-50053050
  hypo

SEQ ID NO: 436719 - DNA, 40 bp, Homo sapiens; identical to SEQ ID NO: 212296
  chr8:50071091-50071131
  hypo

SEQ ID NO: 436720 - DNA, 42 bp, Homo sapiens; identical to SEQ ID NO: 259277
  chr8:50115376-50115418
  hypo

SEQ ID NO: 436721 - DNA, 56 bp, Homo sapiens
  chr8:50313931-50313987
  hypo
ctcaaaaaaaaaaaaaaaaaaaaaaaaccaacagaatgggacatcacaggagcaga

SEQ ID NO: 436722 - DNA, 38 bp, Homo sapiens; identical to SEQ ID NO: 259279
  chr8:50377959-50377997
  hypo

SEQ ID NO: 436723 - DNA, 120 bp, Homo sapiens; identical to SEQ ID NO: 259280
  chr8:50568929-50569049
  hypo

SEQ ID NO: 436724 - DNA, 82 bp, Homo sapiens; identical to SEQ ID NO: 259281
  chr8:50740531-50740613
  hypo

SEQ ID NO: 436725 - DNA, 360 bp, Homo sapiens; identical to SEQ ID NO: 259282
  chr8:50891735-50892095
  hypo

SEQ ID NO: 436726 - DNA, 32 bp, Homo sapiens; identical to SEQ ID NO: 259283
  chr8:50945964-50945996
  hypo

SEQ ID NO: 436727 - DNA, 143 bp, Homo sapiens; identical to SEQ ID NO: 259284
  chr8:50987383-50987526
  hypo

SEQ ID NO: 436728 - DNA, 100 bp, Homo sapiens; identical to SEQ ID NO: 259285
  chr8:52143253-52143353
  hypo

SEQ ID NO: 436729 - DNA, 120 bp, Homo sapiens; identical to SEQ ID NO: 259286
  chr8:52184041-52184161
  hypo

SEQ ID NO: 436730 - DNA, 51 bp, Homo sapiens; identical to SEQ ID NO: 259287
  chr8:52191721-52191772
  hypo

SEQ ID NO: 436731 - DNA, 38 bp, Homo sapiens; identical to SEQ ID NO: 259288
  chr8:52384515-52384553
  hypo

SEQ ID NO: 436732 - DNA, 122 bp, Homo sapiens; identical to SEQ ID NO: 259289
  chr8:52432589-52432711
  hypo

SEQ ID NO: 436733 - DNA, 281 bp, Homo sapiens; identical to SEQ ID NO: 259290
  chr8:52432927-52433208
  hypo

SEQ ID NO: 436734 - DNA, 41 bp, Homo sapiens; identical to SEQ ID NO: 259292
  chr8:53459774-53459815
  hypo

SEQ ID NO: 436735 - DNA, 32 bp, Homo sapiens; identical to SEQ ID NO: 259293
  chr8:53487090-53487122
  hypo

SEQ ID NO: 436736 - DNA, 34 bp, Homo sapiens; identical to SEQ ID NO: 212297
  chr8:53657305-53657339
  hypo

SEQ ID NO: 436737 - DNA, 41 bp, Homo sapiens; identical to SEQ ID NO: 309542
  chr8:53805566-53805607
  hypo

SEQ ID NO: 436738 - DNA, 76 bp, Homo sapiens; identical to SEQ ID NO: 309543
  chr8:53805637-53805713
  hypo

SEQ ID NO: 436739 - DNA, 349 bp, Homo sapiens; identical to SEQ ID NO: 285868
  chr8:53852565-53852914
  hypo

SEQ ID NO: 436740 - DNA, 265 bp, Homo sapiens; identical to SEQ ID NO: 212299
  chr8:54154411-54154676
  hypo

SEQ ID NO: 436741 - DNA, 250 bp, Homo sapiens; identical to SEQ ID NO: 259297
  chr8:54507104-54507354
  hypo

SEQ ID NO: 436742 - DNA, 121 bp, Homo sapiens; identical to SEQ ID NO: 212301
  chr8:54640632-54640753
  hypo

SEQ ID NO: 436743 - DNA, 257 bp, Homo sapiens; identical to SEQ ID NO: 259299
  chr8:54645359-54645616
  hypo

SEQ ID NO: 436744 - DNA, 98 bp, Homo sapiens; identical to SEQ ID NO: 259301
  chr8:54647243-54647341
  hypo

SEQ ID NO: 436745 - DNA, 32 bp, Homo sapiens; identical to SEQ ID NO: 212302
  chr8:54647893-54647925
  hypo

SEQ ID NO: 436746 - DNA, 159 bp, Homo sapiens; identical to SEQ ID NO: 259303
  chr8:54658318-54658477
  hypo

SEQ ID NO: 436747 - DNA, 108 bp, Homo sapiens; identical to SEQ ID NO: 259304
  chr8:54667967-54668075
  hypo

SEQ ID NO: 436748 - DNA, 191 bp, Homo sapiens; identical to SEQ ID NO: 212303
  chr8:54750268-54750459
  hypo

SEQ ID NO: 436749 - DNA, 102 bp, Homo sapiens; identical to SEQ ID NO: 259306
  chr8:54925425-54925527
  hypo

SEQ ID NO: 436750 - DNA, 85 bp, Homo sapiens; identical to SEQ ID NO: 259307
  chr8:54945254-54945339
  hypo

SEQ ID NO: 436751 - DNA, 38 bp, Homo sapiens; identical to SEQ ID NO: 212304
  chr8:54956722-54956760
  hypo

SEQ ID NO: 436752 - DNA, 165 bp, Homo sapiens; identical to SEQ ID NO: 259309
  chr8:55212684-55212849
  hypo

SEQ ID NO: 436753 - DNA, 31 bp, Homo sapiens; identical to SEQ ID NO: 259310
  chr8:55229407-55229438
  hypo

SEQ ID NO: 436754 - DNA, 69 bp, Homo sapiens; identical to SEQ ID NO: 259311
  chr8:55765265-55765334
  hypo

SEQ ID NO: 436755 - DNA, 86 bp, Homo sapiens; identical to SEQ ID NO: 259312
  chr8:55826294-55826380
  hypo

SEQ ID NO: 436756 - DNA, 68 bp, Homo sapiens; identical to SEQ ID NO: 212306
  chr8:56361773-56361841
  hypo

SEQ ID NO: 436757 - DNA, 225 bp, Homo sapiens; identical to SEQ ID NO: 309565
  chr8:56362075-56362300
  hypo

SEQ ID NO: 436758 - DNA, 310 bp, Homo sapiens; identical to SEQ ID NO: 212307
  chr8:56362505-56362815
  hypo

SEQ ID NO: 436759 - DNA, 320 bp, Homo sapiens; identical to SEQ ID NO: 309570
  chr8:56366964-56367284
  hypo

SEQ ID NO: 436760 - DNA, 447 bp, Homo sapiens; identical to SEQ ID NO: 309571
  chr8:56367314-56367761
  hypo

SEQ ID NO: 436761 - DNA, 38 bp, Homo sapiens; identical to SEQ ID NO: 309572
  chr8:56367791-56367829
  hypo

SEQ ID NO: 436762 - DNA, 398 bp, Homo sapiens; identical to SEQ ID NO: 259321
  chr8:57079620-57080018
  hypo

SEQ ID NO: 436763 - DNA, 155 bp, Homo sapiens; identical to SEQ ID NO: 285884
  chr8:57123315-57123470
  hypo

SEQ ID NO: 436764 - DNA, 65 bp, Homo sapiens; identical to SEQ ID NO: 212311
  chr8:57390711-57390776
  hypo

SEQ ID NO: 436765 - DNA, 80 bp, Homo sapiens; identical to SEQ ID NO: 212312
  chr8:58044529-58044609
  hypo

SEQ ID NO: 436766 - DNA, 48 bp, Homo sapiens; identical to SEQ ID NO: 309583
  chr8:58117079-58117127
  hypo

SEQ ID NO: 436767 - DNA, 250 bp, Homo sapiens; identical to SEQ ID NO: 259326
  chr8:58117447-58117697
  hypo

SEQ ID NO: 436768 - DNA, 222 bp, Homo sapiens; identical to SEQ ID NO: 212313
  chr8:58122848-58123070
  hypo

SEQ ID NO: 436769 - DNA, 297 bp, Homo sapiens; identical to SEQ ID NO: 259329
  chr8:58191334-58191631
  hypo

SEQ ID NO: 436770 - DNA, 425 bp, Homo sapiens; identical to SEQ ID NO: 259330
  chr8:58982675-58983100
  hypo

SEQ ID NO: 436771 - DNA, 87 bp, Homo sapiens; identical to SEQ ID NO: 212314
  chr8:58991411-58991498
  hypo

SEQ ID NO: 436772 - DNA, 154 bp, Homo sapiens; identical to SEQ ID NO: 259333
  chr8:59686610-59686764
  hypo

SEQ ID NO: 436773 - DNA, 152 bp, Homo sapiens; identical to SEQ ID NO: 212317
  chr8:60506003-60506155
  hypo

SEQ ID NO: 436774 - DNA, 54 bp, Homo sapiens; identical to SEQ ID NO: 212318
  chr8:60506185-60506239
  hypo

SEQ ID NO: 436775 - DNA, 42 bp, Homo sapiens; identical to SEQ ID NO: 259335
  chr8:60733751-60733793
  hypo

SEQ ID NO: 436776 - DNA, 93 bp, Homo sapiens; identical to SEQ ID NO: 212319
  chr8:61034762-61034855
  hypo

SEQ ID NO: 436777 - DNA, 81 bp, Homo sapiens; identical to SEQ ID NO: 259338
  chr8:61189328-61189409
  hypo

SEQ ID NO: 436778 - DNA, 70 bp, Homo sapiens; identical to SEQ ID NO: 259339
  chr8:61282991-61283061
  hypo

SEQ ID NO: 436779 - DNA, 32 bp, Homo sapiens; identical to SEQ ID NO: 259340
  chr8:61557774-61557806
  hypo

SEQ ID NO: 436780 - DNA, 59 bp, Homo sapiens; identical to SEQ ID NO: 259341
  chr8:61590513-61590572
  hypo

SEQ ID NO: 436781 - DNA, 85 bp, Homo sapiens; identical to SEQ ID NO: 259342
  chr8:61627786-61627871
  hypo

SEQ ID NO: 436782 - DNA, 154 bp, Homo sapiens; identical to SEQ ID NO: 259343
  chr8:61779845-61779999
  hypo

SEQ ID NO: 436783 - DNA, 154 bp, Homo sapiens; identical to SEQ ID NO: 309604
  chr8:61789712-61789866
  hypo

SEQ ID NO: 436784 - DNA, 105 bp, Homo sapiens; identical to SEQ ID NO: 259345
  chr8:62221611-62221716
  hypo

SEQ ID NO: 436785 - DNA, 1143 bp, Homo sapiens; identical to SEQ ID NO: 285898
  chr8:62626290-62627433
  hypo

SEQ ID NO: 436786 - DNA, 82 bp, Homo sapiens; identical to SEQ ID NO: 259346
  chr8:62745086-62745168
  hypo

SEQ ID NO: 436787 - DNA, 99 bp, Homo sapiens; identical to SEQ ID NO: 259347
  chr8:64037106-64037205
  hypo

SEQ ID NO: 436788 - DNA, 33 bp, Homo sapiens; identical to SEQ ID NO: 259348
  chr8:64642939-64642972
  hypo

SEQ ID NO: 436789 - DNA, 124 bp, Homo sapiens; identical to SEQ ID NO: 259349
  chr8:65483619-65483743
  hypo

SEQ ID NO: 436790 - DNA, 183 bp, Homo sapiens; identical to SEQ ID NO: 259350
  chr8:65519231-65519414
  hypo

SEQ ID NO: 436791 - DNA, 178 bp, Homo sapiens; identical to SEQ ID NO: 259351
  chr8:65732649-65732827
  hypo

SEQ ID NO: 436792 - DNA, 38 bp, Homo sapiens; identical to SEQ ID NO: 212325
  chr8:65757970-65758008
  hypo

SEQ ID NO: 436793 - DNA, 38 bp, Homo sapiens; identical to SEQ ID NO: 212326
  chr8:65758248-65758286
  hypo

SEQ ID NO: 436794 - DNA, 36 bp, Homo sapiens; identical to SEQ ID NO: 259354
  chr8:66157671-66157707
  hypo

SEQ ID NO: 436795 - DNA, 213 bp, Homo sapiens; identical to SEQ ID NO: 212327
  chr8:66548504-66548717
  hypo

SEQ ID NO: 436796 - DNA, 32 bp, Homo sapiens; identical to SEQ ID NO: 259356
  chr8:66678462-66678494
  hypo

SEQ ID NO: 436797 - DNA, 33 bp, Homo sapiens; identical to SEQ ID NO: 259357
  chr8:66776021-66776054
  hypo

SEQ ID NO: 436798 - DNA, 53 bp, Homo sapiens; identical to SEQ ID NO: 259359
  chr8:66940483-66940536
  hypo

SEQ ID NO: 436799 - DNA, 103 bp, Homo sapiens; identical to SEQ ID NO: 259360
  chr8:67299564-67299667
  hypo

SEQ ID NO: 436800 - DNA, 42 bp, Homo sapiens; identical to SEQ ID NO: 259361
  chr8:67384648-67384690
  hypo

SEQ ID NO: 436801 - DNA, 53 bp, Homo sapiens; identical to SEQ ID NO: 309625
  chr8:67405469-67405522
  hypo

SEQ ID NO: 436802 - DNA, 31 bp, Homo sapiens; identical to SEQ ID NO: 259363
  chr8:67405805-67405836
  hypo

SEQ ID NO: 436803 - DNA, 449 bp, Homo sapiens; identical to SEQ ID NO: 201440
  chr8:67417575-67418024
  hypo

SEQ ID NO: 436804 - DNA, 34 bp, Homo sapiens; identical to SEQ ID NO: 259365
  chr8:67867314-67867348
  hypo

SEQ ID NO: 436805 - DNA, 98 bp, Homo sapiens; identical to SEQ ID NO: 285931
  chr8:67941010-67941108
  hypo

SEQ ID NO: 436806 - DNA, 154 bp, Homo sapiens; identical to SEQ ID NO: 259367
  chr8:68236303-68236457
  hypo

SEQ ID NO: 436807 - DNA, 45 bp, Homo sapiens; identical to SEQ ID NO: 201443
  chr8:68863998-68864043
  hypo

SEQ ID NO: 436808 - DNA, 60 bp, Homo sapiens; identical to SEQ ID NO: 201444
  chr8:68864119-68864179
  hypo

SEQ ID NO: 436809 - DNA, 276 bp, Homo sapiens; identical to SEQ ID NO: 201445
  chr8:68864195-68864471
  hypo

SEQ ID NO: 436810 - DNA, 318 bp, Homo sapiens; identical to SEQ ID NO: 116751
  chr8:68864942-68865260
  hypo

SEQ ID NO: 436811 - DNA, 142 bp, Homo sapiens; identical to SEQ ID NO: 259368
  chr8:69169577-69169719
  hypo

SEQ ID NO: 436812 - DNA, 166 bp, Homo sapiens; identical to SEQ ID NO: 259371
  chr8:71185496-71185662
  hypo

SEQ ID NO: 436813 - DNA, 37 bp, Homo sapiens; identical to SEQ ID NO: 259376
  chr8:73922264-73922301
  hypo

SEQ ID NO: 436814 - DNA, 131 bp, Homo sapiens; identical to SEQ ID NO: 259378
  chr8:73989477-73989608
  hypo

SEQ ID NO: 436815 - DNA, 235 bp, Homo sapiens; identical to SEQ ID NO: 212342
  chr8:73999532-73999767
  hypo

SEQ ID NO: 436816 - DNA, 235 bp, Homo sapiens; identical to SEQ ID NO: 212343
  chr8:74004014-74004249
  hypo

SEQ ID NO: 436817 - DNA, 98 bp, Homo sapiens; identical to SEQ ID NO: 259382
  chr8:74097718-74097816
  hypo

SEQ ID NO: 436818 - DNA, 454 bp, Homo sapiens; identical to SEQ ID NO: 259383
  chr8:74197777-74198231
  hypo

SEQ ID NO: 436819 - DNA, 45 bp, Homo sapiens; identical to SEQ ID NO: 259384
  chr8:74203780-74203825
  hypo

SEQ ID NO: 436820 - DNA, 183 bp, Homo sapiens; identical to SEQ ID NO: 223418
  chr8:74208009-74208192
  hypo

SEQ ID NO: 436821 - DNA, 493 bp, Homo sapiens; identical to SEQ ID NO: 212344
  chr8:74360978-74361471
  hypo

SEQ ID NO: 436822 - DNA, 396 bp, Homo sapiens; identical to SEQ ID NO: 259386
  chr8:74371800-74372196
  hypo

SEQ ID NO: 436823 - DNA, 59 bp, Homo sapiens; identical to SEQ ID NO: 259387
  chr8:74673152-74673211
  hypo

SEQ ID NO: 436824 - DNA, 355 bp, Homo sapiens; identical to SEQ ID NO: 259391
  chr8:75227593-75227948
  hypo

SEQ ID NO: 436825 - DNA, 141 bp, Homo sapiens; identical to SEQ ID NO: 212346
  chr8:75737615-75737756
  hypo

SEQ ID NO: 436826 - DNA, 42 bp, Homo sapiens; identical to SEQ ID NO: 259393
  chr8:80272279-80272321
  hypo

SEQ ID NO: 436827 - DNA, 81 bp, Homo sapiens; identical to SEQ ID NO: 259394
  chr8:80844671-80844752
  hypo

SEQ ID NO: 436828 - DNA, 37 bp, Homo sapiens; identical to SEQ ID NO: 212350
  chr8:80998635-80998672
  hypo

SEQ ID NO: 436829 - DNA, 246 bp, Homo sapiens; identical to SEQ ID NO: 259396
  chr8:81084473-81084719
  hypo

SEQ ID NO: 436830 - DNA, 33 bp, Homo sapiens; identical to SEQ ID NO: 259399
  chr8:81310006-81310039
  hypo

SEQ ID NO: 436831 - DNA, 36 bp, Homo sapiens; identical to SEQ ID NO: 259400
  chr8:81338705-81338741
  hypo

SEQ ID NO: 436832 - DNA, 364 bp, Homo sapiens; identical to SEQ ID NO: 285999
  chr8:81490259-81490623
  hypo

SEQ ID NO: 436833 - DNA, 119 bp, Homo sapiens; identical to SEQ ID NO: 223427
  chr8:81599502-81599621
  hypo

SEQ ID NO: 436834 - DNA, 85 bp, Homo sapiens; identical to SEQ ID NO: 259401
  chr8:81785030-81785115
  hypo

SEQ ID NO: 436835 - DNA, 300 bp, Homo sapiens; identical to SEQ ID NO: 201486
  chr8:81785141-81785441
  hypo

SEQ ID NO: 436836 - DNA, 448 bp, Homo sapiens; identical to SEQ ID NO: 419884
  chr8:81785467-81785915
  hypo

SEQ ID NO: 436837 - DNA, 38 bp, Homo sapiens; identical to SEQ ID NO: 259402
  chr8:81820451-81820489
  hypo

SEQ ID NO: 436838 - DNA, 34 bp, Homo sapiens; identical to SEQ ID NO: 212360
  chr8:82680449-82680483
  hypo

SEQ ID NO: 436839 - DNA, 40 bp, Homo sapiens; identical to SEQ ID NO: 212361
  chr8:83135626-83135666
  hypo

SEQ ID NO: 436840 - DNA, 40 bp, Homo sapiens; identical to SEQ ID NO: 212362
  chr8:83135906-83135946
  hypo

SEQ ID NO: 436841 - DNA, 250 bp, Homo sapiens; identical to SEQ ID NO: 286014
  chr8:86132759-86133009
  hypo

SEQ ID NO: 436842 - DNA, 35 bp, Homo sapiens; identical to SEQ ID NO: 259408
  chr8:86431840-86431875
  hypo

SEQ ID NO: 436843 - DNA, 56 bp, Homo sapiens; identical to SEQ ID NO: 259409
  chr8:86508969-86509025
  hypo

SEQ ID NO: 436844 - DNA, 85 bp, Homo sapiens; identical to SEQ ID NO: 259411
  chr8:86840940-86841025
  hypo

SEQ ID NO: 436845 - DNA, 86 bp, Homo sapiens; identical to SEQ ID NO: 309699
  chr8:86952963-86953049
  hypo

SEQ ID NO: 436846 - DNA, 86 bp, Homo sapiens; identical to SEQ ID NO: 259413
  chr8:87257024-87257110
  hypo

SEQ ID NO: 436847 - DNA, 161 bp, Homo sapiens; identical to SEQ ID NO: 259414
  chr8:87425719-87425880
  hypo

SEQ ID NO: 436848 - DNA, 89 bp, Homo sapiens; identical to SEQ ID NO: 201499
  chr8:87527032-87527121
  hypo

SEQ ID NO: 436849 - DNA, 170 bp, Homo sapiens; identical to SEQ ID NO: 309703
  chr8:88886196-88886366
  hypo

SEQ ID NO: 436850 - DNA, 36 bp, Homo sapiens; identical to SEQ ID NO: 259416
  chr8:90650867-90650903
  hypo

SEQ ID NO: 436851 - DNA, 32 bp, Homo sapiens; identical to SEQ ID NO: 212365
  chr8:92433536-92433568
  hypo

SEQ ID NO: 436852 - DNA, 68 bp, Homo sapiens; identical to SEQ ID NO: 259422
  chr8:92570800-92570868
  hypo

SEQ ID NO: 436853 - DNA, 121 bp, Homo sapiens; identical to SEQ ID NO: 259423
  chr8:93875196-93875317
  hypo

SEQ ID NO: 436854 - DNA, 106 bp, Homo sapiens; identical to SEQ ID NO: 259424
  chr8:94129116-94129222
  hypo

SEQ ID NO: 436855 - DNA, 129 bp, Homo sapiens; identical to SEQ ID NO: 259425
  chr8:94658932-94659061
  hypo

SEQ ID NO: 436856 - DNA, 104 bp, Homo sapiens; identical to SEQ ID NO: 259426
  chr8:94683868-94683972
  hypo

SEQ ID NO: 436857 - DNA, 159 bp, Homo sapiens; identical to SEQ ID NO: 259430
  chr8:94706936-94707095
  hypo

SEQ ID NO: 436858 - DNA, 209 bp, Homo sapiens; identical to SEQ ID NO: 201506
  chr8:94929137-94929346
  hypo

SEQ ID NO: 436859 - DNA, 44 bp, Homo sapiens; identical to SEQ ID NO: 259432
  chr8:94941365-94941409
  hypo

SEQ ID NO: 436860 - DNA, 35 bp, Homo sapiens; identical to SEQ ID NO: 259433
  chr8:94967750-94967785
  hypo

SEQ ID NO: 436861 - DNA, 41 bp, Homo sapiens; identical to SEQ ID NO: 259434
  chr8:95488066-95488107
  hypo

SEQ ID NO: 436862 - DNA, 31 bp, Homo sapiens; identical to SEQ ID NO: 259436
  chr8:95625860-95625891
  hypo

SEQ ID NO: 436863 - DNA, 163 bp, Homo sapiens; identical to SEQ ID NO: 201513
  chr8:95653853-95654016
  hypo

SEQ ID NO: 436864 - DNA, 416 bp, Homo sapiens; identical to SEQ ID NO: 286045
  chr8:95654337-95654753
  hypo

SEQ ID NO: 436865 - DNA, 157 bp, Homo sapiens; identical to SEQ ID NO: 212374
  chr8:95865517-95865674
  hypo

SEQ ID NO: 436866 - DNA, 120 bp, Homo sapiens; identical to SEQ ID NO: 212375
  chr8:95942702-95942822
  hypo

SEQ ID NO: 436867 - DNA, 40 bp, Homo sapiens; identical to SEQ ID NO: 212376
  chr8:96099108-96099148
  hypo

SEQ ID NO: 436868 - DNA, 187 bp, Homo sapiens; identical to SEQ ID NO: 212377
  chr8:96145224-96145411
  hypo

SEQ ID NO: 436869 - DNA, 1024 bp, Homo sapiens; identical to SEQ ID NO: 286047
  chr8:96145958-96146982
  hypo

SEQ ID NO: 436870 - DNA, 38 bp, Homo sapiens; identical to SEQ ID NO: 212379
  chr8:96229505-96229543
  hypo

SEQ ID NO: 436871 - DNA, 56 bp, Homo sapiens; identical to SEQ ID NO: 309735
  chr8:96285364-96285420
  hypo

SEQ ID NO: 436872 - DNA, 45 bp, Homo sapiens; identical to SEQ ID NO: 212380
  chr8:96465482-96465527
  hypo

SEQ ID NO: 436873 - DNA, 120 bp, Homo sapiens; identical to SEQ ID NO: 259448
  chr8:97128826-97128946
  hypo

SEQ ID NO: 436874 - DNA, 159 bp, Homo sapiens; identical to SEQ ID NO: 259449
  chr8:97265370-97265529
  hypo

SEQ ID NO: 436875 - DNA, 258 bp, Homo sapiens; identical to SEQ ID NO: 259450
  chr8:97333717-97333975
  hypo

SEQ ID NO: 436876 - DNA, 154 bp, Homo sapiens; identical to SEQ ID NO: 259452
  chr8:97414934-97415088
  hypo

SEQ ID NO: 436877 - DNA, 198 bp, Homo sapiens; identical to SEQ ID NO: 259453
  chr8:98289305-98289503
  hypo

SEQ ID NO: 436878 - DNA, 41 bp, Homo sapiens; identical to SEQ ID NO: 212381
  chr8:98307803-98307844
  hypo

SEQ ID NO: 436879 - DNA, 36 bp, Homo sapiens; identical to SEQ ID NO: 212382
  chr8:98798632-98798668
  hypo

SEQ ID NO: 436880 - DNA, 35 bp, Homo sapiens; identical to SEQ ID NO: 212383
  chr8:98798908-98798943
  hypo

SEQ ID NO: 436881 - DNA, 215 bp, Homo sapiens; identical to SEQ ID NO: 259457
  chr8:98933981-98934196
  hypo

SEQ ID NO: 436882 - DNA, 132 bp, Homo sapiens; identical to SEQ ID NO: 259458
  chr8:99166496-99166628
  hypo

SEQ ID NO: 436883 - DNA, 65 bp, Homo sapiens; identical to SEQ ID NO: 259459
  chr8:99376415-99376480
  hypo

SEQ ID NO: 436884 - DNA, 56 bp, Homo sapiens; identical to SEQ ID NO: 259460
  chr8:99411607-99411663
  hypo

SEQ ID NO: 436885 - DNA, 101 bp, Homo sapiens; identical to SEQ ID NO: 259461
  chr8:99626612-99626713
  hypo

SEQ ID NO: 436886 - DNA, 54 bp, Homo sapiens; identical to SEQ ID NO: 223447
  chr8:99837477-99837531
  hypo

SEQ ID NO: 436887 - DNA, 155 bp, Homo sapiens; identical to SEQ ID NO: 212388
  chr8:100245163-100245318
  hypo

SEQ ID NO: 436888 - DNA, 174 bp, Homo sapiens; identical to SEQ ID NO: 212389
  chr8:100353992-100354166
  hypo

SEQ ID NO: 436889 - DNA, 114 bp, Homo sapiens; identical to SEQ ID NO: 259468
  chr8:100881200-100881314
  hypo

SEQ ID NO: 436890 - DNA, 230 bp, Homo sapiens; identical to SEQ ID NO: 212392
  chr8:100882016-100882246
  hypo

SEQ ID NO: 436891 - DNA, 79 bp, Homo sapiens; identical to SEQ ID NO: 212393
  chr8:100900796-100900875
  hypo

SEQ ID NO: 436892 - DNA, 92 bp, Homo sapiens; identical to SEQ ID NO: 309765
  chr8:100904089-100904181
  hypo

SEQ ID NO: 436893 - DNA, 39 bp, Homo sapiens; identical to SEQ ID NO: 259472
  chr8:101297999-101298038
  hypo

SEQ ID NO: 436894 - DNA, 107 bp, Homo sapiens; identical to SEQ ID NO: 212394
  chr8:101300173-101300280
  hypo

SEQ ID NO: 436895 - DNA, 379 bp, Homo sapiens; identical to SEQ ID NO: 259476
  chr8:101730421-101730800
  hypo

SEQ ID NO: 436896 - DNA, 109 bp, Homo sapiens; identical to SEQ ID NO: 212396
  chr8:101744186-101744295
  hypo

SEQ ID NO: 436897 - DNA, 39 bp, Homo sapiens; identical to SEQ ID NO: 259479
  chr8:101787705-101787744
  hypo

SEQ ID NO: 436898 - DNA, 68 bp, Homo sapiens; identical to SEQ ID NO: 309774
  chr8:101872279-101872347
  hypo

SEQ ID NO: 436899 - DNA, 145 bp, Homo sapiens; identical to SEQ ID NO: 259483
  chr8:102145022-102145167
  hypo

SEQ ID NO: 436900 - DNA, 36 bp, Homo sapiens; identical to SEQ ID NO: 259485
  chr8:102197224-102197260
  hypo

SEQ ID NO: 436901 - DNA, 53 bp, Homo sapiens; identical to SEQ ID NO: 259486
  chr8:102381068-102381121
  hypo

SEQ ID NO: 436902 - DNA, 94 bp, Homo sapiens
  chr8:102451132-102451226
  hypo
ggacacttctctttgtgaagttgtccaagcacaagaggccacaatgtggttactactttttttttttttttttttttttgagatgaagtcttgt

SEQ ID NO: 436903 - DNA, 39 bp, Homo sapiens; identical to SEQ ID NO: 259488
  chr8:102524933-102524972
  hypo

SEQ ID NO: 436904 - DNA, 94 bp, Homo sapiens; identical to SEQ ID NO: 212401
  chr8:102690214-102690308
  hypo

SEQ ID NO: 436905 - DNA, 213 bp, Homo sapiens; identical to SEQ ID NO: 259490
  chr8:102998569-102998782
  hypo

SEQ ID NO: 436906 - DNA, 105 bp, Homo sapiens; identical to SEQ ID NO: 259492
  chr8:103403085-103403190
  hypo

SEQ ID NO: 436907 - DNA, 81 bp, Homo sapiens; identical to SEQ ID NO: 259493
  chr8:103463270-103463351
  hypo

SEQ ID NO: 436908 - DNA, 38 bp, Homo sapiens; identical to SEQ ID NO: 259495
  chr8:103588277-103588315
  hypo

SEQ ID NO: 436909 - DNA, 33 bp, Homo sapiens; identical to SEQ ID NO: 212403
  chr8:103629516-103629549
  hypo

SEQ ID NO: 436910 - DNA, 156 bp, Homo sapiens; identical to SEQ ID NO: 259498
  chr8:103728517-103728673
  hypo

SEQ ID NO: 436911 - DNA, 362 bp, Homo sapiens; identical to SEQ ID NO: 259499
  chr8:103728893-103729255
  hypo

SEQ ID NO: 436912 - DNA, 33 bp, Homo sapiens; identical to SEQ ID NO: 309794
  chr8:103768948-103768981
  hypo

SEQ ID NO: 436913 - DNA, 171 bp, Homo sapiens; identical to SEQ ID NO: 259501
  chr8:103769321-103769492
  hypo

SEQ ID NO: 436914 - DNA, 37 bp, Homo sapiens; identical to SEQ ID NO: 259502
  chr8:103833090-103833127
  hypo

SEQ ID NO: 436915 - DNA, 33 bp, Homo sapiens; identical to SEQ ID NO: 212404
  chr8:103878119-103878152
  hypo

SEQ ID NO: 436916 - DNA, 37 bp, Homo sapiens; identical to SEQ ID NO: 212405
  chr8:103916556-103916593
  hypo

SEQ ID NO: 436917 - DNA, 37 bp, Homo sapiens; identical to SEQ ID NO: 259505
  chr8:103916713-103916750
  hypo

SEQ ID NO: 436918 - DNA, 45 bp, Homo sapiens; identical to SEQ ID NO: 212406
  chr8:103932060-103932105
  hypo

SEQ ID NO: 436919 - DNA, 142 bp, Homo sapiens; identical to SEQ ID NO: 212407
  chr8:103943076-103943218
  hypo

SEQ ID NO: 436920 - DNA, 36 bp, Homo sapiens; identical to SEQ ID NO: 259508
  chr8:103984301-103984337
  hypo

SEQ ID NO: 436921 - DNA, 154 bp, Homo sapiens; identical to SEQ ID NO: 259509
  chr8:104054117-104054271
  hypo

SEQ ID NO: 436922 - DNA, 120 bp, Homo sapiens; identical to SEQ ID NO: 212408
  chr8:104055449-104055569
  hypo

SEQ ID NO: 436923 - DNA, 199 bp, Homo sapiens; identical to SEQ ID NO: 212409
  chr8:104086527-104086726
  hypo

SEQ ID NO: 436924 - DNA, 148 bp, Homo sapiens; identical to SEQ ID NO: 259512
  chr8:104431399-104431547
  hypo

SEQ ID NO: 436925 - DNA, 79 bp, Homo sapiens; identical to SEQ ID NO: 259513
  chr8:105645133-105645212
  hypo

SEQ ID NO: 436926 - DNA, 90 bp, Homo sapiens; identical to SEQ ID NO: 212411
  chr8:106453048-106453138
  hypo

SEQ ID NO: 436927 - DNA, 32 bp, Homo sapiens; identical to SEQ ID NO: 259515
  chr8:106458435-106458467
  hypo

SEQ ID NO: 436928 - DNA, 38 bp, Homo sapiens; identical to SEQ ID NO: 259516
  chr8:106485010-106485048
  hypo

SEQ ID NO: 436929 - DNA, 42 bp, Homo sapiens; identical to SEQ ID NO: 212413
  chr8:108454321-108454363
  hypo

SEQ ID NO: 436930 - DNA, 77 bp, Homo sapiens; identical to SEQ ID NO: 309815
  chr8:108581068-108581145
  hypo

SEQ ID NO: 436931 - DNA, 48 bp, Homo sapiens; identical to SEQ ID NO: 309816
  chr8:108581175-108581223
  hypo

SEQ ID NO: 436932 - DNA, 44 bp, Homo sapiens; identical to SEQ ID NO: 259519
  chr8:109255556-109255600
  hypo

SEQ ID NO: 436933 - DNA, 70 bp, Homo sapiens; identical to SEQ ID NO: 212416
  chr8:109800324-109800394
  hypo

SEQ ID NO: 436934 - DNA, 120 bp, Homo sapiens; identical to SEQ ID NO: 259521
  chr8:110083307-110083427
  hypo

SEQ ID NO: 436935 - DNA, 59 bp, Homo sapiens; identical to SEQ ID NO: 309822
  chr8:110274931-110274990
  hypo

SEQ ID NO: 436936 - DNA, 161 bp, Homo sapiens; identical to SEQ ID NO: 259523
  chr8:110643645-110643806
  hypo

SEQ ID NO: 436937 - DNA, 68 bp, Homo sapiens; identical to SEQ ID NO: 201563
  chr8:110703933-110704001
  hypo

SEQ ID NO: 436938 - DNA, 45 bp, Homo sapiens; identical to SEQ ID NO: 201564
  chr8:110704144-110704189
  hypo

SEQ ID NO: 436939 - DNA, 42 bp, Homo sapiens; identical to SEQ ID NO: 212419
  chr8:110767246-110767288
  hypo

SEQ ID NO: 436940 - DNA, 149 bp, Homo sapiens; identical to SEQ ID NO: 259525
  chr8:112347385-112347534
  hypo

SEQ ID NO: 436941 - DNA, 242 bp, Homo sapiens; identical to SEQ ID NO: 259526
  chr8:112482647-112482889
  hypo

SEQ ID NO: 436942 - DNA, 79 bp, Homo sapiens; identical to SEQ ID NO: 212420
  chr8:114691130-114691209
  hypo

SEQ ID NO: 436943 - DNA, 34 bp, Homo sapiens; identical to SEQ ID NO: 212421
  chr8:114888155-114888189
  hypo

SEQ ID NO: 436944 - DNA, 31 bp, Homo sapiens; identical to SEQ ID NO: 259529
  chr8:115222084-115222115
  hypo

SEQ ID NO: 436945 - DNA, 92 bp, Homo sapiens; identical to SEQ ID NO: 259530
  chr8:116342861-116342953
  hypo

SEQ ID NO: 436946 - DNA, 34 bp, Homo sapiens; identical to SEQ ID NO: 212422
  chr8:116345686-116345720
  hypo

SEQ ID NO: 436947 - DNA, 42 bp, Homo sapiens; identical to SEQ ID NO: 259533
  chr8:117572511-117572553
  hypo

SEQ ID NO: 436948 - DNA, 119 bp, Homo sapiens; identical to SEQ ID NO: 212424
  chr8:117667019-117667138
  hypo

SEQ ID NO: 436949 - DNA, 1758 bp, Homo sapiens; identical to SEQ ID NO: 201571
  chr8:117858172-117859930
  hypo

SEQ ID NO: 436950 - DNA, 84 bp, Homo sapiens; identical to SEQ ID NO: 201572
  chr8:117861184-117861268
  hypo

SEQ ID NO: 436951 - DNA, 161 bp, Homo sapiens; identical to SEQ ID NO: 201573
  chr8:117862856-117863017
  hypo

SEQ ID NO: 436952 - DNA, 149 bp, Homo sapiens; identical to SEQ ID NO: 201574
  chr8:117864186-117864335
  hypo

SEQ ID NO: 436953 - DNA, 174 bp, Homo sapiens; identical to SEQ ID NO: 201575
  chr8:117864773-117864947
  hypo

SEQ ID NO: 436954 - DNA, 224 bp, Homo sapiens; identical to SEQ ID NO: 201576
  chr8:117866483-117866707
  hypo

SEQ ID NO: 436955 - DNA, 123 bp, Homo sapiens; identical to SEQ ID NO: 201577
  chr8:117868404-117868527
  hypo

SEQ ID NO: 436956 - DNA, 133 bp, Homo sapiens; identical to SEQ ID NO: 201578
  chr8:117868877-117869010
  hypo

SEQ ID NO: 436957 - DNA, 221 bp, Homo sapiens; identical to SEQ ID NO: 201579
  chr8:117869491-117869712
  hypo

SEQ ID NO: 436958 - DNA, 107 bp, Homo sapiens; identical to SEQ ID NO: 201580
  chr8:117870590-117870697
  hypo

SEQ ID NO: 436959 - DNA, 112 bp, Homo sapiens; identical to SEQ ID NO: 201581
  chr8:117874067-117874179
  hypo

SEQ ID NO: 436960 - DNA, 130 bp, Homo sapiens; identical to SEQ ID NO: 201582
  chr8:117875368-117875498
  hypo

SEQ ID NO: 436961 - DNA, 176 bp, Homo sapiens; identical to SEQ ID NO: 201583
  chr8:117878824-117879000
  hypo

SEQ ID NO: 436962 - DNA, 114 bp, Homo sapiens; identical to SEQ ID NO: 201584
  chr8:117886849-117886963
  hypo

SEQ ID NO: 436963 - DNA, 237 bp, Homo sapiens; identical to SEQ ID NO: 117113
  chr8:117887066-117887303
  hypo

SEQ ID NO: 436964 - DNA, 202 bp, Homo sapiens; identical to SEQ ID NO: 259539
  chr8:118849363-118849565
  hypo

SEQ ID NO: 436965 - DNA, 212 bp, Homo sapiens; identical to SEQ ID NO: 259540
  chr8:118958836-118959048
  hypo

SEQ ID NO: 436966 - DNA, 88 bp, Homo sapiens; identical to SEQ ID NO: 259541
  chr8:119024390-119024478
  hypo

SEQ ID NO: 436967 - DNA, 70 bp, Homo sapiens; identical to SEQ ID NO: 309858
  chr8:119057249-119057319
  hypo

SEQ ID NO: 436968 - DNA, 62 bp, Homo sapiens; identical to SEQ ID NO: 259544
  chr8:119146975-119147037
  hypo

SEQ ID NO: 436969 - DNA, 170 bp, Homo sapiens; identical to SEQ ID NO: 259545
  chr8:119611614-119611784
  hypo

SEQ ID NO: 436970 - DNA, 87 bp, Homo sapiens
  chr8:120846159-120846246
  hypo
aataaatagactacatagagatatatagactgtgtatatatatcatataatccatataaatgcagaaacatttattgaaagacattt

SEQ ID NO: 436971 - DNA, 190 bp, Homo sapiens; identical to SEQ ID NO: 259547
  chr8:121292126-121292316
  hypo

SEQ ID NO: 436972 - DNA, 67 bp, Homo sapiens; identical to SEQ ID NO: 259548
  chr8:121624349-121624416
  hypo

SEQ ID NO: 436973 - DNA, 35 bp, Homo sapiens; identical to SEQ ID NO: 309868
  chr8:121982635-121982670
  hypo

SEQ ID NO: 436974 - DNA, 38 bp, Homo sapiens; identical to SEQ ID NO: 259550
  chr8:122245400-122245438
  hypo

SEQ ID NO: 436975 - DNA, 180 bp, Homo sapiens; identical to SEQ ID NO: 259551
  chr8:122454961-122455141
  hypo

SEQ ID NO: 436976 - DNA, 259 bp, Homo sapiens; identical to SEQ ID NO: 259552
  chr8:122731385-122731644
  hypo

SEQ ID NO: 436977 - DNA, 76 bp, Homo sapiens; identical to SEQ ID NO: 212446
  chr8:123508181-123508257
  hypo

SEQ ID NO: 436978 - DNA, 55 bp, Homo sapiens; identical to SEQ ID NO: 212447
  chr8:123695434-123695489
  hypo

SEQ ID NO: 436979 - DNA, 86 bp, Homo sapiens; identical to SEQ ID NO: 259556
  chr8:123842813-123842899
  hypo

SEQ ID NO: 436980 - DNA, 35 bp, Homo sapiens; identical to SEQ ID NO: 259558
  chr8:123872985-123873020
  hypo

SEQ ID NO: 436981 - DNA, 134 bp, Homo sapiens; identical to SEQ ID NO: 259559
  chr8:123874080-123874214
  hypo

SEQ ID NO: 436982 - DNA, 331 bp, Homo sapiens; identical to SEQ ID NO: 259560
  chr8:123874762-123875093
  hypo

SEQ ID NO: 436983 - DNA, 50 bp, Homo sapiens; identical to SEQ ID NO: 259561
  chr8:123875756-123875806
  hypo

SEQ ID NO: 436984 - DNA, 86 bp, Homo sapiens; identical to SEQ ID NO: 259562
  chr8:123943476-123943562
  hypo

SEQ ID NO: 436985 - DNA, 284 bp, Homo sapiens; identical to SEQ ID NO: 309882
  chr8:124001258-124001542
  hypo

SEQ ID NO: 436986 - DNA, 438 bp, Homo sapiens; identical to SEQ ID NO: 259565
  chr8:124014019-124014457
  hypo

SEQ ID NO: 436987 - DNA, 78 bp, Homo sapiens; identical to SEQ ID NO: 259567
  chr8:124161306-124161384
  hypo

SEQ ID NO: 436988 - DNA, 176 bp, Homo sapiens; identical to SEQ ID NO: 259568
  chr8:124163979-124164155
  hypo

SEQ ID NO: 436989 - DNA, 306 bp, Homo sapiens; identical to SEQ ID NO: 259569
  chr8:124178878-124179184
  hypo

SEQ ID NO: 436990 - DNA, 61 bp, Homo sapiens; identical to SEQ ID NO: 385975
  chr8:124187226-124187287
  hypo

SEQ ID NO: 436991 - DNA, 225 bp, Homo sapiens; identical to SEQ ID NO: 259571
  chr8:124195483-124195708
  hypo

SEQ ID NO: 436992 - DNA, 166 bp, Homo sapiens; identical to SEQ ID NO: 259572
  chr8:124197372-124197538
  hypo

SEQ ID NO: 436993 - DNA, 283 bp, Homo sapiens; identical to SEQ ID NO: 259573
  chr8:124238537-124238820
  hypo

SEQ ID NO: 436994 - DNA, 31 bp, Homo sapiens; identical to SEQ ID NO: 385976
  chr8:124238850-124238881
  hypo

SEQ ID NO: 436995 - DNA, 141 bp, Homo sapiens; identical to SEQ ID NO: 259575
  chr8:124247665-124247806
  hypo

SEQ ID NO: 436996 - DNA, 331 bp, Homo sapiens; identical to SEQ ID NO: 259577
  chr8:124249061-124249392
  hypo

SEQ ID NO: 436997 - DNA, 82 bp, Homo sapiens; identical to SEQ ID NO: 212453
  chr8:124254706-124254788
  hypo

SEQ ID NO: 436998 - DNA, 49 bp, Homo sapiens; identical to SEQ ID NO: 212454
  chr8:124255229-124255278
  hypo

SEQ ID NO: 436999 - DNA, 42 bp, Homo sapiens; identical to SEQ ID NO: 212455
  chr8:124412835-124412877
  hypo

SEQ ID NO: 437000 - DNA, 60 bp, Homo sapiens; identical to SEQ ID NO: 259583
  chr8:124453586-124453646
  hypo

SEQ ID NO: 437001 - DNA, 41 bp, Homo sapiens; identical to SEQ ID NO: 212456
  chr8:124533004-124533045
  hypo

SEQ ID NO: 437002 - DNA, 51 bp, Homo sapiens; identical to SEQ ID NO: 309900
  chr8:124552151-124552202
  hypo

SEQ ID NO: 437003 - DNA, 58 bp, Homo sapiens; identical to SEQ ID NO: 160621
  chr8:124552287-124552345
  hypo

SEQ ID NO: 437004 - DNA, 259 bp, Homo sapiens; identical to SEQ ID NO: 223478
  chr8:124552598-124552857
  hypo

SEQ ID NO: 437005 - DNA, 115 bp, Homo sapiens; identical to SEQ ID NO: 259587
  chr8:124728889-124729004
  hypo

SEQ ID NO: 437006 - DNA, 41 bp, Homo sapiens; identical to SEQ ID NO: 212457
  chr8:124804120-124804161
  hypo

SEQ ID NO: 437007 - DNA, 366 bp, Homo sapiens; identical to SEQ ID NO: 259590
  chr8:124965500-124965866
  hypo

SEQ ID NO: 437008 - DNA, 196 bp, Homo sapiens; identical to SEQ ID NO: 259591
  chr8:125230732-125230928
  hypo

SEQ ID NO: 437009 - DNA, 41 bp, Homo sapiens; identical to SEQ ID NO: 259594
  chr8:125455719-125455760
  hypo

SEQ ID NO: 437010 - DNA, 36 bp, Homo sapiens; identical to SEQ ID NO: 259597
  chr8:125507236-125507272
  hypo

SEQ ID NO: 437011 - DNA, 87 bp, Homo sapiens; identical to SEQ ID NO: 212460
  chr8:125553022-125553109
  hypo

SEQ ID NO: 437012 - DNA, 71 bp, Homo sapiens; identical to SEQ ID NO: 259600
  chr8:125575144-125575215
  hypo

SEQ ID NO: 437013 - DNA, 119 bp, Homo sapiens; identical to SEQ ID NO: 212464
  chr8:125673727-125673846
  hypo

SEQ ID NO: 437014 - DNA, 106 bp, Homo sapiens; identical to SEQ ID NO: 259604
  chr8:125682590-125682696
  hypo

SEQ ID NO: 437015 - DNA, 59 bp, Homo sapiens; identical to SEQ ID NO: 259605
  chr8:125739079-125739138
  hypo

SEQ ID NO: 437016 - DNA, 149 bp, Homo sapiens; identical to SEQ ID NO: 259606
  chr8:125792768-125792917
  hypo

SEQ ID NO: 437017 - DNA, 38 bp, Homo sapiens; identical to SEQ ID NO: 259607
  chr8:125992005-125992043
  hypo

SEQ ID NO: 437018 - DNA, 204 bp, Homo sapiens; identical to SEQ ID NO: 212467
  chr8:126238678-126238882
  hypo

SEQ ID NO: 437019 - DNA, 34 bp, Homo sapiens; identical to SEQ ID NO: 259613
  chr8:126288087-126288121
  hypo

SEQ ID NO: 437020 - DNA, 40 bp, Homo sapiens; identical to SEQ ID NO: 259614
  chr8:126321193-126321233
  hypo

SEQ ID NO: 437021 - DNA, 171 bp, Homo sapiens; identical to SEQ ID NO: 259615
  chr8:126374237-126374408
  hypo

SEQ ID NO: 437022 - DNA, 141 bp, Homo sapiens; identical to SEQ ID NO: 259616
  chr8:126562037-126562178
  hypo

SEQ ID NO: 437023 - DNA, 100 bp, Homo sapiens; identical to SEQ ID NO: 259617
  chr8:126628078-126628178
  hypo

SEQ ID NO: 437024 - DNA, 37 bp, Homo sapiens; identical to SEQ ID NO: 259618
  chr8:127412850-127412887
  hypo

SEQ ID NO: 437025 - DNA, 37 bp, Homo sapiens; identical to SEQ ID NO: 259619
  chr8:127413007-127413044
  hypo

SEQ ID NO: 437026 - DNA, 104 bp, Homo sapiens; identical to SEQ ID NO: 212468
  chr8:127464658-127464762
  hypo

SEQ ID NO: 437027 - DNA, 44 bp, Homo sapiens; identical to SEQ ID NO: 212469
  chr8:127465002-127465046
  hypo

SEQ ID NO: 437028 - DNA, 37 bp, Homo sapiens; identical to SEQ ID NO: 259622
  chr8:127887550-127887587
  hypo

SEQ ID NO: 437029 - DNA, 54 bp, Homo sapiens; identical to SEQ ID NO: 259623
  chr8:128235796-128235850
  hypo

SEQ ID NO: 437030 - DNA, 159 bp, Homo sapiens; identical to SEQ ID NO: 259624
  chr8:128699512-128699671
  hypo

SEQ ID NO: 437031 - DNA, 125 bp, Homo sapiens; identical to SEQ ID NO: 259625
  chr8:128735792-128735917
  hypo

SEQ ID NO: 437032 - DNA, 276 bp, Homo sapiens; identical to SEQ ID NO: 259627
  chr8:128831868-128832144
  hypo

SEQ ID NO: 437033 - DNA, 93 bp, Homo sapiens; identical to SEQ ID NO: 259628
  chr8:128836045-128836138
  hypo

SEQ ID NO: 437034 - DNA, 97 bp, Homo sapiens; identical to SEQ ID NO: 309944
  chr8:128861881-128861978
  hypo

SEQ ID NO: 437035 - DNA, 45 bp, Homo sapiens; identical to SEQ ID NO: 259630
  chr8:128867594-128867639
  hypo

SEQ ID NO: 437036 - DNA, 99 bp, Homo sapiens
  chr8:128872650-128872749
  hypo
ggagctcagggagtactatgggggagattcactaggttgatgctttgctgataggcagccctgtagagaagacaaggcagctgggcatggtggctcagg

SEQ ID NO: 437037 - DNA, 41 bp, Homo sapiens; identical to SEQ ID NO: 212477
  chr8:128896287-128896328
  hypo

SEQ ID NO: 437038 - DNA, 75 bp, Homo sapiens; identical to SEQ ID NO: 212481
  chr8:128958209-128958284
  hypo

SEQ ID NO: 437039 - DNA, 90 bp, Homo sapiens; identical to SEQ ID NO: 259640
  chr8:129131614-129131704
  hypo

SEQ ID NO: 437040 - DNA, 77 bp, Homo sapiens; identical to SEQ ID NO: 259641
  chr8:129338077-129338154
  hypo

SEQ ID NO: 437041 - DNA, 42 bp, Homo sapiens; identical to SEQ ID NO: 259642
  chr8:129533966-129534008
  hypo

SEQ ID NO: 437042 - DNA, 34 bp, Homo sapiens; identical to SEQ ID NO: 259643
  chr8:129893541-129893575
  hypo

SEQ ID NO: 437043 - DNA, 85 bp, Homo sapiens; identical to SEQ ID NO: 259644
  chr8:129909748-129909833
  hypo

SEQ ID NO: 437044 - DNA, 34 bp, Homo sapiens; identical to SEQ ID NO: 259645
  chr8:129996835-129996869
  hypo

SEQ ID NO: 437045 - DNA, 146 bp, Homo sapiens; identical to SEQ ID NO: 259646
  chr8:130368693-130368839
  hypo

SEQ ID NO: 437046 - DNA, 319 bp, Homo sapiens; identical to SEQ ID NO: 259648
  chr8:131070005-131070324
  hypo

SEQ ID NO: 437047 - DNA, 338 bp, Homo sapiens; identical to SEQ ID NO: 212484
  chr8:131085738-131086076
  hypo

SEQ ID NO: 437048 - DNA, 211 bp, Homo sapiens; identical to SEQ ID NO: 259651
  chr8:131098481-131098692
  hypo

SEQ ID NO: 437049 - DNA, 133 bp, Homo sapiens; identical to SEQ ID NO: 259652
  chr8:131124331-131124464
  hypo

SEQ ID NO: 437050 - DNA, 43 bp, Homo sapiens; identical to SEQ ID NO: 259653
  chr8:132966090-132966133
  hypo

SEQ ID NO: 437051 - DNA, 77 bp, Homo sapiens; identical to SEQ ID NO: 259655
  chr8:133906404-133906481
  hypo

SEQ ID NO: 437052 - DNA, 369 bp, Homo sapiens; identical to SEQ ID NO: 259656
  chr8:134224536-134224905
  hypo

SEQ ID NO: 437053 - DNA, 364 bp, Homo sapiens; identical to SEQ ID NO: 201605
  chr8:134232709-134233073
  hypo

SEQ ID NO: 437054 - DNA, 175 bp, Homo sapiens; identical to SEQ ID NO: 212491
  chr8:134251104-134251279
  hypo

SEQ ID NO: 437055 - DNA, 483 bp, Homo sapiens; identical to SEQ ID NO: 259661
  chr8:134278414-134278897
  hypo

SEQ ID NO: 437056 - DNA, 155 bp, Homo sapiens; identical to SEQ ID NO: 259662
  chr8:134297710-134297865
  hypo

SEQ ID NO: 437057 - DNA, 677 bp, Homo sapiens; identical to SEQ ID NO: 286202
  chr8:134308718-134309395
  hypo

SEQ ID NO: 437058 - DNA, 213 bp, Homo sapiens; identical to SEQ ID NO: 259664
  chr8:134462495-134462708
  hypo

SEQ ID NO: 437059 - DNA, 255 bp, Homo sapiens; identical to SEQ ID NO: 212496
  chr8:134466989-134467244
  hypo

SEQ ID NO: 437060 - DNA, 46 bp, Homo sapiens; identical to SEQ ID NO: 212497
  chr8:134470075-134470121
  hypo

SEQ ID NO: 437061 - DNA, 162 bp, Homo sapiens; identical to SEQ ID NO: 212498
  chr8:134478325-134478487
  hypo

SEQ ID NO: 437062 - DNA, 43 bp, Homo sapiens; identical to SEQ ID NO: 212499
  chr8:134482029-134482072
  hypo

SEQ ID NO: 437063 - DNA, 31 bp, Homo sapiens; identical to SEQ ID NO: 212500
  chr8:134482375-134482406
  hypo

SEQ ID NO: 437064 - DNA, 71 bp, Homo sapiens; identical to SEQ ID NO: 309992
  chr8:134545338-134545409
  hypo

SEQ ID NO: 437065 - DNA, 56 bp, Homo sapiens; identical to SEQ ID NO: 201608
  chr8:134581293-134581349
  hypo

SEQ ID NO: 437066 - DNA, 43 bp, Homo sapiens; identical to SEQ ID NO: 259671
  chr8:134602079-134602122
  hypo

SEQ ID NO: 437067 - DNA, 283 bp, Homo sapiens; identical to SEQ ID NO: 259672
  chr8:134686551-134686834
  hypo

SEQ ID NO: 437068 - DNA, 39 bp, Homo sapiens; identical to SEQ ID NO: 259673
  chr8:135003999-135004038
  hypo

SEQ ID NO: 437069 - DNA, 161 bp, Homo sapiens; identical to SEQ ID NO: 259675
  chr8:135348405-135348566
  hypo

SEQ ID NO: 437070 - DNA, 178 bp, Homo sapiens; identical to SEQ ID NO: 259676
  chr8:135563400-135563578
  hypo

SEQ ID NO: 437071 - DNA, 116 bp, Homo sapiens; identical to SEQ ID NO: 212502
  chr8:135871437-135871553
  hypo

SEQ ID NO: 437072 - DNA, 104 bp, Homo sapiens; identical to SEQ ID NO: 259679
  chr8:135950261-135950365
  hypo

SEQ ID NO: 437073 - DNA, 83 bp, Homo sapiens; identical to SEQ ID NO: 259680
  chr8:136440095-136440178
  hypo

SEQ ID NO: 437074 - DNA, 98 bp, Homo sapiens; identical to SEQ ID NO: 259681
  chr8:136577245-136577343
  hypo

SEQ ID NO: 437075 - DNA, 81 bp, Homo sapiens; identical to SEQ ID NO: 259682
  chr8:138498657-138498738
  hypo

SEQ ID NO: 437076 - DNA, 42 bp, Homo sapiens; identical to SEQ ID NO: 259684
  chr8:139096093-139096135
  hypo

SEQ ID NO: 437077 - DNA, 96 bp, Homo sapiens; identical to SEQ ID NO: 259685
  chr8:139356749-139356845
  hypo

SEQ ID NO: 437078 - DNA, 36 bp, Homo sapiens; identical to SEQ ID NO: 259686
  chr8:139357085-139357121
  hypo

SEQ ID NO: 437079 - DNA, 251 bp, Homo sapiens; identical to SEQ ID NO: 259687
  chr8:139833381-139833632
  hypo

SEQ ID NO: 437080 - DNA, 141 bp, Homo sapiens; identical to SEQ ID NO: 212504
  chr8:139889990-139890131
  hypo

SEQ ID NO: 437081 - DNA, 87 bp, Homo sapiens; identical to SEQ ID NO: 259689
  chr8:140383823-140383910
  hypo

SEQ ID NO: 437082 - DNA, 35 bp, Homo sapiens; identical to SEQ ID NO: 259690
  chr8:140616736-140616771
  hypo

SEQ ID NO: 437083 - DNA, 319 bp, Homo sapiens; identical to SEQ ID NO: 212505
  chr8:140630637-140630956
  hypo

SEQ ID NO: 437084 - DNA, 298 bp, Homo sapiens; identical to SEQ ID NO: 212506
  chr8:140630986-140631284
  hypo

SEQ ID NO: 437085 - DNA, 114 bp, Homo sapiens; identical to SEQ ID NO: 310019
  chr8:140691494-140691608
  hypo

SEQ ID NO: 437086 - DNA, 203 bp, Homo sapiens; identical to SEQ ID NO: 201610
  chr8:140716452-140716655
  hypo

SEQ ID NO: 437087 - DNA, 84 bp, Homo sapiens; identical to SEQ ID NO: 259693
  chr8:140719205-140719289
  hypo

SEQ ID NO: 437088 - DNA, 167 bp, Homo sapiens; identical to SEQ ID NO: 259694
  chr8:140744186-140744353
  hypo

SEQ ID NO: 437089 - DNA, 146 bp, Homo sapiens; identical to SEQ ID NO: 259695
  chr8:140751424-140751570
  hypo

SEQ ID NO: 437090 - DNA, 36 bp, Homo sapiens; identical to SEQ ID NO: 310024
  chr8:140755550-140755586
  hypo

SEQ ID NO: 437091 - DNA, 284 bp, Homo sapiens; identical to SEQ ID NO: 259697
  chr8:140756690-140756974
  hypo

SEQ ID NO: 437092 - DNA, 84 bp, Homo sapiens; identical to SEQ ID NO: 259698
  chr8:140757362-140757446
  hypo

SEQ ID NO: 437093 - DNA, 44 bp, Homo sapiens; identical to SEQ ID NO: 259699
  chr8:140757750-140757794
  hypo

SEQ ID NO: 437094 - DNA, 315 bp, Homo sapiens; identical to SEQ ID NO: 212508
  chr8:140758126-140758441
  hypo

SEQ ID NO: 437095 - DNA, 265 bp, Homo sapiens; identical to SEQ ID NO: 259702
  chr8:140774448-140774713
  hypo

SEQ ID NO: 437096 - DNA, 356 bp, Homo sapiens; identical to SEQ ID NO: 259703
  chr8:140775903-140776259
  hypo

SEQ ID NO: 437097 - DNA, 122 bp, Homo sapiens; identical to SEQ ID NO: 212509
  chr8:140802163-140802285
  hypo

SEQ ID NO: 437098 - DNA, 132 bp, Homo sapiens; identical to SEQ ID NO: 259707
  chr8:140802500-140802632
  hypo

SEQ ID NO: 437099 - DNA, 249 bp, Homo sapiens; identical to SEQ ID NO: 259708
  chr8:140807902-140808151
  hypo

SEQ ID NO: 437100 - DNA, 120 bp, Homo sapiens; identical to SEQ ID NO: 259709
  chr8:140809392-140809512
  hypo

SEQ ID NO: 437101 - DNA, 113 bp, Homo sapiens; identical to SEQ ID NO: 310039
  chr8:140834002-140834115
  hypo

SEQ ID NO: 437102 - DNA, 92 bp, Homo sapiens; identical to SEQ ID NO: 212510
  chr8:140834749-140834841
  hypo

SEQ ID NO: 437103 - DNA, 212 bp, Homo sapiens; identical to SEQ ID NO: 259714
  chr8:140844033-140844245
  hypo

SEQ ID NO: 437104 - DNA, 85 bp, Homo sapiens; identical to SEQ ID NO: 259715
  chr8:140844598-140844683
  hypo

SEQ ID NO: 437105 - DNA, 140 bp, Homo sapiens; identical to SEQ ID NO: 212511
  chr8:140847596-140847736
  hypo

SEQ ID NO: 437106 - DNA, 310 bp, Homo sapiens; identical to SEQ ID NO: 259717
  chr8:140859761-140860071
  hypo

SEQ ID NO: 437107 - DNA, 164 bp, Homo sapiens; identical to SEQ ID NO: 259718
  chr8:140871034-140871198
  hypo

SEQ ID NO: 437108 - DNA, 167 bp, Homo sapiens; identical to SEQ ID NO: 259719
  chr8:140920092-140920259
  hypo

SEQ ID NO: 437109 - DNA, 74 bp, Homo sapiens
  chr8:140932218-140932292
  hypo
ggtgggtttttgggttttctccaatgttcctcactgaaaattctgaagatgtttgtattaagattaaaatatct

SEQ ID NO: 437110 - DNA, 58 bp, Homo sapiens; identical to SEQ ID NO: 212513
  chr8:140962580-140962638
  hypo

SEQ ID NO: 437111 - DNA, 69 bp, Homo sapiens; identical to SEQ ID NO: 259725
  chr8:140968327-140968396
  hypo

SEQ ID NO: 437112 - DNA, 379 bp, Homo sapiens; identical to SEQ ID NO: 259728
  chr8:141052508-141052887
  hypo

SEQ ID NO: 437113 - DNA, 76 bp, Homo sapiens; identical to SEQ ID NO: 310057
  chr8:141054769-141054845
  hypo

SEQ ID NO: 437114 - DNA, 141 bp, Homo sapiens; identical to SEQ ID NO: 310058
  chr8:141054875-141055016
  hypo

SEQ ID NO: 437115 - DNA, 186 bp, Homo sapiens; identical to SEQ ID NO: 212515
  chr8:141071378-141071564
  hypo

SEQ ID NO: 437116 - DNA, 72 bp, Homo sapiens; identical to SEQ ID NO: 212518
  chr8:141159287-141159359
  hypo

SEQ ID NO: 437117 - DNA, 38 bp, Homo sapiens; identical to SEQ ID NO: 259736
  chr8:141185739-141185777
  hypo

SEQ ID NO: 437118 - DNA, 160 bp, Homo sapiens; identical to SEQ ID NO: 259738
  chr8:141213695-141213855
  hypo

SEQ ID NO: 437119 - DNA, 63 bp, Homo sapiens; identical to SEQ ID NO: 310068
  chr8:141219190-141219253
  hypo

SEQ ID NO: 437120 - DNA, 128 bp, Homo sapiens; identical to SEQ ID NO: 310069
  chr8:141219283-141219411
  hypo

SEQ ID NO: 437121 - DNA, 119 bp, Homo sapiens; identical to SEQ ID NO: 212520
  chr8:141231524-141231643
  hypo

SEQ ID NO: 437122 - DNA, 159 bp, Homo sapiens; identical to SEQ ID NO: 259741
  chr8:141233423-141233582
  hypo

SEQ ID NO: 437123 - DNA, 188 bp, Homo sapiens; identical to SEQ ID NO: 223497
  chr8:141260487-141260675
  hypo

SEQ ID NO: 437124 - DNA, 285 bp, Homo sapiens; identical to SEQ ID NO: 259743
  chr8:141265017-141265302
  hypo

SEQ ID NO: 437125 - DNA, 135 bp, Homo sapiens; identical to SEQ ID NO: 259744
  chr8:141267397-141267532
  hypo

SEQ ID NO: 437126 - DNA, 347 bp, Homo sapiens; identical to SEQ ID NO: 212522
  chr8:141268122-141268469
  hypo

SEQ ID NO: 437127 - DNA, 205 bp, Homo sapiens; identical to SEQ ID NO: 259746
  chr8:141273172-141273377
  hypo

SEQ ID NO: 437128 - DNA, 100 bp, Homo sapiens; identical to SEQ ID NO: 259747
  chr8:141290061-141290161
  hypo

SEQ ID NO: 437129 - DNA, 35 bp, Homo sapiens; identical to SEQ ID NO: 310080
  chr8:141347684-141347719
  hypo

SEQ ID NO: 437130 - DNA, 77 bp, Homo sapiens; identical to SEQ ID NO: 259750
  chr8:141436007-141436084
  hypo

SEQ ID NO: 437131 - DNA, 198 bp, Homo sapiens; identical to SEQ ID NO: 259751
  chr8:141455583-141455781
  hypo

SEQ ID NO: 437132 - DNA, 31 bp, Homo sapiens; identical to SEQ ID NO: 67308
  chr8:141466495-141466526
  hypo

SEQ ID NO: 437133 - DNA, 34 bp, Homo sapiens; identical to SEQ ID NO: 259754
  chr8:141523825-141523859
  hypo

SEQ ID NO: 437134 - DNA, 80 bp, Homo sapiens; identical to SEQ ID NO: 259757
  chr8:141539851-141539931
  hypo

SEQ ID NO: 437135 - DNA, 501 bp, Homo sapiens; identical to SEQ ID NO: 259758
  chr8:141543887-141544388
  hypo

SEQ ID NO: 437136 - DNA, 94 bp, Homo sapiens; identical to SEQ ID NO: 259759
  chr8:141545610-141545704
  hypo

SEQ ID NO: 437137 - DNA, 411 bp, Homo sapiens; identical to SEQ ID NO: 259761
  chr8:141565895-141566306
  hypo

SEQ ID NO: 437138 - DNA, 45 bp, Homo sapiens; identical to SEQ ID NO: 212527
  chr8:141566686-141566731
  hypo

SEQ ID NO: 437139 - DNA, 149 bp, Homo sapiens; identical to SEQ ID NO: 212528
  chr8:141568114-141568263
  hypo

SEQ ID NO: 437140 - DNA, 66 bp, Homo sapiens; identical to SEQ ID NO: 212529
  chr8:141587942-141588008
  hypo

SEQ ID NO: 437141 - DNA, 404 bp, Homo sapiens; identical to SEQ ID NO: 259765
  chr8:141588239-141588643
  hypo

SEQ ID NO: 437142 - DNA, 161 bp, Homo sapiens; identical to SEQ ID NO: 212531
  chr8:141589815-141589976
  hypo

SEQ ID NO: 437143 - DNA, 102 bp, Homo sapiens; identical to SEQ ID NO: 212532
  chr8:141594755-141594857
  hypo

SEQ ID NO: 437144 - DNA, 50 bp, Homo sapiens; identical to SEQ ID NO: 212533
  chr8:141594912-141594962
  hypo

SEQ ID NO: 437145 - DNA, 218 bp, Homo sapiens; identical to SEQ ID NO: 259771
  chr8:141603917-141604135
  hypo

SEQ ID NO: 437146 - DNA, 49 bp, Homo sapiens; identical to SEQ ID NO: 259775
  chr8:141633674-141633723
  hypo

SEQ ID NO: 437147 - DNA, 223 bp, Homo sapiens; identical to SEQ ID NO: 259777
  chr8:141634459-141634682
  hypo

SEQ ID NO: 437148 - DNA, 152 bp, Homo sapiens; identical to SEQ ID NO: 212539
  chr8:141636160-141636312
  hypo

SEQ ID NO: 437149 - DNA, 81 bp, Homo sapiens; identical to SEQ ID NO: 201611
  chr8:141644414-141644495
  hypo

SEQ ID NO: 437150 - DNA, 219 bp, Homo sapiens; identical to SEQ ID NO: 259779
  chr8:141704910-141705129
  hypo

SEQ ID NO: 437151 - DNA, 91 bp, Homo sapiens; identical to SEQ ID NO: 212543
  chr8:141741358-141741449
  hypo

SEQ ID NO: 437152 - DNA, 176 bp, Homo sapiens; identical to SEQ ID NO: 259782
  chr8:141745321-141745497
  hypo

SEQ ID NO: 437153 - DNA, 761 bp, Homo sapiens; identical to SEQ ID NO: 201612
  chr8:142010302-142011063
  hypo

SEQ ID NO: 437154 - DNA, 1210 bp, Homo sapiens; identical to SEQ ID NO: 45893
  chr8:142011091-142012301
  hypo

SEQ ID NO: 437155 - DNA, 54 bp, Homo sapiens; identical to SEQ ID NO: 259783
  chr8:142112482-142112536
  hypo

SEQ ID NO: 437156 - DNA, 42 bp, Homo sapiens; identical to SEQ ID NO: 226542
  chr8:142141062-142141104
  hypo

SEQ ID NO: 437157 - DNA, 50 bp, Homo sapiens; identical to SEQ ID NO: 259785
  chr8:142149852-142149902
  hypo

SEQ ID NO: 437158 - DNA, 210 bp, Homo sapiens; identical to SEQ ID NO: 212548
  chr8:142157057-142157267
  hypo

SEQ ID NO: 437159 - DNA, 151 bp, Homo sapiens; identical to SEQ ID NO: 259787
  chr8:142165998-142166149
  hypo

SEQ ID NO: 437160 - DNA, 148 bp, Homo sapiens; identical to SEQ ID NO: 259788
  chr8:142176329-142176477
  hypo

SEQ ID NO: 437161 - DNA, 53 bp, Homo sapiens; identical to SEQ ID NO: 212549
  chr8:142178200-142178253
  hypo

SEQ ID NO: 437162 - DNA, 234 bp, Homo sapiens; identical to SEQ ID NO: 259790
  chr8:142186981-142187215
  hypo

SEQ ID NO: 437163 - DNA, 76 bp, Homo sapiens; identical to SEQ ID NO: 259791
  chr8:142188438-142188514
  hypo

SEQ ID NO: 437164 - DNA, 235 bp, Homo sapiens; identical to SEQ ID NO: 259792
  chr8:142190007-142190242
  hypo

SEQ ID NO: 437165 - DNA, 214 bp, Homo sapiens; identical to SEQ ID NO: 310131
  chr8:142190625-142190839
  hypo

SEQ ID NO: 437166 - DNA, 356 bp, Homo sapiens; identical to SEQ ID NO: 310132
  chr8:142190869-142191225
  hypo

SEQ ID NO: 437167 - DNA, 514 bp, Homo sapiens; identical to SEQ ID NO: 259794
  chr8:142202626-142203140
  hypo

SEQ ID NO: 437168 - DNA, 241 bp, Homo sapiens; identical to SEQ ID NO: 212552
  chr8:142203890-142204131
  hypo

SEQ ID NO: 437169 - DNA, 318 bp, Homo sapiens; identical to SEQ ID NO: 259796
  chr8:142221150-142221468
  hypo

SEQ ID NO: 437170 - DNA, 86 bp, Homo sapiens; identical to SEQ ID NO: 212554
  chr8:142226699-142226785
  hypo

SEQ ID NO: 437171 - DNA, 511 bp, Homo sapiens; identical to SEQ ID NO: 212555
  chr8:142228300-142228811
  hypo

SEQ ID NO: 437172 - DNA, 127 bp, Homo sapiens; identical to SEQ ID NO: 212557
  chr8:142236375-142236502
  hypo

SEQ ID NO: 437173 - DNA, 71 bp, Homo sapiens; identical to SEQ ID NO: 259802
  chr8:142236532-142236603
  hypo

SEQ ID NO: 437174 - DNA, 381 bp, Homo sapiens; identical to SEQ ID NO: 392128
  chr8:142241020-142241401
  hypo

SEQ ID NO: 437175 - DNA, 77 bp, Homo sapiens; identical to SEQ ID NO: 259807
  chr8:142247722-142247799
  hypo

SEQ ID NO: 437176 - DNA, 191 bp, Homo sapiens; identical to SEQ ID NO: 259809
  chr8:142252917-142253108
  hypo

SEQ ID NO: 437177 - DNA, 67 bp, Homo sapiens; identical to SEQ ID NO: 310149
  chr8:142260822-142260889
  hypo

SEQ ID NO: 437178 - DNA, 142 bp, Homo sapiens; identical to SEQ ID NO: 212561
  chr8:142262365-142262507
  hypo

SEQ ID NO: 437179 - DNA, 141 bp, Homo sapiens; identical to SEQ ID NO: 212563
  chr8:142263347-142263488
  hypo

SEQ ID NO: 437180 - DNA, 367 bp, Homo sapiens; identical to SEQ ID NO: 212564
  chr8:142264058-142264425
  hypo

SEQ ID NO: 437181 - DNA, 309 bp, Homo sapiens; identical to SEQ ID NO: 212565
  chr8:142277203-142277512
  hypo

SEQ ID NO: 437182 - DNA, 320 bp, Homo sapiens; identical to SEQ ID NO: 259816
  chr8:142277817-142278137
  hypo

SEQ ID NO: 437183 - DNA, 117 bp, Homo sapiens; identical to SEQ ID NO: 259817
  chr8:142278840-142278957
  hypo

SEQ ID NO: 437184 - DNA, 267 bp, Homo sapiens; identical to SEQ ID NO: 259818
  chr8:142279182-142279449
  hypo

SEQ ID NO: 437185 - DNA, 155 bp, Homo sapiens; identical to SEQ ID NO: 212567
  chr8:142280196-142280351
  hypo

SEQ ID NO: 437186 - DNA, 200 bp, Homo sapiens; identical to SEQ ID NO: 259820
  chr8:142283871-142284071
  hypo

SEQ ID NO: 437187 - DNA, 241 bp, Homo sapiens; identical to SEQ ID NO: 212568
  chr8:142290886-142291127
  hypo

SEQ ID NO: 437188 - DNA, 481 bp, Homo sapiens; identical to SEQ ID NO: 259823
  chr8:142294981-142295462
  hypo

SEQ ID NO: 437189 - DNA, 111 bp, Homo sapiens; identical to SEQ ID NO: 212569
  chr8:142295926-142296037
  hypo

SEQ ID NO: 437190 - DNA, 184 bp, Homo sapiens; identical to SEQ ID NO: 259825
  chr8:142296404-142296588
  hypo

SEQ ID NO: 437191 - DNA, 159 bp, Homo sapiens; identical to SEQ ID NO: 286224
  chr8:142297598-142297757
  hypo

SEQ ID NO: 437192 - DNA, 31 bp, Homo sapiens; identical to SEQ ID NO: 212570
  chr8:142304055-142304086
  hypo

SEQ ID NO: 437193 - DNA, 144 bp, Homo sapiens; identical to SEQ ID NO: 212571
  chr8:142305925-142306069
  hypo

SEQ ID NO: 437194 - DNA, 83 bp, Homo sapiens; identical to SEQ ID NO: 259829
  chr8:142310045-142310128
  hypo

SEQ ID NO: 437195 - DNA, 222 bp, Homo sapiens; identical to SEQ ID NO: 212572
  chr8:142312689-142312911
  hypo

SEQ ID NO: 437196 - DNA, 226 bp, Homo sapiens; identical to SEQ ID NO: 259831
  chr8:142332802-142333028
  hypo

SEQ ID NO: 437197 - DNA, 184 bp, Homo sapiens; identical to SEQ ID NO: 259833
  chr8:142359675-142359859
  hypo

SEQ ID NO: 437198 - DNA, 188 bp, Homo sapiens; identical to SEQ ID NO: 212578
  chr8:142374615-142374803
  hypo

SEQ ID NO: 437199 - DNA, 174 bp, Homo sapiens; identical to SEQ ID NO: 259836
  chr8:142383101-142383275
  hypo

SEQ ID NO: 437200 - DNA, 233 bp, Homo sapiens; identical to SEQ ID NO: 286227
  chr8:142425567-142425800
  hypo

SEQ ID NO: 437201 - DNA, 298 bp, Homo sapiens; identical to SEQ ID NO: 259837
  chr8:142435197-142435495
  hypo

SEQ ID NO: 437202 - DNA, 467 bp, Homo sapiens; identical to SEQ ID NO: 310182
  chr8:142435699-142436166
  hypo

SEQ ID NO: 437203 - DNA, 38 bp, Homo sapiens; identical to SEQ ID NO: 212581
  chr8:142437114-142437152
  hypo

SEQ ID NO: 437204 - DNA, 80 bp, Homo sapiens; identical to SEQ ID NO: 259841
  chr8:142440392-142440472
  hypo

SEQ ID NO: 437205 - DNA, 94 bp, Homo sapiens; identical to SEQ ID NO: 310187
  chr8:142452392-142452486
  hypo

SEQ ID NO: 437206 - DNA, 31 bp, Homo sapiens; identical to SEQ ID NO: 259843
  chr8:142493073-142493104
  hypo

SEQ ID NO: 437207 - DNA, 239 bp, Homo sapiens; identical to SEQ ID NO: 212584
  chr8:142537302-142537541
  hypo

SEQ ID NO: 437208 - DNA, 38 bp, Homo sapiens; identical to SEQ ID NO: 212585
  chr8:142541546-142541584
  hypo

SEQ ID NO: 437209 - DNA, 148 bp, Homo sapiens; identical to SEQ ID NO: 259846
  chr8:142544218-142544366
  hypo

SEQ ID NO: 437210 - DNA, 96 bp, Homo sapiens; identical to SEQ ID NO: 259847
  chr8:142559813-142559909
  hypo

SEQ ID NO: 437211 - DNA, 144 bp, Homo sapiens; identical to SEQ ID NO: 310193
  chr8:142560227-142560371
  hypo

SEQ ID NO: 437212 - DNA, 119 bp, Homo sapiens; identical to SEQ ID NO: 259852
  chr8:142734866-142734985
  hypo

SEQ ID NO: 437213 - DNA, 66 bp, Homo sapiens; identical to SEQ ID NO: 259853
  chr8:142744451-142744517
  hypo

SEQ ID NO: 437214 - DNA, 184 bp, Homo sapiens; identical to SEQ ID NO: 259854
  chr8:142863058-142863242
  hypo

SEQ ID NO: 437215 - DNA, 207 bp, Homo sapiens; identical to SEQ ID NO: 259856
  chr8:142898503-142898710
  hypo

SEQ ID NO: 437216 - DNA, 263 bp, Homo sapiens; identical to SEQ ID NO: 259858
  chr8:143022236-143022499
  hypo

SEQ ID NO: 437217 - DNA, 261 bp, Homo sapiens; identical to SEQ ID NO: 259859
  chr8:143026585-143026846
  hypo

SEQ ID NO: 437218 - DNA, 182 bp, Homo sapiens; identical to SEQ ID NO: 310207
  chr8:143088311-143088493
  hypo

SEQ ID NO: 437219 - DNA, 125 bp, Homo sapiens; identical to SEQ ID NO: 259863
  chr8:143090352-143090477
  hypo

SEQ ID NO: 437220 - DNA, 563 bp, Homo sapiens; identical to SEQ ID NO: 212591
  chr8:143152592-143153155
  hypo

SEQ ID NO: 437221 - DNA, 261 bp, Homo sapiens; identical to SEQ ID NO: 212592
  chr8:143171282-143171543
  hypo

SEQ ID NO: 437222 - DNA, 265 bp, Homo sapiens; identical to SEQ ID NO: 259866
  chr8:143204858-143205123
  hypo

SEQ ID NO: 437223 - DNA, 151 bp, Homo sapiens; identical to SEQ ID NO: 259867
  chr8:143209714-143209865
  hypo

SEQ ID NO: 437224 - DNA, 124 bp, Homo sapiens; identical to SEQ ID NO: 212594
  chr8:143269916-143270040
  hypo

SEQ ID NO: 437225 - DNA, 59 bp, Homo sapiens; identical to SEQ ID NO: 212595
  chr8:143270070-143270129
  hypo

SEQ ID NO: 437226 - DNA, 206 bp, Homo sapiens; identical to SEQ ID NO: 310217
  chr8:143319108-143319314
  hypo

SEQ ID NO: 437227 - DNA, 47 bp, Homo sapiens; identical to SEQ ID NO: 310220
  chr8:143368469-143368516
  hypo

SEQ ID NO: 437228 - DNA, 334 bp, Homo sapiens; identical to SEQ ID NO: 259875
  chr8:143368919-143369253
  hypo

SEQ ID NO: 437229 - DNA, 242 bp, Homo sapiens; identical to SEQ ID NO: 259876
  chr8:143372385-143372627
  hypo

SEQ ID NO: 437230 - DNA, 159 bp, Homo sapiens; identical to SEQ ID NO: 259877
  chr8:143373004-143373163
  hypo

SEQ ID NO: 437231 - DNA, 189 bp, Homo sapiens; identical to SEQ ID NO: 259878
  chr8:143374348-143374537
  hypo

SEQ ID NO: 437232 - DNA, 168 bp, Homo sapiens; identical to SEQ ID NO: 259879
  chr8:143379124-143379292
  hypo

SEQ ID NO: 437233 - DNA, 42 bp, Homo sapiens; identical to SEQ ID NO: 212600
  chr8:143398749-143398791
  hypo

SEQ ID NO: 437234 - DNA, 206 bp, Homo sapiens; identical to SEQ ID NO: 259883
  chr8:143404247-143404453
  hypo

SEQ ID NO: 437235 - DNA, 315 bp, Homo sapiens; identical to SEQ ID NO: 259885
  chr8:143406189-143406504
  hypo

SEQ ID NO: 437236 - DNA, 307 bp, Homo sapiens; identical to SEQ ID NO: 259886
  chr8:143410616-143410923
  hypo

SEQ ID NO: 437237 - DNA, 322 bp, Homo sapiens; identical to SEQ ID NO: 212601
  chr8:143413397-143413719
  hypo

SEQ ID NO: 437238 - DNA, 42 bp, Homo sapiens; identical to SEQ ID NO: 259888
  chr8:143414784-143414826
  hypo

SEQ ID NO: 437239 - DNA, 35 bp, Homo sapiens; identical to SEQ ID NO: 212602
  chr8:143415311-143415346
  hypo

SEQ ID NO: 437240 - DNA, 45 bp, Homo sapiens; identical to SEQ ID NO: 259890
  chr8:143421174-143421219
  hypo

SEQ ID NO: 437241 - DNA, 221 bp, Homo sapiens; identical to SEQ ID NO: 212603
  chr8:143424645-143424866
  hypo

SEQ ID NO: 437242 - DNA, 41 bp, Homo sapiens; identical to SEQ ID NO: 201620
  chr8:143429133-143429174
  hypo

SEQ ID NO: 437243 - DNA, 120 bp, Homo sapiens; identical to SEQ ID NO: 259893
  chr8:143455672-143455792
  hypo

SEQ ID NO: 437244 - DNA, 32 bp, Homo sapiens; identical to SEQ ID NO: 259894
  chr8:143462129-143462161
  hypo

SEQ ID NO: 437245 - DNA, 627 bp, Homo sapiens; identical to SEQ ID NO: 212605
  chr8:143463002-143463629
  hypo

SEQ ID NO: 437246 - DNA, 234 bp, Homo sapiens; identical to SEQ ID NO: 212606
  chr8:143463681-143463915
  hypo

SEQ ID NO: 437247 - DNA, 180 bp, Homo sapiens; identical to SEQ ID NO: 212607
  chr8:143505868-143506048
  hypo

SEQ ID NO: 437248 - DNA, 278 bp, Homo sapiens; identical to SEQ ID NO: 259898
  chr8:143535499-143535777
  hypo

SEQ ID NO: 437249 - DNA, 43 bp, Homo sapiens; identical to SEQ ID NO: 259899
  chr8:143550866-143550909
  hypo

SEQ ID NO: 437250 - DNA, 102 bp, Homo sapiens; identical to SEQ ID NO: 259900
  chr8:143550969-143551071
  hypo

SEQ ID NO: 437251 - DNA, 334 bp, Homo sapiens; identical to SEQ ID NO: 259903
  chr8:143570691-143571025
  hypo

SEQ ID NO: 437252 - DNA, 142 bp, Homo sapiens; identical to SEQ ID NO: 310254
  chr8:143599430-143599572
  hypo

SEQ ID NO: 437253 - DNA, 190 bp, Homo sapiens; identical to SEQ ID NO: 259907
  chr8:143609365-143609555
  hypo

SEQ ID NO: 437254 - DNA, 174 bp, Homo sapiens; identical to SEQ ID NO: 259912
  chr8:143667142-143667316
  hypo

SEQ ID NO: 437255 - DNA, 130 bp, Homo sapiens; identical to SEQ ID NO: 259913
  chr8:143699028-143699158
  hypo

SEQ ID NO: 437256 - DNA, 266 bp, Homo sapiens; identical to SEQ ID NO: 259914
  chr8:143843320-143843586
  hypo

SEQ ID NO: 437257 - DNA, 688 bp, Homo sapiens; identical to SEQ ID NO: 259915
  chr8:143868761-143869449
  hypo

SEQ ID NO: 437258 - DNA, 71 bp, Homo sapiens; identical to SEQ ID NO: 259916
  chr8:143879112-143879183
  hypo

SEQ ID NO: 437259 - DNA, 96 bp, Homo sapiens; identical to SEQ ID NO: 259917
  chr8:143916192-143916288
  hypo

SEQ ID NO: 437260 - DNA, 35 bp, Homo sapiens; identical to SEQ ID NO: 259918
  chr8:143983233-143983268
  hypo

SEQ ID NO: 437261 - DNA, 37 bp, Homo sapiens; identical to SEQ ID NO: 259920
  chr8:143994804-143994841
  hypo

SEQ ID NO: 437262 - DNA, 120 bp, Homo sapiens; identical to SEQ ID NO: 310267
  chr8:143998175-143998295
  hypo

SEQ ID NO: 437263 - DNA, 152 bp, Homo sapiens; identical to SEQ ID NO: 310268
  chr8:143998327-143998479
  hypo

SEQ ID NO: 437264 - DNA, 43 bp, Homo sapiens; identical to SEQ ID NO: 259922
  chr8:144057229-144057272
  hypo

SEQ ID NO: 437265 - DNA, 42 bp, Homo sapiens; identical to SEQ ID NO: 259923
  chr8:144057392-144057434
  hypo

SEQ ID NO: 437266 - DNA, 182 bp, Homo sapiens; identical to SEQ ID NO: 310271
  chr8:144069364-144069546
  hypo

SEQ ID NO: 437267 - DNA, 73 bp, Homo sapiens; identical to SEQ ID NO: 310272
  chr8:144070435-144070508
  hypo

SEQ ID NO: 437268 - DNA, 47 bp, Homo sapiens; identical to SEQ ID NO: 310273
  chr8:144070659-144070706
  hypo

SEQ ID NO: 437269 - DNA, 425 bp, Homo sapiens; identical to SEQ ID NO: 212617
  chr8:144070963-144071388
  hypo

SEQ ID NO: 437270 - DNA, 137 bp, Homo sapiens; identical to SEQ ID NO: 259927
  chr8:144090396-144090533
  hypo

SEQ ID NO: 437271 - DNA, 211 bp, Homo sapiens; identical to SEQ ID NO: 259928
  chr8:144093516-144093727
  hypo

SEQ ID NO: 437272 - DNA, 141 bp, Homo sapiens; identical to SEQ ID NO: 259929
  chr8:144163832-144163973
  hypo

SEQ ID NO: 437273 - DNA, 263 bp, Homo sapiens; identical to SEQ ID NO: 259931
  chr8:144187580-144187843
  hypo

SEQ ID NO: 437274 - DNA, 66 bp, Homo sapiens; identical to SEQ ID NO: 310280
  chr8:144190246-144190312
  hypo

SEQ ID NO: 437275 - DNA, 76 bp, Homo sapiens; identical to SEQ ID NO: 259933
  chr8:144203023-144203099
  hypo

SEQ ID NO: 437276 - DNA, 185 bp, Homo sapiens; identical to SEQ ID NO: 212620
  chr8:144203468-144203653
  hypo

SEQ ID NO: 437277 - DNA, 35 bp, Homo sapiens; identical to SEQ ID NO: 212621
  chr8:144203942-144203977
  hypo

SEQ ID NO: 437278 - DNA, 418 bp, Homo sapiens; identical to SEQ ID NO: 212622
  chr8:144204021-144204439
  hypo

SEQ ID NO: 437279 - DNA, 89 bp, Homo sapiens; identical to SEQ ID NO: 212623
  chr8:144208604-144208693
  hypo

SEQ ID NO: 437280 - DNA, 200 bp, Homo sapiens; identical to SEQ ID NO: 259938
  chr8:144236385-144236585
  hypo

SEQ ID NO: 437281 - DNA, 42 bp, Homo sapiens; identical to SEQ ID NO: 310289
  chr8:144238764-144238806
  hypo

SEQ ID NO: 437282 - DNA, 201 bp, Homo sapiens; identical to SEQ ID NO: 259940
  chr8:144254779-144254980
  hypo

SEQ ID NO: 437283 - DNA, 105 bp, Homo sapiens; identical to SEQ ID NO: 259941
  chr8:144262820-144262925
  hypo

SEQ ID NO: 437284 - DNA, 196 bp, Homo sapiens; identical to SEQ ID NO: 259944
  chr8:144311087-144311283
  hypo

SEQ ID NO: 437285 - DNA, 67 bp, Homo sapiens; identical to SEQ ID NO: 310296
  chr8:144330418-144330485
  hypo

SEQ ID NO: 437286 - DNA, 62 bp, Homo sapiens; identical to SEQ ID NO: 259947
  chr8:144334638-144334700
  hypo

SEQ ID NO: 437287 - DNA, 42 bp, Homo sapiens; identical to SEQ ID NO: 259948
  chr8:144335407-144335449
  hypo

SEQ ID NO: 437288 - DNA, 86 bp, Homo sapiens; identical to SEQ ID NO: 212626
  chr8:144344738-144344824
  hypo

SEQ ID NO: 437289 - DNA, 105 bp, Homo sapiens; identical to SEQ ID NO: 212627
  chr8:144347176-144347281
  hypo

SEQ ID NO: 437290 - DNA, 66 bp, Homo sapiens; identical to SEQ ID NO: 310303
  chr8:144347740-144347806
  hypo

SEQ ID NO: 437291 - DNA, 83 bp, Homo sapiens; identical to SEQ ID NO: 212629
  chr8:144361861-144361944
  hypo

SEQ ID NO: 437292 - DNA, 213 bp, Homo sapiens; identical to SEQ ID NO: 259955
  chr8:144372044-144372257
  hypo

SEQ ID NO: 437293 - DNA, 112 bp, Homo sapiens; identical to SEQ ID NO: 259958
  chr8:144386309-144386421
  hypo

SEQ ID NO: 437294 - DNA, 46 bp, Homo sapiens; identical to SEQ ID NO: 259959
  chr8:144386880-144386926
  hypo

SEQ ID NO: 437295 - DNA, 79 bp, Homo sapiens; identical to SEQ ID NO: 259960
  chr8:144387632-144387711
  hypo

SEQ ID NO: 437296 - DNA, 95 bp, Homo sapiens; identical to SEQ ID NO: 259961
  chr8:144390545-144390640
  hypo

SEQ ID NO: 437297 - DNA, 154 bp, Homo sapiens; identical to SEQ ID NO: 259962
  chr8:144396023-144396177
  hypo

SEQ ID NO: 437298 - DNA, 54 bp, Homo sapiens; identical to SEQ ID NO: 259963
  chr8:144398063-144398117
  hypo

SEQ ID NO: 437299 - DNA, 199 bp, Homo sapiens; identical to SEQ ID NO: 310318
  chr8:144400199-144400398
  hypo

SEQ ID NO: 437300 - DNA, 139 bp, Homo sapiens; identical to SEQ ID NO: 259967
  chr8:144452481-144452620
  hypo

SEQ ID NO: 437301 - DNA, 378 bp, Homo sapiens; identical to SEQ ID NO: 212638
  chr8:144462488-144462866
  hypo

SEQ ID NO: 437302 - DNA, 77 bp, Homo sapiens; identical to SEQ ID NO: 310327
  chr8:144471548-144471625
  hypo

SEQ ID NO: 437303 - DNA, 190 bp, Homo sapiens; identical to SEQ ID NO: 310328
  chr8:144471835-144472025
  hypo

SEQ ID NO: 437304 - DNA, 135 bp, Homo sapiens; identical to SEQ ID NO: 223520
  chr8:144484160-144484295
  hypo

SEQ ID NO: 437305 - DNA, 303 bp, Homo sapiens; identical to SEQ ID NO: 384271
  chr8:144512510-144512813
  hypo

SEQ ID NO: 437306 - DNA, 126 bp, Homo sapiens; identical to SEQ ID NO: 259972
  chr8:144519592-144519718
  hypo

SEQ ID NO: 437307 - DNA, 99 bp, Homo sapiens; identical to SEQ ID NO: 212640
  chr8:144519748-144519847
  hypo

SEQ ID NO: 437308 - DNA, 232 bp, Homo sapiens; identical to SEQ ID NO: 212641
  chr8:144521390-144521622
  hypo

SEQ ID NO: 437309 - DNA, 160 bp, Homo sapiens; identical to SEQ ID NO: 212642
  chr8:144521831-144521991
  hypo

SEQ ID NO: 437310 - DNA, 145 bp, Homo sapiens; identical to SEQ ID NO: 259976
  chr8:144543710-144543855
  hypo

SEQ ID NO: 437311 - DNA, 135 bp, Homo sapiens; identical to SEQ ID NO: 259977
  chr8:144545694-144545829
  hypo

SEQ ID NO: 437312 - DNA, 99 bp, Homo sapiens; identical to SEQ ID NO: 212643
  chr8:144546273-144546372
  hypo

SEQ ID NO: 437313 - DNA, 91 bp, Homo sapiens; identical to SEQ ID NO: 212644
  chr8:144550587-144550678
  hypo

SEQ ID NO: 437314 - DNA, 198 bp, Homo sapiens; identical to SEQ ID NO: 212645
  chr8:144559235-144559433
  hypo

SEQ ID NO: 437315 - DNA, 37 bp, Homo sapiens; identical to SEQ ID NO: 259982
  chr8:144567459-144567496
  hypo

SEQ ID NO: 437316 - DNA, 147 bp, Homo sapiens; identical to SEQ ID NO: 259984
  chr8:144577123-144577270
  hypo

SEQ ID NO: 437317 - DNA, 33 bp, Homo sapiens; identical to SEQ ID NO: 212646
  chr8:144589672-144589705
  hypo

SEQ ID NO: 437318 - DNA, 265 bp, Homo sapiens; identical to SEQ ID NO: 259987
  chr8:144610876-144611141
  hypo

SEQ ID NO: 437319 - DNA, 56 bp, Homo sapiens; identical to SEQ ID NO: 310354
  chr8:144661845-144661901
  hypo

SEQ ID NO: 437320 - DNA, 141 bp, Homo sapiens; identical to SEQ ID NO: 310355
  chr8:144661931-144662072
  hypo

SEQ ID NO: 437321 - DNA, 88 bp, Homo sapiens; identical to SEQ ID NO: 212653
  chr8:144676812-144676900
  hypo

SEQ ID NO: 437322 - DNA, 85 bp, Homo sapiens; identical to SEQ ID NO: 223525
  chr8:144680874-144680959
  hypo

SEQ ID NO: 437323 - DNA, 53 bp, Homo sapiens; identical to SEQ ID NO: 201633
  chr8:144691796-144691849
  hypo

SEQ ID NO: 437324 - DNA, 35 bp, Homo sapiens; identical to SEQ ID NO: 259998
  chr8:144717163-144717198
  hypo

SEQ ID NO: 437325 - DNA, 198 bp, Homo sapiens; identical to SEQ ID NO: 259999
  chr8:145155548-145155746
  hypo

SEQ ID NO: 437326 - DNA, 231 bp, Homo sapiens; identical to SEQ ID NO: 212655
  chr8:145161408-145161639
  hypo

SEQ ID NO: 437327 - DNA, 60 bp, Homo sapiens; identical to SEQ ID NO: 260001
  chr8:145163871-145163931
  hypo

SEQ ID NO: 437328 - DNA, 83 bp, Homo sapiens; identical to SEQ ID NO: 260002
  chr8:145214941-145215024
  hypo

SEQ ID NO: 437329 - DNA, 67 bp, Homo sapiens; identical to SEQ ID NO: 212656
  chr8:145223205-145223272
  hypo

SEQ ID NO: 437330 - DNA, 236 bp, Homo sapiens; identical to SEQ ID NO: 212657
  chr8:145235189-145235425
  hypo

SEQ ID NO: 437331 - DNA, 82 bp, Homo sapiens; identical to SEQ ID NO: 260007
  chr8:145273270-145273352
  hypo

SEQ ID NO: 437332 - DNA, 153 bp, Homo sapiens; identical to SEQ ID NO: 260008
  chr8:145278744-145278897
  hypo

SEQ ID NO: 437333 - DNA, 148 bp, Homo sapiens; identical to SEQ ID NO: 212659
  chr8:145679540-145679688
  hypo

SEQ ID NO: 437334 - DNA, 64 bp, Homo sapiens; identical to SEQ ID NO: 212660
  chr8:145680955-145681019
  hypo

SEQ ID NO: 437335 - DNA, 207 bp, Homo sapiens; identical to SEQ ID NO: 286263
  chr8:145697349-145697556
  hypo

SEQ ID NO: 437336 - DNA, 38 bp, Homo sapiens; identical to SEQ ID NO: 260012
  chr8:145719389-145719427
  hypo

SEQ ID NO: 437337 - DNA, 129 bp, Homo sapiens; identical to SEQ ID NO: 212661
  chr8:145721882-145722011
  hypo

SEQ ID NO: 437338 - DNA, 477 bp, Homo sapiens; identical to SEQ ID NO: 223529
  chr8:145726121-145726598
  hypo

SEQ ID NO: 437339 - DNA, 211 bp, Homo sapiens; identical to SEQ ID NO: 260014
  chr8:145736700-145736911
  hypo

SEQ ID NO: 437340 - DNA, 151 bp, Homo sapiens; identical to SEQ ID NO: 260015
  chr8:145737564-145737715
  hypo

SEQ ID NO: 437341 - DNA, 818 bp, Homo sapiens; identical to SEQ ID NO: 212664
  chr8:145738000-145738818
  hypo

SEQ ID NO: 437342 - DNA, 240 bp, Homo sapiens; identical to SEQ ID NO: 212665
  chr8:145740331-145740571
  hypo

SEQ ID NO: 437343 - DNA, 295 bp, Homo sapiens; identical to SEQ ID NO: 260020
  chr8:145745870-145746165
  hypo

SEQ ID NO: 437344 - DNA, 57 bp, Homo sapiens; identical to SEQ ID NO: 212669
  chr8:145763001-145763058
  hypo

SEQ ID NO: 437345 - DNA, 402 bp, Homo sapiens; identical to SEQ ID NO: 260024
  chr8:145770758-145771160
  hypo

SEQ ID NO: 437346 - DNA, 566 bp, Homo sapiens; identical to SEQ ID NO: 260025
  chr8:145772641-145773207
  hypo

SEQ ID NO: 437347 - DNA, 35 bp, Homo sapiens; identical to SEQ ID NO: 260026
  chr8:145779199-145779234
  hypo

SEQ ID NO: 437348 - DNA, 121 bp, Homo sapiens; identical to SEQ ID NO: 260027
  chr8:145780880-145781001
  hypo

SEQ ID NO: 437349 - DNA, 188 bp, Homo sapiens; identical to SEQ ID NO: 260028
  chr8:145804872-145805060
  hypo

SEQ ID NO: 437350 - DNA, 139 bp, Homo sapiens; identical to SEQ ID NO: 260029
  chr8:145805453-145805592
  hypo

SEQ ID NO: 437351 - DNA, 170 bp, Homo sapiens; identical to SEQ ID NO: 212670
  chr8:145811091-145811261
  hypo

SEQ ID NO: 437352 - DNA, 281 bp, Homo sapiens; identical to SEQ ID NO: 260032
  chr8:145814544-145814825
  hypo

SEQ ID NO: 437353 - DNA, 175 bp, Homo sapiens; identical to SEQ ID NO: 260033
  chr8:145815417-145815592
  hypo

SEQ ID NO: 437354 - DNA, 290 bp, Homo sapiens; identical to SEQ ID NO: 260034
  chr8:145823326-145823616
  hypo

SEQ ID NO: 437355 - DNA, 96 bp, Homo sapiens; identical to SEQ ID NO: 212672
  chr8:145826423-145826519
  hypo

SEQ ID NO: 437356 - DNA, 36 bp, Homo sapiens; identical to SEQ ID NO: 212673
  chr8:145826579-145826615
  hypo

SEQ ID NO: 437357 - DNA, 306 bp, Homo sapiens; identical to SEQ ID NO: 212674
  chr8:145828364-145828670
  hypo

SEQ ID NO: 437358 - DNA, 261 bp, Homo sapiens; identical to SEQ ID NO: 260038
  chr8:145831271-145831532
  hypo

SEQ ID NO: 437359 - DNA, 78 bp, Homo sapiens; identical to SEQ ID NO: 260039
  chr8:145843552-145843630
  hypo

SEQ ID NO: 437360 - DNA, 64 bp, Homo sapiens; identical to SEQ ID NO: 212675
  chr8:145844223-145844287
  hypo

SEQ ID NO: 437361 - DNA, 472 bp, Homo sapiens; identical to SEQ ID NO: 260041
  chr8:145844496-145844968
  hypo

SEQ ID NO: 437362 - DNA, 167 bp, Homo sapiens; identical to SEQ ID NO: 212678
  chr8:145849042-145849209
  hypo

SEQ ID NO: 437363 - DNA, 42 bp, Homo sapiens; identical to SEQ ID NO: 260044
  chr8:145849872-145849914
  hypo

SEQ ID NO: 437364 - DNA, 152 bp, Homo sapiens; identical to SEQ ID NO: 260045
  chr8:145852008-145852160
  hypo

SEQ ID NO: 437365 - DNA, 69 bp, Homo sapiens; identical to SEQ ID NO: 260046
  chr8:145854282-145854351
  hypo

SEQ ID NO: 437366 - DNA, 249 bp, Homo sapiens; identical to SEQ ID NO: 286271
  chr8:145910532-145910781
  hypo

SEQ ID NO: 437367 - DNA, 99 bp, Homo sapiens; identical to SEQ ID NO: 212681
  chr8:145978673-145978772
  hypo

SEQ ID NO: 437368 - DNA, 253 bp, Homo sapiens; identical to SEQ ID NO: 260050
  chr8:146033024-146033277
  hypo

SEQ ID NO: 437369 - DNA, 159 bp, Homo sapiens; identical to SEQ ID NO: 310417
  chr8:146036126-146036285
  hypo

SEQ ID NO: 437370 - DNA, 142 bp, Homo sapiens; identical to SEQ ID NO: 310418
  chr8:146036319-146036461
  hypo

SEQ ID NO: 437371 - DNA, 203 bp, Homo sapiens; identical to SEQ ID NO: 212683
  chr8:146046147-146046350
  hypo

SEQ ID NO: 437372 - DNA, 184 bp, Homo sapiens; identical to SEQ ID NO: 286274
  chr8:146052022-146052206
  hypo

SEQ ID NO: 437373 - DNA, 36 bp, Homo sapiens; identical to SEQ ID NO: 201641
  chr8:146078071-146078107
  hypo

SEQ ID NO: 437374 - DNA, 75 bp, Homo sapiens
  chr8:146176579-146176654
  hypo
ctgaatcattcaatcagtaagtgattagatagataaatggaagaattcagattccttcagtagataacatgtttt

SEQ ID NO: 437375 - DNA, 82 bp, Homo sapiens; identical to SEQ ID NO: 260056
  chr8:146301130-146301212
  hypo

SEQ ID NO: 437376 - DNA, 34 bp, Homo sapiens; identical to SEQ ID NO: 260058
  chr9:413857-413891
  hypo

SEQ ID NO: 437377 - DNA, 99 bp, Homo sapiens; identical to SEQ ID NO: 260059
  chr9:573570-573669
  hypo

SEQ ID NO: 437378 - DNA, 35 bp, Homo sapiens; identical to SEQ ID NO: 260060
  chr9:671596-671631
  hypo

SEQ ID NO: 437379 - DNA, 138 bp, Homo sapiens; identical to SEQ ID NO: 286284
  chr9:706973-707111
  hypo

SEQ ID NO: 437380 - DNA, 239 bp, Homo sapiens; identical to SEQ ID NO: 45981
  chr9:707165-707404
  hypo

SEQ ID NO: 437381 - DNA, 79 bp, Homo sapiens; identical to SEQ ID NO: 310435
  chr9:738242-738321
  hypo

SEQ ID NO: 437382 - DNA, 95 bp, Homo sapiens; identical to SEQ ID NO: 161534
  chr9:738429-738524
  hypo

SEQ ID NO: 437383 - DNA, 149 bp, Homo sapiens; identical to SEQ ID NO: 260063
  chr9:2086730-2086879
  hypo

SEQ ID NO: 437384 - DNA, 231 bp, Homo sapiens; identical to SEQ ID NO: 260065
  chr9:2170356-2170587
  hypo

SEQ ID NO: 437385 - DNA, 98 bp, Homo sapiens; identical to SEQ ID NO: 260066
  chr9:2170837-2170935
  hypo

SEQ ID NO: 437386 - DNA, 93 bp, Homo sapiens; identical to SEQ ID NO: 260068
  chr9:2272286-2272379
  hypo

SEQ ID NO: 437387 - DNA, 312 bp, Homo sapiens; identical to SEQ ID NO: 260069
  chr9:2717324-2717636
  hypo

SEQ ID NO: 437388 - DNA, 133 bp, Homo sapiens; identical to SEQ ID NO: 212693
  chr9:2718724-2718857
  hypo

SEQ ID NO: 437389 - DNA, 68 bp, Homo sapiens; identical to SEQ ID NO: 260073
  chr9:3262996-3263064
  hypo

SEQ ID NO: 437390 - DNA, 31 bp, Homo sapiens; identical to SEQ ID NO: 260074
  chr9:3469785-3469816
  hypo

SEQ ID NO: 437391 - DNA, 40 bp, Homo sapiens; identical to SEQ ID NO: 260075
  chr9:4622943-4622983
  hypo

SEQ ID NO: 437392 - DNA, 78 bp, Homo sapiens; identical to SEQ ID NO: 212696
  chr9:4714888-4714966
  hypo

SEQ ID NO: 437393 - DNA, 160 bp, Homo sapiens; identical to SEQ ID NO: 260077
  chr9:4804634-4804794
  hypo

SEQ ID NO: 437394 - DNA, 43 bp, Homo sapiens; identical to SEQ ID NO: 212697
  chr9:4987437-4987480
  hypo

SEQ ID NO: 437395 - DNA, 99 bp, Homo sapiens; identical to SEQ ID NO: 201655
  chr9:5022028-5022127
  hypo

SEQ ID NO: 437396 - DNA, 248 bp, Homo sapiens; identical to SEQ ID NO: 201656
  chr9:5054640-5054888
  hypo

SEQ ID NO: 437397 - DNA, 82 bp, Homo sapiens; identical to SEQ ID NO: 201657
  chr9:5069924-5070006
  hypo

SEQ ID NO: 437398 - DNA, 152 bp, Homo sapiens; identical to SEQ ID NO: 201658
  chr9:5080228-5080380
  hypo

SEQ ID NO: 437399 - DNA, 99 bp, Homo sapiens; identical to SEQ ID NO: 201659
  chr9:5081712-5081811
  hypo

SEQ ID NO: 437400 - DNA, 41 bp, Homo sapiens; identical to SEQ ID NO: 260080
  chr9:5418576-5418617
  hypo

SEQ ID NO: 437401 - DNA, 34 bp, Homo sapiens; identical to SEQ ID NO: 250599
  chr9:6183187-6183221
  hypo

SEQ ID NO: 437402 - DNA, 98 bp, Homo sapiens; identical to SEQ ID NO: 212705
  chr9:6868604-6868702
  hypo

SEQ ID NO: 437403 - DNA, 142 bp, Homo sapiens; identical to SEQ ID NO: 260085
  chr9:6883915-6884057
  hypo

SEQ ID NO: 437404 - DNA, 100 bp, Homo sapiens; identical to SEQ ID NO: 212706
  chr9:7028538-7028638
  hypo

SEQ ID NO: 437405 - DNA, 113 bp, Homo sapiens; identical to SEQ ID NO: 260089
  chr9:7032961-7033074
  hypo

SEQ ID NO: 437406 - DNA, 37 bp, Homo sapiens; identical to SEQ ID NO: 212708
  chr9:7164555-7164592
  hypo

SEQ ID NO: 437407 - DNA, 66 bp, Homo sapiens; identical to SEQ ID NO: 212709
  chr9:7164622-7164688
  hypo

SEQ ID NO: 437408 - DNA, 44 bp, Homo sapiens; identical to SEQ ID NO: 260093
  chr9:7392965-7393009
  hypo

SEQ ID NO: 437409 - DNA, 138 bp, Homo sapiens; identical to SEQ ID NO: 212711
  chr9:7785325-7785463
  hypo

SEQ ID NO: 437410 - DNA, 337 bp, Homo sapiens; identical to SEQ ID NO: 286320
  chr9:12775826-12776163
  hypo

SEQ ID NO: 437411 - DNA, 369 bp, Homo sapiens; identical to SEQ ID NO: 286321
  chr9:12776216-12776585
  hypo

SEQ ID NO: 437412 - DNA, 192 bp, Homo sapiens; identical to SEQ ID NO: 260096
  chr9:13753041-13753233
  hypo

SEQ ID NO: 437413 - DNA, 223 bp, Homo sapiens; identical to SEQ ID NO: 201671
  chr9:14313096-14313319
  hypo

SEQ ID NO: 437414 - DNA, 845 bp, Homo sapiens; identical to SEQ ID NO: 201674
  chr9:14322293-14323138
  hypo

SEQ ID NO: 437415 - DNA, 96 bp, Homo sapiens; identical to SEQ ID NO: 260098
  chr9:14355600-14355696
  hypo

SEQ ID NO: 437416 - DNA, 42 bp, Homo sapiens; identical to SEQ ID NO: 260099
  chr9:14462634-14462676
  hypo

SEQ ID NO: 437417 - DNA, 206 bp, Homo sapiens; identical to SEQ ID NO: 212719
  chr9:14607839-14608045
  hypo

SEQ ID NO: 437418 - DNA, 180 bp, Homo sapiens; identical to SEQ ID NO: 260101
  chr9:14796912-14797092
  hypo

SEQ ID NO: 437419 - DNA, 74 bp, Homo sapiens; identical to SEQ ID NO: 310490
  chr9:14974117-14974191
  hypo

SEQ ID NO: 437420 - DNA, 34 bp, Homo sapiens; identical to SEQ ID NO: 260103
  chr9:14979217-14979251
  hypo

SEQ ID NO: 437421 - DNA, 623 bp, Homo sapiens; identical to SEQ ID NO: 286334
  chr9:15306323-15306946
  hypo

SEQ ID NO: 437422 - DNA, 393 bp, Homo sapiens; identical to SEQ ID NO: 117474
  chr9:15306998-15307391
  hypo

SEQ ID NO: 437423 - DNA, 63 bp, Homo sapiens; identical to SEQ ID NO: 212722
  chr9:15527748-15527811
  hypo

SEQ ID NO: 437424 - DNA, 92 bp, Homo sapiens; identical to SEQ ID NO: 260106
  chr9:15618919-15619011
  hypo

SEQ ID NO: 437425 - DNA, 91 bp, Homo sapiens; identical to SEQ ID NO: 260107
  chr9:16144535-16144626
  hypo

SEQ ID NO: 437426 - DNA, 206 bp, Homo sapiens; identical to SEQ ID NO: 212723
  chr9:16268704-16268910
  hypo

SEQ ID NO: 437427 - DNA, 36 bp, Homo sapiens; identical to SEQ ID NO: 212724
  chr9:16886662-16886698
  hypo

SEQ ID NO: 437428 - DNA, 42 bp, Homo sapiens; identical to SEQ ID NO: 260110
  chr9:17018077-17018119
  hypo

SEQ ID NO: 437429 - DNA, 38 bp, Homo sapiens; identical to SEQ ID NO: 286341
  chr9:17134993-17135031
  hypo

SEQ ID NO: 437430 - DNA, 87 bp, Homo sapiens; identical to SEQ ID NO: 260111
  chr9:17223003-17223090
  hypo

SEQ ID NO: 437431 - DNA, 62 bp, Homo sapiens; identical to SEQ ID NO: 286342
  chr9:17579748-17579810
  hypo

SEQ ID NO: 437432 - DNA, 1125 bp, Homo sapiens; identical to SEQ ID NO: 260112
  chr9:18776738-18777863
  hypo

SEQ ID NO: 437433 - DNA, 180 bp, Homo sapiens; identical to SEQ ID NO: 260113
  chr9:19103984-19104164
  hypo

SEQ ID NO: 437434 - DNA, 32 bp, Homo sapiens; identical to SEQ ID NO: 260115
  chr9:19414878-19414910
  hypo

SEQ ID NO: 437435 - DNA, 44 bp, Homo sapiens; identical to SEQ ID NO: 212726
  chr9:19431391-19431435
  hypo

SEQ ID NO: 437436 - DNA, 1027 bp, Homo sapiens; identical to SEQ ID NO: 420089
  chr9:20621345-20622372
  hypo

SEQ ID NO: 437437 - DNA, 44 bp, Homo sapiens; identical to SEQ ID NO: 260117
  chr9:20778484-20778528
  hypo

SEQ ID NO: 437438 - DNA, 35 bp, Homo sapiens; identical to SEQ ID NO: 223568
  chr9:21032003-21032038
  hypo

SEQ ID NO: 437439 - DNA, 68 bp, Homo sapiens; identical to SEQ ID NO: 223569
  chr9:21802584-21802652
  hypo

SEQ ID NO: 437440 - DNA, 161 bp, Homo sapiens; identical to SEQ ID NO: 286360
  chr9:21995749-21995910
  hypo

SEQ ID NO: 437441 - DNA, 72 bp, Homo sapiens; identical to SEQ ID NO: 286364
  chr9:23821662-23821734
  hypo

SEQ ID NO: 437442 - DNA, 95 bp, Homo sapiens; identical to SEQ ID NO: 286365
  chr9:23822017-23822112
  hypo

SEQ ID NO: 437443 - DNA, 92 bp, Homo sapiens; identical to SEQ ID NO: 286373
  chr9:25677513-25677605
  hypo

SEQ ID NO: 437444 - DNA, 426 bp, Homo sapiens; identical to SEQ ID NO: 286374
  chr9:25677627-25678053
  hypo

SEQ ID NO: 437445 - DNA, 490 bp, Homo sapiens; identical to SEQ ID NO: 286375
  chr9:25678127-25678617
  hypo

SEQ ID NO: 437446 - DNA, 84 bp, Homo sapiens; identical to SEQ ID NO: 260118
  chr9:26936774-26936858
  hypo

SEQ ID NO: 437447 - DNA, 167 bp, Homo sapiens; identical to SEQ ID NO: 212729
  chr9:27340153-27340320
  hypo

SEQ ID NO: 437448 - DNA, 42 bp, Homo sapiens; identical to SEQ ID NO: 260121
  chr9:27380602-27380644
  hypo

SEQ ID NO: 437449 - DNA, 56 bp, Homo sapiens; identical to SEQ ID NO: 212733
  chr9:27610812-27610868
  hypo

SEQ ID NO: 437450 - DNA, 44 bp, Homo sapiens; identical to SEQ ID NO: 212735
  chr9:32481580-32481624
  hypo

SEQ ID NO: 437451 - DNA, 42 bp, Homo sapiens; identical to SEQ ID NO: 260124
  chr9:32516784-32516826
  hypo

SEQ ID NO: 437452 - DNA, 109 bp, Homo sapiens; identical to SEQ ID NO: 260125
  chr9:32632958-32633067
  hypo

SEQ ID NO: 437453 - DNA, 43 bp, Homo sapiens; identical to SEQ ID NO: 212736
  chr9:32999674-32999717
  hypo

SEQ ID NO: 437454 - DNA, 173 bp, Homo sapiens; identical to SEQ ID NO: 260128
  chr9:33019798-33019971
  hypo

SEQ ID NO: 437455 - DNA, 45 bp, Homo sapiens; identical to SEQ ID NO: 212737
  chr9:33077216-33077261
  hypo

SEQ ID NO: 437456 - DNA, 120 bp, Homo sapiens; identical to SEQ ID NO: 260131
  chr9:33077545-33077665
  hypo

SEQ ID NO: 437457 - DNA, 123 bp, Homo sapiens; identical to SEQ ID NO: 212738
  chr9:33136435-33136558
  hypo

SEQ ID NO: 437458 - DNA, 56 bp, Homo sapiens; identical to SEQ ID NO: 212739
  chr9:33136588-33136644
  hypo

SEQ ID NO: 437459 - DNA, 78 bp, Homo sapiens; identical to SEQ ID NO: 260133
  chr9:33299616-33299694
  hypo

SEQ ID NO: 437460 - DNA, 120 bp, Homo sapiens; identical to SEQ ID NO: 260134
  chr9:33411413-33411533
  hypo

SEQ ID NO: 437461 - DNA, 809 bp, Homo sapiens; identical to SEQ ID NO: 260137
  chr9:33442163-33442972
  hypo

SEQ ID NO: 437462 - DNA, 517 bp, Homo sapiens; identical to SEQ ID NO: 260138
  chr9:33464102-33464619
  hypo

SEQ ID NO: 437463 - DNA, 32 bp, Homo sapiens; identical to SEQ ID NO: 212742
  chr9:33834158-33834190
  hypo

SEQ ID NO: 437464 - DNA, 33 bp, Homo sapiens; identical to SEQ ID NO: 260140
  chr9:33862121-33862154
  hypo

SEQ ID NO: 437465 - DNA, 39 bp, Homo sapiens; identical to SEQ ID NO: 212743
  chr9:34050561-34050600
  hypo

SEQ ID NO: 437466 - DNA, 180 bp, Homo sapiens; identical to SEQ ID NO: 260144
  chr9:34062783-34062963
  hypo

SEQ ID NO: 437467 - DNA, 43 bp, Homo sapiens; identical to SEQ ID NO: 260146
  chr9:34148342-34148385
  hypo

SEQ ID NO: 437468 - DNA, 40 bp, Homo sapiens; identical to SEQ ID NO: 260148
  chr9:34230332-34230372
  hypo

SEQ ID NO: 437469 - DNA, 35 bp, Homo sapiens; identical to SEQ ID NO: 212746
  chr9:34276112-34276147
  hypo

SEQ ID NO: 437470 - DNA, 81 bp, Homo sapiens; identical to SEQ ID NO: 212747
  chr9:34316317-34316398
  hypo

SEQ ID NO: 437471 - DNA, 192 bp, Homo sapiens; identical to SEQ ID NO: 260153
  chr9:34401060-34401252
  hypo

SEQ ID NO: 437472 - DNA, 118 bp, Homo sapiens; identical to SEQ ID NO: 310555
  chr9:34574690-34574808
  hypo

SEQ ID NO: 437473 - DNA, 77 bp, Homo sapiens; identical to SEQ ID NO: 201697
  chr9:34646925-34647002
  hypo

SEQ ID NO: 437474 - DNA, 85 bp, Homo sapiens; identical to SEQ ID NO: 212751
  chr9:34971556-34971641
  hypo

SEQ ID NO: 437475 - DNA, 33 bp, Homo sapiens; identical to SEQ ID NO: 201699
  chr9:35072284-35072317
  hypo

SEQ ID NO: 437476 - DNA, 73 bp, Homo sapiens; identical to SEQ ID NO: 212754
  chr9:35608230-35608303
  hypo

SEQ ID NO: 437477 - DNA, 284 bp, Homo sapiens; identical to SEQ ID NO: 260157
  chr9:35609216-35609500
  hypo

SEQ ID NO: 437478 - DNA, 145 bp, Homo sapiens; identical to SEQ ID NO: 260158
  chr9:35649869-35650014
  hypo

SEQ ID NO: 437479 - DNA, 192 bp, Homo sapiens; identical to SEQ ID NO: 260159
  chr9:35689364-35689556
  hypo

SEQ ID NO: 437480 - DNA, 145 bp, Homo sapiens; identical to SEQ ID NO: 201705
  chr9:35814690-35814835
  hypo

SEQ ID NO: 437481 - DNA, 317 bp, Homo sapiens; identical to SEQ ID NO: 260162
  chr9:35869775-35870092
  hypo

SEQ ID NO: 437482 - DNA, 112 bp, Homo sapiens; identical to SEQ ID NO: 260163
  chr9:36118828-36118940
  hypo

SEQ ID NO: 437483 - DNA, 35 bp, Homo sapiens; identical to SEQ ID NO: 260164
  chr9:36165535-36165570
  hypo

SEQ ID NO: 437484 - DNA, 70 bp, Homo sapiens; identical to SEQ ID NO: 201708
  chr9:36257445-36257515
  hypo

SEQ ID NO: 437485 - DNA, 76 bp, Homo sapiens; identical to SEQ ID NO: 260165
  chr9:36303861-36303937
  hypo

SEQ ID NO: 437486 - DNA, 32 bp, Homo sapiens; identical to SEQ ID NO: 310574
  chr9:36318335-36318367
  hypo

SEQ ID NO: 437487 - DNA, 81 bp, Homo sapiens; identical to SEQ ID NO: 260167
  chr9:36320468-36320549
  hypo

SEQ ID NO: 437488 - DNA, 120 bp, Homo sapiens; identical to SEQ ID NO: 260168
  chr9:36478391-36478511
  hypo

SEQ ID NO: 437489 - DNA, 155 bp, Homo sapiens; identical to SEQ ID NO: 260172
  chr9:37119445-37119600
  hypo

SEQ ID NO: 437490 - DNA, 37 bp, Homo sapiens; identical to SEQ ID NO: 260173
  chr9:37122905-37122942
  hypo

SEQ ID NO: 437491 - DNA, 42 bp, Homo sapiens; identical to SEQ ID NO: 260174
  chr9:37380693-37380735
  hypo

SEQ ID NO: 437492 - DNA, 142 bp, Homo sapiens; identical to SEQ ID NO: 260175
  chr9:37409148-37409290
  hypo

SEQ ID NO: 437493 - DNA, 490 bp, Homo sapiens; identical to SEQ ID NO: 212764
  chr9:37414524-37415014
  hypo

SEQ ID NO: 437494 - DNA, 99 bp, Homo sapiens; identical to SEQ ID NO: 212765
  chr9:37432303-37432402
  hypo

SEQ ID NO: 437495 - DNA, 84 bp, Homo sapiens; identical to SEQ ID NO: 212766
  chr9:37468277-37468361
  hypo

SEQ ID NO: 437496 - DNA, 137 bp, Homo sapiens; identical to SEQ ID NO: 260180
  chr9:37515931-37516068
  hypo

SEQ ID NO: 437497 - DNA, 98 bp, Homo sapiens; identical to SEQ ID NO: 212767
  chr9:37778484-37778582
  hypo

SEQ ID NO: 437498 - DNA, 82 bp, Homo sapiens; identical to SEQ ID NO: 212768
  chr9:37871179-37871261
  hypo

SEQ ID NO: 437499 - DNA, 437 bp, Homo sapiens; identical to SEQ ID NO: 260184
  chr9:37935344-37935781
  hypo

SEQ ID NO: 437500 - DNA, 52 bp, Homo sapiens; identical to SEQ ID NO: 260185
  chr9:37948329-37948381
  hypo

SEQ ID NO: 437501 - DNA, 88 bp, Homo sapiens; identical to SEQ ID NO: 212770
  chr9:37948878-37948966
  hypo

SEQ ID NO: 437502 - DNA, 158 bp, Homo sapiens; identical to SEQ ID NO: 260188
  chr9:37955883-37956041
  hypo

SEQ ID NO: 437503 - DNA, 45 bp, Homo sapiens; identical to SEQ ID NO: 260189
  chr9:37965536-37965581
  hypo

SEQ ID NO: 437504 - DNA, 301 bp, Homo sapiens; identical to SEQ ID NO: 260190
  chr9:37974530-37974831
  hypo

SEQ ID NO: 437505 - DNA, 34 bp, Homo sapiens; identical to SEQ ID NO: 212771
  chr9:37985465-37985499
  hypo

SEQ ID NO: 437506 - DNA, 45 bp, Homo sapiens; identical to SEQ ID NO: 286428
  chr9:37998720-37998765
  hypo

SEQ ID NO: 437507 - DNA, 85 bp, Homo sapiens; identical to SEQ ID NO: 260192
  chr9:38005202-38005287
  hypo

SEQ ID NO: 437508 - DNA, 184 bp, Homo sapiens; identical to SEQ ID NO: 260193
  chr9:38012923-38013107
  hypo

SEQ ID NO: 437509 - DNA, 258 bp, Homo sapiens; identical to SEQ ID NO: 260194
  chr9:38022309-38022567
  hypo

SEQ ID NO: 437510 - DNA, 80 bp, Homo sapiens; identical to SEQ ID NO: 260195
  chr9:38033536-38033616
  hypo

SEQ ID NO: 437511 - DNA, 88 bp, Homo sapiens; identical to SEQ ID NO: 260196
  chr9:38033980-38034068
  hypo

SEQ ID NO: 437512 - DNA, 207 bp, Homo sapiens; identical to SEQ ID NO: 260197
  chr9:38042761-38042968
  hypo

SEQ ID NO: 437513 - DNA, 151 bp, Homo sapiens; identical to SEQ ID NO: 260198
  chr9:38045591-38045742
  hypo

SEQ ID NO: 437514 - DNA, 413 bp, Homo sapiens; identical to SEQ ID NO: 201713
  chr9:38067708-38068121
  hypo

SEQ ID NO: 437515 - DNA, 749 bp, Homo sapiens; identical to SEQ ID NO: 201714
  chr9:38068158-38068907
  hypo

SEQ ID NO: 437516 - DNA, 92 bp, Homo sapiens; identical to SEQ ID NO: 260199
  chr9:38075105-38075197
  hypo

SEQ ID NO: 437517 - DNA, 33 bp, Homo sapiens; identical to SEQ ID NO: 212774
  chr9:38131932-38131965
  hypo

SEQ ID NO: 437518 - DNA, 178 bp, Homo sapiens; identical to SEQ ID NO: 260201
  chr9:38290209-38290387
  hypo

SEQ ID NO: 437519 - DNA, 154 bp, Homo sapiens; identical to SEQ ID NO: 260202
  chr9:38397125-38397279
  hypo

SEQ ID NO: 437520 - DNA, 36 bp, Homo sapiens; identical to SEQ ID NO: 260203
  chr9:38695225-38695261
  hypo

SEQ ID NO: 437521 - DNA, 36 bp, Homo sapiens; identical to SEQ ID NO: 260204
  chr9:38695501-38695537
  hypo

SEQ ID NO: 437522 - DNA, 33 bp, Homo sapiens; identical to SEQ ID NO: 260205
  chr9:39020901-39020934
  hypo

SEQ ID NO: 437523 - DNA, 44 bp, Homo sapiens; identical to SEQ ID NO: 260206
  chr9:43617175-43617219
  hypo

SEQ ID NO: 437524 - DNA, 40 bp, Homo sapiens; identical to SEQ ID NO: 260207
  chr9:71200385-71200425
  hypo

SEQ ID NO: 437525 - DNA, 77 bp, Homo sapiens; identical to SEQ ID NO: 260208
  chr9:71230118-71230195
  hypo

SEQ ID NO: 437526 - DNA, 42 bp, Homo sapiens; identical to SEQ ID NO: 212775
  chr9:71455000-71455042
  hypo

SEQ ID NO: 437527 - DNA, 63 bp, Homo sapiens; identical to SEQ ID NO: 260210
  chr9:71482150-71482213
  hypo

SEQ ID NO: 437528 - DNA, 43 bp, Homo sapiens; identical to SEQ ID NO: 260211
  chr9:71495144-71495187
  hypo

SEQ ID NO: 437529 - DNA, 82 bp, Homo sapiens; identical to SEQ ID NO: 260213
  chr9:71615753-71615835
  hypo

SEQ ID NO: 437530 - DNA, 35 bp, Homo sapiens; identical to SEQ ID NO: 212776
  chr9:71620576-71620611
  hypo

SEQ ID NO: 437531 - DNA, 102 bp, Homo sapiens; identical to SEQ ID NO: 260216
  chr9:71664072-71664174
  hypo

SEQ ID NO: 437532 - DNA, 157 bp, Homo sapiens; identical to SEQ ID NO: 260217
  chr9:71669729-71669886
  hypo

SEQ ID NO: 437533 - DNA, 42 bp, Homo sapiens; identical to SEQ ID NO: 223596
  chr9:71736563-71736605
  hypo

SEQ ID NO: 437534 - DNA, 35 bp, Homo sapiens; identical to SEQ ID NO: 260220
  chr9:71800810-71800845
  hypo

SEQ ID NO: 437535 - DNA, 35 bp, Homo sapiens; identical to SEQ ID NO: 260221
  chr9:71800965-71801000
  hypo

SEQ ID NO: 437536 - DNA, 33 bp, Homo sapiens; identical to SEQ ID NO: 260222
  chr9:72333375-72333408
  hypo

SEQ ID NO: 437537 - DNA, 111 bp, Homo sapiens; identical to SEQ ID NO: 260223
  chr9:72832133-72832244
  hypo

SEQ ID NO: 437538 - DNA, 178 bp, Homo sapiens; identical to SEQ ID NO: 286456
  chr9:72874088-72874266
  hypo

SEQ ID NO: 437539 - DNA, 385 bp, Homo sapiens; identical to SEQ ID NO: 201725
  chr9:73027584-73027969
  hypo

SEQ ID NO: 437540 - DNA, 733 bp, Homo sapiens; identical to SEQ ID NO: 201726
  chr9:73028305-73029038
  hypo

SEQ ID NO: 437541 - DNA, 34 bp, Homo sapiens; identical to SEQ ID NO: 260224
  chr9:73119015-73119049
  hypo

SEQ ID NO: 437542 - DNA, 60 bp, Homo sapiens; identical to SEQ ID NO: 260225
  chr9:73152153-73152213
  hypo

SEQ ID NO: 437543 - DNA, 35 bp, Homo sapiens; identical to SEQ ID NO: 260226
  chr9:73984598-73984633
  hypo

SEQ ID NO: 437544 - DNA, 38 bp, Homo sapiens; identical to SEQ ID NO: 260227
  chr9:74418835-74418873
  hypo

SEQ ID NO: 437545 - DNA, 96 bp, Homo sapiens; identical to SEQ ID NO: 420164
  chr9:74640165-74640261
  hypo

SEQ ID NO: 437546 - DNA, 31 bp, Homo sapiens; identical to SEQ ID NO: 260228
  chr9:74640499-74640530
  hypo

SEQ ID NO: 437547 - DNA, 154 bp, Homo sapiens; identical to SEQ ID NO: 260229
  chr9:74794876-74795030
  hypo

SEQ ID NO: 437548 - DNA, 213 bp, Homo sapiens; identical to SEQ ID NO: 212782
  chr9:74853849-74854062
  hypo

SEQ ID NO: 437549 - DNA, 162 bp, Homo sapiens; identical to SEQ ID NO: 260231
  chr9:75005076-75005238
  hypo

SEQ ID NO: 437550 - DNA, 97 bp, Homo sapiens; identical to SEQ ID NO: 260232
  chr9:75049396-75049493
  hypo

SEQ ID NO: 437551 - DNA, 206 bp, Homo sapiens; identical to SEQ ID NO: 260233
  chr9:75083052-75083258
  hypo

SEQ ID NO: 437552 - DNA, 100 bp, Homo sapiens; identical to SEQ ID NO: 260234
  chr9:75136042-75136142
  hypo

SEQ ID NO: 437553 - DNA, 167 bp, Homo sapiens; identical to SEQ ID NO: 260236
  chr9:75429003-75429170
  hypo

SEQ ID NO: 437554 - DNA, 84 bp, Homo sapiens; identical to SEQ ID NO: 310653
  chr9:75545774-75545858
  hypo

SEQ ID NO: 437555 - DNA, 41 bp, Homo sapiens; identical to SEQ ID NO: 310654
  chr9:75545888-75545929
  hypo

SEQ ID NO: 437556 - DNA, 124 bp, Homo sapiens; identical to SEQ ID NO: 260238
  chr9:75580431-75580555
  hypo

SEQ ID NO: 437557 - DNA, 76 bp, Homo sapiens; identical to SEQ ID NO: 212783
  chr9:75715152-75715228
  hypo

SEQ ID NO: 437558 - DNA, 34 bp, Homo sapiens; identical to SEQ ID NO: 260241
  chr9:76744464-76744498
  hypo

SEQ ID NO: 437559 - DNA, 157 bp, Homo sapiens; identical to SEQ ID NO: 260242
  chr9:77257380-77257537
  hypo

SEQ ID NO: 437560 - DNA, 32 bp, Homo sapiens; identical to SEQ ID NO: 260243
  chr9:77401360-77401392
  hypo

SEQ ID NO: 437561 - DNA, 31 bp, Homo sapiens; identical to SEQ ID NO: 260244
  chr9:78017959-78017990
  hypo

SEQ ID NO: 437562 - DNA, 41 bp, Homo sapiens; identical to SEQ ID NO: 260245
  chr9:78550279-78550320
  hypo

SEQ ID NO: 437563 - DNA, 155 bp, Homo sapiens; identical to SEQ ID NO: 260247
  chr9:78682860-78683015
  hypo

SEQ ID NO: 437564 - DNA, 135 bp, Homo sapiens; identical to SEQ ID NO: 212785
  chr9:78686691-78686826
  hypo

SEQ ID NO: 437565 - DNA, 41 bp, Homo sapiens; identical to SEQ ID NO: 212786
  chr9:78775008-78775049
  hypo

SEQ ID NO: 437566 - DNA, 39 bp, Homo sapiens; identical to SEQ ID NO: 212787
  chr9:78866884-78866923
  hypo

SEQ ID NO: 437567 - DNA, 66 bp, Homo sapiens; identical to SEQ ID NO: 260251
  chr9:78989902-78989968
  hypo

SEQ ID NO: 437568 - DNA, 40 bp, Homo sapiens; identical to SEQ ID NO: 260252
  chr9:79012636-79012676
  hypo

SEQ ID NO: 437569 - DNA, 180 bp, Homo sapiens; identical to SEQ ID NO: 260254
  chr9:79197274-79197454
  hypo

SEQ ID NO: 437570 - DNA, 41 bp, Homo sapiens; identical to SEQ ID NO: 212788
  chr9:79230962-79231003
  hypo

SEQ ID NO: 437571 - DNA, 109 bp, Homo sapiens; identical to SEQ ID NO: 260256
  chr9:79398985-79399094
  hypo

SEQ ID NO: 437572 - DNA, 36 bp, Homo sapiens; identical to SEQ ID NO: 212789
  chr9:79448382-79448418
  hypo

SEQ ID NO: 437573 - DNA, 165 bp, Homo sapiens; identical to SEQ ID NO: 260259
  chr9:80064832-80064997
  hypo

SEQ ID NO: 437574 - DNA, 208 bp, Homo sapiens; identical to SEQ ID NO: 260260
  chr9:80076052-80076260
  hypo

SEQ ID NO: 437575 - DNA, 90 bp, Homo sapiens; identical to SEQ ID NO: 212793
  chr9:80116554-80116644
  hypo

SEQ ID NO: 437576 - DNA, 205 bp, Homo sapiens; identical to SEQ ID NO: 260262
  chr9:80137040-80137245
  hypo

SEQ ID NO: 437577 - DNA, 43 bp, Homo sapiens; identical to SEQ ID NO: 260263
  chr9:80269586-80269629
  hypo

SEQ ID NO: 437578 - DNA, 89 bp, Homo sapiens; identical to SEQ ID NO: 212795
  chr9:80272830-80272919
  hypo

SEQ ID NO: 437579 - DNA, 37 bp, Homo sapiens; identical to SEQ ID NO: 212796
  chr9:80304150-80304187
  hypo

SEQ ID NO: 437580 - DNA, 34 bp, Homo sapiens; identical to SEQ ID NO: 212797
  chr9:80315386-80315420
  hypo

SEQ ID NO: 437581 - DNA, 41 bp, Homo sapiens; identical to SEQ ID NO: 212798
  chr9:80343172-80343213
  hypo

SEQ ID NO: 437582 - DNA, 180 bp, Homo sapiens; identical to SEQ ID NO: 212799
  chr9:80390584-80390764
  hypo

SEQ ID NO: 437583 - DNA, 41 bp, Homo sapiens; identical to SEQ ID NO: 260269
  chr9:80420642-80420683
  hypo

SEQ ID NO: 437584 - DNA, 89 bp, Homo sapiens; identical to SEQ ID NO: 212801
  chr9:80533774-80533863
  hypo

SEQ ID NO: 437585 - DNA, 87 bp, Homo sapiens; identical to SEQ ID NO: 260273
  chr9:80544725-80544812
  hypo

SEQ ID NO: 437586 - DNA, 158 bp, Homo sapiens; identical to SEQ ID NO: 212802
  chr9:80546076-80546234
  hypo

SEQ ID NO: 437587 - DNA, 203 bp, Homo sapiens; identical to SEQ ID NO: 260275
  chr9:80563224-80563427
  hypo

SEQ ID NO: 437588 - DNA, 88 bp, Homo sapiens; identical to SEQ ID NO: 212803
  chr9:80570363-80570451
  hypo

SEQ ID NO: 437589 - DNA, 79 bp, Homo sapiens; identical to SEQ ID NO: 260277
  chr9:80591582-80591661
  hypo

SEQ ID NO: 437590 - DNA, 76 bp, Homo sapiens; identical to SEQ ID NO: 260280
  chr9:81897888-81897964
  hypo

SEQ ID NO: 437591 - DNA, 37 bp, Homo sapiens; identical to SEQ ID NO: 260281
  chr9:82082370-82082407
  hypo

SEQ ID NO: 437592 - DNA, 505 bp, Homo sapiens; identical to SEQ ID NO: 398170
  chr9:82186172-82186677
  hypo

SEQ ID NO: 437593 - DNA, 492 bp, Homo sapiens; identical to SEQ ID NO: 286497
  chr9:82187755-82188247
  hypo

SEQ ID NO: 437594 - DNA, 49 bp, Homo sapiens; identical to SEQ ID NO: 260283
  chr9:82282622-82282671
  hypo

SEQ ID NO: 437595 - DNA, 120 bp, Homo sapiens; identical to SEQ ID NO: 260284
  chr9:84130018-84130138
  hypo

SEQ ID NO: 437596 - DNA, 186 bp, Homo sapiens; identical to SEQ ID NO: 260285
  chr9:84220198-84220384
  hypo

SEQ ID NO: 437597 - DNA, 34 bp, Homo sapiens; identical to SEQ ID NO: 260286
  chr9:84281396-84281430
  hypo

SEQ ID NO: 437598 - DNA, 159 bp, Homo sapiens; identical to SEQ ID NO: 310713
  chr9:84294990-84295149
  hypo

SEQ ID NO: 437599 - DNA, 1035 bp, Homo sapiens; identical to SEQ ID NO: 286499
  chr9:84302131-84303166
  hypo

SEQ ID NO: 437600 - DNA, 673 bp, Homo sapiens; identical to SEQ ID NO: 201755
  chr9:84303267-84303940
  hypo

SEQ ID NO: 437601 - DNA, 222 bp, Homo sapiens; identical to SEQ ID NO: 260288
  chr9:84441561-84441783
  hypo

SEQ ID NO: 437602 - DNA, 169 bp, Homo sapiens; identical to SEQ ID NO: 212813
  chr9:84530343-84530512
  hypo

SEQ ID NO: 437603 - DNA, 99 bp, Homo sapiens; identical to SEQ ID NO: 260290
  chr9:85673370-85673469
  hypo

SEQ ID NO: 437604 - DNA, 68 bp, Homo sapiens; identical to SEQ ID NO: 286504
  chr9:86152304-86152372
  hypo

SEQ ID NO: 437605 - DNA, 368 bp, Homo sapiens; identical to SEQ ID NO: 286505
  chr9:86152964-86153332
  hypo

SEQ ID NO: 437606 - DNA, 339 bp, Homo sapiens; identical to SEQ ID NO: 201757
  chr9:86238306-86238645
  hypo

SEQ ID NO: 437607 - DNA, 188 bp, Homo sapiens; identical to SEQ ID NO: 260292
  chr9:86586839-86587027
  hypo

SEQ ID NO: 437608 - DNA, 33 bp, Homo sapiens; identical to SEQ ID NO: 212817
  chr9:86600601-86600634
  hypo

SEQ ID NO: 437609 - DNA, 33 bp, Homo sapiens; identical to SEQ ID NO: 260295
  chr9:87655019-87655052
  hypo

SEQ ID NO: 437610 - DNA, 120 bp, Homo sapiens; identical to SEQ ID NO: 260296
  chr9:87904207-87904327
  hypo

SEQ ID NO: 437611 - DNA, 59 bp, Homo sapiens; identical to SEQ ID NO: 420188
  chr9:88356012-88356071
  hypo

SEQ ID NO: 437612 - DNA, 81 bp, Homo sapiens; identical to SEQ ID NO: 260297
  chr9:88490935-88491016
  hypo

SEQ ID NO: 437613 - DNA, 185 bp, Homo sapiens; identical to SEQ ID NO: 260298
  chr9:88651536-88651721
  hypo

SEQ ID NO: 437614 - DNA, 41 bp, Homo sapiens; identical to SEQ ID NO: 260300
  chr9:88672701-88672742
  hypo

SEQ ID NO: 437615 - DNA, 248 bp, Homo sapiens; identical to SEQ ID NO: 212818
  chr9:88694097-88694345
  hypo

SEQ ID NO: 437616 - DNA, 108 bp, Homo sapiens; identical to SEQ ID NO: 212819
  chr9:88694438-88694546
  hypo

SEQ ID NO: 437617 - DNA, 42 bp, Homo sapiens; identical to SEQ ID NO: 260302
  chr9:88712487-88712529
  hypo

SEQ ID NO: 437618 - DNA, 45 bp, Homo sapiens; identical to SEQ ID NO: 260303
  chr9:88977773-88977818
  hypo

SEQ ID NO: 437619 - DNA, 33 bp, Homo sapiens; identical to SEQ ID NO: 212820
  chr9:89301326-89301359
  hypo

SEQ ID NO: 437620 - DNA, 219 bp, Homo sapiens; identical to SEQ ID NO: 201762
  chr9:89560475-89560694
  hypo

SEQ ID NO: 437621 - DNA, 289 bp, Homo sapiens; identical to SEQ ID NO: 420192
  chr9:89562273-89562562
  hypo

SEQ ID NO: 437622 - DNA, 405 bp, Homo sapiens; identical to SEQ ID NO: 212824
  chr9:89699972-89700377
  hypo

SEQ ID NO: 437623 - DNA, 51 bp, Homo sapiens; identical to SEQ ID NO: 260306
  chr9:90112283-90112334
  hypo

SEQ ID NO: 437624 - DNA, 66 bp, Homo sapiens; identical to SEQ ID NO: 286520
  chr9:90112364-90112430
  hypo

SEQ ID NO: 437625 - DNA, 105 bp, Homo sapiens; identical to SEQ ID NO: 310745
  chr9:90287766-90287871
  hypo

SEQ ID NO: 437626 - DNA, 46 bp, Homo sapiens; identical to SEQ ID NO: 260308
  chr9:90290415-90290461
  hypo

SEQ ID NO: 437627 - DNA, 149 bp, Homo sapiens; identical to SEQ ID NO: 212827
  chr9:90346011-90346160
  hypo

SEQ ID NO: 437628 - DNA, 204 bp, Homo sapiens; identical to SEQ ID NO: 260310
  chr9:90439088-90439292
  hypo

SEQ ID NO: 437629 - DNA, 209 bp, Homo sapiens; identical to SEQ ID NO: 260311
  chr9:90457941-90458150
  hypo

SEQ ID NO: 437630 - DNA, 137 bp, Homo sapiens; identical to SEQ ID NO: 260312
  chr9:90472237-90472374
  hypo

SEQ ID NO: 437631 - DNA, 300 bp, Homo sapiens; identical to SEQ ID NO: 260313
  chr9:90472434-90472734
  hypo

SEQ ID NO: 437632 - DNA, 533 bp, Homo sapiens; identical to SEQ ID NO: 260314
  chr9:90474024-90474557
  hypo

SEQ ID NO: 437633 - DNA, 34 bp, Homo sapiens; identical to SEQ ID NO: 212828
  chr9:90482724-90482758
  hypo

SEQ ID NO: 437634 - DNA, 34 bp, Homo sapiens; identical to SEQ ID NO: 212829
  chr9:90482818-90482852
  hypo

SEQ ID NO: 437635 - DNA, 224 bp, Homo sapiens; identical to SEQ ID NO: 260317
  chr9:90483167-90483391
  hypo

SEQ ID NO: 437636 - DNA, 36 bp, Homo sapiens; identical to SEQ ID NO: 260318
  chr9:90485107-90485143
  hypo

SEQ ID NO: 437637 - DNA, 216 bp, Homo sapiens; identical to SEQ ID NO: 260319
  chr9:90485383-90485599
  hypo

SEQ ID NO: 437638 - DNA, 203 bp, Homo sapiens; identical to SEQ ID NO: 260320
  chr9:90499879-90500082
  hypo

SEQ ID NO: 437639 - DNA, 169 bp, Homo sapiens; identical to SEQ ID NO: 260321
  chr9:90500553-90500722
  hypo

SEQ ID NO: 437640 - DNA, 37 bp, Homo sapiens; identical to SEQ ID NO: 260322
  chr9:90583824-90583861
  hypo

SEQ ID NO: 437641 - DNA, 140 bp, Homo sapiens; identical to SEQ ID NO: 260323
  chr9:90670703-90670843
  hypo

SEQ ID NO: 437642 - DNA, 153 bp, Homo sapiens; identical to SEQ ID NO: 260324
  chr9:90888548-90888701
  hypo

SEQ ID NO: 437643 - DNA, 291 bp, Homo sapiens; identical to SEQ ID NO: 212830
  chr9:91119034-91119325
  hypo

SEQ ID NO: 437644 - DNA, 102 bp, Homo sapiens; identical to SEQ ID NO: 260326
  chr9:91138737-91138839
  hypo

SEQ ID NO: 437645 - DNA, 47 bp, Homo sapiens; identical to SEQ ID NO: 260327
  chr9:91140238-91140285
  hypo

SEQ ID NO: 437646 - DNA, 98 bp, Homo sapiens; identical to SEQ ID NO: 260328
  chr9:91161619-91161717
  hypo

SEQ ID NO: 437647 - DNA, 94 bp, Homo sapiens; identical to SEQ ID NO: 260329
  chr9:91187465-91187559
  hypo

SEQ ID NO: 437648 - DNA, 175 bp, Homo sapiens; identical to SEQ ID NO: 260330
  chr9:91312334-91312509
  hypo

SEQ ID NO: 437649 - DNA, 86 bp, Homo sapiens; identical to SEQ ID NO: 212831
  chr9:91614962-91615048
  hypo

SEQ ID NO: 437650 - DNA, 367 bp, Homo sapiens; identical to SEQ ID NO: 260332
  chr9:91616951-91617318
  hypo

SEQ ID NO: 437651 - DNA, 219 bp, Homo sapiens; identical to SEQ ID NO: 260333
  chr9:91663695-91663914
  hypo

SEQ ID NO: 437652 - DNA, 96 bp, Homo sapiens; identical to SEQ ID NO: 260334
  chr9:91666527-91666623
  hypo

SEQ ID NO: 437653 - DNA, 134 bp, Homo sapiens; identical to SEQ ID NO: 212835
  chr9:91997068-91997202
  hypo

SEQ ID NO: 437654 - DNA, 249 bp, Homo sapiens; identical to SEQ ID NO: 212836
  chr9:91997531-91997780
  hypo

SEQ ID NO: 437655 - DNA, 247 bp, Homo sapiens; identical to SEQ ID NO: 260339
  chr9:92049177-92049424
  hypo

SEQ ID NO: 437656 - DNA, 321 bp, Homo sapiens; identical to SEQ ID NO: 260340
  chr9:92053270-92053591
  hypo

SEQ ID NO: 437657 - DNA, 145 bp, Homo sapiens; identical to SEQ ID NO: 260341
  chr9:92056121-92056266
  hypo

SEQ ID NO: 437658 - DNA, 253 bp, Homo sapiens; identical to SEQ ID NO: 260342
  chr9:92058330-92058583
  hypo

SEQ ID NO: 437659 - DNA, 123 bp, Homo sapiens; identical to SEQ ID NO: 260343
  chr9:92075500-92075623
  hypo

SEQ ID NO: 437660 - DNA, 51 bp, Homo sapiens; identical to SEQ ID NO: 212839
  chr9:92140641-92140692
  hypo

SEQ ID NO: 437661 - DNA, 207 bp, Homo sapiens; identical to SEQ ID NO: 260345
  chr9:92178183-92178390
  hypo

SEQ ID NO: 437662 - DNA, 40 bp, Homo sapiens; identical to SEQ ID NO: 260347
  chr9:92231503-92231543
  hypo

SEQ ID NO: 437663 - DNA, 372 bp, Homo sapiens; identical to SEQ ID NO: 260348
  chr9:92235736-92236108
  hypo

SEQ ID NO: 437664 - DNA, 167 bp, Homo sapiens; identical to SEQ ID NO: 212842
  chr9:92237959-92238126
  hypo

SEQ ID NO: 437665 - DNA, 212 bp, Homo sapiens; identical to SEQ ID NO: 260350
  chr9:92249014-92249226
  hypo

SEQ ID NO: 437666 - DNA, 67 bp, Homo sapiens; identical to SEQ ID NO: 310789
  chr9:92277577-92277644
  hypo

SEQ ID NO: 437667 - DNA, 98 bp, Homo sapiens; identical to SEQ ID NO: 162229
  chr9:92277734-92277832
  hypo

SEQ ID NO: 437668 - DNA, 200 bp, Homo sapiens; identical to SEQ ID NO: 260352
  chr9:92725474-92725674
  hypo

SEQ ID NO: 437669 - DNA, 78 bp, Homo sapiens; identical to SEQ ID NO: 260353
  chr9:92776739-92776817
  hypo

SEQ ID NO: 437670 - DNA, 239 bp, Homo sapiens; identical to SEQ ID NO: 260355
  chr9:93156039-93156278
  hypo

SEQ ID NO: 437671 - DNA, 242 bp, Homo sapiens; identical to SEQ ID NO: 260357
  chr9:93676597-93676839
  hypo

SEQ ID NO: 437672 - DNA, 158 bp, Homo sapiens; identical to SEQ ID NO: 260358
  chr9:93727466-93727624
  hypo

SEQ ID NO: 437673 - DNA, 315 bp, Homo sapiens; identical to SEQ ID NO: 260359
  chr9:93733024-93733339
  hypo

SEQ ID NO: 437674 - DNA, 42 bp, Homo sapiens; identical to SEQ ID NO: 260360
  chr9:93734262-93734304
  hypo

SEQ ID NO: 437675 - DNA, 120 bp, Homo sapiens; identical to SEQ ID NO: 260361
  chr9:94076014-94076134
  hypo

SEQ ID NO: 437676 - DNA, 223 bp, Homo sapiens; identical to SEQ ID NO: 212845
  chr9:94124707-94124930
  hypo

SEQ ID NO: 437677 - DNA, 75 bp, Homo sapiens; identical to SEQ ID NO: 260363
  chr9:94475885-94475960
  hypo

SEQ ID NO: 437678 - DNA, 393 bp, Homo sapiens; identical to SEQ ID NO: 260364
  chr9:94486727-94487120
  hypo

SEQ ID NO: 437679 - DNA, 123 bp, Homo sapiens; identical to SEQ ID NO: 310805
  chr9:94572962-94573085
  hypo

SEQ ID NO: 437680 - DNA, 39 bp, Homo sapiens; identical to SEQ ID NO: 212847
  chr9:94834642-94834681
  hypo

SEQ ID NO: 437681 - DNA, 210 bp, Homo sapiens; identical to SEQ ID NO: 260367
  chr9:94904617-94904827
  hypo

SEQ ID NO: 437682 - DNA, 100 bp, Homo sapiens; identical to SEQ ID NO: 212848
  chr9:95003570-95003670
  hypo

SEQ ID NO: 437683 - DNA, 38 bp, Homo sapiens; identical to SEQ ID NO: 212849
  chr9:95010672-95010710
  hypo

SEQ ID NO: 437684 - DNA, 104 bp, Homo sapiens; identical to SEQ ID NO: 212850
  chr9:95039646-95039750
  hypo

SEQ ID NO: 437685 - DNA, 226 bp, Homo sapiens; identical to SEQ ID NO: 260371
  chr9:95376169-95376395
  hypo

SEQ ID NO: 437686 - DNA, 96 bp, Homo sapiens; identical to SEQ ID NO: 260372
  chr9:95380371-95380467
  hypo

SEQ ID NO: 437687 - DNA, 231 bp, Homo sapiens; identical to SEQ ID NO: 260374
  chr9:95403858-95404089
  hypo

SEQ ID NO: 437688 - DNA, 220 bp, Homo sapiens; identical to SEQ ID NO: 310815
  chr9:95416105-95416325
  hypo

SEQ ID NO: 437689 - DNA, 45 bp, Homo sapiens; identical to SEQ ID NO: 260376
  chr9:95416854-95416899
  hypo

SEQ ID NO: 437690 - DNA, 65 bp, Homo sapiens; identical to SEQ ID NO: 212851
  chr9:95417140-95417205
  hypo

SEQ ID NO: 437691 - DNA, 605 bp, Homo sapiens; identical to SEQ ID NO: 212853
  chr9:95477240-95477845
  hypo

SEQ ID NO: 437692 - DNA, 50 bp, Homo sapiens; identical to SEQ ID NO: 310822
  chr9:95501276-95501326
  hypo

SEQ ID NO: 437693 - DNA, 99 bp, Homo sapiens; identical to SEQ ID NO: 310823
  chr9:95501356-95501455
  hypo

SEQ ID NO: 437694 - DNA, 60 bp, Homo sapiens; identical to SEQ ID NO: 201782
  chr9:95570721-95570781
  hypo

SEQ ID NO: 437695 - DNA, 85 bp, Homo sapiens; identical to SEQ ID NO: 260383
  chr9:95676050-95676135
  hypo

SEQ ID NO: 437696 - DNA, 203 bp, Homo sapiens; identical to SEQ ID NO: 260384
  chr9:95687862-95688065
  hypo

SEQ ID NO: 437697 - DNA, 91 bp, Homo sapiens; identical to SEQ ID NO: 260385
  chr9:95826254-95826345
  hypo

SEQ ID NO: 437698 - DNA, 248 bp, Homo sapiens; identical to SEQ ID NO: 260386
  chr9:95899553-95899801
  hypo

SEQ ID NO: 437699 - DNA, 34 bp, Homo sapiens; identical to SEQ ID NO: 260388
  chr9:95952714-95952748
  hypo

SEQ ID NO: 437700 - DNA, 396 bp, Homo sapiens; identical to SEQ ID NO: 260389
  chr9:96054920-96055316
  hypo

SEQ ID NO: 437701 - DNA, 34 bp, Homo sapiens; identical to SEQ ID NO: 260391
  chr9:96070699-96070733
  hypo

SEQ ID NO: 437702 - DNA, 103 bp, Homo sapiens; identical to SEQ ID NO: 260392
  chr9:96084519-96084622
  hypo

SEQ ID NO: 437703 - DNA, 36 bp, Homo sapiens; identical to SEQ ID NO: 212859
  chr9:96230446-96230482
  hypo

SEQ ID NO: 437704 - DNA, 178 bp, Homo sapiens; identical to SEQ ID NO: 212860
  chr9:96256151-96256329
  hypo

SEQ ID NO: 437705 - DNA, 410 bp, Homo sapiens; identical to SEQ ID NO: 212861
  chr9:96275710-96276120
  hypo

SEQ ID NO: 437706 - DNA, 187 bp, Homo sapiens; identical to SEQ ID NO: 212862
  chr9:96294481-96294668
  hypo

SEQ ID NO: 437707 - DNA, 246 bp, Homo sapiens; identical to SEQ ID NO: 260400
  chr9:96308695-96308941
  hypo

SEQ ID NO: 437708 - DNA, 178 bp, Homo sapiens; identical to SEQ ID NO: 212863
  chr9:96357852-96358030
  hypo

SEQ ID NO: 437709 - DNA, 119 bp, Homo sapiens; identical to SEQ ID NO: 310844
  chr9:96361906-96362025
  hypo

SEQ ID NO: 437710 - DNA, 171 bp, Homo sapiens; identical to SEQ ID NO: 260405
  chr9:96446747-96446918
  hypo

SEQ ID NO: 437711 - DNA, 319 bp, Homo sapiens; identical to SEQ ID NO: 260407
  chr9:96673540-96673859
  hypo

SEQ ID NO: 437712 - DNA, 36 bp, Homo sapiens; identical to SEQ ID NO: 260408
  chr9:96687053-96687089
  hypo

SEQ ID NO: 437713 - DNA, 100 bp, Homo sapiens; identical to SEQ ID NO: 260409
  chr9:96910020-96910120
  hypo

SEQ ID NO: 437714 - DNA, 132 bp, Homo sapiens; identical to SEQ ID NO: 260410
  chr9:96910150-96910282
  hypo

SEQ ID NO: 437715 - DNA, 37 bp, Homo sapiens; identical to SEQ ID NO: 212866
  chr9:96945351-96945388
  hypo

SEQ ID NO: 437716 - DNA, 120 bp, Homo sapiens; identical to SEQ ID NO: 212867
  chr9:96945448-96945568
  hypo

SEQ ID NO: 437717 - DNA, 36 bp, Homo sapiens; identical to SEQ ID NO: 260413
  chr9:97010560-97010596
  hypo

SEQ ID NO: 437718 - DNA, 35 bp, Homo sapiens; identical to SEQ ID NO: 260414
  chr9:97010716-97010751
  hypo

SEQ ID NO: 437719 - DNA, 266 bp, Homo sapiens; identical to SEQ ID NO: 260415
  chr9:97062633-97062899
  hypo

SEQ ID NO: 437720 - DNA, 41 bp, Homo sapiens; identical to SEQ ID NO: 260416
  chr9:97107980-97108021
  hypo

SEQ ID NO: 437721 - DNA, 103 bp, Homo sapiens; identical to SEQ ID NO: 212868
  chr9:97162000-97162103
  hypo

SEQ ID NO: 437722 - DNA, 108 bp, Homo sapiens; identical to SEQ ID NO: 260418
  chr9:97203264-97203372
  hypo

SEQ ID NO: 437723 - DNA, 107 bp, Homo sapiens; identical to SEQ ID NO: 260420
  chr9:97369213-97369320
  hypo

SEQ ID NO: 437724 - DNA, 313 bp, Homo sapiens; identical to SEQ ID NO: 260421
  chr9:97384560-97384873
  hypo

SEQ ID NO: 437725 - DNA, 37 bp, Homo sapiens; identical to SEQ ID NO: 260422
  chr9:97469746-97469783
  hypo

SEQ ID NO: 437726 - DNA, 212 bp, Homo sapiens; identical to SEQ ID NO: 260423
  chr9:97474710-97474922
  hypo

SEQ ID NO: 437727 - DNA, 42 bp, Homo sapiens; identical to SEQ ID NO: 260424
  chr9:97488328-97488370
  hypo

SEQ ID NO: 437728 - DNA, 37 bp, Homo sapiens; identical to SEQ ID NO: 260425
  chr9:97506389-97506426
  hypo

SEQ ID NO: 437729 - DNA, 131 bp, Homo sapiens; identical to SEQ ID NO: 260426
  chr9:97563055-97563186
  hypo

SEQ ID NO: 437730 - DNA, 37 bp, Homo sapiens; identical to SEQ ID NO: 212869
  chr9:97591478-97591515
  hypo

SEQ ID NO: 437731 - DNA, 96 bp, Homo sapiens; identical to SEQ ID NO: 260428
  chr9:97634477-97634573
  hypo

SEQ ID NO: 437732 - DNA, 163 bp, Homo sapiens; identical to SEQ ID NO: 260429
  chr9:97671389-97671552
  hypo

SEQ ID NO: 437733 - DNA, 85 bp, Homo sapiens; identical to SEQ ID NO: 310872
  chr9:97674974-97675059
  hypo

SEQ ID NO: 437734 - DNA, 239 bp, Homo sapiens; identical to SEQ ID NO: 260431
  chr9:97678305-97678544
  hypo

SEQ ID NO: 437735 - DNA, 168 bp, Homo sapiens; identical to SEQ ID NO: 310874
  chr9:97679314-97679482
  hypo

SEQ ID NO: 437736 - DNA, 39 bp, Homo sapiens; identical to SEQ ID NO: 260433
  chr9:97682280-97682319
  hypo

SEQ ID NO: 437737 - DNA, 38 bp, Homo sapiens; identical to SEQ ID NO: 310876
  chr9:97682619-97682657
  hypo

SEQ ID NO: 437738 - DNA, 37 bp, Homo sapiens; identical to SEQ ID NO: 162391
  chr9:97682800-97682837
  hypo

SEQ ID NO: 437739 - DNA, 337 bp, Homo sapiens; identical to SEQ ID NO: 212870
  chr9:97719171-97719508
  hypo

SEQ ID NO: 437740 - DNA, 172 bp, Homo sapiens; identical to SEQ ID NO: 212871
  chr9:97727389-97727561
  hypo

SEQ ID NO: 437741 - DNA, 471 bp, Homo sapiens; identical to SEQ ID NO: 286569
  chr9:97810932-97811403
  hypo

SEQ ID NO: 437742 - DNA, 216 bp, Homo sapiens; identical to SEQ ID NO: 260438
  chr9:97847400-97847616
  hypo

SEQ ID NO: 437743 - DNA, 1027 bp, Homo sapiens; identical to SEQ ID NO: 260439
  chr9:97847891-97848918
  hypo

SEQ ID NO: 437744 - DNA, 223 bp, Homo sapiens; identical to SEQ ID NO: 212875
  chr9:97855923-97856146
  hypo

SEQ ID NO: 437745 - DNA, 144 bp, Homo sapiens; identical to SEQ ID NO: 310886
  chr9:97863724-97863868
  hypo

SEQ ID NO: 437746 - DNA, 178 bp, Homo sapiens; identical to SEQ ID NO: 310887
  chr9:97863898-97864076
  hypo

SEQ ID NO: 437747 - DNA, 61 bp, Homo sapiens; identical to SEQ ID NO: 260442
  chr9:97864638-97864699
  hypo

SEQ ID NO: 437748 - DNA, 168 bp, Homo sapiens; identical to SEQ ID NO: 260445
  chr9:97868960-97869128
  hypo

SEQ ID NO: 437749 - DNA, 77 bp, Homo sapiens; identical to SEQ ID NO: 260446
  chr9:97887433-97887510
  hypo

SEQ ID NO: 437750 - DNA, 127 bp, Homo sapiens; identical to SEQ ID NO: 310894
  chr9:97891756-97891883
  hypo

SEQ ID NO: 437751 - DNA, 206 bp, Homo sapiens; identical to SEQ ID NO: 212879
  chr9:97913297-97913503
  hypo

SEQ ID NO: 437752 - DNA, 81 bp, Homo sapiens; identical to SEQ ID NO: 260449
  chr9:98145032-98145113
  hypo

SEQ ID NO: 437753 - DNA, 60 bp, Homo sapiens; identical to SEQ ID NO: 223636
  chr9:98189305-98189365
  hypo

SEQ ID NO: 437754 - DNA, 402 bp, Homo sapiens; identical to SEQ ID NO: 260451
  chr9:98240100-98240502
  hypo

SEQ ID NO: 437755 - DNA, 46 bp, Homo sapiens; identical to SEQ ID NO: 201798
  chr9:98268140-98268186
  hypo

SEQ ID NO: 437756 - DNA, 313 bp, Homo sapiens; identical to SEQ ID NO: 286573
  chr9:98278353-98278666
  hypo

SEQ ID NO: 437757 - DNA, 468 bp, Homo sapiens; identical to SEQ ID NO: 286574
  chr9:98278719-98279187
  hypo

SEQ ID NO: 437758 - DNA, 45 bp, Homo sapiens; identical to SEQ ID NO: 212882
  chr9:98459835-98459880
  hypo

SEQ ID NO: 437759 - DNA, 207 bp, Homo sapiens; identical to SEQ ID NO: 260453
  chr9:98490544-98490751
  hypo

SEQ ID NO: 437760 - DNA, 59 bp, Homo sapiens; identical to SEQ ID NO: 260454
  chr9:98842605-98842664
  hypo

SEQ ID NO: 437761 - DNA, 231 bp, Homo sapiens; identical to SEQ ID NO: 260455
  chr9:98842927-98843158
  hypo

SEQ ID NO: 437762 - DNA, 80 bp, Homo sapiens; identical to SEQ ID NO: 260456
  chr9:99102564-99102644
  hypo

SEQ ID NO: 437763 - DNA, 46 bp, Homo sapiens
  chr9:99139192-99139238
  hypo
tggggtcaacaatttgaaagtaaaccagccagccagatgtggtttt

SEQ ID NO: 437764 - DNA, 491 bp, Homo sapiens; identical to SEQ ID NO: 286578
  chr9:99145529-99146020
  hypo

SEQ ID NO: 437765 - DNA, 37 bp, Homo sapiens; identical to SEQ ID NO: 260458
  chr9:99214210-99214247
  hypo

SEQ ID NO: 437766 - DNA, 37 bp, Homo sapiens; identical to SEQ ID NO: 260459
  chr9:99214487-99214524
  hypo

SEQ ID NO: 437767 - DNA, 122 bp, Homo sapiens; identical to SEQ ID NO: 260460
  chr9:99256191-99256313
  hypo

SEQ ID NO: 437768 - DNA, 196 bp, Homo sapiens; identical to SEQ ID NO: 260462
  chr9:99267708-99267904
  hypo

SEQ ID NO: 437769 - DNA, 240 bp, Homo sapiens; identical to SEQ ID NO: 201803
  chr9:99416950-99417190
  hypo

SEQ ID NO: 437770 - DNA, 409 bp, Homo sapiens; identical to SEQ ID NO: 201804
  chr9:99417397-99417806
  hypo

SEQ ID NO: 437771 - DNA, 79 bp, Homo sapiens; identical to SEQ ID NO: 260463
  chr9:99446887-99446966
  hypo

SEQ ID NO: 437772 - DNA, 211 bp, Homo sapiens; identical to SEQ ID NO: 260464
  chr9:99450309-99450520
  hypo

SEQ ID NO: 437773 - DNA, 45 bp, Homo sapiens; identical to SEQ ID NO: 260465
  chr9:99641471-99641516
  hypo

SEQ ID NO: 437774 - DNA, 40 bp, Homo sapiens; identical to SEQ ID NO: 260466
  chr9:99803883-99803923
  hypo

SEQ ID NO: 437775 - DNA, 40 bp, Homo sapiens; identical to SEQ ID NO: 260467
  chr9:99818324-99818364
  hypo

SEQ ID NO: 437776 - DNA, 180 bp, Homo sapiens; identical to SEQ ID NO: 260469
  chr9:100297536-100297716
  hypo

SEQ ID NO: 437777 - DNA, 76 bp, Homo sapiens; identical to SEQ ID NO: 260471
  chr9:100308892-100308968
  hypo

SEQ ID NO: 437778 - DNA, 303 bp, Homo sapiens; identical to SEQ ID NO: 201811
  chr9:100565762-100566065
  hypo

SEQ ID NO: 437779 - DNA, 138 bp, Homo sapiens; identical to SEQ ID NO: 260475
  chr9:100690587-100690725
  hypo

SEQ ID NO: 437780 - DNA, 35 bp, Homo sapiens; identical to SEQ ID NO: 260476
  chr9:100820491-100820526
  hypo

SEQ ID NO: 437781 - DNA, 128 bp, Homo sapiens; identical to SEQ ID NO: 212891
  chr9:100890703-100890831
  hypo

SEQ ID NO: 437782 - DNA, 210 bp, Homo sapiens; identical to SEQ ID NO: 260481
  chr9:100924970-100925180
  hypo

SEQ ID NO: 437783 - DNA, 182 bp, Homo sapiens; identical to SEQ ID NO: 260482
  chr9:100933034-100933216
  hypo

SEQ ID NO: 437784 - DNA, 225 bp, Homo sapiens; identical to SEQ ID NO: 260483
  chr9:100935909-100936134
  hypo

SEQ ID NO: 437785 - DNA, 57 bp, Homo sapiens; identical to SEQ ID NO: 310937
  chr9:100981136-100981193
  hypo

SEQ ID NO: 437786 - DNA, 79 bp, Homo sapiens; identical to SEQ ID NO: 392252
  chr9:101009639-101009718
  hypo

SEQ ID NO: 437787 - DNA, 174 bp, Homo sapiens; identical to SEQ ID NO: 260486
  chr9:101014052-101014226
  hypo

SEQ ID NO: 437788 - DNA, 118 bp, Homo sapiens; identical to SEQ ID NO: 212892
  chr9:101052972-101053090
  hypo

SEQ ID NO: 437789 - DNA, 196 bp, Homo sapiens; identical to SEQ ID NO: 212893
  chr9:101216242-101216438
  hypo

SEQ ID NO: 437790 - DNA, 110 bp, Homo sapiens; identical to SEQ ID NO: 212894
  chr9:101216476-101216586
  hypo

SEQ ID NO: 437791 - DNA, 156 bp, Homo sapiens; identical to SEQ ID NO: 212895
  chr9:101280572-101280728
  hypo

SEQ ID NO: 437792 - DNA, 98 bp, Homo sapiens; identical to SEQ ID NO: 260490
  chr9:101445882-101445980
  hypo

SEQ ID NO: 437793 - DNA, 224 bp, Homo sapiens; identical to SEQ ID NO: 260491
  chr9:101499001-101499225
  hypo

SEQ ID NO: 437794 - DNA, 118 bp, Homo sapiens; identical to SEQ ID NO: 212896
  chr9:101553997-101554115
  hypo

SEQ ID NO: 437795 - DNA, 165 bp, Homo sapiens; identical to SEQ ID NO: 310947
  chr9:101557774-101557939
  hypo

SEQ ID NO: 437796 - DNA, 144 bp, Homo sapiens; identical to SEQ ID NO: 260494
  chr9:101813050-101813194
  hypo

SEQ ID NO: 437797 - DNA, 164 bp, Homo sapiens; identical to SEQ ID NO: 260495
  chr9:101904930-101905094
  hypo

SEQ ID NO: 437798 - DNA, 39 bp, Homo sapiens; identical to SEQ ID NO: 260496
  chr9:101949974-101950013
  hypo

SEQ ID NO: 437799 - DNA, 162 bp, Homo sapiens; identical to SEQ ID NO: 260497
  chr9:102068815-102068977
  hypo

SEQ ID NO: 437800 - DNA, 144 bp, Homo sapiens; identical to SEQ ID NO: 212898
  chr9:103174497-103174641
  hypo

SEQ ID NO: 437801 - DNA, 31 bp, Homo sapiens; identical to SEQ ID NO: 212899
  chr9:103174754-103174785
  hypo

SEQ ID NO: 437802 - DNA, 89 bp, Homo sapiens; identical to SEQ ID NO: 286611
  chr9:103190036-103190125
  hypo

SEQ ID NO: 437803 - DNA, 96 bp, Homo sapiens; identical to SEQ ID NO: 260501
  chr9:104138073-104138169
  hypo

SEQ ID NO: 437804 - DNA, 180 bp, Homo sapiens; identical to SEQ ID NO: 260502
  chr9:104238256-104238436
  hypo

SEQ ID NO: 437805 - DNA, 84 bp, Homo sapiens; identical to SEQ ID NO: 260503
  chr9:104238668-104238752
  hypo

SEQ ID NO: 437806 - DNA, 316 bp, Homo sapiens; identical to SEQ ID NO: 260504
  chr9:104305542-104305858
  hypo

SEQ ID NO: 437807 - DNA, 187 bp, Homo sapiens; identical to SEQ ID NO: 260505
  chr9:104365592-104365779
  hypo

SEQ ID NO: 437808 - DNA, 82 bp, Homo sapiens; identical to SEQ ID NO: 260506
  chr9:104473574-104473656
  hypo

SEQ ID NO: 437809 - DNA, 42 bp, Homo sapiens; identical to SEQ ID NO: 260507
  chr9:104605229-104605271
  hypo

SEQ ID NO: 437810 - DNA, 39 bp, Homo sapiens; identical to SEQ ID NO: 212903
  chr9:107144258-107144297
  hypo

SEQ ID NO: 437811 - DNA, 35 bp, Homo sapiens; identical to SEQ ID NO: 260509
  chr9:107260232-107260267
  hypo

SEQ ID NO: 437812 - DNA, 34 bp, Homo sapiens; identical to SEQ ID NO: 260510
  chr9:107260507-107260541
  hypo

SEQ ID NO: 437813 - DNA, 48 bp, Homo sapiens; identical to SEQ ID NO: 212904
  chr9:107396338-107396386
  hypo

SEQ ID NO: 437814 - DNA, 110 bp, Homo sapiens; identical to SEQ ID NO: 212905
  chr9:107396494-107396604
  hypo

SEQ ID NO: 437815 - DNA, 51 bp, Homo sapiens; identical to SEQ ID NO: 260512
  chr9:107528626-107528677
  hypo

SEQ ID NO: 437816 - DNA, 86 bp, Homo sapiens; identical to SEQ ID NO: 260513
  chr9:107554120-107554206
  hypo

SEQ ID NO: 437817 - DNA, 153 bp, Homo sapiens; identical to SEQ ID NO: 212906
  chr9:107729489-107729642
  hypo

SEQ ID NO: 437818 - DNA, 120 bp, Homo sapiens; identical to SEQ ID NO: 260515
  chr9:108257889-108258009
  hypo

SEQ ID NO: 437819 - DNA, 256 bp, Homo sapiens; identical to SEQ ID NO: 260516
  chr9:109687597-109687853
  hypo

SEQ ID NO: 437820 - DNA, 178 bp, Homo sapiens; identical to SEQ ID NO: 260517
  chr9:109688896-109689074
  hypo

SEQ ID NO: 437821 - DNA, 185 bp, Homo sapiens; identical to SEQ ID NO: 260520
  chr9:109691303-109691488
  hypo

SEQ ID NO: 437822 - DNA, 44 bp, Homo sapiens; identical to SEQ ID NO: 260521
  chr9:109693210-109693254
  hypo

SEQ ID NO: 437823 - DNA, 37 bp, Homo sapiens; identical to SEQ ID NO: 212909
  chr9:109865317-109865354
  hypo

SEQ ID NO: 437824 - DNA, 41 bp, Homo sapiens; identical to SEQ ID NO: 212910
  chr9:109894935-109894976
  hypo

SEQ ID NO: 437825 - DNA, 40 bp, Homo sapiens; identical to SEQ ID NO: 260524
  chr9:109895276-109895316
  hypo

SEQ ID NO: 437826 - DNA, 265 bp, Homo sapiens; identical to SEQ ID NO: 212911
  chr9:110096156-110096421
  hypo

SEQ ID NO: 437827 - DNA, 113 bp, Homo sapiens; identical to SEQ ID NO: 260526
  chr9:110121099-110121212
  hypo

SEQ ID NO: 437828 - DNA, 34 bp, Homo sapiens; identical to SEQ ID NO: 212912
  chr9:110160588-110160622
  hypo

SEQ ID NO: 437829 - DNA, 119 bp, Homo sapiens; identical to SEQ ID NO: 260529
  chr9:110185793-110185912
  hypo

SEQ ID NO: 437830 - DNA, 139 bp, Homo sapiens; identical to SEQ ID NO: 260530
  chr9:110335015-110335154
  hypo

SEQ ID NO: 437831 - DNA, 76 bp, Homo sapiens; identical to SEQ ID NO: 212914
  chr9:110478888-110478964
  hypo

SEQ ID NO: 437832 - DNA, 183 bp, Homo sapiens; identical to SEQ ID NO: 260533
  chr9:110531375-110531558
  hypo

SEQ ID NO: 437833 - DNA, 214 bp, Homo sapiens; identical to SEQ ID NO: 212915
  chr9:110779880-110780094
  hypo

SEQ ID NO: 437834 - DNA, 185 bp, Homo sapiens; identical to SEQ ID NO: 212916
  chr9:110842928-110843113
  hypo

SEQ ID NO: 437835 - DNA, 44 bp, Homo sapiens; identical to SEQ ID NO: 260536
  chr9:110861945-110861989
  hypo

SEQ ID NO: 437836 - DNA, 32 bp, Homo sapiens; identical to SEQ ID NO: 260537
  chr9:111446306-111446338
  hypo

SEQ ID NO: 437837 - DNA, 170 bp, Homo sapiens; identical to SEQ ID NO: 260538
  chr9:111465838-111466008
  hypo

SEQ ID NO: 437838 - DNA, 49 bp, Homo sapiens; identical to SEQ ID NO: 260539
  chr9:111617456-111617505
  hypo

SEQ ID NO: 437839 - DNA, 66 bp, Homo sapiens; identical to SEQ ID NO: 260540
  chr9:111617924-111617990
  hypo

SEQ ID NO: 437840 - DNA, 192 bp, Homo sapiens; identical to SEQ ID NO: 212917
  chr9:111835846-111836038
  hypo

SEQ ID NO: 437841 - DNA, 33 bp, Homo sapiens; identical to SEQ ID NO: 260542
  chr9:111876331-111876364
  hypo

SEQ ID NO: 437842 - DNA, 187 bp, Homo sapiens; identical to SEQ ID NO: 212918
  chr9:111951147-111951334
  hypo

SEQ ID NO: 437843 - DNA, 58 bp, Homo sapiens; identical to SEQ ID NO: 260544
  chr9:111952371-111952429
  hypo

SEQ ID NO: 437844 - DNA, 43 bp, Homo sapiens; identical to SEQ ID NO: 407182
  chr9:112040522-112040565
  hypo

SEQ ID NO: 437845 - DNA, 869 bp, Homo sapiens; identical to SEQ ID NO: 420259
  chr9:112082633-112083502
  hypo

SEQ ID NO: 437846 - DNA, 78 bp, Homo sapiens; identical to SEQ ID NO: 260546
  chr9:112295751-112295829
  hypo

SEQ ID NO: 437847 - DNA, 84 bp, Homo sapiens; identical to SEQ ID NO: 260547
  chr9:112847321-112847405
  hypo

SEQ ID NO: 437848 - DNA, 56 bp, Homo sapiens; identical to SEQ ID NO: 420262
  chr9:113017643-113017699
  hypo

SEQ ID NO: 437849 - DNA, 31 bp, Homo sapiens; identical to SEQ ID NO: 286647
  chr9:113017729-113017760
  hypo

SEQ ID NO: 437850 - DNA, 101 bp, Homo sapiens; identical to SEQ ID NO: 286648
  chr9:113017835-113017936
  hypo

SEQ ID NO: 437851 - DNA, 203 bp, Homo sapiens; identical to SEQ ID NO: 212923
  chr9:113592870-113593073
  hypo

SEQ ID NO: 437852 - DNA, 45 bp, Homo sapiens; identical to SEQ ID NO: 260550
  chr9:113897404-113897449
  hypo

SEQ ID NO: 437853 - DNA, 91 bp, Homo sapiens; identical to SEQ ID NO: 260551
  chr9:114173538-114173629
  hypo

SEQ ID NO: 437854 - DNA, 120 bp, Homo sapiens; identical to SEQ ID NO: 260552
  chr9:114319645-114319765
  hypo

SEQ ID NO: 437855 - DNA, 240 bp, Homo sapiens; identical to SEQ ID NO: 212924
  chr9:114619240-114619480
  hypo

SEQ ID NO: 437856 - DNA, 180 bp, Homo sapiens; identical to SEQ ID NO: 260555
  chr9:114656964-114657144
  hypo

SEQ ID NO: 437857 - DNA, 37 bp, Homo sapiens; identical to SEQ ID NO: 212925
  chr9:114701511-114701548
  hypo

SEQ ID NO: 437858 - DNA, 157 bp, Homo sapiens; identical to SEQ ID NO: 212926
  chr9:114750309-114750466
  hypo

SEQ ID NO: 437859 - DNA, 32 bp, Homo sapiens; identical to SEQ ID NO: 260558
  chr9:114789967-114789999
  hypo

SEQ ID NO: 437860 - DNA, 181 bp, Homo sapiens; identical to SEQ ID NO: 260559
  chr9:114823149-114823330
  hypo

SEQ ID NO: 437861 - DNA, 202 bp, Homo sapiens; identical to SEQ ID NO: 212927
  chr9:114830992-114831194
  hypo

SEQ ID NO: 437862 - DNA, 137 bp, Homo sapiens; identical to SEQ ID NO: 212928
  chr9:114832553-114832690
  hypo

SEQ ID NO: 437863 - DNA, 192 bp, Homo sapiens; identical to SEQ ID NO: 223662
  chr9:114937755-114937947
  hypo

SEQ ID NO: 437864 - DNA, 198 bp, Homo sapiens; identical to SEQ ID NO: 260564
  chr9:115040853-115041051
  hypo

SEQ ID NO: 437865 - DNA, 82 bp, Homo sapiens; identical to SEQ ID NO: 260568
  chr9:115445176-115445258
  hypo

SEQ ID NO: 437866 - DNA, 94 bp, Homo sapiens; identical to SEQ ID NO: 212929
  chr9:115479262-115479356
  hypo

SEQ ID NO: 437867 - DNA, 78 bp, Homo sapiens; identical to SEQ ID NO: 260571
  chr9:115519017-115519095
  hypo

SEQ ID NO: 437868 - DNA, 199 bp, Homo sapiens; identical to SEQ ID NO: 260572
  chr9:115550632-115550831
  hypo

SEQ ID NO: 437869 - DNA, 209 bp, Homo sapiens; identical to SEQ ID NO: 260573
  chr9:115598523-115598732
  hypo

SEQ ID NO: 437870 - DNA, 38 bp, Homo sapiens; identical to SEQ ID NO: 311035
  chr9:115599335-115599373
  hypo

SEQ ID NO: 437871 - DNA, 273 bp, Homo sapiens; identical to SEQ ID NO: 260575
  chr9:115630952-115631225
  hypo

SEQ ID NO: 437872 - DNA, 144 bp, Homo sapiens; identical to SEQ ID NO: 260576
  chr9:115948533-115948677
  hypo

SEQ ID NO: 437873 - DNA, 101 bp, Homo sapiens; identical to SEQ ID NO: 212931
  chr9:116043449-116043550
  hypo

SEQ ID NO: 437874 - DNA, 64 bp, Homo sapiens; identical to SEQ ID NO: 260578
  chr9:116047380-116047444
  hypo

SEQ ID NO: 437875 - DNA, 97 bp, Homo sapiens; identical to SEQ ID NO: 260579
  chr9:116054117-116054214
  hypo

SEQ ID NO: 437876 - DNA, 233 bp, Homo sapiens; identical to SEQ ID NO: 212932
  chr9:116061763-116061996
  hypo

SEQ ID NO: 437877 - DNA, 127 bp, Homo sapiens; identical to SEQ ID NO: 260582
  chr9:116062911-116063038
  hypo

SEQ ID NO: 437878 - DNA, 71 bp, Homo sapiens; identical to SEQ ID NO: 386070
  chr9:116066129-116066200
  hypo

SEQ ID NO: 437879 - DNA, 32 bp, Homo sapiens; identical to SEQ ID NO: 260584
  chr9:116076150-116076182
  hypo

SEQ ID NO: 437880 - DNA, 37 bp, Homo sapiens; identical to SEQ ID NO: 260585
  chr9:116076765-116076802
  hypo

SEQ ID NO: 437881 - DNA, 38 bp, Homo sapiens; identical to SEQ ID NO: 260586
  chr9:116222778-116222816
  hypo

SEQ ID NO: 437882 - DNA, 65 bp, Homo sapiens; identical to SEQ ID NO: 260587
  chr9:116259621-116259686
  hypo

SEQ ID NO: 437883 - DNA, 53 bp, Homo sapiens; identical to SEQ ID NO: 212934
  chr9:116269883-116269936
  hypo

SEQ ID NO: 437884 - DNA, 55 bp, Homo sapiens; identical to SEQ ID NO: 311054
  chr9:116331386-116331441
  hypo

SEQ ID NO: 437885 - DNA, 182 bp, Homo sapiens; identical to SEQ ID NO: 212935
  chr9:116344624-116344806
  hypo

SEQ ID NO: 437886 - DNA, 148 bp, Homo sapiens; identical to SEQ ID NO: 260592
  chr9:116634761-116634909
  hypo

SEQ ID NO: 437887 - DNA, 242 bp, Homo sapiens; identical to SEQ ID NO: 286668
  chr9:116638746-116638988
  hypo

SEQ ID NO: 437888 - DNA, 233 bp, Homo sapiens; identical to SEQ ID NO: 260593
  chr9:116663446-116663679
  hypo

SEQ ID NO: 437889 - DNA, 81 bp, Homo sapiens; identical to SEQ ID NO: 212936
  chr9:116671457-116671538
  hypo

SEQ ID NO: 437890 - DNA, 137 bp, Homo sapiens; identical to SEQ ID NO: 212937
  chr9:116671888-116672025
  hypo

SEQ ID NO: 437891 - DNA, 151 bp, Homo sapiens; identical to SEQ ID NO: 78056
  chr9:116681838-116681989
  hypo

SEQ ID NO: 437892 - DNA, 128 bp, Homo sapiens; identical to SEQ ID NO: 260597
  chr9:116697028-116697156
  hypo

SEQ ID NO: 437893 - DNA, 81 bp, Homo sapiens
  chr9:116749926-116750007
  hypo
gtagtttgaggcccagcagccctggccccacctgagagagcttgttagaaatgcagaatctctgagtgaggcatggtggca

SEQ ID NO: 437894 - DNA, 35 bp, Homo sapiens; identical to SEQ ID NO: 260601
  chr9:116750067-116750102
  hypo

SEQ ID NO: 437895 - DNA, 150 bp, Homo sapiens; identical to SEQ ID NO: 260603
  chr9:116760431-116760581
  hypo

SEQ ID NO: 437896 - DNA, 279 bp, Homo sapiens; identical to SEQ ID NO: 260605
  chr9:116762418-116762697
  hypo

SEQ ID NO: 437897 - DNA, 323 bp, Homo sapiens; identical to SEQ ID NO: 212944
  chr9:116798287-116798610
  hypo

SEQ ID NO: 437898 - DNA, 98 bp, Homo sapiens; identical to SEQ ID NO: 212948
  chr9:116812706-116812804
  hypo

SEQ ID NO: 437899 - DNA, 421 bp, Homo sapiens; identical to SEQ ID NO: 260614
  chr9:116817234-116817655
  hypo

SEQ ID NO: 437900 - DNA, 201 bp, Homo sapiens; identical to SEQ ID NO: 260615
  chr9:116823662-116823863
  hypo

SEQ ID NO: 437901 - DNA, 43 bp, Homo sapiens; identical to SEQ ID NO: 260616
  chr9:116832918-116832961
  hypo

SEQ ID NO: 437902 - DNA, 200 bp, Homo sapiens; identical to SEQ ID NO: 212950
  chr9:116856485-116856685
  hypo

SEQ ID NO: 437903 - DNA, 175 bp, Homo sapiens; identical to SEQ ID NO: 212953
  chr9:116973314-116973489
  hypo

SEQ ID NO: 437904 - DNA, 54 bp, Homo sapiens; identical to SEQ ID NO: 260621
  chr9:117038006-117038060
  hypo

SEQ ID NO: 437905 - DNA, 49 bp, Homo sapiens; identical to SEQ ID NO: 260623
  chr9:117179587-117179636
  hypo

SEQ ID NO: 437906 - DNA, 45 bp, Homo sapiens; identical to SEQ ID NO: 260624
  chr9:117372622-117372667
  hypo

SEQ ID NO: 437907 - DNA, 241 bp, Homo sapiens; identical to SEQ ID NO: 260625
  chr9:117372697-117372938
  hypo

SEQ ID NO: 437908 - DNA, 60 bp, Homo sapiens; identical to SEQ ID NO: 260627
  chr9:123139935-123139995
  hypo

SEQ ID NO: 437909 - DNA, 203 bp, Homo sapiens; identical to SEQ ID NO: 260628
  chr9:123140239-123140442
  hypo

SEQ ID NO: 437910 - DNA, 484 bp, Homo sapiens; identical to SEQ ID NO: 212954
  chr9:123150759-123151243
  hypo

SEQ ID NO: 437911 - DNA, 55 bp, Homo sapiens; identical to SEQ ID NO: 260631
  chr9:123162810-123162865
  hypo

SEQ ID NO: 437912 - DNA, 110 bp, Homo sapiens; identical to SEQ ID NO: 260632
  chr9:123163101-123163211
  hypo

SEQ ID NO: 437913 - DNA, 166 bp, Homo sapiens; identical to SEQ ID NO: 260633
  chr9:123165255-123165421
  hypo

SEQ ID NO: 437914 - DNA, 104 bp, Homo sapiens; identical to SEQ ID NO: 260634
  chr9:123171454-123171558
  hypo

SEQ ID NO: 437915 - DNA, 71 bp, Homo sapiens; identical to SEQ ID NO: 260637
  chr9:123295277-123295348
  hypo

SEQ ID NO: 437916 - DNA, 124 bp, Homo sapiens; identical to SEQ ID NO: 260638
  chr9:123367536-123367660
  hypo

SEQ ID NO: 437917 - DNA, 42 bp, Homo sapiens; identical to SEQ ID NO: 260639
  chr9:123447413-123447455
  hypo

SEQ ID NO: 437918 - DNA, 77 bp, Homo sapiens; identical to SEQ ID NO: 260640
  chr9:123650230-123650307
  hypo

SEQ ID NO: 437919 - DNA, 82 bp, Homo sapiens; identical to SEQ ID NO: 260641
  chr9:123664361-123664443
  hypo

SEQ ID NO: 437920 - DNA, 33 bp, Homo sapiens; identical to SEQ ID NO: 260642
  chr9:123690272-123690305
  hypo

SEQ ID NO: 437921 - DNA, 104 bp, Homo sapiens; identical to SEQ ID NO: 212957
  chr9:123965022-123965126
  hypo

SEQ ID NO: 437922 - DNA, 64 bp, Homo sapiens; identical to SEQ ID NO: 260644
  chr9:124095120-124095184
  hypo

SEQ ID NO: 437923 - DNA, 63 bp, Homo sapiens
  chr9:124289706-124289769
  hypo
catggagccagtgggggctgggggctgggggctgggagcagacaggagccccacccttccagg

SEQ ID NO: 437924 - DNA, 222 bp, Homo sapiens; identical to SEQ ID NO: 260646
  chr9:124339602-124339824
  hypo

SEQ ID NO: 437925 - DNA, 205 bp, Homo sapiens; identical to SEQ ID NO: 212959
  chr9:124422091-124422296
  hypo

SEQ ID NO: 437926 - DNA, 198 bp, Homo sapiens; identical to SEQ ID NO: 212960
  chr9:124443387-124443585
  hypo

SEQ ID NO: 437927 - DNA, 365 bp, Homo sapiens; identical to SEQ ID NO: 260649
  chr9:124479634-124479999
  hypo

SEQ ID NO: 437928 - DNA, 167 bp, Homo sapiens; identical to SEQ ID NO: 212961
  chr9:124499833-124500000
  hypo

SEQ ID NO: 437929 - DNA, 84 bp, Homo sapiens; identical to SEQ ID NO: 260651
  chr9:124512392-124512476
  hypo

SEQ ID NO: 437930 - DNA, 97 bp, Homo sapiens; identical to SEQ ID NO: 260652
  chr9:124513376-124513473
  hypo

SEQ ID NO: 437931 - DNA, 169 bp, Homo sapiens; identical to SEQ ID NO: 212962
  chr9:124545862-124546031
  hypo

SEQ ID NO: 437932 - DNA, 184 bp, Homo sapiens; identical to SEQ ID NO: 212963
  chr9:124548590-124548774
  hypo

SEQ ID NO: 437933 - DNA, 179 bp, Homo sapiens; identical to SEQ ID NO: 260655
  chr9:124549335-124549514
  hypo

SEQ ID NO: 437934 - DNA, 62 bp, Homo sapiens; identical to SEQ ID NO: 260656
  chr9:124581116-124581178
  hypo

SEQ ID NO: 437935 - DNA, 181 bp, Homo sapiens; identical to SEQ ID NO: 223669
  chr9:124622036-124622217
  hypo

SEQ ID NO: 437936 - DNA, 386 bp, Homo sapiens; identical to SEQ ID NO: 260658
  chr9:124666054-124666440
  hypo

SEQ ID NO: 437937 - DNA, 166 bp, Homo sapiens; identical to SEQ ID NO: 260659
  chr9:124736303-124736469
  hypo

SEQ ID NO: 437938 - DNA, 65 bp, Homo sapiens; identical to SEQ ID NO: 260662
  chr9:124967430-124967495
  hypo

SEQ ID NO: 437939 - DNA, 63 bp, Homo sapiens; identical to SEQ ID NO: 286691
  chr9:124981571-124981634
  hypo

SEQ ID NO: 437940 - DNA, 140 bp, Homo sapiens; identical to SEQ ID NO: 118090
  chr9:124981877-124982017
  hypo

SEQ ID NO: 437941 - DNA, 42 bp, Homo sapiens; identical to SEQ ID NO: 260664
  chr9:125573936-125573978
  hypo

SEQ ID NO: 437942 - DNA, 42 bp, Homo sapiens; identical to SEQ ID NO: 212966
  chr9:125574218-125574260
  hypo

SEQ ID NO: 437943 - DNA, 240 bp, Homo sapiens; identical to SEQ ID NO: 260666
  chr9:125591372-125591612
  hypo

SEQ ID NO: 437944 - DNA, 153 bp, Homo sapiens; identical to SEQ ID NO: 260667
  chr9:125622564-125622717
  hypo

SEQ ID NO: 437945 - DNA, 57 bp, Homo sapiens; identical to SEQ ID NO: 212967
  chr9:125870568-125870625
  hypo

SEQ ID NO: 437946 - DNA, 42 bp, Homo sapiens; identical to SEQ ID NO: 260669
  chr9:125878079-125878121
  hypo

SEQ ID NO: 437947 - DNA, 44 bp, Homo sapiens; identical to SEQ ID NO: 260670
  chr9:125927262-125927306
  hypo

SEQ ID NO: 437948 - DNA, 195 bp, Homo sapiens; identical to SEQ ID NO: 212969
  chr9:126100875-126101070
  hypo

SEQ ID NO: 437949 - DNA, 125 bp, Homo sapiens; identical to SEQ ID NO: 311146
  chr9:126110175-126110300
  hypo

SEQ ID NO: 437950 - DNA, 64 bp, Homo sapiens; identical to SEQ ID NO: 212971
  chr9:126154147-126154211
  hypo

SEQ ID NO: 437951 - DNA, 156 bp, Homo sapiens; identical to SEQ ID NO: 260679
  chr9:126162177-126162333
  hypo

SEQ ID NO: 437952 - DNA, 34 bp, Homo sapiens; identical to SEQ ID NO: 260681
  chr9:126168860-126168894
  hypo

SEQ ID NO: 437953 - DNA, 189 bp, Homo sapiens; identical to SEQ ID NO: 311154
  chr9:126169183-126169372
  hypo

SEQ ID NO: 437954 - DNA, 42 bp, Homo sapiens; identical to SEQ ID NO: 212974
  chr9:126169491-126169533
  hypo

SEQ ID NO: 437955 - DNA, 348 bp, Homo sapiens; identical to SEQ ID NO: 260683
  chr9:126169851-126170199
  hypo

SEQ ID NO: 437956 - DNA, 221 bp, Homo sapiens; identical to SEQ ID NO: 260685
  chr9:126187645-126187866
  hypo

SEQ ID NO: 437957 - DNA, 134 bp, Homo sapiens; identical to SEQ ID NO: 260686
  chr9:126198542-126198676
  hypo

SEQ ID NO: 437958 - DNA, 266 bp, Homo sapiens; identical to SEQ ID NO: 260687
  chr9:126208445-126208711
  hypo

SEQ ID NO: 437959 - DNA, 80 bp, Homo sapiens; identical to SEQ ID NO: 260688
  chr9:126243636-126243716
  hypo

SEQ ID NO: 437960 - DNA, 61 bp, Homo sapiens; identical to SEQ ID NO: 311162
  chr9:126314090-126314151
  hypo

SEQ ID NO: 437961 - DNA, 73 bp, Homo sapiens; identical to SEQ ID NO: 311163
  chr9:126314181-126314254
  hypo

SEQ ID NO: 437962 - DNA, 103 bp, Homo sapiens; identical to SEQ ID NO: 260690
  chr9:126314314-126314417
  hypo

SEQ ID NO: 437963 - DNA, 167 bp, Homo sapiens; identical to SEQ ID NO: 212975
  chr9:126323416-126323583
  hypo

SEQ ID NO: 437964 - DNA, 51 bp, Homo sapiens; identical to SEQ ID NO: 212978
  chr9:126349174-126349225
  hypo

SEQ ID NO: 437965 - DNA, 114 bp, Homo sapiens; identical to SEQ ID NO: 260694
  chr9:126368302-126368416
  hypo

SEQ ID NO: 437966 - DNA, 78 bp, Homo sapiens; identical to SEQ ID NO: 260695
  chr9:126403904-126403982
  hypo

SEQ ID NO: 437967 - DNA, 75 bp, Homo sapiens; identical to SEQ ID NO: 260696
  chr9:126406103-126406178
  hypo

SEQ ID NO: 437968 - DNA, 80 bp, Homo sapiens; identical to SEQ ID NO: 260697
  chr9:126440715-126440795
  hypo

SEQ ID NO: 437969 - DNA, 87 bp, Homo sapiens; identical to SEQ ID NO: 212979
  chr9:126442151-126442238
  hypo

SEQ ID NO: 437970 - DNA, 260 bp, Homo sapiens; identical to SEQ ID NO: 260699
  chr9:126487964-126488224
  hypo

SEQ ID NO: 437971 - DNA, 101 bp, Homo sapiens; identical to SEQ ID NO: 260700
  chr9:126707416-126707517
  hypo

SEQ ID NO: 437972 - DNA, 165 bp, Homo sapiens; identical to SEQ ID NO: 286698
  chr9:126762044-126762209
  hypo

SEQ ID NO: 437973 - DNA, 299 bp, Homo sapiens; identical to SEQ ID NO: 286699
  chr9:126762231-126762530
  hypo

SEQ ID NO: 437974 - DNA, 67 bp, Homo sapiens; identical to SEQ ID NO: 286700
  chr9:126762606-126762673
  hypo

SEQ ID NO: 437975 - DNA, 337 bp, Homo sapiens; identical to SEQ ID NO: 260701
  chr9:126975847-126976184
  hypo

SEQ ID NO: 437976 - DNA, 282 bp, Homo sapiens; identical to SEQ ID NO: 260702
  chr9:127019287-127019569
  hypo

SEQ ID NO: 437977 - DNA, 291 bp, Homo sapiens; identical to SEQ ID NO: 260703
  chr9:127071988-127072279
  hypo

SEQ ID NO: 437978 - DNA, 200 bp, Homo sapiens; identical to SEQ ID NO: 260705
  chr9:127214765-127214965
  hypo

SEQ ID NO: 437979 - DNA, 278 bp, Homo sapiens; identical to SEQ ID NO: 286720
  chr9:127215312-127215590
  hypo

SEQ ID NO: 437980 - DNA, 124 bp, Homo sapiens; identical to SEQ ID NO: 286721
  chr9:127215678-127215802
  hypo

SEQ ID NO: 437981 - DNA, 80 bp, Homo sapiens; identical to SEQ ID NO: 260706
  chr9:127219756-127219836
  hypo

SEQ ID NO: 437982 - DNA, 51 bp, Homo sapiens; identical to SEQ ID NO: 260707
  chr9:127230411-127230462
  hypo

SEQ ID NO: 437983 - DNA, 171 bp, Homo sapiens; identical to SEQ ID NO: 260708
  chr9:127241721-127241892
  hypo

SEQ ID NO: 437984 - DNA, 602 bp, Homo sapiens; identical to SEQ ID NO: 260709
  chr9:127262376-127262978
  hypo

SEQ ID NO: 437985 - DNA, 271 bp, Homo sapiens; identical to SEQ ID NO: 260710
  chr9:127268260-127268531
  hypo

SEQ ID NO: 437986 - DNA, 93 bp, Homo sapiens; identical to SEQ ID NO: 212981
  chr9:127308364-127308457
  hypo

SEQ ID NO: 437987 - DNA, 222 bp, Homo sapiens; identical to SEQ ID NO: 260712
  chr9:127361668-127361890
  hypo

SEQ ID NO: 437988 - DNA, 39 bp, Homo sapiens; identical to SEQ ID NO: 212982
  chr9:127420645-127420684
  hypo

SEQ ID NO: 437989 - DNA, 98 bp, Homo sapiens; identical to SEQ ID NO: 260715
  chr9:127481335-127481433
  hypo

SEQ ID NO: 437990 - DNA, 35 bp, Homo sapiens; identical to SEQ ID NO: 260716
  chr9:127482311-127482346
  hypo

SEQ ID NO: 437991 - DNA, 31 bp, Homo sapiens; identical to SEQ ID NO: 212983
  chr9:127500846-127500877
  hypo

SEQ ID NO: 437992 - DNA, 127 bp, Homo sapiens; identical to SEQ ID NO: 201874
  chr9:127534416-127534543
  hypo

SEQ ID NO: 437993 - DNA, 85 bp, Homo sapiens; identical to SEQ ID NO: 260718
  chr9:127538088-127538173
  hypo

SEQ ID NO: 437994 - DNA, 67 bp, Homo sapiens; identical to SEQ ID NO: 260719
  chr9:127570205-127570272
  hypo

SEQ ID NO: 437995 - DNA, 336 bp, Homo sapiens; identical to SEQ ID NO: 212985
  chr9:127572288-127572624
  hypo

SEQ ID NO: 437996 - DNA, 110 bp, Homo sapiens; identical to SEQ ID NO: 260721
  chr9:127573375-127573485
  hypo

SEQ ID NO: 437997 - DNA, 39 bp, Homo sapiens; identical to SEQ ID NO: 260722
  chr9:127577754-127577793
  hypo

SEQ ID NO: 437998 - DNA, 39 bp, Homo sapiens; identical to SEQ ID NO: 260723
  chr9:127577913-127577952
  hypo

SEQ ID NO: 437999 - DNA, 117 bp, Homo sapiens; identical to SEQ ID NO: 260724
  chr9:127616531-127616648
  hypo

SEQ ID NO: 438000 - DNA, 77 bp, Homo sapiens; identical to SEQ ID NO: 212986
  chr9:127657866-127657943
  hypo

SEQ ID NO: 438001 - DNA, 36 bp, Homo sapiens; identical to SEQ ID NO: 260726
  chr9:127861825-127861861
  hypo

SEQ ID NO: 438002 - DNA, 33 bp, Homo sapiens; identical to SEQ ID NO: 212987
  chr9:127955075-127955108
  hypo

SEQ ID NO: 438003 - DNA, 33 bp, Homo sapiens; identical to SEQ ID NO: 260728
  chr9:128029579-128029612
  hypo

SEQ ID NO: 438004 - DNA, 37 bp, Homo sapiens; identical to SEQ ID NO: 260729
  chr9:128032923-128032960
  hypo

SEQ ID NO: 438005 - DNA, 87 bp, Homo sapiens
  chr9:128103377-128103464
  hypo
acaaacaaaaagaaatccttttcttagtaatttatcctgctatccaactccaaataaagcctccaactttttctacagactgaagaa

SEQ ID NO: 438006 - DNA, 138 bp, Homo sapiens; identical to SEQ ID NO: 212989
  chr9:128135749-128135887
  hypo

SEQ ID NO: 438007 - DNA, 159 bp, Homo sapiens; identical to SEQ ID NO: 260733
  chr9:128168027-128168186
  hypo

SEQ ID NO: 438008 - DNA, 116 bp, Homo sapiens; identical to SEQ ID NO: 311217
  chr9:128189978-128190094
  hypo

SEQ ID NO: 438009 - DNA, 158 bp, Homo sapiens; identical to SEQ ID NO: 311218
  chr9:128190140-128190298
  hypo

SEQ ID NO: 438010 - DNA, 245 bp, Homo sapiens; identical to SEQ ID NO: 260736
  chr9:128263221-128263466
  hypo

SEQ ID NO: 438011 - DNA, 93 bp, Homo sapiens; identical to SEQ ID NO: 212991
  chr9:128399989-128400082
  hypo

SEQ ID NO: 438012 - DNA, 159 bp, Homo sapiens; identical to SEQ ID NO: 212992
  chr9:128407606-128407765
  hypo

SEQ ID NO: 438013 - DNA, 264 bp, Homo sapiens; identical to SEQ ID NO: 212993
  chr9:128409706-128409970
  hypo

SEQ ID NO: 438014 - DNA, 81 bp, Homo sapiens; identical to SEQ ID NO: 212994
  chr9:128479564-128479645
  hypo

SEQ ID NO: 438015 - DNA, 50 bp, Homo sapiens; identical to SEQ ID NO: 260743
  chr9:128672789-128672839
  hypo

SEQ ID NO: 438016 - DNA, 57 bp, Homo sapiens; identical to SEQ ID NO: 260744
  chr9:128674628-128674685
  hypo

SEQ ID NO: 438017 - DNA, 239 bp, Homo sapiens; identical to SEQ ID NO: 260745
  chr9:128677870-128678109
  hypo

SEQ ID NO: 438018 - DNA, 105 bp, Homo sapiens; identical to SEQ ID NO: 260746
  chr9:128718758-128718863
  hypo

SEQ ID NO: 438019 - DNA, 40 bp, Homo sapiens; identical to SEQ ID NO: 260747
  chr9:128752498-128752538
  hypo

SEQ ID NO: 438020 - DNA, 59 bp, Homo sapiens; identical to SEQ ID NO: 260749
  chr9:128777744-128777803
  hypo

SEQ ID NO: 438021 - DNA, 175 bp, Homo sapiens; identical to SEQ ID NO: 260750
  chr9:128786731-128786906
  hypo

SEQ ID NO: 438022 - DNA, 147 bp, Homo sapiens; identical to SEQ ID NO: 260751
  chr9:128819865-128820012
  hypo

SEQ ID NO: 438023 - DNA, 165 bp, Homo sapiens; identical to SEQ ID NO: 311236
  chr9:128824393-128824558
  hypo

SEQ ID NO: 438024 - DNA, 59 bp, Homo sapiens; identical to SEQ ID NO: 260753
  chr9:128890927-128890986
  hypo

SEQ ID NO: 438025 - DNA, 111 bp, Homo sapiens; identical to SEQ ID NO: 212996
  chr9:128925326-128925437
  hypo

SEQ ID NO: 438026 - DNA, 35 bp, Homo sapiens; identical to SEQ ID NO: 260755
  chr9:128926861-128926896
  hypo

SEQ ID NO: 438027 - DNA, 440 bp, Homo sapiens; identical to SEQ ID NO: 260756
  chr9:128997999-128998439
  hypo

SEQ ID NO: 438028 - DNA, 295 bp, Homo sapiens; identical to SEQ ID NO: 260757
  chr9:129038608-129038903
  hypo

SEQ ID NO: 438029 - DNA, 140 bp, Homo sapiens; identical to SEQ ID NO: 260758
  chr9:129265881-129266021
  hypo

SEQ ID NO: 438030 - DNA, 79 bp, Homo sapiens; identical to SEQ ID NO: 260759
  chr9:129316510-129316589
  hypo

SEQ ID NO: 438031 - DNA, 119 bp, Homo sapiens; identical to SEQ ID NO: 260760
  chr9:129454751-129454870
  hypo

SEQ ID NO: 438032 - DNA, 224 bp, Homo sapiens; identical to SEQ ID NO: 311247
  chr9:129517389-129517613
  hypo

SEQ ID NO: 438033 - DNA, 37 bp, Homo sapiens; identical to SEQ ID NO: 260764
  chr9:129560119-129560156
  hypo

SEQ ID NO: 438034 - DNA, 97 bp, Homo sapiens; identical to SEQ ID NO: 260765
  chr9:129562214-129562311
  hypo

SEQ ID NO: 438035 - DNA, 37 bp, Homo sapiens; identical to SEQ ID NO: 212998
  chr9:129627966-129628003
  hypo

SEQ ID NO: 438036 - DNA, 237 bp, Homo sapiens; identical to SEQ ID NO: 212999
  chr9:129628399-129628636
  hypo

SEQ ID NO: 438037 - DNA, 425 bp, Homo sapiens; identical to SEQ ID NO: 260768
  chr9:129630576-129631001
  hypo

SEQ ID NO: 438038 - DNA, 76 bp, Homo sapiens; identical to SEQ ID NO: 213000
  chr9:129633597-129633673
  hypo

SEQ ID NO: 438039 - DNA, 135 bp, Homo sapiens; identical to SEQ ID NO: 260770
  chr9:129643034-129643169
  hypo

SEQ ID NO: 438040 - DNA, 148 bp, Homo sapiens; identical to SEQ ID NO: 260771
  chr9:129644774-129644922
  hypo

SEQ ID NO: 438041 - DNA, 38 bp, Homo sapiens; identical to SEQ ID NO: 260773
  chr9:129648781-129648819
  hypo

SEQ ID NO: 438042 - DNA, 40 bp, Homo sapiens; identical to SEQ ID NO: 260774
  chr9:129834459-129834499
  hypo

SEQ ID NO: 438043 - DNA, 658 bp, Homo sapiens; identical to SEQ ID NO: 223678
  chr9:130158818-130159476
  hypo

SEQ ID NO: 438044 - DNA, 36 bp, Homo sapiens; identical to SEQ ID NO: 260775
  chr9:130172835-130172871
  hypo

SEQ ID NO: 438045 - DNA, 84 bp, Homo sapiens; identical to SEQ ID NO: 311261
  chr9:130248449-130248533
  hypo

SEQ ID NO: 438046 - DNA, 190 bp, Homo sapiens; identical to SEQ ID NO: 260777
  chr9:130265601-130265791
  hypo

SEQ ID NO: 438047 - DNA, 167 bp, Homo sapiens; identical to SEQ ID NO: 213002
  chr9:130266739-130266906
  hypo

SEQ ID NO: 438048 - DNA, 273 bp, Homo sapiens; identical to SEQ ID NO: 260779
  chr9:130269317-130269590
  hypo

SEQ ID NO: 438049 - DNA, 317 bp, Homo sapiens; identical to SEQ ID NO: 260780
  chr9:130270528-130270845
  hypo

SEQ ID NO: 438050 - DNA, 198 bp, Homo sapiens; identical to SEQ ID NO: 213004
  chr9:130271243-130271441
  hypo

SEQ ID NO: 438051 - DNA, 163 bp, Homo sapiens; identical to SEQ ID NO: 213005
  chr9:130272563-130272726
  hypo

SEQ ID NO: 438052 - DNA, 71 bp, Homo sapiens; identical to SEQ ID NO: 260783
  chr9:130278830-130278901
  hypo

SEQ ID NO: 438053 - DNA, 69 bp, Homo sapiens; identical to SEQ ID NO: 213006
  chr9:130279231-130279300
  hypo

SEQ ID NO: 438054 - DNA, 326 bp, Homo sapiens; identical to SEQ ID NO: 260785
  chr9:130279874-130280200
  hypo

SEQ ID NO: 438055 - DNA, 37 bp, Homo sapiens; identical to SEQ ID NO: 260786
  chr9:130282274-130282311
  hypo

SEQ ID NO: 438056 - DNA, 34 bp, Homo sapiens; identical to SEQ ID NO: 260787
  chr9:130296359-130296393
  hypo

SEQ ID NO: 438057 - DNA, 203 bp, Homo sapiens; identical to SEQ ID NO: 260788
  chr9:130297782-130297985
  hypo

SEQ ID NO: 438058 - DNA, 300 bp, Homo sapiens; identical to SEQ ID NO: 260790
  chr9:130327523-130327823
  hypo

SEQ ID NO: 438059 - DNA, 473 bp, Homo sapiens; identical to SEQ ID NO: 201885
  chr9:130330786-130331259
  hypo

SEQ ID NO: 438060 - DNA, 158 bp, Homo sapiens; identical to SEQ ID NO: 223680
  chr9:130374196-130374354
  hypo

SEQ ID NO: 438061 - DNA, 36 bp, Homo sapiens; identical to SEQ ID NO: 223681
  chr9:130374657-130374693
  hypo

SEQ ID NO: 438062 - DNA, 180 bp, Homo sapiens; identical to SEQ ID NO: 260791
  chr9:130388085-130388265
  hypo

SEQ ID NO: 438063 - DNA, 199 bp, Homo sapiens; identical to SEQ ID NO: 260792
  chr9:130438945-130439144
  hypo

SEQ ID NO: 438064 - DNA, 45 bp, Homo sapiens; identical to SEQ ID NO: 260793
  chr9:130440870-130440915
  hypo

SEQ ID NO: 438065 - DNA, 191 bp, Homo sapiens; identical to SEQ ID NO: 260794
  chr9:130442501-130442692
  hypo

SEQ ID NO: 438066 - DNA, 162 bp, Homo sapiens; identical to SEQ ID NO: 213009
  chr9:130444669-130444831
  hypo

SEQ ID NO: 438067 - DNA, 191 bp, Homo sapiens; identical to SEQ ID NO: 213010
  chr9:130446345-130446536
  hypo

SEQ ID NO: 438068 - DNA, 33 bp, Homo sapiens; identical to SEQ ID NO: 213011
  chr9:130448210-130448243
  hypo

SEQ ID NO: 438069 - DNA, 201 bp, Homo sapiens; identical to SEQ ID NO: 260798
  chr9:130454485-130454686
  hypo

SEQ ID NO: 438070 - DNA, 39 bp, Homo sapiens; identical to SEQ ID NO: 260799
  chr9:130494892-130494931
  hypo

SEQ ID NO: 438071 - DNA, 154 bp, Homo sapiens; identical to SEQ ID NO: 260801
  chr9:130536485-130536639
  hypo

SEQ ID NO: 438072 - DNA, 345 bp, Homo sapiens; identical to SEQ ID NO: 213012
  chr9:130550821-130551166
  hypo

SEQ ID NO: 438073 - DNA, 36 bp, Homo sapiens; identical to SEQ ID NO: 260803
  chr9:130561820-130561856
  hypo

SEQ ID NO: 438074 - DNA, 37 bp, Homo sapiens; identical to SEQ ID NO: 260804
  chr9:130563064-130563101
  hypo

SEQ ID NO: 438075 - DNA, 67 bp, Homo sapiens; identical to SEQ ID NO: 311292
  chr9:130587468-130587535
  hypo

SEQ ID NO: 438076 - DNA, 55 bp, Homo sapiens; identical to SEQ ID NO: 311293
  chr9:130587565-130587620
  hypo

SEQ ID NO: 438077 - DNA, 40 bp, Homo sapiens; identical to SEQ ID NO: 213013
  chr9:130589225-130589265
  hypo

SEQ ID NO: 438078 - DNA, 141 bp, Homo sapiens; identical to SEQ ID NO: 286753
  chr9:130616612-130616753
  hypo

SEQ ID NO: 438079 - DNA, 93 bp, Homo sapiens; identical to SEQ ID NO: 213014
  chr9:130630679-130630772
  hypo

SEQ ID NO: 438080 - DNA, 215 bp, Homo sapiens; identical to SEQ ID NO: 260808
  chr9:130633162-130633377
  hypo

SEQ ID NO: 438081 - DNA, 185 bp, Homo sapiens; identical to SEQ ID NO: 213015
  chr9:130635124-130635309
  hypo

SEQ ID NO: 438082 - DNA, 62 bp, Homo sapiens; identical to SEQ ID NO: 311303
  chr9:130676088-130676150
  hypo

SEQ ID NO: 438083 - DNA, 154 bp, Homo sapiens; identical to SEQ ID NO: 260814
  chr9:130712703-130712857
  hypo

SEQ ID NO: 438084 - DNA, 107 bp, Homo sapiens; identical to SEQ ID NO: 260815
  chr9:130716085-130716192
  hypo

SEQ ID NO: 438085 - DNA, 104 bp, Homo sapiens; identical to SEQ ID NO: 213020
  chr9:130737468-130737572
  hypo

SEQ ID NO: 438086 - DNA, 31 bp, Homo sapiens; identical to SEQ ID NO: 260817
  chr9:130744755-130744786
  hypo

SEQ ID NO: 438087 - DNA, 124 bp, Homo sapiens; identical to SEQ ID NO: 213021
  chr9:130868765-130868889
  hypo

SEQ ID NO: 438088 - DNA, 48 bp, Homo sapiens; identical to SEQ ID NO: 260819
  chr9:130877183-130877231
  hypo

SEQ ID NO: 438089 - DNA, 104 bp, Homo sapiens; identical to SEQ ID NO: 260820
  chr9:130878928-130879032
  hypo

SEQ ID NO: 438090 - DNA, 142 bp, Homo sapiens; identical to SEQ ID NO: 260821
  chr9:130906607-130906749
  hypo

SEQ ID NO: 438091 - DNA, 317 bp, Homo sapiens; identical to SEQ ID NO: 260823
  chr9:130914350-130914667
  hypo

SEQ ID NO: 438092 - DNA, 121 bp, Homo sapiens; identical to SEQ ID NO: 260824
  chr9:130945587-130945708
  hypo

SEQ ID NO: 438093 - DNA, 163 bp, Homo sapiens; identical to SEQ ID NO: 260825
  chr9:131048963-131049126
  hypo

SEQ ID NO: 438094 - DNA, 40 bp, Homo sapiens; identical to SEQ ID NO: 213024
  chr9:131060967-131061007
  hypo

SEQ ID NO: 438095 - DNA, 85 bp, Homo sapiens; identical to SEQ ID NO: 260827
  chr9:131061249-131061334
  hypo

SEQ ID NO: 438096 - DNA, 83 bp, Homo sapiens; identical to SEQ ID NO: 226543
  chr9:131132510-131132593
  hypo

SEQ ID NO: 438097 - DNA, 82 bp, Homo sapiens; identical to SEQ ID NO: 260829
  chr9:131145992-131146074
  hypo

SEQ ID NO: 438098 - DNA, 220 bp, Homo sapiens; identical to SEQ ID NO: 286764
  chr9:131183034-131183254
  hypo

SEQ ID NO: 438099 - DNA, 179 bp, Homo sapiens; identical to SEQ ID NO: 260831
  chr9:131396613-131396792
  hypo

SEQ ID NO: 438100 - DNA, 147 bp, Homo sapiens; identical to SEQ ID NO: 213026
  chr9:131411426-131411573
  hypo

SEQ ID NO: 438101 - DNA, 146 bp, Homo sapiens; identical to SEQ ID NO: 260834
  chr9:131417339-131417485
  hypo

SEQ ID NO: 438102 - DNA, 204 bp, Homo sapiens; identical to SEQ ID NO: 213027
  chr9:131483897-131484101
  hypo

SEQ ID NO: 438103 - DNA, 36 bp, Homo sapiens; identical to SEQ ID NO: 213028
  chr9:131574473-131574509
  hypo

SEQ ID NO: 438104 - DNA, 37 bp, Homo sapiens; identical to SEQ ID NO: 213029
  chr9:131579962-131579999
  hypo

SEQ ID NO: 438105 - DNA, 174 bp, Homo sapiens; identical to SEQ ID NO: 260839
  chr9:131600339-131600513
  hypo

SEQ ID NO: 438106 - DNA, 135 bp, Homo sapiens; identical to SEQ ID NO: 260840
  chr9:131607624-131607759
  hypo

SEQ ID NO: 438107 - DNA, 155 bp, Homo sapiens; identical to SEQ ID NO: 260841
  chr9:131647361-131647516
  hypo

SEQ ID NO: 438108 - DNA, 155 bp, Homo sapiens; identical to SEQ ID NO: 311333
  chr9:131652561-131652716
  hypo

SEQ ID NO: 438109 - DNA, 395 bp, Homo sapiens; identical to SEQ ID NO: 311334
  chr9:131652746-131653141
  hypo

SEQ ID NO: 438110 - DNA, 399 bp, Homo sapiens; identical to SEQ ID NO: 286768
  chr9:131709401-131709800
  hypo

SEQ ID NO: 438111 - DNA, 98 bp, Homo sapiens; identical to SEQ ID NO: 260844
  chr9:131749119-131749217
  hypo

SEQ ID NO: 438112 - DNA, 260 bp, Homo sapiens; identical to SEQ ID NO: 260845
  chr9:131770315-131770575
  hypo

SEQ ID NO: 438113 - DNA, 112 bp, Homo sapiens; identical to SEQ ID NO: 213033
  chr9:131776674-131776786
  hypo

SEQ ID NO: 438114 - DNA, 200 bp, Homo sapiens; identical to SEQ ID NO: 213034
  chr9:131822190-131822390
  hypo

SEQ ID NO: 438115 - DNA, 201 bp, Homo sapiens; identical to SEQ ID NO: 311344
  chr9:131870087-131870288
  hypo

SEQ ID NO: 438116 - DNA, 125 bp, Homo sapiens; identical to SEQ ID NO: 260852
  chr9:131870880-131871005
  hypo

SEQ ID NO: 438117 - DNA, 36 bp, Homo sapiens; identical to SEQ ID NO: 260853
  chr9:131897374-131897410
  hypo

SEQ ID NO: 438118 - DNA, 157 bp, Homo sapiens; identical to SEQ ID NO: 260854
  chr9:131919404-131919561
  hypo

SEQ ID NO: 438119 - DNA, 277 bp, Homo sapiens; identical to SEQ ID NO: 286771
  chr9:131940269-131940546
  hypo

SEQ ID NO: 438120 - DNA, 390 bp, Homo sapiens; identical to SEQ ID NO: 46623
  chr9:131940585-131940975
  hypo

SEQ ID NO: 438121 - DNA, 227 bp, Homo sapiens; identical to SEQ ID NO: 260855
  chr9:132004480-132004707
  hypo

SEQ ID NO: 438122 - DNA, 196 bp, Homo sapiens; identical to SEQ ID NO: 213038
  chr9:132112539-132112735
  hypo

SEQ ID NO: 438123 - DNA, 240 bp, Homo sapiens; identical to SEQ ID NO: 260858
  chr9:132123266-132123506
  hypo

SEQ ID NO: 438124 - DNA, 502 bp, Homo sapiens; identical to SEQ ID NO: 260859
  chr9:132162536-132163038
  hypo

SEQ ID NO: 438125 - DNA, 218 bp, Homo sapiens; identical to SEQ ID NO: 213040
  chr9:132163279-132163497
  hypo

SEQ ID NO: 438126 - DNA, 271 bp, Homo sapiens; identical to SEQ ID NO: 260861
  chr9:132166918-132167189
  hypo

SEQ ID NO: 438127 - DNA, 169 bp, Homo sapiens; identical to SEQ ID NO: 260862
  chr9:132189584-132189753
  hypo

SEQ ID NO: 438128 - DNA, 47 bp, Homo sapiens; identical to SEQ ID NO: 213041
  chr9:132211772-132211819
  hypo

SEQ ID NO: 438129 - DNA, 34 bp, Homo sapiens; identical to SEQ ID NO: 223691
  chr9:132222864-132222898
  hypo

SEQ ID NO: 438130 - DNA, 56 bp, Homo sapiens; identical to SEQ ID NO: 223693
  chr9:132250698-132250754
  hypo

SEQ ID NO: 438131 - DNA, 36 bp, Homo sapiens; identical to SEQ ID NO: 260865
  chr9:132285635-132285671
  hypo

SEQ ID NO: 438132 - DNA, 551 bp, Homo sapiens; identical to SEQ ID NO: 286787
  chr9:132330680-132331231
  hypo

SEQ ID NO: 438133 - DNA, 321 bp, Homo sapiens; identical to SEQ ID NO: 286788
  chr9:132331336-132331657
  hypo

SEQ ID NO: 438134 - DNA, 42 bp, Homo sapiens; identical to SEQ ID NO: 260866
  chr9:132356355-132356397
  hypo

SEQ ID NO: 438135 - DNA, 199 bp, Homo sapiens; identical to SEQ ID NO: 260867
  chr9:132370722-132370921
  hypo

SEQ ID NO: 438136 - DNA, 42 bp, Homo sapiens; identical to SEQ ID NO: 260870
  chr9:132408623-132408665
  hypo

SEQ ID NO: 438137 - DNA, 101 bp, Homo sapiens; identical to SEQ ID NO: 260871
  chr9:132409736-132409837
  hypo

SEQ ID NO: 438138 - DNA, 168 bp, Homo sapiens; identical to SEQ ID NO: 260872
  chr9:132411516-132411684
  hypo

SEQ ID NO: 438139 - DNA, 137 bp, Homo sapiens; identical to SEQ ID NO: 260873
  chr9:132411887-132412024
  hypo

SEQ ID NO: 438140 - DNA, 37 bp, Homo sapiens; identical to SEQ ID NO: 260874
  chr9:132412333-132412370
  hypo

SEQ ID NO: 438141 - DNA, 42 bp, Homo sapiens; identical to SEQ ID NO: 260875
  chr9:132448117-132448159
  hypo

SEQ ID NO: 438142 - DNA, 84 bp, Homo sapiens; identical to SEQ ID NO: 260876
  chr9:132451960-132452044
  hypo

SEQ ID NO: 438143 - DNA, 136 bp, Homo sapiens; identical to SEQ ID NO: 260877
  chr9:132471798-132471934
  hypo

SEQ ID NO: 438144 - DNA, 209 bp, Homo sapiens; identical to SEQ ID NO: 260878
  chr9:132495391-132495600
  hypo

SEQ ID NO: 438145 - DNA, 96 bp, Homo sapiens; identical to SEQ ID NO: 213046
  chr9:132509434-132509530
  hypo

SEQ ID NO: 438146 - DNA, 94 bp, Homo sapiens; identical to SEQ ID NO: 213047
  chr9:132604072-132604166
  hypo

SEQ ID NO: 438147 - DNA, 202 bp, Homo sapiens; identical to SEQ ID NO: 260882
  chr9:132631149-132631351
  hypo

SEQ ID NO: 438148 - DNA, 202 bp, Homo sapiens; identical to SEQ ID NO: 213049
  chr9:132636600-132636802
  hypo

SEQ ID NO: 438149 - DNA, 53 bp, Homo sapiens; identical to SEQ ID NO: 213050
  chr9:132638505-132638558
  hypo

SEQ ID NO: 438150 - DNA, 130 bp, Homo sapiens; identical to SEQ ID NO: 213054
  chr9:132821045-132821175
  hypo

SEQ ID NO: 438151 - DNA, 58 bp, Homo sapiens; identical to SEQ ID NO: 260889
  chr9:132850526-132850584
  hypo

SEQ ID NO: 438152 - DNA, 58 bp, Homo sapiens; identical to SEQ ID NO: 213059
  chr9:132881756-132881814
  hypo

SEQ ID NO: 438153 - DNA, 63 bp, Homo sapiens; identical to SEQ ID NO: 213060
  chr9:133223968-133224031
  hypo

SEQ ID NO: 438154 - DNA, 329 bp, Homo sapiens; identical to SEQ ID NO: 260895
  chr9:133230037-133230366
  hypo

SEQ ID NO: 438155 - DNA, 198 bp, Homo sapiens; identical to SEQ ID NO: 260896
  chr9:133258530-133258728
  hypo

SEQ ID NO: 438156 - DNA, 104 bp, Homo sapiens; identical to SEQ ID NO: 260897
  chr9:133264434-133264538
  hypo

SEQ ID NO: 438157 - DNA, 72 bp, Homo sapiens; identical to SEQ ID NO: 260898
  chr9:133265444-133265516
  hypo

SEQ ID NO: 438158 - DNA, 309 bp, Homo sapiens; identical to SEQ ID NO: 260899
  chr9:133266378-133266687
  hypo

SEQ ID NO: 438159 - DNA, 149 bp, Homo sapiens; identical to SEQ ID NO: 260900
  chr9:133281384-133281533
  hypo

SEQ ID NO: 438160 - DNA, 376 bp, Homo sapiens; identical to SEQ ID NO: 260902
  chr9:133303487-133303863
  hypo

SEQ ID NO: 438161 - DNA, 104 bp, Homo sapiens; identical to SEQ ID NO: 213062
  chr9:133304439-133304543
  hypo

SEQ ID NO: 438162 - DNA, 159 bp, Homo sapiens; identical to SEQ ID NO: 213063
  chr9:133304981-133305140
  hypo

SEQ ID NO: 438163 - DNA, 235 bp, Homo sapiens; identical to SEQ ID NO: 260905
  chr9:133305757-133305992
  hypo

SEQ ID NO: 438164 - DNA, 251 bp, Homo sapiens; identical to SEQ ID NO: 260906
  chr9:133306770-133307021
  hypo

SEQ ID NO: 438165 - DNA, 111 bp, Homo sapiens; identical to SEQ ID NO: 260907
  chr9:133314399-133314510
  hypo

SEQ ID NO: 438166 - DNA, 43 bp, Homo sapiens; identical to SEQ ID NO: 260908
  chr9:133345459-133345502
  hypo

SEQ ID NO: 438167 - DNA, 259 bp, Homo sapiens; identical to SEQ ID NO: 260909
  chr9:133346156-133346415
  hypo

SEQ ID NO: 438168 - DNA, 136 bp, Homo sapiens; identical to SEQ ID NO: 311419
  chr9:133408939-133409075
  hypo

SEQ ID NO: 438169 - DNA, 40 bp, Homo sapiens; identical to SEQ ID NO: 260912
  chr9:133421534-133421574
  hypo

SEQ ID NO: 438170 - DNA, 515 bp, Homo sapiens; identical to SEQ ID NO: 260913
  chr9:133426643-133427158
  hypo

SEQ ID NO: 438171 - DNA, 39 bp, Homo sapiens; identical to SEQ ID NO: 260914
  chr9:133433441-133433480
  hypo

SEQ ID NO: 438172 - DNA, 80 bp, Homo sapiens; identical to SEQ ID NO: 260915
  chr9:133450277-133450357
  hypo

SEQ ID NO: 438173 - DNA, 331 bp, Homo sapiens; identical to SEQ ID NO: 260918
  chr9:133527218-133527549
  hypo

SEQ ID NO: 438174 - DNA, 33 bp, Homo sapiens; identical to SEQ ID NO: 260919
  chr9:133580976-133581009
  hypo

SEQ ID NO: 438175 - DNA, 88 bp, Homo sapiens; identical to SEQ ID NO: 260920
  chr9:133583814-133583902
  hypo

SEQ ID NO: 438176 - DNA, 120 bp, Homo sapiens; identical to SEQ ID NO: 213065
  chr9:133585240-133585360
  hypo

SEQ ID NO: 438177 - DNA, 69 bp, Homo sapiens; identical to SEQ ID NO: 386097
  chr9:133593031-133593100
  hypo

SEQ ID NO: 438178 - DNA, 40 bp, Homo sapiens; identical to SEQ ID NO: 213067
  chr9:133606663-133606703
  hypo

SEQ ID NO: 438179 - DNA, 82 bp, Homo sapiens; identical to SEQ ID NO: 213068
  chr9:133609268-133609350
  hypo

SEQ ID NO: 438180 - DNA, 34 bp, Homo sapiens; identical to SEQ ID NO: 260927
  chr9:133755899-133755933
  hypo

SEQ ID NO: 438181 - DNA, 364 bp, Homo sapiens; identical to SEQ ID NO: 260928
  chr9:133759676-133760040
  hypo

SEQ ID NO: 438182 - DNA, 110 bp, Homo sapiens; identical to SEQ ID NO: 213072
  chr9:133767699-133767809
  hypo

SEQ ID NO: 438183 - DNA, 123 bp, Homo sapiens; identical to SEQ ID NO: 213073
  chr9:133767878-133768001
  hypo

SEQ ID NO: 438184 - DNA, 120 bp, Homo sapiens; identical to SEQ ID NO: 311442
  chr9:133773572-133773692
  hypo

SEQ ID NO: 438185 - DNA, 211 bp, Homo sapiens; identical to SEQ ID NO: 260935
  chr9:133802158-133802369
  hypo

SEQ ID NO: 438186 - DNA, 400 bp, Homo sapiens; identical to SEQ ID NO: 286810
  chr9:133814235-133814635
  hypo

SEQ ID NO: 438187 - DNA, 107 bp, Homo sapiens; identical to SEQ ID NO: 213076
  chr9:133911551-133911658
  hypo

SEQ ID NO: 438188 - DNA, 85 bp, Homo sapiens; identical to SEQ ID NO: 311450
  chr9:133911723-133911808
  hypo

SEQ ID NO: 438189 - DNA, 113 bp, Homo sapiens; identical to SEQ ID NO: 260937
  chr9:133926312-133926425
  hypo

SEQ ID NO: 438190 - DNA, 105 bp, Homo sapiens; identical to SEQ ID NO: 260938
  chr9:133927488-133927593
  hypo

SEQ ID NO: 438191 - DNA, 54 bp, Homo sapiens; identical to SEQ ID NO: 260940
  chr9:133951050-133951104
  hypo

SEQ ID NO: 438192 - DNA, 244 bp, Homo sapiens; identical to SEQ ID NO: 213078
  chr9:133967063-133967307
  hypo

SEQ ID NO: 438193 - DNA, 216 bp, Homo sapiens; identical to SEQ ID NO: 260942
  chr9:133967914-133968130
  hypo

SEQ ID NO: 438194 - DNA, 94 bp, Homo sapiens; identical to SEQ ID NO: 260943
  chr9:133982140-133982234
  hypo

SEQ ID NO: 438195 - DNA, 346 bp, Homo sapiens; identical to SEQ ID NO: 260944
  chr9:133987304-133987650
  hypo

SEQ ID NO: 438196 - DNA, 85 bp, Homo sapiens; identical to SEQ ID NO: 260945
  chr9:133987867-133987952
  hypo

SEQ ID NO: 438197 - DNA, 47 bp, Homo sapiens; identical to SEQ ID NO: 260946
  chr9:134110673-134110720
  hypo

SEQ ID NO: 438198 - DNA, 31 bp, Homo sapiens; identical to SEQ ID NO: 213080
  chr9:134132752-134132783
  hypo

SEQ ID NO: 438199 - DNA, 226 bp, Homo sapiens; identical to SEQ ID NO: 311463
  chr9:134136005-134136231
  hypo

SEQ ID NO: 438200 - DNA, 221 bp, Homo sapiens; identical to SEQ ID NO: 311464
  chr9:134136325-134136546
  hypo

SEQ ID NO: 438201 - DNA, 225 bp, Homo sapiens; identical to SEQ ID NO: 260950
  chr9:134188222-134188447
  hypo

SEQ ID NO: 438202 - DNA, 154 bp, Homo sapiens; identical to SEQ ID NO: 260953
  chr9:134195896-134196050
  hypo

SEQ ID NO: 438203 - DNA, 112 bp, Homo sapiens; identical to SEQ ID NO: 260954
  chr9:134200644-134200756
  hypo

SEQ ID NO: 438204 - DNA, 42 bp, Homo sapiens; identical to SEQ ID NO: 311468
  chr9:134207874-134207916
  hypo

SEQ ID NO: 438205 - DNA, 32 bp, Homo sapiens; identical to SEQ ID NO: 260956
  chr9:134279022-134279054
  hypo

SEQ ID NO: 438206 - DNA, 258 bp, Homo sapiens; identical to SEQ ID NO: 260957
  chr9:134308039-134308297
  hypo

SEQ ID NO: 438207 - DNA, 120 bp, Homo sapiens; identical to SEQ ID NO: 260958
  chr9:134377410-134377530
  hypo

SEQ ID NO: 438208 - DNA, 184 bp, Homo sapiens; identical to SEQ ID NO: 213082
  chr9:134400291-134400475
  hypo

SEQ ID NO: 438209 - DNA, 31 bp, Homo sapiens; identical to SEQ ID NO: 260960
  chr9:134509059-134509090
  hypo

SEQ ID NO: 438210 - DNA, 38 bp, Homo sapiens; identical to SEQ ID NO: 213083
  chr9:134688853-134688891
  hypo

SEQ ID NO: 438211 - DNA, 370 bp, Homo sapiens; identical to SEQ ID NO: 260962
  chr9:134731512-134731882
  hypo

SEQ ID NO: 438212 - DNA, 186 bp, Homo sapiens; identical to SEQ ID NO: 213084
  chr9:134746467-134746653
  hypo

SEQ ID NO: 438213 - DNA, 337 bp, Homo sapiens; identical to SEQ ID NO: 260964
  chr9:134775011-134775348
  hypo

SEQ ID NO: 438214 - DNA, 249 bp, Homo sapiens; identical to SEQ ID NO: 260966
  chr9:134836480-134836729
  hypo

SEQ ID NO: 438215 - DNA, 138 bp, Homo sapiens; identical to SEQ ID NO: 213086
  chr9:134902645-134902783
  hypo

SEQ ID NO: 438216 - DNA, 196 bp, Homo sapiens; identical to SEQ ID NO: 213087
  chr9:134903267-134903463
  hypo

SEQ ID NO: 438217 - DNA, 97 bp, Homo sapiens; identical to SEQ ID NO: 260969
  chr9:134929560-134929657
  hypo

SEQ ID NO: 438218 - DNA, 879 bp, Homo sapiens; identical to SEQ ID NO: 213089
  chr9:135048988-135049867
  hypo

SEQ ID NO: 438219 - DNA, 45 bp, Homo sapiens; identical to SEQ ID NO: 260971
  chr9:135084416-135084461
  hypo

SEQ ID NO: 438220 - DNA, 48 bp, Homo sapiens; identical to SEQ ID NO: 311485
  chr9:135102284-135102332
  hypo

SEQ ID NO: 438221 - DNA, 100 bp, Homo sapiens; identical to SEQ ID NO: 213090
  chr9:135195997-135196097
  hypo

SEQ ID NO: 438222 - DNA, 144 bp, Homo sapiens; identical to SEQ ID NO: 213091
  chr9:135196474-135196618
  hypo

SEQ ID NO: 438223 - DNA, 39 bp, Homo sapiens; identical to SEQ ID NO: 260975
  chr9:135239755-135239794
  hypo

SEQ ID NO: 438224 - DNA, 343 bp, Homo sapiens; identical to SEQ ID NO: 260978
  chr9:135331489-135331832
  hypo

SEQ ID NO: 438225 - DNA, 209 bp, Homo sapiens; identical to SEQ ID NO: 260979
  chr9:135338502-135338711
  hypo

SEQ ID NO: 438226 - DNA, 157 bp, Homo sapiens; identical to SEQ ID NO: 260980
  chr9:135360968-135361125
  hypo

SEQ ID NO: 438227 - DNA, 234 bp, Homo sapiens; identical to SEQ ID NO: 213095
  chr9:135384263-135384497
  hypo

SEQ ID NO: 438228 - DNA, 161 bp, Homo sapiens; identical to SEQ ID NO: 223714
  chr9:135395349-135395510
  hypo

SEQ ID NO: 438229 - DNA, 34 bp, Homo sapiens; identical to SEQ ID NO: 260982
  chr9:135447836-135447870
  hypo

SEQ ID NO: 438230 - DNA, 37 bp, Homo sapiens; identical to SEQ ID NO: 286828
  chr9:135464627-135464664
  hypo

SEQ ID NO: 438231 - DNA, 83 bp, Homo sapiens; identical to SEQ ID NO: 260983
  chr9:135479250-135479333
  hypo

SEQ ID NO: 438232 - DNA, 35 bp, Homo sapiens; identical to SEQ ID NO: 260984
  chr9:135507041-135507076
  hypo

SEQ ID NO: 438233 - DNA, 320 bp, Homo sapiens; identical to SEQ ID NO: 260986
  chr9:135514394-135514714
  hypo

SEQ ID NO: 438234 - DNA, 236 bp, Homo sapiens; identical to SEQ ID NO: 260987
  chr9:135520063-135520299
  hypo

SEQ ID NO: 438235 - DNA, 112 bp, Homo sapiens; identical to SEQ ID NO: 260989
  chr9:135537995-135538107
  hypo

SEQ ID NO: 438236 - DNA, 245 bp, Homo sapiens; identical to SEQ ID NO: 260990
  chr9:135538541-135538786
  hypo

SEQ ID NO: 438237 - DNA, 78 bp, Homo sapiens; identical to SEQ ID NO: 260992
  chr9:135588873-135588951
  hypo

SEQ ID NO: 438238 - DNA, 334 bp, Homo sapiens; identical to SEQ ID NO: 260993
  chr9:135600616-135600950
  hypo

SEQ ID NO: 438239 - DNA, 153 bp, Homo sapiens; identical to SEQ ID NO: 213098
  chr9:135624734-135624887
  hypo

SEQ ID NO: 438240 - DNA, 347 bp, Homo sapiens; identical to SEQ ID NO: 260995
  chr9:135624917-135625264
  hypo

SEQ ID NO: 438241 - DNA, 203 bp, Homo sapiens; identical to SEQ ID NO: 213100
  chr9:135626043-135626246
  hypo

SEQ ID NO: 438242 - DNA, 283 bp, Homo sapiens; identical to SEQ ID NO: 260997
  chr9:135632487-135632770
  hypo

SEQ ID NO: 438243 - DNA, 164 bp, Homo sapiens; identical to SEQ ID NO: 260998
  chr9:135671075-135671239
  hypo

SEQ ID NO: 438244 - DNA, 171 bp, Homo sapiens; identical to SEQ ID NO: 260999
  chr9:135701621-135701792
  hypo

SEQ ID NO: 438245 - DNA, 387 bp, Homo sapiens; identical to SEQ ID NO: 261000
  chr9:135712695-135713082
  hypo

SEQ ID NO: 438246 - DNA, 45 bp, Homo sapiens; identical to SEQ ID NO: 261001
  chr9:135714354-135714399
  hypo

SEQ ID NO: 438247 - DNA, 65 bp, Homo sapiens; identical to SEQ ID NO: 213101
  chr9:135735333-135735398
  hypo

SEQ ID NO: 438248 - DNA, 141 bp, Homo sapiens; identical to SEQ ID NO: 213102
  chr9:135745917-135746058
  hypo

SEQ ID NO: 438249 - DNA, 84 bp, Homo sapiens; identical to SEQ ID NO: 261008
  chr9:135904330-135904414
  hypo

SEQ ID NO: 438250 - DNA, 180 bp, Homo sapiens; identical to SEQ ID NO: 201921
  chr9:135906376-135906556
  hypo

SEQ ID NO: 438251 - DNA, 135 bp, Homo sapiens; identical to SEQ ID NO: 261009
  chr9:135907665-135907800
  hypo

SEQ ID NO: 438252 - DNA, 127 bp, Homo sapiens; identical to SEQ ID NO: 311526
  chr9:135908016-135908143
  hypo

SEQ ID NO: 438253 - DNA, 247 bp, Homo sapiens; identical to SEQ ID NO: 261012
  chr9:135920656-135920903
  hypo

SEQ ID NO: 438254 - DNA, 138 bp, Homo sapiens; identical to SEQ ID NO: 261013
  chr9:135922416-135922554
  hypo

SEQ ID NO: 438255 - DNA, 36 bp, Homo sapiens; identical to SEQ ID NO: 261014
  chr9:135926317-135926353
  hypo

SEQ ID NO: 438256 - DNA, 45 bp, Homo sapiens; identical to SEQ ID NO: 213108
  chr9:135962412-135962457
  hypo

SEQ ID NO: 438257 - DNA, 126 bp, Homo sapiens; identical to SEQ ID NO: 261018
  chr9:135979097-135979223
  hypo

SEQ ID NO: 438258 - DNA, 104 bp, Homo sapiens; identical to SEQ ID NO: 261019
  chr9:135991327-135991431
  hypo

SEQ ID NO: 438259 - DNA, 305 bp, Homo sapiens; identical to SEQ ID NO: 261020
  chr9:136044289-136044594
  hypo

SEQ ID NO: 438260 - DNA, 150 bp, Homo sapiens; identical to SEQ ID NO: 261021
  chr9:136369631-136369781
  hypo

SEQ ID NO: 438261 - DNA, 39 bp, Homo sapiens; identical to SEQ ID NO: 261023
  chr9:136375448-136375487
  hypo

SEQ ID NO: 438262 - DNA, 1137 bp, Homo sapiens; identical to SEQ ID NO: 261025
  chr9:136376182-136377319
  hypo

SEQ ID NO: 438263 - DNA, 313 bp, Homo sapiens; identical to SEQ ID NO: 261026
  chr9:136377539-136377852
  hypo

SEQ ID NO: 438264 - DNA, 226 bp, Homo sapiens; identical to SEQ ID NO: 311542
  chr9:136378203-136378429
  hypo

SEQ ID NO: 438265 - DNA, 50 bp, Homo sapiens; identical to SEQ ID NO: 311543
  chr9:136378519-136378569
  hypo

SEQ ID NO: 438266 - DNA, 119 bp, Homo sapiens; identical to SEQ ID NO: 213112
  chr9:136381250-136381369
  hypo

SEQ ID NO: 438267 - DNA, 188 bp, Homo sapiens; identical to SEQ ID NO: 213113
  chr9:136382129-136382317
  hypo

SEQ ID NO: 438268 - DNA, 176 bp, Homo sapiens; identical to SEQ ID NO: 213114
  chr9:136382777-136382953
  hypo

SEQ ID NO: 438269 - DNA, 75 bp, Homo sapiens; identical to SEQ ID NO: 311552
  chr9:136395959-136396034
  hypo

SEQ ID NO: 438270 - DNA, 112 bp, Homo sapiens; identical to SEQ ID NO: 261038
  chr9:136412218-136412330
  hypo

SEQ ID NO: 438271 - DNA, 74 bp, Homo sapiens; identical to SEQ ID NO: 261039
  chr9:136412360-136412434
  hypo

SEQ ID NO: 438272 - DNA, 41 bp, Homo sapiens; identical to SEQ ID NO: 213120
  chr9:136501758-136501799
  hypo

SEQ ID NO: 438273 - DNA, 147 bp, Homo sapiens; identical to SEQ ID NO: 261041
  chr9:136507436-136507583
  hypo

SEQ ID NO: 438274 - DNA, 495 bp, Homo sapiens; identical to SEQ ID NO: 261043
  chr9:136537810-136538305
  hypo

SEQ ID NO: 438275 - DNA, 510 bp, Homo sapiens; identical to SEQ ID NO: 261044
  chr9:136546765-136547275
  hypo

SEQ ID NO: 438276 - DNA, 210 bp, Homo sapiens; identical to SEQ ID NO: 261045
  chr9:136549274-136549484
  hypo

SEQ ID NO: 438277 - DNA, 164 bp, Homo sapiens; identical to SEQ ID NO: 261046
  chr9:136553360-136553524
  hypo

SEQ ID NO: 438278 - DNA, 358 bp, Homo sapiens; identical to SEQ ID NO: 261047
  chr9:136557802-136558160
  hypo

SEQ ID NO: 438279 - DNA, 241 bp, Homo sapiens; identical to SEQ ID NO: 261048
  chr9:136569905-136570146
  hypo

SEQ ID NO: 438280 - DNA, 81 bp, Homo sapiens; identical to SEQ ID NO: 261049
  chr9:136575502-136575583
  hypo

SEQ ID NO: 438281 - DNA, 133 bp, Homo sapiens; identical to SEQ ID NO: 261050
  chr9:136575613-136575746
  hypo

SEQ ID NO: 438282 - DNA, 155 bp, Homo sapiens; identical to SEQ ID NO: 261051
  chr9:136575776-136575931
  hypo

SEQ ID NO: 438283 - DNA, 323 bp, Homo sapiens; identical to SEQ ID NO: 261052
  chr9:136593120-136593443
  hypo

SEQ ID NO: 438284 - DNA, 105 bp, Homo sapiens; identical to SEQ ID NO: 261053
  chr9:136607053-136607158
  hypo

SEQ ID NO: 438285 - DNA, 103 bp, Homo sapiens; identical to SEQ ID NO: 261054
  chr9:136621773-136621876
  hypo

SEQ ID NO: 438286 - DNA, 74 bp, Homo sapiens; identical to SEQ ID NO: 213121
  chr9:136641169-136641243
  hypo

SEQ ID NO: 438287 - DNA, 196 bp, Homo sapiens; identical to SEQ ID NO: 261056
  chr9:136645036-136645232
  hypo

SEQ ID NO: 438288 - DNA, 172 bp, Homo sapiens; identical to SEQ ID NO: 213122
  chr9:136648156-136648328
  hypo

SEQ ID NO: 438289 - DNA, 135 bp, Homo sapiens; identical to SEQ ID NO: 261058
  chr9:136649606-136649741
  hypo

SEQ ID NO: 438290 - DNA, 208 bp, Homo sapiens; identical to SEQ ID NO: 213123
  chr9:136651136-136651344
  hypo

SEQ ID NO: 438291 - DNA, 288 bp, Homo sapiens; identical to SEQ ID NO: 213124
  chr9:136655639-136655927
  hypo

SEQ ID NO: 438292 - DNA, 163 bp, Homo sapiens; identical to SEQ ID NO: 213125
  chr9:136664524-136664687
  hypo

SEQ ID NO: 438293 - DNA, 111 bp, Homo sapiens; identical to SEQ ID NO: 261062
  chr9:136665006-136665117
  hypo

SEQ ID NO: 438294 - DNA, 72 bp, Homo sapiens; identical to SEQ ID NO: 261064
  chr9:136669074-136669146
  hypo

SEQ ID NO: 438295 - DNA, 344 bp, Homo sapiens; identical to SEQ ID NO: 261065
  chr9:136669406-136669750
  hypo

SEQ ID NO: 438296 - DNA, 153 bp, Homo sapiens; identical to SEQ ID NO: 261066
  chr9:136670534-136670687
  hypo

SEQ ID NO: 438297 - DNA, 496 bp, Homo sapiens; identical to SEQ ID NO: 261067
  chr9:136671074-136671570
  hypo

SEQ ID NO: 438298 - DNA, 471 bp, Homo sapiens; identical to SEQ ID NO: 261068
  chr9:136671901-136672372
  hypo

SEQ ID NO: 438299 - DNA, 179 bp, Homo sapiens; identical to SEQ ID NO: 261069
  chr9:136676092-136676271
  hypo

SEQ ID NO: 438300 - DNA, 300 bp, Homo sapiens; identical to SEQ ID NO: 213127
  chr9:136677205-136677505
  hypo

SEQ ID NO: 438301 - DNA, 962 bp, Homo sapiens; identical to SEQ ID NO: 261071
  chr9:136680293-136681255
  hypo

SEQ ID NO: 438302 - DNA, 385 bp, Homo sapiens; identical to SEQ ID NO: 261072
  chr9:136686196-136686581
  hypo

SEQ ID NO: 438303 - DNA, 510 bp, Homo sapiens; identical to SEQ ID NO: 261073
  chr9:136689993-136690503
  hypo

SEQ ID NO: 438304 - DNA, 115 bp, Homo sapiens; identical to SEQ ID NO: 213130
  chr9:136691771-136691886
  hypo

SEQ ID NO: 438305 - DNA, 236 bp, Homo sapiens; identical to SEQ ID NO: 261075
  chr9:136693624-136693860
  hypo

SEQ ID NO: 438306 - DNA, 75 bp, Homo sapiens; identical to SEQ ID NO: 213131
  chr9:136694904-136694979
  hypo

SEQ ID NO: 438307 - DNA, 174 bp, Homo sapiens; identical to SEQ ID NO: 213133
  chr9:136699684-136699858
  hypo

SEQ ID NO: 438308 - DNA, 308 bp, Homo sapiens; identical to SEQ ID NO: 261079
  chr9:136714185-136714493
  hypo

SEQ ID NO: 438309 - DNA, 239 bp, Homo sapiens; identical to SEQ ID NO: 261080
  chr9:136718546-136718785
  hypo

SEQ ID NO: 438310 - DNA, 434 bp, Homo sapiens; identical to SEQ ID NO: 261081
  chr9:136722069-136722503
  hypo

SEQ ID NO: 438311 - DNA, 179 bp, Homo sapiens; identical to SEQ ID NO: 213137
  chr9:136723290-136723469
  hypo

SEQ ID NO: 438312 - DNA, 80 bp, Homo sapiens; identical to SEQ ID NO: 213138
  chr9:136725455-136725535
  hypo

SEQ ID NO: 438313 - DNA, 65 bp, Homo sapiens; identical to SEQ ID NO: 261085
  chr9:136729692-136729757
  hypo

SEQ ID NO: 438314 - DNA, 47 bp, Homo sapiens; identical to SEQ ID NO: 261086
  chr9:136729989-136730036
  hypo

SEQ ID NO: 438315 - DNA, 35 bp, Homo sapiens; identical to SEQ ID NO: 213139
  chr9:136731601-136731636
  hypo

SEQ ID NO: 438316 - DNA, 172 bp, Homo sapiens; identical to SEQ ID NO: 261088
  chr9:136732402-136732574
  hypo

SEQ ID NO: 438317 - DNA, 455 bp, Homo sapiens; identical to SEQ ID NO: 261089
  chr9:136733334-136733789
  hypo

SEQ ID NO: 438318 - DNA, 335 bp, Homo sapiens; identical to SEQ ID NO: 261090
  chr9:136737403-136737738
  hypo

SEQ ID NO: 438319 - DNA, 114 bp, Homo sapiens; identical to SEQ ID NO: 261091
  chr9:136739160-136739274
  hypo

SEQ ID NO: 438320 - DNA, 100 bp, Homo sapiens; identical to SEQ ID NO: 213142
  chr9:136743438-136743538
  hypo

SEQ ID NO: 438321 - DNA, 47 bp, Homo sapiens; identical to SEQ ID NO: 213143
  chr9:136743950-136743997
  hypo

SEQ ID NO: 438322 - DNA, 253 bp, Homo sapiens; identical to SEQ ID NO: 261094
  chr9:136746362-136746615
  hypo

SEQ ID NO: 438323 - DNA, 171 bp, Homo sapiens; identical to SEQ ID NO: 213144
  chr9:136751547-136751718
  hypo

SEQ ID NO: 438324 - DNA, 75 bp, Homo sapiens; identical to SEQ ID NO: 261096
  chr9:136754061-136754136
  hypo

SEQ ID NO: 438325 - DNA, 363 bp, Homo sapiens; identical to SEQ ID NO: 261097
  chr9:136758751-136759114
  hypo

SEQ ID NO: 438326 - DNA, 77 bp, Homo sapiens; identical to SEQ ID NO: 213146
  chr9:136762226-136762303
  hypo

SEQ ID NO: 438327 - DNA, 59 bp, Homo sapiens; identical to SEQ ID NO: 261099
  chr9:136763773-136763832
  hypo

SEQ ID NO: 438328 - DNA, 303 bp, Homo sapiens; identical to SEQ ID NO: 213147
  chr9:136766707-136767010
  hypo

SEQ ID NO: 438329 - DNA, 368 bp, Homo sapiens; identical to SEQ ID NO: 261101
  chr9:136771809-136772177
  hypo

SEQ ID NO: 438330 - DNA, 126 bp, Homo sapiens; identical to SEQ ID NO: 261102
  chr9:136773825-136773951
  hypo

SEQ ID NO: 438331 - DNA, 57 bp, Homo sapiens; identical to SEQ ID NO: 213149
  chr9:136785103-136785160
  hypo

SEQ ID NO: 438332 - DNA, 39 bp, Homo sapiens; identical to SEQ ID NO: 261104
  chr9:136786010-136786049
  hypo

SEQ ID NO: 438333 - DNA, 193 bp, Homo sapiens; identical to SEQ ID NO: 261105
  chr9:136795959-136796152
  hypo

SEQ ID NO: 438334 - DNA, 161 bp, Homo sapiens; identical to SEQ ID NO: 261107
  chr9:136802014-136802175
  hypo

SEQ ID NO: 438335 - DNA, 138 bp, Homo sapiens; identical to SEQ ID NO: 261108
  chr9:136834267-136834405
  hypo

SEQ ID NO: 438336 - DNA, 303 bp, Homo sapiens; identical to SEQ ID NO: 213150
  chr9:136835362-136835665
  hypo

SEQ ID NO: 438337 - DNA, 281 bp, Homo sapiens; identical to SEQ ID NO: 261110
  chr9:136836266-136836547
  hypo

SEQ ID NO: 438338 - DNA, 196 bp, Homo sapiens; identical to SEQ ID NO: 261111
  chr9:136852629-136852825
  hypo

SEQ ID NO: 438339 - DNA, 191 bp, Homo sapiens; identical to SEQ ID NO: 213151
  chr9:136905412-136905603
  hypo

SEQ ID NO: 438340 - DNA, 34 bp, Homo sapiens; identical to SEQ ID NO: 261113
  chr9:136915611-136915645
  hypo

SEQ ID NO: 438341 - DNA, 230 bp, Homo sapiens; identical to SEQ ID NO: 261114
  chr9:136920306-136920536
  hypo

SEQ ID NO: 438342 - DNA, 84 bp, Homo sapiens; identical to SEQ ID NO: 261115
  chr9:136993426-136993510
  hypo

SEQ ID NO: 438343 - DNA, 111 bp, Homo sapiens; identical to SEQ ID NO: 311632
  chr9:136999417-136999528
  hypo

SEQ ID NO: 438344 - DNA, 219 bp, Homo sapiens; identical to SEQ ID NO: 286838
  chr9:137273878-137274097
  hypo

SEQ ID NO: 438345 - DNA, 44 bp, Homo sapiens; identical to SEQ ID NO: 261118
  chr9:137280523-137280567
  hypo

SEQ ID NO: 438346 - DNA, 64 bp, Homo sapiens; identical to SEQ ID NO: 311636
  chr9:137280948-137281012
  hypo

SEQ ID NO: 438347 - DNA, 217 bp, Homo sapiens; identical to SEQ ID NO: 261120
  chr9:137281713-137281930
  hypo

SEQ ID NO: 438348 - DNA, 182 bp, Homo sapiens; identical to SEQ ID NO: 261121
  chr9:137282423-137282605
  hypo

SEQ ID NO: 438349 - DNA, 96 bp, Homo sapiens; identical to SEQ ID NO: 261122
  chr9:137282869-137282965
  hypo

SEQ ID NO: 438350 - DNA, 48 bp, Homo sapiens; identical to SEQ ID NO: 261123
  chr9:137293295-137293343
  hypo

SEQ ID NO: 438351 - DNA, 82 bp, Homo sapiens; identical to SEQ ID NO: 261124
  chr9:137314810-137314892
  hypo

SEQ ID NO: 438352 - DNA, 34 bp, Homo sapiens; identical to SEQ ID NO: 213152
  chr9:137330715-137330749
  hypo

SEQ ID NO: 438353 - DNA, 60 bp, Homo sapiens; identical to SEQ ID NO: 261126
  chr9:137352256-137352316
  hypo

SEQ ID NO: 438354 - DNA, 250 bp, Homo sapiens; identical to SEQ ID NO: 261127
  chr9:137360364-137360614
  hypo

SEQ ID NO: 438355 - DNA, 93 bp, Homo sapiens; identical to SEQ ID NO: 261128
  chr9:137387911-137388004
  hypo

SEQ ID NO: 438356 - DNA, 153 bp, Homo sapiens; identical to SEQ ID NO: 261129
  chr9:137433016-137433169
  hypo

SEQ ID NO: 438357 - DNA, 59 bp, Homo sapiens; identical to SEQ ID NO: 311647
  chr9:137439057-137439116
  hypo

SEQ ID NO: 438358 - DNA, 67 bp, Homo sapiens; identical to SEQ ID NO: 311648
  chr9:137439146-137439213
  hypo

SEQ ID NO: 438359 - DNA, 140 bp, Homo sapiens; identical to SEQ ID NO: 261131
  chr9:137474607-137474747
  hypo

SEQ ID NO: 438360 - DNA, 99 bp, Homo sapiens; identical to SEQ ID NO: 261132
  chr9:137497208-137497307
  hypo

SEQ ID NO: 438361 - DNA, 264 bp, Homo sapiens; identical to SEQ ID NO: 261133
  chr9:137515857-137516121
  hypo

SEQ ID NO: 438362 - DNA, 165 bp, Homo sapiens; identical to SEQ ID NO: 261134
  chr9:137542648-137542813
  hypo

SEQ ID NO: 438363 - DNA, 81 bp, Homo sapiens; identical to SEQ ID NO: 311653
  chr9:137575945-137576026
  hypo

SEQ ID NO: 438364 - DNA, 132 bp, Homo sapiens; identical to SEQ ID NO: 261136
  chr9:137580163-137580295
  hypo

SEQ ID NO: 438365 - DNA, 36 bp, Homo sapiens; identical to SEQ ID NO: 261137
  chr9:137583040-137583076
  hypo

SEQ ID NO: 438366 - DNA, 106 bp, Homo sapiens; identical to SEQ ID NO: 261138
  chr9:137601996-137602102
  hypo

SEQ ID NO: 438367 - DNA, 80 bp, Homo sapiens; identical to SEQ ID NO: 261139
  chr9:137602132-137602212
  hypo

SEQ ID NO: 438368 - DNA, 199 bp, Homo sapiens; identical to SEQ ID NO: 261140
  chr9:137609684-137609883
  hypo

SEQ ID NO: 438369 - DNA, 615 bp, Homo sapiens; identical to SEQ ID NO: 261142
  chr9:137621052-137621667
  hypo

SEQ ID NO: 438370 - DNA, 159 bp, Homo sapiens; identical to SEQ ID NO: 261143
  chr9:137622086-137622245
  hypo

SEQ ID NO: 438371 - DNA, 253 bp, Homo sapiens; identical to SEQ ID NO: 261144
  chr9:137622810-137623063
  hypo

SEQ ID NO: 438372 - DNA, 109 bp, Homo sapiens; identical to SEQ ID NO: 261146
  chr9:137632038-137632147
  hypo

SEQ ID NO: 438373 - DNA, 126 bp, Homo sapiens; identical to SEQ ID NO: 261147
  chr9:137632911-137633037
  hypo

SEQ ID NO: 438374 - DNA, 113 bp, Homo sapiens; identical to SEQ ID NO: 261152
  chr9:137650028-137650141
  hypo

SEQ ID NO: 438375 - DNA, 109 bp, Homo sapiens; identical to SEQ ID NO: 261153
  chr9:137650639-137650748
  hypo

SEQ ID NO: 438376 - DNA, 81 bp, Homo sapiens; identical to SEQ ID NO: 261155
  chr9:137708698-137708779
  hypo

SEQ ID NO: 438377 - DNA, 40 bp, Homo sapiens; identical to SEQ ID NO: 213155
  chr9:137709404-137709444
  hypo

SEQ ID NO: 438378 - DNA, 227 bp, Homo sapiens; identical to SEQ ID NO: 261157
  chr9:137709949-137710176
  hypo

SEQ ID NO: 438379 - DNA, 79 bp, Homo sapiens; identical to SEQ ID NO: 261158
  chr9:137710620-137710699
  hypo

SEQ ID NO: 438380 - DNA, 90 bp, Homo sapiens; identical to SEQ ID NO: 261159
  chr9:137716485-137716575
  hypo

SEQ ID NO: 438381 - DNA, 50 bp, Homo sapiens; identical to SEQ ID NO: 213156
  chr9:137718800-137718850
  hypo

SEQ ID NO: 438382 - DNA, 33 bp, Homo sapiens; identical to SEQ ID NO: 261162
  chr9:137727555-137727588
  hypo

SEQ ID NO: 438383 - DNA, 552 bp, Homo sapiens; identical to SEQ ID NO: 261163
  chr9:137760000-137760552
  hypo

SEQ ID NO: 438384 - DNA, 136 bp, Homo sapiens; identical to SEQ ID NO: 311681
  chr9:137774781-137774917
  hypo

SEQ ID NO: 438385 - DNA, 82 bp, Homo sapiens; identical to SEQ ID NO: 311682
  chr9:137774947-137775029
  hypo

SEQ ID NO: 438386 - DNA, 82 bp, Homo sapiens; identical to SEQ ID NO: 261165
  chr9:137926909-137926991
  hypo

SEQ ID NO: 438387 - DNA, 186 bp, Homo sapiens; identical to SEQ ID NO: 261167
  chr9:138060951-138061137
  hypo

SEQ ID NO: 438388 - DNA, 68 bp, Homo sapiens; identical to SEQ ID NO: 261168
  chr9:138068322-138068390
  hypo

SEQ ID NO: 438389 - DNA, 164 bp, Homo sapiens; identical to SEQ ID NO: 261169
  chr9:138077116-138077280
  hypo

SEQ ID NO: 438390 - DNA, 37 bp, Homo sapiens; identical to SEQ ID NO: 213158
  chr9:138106859-138106896
  hypo

SEQ ID NO: 438391 - DNA, 209 bp, Homo sapiens; identical to SEQ ID NO: 261172
  chr9:138148459-138148668
  hypo

SEQ ID NO: 438392 - DNA, 43 bp, Homo sapiens; identical to SEQ ID NO: 261173
  chr9:138150429-138150472
  hypo

SEQ ID NO: 438393 - DNA, 724 bp, Homo sapiens; identical to SEQ ID NO: 261174
  chr9:138150502-138151226
  hypo

SEQ ID NO: 438394 - DNA, 109 bp, Homo sapiens; identical to SEQ ID NO: 261175
  chr9:138163500-138163609
  hypo

SEQ ID NO: 438395 - DNA, 43 bp, Homo sapiens; identical to SEQ ID NO: 261176
  chr9:138190748-138190791
  hypo

SEQ ID NO: 438396 - DNA, 84 bp, Homo sapiens; identical to SEQ ID NO: 311697
  chr9:138274930-138275014
  hypo

SEQ ID NO: 438397 - DNA, 48 bp, Homo sapiens; identical to SEQ ID NO: 311698
  chr9:138275044-138275092
  hypo

SEQ ID NO: 438398 - DNA, 298 bp, Homo sapiens; identical to SEQ ID NO: 311699
  chr9:138289054-138289352
  hypo

SEQ ID NO: 438399 - DNA, 177 bp, Homo sapiens; identical to SEQ ID NO: 213161
  chr9:138289790-138289967
  hypo

SEQ ID NO: 438400 - DNA, 42 bp, Homo sapiens; identical to SEQ ID NO: 213162
  chr9:138296701-138296743
  hypo

SEQ ID NO: 438401 - DNA, 89 bp, Homo sapiens; identical to SEQ ID NO: 213163
  chr9:138297097-138297186
  hypo

SEQ ID NO: 438402 - DNA, 42 bp, Homo sapiens; identical to SEQ ID NO: 261183
  chr9:138339188-138339230
  hypo

SEQ ID NO: 438403 - DNA, 56 bp, Homo sapiens; identical to SEQ ID NO: 311704
  chr9:138353991-138354047
  hypo

SEQ ID NO: 438404 - DNA, 151 bp, Homo sapiens; identical to SEQ ID NO: 223720
  chr9:138372138-138372289
  hypo

SEQ ID NO: 438405 - DNA, 84 bp, Homo sapiens; identical to SEQ ID NO: 213164
  chr9:138456651-138456735
  hypo

SEQ ID NO: 438406 - DNA, 44 bp, Homo sapiens; identical to SEQ ID NO: 261187
  chr9:138507285-138507329
  hypo

SEQ ID NO: 438407 - DNA, 313 bp, Homo sapiens; identical to SEQ ID NO: 261190
  chr9:138569350-138569663
  hypo

SEQ ID NO: 438408 - DNA, 42 bp, Homo sapiens; identical to SEQ ID NO: 261191
  chr9:138603672-138603714
  hypo

SEQ ID NO: 438409 - DNA, 181 bp, Homo sapiens; identical to SEQ ID NO: 311711
  chr9:138637700-138637881
  hypo

SEQ ID NO: 438410 - DNA, 39 bp, Homo sapiens; identical to SEQ ID NO: 311712
  chr9:138638049-138638088
  hypo

SEQ ID NO: 438411 - DNA, 44 bp, Homo sapiens; identical to SEQ ID NO: 261194
  chr9:138643904-138643948
  hypo

SEQ ID NO: 438412 - DNA, 32 bp, Homo sapiens; identical to SEQ ID NO: 261195
  chr9:138643978-138644010
  hypo

SEQ ID NO: 438413 - DNA, 198 bp, Homo sapiens; identical to SEQ ID NO: 213166
  chr9:138649885-138650083
  hypo

SEQ ID NO: 438414 - DNA, 206 bp, Homo sapiens; identical to SEQ ID NO: 311716
  chr9:138650227-138650433
  hypo

SEQ ID NO: 438415 - DNA, 209 bp, Homo sapiens; identical to SEQ ID NO: 311717
  chr9:138651325-138651534
  hypo

SEQ ID NO: 438416 - DNA, 148 bp, Homo sapiens; identical to SEQ ID NO: 311718
  chr9:138651701-138651849
  hypo

SEQ ID NO: 438417 - DNA, 37 bp, Homo sapiens; identical to SEQ ID NO: 213168
  chr9:138654778-138654815
  hypo

SEQ ID NO: 438418 - DNA, 203 bp, Homo sapiens; identical to SEQ ID NO: 213171
  chr9:138718007-138718210
  hypo

SEQ ID NO: 438419 - DNA, 246 bp, Homo sapiens; identical to SEQ ID NO: 261208
  chr9:138770462-138770708
  hypo

SEQ ID NO: 438420 - DNA, 77 bp, Homo sapiens; identical to SEQ ID NO: 261212
  chr9:138796491-138796568
  hypo

SEQ ID NO: 438421 - DNA, 77 bp, Homo sapiens; identical to SEQ ID NO: 213175
  chr9:138796808-138796885
  hypo

SEQ ID NO: 438422 - DNA, 40 bp, Homo sapiens; identical to SEQ ID NO: 213176
  chr9:138824557-138824597
  hypo

SEQ ID NO: 438423 - DNA, 308 bp, Homo sapiens; identical to SEQ ID NO: 213177
  chr9:138836303-138836611
  hypo

SEQ ID NO: 438424 - DNA, 244 bp, Homo sapiens; identical to SEQ ID NO: 261217
  chr9:138841434-138841678
  hypo

SEQ ID NO: 438425 - DNA, 60 bp, Homo sapiens; identical to SEQ ID NO: 261218
  chr9:138867841-138867901
  hypo

SEQ ID NO: 438426 - DNA, 154 bp, Homo sapiens; identical to SEQ ID NO: 261219
  chr9:138871837-138871991
  hypo

SEQ ID NO: 438427 - DNA, 177 bp, Homo sapiens; identical to SEQ ID NO: 261221
  chr9:138874536-138874713
  hypo

SEQ ID NO: 438428 - DNA, 76 bp, Homo sapiens; identical to SEQ ID NO: 261222
  chr9:138875025-138875101
  hypo

SEQ ID NO: 438429 - DNA, 51 bp, Homo sapiens; identical to SEQ ID NO: 261223
  chr9:138875479-138875530
  hypo

SEQ ID NO: 438430 - DNA, 298 bp, Homo sapiens; identical to SEQ ID NO: 261225
  chr9:138878431-138878729
  hypo

SEQ ID NO: 438431 - DNA, 335 bp, Homo sapiens; identical to SEQ ID NO: 261226
  chr9:138880242-138880577
  hypo

SEQ ID NO: 438432 - DNA, 690 bp, Homo sapiens; identical to SEQ ID NO: 261227
  chr9:138887921-138888611
  hypo

SEQ ID NO: 438433 - DNA, 209 bp, Homo sapiens; identical to SEQ ID NO: 261228
  chr9:138890407-138890616
  hypo

SEQ ID NO: 438434 - DNA, 100 bp, Homo sapiens; identical to SEQ ID NO: 213180
  chr9:138901527-138901627
  hypo

SEQ ID NO: 438435 - DNA, 161 bp, Homo sapiens; identical to SEQ ID NO: 213181
  chr9:138902149-138902310
  hypo

SEQ ID NO: 438436 - DNA, 48 bp, Homo sapiens; identical to SEQ ID NO: 213182
  chr9:138906092-138906140
  hypo

SEQ ID NO: 438437 - DNA, 55 bp, Homo sapiens; identical to SEQ ID NO: 213183
  chr9:138907131-138907186
  hypo

SEQ ID NO: 438438 - DNA, 39 bp, Homo sapiens; identical to SEQ ID NO: 261233
  chr9:138909964-138910003
  hypo

SEQ ID NO: 438439 - DNA, 184 bp, Homo sapiens; identical to SEQ ID NO: 213184
  chr9:138910983-138911167
  hypo

SEQ ID NO: 438440 - DNA, 569 bp, Homo sapiens; identical to SEQ ID NO: 261235
  chr9:138911434-138912003
  hypo

SEQ ID NO: 438441 - DNA, 31 bp, Homo sapiens; identical to SEQ ID NO: 261236
  chr9:138922161-138922192
  hypo

SEQ ID NO: 438442 - DNA, 239 bp, Homo sapiens; identical to SEQ ID NO: 261237
  chr9:138948881-138949120
  hypo

SEQ ID NO: 438443 - DNA, 432 bp, Homo sapiens; identical to SEQ ID NO: 261238
  chr9:138950492-138950924
  hypo

SEQ ID NO: 438444 - DNA, 85 bp, Homo sapiens; identical to SEQ ID NO: 261239
  chr9:138954964-138955049
  hypo

SEQ ID NO: 438445 - DNA, 36 bp, Homo sapiens; identical to SEQ ID NO: 213187
  chr9:138970475-138970511
  hypo

SEQ ID NO: 438446 - DNA, 172 bp, Homo sapiens; identical to SEQ ID NO: 261241
  chr9:138974809-138974981
  hypo

SEQ ID NO: 438447 - DNA, 192 bp, Homo sapiens; identical to SEQ ID NO: 261242
  chr9:138975400-138975592
  hypo

SEQ ID NO: 438448 - DNA, 258 bp, Homo sapiens; identical to SEQ ID NO: 261243
  chr9:138976374-138976632
  hypo

SEQ ID NO: 438449 - DNA, 212 bp, Homo sapiens; identical to SEQ ID NO: 261244
  chr9:138979354-138979566
  hypo

SEQ ID NO: 438450 - DNA, 122 bp, Homo sapiens; identical to SEQ ID NO: 261246
  chr9:139006538-139006660
  hypo

SEQ ID NO: 438451 - DNA, 184 bp, Homo sapiens; identical to SEQ ID NO: 261249
  chr9:139041469-139041653
  hypo

SEQ ID NO: 438452 - DNA, 59 bp, Homo sapiens; identical to SEQ ID NO: 261250
  chr9:139043908-139043967
  hypo

SEQ ID NO: 438453 - DNA, 66 bp, Homo sapiens; identical to SEQ ID NO: 213191
  chr9:139044756-139044822
  hypo

SEQ ID NO: 438454 - DNA, 814 bp, Homo sapiens; identical to SEQ ID NO: 213192
  chr9:139051193-139052007
  hypo

SEQ ID NO: 438455 - DNA, 235 bp, Homo sapiens; identical to SEQ ID NO: 261254
  chr9:139061803-139062038
  hypo

SEQ ID NO: 438456 - DNA, 170 bp, Homo sapiens; identical to SEQ ID NO: 213193
  chr9:139069742-139069912
  hypo

SEQ ID NO: 438457 - DNA, 70 bp, Homo sapiens; identical to SEQ ID NO: 261256
  chr9:139071634-139071704
  hypo

SEQ ID NO: 438458 - DNA, 251 bp, Homo sapiens; identical to SEQ ID NO: 261257
  chr9:139075039-139075290
  hypo

SEQ ID NO: 438459 - DNA, 207 bp, Homo sapiens; identical to SEQ ID NO: 213195
  chr9:139079780-139079987
  hypo

SEQ ID NO: 438460 - DNA, 105 bp, Homo sapiens; identical to SEQ ID NO: 213196
  chr9:139101084-139101189
  hypo

SEQ ID NO: 438461 - DNA, 34 bp, Homo sapiens; identical to SEQ ID NO: 213197
  chr9:139103914-139103948
  hypo

SEQ ID NO: 438462 - DNA, 52 bp, Homo sapiens; identical to SEQ ID NO: 311785
  chr9:139114399-139114451
  hypo

SEQ ID NO: 438463 - DNA, 848 bp, Homo sapiens; identical to SEQ ID NO: 311786
  chr9:139114481-139115329
  hypo

SEQ ID NO: 438464 - DNA, 235 bp, Homo sapiens; identical to SEQ ID NO: 213203
  chr9:139118753-139118988
  hypo

SEQ ID NO: 438465 - DNA, 138 bp, Homo sapiens; identical to SEQ ID NO: 261266
  chr9:139121427-139121565
  hypo

SEQ ID NO: 438466 - DNA, 244 bp, Homo sapiens; identical to SEQ ID NO: 213204
  chr9:139128188-139128432
  hypo

SEQ ID NO: 438467 - DNA, 89 bp, Homo sapiens; identical to SEQ ID NO: 213205
  chr9:139130639-139130728
  hypo

SEQ ID NO: 438468 - DNA, 306 bp, Homo sapiens; identical to SEQ ID NO: 311791
  chr9:139132822-139133128
  hypo

SEQ ID NO: 438469 - DNA, 640 bp, Homo sapiens; identical to SEQ ID NO: 311792
  chr9:139133183-139133823
  hypo

SEQ ID NO: 438470 - DNA, 55 bp, Homo sapiens; identical to SEQ ID NO: 261270
  chr9:139134454-139134509
  hypo

SEQ ID NO: 438471 - DNA, 168 bp, Homo sapiens; identical to SEQ ID NO: 261271
  chr9:139256371-139256539
  hypo

SEQ ID NO: 438472 - DNA, 80 bp, Homo sapiens; identical to SEQ ID NO: 213208
  chr9:139264125-139264205
  hypo

SEQ ID NO: 438473 - DNA, 34 bp, Homo sapiens; identical to SEQ ID NO: 213210
  chr9:139272165-139272199
  hypo

SEQ ID NO: 438474 - DNA, 47 bp, Homo sapiens; identical to SEQ ID NO: 261275
  chr9:139292779-139292826
  hypo

SEQ ID NO: 438475 - DNA, 56 bp, Homo sapiens; identical to SEQ ID NO: 201930
  chr9:139294771-139294827
  hypo

SEQ ID NO: 438476 - DNA, 148 bp, Homo sapiens; identical to SEQ ID NO: 213212
  chr9:139300480-139300628
  hypo

SEQ ID NO: 438477 - DNA, 289 bp, Homo sapiens; identical to SEQ ID NO: 261277
  chr9:139302051-139302340
  hypo

SEQ ID NO: 438478 - DNA, 54 bp, Homo sapiens; identical to SEQ ID NO: 261279
  chr9:139324913-139324967
  hypo

SEQ ID NO: 438479 - DNA, 489 bp, Homo sapiens; identical to SEQ ID NO: 261280
  chr9:139330350-139330839
  hypo

SEQ ID NO: 438480 - DNA, 247 bp, Homo sapiens; identical to SEQ ID NO: 286849
  chr9:139334259-139334506
  hypo

SEQ ID NO: 438481 - DNA, 365 bp, Homo sapiens; identical to SEQ ID NO: 213217
  chr9:139345460-139345825
  hypo

SEQ ID NO: 438482 - DNA, 275 bp, Homo sapiens; identical to SEQ ID NO: 213218
  chr9:139347810-139348085
  hypo

SEQ ID NO: 438483 - DNA, 141 bp, Homo sapiens; identical to SEQ ID NO: 213219
  chr9:139349659-139349800
  hypo

SEQ ID NO: 438484 - DNA, 96 bp, Homo sapiens; identical to SEQ ID NO: 213220
  chr9:139351904-139352000
  hypo

SEQ ID NO: 438485 - DNA, 249 bp, Homo sapiens; identical to SEQ ID NO: 261285
  chr9:139360042-139360291
  hypo

SEQ ID NO: 438486 - DNA, 67 bp, Homo sapiens; identical to SEQ ID NO: 213222
  chr9:139361592-139361659
  hypo

SEQ ID NO: 438487 - DNA, 80 bp, Homo sapiens; identical to SEQ ID NO: 311815
  chr9:139367958-139368038
  hypo

SEQ ID NO: 438488 - DNA, 143 bp, Homo sapiens; identical to SEQ ID NO: 261290
  chr9:139381429-139381572
  hypo

SEQ ID NO: 438489 - DNA, 165 bp, Homo sapiens; identical to SEQ ID NO: 261291
  chr9:139382433-139382598
  hypo

SEQ ID NO: 438490 - DNA, 192 bp, Homo sapiens; identical to SEQ ID NO: 261292
  chr9:139384213-139384405
  hypo

SEQ ID NO: 438491 - DNA, 89 bp, Homo sapiens; identical to SEQ ID NO: 213223
  chr9:139384888-139384977
  hypo

SEQ ID NO: 438492 - DNA, 76 bp, Homo sapiens; identical to SEQ ID NO: 261294
  chr9:139389075-139389151
  hypo

SEQ ID NO: 438493 - DNA, 34 bp, Homo sapiens; identical to SEQ ID NO: 213227
  chr9:139456527-139456561
  hypo

SEQ ID NO: 438494 - DNA, 204 bp, Homo sapiens; identical to SEQ ID NO: 261298
  chr9:139480859-139481063
  hypo

SEQ ID NO: 438495 - DNA, 416 bp, Homo sapiens; identical to SEQ ID NO: 261299
  chr9:139484035-139484451
  hypo

SEQ ID NO: 438496 - DNA, 104 bp, Homo sapiens; identical to SEQ ID NO: 261300
  chr9:139490202-139490306
  hypo

SEQ ID NO: 438497 - DNA, 158 bp, Homo sapiens; identical to SEQ ID NO: 261301
  chr9:139497760-139497918
  hypo

SEQ ID NO: 438498 - DNA, 89 bp, Homo sapiens; identical to SEQ ID NO: 213229
  chr9:139501902-139501991
  hypo

SEQ ID NO: 438499 - DNA, 173 bp, Homo sapiens; identical to SEQ ID NO: 213230
  chr9:139509481-139509654
  hypo

SEQ ID NO: 438500 - DNA, 104 bp, Homo sapiens; identical to SEQ ID NO: 311835
  chr9:139517134-139517238
  hypo

SEQ ID NO: 438501 - DNA, 66 bp, Homo sapiens; identical to SEQ ID NO: 311836
  chr9:139517268-139517334
  hypo

SEQ ID NO: 438502 - DNA, 298 bp, Homo sapiens; identical to SEQ ID NO: 261306
  chr9:139517555-139517853
  hypo

SEQ ID NO: 438503 - DNA, 92 bp, Homo sapiens; identical to SEQ ID NO: 261308
  chr9:139571844-139571936
  hypo

SEQ ID NO: 438504 - DNA, 109 bp, Homo sapiens; identical to SEQ ID NO: 201935
  chr9:139580674-139580783
  hypo

SEQ ID NO: 438505 - DNA, 45 bp, Homo sapiens; identical to SEQ ID NO: 261309
  chr9:139580886-139580931
  hypo

SEQ ID NO: 438506 - DNA, 283 bp, Homo sapiens; identical to SEQ ID NO: 286855
  chr9:139580987-139581270
  hypo

SEQ ID NO: 438507 - DNA, 144 bp, Homo sapiens; identical to SEQ ID NO: 223733
  chr9:139581731-139581875
  hypo

SEQ ID NO: 438508 - DNA, 321 bp, Homo sapiens; identical to SEQ ID NO: 213233
  chr9:139585994-139586315
  hypo

SEQ ID NO: 438509 - DNA, 159 bp, Homo sapiens; identical to SEQ ID NO: 213235
  chr9:139598243-139598402
  hypo

SEQ ID NO: 438510 - DNA, 243 bp, Homo sapiens; identical to SEQ ID NO: 286857
  chr9:139606720-139606963
  hypo

SEQ ID NO: 438511 - DNA, 403 bp, Homo sapiens; identical to SEQ ID NO: 286858
  chr9:139607299-139607702
  hypo

SEQ ID NO: 438512 - DNA, 474 bp, Homo sapiens; identical to SEQ ID NO: 261314
  chr9:139617709-139618183
  hypo

SEQ ID NO: 438513 - DNA, 347 bp, Homo sapiens; identical to SEQ ID NO: 261315
  chr9:139630437-139630784
  hypo

SEQ ID NO: 438514 - DNA, 60 bp, Homo sapiens; identical to SEQ ID NO: 311851
  chr9:139638538-139638598
  hypo

SEQ ID NO: 438515 - DNA, 31 bp, Homo sapiens; identical to SEQ ID NO: 261317
  chr9:139666885-139666916
  hypo

SEQ ID NO: 438516 - DNA, 41 bp, Homo sapiens; identical to SEQ ID NO: 261320
  chr9:139703929-139703970
  hypo

SEQ ID NO: 438517 - DNA, 242 bp, Homo sapiens; identical to SEQ ID NO: 311857
  chr9:139721706-139721948
  hypo

SEQ ID NO: 438518 - DNA, 100 bp, Homo sapiens; identical to SEQ ID NO: 261324
  chr9:139724685-139724785
  hypo

SEQ ID NO: 438519 - DNA, 202 bp, Homo sapiens; identical to SEQ ID NO: 261325
  chr9:139729608-139729810
  hypo

SEQ ID NO: 438520 - DNA, 434 bp, Homo sapiens; identical to SEQ ID NO: 311861
  chr9:139735098-139735532
  hypo

SEQ ID NO: 438521 - DNA, 42 bp, Homo sapiens; identical to SEQ ID NO: 261328
  chr9:139754947-139754989
  hypo

SEQ ID NO: 438522 - DNA, 41 bp, Homo sapiens; identical to SEQ ID NO: 261330
  chr9:139782896-139782937
  hypo

SEQ ID NO: 438523 - DNA, 277 bp, Homo sapiens; identical to SEQ ID NO: 213239
  chr9:139787443-139787720
  hypo

SEQ ID NO: 438524 - DNA, 282 bp, Homo sapiens; identical to SEQ ID NO: 311867
  chr9:139794983-139795265
  hypo

SEQ ID NO: 438525 - DNA, 150 bp, Homo sapiens; identical to SEQ ID NO: 261334
  chr9:139798424-139798574
  hypo

SEQ ID NO: 438526 - DNA, 139 bp, Homo sapiens; identical to SEQ ID NO: 261335
  chr9:139803483-139803622
  hypo

SEQ ID NO: 438527 - DNA, 349 bp, Homo sapiens; identical to SEQ ID NO: 213244
  chr9:139805157-139805506
  hypo

SEQ ID NO: 438528 - DNA, 142 bp, Homo sapiens; identical to SEQ ID NO: 213245
  chr9:139814740-139814882
  hypo

SEQ ID NO: 438529 - DNA, 147 bp, Homo sapiens; identical to SEQ ID NO: 261342
  chr9:139821632-139821779
  hypo

SEQ ID NO: 438530 - DNA, 69 bp, Homo sapiens; identical to SEQ ID NO: 261343
  chr9:139822247-139822316
  hypo

SEQ ID NO: 438531 - DNA, 92 bp, Homo sapiens; identical to SEQ ID NO: 407519
  chr9:139847558-139847650
  hypo

SEQ ID NO: 438532 - DNA, 247 bp, Homo sapiens; identical to SEQ ID NO: 261347
  chr9:139873673-139873920
  hypo

SEQ ID NO: 438533 - DNA, 35 bp, Homo sapiens; identical to SEQ ID NO: 311883
  chr9:139886028-139886063
  hypo

SEQ ID NO: 438534 - DNA, 54 bp, Homo sapiens; identical to SEQ ID NO: 213252
  chr9:139903847-139903901
  hypo

SEQ ID NO: 438535 - DNA, 97 bp, Homo sapiens; identical to SEQ ID NO: 261354
  chr9:139906300-139906397
  hypo

SEQ ID NO: 438536 - DNA, 43 bp, Homo sapiens; identical to SEQ ID NO: 261356
  chr9:139910704-139910747
  hypo

SEQ ID NO: 438537 - DNA, 712 bp, Homo sapiens; identical to SEQ ID NO: 213254
  chr9:139934675-139935387
  hypo

SEQ ID NO: 438538 - DNA, 265 bp, Homo sapiens; identical to SEQ ID NO: 261360
  chr9:139990642-139990907
  hypo

SEQ ID NO: 438539 - DNA, 85 bp, Homo sapiens; identical to SEQ ID NO: 261361
  chr9:140001323-140001408
  hypo

SEQ ID NO: 438540 - DNA, 78 bp, Homo sapiens; identical to SEQ ID NO: 261364
  chr9:140071514-140071592
  hypo

SEQ ID NO: 438541 - DNA, 33 bp, Homo sapiens; identical to SEQ ID NO: 261365
  chr9:140078705-140078738
  hypo

SEQ ID NO: 438542 - DNA, 87 bp, Homo sapiens; identical to SEQ ID NO: 261366
  chr9:140081900-140081987
  hypo

SEQ ID NO: 438543 - DNA, 71 bp, Homo sapiens; identical to SEQ ID NO: 261367
  chr9:140089726-140089797
  hypo

SEQ ID NO: 438544 - DNA, 150 bp, Homo sapiens; identical to SEQ ID NO: 261368
  chr9:140106339-140106489
  hypo

SEQ ID NO: 438545 - DNA, 120 bp, Homo sapiens; identical to SEQ ID NO: 261371
  chr9:140112978-140113098
  hypo

SEQ ID NO: 438546 - DNA, 347 bp, Homo sapiens; identical to SEQ ID NO: 261372
  chr9:140125871-140126218
  hypo

SEQ ID NO: 438547 - DNA, 277 bp, Homo sapiens; identical to SEQ ID NO: 261373
  chr9:140133507-140133784
  hypo

SEQ ID NO: 438548 - DNA, 46 bp, Homo sapiens; identical to SEQ ID NO: 213258
  chr9:140137588-140137634
  hypo

SEQ ID NO: 438549 - DNA, 277 bp, Homo sapiens; identical to SEQ ID NO: 261375
  chr9:140137948-140138225
  hypo

SEQ ID NO: 438550 - DNA, 72 bp, Homo sapiens; identical to SEQ ID NO: 261376
  chr9:140140640-140140712
  hypo

SEQ ID NO: 438551 - DNA, 168 bp, Homo sapiens; identical to SEQ ID NO: 213259
  chr9:140157484-140157652
  hypo

SEQ ID NO: 438552 - DNA, 123 bp, Homo sapiens; identical to SEQ ID NO: 261379
  chr9:140166592-140166715
  hypo

SEQ ID NO: 438553 - DNA, 290 bp, Homo sapiens; identical to SEQ ID NO: 398280
  chr9:140196196-140196486
  hypo

SEQ ID NO: 438554 - DNA, 155 bp, Homo sapiens; identical to SEQ ID NO: 213265
  chr9:140198185-140198340
  hypo

SEQ ID NO: 438555 - DNA, 208 bp, Homo sapiens; identical to SEQ ID NO: 261383
  chr9:140206332-140206540
  hypo

SEQ ID NO: 438556 - DNA, 108 bp, Homo sapiens; identical to SEQ ID NO: 311924
  chr9:140208418-140208526
  hypo

SEQ ID NO: 438557 - DNA, 426 bp, Homo sapiens; identical to SEQ ID NO: 311925
  chr9:140208564-140208990
  hypo

SEQ ID NO: 438558 - DNA, 68 bp, Homo sapiens; identical to SEQ ID NO: 213266
  chr9:140216162-140216230
  hypo

SEQ ID NO: 438559 - DNA, 102 bp, Homo sapiens; identical to SEQ ID NO: 213267
  chr9:140216260-140216362
  hypo

SEQ ID NO: 438560 - DNA, 32 bp, Homo sapiens; identical to SEQ ID NO: 261386
  chr9:140216846-140216878
  hypo

SEQ ID NO: 438561 - DNA, 54 bp, Homo sapiens; identical to SEQ ID NO: 261387
  chr9:140218253-140218307
  hypo

SEQ ID NO: 438562 - DNA, 131 bp, Homo sapiens; identical to SEQ ID NO: 311930
  chr9:140243517-140243648
  hypo

SEQ ID NO: 438563 - DNA, 87 bp, Homo sapiens; identical to SEQ ID NO: 261389
  chr9:140263678-140263765
  hypo

SEQ ID NO: 438564 - DNA, 120 bp, Homo sapiens; identical to SEQ ID NO: 261392
  chr9:140268625-140268745
  hypo

SEQ ID NO: 438565 - DNA, 65 bp, Homo sapiens; identical to SEQ ID NO: 311936
  chr9:140273999-140274064
  hypo

SEQ ID NO: 438566 - DNA, 354 bp, Homo sapiens; identical to SEQ ID NO: 311937
  chr9:140274262-140274616
  hypo

SEQ ID NO: 438567 - DNA, 151 bp, Homo sapiens; identical to SEQ ID NO: 261394
  chr9:140290859-140291010
  hypo

SEQ ID NO: 438568 - DNA, 236 bp, Homo sapiens; identical to SEQ ID NO: 311939
  chr9:140325645-140325881
  hypo

SEQ ID NO: 438569 - DNA, 41 bp, Homo sapiens; identical to SEQ ID NO: 261396
  chr9:140327520-140327561
  hypo

SEQ ID NO: 438570 - DNA, 369 bp, Homo sapiens; identical to SEQ ID NO: 261397
  chr9:140328418-140328787
  hypo

SEQ ID NO: 438571 - DNA, 259 bp, Homo sapiens; identical to SEQ ID NO: 311943
  chr9:140351846-140352105
  hypo

SEQ ID NO: 438572 - DNA, 180 bp, Homo sapiens; identical to SEQ ID NO: 213274
  chr9:140352153-140352333
  hypo

SEQ ID NO: 438573 - DNA, 184 bp, Homo sapiens; identical to SEQ ID NO: 261400
  chr9:140355149-140355333
  hypo

SEQ ID NO: 438574 - DNA, 625 bp, Homo sapiens; identical to SEQ ID NO: 261401
  chr9:140358867-140359492
  hypo

SEQ ID NO: 438575 - DNA, 37 bp, Homo sapiens; identical to SEQ ID NO: 261408
  chr9:140418788-140418825
  hypo

SEQ ID NO: 438576 - DNA, 729 bp, Homo sapiens; identical to SEQ ID NO: 286878
  chr9:140445746-140446475
  hypo

SEQ ID NO: 438577 - DNA, 122 bp, Homo sapiens; identical to SEQ ID NO: 201948
  chr9:140473437-140473559
  hypo

SEQ ID NO: 438578 - DNA, 81 bp, Homo sapiens; identical to SEQ ID NO: 213284
  chr9:140487908-140487989
  hypo

SEQ ID NO: 438579 - DNA, 146 bp, Homo sapiens; identical to SEQ ID NO: 213285
  chr9:140538082-140538228
  hypo

SEQ ID NO: 438580 - DNA, 42 bp, Homo sapiens; identical to SEQ ID NO: 213286
  chr9:140576167-140576209
  hypo

SEQ ID NO: 438581 - DNA, 174 bp, Homo sapiens; identical to SEQ ID NO: 213287
  chr9:140577314-140577488
  hypo

SEQ ID NO: 438582 - DNA, 700 bp, Homo sapiens; identical to SEQ ID NO: 213288
  chr9:140587006-140587706
  hypo

SEQ ID NO: 438583 - DNA, 79 bp, Homo sapiens; identical to SEQ ID NO: 213289
  chr9:140588766-140588845
  hypo

SEQ ID NO: 438584 - DNA, 333 bp, Homo sapiens; identical to SEQ ID NO: 261416
  chr9:140592377-140592710
  hypo

SEQ ID NO: 438585 - DNA, 544 bp, Homo sapiens; identical to SEQ ID NO: 213291
  chr9:140606073-140606617
  hypo

SEQ ID NO: 438586 - DNA, 283 bp, Homo sapiens; identical to SEQ ID NO: 213292
  chr9:140611160-140611443
  hypo

SEQ ID NO: 438587 - DNA, 151 bp, Homo sapiens; identical to SEQ ID NO: 261419
  chr9:140612587-140612738
  hypo

SEQ ID NO: 438588 - DNA, 381 bp, Homo sapiens; identical to SEQ ID NO: 213293
  chr9:140615063-140615444
  hypo

SEQ ID NO: 438589 - DNA, 79 bp, Homo sapiens; identical to SEQ ID NO: 213294
  chr9:140615492-140615571
  hypo

SEQ ID NO: 438590 - DNA, 141 bp, Homo sapiens; identical to SEQ ID NO: 261421
  chr9:140617090-140617231
  hypo

SEQ ID NO: 438591 - DNA, 861 bp, Homo sapiens; identical to SEQ ID NO: 261422
  chr9:140620043-140620904
  hypo

SEQ ID NO: 438592 - DNA, 328 bp, Homo sapiens; identical to SEQ ID NO: 261423
  chr9:140622680-140623008
  hypo

SEQ ID NO: 438593 - DNA, 40 bp, Homo sapiens; identical to SEQ ID NO: 213299
  chr9:140633524-140633564
  hypo

SEQ ID NO: 438594 - DNA, 208 bp, Homo sapiens; identical to SEQ ID NO: 261426
  chr9:140636513-140636721
  hypo

SEQ ID NO: 438595 - DNA, 180 bp, Homo sapiens; identical to SEQ ID NO: 213301
  chr9:140647980-140648160
  hypo

SEQ ID NO: 438596 - DNA, 674 bp, Homo sapiens; identical to SEQ ID NO: 213302
  chr9:140653937-140654611
  hypo

SEQ ID NO: 438597 - DNA, 361 bp, Homo sapiens; identical to SEQ ID NO: 311983
  chr9:140657349-140657710
  hypo

SEQ ID NO: 438598 - DNA, 543 bp, Homo sapiens; identical to SEQ ID NO: 311984
  chr9:140657995-140658538
  hypo

SEQ ID NO: 438599 - DNA, 290 bp, Homo sapiens; identical to SEQ ID NO: 311985
  chr9:140658568-140658858
  hypo

SEQ ID NO: 438600 - DNA, 90 bp, Homo sapiens; identical to SEQ ID NO: 261431
  chr9:140659467-140659557
  hypo

SEQ ID NO: 438601 - DNA, 188 bp, Homo sapiens; identical to SEQ ID NO: 311987
  chr9:140664660-140664848
  hypo

SEQ ID NO: 438602 - DNA, 88 bp, Homo sapiens; identical to SEQ ID NO: 213305
  chr9:140680232-140680320
  hypo

SEQ ID NO: 438603 - DNA, 177 bp, Homo sapiens; identical to SEQ ID NO: 311989
  chr9:140680365-140680542
  hypo

SEQ ID NO: 438604 - DNA, 106 bp, Homo sapiens; identical to SEQ ID NO: 261436
  chr9:140691709-140691815
  hypo

SEQ ID NO: 438605 - DNA, 147 bp, Homo sapiens; identical to SEQ ID NO: 261438
  chr9:140693486-140693633
  hypo

SEQ ID NO: 438606 - DNA, 257 bp, Homo sapiens; identical to SEQ ID NO: 261439
  chr9:140697268-140697525
  hypo

SEQ ID NO: 438607 - DNA, 466 bp, Homo sapiens; identical to SEQ ID NO: 261444
  chr9:140709436-140709902
  hypo

SEQ ID NO: 438608 - DNA, 54 bp, Homo sapiens; identical to SEQ ID NO: 312004
  chr9:140723525-140723579
  hypo

SEQ ID NO: 438609 - DNA, 136 bp, Homo sapiens; identical to SEQ ID NO: 213318
  chr9:140731431-140731567
  hypo

SEQ ID NO: 438610 - DNA, 135 bp, Homo sapiens; identical to SEQ ID NO: 312008
  chr9:140969119-140969254
  hypo

SEQ ID NO: 438611 - DNA, 222 bp, Homo sapiens; identical to SEQ ID NO: 261451
  chr9:140996899-140997121
  hypo

SEQ ID NO: 438612 - DNA, 456 bp, Homo sapiens; identical to SEQ ID NO: 261452
  chr9:141015968-141016424
  hypo

SEQ ID NO: 438613 - DNA, 206 bp, Homo sapiens; identical to SEQ ID NO: 213319
  chr9:141069527-141069733
  hypo

SEQ ID NO: 438614 - DNA, 44 bp, Homo sapiens; identical to SEQ ID NO: 261455
  chr10:353591-353635
  hypo

SEQ ID NO: 438615 - DNA, 47 bp, Homo sapiens; identical to SEQ ID NO: 261457
  chr10:385014-385061
  hypo

SEQ ID NO: 438616 - DNA, 74 bp, Homo sapiens; identical to SEQ ID NO: 261459
  chr10:397174-397248
  hypo

SEQ ID NO: 438617 - DNA, 123 bp, Homo sapiens; identical to SEQ ID NO: 261460
  chr10:415397-415520
  hypo

SEQ ID NO: 438618 - DNA, 85 bp, Homo sapiens; identical to SEQ ID NO: 261461
  chr10:416218-416303
  hypo

SEQ ID NO: 438619 - DNA, 44 bp, Homo sapiens; identical to SEQ ID NO: 261464
  chr10:463657-463701
  hypo

SEQ ID NO: 438620 - DNA, 141 bp, Homo sapiens; identical to SEQ ID NO: 213325
  chr10:482840-482981
  hypo

SEQ ID NO: 438621 - DNA, 159 bp, Homo sapiens; identical to SEQ ID NO: 261467
  chr10:483296-483455
  hypo

SEQ ID NO: 438622 - DNA, 158 bp, Homo sapiens; identical to SEQ ID NO: 213328
  chr10:545443-545601
  hypo

SEQ ID NO: 438623 - DNA, 427 bp, Homo sapiens; identical to SEQ ID NO: 261471
  chr10:583336-583763
  hypo

SEQ ID NO: 438624 - DNA, 180 bp, Homo sapiens; identical to SEQ ID NO: 261472
  chr10:603006-603186
  hypo

SEQ ID NO: 438625 - DNA, 335 bp, Homo sapiens; identical to SEQ ID NO: 261473
  chr10:606109-606444
  hypo

SEQ ID NO: 438626 - DNA, 319 bp, Homo sapiens; identical to SEQ ID NO: 261475
  chr10:632981-633300
  hypo

SEQ ID NO: 438627 - DNA, 69 bp, Homo sapiens; identical to SEQ ID NO: 261476
  chr10:658726-658795
  hypo

SEQ ID NO: 438628 - DNA, 352 bp, Homo sapiens; identical to SEQ ID NO: 213330
  chr10:669050-669402
  hypo

SEQ ID NO: 438629 - DNA, 219 bp, Homo sapiens; identical to SEQ ID NO: 213331
  chr10:669947-670166
  hypo

SEQ ID NO: 438630 - DNA, 217 bp, Homo sapiens; identical to SEQ ID NO: 261479
  chr10:673213-673430
  hypo

SEQ ID NO: 438631 - DNA, 92 bp, Homo sapiens; identical to SEQ ID NO: 312041
  chr10:673704-673796
  hypo

SEQ ID NO: 438632 - DNA, 363 bp, Homo sapiens; identical to SEQ ID NO: 261481
  chr10:676525-676888
  hypo

SEQ ID NO: 438633 - DNA, 43 bp, Homo sapiens; identical to SEQ ID NO: 213332
  chr10:678906-678949
  hypo

SEQ ID NO: 438634 - DNA, 213 bp, Homo sapiens; identical to SEQ ID NO: 213333
  chr10:679150-679363
  hypo

SEQ ID NO: 438635 - DNA, 105 bp, Homo sapiens; identical to SEQ ID NO: 213334
  chr10:679402-679507
  hypo

SEQ ID NO: 438636 - DNA, 40 bp, Homo sapiens; identical to SEQ ID NO: 213335
  chr10:685212-685252
  hypo

SEQ ID NO: 438637 - DNA, 90 bp, Homo sapiens; identical to SEQ ID NO: 213336
  chr10:685282-685372
  hypo

SEQ ID NO: 438638 - DNA, 332 bp, Homo sapiens; identical to SEQ ID NO: 261486
  chr10:698147-698479
  hypo

SEQ ID NO: 438639 - DNA, 42 bp, Homo sapiens; identical to SEQ ID NO: 79203
  chr10:712415-712457
  hypo

SEQ ID NO: 438640 - DNA, 552 bp, Homo sapiens; identical to SEQ ID NO: 312050
  chr10:741587-742139
  hypo

SEQ ID NO: 438641 - DNA, 87 bp, Homo sapiens; identical to SEQ ID NO: 213338
  chr10:746703-746790
  hypo

SEQ ID NO: 438642 - DNA, 229 bp, Homo sapiens; identical to SEQ ID NO: 213339
  chr10:769017-769246
  hypo

SEQ ID NO: 438643 - DNA, 131 bp, Homo sapiens; identical to SEQ ID NO: 261491
  chr10:802983-803114
  hypo

SEQ ID NO: 438644 - DNA, 79 bp, Homo sapiens; identical to SEQ ID NO: 261492
  chr10:818533-818612
  hypo

SEQ ID NO: 438645 - DNA, 223 bp, Homo sapiens; identical to SEQ ID NO: 261493
  chr10:818868-819091
  hypo

SEQ ID NO: 438646 - DNA, 423 bp, Homo sapiens; identical to SEQ ID NO: 213341
  chr10:819611-820034
  hypo

SEQ ID NO: 438647 - DNA, 164 bp, Homo sapiens; identical to SEQ ID NO: 312057
  chr10:832976-833140
  hypo

SEQ ID NO: 438648 - DNA, 150 bp, Homo sapiens; identical to SEQ ID NO: 312058
  chr10:833386-833536
  hypo

SEQ ID NO: 438649 - DNA, 194 bp, Homo sapiens; identical to SEQ ID NO: 213343
  chr10:863715-863909
  hypo

SEQ ID NO: 438650 - DNA, 168 bp, Homo sapiens; identical to SEQ ID NO: 261500
  chr10:865348-865516
  hypo

SEQ ID NO: 438651 - DNA, 186 bp, Homo sapiens; identical to SEQ ID NO: 213344
  chr10:868640-868826
  hypo

SEQ ID NO: 438652 - DNA, 108 bp, Homo sapiens; identical to SEQ ID NO: 213347
  chr10:986578-986686
  hypo

SEQ ID NO: 438653 - DNA, 52 bp, Homo sapiens; identical to SEQ ID NO: 261505
  chr10:1007455-1007507
  hypo

SEQ ID NO: 438654 - DNA, 240 bp, Homo sapiens; identical to SEQ ID NO: 261506
  chr10:1020587-1020827
  hypo

SEQ ID NO: 438655 - DNA, 45 bp, Homo sapiens; identical to SEQ ID NO: 261507
  chr10:1031930-1031975
  hypo

SEQ ID NO: 438656 - DNA, 43 bp, Homo sapiens; identical to SEQ ID NO: 261508
  chr10:1043354-1043397
  hypo

SEQ ID NO: 438657 - DNA, 210 bp, Homo sapiens; identical to SEQ ID NO: 261511
  chr10:1106060-1106270
  hypo

SEQ ID NO: 438658 - DNA, 34 bp, Homo sapiens
  chr10:1120965-1120999
  hypo
ggcagtagtgtcttgagttttctcaagtggtacc

SEQ ID NO: 438659 - DNA, 56 bp, Homo sapiens; identical to SEQ ID NO: 261513
  chr10:1130124-1130180
  hypo

SEQ ID NO: 438660 - DNA, 171 bp, Homo sapiens; identical to SEQ ID NO: 213350
  chr10:1147965-1148136
  hypo

SEQ ID NO: 438661 - DNA, 90 bp, Homo sapiens; identical to SEQ ID NO: 213351
  chr10:1148461-1148551
  hypo

SEQ ID NO: 438662 - DNA, 55 bp, Homo sapiens; identical to SEQ ID NO: 261516
  chr10:1163782-1163837
  hypo

SEQ ID NO: 438663 - DNA, 60 bp, Homo sapiens; identical to SEQ ID NO: 261517
  chr10:1163867-1163927
  hypo

SEQ ID NO: 438664 - DNA, 164 bp, Homo sapiens; identical to SEQ ID NO: 213353
  chr10:1206577-1206741
  hypo

SEQ ID NO: 438665 - DNA, 308 bp, Homo sapiens; identical to SEQ ID NO: 261521
  chr10:1219203-1219511
  hypo

SEQ ID NO: 438666 - DNA, 43 bp, Homo sapiens; identical to SEQ ID NO: 213354
  chr10:1230858-1230901
  hypo

SEQ ID NO: 438667 - DNA, 137 bp, Homo sapiens; identical to SEQ ID NO: 261523
  chr10:1230982-1231119
  hypo

SEQ ID NO: 438668 - DNA, 38 bp, Homo sapiens; identical to SEQ ID NO: 312086
  chr10:1233052-1233090
  hypo

SEQ ID NO: 438669 - DNA, 81 bp, Homo sapiens; identical to SEQ ID NO: 312087
  chr10:1233240-1233321
  hypo

SEQ ID NO: 438670 - DNA, 149 bp, Homo sapiens; identical to SEQ ID NO: 261525
  chr10:1233559-1233708
  hypo

SEQ ID NO: 438671 - DNA, 163 bp, Homo sapiens; identical to SEQ ID NO: 261527
  chr10:1250512-1250675
  hypo

SEQ ID NO: 438672 - DNA, 163 bp, Homo sapiens; identical to SEQ ID NO: 213356
  chr10:1251714-1251877
  hypo

SEQ ID NO: 438673 - DNA, 235 bp, Homo sapiens; identical to SEQ ID NO: 213357
  chr10:1252355-1252590
  hypo

SEQ ID NO: 438674 - DNA, 128 bp, Homo sapiens; identical to SEQ ID NO: 213358
  chr10:1252620-1252748
  hypo

SEQ ID NO: 438675 - DNA, 363 bp, Homo sapiens; identical to SEQ ID NO: 213359
  chr10:1260018-1260381
  hypo

SEQ ID NO: 438676 - DNA, 117 bp, Homo sapiens; identical to SEQ ID NO: 213360
  chr10:1260416-1260533
  hypo

SEQ ID NO: 438677 - DNA, 724 bp, Homo sapiens; identical to SEQ ID NO: 261532
  chr10:1283790-1284514
  hypo

SEQ ID NO: 438678 - DNA, 211 bp, Homo sapiens; identical to SEQ ID NO: 261533
  chr10:1286699-1286910
  hypo

SEQ ID NO: 438679 - DNA, 81 bp, Homo sapiens; identical to SEQ ID NO: 261534
  chr10:1357511-1357592
  hypo

SEQ ID NO: 438680 - DNA, 203 bp, Homo sapiens; identical to SEQ ID NO: 261535
  chr10:1376282-1376485
  hypo

SEQ ID NO: 438681 - DNA, 120 bp, Homo sapiens; identical to SEQ ID NO: 261536
  chr10:1418033-1418153
  hypo

SEQ ID NO: 438682 - DNA, 48 bp, Homo sapiens; identical to SEQ ID NO: 312100
  chr10:1418213-1418261
  hypo

SEQ ID NO: 438683 - DNA, 68 bp, Homo sapiens; identical to SEQ ID NO: 312101
  chr10:1418291-1418359
  hypo

SEQ ID NO: 438684 - DNA, 103 bp, Homo sapiens; identical to SEQ ID NO: 261539
  chr10:1445193-1445296
  hypo

SEQ ID NO: 438685 - DNA, 195 bp, Homo sapiens; identical to SEQ ID NO: 261540
  chr10:1476322-1476517
  hypo

SEQ ID NO: 438686 - DNA, 143 bp, Homo sapiens; identical to SEQ ID NO: 261543
  chr10:1527766-1527909
  hypo

SEQ ID NO: 438687 - DNA, 100 bp, Homo sapiens; identical to SEQ ID NO: 261544
  chr10:1547438-1547538
  hypo

SEQ ID NO: 438688 - DNA, 44 bp, Homo sapiens; identical to SEQ ID NO: 261545
  chr10:1555732-1555776
  hypo

SEQ ID NO: 438689 - DNA, 389 bp, Homo sapiens; identical to SEQ ID NO: 261547
  chr10:1574918-1575307
  hypo

SEQ ID NO: 438690 - DNA, 96 bp, Homo sapiens; identical to SEQ ID NO: 261549
  chr10:1607155-1607251
  hypo

SEQ ID NO: 438691 - DNA, 34 bp, Homo sapiens; identical to SEQ ID NO: 261550
  chr10:1649863-1649897
  hypo

SEQ ID NO: 438692 - DNA, 111 bp, Homo sapiens; identical to SEQ ID NO: 261551
  chr10:1668891-1669002
  hypo

SEQ ID NO: 438693 - DNA, 187 bp, Homo sapiens; identical to SEQ ID NO: 261552
  chr10:1701552-1701739
  hypo

SEQ ID NO: 438694 - DNA, 67 bp, Homo sapiens; identical to SEQ ID NO: 261556
  chr10:1814098-1814165
  hypo

SEQ ID NO: 438695 - DNA, 169 bp, Homo sapiens; identical to SEQ ID NO: 261557
  chr10:1828704-1828873
  hypo

SEQ ID NO: 438696 - DNA, 33 bp, Homo sapiens; identical to SEQ ID NO: 261558
  chr10:1852466-1852499
  hypo

SEQ ID NO: 438697 - DNA, 323 bp, Homo sapiens; identical to SEQ ID NO: 261559
  chr10:1986624-1986947
  hypo

SEQ ID NO: 438698 - DNA, 107 bp, Homo sapiens; identical to SEQ ID NO: 213371
  chr10:1994802-1994909
  hypo

SEQ ID NO: 438699 - DNA, 190 bp, Homo sapiens; identical to SEQ ID NO: 312132
  chr10:1995298-1995488
  hypo

SEQ ID NO: 438700 - DNA, 63 bp, Homo sapiens; identical to SEQ ID NO: 261563
  chr10:2140551-2140614
  hypo

SEQ ID NO: 438701 - DNA, 51 bp, Homo sapiens; identical to SEQ ID NO: 261564
  chr10:2358814-2358865
  hypo

SEQ ID NO: 438702 - DNA, 79 bp, Homo sapiens; identical to SEQ ID NO: 261565
  chr10:2364622-2364701
  hypo

SEQ ID NO: 438703 - DNA, 172 bp, Homo sapiens; identical to SEQ ID NO: 213374
  chr10:2416382-2416554
  hypo

SEQ ID NO: 438704 - DNA, 185 bp, Homo sapiens; identical to SEQ ID NO: 213375
  chr10:2610008-2610193
  hypo

SEQ ID NO: 438705 - DNA, 221 bp, Homo sapiens; identical to SEQ ID NO: 213376
  chr10:2620065-2620286
  hypo

SEQ ID NO: 438706 - DNA, 64 bp, Homo sapiens; identical to SEQ ID NO: 213377
  chr10:2620526-2620590
  hypo

SEQ ID NO: 438707 - DNA, 42 bp, Homo sapiens; identical to SEQ ID NO: 261570
  chr10:2782246-2782288
  hypo

SEQ ID NO: 438708 - DNA, 110 bp, Homo sapiens; identical to SEQ ID NO: 261572
  chr10:2936339-2936449
  hypo

SEQ ID NO: 438709 - DNA, 66 bp, Homo sapiens; identical to SEQ ID NO: 261574
  chr10:3141466-3141532
  hypo

SEQ ID NO: 438710 - DNA, 54 bp, Homo sapiens; identical to SEQ ID NO: 261575
  chr10:3146043-3146097
  hypo

SEQ ID NO: 438711 - DNA, 275 bp, Homo sapiens; identical to SEQ ID NO: 261576
  chr10:3150860-3151135
  hypo

SEQ ID NO: 438712 - DNA, 425 bp, Homo sapiens; identical to SEQ ID NO: 164516
  chr10:3155318-3155743
  hypo

SEQ ID NO: 438713 - DNA, 291 bp, Homo sapiens; identical to SEQ ID NO: 261579
  chr10:3158926-3159217
  hypo

SEQ ID NO: 438714 - DNA, 45 bp, Homo sapiens; identical to SEQ ID NO: 213387
  chr10:3168655-3168700
  hypo

SEQ ID NO: 438715 - DNA, 55 bp, Homo sapiens; identical to SEQ ID NO: 261582
  chr10:3171106-3171161
  hypo

SEQ ID NO: 438716 - DNA, 232 bp, Homo sapiens; identical to SEQ ID NO: 261583
  chr10:3179620-3179852
  hypo

SEQ ID NO: 438717 - DNA, 197 bp, Homo sapiens; identical to SEQ ID NO: 261584
  chr10:3185690-3185887
  hypo

SEQ ID NO: 438718 - DNA, 96 bp, Homo sapiens; identical to SEQ ID NO: 213388
  chr10:3192559-3192655
  hypo

SEQ ID NO: 438719 - DNA, 39 bp, Homo sapiens; identical to SEQ ID NO: 213389
  chr10:3192934-3192973
  hypo

SEQ ID NO: 438720 - DNA, 117 bp, Homo sapiens; identical to SEQ ID NO: 261589
  chr10:3197636-3197753
  hypo

SEQ ID NO: 438721 - DNA, 96 bp, Homo sapiens; identical to SEQ ID NO: 261590
  chr10:3206003-3206099
  hypo

SEQ ID NO: 438722 - DNA, 81 bp, Homo sapiens; identical to SEQ ID NO: 261591
  chr10:3206323-3206404
  hypo

SEQ ID NO: 438723 - DNA, 70 bp, Homo sapiens; identical to SEQ ID NO: 213392
  chr10:3243876-3243946
  hypo

SEQ ID NO: 438724 - DNA, 188 bp, Homo sapiens; identical to SEQ ID NO: 213393
  chr10:3277176-3277364
  hypo

SEQ ID NO: 438725 - DNA, 69 bp, Homo sapiens; identical to SEQ ID NO: 261596
  chr10:3284260-3284329
  hypo

SEQ ID NO: 438726 - DNA, 46 bp, Homo sapiens; identical to SEQ ID NO: 261597
  chr10:3285012-3285058
  hypo

SEQ ID NO: 438727 - DNA, 285 bp, Homo sapiens; identical to SEQ ID NO: 213396
  chr10:3342840-3343125
  hypo

SEQ ID NO: 438728 - DNA, 82 bp, Homo sapiens; identical to SEQ ID NO: 213397
  chr10:3343155-3343237
  hypo

SEQ ID NO: 438729 - DNA, 52 bp, Homo sapiens; identical to SEQ ID NO: 261602
  chr10:3365239-3365291
  hypo

SEQ ID NO: 438730 - DNA, 50 bp, Homo sapiens; identical to SEQ ID NO: 261603
  chr10:3438497-3438547
  hypo

SEQ ID NO: 438731 - DNA, 230 bp, Homo sapiens; identical to SEQ ID NO: 261604
  chr10:3512565-3512795
  hypo

SEQ ID NO: 438732 - DNA, 42 bp, Homo sapiens; identical to SEQ ID NO: 261605
  chr10:3518835-3518877
  hypo

SEQ ID NO: 438733 - DNA, 246 bp, Homo sapiens; identical to SEQ ID NO: 261606
  chr10:3572532-3572778
  hypo

SEQ ID NO: 438734 - DNA, 31 bp, Homo sapiens; identical to SEQ ID NO: 79322
  chr10:3641660-3641691
  hypo

SEQ ID NO: 438735 - DNA, 122 bp, Homo sapiens; identical to SEQ ID NO: 261610
  chr10:3712903-3713025
  hypo

SEQ ID NO: 438736 - DNA, 255 bp, Homo sapiens; identical to SEQ ID NO: 286901
  chr10:3862675-3862930
  hypo

SEQ ID NO: 438737 - DNA, 68 bp, Homo sapiens; identical to SEQ ID NO: 261613
  chr10:4082781-4082849
  hypo

SEQ ID NO: 438738 - DNA, 138 bp, Homo sapiens; identical to SEQ ID NO: 261614
  chr10:4191045-4191183
  hypo

SEQ ID NO: 438739 - DNA, 69 bp, Homo sapiens; identical to SEQ ID NO: 261615
  chr10:4773957-4774026
  hypo

SEQ ID NO: 438740 - DNA, 160 bp, Homo sapiens; identical to SEQ ID NO: 261616
  chr10:4867812-4867972
  hypo

SEQ ID NO: 438741 - DNA, 37 bp, Homo sapiens; identical to SEQ ID NO: 261617
  chr10:4872906-4872943
  hypo

SEQ ID NO: 438742 - DNA, 223 bp, Homo sapiens; identical to SEQ ID NO: 261618
  chr10:4886024-4886247
  hypo

SEQ ID NO: 438743 - DNA, 157 bp, Homo sapiens; identical to SEQ ID NO: 223749
  chr10:5488421-5488578
  hypo

SEQ ID NO: 438744 - DNA, 69 bp, Homo sapiens; identical to SEQ ID NO: 261619
  chr10:5495770-5495839
  hypo

SEQ ID NO: 438745 - DNA, 128 bp, Homo sapiens; identical to SEQ ID NO: 261620
  chr10:5509144-5509272
  hypo

SEQ ID NO: 438746 - DNA, 175 bp, Homo sapiens; identical to SEQ ID NO: 261622
  chr10:5527430-5527605
  hypo

SEQ ID NO: 438747 - DNA, 504 bp, Homo sapiens; identical to SEQ ID NO: 312197
  chr10:5530260-5530764
  hypo

SEQ ID NO: 438748 - DNA, 182 bp, Homo sapiens; identical to SEQ ID NO: 261625
  chr10:5535380-5535562
  hypo

SEQ ID NO: 438749 - DNA, 138 bp, Homo sapiens; identical to SEQ ID NO: 261626
  chr10:5536521-5536659
  hypo

SEQ ID NO: 438750 - DNA, 102 bp, Homo sapiens; identical to SEQ ID NO: 261627
  chr10:5537076-5537178
  hypo

SEQ ID NO: 438751 - DNA, 62 bp, Homo sapiens; identical to SEQ ID NO: 261630
  chr10:5548690-5548752
  hypo

SEQ ID NO: 438752 - DNA, 64 bp, Homo sapiens; identical to SEQ ID NO: 312206
  chr10:5551897-5551961
  hypo

SEQ ID NO: 438753 - DNA, 215 bp, Homo sapiens; identical to SEQ ID NO: 312207
  chr10:5566908-5567123
  hypo

SEQ ID NO: 438754 - DNA, 326 bp, Homo sapiens; identical to SEQ ID NO: 213408
  chr10:5567210-5567536
  hypo

SEQ ID NO: 438755 - DNA, 103 bp, Homo sapiens; identical to SEQ ID NO: 213409
  chr10:5567566-5567669
  hypo

SEQ ID NO: 438756 - DNA, 153 bp, Homo sapiens; identical to SEQ ID NO: 261633
  chr10:5572907-5573060
  hypo

SEQ ID NO: 438757 - DNA, 189 bp, Homo sapiens; identical to SEQ ID NO: 261634
  chr10:5574191-5574380
  hypo

SEQ ID NO: 438758 - DNA, 215 bp, Homo sapiens; identical to SEQ ID NO: 261637
  chr10:5666828-5667043
  hypo

SEQ ID NO: 438759 - DNA, 40 bp, Homo sapiens; identical to SEQ ID NO: 261638
  chr10:5680699-5680739
  hypo

SEQ ID NO: 438760 - DNA, 58 bp, Homo sapiens; identical to SEQ ID NO: 261639
  chr10:5681054-5681112
  hypo

SEQ ID NO: 438761 - DNA, 101 bp, Homo sapiens; identical to SEQ ID NO: 213411
  chr10:5683749-5683850
  hypo

SEQ ID NO: 438762 - DNA, 855 bp, Homo sapiens; identical to SEQ ID NO: 286904
  chr10:5707985-5708840
  hypo

SEQ ID NO: 438763 - DNA, 36 bp, Homo sapiens; identical to SEQ ID NO: 213413
  chr10:5796177-5796213
  hypo

SEQ ID NO: 438764 - DNA, 114 bp, Homo sapiens; identical to SEQ ID NO: 213414
  chr10:5796243-5796357
  hypo

SEQ ID NO: 438765 - DNA, 82 bp, Homo sapiens; identical to SEQ ID NO: 213415
  chr10:5863290-5863372
  hypo

SEQ ID NO: 438766 - DNA, 90 bp, Homo sapiens; identical to SEQ ID NO: 213416
  chr10:5901982-5902072
  hypo

SEQ ID NO: 438767 - DNA, 78 bp, Homo sapiens; identical to SEQ ID NO: 261647
  chr10:5902471-5902549
  hypo

SEQ ID NO: 438768 - DNA, 33 bp, Homo sapiens; identical to SEQ ID NO: 261648
  chr10:5952451-5952484
  hypo

SEQ ID NO: 438769 - DNA, 631 bp, Homo sapiens; identical to SEQ ID NO: 213417
  chr10:5953029-5953660
  hypo

SEQ ID NO: 438770 - DNA, 168 bp, Homo sapiens; identical to SEQ ID NO: 213419
  chr10:5962672-5962840
  hypo

SEQ ID NO: 438771 - DNA, 138 bp, Homo sapiens; identical to SEQ ID NO: 261652
  chr10:5979160-5979298
  hypo

SEQ ID NO: 438772 - DNA, 103 bp, Homo sapiens; identical to SEQ ID NO: 312232
  chr10:6024478-6024581
  hypo

SEQ ID NO: 438773 - DNA, 62 bp, Homo sapiens; identical to SEQ ID NO: 261657
  chr10:6055609-6055671
  hypo

SEQ ID NO: 438774 - DNA, 150 bp, Homo sapiens; identical to SEQ ID NO: 261658
  chr10:6065692-6065842
  hypo

SEQ ID NO: 438775 - DNA, 270 bp, Homo sapiens; identical to SEQ ID NO: 261659
  chr10:6078743-6079013
  hypo

SEQ ID NO: 438776 - DNA, 46 bp, Homo sapiens; identical to SEQ ID NO: 261660
  chr10:6089449-6089495
  hypo

SEQ ID NO: 438777 - DNA, 49 bp, Homo sapiens; identical to SEQ ID NO: 213421
  chr10:6135599-6135648
  hypo

SEQ ID NO: 438778 - DNA, 256 bp, Homo sapiens; identical to SEQ ID NO: 261662
  chr10:6151972-6152228
  hypo

SEQ ID NO: 438779 - DNA, 153 bp, Homo sapiens; identical to SEQ ID NO: 261665
  chr10:6167800-6167953
  hypo

SEQ ID NO: 438780 - DNA, 264 bp, Homo sapiens; identical to SEQ ID NO: 261666
  chr10:6211184-6211448
  hypo

SEQ ID NO: 438781 - DNA, 41 bp, Homo sapiens; identical to SEQ ID NO: 312242
  chr10:6372302-6372343
  hypo

SEQ ID NO: 438782 - DNA, 34 bp, Homo sapiens; identical to SEQ ID NO: 261668
  chr10:6372696-6372730
  hypo

SEQ ID NO: 438783 - DNA, 207 bp, Homo sapiens; identical to SEQ ID NO: 213423
  chr10:6531176-6531383
  hypo

SEQ ID NO: 438784 - DNA, 82 bp, Homo sapiens; identical to SEQ ID NO: 261670
  chr10:6547162-6547244
  hypo

SEQ ID NO: 438785 - DNA, 218 bp, Homo sapiens; identical to SEQ ID NO: 261671
  chr10:6578876-6579094
  hypo

SEQ ID NO: 438786 - DNA, 44 bp, Homo sapiens; identical to SEQ ID NO: 213424
  chr10:6647894-6647938
  hypo

SEQ ID NO: 438787 - DNA, 143 bp, Homo sapiens; identical to SEQ ID NO: 261673
  chr10:6664620-6664763
  hypo

SEQ ID NO: 438788 - DNA, 195 bp, Homo sapiens; identical to SEQ ID NO: 261674
  chr10:6852535-6852730
  hypo

SEQ ID NO: 438789 - DNA, 89 bp, Homo sapiens; identical to SEQ ID NO: 261675
  chr10:6864689-6864778
  hypo

SEQ ID NO: 438790 - DNA, 103 bp, Homo sapiens; identical to SEQ ID NO: 261676
  chr10:6956297-6956400
  hypo

SEQ ID NO: 438791 - DNA, 70 bp, Homo sapiens; identical to SEQ ID NO: 261677
  chr10:6975463-6975533
  hypo

SEQ ID NO: 438792 - DNA, 42 bp, Homo sapiens; identical to SEQ ID NO: 261679
  chr10:7083317-7083359
  hypo

SEQ ID NO: 438793 - DNA, 82 bp, Homo sapiens; identical to SEQ ID NO: 261680
  chr10:7138552-7138634
  hypo

SEQ ID NO: 438794 - DNA, 37 bp, Homo sapiens; identical to SEQ ID NO: 312257
  chr10:7156189-7156226
  hypo

SEQ ID NO: 438795 - DNA, 145 bp, Homo sapiens; identical to SEQ ID NO: 261683
  chr10:7175436-7175581
  hypo

SEQ ID NO: 438796 - DNA, 264 bp, Homo sapiens; identical to SEQ ID NO: 261685
  chr10:7204511-7204775
  hypo

SEQ ID NO: 438797 - DNA, 296 bp, Homo sapiens; identical to SEQ ID NO: 312262
  chr10:7205787-7206083
  hypo

SEQ ID NO: 438798 - DNA, 84 bp, Homo sapiens; identical to SEQ ID NO: 261687
  chr10:7209416-7209500
  hypo

SEQ ID NO: 438799 - DNA, 95 bp, Homo sapiens; identical to SEQ ID NO: 261692
  chr10:7235749-7235844
  hypo

SEQ ID NO: 438800 - DNA, 318 bp, Homo sapiens; identical to SEQ ID NO: 312267
  chr10:7236245-7236563
  hypo

SEQ ID NO: 438801 - DNA, 138 bp, Homo sapiens; identical to SEQ ID NO: 261694
  chr10:7238964-7239102
  hypo

SEQ ID NO: 438802 - DNA, 39 bp, Homo sapiens; identical to SEQ ID NO: 261695
  chr10:7239512-7239551
  hypo

SEQ ID NO: 438803 - DNA, 177 bp, Homo sapiens; identical to SEQ ID NO: 261696
  chr10:7239774-7239951
  hypo

SEQ ID NO: 438804 - DNA, 87 bp, Homo sapiens; identical to SEQ ID NO: 261697
  chr10:7246836-7246923
  hypo

SEQ ID NO: 438805 - DNA, 214 bp, Homo sapiens; identical to SEQ ID NO: 213429
  chr10:7252611-7252825
  hypo

SEQ ID NO: 438806 - DNA, 157 bp, Homo sapiens; identical to SEQ ID NO: 261699
  chr10:7256061-7256218
  hypo

SEQ ID NO: 438807 - DNA, 195 bp, Homo sapiens; identical to SEQ ID NO: 261700
  chr10:7262331-7262526
  hypo

SEQ ID NO: 438808 - DNA, 152 bp, Homo sapiens; identical to SEQ ID NO: 213430
  chr10:7290536-7290688
  hypo

SEQ ID NO: 438809 - DNA, 105 bp, Homo sapiens; identical to SEQ ID NO: 261704
  chr10:7304466-7304571
  hypo

SEQ ID NO: 438810 - DNA, 168 bp, Homo sapiens; identical to SEQ ID NO: 261705
  chr10:7317009-7317177
  hypo

SEQ ID NO: 438811 - DNA, 100 bp, Homo sapiens; identical to SEQ ID NO: 261706
  chr10:7330644-7330744
  hypo

SEQ ID NO: 438812 - DNA, 42 bp, Homo sapiens; identical to SEQ ID NO: 213431
  chr10:7352682-7352724
  hypo

SEQ ID NO: 438813 - DNA, 78 bp, Homo sapiens; identical to SEQ ID NO: 261708
  chr10:7367242-7367320
  hypo

SEQ ID NO: 438814 - DNA, 133 bp, Homo sapiens; identical to SEQ ID NO: 261709
  chr10:7381915-7382048
  hypo

SEQ ID NO: 438815 - DNA, 231 bp, Homo sapiens; identical to SEQ ID NO: 312282
  chr10:7401000-7401231
  hypo

SEQ ID NO: 438816 - DNA, 195 bp, Homo sapiens; identical to SEQ ID NO: 261712
  chr10:7412692-7412887
  hypo

SEQ ID NO: 438817 - DNA, 82 bp, Homo sapiens; identical to SEQ ID NO: 261713
  chr10:7415788-7415870
  hypo

SEQ ID NO: 438818 - DNA, 72 bp, Homo sapiens; identical to SEQ ID NO: 312287
  chr10:7424554-7424626
  hypo

SEQ ID NO: 438819 - DNA, 99 bp, Homo sapiens; identical to SEQ ID NO: 312288
  chr10:7424687-7424786
  hypo

SEQ ID NO: 438820 - DNA, 138 bp, Homo sapiens; identical to SEQ ID NO: 261715
  chr10:7426168-7426306
  hypo

SEQ ID NO: 438821 - DNA, 131 bp, Homo sapiens; identical to SEQ ID NO: 312290
  chr10:7436209-7436340
  hypo

SEQ ID NO: 438822 - DNA, 36 bp, Homo sapiens; identical to SEQ ID NO: 261717
  chr10:7442791-7442827
  hypo

SEQ ID NO: 438823 - DNA, 38 bp, Homo sapiens; identical to SEQ ID NO: 261718
  chr10:7471887-7471925
  hypo

SEQ ID NO: 438824 - DNA, 56 bp, Homo sapiens; identical to SEQ ID NO: 261719
  chr10:7498707-7498763
  hypo

SEQ ID NO: 438825 - DNA, 51 bp, Homo sapiens; identical to SEQ ID NO: 213435
  chr10:7583452-7583503
  hypo

SEQ ID NO: 438826 - DNA, 41 bp, Homo sapiens; identical to SEQ ID NO: 213437
  chr10:7679269-7679310
  hypo

SEQ ID NO: 438827 - DNA, 171 bp, Homo sapiens; identical to SEQ ID NO: 213438
  chr10:7780611-7780782
  hypo

SEQ ID NO: 438828 - DNA, 91 bp, Homo sapiens; identical to SEQ ID NO: 261725
  chr10:7790290-7790381
  hypo

SEQ ID NO: 438829 - DNA, 34 bp, Homo sapiens; identical to SEQ ID NO: 261726
  chr10:7852584-7852618
  hypo

SEQ ID NO: 438830 - DNA, 202 bp, Homo sapiens; identical to SEQ ID NO: 261728
  chr10:7945962-7946164
  hypo

SEQ ID NO: 438831 - DNA, 32 bp, Homo sapiens; identical to SEQ ID NO: 261730
  chr10:8024999-8025031
  hypo

SEQ ID NO: 438832 - DNA, 42 bp, Homo sapiens; identical to SEQ ID NO: 261732
  chr10:8124885-8124927
  hypo

SEQ ID NO: 438833 - DNA, 122 bp, Homo sapiens; identical to SEQ ID NO: 261733
  chr10:8192083-8192205
  hypo

SEQ ID NO: 438834 - DNA, 174 bp, Homo sapiens; identical to SEQ ID NO: 261734
  chr10:8203924-8204098
  hypo

SEQ ID NO: 438835 - DNA, 48 bp, Homo sapiens; identical to SEQ ID NO: 312314
  chr10:8556148-8556196
  hypo

SEQ ID NO: 438836 - DNA, 93 bp, Homo sapiens; identical to SEQ ID NO: 261736
  chr10:9043112-9043205
  hypo

SEQ ID NO: 438837 - DNA, 43 bp, Homo sapiens; identical to SEQ ID NO: 261737
  chr10:9141899-9141942
  hypo

SEQ ID NO: 438838 - DNA, 444 bp, Homo sapiens; identical to SEQ ID NO: 261738
  chr10:9919835-9920279
  hypo

SEQ ID NO: 438839 - DNA, 82 bp, Homo sapiens; identical to SEQ ID NO: 261739
  chr10:10661818-10661900
  hypo

SEQ ID NO: 438840 - DNA, 42 bp, Homo sapiens; identical to SEQ ID NO: 261740
  chr10:10964610-10964652
  hypo

SEQ ID NO: 438841 - DNA, 42 bp, Homo sapiens; identical to SEQ ID NO: 261742
  chr10:10979086-10979128
  hypo

SEQ ID NO: 438842 - DNA, 32 bp, Homo sapiens; identical to SEQ ID NO: 213445
  chr10:11081058-11081090
  hypo

SEQ ID NO: 438843 - DNA, 41 bp, Homo sapiens; identical to SEQ ID NO: 213446
  chr10:11184680-11184721
  hypo

SEQ ID NO: 438844 - DNA, 311 bp, Homo sapiens; identical to SEQ ID NO: 213447
  chr10:11198992-11199303
  hypo

SEQ ID NO: 438845 - DNA, 395 bp, Homo sapiens; identical to SEQ ID NO: 261747
  chr10:11296956-11297351
  hypo

SEQ ID NO: 438846 - DNA, 221 bp, Homo sapiens; identical to SEQ ID NO: 213449
  chr10:11317672-11317893
  hypo

SEQ ID NO: 438847 - DNA, 106 bp, Homo sapiens; identical to SEQ ID NO: 261749
  chr10:11338049-11338155
  hypo

SEQ ID NO: 438848 - DNA, 200 bp, Homo sapiens; identical to SEQ ID NO: 213450
  chr10:11344065-11344265
  hypo

SEQ ID NO: 438849 - DNA, 252 bp, Homo sapiens; identical to SEQ ID NO: 261751
  chr10:11360789-11361041
  hypo

SEQ ID NO: 438850 - DNA, 121 bp, Homo sapiens; identical to SEQ ID NO: 312332
  chr10:11381580-11381701
  hypo

SEQ ID NO: 438851 - DNA, 228 bp, Homo sapiens; identical to SEQ ID NO: 213451
  chr10:11381731-11381959
  hypo

SEQ ID NO: 438852 - DNA, 81 bp, Homo sapiens; identical to SEQ ID NO: 261753
  chr10:11405331-11405412
  hypo

SEQ ID NO: 438853 - DNA, 174 bp, Homo sapiens; identical to SEQ ID NO: 213452
  chr10:11472668-11472842
  hypo

SEQ ID NO: 438854 - DNA, 144 bp, Homo sapiens; identical to SEQ ID NO: 261755
  chr10:11504537-11504681
  hypo

SEQ ID NO: 438855 - DNA, 199 bp, Homo sapiens; identical to SEQ ID NO: 261756
  chr10:11505266-11505465
  hypo

SEQ ID NO: 438856 - DNA, 81 bp, Homo sapiens; identical to SEQ ID NO: 261757
  chr10:11661767-11661848
  hypo

SEQ ID NO: 438857 - DNA, 454 bp, Homo sapiens; identical to SEQ ID NO: 261759
  chr10:11731795-11732249
  hypo

SEQ ID NO: 438858 - DNA, 169 bp, Homo sapiens; identical to SEQ ID NO: 261760
  chr10:11761571-11761740
  hypo

SEQ ID NO: 438859 - DNA, 78 bp, Homo sapiens; identical to SEQ ID NO: 261761
  chr10:11830180-11830258
  hypo

SEQ ID NO: 438860 - DNA, 75 bp, Homo sapiens; identical to SEQ ID NO: 261763
  chr10:11847448-11847523
  hypo

SEQ ID NO: 438861 - DNA, 870 bp, Homo sapiens; identical to SEQ ID NO: 286943
  chr10:11865127-11865997
  hypo

SEQ ID NO: 438862 - DNA, 193 bp, Homo sapiens; identical to SEQ ID NO: 213454
  chr10:11870932-11871125
  hypo

SEQ ID NO: 438863 - DNA, 35 bp, Homo sapiens; identical to SEQ ID NO: 261765
  chr10:11878794-11878829
  hypo

SEQ ID NO: 438864 - DNA, 150 bp, Homo sapiens; identical to SEQ ID NO: 213455
  chr10:11894859-11895009
  hypo

SEQ ID NO: 438865 - DNA, 46 bp, Homo sapiens; identical to SEQ ID NO: 213456
  chr10:11898439-11898485
  hypo

SEQ ID NO: 438866 - DNA, 78 bp, Homo sapiens; identical to SEQ ID NO: 261768
  chr10:11911399-11911477
  hypo

SEQ ID NO: 438867 - DNA, 32 bp, Homo sapiens; identical to SEQ ID NO: 261769
  chr10:11914996-11915028
  hypo

SEQ ID NO: 438868 - DNA, 116 bp, Homo sapiens; identical to SEQ ID NO: 261770
  chr10:11920973-11921089
  hypo

SEQ ID NO: 438869 - DNA, 151 bp, Homo sapiens; identical to SEQ ID NO: 261771
  chr10:11923032-11923183
  hypo

SEQ ID NO: 438870 - DNA, 50 bp, Homo sapiens; identical to SEQ ID NO: 261772
  chr10:11941266-11941316
  hypo

SEQ ID NO: 438871 - DNA, 158 bp, Homo sapiens; identical to SEQ ID NO: 261773
  chr10:11952452-11952610
  hypo

SEQ ID NO: 438872 - DNA, 181 bp, Homo sapiens; identical to SEQ ID NO: 261774
  chr10:11972974-11973155
  hypo

SEQ ID NO: 438873 - DNA, 151 bp, Homo sapiens; identical to SEQ ID NO: 261775
  chr10:12139550-12139701
  hypo

SEQ ID NO: 438874 - DNA, 61 bp, Homo sapiens; identical to SEQ ID NO: 261776
  chr10:12211464-12211525
  hypo

SEQ ID NO: 438875 - DNA, 44 bp, Homo sapiens; identical to SEQ ID NO: 261777
  chr10:12308422-12308466
  hypo

SEQ ID NO: 438876 - DNA, 40 bp, Homo sapiens; identical to SEQ ID NO: 261778
  chr10:12309043-12309083
  hypo

SEQ ID NO: 438877 - DNA, 42 bp, Homo sapiens; identical to SEQ ID NO: 261779
  chr10:12346516-12346558
  hypo

SEQ ID NO: 438878 - DNA, 132 bp, Homo sapiens; identical to SEQ ID NO: 261780
  chr10:12460855-12460987
  hypo

SEQ ID NO: 438879 - DNA, 66 bp, Homo sapiens; identical to SEQ ID NO: 261781
  chr10:12485160-12485226
  hypo

SEQ ID NO: 438880 - DNA, 134 bp, Homo sapiens; identical to SEQ ID NO: 312366
  chr10:12531842-12531976
  hypo

SEQ ID NO: 438881 - DNA, 245 bp, Homo sapiens; identical to SEQ ID NO: 261784
  chr10:12545239-12545484
  hypo

SEQ ID NO: 438882 - DNA, 147 bp, Homo sapiens; identical to SEQ ID NO: 261785
  chr10:12548783-12548930
  hypo

SEQ ID NO: 438883 - DNA, 59 bp, Homo sapiens; identical to SEQ ID NO: 261786
  chr10:12553847-12553906
  hypo

SEQ ID NO: 438884 - DNA, 117 bp, Homo sapiens; identical to SEQ ID NO: 261787
  chr10:12554254-12554371
  hypo

SEQ ID NO: 438885 - DNA, 76 bp, Homo sapiens; identical to SEQ ID NO: 261788
  chr10:12589996-12590072
  hypo

SEQ ID NO: 438886 - DNA, 54 bp, Homo sapiens; identical to SEQ ID NO: 261789
  chr10:12595203-12595257
  hypo

SEQ ID NO: 438887 - DNA, 37 bp, Homo sapiens; identical to SEQ ID NO: 213460
  chr10:12602247-12602284
  hypo

SEQ ID NO: 438888 - DNA, 57 bp, Homo sapiens; identical to SEQ ID NO: 261791
  chr10:12611335-12611392
  hypo

SEQ ID NO: 438889 - DNA, 42 bp, Homo sapiens; identical to SEQ ID NO: 213461
  chr10:12671580-12671622
  hypo

SEQ ID NO: 438890 - DNA, 177 bp, Homo sapiens; identical to SEQ ID NO: 213462
  chr10:12707812-12707989
  hypo

SEQ ID NO: 438891 - DNA, 181 bp, Homo sapiens; identical to SEQ ID NO: 261794
  chr10:12768863-12769044
  hypo

SEQ ID NO: 438892 - DNA, 284 bp, Homo sapiens; identical to SEQ ID NO: 261796
  chr10:12837375-12837659
  hypo

SEQ ID NO: 438893 - DNA, 42 bp, Homo sapiens; identical to SEQ ID NO: 261797
  chr10:12872606-12872648
  hypo

SEQ ID NO: 438894 - DNA, 90 bp, Homo sapiens; identical to SEQ ID NO: 261798
  chr10:12875520-12875610
  hypo

SEQ ID NO: 438895 - DNA, 95 bp, Homo sapiens; identical to SEQ ID NO: 261799
  chr10:12940456-12940551
  hypo

SEQ ID NO: 438896 - DNA, 71 bp, Homo sapiens; identical to SEQ ID NO: 261800
  chr10:12965605-12965676
  hypo

SEQ ID NO: 438897 - DNA, 34 bp, Homo sapiens; identical to SEQ ID NO: 213463
  chr10:13146884-13146918
  hypo

SEQ ID NO: 438898 - DNA, 37 bp, Homo sapiens; identical to SEQ ID NO: 213464
  chr10:13150491-13150528
  hypo

SEQ ID NO: 438899 - DNA, 201 bp, Homo sapiens; identical to SEQ ID NO: 213465
  chr10:13263527-13263728
  hypo

SEQ ID NO: 438900 - DNA, 241 bp, Homo sapiens; identical to SEQ ID NO: 201985
  chr10:13341387-13341628
  hypo

SEQ ID NO: 438901 - DNA, 88 bp, Homo sapiens; identical to SEQ ID NO: 261806
  chr10:13451816-13451904
  hypo

SEQ ID NO: 438902 - DNA, 172 bp, Homo sapiens; identical to SEQ ID NO: 261807
  chr10:13480544-13480716
  hypo

SEQ ID NO: 438903 - DNA, 35 bp, Homo sapiens; identical to SEQ ID NO: 261808
  chr10:13516622-13516657
  hypo

SEQ ID NO: 438904 - DNA, 97 bp, Homo sapiens; identical to SEQ ID NO: 261809
  chr10:13630041-13630138
  hypo

SEQ ID NO: 438905 - DNA, 132 bp, Homo sapiens; identical to SEQ ID NO: 261810
  chr10:13688016-13688148
  hypo

SEQ ID NO: 438906 - DNA, 170 bp, Homo sapiens; identical to SEQ ID NO: 213467
  chr10:13692405-13692575
  hypo

SEQ ID NO: 438907 - DNA, 78 bp, Homo sapiens; identical to SEQ ID NO: 261814
  chr10:13725168-13725246
  hypo

SEQ ID NO: 438908 - DNA, 263 bp, Homo sapiens; identical to SEQ ID NO: 261815
  chr10:13735188-13735451
  hypo

SEQ ID NO: 438909 - DNA, 85 bp, Homo sapiens; identical to SEQ ID NO: 261816
  chr10:13737448-13737533
  hypo

SEQ ID NO: 438910 - DNA, 95 bp, Homo sapiens; identical to SEQ ID NO: 213470
  chr10:13739454-13739549
  hypo

SEQ ID NO: 438911 - DNA, 333 bp, Homo sapiens; identical to SEQ ID NO: 261818
  chr10:13769492-13769825
  hypo

SEQ ID NO: 438912 - DNA, 32 bp, Homo sapiens; identical to SEQ ID NO: 261819
  chr10:13769885-13769917
  hypo

SEQ ID NO: 438913 - DNA, 56 bp, Homo sapiens; identical to SEQ ID NO: 261821
  chr10:13776212-13776268
  hypo

SEQ ID NO: 438914 - DNA, 138 bp, Homo sapiens; identical to SEQ ID NO: 261822
  chr10:14195996-14196134
  hypo

SEQ ID NO: 438915 - DNA, 353 bp, Homo sapiens; identical to SEQ ID NO: 261823
  chr10:14575212-14575565
  hypo

SEQ ID NO: 438916 - DNA, 160 bp, Homo sapiens; identical to SEQ ID NO: 213474
  chr10:14626301-14626461
  hypo

SEQ ID NO: 438917 - DNA, 74 bp, Homo sapiens; identical to SEQ ID NO: 261826
  chr10:14818702-14818776
  hypo

SEQ ID NO: 438918 - DNA, 36 bp, Homo sapiens; identical to SEQ ID NO: 213476
  chr10:14851282-14851318
  hypo

SEQ ID NO: 438919 - DNA, 36 bp, Homo sapiens; identical to SEQ ID NO: 213477
  chr10:14966552-14966588
  hypo

SEQ ID NO: 438920 - DNA, 142 bp, Homo sapiens; identical to SEQ ID NO: 312417
  chr10:15000459-15000601
  hypo

SEQ ID NO: 438921 - DNA, 81 bp, Homo sapiens; identical to SEQ ID NO: 261833
  chr10:15009625-15009706
  hypo

SEQ ID NO: 438922 - DNA, 101 bp, Homo sapiens; identical to SEQ ID NO: 261834
  chr10:15022595-15022696
  hypo

SEQ ID NO: 438923 - DNA, 167 bp, Homo sapiens; identical to SEQ ID NO: 261836
  chr10:15154756-15154923
  hypo

SEQ ID NO: 438924 - DNA, 246 bp, Homo sapiens; identical to SEQ ID NO: 261837
  chr10:15174784-15175030
  hypo

SEQ ID NO: 438925 - DNA, 35 bp, Homo sapiens; identical to SEQ ID NO: 261840
  chr10:15261860-15261895
  hypo

SEQ ID NO: 438926 - DNA, 291 bp, Homo sapiens; identical to SEQ ID NO: 261841
  chr10:15264100-15264391
  hypo

SEQ ID NO: 438927 - DNA, 83 bp, Homo sapiens; identical to SEQ ID NO: 261842
  chr10:15273618-15273701
  hypo

SEQ ID NO: 438928 - DNA, 60 bp, Homo sapiens; identical to SEQ ID NO: 213478
  chr10:15345843-15345903
  hypo

SEQ ID NO: 438929 - DNA, 40 bp, Homo sapiens; identical to SEQ ID NO: 261844
  chr10:15355003-15355043
  hypo

SEQ ID NO: 438930 - DNA, 285 bp, Homo sapiens; identical to SEQ ID NO: 261845
  chr10:15356716-15357001
  hypo

SEQ ID NO: 438931 - DNA, 167 bp, Homo sapiens; identical to SEQ ID NO: 213482
  chr10:16715632-16715799
  hypo

SEQ ID NO: 438932 - DNA, 322 bp, Homo sapiens; identical to SEQ ID NO: 213483
  chr10:16769206-16769528
  hypo

SEQ ID NO: 438933 - DNA, 47 bp, Homo sapiens; identical to SEQ ID NO: 261852
  chr10:16866978-16867025
  hypo

SEQ ID NO: 438934 - DNA, 32 bp, Homo sapiens; identical to SEQ ID NO: 261853
  chr10:16915427-16915459
  hypo

SEQ ID NO: 438935 - DNA, 50 bp, Homo sapiens; identical to SEQ ID NO: 261854
  chr10:16916365-16916415
  hypo

SEQ ID NO: 438936 - DNA, 97 bp, Homo sapiens; identical to SEQ ID NO: 261855
  chr10:16955825-16955922
  hypo

SEQ ID NO: 438937 - DNA, 62 bp, Homo sapiens; identical to SEQ ID NO: 261856
  chr10:16990540-16990602
  hypo

SEQ ID NO: 438938 - DNA, 39 bp, Homo sapiens; identical to SEQ ID NO: 386155
  chr10:17157575-17157614
  hypo

SEQ ID NO: 438939 - DNA, 125 bp, Homo sapiens; identical to SEQ ID NO: 261858
  chr10:17157644-17157769
  hypo

SEQ ID NO: 438940 - DNA, 32 bp, Homo sapiens; identical to SEQ ID NO: 261859
  chr10:17331810-17331842
  hypo

SEQ ID NO: 438941 - DNA, 39 bp, Homo sapiens; identical to SEQ ID NO: 261861
  chr10:17378259-17378298
  hypo

SEQ ID NO: 438942 - DNA, 113 bp, Homo sapiens; identical to SEQ ID NO: 261863
  chr10:17507084-17507197
  hypo

SEQ ID NO: 438943 - DNA, 81 bp, Homo sapiens; identical to SEQ ID NO: 213489
  chr10:17509666-17509747
  hypo

SEQ ID NO: 438944 - DNA, 44 bp, Homo sapiens; identical to SEQ ID NO: 261865
  chr10:17512861-17512905
  hypo

SEQ ID NO: 438945 - DNA, 38 bp, Homo sapiens; identical to SEQ ID NO: 261866
  chr10:17608667-17608705
  hypo

SEQ ID NO: 438946 - DNA, 190 bp, Homo sapiens; identical to SEQ ID NO: 261867
  chr10:18579867-18580057
  hypo

SEQ ID NO: 438947 - DNA, 204 bp, Homo sapiens; identical to SEQ ID NO: 261868
  chr10:18914961-18915165
  hypo

SEQ ID NO: 438948 - DNA, 146 bp, Homo sapiens; identical to SEQ ID NO: 261869
  chr10:20538375-20538521
  hypo

SEQ ID NO: 438949 - DNA, 34 bp, Homo sapiens; identical to SEQ ID NO: 261870
  chr10:21606054-21606088
  hypo

SEQ ID NO: 438950 - DNA, 38 bp, Homo sapiens; identical to SEQ ID NO: 261871
  chr10:21623890-21623928
  hypo

SEQ ID NO: 438951 - DNA, 203 bp, Homo sapiens; identical to SEQ ID NO: 202007
  chr10:21785547-21785750
  hypo

SEQ ID NO: 438952 - DNA, 49 bp, Homo sapiens; identical to SEQ ID NO: 286985
  chr10:21785786-21785835
  hypo

SEQ ID NO: 438953 - DNA, 153 bp, Homo sapiens; identical to SEQ ID NO: 223775
  chr10:21805907-21806060
  hypo

SEQ ID NO: 438954 - DNA, 318 bp, Homo sapiens; identical to SEQ ID NO: 286988
  chr10:21814235-21814553
  hypo

SEQ ID NO: 438955 - DNA, 142 bp, Homo sapiens; identical to SEQ ID NO: 223778
  chr10:21824264-21824406
  hypo

SEQ ID NO: 438956 - DNA, 82 bp, Homo sapiens; identical to SEQ ID NO: 261874
  chr10:21983925-21984007
  hypo

SEQ ID NO: 438957 - DNA, 60 bp, Homo sapiens; identical to SEQ ID NO: 261875
  chr10:22004067-22004127
  hypo

SEQ ID NO: 438958 - DNA, 240 bp, Homo sapiens; identical to SEQ ID NO: 286993
  chr10:22032716-22032956
  hypo

SEQ ID NO: 438959 - DNA, 101 bp, Homo sapiens; identical to SEQ ID NO: 312472
  chr10:22033349-22033450
  hypo

SEQ ID NO: 438960 - DNA, 301 bp, Homo sapiens; identical to SEQ ID NO: 261878
  chr10:22039219-22039520
  hypo

SEQ ID NO: 438961 - DNA, 34 bp, Homo sapiens; identical to SEQ ID NO: 312474
  chr10:22040719-22040753
  hypo

SEQ ID NO: 438962 - DNA, 113 bp, Homo sapiens; identical to SEQ ID NO: 312475
  chr10:22040783-22040896
  hypo

SEQ ID NO: 438963 - DNA, 163 bp, Homo sapiens; identical to SEQ ID NO: 261882
  chr10:22048281-22048444
  hypo

SEQ ID NO: 438964 - DNA, 131 bp, Homo sapiens; identical to SEQ ID NO: 261883
  chr10:22099945-22100076
  hypo

SEQ ID NO: 438965 - DNA, 36 bp, Homo sapiens; identical to SEQ ID NO: 261884
  chr10:22477766-22477802
  hypo

SEQ ID NO: 438966 - DNA, 36 bp, Homo sapiens; identical to SEQ ID NO: 261885
  chr10:22478102-22478138
  hypo

SEQ ID NO: 438967 - DNA, 966 bp, Homo sapiens; identical to SEQ ID NO: 287001
  chr10:22614079-22615045
  hypo

SEQ ID NO: 438968 - DNA, 291 bp, Homo sapiens; identical to SEQ ID NO: 261888
  chr10:22849147-22849438
  hypo

SEQ ID NO: 438969 - DNA, 135 bp, Homo sapiens; identical to SEQ ID NO: 261889
  chr10:22849866-22850001
  hypo

SEQ ID NO: 438970 - DNA, 235 bp, Homo sapiens; identical to SEQ ID NO: 261892
  chr10:22922576-22922811
  hypo

SEQ ID NO: 438971 - DNA, 161 bp, Homo sapiens; identical to SEQ ID NO: 261893
  chr10:23294127-23294288
  hypo

SEQ ID NO: 438972 - DNA, 77 bp, Homo sapiens; identical to SEQ ID NO: 261894
  chr10:24839342-24839419
  hypo

SEQ ID NO: 438973 - DNA, 37 bp, Homo sapiens; identical to SEQ ID NO: 261898
  chr10:24966120-24966157
  hypo

SEQ ID NO: 438974 - DNA, 96 bp, Homo sapiens; identical to SEQ ID NO: 213501
  chr10:24988619-24988715
  hypo

SEQ ID NO: 438975 - DNA, 241 bp, Homo sapiens; identical to SEQ ID NO: 287011
  chr10:25011170-25011411
  hypo

SEQ ID NO: 438976 - DNA, 164 bp, Homo sapiens; identical to SEQ ID NO: 202016
  chr10:25012546-25012710
  hypo

SEQ ID NO: 438977 - DNA, 33 bp, Homo sapiens; identical to SEQ ID NO: 213503
  chr10:25097337-25097370
  hypo

SEQ ID NO: 438978 - DNA, 112 bp, Homo sapiens; identical to SEQ ID NO: 287016
  chr10:25463329-25463441
  hypo

SEQ ID NO: 438979 - DNA, 33 bp, Homo sapiens; identical to SEQ ID NO: 261902
  chr10:26819343-26819376
  hypo

SEQ ID NO: 438980 - DNA, 157 bp, Homo sapiens; identical to SEQ ID NO: 261903
  chr10:26822792-26822949
  hypo

SEQ ID NO: 438981 - DNA, 289 bp, Homo sapiens; identical to SEQ ID NO: 261904
  chr10:26868625-26868914
  hypo

SEQ ID NO: 438982 - DNA, 36 bp, Homo sapiens; identical to SEQ ID NO: 261905
  chr10:27020722-27020758
  hypo

SEQ ID NO: 438983 - DNA, 275 bp, Homo sapiens; identical to SEQ ID NO: 213505
  chr10:27020878-27021153
  hypo

SEQ ID NO: 438984 - DNA, 89 bp, Homo sapiens; identical to SEQ ID NO: 213506
  chr10:27089296-27089385
  hypo

SEQ ID NO: 438985 - DNA, 36 bp, Homo sapiens; identical to SEQ ID NO: 213507
  chr10:27096989-27097025
  hypo

SEQ ID NO: 438986 - DNA, 42 bp, Homo sapiens; identical to SEQ ID NO: 261910
  chr10:27233078-27233120
  hypo

SEQ ID NO: 438987 - DNA, 281 bp, Homo sapiens; identical to SEQ ID NO: 261911
  chr10:27233410-27233691
  hypo

SEQ ID NO: 438988 - DNA, 102 bp, Homo sapiens; identical to SEQ ID NO: 213510
  chr10:27478219-27478321
  hypo

SEQ ID NO: 438989 - DNA, 31 bp, Homo sapiens; identical to SEQ ID NO: 213511
  chr10:27846958-27846989
  hypo

SEQ ID NO: 438990 - DNA, 60 bp, Homo sapiens; identical to SEQ ID NO: 213512
  chr10:27978843-27978903
  hypo

SEQ ID NO: 438991 - DNA, 74 bp, Homo sapiens; identical to SEQ ID NO: 261917
  chr10:27990194-27990268
  hypo

SEQ ID NO: 438992 - DNA, 43 bp, Homo sapiens; identical to SEQ ID NO: 261918
  chr10:28551685-28551728
  hypo

SEQ ID NO: 438993 - DNA, 42 bp, Homo sapiens; identical to SEQ ID NO: 261919
  chr10:28558917-28558959
  hypo

SEQ ID NO: 438994 - DNA, 59 bp, Homo sapiens; identical to SEQ ID NO: 213513
  chr10:28824511-28824570
  hypo

SEQ ID NO: 438995 - DNA, 87 bp, Homo sapiens; identical to SEQ ID NO: 261921
  chr10:28833066-28833153
  hypo

SEQ ID NO: 438996 - DNA, 420 bp, Homo sapiens; identical to SEQ ID NO: 287037
  chr10:28965881-28966301
  hypo

SEQ ID NO: 438997 - DNA, 239 bp, Homo sapiens; identical to SEQ ID NO: 202029
  chr10:28966598-28966837
  hypo

SEQ ID NO: 438998 - DNA, 172 bp, Homo sapiens; identical to SEQ ID NO: 261922
  chr10:29186603-29186775
  hypo

SEQ ID NO: 438999 - DNA, 79 bp, Homo sapiens; identical to SEQ ID NO: 261923
  chr10:29213404-29213483
  hypo

SEQ ID NO: 439000 - DNA, 76 bp, Homo sapiens; identical to SEQ ID NO: 261924
  chr10:29296565-29296641
  hypo

SEQ ID NO: 439001 - DNA, 86 bp, Homo sapiens; identical to SEQ ID NO: 213516
  chr10:29300155-29300241
  hypo

SEQ ID NO: 439002 - DNA, 228 bp, Homo sapiens; identical to SEQ ID NO: 213517
  chr10:29311385-29311613
  hypo

SEQ ID NO: 439003 - DNA, 367 bp, Homo sapiens; identical to SEQ ID NO: 261927
  chr10:29518368-29518735
  hypo

SEQ ID NO: 439004 - DNA, 78 bp, Homo sapiens; identical to SEQ ID NO: 202031
  chr10:29738055-29738133
  hypo

SEQ ID NO: 439005 - DNA, 107 bp, Homo sapiens; identical to SEQ ID NO: 261930
  chr10:29769273-29769380
  hypo

SEQ ID NO: 439006 - DNA, 45 bp, Homo sapiens; identical to SEQ ID NO: 261931
  chr10:29777545-29777590
  hypo

SEQ ID NO: 439007 - DNA, 171 bp, Homo sapiens; identical to SEQ ID NO: 261932
  chr10:29805522-29805693
  hypo

SEQ ID NO: 439008 - DNA, 145 bp, Homo sapiens; identical to SEQ ID NO: 261933
  chr10:29815841-29815986
  hypo

SEQ ID NO: 439009 - DNA, 158 bp, Homo sapiens; identical to SEQ ID NO: 261934
  chr10:29821666-29821824
  hypo

SEQ ID NO: 439010 - DNA, 39 bp, Homo sapiens; identical to SEQ ID NO: 261935
  chr10:29840087-29840126
  hypo

SEQ ID NO: 439011 - DNA, 35 bp, Homo sapiens; identical to SEQ ID NO: 261936
  chr10:29857037-29857072
  hypo

SEQ ID NO: 439012 - DNA, 207 bp, Homo sapiens; identical to SEQ ID NO: 261937
  chr10:29884472-29884679
  hypo

SEQ ID NO: 439013 - DNA, 43 bp, Homo sapiens; identical to SEQ ID NO: 261938
  chr10:30270177-30270220
  hypo

SEQ ID NO: 439014 - DNA, 47 bp, Homo sapiens; identical to SEQ ID NO: 261939
  chr10:30280769-30280816
  hypo

SEQ ID NO: 439015 - DNA, 119 bp, Homo sapiens; identical to SEQ ID NO: 261940
  chr10:30282371-30282490
  hypo

SEQ ID NO: 439016 - DNA, 240 bp, Homo sapiens; identical to SEQ ID NO: 261941
  chr10:30454426-30454666
  hypo

SEQ ID NO: 439017 - DNA, 96 bp, Homo sapiens; identical to SEQ ID NO: 261942
  chr10:30496158-30496254
  hypo

SEQ ID NO: 439018 - DNA, 34 bp, Homo sapiens; identical to SEQ ID NO: 261943
  chr10:30692599-30692633
  hypo

SEQ ID NO: 439019 - DNA, 81 bp, Homo sapiens; identical to SEQ ID NO: 261945
  chr10:30798127-30798208
  hypo

SEQ ID NO: 439020 - DNA, 34 bp, Homo sapiens; identical to SEQ ID NO: 213520
  chr10:30981747-30981781
  hypo

SEQ ID NO: 439021 - DNA, 287 bp, Homo sapiens; identical to SEQ ID NO: 213521
  chr10:31108014-31108301
  hypo

SEQ ID NO: 439022 - DNA, 84 bp, Homo sapiens; identical to SEQ ID NO: 261948
  chr10:31121497-31121581
  hypo

SEQ ID NO: 439023 - DNA, 42 bp, Homo sapiens; identical to SEQ ID NO: 261950
  chr10:31389890-31389932
  hypo

SEQ ID NO: 439024 - DNA, 106 bp, Homo sapiens; identical to SEQ ID NO: 261951
  chr10:31810654-31810760
  hypo

SEQ ID NO: 439025 - DNA, 186 bp, Homo sapiens; identical to SEQ ID NO: 261953
  chr10:32038297-32038483
  hypo

SEQ ID NO: 439026 - DNA, 33 bp, Homo sapiens; identical to SEQ ID NO: 261954
  chr10:32080305-32080338
  hypo

SEQ ID NO: 439027 - DNA, 155 bp, Homo sapiens; identical to SEQ ID NO: 213524
  chr10:32205149-32205304
  hypo

SEQ ID NO: 439028 - DNA, 36 bp, Homo sapiens; identical to SEQ ID NO: 213525
  chr10:32333609-32333645
  hypo

SEQ ID NO: 439029 - DNA, 33 bp, Homo sapiens; identical to SEQ ID NO: 261959
  chr10:32587053-32587086
  hypo

SEQ ID NO: 439030 - DNA, 40 bp, Homo sapiens; identical to SEQ ID NO: 213526
  chr10:33293520-33293560
  hypo

SEQ ID NO: 439031 - DNA, 104 bp, Homo sapiens; identical to SEQ ID NO: 261962
  chr10:33432805-33432909
  hypo

SEQ ID NO: 439032 - DNA, 43 bp, Homo sapiens; identical to SEQ ID NO: 213527
  chr10:34063092-34063135
  hypo

SEQ ID NO: 439033 - DNA, 47 bp, Homo sapiens; identical to SEQ ID NO: 261964
  chr10:34151694-34151741
  hypo

SEQ ID NO: 439034 - DNA, 182 bp, Homo sapiens; identical to SEQ ID NO: 213528
  chr10:34276837-34277019
  hypo

SEQ ID NO: 439035 - DNA, 171 bp, Homo sapiens; identical to SEQ ID NO: 261966
  chr10:34333800-34333971
  hypo

SEQ ID NO: 439036 - DNA, 76 bp, Homo sapiens; identical to SEQ ID NO: 261967
  chr10:34345647-34345723
  hypo

SEQ ID NO: 439037 - DNA, 160 bp, Homo sapiens; identical to SEQ ID NO: 261968
  chr10:34472412-34472572
  hypo

SEQ ID NO: 439038 - DNA, 40 bp, Homo sapiens; identical to SEQ ID NO: 261969
  chr10:34532753-34532793
  hypo

SEQ ID NO: 439039 - DNA, 167 bp, Homo sapiens; identical to SEQ ID NO: 261970
  chr10:34558597-34558764
  hypo

SEQ ID NO: 439040 - DNA, 78 bp, Homo sapiens; identical to SEQ ID NO: 261971
  chr10:34845266-34845344
  hypo

SEQ ID NO: 439041 - DNA, 77 bp, Homo sapiens; identical to SEQ ID NO: 261972
  chr10:34845584-34845661
  hypo

SEQ ID NO: 439042 - DNA, 340 bp, Homo sapiens; identical to SEQ ID NO: 287067
  chr10:35105213-35105553
  hypo

SEQ ID NO: 439043 - DNA, 31 bp, Homo sapiens; identical to SEQ ID NO: 261975
  chr10:35243813-35243844
  hypo

SEQ ID NO: 439044 - DNA, 81 bp, Homo sapiens; identical to SEQ ID NO: 213531
  chr10:35254596-35254677
  hypo

SEQ ID NO: 439045 - DNA, 35 bp, Homo sapiens; identical to SEQ ID NO: 261977
  chr10:35394058-35394093
  hypo

SEQ ID NO: 439046 - DNA, 34 bp, Homo sapiens; identical to SEQ ID NO: 213533
  chr10:35621534-35621568
  hypo

SEQ ID NO: 439047 - DNA, 33 bp, Homo sapiens; identical to SEQ ID NO: 261980
  chr10:35621808-35621841
  hypo

SEQ ID NO: 439048 - DNA, 198 bp, Homo sapiens; identical to SEQ ID NO: 213534
  chr10:36639323-36639521
  hypo

SEQ ID NO: 439049 - DNA, 42 bp, Homo sapiens; identical to SEQ ID NO: 213535
  chr10:36930096-36930138
  hypo

SEQ ID NO: 439050 - DNA, 34 bp, Homo sapiens; identical to SEQ ID NO: 213536
  chr10:43131976-43132010
  hypo

SEQ ID NO: 439051 - DNA, 300 bp, Homo sapiens; identical to SEQ ID NO: 261984
  chr10:43185746-43186046
  hypo

SEQ ID NO: 439052 - DNA, 285 bp, Homo sapiens; identical to SEQ ID NO: 261985
  chr10:43186655-43186940
  hypo

SEQ ID NO: 439053 - DNA, 175 bp, Homo sapiens; identical to SEQ ID NO: 312592
  chr10:43265253-43265428
  hypo

SEQ ID NO: 439054 - DNA, 257 bp, Homo sapiens; identical to SEQ ID NO: 287079
  chr10:43361723-43361980
  hypo

SEQ ID NO: 439055 - DNA, 49 bp, Homo sapiens; identical to SEQ ID NO: 261987
  chr10:43584498-43584547
  hypo

SEQ ID NO: 439056 - DNA, 168 bp, Homo sapiens; identical to SEQ ID NO: 261988
  chr10:43604494-43604662
  hypo

SEQ ID NO: 439057 - DNA, 78 bp, Homo sapiens; identical to SEQ ID NO: 213537
  chr10:43605297-43605375
  hypo

SEQ ID NO: 439058 - DNA, 77 bp, Homo sapiens; identical to SEQ ID NO: 213538
  chr10:43605405-43605482
  hypo

SEQ ID NO: 439059 - DNA, 53 bp, Homo sapiens; identical to SEQ ID NO: 261991
  chr10:43626346-43626399
  hypo

SEQ ID NO: 439060 - DNA, 168 bp, Homo sapiens; identical to SEQ ID NO: 261992
  chr10:43626884-43627052
  hypo

SEQ ID NO: 439061 - DNA, 239 bp, Homo sapiens; identical to SEQ ID NO: 261993
  chr10:43701717-43701956
  hypo

SEQ ID NO: 439062 - DNA, 326 bp, Homo sapiens; identical to SEQ ID NO: 261995
  chr10:43872976-43873302
  hypo

SEQ ID NO: 439063 - DNA, 37 bp, Homo sapiens; identical to SEQ ID NO: 213539
  chr10:43906027-43906064
  hypo

SEQ ID NO: 439064 - DNA, 57 bp, Homo sapiens; identical to SEQ ID NO: 407791
  chr10:44163603-44163660
  hypo

SEQ ID NO: 439065 - DNA, 159 bp, Homo sapiens; identical to SEQ ID NO: 261999
  chr10:44184096-44184255
  hypo

SEQ ID NO: 439066 - DNA, 182 bp, Homo sapiens; identical to SEQ ID NO: 312608
  chr10:44197651-44197833
  hypo

SEQ ID NO: 439067 - DNA, 272 bp, Homo sapiens; identical to SEQ ID NO: 262004
  chr10:45566820-45567092
  hypo

SEQ ID NO: 439068 - DNA, 34 bp, Homo sapiens; identical to SEQ ID NO: 262005
  chr10:45986735-45986769
  hypo

SEQ ID NO: 439069 - DNA, 75 bp, Homo sapiens
  chr10:46009934-46010009
  hypo
gcagctggacttgtgagggcttgctgaagccctcagcataccactcctgccatcaaactggactacttcctccag

SEQ ID NO: 439070 - DNA, 31 bp, Homo sapiens; identical to SEQ ID NO: 213545
  chr10:46195657-46195688
  hypo

SEQ ID NO: 439071 - DNA, 50 bp, Homo sapiens; identical to SEQ ID NO: 202066
  chr10:49514479-49514529
  hypo

SEQ ID NO: 439072 - DNA, 130 bp, Homo sapiens; identical to SEQ ID NO: 213547
  chr10:49541833-49541963
  hypo

SEQ ID NO: 439073 - DNA, 106 bp, Homo sapiens; identical to SEQ ID NO: 213548
  chr10:49541993-49542099
  hypo

SEQ ID NO: 439074 - DNA, 40 bp, Homo sapiens; identical to SEQ ID NO: 213549
  chr10:49592262-49592302
  hypo

SEQ ID NO: 439075 - DNA, 283 bp, Homo sapiens; identical to SEQ ID NO: 262011
  chr10:49658306-49658589
  hypo

SEQ ID NO: 439076 - DNA, 153 bp, Homo sapiens; identical to SEQ ID NO: 262012
  chr10:50099026-50099179
  hypo

SEQ ID NO: 439077 - DNA, 42 bp, Homo sapiens; identical to SEQ ID NO: 262013
  chr10:50158397-50158439
  hypo

SEQ ID NO: 439078 - DNA, 118 bp, Homo sapiens; identical to SEQ ID NO: 262014
  chr10:50178208-50178326
  hypo

SEQ ID NO: 439079 - DNA, 86 bp, Homo sapiens; identical to SEQ ID NO: 213550
  chr10:50340033-50340119
  hypo

SEQ ID NO: 439080 - DNA, 39 bp, Homo sapiens; identical to SEQ ID NO: 213551
  chr10:50340149-50340188
  hypo

SEQ ID NO: 439081 - DNA, 368 bp, Homo sapiens; identical to SEQ ID NO: 262016
  chr10:50530629-50530997
  hypo

SEQ ID NO: 439082 - DNA, 153 bp, Homo sapiens; identical to SEQ ID NO: 262017
  chr10:50680406-50680559
  hypo

SEQ ID NO: 439083 - DNA, 193 bp, Homo sapiens; identical to SEQ ID NO: 213553
  chr10:50724153-50724346
  hypo

SEQ ID NO: 439084 - DNA, 313 bp, Homo sapiens; identical to SEQ ID NO: 262020
  chr10:50854541-50854854
  hypo

SEQ ID NO: 439085 - DNA, 126 bp, Homo sapiens; identical to SEQ ID NO: 213558
  chr10:52369822-52369948
  hypo

SEQ ID NO: 439086 - DNA, 139 bp, Homo sapiens; identical to SEQ ID NO: 287123
  chr10:52833429-52833568
  hypo

SEQ ID NO: 439087 - DNA, 289 bp, Homo sapiens; identical to SEQ ID NO: 213560
  chr10:59866613-59866902
  hypo

SEQ ID NO: 439088 - DNA, 146 bp, Homo sapiens; identical to SEQ ID NO: 213561
  chr10:61552612-61552758
  hypo

SEQ ID NO: 439089 - DNA, 52 bp, Homo sapiens; identical to SEQ ID NO: 262026
  chr10:61552788-61552840
  hypo

SEQ ID NO: 439090 - DNA, 50 bp, Homo sapiens; identical to SEQ ID NO: 262027
  chr10:61652231-61652281
  hypo

SEQ ID NO: 439091 - DNA, 179 bp, Homo sapiens; identical to SEQ ID NO: 262028
  chr10:62662663-62662842
  hypo

SEQ ID NO: 439092 - DNA, 192 bp, Homo sapiens; identical to SEQ ID NO: 287144
  chr10:62703331-62703523
  hypo

SEQ ID NO: 439093 - DNA, 180 bp, Homo sapiens; identical to SEQ ID NO: 202090
  chr10:62703652-62703832
  hypo

SEQ ID NO: 439094 - DNA, 101 bp, Homo sapiens; identical to SEQ ID NO: 287146
  chr10:62704082-62704183
  hypo

SEQ ID NO: 439095 - DNA, 43 bp, Homo sapiens; identical to SEQ ID NO: 213563
  chr10:63669383-63669426
  hypo

SEQ ID NO: 439096 - DNA, 41 bp, Homo sapiens; identical to SEQ ID NO: 213564
  chr10:63757869-63757910
  hypo

SEQ ID NO: 439097 - DNA, 206 bp, Homo sapiens; identical to SEQ ID NO: 223828
  chr10:64028003-64028209
  hypo

SEQ ID NO: 439098 - DNA, 111 bp, Homo sapiens; identical to SEQ ID NO: 262031
  chr10:64914130-64914241
  hypo

SEQ ID NO: 439099 - DNA, 103 bp, Homo sapiens; identical to SEQ ID NO: 213565
  chr10:64945157-64945260
  hypo

SEQ ID NO: 439100 - DNA, 82 bp, Homo sapiens; identical to SEQ ID NO: 262033
  chr10:64997098-64997180
  hypo

SEQ ID NO: 439101 - DNA, 114 bp, Homo sapiens; identical to SEQ ID NO: 262034
  chr10:65186891-65187005
  hypo

SEQ ID NO: 439102 - DNA, 444 bp, Homo sapiens; identical to SEQ ID NO: 287159
  chr10:65225896-65226340
  hypo

SEQ ID NO: 439103 - DNA, 33 bp, Homo sapiens; identical to SEQ ID NO: 262035
  chr10:69253021-69253054
  hypo

SEQ ID NO: 439104 - DNA, 41 bp, Homo sapiens; identical to SEQ ID NO: 262036
  chr10:69578804-69578845
  hypo

SEQ ID NO: 439105 - DNA, 42 bp, Homo sapiens; identical to SEQ ID NO: 262037
  chr10:69606878-69606920
  hypo

SEQ ID NO: 439106 - DNA, 79 bp, Homo sapiens; identical to SEQ ID NO: 262038
  chr10:69646548-69646627
  hypo

SEQ ID NO: 439107 - DNA, 120 bp, Homo sapiens; identical to SEQ ID NO: 213566
  chr10:69853849-69853969
  hypo

SEQ ID NO: 439108 - DNA, 34 bp, Homo sapiens; identical to SEQ ID NO: 213569
  chr10:70266166-70266200
  hypo

SEQ ID NO: 439109 - DNA, 240 bp, Homo sapiens; identical to SEQ ID NO: 262044
  chr10:70288835-70289075
  hypo

SEQ ID NO: 439110 - DNA, 35 bp, Homo sapiens; identical to SEQ ID NO: 262045
  chr10:70472770-70472805
  hypo

SEQ ID NO: 439111 - DNA, 43 bp, Homo sapiens; identical to SEQ ID NO: 262046
  chr10:70478654-70478697
  hypo

SEQ ID NO: 439112 - DNA, 112 bp, Homo sapiens; identical to SEQ ID NO: 213570
  chr10:70483199-70483311
  hypo

SEQ ID NO: 439113 - DNA, 139 bp, Homo sapiens; identical to SEQ ID NO: 262048
  chr10:70530864-70531003
  hypo

SEQ ID NO: 439114 - DNA, 98 bp, Homo sapiens; identical to SEQ ID NO: 262049
  chr10:70992569-70992667
  hypo

SEQ ID NO: 439115 - DNA, 51 bp, Homo sapiens; identical to SEQ ID NO: 262050
  chr10:70993020-70993071
  hypo

SEQ ID NO: 439116 - DNA, 159 bp, Homo sapiens; identical to SEQ ID NO: 262051
  chr10:71007178-71007337
  hypo

SEQ ID NO: 439117 - DNA, 196 bp, Homo sapiens; identical to SEQ ID NO: 262052
  chr10:71097944-71098140
  hypo

SEQ ID NO: 439118 - DNA, 173 bp, Homo sapiens; identical to SEQ ID NO: 262054
  chr10:71136632-71136805
  hypo

SEQ ID NO: 439119 - DNA, 42 bp, Homo sapiens; identical to SEQ ID NO: 262055
  chr10:71144262-71144304
  hypo

SEQ ID NO: 439120 - DNA, 72 bp, Homo sapiens; identical to SEQ ID NO: 213572
  chr10:71144613-71144685
  hypo

SEQ ID NO: 439121 - DNA, 48 bp, Homo sapiens; identical to SEQ ID NO: 262057
  chr10:71154729-71154777
  hypo

SEQ ID NO: 439122 - DNA, 50 bp, Homo sapiens; identical to SEQ ID NO: 213573
  chr10:71174693-71174743
  hypo

SEQ ID NO: 439123 - DNA, 106 bp, Homo sapiens; identical to SEQ ID NO: 262060
  chr10:71218535-71218641
  hypo

SEQ ID NO: 439124 - DNA, 190 bp, Homo sapiens; identical to SEQ ID NO: 213574
  chr10:71245588-71245778
  hypo

SEQ ID NO: 439125 - DNA, 70 bp, Homo sapiens; identical to SEQ ID NO: 262063
  chr10:71566071-71566141
  hypo

SEQ ID NO: 439126 - DNA, 166 bp, Homo sapiens; identical to SEQ ID NO: 213575
  chr10:71639773-71639939
  hypo

SEQ ID NO: 439127 - DNA, 183 bp, Homo sapiens; identical to SEQ ID NO: 262065
  chr10:71703276-71703459
  hypo

SEQ ID NO: 439128 - DNA, 93 bp, Homo sapiens; identical to SEQ ID NO: 262066
  chr10:71706826-71706919
  hypo

SEQ ID NO: 439129 - DNA, 53 bp, Homo sapiens; identical to SEQ ID NO: 213576
  chr10:71871350-71871403
  hypo

SEQ ID NO: 439130 - DNA, 58 bp, Homo sapiens; identical to SEQ ID NO: 398379
  chr10:71892801-71892859
  hypo

SEQ ID NO: 439131 - DNA, 128 bp, Homo sapiens; identical to SEQ ID NO: 287199
  chr10:71892896-71893024
  hypo

SEQ ID NO: 439132 - DNA, 160 bp, Homo sapiens; identical to SEQ ID NO: 262069
  chr10:72300744-72300904
  hypo

SEQ ID NO: 439133 - DNA, 223 bp, Homo sapiens; identical to SEQ ID NO: 213579
  chr10:72442676-72442899
  hypo

SEQ ID NO: 439134 - DNA, 165 bp, Homo sapiens; identical to SEQ ID NO: 262072
  chr10:72491962-72492127
  hypo

SEQ ID NO: 439135 - DNA, 37 bp, Homo sapiens; identical to SEQ ID NO: 262073
  chr10:72503444-72503481
  hypo

SEQ ID NO: 439136 - DNA, 56 bp, Homo sapiens; identical to SEQ ID NO: 262074
  chr10:72509555-72509611
  hypo

SEQ ID NO: 439137 - DNA, 261 bp, Homo sapiens; identical to SEQ ID NO: 262075
  chr10:72695180-72695441
  hypo

SEQ ID NO: 439138 - DNA, 150 bp, Homo sapiens; identical to SEQ ID NO: 262078
  chr10:72793046-72793196
  hypo

SEQ ID NO: 439139 - DNA, 133 bp, Homo sapiens; identical to SEQ ID NO: 262079
  chr10:72820038-72820171
  hypo

SEQ ID NO: 439140 - DNA, 212 bp, Homo sapiens; identical to SEQ ID NO: 262080
  chr10:72838755-72838967
  hypo

SEQ ID NO: 439141 - DNA, 175 bp, Homo sapiens; identical to SEQ ID NO: 262081
  chr10:72847942-72848117
  hypo

SEQ ID NO: 439142 - DNA, 202 bp, Homo sapiens; identical to SEQ ID NO: 262082
  chr10:72887226-72887428
  hypo

SEQ ID NO: 439143 - DNA, 99 bp, Homo sapiens; identical to SEQ ID NO: 262083
  chr10:73036106-73036205
  hypo

SEQ ID NO: 439144 - DNA, 37 bp, Homo sapiens; identical to SEQ ID NO: 202115
  chr10:73113223-73113260
  hypo

SEQ ID NO: 439145 - DNA, 192 bp, Homo sapiens; identical to SEQ ID NO: 213582
  chr10:73288226-73288418
  hypo

SEQ ID NO: 439146 - DNA, 34 bp, Homo sapiens; identical to SEQ ID NO: 262085
  chr10:73326700-73326734
  hypo

SEQ ID NO: 439147 - DNA, 36 bp, Homo sapiens; identical to SEQ ID NO: 262086
  chr10:73395989-73396025
  hypo

SEQ ID NO: 439148 - DNA, 138 bp, Homo sapiens; identical to SEQ ID NO: 262087
  chr10:73418336-73418474
  hypo

SEQ ID NO: 439149 - DNA, 123 bp, Homo sapiens; identical to SEQ ID NO: 213584
  chr10:73455053-73455176
  hypo

SEQ ID NO: 439150 - DNA, 53 bp, Homo sapiens; identical to SEQ ID NO: 213586
  chr10:73553163-73553216
  hypo

SEQ ID NO: 439151 - DNA, 92 bp, Homo sapiens; identical to SEQ ID NO: 213587
  chr10:73574841-73574933
  hypo

SEQ ID NO: 439152 - DNA, 166 bp, Homo sapiens; identical to SEQ ID NO: 262093
  chr10:73576259-73576425
  hypo

SEQ ID NO: 439153 - DNA, 147 bp, Homo sapiens; identical to SEQ ID NO: 287217
  chr10:73848222-73848369
  hypo

SEQ ID NO: 439154 - DNA, 38 bp, Homo sapiens; identical to SEQ ID NO: 262096
  chr10:73929856-73929894
  hypo

SEQ ID NO: 439155 - DNA, 92 bp, Homo sapiens; identical to SEQ ID NO: 262097
  chr10:73970690-73970782
  hypo

SEQ ID NO: 439156 - DNA, 151 bp, Homo sapiens; identical to SEQ ID NO: 262098
  chr10:74003510-74003661
  hypo

SEQ ID NO: 439157 - DNA, 466 bp, Homo sapiens; identical to SEQ ID NO: 287219
  chr10:74032435-74032901
  hypo

SEQ ID NO: 439158 - DNA, 155 bp, Homo sapiens; identical to SEQ ID NO: 262100
  chr10:74108259-74108414
  hypo

SEQ ID NO: 439159 - DNA, 42 bp, Homo sapiens; identical to SEQ ID NO: 262101
  chr10:74439298-74439340
  hypo

SEQ ID NO: 439160 - DNA, 31 bp, Homo sapiens; identical to SEQ ID NO: 262103
  chr10:74467239-74467270
  hypo

SEQ ID NO: 439161 - DNA, 84 bp, Homo sapiens; identical to SEQ ID NO: 213593
  chr10:74518790-74518874
  hypo

SEQ ID NO: 439162 - DNA, 252 bp, Homo sapiens; identical to SEQ ID NO: 262105
  chr10:74684078-74684330
  hypo

SEQ ID NO: 439163 - DNA, 31 bp, Homo sapiens; identical to SEQ ID NO: 262106
  chr10:74880401-74880432
  hypo

SEQ ID NO: 439164 - DNA, 33 bp, Homo sapiens; identical to SEQ ID NO: 262107
  chr10:75128352-75128385
  hypo

SEQ ID NO: 439165 - DNA, 222 bp, Homo sapiens; identical to SEQ ID NO: 262108
  chr10:75184111-75184333
  hypo

SEQ ID NO: 439166 - DNA, 276 bp, Homo sapiens; identical to SEQ ID NO: 287235
  chr10:75408169-75408445
  hypo

SEQ ID NO: 439167 - DNA, 226 bp, Homo sapiens; identical to SEQ ID NO: 262111
  chr10:75423485-75423711
  hypo

SEQ ID NO: 439168 - DNA, 143 bp, Homo sapiens; identical to SEQ ID NO: 262112
  chr10:75491399-75491542
  hypo

SEQ ID NO: 439169 - DNA, 34 bp, Homo sapiens; identical to SEQ ID NO: 213594
  chr10:75493101-75493135
  hypo

SEQ ID NO: 439170 - DNA, 67 bp, Homo sapiens; identical to SEQ ID NO: 262115
  chr10:75548868-75548935
  hypo

SEQ ID NO: 439171 - DNA, 60 bp, Homo sapiens; identical to SEQ ID NO: 262117
  chr10:75606977-75607037
  hypo

SEQ ID NO: 439172 - DNA, 136 bp, Homo sapiens; identical to SEQ ID NO: 312742
  chr10:75632895-75633031
  hypo

SEQ ID NO: 439173 - DNA, 96 bp, Homo sapiens; identical to SEQ ID NO: 312743
  chr10:75832593-75832689
  hypo

SEQ ID NO: 439174 - DNA, 99 bp, Homo sapiens; identical to SEQ ID NO: 262120
  chr10:75874043-75874142
  hypo

SEQ ID NO: 439175 - DNA, 159 bp, Homo sapiens; identical to SEQ ID NO: 262121
  chr10:75893717-75893876
  hypo

SEQ ID NO: 439176 - DNA, 86 bp, Homo sapiens; identical to SEQ ID NO: 262122
  chr10:75966600-75966686
  hypo

SEQ ID NO: 439177 - DNA, 31 bp, Homo sapiens; identical to SEQ ID NO: 213595
  chr10:76013804-76013835
  hypo

SEQ ID NO: 439178 - DNA, 31 bp, Homo sapiens; identical to SEQ ID NO: 213596
  chr10:76019176-76019207
  hypo

SEQ ID NO: 439179 - DNA, 34 bp, Homo sapiens; identical to SEQ ID NO: 213597
  chr10:76538433-76538467
  hypo

SEQ ID NO: 439180 - DNA, 146 bp, Homo sapiens; identical to SEQ ID NO: 262128
  chr10:76588593-76588739
  hypo

SEQ ID NO: 439181 - DNA, 44 bp, Homo sapiens; identical to SEQ ID NO: 262129
  chr10:76693644-76693688
  hypo

SEQ ID NO: 439182 - DNA, 366 bp, Homo sapiens; identical to SEQ ID NO: 262130
  chr10:76780147-76780513
  hypo

SEQ ID NO: 439183 - DNA, 173 bp, Homo sapiens; identical to SEQ ID NO: 213599
  chr10:76796613-76796786
  hypo

SEQ ID NO: 439184 - DNA, 496 bp, Homo sapiens; identical to SEQ ID NO: 262133
  chr10:76797023-76797519
  hypo

SEQ ID NO: 439185 - DNA, 187 bp, Homo sapiens; identical to SEQ ID NO: 213601
  chr10:76818035-76818222
  hypo

SEQ ID NO: 439186 - DNA, 35 bp, Homo sapiens; identical to SEQ ID NO: 262135
  chr10:76845053-76845088
  hypo

SEQ ID NO: 439187 - DNA, 146 bp, Homo sapiens; identical to SEQ ID NO: 262136
  chr10:76857399-76857545
  hypo

SEQ ID NO: 439188 - DNA, 33 bp, Homo sapiens; identical to SEQ ID NO: 213602
  chr10:76875399-76875432
  hypo

SEQ ID NO: 439189 - DNA, 108 bp, Homo sapiens; identical to SEQ ID NO: 262138
  chr10:76961624-76961732
  hypo

SEQ ID NO: 439190 - DNA, 88 bp, Homo sapiens; identical to SEQ ID NO: 213603
  chr10:76968431-76968519
  hypo

SEQ ID NO: 439191 - DNA, 44 bp, Homo sapiens; identical to SEQ ID NO: 262141
  chr10:76992470-76992514
  hypo

SEQ ID NO: 439192 - DNA, 31 bp, Homo sapiens; identical to SEQ ID NO: 262143
  chr10:77003406-77003437
  hypo

SEQ ID NO: 439193 - DNA, 389 bp, Homo sapiens; identical to SEQ ID NO: 287248
  chr10:77054513-77054902
  hypo

SEQ ID NO: 439194 - DNA, 178 bp, Homo sapiens; identical to SEQ ID NO: 262144
  chr10:77242295-77242473
  hypo

SEQ ID NO: 439195 - DNA, 130 bp, Homo sapiens; identical to SEQ ID NO: 262145
  chr10:77499938-77500068
  hypo

SEQ ID NO: 439196 - DNA, 221 bp, Homo sapiens; identical to SEQ ID NO: 262146
  chr10:77794551-77794772
  hypo

SEQ ID NO: 439197 - DNA, 44 bp, Homo sapiens; identical to SEQ ID NO: 262148
  chr10:79540286-79540330
  hypo

SEQ ID NO: 439198 - DNA, 106 bp, Homo sapiens; identical to SEQ ID NO: 262149
  chr10:79581129-79581235
  hypo

SEQ ID NO: 439199 - DNA, 506 bp, Homo sapiens; identical to SEQ ID NO: 262150
  chr10:79598456-79598962
  hypo

SEQ ID NO: 439200 - DNA, 31 bp, Homo sapiens; identical to SEQ ID NO: 262153
  chr10:79670435-79670466
  hypo

SEQ ID NO: 439201 - DNA, 45 bp, Homo sapiens; identical to SEQ ID NO: 223849
  chr10:79686268-79686313
  hypo

SEQ ID NO: 439202 - DNA, 469 bp, Homo sapiens; identical to SEQ ID NO: 223850
  chr10:79686575-79687044
  hypo

SEQ ID NO: 439203 - DNA, 42 bp, Homo sapiens; identical to SEQ ID NO: 262154
  chr10:79713478-79713520
  hypo

SEQ ID NO: 439204 - DNA, 101 bp, Homo sapiens; identical to SEQ ID NO: 262156
  chr10:80061832-80061933
  hypo

SEQ ID NO: 439205 - DNA, 63 bp, Homo sapiens; identical to SEQ ID NO: 262157
  chr10:80232427-80232490
  hypo

SEQ ID NO: 439206 - DNA, 212 bp, Homo sapiens; identical to SEQ ID NO: 262158
  chr10:80540448-80540660
  hypo

SEQ ID NO: 439207 - DNA, 180 bp, Homo sapiens; identical to SEQ ID NO: 262159
  chr10:80588139-80588319
  hypo

SEQ ID NO: 439208 - DNA, 99 bp, Homo sapiens; identical to SEQ ID NO: 262160
  chr10:80726030-80726129
  hypo

SEQ ID NO: 439209 - DNA, 115 bp, Homo sapiens; identical to SEQ ID NO: 202151
  chr10:80733746-80733861
  hypo

SEQ ID NO: 439210 - DNA, 63 bp, Homo sapiens; identical to SEQ ID NO: 213610
  chr10:80739956-80740019
  hypo

SEQ ID NO: 439211 - DNA, 77 bp, Homo sapiens; identical to SEQ ID NO: 262162
  chr10:80763042-80763119
  hypo

SEQ ID NO: 439212 - DNA, 194 bp, Homo sapiens; identical to SEQ ID NO: 262163
  chr10:80766188-80766382
  hypo

SEQ ID NO: 439213 - DNA, 379 bp, Homo sapiens; identical to SEQ ID NO: 262164
  chr10:80793778-80794157
  hypo

SEQ ID NO: 439214 - DNA, 115 bp, Homo sapiens; identical to SEQ ID NO: 202152
  chr10:80827233-80827348
  hypo

SEQ ID NO: 439215 - DNA, 407 bp, Homo sapiens; identical to SEQ ID NO: 287267
  chr10:80828532-80828939
  hypo

SEQ ID NO: 439216 - DNA, 189 bp, Homo sapiens; identical to SEQ ID NO: 287268
  chr10:80830746-80830935
  hypo

SEQ ID NO: 439217 - DNA, 75 bp, Homo sapiens; identical to SEQ ID NO: 213613
  chr10:80840369-80840444
  hypo

SEQ ID NO: 439218 - DNA, 38 bp, Homo sapiens; identical to SEQ ID NO: 213614
  chr10:80870193-80870231
  hypo

SEQ ID NO: 439219 - DNA, 167 bp, Homo sapiens; identical to SEQ ID NO: 262170
  chr10:80879966-80880133
  hypo

SEQ ID NO: 439220 - DNA, 384 bp, Homo sapiens; identical to SEQ ID NO: 262171
  chr10:80900704-80901088
  hypo

SEQ ID NO: 439221 - DNA, 425 bp, Homo sapiens; identical to SEQ ID NO: 262174
  chr10:80930708-80931133
  hypo

SEQ ID NO: 439222 - DNA, 316 bp, Homo sapiens; identical to SEQ ID NO: 262175
  chr10:80953306-80953622
  hypo

SEQ ID NO: 439223 - DNA, 128 bp, Homo sapiens; identical to SEQ ID NO: 262176
  chr10:80954541-80954669
  hypo

SEQ ID NO: 439224 - DNA, 336 bp, Homo sapiens; identical to SEQ ID NO: 262177
  chr10:80955982-80956318
  hypo

SEQ ID NO: 439225 - DNA, 240 bp, Homo sapiens; identical to SEQ ID NO: 262179
  chr10:80958773-80959013
  hypo

SEQ ID NO: 439226 - DNA, 239 bp, Homo sapiens; identical to SEQ ID NO: 262180
  chr10:80961348-80961587
  hypo

SEQ ID NO: 439227 - DNA, 57 bp, Homo sapiens; identical to SEQ ID NO: 262181
  chr10:80962989-80963046
  hypo

SEQ ID NO: 439228 - DNA, 546 bp, Homo sapiens; identical to SEQ ID NO: 262182
  chr10:80966388-80966934
  hypo

SEQ ID NO: 439229 - DNA, 184 bp, Homo sapiens; identical to SEQ ID NO: 262183
  chr10:80969929-80970113
  hypo

SEQ ID NO: 439230 - DNA, 171 bp, Homo sapiens; identical to SEQ ID NO: 213622
  chr10:80971586-80971757
  hypo

SEQ ID NO: 439231 - DNA, 498 bp, Homo sapiens; identical to SEQ ID NO: 213623
  chr10:80974593-80975091
  hypo

SEQ ID NO: 439232 - DNA, 423 bp, Homo sapiens; identical to SEQ ID NO: 262186
  chr10:80975646-80976069
  hypo

SEQ ID NO: 439233 - DNA, 146 bp, Homo sapiens; identical to SEQ ID NO: 119197
  chr10:81002562-81002708
  hypo

SEQ ID NO: 439234 - DNA, 32 bp, Homo sapiens; identical to SEQ ID NO: 213625
  chr10:81017844-81017876
  hypo

SEQ ID NO: 439235 - DNA, 50 bp, Homo sapiens; identical to SEQ ID NO: 262188
  chr10:81020970-81021020
  hypo

SEQ ID NO: 439236 - DNA, 47 bp, Homo sapiens; identical to SEQ ID NO: 262190
  chr10:81029634-81029681
  hypo

SEQ ID NO: 439237 - DNA, 433 bp, Homo sapiens; identical to SEQ ID NO: 213630
  chr10:81036657-81037090
  hypo

SEQ ID NO: 439238 - DNA, 187 bp, Homo sapiens; identical to SEQ ID NO: 213632
  chr10:81058000-81058187
  hypo

SEQ ID NO: 439239 - DNA, 77 bp, Homo sapiens; identical to SEQ ID NO: 213633
  chr10:81059003-81059080
  hypo

SEQ ID NO: 439240 - DNA, 42 bp, Homo sapiens; identical to SEQ ID NO: 262201
  chr10:81072192-81072234
  hypo

SEQ ID NO: 439241 - DNA, 181 bp, Homo sapiens; identical to SEQ ID NO: 213637
  chr10:81073340-81073521
  hypo

SEQ ID NO: 439242 - DNA, 263 bp, Homo sapiens; identical to SEQ ID NO: 213639
  chr10:81145945-81146208
  hypo

SEQ ID NO: 439243 - DNA, 162 bp, Homo sapiens; identical to SEQ ID NO: 262205
  chr10:81861006-81861168
  hypo

SEQ ID NO: 439244 - DNA, 33 bp, Homo sapiens; identical to SEQ ID NO: 165803
  chr10:81915176-81915209
  hypo

SEQ ID NO: 439245 - DNA, 107 bp, Homo sapiens; identical to SEQ ID NO: 262207
  chr10:81931376-81931483
  hypo

SEQ ID NO: 439246 - DNA, 105 bp, Homo sapiens; identical to SEQ ID NO: 213640
  chr10:81966466-81966571
  hypo

SEQ ID NO: 439247 - DNA, 35 bp, Homo sapiens; identical to SEQ ID NO: 213641
  chr10:81966596-81966631
  hypo

SEQ ID NO: 439248 - DNA, 142 bp, Homo sapiens; identical to SEQ ID NO: 262209
  chr10:81968101-81968243
  hypo

SEQ ID NO: 439249 - DNA, 146 bp, Homo sapiens; identical to SEQ ID NO: 202156
  chr10:82213597-82213743
  hypo

SEQ ID NO: 439250 - DNA, 79 bp, Homo sapiens; identical to SEQ ID NO: 262210
  chr10:82363370-82363449
  hypo

SEQ ID NO: 439251 - DNA, 62 bp, Homo sapiens; identical to SEQ ID NO: 312847
  chr10:82573991-82574053
  hypo

SEQ ID NO: 439252 - DNA, 162 bp, Homo sapiens; identical to SEQ ID NO: 213643
  chr10:84618971-84619133
  hypo

SEQ ID NO: 439253 - DNA, 33 bp, Homo sapiens; identical to SEQ ID NO: 213644
  chr10:86016117-86016150
  hypo

SEQ ID NO: 439254 - DNA, 42 bp, Homo sapiens; identical to SEQ ID NO: 202161
  chr10:86088147-86088189
  hypo

SEQ ID NO: 439255 - DNA, 177 bp, Homo sapiens; identical to SEQ ID NO: 262214
  chr10:86175509-86175686
  hypo

SEQ ID NO: 439256 - DNA, 178 bp, Homo sapiens; identical to SEQ ID NO: 213646
  chr10:86306481-86306659
  hypo

SEQ ID NO: 439257 - DNA, 266 bp, Homo sapiens; identical to SEQ ID NO: 262216
  chr10:86361898-86362164
  hypo

SEQ ID NO: 439258 - DNA, 56 bp, Homo sapiens; identical to SEQ ID NO: 223859
  chr10:87493570-87493626
  hypo

SEQ ID NO: 439259 - DNA, 147 bp, Homo sapiens; identical to SEQ ID NO: 262217
  chr10:87965994-87966141
  hypo

SEQ ID NO: 439260 - DNA, 82 bp, Homo sapiens; identical to SEQ ID NO: 287290
  chr10:88224575-88224657
  hypo

SEQ ID NO: 439261 - DNA, 52 bp, Homo sapiens; identical to SEQ ID NO: 312859
  chr10:88280113-88280165
  hypo

SEQ ID NO: 439262 - DNA, 33 bp, Homo sapiens; identical to SEQ ID NO: 262222
  chr10:88286949-88286982
  hypo

SEQ ID NO: 439263 - DNA, 212 bp, Homo sapiens; identical to SEQ ID NO: 287292
  chr10:88294492-88294704
  hypo

SEQ ID NO: 439264 - DNA, 164 bp, Homo sapiens; identical to SEQ ID NO: 262224
  chr10:88422751-88422915
  hypo

SEQ ID NO: 439265 - DNA, 224 bp, Homo sapiens; identical to SEQ ID NO: 262226
  chr10:88470510-88470734
  hypo

SEQ ID NO: 439266 - DNA, 35 bp, Homo sapiens; identical to SEQ ID NO: 262227
  chr10:88587611-88587646
  hypo

SEQ ID NO: 439267 - DNA, 39 bp, Homo sapiens; identical to SEQ ID NO: 262230
  chr10:89362124-89362163
  hypo

SEQ ID NO: 439268 - DNA, 116 bp, Homo sapiens; identical to SEQ ID NO: 262231
  chr10:89892095-89892211
  hypo

SEQ ID NO: 439269 - DNA, 277 bp, Homo sapiens; identical to SEQ ID NO: 213650
  chr10:90029772-90030049
  hypo

SEQ ID NO: 439270 - DNA, 183 bp, Homo sapiens; identical to SEQ ID NO: 287308
  chr10:90750730-90750913
  hypo

SEQ ID NO: 439271 - DNA, 31 bp, Homo sapiens; identical to SEQ ID NO: 262233
  chr10:91589220-91589251
  hypo

SEQ ID NO: 439272 - DNA, 317 bp, Homo sapiens; identical to SEQ ID NO: 312876
  chr10:92913473-92913790
  hypo

SEQ ID NO: 439273 - DNA, 42 bp, Homo sapiens; identical to SEQ ID NO: 262237
  chr10:93744096-93744138
  hypo

SEQ ID NO: 439274 - DNA, 319 bp, Homo sapiens; identical to SEQ ID NO: 213655
  chr10:93811840-93812159
  hypo

SEQ ID NO: 439275 - DNA, 37 bp, Homo sapiens; identical to SEQ ID NO: 213656
  chr10:93843638-93843675
  hypo

SEQ ID NO: 439276 - DNA, 85 bp, Homo sapiens; identical to SEQ ID NO: 262240
  chr10:94156009-94156094
  hypo

SEQ ID NO: 439277 - DNA, 77 bp, Homo sapiens; identical to SEQ ID NO: 262241
  chr10:94156300-94156377
  hypo

SEQ ID NO: 439278 - DNA, 37 bp, Homo sapiens; identical to SEQ ID NO: 262242
  chr10:94219877-94219914
  hypo

SEQ ID NO: 439279 - DNA, 37 bp, Homo sapiens; identical to SEQ ID NO: 213657
  chr10:94310596-94310633
  hypo

SEQ ID NO: 439280 - DNA, 102 bp, Homo sapiens; identical to SEQ ID NO: 262245
  chr10:94770433-94770535
  hypo

SEQ ID NO: 439281 - DNA, 80 bp, Homo sapiens; identical to SEQ ID NO: 262246
  chr10:95143644-95143724
  hypo

SEQ ID NO: 439282 - DNA, 151 bp, Homo sapiens; identical to SEQ ID NO: 202189
  chr10:96122665-96122816
  hypo

SEQ ID NO: 439283 - DNA, 158 bp, Homo sapiens; identical to SEQ ID NO: 262247
  chr10:96154781-96154939
  hypo

SEQ ID NO: 439284 - DNA, 1666 bp, Homo sapiens; identical to SEQ ID NO: 287341
  chr10:96161937-96163603
  hypo

SEQ ID NO: 439285 - DNA, 92 bp, Homo sapiens; identical to SEQ ID NO: 262248
  chr10:97096180-97096272
  hypo

SEQ ID NO: 439286 - DNA, 37 bp, Homo sapiens; identical to SEQ ID NO: 213663
  chr10:97118425-97118462
  hypo

SEQ ID NO: 439287 - DNA, 80 bp, Homo sapiens; identical to SEQ ID NO: 262250
  chr10:97317229-97317309
  hypo

SEQ ID NO: 439288 - DNA, 191 bp, Homo sapiens; identical to SEQ ID NO: 202193
  chr10:97321201-97321392
  hypo

SEQ ID NO: 439289 - DNA, 74 bp, Homo sapiens; identical to SEQ ID NO: 262252
  chr10:97326022-97326096
  hypo

SEQ ID NO: 439290 - DNA, 44 bp, Homo sapiens; identical to SEQ ID NO: 213665
  chr10:97617586-97617630
  hypo

SEQ ID NO: 439291 - DNA, 94 bp, Homo sapiens; identical to SEQ ID NO: 262254
  chr10:97801082-97801176
  hypo

SEQ ID NO: 439292 - DNA, 96 bp, Homo sapiens; identical to SEQ ID NO: 262256
  chr10:98144322-98144418
  hypo

SEQ ID NO: 439293 - DNA, 38 bp, Homo sapiens; identical to SEQ ID NO: 262258
  chr10:98338545-98338583
  hypo

SEQ ID NO: 439294 - DNA, 136 bp, Homo sapiens; identical to SEQ ID NO: 213666
  chr10:98350862-98350998
  hypo

SEQ ID NO: 439295 - DNA, 176 bp, Homo sapiens; identical to SEQ ID NO: 262261
  chr10:98380115-98380291
  hypo

SEQ ID NO: 439296 - DNA, 144 bp, Homo sapiens; identical to SEQ ID NO: 213667
  chr10:98469423-98469567
  hypo

SEQ ID NO: 439297 - DNA, 95 bp, Homo sapiens; identical to SEQ ID NO: 262263
  chr10:98482590-98482685
  hypo

SEQ ID NO: 439298 - DNA, 120 bp, Homo sapiens; identical to SEQ ID NO: 213668
  chr10:98526399-98526519
  hypo

SEQ ID NO: 439299 - DNA, 228 bp, Homo sapiens; identical to SEQ ID NO: 223880
  chr10:98593370-98593598
  hypo

SEQ ID NO: 439300 - DNA, 34 bp, Homo sapiens; identical to SEQ ID NO: 262266
  chr10:98676070-98676104
  hypo

SEQ ID NO: 439301 - DNA, 45 bp, Homo sapiens; identical to SEQ ID NO: 262267
  chr10:98713009-98713054
  hypo

SEQ ID NO: 439302 - DNA, 54 bp, Homo sapiens; identical to SEQ ID NO: 262268
  chr10:98746417-98746471
  hypo

SEQ ID NO: 439303 - DNA, 251 bp, Homo sapiens; identical to SEQ ID NO: 262272
  chr10:99240758-99241009
  hypo

SEQ ID NO: 439304 - DNA, 336 bp, Homo sapiens; identical to SEQ ID NO: 223881
  chr10:99259373-99259709
  hypo

SEQ ID NO: 439305 - DNA, 124 bp, Homo sapiens; identical to SEQ ID NO: 262273
  chr10:99329947-99330071
  hypo

SEQ ID NO: 439306 - DNA, 328 bp, Homo sapiens; identical to SEQ ID NO: 262274
  chr10:99358763-99359091
  hypo

SEQ ID NO: 439307 - DNA, 122 bp, Homo sapiens; identical to SEQ ID NO: 223882
  chr10:99447292-99447414
  hypo

SEQ ID NO: 439308 - DNA, 191 bp, Homo sapiens; identical to SEQ ID NO: 213670
  chr10:99626199-99626390
  hypo

SEQ ID NO: 439309 - DNA, 172 bp, Homo sapiens; identical to SEQ ID NO: 262276
  chr10:100013352-100013524
  hypo

SEQ ID NO: 439310 - DNA, 78 bp, Homo sapiens; identical to SEQ ID NO: 262277
  chr10:100127560-100127638
  hypo

SEQ ID NO: 439311 - DNA, 174 bp, Homo sapiens; identical to SEQ ID NO: 213671
  chr10:100170637-100170811
  hypo

SEQ ID NO: 439312 - DNA, 426 bp, Homo sapiens; identical to SEQ ID NO: 213673
  chr10:100178510-100178936
  hypo

SEQ ID NO: 439313 - DNA, 211 bp, Homo sapiens; identical to SEQ ID NO: 262281
  chr10:100194215-100194426
  hypo

SEQ ID NO: 439314 - DNA, 86 bp, Homo sapiens; identical to SEQ ID NO: 262282
  chr10:100207454-100207540
  hypo

SEQ ID NO: 439315 - DNA, 58 bp, Homo sapiens; identical to SEQ ID NO: 312937
  chr10:100217102-100217160
  hypo

SEQ ID NO: 439316 - DNA, 264 bp, Homo sapiens; identical to SEQ ID NO: 287389
  chr10:101296800-101297064
  hypo

SEQ ID NO: 439317 - DNA, 236 bp, Homo sapiens; identical to SEQ ID NO: 287390
  chr10:101297130-101297366
  hypo

SEQ ID NO: 439318 - DNA, 239 bp, Homo sapiens; identical to SEQ ID NO: 213674
  chr10:101493074-101493313
  hypo

SEQ ID NO: 439319 - DNA, 43 bp, Homo sapiens; identical to SEQ ID NO: 213675
  chr10:101493373-101493416
  hypo

SEQ ID NO: 439320 - DNA, 37 bp, Homo sapiens; identical to SEQ ID NO: 262286
  chr10:101769082-101769119
  hypo

SEQ ID NO: 439321 - DNA, 223 bp, Homo sapiens; identical to SEQ ID NO: 262287
  chr10:102180363-102180586
  hypo

SEQ ID NO: 439322 - DNA, 203 bp, Homo sapiens; identical to SEQ ID NO: 262288
  chr10:102409486-102409689
  hypo

SEQ ID NO: 439323 - DNA, 203 bp, Homo sapiens; identical to SEQ ID NO: 262289
  chr10:102748645-102748848
  hypo

SEQ ID NO: 439324 - DNA, 317 bp, Homo sapiens; identical to SEQ ID NO: 213676
  chr10:102766308-102766625
  hypo

SEQ ID NO: 439325 - DNA, 262 bp, Homo sapiens; identical to SEQ ID NO: 262291
  chr10:102770159-102770421
  hypo

SEQ ID NO: 439326 - DNA, 381 bp, Homo sapiens; identical to SEQ ID NO: 287423
  chr10:102802620-102803001
  hypo

SEQ ID NO: 439327 - DNA, 61 bp, Homo sapiens; identical to SEQ ID NO: 213679
  chr10:102872322-102872383
  hypo

SEQ ID NO: 439328 - DNA, 120 bp, Homo sapiens; identical to SEQ ID NO: 202233
  chr10:102973524-102973644
  hypo

SEQ ID NO: 439329 - DNA, 88 bp, Homo sapiens; identical to SEQ ID NO: 262293
  chr10:103033097-103033185
  hypo

SEQ ID NO: 439330 - DNA, 34 bp, Homo sapiens; identical to SEQ ID NO: 262295
  chr10:103259007-103259041
  hypo

SEQ ID NO: 439331 - DNA, 202 bp, Homo sapiens; identical to SEQ ID NO: 202237
  chr10:103348788-103348990
  hypo

SEQ ID NO: 439332 - DNA, 73 bp, Homo sapiens; identical to SEQ ID NO: 213684
  chr10:103553397-103553470
  hypo

SEQ ID NO: 439333 - DNA, 124 bp, Homo sapiens; identical to SEQ ID NO: 262299
  chr10:103555064-103555188
  hypo

SEQ ID NO: 439334 - DNA, 129 bp, Homo sapiens; identical to SEQ ID NO: 262300
  chr10:103588893-103589022
  hypo

SEQ ID NO: 439335 - DNA, 91 bp, Homo sapiens; identical to SEQ ID NO: 262301
  chr10:103720633-103720724
  hypo

SEQ ID NO: 439336 - DNA, 144 bp, Homo sapiens; identical to SEQ ID NO: 262304
  chr10:104140854-104140998
  hypo

SEQ ID NO: 439337 - DNA, 61 bp, Homo sapiens; identical to SEQ ID NO: 312968
  chr10:104161594-104161655
  hypo

SEQ ID NO: 439338 - DNA, 42 bp, Homo sapiens; identical to SEQ ID NO: 262306
  chr10:104198522-104198564
  hypo

SEQ ID NO: 439339 - DNA, 34 bp, Homo sapiens; identical to SEQ ID NO: 213685
  chr10:104230570-104230604
  hypo

SEQ ID NO: 439340 - DNA, 199 bp, Homo sapiens; identical to SEQ ID NO: 213686
  chr10:104239074-104239273
  hypo

SEQ ID NO: 439341 - DNA, 129 bp, Homo sapiens; identical to SEQ ID NO: 262309
  chr10:104384282-104384411
  hypo

SEQ ID NO: 439342 - DNA, 57 bp, Homo sapiens; identical to SEQ ID NO: 262311
  chr10:104456328-104456385
  hypo

SEQ ID NO: 439343 - DNA, 101 bp, Homo sapiens; identical to SEQ ID NO: 262312
  chr10:104737943-104738044
  hypo

SEQ ID NO: 439344 - DNA, 120 bp, Homo sapiens; identical to SEQ ID NO: 262313
  chr10:104746123-104746243
  hypo

SEQ ID NO: 439345 - DNA, 41 bp, Homo sapiens; identical to SEQ ID NO: 262314
  chr10:104793215-104793256
  hypo

SEQ ID NO: 439346 - DNA, 336 bp, Homo sapiens; identical to SEQ ID NO: 213689
  chr10:104837797-104838133
  hypo

SEQ ID NO: 439347 - DNA, 85 bp, Homo sapiens; identical to SEQ ID NO: 312981
  chr10:105127076-105127161
  hypo

SEQ ID NO: 439348 - DNA, 33 bp, Homo sapiens; identical to SEQ ID NO: 213691
  chr10:105238592-105238625
  hypo

SEQ ID NO: 439349 - DNA, 321 bp, Homo sapiens; identical to SEQ ID NO: 262320
  chr10:105345023-105345344
  hypo

SEQ ID NO: 439350 - DNA, 282 bp, Homo sapiens; identical to SEQ ID NO: 262323
  chr10:105436790-105437072
  hypo

SEQ ID NO: 439351 - DNA, 42 bp, Homo sapiens; identical to SEQ ID NO: 262324
  chr10:105440561-105440603
  hypo

SEQ ID NO: 439352 - DNA, 38 bp, Homo sapiens; identical to SEQ ID NO: 262325
  chr10:105487458-105487496
  hypo

SEQ ID NO: 439353 - DNA, 65 bp, Homo sapiens; identical to SEQ ID NO: 262326
  chr10:105639324-105639389
  hypo

SEQ ID NO: 439354 - DNA, 33 bp, Homo sapiens; identical to SEQ ID NO: 213692
  chr10:105725850-105725883
  hypo

SEQ ID NO: 439355 - DNA, 76 bp, Homo sapiens; identical to SEQ ID NO: 262328
  chr10:106029646-106029722
  hypo

SEQ ID NO: 439356 - DNA, 75 bp, Homo sapiens; identical to SEQ ID NO: 262329
  chr10:106030047-106030122
  hypo

SEQ ID NO: 439357 - DNA, 35 bp, Homo sapiens; identical to SEQ ID NO: 262330
  chr10:106032651-106032686
  hypo

SEQ ID NO: 439358 - DNA, 55 bp, Homo sapiens; identical to SEQ ID NO: 213693
  chr10:106075696-106075751
  hypo

SEQ ID NO: 439359 - DNA, 93 bp, Homo sapiens; identical to SEQ ID NO: 262332
  chr10:106094618-106094711
  hypo

SEQ ID NO: 439360 - DNA, 516 bp, Homo sapiens; identical to SEQ ID NO: 420786
  chr10:106098190-106098706
  hypo

SEQ ID NO: 439361 - DNA, 102 bp, Homo sapiens; identical to SEQ ID NO: 223913
  chr10:106098946-106099048
  hypo

SEQ ID NO: 439362 - DNA, 94 bp, Homo sapiens; identical to SEQ ID NO: 262333
  chr10:106174643-106174737
  hypo

SEQ ID NO: 439363 - DNA, 36 bp, Homo sapiens; identical to SEQ ID NO: 262334
  chr10:106199914-106199950
  hypo

SEQ ID NO: 439364 - DNA, 187 bp, Homo sapiens; identical to SEQ ID NO: 213694
  chr10:111684022-111684209
  hypo

SEQ ID NO: 439365 - DNA, 32 bp, Homo sapiens; identical to SEQ ID NO: 262338
  chr10:111696450-111696482
  hypo

SEQ ID NO: 439366 - DNA, 299 bp, Homo sapiens; identical to SEQ ID NO: 313005
  chr10:111921293-111921592
  hypo

SEQ ID NO: 439367 - DNA, 266 bp, Homo sapiens; identical to SEQ ID NO: 262343
  chr10:112170716-112170982
  hypo

SEQ ID NO: 439368 - DNA, 40 bp, Homo sapiens; identical to SEQ ID NO: 262344
  chr10:112326386-112326426
  hypo

SEQ ID NO: 439369 - DNA, 385 bp, Homo sapiens; identical to SEQ ID NO: 287505
  chr10:112327397-112327782
  hypo

SEQ ID NO: 439370 - DNA, 76 bp, Homo sapiens; identical to SEQ ID NO: 202262
  chr10:112328695-112328771
  hypo

SEQ ID NO: 439371 - DNA, 39 bp, Homo sapiens; identical to SEQ ID NO: 202263
  chr10:112333464-112333503
  hypo

SEQ ID NO: 439372 - DNA, 68 bp, Homo sapiens; identical to SEQ ID NO: 202264
  chr10:112335093-112335161
  hypo

SEQ ID NO: 439373 - DNA, 72 bp, Homo sapiens; identical to SEQ ID NO: 202265
  chr10:112337178-112337250
  hypo

SEQ ID NO: 439374 - DNA, 80 bp, Homo sapiens; identical to SEQ ID NO: 202266
  chr10:112337592-112337672
  hypo

SEQ ID NO: 439375 - DNA, 79 bp, Homo sapiens; identical to SEQ ID NO: 202267
  chr10:112338385-112338464
  hypo

SEQ ID NO: 439376 - DNA, 118 bp, Homo sapiens; identical to SEQ ID NO: 202268
  chr10:112340661-112340779
  hypo

SEQ ID NO: 439377 - DNA, 176 bp, Homo sapiens; identical to SEQ ID NO: 202269
  chr10:112341680-112341856
  hypo

SEQ ID NO: 439378 - DNA, 81 bp, Homo sapiens; identical to SEQ ID NO: 202270
  chr10:112342319-112342400
  hypo

SEQ ID NO: 439379 - DNA, 165 bp, Homo sapiens; identical to SEQ ID NO: 202271
  chr10:112343141-112343306
  hypo

SEQ ID NO: 439380 - DNA, 122 bp, Homo sapiens; identical to SEQ ID NO: 202272
  chr10:112343598-112343720
  hypo

SEQ ID NO: 439381 - DNA, 214 bp, Homo sapiens; identical to SEQ ID NO: 202273
  chr10:112343940-112344154
  hypo

SEQ ID NO: 439382 - DNA, 387 bp, Homo sapiens; identical to SEQ ID NO: 202274
  chr10:112349362-112349749
  hypo

SEQ ID NO: 439383 - DNA, 161 bp, Homo sapiens; identical to SEQ ID NO: 202275
  chr10:112350169-112350330
  hypo

SEQ ID NO: 439384 - DNA, 142 bp, Homo sapiens; identical to SEQ ID NO: 202276
  chr10:112350748-112350890
  hypo

SEQ ID NO: 439385 - DNA, 151 bp, Homo sapiens; identical to SEQ ID NO: 202277
  chr10:112352830-112352981
  hypo

SEQ ID NO: 439386 - DNA, 153 bp, Homo sapiens; identical to SEQ ID NO: 202278
  chr10:112356155-112356308
  hypo

SEQ ID NO: 439387 - DNA, 152 bp, Homo sapiens; identical to SEQ ID NO: 202279
  chr10:112357896-112358048
  hypo

SEQ ID NO: 439388 - DNA, 159 bp, Homo sapiens; identical to SEQ ID NO: 202280
  chr10:112359411-112359570
  hypo

SEQ ID NO: 439389 - DNA, 108 bp, Homo sapiens; identical to SEQ ID NO: 202281
  chr10:112360196-112360304
  hypo

SEQ ID NO: 439390 - DNA, 109 bp, Homo sapiens; identical to SEQ ID NO: 202282
  chr10:112360779-112360888
  hypo

SEQ ID NO: 439391 - DNA, 542 bp, Homo sapiens; identical to SEQ ID NO: 202283
  chr10:112361394-112361936
  hypo

SEQ ID NO: 439392 - DNA, 817 bp, Homo sapiens; identical to SEQ ID NO: 202284
  chr10:112362231-112363048
  hypo

SEQ ID NO: 439393 - DNA, 404 bp, Homo sapiens; identical to SEQ ID NO: 202285
  chr10:112363988-112364392
  hypo

SEQ ID NO: 439394 - DNA, 260 bp, Homo sapiens; identical to SEQ ID NO: 213724
  chr10:112524228-112524488
  hypo

SEQ ID NO: 439395 - DNA, 224 bp, Homo sapiens; identical to SEQ ID NO: 262346
  chr10:112540576-112540800
  hypo

SEQ ID NO: 439396 - DNA, 43 bp, Homo sapiens; identical to SEQ ID NO: 262348
  chr10:112595366-112595409
  hypo

SEQ ID NO: 439397 - DNA, 35 bp, Homo sapiens; identical to SEQ ID NO: 262349
  chr10:112761502-112761537
  hypo

SEQ ID NO: 439398 - DNA, 96 bp, Homo sapiens; identical to SEQ ID NO: 262353
  chr10:114410445-114410541
  hypo

SEQ ID NO: 439399 - DNA, 47 bp, Homo sapiens; identical to SEQ ID NO: 262354
  chr10:114498664-114498711
  hypo

SEQ ID NO: 439400 - DNA, 232 bp, Homo sapiens; identical to SEQ ID NO: 262355
  chr10:114542054-114542286
  hypo

SEQ ID NO: 439401 - DNA, 59 bp, Homo sapiens; identical to SEQ ID NO: 213726
  chr10:114571439-114571498
  hypo

SEQ ID NO: 439402 - DNA, 121 bp, Homo sapiens; identical to SEQ ID NO: 213727
  chr10:114571537-114571658
  hypo

SEQ ID NO: 439403 - DNA, 250 bp, Homo sapiens; identical to SEQ ID NO: 262358
  chr10:114591112-114591362
  hypo

SEQ ID NO: 439404 - DNA, 33 bp, Homo sapiens; identical to SEQ ID NO: 202295
  chr10:114709864-114709897
  hypo

SEQ ID NO: 439405 - DNA, 56 bp, Homo sapiens; identical to SEQ ID NO: 223949
  chr10:114710115-114710171
  hypo

SEQ ID NO: 439406 - DNA, 290 bp, Homo sapiens; identical to SEQ ID NO: 287545
  chr10:114710660-114710950
  hypo

SEQ ID NO: 439407 - DNA, 46 bp, Homo sapiens; identical to SEQ ID NO: 223951
  chr10:114711334-114711380
  hypo

SEQ ID NO: 439408 - DNA, 262 bp, Homo sapiens; identical to SEQ ID NO: 313057
  chr10:114752107-114752369
  hypo

SEQ ID NO: 439409 - DNA, 147 bp, Homo sapiens; identical to SEQ ID NO: 262361
  chr10:114834271-114834418
  hypo

SEQ ID NO: 439410 - DNA, 86 bp, Homo sapiens; identical to SEQ ID NO: 262362
  chr10:114858115-114858201
  hypo

SEQ ID NO: 439411 - DNA, 102 bp, Homo sapiens; identical to SEQ ID NO: 213730
  chr10:114867548-114867650
  hypo

SEQ ID NO: 439412 - DNA, 138 bp, Homo sapiens; identical to SEQ ID NO: 262364
  chr10:114868048-114868186
  hypo

SEQ ID NO: 439413 - DNA, 109 bp, Homo sapiens; identical to SEQ ID NO: 262365
  chr10:114868454-114868563
  hypo

SEQ ID NO: 439414 - DNA, 321 bp, Homo sapiens; identical to SEQ ID NO: 262366
  chr10:114877412-114877733
  hypo

SEQ ID NO: 439415 - DNA, 241 bp, Homo sapiens; identical to SEQ ID NO: 262367
  chr10:114878744-114878985
  hypo

SEQ ID NO: 439416 - DNA, 296 bp, Homo sapiens; identical to SEQ ID NO: 262368
  chr10:114902488-114902784
  hypo

SEQ ID NO: 439417 - DNA, 41 bp, Homo sapiens; identical to SEQ ID NO: 262369
  chr10:114913258-114913299
  hypo

SEQ ID NO: 439418 - DNA, 237 bp, Homo sapiens; identical to SEQ ID NO: 262370
  chr10:114925528-114925765
  hypo

SEQ ID NO: 439419 - DNA, 204 bp, Homo sapiens; identical to SEQ ID NO: 262371
  chr10:115201245-115201449
  hypo

SEQ ID NO: 439420 - DNA, 83 bp, Homo sapiens; identical to SEQ ID NO: 262372
  chr10:115548281-115548364
  hypo

SEQ ID NO: 439421 - DNA, 85 bp, Homo sapiens; identical to SEQ ID NO: 313070
  chr10:115585200-115585285
  hypo

SEQ ID NO: 439422 - DNA, 37 bp, Homo sapiens; identical to SEQ ID NO: 262374
  chr10:115612073-115612110
  hypo

SEQ ID NO: 439423 - DNA, 141 bp, Homo sapiens; identical to SEQ ID NO: 287555
  chr10:115804398-115804539
  hypo

SEQ ID NO: 439424 - DNA, 201 bp, Homo sapiens; identical to SEQ ID NO: 202298
  chr10:115805287-115805488
  hypo

SEQ ID NO: 439425 - DNA, 92 bp, Homo sapiens; identical to SEQ ID NO: 313075
  chr10:115844855-115844947
  hypo

SEQ ID NO: 439426 - DNA, 33 bp, Homo sapiens; identical to SEQ ID NO: 213733
  chr10:115925581-115925614
  hypo

SEQ ID NO: 439427 - DNA, 95 bp, Homo sapiens; identical to SEQ ID NO: 262378
  chr10:115940180-115940275
  hypo

SEQ ID NO: 439428 - DNA, 37 bp, Homo sapiens; identical to SEQ ID NO: 262379
  chr10:116007333-116007370
  hypo

SEQ ID NO: 439429 - DNA, 81 bp, Homo sapiens; identical to SEQ ID NO: 213734
  chr10:116011528-116011609
  hypo

SEQ ID NO: 439430 - DNA, 105 bp, Homo sapiens; identical to SEQ ID NO: 213735
  chr10:116028357-116028462
  hypo

SEQ ID NO: 439431 - DNA, 156 bp, Homo sapiens; identical to SEQ ID NO: 262382
  chr10:116034555-116034711
  hypo

SEQ ID NO: 439432 - DNA, 38 bp, Homo sapiens; identical to SEQ ID NO: 262385
  chr10:116188468-116188506
  hypo

SEQ ID NO: 439433 - DNA, 151 bp, Homo sapiens; identical to SEQ ID NO: 262386
  chr10:116190955-116191106
  hypo

SEQ ID NO: 439434 - DNA, 186 bp, Homo sapiens; identical to SEQ ID NO: 262387
  chr10:116203666-116203852
  hypo

SEQ ID NO: 439435 - DNA, 38 bp, Homo sapiens; identical to SEQ ID NO: 213738
  chr10:116282622-116282660
  hypo

SEQ ID NO: 439436 - DNA, 95 bp, Homo sapiens; identical to SEQ ID NO: 262389
  chr10:116304716-116304811
  hypo

SEQ ID NO: 439437 - DNA, 117 bp, Homo sapiens; identical to SEQ ID NO: 313090
  chr10:116331009-116331126
  hypo

SEQ ID NO: 439438 - DNA, 74 bp, Homo sapiens; identical to SEQ ID NO: 287572
  chr10:116852172-116852246
  hypo

SEQ ID NO: 439439 - DNA, 185 bp, Homo sapiens; identical to SEQ ID NO: 398541
  chr10:116852441-116852626
  hypo

SEQ ID NO: 439440 - DNA, 69 bp, Homo sapiens
  chr10:118740858-118740927
  hypo
aacagaaaaagatttgactgacctagaatgaagctctctgcacaccagctcttcatcagccccaccaca

SEQ ID NO: 439441 - DNA, 33 bp, Homo sapiens; identical to SEQ ID NO: 262392
  chr10:118742173-118742206
  hypo

SEQ ID NO: 439442 - DNA, 571 bp, Homo sapiens; identical to SEQ ID NO: 287578
  chr10:118764187-118764758
  hypo

SEQ ID NO: 439443 - DNA, 180 bp, Homo sapiens; identical to SEQ ID NO: 287579
  chr10:118764980-118765160
  hypo

SEQ ID NO: 439444 - DNA, 99 bp, Homo sapiens; identical to SEQ ID NO: 213743
  chr10:119180987-119181086
  hypo

SEQ ID NO: 439445 - DNA, 308 bp, Homo sapiens; identical to SEQ ID NO: 202311
  chr10:119256046-119256354
  hypo

SEQ ID NO: 439446 - DNA, 31 bp, Homo sapiens; identical to SEQ ID NO: 420866
  chr10:119302459-119302490
  hypo

SEQ ID NO: 439447 - DNA, 102 bp, Homo sapiens; identical to SEQ ID NO: 262394
  chr10:119374701-119374803
  hypo

SEQ ID NO: 439448 - DNA, 204 bp, Homo sapiens; identical to SEQ ID NO: 262395
  chr10:119543606-119543810
  hypo

SEQ ID NO: 439449 - DNA, 75 bp, Homo sapiens; identical to SEQ ID NO: 262396
  chr10:119680912-119680987
  hypo

SEQ ID NO: 439450 - DNA, 63 bp, Homo sapiens; identical to SEQ ID NO: 262398
  chr10:119876202-119876265
  hypo

SEQ ID NO: 439451 - DNA, 47 bp, Homo sapiens; identical to SEQ ID NO: 213746
  chr10:120011733-120011780
  hypo

SEQ ID NO: 439452 - DNA, 189 bp, Homo sapiens; identical to SEQ ID NO: 262400
  chr10:120170438-120170627
  hypo

SEQ ID NO: 439453 - DNA, 441 bp, Homo sapiens; identical to SEQ ID NO: 287614
  chr10:120514800-120515241
  hypo

SEQ ID NO: 439454 - DNA, 41 bp, Homo sapiens; identical to SEQ ID NO: 262401
  chr10:120518464-120518505
  hypo

SEQ ID NO: 439455 - DNA, 34 bp, Homo sapiens; identical to SEQ ID NO: 262402
  chr10:120584843-120584877
  hypo

SEQ ID NO: 439456 - DNA, 93 bp, Homo sapiens; identical to SEQ ID NO: 213748
  chr10:120822534-120822627
  hypo

SEQ ID NO: 439457 - DNA, 151 bp, Homo sapiens; identical to SEQ ID NO: 213749
  chr10:120926967-120927118
  hypo

SEQ ID NO: 439458 - DNA, 49 bp, Homo sapiens; identical to SEQ ID NO: 262407
  chr10:120966063-120966112
  hypo

SEQ ID NO: 439459 - DNA, 35 bp, Homo sapiens; identical to SEQ ID NO: 262408
  chr10:120996576-120996611
  hypo

SEQ ID NO: 439460 - DNA, 155 bp, Homo sapiens; identical to SEQ ID NO: 262409
  chr10:121103957-121104112
  hypo

SEQ ID NO: 439461 - DNA, 214 bp, Homo sapiens; identical to SEQ ID NO: 262410
  chr10:121182611-121182825
  hypo

SEQ ID NO: 439462 - DNA, 112 bp, Homo sapiens; identical to SEQ ID NO: 313119
  chr10:121228865-121228977
  hypo

SEQ ID NO: 439463 - DNA, 149 bp, Homo sapiens; identical to SEQ ID NO: 262412
  chr10:121260422-121260571
  hypo

SEQ ID NO: 439464 - DNA, 174 bp, Homo sapiens; identical to SEQ ID NO: 262413
  chr10:121264282-121264456
  hypo

SEQ ID NO: 439465 - DNA, 80 bp, Homo sapiens; identical to SEQ ID NO: 262414
  chr10:121264730-121264810
  hypo

SEQ ID NO: 439466 - DNA, 131 bp, Homo sapiens; identical to SEQ ID NO: 213750
  chr10:121265440-121265571
  hypo

SEQ ID NO: 439467 - DNA, 84 bp, Homo sapiens; identical to SEQ ID NO: 223965
  chr10:121271622-121271706
  hypo

SEQ ID NO: 439468 - DNA, 43 bp, Homo sapiens; identical to SEQ ID NO: 202334
  chr10:121356079-121356122
  hypo

SEQ ID NO: 439469 - DNA, 279 bp, Homo sapiens; identical to SEQ ID NO: 213755
  chr10:121429483-121429762
  hypo

SEQ ID NO: 439470 - DNA, 174 bp, Homo sapiens; identical to SEQ ID NO: 213756
  chr10:121550361-121550535
  hypo

SEQ ID NO: 439471 - DNA, 126 bp, Homo sapiens; identical to SEQ ID NO: 262421
  chr10:121663600-121663726
  hypo

SEQ ID NO: 439472 - DNA, 42 bp, Homo sapiens; identical to SEQ ID NO: 262423
  chr10:122214596-122214638
  hypo

SEQ ID NO: 439473 - DNA, 34 bp, Homo sapiens; identical to SEQ ID NO: 213758
  chr10:123037580-123037614
  hypo

SEQ ID NO: 439474 - DNA, 34 bp, Homo sapiens; identical to SEQ ID NO: 213759
  chr10:123037854-123037888
  hypo

SEQ ID NO: 439475 - DNA, 84 bp, Homo sapiens; identical to SEQ ID NO: 213760
  chr10:123063523-123063607
  hypo

SEQ ID NO: 439476 - DNA, 77 bp, Homo sapiens; identical to SEQ ID NO: 262427
  chr10:123335738-123335815
  hypo

SEQ ID NO: 439477 - DNA, 137 bp, Homo sapiens; identical to SEQ ID NO: 262428
  chr10:123492975-123493112
  hypo

SEQ ID NO: 439478 - DNA, 196 bp, Homo sapiens; identical to SEQ ID NO: 262429
  chr10:123757357-123757553
  hypo

SEQ ID NO: 439479 - DNA, 103 bp, Homo sapiens; identical to SEQ ID NO: 262430
  chr10:123837325-123837428
  hypo

SEQ ID NO: 439480 - DNA, 238 bp, Homo sapiens; identical to SEQ ID NO: 262431
  chr10:123842298-123842536
  hypo

SEQ ID NO: 439481 - DNA, 334 bp, Homo sapiens; identical to SEQ ID NO: 262432
  chr10:123879960-123880294
  hypo

SEQ ID NO: 439482 - DNA, 237 bp, Homo sapiens; identical to SEQ ID NO: 262433
  chr10:123910181-123910418
  hypo

SEQ ID NO: 439483 - DNA, 176 bp, Homo sapiens; identical to SEQ ID NO: 262434
  chr10:123952375-123952551
  hypo

SEQ ID NO: 439484 - DNA, 42 bp, Homo sapiens; identical to SEQ ID NO: 213763
  chr10:123971195-123971237
  hypo

SEQ ID NO: 439485 - DNA, 39 bp, Homo sapiens; identical to SEQ ID NO: 213764
  chr10:123977732-123977771
  hypo

SEQ ID NO: 439486 - DNA, 179 bp, Homo sapiens; identical to SEQ ID NO: 262437
  chr10:123988940-123989119
  hypo

SEQ ID NO: 439487 - DNA, 87 bp, Homo sapiens; identical to SEQ ID NO: 262438
  chr10:124028462-124028549
  hypo

SEQ ID NO: 439488 - DNA, 447 bp, Homo sapiens; identical to SEQ ID NO: 420891
  chr10:124134589-124135036
  hypo

SEQ ID NO: 439489 - DNA, 284 bp, Homo sapiens; identical to SEQ ID NO: 262439
  chr10:124248922-124249206
  hypo

SEQ ID NO: 439490 - DNA, 189 bp, Homo sapiens; identical to SEQ ID NO: 262440
  chr10:124609891-124610080
  hypo

SEQ ID NO: 439491 - DNA, 45 bp, Homo sapiens; identical to SEQ ID NO: 213766
  chr10:124712595-124712640
  hypo

SEQ ID NO: 439492 - DNA, 120 bp, Homo sapiens; identical to SEQ ID NO: 262442
  chr10:124738944-124739064
  hypo

SEQ ID NO: 439493 - DNA, 78 bp, Homo sapiens; identical to SEQ ID NO: 262443
  chr10:124922178-124922256
  hypo

SEQ ID NO: 439494 - DNA, 31 bp, Homo sapiens; identical to SEQ ID NO: 262444
  chr10:124931354-124931385
  hypo

SEQ ID NO: 439495 - DNA, 124 bp, Homo sapiens; identical to SEQ ID NO: 262445
  chr10:124964477-124964601
  hypo

SEQ ID NO: 439496 - DNA, 58 bp, Homo sapiens; identical to SEQ ID NO: 262448
  chr10:125769654-125769712
  hypo

SEQ ID NO: 439497 - DNA, 80 bp, Homo sapiens; identical to SEQ ID NO: 262449
  chr10:125984183-125984263
  hypo

SEQ ID NO: 439498 - DNA, 45 bp, Homo sapiens; identical to SEQ ID NO: 262451
  chr10:126102246-126102291
  hypo

SEQ ID NO: 439499 - DNA, 120 bp, Homo sapiens; identical to SEQ ID NO: 262452
  chr10:126114966-126115086
  hypo

SEQ ID NO: 439500 - DNA, 120 bp, Homo sapiens; identical to SEQ ID NO: 262453
  chr10:126115344-126115464
  hypo

SEQ ID NO: 439501 - DNA, 81 bp, Homo sapiens; identical to SEQ ID NO: 262454
  chr10:126186174-126186255
  hypo

SEQ ID NO: 439502 - DNA, 31 bp, Homo sapiens
  chr10:126190197-126190228
  hypo
attctggaactggacagtgatgatggtggca

SEQ ID NO: 439503 - DNA, 387 bp, Homo sapiens; identical to SEQ ID NO: 262457
  chr10:126238653-126239040
  hypo

SEQ ID NO: 439504 - DNA, 34 bp, Homo sapiens; identical to SEQ ID NO: 262458
  chr10:126240418-126240452
  hypo

SEQ ID NO: 439505 - DNA, 39 bp, Homo sapiens; identical to SEQ ID NO: 313173
  chr10:126254748-126254787
  hypo

SEQ ID NO: 439506 - DNA, 151 bp, Homo sapiens; identical to SEQ ID NO: 213772
  chr10:126265312-126265463
  hypo

SEQ ID NO: 439507 - DNA, 34 bp, Homo sapiens; identical to SEQ ID NO: 262461
  chr10:126267744-126267778
  hypo

SEQ ID NO: 439508 - DNA, 77 bp, Homo sapiens; identical to SEQ ID NO: 213773
  chr10:126287226-126287303
  hypo

SEQ ID NO: 439509 - DNA, 411 bp, Homo sapiens; identical to SEQ ID NO: 213775
  chr10:126305757-126306168
  hypo

SEQ ID NO: 439510 - DNA, 317 bp, Homo sapiens; identical to SEQ ID NO: 262465
  chr10:126307213-126307530
  hypo

SEQ ID NO: 439511 - DNA, 240 bp, Homo sapiens; identical to SEQ ID NO: 262466
  chr10:126309753-126309993
  hypo

SEQ ID NO: 439512 - DNA, 119 bp, Homo sapiens; identical to SEQ ID NO: 262467
  chr10:126311518-126311637
  hypo

SEQ ID NO: 439513 - DNA, 219 bp, Homo sapiens; identical to SEQ ID NO: 262468
  chr10:126311864-126312083
  hypo

SEQ ID NO: 439514 - DNA, 184 bp, Homo sapiens; identical to SEQ ID NO: 213776
  chr10:126312314-126312498
  hypo

SEQ ID NO: 439515 - DNA, 229 bp, Homo sapiens; identical to SEQ ID NO: 262470
  chr10:126313238-126313467
  hypo

SEQ ID NO: 439516 - DNA, 217 bp, Homo sapiens; identical to SEQ ID NO: 213778
  chr10:126317368-126317585
  hypo

SEQ ID NO: 439517 - DNA, 331 bp, Homo sapiens; identical to SEQ ID NO: 262474
  chr10:126321123-126321454
  hypo

SEQ ID NO: 439518 - DNA, 190 bp, Homo sapiens; identical to SEQ ID NO: 213779
  chr10:126325797-126325987
  hypo

SEQ ID NO: 439519 - DNA, 328 bp, Homo sapiens; identical to SEQ ID NO: 262478
  chr10:126367644-126367972
  hypo

SEQ ID NO: 439520 - DNA, 310 bp, Homo sapiens; identical to SEQ ID NO: 213782
  chr10:126370268-126370578
  hypo

SEQ ID NO: 439521 - DNA, 256 bp, Homo sapiens; identical to SEQ ID NO: 262480
  chr10:126386075-126386331
  hypo

SEQ ID NO: 439522 - DNA, 128 bp, Homo sapiens; identical to SEQ ID NO: 262481
  chr10:126420270-126420398
  hypo

SEQ ID NO: 439523 - DNA, 79 bp, Homo sapiens; identical to SEQ ID NO: 262482
  chr10:126435116-126435195
  hypo

SEQ ID NO: 439524 - DNA, 1148 bp, Homo sapiens; identical to SEQ ID NO: 262483
  chr10:126690291-126691439
  hypo

SEQ ID NO: 439525 - DNA, 238 bp, Homo sapiens; identical to SEQ ID NO: 262484
  chr10:126694641-126694879
  hypo

SEQ ID NO: 439526 - DNA, 55 bp, Homo sapiens; identical to SEQ ID NO: 313200
  chr10:126698107-126698162
  hypo

SEQ ID NO: 439527 - DNA, 80 bp, Homo sapiens; identical to SEQ ID NO: 262487
  chr10:126701135-126701215
  hypo

SEQ ID NO: 439528 - DNA, 53 bp, Homo sapiens; identical to SEQ ID NO: 262488
  chr10:126702213-126702266
  hypo

SEQ ID NO: 439529 - DNA, 215 bp, Homo sapiens; identical to SEQ ID NO: 262489
  chr10:126702577-126702792
  hypo

SEQ ID NO: 439530 - DNA, 36 bp, Homo sapiens; identical to SEQ ID NO: 213784
  chr10:126709396-126709432
  hypo

SEQ ID NO: 439531 - DNA, 105 bp, Homo sapiens; identical to SEQ ID NO: 262491
  chr10:126710674-126710779
  hypo

SEQ ID NO: 439532 - DNA, 40 bp, Homo sapiens; identical to SEQ ID NO: 262495
  chr10:126726953-126726993
  hypo

SEQ ID NO: 439533 - DNA, 306 bp, Homo sapiens; identical to SEQ ID NO: 213786
  chr10:126732716-126733022
  hypo

SEQ ID NO: 439534 - DNA, 42 bp, Homo sapiens; identical to SEQ ID NO: 262497
  chr10:126738868-126738910
  hypo

SEQ ID NO: 439535 - DNA, 89 bp, Homo sapiens; identical to SEQ ID NO: 213787
  chr10:126751063-126751152
  hypo

SEQ ID NO: 439536 - DNA, 181 bp, Homo sapiens; identical to SEQ ID NO: 262499
  chr10:126763482-126763663
  hypo

SEQ ID NO: 439537 - DNA, 120 bp, Homo sapiens; identical to SEQ ID NO: 262503
  chr10:126774972-126775092
  hypo

SEQ ID NO: 439538 - DNA, 87 bp, Homo sapiens
  chr10:126775540-126775627
  hypo
gatctctgaatggatggatgactgagtctgaagagatcatgagccagccctgattcttcagccctaacttcaaccttgaaaggaaaa

SEQ ID NO: 439539 - DNA, 51 bp, Homo sapiens; identical to SEQ ID NO: 262505
  chr10:126786130-126786181
  hypo

SEQ ID NO: 439540 - DNA, 334 bp, Homo sapiens; identical to SEQ ID NO: 262506
  chr10:126786698-126787032
  hypo

SEQ ID NO: 439541 - DNA, 92 bp, Homo sapiens; identical to SEQ ID NO: 262507
  chr10:126787572-126787664
  hypo

SEQ ID NO: 439542 - DNA, 291 bp, Homo sapiens; identical to SEQ ID NO: 262508
  chr10:126789760-126790051
  hypo

SEQ ID NO: 439543 - DNA, 193 bp, Homo sapiens; identical to SEQ ID NO: 262509
  chr10:126792667-126792860
  hypo

SEQ ID NO: 439544 - DNA, 50 bp, Homo sapiens; identical to SEQ ID NO: 262511
  chr10:126809817-126809867
  hypo

SEQ ID NO: 439545 - DNA, 229 bp, Homo sapiens; identical to SEQ ID NO: 262512
  chr10:126811107-126811336
  hypo

SEQ ID NO: 439546 - DNA, 120 bp, Homo sapiens; identical to SEQ ID NO: 262516
  chr10:126839532-126839652
  hypo

SEQ ID NO: 439547 - DNA, 285 bp, Homo sapiens; identical to SEQ ID NO: 287655
  chr10:126847584-126847869
  hypo

SEQ ID NO: 439548 - DNA, 123 bp, Homo sapiens; identical to SEQ ID NO: 47906
  chr10:126847900-126848023
  hypo

SEQ ID NO: 439549 - DNA, 647 bp, Homo sapiens; identical to SEQ ID NO: 287659
  chr10:126849498-126850145
  hypo

SEQ ID NO: 439550 - DNA, 136 bp, Homo sapiens; identical to SEQ ID NO: 262517
  chr10:126912092-126912228
  hypo

SEQ ID NO: 439551 - DNA, 149 bp, Homo sapiens; identical to SEQ ID NO: 262518
  chr10:127263257-127263406
  hypo

SEQ ID NO: 439552 - DNA, 37 bp, Homo sapiens; identical to SEQ ID NO: 262519
  chr10:127277450-127277487
  hypo

SEQ ID NO: 439553 - DNA, 274 bp, Homo sapiens; identical to SEQ ID NO: 262520
  chr10:127314344-127314618
  hypo

SEQ ID NO: 439554 - DNA, 252 bp, Homo sapiens; identical to SEQ ID NO: 313241
  chr10:127464203-127464455
  hypo

SEQ ID NO: 439555 - DNA, 91 bp, Homo sapiens; identical to SEQ ID NO: 262525
  chr10:127616426-127616517
  hypo

SEQ ID NO: 439556 - DNA, 85 bp, Homo sapiens; identical to SEQ ID NO: 262526
  chr10:127659356-127659441
  hypo

SEQ ID NO: 439557 - DNA, 36 bp, Homo sapiens; identical to SEQ ID NO: 213799
  chr10:127937968-127938004
  hypo

SEQ ID NO: 439558 - DNA, 84 bp, Homo sapiens; identical to SEQ ID NO: 262530
  chr10:128767291-128767375
  hypo

SEQ ID NO: 439559 - DNA, 34 bp, Homo sapiens; identical to SEQ ID NO: 213800
  chr10:128767590-128767624
  hypo

SEQ ID NO: 439560 - DNA, 44 bp, Homo sapiens; identical to SEQ ID NO: 213801
  chr10:128779079-128779123
  hypo

SEQ ID NO: 439561 - DNA, 135 bp, Homo sapiens; identical to SEQ ID NO: 262533
  chr10:128804389-128804524
  hypo

SEQ ID NO: 439562 - DNA, 140 bp, Homo sapiens; identical to SEQ ID NO: 213802
  chr10:128804853-128804993
  hypo

SEQ ID NO: 439563 - DNA, 116 bp, Homo sapiens; identical to SEQ ID NO: 213804
  chr10:128816343-128816459
  hypo

SEQ ID NO: 439564 - DNA, 115 bp, Homo sapiens; identical to SEQ ID NO: 262537
  chr10:128819000-128819115
  hypo

SEQ ID NO: 439565 - DNA, 76 bp, Homo sapiens; identical to SEQ ID NO: 262538
  chr10:128863994-128864070
  hypo

SEQ ID NO: 439566 - DNA, 38 bp, Homo sapiens; identical to SEQ ID NO: 213805
  chr10:128874462-128874500
  hypo

SEQ ID NO: 439567 - DNA, 89 bp, Homo sapiens; identical to SEQ ID NO: 313256
  chr10:128888487-128888576
  hypo

SEQ ID NO: 439568 - DNA, 31 bp, Homo sapiens; identical to SEQ ID NO: 213806
  chr10:128891890-128891921
  hypo

SEQ ID NO: 439569 - DNA, 78 bp, Homo sapiens; identical to SEQ ID NO: 262542
  chr10:128897856-128897934
  hypo

SEQ ID NO: 439570 - DNA, 204 bp, Homo sapiens; identical to SEQ ID NO: 262543
  chr10:128898512-128898716
  hypo

SEQ ID NO: 439571 - DNA, 194 bp, Homo sapiens; identical to SEQ ID NO: 262544
  chr10:128899935-128900129
  hypo

SEQ ID NO: 439572 - DNA, 203 bp, Homo sapiens; identical to SEQ ID NO: 262545
  chr10:128904395-128904598
  hypo

SEQ ID NO: 439573 - DNA, 62 bp, Homo sapiens; identical to SEQ ID NO: 262546
  chr10:128930828-128930890
  hypo

SEQ ID NO: 439574 - DNA, 194 bp, Homo sapiens; identical to SEQ ID NO: 262547
  chr10:128936062-128936256
  hypo

SEQ ID NO: 439575 - DNA, 418 bp, Homo sapiens; identical to SEQ ID NO: 262548
  chr10:128973759-128974177
  hypo

SEQ ID NO: 439576 - DNA, 204 bp, Homo sapiens; identical to SEQ ID NO: 213807
  chr10:128999161-128999365
  hypo

SEQ ID NO: 439577 - DNA, 41 bp, Homo sapiens; identical to SEQ ID NO: 262550
  chr10:129057988-129058029
  hypo

SEQ ID NO: 439578 - DNA, 131 bp, Homo sapiens; identical to SEQ ID NO: 213808
  chr10:129065863-129065994
  hypo

SEQ ID NO: 439579 - DNA, 95 bp, Homo sapiens; identical to SEQ ID NO: 262552
  chr10:129144158-129144253
  hypo

SEQ ID NO: 439580 - DNA, 146 bp, Homo sapiens; identical to SEQ ID NO: 262553
  chr10:129144283-129144429
  hypo

SEQ ID NO: 439581 - DNA, 91 bp, Homo sapiens; identical to SEQ ID NO: 262554
  chr10:129156702-129156793
  hypo

SEQ ID NO: 439582 - DNA, 214 bp, Homo sapiens; identical to SEQ ID NO: 262555
  chr10:129165713-129165927
  hypo

SEQ ID NO: 439583 - DNA, 94 bp, Homo sapiens; identical to SEQ ID NO: 262556
  chr10:129182943-129183037
  hypo

SEQ ID NO: 439584 - DNA, 47 bp, Homo sapiens; identical to SEQ ID NO: 262559
  chr10:129199502-129199549
  hypo

SEQ ID NO: 439585 - DNA, 159 bp, Homo sapiens; identical to SEQ ID NO: 262560
  chr10:129218388-129218547
  hypo

SEQ ID NO: 439586 - DNA, 196 bp, Homo sapiens; identical to SEQ ID NO: 213811
  chr10:129236892-129237088
  hypo

SEQ ID NO: 439587 - DNA, 200 bp, Homo sapiens; identical to SEQ ID NO: 213812
  chr10:129237715-129237915
  hypo

SEQ ID NO: 439588 - DNA, 205 bp, Homo sapiens; identical to SEQ ID NO: 262564
  chr10:129239688-129239893
  hypo

SEQ ID NO: 439589 - DNA, 48 bp, Homo sapiens; identical to SEQ ID NO: 213814
  chr10:129245980-129246028
  hypo

SEQ ID NO: 439590 - DNA, 90 bp, Homo sapiens; identical to SEQ ID NO: 262569
  chr10:129249788-129249878
  hypo

SEQ ID NO: 439591 - DNA, 99 bp, Homo sapiens; identical to SEQ ID NO: 262570
  chr10:129721602-129721701
  hypo

SEQ ID NO: 439592 - DNA, 84 bp, Homo sapiens; identical to SEQ ID NO: 262571
  chr10:129865329-129865413
  hypo

SEQ ID NO: 439593 - DNA, 130 bp, Homo sapiens; identical to SEQ ID NO: 213815
  chr10:129907594-129907724
  hypo

SEQ ID NO: 439594 - DNA, 34 bp, Homo sapiens
  chr10:129907754-129907788
  hypo
cataaaatatggtaaaaaactaaatatttagctt

SEQ ID NO: 439595 - DNA, 260 bp, Homo sapiens; identical to SEQ ID NO: 262574
  chr10:130123679-130123939
  hypo

SEQ ID NO: 439596 - DNA, 401 bp, Homo sapiens; identical to SEQ ID NO: 262575
  chr10:130185248-130185649
  hypo

SEQ ID NO: 439597 - DNA, 52 bp, Homo sapiens; identical to SEQ ID NO: 262577
  chr10:130259851-130259903
  hypo

SEQ ID NO: 439598 - DNA, 122 bp, Homo sapiens; identical to SEQ ID NO: 262578
  chr10:130265103-130265225
  hypo

SEQ ID NO: 439599 - DNA, 302 bp, Homo sapiens; identical to SEQ ID NO: 262581
  chr10:130748864-130749166
  hypo

SEQ ID NO: 439600 - DNA, 40 bp, Homo sapiens; identical to SEQ ID NO: 262582
  chr10:130828604-130828644
  hypo

SEQ ID NO: 439601 - DNA, 183 bp, Homo sapiens; identical to SEQ ID NO: 262583
  chr10:130828912-130829095
  hypo

SEQ ID NO: 439602 - DNA, 42 bp, Homo sapiens; identical to SEQ ID NO: 262584
  chr10:130911838-130911880
  hypo

SEQ ID NO: 439603 - DNA, 71 bp, Homo sapiens; identical to SEQ ID NO: 262585
  chr10:131301187-131301258
  hypo

SEQ ID NO: 439604 - DNA, 221 bp, Homo sapiens; identical to SEQ ID NO: 262586
  chr10:131329753-131329974
  hypo

SEQ ID NO: 439605 - DNA, 207 bp, Homo sapiens; identical to SEQ ID NO: 313303
  chr10:131377660-131377867
  hypo

SEQ ID NO: 439606 - DNA, 265 bp, Homo sapiens; identical to SEQ ID NO: 262589
  chr10:131378237-131378502
  hypo

SEQ ID NO: 439607 - DNA, 124 bp, Homo sapiens; identical to SEQ ID NO: 262590
  chr10:131412743-131412867
  hypo

SEQ ID NO: 439608 - DNA, 126 bp, Homo sapiens; identical to SEQ ID NO: 262591
  chr10:131428277-131428403
  hypo

SEQ ID NO: 439609 - DNA, 191 bp, Homo sapiens; identical to SEQ ID NO: 213820
  chr10:131577565-131577756
  hypo

SEQ ID NO: 439610 - DNA, 218 bp, Homo sapiens; identical to SEQ ID NO: 313309
  chr10:131592426-131592644
  hypo

SEQ ID NO: 439611 - DNA, 54 bp, Homo sapiens; identical to SEQ ID NO: 262597
  chr10:131660294-131660348
  hypo

SEQ ID NO: 439612 - DNA, 140 bp, Homo sapiens; identical to SEQ ID NO: 262598
  chr10:131660570-131660710
  hypo

SEQ ID NO: 439613 - DNA, 175 bp, Homo sapiens; identical to SEQ ID NO: 213823
  chr10:131686725-131686900
  hypo

SEQ ID NO: 439614 - DNA, 86 bp, Homo sapiens; identical to SEQ ID NO: 313315
  chr10:131694682-131694768
  hypo

SEQ ID NO: 439615 - DNA, 161 bp, Homo sapiens; identical to SEQ ID NO: 80897
  chr10:131694792-131694953
  hypo

SEQ ID NO: 439616 - DNA, 120 bp, Homo sapiens; identical to SEQ ID NO: 262601
  chr10:131713787-131713907
  hypo

SEQ ID NO: 439617 - DNA, 240 bp, Homo sapiens; identical to SEQ ID NO: 262602
  chr10:131735251-131735491
  hypo

SEQ ID NO: 439618 - DNA, 132 bp, Homo sapiens; identical to SEQ ID NO: 262603
  chr10:131811606-131811738
  hypo

SEQ ID NO: 439619 - DNA, 152 bp, Homo sapiens; identical to SEQ ID NO: 262605
  chr10:131826126-131826278
  hypo

SEQ ID NO: 439620 - DNA, 128 bp, Homo sapiens; identical to SEQ ID NO: 313322
  chr10:131937484-131937612
  hypo

SEQ ID NO: 439621 - DNA, 73 bp, Homo sapiens; identical to SEQ ID NO: 262609
  chr10:131975644-131975717
  hypo

SEQ ID NO: 439622 - DNA, 190 bp, Homo sapiens; identical to SEQ ID NO: 262611
  chr10:132237997-132238187
  hypo

SEQ ID NO: 439623 - DNA, 38 bp, Homo sapiens; identical to SEQ ID NO: 262612
  chr10:132251719-132251757
  hypo

SEQ ID NO: 439624 - DNA, 36 bp, Homo sapiens; identical to SEQ ID NO: 262613
  chr10:132284135-132284171
  hypo

SEQ ID NO: 439625 - DNA, 54 bp, Homo sapiens; identical to SEQ ID NO: 313329
  chr10:132365917-132365971
  hypo

SEQ ID NO: 439626 - DNA, 54 bp, Homo sapiens; identical to SEQ ID NO: 262615
  chr10:132421233-132421287
  hypo

SEQ ID NO: 439627 - DNA, 38 bp, Homo sapiens; identical to SEQ ID NO: 313332
  chr10:132873694-132873732
  hypo

SEQ ID NO: 439628 - DNA, 78 bp, Homo sapiens; identical to SEQ ID NO: 262618
  chr10:132933678-132933756
  hypo

SEQ ID NO: 439629 - DNA, 42 bp, Homo sapiens; identical to SEQ ID NO: 262619
  chr10:132956922-132956964
  hypo

SEQ ID NO: 439630 - DNA, 163 bp, Homo sapiens; identical to SEQ ID NO: 262620
  chr10:132958985-132959148
  hypo

SEQ ID NO: 439631 - DNA, 154 bp, Homo sapiens; identical to SEQ ID NO: 313336
  chr10:132977235-132977389
  hypo

SEQ ID NO: 439632 - DNA, 192 bp, Homo sapiens; identical to SEQ ID NO: 213824
  chr10:132992257-132992449
  hypo

SEQ ID NO: 439633 - DNA, 174 bp, Homo sapiens; identical to SEQ ID NO: 213825
  chr10:133058420-133058594
  hypo

SEQ ID NO: 439634 - DNA, 34 bp, Homo sapiens; identical to SEQ ID NO: 262624
  chr10:133146661-133146695
  hypo

SEQ ID NO: 439635 - DNA, 83 bp, Homo sapiens; identical to SEQ ID NO: 262625
  chr10:133218245-133218328
  hypo

SEQ ID NO: 439636 - DNA, 32 bp, Homo sapiens; identical to SEQ ID NO: 262626
  chr10:133229420-133229452
  hypo

SEQ ID NO: 439637 - DNA, 114 bp, Homo sapiens; identical to SEQ ID NO: 262627
  chr10:133514941-133515055
  hypo

SEQ ID NO: 439638 - DNA, 89 bp, Homo sapiens; identical to SEQ ID NO: 213826
  chr10:133557718-133557807
  hypo

SEQ ID NO: 439639 - DNA, 158 bp, Homo sapiens; identical to SEQ ID NO: 262629
  chr10:133572409-133572567
  hypo

SEQ ID NO: 439640 - DNA, 41 bp, Homo sapiens; identical to SEQ ID NO: 313345
  chr10:133590168-133590209
  hypo

SEQ ID NO: 439641 - DNA, 34 bp, Homo sapiens; identical to SEQ ID NO: 213828
  chr10:133790491-133790525
  hypo

SEQ ID NO: 439642 - DNA, 592 bp, Homo sapiens; identical to SEQ ID NO: 213830
  chr10:133953707-133954299
  hypo

SEQ ID NO: 439643 - DNA, 72 bp, Homo sapiens; identical to SEQ ID NO: 213831
  chr10:133955513-133955585
  hypo

SEQ ID NO: 439644 - DNA, 143 bp, Homo sapiens; identical to SEQ ID NO: 313353
  chr10:133979227-133979370
  hypo

SEQ ID NO: 439645 - DNA, 291 bp, Homo sapiens; identical to SEQ ID NO: 262640
  chr10:133981379-133981670
  hypo

SEQ ID NO: 439646 - DNA, 219 bp, Homo sapiens; identical to SEQ ID NO: 213834
  chr10:133983713-133983932
  hypo

SEQ ID NO: 439647 - DNA, 53 bp, Homo sapiens; identical to SEQ ID NO: 262643
  chr10:134002751-134002804
  hypo

SEQ ID NO: 439648 - DNA, 138 bp, Homo sapiens; identical to SEQ ID NO: 262644
  chr10:134013835-134013973
  hypo

SEQ ID NO: 439649 - DNA, 134 bp, Homo sapiens; identical to SEQ ID NO: 262645
  chr10:134014003-134014137
  hypo

SEQ ID NO: 439650 - DNA, 40 bp, Homo sapiens; identical to SEQ ID NO: 313361
  chr10:134019294-134019334
  hypo

SEQ ID NO: 439651 - DNA, 408 bp, Homo sapiens; identical to SEQ ID NO: 313362
  chr10:134019364-134019772
  hypo

SEQ ID NO: 439652 - DNA, 286 bp, Homo sapiens; identical to SEQ ID NO: 262649
  chr10:134024097-134024383
  hypo

SEQ ID NO: 439653 - DNA, 349 bp, Homo sapiens; identical to SEQ ID NO: 262650
  chr10:134035687-134036036
  hypo

SEQ ID NO: 439654 - DNA, 301 bp, Homo sapiens; identical to SEQ ID NO: 262651
  chr10:134036086-134036387
  hypo

SEQ ID NO: 439655 - DNA, 301 bp, Homo sapiens; identical to SEQ ID NO: 262652
  chr10:134038775-134039076
  hypo

SEQ ID NO: 439656 - DNA, 105 bp, Homo sapiens; identical to SEQ ID NO: 213835
  chr10:134044632-134044737
  hypo

SEQ ID NO: 439657 - DNA, 333 bp, Homo sapiens; identical to SEQ ID NO: 213836
  chr10:134053690-134054023
  hypo

SEQ ID NO: 439658 - DNA, 161 bp, Homo sapiens; identical to SEQ ID NO: 262656
  chr10:134056818-134056979
  hypo

SEQ ID NO: 439659 - DNA, 128 bp, Homo sapiens; identical to SEQ ID NO: 262657
  chr10:134057208-134057336
  hypo

SEQ ID NO: 439660 - DNA, 115 bp, Homo sapiens; identical to SEQ ID NO: 262658
  chr10:134058332-134058447
  hypo

SEQ ID NO: 439661 - DNA, 87 bp, Homo sapiens; identical to SEQ ID NO: 213837
  chr10:134065942-134066029
  hypo

SEQ ID NO: 439662 - DNA, 118 bp, Homo sapiens; identical to SEQ ID NO: 262660
  chr10:134089039-134089157
  hypo

SEQ ID NO: 439663 - DNA, 174 bp, Homo sapiens; identical to SEQ ID NO: 262662
  chr10:134104519-134104693
  hypo

SEQ ID NO: 439664 - DNA, 280 bp, Homo sapiens; identical to SEQ ID NO: 262663
  chr10:134106506-134106786
  hypo

SEQ ID NO: 439665 - DNA, 37 bp, Homo sapiens; identical to SEQ ID NO: 202373
  chr10:134120669-134120706
  hypo

SEQ ID NO: 439666 - DNA, 387 bp, Homo sapiens; identical to SEQ ID NO: 202374
  chr10:134121014-134121401
  hypo

SEQ ID NO: 439667 - DNA, 104 bp, Homo sapiens; identical to SEQ ID NO: 213840
  chr10:134164631-134164735
  hypo

SEQ ID NO: 439668 - DNA, 44 bp, Homo sapiens; identical to SEQ ID NO: 262666
  chr10:134168482-134168526
  hypo

SEQ ID NO: 439669 - DNA, 44 bp, Homo sapiens; identical to SEQ ID NO: 262667
  chr10:134171806-134171850
  hypo

SEQ ID NO: 439670 - DNA, 384 bp, Homo sapiens; identical to SEQ ID NO: 262668
  chr10:134188501-134188885
  hypo

SEQ ID NO: 439671 - DNA, 945 bp, Homo sapiens; identical to SEQ ID NO: 287688
  chr10:134210377-134211322
  hypo

SEQ ID NO: 439672 - DNA, 687 bp, Homo sapiens; identical to SEQ ID NO: 262670
  chr10:134217026-134217713
  hypo

SEQ ID NO: 439673 - DNA, 201 bp, Homo sapiens; identical to SEQ ID NO: 262671
  chr10:134269926-134270127
  hypo

SEQ ID NO: 439674 - DNA, 38 bp, Homo sapiens; identical to SEQ ID NO: 313390
  chr10:134273156-134273194
  hypo

SEQ ID NO: 439675 - DNA, 43 bp, Homo sapiens; identical to SEQ ID NO: 213845
  chr10:134276612-134276655
  hypo

SEQ ID NO: 439676 - DNA, 81 bp, Homo sapiens; identical to SEQ ID NO: 213846
  chr10:134279122-134279203
  hypo

SEQ ID NO: 439677 - DNA, 105 bp, Homo sapiens; identical to SEQ ID NO: 213847
  chr10:134279498-134279603
  hypo

SEQ ID NO: 439678 - DNA, 106 bp, Homo sapiens; identical to SEQ ID NO: 213848
  chr10:134280450-134280556
  hypo

SEQ ID NO: 439679 - DNA, 65 bp, Homo sapiens; identical to SEQ ID NO: 313395
  chr10:134292419-134292484
  hypo

SEQ ID NO: 439680 - DNA, 53 bp, Homo sapiens; identical to SEQ ID NO: 213849
  chr10:134302492-134302545
  hypo

SEQ ID NO: 439681 - DNA, 85 bp, Homo sapiens; identical to SEQ ID NO: 262681
  chr10:134304827-134304912
  hypo

SEQ ID NO: 439682 - DNA, 122 bp, Homo sapiens; identical to SEQ ID NO: 262682
  chr10:134346519-134346641
  hypo

SEQ ID NO: 439683 - DNA, 770 bp, Homo sapiens; identical to SEQ ID NO: 287690
  chr10:134351009-134351779
  hypo

SEQ ID NO: 439684 - DNA, 274 bp, Homo sapiens; identical to SEQ ID NO: 262683
  chr10:134370565-134370839
  hypo

SEQ ID NO: 439685 - DNA, 55 bp, Homo sapiens; identical to SEQ ID NO: 213851
  chr10:134421293-134421348
  hypo

SEQ ID NO: 439686 - DNA, 45 bp, Homo sapiens; identical to SEQ ID NO: 262685
  chr10:134421771-134421816
  hypo

SEQ ID NO: 439687 - DNA, 55 bp, Homo sapiens; identical to SEQ ID NO: 262686
  chr10:134427568-134427623
  hypo

SEQ ID NO: 439688 - DNA, 36 bp, Homo sapiens; identical to SEQ ID NO: 213852
  chr10:134457709-134457745
  hypo

SEQ ID NO: 439689 - DNA, 201 bp, Homo sapiens; identical to SEQ ID NO: 262688
  chr10:134459516-134459717
  hypo

SEQ ID NO: 439690 - DNA, 55 bp, Homo sapiens; identical to SEQ ID NO: 262689
  chr10:134460290-134460345
  hypo

SEQ ID NO: 439691 - DNA, 39 bp, Homo sapiens; identical to SEQ ID NO: 262690
  chr10:134467311-134467350
  hypo

SEQ ID NO: 439692 - DNA, 58 bp, Homo sapiens; identical to SEQ ID NO: 262694
  chr10:134492043-134492101
  hypo

SEQ ID NO: 439693 - DNA, 32 bp, Homo sapiens; identical to SEQ ID NO: 313413
  chr10:134499296-134499328
  hypo

SEQ ID NO: 439694 - DNA, 240 bp, Homo sapiens; identical to SEQ ID NO: 313414
  chr10:134499533-134499773
  hypo

SEQ ID NO: 439695 - DNA, 405 bp, Homo sapiens; identical to SEQ ID NO: 262696
  chr10:134503266-134503671
  hypo

SEQ ID NO: 439696 - DNA, 192 bp, Homo sapiens; identical to SEQ ID NO: 262697
  chr10:134504489-134504681
  hypo

SEQ ID NO: 439697 - DNA, 350 bp, Homo sapiens; identical to SEQ ID NO: 262698
  chr10:134517971-134518321
  hypo

SEQ ID NO: 439698 - DNA, 88 bp, Homo sapiens; identical to SEQ ID NO: 313418
  chr10:134518523-134518611
  hypo

SEQ ID NO: 439699 - DNA, 40 bp, Homo sapiens; identical to SEQ ID NO: 313419
  chr10:134518778-134518818
  hypo

SEQ ID NO: 439700 - DNA, 124 bp, Homo sapiens; identical to SEQ ID NO: 262701
  chr10:134528539-134528663
  hypo

SEQ ID NO: 439701 - DNA, 49 bp, Homo sapiens; identical to SEQ ID NO: 262703
  chr10:134540684-134540733
  hypo

SEQ ID NO: 439702 - DNA, 127 bp, Homo sapiens; identical to SEQ ID NO: 313425
  chr10:134542025-134542152
  hypo

SEQ ID NO: 439703 - DNA, 224 bp, Homo sapiens; identical to SEQ ID NO: 313426
  chr10:134542212-134542436
  hypo

SEQ ID NO: 439704 - DNA, 67 bp, Homo sapiens; identical to SEQ ID NO: 262705
  chr10:134546239-134546306
  hypo

SEQ ID NO: 439705 - DNA, 400 bp, Homo sapiens; identical to SEQ ID NO: 262706
  chr10:134556147-134556547
  hypo

SEQ ID NO: 439706 - DNA, 172 bp, Homo sapiens; identical to SEQ ID NO: 213858
  chr10:134559539-134559711
  hypo

SEQ ID NO: 439707 - DNA, 84 bp, Homo sapiens; identical to SEQ ID NO: 167033
  chr10:134567165-134567249
  hypo

SEQ ID NO: 439708 - DNA, 58 bp, Homo sapiens; identical to SEQ ID NO: 262712
  chr10:134575252-134575310
  hypo

SEQ ID NO: 439709 - DNA, 144 bp, Homo sapiens; identical to SEQ ID NO: 213860
  chr10:134577903-134578047
  hypo

SEQ ID NO: 439710 - DNA, 100 bp, Homo sapiens; identical to SEQ ID NO: 262714
  chr10:134583322-134583422
  hypo

SEQ ID NO: 439711 - DNA, 208 bp, Homo sapiens; identical to SEQ ID NO: 262715
  chr10:134588784-134588992
  hypo

SEQ ID NO: 439712 - DNA, 45 bp, Homo sapiens; identical to SEQ ID NO: 313437
  chr10:134589352-134589397
  hypo

SEQ ID NO: 439713 - DNA, 166 bp, Homo sapiens; identical to SEQ ID NO: 313438
  chr10:134589427-134589593
  hypo

SEQ ID NO: 439714 - DNA, 535 bp, Homo sapiens; identical to SEQ ID NO: 262717
  chr10:134589801-134590336
  hypo

SEQ ID NO: 439715 - DNA, 93 bp, Homo sapiens; identical to SEQ ID NO: 262719
  chr10:134595971-134596064
  hypo

SEQ ID NO: 439716 - DNA, 262 bp, Homo sapiens; identical to SEQ ID NO: 262720
  chr10:134606292-134606554
  hypo

SEQ ID NO: 439717 - DNA, 153 bp, Homo sapiens; identical to SEQ ID NO: 313447
  chr10:134611774-134611927
  hypo

SEQ ID NO: 439718 - DNA, 50 bp, Homo sapiens; identical to SEQ ID NO: 213867
  chr10:134620149-134620199
  hypo

SEQ ID NO: 439719 - DNA, 127 bp, Homo sapiens; identical to SEQ ID NO: 213868
  chr10:134620229-134620356
  hypo

SEQ ID NO: 439720 - DNA, 33 bp, Homo sapiens; identical to SEQ ID NO: 408121
  chr10:134639960-134639993
  hypo

SEQ ID NO: 439721 - DNA, 362 bp, Homo sapiens; identical to SEQ ID NO: 313451
  chr10:134651401-134651763
  hypo

SEQ ID NO: 439722 - DNA, 417 bp, Homo sapiens; identical to SEQ ID NO: 313452
  chr10:134651793-134652210
  hypo

SEQ ID NO: 439723 - DNA, 147 bp, Homo sapiens; identical to SEQ ID NO: 262729
  chr10:134663732-134663879
  hypo

SEQ ID NO: 439724 - DNA, 114 bp, Homo sapiens; identical to SEQ ID NO: 262733
  chr10:134680625-134680739
  hypo

SEQ ID NO: 439725 - DNA, 769 bp, Homo sapiens; identical to SEQ ID NO: 262734
  chr10:134680972-134681741
  hypo

SEQ ID NO: 439726 - DNA, 145 bp, Homo sapiens; identical to SEQ ID NO: 313459
  chr10:134682472-134682617
  hypo

SEQ ID NO: 439727 - DNA, 270 bp, Homo sapiens; identical to SEQ ID NO: 313460
  chr10:134682847-134683117
  hypo

SEQ ID NO: 439728 - DNA, 257 bp, Homo sapiens; identical to SEQ ID NO: 262736
  chr10:134683320-134683577
  hypo

SEQ ID NO: 439729 - DNA, 277 bp, Homo sapiens; identical to SEQ ID NO: 262739
  chr10:134698448-134698725
  hypo

SEQ ID NO: 439730 - DNA, 365 bp, Homo sapiens; identical to SEQ ID NO: 262741
  chr10:134716710-134717075
  hypo

SEQ ID NO: 439731 - DNA, 669 bp, Homo sapiens; identical to SEQ ID NO: 262742
  chr10:134722154-134722823
  hypo

SEQ ID NO: 439732 - DNA, 43 bp, Homo sapiens; identical to SEQ ID NO: 262743
  chr10:134723477-134723520
  hypo

SEQ ID NO: 439733 - DNA, 178 bp, Homo sapiens; identical to SEQ ID NO: 262744
  chr10:134724608-134724786
  hypo

SEQ ID NO: 439734 - DNA, 154 bp, Homo sapiens; identical to SEQ ID NO: 213874
  chr10:134736024-134736178
  hypo

SEQ ID NO: 439735 - DNA, 180 bp, Homo sapiens; identical to SEQ ID NO: 392614
  chr10:134738986-134739166
  hypo

SEQ ID NO: 439736 - DNA, 188 bp, Homo sapiens; identical to SEQ ID NO: 313475
  chr10:134739760-134739948
  hypo

SEQ ID NO: 439737 - DNA, 70 bp, Homo sapiens; identical to SEQ ID NO: 213877
  chr10:134740788-134740858
  hypo

SEQ ID NO: 439738 - DNA, 56 bp, Homo sapiens; identical to SEQ ID NO: 213878
  chr10:134740911-134740967
  hypo

SEQ ID NO: 439739 - DNA, 272 bp, Homo sapiens; identical to SEQ ID NO: 262752
  chr10:134746663-134746935
  hypo

SEQ ID NO: 439740 - DNA, 110 bp, Homo sapiens; identical to SEQ ID NO: 262758
  chr10:134795408-134795518
  hypo

SEQ ID NO: 439741 - DNA, 381 bp, Homo sapiens; identical to SEQ ID NO: 213883
  chr10:134797188-134797569
  hypo

SEQ ID NO: 439742 - DNA, 43 bp, Homo sapiens; identical to SEQ ID NO: 213884
  chr10:134797730-134797773
  hypo

SEQ ID NO: 439743 - DNA, 345 bp, Homo sapiens; identical to SEQ ID NO: 262761
  chr10:134803434-134803779
  hypo

SEQ ID NO: 439744 - DNA, 100 bp, Homo sapiens; identical to SEQ ID NO: 213885
  chr10:134807156-134807256
  hypo

SEQ ID NO: 439745 - DNA, 158 bp, Homo sapiens; identical to SEQ ID NO: 313491
  chr10:134807307-134807465
  hypo

SEQ ID NO: 439746 - DNA, 222 bp, Homo sapiens; identical to SEQ ID NO: 262763
  chr10:134817170-134817392
  hypo

SEQ ID NO: 439747 - DNA, 224 bp, Homo sapiens; identical to SEQ ID NO: 262764
  chr10:134827960-134828184
  hypo

SEQ ID NO: 439748 - DNA, 95 bp, Homo sapiens; identical to SEQ ID NO: 313497
  chr10:134833358-134833453
  hypo

SEQ ID NO: 439749 - DNA, 51 bp, Homo sapiens; identical to SEQ ID NO: 313498
  chr10:134833483-134833534
  hypo

SEQ ID NO: 439750 - DNA, 50 bp, Homo sapiens; identical to SEQ ID NO: 262768
  chr10:134833860-134833910
  hypo

SEQ ID NO: 439751 - DNA, 150 bp, Homo sapiens; identical to SEQ ID NO: 262773
  chr10:134886535-134886685
  hypo

SEQ ID NO: 439752 - DNA, 249 bp, Homo sapiens; identical to SEQ ID NO: 313504
  chr10:134894586-134894835
  hypo

SEQ ID NO: 439753 - DNA, 281 bp, Homo sapiens; identical to SEQ ID NO: 262775
  chr10:134907950-134908231
  hypo

SEQ ID NO: 439754 - DNA, 156 bp, Homo sapiens; identical to SEQ ID NO: 313506
  chr10:134911962-134912118
  hypo

SEQ ID NO: 439755 - DNA, 46 bp, Homo sapiens; identical to SEQ ID NO: 213890
  chr10:134912336-134912382
  hypo

SEQ ID NO: 439756 - DNA, 258 bp, Homo sapiens; identical to SEQ ID NO: 262778
  chr10:134920248-134920506
  hypo

SEQ ID NO: 439757 - DNA, 96 bp, Homo sapiens; identical to SEQ ID NO: 262779
  chr10:134926796-134926892
  hypo

SEQ ID NO: 439758 - DNA, 166 bp, Homo sapiens; identical to SEQ ID NO: 313512
  chr10:134944405-134944571
  hypo

SEQ ID NO: 439759 - DNA, 115 bp, Homo sapiens; identical to SEQ ID NO: 262784
  chr10:134945553-134945668
  hypo

SEQ ID NO: 439760 - DNA, 70 bp, Homo sapiens; identical to SEQ ID NO: 313514
  chr10:134945723-134945793
  hypo

SEQ ID NO: 439761 - DNA, 375 bp, Homo sapiens; identical to SEQ ID NO: 262786
  chr10:134978859-134979234
  hypo

SEQ ID NO: 439762 - DNA, 681 bp, Homo sapiens; identical to SEQ ID NO: 313516
  chr10:134980289-134980970
  hypo

SEQ ID NO: 439763 - DNA, 158 bp, Homo sapiens; identical to SEQ ID NO: 213895
  chr10:135002833-135002991
  hypo

SEQ ID NO: 439764 - DNA, 83 bp, Homo sapiens; identical to SEQ ID NO: 313521
  chr10:135008714-135008797
  hypo

SEQ ID NO: 439765 - DNA, 116 bp, Homo sapiens; identical to SEQ ID NO: 313522
  chr10:135008833-135008949
  hypo

SEQ ID NO: 439766 - DNA, 353 bp, Homo sapiens; identical to SEQ ID NO: 213896
  chr10:135009175-135009528
  hypo

SEQ ID NO: 439767 - DNA, 188 bp, Homo sapiens
  chr10:135016807-135016995
  hypo
actcggcccccaaactcatggtgtccagcagggagcactcggcccccaaacacacagcgtccggcccatggccacagcctcacgtttctcttggaggagctactgtgtctctttcaaaacaggaggctcagaaacacagcaagggcaaaaaccacctggagacagactttcacatccgcagcccaaaa

SEQ ID NO: 439768 - DNA, 37 bp, Homo sapiens
  chr10:135017973-135018010
  hypo
gaggttctgcagaggcctggtctttacgcagctggga

SEQ ID NO: 439769 - DNA, 282 bp, Homo sapiens; identical to SEQ ID NO: 213899
  chr10:135018070-135018352
  hypo

SEQ ID NO: 439770 - DNA, 158 bp, Homo sapiens; identical to SEQ ID NO: 313528
  chr10:135018667-135018825
  hypo

SEQ ID NO: 439771 - DNA, 41 bp, Homo sapiens; identical to SEQ ID NO: 313529
  chr10:135018992-135019033
  hypo

SEQ ID NO: 439772 - DNA, 180 bp, Homo sapiens; identical to SEQ ID NO: 262799
  chr10:135025085-135025265
  hypo

SEQ ID NO: 439773 - DNA, 146 bp, Homo sapiens; identical to SEQ ID NO: 262801
  chr10:135026335-135026481
  hypo

SEQ ID NO: 439774 - DNA, 134 bp, Homo sapiens; identical to SEQ ID NO: 262804
  chr10:135067365-135067499
  hypo

SEQ ID NO: 439775 - DNA, 99 bp, Homo sapiens; identical to SEQ ID NO: 262805
  chr10:135069286-135069385
  hypo

SEQ ID NO: 439776 - DNA, 158 bp, Homo sapiens; identical to SEQ ID NO: 313538
  chr10:135069625-135069783
  hypo

SEQ ID NO: 439777 - DNA, 40 bp, Homo sapiens; identical to SEQ ID NO: 213903
  chr10:135073971-135074011
  hypo

SEQ ID NO: 439778 - DNA, 114 bp, Homo sapiens; identical to SEQ ID NO: 313540
  chr10:135076254-135076368
  hypo

SEQ ID NO: 439779 - DNA, 146 bp, Homo sapiens; identical to SEQ ID NO: 213904
  chr10:135081994-135082140
  hypo

SEQ ID NO: 439780 - DNA, 192 bp, Homo sapiens; identical to SEQ ID NO: 262810
  chr10:135085113-135085305
  hypo

SEQ ID NO: 439781 - DNA, 77 bp, Homo sapiens; identical to SEQ ID NO: 213906
  chr10:135102837-135102914
  hypo

SEQ ID NO: 439782 - DNA, 74 bp, Homo sapiens; identical to SEQ ID NO: 262815
  chr10:135111401-135111475
  hypo

SEQ ID NO: 439783 - DNA, 37 bp, Homo sapiens; identical to SEQ ID NO: 262816
  chr10:135113437-135113474
  hypo

SEQ ID NO: 439784 - DNA, 44 bp, Homo sapiens
  chr10:135120291-135120335
  hypo
aaaaaataataataaaaaaaataaaaactaccttcaggaaactt

SEQ ID NO: 439785 - DNA, 202 bp, Homo sapiens; identical to SEQ ID NO: 262820
  chr10:135128535-135128737
  hypo

SEQ ID NO: 439786 - DNA, 120 bp, Homo sapiens; identical to SEQ ID NO: 287707
  chr10:135149102-135149222
  hypo

SEQ ID NO: 439787 - DNA, 456 bp, Homo sapiens; identical to SEQ ID NO: 287708
  chr10:135149869-135150325
  hypo

SEQ ID NO: 439788 - DNA, 114 bp, Homo sapiens; identical to SEQ ID NO: 262822
  chr10:135202198-135202312
  hypo

SEQ ID NO: 439789 - DNA, 201 bp, Homo sapiens; identical to SEQ ID NO: 213911
  chr10:135204811-135205012
  hypo

SEQ ID NO: 439790 - DNA, 37 bp, Homo sapiens; identical to SEQ ID NO: 262826
  chr10:135381713-135381750
  hypo

SEQ ID NO: 439791 - DNA, 86 bp, Homo sapiens; identical to SEQ ID NO: 262827
  chr10:135381780-135381866
  hypo

SEQ ID NO: 439792 - DNA, 138 bp, Homo sapiens; identical to SEQ ID NO: 262829
  chr11:251677-251815
  hypo

SEQ ID NO: 439793 - DNA, 412 bp, Homo sapiens; identical to SEQ ID NO: 202387
  chr11:314083-314495
  hypo

SEQ ID NO: 439794 - DNA, 38 bp, Homo sapiens; identical to SEQ ID NO: 262830
  chr11:367112-367150
  hypo

SEQ ID NO: 439795 - DNA, 155 bp, Homo sapiens; identical to SEQ ID NO: 262831
  chr11:372118-372273
  hypo

SEQ ID NO: 439796 - DNA, 830 bp, Homo sapiens; identical to SEQ ID NO: 408161
  chr11:375766-376596
  hypo

SEQ ID NO: 439797 - DNA, 36 bp, Homo sapiens; identical to SEQ ID NO: 262834
  chr11:381324-381360
  hypo

SEQ ID NO: 439798 - DNA, 185 bp, Homo sapiens; identical to SEQ ID NO: 262835
  chr11:390912-391097
  hypo

SEQ ID NO: 439799 - DNA, 717 bp, Homo sapiens; identical to SEQ ID NO: 313572
  chr11:391859-392576
  hypo

SEQ ID NO: 439800 - DNA, 108 bp, Homo sapiens; identical to SEQ ID NO: 24822
  chr11:393555-393663
  hypo

SEQ ID NO: 439801 - DNA, 145 bp, Homo sapiens; identical to SEQ ID NO: 262838
  chr11:394012-394157
  hypo

SEQ ID NO: 439802 - DNA, 33 bp, Homo sapiens; identical to SEQ ID NO: 262839
  chr11:394430-394463
  hypo

SEQ ID NO: 439803 - DNA, 101 bp, Homo sapiens; identical to SEQ ID NO: 313576
  chr11:395057-395158
  hypo

SEQ ID NO: 439804 - DNA, 39 bp, Homo sapiens; identical to SEQ ID NO: 262841
  chr11:404582-404621
  hypo

SEQ ID NO: 439805 - DNA, 52 bp, Homo sapiens; identical to SEQ ID NO: 262842
  chr11:405079-405131
  hypo

SEQ ID NO: 439806 - DNA, 153 bp, Homo sapiens; identical to SEQ ID NO: 262843
  chr11:419276-419429
  hypo

SEQ ID NO: 439807 - DNA, 425 bp, Homo sapiens; identical to SEQ ID NO: 262844
  chr11:421330-421755
  hypo

SEQ ID NO: 439808 - DNA, 177 bp, Homo sapiens; identical to SEQ ID NO: 213919
  chr11:429289-429466
  hypo

SEQ ID NO: 439809 - DNA, 51 bp, Homo sapiens; identical to SEQ ID NO: 213920
  chr11:429759-429810
  hypo

SEQ ID NO: 439810 - DNA, 144 bp, Homo sapiens; identical to SEQ ID NO: 213921
  chr11:431645-431789
  hypo

SEQ ID NO: 439811 - DNA, 134 bp, Homo sapiens; identical to SEQ ID NO: 262847
  chr11:438117-438251
  hypo

SEQ ID NO: 439812 - DNA, 137 bp, Homo sapiens; identical to SEQ ID NO: 213922
  chr11:449377-449514
  hypo

SEQ ID NO: 439813 - DNA, 268 bp, Homo sapiens; identical to SEQ ID NO: 202390
  chr11:450011-450279
  hypo

SEQ ID NO: 439814 - DNA, 101 bp, Homo sapiens; identical to SEQ ID NO: 213925
  chr11:464468-464569
  hypo

SEQ ID NO: 439815 - DNA, 34 bp, Homo sapiens; identical to SEQ ID NO: 213926
  chr11:471551-471585
  hypo

SEQ ID NO: 439816 - DNA, 195 bp, Homo sapiens; identical to SEQ ID NO: 213927
  chr11:472768-472963
  hypo

SEQ ID NO: 439817 - DNA, 42 bp, Homo sapiens; identical to SEQ ID NO: 262854
  chr11:475001-475043
  hypo

SEQ ID NO: 439818 - DNA, 49 bp, Homo sapiens; identical to SEQ ID NO: 262855
  chr11:476445-476494
  hypo

SEQ ID NO: 439819 - DNA, 105 bp, Homo sapiens; identical to SEQ ID NO: 287722
  chr11:485908-486013
  hypo

SEQ ID NO: 439820 - DNA, 79 bp, Homo sapiens; identical to SEQ ID NO: 287723
  chr11:486095-486174
  hypo

SEQ ID NO: 439821 - DNA, 136 bp, Homo sapiens; identical to SEQ ID NO: 262858
  chr11:489087-489223
  hypo

SEQ ID NO: 439822 - DNA, 182 bp, Homo sapiens; identical to SEQ ID NO: 202391
  chr11:518712-518894
  hypo

SEQ ID NO: 439823 - DNA, 61 bp, Homo sapiens; identical to SEQ ID NO: 287725
  chr11:518933-518994
  hypo

SEQ ID NO: 439824 - DNA, 64 bp, Homo sapiens; identical to SEQ ID NO: 262860
  chr11:528257-528321
  hypo

SEQ ID NO: 439825 - DNA, 261 bp, Homo sapiens; identical to SEQ ID NO: 262861
  chr11:528626-528887
  hypo

SEQ ID NO: 439826 - DNA, 38 bp, Homo sapiens; identical to SEQ ID NO: 262862
  chr11:532700-532738
  hypo

SEQ ID NO: 439827 - DNA, 37 bp, Homo sapiens; identical to SEQ ID NO: 213934
  chr11:534210-534247
  hypo

SEQ ID NO: 439828 - DNA, 36 bp, Homo sapiens; identical to SEQ ID NO: 262865
  chr11:539725-539761
  hypo

SEQ ID NO: 439829 - DNA, 31 bp, Homo sapiens; identical to SEQ ID NO: 313609
  chr11:548735-548766
  hypo

SEQ ID NO: 439830 - DNA, 177 bp, Homo sapiens; identical to SEQ ID NO: 313610
  chr11:548800-548977
  hypo

SEQ ID NO: 439831 - DNA, 65 bp, Homo sapiens; identical to SEQ ID NO: 313611
  chr11:549007-549072
  hypo

SEQ ID NO: 439832 - DNA, 152 bp, Homo sapiens; identical to SEQ ID NO: 262867
  chr11:550045-550197
  hypo

SEQ ID NO: 439833 - DNA, 159 bp, Homo sapiens; identical to SEQ ID NO: 213937
  chr11:563846-564005
  hypo

SEQ ID NO: 439834 - DNA, 211 bp, Homo sapiens; identical to SEQ ID NO: 287727
  chr11:568188-568399
  hypo

SEQ ID NO: 439835 - DNA, 221 bp, Homo sapiens; identical to SEQ ID NO: 202394
  chr11:575604-575825
  hypo

SEQ ID NO: 439836 - DNA, 102 bp, Homo sapiens; identical to SEQ ID NO: 213941
  chr11:590964-591066
  hypo

SEQ ID NO: 439837 - DNA, 110 bp, Homo sapiens; identical to SEQ ID NO: 213943
  chr11:593651-593761
  hypo

SEQ ID NO: 439838 - DNA, 122 bp, Homo sapiens; identical to SEQ ID NO: 213944
  chr11:601646-601768
  hypo

SEQ ID NO: 439839 - DNA, 129 bp, Homo sapiens; identical to SEQ ID NO: 262875
  chr11:605030-605159
  hypo

SEQ ID NO: 439840 - DNA, 60 bp, Homo sapiens; identical to SEQ ID NO: 213945
  chr11:609531-609591
  hypo

SEQ ID NO: 439841 - DNA, 116 bp, Homo sapiens; identical to SEQ ID NO: 213946
  chr11:618979-619095
  hypo

SEQ ID NO: 439842 - DNA, 302 bp, Homo sapiens; identical to SEQ ID NO: 262878
  chr11:625775-626077
  hypo

SEQ ID NO: 439843 - DNA, 131 bp, Homo sapiens; identical to SEQ ID NO: 262879
  chr11:644102-644233
  hypo

SEQ ID NO: 439844 - DNA, 268 bp, Homo sapiens; identical to SEQ ID NO: 287733
  chr11:694728-694996
  hypo

SEQ ID NO: 439845 - DNA, 152 bp, Homo sapiens; identical to SEQ ID NO: 213948
  chr11:700514-700666
  hypo

SEQ ID NO: 439846 - DNA, 68 bp, Homo sapiens; identical to SEQ ID NO: 262882
  chr11:702894-702962
  hypo

SEQ ID NO: 439847 - DNA, 189 bp, Homo sapiens; identical to SEQ ID NO: 224019
  chr11:721128-721317
  hypo

SEQ ID NO: 439848 - DNA, 135 bp, Homo sapiens; identical to SEQ ID NO: 262883
  chr11:727709-727844
  hypo

SEQ ID NO: 439849 - DNA, 310 bp, Homo sapiens; identical to SEQ ID NO: 262884
  chr11:733218-733528
  hypo

SEQ ID NO: 439850 - DNA, 32 bp, Homo sapiens; identical to SEQ ID NO: 262885
  chr11:739281-739313
  hypo

SEQ ID NO: 439851 - DNA, 33 bp, Homo sapiens; identical to SEQ ID NO: 213950
  chr11:744542-744575
  hypo

SEQ ID NO: 439852 - DNA, 626 bp, Homo sapiens; identical to SEQ ID NO: 262889
  chr11:772495-773121
  hypo

SEQ ID NO: 439853 - DNA, 187 bp, Homo sapiens; identical to SEQ ID NO: 313642
  chr11:775074-775261
  hypo

SEQ ID NO: 439854 - DNA, 54 bp, Homo sapiens
  chr11:823372-823426
  hypo
tgtacagctttgatcttgttctggatctaggataggttttggggttgggagctg

SEQ ID NO: 439855 - DNA, 321 bp, Homo sapiens; identical to SEQ ID NO: 313647
  chr11:824507-824828
  hypo

SEQ ID NO: 439856 - DNA, 143 bp, Homo sapiens; identical to SEQ ID NO: 262895
  chr11:826059-826202
  hypo

SEQ ID NO: 439857 - DNA, 34 bp, Homo sapiens; identical to SEQ ID NO: 202396
  chr11:832781-832815
  hypo

SEQ ID NO: 439858 - DNA, 43 bp, Homo sapiens; identical to SEQ ID NO: 262897
  chr11:858811-858854
  hypo

SEQ ID NO: 439859 - DNA, 110 bp, Homo sapiens; identical to SEQ ID NO: 313653
  chr11:864622-864732
  hypo

SEQ ID NO: 439860 - DNA, 34 bp, Homo sapiens; identical to SEQ ID NO: 262901
  chr11:865452-865486
  hypo

SEQ ID NO: 439861 - DNA, 141 bp, Homo sapiens; identical to SEQ ID NO: 313655
  chr11:865516-865657
  hypo

SEQ ID NO: 439862 - DNA, 70 bp, Homo sapiens; identical to SEQ ID NO: 262903
  chr11:873624-873694
  hypo

SEQ ID NO: 439863 - DNA, 61 bp, Homo sapiens; identical to SEQ ID NO: 262904
  chr11:873724-873785
  hypo

SEQ ID NO: 439864 - DNA, 171 bp, Homo sapiens; identical to SEQ ID NO: 313658
  chr11:875517-875688
  hypo

SEQ ID NO: 439865 - DNA, 206 bp, Homo sapiens; identical to SEQ ID NO: 262906
  chr11:898338-898544
  hypo

SEQ ID NO: 439866 - DNA, 79 bp, Homo sapiens; identical to SEQ ID NO: 213955
  chr11:907472-907551
  hypo

SEQ ID NO: 439867 - DNA, 83 bp, Homo sapiens; identical to SEQ ID NO: 262908
  chr11:937330-937413
  hypo

SEQ ID NO: 439868 - DNA, 144 bp, Homo sapiens; identical to SEQ ID NO: 262910
  chr11:946374-946518
  hypo

SEQ ID NO: 439869 - DNA, 98 bp, Homo sapiens; identical to SEQ ID NO: 313664
  chr11:971727-971825
  hypo

SEQ ID NO: 439870 - DNA, 129 bp, Homo sapiens; identical to SEQ ID NO: 313665
  chr11:971860-971989
  hypo

SEQ ID NO: 439871 - DNA, 101 bp, Homo sapiens; identical to SEQ ID NO: 262914
  chr11:986394-986495
  hypo

SEQ ID NO: 439872 - DNA, 294 bp, Homo sapiens; identical to SEQ ID NO: 213957
  chr11:991642-991936
  hypo

SEQ ID NO: 439873 - DNA, 301 bp, Homo sapiens; identical to SEQ ID NO: 213959
  chr11:996128-996429
  hypo

SEQ ID NO: 439874 - DNA, 263 bp, Homo sapiens; identical to SEQ ID NO: 213960
  chr11:998037-998300
  hypo

SEQ ID NO: 439875 - DNA, 56 bp, Homo sapiens; identical to SEQ ID NO: 213961
  chr11:1000519-1000575
  hypo

SEQ ID NO: 439876 - DNA, 99 bp, Homo sapiens; identical to SEQ ID NO: 213962
  chr11:1005978-1006077
  hypo

SEQ ID NO: 439877 - DNA, 240 bp, Homo sapiens; identical to SEQ ID NO: 213963
  chr11:1006107-1006347
  hypo

SEQ ID NO: 439878 - DNA, 169 bp, Homo sapiens; identical to SEQ ID NO: 213964
  chr11:1006970-1007139
  hypo

SEQ ID NO: 439879 - DNA, 59 bp, Homo sapiens; identical to SEQ ID NO: 262924
  chr11:1008941-1009000
  hypo

SEQ ID NO: 439880 - DNA, 63 bp, Homo sapiens; identical to SEQ ID NO: 262925
  chr11:1011267-1011330
  hypo

SEQ ID NO: 439881 - DNA, 452 bp, Homo sapiens; identical to SEQ ID NO: 262926
  chr11:1013508-1013960
  hypo

SEQ ID NO: 439882 - DNA, 230 bp, Homo sapiens; identical to SEQ ID NO: 313683
  chr11:1025210-1025440
  hypo

SEQ ID NO: 439883 - DNA, 268 bp, Homo sapiens; identical to SEQ ID NO: 262930
  chr11:1035491-1035759
  hypo

SEQ ID NO: 439884 - DNA, 167 bp, Homo sapiens; identical to SEQ ID NO: 313686
  chr11:1043703-1043870
  hypo

SEQ ID NO: 439885 - DNA, 118 bp, Homo sapiens; identical to SEQ ID NO: 313687
  chr11:1043921-1044039
  hypo

SEQ ID NO: 439886 - DNA, 69 bp, Homo sapiens; identical to SEQ ID NO: 262932
  chr11:1047107-1047176
  hypo

SEQ ID NO: 439887 - DNA, 38 bp, Homo sapiens; identical to SEQ ID NO: 262933
  chr11:1056099-1056137
  hypo

SEQ ID NO: 439888 - DNA, 45 bp, Homo sapiens; identical to SEQ ID NO: 262934
  chr11:1060630-1060675
  hypo

SEQ ID NO: 439889 - DNA, 80 bp, Homo sapiens; identical to SEQ ID NO: 262935
  chr11:1061401-1061481
  hypo

SEQ ID NO: 439890 - DNA, 502 bp, Homo sapiens; identical to SEQ ID NO: 262938
  chr11:1088802-1089304
  hypo

SEQ ID NO: 439891 - DNA, 379 bp, Homo sapiens; identical to SEQ ID NO: 213966
  chr11:1096252-1096631
  hypo

SEQ ID NO: 439892 - DNA, 267 bp, Homo sapiens; identical to SEQ ID NO: 213967
  chr11:1098559-1098826
  hypo

SEQ ID NO: 439893 - DNA, 345 bp, Homo sapiens; identical to SEQ ID NO: 213970
  chr11:1105012-1105357
  hypo

SEQ ID NO: 439894 - DNA, 68 bp, Homo sapiens; identical to SEQ ID NO: 313701
  chr11:1155528-1155596
  hypo

SEQ ID NO: 439895 - DNA, 284 bp, Homo sapiens; identical to SEQ ID NO: 262946
  chr11:1161252-1161536
  hypo

SEQ ID NO: 439896 - DNA, 43 bp, Homo sapiens; identical to SEQ ID NO: 262947
  chr11:1161745-1161788
  hypo

SEQ ID NO: 439897 - DNA, 260 bp, Homo sapiens; identical to SEQ ID NO: 262948
  chr11:1162084-1162344
  hypo

SEQ ID NO: 439898 - DNA, 251 bp, Homo sapiens; identical to SEQ ID NO: 262949
  chr11:1213296-1213547
  hypo

SEQ ID NO: 439899 - DNA, 165 bp, Homo sapiens
  chr11:1214967-1215132
  hypo
ggcttggctgaagcagaaaagaattgggtgggacagcaggaaggacttcccagcatcaaggcggggccgcatggggccgagcctccccgcttaggggtgctgagtgaatccctgtgagcctcggagcagcctggctggagaaggtggaggagtctgtccctgcct

SEQ ID NO: 439900 - DNA, 215 bp, Homo sapiens; identical to SEQ ID NO: 313708
  chr11:1221488-1221703
  hypo

SEQ ID NO: 439901 - DNA, 71 bp, Homo sapiens; identical to SEQ ID NO: 313713
  chr11:1256517-1256588
  hypo

SEQ ID NO: 439902 - DNA, 358 bp, Homo sapiens; identical to SEQ ID NO: 262957
  chr11:1261378-1261736
  hypo

SEQ ID NO: 439903 - DNA, 420 bp, Homo sapiens
  chr11:1262078-1262498
  hypo
aggcccggccctcccggtctccaccgtgtgtgtccgcgaggtctgccgctggtccagctggtacaatgggcaccgcccagagcccggcctgggaggcggagactttgagacgtttgaaaacctgaggcagagagggtaccaggtatgccctgtgctggctgacatcgagtgccgggcggcgcagcttcccgacatgccgctggaggagctgggccagcaggtggactgtgaccgcatgcgggggctgatgtgcgccaacagccaacagagtcccccgctctgtcacgactacgagctgcgggttctctgctgcgaatacgtgccctgtggcccctccccggccccaggcaccagccctcagccctccctcagtgccagcacggagcctgctgtgcctaccccaacccagaccacagcaac

SEQ ID NO: 439904 - DNA, 140 bp, Homo sapiens; identical to SEQ ID NO: 408206
  chr11:1275398-1275538
  hypo

SEQ ID NO: 439905 - DNA, 31 bp, Homo sapiens; identical to SEQ ID NO: 262961
  chr11:1281709-1281740
  hypo

SEQ ID NO: 439906 - DNA, 233 bp, Homo sapiens; identical to SEQ ID NO: 262962
  chr11:1298242-1298475
  hypo

SEQ ID NO: 439907 - DNA, 138 bp, Homo sapiens; identical to SEQ ID NO: 262964
  chr11:1306745-1306883
  hypo

SEQ ID NO: 439908 - DNA, 139 bp, Homo sapiens; identical to SEQ ID NO: 213979
  chr11:1307128-1307267
  hypo

SEQ ID NO: 439909 - DNA, 109 bp, Homo sapiens; identical to SEQ ID NO: 213980
  chr11:1312471-1312580
  hypo

SEQ ID NO: 439910 - DNA, 55 bp, Homo sapiens; identical to SEQ ID NO: 262967
  chr11:1312883-1312938
  hypo

SEQ ID NO: 439911 - DNA, 278 bp, Homo sapiens; identical to SEQ ID NO: 262968
  chr11:1360071-1360349
  hypo

SEQ ID NO: 439912 - DNA, 277 bp, Homo sapiens; identical to SEQ ID NO: 313727
  chr11:1374621-1374898
  hypo

SEQ ID NO: 439913 - DNA, 178 bp, Homo sapiens; identical to SEQ ID NO: 262970
  chr11:1375494-1375672
  hypo

SEQ ID NO: 439914 - DNA, 58 bp, Homo sapiens; identical to SEQ ID NO: 262971
  chr11:1390811-1390869
  hypo

SEQ ID NO: 439915 - DNA, 150 bp, Homo sapiens; identical to SEQ ID NO: 262972
  chr11:1397882-1398032
  hypo

SEQ ID NO: 439916 - DNA, 636 bp, Homo sapiens; identical to SEQ ID NO: 262973
  chr11:1417382-1418018
  hypo

SEQ ID NO: 439917 - DNA, 284 bp, Homo sapiens; identical to SEQ ID NO: 313733
  chr11:1431201-1431485
  hypo

SEQ ID NO: 439918 - DNA, 87 bp, Homo sapiens; identical to SEQ ID NO: 262975
  chr11:1433176-1433263
  hypo

SEQ ID NO: 439919 - DNA, 57 bp, Homo sapiens; identical to SEQ ID NO: 213983
  chr11:1433608-1433665
  hypo

SEQ ID NO: 439920 - DNA, 190 bp, Homo sapiens; identical to SEQ ID NO: 262977
  chr11:1434052-1434242
  hypo

SEQ ID NO: 439921 - DNA, 478 bp, Homo sapiens; identical to SEQ ID NO: 313739
  chr11:1446896-1447374
  hypo

SEQ ID NO: 439922 - DNA, 49 bp, Homo sapiens; identical to SEQ ID NO: 313740
  chr11:1450676-1450725
  hypo

SEQ ID NO: 439923 - DNA, 208 bp, Homo sapiens; identical to SEQ ID NO: 313744
  chr11:1468915-1469123
  hypo

SEQ ID NO: 439924 - DNA, 71 bp, Homo sapiens; identical to SEQ ID NO: 313746
  chr11:1472058-1472129
  hypo

SEQ ID NO: 439925 - DNA, 329 bp, Homo sapiens; identical to SEQ ID NO: 313749
  chr11:1483177-1483506
  hypo

SEQ ID NO: 439926 - DNA, 96 bp, Homo sapiens; identical to SEQ ID NO: 313750
  chr11:1483938-1484034
  hypo

SEQ ID NO: 439927 - DNA, 161 bp, Homo sapiens; identical to SEQ ID NO: 213991
  chr11:1494354-1494515
  hypo

SEQ ID NO: 439928 - DNA, 283 bp, Homo sapiens; identical to SEQ ID NO: 213992
  chr11:1497177-1497460
  hypo

SEQ ID NO: 439929 - DNA, 162 bp, Homo sapiens; identical to SEQ ID NO: 262992
  chr11:1508342-1508504
  hypo

SEQ ID NO: 439930 - DNA, 482 bp, Homo sapiens; identical to SEQ ID NO: 262993
  chr11:1509374-1509856
  hypo

SEQ ID NO: 439931 - DNA, 197 bp, Homo sapiens; identical to SEQ ID NO: 262997
  chr11:1553266-1553463
  hypo

SEQ ID NO: 439932 - DNA, 190 bp, Homo sapiens; identical to SEQ ID NO: 262998
  chr11:1555916-1556106
  hypo

SEQ ID NO: 439933 - DNA, 120 bp, Homo sapiens; identical to SEQ ID NO: 262999
  chr11:1560263-1560383
  hypo

SEQ ID NO: 439934 - DNA, 39 bp, Homo sapiens; identical to SEQ ID NO: 213995
  chr11:1584969-1585008
  hypo

SEQ ID NO: 439935 - DNA, 38 bp, Homo sapiens; identical to SEQ ID NO: 213996
  chr11:1586817-1586855
  hypo

SEQ ID NO: 439936 - DNA, 498 bp, Homo sapiens; identical to SEQ ID NO: 224022
  chr11:1592747-1593245
  hypo

SEQ ID NO: 439937 - DNA, 117 bp, Homo sapiens; identical to SEQ ID NO: 202402
  chr11:1594039-1594156
  hypo

SEQ ID NO: 439938 - DNA, 613 bp, Homo sapiens; identical to SEQ ID NO: 263002
  chr11:1602581-1603194
  hypo

SEQ ID NO: 439939 - DNA, 212 bp, Homo sapiens; identical to SEQ ID NO: 213999
  chr11:1749039-1749251
  hypo

SEQ ID NO: 439940 - DNA, 224 bp, Homo sapiens; identical to SEQ ID NO: 263004
  chr11:1759618-1759842
  hypo

SEQ ID NO: 439941 - DNA, 94 bp, Homo sapiens; identical to SEQ ID NO: 263007
  chr11:1801339-1801433
  hypo

SEQ ID NO: 439942 - DNA, 93 bp, Homo sapiens; identical to SEQ ID NO: 263008
  chr11:1805366-1805459
  hypo

SEQ ID NO: 439943 - DNA, 222 bp, Homo sapiens; identical to SEQ ID NO: 263009
  chr11:1806143-1806365
  hypo

SEQ ID NO: 439944 - DNA, 31 bp, Homo sapiens; identical to SEQ ID NO: 263010
  chr11:1811101-1811132
  hypo

SEQ ID NO: 439945 - DNA, 38 bp, Homo sapiens; identical to SEQ ID NO: 263011
  chr11:1819538-1819576
  hypo

SEQ ID NO: 439946 - DNA, 40 bp, Homo sapiens; identical to SEQ ID NO: 214005
  chr11:1825529-1825569
  hypo

SEQ ID NO: 439947 - DNA, 234 bp, Homo sapiens; identical to SEQ ID NO: 313780
  chr11:1826944-1827178
  hypo

SEQ ID NO: 439948 - DNA, 65 bp, Homo sapiens; identical to SEQ ID NO: 263017
  chr11:1842377-1842442
  hypo

SEQ ID NO: 439949 - DNA, 123 bp, Homo sapiens; identical to SEQ ID NO: 214006
  chr11:1847136-1847259
  hypo

SEQ ID NO: 439950 - DNA, 124 bp, Homo sapiens; identical to SEQ ID NO: 214007
  chr11:1847321-1847445
  hypo

SEQ ID NO: 439951 - DNA, 328 bp, Homo sapiens; identical to SEQ ID NO: 313785
  chr11:1857545-1857873
  hypo

SEQ ID NO: 439952 - DNA, 129 bp, Homo sapiens; identical to SEQ ID NO: 313786
  chr11:1857933-1858062
  hypo

SEQ ID NO: 439953 - DNA, 54 bp, Homo sapiens; identical to SEQ ID NO: 313787
  chr11:1858535-1858589
  hypo

SEQ ID NO: 439954 - DNA, 128 bp, Homo sapiens; identical to SEQ ID NO: 313788
  chr11:1858652-1858780
  hypo

SEQ ID NO: 439955 - DNA, 49 bp, Homo sapiens; identical to SEQ ID NO: 263022
  chr11:1858842-1858891
  hypo

SEQ ID NO: 439956 - DNA, 622 bp, Homo sapiens; identical to SEQ ID NO: 263025
  chr11:1869646-1870268
  hypo

SEQ ID NO: 439957 - DNA, 66 bp, Homo sapiens; identical to SEQ ID NO: 313792
  chr11:1950284-1950350
  hypo

SEQ ID NO: 439958 - DNA, 589 bp, Homo sapiens; identical to SEQ ID NO: 313793
  chr11:1950634-1951223
  hypo

SEQ ID NO: 439959 - DNA, 53 bp, Homo sapiens; identical to SEQ ID NO: 313794
  chr11:1955098-1955151
  hypo

SEQ ID NO: 439960 - DNA, 86 bp, Homo sapiens; identical to SEQ ID NO: 214008
  chr11:1956448-1956534
  hypo

SEQ ID NO: 439961 - DNA, 235 bp, Homo sapiens; identical to SEQ ID NO: 263031
  chr11:1956828-1957063
  hypo

SEQ ID NO: 439962 - DNA, 89 bp, Homo sapiens; identical to SEQ ID NO: 263034
  chr11:1962757-1962846
  hypo

SEQ ID NO: 439963 - DNA, 34 bp, Homo sapiens; identical to SEQ ID NO: 263035
  chr11:1975868-1975902
  hypo

SEQ ID NO: 439964 - DNA, 50 bp, Homo sapiens; identical to SEQ ID NO: 263037
  chr11:1980680-1980730
  hypo

SEQ ID NO: 439965 - DNA, 114 bp, Homo sapiens; identical to SEQ ID NO: 263038
  chr11:1982883-1982997
  hypo

SEQ ID NO: 439966 - DNA, 99 bp, Homo sapiens; identical to SEQ ID NO: 214009
  chr11:1985748-1985847
  hypo

SEQ ID NO: 439967 - DNA, 333 bp, Homo sapiens; identical to SEQ ID NO: 263040
  chr11:2005410-2005743
  hypo

SEQ ID NO: 439968 - DNA, 176 bp, Homo sapiens; identical to SEQ ID NO: 263041
  chr11:2013349-2013525
  hypo

SEQ ID NO: 439969 - DNA, 54 bp, Homo sapiens; identical to SEQ ID NO: 263042
  chr11:2013555-2013609
  hypo

SEQ ID NO: 439970 - DNA, 146 bp, Homo sapiens; identical to SEQ ID NO: 263044
  chr11:2027241-2027387
  hypo

SEQ ID NO: 439971 - DNA, 220 bp, Homo sapiens; identical to SEQ ID NO: 263045
  chr11:2029642-2029862
  hypo

SEQ ID NO: 439972 - DNA, 96 bp, Homo sapiens; identical to SEQ ID NO: 313810
  chr11:2037138-2037234
  hypo

SEQ ID NO: 439973 - DNA, 191 bp, Homo sapiens; identical to SEQ ID NO: 263047
  chr11:2051191-2051382
  hypo

SEQ ID NO: 439974 - DNA, 54 bp, Homo sapiens; identical to SEQ ID NO: 263048
  chr11:2054681-2054735
  hypo

SEQ ID NO: 439975 - DNA, 305 bp, Homo sapiens; identical to SEQ ID NO: 263049
  chr11:2055187-2055492
  hypo

SEQ ID NO: 439976 - DNA, 159 bp, Homo sapiens; identical to SEQ ID NO: 263050
  chr11:2096090-2096249
  hypo

SEQ ID NO: 439977 - DNA, 152 bp, Homo sapiens; identical to SEQ ID NO: 263051
  chr11:2107097-2107249
  hypo

SEQ ID NO: 439978 - DNA, 32 bp, Homo sapiens; identical to SEQ ID NO: 313818
  chr11:2109250-2109282
  hypo

SEQ ID NO: 439979 - DNA, 84 bp, Homo sapiens; identical to SEQ ID NO: 313819
  chr11:2109312-2109396
  hypo

SEQ ID NO: 439980 - DNA, 188 bp, Homo sapiens; identical to SEQ ID NO: 263054
  chr11:2113263-2113451
  hypo

SEQ ID NO: 439981 - DNA, 54 bp, Homo sapiens; identical to SEQ ID NO: 263056
  chr11:2119433-2119487
  hypo

SEQ ID NO: 439982 - DNA, 36 bp, Homo sapiens; identical to SEQ ID NO: 263057
  chr11:2119758-2119794
  hypo

SEQ ID NO: 439983 - DNA, 42 bp, Homo sapiens; identical to SEQ ID NO: 263060
  chr11:2125676-2125718
  hypo

SEQ ID NO: 439984 - DNA, 282 bp, Homo sapiens; identical to SEQ ID NO: 263061
  chr11:2125778-2126060
  hypo

SEQ ID NO: 439985 - DNA, 171 bp, Homo sapiens; identical to SEQ ID NO: 263062
  chr11:2136032-2136203
  hypo

SEQ ID NO: 439986 - DNA, 57 bp, Homo sapiens; identical to SEQ ID NO: 263063
  chr11:2136427-2136484
  hypo

SEQ ID NO: 439987 - DNA, 178 bp, Homo sapiens; identical to SEQ ID NO: 313830
  chr11:2152091-2152269
  hypo

SEQ ID NO: 439988 - DNA, 323 bp, Homo sapiens; identical to SEQ ID NO: 263065
  chr11:2175988-2176311
  hypo

SEQ ID NO: 439989 - DNA, 190 bp, Homo sapiens; identical to SEQ ID NO: 263066
  chr11:2176341-2176531
  hypo

SEQ ID NO: 439990 - DNA, 200 bp, Homo sapiens; identical to SEQ ID NO: 263067
  chr11:2183694-2183894
  hypo

SEQ ID NO: 439991 - DNA, 204 bp, Homo sapiens; identical to SEQ ID NO: 263069
  chr11:2210733-2210937
  hypo

SEQ ID NO: 439992 - DNA, 411 bp, Homo sapiens; identical to SEQ ID NO: 263070
  chr11:2221258-2221669
  hypo

SEQ ID NO: 439993 - DNA, 38 bp, Homo sapiens; identical to SEQ ID NO: 313838
  chr11:2226010-2226048
  hypo

SEQ ID NO: 439994 - DNA, 57 bp, Homo sapiens; identical to SEQ ID NO: 313839
  chr11:2226078-2226135
  hypo

SEQ ID NO: 439995 - DNA, 70 bp, Homo sapiens; identical to SEQ ID NO: 263073
  chr11:2229025-2229095
  hypo

SEQ ID NO: 439996 - DNA, 182 bp, Homo sapiens; identical to SEQ ID NO: 263074
  chr11:2229125-2229307
  hypo

SEQ ID NO: 439997 - DNA, 202 bp, Homo sapiens; identical to SEQ ID NO: 263075
  chr11:2235851-2236053
  hypo

SEQ ID NO: 439998 - DNA, 180 bp, Homo sapiens; identical to SEQ ID NO: 263077
  chr11:2237500-2237680
  hypo

SEQ ID NO: 439999 - DNA, 46 bp, Homo sapiens; identical to SEQ ID NO: 263078
  chr11:2269906-2269952
  hypo

SEQ ID NO: 440000 - DNA, 92 bp, Homo sapiens; identical to SEQ ID NO: 263079
  chr11:2277665-2277757
  hypo

SEQ ID NO: 440001 - DNA, 228 bp, Homo sapiens; identical to SEQ ID NO: 313848
  chr11:2288976-2289204
  hypo

SEQ ID NO: 440002 - DNA, 41 bp, Homo sapiens; identical to SEQ ID NO: 263082
  chr11:2294016-2294057
  hypo

SEQ ID NO: 440003 - DNA, 106 bp, Homo sapiens; identical to SEQ ID NO: 214011
  chr11:2294685-2294791
  hypo

SEQ ID NO: 440004 - DNA, 89 bp, Homo sapiens; identical to SEQ ID NO: 214012
  chr11:2328966-2329055
  hypo

SEQ ID NO: 440005 - DNA, 39 bp, Homo sapiens; identical to SEQ ID NO: 263085
  chr11:2330508-2330547
  hypo

SEQ ID NO: 440006 - DNA, 71 bp, Homo sapiens; identical to SEQ ID NO: 263086
  chr11:2330577-2330648
  hypo

SEQ ID NO: 440007 - DNA, 142 bp, Homo sapiens; identical to SEQ ID NO: 263089
  chr11:2348407-2348549
  hypo

SEQ ID NO: 440008 - DNA, 34 bp, Homo sapiens
  chr11:2362740-2362774
  hypo
gaattgtgccaagctctttctctgctatttcctg

SEQ ID NO: 440009 - DNA, 33 bp, Homo sapiens; identical to SEQ ID NO: 263091
  chr11:2375968-2376001
  hypo

SEQ ID NO: 440010 - DNA, 174 bp, Homo sapiens; identical to SEQ ID NO: 263093
  chr11:2413789-2413963
  hypo

SEQ ID NO: 440011 - DNA, 157 bp, Homo sapiens; identical to SEQ ID NO: 214014
  chr11:2414473-2414630
  hypo

SEQ ID NO: 440012 - DNA, 218 bp, Homo sapiens; identical to SEQ ID NO: 263095
  chr11:2423368-2423586
  hypo

SEQ ID NO: 440013 - DNA, 197 bp, Homo sapiens; identical to SEQ ID NO: 263096
  chr11:2423833-2424030
  hypo

SEQ ID NO: 440014 - DNA, 160 bp, Homo sapiens; identical to SEQ ID NO: 263097
  chr11:2428378-2428538
  hypo

SEQ ID NO: 440015 - DNA, 258 bp, Homo sapiens; identical to SEQ ID NO: 263099
  chr11:2441484-2441742
  hypo

SEQ ID NO: 440016 - DNA, 33 bp, Homo sapiens; identical to SEQ ID NO: 263100
  chr11:2441826-2441859
  hypo

SEQ ID NO: 440017 - DNA, 95 bp, Homo sapiens; identical to SEQ ID NO: 263101
  chr11:2446552-2446647
  hypo

SEQ ID NO: 440018 - DNA, 57 bp, Homo sapiens; identical to SEQ ID NO: 263102
  chr11:2448567-2448624
  hypo

SEQ ID NO: 440019 - DNA, 299 bp, Homo sapiens; identical to SEQ ID NO: 263103
  chr11:2485035-2485334
  hypo

SEQ ID NO: 440020 - DNA, 50 bp, Homo sapiens; identical to SEQ ID NO: 313875
  chr11:2543213-2543263
  hypo

SEQ ID NO: 440021 - DNA, 109 bp, Homo sapiens; identical to SEQ ID NO: 202408
  chr11:2554316-2554425
  hypo

SEQ ID NO: 440022 - DNA, 64 bp, Homo sapiens; identical to SEQ ID NO: 202409
  chr11:2554454-2554518
  hypo

SEQ ID NO: 440023 - DNA, 182 bp, Homo sapiens; identical to SEQ ID NO: 263105
  chr11:2560627-2560809
  hypo

SEQ ID NO: 440024 - DNA, 38 bp, Homo sapiens; identical to SEQ ID NO: 214020
  chr11:2562214-2562252
  hypo

SEQ ID NO: 440025 - DNA, 41 bp, Homo sapiens; identical to SEQ ID NO: 263108
  chr11:2579781-2579822
  hypo

SEQ ID NO: 440026 - DNA, 43 bp, Homo sapiens; identical to SEQ ID NO: 263109
  chr11:2581754-2581797
  hypo

SEQ ID NO: 440027 - DNA, 130 bp, Homo sapiens; identical to SEQ ID NO: 214021
  chr11:2594826-2594956
  hypo

SEQ ID NO: 440028 - DNA, 63 bp, Homo sapiens; identical to SEQ ID NO: 263111
  chr11:2595670-2595733
  hypo

SEQ ID NO: 440029 - DNA, 149 bp, Homo sapiens; identical to SEQ ID NO: 214022
  chr11:2596284-2596433
  hypo

SEQ ID NO: 440030 - DNA, 31 bp, Homo sapiens; identical to SEQ ID NO: 214023
  chr11:2597548-2597579
  hypo

SEQ ID NO: 440031 - DNA, 66 bp, Homo sapiens; identical to SEQ ID NO: 263114
  chr11:2610097-2610163
  hypo

SEQ ID NO: 440032 - DNA, 143 bp, Homo sapiens; identical to SEQ ID NO: 263115
  chr11:2720203-2720346
  hypo

SEQ ID NO: 440033 - DNA, 263 bp, Homo sapiens; identical to SEQ ID NO: 263116
  chr11:2750149-2750412
  hypo

SEQ ID NO: 440034 - DNA, 493 bp, Homo sapiens; identical to SEQ ID NO: 263118
  chr11:2757685-2758178
  hypo

SEQ ID NO: 440035 - DNA, 80 bp, Homo sapiens; identical to SEQ ID NO: 313891
  chr11:2758867-2758947
  hypo

SEQ ID NO: 440036 - DNA, 385 bp, Homo sapiens; identical to SEQ ID NO: 214024
  chr11:2772656-2773041
  hypo

SEQ ID NO: 440037 - DNA, 330 bp, Homo sapiens; identical to SEQ ID NO: 263121
  chr11:2781507-2781837
  hypo

SEQ ID NO: 440038 - DNA, 175 bp, Homo sapiens; identical to SEQ ID NO: 214026
  chr11:2818020-2818195
  hypo

SEQ ID NO: 440039 - DNA, 155 bp, Homo sapiens; identical to SEQ ID NO: 263125
  chr11:2826847-2827002
  hypo

SEQ ID NO: 440040 - DNA, 131 bp, Homo sapiens; identical to SEQ ID NO: 263126
  chr11:2864467-2864598
  hypo

SEQ ID NO: 440041 - DNA, 218 bp, Homo sapiens; identical to SEQ ID NO: 263127
  chr11:2865183-2865401
  hypo

SEQ ID NO: 440042 - DNA, 295 bp, Homo sapiens; identical to SEQ ID NO: 214027
  chr11:2868805-2869100
  hypo

SEQ ID NO: 440043 - DNA, 215 bp, Homo sapiens; identical to SEQ ID NO: 263129
  chr11:2874227-2874442
  hypo

SEQ ID NO: 440044 - DNA, 160 bp, Homo sapiens; identical to SEQ ID NO: 263130
  chr11:2874823-2874983
  hypo

SEQ ID NO: 440045 - DNA, 54 bp, Homo sapiens; identical to SEQ ID NO: 263131
  chr11:2885741-2885795
  hypo

SEQ ID NO: 440046 - DNA, 349 bp, Homo sapiens; identical to SEQ ID NO: 287765
  chr11:2905510-2905859
  hypo

SEQ ID NO: 440047 - DNA, 269 bp, Homo sapiens; identical to SEQ ID NO: 202412
  chr11:2906036-2906305
  hypo

SEQ ID NO: 440048 - DNA, 201 bp, Homo sapiens; identical to SEQ ID NO: 202413
  chr11:2906580-2906781
  hypo

SEQ ID NO: 440049 - DNA, 170 bp, Homo sapiens; identical to SEQ ID NO: 202414
  chr11:2906971-2907141
  hypo

SEQ ID NO: 440050 - DNA, 102 bp, Homo sapiens; identical to SEQ ID NO: 263132
  chr11:2910403-2910505
  hypo

SEQ ID NO: 440051 - DNA, 201 bp, Homo sapiens; identical to SEQ ID NO: 263133
  chr11:2934242-2934443
  hypo

SEQ ID NO: 440052 - DNA, 97 bp, Homo sapiens; identical to SEQ ID NO: 263134
  chr11:2934473-2934570
  hypo

SEQ ID NO: 440053 - DNA, 197 bp, Homo sapiens; identical to SEQ ID NO: 214033
  chr11:2939101-2939298
  hypo

SEQ ID NO: 440054 - DNA, 304 bp, Homo sapiens; identical to SEQ ID NO: 214034
  chr11:2942534-2942838
  hypo

SEQ ID NO: 440055 - DNA, 433 bp, Homo sapiens; identical to SEQ ID NO: 224029
  chr11:2951691-2952124
  hypo

SEQ ID NO: 440056 - DNA, 41 bp, Homo sapiens; identical to SEQ ID NO: 263137
  chr11:2963522-2963563
  hypo

SEQ ID NO: 440057 - DNA, 385 bp, Homo sapiens; identical to SEQ ID NO: 263138
  chr11:2965737-2966122
  hypo

SEQ ID NO: 440058 - DNA, 273 bp, Homo sapiens; identical to SEQ ID NO: 263140
  chr11:3021376-3021649
  hypo

SEQ ID NO: 440059 - DNA, 107 bp, Homo sapiens; identical to SEQ ID NO: 263141
  chr11:3031444-3031551
  hypo

SEQ ID NO: 440060 - DNA, 33 bp, Homo sapiens; identical to SEQ ID NO: 263143
  chr11:3046728-3046761
  hypo

SEQ ID NO: 440061 - DNA, 166 bp, Homo sapiens; identical to SEQ ID NO: 263144
  chr11:3050212-3050378
  hypo

SEQ ID NO: 440062 - DNA, 52 bp, Homo sapiens; identical to SEQ ID NO: 214037
  chr11:3060355-3060407
  hypo

SEQ ID NO: 440063 - DNA, 53 bp, Homo sapiens; identical to SEQ ID NO: 214038
  chr11:3109135-3109188
  hypo

SEQ ID NO: 440064 - DNA, 59 bp, Homo sapiens; identical to SEQ ID NO: 263148
  chr11:3122919-3122978
  hypo

SEQ ID NO: 440065 - DNA, 43 bp, Homo sapiens; identical to SEQ ID NO: 263149
  chr11:3127001-3127044
  hypo

SEQ ID NO: 440066 - DNA, 425 bp, Homo sapiens; identical to SEQ ID NO: 214041
  chr11:3141593-3142018
  hypo

SEQ ID NO: 440067 - DNA, 311 bp, Homo sapiens; identical to SEQ ID NO: 263152
  chr11:3143176-3143487
  hypo

SEQ ID NO: 440068 - DNA, 275 bp, Homo sapiens; identical to SEQ ID NO: 263154
  chr11:3162893-3163168
  hypo

SEQ ID NO: 440069 - DNA, 393 bp, Homo sapiens; identical to SEQ ID NO: 263157
  chr11:3167019-3167412
  hypo

SEQ ID NO: 440070 - DNA, 63 bp, Homo sapiens; identical to SEQ ID NO: 263158
  chr11:3168979-3169042
  hypo

SEQ ID NO: 440071 - DNA, 123 bp, Homo sapiens; identical to SEQ ID NO: 263160
  chr11:3172032-3172155
  hypo

SEQ ID NO: 440072 - DNA, 54 bp, Homo sapiens; identical to SEQ ID NO: 263161
  chr11:3179502-3179556
  hypo

SEQ ID NO: 440073 - DNA, 169 bp, Homo sapiens; identical to SEQ ID NO: 214045
  chr11:3187736-3187905
  hypo

SEQ ID NO: 440074 - DNA, 78 bp, Homo sapiens; identical to SEQ ID NO: 214046
  chr11:3187953-3188031
  hypo

SEQ ID NO: 440075 - DNA, 216 bp, Homo sapiens; identical to SEQ ID NO: 263163
  chr11:3212407-3212623
  hypo

SEQ ID NO: 440076 - DNA, 35 bp, Homo sapiens; identical to SEQ ID NO: 263164
  chr11:3212863-3212898
  hypo

SEQ ID NO: 440077 - DNA, 272 bp, Homo sapiens; identical to SEQ ID NO: 263166
  chr11:3246365-3246637
  hypo

SEQ ID NO: 440078 - DNA, 34 bp, Homo sapiens; identical to SEQ ID NO: 263167
  chr11:3247717-3247751
  hypo

SEQ ID NO: 440079 - DNA, 154 bp, Homo sapiens; identical to SEQ ID NO: 214048
  chr11:3254282-3254436
  hypo

SEQ ID NO: 440080 - DNA, 242 bp, Homo sapiens; identical to SEQ ID NO: 202418
  chr11:3444553-3444795
  hypo

SEQ ID NO: 440081 - DNA, 86 bp, Homo sapiens; identical to SEQ ID NO: 263170
  chr11:3511141-3511227
  hypo

SEQ ID NO: 440082 - DNA, 125 bp, Homo sapiens; identical to SEQ ID NO: 263171
  chr11:3681140-3681265
  hypo

SEQ ID NO: 440083 - DNA, 225 bp, Homo sapiens; identical to SEQ ID NO: 263172
  chr11:3688512-3688737
  hypo

SEQ ID NO: 440084 - DNA, 50 bp, Homo sapiens; identical to SEQ ID NO: 214050
  chr11:3688971-3689021
  hypo

SEQ ID NO: 440085 - DNA, 149 bp, Homo sapiens; identical to SEQ ID NO: 263175
  chr11:3705440-3705589
  hypo

SEQ ID NO: 440086 - DNA, 37 bp, Homo sapiens; identical to SEQ ID NO: 263180
  chr11:4494114-4494151
  hypo

SEQ ID NO: 440087 - DNA, 152 bp, Homo sapiens; identical to SEQ ID NO: 214052
  chr11:4599983-4600135
  hypo

SEQ ID NO: 440088 - DNA, 120 bp, Homo sapiens; identical to SEQ ID NO: 214053
  chr11:5177827-5177947
  hypo

SEQ ID NO: 440089 - DNA, 158 bp, Homo sapiens; identical to SEQ ID NO: 263183
  chr11:5687849-5688007
  hypo

SEQ ID NO: 440090 - DNA, 46 bp, Homo sapiens; identical to SEQ ID NO: 313959
  chr11:5951401-5951447
  hypo

SEQ ID NO: 440091 - DNA, 34 bp, Homo sapiens; identical to SEQ ID NO: 263186
  chr11:6432992-6433026
  hypo

SEQ ID NO: 440092 - DNA, 236 bp, Homo sapiens; identical to SEQ ID NO: 263187
  chr11:6477624-6477860
  hypo

SEQ ID NO: 440093 - DNA, 80 bp, Homo sapiens; identical to SEQ ID NO: 263188
  chr11:6478112-6478192
  hypo

SEQ ID NO: 440094 - DNA, 218 bp, Homo sapiens; identical to SEQ ID NO: 287790
  chr11:6502787-6503005
  hypo

SEQ ID NO: 440095 - DNA, 120 bp, Homo sapiens; identical to SEQ ID NO: 263190
  chr11:6521106-6521226
  hypo

SEQ ID NO: 440096 - DNA, 113 bp, Homo sapiens; identical to SEQ ID NO: 263191
  chr11:6585065-6585178
  hypo

SEQ ID NO: 440097 - DNA, 89 bp, Homo sapiens; identical to SEQ ID NO: 263192
  chr11:6730930-6731019
  hypo

SEQ ID NO: 440098 - DNA, 40 bp, Homo sapiens; identical to SEQ ID NO: 202425
  chr11:8103155-8103195
  hypo

SEQ ID NO: 440099 - DNA, 94 bp, Homo sapiens; identical to SEQ ID NO: 214056
  chr11:8254114-8254208
  hypo

SEQ ID NO: 440100 - DNA, 202 bp, Homo sapiens; identical to SEQ ID NO: 263195
  chr11:8269570-8269772
  hypo

SEQ ID NO: 440101 - DNA, 533 bp, Homo sapiens; identical to SEQ ID NO: 263196
  chr11:8336904-8337437
  hypo

SEQ ID NO: 440102 - DNA, 214 bp, Homo sapiens; identical to SEQ ID NO: 263197
  chr11:8358361-8358575
  hypo

SEQ ID NO: 440103 - DNA, 166 bp, Homo sapiens; identical to SEQ ID NO: 214058
  chr11:8656271-8656437
  hypo

SEQ ID NO: 440104 - DNA, 169 bp, Homo sapiens; identical to SEQ ID NO: 263199
  chr11:8725356-8725525
  hypo

SEQ ID NO: 440105 - DNA, 31 bp, Homo sapiens; identical to SEQ ID NO: 263200
  chr11:8735205-8735236
  hypo

SEQ ID NO: 440106 - DNA, 41 bp, Homo sapiens; identical to SEQ ID NO: 263201
  chr11:8751526-8751567
  hypo

SEQ ID NO: 440107 - DNA, 366 bp, Homo sapiens; identical to SEQ ID NO: 263202
  chr11:8752347-8752713
  hypo

SEQ ID NO: 440108 - DNA, 179 bp, Homo sapiens; identical to SEQ ID NO: 214060
  chr11:8759790-8759969
  hypo

SEQ ID NO: 440109 - DNA, 35 bp, Homo sapiens; identical to SEQ ID NO: 263204
  chr11:8791120-8791155
  hypo

SEQ ID NO: 440110 - DNA, 125 bp, Homo sapiens; identical to SEQ ID NO: 263205
  chr11:8829417-8829542
  hypo

SEQ ID NO: 440111 - DNA, 190 bp, Homo sapiens; identical to SEQ ID NO: 263206
  chr11:9074512-9074702
  hypo

SEQ ID NO: 440112 - DNA, 77 bp, Homo sapiens; identical to SEQ ID NO: 214061
  chr11:9328213-9328290
  hypo

SEQ ID NO: 440113 - DNA, 42 bp, Homo sapiens; identical to SEQ ID NO: 263208
  chr11:9343803-9343845
  hypo

SEQ ID NO: 440114 - DNA, 36 bp, Homo sapiens; identical to SEQ ID NO: 214063
  chr11:9418901-9418937
  hypo

SEQ ID NO: 440115 - DNA, 36 bp, Homo sapiens; identical to SEQ ID NO: 214064
  chr11:9422432-9422468
  hypo

SEQ ID NO: 440116 - DNA, 41 bp, Homo sapiens; identical to SEQ ID NO: 214065
  chr11:9531940-9531981
  hypo

SEQ ID NO: 440117 - DNA, 41 bp, Homo sapiens; identical to SEQ ID NO: 263213
  chr11:9540962-9541003
  hypo

SEQ ID NO: 440118 - DNA, 105 bp, Homo sapiens; identical to SEQ ID NO: 214068
  chr11:9567905-9568010
  hypo

SEQ ID NO: 440119 - DNA, 36 bp, Homo sapiens; identical to SEQ ID NO: 263218
  chr11:9593563-9593599
  hypo

SEQ ID NO: 440120 - DNA, 721 bp, Homo sapiens; identical to SEQ ID NO: 287816
  chr11:9596147-9596868
  hypo

SEQ ID NO: 440121 - DNA, 69 bp, Homo sapiens; identical to SEQ ID NO: 263219
  chr11:9596898-9596967
  hypo

SEQ ID NO: 440122 - DNA, 49 bp, Homo sapiens; identical to SEQ ID NO: 263220
  chr11:9620658-9620707
  hypo

SEQ ID NO: 440123 - DNA, 823 bp, Homo sapiens; identical to SEQ ID NO: 120296
  chr11:9685218-9686041
  hypo

SEQ ID NO: 440124 - DNA, 35 bp, Homo sapiens; identical to SEQ ID NO: 214071
  chr11:9771063-9771098
  hypo

SEQ ID NO: 440125 - DNA, 84 bp, Homo sapiens; identical to SEQ ID NO: 263222
  chr11:10004724-10004808
  hypo

SEQ ID NO: 440126 - DNA, 112 bp, Homo sapiens; identical to SEQ ID NO: 263224
  chr11:10512606-10512718
  hypo

SEQ ID NO: 440127 - DNA, 267 bp, Homo sapiens; identical to SEQ ID NO: 263226
  chr11:10522099-10522366
  hypo

SEQ ID NO: 440128 - DNA, 193 bp, Homo sapiens; identical to SEQ ID NO: 214073
  chr11:10712069-10712262
  hypo

SEQ ID NO: 440129 - DNA, 34 bp, Homo sapiens; identical to SEQ ID NO: 214074
  chr11:10811103-10811137
  hypo

SEQ ID NO: 440130 - DNA, 44 bp, Homo sapiens; identical to SEQ ID NO: 214075
  chr11:10865158-10865202
  hypo

SEQ ID NO: 440131 - DNA, 139 bp, Homo sapiens; identical to SEQ ID NO: 263230
  chr11:11177834-11177973
  hypo

SEQ ID NO: 440132 - DNA, 42 bp, Homo sapiens; identical to SEQ ID NO: 263231
  chr11:11178003-11178045
  hypo

SEQ ID NO: 440133 - DNA, 206 bp, Homo sapiens; identical to SEQ ID NO: 214076
  chr11:11534254-11534460
  hypo

SEQ ID NO: 440134 - DNA, 207 bp, Homo sapiens; identical to SEQ ID NO: 263233
  chr11:11601780-11601987
  hypo

SEQ ID NO: 440135 - DNA, 74 bp, Homo sapiens; identical to SEQ ID NO: 408321
  chr11:11833403-11833477
  hypo

SEQ ID NO: 440136 - DNA, 75 bp, Homo sapiens; identical to SEQ ID NO: 263235
  chr11:11862893-11862968
  hypo

SEQ ID NO: 440137 - DNA, 245 bp, Homo sapiens; identical to SEQ ID NO: 263237
  chr11:11991422-11991667
  hypo

SEQ ID NO: 440138 - DNA, 43 bp, Homo sapiens; identical to SEQ ID NO: 263239
  chr11:12106316-12106359
  hypo

SEQ ID NO: 440139 - DNA, 262 bp, Homo sapiens; identical to SEQ ID NO: 263240
  chr11:12115688-12115950
  hypo

SEQ ID NO: 440140 - DNA, 102 bp, Homo sapiens; identical to SEQ ID NO: 263241
  chr11:12145846-12145948
  hypo

SEQ ID NO: 440141 - DNA, 86 bp, Homo sapiens; identical to SEQ ID NO: 263242
  chr11:12158740-12158826
  hypo

SEQ ID NO: 440142 - DNA, 50 bp, Homo sapiens; identical to SEQ ID NO: 263243
  chr11:12172361-12172411
  hypo

SEQ ID NO: 440143 - DNA, 69 bp, Homo sapiens; identical to SEQ ID NO: 263244
  chr11:12172441-12172510
  hypo

SEQ ID NO: 440144 - DNA, 133 bp, Homo sapiens; identical to SEQ ID NO: 263247
  chr11:12205861-12205994
  hypo

SEQ ID NO: 440145 - DNA, 427 bp, Homo sapiens; identical to SEQ ID NO: 214082
  chr11:12209618-12210045
  hypo

SEQ ID NO: 440146 - DNA, 41 bp, Homo sapiens; identical to SEQ ID NO: 214083
  chr11:12214008-12214049
  hypo

SEQ ID NO: 440147 - DNA, 59 bp, Homo sapiens; identical to SEQ ID NO: 408330
  chr11:12248494-12248553
  hypo

SEQ ID NO: 440148 - DNA, 131 bp, Homo sapiens; identical to SEQ ID NO: 263255
  chr11:12250137-12250268
  hypo

SEQ ID NO: 440149 - DNA, 54 bp, Homo sapiens; identical to SEQ ID NO: 214089
  chr11:12253012-12253066
  hypo

SEQ ID NO: 440150 - DNA, 118 bp, Homo sapiens; identical to SEQ ID NO: 214090
  chr11:12260726-12260844
  hypo

SEQ ID NO: 440151 - DNA, 218 bp, Homo sapiens; identical to SEQ ID NO: 263260
  chr11:12276133-12276351
  hypo

SEQ ID NO: 440152 - DNA, 317 bp, Homo sapiens; identical to SEQ ID NO: 214091
  chr11:12276763-12277080
  hypo

SEQ ID NO: 440153 - DNA, 198 bp, Homo sapiens; identical to SEQ ID NO: 263267
  chr11:12296625-12296823
  hypo

SEQ ID NO: 440154 - DNA, 362 bp, Homo sapiens; identical to SEQ ID NO: 263268
  chr11:12298408-12298770
  hypo

SEQ ID NO: 440155 - DNA, 191 bp, Homo sapiens; identical to SEQ ID NO: 214097
  chr11:12315587-12315778
  hypo

SEQ ID NO: 440156 - DNA, 33 bp, Homo sapiens; identical to SEQ ID NO: 214098
  chr11:12554120-12554153
  hypo

SEQ ID NO: 440157 - DNA, 139 bp, Homo sapiens; identical to SEQ ID NO: 263271
  chr11:12769804-12769943
  hypo

SEQ ID NO: 440158 - DNA, 215 bp, Homo sapiens; identical to SEQ ID NO: 214099
  chr11:12823851-12824066
  hypo

SEQ ID NO: 440159 - DNA, 33 bp, Homo sapiens; identical to SEQ ID NO: 263273
  chr11:12841278-12841311
  hypo

SEQ ID NO: 440160 - DNA, 129 bp, Homo sapiens; identical to SEQ ID NO: 214100
  chr11:12944977-12945106
  hypo

SEQ ID NO: 440161 - DNA, 104 bp, Homo sapiens; identical to SEQ ID NO: 263275
  chr11:12990320-12990424
  hypo

SEQ ID NO: 440162 - DNA, 86 bp, Homo sapiens; identical to SEQ ID NO: 263276
  chr11:13114153-13114239
  hypo

SEQ ID NO: 440163 - DNA, 70 bp, Homo sapiens; identical to SEQ ID NO: 214101
  chr11:13185770-13185840
  hypo

SEQ ID NO: 440164 - DNA, 304 bp, Homo sapiens; identical to SEQ ID NO: 287846
  chr11:13298519-13298823
  hypo

SEQ ID NO: 440165 - DNA, 519 bp, Homo sapiens; identical to SEQ ID NO: 263279
  chr11:13375541-13376060
  hypo

SEQ ID NO: 440166 - DNA, 33 bp, Homo sapiens; identical to SEQ ID NO: 214105
  chr11:13700080-13700113
  hypo

SEQ ID NO: 440167 - DNA, 147 bp, Homo sapiens; identical to SEQ ID NO: 214106
  chr11:14498537-14498684
  hypo

SEQ ID NO: 440168 - DNA, 92 bp, Homo sapiens; identical to SEQ ID NO: 314071
  chr11:14520358-14520450
  hypo

SEQ ID NO: 440169 - DNA, 120 bp, Homo sapiens; identical to SEQ ID NO: 214107
  chr11:14542801-14542921
  hypo

SEQ ID NO: 440170 - DNA, 45 bp, Homo sapiens; identical to SEQ ID NO: 263285
  chr11:14674976-14675021
  hypo

SEQ ID NO: 440171 - DNA, 251 bp, Homo sapiens; identical to SEQ ID NO: 202457
  chr11:15671676-15671927
  hypo

SEQ ID NO: 440172 - DNA, 63 bp, Homo sapiens; identical to SEQ ID NO: 214109
  chr11:15959967-15960030
  hypo

SEQ ID NO: 440173 - DNA, 42 bp, Homo sapiens; identical to SEQ ID NO: 263287
  chr11:16050846-16050888
  hypo

SEQ ID NO: 440174 - DNA, 42 bp, Homo sapiens; identical to SEQ ID NO: 263288
  chr11:16051188-16051230
  hypo

SEQ ID NO: 440175 - DNA, 37 bp, Homo sapiens; identical to SEQ ID NO: 263289
  chr11:16790662-16790699
  hypo

SEQ ID NO: 440176 - DNA, 142 bp, Homo sapiens; identical to SEQ ID NO: 263290
  chr11:16847524-16847666
  hypo

SEQ ID NO: 440177 - DNA, 123 bp, Homo sapiens; identical to SEQ ID NO: 263291
  chr11:16863137-16863260
  hypo

SEQ ID NO: 440178 - DNA, 32 bp, Homo sapiens; identical to SEQ ID NO: 314082
  chr11:17037344-17037376
  hypo

SEQ ID NO: 440179 - DNA, 110 bp, Homo sapiens; identical to SEQ ID NO: 214111
  chr11:17100561-17100671
  hypo

SEQ ID NO: 440180 - DNA, 79 bp, Homo sapiens; identical to SEQ ID NO: 263294
  chr11:17101060-17101139
  hypo

SEQ ID NO: 440181 - DNA, 121 bp, Homo sapiens; identical to SEQ ID NO: 263295
  chr11:17430256-17430377
  hypo

SEQ ID NO: 440182 - DNA, 481 bp, Homo sapiens; identical to SEQ ID NO: 287883
  chr11:17498265-17498746
  hypo

SEQ ID NO: 440183 - DNA, 35 bp, Homo sapiens; identical to SEQ ID NO: 263296
  chr11:17566571-17566606
  hypo

SEQ ID NO: 440184 - DNA, 58 bp, Homo sapiens; identical to SEQ ID NO: 314088
  chr11:17653729-17653787
  hypo

SEQ ID NO: 440185 - DNA, 81 bp, Homo sapiens; identical to SEQ ID NO: 287886
  chr11:17741598-17741679
  hypo

SEQ ID NO: 440186 - DNA, 158 bp, Homo sapiens; identical to SEQ ID NO: 263298
  chr11:17905736-17905894
  hypo

SEQ ID NO: 440187 - DNA, 35 bp, Homo sapiens; identical to SEQ ID NO: 314093
  chr11:18100061-18100096
  hypo

SEQ ID NO: 440188 - DNA, 32 bp, Homo sapiens; identical to SEQ ID NO: 263300
  chr11:18401403-18401435
  hypo

SEQ ID NO: 440189 - DNA, 55 bp, Homo sapiens; identical to SEQ ID NO: 202475
  chr11:18610408-18610463
  hypo

SEQ ID NO: 440190 - DNA, 173 bp, Homo sapiens; identical to SEQ ID NO: 202476
  chr11:18610571-18610744
  hypo

SEQ ID NO: 440191 - DNA, 64 bp, Homo sapiens; identical to SEQ ID NO: 314098
  chr11:18656775-18656839
  hypo

SEQ ID NO: 440192 - DNA, 34 bp, Homo sapiens; identical to SEQ ID NO: 314099
  chr11:18656882-18656916
  hypo

SEQ ID NO: 440193 - DNA, 98 bp, Homo sapiens; identical to SEQ ID NO: 263304
  chr11:18657233-18657331
  hypo

SEQ ID NO: 440194 - DNA, 229 bp, Homo sapiens; identical to SEQ ID NO: 263305
  chr11:18978176-18978405
  hypo

SEQ ID NO: 440195 - DNA, 36 bp, Homo sapiens; identical to SEQ ID NO: 263306
  chr11:19080253-19080289
  hypo

SEQ ID NO: 440196 - DNA, 32 bp, Homo sapiens; identical to SEQ ID NO: 263307
  chr11:19140970-19141002
  hypo

SEQ ID NO: 440197 - DNA, 117 bp, Homo sapiens; identical to SEQ ID NO: 263309
  chr11:19240816-19240933
  hypo

SEQ ID NO: 440198 - DNA, 109 bp, Homo sapiens; identical to SEQ ID NO: 263312
  chr11:19913974-19914083
  hypo

SEQ ID NO: 440199 - DNA, 97 bp, Homo sapiens; identical to SEQ ID NO: 263313
  chr11:27380960-27381057
  hypo

SEQ ID NO: 440200 - DNA, 36 bp, Homo sapiens; identical to SEQ ID NO: 263314
  chr11:27381177-27381213
  hypo

SEQ ID NO: 440201 - DNA, 97 bp, Homo sapiens; identical to SEQ ID NO: 214121
  chr11:27485359-27485456
  hypo

SEQ ID NO: 440202 - DNA, 34 bp, Homo sapiens; identical to SEQ ID NO: 263317
  chr11:27526853-27526887
  hypo

SEQ ID NO: 440203 - DNA, 104 bp, Homo sapiens; identical to SEQ ID NO: 263318
  chr11:27678524-27678628
  hypo

SEQ ID NO: 440204 - DNA, 336 bp, Homo sapiens; identical to SEQ ID NO: 202493
  chr11:30607762-30608098
  hypo

SEQ ID NO: 440205 - DNA, 44 bp, Homo sapiens; identical to SEQ ID NO: 314119
  chr11:31533857-31533901
  hypo

SEQ ID NO: 440206 - DNA, 83 bp, Homo sapiens; identical to SEQ ID NO: 263321
  chr11:31760147-31760230
  hypo

SEQ ID NO: 440207 - DNA, 44 bp, Homo sapiens; identical to SEQ ID NO: 263323
  chr11:32535832-32535876
  hypo

SEQ ID NO: 440208 - DNA, 96 bp, Homo sapiens; identical to SEQ ID NO: 263324
  chr11:32727120-32727216
  hypo

SEQ ID NO: 440209 - DNA, 40 bp, Homo sapiens; identical to SEQ ID NO: 263325
  chr11:32907343-32907383
  hypo

SEQ ID NO: 440210 - DNA, 54 bp, Homo sapiens; identical to SEQ ID NO: 263326
  chr11:32912159-32912213
  hypo

SEQ ID NO: 440211 - DNA, 86 bp, Homo sapiens; identical to SEQ ID NO: 263330
  chr11:33277374-33277460
  hypo

SEQ ID NO: 440212 - DNA, 162 bp, Homo sapiens; identical to SEQ ID NO: 287971
  chr11:33397373-33397535
  hypo

SEQ ID NO: 440213 - DNA, 46 bp, Homo sapiens; identical to SEQ ID NO: 421101
  chr11:33397642-33397688
  hypo

SEQ ID NO: 440214 - DNA, 127 bp, Homo sapiens; identical to SEQ ID NO: 263331
  chr11:33667398-33667525
  hypo

SEQ ID NO: 440215 - DNA, 279 bp, Homo sapiens; identical to SEQ ID NO: 398660
  chr11:33890957-33891236
  hypo

SEQ ID NO: 440216 - DNA, 65 bp, Homo sapiens; identical to SEQ ID NO: 263334
  chr11:34097799-34097864
  hypo

SEQ ID NO: 440217 - DNA, 61 bp, Homo sapiens; identical to SEQ ID NO: 263336
  chr11:34190350-34190411
  hypo

SEQ ID NO: 440218 - DNA, 111 bp, Homo sapiens; identical to SEQ ID NO: 263337
  chr11:34190793-34190904
  hypo

SEQ ID NO: 440219 - DNA, 38 bp, Homo sapiens; identical to SEQ ID NO: 214130
  chr11:34192314-34192352
  hypo

SEQ ID NO: 440220 - DNA, 34 bp, Homo sapiens; identical to SEQ ID NO: 263339
  chr11:34264829-34264863
  hypo

SEQ ID NO: 440221 - DNA, 393 bp, Homo sapiens; identical to SEQ ID NO: 263340
  chr11:34264983-34265376
  hypo

SEQ ID NO: 440222 - DNA, 75 bp, Homo sapiens; identical to SEQ ID NO: 263341
  chr11:34270689-34270764
  hypo

SEQ ID NO: 440223 - DNA, 101 bp, Homo sapiens; identical to SEQ ID NO: 263342
  chr11:34407511-34407612
  hypo

SEQ ID NO: 440224 - DNA, 200 bp, Homo sapiens; identical to SEQ ID NO: 214132
  chr11:34511230-34511430
  hypo

SEQ ID NO: 440225 - DNA, 92 bp, Homo sapiens; identical to SEQ ID NO: 263345
  chr11:34518320-34518412
  hypo

SEQ ID NO: 440226 - DNA, 44 bp, Homo sapiens; identical to SEQ ID NO: 263347
  chr11:34592834-34592878
  hypo

SEQ ID NO: 440227 - DNA, 169 bp, Homo sapiens; identical to SEQ ID NO: 263348
  chr11:34631595-34631764
  hypo

SEQ ID NO: 440228 - DNA, 42 bp, Homo sapiens; identical to SEQ ID NO: 263349
  chr11:34666542-34666584
  hypo

SEQ ID NO: 440229 - DNA, 103 bp, Homo sapiens; identical to SEQ ID NO: 263351
  chr11:35016467-35016570
  hypo

SEQ ID NO: 440230 - DNA, 77 bp, Homo sapiens; identical to SEQ ID NO: 263352
  chr11:35150808-35150885
  hypo

SEQ ID NO: 440231 - DNA, 37 bp, Homo sapiens; identical to SEQ ID NO: 214136
  chr11:35516160-35516197
  hypo

SEQ ID NO: 440232 - DNA, 66 bp, Homo sapiens; identical to SEQ ID NO: 202518
  chr11:35641617-35641683
  hypo

SEQ ID NO: 440233 - DNA, 74 bp, Homo sapiens; identical to SEQ ID NO: 214138
  chr11:35661156-35661230
  hypo

SEQ ID NO: 440234 - DNA, 38 bp, Homo sapiens; identical to SEQ ID NO: 214139
  chr11:36060520-36060558
  hypo

SEQ ID NO: 440235 - DNA, 37 bp, Homo sapiens; identical to SEQ ID NO: 214140
  chr11:36060798-36060835
  hypo

SEQ ID NO: 440236 - DNA, 316 bp, Homo sapiens; identical to SEQ ID NO: 263358
  chr11:36100376-36100692
  hypo

SEQ ID NO: 440237 - DNA, 49 bp, Homo sapiens; identical to SEQ ID NO: 214141
  chr11:36248992-36249041
  hypo

SEQ ID NO: 440238 - DNA, 207 bp, Homo sapiens; identical to SEQ ID NO: 263361
  chr11:36277915-36278122
  hypo

SEQ ID NO: 440239 - DNA, 42 bp, Homo sapiens; identical to SEQ ID NO: 263362
  chr11:36292455-36292497
  hypo

SEQ ID NO: 440240 - DNA, 183 bp, Homo sapiens; identical to SEQ ID NO: 263363
  chr11:36300631-36300814
  hypo

SEQ ID NO: 440241 - DNA, 42 bp, Homo sapiens; identical to SEQ ID NO: 263364
  chr11:36419756-36419798
  hypo

SEQ ID NO: 440242 - DNA, 37 bp, Homo sapiens; identical to SEQ ID NO: 263366
  chr11:36823633-36823670
  hypo

SEQ ID NO: 440243 - DNA, 46 bp, Homo sapiens; identical to SEQ ID NO: 263367
  chr11:37929404-37929450
  hypo

SEQ ID NO: 440244 - DNA, 43 bp, Homo sapiens; identical to SEQ ID NO: 263368
  chr11:37929480-37929523
  hypo

SEQ ID NO: 440245 - DNA, 45 bp, Homo sapiens; identical to SEQ ID NO: 263369
  chr11:38195082-38195127
  hypo

SEQ ID NO: 440246 - DNA, 39 bp, Homo sapiens; identical to SEQ ID NO: 263370
  chr11:38358533-38358572
  hypo

SEQ ID NO: 440247 - DNA, 82 bp, Homo sapiens; identical to SEQ ID NO: 263371
  chr11:38525522-38525604
  hypo

SEQ ID NO: 440248 - DNA, 159 bp, Homo sapiens; identical to SEQ ID NO: 263372
  chr11:39766926-39767085
  hypo

SEQ ID NO: 440249 - DNA, 82 bp, Homo sapiens; identical to SEQ ID NO: 214143
  chr11:40039796-40039878
  hypo

SEQ ID NO: 440250 - DNA, 140 bp, Homo sapiens; identical to SEQ ID NO: 263375
  chr11:44594534-44594674
  hypo

SEQ ID NO: 440251 - DNA, 200 bp, Homo sapiens; identical to SEQ ID NO: 214146
  chr11:44609415-44609615
  hypo

SEQ ID NO: 440252 - DNA, 41 bp, Homo sapiens; identical to SEQ ID NO: 214147
  chr11:44611373-44611414
  hypo

SEQ ID NO: 440253 - DNA, 41 bp, Homo sapiens; identical to SEQ ID NO: 214148
  chr11:44611654-44611695
  hypo

SEQ ID NO: 440254 - DNA, 175 bp, Homo sapiens; identical to SEQ ID NO: 263382
  chr11:44637485-44637660
  hypo

SEQ ID NO: 440255 - DNA, 206 bp, Homo sapiens; identical to SEQ ID NO: 263385
  chr11:44675159-44675365
  hypo

SEQ ID NO: 440256 - DNA, 86 bp, Homo sapiens; identical to SEQ ID NO: 214153
  chr11:44944309-44944395
  hypo

SEQ ID NO: 440257 - DNA, 33 bp, Homo sapiens; identical to SEQ ID NO: 263388
  chr11:44993090-44993123
  hypo

SEQ ID NO: 440258 - DNA, 371 bp, Homo sapiens; identical to SEQ ID NO: 263389
  chr11:45011418-45011789
  hypo

SEQ ID NO: 440259 - DNA, 47 bp, Homo sapiens; identical to SEQ ID NO: 214154
  chr11:45195184-45195231
  hypo

SEQ ID NO: 440260 - DNA, 102 bp, Homo sapiens; identical to SEQ ID NO: 263391
  chr11:45230781-45230883
  hypo

SEQ ID NO: 440261 - DNA, 90 bp, Homo sapiens; identical to SEQ ID NO: 263392
  chr11:45234259-45234349
  hypo

SEQ ID NO: 440262 - DNA, 61 bp, Homo sapiens; identical to SEQ ID NO: 263393
  chr11:45248080-45248141
  hypo

SEQ ID NO: 440263 - DNA, 191 bp, Homo sapiens; identical to SEQ ID NO: 263394
  chr11:45417059-45417250
  hypo

SEQ ID NO: 440264 - DNA, 96 bp, Homo sapiens; identical to SEQ ID NO: 202537
  chr11:45684299-45684395
  hypo

SEQ ID NO: 440265 - DNA, 42 bp, Homo sapiens; identical to SEQ ID NO: 263395
  chr11:45773610-45773652
  hypo

SEQ ID NO: 440266 - DNA, 186 bp, Homo sapiens; identical to SEQ ID NO: 202538
  chr11:45825485-45825671
  hypo

SEQ ID NO: 440267 - DNA, 80 bp, Homo sapiens; identical to SEQ ID NO: 263396
  chr11:45838883-45838963
  hypo

SEQ ID NO: 440268 - DNA, 195 bp, Homo sapiens; identical to SEQ ID NO: 214157
  chr11:45951099-45951294
  hypo

SEQ ID NO: 440269 - DNA, 499 bp, Homo sapiens; identical to SEQ ID NO: 214158
  chr11:45953589-45954088
  hypo

SEQ ID NO: 440270 - DNA, 189 bp, Homo sapiens; identical to SEQ ID NO: 263399
  chr11:45955789-45955978
  hypo

SEQ ID NO: 440271 - DNA, 157 bp, Homo sapiens; identical to SEQ ID NO: 214159
  chr11:45956742-45956899
  hypo

SEQ ID NO: 440272 - DNA, 62 bp, Homo sapiens; identical to SEQ ID NO: 202540
  chr11:46264958-46265020
  hypo

SEQ ID NO: 440273 - DNA, 56 bp, Homo sapiens; identical to SEQ ID NO: 263401
  chr11:46275737-46275793
  hypo

SEQ ID NO: 440274 - DNA, 34 bp, Homo sapiens; identical to SEQ ID NO: 392723
  chr11:46338449-46338483
  hypo

SEQ ID NO: 440275 - DNA, 41 bp, Homo sapiens; identical to SEQ ID NO: 263404
  chr11:46390759-46390800
  hypo

SEQ ID NO: 440276 - DNA, 206 bp, Homo sapiens; identical to SEQ ID NO: 288035
  chr11:46412034-46412240
  hypo

SEQ ID NO: 440277 - DNA, 308 bp, Homo sapiens; identical to SEQ ID NO: 120673
  chr11:46412276-46412584
  hypo

SEQ ID NO: 440278 - DNA, 470 bp, Homo sapiens; identical to SEQ ID NO: 288038
  chr11:46413304-46413774
  hypo

SEQ ID NO: 440279 - DNA, 32 bp, Homo sapiens; identical to SEQ ID NO: 263406
  chr11:46483754-46483786
  hypo

SEQ ID NO: 440280 - DNA, 42 bp, Homo sapiens; identical to SEQ ID NO: 263407
  chr11:46542429-46542471
  hypo

SEQ ID NO: 440281 - DNA, 333 bp, Homo sapiens; identical to SEQ ID NO: 224102
  chr11:46564032-46564365
  hypo

SEQ ID NO: 440282 - DNA, 180 bp, Homo sapiens; identical to SEQ ID NO: 214166
  chr11:46617388-46617568
  hypo

SEQ ID NO: 440283 - DNA, 32 bp, Homo sapiens; identical to SEQ ID NO: 214168
  chr11:46844005-46844037
  hypo

SEQ ID NO: 440284 - DNA, 182 bp, Homo sapiens; identical to SEQ ID NO: 224103
  chr11:46848281-46848463
  hypo

SEQ ID NO: 440285 - DNA, 132 bp, Homo sapiens; identical to SEQ ID NO: 263413
  chr11:46916229-46916361
  hypo

SEQ ID NO: 440286 - DNA, 34 bp, Homo sapiens; identical to SEQ ID NO: 224105
  chr11:46939597-46939631
  hypo

SEQ ID NO: 440287 - DNA, 34 bp, Homo sapiens; identical to SEQ ID NO: 214169
  chr11:46959101-46959135
  hypo

SEQ ID NO: 440288 - DNA, 31 bp, Homo sapiens; identical to SEQ ID NO: 263416
  chr11:47081353-47081384
  hypo

SEQ ID NO: 440289 - DNA, 186 bp, Homo sapiens; identical to SEQ ID NO: 214170
  chr11:47169578-47169764
  hypo

SEQ ID NO: 440290 - DNA, 611 bp, Homo sapiens; identical to SEQ ID NO: 263419
  chr11:47264239-47264850
  hypo

SEQ ID NO: 440291 - DNA, 251 bp, Homo sapiens; identical to SEQ ID NO: 263420
  chr11:47348746-47348997
  hypo

SEQ ID NO: 440292 - DNA, 80 bp, Homo sapiens; identical to SEQ ID NO: 263422
  chr11:47431265-47431345
  hypo

SEQ ID NO: 440293 - DNA, 180 bp, Homo sapiens; identical to SEQ ID NO: 263423
  chr11:47479675-47479855
  hypo

SEQ ID NO: 440294 - DNA, 78 bp, Homo sapiens; identical to SEQ ID NO: 214174
  chr11:47599039-47599117
  hypo

SEQ ID NO: 440295 - DNA, 108 bp, Homo sapiens; identical to SEQ ID NO: 314240
  chr11:47599315-47599423
  hypo

SEQ ID NO: 440296 - DNA, 50 bp, Homo sapiens; identical to SEQ ID NO: 224106
  chr11:48002696-48002746
  hypo

SEQ ID NO: 440297 - DNA, 44 bp, Homo sapiens; identical to SEQ ID NO: 263428
  chr11:48008070-48008114
  hypo

SEQ ID NO: 440298 - DNA, 74 bp, Homo sapiens; identical to SEQ ID NO: 263430
  chr11:48065754-48065828
  hypo

SEQ ID NO: 440299 - DNA, 89 bp, Homo sapiens; identical to SEQ ID NO: 263431
  chr11:48146569-48146658
  hypo

SEQ ID NO: 440300 - DNA, 31 bp, Homo sapiens; identical to SEQ ID NO: 263432
  chr11:48365007-48365038
  hypo

SEQ ID NO: 440301 - DNA, 50 bp, Homo sapiens; identical to SEQ ID NO: 263433
  chr11:49124076-49124126
  hypo

SEQ ID NO: 440302 - DNA, 43 bp, Homo sapiens; identical to SEQ ID NO: 314248
  chr11:49212565-49212608
  hypo

SEQ ID NO: 440303 - DNA, 98 bp, Homo sapiens; identical to SEQ ID NO: 263435
  chr11:50258375-50258473
  hypo

SEQ ID NO: 440304 - DNA, 58 bp, Homo sapiens; identical to SEQ ID NO: 263436
  chr11:55940876-55940934
  hypo

SEQ ID NO: 440305 - DNA, 158 bp, Homo sapiens; identical to SEQ ID NO: 263437
  chr11:57010762-57010920
  hypo

SEQ ID NO: 440306 - DNA, 72 bp, Homo sapiens; identical to SEQ ID NO: 263438
  chr11:57069626-57069698
  hypo

SEQ ID NO: 440307 - DNA, 147 bp, Homo sapiens; identical to SEQ ID NO: 263440
  chr11:57072387-57072534
  hypo

SEQ ID NO: 440308 - DNA, 38 bp, Homo sapiens; identical to SEQ ID NO: 263441
  chr11:57134905-57134943
  hypo

SEQ ID NO: 440309 - DNA, 42 bp, Homo sapiens; identical to SEQ ID NO: 214176
  chr11:57152967-57153009
  hypo

SEQ ID NO: 440310 - DNA, 281 bp, Homo sapiens; identical to SEQ ID NO: 263445
  chr11:57202848-57203129
  hypo

SEQ ID NO: 440311 - DNA, 165 bp, Homo sapiens; identical to SEQ ID NO: 263446
  chr11:57206942-57207107
  hypo

SEQ ID NO: 440312 - DNA, 174 bp, Homo sapiens; identical to SEQ ID NO: 263448
  chr11:57254651-57254825
  hypo

SEQ ID NO: 440313 - DNA, 84 bp, Homo sapiens; identical to SEQ ID NO: 314264
  chr11:57373338-57373422
  hypo

SEQ ID NO: 440314 - DNA, 51 bp, Homo sapiens; identical to SEQ ID NO: 202551
  chr11:57434928-57434979
  hypo

SEQ ID NO: 440315 - DNA, 39 bp, Homo sapiens; identical to SEQ ID NO: 263451
  chr11:57446669-57446708
  hypo

SEQ ID NO: 440316 - DNA, 120 bp, Homo sapiens; identical to SEQ ID NO: 263454
  chr11:58437898-58438018
  hypo

SEQ ID NO: 440317 - DNA, 61 bp, Homo sapiens; identical to SEQ ID NO: 263455
  chr11:58904855-58904916
  hypo

SEQ ID NO: 440318 - DNA, 42 bp, Homo sapiens; identical to SEQ ID NO: 214183
  chr11:58949204-58949246
  hypo

SEQ ID NO: 440319 - DNA, 42 bp, Homo sapiens; identical to SEQ ID NO: 263457
  chr11:59031094-59031136
  hypo

SEQ ID NO: 440320 - DNA, 66 bp, Homo sapiens; identical to SEQ ID NO: 314273
  chr11:59312681-59312747
  hypo

SEQ ID NO: 440321 - DNA, 43 bp, Homo sapiens; identical to SEQ ID NO: 263459
  chr11:59316335-59316378
  hypo

SEQ ID NO: 440322 - DNA, 176 bp, Homo sapiens; identical to SEQ ID NO: 214184
  chr11:59423038-59423214
  hypo

SEQ ID NO: 440323 - DNA, 210 bp, Homo sapiens; identical to SEQ ID NO: 202557
  chr11:59523106-59523316
  hypo

SEQ ID NO: 440324 - DNA, 272 bp, Homo sapiens; identical to SEQ ID NO: 214186
  chr11:59665529-59665801
  hypo

SEQ ID NO: 440325 - DNA, 37 bp, Homo sapiens; identical to SEQ ID NO: 214187
  chr11:59809609-59809646
  hypo

SEQ ID NO: 440326 - DNA, 37 bp, Homo sapiens; identical to SEQ ID NO: 263464
  chr11:59834956-59834993
  hypo

SEQ ID NO: 440327 - DNA, 40 bp, Homo sapiens; identical to SEQ ID NO: 214188
  chr11:60143549-60143589
  hypo

SEQ ID NO: 440328 - DNA, 321 bp, Homo sapiens; identical to SEQ ID NO: 214191
  chr11:60514866-60515187
  hypo

SEQ ID NO: 440329 - DNA, 34 bp, Homo sapiens; identical to SEQ ID NO: 314284
  chr11:60524470-60524504
  hypo

SEQ ID NO: 440330 - DNA, 647 bp, Homo sapiens; identical to SEQ ID NO: 314285
  chr11:60524717-60525364
  hypo

SEQ ID NO: 440331 - DNA, 42 bp, Homo sapiens; identical to SEQ ID NO: 263469
  chr11:60640963-60641005
  hypo

SEQ ID NO: 440332 - DNA, 83 bp, Homo sapiens; identical to SEQ ID NO: 392734
  chr11:60648733-60648816
  hypo

SEQ ID NO: 440333 - DNA, 33 bp, Homo sapiens; identical to SEQ ID NO: 263471
  chr11:60660676-60660709
  hypo

SEQ ID NO: 440334 - DNA, 93 bp, Homo sapiens; identical to SEQ ID NO: 263472
  chr11:60680209-60680302
  hypo

SEQ ID NO: 440335 - DNA, 33 bp, Homo sapiens; identical to SEQ ID NO: 263473
  chr11:60680362-60680395
  hypo

SEQ ID NO: 440336 - DNA, 230 bp, Homo sapiens; identical to SEQ ID NO: 214192
  chr11:60689401-60689631
  hypo

SEQ ID NO: 440337 - DNA, 49 bp, Homo sapiens; identical to SEQ ID NO: 202558
  chr11:60692121-60692170
  hypo

SEQ ID NO: 440338 - DNA, 132 bp, Homo sapiens; identical to SEQ ID NO: 263475
  chr11:60695104-60695236
  hypo

SEQ ID NO: 440339 - DNA, 159 bp, Homo sapiens; identical to SEQ ID NO: 263476
  chr11:60696096-60696255
  hypo

SEQ ID NO: 440340 - DNA, 164 bp, Homo sapiens; identical to SEQ ID NO: 214194
  chr11:60703904-60704068
  hypo

SEQ ID NO: 440341 - DNA, 32 bp, Homo sapiens; identical to SEQ ID NO: 263479
  chr11:60754318-60754350
  hypo

SEQ ID NO: 440342 - DNA, 155 bp, Homo sapiens; identical to SEQ ID NO: 48499
  chr11:60775226-60775381
  hypo

SEQ ID NO: 440343 - DNA, 153 bp, Homo sapiens; identical to SEQ ID NO: 263480
  chr11:60850614-60850767
  hypo

SEQ ID NO: 440344 - DNA, 173 bp, Homo sapiens; identical to SEQ ID NO: 214195
  chr11:60880738-60880911
  hypo

SEQ ID NO: 440345 - DNA, 189 bp, Homo sapiens; identical to SEQ ID NO: 214196
  chr11:60897022-60897211
  hypo

SEQ ID NO: 440346 - DNA, 103 bp, Homo sapiens; identical to SEQ ID NO: 263484
  chr11:60920711-60920814
  hypo

SEQ ID NO: 440347 - DNA, 32 bp, Homo sapiens; identical to SEQ ID NO: 214197
  chr11:60926976-60927008
  hypo

SEQ ID NO: 440348 - DNA, 66 bp, Homo sapiens; identical to SEQ ID NO: 214198
  chr11:60927368-60927434
  hypo

SEQ ID NO: 440349 - DNA, 68 bp, Homo sapiens; identical to SEQ ID NO: 214199
  chr11:61049429-61049497
  hypo

SEQ ID NO: 440350 - DNA, 39 bp, Homo sapiens; identical to SEQ ID NO: 214200
  chr11:61049655-61049694
  hypo

SEQ ID NO: 440351 - DNA, 43 bp, Homo sapiens; identical to SEQ ID NO: 314308
  chr11:61049736-61049779
  hypo

SEQ ID NO: 440352 - DNA, 37 bp, Homo sapiens; identical to SEQ ID NO: 263489
  chr11:61056997-61057034
  hypo

SEQ ID NO: 440353 - DNA, 351 bp, Homo sapiens; identical to SEQ ID NO: 214202
  chr11:61076171-61076522
  hypo

SEQ ID NO: 440354 - DNA, 169 bp, Homo sapiens; identical to SEQ ID NO: 263491
  chr11:61094130-61094299
  hypo

SEQ ID NO: 440355 - DNA, 354 bp, Homo sapiens; identical to SEQ ID NO: 263492
  chr11:61106581-61106935
  hypo

SEQ ID NO: 440356 - DNA, 100 bp, Homo sapiens; identical to SEQ ID NO: 214204
  chr11:61108987-61109087
  hypo

SEQ ID NO: 440357 - DNA, 169 bp, Homo sapiens; identical to SEQ ID NO: 263494
  chr11:61110433-61110602
  hypo

SEQ ID NO: 440358 - DNA, 53 bp, Homo sapiens; identical to SEQ ID NO: 263495
  chr11:61118455-61118508
  hypo

SEQ ID NO: 440359 - DNA, 43 bp, Homo sapiens; identical to SEQ ID NO: 214205
  chr11:61122609-61122652
  hypo

SEQ ID NO: 440360 - DNA, 120 bp, Homo sapiens; identical to SEQ ID NO: 214206
  chr11:61263503-61263623
  hypo

SEQ ID NO: 440361 - DNA, 492 bp, Homo sapiens; identical to SEQ ID NO: 263498
  chr11:61292552-61293044
  hypo

SEQ ID NO: 440362 - DNA, 75 bp, Homo sapiens; identical to SEQ ID NO: 263499
  chr11:61302241-61302316
  hypo

SEQ ID NO: 440363 - DNA, 260 bp, Homo sapiens; identical to SEQ ID NO: 214208
  chr11:61305393-61305653
  hypo

SEQ ID NO: 440364 - DNA, 79 bp, Homo sapiens; identical to SEQ ID NO: 263501
  chr11:61464743-61464822
  hypo

SEQ ID NO: 440365 - DNA, 50 bp, Homo sapiens; identical to SEQ ID NO: 214209
  chr11:61474397-61474447
  hypo

SEQ ID NO: 440366 - DNA, 52 bp, Homo sapiens; identical to SEQ ID NO: 263504
  chr11:61475156-61475208
  hypo

SEQ ID NO: 440367 - DNA, 120 bp, Homo sapiens; identical to SEQ ID NO: 214210
  chr11:61475743-61475863
  hypo

SEQ ID NO: 440368 - DNA, 44 bp, Homo sapiens; identical to SEQ ID NO: 214211
  chr11:61476225-61476269
  hypo

SEQ ID NO: 440369 - DNA, 198 bp, Homo sapiens; identical to SEQ ID NO: 214212
  chr11:61478512-61478710
  hypo

SEQ ID NO: 440370 - DNA, 189 bp, Homo sapiens; identical to SEQ ID NO: 214213
  chr11:61479892-61480081
  hypo

SEQ ID NO: 440371 - DNA, 370 bp, Homo sapiens; identical to SEQ ID NO: 263509
  chr11:61488080-61488450
  hypo

SEQ ID NO: 440372 - DNA, 35 bp, Homo sapiens; identical to SEQ ID NO: 263512
  chr11:61494080-61494115
  hypo

SEQ ID NO: 440373 - DNA, 213 bp, Homo sapiens; identical to SEQ ID NO: 263513
  chr11:61495640-61495853
  hypo

SEQ ID NO: 440374 - DNA, 320 bp, Homo sapiens; identical to SEQ ID NO: 263514
  chr11:61498684-61499004
  hypo

SEQ ID NO: 440375 - DNA, 174 bp, Homo sapiens; identical to SEQ ID NO: 263515
  chr11:61502322-61502496
  hypo

SEQ ID NO: 440376 - DNA, 143 bp, Homo sapiens; identical to SEQ ID NO: 214216
  chr11:61508687-61508830
  hypo

SEQ ID NO: 440377 - DNA, 171 bp, Homo sapiens; identical to SEQ ID NO: 263518
  chr11:61514701-61514872
  hypo

SEQ ID NO: 440378 - DNA, 519 bp, Homo sapiens; identical to SEQ ID NO: 288101
  chr11:61519848-61520367
  hypo

SEQ ID NO: 440379 - DNA, 458 bp, Homo sapiens; identical to SEQ ID NO: 214219
  chr11:61522483-61522941
  hypo

SEQ ID NO: 440380 - DNA, 99 bp, Homo sapiens; identical to SEQ ID NO: 214220
  chr11:61525593-61525692
  hypo

SEQ ID NO: 440381 - DNA, 299 bp, Homo sapiens; identical to SEQ ID NO: 314344
  chr11:61536686-61536985
  hypo

SEQ ID NO: 440382 - DNA, 83 bp, Homo sapiens; identical to SEQ ID NO: 314345
  chr11:61537014-61537097
  hypo

SEQ ID NO: 440383 - DNA, 46 bp, Homo sapiens; identical to SEQ ID NO: 263522
  chr11:61615510-61615556
  hypo

SEQ ID NO: 440384 - DNA, 407 bp, Homo sapiens; identical to SEQ ID NO: 214223
  chr11:61632399-61632806
  hypo

SEQ ID NO: 440385 - DNA, 176 bp, Homo sapiens; identical to SEQ ID NO: 214224
  chr11:61634597-61634773
  hypo

SEQ ID NO: 440386 - DNA, 42 bp, Homo sapiens; identical to SEQ ID NO: 214225
  chr11:61635271-61635313
  hypo

SEQ ID NO: 440387 - DNA, 155 bp, Homo sapiens; identical to SEQ ID NO: 314353
  chr11:61641255-61641410
  hypo

SEQ ID NO: 440388 - DNA, 215 bp, Homo sapiens; identical to SEQ ID NO: 214226
  chr11:61644863-61645078
  hypo

SEQ ID NO: 440389 - DNA, 111 bp, Homo sapiens; identical to SEQ ID NO: 263529
  chr11:61646081-61646192
  hypo

SEQ ID NO: 440390 - DNA, 42 bp, Homo sapiens; identical to SEQ ID NO: 263530
  chr11:61653516-61653558
  hypo

SEQ ID NO: 440391 - DNA, 56 bp, Homo sapiens; identical to SEQ ID NO: 314359
  chr11:61665672-61665728
  hypo

SEQ ID NO: 440392 - DNA, 63 bp, Homo sapiens; identical to SEQ ID NO: 314360
  chr11:61666025-61666088
  hypo

SEQ ID NO: 440393 - DNA, 143 bp, Homo sapiens; identical to SEQ ID NO: 214229
  chr11:61667785-61667928
  hypo

SEQ ID NO: 440394 - DNA, 154 bp, Homo sapiens; identical to SEQ ID NO: 214235
  chr11:61679898-61680052
  hypo

SEQ ID NO: 440395 - DNA, 66 bp, Homo sapiens; identical to SEQ ID NO: 214236
  chr11:61688731-61688797
  hypo

SEQ ID NO: 440396 - DNA, 94 bp, Homo sapiens; identical to SEQ ID NO: 263542
  chr11:61713860-61713954
  hypo

SEQ ID NO: 440397 - DNA, 221 bp, Homo sapiens; identical to SEQ ID NO: 214237
  chr11:61717670-61717891
  hypo

SEQ ID NO: 440398 - DNA, 125 bp, Homo sapiens; identical to SEQ ID NO: 214238
  chr11:61736227-61736352
  hypo

SEQ ID NO: 440399 - DNA, 76 bp, Homo sapiens; identical to SEQ ID NO: 214239
  chr11:61770026-61770102
  hypo

SEQ ID NO: 440400 - DNA, 148 bp, Homo sapiens; identical to SEQ ID NO: 214240
  chr11:61770721-61770869
  hypo

SEQ ID NO: 440401 - DNA, 33 bp, Homo sapiens; identical to SEQ ID NO: 263549
  chr11:61795462-61795495
  hypo

SEQ ID NO: 440402 - DNA, 39 bp, Homo sapiens; identical to SEQ ID NO: 263550
  chr11:61797090-61797129
  hypo

SEQ ID NO: 440403 - DNA, 31 bp, Homo sapiens; identical to SEQ ID NO: 214241
  chr11:61811795-61811826
  hypo

SEQ ID NO: 440404 - DNA, 44 bp, Homo sapiens; identical to SEQ ID NO: 214242
  chr11:61825693-61825737
  hypo

SEQ ID NO: 440405 - DNA, 55 bp, Homo sapiens; identical to SEQ ID NO: 263553
  chr11:61889939-61889994
  hypo

SEQ ID NO: 440406 - DNA, 129 bp, Homo sapiens; identical to SEQ ID NO: 263554
  chr11:61912296-61912425
  hypo

SEQ ID NO: 440407 - DNA, 236 bp, Homo sapiens; identical to SEQ ID NO: 263555
  chr11:62167973-62168209
  hypo

SEQ ID NO: 440408 - DNA, 112 bp, Homo sapiens; identical to SEQ ID NO: 314381
  chr11:62184162-62184274
  hypo

SEQ ID NO: 440409 - DNA, 164 bp, Homo sapiens; identical to SEQ ID NO: 224119
  chr11:62192262-62192426
  hypo

SEQ ID NO: 440410 - DNA, 88 bp, Homo sapiens; identical to SEQ ID NO: 263557
  chr11:62257978-62258066
  hypo

SEQ ID NO: 440411 - DNA, 468 bp, Homo sapiens; identical to SEQ ID NO: 202568
  chr11:62313646-62314114
  hypo

SEQ ID NO: 440412 - DNA, 54 bp, Homo sapiens; identical to SEQ ID NO: 263558
  chr11:62356614-62356668
  hypo

SEQ ID NO: 440413 - DNA, 187 bp, Homo sapiens; identical to SEQ ID NO: 263559
  chr11:62361980-62362167
  hypo

SEQ ID NO: 440414 - DNA, 105 bp, Homo sapiens; identical to SEQ ID NO: 214245
  chr11:62387277-62387382
  hypo

SEQ ID NO: 440415 - DNA, 38 bp, Homo sapiens; identical to SEQ ID NO: 263561
  chr11:62418574-62418612
  hypo

SEQ ID NO: 440416 - DNA, 31 bp, Homo sapiens; identical to SEQ ID NO: 214246
  chr11:62423247-62423278
  hypo

SEQ ID NO: 440417 - DNA, 34 bp, Homo sapiens; identical to SEQ ID NO: 314391
  chr11:62440588-62440622
  hypo

SEQ ID NO: 440418 - DNA, 49 bp, Homo sapiens; identical to SEQ ID NO: 314392
  chr11:62450079-62450128
  hypo

SEQ ID NO: 440419 - DNA, 239 bp, Homo sapiens; identical to SEQ ID NO: 224123
  chr11:62473884-62474123
  hypo

SEQ ID NO: 440420 - DNA, 197 bp, Homo sapiens; identical to SEQ ID NO: 214247
  chr11:62474896-62475093
  hypo

SEQ ID NO: 440421 - DNA, 101 bp, Homo sapiens; identical to SEQ ID NO: 263566
  chr11:62479575-62479676
  hypo

SEQ ID NO: 440422 - DNA, 51 bp, Homo sapiens; identical to SEQ ID NO: 314396
  chr11:62484466-62484517
  hypo

SEQ ID NO: 440423 - DNA, 102 bp, Homo sapiens; identical to SEQ ID NO: 314397
  chr11:62484547-62484649
  hypo

SEQ ID NO: 440424 - DNA, 105 bp, Homo sapiens; identical to SEQ ID NO: 263568
  chr11:62527793-62527898
  hypo

SEQ ID NO: 440425 - DNA, 66 bp, Homo sapiens; identical to SEQ ID NO: 214248
  chr11:62532994-62533060
  hypo

SEQ ID NO: 440426 - DNA, 213 bp, Homo sapiens; identical to SEQ ID NO: 263570
  chr11:62541857-62542070
  hypo

SEQ ID NO: 440427 - DNA, 296 bp, Homo sapiens; identical to SEQ ID NO: 263571
  chr11:62581077-62581373
  hypo

SEQ ID NO: 440428 - DNA, 34 bp, Homo sapiens; identical to SEQ ID NO: 263572
  chr11:62617578-62617612
  hypo

SEQ ID NO: 440429 - DNA, 120 bp, Homo sapiens; identical to SEQ ID NO: 263573
  chr11:62658210-62658330
  hypo

SEQ ID NO: 440430 - DNA, 206 bp, Homo sapiens; identical to SEQ ID NO: 202576
  chr11:63258404-63258610
  hypo

SEQ ID NO: 440431 - DNA, 54 bp, Homo sapiens; identical to SEQ ID NO: 202577
  chr11:63258770-63258824
  hypo

SEQ ID NO: 440432 - DNA, 304 bp, Homo sapiens; identical to SEQ ID NO: 263575
  chr11:63377496-63377800
  hypo

SEQ ID NO: 440433 - DNA, 40 bp, Homo sapiens; identical to SEQ ID NO: 263576
  chr11:63389635-63389675
  hypo

SEQ ID NO: 440434 - DNA, 221 bp, Homo sapiens; identical to SEQ ID NO: 263577
  chr11:63398535-63398756
  hypo

SEQ ID NO: 440435 - DNA, 152 bp, Homo sapiens; identical to SEQ ID NO: 214252
  chr11:63399450-63399602
  hypo

SEQ ID NO: 440436 - DNA, 88 bp, Homo sapiens; identical to SEQ ID NO: 214254
  chr11:63434153-63434241
  hypo

SEQ ID NO: 440437 - DNA, 95 bp, Homo sapiens; identical to SEQ ID NO: 263581
  chr11:63529491-63529586
  hypo

SEQ ID NO: 440438 - DNA, 91 bp, Homo sapiens; identical to SEQ ID NO: 214258
  chr11:63676708-63676799
  hypo

SEQ ID NO: 440439 - DNA, 31 bp, Homo sapiens; identical to SEQ ID NO: 214259
  chr11:63743821-63743852
  hypo

SEQ ID NO: 440440 - DNA, 69 bp, Homo sapiens; identical to SEQ ID NO: 214260
  chr11:63764163-63764232
  hypo

SEQ ID NO: 440441 - DNA, 150 bp, Homo sapiens; identical to SEQ ID NO: 263591
  chr11:63764790-63764940
  hypo

SEQ ID NO: 440442 - DNA, 182 bp, Homo sapiens; identical to SEQ ID NO: 214262
  chr11:63784048-63784230
  hypo

SEQ ID NO: 440443 - DNA, 42 bp, Homo sapiens; identical to SEQ ID NO: 263595
  chr11:63786387-63786429
  hypo

SEQ ID NO: 440444 - DNA, 31 bp, Homo sapiens; identical to SEQ ID NO: 263596
  chr11:63814029-63814060
  hypo

SEQ ID NO: 440445 - DNA, 437 bp, Homo sapiens; identical to SEQ ID NO: 214263
  chr11:63832549-63832986
  hypo

SEQ ID NO: 440446 - DNA, 280 bp, Homo sapiens; identical to SEQ ID NO: 263602
  chr11:63864923-63865203
  hypo

SEQ ID NO: 440447 - DNA, 77 bp, Homo sapiens; identical to SEQ ID NO: 214265
  chr11:63871583-63871660
  hypo

SEQ ID NO: 440448 - DNA, 258 bp, Homo sapiens; identical to SEQ ID NO: 263604
  chr11:63883405-63883663
  hypo

SEQ ID NO: 440449 - DNA, 254 bp, Homo sapiens; identical to SEQ ID NO: 263606
  chr11:63888534-63888788
  hypo

SEQ ID NO: 440450 - DNA, 33 bp, Homo sapiens; identical to SEQ ID NO: 263607
  chr11:63889204-63889237
  hypo

SEQ ID NO: 440451 - DNA, 144 bp, Homo sapiens; identical to SEQ ID NO: 263608
  chr11:63892468-63892612
  hypo

SEQ ID NO: 440452 - DNA, 82 bp, Homo sapiens; identical to SEQ ID NO: 263609
  chr11:63894386-63894468
  hypo

SEQ ID NO: 440453 - DNA, 93 bp, Homo sapiens; identical to SEQ ID NO: 214267
  chr11:63905995-63906088
  hypo

SEQ ID NO: 440454 - DNA, 64 bp, Homo sapiens; identical to SEQ ID NO: 214268
  chr11:63906118-63906182
  hypo

SEQ ID NO: 440455 - DNA, 144 bp, Homo sapiens; identical to SEQ ID NO: 214269
  chr11:63912569-63912713
  hypo

SEQ ID NO: 440456 - DNA, 252 bp, Homo sapiens; identical to SEQ ID NO: 263613
  chr11:63916439-63916691
  hypo

SEQ ID NO: 440457 - DNA, 80 bp, Homo sapiens; identical to SEQ ID NO: 214270
  chr11:63934619-63934699
  hypo

SEQ ID NO: 440458 - DNA, 271 bp, Homo sapiens; identical to SEQ ID NO: 214271
  chr11:63963859-63964130
  hypo

SEQ ID NO: 440459 - DNA, 164 bp, Homo sapiens; identical to SEQ ID NO: 263617
  chr11:63979092-63979256
  hypo

SEQ ID NO: 440460 - DNA, 215 bp, Homo sapiens; identical to SEQ ID NO: 214272
  chr11:63988354-63988569
  hypo

SEQ ID NO: 440461 - DNA, 161 bp, Homo sapiens; identical to SEQ ID NO: 214273
  chr11:63990015-63990176
  hypo

SEQ ID NO: 440462 - DNA, 31 bp, Homo sapiens; identical to SEQ ID NO: 263620
  chr11:64011977-64012008
  hypo

SEQ ID NO: 440463 - DNA, 58 bp, Homo sapiens; identical to SEQ ID NO: 214274
  chr11:64032945-64033003
  hypo

SEQ ID NO: 440464 - DNA, 88 bp, Homo sapiens; identical to SEQ ID NO: 263622
  chr11:64034944-64035032
  hypo

SEQ ID NO: 440465 - DNA, 460 bp, Homo sapiens; identical to SEQ ID NO: 263623
  chr11:64044375-64044835
  hypo

SEQ ID NO: 440466 - DNA, 94 bp, Homo sapiens; identical to SEQ ID NO: 263625
  chr11:64055231-64055325
  hypo

SEQ ID NO: 440467 - DNA, 179 bp, Homo sapiens; identical to SEQ ID NO: 263626
  chr11:64056037-64056216
  hypo

SEQ ID NO: 440468 - DNA, 78 bp, Homo sapiens; identical to SEQ ID NO: 263627
  chr11:64069275-64069353
  hypo

SEQ ID NO: 440469 - DNA, 39 bp, Homo sapiens; identical to SEQ ID NO: 214276
  chr11:64078889-64078928
  hypo

SEQ ID NO: 440470 - DNA, 115 bp, Homo sapiens; identical to SEQ ID NO: 214277
  chr11:64081531-64081646
  hypo

SEQ ID NO: 440471 - DNA, 159 bp, Homo sapiens; identical to SEQ ID NO: 263631
  chr11:64089708-64089867
  hypo

SEQ ID NO: 440472 - DNA, 188 bp, Homo sapiens; identical to SEQ ID NO: 214279
  chr11:64112373-64112561
  hypo

SEQ ID NO: 440473 - DNA, 158 bp, Homo sapiens; identical to SEQ ID NO: 214280
  chr11:64118936-64119094
  hypo

SEQ ID NO: 440474 - DNA, 200 bp, Homo sapiens; identical to SEQ ID NO: 314465
  chr11:64120022-64120222
  hypo

SEQ ID NO: 440475 - DNA, 41 bp, Homo sapiens; identical to SEQ ID NO: 314466
  chr11:64120327-64120368
  hypo

SEQ ID NO: 440476 - DNA, 229 bp, Homo sapiens; identical to SEQ ID NO: 214281
  chr11:64120593-64120822
  hypo

SEQ ID NO: 440477 - DNA, 171 bp, Homo sapiens; identical to SEQ ID NO: 214282
  chr11:64120948-64121119
  hypo

SEQ ID NO: 440478 - DNA, 82 bp, Homo sapiens; identical to SEQ ID NO: 214285
  chr11:64143181-64143263
  hypo

SEQ ID NO: 440479 - DNA, 149 bp, Homo sapiens; identical to SEQ ID NO: 263641
  chr11:64150446-64150595
  hypo

SEQ ID NO: 440480 - DNA, 163 bp, Homo sapiens; identical to SEQ ID NO: 263642
  chr11:64160546-64160709
  hypo

SEQ ID NO: 440481 - DNA, 186 bp, Homo sapiens; identical to SEQ ID NO: 314475
  chr11:64168655-64168841
  hypo

SEQ ID NO: 440482 - DNA, 149 bp, Homo sapiens; identical to SEQ ID NO: 314477
  chr11:64313131-64313280
  hypo

SEQ ID NO: 440483 - DNA, 52 bp, Homo sapiens; identical to SEQ ID NO: 263646
  chr11:64319242-64319294
  hypo

SEQ ID NO: 440484 - DNA, 42 bp, Homo sapiens; identical to SEQ ID NO: 214288
  chr11:64335474-64335516
  hypo

SEQ ID NO: 440485 - DNA, 87 bp, Homo sapiens; identical to SEQ ID NO: 214289
  chr11:64347188-64347275
  hypo

SEQ ID NO: 440486 - DNA, 222 bp, Homo sapiens; identical to SEQ ID NO: 263650
  chr11:64367275-64367497
  hypo

SEQ ID NO: 440487 - DNA, 101 bp, Homo sapiens; identical to SEQ ID NO: 263651
  chr11:64367837-64367938
  hypo

SEQ ID NO: 440488 - DNA, 49 bp, Homo sapiens; identical to SEQ ID NO: 263652
  chr11:64390387-64390436
  hypo

SEQ ID NO: 440489 - DNA, 202 bp, Homo sapiens; identical to SEQ ID NO: 288163
  chr11:64410436-64410638
  hypo

SEQ ID NO: 440490 - DNA, 58 bp, Homo sapiens; identical to SEQ ID NO: 214291
  chr11:64418855-64418913
  hypo

SEQ ID NO: 440491 - DNA, 240 bp, Homo sapiens; identical to SEQ ID NO: 288165
  chr11:64481256-64481496
  hypo

SEQ ID NO: 440492 - DNA, 98 bp, Homo sapiens; identical to SEQ ID NO: 263654
  chr11:64504253-64504351
  hypo

SEQ ID NO: 440493 - DNA, 153 bp, Homo sapiens; identical to SEQ ID NO: 398730
  chr11:64512196-64512349
  hypo

SEQ ID NO: 440494 - DNA, 65 bp, Homo sapiens; identical to SEQ ID NO: 263655
  chr11:64521038-64521103
  hypo

SEQ ID NO: 440495 - DNA, 300 bp, Homo sapiens; identical to SEQ ID NO: 263656
  chr11:64599005-64599305
  hypo

SEQ ID NO: 440496 - DNA, 177 bp, Homo sapiens; identical to SEQ ID NO: 263657
  chr11:64600135-64600312
  hypo

SEQ ID NO: 440497 - DNA, 494 bp, Homo sapiens; identical to SEQ ID NO: 263658
  chr11:64602459-64602953
  hypo

SEQ ID NO: 440498 - DNA, 83 bp, Homo sapiens; identical to SEQ ID NO: 214294
  chr11:64607057-64607140
  hypo

SEQ ID NO: 440499 - DNA, 123 bp, Homo sapiens; identical to SEQ ID NO: 314496
  chr11:64609226-64609349
  hypo

SEQ ID NO: 440500 - DNA, 66 bp, Homo sapiens; identical to SEQ ID NO: 314497
  chr11:64609407-64609473
  hypo

SEQ ID NO: 440501 - DNA, 221 bp, Homo sapiens; identical to SEQ ID NO: 263661
  chr11:64620283-64620504
  hypo

SEQ ID NO: 440502 - DNA, 86 bp, Homo sapiens; identical to SEQ ID NO: 214296
  chr11:64624927-64625013
  hypo

SEQ ID NO: 440503 - DNA, 78 bp, Homo sapiens; identical to SEQ ID NO: 314501
  chr11:64631090-64631168
  hypo

SEQ ID NO: 440504 - DNA, 331 bp, Homo sapiens; identical to SEQ ID NO: 214297
  chr11:64635186-64635517
  hypo

SEQ ID NO: 440505 - DNA, 59 bp, Homo sapiens; identical to SEQ ID NO: 263666
  chr11:64646831-64646890
  hypo

SEQ ID NO: 440506 - DNA, 105 bp, Homo sapiens; identical to SEQ ID NO: 263667
  chr11:64648942-64649047
  hypo

SEQ ID NO: 440507 - DNA, 101 bp, Homo sapiens; identical to SEQ ID NO: 263668
  chr11:64653030-64653131
  hypo

SEQ ID NO: 440508 - DNA, 98 bp, Homo sapiens; identical to SEQ ID NO: 314506
  chr11:64667889-64667987
  hypo

SEQ ID NO: 440509 - DNA, 110 bp, Homo sapiens; identical to SEQ ID NO: 314507
  chr11:64668074-64668184
  hypo

SEQ ID NO: 440510 - DNA, 72 bp, Homo sapiens; identical to SEQ ID NO: 214298
  chr11:64672165-64672237
  hypo

SEQ ID NO: 440511 - DNA, 198 bp, Homo sapiens; identical to SEQ ID NO: 224132
  chr11:64698945-64699143
  hypo

SEQ ID NO: 440512 - DNA, 49 bp, Homo sapiens
  chr11:64774015-64774064
  hypo
attaaataaaaaagggtccctgtgccttggagcaggggagcagggaagc

SEQ ID NO: 440513 - DNA, 34 bp, Homo sapiens; identical to SEQ ID NO: 214299
  chr11:64804457-64804491
  hypo

SEQ ID NO: 440514 - DNA, 93 bp, Homo sapiens; identical to SEQ ID NO: 214300
  chr11:64809906-64809999
  hypo

SEQ ID NO: 440515 - DNA, 94 bp, Homo sapiens; identical to SEQ ID NO: 263674
  chr11:64820396-64820490
  hypo

SEQ ID NO: 440516 - DNA, 156 bp, Homo sapiens; identical to SEQ ID NO: 263675
  chr11:64833875-64834031
  hypo

SEQ ID NO: 440517 - DNA, 230 bp, Homo sapiens; identical to SEQ ID NO: 263677
  chr11:64898551-64898781
  hypo

SEQ ID NO: 440518 - DNA, 107 bp, Homo sapiens; identical to SEQ ID NO: 314518
  chr11:64950374-64950481
  hypo

SEQ ID NO: 440519 - DNA, 77 bp, Homo sapiens; identical to SEQ ID NO: 263681
  chr11:64955443-64955520
  hypo

SEQ ID NO: 440520 - DNA, 302 bp, Homo sapiens; identical to SEQ ID NO: 263682
  chr11:64955905-64956207
  hypo

SEQ ID NO: 440521 - DNA, 218 bp, Homo sapiens; identical to SEQ ID NO: 263683
  chr11:64971912-64972130
  hypo

SEQ ID NO: 440522 - DNA, 180 bp, Homo sapiens; identical to SEQ ID NO: 263684
  chr11:64974941-64975121
  hypo

SEQ ID NO: 440523 - DNA, 99 bp, Homo sapiens; identical to SEQ ID NO: 314526
  chr11:64975361-64975460
  hypo

SEQ ID NO: 440524 - DNA, 329 bp, Homo sapiens; identical to SEQ ID NO: 314527
  chr11:64975532-64975861
  hypo

SEQ ID NO: 440525 - DNA, 42 bp, Homo sapiens; identical to SEQ ID NO: 263687
  chr11:65023027-65023069
  hypo

SEQ ID NO: 440526 - DNA, 195 bp, Homo sapiens; identical to SEQ ID NO: 288182
  chr11:65081963-65082158
  hypo

SEQ ID NO: 440527 - DNA, 122 bp, Homo sapiens; identical to SEQ ID NO: 263689
  chr11:65120977-65121099
  hypo

SEQ ID NO: 440528 - DNA, 133 bp, Homo sapiens; identical to SEQ ID NO: 263691
  chr11:65145405-65145538
  hypo

SEQ ID NO: 440529 - DNA, 91 bp, Homo sapiens; identical to SEQ ID NO: 224135
  chr11:65147933-65148024
  hypo

SEQ ID NO: 440530 - DNA, 191 bp, Homo sapiens; identical to SEQ ID NO: 263692
  chr11:65168192-65168383
  hypo

SEQ ID NO: 440531 - DNA, 98 bp, Homo sapiens; identical to SEQ ID NO: 202592
  chr11:65189906-65190004
  hypo

SEQ ID NO: 440532 - DNA, 120 bp, Homo sapiens; identical to SEQ ID NO: 263693
  chr11:65276490-65276610
  hypo

SEQ ID NO: 440533 - DNA, 168 bp, Homo sapiens; identical to SEQ ID NO: 214312
  chr11:65306213-65306381
  hypo

SEQ ID NO: 440534 - DNA, 350 bp, Homo sapiens; identical to SEQ ID NO: 214313
  chr11:65306425-65306775
  hypo

SEQ ID NO: 440535 - DNA, 410 bp, Homo sapiens; identical to SEQ ID NO: 288196
  chr11:65306805-65307215
  hypo

SEQ ID NO: 440536 - DNA, 224 bp, Homo sapiens; identical to SEQ ID NO: 214315
  chr11:65353078-65353302
  hypo

SEQ ID NO: 440537 - DNA, 385 bp, Homo sapiens; identical to SEQ ID NO: 214316
  chr11:65366939-65367324
  hypo

SEQ ID NO: 440538 - DNA, 343 bp, Homo sapiens; identical to SEQ ID NO: 263698
  chr11:65374934-65375277
  hypo

SEQ ID NO: 440539 - DNA, 146 bp, Homo sapiens; identical to SEQ ID NO: 263699
  chr11:65385897-65386043
  hypo

SEQ ID NO: 440540 - DNA, 223 bp, Homo sapiens; identical to SEQ ID NO: 214318
  chr11:65388104-65388327
  hypo

SEQ ID NO: 440541 - DNA, 120 bp, Homo sapiens; identical to SEQ ID NO: 263702
  chr11:65393284-65393404
  hypo

SEQ ID NO: 440542 - DNA, 201 bp, Homo sapiens; identical to SEQ ID NO: 263704
  chr11:65402722-65402923
  hypo

SEQ ID NO: 440543 - DNA, 144 bp, Homo sapiens; identical to SEQ ID NO: 202602
  chr11:65419839-65419983
  hypo

SEQ ID NO: 440544 - DNA, 49 bp, Homo sapiens; identical to SEQ ID NO: 214321
  chr11:65425914-65425963
  hypo

SEQ ID NO: 440545 - DNA, 32 bp, Homo sapiens; identical to SEQ ID NO: 263707
  chr11:65465492-65465524
  hypo

SEQ ID NO: 440546 - DNA, 77 bp, Homo sapiens; identical to SEQ ID NO: 263708
  chr11:65476358-65476435
  hypo

SEQ ID NO: 440547 - DNA, 37 bp, Homo sapiens; identical to SEQ ID NO: 214322
  chr11:65524510-65524547
  hypo

SEQ ID NO: 440548 - DNA, 206 bp, Homo sapiens; identical to SEQ ID NO: 224139
  chr11:65548872-65549078
  hypo

SEQ ID NO: 440549 - DNA, 108 bp, Homo sapiens; identical to SEQ ID NO: 263712
  chr11:65561324-65561432
  hypo

SEQ ID NO: 440550 - DNA, 32 bp, Homo sapiens; identical to SEQ ID NO: 263713
  chr11:65577928-65577960
  hypo

SEQ ID NO: 440551 - DNA, 91 bp, Homo sapiens; identical to SEQ ID NO: 263714
  chr11:65578020-65578111
  hypo

SEQ ID NO: 440552 - DNA, 95 bp, Homo sapiens; identical to SEQ ID NO: 421267
  chr11:65582985-65583080
  hypo

SEQ ID NO: 440553 - DNA, 226 bp, Homo sapiens; identical to SEQ ID NO: 314567
  chr11:65629224-65629450
  hypo

SEQ ID NO: 440554 - DNA, 92 bp, Homo sapiens; identical to SEQ ID NO: 214328
  chr11:65634006-65634098
  hypo

SEQ ID NO: 440555 - DNA, 98 bp, Homo sapiens; identical to SEQ ID NO: 214329
  chr11:65665116-65665214
  hypo

SEQ ID NO: 440556 - DNA, 277 bp, Homo sapiens; identical to SEQ ID NO: 214331
  chr11:65698237-65698514
  hypo

SEQ ID NO: 440557 - DNA, 65 bp, Homo sapiens; identical to SEQ ID NO: 214332
  chr11:65733942-65734007
  hypo

SEQ ID NO: 440558 - DNA, 199 bp, Homo sapiens; identical to SEQ ID NO: 263723
  chr11:65740976-65741175
  hypo

SEQ ID NO: 440559 - DNA, 314 bp, Homo sapiens; identical to SEQ ID NO: 214333
  chr11:65743837-65744151
  hypo

SEQ ID NO: 440560 - DNA, 120 bp, Homo sapiens; identical to SEQ ID NO: 288219
  chr11:65746278-65746398
  hypo

SEQ ID NO: 440561 - DNA, 39 bp, Homo sapiens; identical to SEQ ID NO: 214334
  chr11:65754937-65754976
  hypo

SEQ ID NO: 440562 - DNA, 56 bp, Homo sapiens; identical to SEQ ID NO: 408525
  chr11:65761070-65761126
  hypo

SEQ ID NO: 440563 - DNA, 34 bp, Homo sapiens; identical to SEQ ID NO: 263728
  chr11:65787645-65787679
  hypo

SEQ ID NO: 440564 - DNA, 41 bp, Homo sapiens; identical to SEQ ID NO: 214336
  chr11:65810130-65810171
  hypo

SEQ ID NO: 440565 - DNA, 78 bp, Homo sapiens; identical to SEQ ID NO: 214337
  chr11:65817722-65817800
  hypo

SEQ ID NO: 440566 - DNA, 241 bp, Homo sapiens; identical to SEQ ID NO: 263731
  chr11:65935759-65936000
  hypo

SEQ ID NO: 440567 - DNA, 40 bp, Homo sapiens; identical to SEQ ID NO: 263732
  chr11:65944154-65944194
  hypo

SEQ ID NO: 440568 - DNA, 60 bp, Homo sapiens; identical to SEQ ID NO: 263733
  chr11:65996092-65996152
  hypo

SEQ ID NO: 440569 - DNA, 70 bp, Homo sapiens; identical to SEQ ID NO: 214338
  chr11:66047173-66047243
  hypo

SEQ ID NO: 440570 - DNA, 268 bp, Homo sapiens; identical to SEQ ID NO: 214339
  chr11:66052169-66052437
  hypo

SEQ ID NO: 440571 - DNA, 199 bp, Homo sapiens; identical to SEQ ID NO: 214341
  chr11:66099978-66100177
  hypo

SEQ ID NO: 440572 - DNA, 59 bp, Homo sapiens; identical to SEQ ID NO: 263737
  chr11:66101899-66101958
  hypo

SEQ ID NO: 440573 - DNA, 590 bp, Homo sapiens; identical to SEQ ID NO: 263738
  chr11:66101988-66102578
  hypo

SEQ ID NO: 440574 - DNA, 170 bp, Homo sapiens; identical to SEQ ID NO: 263739
  chr11:66113511-66113681
  hypo

SEQ ID NO: 440575 - DNA, 63 bp, Homo sapiens; identical to SEQ ID NO: 214342
  chr11:66113950-66114013
  hypo

SEQ ID NO: 440576 - DNA, 214 bp, Homo sapiens; identical to SEQ ID NO: 314593
  chr11:66114043-66114257
  hypo

SEQ ID NO: 440577 - DNA, 163 bp, Homo sapiens; identical to SEQ ID NO: 263741
  chr11:66243063-66243226
  hypo

SEQ ID NO: 440578 - DNA, 180 bp, Homo sapiens; identical to SEQ ID NO: 314596
  chr11:66325396-66325576
  hypo

SEQ ID NO: 440579 - DNA, 233 bp, Homo sapiens; identical to SEQ ID NO: 263743
  chr11:66373085-66373318
  hypo

SEQ ID NO: 440580 - DNA, 81 bp, Homo sapiens; identical to SEQ ID NO: 263745
  chr11:66413515-66413596
  hypo

SEQ ID NO: 440581 - DNA, 36 bp, Homo sapiens; identical to SEQ ID NO: 214348
  chr11:66453719-66453755
  hypo

SEQ ID NO: 440582 - DNA, 265 bp, Homo sapiens; identical to SEQ ID NO: 263748
  chr11:66457265-66457530
  hypo

SEQ ID NO: 440583 - DNA, 119 bp, Homo sapiens; identical to SEQ ID NO: 263749
  chr11:66461612-66461731
  hypo

SEQ ID NO: 440584 - DNA, 130 bp, Homo sapiens; identical to SEQ ID NO: 263750
  chr11:66475123-66475253
  hypo

SEQ ID NO: 440585 - DNA, 50 bp, Homo sapiens; identical to SEQ ID NO: 263752
  chr11:66484936-66484986
  hypo

SEQ ID NO: 440586 - DNA, 80 bp, Homo sapiens; identical to SEQ ID NO: 214350
  chr11:66510746-66510826
  hypo

SEQ ID NO: 440587 - DNA, 88 bp, Homo sapiens; identical to SEQ ID NO: 214352
  chr11:66557750-66557838
  hypo

SEQ ID NO: 440588 - DNA, 145 bp, Homo sapiens; identical to SEQ ID NO: 263760
  chr11:66600088-66600233
  hypo

SEQ ID NO: 440589 - DNA, 34 bp, Homo sapiens; identical to SEQ ID NO: 263761
  chr11:66602481-66602515
  hypo

SEQ ID NO: 440590 - DNA, 34 bp, Homo sapiens; identical to SEQ ID NO: 214354
  chr11:66628276-66628310
  hypo

SEQ ID NO: 440591 - DNA, 200 bp, Homo sapiens; identical to SEQ ID NO: 263764
  chr11:66629459-66629659
  hypo

SEQ ID NO: 440592 - DNA, 97 bp, Homo sapiens; identical to SEQ ID NO: 263768
  chr11:66637738-66637835
  hypo

SEQ ID NO: 440593 - DNA, 40 bp, Homo sapiens; identical to SEQ ID NO: 263769
  chr11:66639553-66639593
  hypo

SEQ ID NO: 440594 - DNA, 41 bp, Homo sapiens; identical to SEQ ID NO: 214356
  chr11:66643997-66644038
  hypo

SEQ ID NO: 440595 - DNA, 100 bp, Homo sapiens; identical to SEQ ID NO: 214357
  chr11:66644472-66644572
  hypo

SEQ ID NO: 440596 - DNA, 91 bp, Homo sapiens; identical to SEQ ID NO: 314624
  chr11:66649105-66649196
  hypo

SEQ ID NO: 440597 - DNA, 138 bp, Homo sapiens; identical to SEQ ID NO: 214358
  chr11:66652536-66652674
  hypo

SEQ ID NO: 440598 - DNA, 100 bp, Homo sapiens; identical to SEQ ID NO: 263774
  chr11:66654307-66654407
  hypo

SEQ ID NO: 440599 - DNA, 100 bp, Homo sapiens; identical to SEQ ID NO: 263777
  chr11:66662144-66662244
  hypo

SEQ ID NO: 440600 - DNA, 92 bp, Homo sapiens; identical to SEQ ID NO: 214360
  chr11:66665004-66665096
  hypo

SEQ ID NO: 440601 - DNA, 298 bp, Homo sapiens; identical to SEQ ID NO: 214361
  chr11:66676020-66676318
  hypo

SEQ ID NO: 440602 - DNA, 223 bp, Homo sapiens; identical to SEQ ID NO: 263780
  chr11:66676878-66677101
  hypo

SEQ ID NO: 440603 - DNA, 199 bp, Homo sapiens; identical to SEQ ID NO: 263782
  chr11:66683036-66683235
  hypo

SEQ ID NO: 440604 - DNA, 86 bp, Homo sapiens; identical to SEQ ID NO: 214362
  chr11:66683850-66683936
  hypo

SEQ ID NO: 440605 - DNA, 147 bp, Homo sapiens; identical to SEQ ID NO: 214363
  chr11:66695456-66695603
  hypo

SEQ ID NO: 440606 - DNA, 346 bp, Homo sapiens; identical to SEQ ID NO: 214364
  chr11:66701354-66701700
  hypo

SEQ ID NO: 440607 - DNA, 33 bp, Homo sapiens; identical to SEQ ID NO: 263787
  chr11:66706997-66707030
  hypo

SEQ ID NO: 440608 - DNA, 44 bp, Homo sapiens; identical to SEQ ID NO: 214365
  chr11:66710160-66710204
  hypo

SEQ ID NO: 440609 - DNA, 87 bp, Homo sapiens; identical to SEQ ID NO: 263789
  chr11:66807525-66807612
  hypo

SEQ ID NO: 440610 - DNA, 33 bp, Homo sapiens; identical to SEQ ID NO: 263790
  chr11:66867270-66867303
  hypo

SEQ ID NO: 440611 - DNA, 120 bp, Homo sapiens; identical to SEQ ID NO: 202625
  chr11:66897392-66897512
  hypo

SEQ ID NO: 440612 - DNA, 49 bp, Homo sapiens; identical to SEQ ID NO: 214368
  chr11:66897763-66897812
  hypo

SEQ ID NO: 440613 - DNA, 150 bp, Homo sapiens; identical to SEQ ID NO: 263793
  chr11:66974946-66975096
  hypo

SEQ ID NO: 440614 - DNA, 31 bp, Homo sapiens; identical to SEQ ID NO: 214369
  chr11:67002080-67002111
  hypo

SEQ ID NO: 440615 - DNA, 84 bp, Homo sapiens; identical to SEQ ID NO: 263795
  chr11:67021693-67021777
  hypo

SEQ ID NO: 440616 - DNA, 77 bp, Homo sapiens; identical to SEQ ID NO: 214370
  chr11:67051193-67051270
  hypo

SEQ ID NO: 440617 - DNA, 49 bp, Homo sapiens; identical to SEQ ID NO: 214371
  chr11:67059786-67059835
  hypo

SEQ ID NO: 440618 - DNA, 209 bp, Homo sapiens; identical to SEQ ID NO: 263799
  chr11:67073281-67073490
  hypo

SEQ ID NO: 440619 - DNA, 99 bp, Homo sapiens; identical to SEQ ID NO: 263800
  chr11:67076905-67077004
  hypo

SEQ ID NO: 440620 - DNA, 170 bp, Homo sapiens; identical to SEQ ID NO: 263801
  chr11:67077277-67077447
  hypo

SEQ ID NO: 440621 - DNA, 461 bp, Homo sapiens; identical to SEQ ID NO: 263802
  chr11:67077697-67078158
  hypo

SEQ ID NO: 440622 - DNA, 217 bp, Homo sapiens; identical to SEQ ID NO: 214373
  chr11:67078398-67078615
  hypo

SEQ ID NO: 440623 - DNA, 41 bp, Homo sapiens; identical to SEQ ID NO: 214375
  chr11:67091662-67091703
  hypo

SEQ ID NO: 440624 - DNA, 714 bp, Homo sapiens; identical to SEQ ID NO: 288251
  chr11:67141093-67141807
  hypo

SEQ ID NO: 440625 - DNA, 76 bp, Homo sapiens; identical to SEQ ID NO: 263806
  chr11:67145532-67145608
  hypo

SEQ ID NO: 440626 - DNA, 183 bp, Homo sapiens; identical to SEQ ID NO: 214378
  chr11:67166353-67166536
  hypo

SEQ ID NO: 440627 - DNA, 442 bp, Homo sapiens; identical to SEQ ID NO: 263809
  chr11:67186967-67187409
  hypo

SEQ ID NO: 440628 - DNA, 235 bp, Homo sapiens; identical to SEQ ID NO: 263810
  chr11:67201983-67202218
  hypo

SEQ ID NO: 440629 - DNA, 583 bp, Homo sapiens; identical to SEQ ID NO: 263811
  chr11:67203183-67203766
  hypo

SEQ ID NO: 440630 - DNA, 201 bp, Homo sapiens; identical to SEQ ID NO: 263812
  chr11:67205682-67205883
  hypo

SEQ ID NO: 440631 - DNA, 213 bp, Homo sapiens; identical to SEQ ID NO: 263813
  chr11:67206219-67206432
  hypo

SEQ ID NO: 440632 - DNA, 34 bp, Homo sapiens; identical to SEQ ID NO: 214380
  chr11:67208822-67208856
  hypo

SEQ ID NO: 440633 - DNA, 56 bp, Homo sapiens; identical to SEQ ID NO: 263815
  chr11:67209515-67209571
  hypo

SEQ ID NO: 440634 - DNA, 234 bp, Homo sapiens; identical to SEQ ID NO: 202629
  chr11:67210770-67211004
  hypo

SEQ ID NO: 440635 - DNA, 61 bp, Homo sapiens; identical to SEQ ID NO: 263817
  chr11:67221670-67221731
  hypo

SEQ ID NO: 440636 - DNA, 289 bp, Homo sapiens; identical to SEQ ID NO: 263819
  chr11:67257336-67257625
  hypo

SEQ ID NO: 440637 - DNA, 36 bp, Homo sapiens; identical to SEQ ID NO: 263820
  chr11:67259309-67259345
  hypo

SEQ ID NO: 440638 - DNA, 383 bp, Homo sapiens; identical to SEQ ID NO: 214382
  chr11:67259386-67259769
  hypo

SEQ ID NO: 440639 - DNA, 127 bp, Homo sapiens; identical to SEQ ID NO: 263822
  chr11:67260399-67260526
  hypo

SEQ ID NO: 440640 - DNA, 376 bp, Homo sapiens; identical to SEQ ID NO: 263823
  chr11:67260761-67261137
  hypo

SEQ ID NO: 440641 - DNA, 35 bp, Homo sapiens; identical to SEQ ID NO: 214383
  chr11:67291006-67291041
  hypo

SEQ ID NO: 440642 - DNA, 143 bp, Homo sapiens; identical to SEQ ID NO: 314676
  chr11:67378802-67378945
  hypo

SEQ ID NO: 440643 - DNA, 85 bp, Homo sapiens; identical to SEQ ID NO: 314677
  chr11:67378975-67379060
  hypo

SEQ ID NO: 440644 - DNA, 214 bp, Homo sapiens; identical to SEQ ID NO: 288262
  chr11:67406911-67407125
  hypo

SEQ ID NO: 440645 - DNA, 37 bp, Homo sapiens; identical to SEQ ID NO: 263828
  chr11:67425589-67425626
  hypo

SEQ ID NO: 440646 - DNA, 184 bp, Homo sapiens; identical to SEQ ID NO: 263829
  chr11:67430155-67430339
  hypo

SEQ ID NO: 440647 - DNA, 95 bp, Homo sapiens; identical to SEQ ID NO: 202634
  chr11:67777602-67777697
  hypo

SEQ ID NO: 440648 - DNA, 180 bp, Homo sapiens; identical to SEQ ID NO: 263835
  chr11:67785446-67785626
  hypo

SEQ ID NO: 440649 - DNA, 257 bp, Homo sapiens; identical to SEQ ID NO: 263836
  chr11:67786112-67786369
  hypo

SEQ ID NO: 440650 - DNA, 185 bp, Homo sapiens; identical to SEQ ID NO: 263837
  chr11:67786588-67786773
  hypo

SEQ ID NO: 440651 - DNA, 87 bp, Homo sapiens; identical to SEQ ID NO: 263838
  chr11:67795520-67795607
  hypo

SEQ ID NO: 440652 - DNA, 742 bp, Homo sapiens; identical to SEQ ID NO: 214389
  chr11:67808550-67809292
  hypo

SEQ ID NO: 440653 - DNA, 64 bp, Homo sapiens; identical to SEQ ID NO: 214390
  chr11:67810254-67810318
  hypo

SEQ ID NO: 440654 - DNA, 326 bp, Homo sapiens; identical to SEQ ID NO: 314693
  chr11:67811379-67811705
  hypo

SEQ ID NO: 440655 - DNA, 100 bp, Homo sapiens; identical to SEQ ID NO: 214392
  chr11:67815195-67815295
  hypo

SEQ ID NO: 440656 - DNA, 729 bp, Homo sapiens; identical to SEQ ID NO: 263844
  chr11:67817080-67817809
  hypo

SEQ ID NO: 440657 - DNA, 77 bp, Homo sapiens; identical to SEQ ID NO: 214395
  chr11:67864777-67864854
  hypo

SEQ ID NO: 440658 - DNA, 386 bp, Homo sapiens; identical to SEQ ID NO: 224154
  chr11:67889354-67889740
  hypo

SEQ ID NO: 440659 - DNA, 172 bp, Homo sapiens; identical to SEQ ID NO: 263849
  chr11:67926119-67926291
  hypo

SEQ ID NO: 440660 - DNA, 320 bp, Homo sapiens; identical to SEQ ID NO: 214397
  chr11:67931311-67931631
  hypo

SEQ ID NO: 440661 - DNA, 155 bp, Homo sapiens; identical to SEQ ID NO: 263851
  chr11:67949302-67949457
  hypo

SEQ ID NO: 440662 - DNA, 216 bp, Homo sapiens; identical to SEQ ID NO: 263852
  chr11:67970707-67970923
  hypo

SEQ ID NO: 440663 - DNA, 257 bp, Homo sapiens; identical to SEQ ID NO: 214398
  chr11:67984063-67984320
  hypo

SEQ ID NO: 440664 - DNA, 44 bp, Homo sapiens; identical to SEQ ID NO: 314706
  chr11:67984388-67984432
  hypo

SEQ ID NO: 440665 - DNA, 110 bp, Homo sapiens; identical to SEQ ID NO: 224156
  chr11:68080104-68080214
  hypo

SEQ ID NO: 440666 - DNA, 179 bp, Homo sapiens; identical to SEQ ID NO: 263854
  chr11:68119117-68119296
  hypo

SEQ ID NO: 440667 - DNA, 148 bp, Homo sapiens; identical to SEQ ID NO: 314711
  chr11:68133368-68133516
  hypo

SEQ ID NO: 440668 - DNA, 144 bp, Homo sapiens; identical to SEQ ID NO: 314712
  chr11:68133546-68133690
  hypo

SEQ ID NO: 440669 - DNA, 192 bp, Homo sapiens; identical to SEQ ID NO: 214401
  chr11:68142591-68142783
  hypo

SEQ ID NO: 440670 - DNA, 76 bp, Homo sapiens; identical to SEQ ID NO: 263858
  chr11:68153340-68153416
  hypo

SEQ ID NO: 440671 - DNA, 94 bp, Homo sapiens; identical to SEQ ID NO: 214402
  chr11:68158724-68158818
  hypo

SEQ ID NO: 440672 - DNA, 393 bp, Homo sapiens; identical to SEQ ID NO: 263860
  chr11:68161251-68161644
  hypo

SEQ ID NO: 440673 - DNA, 145 bp, Homo sapiens; identical to SEQ ID NO: 214404
  chr11:68162351-68162496
  hypo

SEQ ID NO: 440674 - DNA, 33 bp, Homo sapiens; identical to SEQ ID NO: 263862
  chr11:68165099-68165132
  hypo

SEQ ID NO: 440675 - DNA, 99 bp, Homo sapiens; identical to SEQ ID NO: 214405
  chr11:68172056-68172155
  hypo

SEQ ID NO: 440676 - DNA, 196 bp, Homo sapiens; identical to SEQ ID NO: 214406
  chr11:68176056-68176252
  hypo

SEQ ID NO: 440677 - DNA, 128 bp, Homo sapiens; identical to SEQ ID NO: 214407
  chr11:68177518-68177646
  hypo

SEQ ID NO: 440678 - DNA, 225 bp, Homo sapiens; identical to SEQ ID NO: 263866
  chr11:68178823-68179048
  hypo

SEQ ID NO: 440679 - DNA, 68 bp, Homo sapiens; identical to SEQ ID NO: 263867
  chr11:68189965-68190033
  hypo

SEQ ID NO: 440680 - DNA, 362 bp, Homo sapiens; identical to SEQ ID NO: 263868
  chr11:68190242-68190604
  hypo

SEQ ID NO: 440681 - DNA, 388 bp, Homo sapiens; identical to SEQ ID NO: 214409
  chr11:68190854-68191242
  hypo

SEQ ID NO: 440682 - DNA, 263 bp, Homo sapiens; identical to SEQ ID NO: 263870
  chr11:68191537-68191800
  hypo

SEQ ID NO: 440683 - DNA, 253 bp, Homo sapiens; identical to SEQ ID NO: 214411
  chr11:68192497-68192750
  hypo

SEQ ID NO: 440684 - DNA, 136 bp, Homo sapiens; identical to SEQ ID NO: 263872
  chr11:68192960-68193096
  hypo

SEQ ID NO: 440685 - DNA, 251 bp, Homo sapiens; identical to SEQ ID NO: 263873
  chr11:68193464-68193715
  hypo

SEQ ID NO: 440686 - DNA, 41 bp, Homo sapiens; identical to SEQ ID NO: 214413
  chr11:68196105-68196146
  hypo

SEQ ID NO: 440687 - DNA, 77 bp, Homo sapiens; identical to SEQ ID NO: 214414
  chr11:68199350-68199427
  hypo

SEQ ID NO: 440688 - DNA, 192 bp, Homo sapiens; identical to SEQ ID NO: 214415
  chr11:68201117-68201309
  hypo

SEQ ID NO: 440689 - DNA, 140 bp, Homo sapiens; identical to SEQ ID NO: 214416
  chr11:68203449-68203589
  hypo

SEQ ID NO: 440690 - DNA, 441 bp, Homo sapiens; identical to SEQ ID NO: 263878
  chr11:68204359-68204800
  hypo

SEQ ID NO: 440691 - DNA, 62 bp, Homo sapiens; identical to SEQ ID NO: 214418
  chr11:68206026-68206088
  hypo

SEQ ID NO: 440692 - DNA, 128 bp, Homo sapiens; identical to SEQ ID NO: 214419
  chr11:68207214-68207342
  hypo

SEQ ID NO: 440693 - DNA, 194 bp, Homo sapiens; identical to SEQ ID NO: 214420
  chr11:68207880-68208074
  hypo

SEQ ID NO: 440694 - DNA, 94 bp, Homo sapiens; identical to SEQ ID NO: 314738
  chr11:68210132-68210226
  hypo

SEQ ID NO: 440695 - DNA, 218 bp, Homo sapiens; identical to SEQ ID NO: 263884
  chr11:68225539-68225757
  hypo

SEQ ID NO: 440696 - DNA, 256 bp, Homo sapiens; identical to SEQ ID NO: 214422
  chr11:68226749-68227005
  hypo

SEQ ID NO: 440697 - DNA, 156 bp, Homo sapiens; identical to SEQ ID NO: 263886
  chr11:68341483-68341639
  hypo

SEQ ID NO: 440698 - DNA, 232 bp, Homo sapiens; identical to SEQ ID NO: 263887
  chr11:68383036-68383268
  hypo

SEQ ID NO: 440699 - DNA, 33 bp, Homo sapiens; identical to SEQ ID NO: 263890
  chr11:68408313-68408346
  hypo

SEQ ID NO: 440700 - DNA, 137 bp, Homo sapiens; identical to SEQ ID NO: 263892
  chr11:68442013-68442150
  hypo

SEQ ID NO: 440701 - DNA, 244 bp, Homo sapiens; identical to SEQ ID NO: 263893
  chr11:68472884-68473128
  hypo

SEQ ID NO: 440702 - DNA, 37 bp, Homo sapiens; identical to SEQ ID NO: 214423
  chr11:68505095-68505132
  hypo

SEQ ID NO: 440703 - DNA, 113 bp, Homo sapiens; identical to SEQ ID NO: 214424
  chr11:68549945-68550058
  hypo

SEQ ID NO: 440704 - DNA, 161 bp, Homo sapiens; identical to SEQ ID NO: 263897
  chr11:68657683-68657844
  hypo

SEQ ID NO: 440705 - DNA, 246 bp, Homo sapiens; identical to SEQ ID NO: 263898
  chr11:68664617-68664863
  hypo

SEQ ID NO: 440706 - DNA, 198 bp, Homo sapiens; identical to SEQ ID NO: 263899
  chr11:68679246-68679444
  hypo

SEQ ID NO: 440707 - DNA, 340 bp, Homo sapiens; identical to SEQ ID NO: 263900
  chr11:68682153-68682493
  hypo

SEQ ID NO: 440708 - DNA, 73 bp, Homo sapiens; identical to SEQ ID NO: 263901
  chr11:68691889-68691962
  hypo

SEQ ID NO: 440709 - DNA, 227 bp, Homo sapiens; identical to SEQ ID NO: 263902
  chr11:68700807-68701034
  hypo

SEQ ID NO: 440710 - DNA, 203 bp, Homo sapiens; identical to SEQ ID NO: 263903
  chr11:68701352-68701555
  hypo

SEQ ID NO: 440711 - DNA, 87 bp, Homo sapiens; identical to SEQ ID NO: 214427
  chr11:68727156-68727243
  hypo

SEQ ID NO: 440712 - DNA, 48 bp, Homo sapiens; identical to SEQ ID NO: 263905
  chr11:68728254-68728302
  hypo

SEQ ID NO: 440713 - DNA, 243 bp, Homo sapiens; identical to SEQ ID NO: 263907
  chr11:68800914-68801157
  hypo

SEQ ID NO: 440714 - DNA, 63 bp, Homo sapiens; identical to SEQ ID NO: 263909
  chr11:68830513-68830576
  hypo

SEQ ID NO: 440715 - DNA, 176 bp, Homo sapiens; identical to SEQ ID NO: 214428
  chr11:68838712-68838888
  hypo

SEQ ID NO: 440716 - DNA, 71 bp, Homo sapiens; identical to SEQ ID NO: 214429
  chr11:68853901-68853972
  hypo

SEQ ID NO: 440717 - DNA, 76 bp, Homo sapiens; identical to SEQ ID NO: 263912
  chr11:68856610-68856686
  hypo

SEQ ID NO: 440718 - DNA, 196 bp, Homo sapiens; identical to SEQ ID NO: 263913
  chr11:68968788-68968984
  hypo

SEQ ID NO: 440719 - DNA, 199 bp, Homo sapiens; identical to SEQ ID NO: 263914
  chr11:68970085-68970284
  hypo

SEQ ID NO: 440720 - DNA, 210 bp, Homo sapiens; identical to SEQ ID NO: 263915
  chr11:68970656-68970866
  hypo

SEQ ID NO: 440721 - DNA, 174 bp, Homo sapiens; identical to SEQ ID NO: 263916
  chr11:68972048-68972222
  hypo

SEQ ID NO: 440722 - DNA, 250 bp, Homo sapiens; identical to SEQ ID NO: 263917
  chr11:69056019-69056269
  hypo

SEQ ID NO: 440723 - DNA, 45 bp, Homo sapiens; identical to SEQ ID NO: 263918
  chr11:69192163-69192208
  hypo

SEQ ID NO: 440724 - DNA, 193 bp, Homo sapiens; identical to SEQ ID NO: 214430
  chr11:69193143-69193336
  hypo

SEQ ID NO: 440725 - DNA, 134 bp, Homo sapiens; identical to SEQ ID NO: 263921
  chr11:69205855-69205989
  hypo

SEQ ID NO: 440726 - DNA, 217 bp, Homo sapiens; identical to SEQ ID NO: 263923
  chr11:69244619-69244836
  hypo

SEQ ID NO: 440727 - DNA, 253 bp, Homo sapiens; identical to SEQ ID NO: 224159
  chr11:69331403-69331656
  hypo

SEQ ID NO: 440728 - DNA, 75 bp, Homo sapiens; identical to SEQ ID NO: 263925
  chr11:69337266-69337341
  hypo

SEQ ID NO: 440729 - DNA, 289 bp, Homo sapiens; identical to SEQ ID NO: 314781
  chr11:69339659-69339948
  hypo

SEQ ID NO: 440730 - DNA, 206 bp, Homo sapiens; identical to SEQ ID NO: 314782
  chr11:69340015-69340221
  hypo

SEQ ID NO: 440731 - DNA, 221 bp, Homo sapiens; identical to SEQ ID NO: 214433
  chr11:69357102-69357323
  hypo

SEQ ID NO: 440732 - DNA, 95 bp, Homo sapiens; identical to SEQ ID NO: 214434
  chr11:69367214-69367309
  hypo

SEQ ID NO: 440733 - DNA, 101 bp, Homo sapiens; identical to SEQ ID NO: 314785
  chr11:69431510-69431611
  hypo

SEQ ID NO: 440734 - DNA, 78 bp, Homo sapiens; identical to SEQ ID NO: 314786
  chr11:69431641-69431719
  hypo

SEQ ID NO: 440735 - DNA, 52 bp, Homo sapiens; identical to SEQ ID NO: 263930
  chr11:69458859-69458911
  hypo

SEQ ID NO: 440736 - DNA, 146 bp, Homo sapiens; identical to SEQ ID NO: 214435
  chr11:69468277-69468423
  hypo

SEQ ID NO: 440737 - DNA, 458 bp, Homo sapiens; identical to SEQ ID NO: 314789
  chr11:69468482-69468940
  hypo

SEQ ID NO: 440738 - DNA, 31 bp, Homo sapiens; identical to SEQ ID NO: 202643
  chr11:69477505-69477536
  hypo

SEQ ID NO: 440739 - DNA, 129 bp, Homo sapiens; identical to SEQ ID NO: 314791
  chr11:69481589-69481718
  hypo

SEQ ID NO: 440740 - DNA, 165 bp, Homo sapiens; identical to SEQ ID NO: 314792
  chr11:69481750-69481915
  hypo

SEQ ID NO: 440741 - DNA, 89 bp, Homo sapiens; identical to SEQ ID NO: 263933
  chr11:69525488-69525577
  hypo

SEQ ID NO: 440742 - DNA, 91 bp, Homo sapiens; identical to SEQ ID NO: 263934
  chr11:69593280-69593371
  hypo

SEQ ID NO: 440743 - DNA, 61 bp, Homo sapiens; identical to SEQ ID NO: 214440
  chr11:69946372-69946433
  hypo

SEQ ID NO: 440744 - DNA, 33 bp, Homo sapiens; identical to SEQ ID NO: 263938
  chr11:69947852-69947885
  hypo

SEQ ID NO: 440745 - DNA, 188 bp, Homo sapiens; identical to SEQ ID NO: 263939
  chr11:69949119-69949307
  hypo

SEQ ID NO: 440746 - DNA, 183 bp, Homo sapiens; identical to SEQ ID NO: 263940
  chr11:69953589-69953772
  hypo

SEQ ID NO: 440747 - DNA, 77 bp, Homo sapiens; identical to SEQ ID NO: 263943
  chr11:69971958-69972035
  hypo

SEQ ID NO: 440748 - DNA, 49 bp, Homo sapiens; identical to SEQ ID NO: 263945
  chr11:69972882-69972931
  hypo

SEQ ID NO: 440749 - DNA, 127 bp, Homo sapiens; identical to SEQ ID NO: 263946
  chr11:69973147-69973274
  hypo

SEQ ID NO: 440750 - DNA, 193 bp, Homo sapiens; identical to SEQ ID NO: 263947
  chr11:69976910-69977103
  hypo

SEQ ID NO: 440751 - DNA, 362 bp, Homo sapiens; identical to SEQ ID NO: 263948
  chr11:69977943-69978305
  hypo

SEQ ID NO: 440752 - DNA, 163 bp, Homo sapiens; identical to SEQ ID NO: 263950
  chr11:69985998-69986161
  hypo

SEQ ID NO: 440753 - DNA, 130 bp, Homo sapiens; identical to SEQ ID NO: 263951
  chr11:70002186-70002316
  hypo

SEQ ID NO: 440754 - DNA, 224 bp, Homo sapiens; identical to SEQ ID NO: 263952
  chr11:70002957-70003181
  hypo

SEQ ID NO: 440755 - DNA, 106 bp, Homo sapiens; identical to SEQ ID NO: 263953
  chr11:70008172-70008278
  hypo

SEQ ID NO: 440756 - DNA, 101 bp, Homo sapiens; identical to SEQ ID NO: 214444
  chr11:70020524-70020625
  hypo

SEQ ID NO: 440757 - DNA, 484 bp, Homo sapiens; identical to SEQ ID NO: 263956
  chr11:70021160-70021644
  hypo

SEQ ID NO: 440758 - DNA, 55 bp, Homo sapiens
  chr11:70022807-70022862
  hypo
tgcttcctgtcatggcctgaaccagtctttcaggttaatttgggggtgccctggc

SEQ ID NO: 440759 - DNA, 37 bp, Homo sapiens; identical to SEQ ID NO: 263958
  chr11:70023977-70024014
  hypo

SEQ ID NO: 440760 - DNA, 182 bp, Homo sapiens; identical to SEQ ID NO: 263962
  chr11:70080115-70080297
  hypo

SEQ ID NO: 440761 - DNA, 74 bp, Homo sapiens; identical to SEQ ID NO: 263963
  chr11:70125200-70125274
  hypo

SEQ ID NO: 440762 - DNA, 31 bp, Homo sapiens; identical to SEQ ID NO: 263964
  chr11:70139604-70139635
  hypo

SEQ ID NO: 440763 - DNA, 95 bp, Homo sapiens; identical to SEQ ID NO: 263966
  chr11:70177350-70177445
  hypo

SEQ ID NO: 440764 - DNA, 95 bp, Homo sapiens; identical to SEQ ID NO: 263968
  chr11:70263136-70263231
  hypo

SEQ ID NO: 440765 - DNA, 141 bp, Homo sapiens; identical to SEQ ID NO: 214448
  chr11:70268911-70269052
  hypo

SEQ ID NO: 440766 - DNA, 77 bp, Homo sapiens; identical to SEQ ID NO: 214449
  chr11:70281167-70281244
  hypo

SEQ ID NO: 440767 - DNA, 68 bp, Homo sapiens; identical to SEQ ID NO: 214450
  chr11:70282721-70282789
  hypo

SEQ ID NO: 440768 - DNA, 194 bp, Homo sapiens; identical to SEQ ID NO: 314833
  chr11:71108172-71108366
  hypo

SEQ ID NO: 440769 - DNA, 153 bp, Homo sapiens; identical to SEQ ID NO: 314834
  chr11:71108396-71108549
  hypo

SEQ ID NO: 440770 - DNA, 161 bp, Homo sapiens; identical to SEQ ID NO: 263973
  chr11:71135268-71135429
  hypo

SEQ ID NO: 440771 - DNA, 202 bp, Homo sapiens; identical to SEQ ID NO: 263974
  chr11:71146644-71146846
  hypo

SEQ ID NO: 440772 - DNA, 200 bp, Homo sapiens; identical to SEQ ID NO: 263976
  chr11:71178322-71178522
  hypo

SEQ ID NO: 440773 - DNA, 33 bp, Homo sapiens; identical to SEQ ID NO: 214451
  chr11:71184882-71184915
  hypo

SEQ ID NO: 440774 - DNA, 153 bp, Homo sapiens; identical to SEQ ID NO: 263981
  chr11:71193408-71193561
  hypo

SEQ ID NO: 440775 - DNA, 90 bp, Homo sapiens; identical to SEQ ID NO: 214456
  chr11:71282211-71282301
  hypo

SEQ ID NO: 440776 - DNA, 120 bp, Homo sapiens; identical to SEQ ID NO: 263984
  chr11:71296339-71296459
  hypo

SEQ ID NO: 440777 - DNA, 82 bp, Homo sapiens; identical to SEQ ID NO: 214457
  chr11:71321043-71321125
  hypo

SEQ ID NO: 440778 - DNA, 36 bp, Homo sapiens; identical to SEQ ID NO: 214458
  chr11:71647445-71647481
  hypo

SEQ ID NO: 440779 - DNA, 35 bp, Homo sapiens; identical to SEQ ID NO: 263988
  chr11:71647721-71647756
  hypo

SEQ ID NO: 440780 - DNA, 84 bp, Homo sapiens; identical to SEQ ID NO: 263992
  chr11:71792521-71792605
  hypo

SEQ ID NO: 440781 - DNA, 44 bp, Homo sapiens; identical to SEQ ID NO: 263993
  chr11:71937179-71937223
  hypo

SEQ ID NO: 440782 - DNA, 37 bp, Homo sapiens; identical to SEQ ID NO: 263994
  chr11:71938062-71938099
  hypo

SEQ ID NO: 440783 - DNA, 54 bp, Homo sapiens; identical to SEQ ID NO: 214462
  chr11:71948504-71948558
  hypo

SEQ ID NO: 440784 - DNA, 49 bp, Homo sapiens; identical to SEQ ID NO: 214463
  chr11:72006579-72006628
  hypo

SEQ ID NO: 440785 - DNA, 41 bp, Homo sapiens; identical to SEQ ID NO: 263997
  chr11:72021664-72021705
  hypo

SEQ ID NO: 440786 - DNA, 241 bp, Homo sapiens; identical to SEQ ID NO: 288300
  chr11:72301342-72301583
  hypo

SEQ ID NO: 440787 - DNA, 581 bp, Homo sapiens; identical to SEQ ID NO: 263999
  chr11:72407946-72408527
  hypo

SEQ ID NO: 440788 - DNA, 330 bp, Homo sapiens; identical to SEQ ID NO: 314863
  chr11:72413650-72413980
  hypo

SEQ ID NO: 440789 - DNA, 45 bp, Homo sapiens; identical to SEQ ID NO: 314864
  chr11:72414010-72414055
  hypo

SEQ ID NO: 440790 - DNA, 107 bp, Homo sapiens; identical to SEQ ID NO: 214465
  chr11:72437783-72437890
  hypo

SEQ ID NO: 440791 - DNA, 80 bp, Homo sapiens; identical to SEQ ID NO: 264005
  chr11:72907831-72907911
  hypo

SEQ ID NO: 440792 - DNA, 38 bp, Homo sapiens; identical to SEQ ID NO: 264006
  chr11:73057918-73057956
  hypo

SEQ ID NO: 440793 - DNA, 217 bp, Homo sapiens; identical to SEQ ID NO: 202656
  chr11:73087925-73088142
  hypo

SEQ ID NO: 440794 - DNA, 92 bp, Homo sapiens; identical to SEQ ID NO: 214470
  chr11:73093212-73093304
  hypo

SEQ ID NO: 440795 - DNA, 42 bp, Homo sapiens; identical to SEQ ID NO: 214471
  chr11:73464045-73464087
  hypo

SEQ ID NO: 440796 - DNA, 157 bp, Homo sapiens; identical to SEQ ID NO: 264013
  chr11:73476967-73477124
  hypo

SEQ ID NO: 440797 - DNA, 87 bp, Homo sapiens; identical to SEQ ID NO: 408648
  chr11:73492622-73492709
  hypo

SEQ ID NO: 440798 - DNA, 38 bp, Homo sapiens; identical to SEQ ID NO: 214472
  chr11:73643144-73643182
  hypo

SEQ ID NO: 440799 - DNA, 174 bp, Homo sapiens; identical to SEQ ID NO: 264017
  chr11:73662120-73662294
  hypo

SEQ ID NO: 440800 - DNA, 35 bp, Homo sapiens; identical to SEQ ID NO: 264018
  chr11:73662698-73662733
  hypo

SEQ ID NO: 440801 - DNA, 119 bp, Homo sapiens; identical to SEQ ID NO: 264021
  chr11:73687939-73688058
  hypo

SEQ ID NO: 440802 - DNA, 179 bp, Homo sapiens; identical to SEQ ID NO: 264022
  chr11:73688955-73689134
  hypo

SEQ ID NO: 440803 - DNA, 145 bp, Homo sapiens; identical to SEQ ID NO: 314886
  chr11:73883535-73883680
  hypo

SEQ ID NO: 440804 - DNA, 189 bp, Homo sapiens; identical to SEQ ID NO: 264024
  chr11:73965091-73965280
  hypo

SEQ ID NO: 440805 - DNA, 96 bp, Homo sapiens; identical to SEQ ID NO: 264025
  chr11:74100758-74100854
  hypo

SEQ ID NO: 440806 - DNA, 120 bp, Homo sapiens; identical to SEQ ID NO: 264026
  chr11:74107339-74107459
  hypo

SEQ ID NO: 440807 - DNA, 44 bp, Homo sapiens; identical to SEQ ID NO: 214476
  chr11:74168144-74168188
  hypo

SEQ ID NO: 440808 - DNA, 93 bp, Homo sapiens; identical to SEQ ID NO: 214477
  chr11:74168435-74168528
  hypo

SEQ ID NO: 440809 - DNA, 31 bp, Homo sapiens; identical to SEQ ID NO: 264029
  chr11:74246354-74246385
  hypo

SEQ ID NO: 440810 - DNA, 64 bp, Homo sapiens; identical to SEQ ID NO: 264031
  chr11:74264050-74264114
  hypo

SEQ ID NO: 440811 - DNA, 197 bp, Homo sapiens; identical to SEQ ID NO: 264032
  chr11:74424486-74424683
  hypo

SEQ ID NO: 440812 - DNA, 74 bp, Homo sapiens; identical to SEQ ID NO: 264034
  chr11:74998668-74998742
  hypo

SEQ ID NO: 440813 - DNA, 67 bp, Homo sapiens; identical to SEQ ID NO: 264035
  chr11:75001250-75001317
  hypo

SEQ ID NO: 440814 - DNA, 95 bp, Homo sapiens; identical to SEQ ID NO: 214479
  chr11:75026127-75026222
  hypo

SEQ ID NO: 440815 - DNA, 452 bp, Homo sapiens; identical to SEQ ID NO: 264037
  chr11:75035341-75035793
  hypo

SEQ ID NO: 440816 - DNA, 44 bp, Homo sapiens; identical to SEQ ID NO: 264038
  chr11:75053731-75053775
  hypo

SEQ ID NO: 440817 - DNA, 714 bp, Homo sapiens; identical to SEQ ID NO: 202664
  chr11:75062273-75062987
  hypo

SEQ ID NO: 440818 - DNA, 203 bp, Homo sapiens; identical to SEQ ID NO: 264039
  chr11:75088468-75088671
  hypo

SEQ ID NO: 440819 - DNA, 87 bp, Homo sapiens; identical to SEQ ID NO: 264040
  chr11:75101269-75101356
  hypo

SEQ ID NO: 440820 - DNA, 294 bp, Homo sapiens; identical to SEQ ID NO: 264041
  chr11:75136560-75136854
  hypo

SEQ ID NO: 440821 - DNA, 201 bp, Homo sapiens; identical to SEQ ID NO: 314909
  chr11:75146457-75146658
  hypo

SEQ ID NO: 440822 - DNA, 386 bp, Homo sapiens; identical to SEQ ID NO: 264043
  chr11:75150986-75151372
  hypo

SEQ ID NO: 440823 - DNA, 544 bp, Homo sapiens; identical to SEQ ID NO: 264045
  chr11:75161622-75162166
  hypo

SEQ ID NO: 440824 - DNA, 127 bp, Homo sapiens; identical to SEQ ID NO: 214483
  chr11:75242019-75242146
  hypo

SEQ ID NO: 440825 - DNA, 202 bp, Homo sapiens; identical to SEQ ID NO: 264048
  chr11:75285550-75285752
  hypo

SEQ ID NO: 440826 - DNA, 120 bp, Homo sapiens; identical to SEQ ID NO: 214484
  chr11:75303123-75303243
  hypo

SEQ ID NO: 440827 - DNA, 43 bp, Homo sapiens; identical to SEQ ID NO: 214485
  chr11:75303273-75303316
  hypo

SEQ ID NO: 440828 - DNA, 141 bp, Homo sapiens; identical to SEQ ID NO: 264051
  chr11:75315461-75315602
  hypo

SEQ ID NO: 440829 - DNA, 92 bp, Homo sapiens; identical to SEQ ID NO: 264052
  chr11:75389093-75389185
  hypo

SEQ ID NO: 440830 - DNA, 45 bp, Homo sapiens; identical to SEQ ID NO: 264053
  chr11:75392223-75392268
  hypo

SEQ ID NO: 440831 - DNA, 40 bp, Homo sapiens; identical to SEQ ID NO: 214487
  chr11:75426561-75426601
  hypo

SEQ ID NO: 440832 - DNA, 134 bp, Homo sapiens; identical to SEQ ID NO: 224170
  chr11:75480048-75480182
  hypo

SEQ ID NO: 440833 - DNA, 180 bp, Homo sapiens; identical to SEQ ID NO: 214488
  chr11:75536035-75536215
  hypo

SEQ ID NO: 440834 - DNA, 31 bp, Homo sapiens; identical to SEQ ID NO: 264057
  chr11:75748469-75748500
  hypo

SEQ ID NO: 440835 - DNA, 36 bp, Homo sapiens; identical to SEQ ID NO: 264058
  chr11:75799383-75799419
  hypo

SEQ ID NO: 440836 - DNA, 167 bp, Homo sapiens; identical to SEQ ID NO: 214491
  chr11:75882508-75882675
  hypo

SEQ ID NO: 440837 - DNA, 228 bp, Homo sapiens; identical to SEQ ID NO: 264062
  chr11:75905704-75905932
  hypo

SEQ ID NO: 440838 - DNA, 253 bp, Homo sapiens; identical to SEQ ID NO: 224171
  chr11:75921931-75922184
  hypo

SEQ ID NO: 440839 - DNA, 86 bp, Homo sapiens; identical to SEQ ID NO: 264063
  chr11:75993075-75993161
  hypo

SEQ ID NO: 440840 - DNA, 35 bp, Homo sapiens; identical to SEQ ID NO: 214492
  chr11:76077428-76077463
  hypo

SEQ ID NO: 440841 - DNA, 180 bp, Homo sapiens; identical to SEQ ID NO: 264066
  chr11:76205112-76205292
  hypo

SEQ ID NO: 440842 - DNA, 191 bp, Homo sapiens; identical to SEQ ID NO: 264067
  chr11:76315100-76315291
  hypo

SEQ ID NO: 440843 - DNA, 183 bp, Homo sapiens; identical to SEQ ID NO: 214494
  chr11:76339359-76339542
  hypo

SEQ ID NO: 440844 - DNA, 436 bp, Homo sapiens; identical to SEQ ID NO: 264070
  chr11:76407635-76408071
  hypo

SEQ ID NO: 440845 - DNA, 192 bp, Homo sapiens; identical to SEQ ID NO: 214498
  chr11:76408273-76408465
  hypo

SEQ ID NO: 440846 - DNA, 39 bp, Homo sapiens; identical to SEQ ID NO: 264072
  chr11:76419081-76419120
  hypo

SEQ ID NO: 440847 - DNA, 159 bp, Homo sapiens; identical to SEQ ID NO: 264073
  chr11:76419240-76419399
  hypo

SEQ ID NO: 440848 - DNA, 89 bp, Homo sapiens; identical to SEQ ID NO: 264074
  chr11:76419671-76419760
  hypo

SEQ ID NO: 440849 - DNA, 72 bp, Homo sapiens; identical to SEQ ID NO: 264075
  chr11:76447828-76447900
  hypo

SEQ ID NO: 440850 - DNA, 55 bp, Homo sapiens; identical to SEQ ID NO: 214499
  chr11:76463185-76463240
  hypo

SEQ ID NO: 440851 - DNA, 143 bp, Homo sapiens; identical to SEQ ID NO: 264077
  chr11:76506255-76506398
  hypo

SEQ ID NO: 440852 - DNA, 104 bp, Homo sapiens; identical to SEQ ID NO: 214500
  chr11:76674834-76674938
  hypo

SEQ ID NO: 440853 - DNA, 120 bp, Homo sapiens; identical to SEQ ID NO: 214501
  chr11:76901057-76901177
  hypo

SEQ ID NO: 440854 - DNA, 166 bp, Homo sapiens; identical to SEQ ID NO: 264080
  chr11:76905510-76905676
  hypo

SEQ ID NO: 440855 - DNA, 107 bp, Homo sapiens; identical to SEQ ID NO: 264081
  chr11:76924554-76924661
  hypo

SEQ ID NO: 440856 - DNA, 35 bp, Homo sapiens; identical to SEQ ID NO: 264082
  chr11:76955354-76955389
  hypo

SEQ ID NO: 440857 - DNA, 81 bp, Homo sapiens; identical to SEQ ID NO: 264084
  chr11:78021125-78021206
  hypo

SEQ ID NO: 440858 - DNA, 347 bp, Homo sapiens; identical to SEQ ID NO: 264085
  chr11:78380585-78380932
  hypo

SEQ ID NO: 440859 - DNA, 48 bp, Homo sapiens; identical to SEQ ID NO: 314960
  chr11:78387336-78387384
  hypo

SEQ ID NO: 440860 - DNA, 73 bp, Homo sapiens; identical to SEQ ID NO: 264087
  chr11:78497977-78498050
  hypo

SEQ ID NO: 440861 - DNA, 42 bp, Homo sapiens; identical to SEQ ID NO: 264089
  chr11:78982381-78982423
  hypo

SEQ ID NO: 440862 - DNA, 103 bp, Homo sapiens; identical to SEQ ID NO: 264090
  chr11:82843543-82843646
  hypo

SEQ ID NO: 440863 - DNA, 218 bp, Homo sapiens; identical to SEQ ID NO: 264091
  chr11:82931326-82931544
  hypo

SEQ ID NO: 440864 - DNA, 136 bp, Homo sapiens; identical to SEQ ID NO: 264092
  chr11:85247648-85247784
  hypo

SEQ ID NO: 440865 - DNA, 42 bp, Homo sapiens; identical to SEQ ID NO: 264093
  chr11:85319011-85319053
  hypo

SEQ ID NO: 440866 - DNA, 35 bp, Homo sapiens; identical to SEQ ID NO: 314968
  chr11:85564731-85564766
  hypo

SEQ ID NO: 440867 - DNA, 169 bp, Homo sapiens; identical to SEQ ID NO: 214506
  chr11:85692740-85692909
  hypo

SEQ ID NO: 440868 - DNA, 180 bp, Homo sapiens; identical to SEQ ID NO: 264096
  chr11:85749362-85749542
  hypo

SEQ ID NO: 440869 - DNA, 83 bp, Homo sapiens; identical to SEQ ID NO: 264099
  chr11:86267641-86267724
  hypo

SEQ ID NO: 440870 - DNA, 174 bp, Homo sapiens; identical to SEQ ID NO: 264100
  chr11:86408236-86408410
  hypo

SEQ ID NO: 440871 - DNA, 31 bp, Homo sapiens; identical to SEQ ID NO: 264101
  chr11:86464895-86464926
  hypo

SEQ ID NO: 440872 - DNA, 1141 bp, Homo sapiens; identical to SEQ ID NO: 288371
  chr11:86510900-86512041
  hypo

SEQ ID NO: 440873 - DNA, 283 bp, Homo sapiens; identical to SEQ ID NO: 224181
  chr11:86513414-86513697
  hypo

SEQ ID NO: 440874 - DNA, 649 bp, Homo sapiens; identical to SEQ ID NO: 288373
  chr11:86665886-86666535
  hypo

SEQ ID NO: 440875 - DNA, 31 bp, Homo sapiens; identical to SEQ ID NO: 214512
  chr11:87434384-87434415
  hypo

SEQ ID NO: 440876 - DNA, 91 bp, Homo sapiens; identical to SEQ ID NO: 214513
  chr11:87434775-87434866
  hypo

SEQ ID NO: 440877 - DNA, 185 bp, Homo sapiens; identical to SEQ ID NO: 214514
  chr11:91435729-91435914
  hypo

SEQ ID NO: 440878 - DNA, 481 bp, Homo sapiens; identical to SEQ ID NO: 264105
  chr11:92648642-92649123
  hypo

SEQ ID NO: 440879 - DNA, 101 bp, Homo sapiens; identical to SEQ ID NO: 264106
  chr11:93065699-93065800
  hypo

SEQ ID NO: 440880 - DNA, 106 bp, Homo sapiens; identical to SEQ ID NO: 264108
  chr11:93214579-93214685
  hypo

SEQ ID NO: 440881 - DNA, 54 bp, Homo sapiens
  chr11:93476508-93476562
  hypo
gctctgccacccaggctggagtgcagttgaagcaggatattcctctgacccctt

SEQ ID NO: 440882 - DNA, 87 bp, Homo sapiens; identical to SEQ ID NO: 264112
  chr11:94163940-94164027
  hypo

SEQ ID NO: 440883 - DNA, 79 bp, Homo sapiens; identical to SEQ ID NO: 264114
  chr11:94390523-94390602
  hypo

SEQ ID NO: 440884 - DNA, 271 bp, Homo sapiens; identical to SEQ ID NO: 264115
  chr11:94532870-94533141
  hypo

SEQ ID NO: 440885 - DNA, 93 bp, Homo sapiens; identical to SEQ ID NO: 264118
  chr11:94924623-94924716
  hypo

SEQ ID NO: 440886 - DNA, 34 bp, Homo sapiens; identical to SEQ ID NO: 214518
  chr11:94952098-94952132
  hypo

SEQ ID NO: 440887 - DNA, 203 bp, Homo sapiens; identical to SEQ ID NO: 264120
  chr11:95526175-95526378
  hypo

SEQ ID NO: 440888 - DNA, 113 bp, Homo sapiens; identical to SEQ ID NO: 214519
  chr11:95631021-95631134
  hypo

SEQ ID NO: 440889 - DNA, 124 bp, Homo sapiens; identical to SEQ ID NO: 315001
  chr11:95658584-95658708
  hypo

SEQ ID NO: 440890 - DNA, 144 bp, Homo sapiens; identical to SEQ ID NO: 264123
  chr11:96117187-96117331
  hypo

SEQ ID NO: 440891 - DNA, 429 bp, Homo sapiens; identical to SEQ ID NO: 388916
  chr11:96123256-96123685
  hypo

SEQ ID NO: 440892 - DNA, 51 bp, Homo sapiens; identical to SEQ ID NO: 264124
  chr11:97332188-97332239
  hypo

SEQ ID NO: 440893 - DNA, 37 bp, Homo sapiens; identical to SEQ ID NO: 264126
  chr11:97936947-97936984
  hypo

SEQ ID NO: 440894 - DNA, 43 bp, Homo sapiens; identical to SEQ ID NO: 214522
  chr11:102245881-102245924
  hypo

SEQ ID NO: 440895 - DNA, 77 bp, Homo sapiens; identical to SEQ ID NO: 264128
  chr11:102246147-102246224
  hypo

SEQ ID NO: 440896 - DNA, 49 bp, Homo sapiens; identical to SEQ ID NO: 264129
  chr11:103870883-103870932
  hypo

SEQ ID NO: 440897 - DNA, 705 bp, Homo sapiens; identical to SEQ ID NO: 214523
  chr11:103907385-103908090
  hypo

SEQ ID NO: 440898 - DNA, 201 bp, Homo sapiens; identical to SEQ ID NO: 214524
  chr11:105850438-105850639
  hypo

SEQ ID NO: 440899 - DNA, 42 bp, Homo sapiens; identical to SEQ ID NO: 264132
  chr11:107696428-107696470
  hypo

SEQ ID NO: 440900 - DNA, 34 bp, Homo sapiens; identical to SEQ ID NO: 214527
  chr11:108031057-108031091
  hypo

SEQ ID NO: 440901 - DNA, 644 bp, Homo sapiens; identical to SEQ ID NO: 288429
  chr11:108368605-108369249
  hypo

SEQ ID NO: 440902 - DNA, 61 bp, Homo sapiens; identical to SEQ ID NO: 315018
  chr11:108603172-108603233
  hypo

SEQ ID NO: 440903 - DNA, 86 bp, Homo sapiens; identical to SEQ ID NO: 315019
  chr11:108603263-108603349
  hypo

SEQ ID NO: 440904 - DNA, 34 bp, Homo sapiens; identical to SEQ ID NO: 214528
  chr11:108674027-108674061
  hypo

SEQ ID NO: 440905 - DNA, 220 bp, Homo sapiens; identical to SEQ ID NO: 264140
  chr11:111500769-111500989
  hypo

SEQ ID NO: 440906 - DNA, 140 bp, Homo sapiens; identical to SEQ ID NO: 264141
  chr11:111558643-111558783
  hypo

SEQ ID NO: 440907 - DNA, 222 bp, Homo sapiens; identical to SEQ ID NO: 264142
  chr11:111574699-111574921
  hypo

SEQ ID NO: 440908 - DNA, 43 bp, Homo sapiens; identical to SEQ ID NO: 264143
  chr11:112066436-112066479
  hypo

SEQ ID NO: 440909 - DNA, 116 bp, Homo sapiens; identical to SEQ ID NO: 264148
  chr11:113688515-113688631
  hypo

SEQ ID NO: 440910 - DNA, 34 bp, Homo sapiens; identical to SEQ ID NO: 214530
  chr11:113747597-113747631
  hypo

SEQ ID NO: 440911 - DNA, 99 bp, Homo sapiens; identical to SEQ ID NO: 315030
  chr11:113902194-113902293
  hypo

SEQ ID NO: 440912 - DNA, 199 bp, Homo sapiens; identical to SEQ ID NO: 214531
  chr11:113921422-113921621
  hypo

SEQ ID NO: 440913 - DNA, 63 bp, Homo sapiens; identical to SEQ ID NO: 264152
  chr11:114013829-114013892
  hypo

SEQ ID NO: 440914 - DNA, 375 bp, Homo sapiens; identical to SEQ ID NO: 264153
  chr11:114069850-114070225
  hypo

SEQ ID NO: 440915 - DNA, 92 bp, Homo sapiens; identical to SEQ ID NO: 264154
  chr11:114082516-114082608
  hypo

SEQ ID NO: 440916 - DNA, 285 bp, Homo sapiens; identical to SEQ ID NO: 264155
  chr11:114103481-114103766
  hypo

SEQ ID NO: 440917 - DNA, 65 bp, Homo sapiens; identical to SEQ ID NO: 214535
  chr11:114127910-114127975
  hypo

SEQ ID NO: 440918 - DNA, 180 bp, Homo sapiens; identical to SEQ ID NO: 264159
  chr11:114284756-114284936
  hypo

SEQ ID NO: 440919 - DNA, 79 bp, Homo sapiens; identical to SEQ ID NO: 264160
  chr11:114483428-114483507
  hypo

SEQ ID NO: 440920 - DNA, 279 bp, Homo sapiens; identical to SEQ ID NO: 288452
  chr11:115372960-115373239
  hypo

SEQ ID NO: 440921 - DNA, 87 bp, Homo sapiens; identical to SEQ ID NO: 264161
  chr11:115939372-115939459
  hypo

SEQ ID NO: 440922 - DNA, 124 bp, Homo sapiens; identical to SEQ ID NO: 264162
  chr11:116132012-116132136
  hypo

SEQ ID NO: 440923 - DNA, 31 bp, Homo sapiens; identical to SEQ ID NO: 264163
  chr11:116256383-116256414
  hypo

SEQ ID NO: 440924 - DNA, 37 bp, Homo sapiens; identical to SEQ ID NO: 264164
  chr11:116365360-116365397
  hypo

SEQ ID NO: 440925 - DNA, 288 bp, Homo sapiens; identical to SEQ ID NO: 288458
  chr11:116450735-116451023
  hypo

SEQ ID NO: 440926 - DNA, 123 bp, Homo sapiens; identical to SEQ ID NO: 288459
  chr11:116451190-116451313
  hypo

SEQ ID NO: 440927 - DNA, 170 bp, Homo sapiens; identical to SEQ ID NO: 214538
  chr11:116591713-116591883
  hypo

SEQ ID NO: 440928 - DNA, 36 bp, Homo sapiens; identical to SEQ ID NO: 264167
  chr11:116672910-116672946
  hypo

SEQ ID NO: 440929 - DNA, 33 bp, Homo sapiens; identical to SEQ ID NO: 214539
  chr11:116959822-116959855
  hypo

SEQ ID NO: 440930 - DNA, 35 bp, Homo sapiens; identical to SEQ ID NO: 264171
  chr11:116960726-116960761
  hypo

SEQ ID NO: 440931 - DNA, 255 bp, Homo sapiens; identical to SEQ ID NO: 264173
  chr11:117054572-117054827
  hypo

SEQ ID NO: 440932 - DNA, 104 bp, Homo sapiens; identical to SEQ ID NO: 214541
  chr11:117056079-117056183
  hypo

SEQ ID NO: 440933 - DNA, 492 bp, Homo sapiens; identical to SEQ ID NO: 264175
  chr11:117058317-117058809
  hypo

SEQ ID NO: 440934 - DNA, 238 bp, Homo sapiens; identical to SEQ ID NO: 264176
  chr11:117062556-117062794
  hypo

SEQ ID NO: 440935 - DNA, 100 bp, Homo sapiens; identical to SEQ ID NO: 315063
  chr11:117068432-117068532
  hypo

SEQ ID NO: 440936 - DNA, 70 bp, Homo sapiens; identical to SEQ ID NO: 214543
  chr11:117074288-117074358
  hypo

SEQ ID NO: 440937 - DNA, 115 bp, Homo sapiens; identical to SEQ ID NO: 214546
  chr11:117097881-117097996
  hypo

SEQ ID NO: 440938 - DNA, 679 bp, Homo sapiens; identical to SEQ ID NO: 288466
  chr11:117186458-117187137
  hypo

SEQ ID NO: 440939 - DNA, 120 bp, Homo sapiens; identical to SEQ ID NO: 214548
  chr11:117188182-117188302
  hypo

SEQ ID NO: 440940 - DNA, 150 bp, Homo sapiens; identical to SEQ ID NO: 214550
  chr11:117267876-117268026
  hypo

SEQ ID NO: 440941 - DNA, 231 bp, Homo sapiens; identical to SEQ ID NO: 214551
  chr11:117335664-117335895
  hypo

SEQ ID NO: 440942 - DNA, 266 bp, Homo sapiens; identical to SEQ ID NO: 264187
  chr11:117347130-117347396
  hypo

SEQ ID NO: 440943 - DNA, 250 bp, Homo sapiens; identical to SEQ ID NO: 224203
  chr11:117352704-117352954
  hypo

SEQ ID NO: 440944 - DNA, 93 bp, Homo sapiens; identical to SEQ ID NO: 315076
  chr11:117376345-117376438
  hypo

SEQ ID NO: 440945 - DNA, 198 bp, Homo sapiens; identical to SEQ ID NO: 214552
  chr11:117380436-117380634
  hypo

SEQ ID NO: 440946 - DNA, 381 bp, Homo sapiens; identical to SEQ ID NO: 214553
  chr11:117389166-117389547
  hypo

SEQ ID NO: 440947 - DNA, 180 bp, Homo sapiens; identical to SEQ ID NO: 264191
  chr11:117391899-117392079
  hypo

SEQ ID NO: 440948 - DNA, 114 bp, Homo sapiens; identical to SEQ ID NO: 264192
  chr11:117403090-117403204
  hypo

SEQ ID NO: 440949 - DNA, 206 bp, Homo sapiens; identical to SEQ ID NO: 264193
  chr11:117488134-117488340
  hypo

SEQ ID NO: 440950 - DNA, 82 bp, Homo sapiens; identical to SEQ ID NO: 264194
  chr11:117497923-117498005
  hypo

SEQ ID NO: 440951 - DNA, 243 bp, Homo sapiens; identical to SEQ ID NO: 264195
  chr11:117498035-117498278
  hypo

SEQ ID NO: 440952 - DNA, 264 bp, Homo sapiens; identical to SEQ ID NO: 288469
  chr11:117666746-117667010
  hypo

SEQ ID NO: 440953 - DNA, 276 bp, Homo sapiens; identical to SEQ ID NO: 224206
  chr11:117856650-117856926
  hypo

SEQ ID NO: 440954 - DNA, 100 bp, Homo sapiens; identical to SEQ ID NO: 264196
  chr11:117949567-117949667
  hypo

SEQ ID NO: 440955 - DNA, 125 bp, Homo sapiens; identical to SEQ ID NO: 214554
  chr11:117957555-117957680
  hypo

SEQ ID NO: 440956 - DNA, 32 bp, Homo sapiens; identical to SEQ ID NO: 214555
  chr11:117977482-117977514
  hypo

SEQ ID NO: 440957 - DNA, 39 bp, Homo sapiens; identical to SEQ ID NO: 214556
  chr11:117994509-117994548
  hypo

SEQ ID NO: 440958 - DNA, 87 bp, Homo sapiens; identical to SEQ ID NO: 264200
  chr11:118088742-118088829
  hypo

SEQ ID NO: 440959 - DNA, 200 bp, Homo sapiens; identical to SEQ ID NO: 264201
  chr11:118133141-118133341
  hypo

SEQ ID NO: 440960 - DNA, 44 bp, Homo sapiens; identical to SEQ ID NO: 264202
  chr11:118772066-118772110
  hypo

SEQ ID NO: 440961 - DNA, 511 bp, Homo sapiens; identical to SEQ ID NO: 264203
  chr11:118773643-118774154
  hypo

SEQ ID NO: 440962 - DNA, 85 bp, Homo sapiens; identical to SEQ ID NO: 264204
  chr11:118780943-118781028
  hypo

SEQ ID NO: 440963 - DNA, 156 bp, Homo sapiens; identical to SEQ ID NO: 288488
  chr11:119039957-119040113
  hypo

SEQ ID NO: 440964 - DNA, 31 bp, Homo sapiens; identical to SEQ ID NO: 264205
  chr11:119040421-119040452
  hypo

SEQ ID NO: 440965 - DNA, 261 bp, Homo sapiens; identical to SEQ ID NO: 214557
  chr11:119044183-119044444
  hypo

SEQ ID NO: 440966 - DNA, 54 bp, Homo sapiens; identical to SEQ ID NO: 264207
  chr11:119052936-119052990
  hypo

SEQ ID NO: 440967 - DNA, 236 bp, Homo sapiens; identical to SEQ ID NO: 202736
  chr11:119103176-119103412
  hypo

SEQ ID NO: 440968 - DNA, 83 bp, Homo sapiens; identical to SEQ ID NO: 202737
  chr11:119142431-119142514
  hypo

SEQ ID NO: 440969 - DNA, 106 bp, Homo sapiens; identical to SEQ ID NO: 202738
  chr11:119144575-119144681
  hypo

SEQ ID NO: 440970 - DNA, 64 bp, Homo sapiens; identical to SEQ ID NO: 421468
  chr11:119145547-119145611
  hypo

SEQ ID NO: 440971 - DNA, 142 bp, Homo sapiens; identical to SEQ ID NO: 202740
  chr11:119146702-119146844
  hypo

SEQ ID NO: 440972 - DNA, 102 bp, Homo sapiens; identical to SEQ ID NO: 202741
  chr11:119148462-119148564
  hypo

SEQ ID NO: 440973 - DNA, 291 bp, Homo sapiens; identical to SEQ ID NO: 202742
  chr11:119148945-119149236
  hypo

SEQ ID NO: 440974 - DNA, 158 bp, Homo sapiens; identical to SEQ ID NO: 202743
  chr11:119149265-119149423
  hypo

SEQ ID NO: 440975 - DNA, 492 bp, Homo sapiens; identical to SEQ ID NO: 202744
  chr11:119155748-119156240
  hypo

SEQ ID NO: 440976 - DNA, 126 bp, Homo sapiens; identical to SEQ ID NO: 202745
  chr11:119167631-119167757
  hypo

SEQ ID NO: 440977 - DNA, 86 bp, Homo sapiens; identical to SEQ ID NO: 202746
  chr11:119168098-119168184
  hypo

SEQ ID NO: 440978 - DNA, 175 bp, Homo sapiens; identical to SEQ ID NO: 202747
  chr11:119169061-119169236
  hypo

SEQ ID NO: 440979 - DNA, 100 bp, Homo sapiens; identical to SEQ ID NO: 202748
  chr11:119170361-119170461
  hypo

SEQ ID NO: 440980 - DNA, 308 bp, Homo sapiens; identical to SEQ ID NO: 264208
  chr11:119243048-119243356
  hypo

SEQ ID NO: 440981 - DNA, 190 bp, Homo sapiens; identical to SEQ ID NO: 264209
  chr11:119244100-119244290
  hypo

SEQ ID NO: 440982 - DNA, 55 bp, Homo sapiens; identical to SEQ ID NO: 264211
  chr11:119352936-119352991
  hypo

SEQ ID NO: 440983 - DNA, 90 bp, Homo sapiens; identical to SEQ ID NO: 214573
  chr11:119405812-119405902
  hypo

SEQ ID NO: 440984 - DNA, 85 bp, Homo sapiens; identical to SEQ ID NO: 214574
  chr11:119493220-119493305
  hypo

SEQ ID NO: 440985 - DNA, 67 bp, Homo sapiens; identical to SEQ ID NO: 214575
  chr11:119493693-119493760
  hypo

SEQ ID NO: 440986 - DNA, 68 bp, Homo sapiens; identical to SEQ ID NO: 264217
  chr11:119506662-119506730
  hypo

SEQ ID NO: 440987 - DNA, 217 bp, Homo sapiens; identical to SEQ ID NO: 315124
  chr11:119523963-119524180
  hypo

SEQ ID NO: 440988 - DNA, 39 bp, Homo sapiens; identical to SEQ ID NO: 214578
  chr11:119524226-119524265
  hypo

SEQ ID NO: 440989 - DNA, 149 bp, Homo sapiens; identical to SEQ ID NO: 264220
  chr11:119531882-119532031
  hypo

SEQ ID NO: 440990 - DNA, 122 bp, Homo sapiens; identical to SEQ ID NO: 214579
  chr11:119532474-119532596
  hypo

SEQ ID NO: 440991 - DNA, 186 bp, Homo sapiens; identical to SEQ ID NO: 264223
  chr11:119536817-119537003
  hypo

SEQ ID NO: 440992 - DNA, 159 bp, Homo sapiens; identical to SEQ ID NO: 264224
  chr11:119540985-119541144
  hypo

SEQ ID NO: 440993 - DNA, 99 bp, Homo sapiens; identical to SEQ ID NO: 214581
  chr11:119541630-119541729
  hypo

SEQ ID NO: 440994 - DNA, 637 bp, Homo sapiens; identical to SEQ ID NO: 264226
  chr11:119548209-119548846
  hypo

SEQ ID NO: 440995 - DNA, 383 bp, Homo sapiens; identical to SEQ ID NO: 214583
  chr11:119549111-119549494
  hypo

SEQ ID NO: 440996 - DNA, 161 bp, Homo sapiens; identical to SEQ ID NO: 264228
  chr11:119549862-119550023
  hypo

SEQ ID NO: 440997 - DNA, 73 bp, Homo sapiens; identical to SEQ ID NO: 214585
  chr11:119576250-119576323
  hypo

SEQ ID NO: 440998 - DNA, 158 bp, Homo sapiens; identical to SEQ ID NO: 214588
  chr11:119588398-119588556
  hypo

SEQ ID NO: 440999 - DNA, 269 bp, Homo sapiens; identical to SEQ ID NO: 202753
  chr11:119598243-119598512
  hypo

SEQ ID NO: 441000 - DNA, 57 bp, Homo sapiens; identical to SEQ ID NO: 202755
  chr11:119600032-119600089
  hypo

SEQ ID NO: 441001 - DNA, 40 bp, Homo sapiens; identical to SEQ ID NO: 264236
  chr11:119602212-119602252
  hypo

SEQ ID NO: 441002 - DNA, 32 bp, Homo sapiens; identical to SEQ ID NO: 264238
  chr11:119681395-119681427
  hypo

SEQ ID NO: 441003 - DNA, 130 bp, Homo sapiens; identical to SEQ ID NO: 264239
  chr11:119757773-119757903
  hypo

SEQ ID NO: 441004 - DNA, 331 bp, Homo sapiens; identical to SEQ ID NO: 214595
  chr11:119994862-119995193
  hypo

SEQ ID NO: 441005 - DNA, 77 bp, Homo sapiens; identical to SEQ ID NO: 264244
  chr11:120041663-120041740
  hypo

SEQ ID NO: 441006 - DNA, 153 bp, Homo sapiens; identical to SEQ ID NO: 264245
  chr11:120043749-120043902
  hypo

SEQ ID NO: 441007 - DNA, 629 bp, Homo sapiens; identical to SEQ ID NO: 288519
  chr11:120195891-120196520
  hypo

SEQ ID NO: 441008 - DNA, 142 bp, Homo sapiens; identical to SEQ ID NO: 202758
  chr11:120206447-120206589
  hypo

SEQ ID NO: 441009 - DNA, 274 bp, Homo sapiens; identical to SEQ ID NO: 202759
  chr11:120207766-120208040
  hypo

SEQ ID NO: 441010 - DNA, 40 bp, Homo sapiens; identical to SEQ ID NO: 264246
  chr11:120221759-120221799
  hypo

SEQ ID NO: 441011 - DNA, 271 bp, Homo sapiens; identical to SEQ ID NO: 288522
  chr11:120382097-120382368
  hypo

SEQ ID NO: 441012 - DNA, 206 bp, Homo sapiens; identical to SEQ ID NO: 288523
  chr11:120382448-120382654
  hypo

SEQ ID NO: 441013 - DNA, 72 bp, Homo sapiens; identical to SEQ ID NO: 264250
  chr11:120446084-120446156
  hypo

SEQ ID NO: 441014 - DNA, 112 bp, Homo sapiens; identical to SEQ ID NO: 264251
  chr11:120772901-120773013
  hypo

SEQ ID NO: 441015 - DNA, 32 bp, Homo sapiens; identical to SEQ ID NO: 264252
  chr11:120908934-120908966
  hypo

SEQ ID NO: 441016 - DNA, 35 bp, Homo sapiens; identical to SEQ ID NO: 214602
  chr11:120950504-120950539
  hypo

SEQ ID NO: 441017 - DNA, 348 bp, Homo sapiens; identical to SEQ ID NO: 315172
  chr11:121000556-121000904
  hypo

SEQ ID NO: 441018 - DNA, 105 bp, Homo sapiens; identical to SEQ ID NO: 224232
  chr11:121323530-121323635
  hypo

SEQ ID NO: 441019 - DNA, 35 bp, Homo sapiens; identical to SEQ ID NO: 264257
  chr11:121323736-121323771
  hypo

SEQ ID NO: 441020 - DNA, 216 bp, Homo sapiens; identical to SEQ ID NO: 264258
  chr11:121348737-121348953
  hypo

SEQ ID NO: 441021 - DNA, 103 bp, Homo sapiens; identical to SEQ ID NO: 264260
  chr11:121516994-121517097
  hypo

SEQ ID NO: 441022 - DNA, 240 bp, Homo sapiens; identical to SEQ ID NO: 214607
  chr11:121665534-121665774
  hypo

SEQ ID NO: 441023 - DNA, 147 bp, Homo sapiens; identical to SEQ ID NO: 264262
  chr11:122621690-122621837
  hypo

SEQ ID NO: 441024 - DNA, 260 bp, Homo sapiens; identical to SEQ ID NO: 264263
  chr11:122628720-122628980
  hypo

SEQ ID NO: 441025 - DNA, 104 bp, Homo sapiens; identical to SEQ ID NO: 214609
  chr11:122632802-122632906
  hypo

SEQ ID NO: 441026 - DNA, 120 bp, Homo sapiens; identical to SEQ ID NO: 264265
  chr11:122945970-122946090
  hypo

SEQ ID NO: 441027 - DNA, 39 bp, Homo sapiens; identical to SEQ ID NO: 264266
  chr11:123027337-123027376
  hypo

SEQ ID NO: 441028 - DNA, 44 bp, Homo sapiens; identical to SEQ ID NO: 264267
  chr11:123614727-123614771
  hypo

SEQ ID NO: 441029 - DNA, 69 bp, Homo sapiens; identical to SEQ ID NO: 214612
  chr11:124638960-124639029
  hypo

SEQ ID NO: 441030 - DNA, 85 bp, Homo sapiens; identical to SEQ ID NO: 214613
  chr11:124639059-124639144
  hypo

SEQ ID NO: 441031 - DNA, 47 bp, Homo sapiens; identical to SEQ ID NO: 288552
  chr11:124709070-124709117
  hypo

SEQ ID NO: 441032 - DNA, 249 bp, Homo sapiens; identical to SEQ ID NO: 202775
  chr11:124709233-124709482
  hypo

SEQ ID NO: 441033 - DNA, 210 bp, Homo sapiens; identical to SEQ ID NO: 202776
  chr11:124709856-124710066
  hypo

SEQ ID NO: 441034 - DNA, 48 bp, Homo sapiens; identical to SEQ ID NO: 288555
  chr11:124736457-124736505
  hypo

SEQ ID NO: 441035 - DNA, 141 bp, Homo sapiens; identical to SEQ ID NO: 264271
  chr11:124792306-124792447
  hypo

SEQ ID NO: 441036 - DNA, 324 bp, Homo sapiens; identical to SEQ ID NO: 264273
  chr11:124948906-124949230
  hypo

SEQ ID NO: 441037 - DNA, 163 bp, Homo sapiens; identical to SEQ ID NO: 264274
  chr11:125211589-125211752
  hypo

SEQ ID NO: 441038 - DNA, 81 bp, Homo sapiens; identical to SEQ ID NO: 264275
  chr11:125758706-125758787
  hypo

SEQ ID NO: 441039 - DNA, 70 bp, Homo sapiens; identical to SEQ ID NO: 264276
  chr11:125791137-125791207
  hypo

SEQ ID NO: 441040 - DNA, 178 bp, Homo sapiens; identical to SEQ ID NO: 264278
  chr11:125824157-125824335
  hypo

SEQ ID NO: 441041 - DNA, 108 bp, Homo sapiens; identical to SEQ ID NO: 264279
  chr11:125827969-125828077
  hypo

SEQ ID NO: 441042 - DNA, 31 bp, Homo sapiens; identical to SEQ ID NO: 214619
  chr11:125836034-125836065
  hypo

SEQ ID NO: 441043 - DNA, 178 bp, Homo sapiens; identical to SEQ ID NO: 214620
  chr11:125902449-125902627
  hypo

SEQ ID NO: 441044 - DNA, 56 bp, Homo sapiens; identical to SEQ ID NO: 202779
  chr11:125932494-125932550
  hypo

SEQ ID NO: 441045 - DNA, 436 bp, Homo sapiens; identical to SEQ ID NO: 8456
  chr11:125932556-125932992
  hypo

SEQ ID NO: 441046 - DNA, 127 bp, Homo sapiens; identical to SEQ ID NO: 202781
  chr11:125933201-125933328
  hypo

SEQ ID NO: 441047 - DNA, 40 bp, Homo sapiens; identical to SEQ ID NO: 214624
  chr11:125945776-125945816
  hypo

SEQ ID NO: 441048 - DNA, 156 bp, Homo sapiens; identical to SEQ ID NO: 264283
  chr11:125954978-125955134
  hypo

SEQ ID NO: 441049 - DNA, 124 bp, Homo sapiens; identical to SEQ ID NO: 214626
  chr11:125988689-125988813
  hypo

SEQ ID NO: 441050 - DNA, 182 bp, Homo sapiens; identical to SEQ ID NO: 83335
  chr11:126030295-126030477
  hypo

SEQ ID NO: 441051 - DNA, 691 bp, Homo sapiens; identical to SEQ ID NO: 288570
  chr11:126225361-126226052
  hypo

SEQ ID NO: 441052 - DNA, 125 bp, Homo sapiens; identical to SEQ ID NO: 264291
  chr11:126278421-126278546
  hypo

SEQ ID NO: 441053 - DNA, 100 bp, Homo sapiens; identical to SEQ ID NO: 264292
  chr11:126578518-126578618
  hypo

SEQ ID NO: 441054 - DNA, 206 bp, Homo sapiens; identical to SEQ ID NO: 214629
  chr11:126619095-126619301
  hypo

SEQ ID NO: 441055 - DNA, 32 bp, Homo sapiens; identical to SEQ ID NO: 264294
  chr11:127323962-127323994
  hypo

SEQ ID NO: 441056 - DNA, 100 bp, Homo sapiens; identical to SEQ ID NO: 264295
  chr11:128290555-128290655
  hypo

SEQ ID NO: 441057 - DNA, 273 bp, Homo sapiens; identical to SEQ ID NO: 264296
  chr11:128350030-128350303
  hypo

SEQ ID NO: 441058 - DNA, 242 bp, Homo sapiens; identical to SEQ ID NO: 315225
  chr11:128634629-128634871
  hypo

SEQ ID NO: 441059 - DNA, 81 bp, Homo sapiens; identical to SEQ ID NO: 315226
  chr11:128634905-128634986
  hypo

SEQ ID NO: 441060 - DNA, 160 bp, Homo sapiens; identical to SEQ ID NO: 214632
  chr11:128737284-128737444
  hypo

SEQ ID NO: 441061 - DNA, 788 bp, Homo sapiens; identical to SEQ ID NO: 264300
  chr11:128812234-128813022
  hypo

SEQ ID NO: 441062 - DNA, 79 bp, Homo sapiens; identical to SEQ ID NO: 214635
  chr11:129207798-129207877
  hypo

SEQ ID NO: 441063 - DNA, 159 bp, Homo sapiens; identical to SEQ ID NO: 264302
  chr11:129315219-129315378
  hypo

SEQ ID NO: 441064 - DNA, 184 bp, Homo sapiens; identical to SEQ ID NO: 264303
  chr11:129575147-129575331
  hypo

SEQ ID NO: 441065 - DNA, 94 bp, Homo sapiens; identical to SEQ ID NO: 264304
  chr11:129686910-129687004
  hypo

SEQ ID NO: 441066 - DNA, 145 bp, Homo sapiens; identical to SEQ ID NO: 315235
  chr11:129732146-129732291
  hypo

SEQ ID NO: 441067 - DNA, 299 bp, Homo sapiens; identical to SEQ ID NO: 264306
  chr11:129742115-129742414
  hypo

SEQ ID NO: 441068 - DNA, 216 bp, Homo sapiens; identical to SEQ ID NO: 202789
  chr11:129765560-129765776
  hypo

SEQ ID NO: 441069 - DNA, 288 bp, Homo sapiens; identical to SEQ ID NO: 214637
  chr11:129775501-129775789
  hypo

SEQ ID NO: 441070 - DNA, 125 bp, Homo sapiens; identical to SEQ ID NO: 214638
  chr11:129785494-129785619
  hypo

SEQ ID NO: 441071 - DNA, 73 bp, Homo sapiens; identical to SEQ ID NO: 214639
  chr11:129802032-129802105
  hypo

SEQ ID NO: 441072 - DNA, 270 bp, Homo sapiens; identical to SEQ ID NO: 264311
  chr11:129816769-129817039
  hypo

SEQ ID NO: 441073 - DNA, 98 bp, Homo sapiens; identical to SEQ ID NO: 214641
  chr11:129859713-129859811
  hypo

SEQ ID NO: 441074 - DNA, 41 bp, Homo sapiens; identical to SEQ ID NO: 264313
  chr11:129897979-129898020
  hypo

SEQ ID NO: 441075 - DNA, 190 bp, Homo sapiens; identical to SEQ ID NO: 214642
  chr11:129902831-129903021
  hypo

SEQ ID NO: 441076 - DNA, 238 bp, Homo sapiens; identical to SEQ ID NO: 224248
  chr11:129939594-129939832
  hypo

SEQ ID NO: 441077 - DNA, 36 bp, Homo sapiens; identical to SEQ ID NO: 264315
  chr11:129968002-129968038
  hypo

SEQ ID NO: 441078 - DNA, 36 bp, Homo sapiens; identical to SEQ ID NO: 264316
  chr11:129968278-129968314
  hypo

SEQ ID NO: 441079 - DNA, 80 bp, Homo sapiens; identical to SEQ ID NO: 264318
  chr11:130013341-130013421
  hypo

SEQ ID NO: 441080 - DNA, 269 bp, Homo sapiens; identical to SEQ ID NO: 170301
  chr11:130067921-130068190
  hypo

SEQ ID NO: 441081 - DNA, 84 bp, Homo sapiens; identical to SEQ ID NO: 264323
  chr11:130074709-130074793
  hypo

SEQ ID NO: 441082 - DNA, 42 bp, Homo sapiens; identical to SEQ ID NO: 264324
  chr11:130075918-130075960
  hypo

SEQ ID NO: 441083 - DNA, 173 bp, Homo sapiens; identical to SEQ ID NO: 264327
  chr11:130250620-130250793
  hypo

SEQ ID NO: 441084 - DNA, 44 bp, Homo sapiens; identical to SEQ ID NO: 214651
  chr11:130264261-130264305
  hypo

SEQ ID NO: 441085 - DNA, 359 bp, Homo sapiens; identical to SEQ ID NO: 288593
  chr11:130319158-130319517
  hypo

SEQ ID NO: 441086 - DNA, 124 bp, Homo sapiens; identical to SEQ ID NO: 202793
  chr11:130319633-130319757
  hypo

SEQ ID NO: 441087 - DNA, 81 bp, Homo sapiens; identical to SEQ ID NO: 214654
  chr11:130356098-130356179
  hypo

SEQ ID NO: 441088 - DNA, 200 bp, Homo sapiens; identical to SEQ ID NO: 214656
  chr11:131648918-131649118
  hypo

SEQ ID NO: 441089 - DNA, 130 bp, Homo sapiens; identical to SEQ ID NO: 264333
  chr11:131707599-131707729
  hypo

SEQ ID NO: 441090 - DNA, 157 bp, Homo sapiens; identical to SEQ ID NO: 288602
  chr11:132864209-132864366
  hypo

SEQ ID NO: 441091 - DNA, 212 bp, Homo sapiens; identical to SEQ ID NO: 264334
  chr11:133076714-133076926
  hypo

SEQ ID NO: 441092 - DNA, 68 bp, Homo sapiens; identical to SEQ ID NO: 264335
  chr11:133233052-133233120
  hypo

SEQ ID NO: 441093 - DNA, 33 bp, Homo sapiens; identical to SEQ ID NO: 264337
  chr11:133704391-133704424
  hypo

SEQ ID NO: 441094 - DNA, 79 bp, Homo sapiens; identical to SEQ ID NO: 264339
  chr11:133771363-133771442
  hypo

SEQ ID NO: 441095 - DNA, 34 bp, Homo sapiens; identical to SEQ ID NO: 264340
  chr11:133776833-133776867
  hypo

SEQ ID NO: 441096 - DNA, 113 bp, Homo sapiens; identical to SEQ ID NO: 214659
  chr11:133777670-133777783
  hypo

SEQ ID NO: 441097 - DNA, 294 bp, Homo sapiens; identical to SEQ ID NO: 214660
  chr11:133777845-133778139
  hypo

SEQ ID NO: 441098 - DNA, 35 bp, Homo sapiens; identical to SEQ ID NO: 214661
  chr11:133790244-133790279
  hypo

SEQ ID NO: 441099 - DNA, 178 bp, Homo sapiens
  chr11:133790369-133790547
  hypo
aggtggggggcagtcctcgggggaggccggccttgggctgcagactctcgggcacatcacagggtggcagctggtgggggaacatcatcgctggggtctccagccccccgaaggggaattctggccggccccagggctcaggggagcgccctcctgtaggtgtctgagtcaagggcag

SEQ ID NO: 441100 - DNA, 54 bp, Homo sapiens; identical to SEQ ID NO: 264343
  chr11:133795668-133795722
  hypo

SEQ ID NO: 441101 - DNA, 183 bp, Homo sapiens; identical to SEQ ID NO: 214663
  chr11:133799603-133799786
  hypo

SEQ ID NO: 441102 - DNA, 259 bp, Homo sapiens; identical to SEQ ID NO: 264345
  chr11:133800161-133800420
  hypo

SEQ ID NO: 441103 - DNA, 100 bp, Homo sapiens; identical to SEQ ID NO: 214665
  chr11:133804995-133805095
  hypo

SEQ ID NO: 441104 - DNA, 379 bp, Homo sapiens; identical to SEQ ID NO: 264347
  chr11:133805532-133805911
  hypo

SEQ ID NO: 441105 - DNA, 246 bp, Homo sapiens; identical to SEQ ID NO: 264348
  chr11:133915023-133915269
  hypo

SEQ ID NO: 441106 - DNA, 187 bp, Homo sapiens; identical to SEQ ID NO: 214669
  chr11:134015727-134015914
  hypo

SEQ ID NO: 441107 - DNA, 138 bp, Homo sapiens; identical to SEQ ID NO: 214670
  chr11:134023320-134023458
  hypo

SEQ ID NO: 441108 - DNA, 52 bp, Homo sapiens; identical to SEQ ID NO: 264352
  chr11:134027875-134027927
  hypo

SEQ ID NO: 441109 - DNA, 35 bp, Homo sapiens; identical to SEQ ID NO: 214671
  chr11:134071993-134072028
  hypo

SEQ ID NO: 441110 - DNA, 94 bp, Homo sapiens; identical to SEQ ID NO: 264354
  chr11:134075571-134075665
  hypo

SEQ ID NO: 441111 - DNA, 97 bp, Homo sapiens; identical to SEQ ID NO: 214672
  chr11:134083475-134083572
  hypo

SEQ ID NO: 441112 - DNA, 37 bp, Homo sapiens; identical to SEQ ID NO: 264357
  chr11:134152957-134152994
  hypo

SEQ ID NO: 441113 - DNA, 36 bp, Homo sapiens; identical to SEQ ID NO: 264358
  chr11:134153234-134153270
  hypo

SEQ ID NO: 441114 - DNA, 62 bp, Homo sapiens; identical to SEQ ID NO: 264359
  chr11:134182296-134182358
  hypo

SEQ ID NO: 441115 - DNA, 386 bp, Homo sapiens; identical to SEQ ID NO: 214674
  chr11:134212673-134213059
  hypo

SEQ ID NO: 441116 - DNA, 32 bp, Homo sapiens; identical to SEQ ID NO: 264361
  chr11:134222550-134222582
  hypo

SEQ ID NO: 441117 - DNA, 32 bp, Homo sapiens; identical to SEQ ID NO: 264362
  chr11:134222822-134222854
  hypo

SEQ ID NO: 441118 - DNA, 168 bp, Homo sapiens; identical to SEQ ID NO: 264363
  chr11:134227491-134227659
  hypo

SEQ ID NO: 441119 - DNA, 386 bp, Homo sapiens; identical to SEQ ID NO: 214675
  chr11:134228005-134228391
  hypo

SEQ ID NO: 441120 - DNA, 233 bp, Homo sapiens; identical to SEQ ID NO: 264365
  chr11:134232150-134232383
  hypo

SEQ ID NO: 441121 - DNA, 420 bp, Homo sapiens; identical to SEQ ID NO: 214676
  chr11:134252615-134253035
  hypo

SEQ ID NO: 441122 - DNA, 514 bp, Homo sapiens; identical to SEQ ID NO: 288619
  chr11:134282336-134282850
  hypo

SEQ ID NO: 441123 - DNA, 57 bp, Homo sapiens; identical to SEQ ID NO: 264368
  chr11:134356383-134356440
  hypo

SEQ ID NO: 441124 - DNA, 196 bp, Homo sapiens; identical to SEQ ID NO: 264369
  chr11:134378732-134378928
  hypo

SEQ ID NO: 441125 - DNA, 329 bp, Homo sapiens; identical to SEQ ID NO: 264370
  chr11:134401569-134401898
  hypo

SEQ ID NO: 441126 - DNA, 344 bp, Homo sapiens; identical to SEQ ID NO: 264372
  chr11:134526969-134527313
  hypo

SEQ ID NO: 441127 - DNA, 33 bp, Homo sapiens; identical to SEQ ID NO: 264373
  chr11:134534372-134534405
  hypo

SEQ ID NO: 441128 - DNA, 234 bp, Homo sapiens; identical to SEQ ID NO: 264374
  chr11:134571549-134571783
  hypo

SEQ ID NO: 441129 - DNA, 32 bp, Homo sapiens; identical to SEQ ID NO: 264376
  chr11:134831337-134831369
  hypo

SEQ ID NO: 441130 - DNA, 40 bp, Homo sapiens; identical to SEQ ID NO: 264379
  chr12:287644-287684
  hypo

SEQ ID NO: 441131 - DNA, 95 bp, Homo sapiens; identical to SEQ ID NO: 264380
  chr12:318480-318575
  hypo

SEQ ID NO: 441132 - DNA, 169 bp, Homo sapiens; identical to SEQ ID NO: 264381
  chr12:334115-334284
  hypo

SEQ ID NO: 441133 - DNA, 137 bp, Homo sapiens; identical to SEQ ID NO: 264382
  chr12:363089-363226
  hypo

SEQ ID NO: 441134 - DNA, 148 bp, Homo sapiens; identical to SEQ ID NO: 264384
  chr12:563165-563313
  hypo

SEQ ID NO: 441135 - DNA, 305 bp, Homo sapiens; identical to SEQ ID NO: 288621
  chr12:569665-569970
  hypo

SEQ ID NO: 441136 - DNA, 187 bp, Homo sapiens; identical to SEQ ID NO: 214681
  chr12:646784-646971
  hypo

SEQ ID NO: 441137 - DNA, 108 bp, Homo sapiens; identical to SEQ ID NO: 214682
  chr12:658733-658841
  hypo

SEQ ID NO: 441138 - DNA, 95 bp, Homo sapiens; identical to SEQ ID NO: 315334
  chr12:665735-665830
  hypo

SEQ ID NO: 441139 - DNA, 123 bp, Homo sapiens; identical to SEQ ID NO: 315335
  chr12:665901-666024
  hypo

SEQ ID NO: 441140 - DNA, 217 bp, Homo sapiens; identical to SEQ ID NO: 264388
  chr12:666656-666873
  hypo

SEQ ID NO: 441141 - DNA, 91 bp, Homo sapiens; identical to SEQ ID NO: 214683
  chr12:667201-667292
  hypo

SEQ ID NO: 441142 - DNA, 148 bp, Homo sapiens; identical to SEQ ID NO: 214684
  chr12:670522-670670
  hypo

SEQ ID NO: 441143 - DNA, 799 bp, Homo sapiens; identical to SEQ ID NO: 264391
  chr12:674438-675237
  hypo

SEQ ID NO: 441144 - DNA, 209 bp, Homo sapiens; identical to SEQ ID NO: 202807
  chr12:694940-695149
  hypo

SEQ ID NO: 441145 - DNA, 197 bp, Homo sapiens; identical to SEQ ID NO: 264393
  chr12:718161-718358
  hypo

SEQ ID NO: 441146 - DNA, 71 bp, Homo sapiens; identical to SEQ ID NO: 264394
  chr12:724161-724232
  hypo

SEQ ID NO: 441147 - DNA, 38 bp, Homo sapiens; identical to SEQ ID NO: 214686
  chr12:750707-750745
  hypo

SEQ ID NO: 441148 - DNA, 157 bp, Homo sapiens; identical to SEQ ID NO: 264396
  chr12:751045-751202
  hypo

SEQ ID NO: 441149 - DNA, 39 bp, Homo sapiens; identical to SEQ ID NO: 264397
  chr12:885896-885935
  hypo

SEQ ID NO: 441150 - DNA, 206 bp, Homo sapiens; identical to SEQ ID NO: 214688
  chr12:934133-934339
  hypo

SEQ ID NO: 441151 - DNA, 236 bp, Homo sapiens; identical to SEQ ID NO: 264400
  chr12:974283-974519
  hypo

SEQ ID NO: 441152 - DNA, 69 bp, Homo sapiens; identical to SEQ ID NO: 264401
  chr12:1005679-1005748
  hypo

SEQ ID NO: 441153 - DNA, 319 bp, Homo sapiens; identical to SEQ ID NO: 264402
  chr12:1026088-1026407
  hypo

SEQ ID NO: 441154 - DNA, 84 bp, Homo sapiens; identical to SEQ ID NO: 264405
  chr12:1353962-1354046
  hypo

SEQ ID NO: 441155 - DNA, 99 bp, Homo sapiens; identical to SEQ ID NO: 214691
  chr12:1411786-1411885
  hypo

SEQ ID NO: 441156 - DNA, 69 bp, Homo sapiens; identical to SEQ ID NO: 264407
  chr12:1476691-1476760
  hypo

SEQ ID NO: 441157 - DNA, 175 bp, Homo sapiens; identical to SEQ ID NO: 264408
  chr12:1553850-1554025
  hypo

SEQ ID NO: 441158 - DNA, 252 bp, Homo sapiens; identical to SEQ ID NO: 264409
  chr12:1605198-1605450
  hypo

SEQ ID NO: 441159 - DNA, 53 bp, Homo sapiens; identical to SEQ ID NO: 214692
  chr12:1607425-1607478
  hypo

SEQ ID NO: 441160 - DNA, 157 bp, Homo sapiens; identical to SEQ ID NO: 264412
  chr12:1656342-1656499
  hypo

SEQ ID NO: 441161 - DNA, 218 bp, Homo sapiens; identical to SEQ ID NO: 264413
  chr12:1711558-1711776
  hypo

SEQ ID NO: 441162 - DNA, 54 bp, Homo sapiens; identical to SEQ ID NO: 214696
  chr12:1738021-1738075
  hypo

SEQ ID NO: 441163 - DNA, 222 bp, Homo sapiens; identical to SEQ ID NO: 264416
  chr12:1766124-1766346
  hypo

SEQ ID NO: 441164 - DNA, 120 bp, Homo sapiens; identical to SEQ ID NO: 214697
  chr12:1840409-1840529
  hypo

SEQ ID NO: 441165 - DNA, 180 bp, Homo sapiens; identical to SEQ ID NO: 214698
  chr12:1840589-1840769
  hypo

SEQ ID NO: 441166 - DNA, 203 bp, Homo sapiens; identical to SEQ ID NO: 315369
  chr12:1948662-1948865
  hypo

SEQ ID NO: 441167 - DNA, 70 bp, Homo sapiens; identical to SEQ ID NO: 264421
  chr12:1973182-1973252
  hypo

SEQ ID NO: 441168 - DNA, 233 bp, Homo sapiens; identical to SEQ ID NO: 264422
  chr12:1980082-1980315
  hypo

SEQ ID NO: 441169 - DNA, 133 bp, Homo sapiens; identical to SEQ ID NO: 264423
  chr12:1987522-1987655
  hypo

SEQ ID NO: 441170 - DNA, 182 bp, Homo sapiens; identical to SEQ ID NO: 214703
  chr12:2023975-2024157
  hypo

SEQ ID NO: 441171 - DNA, 88 bp, Homo sapiens; identical to SEQ ID NO: 214704
  chr12:2046016-2046104
  hypo

SEQ ID NO: 441172 - DNA, 111 bp, Homo sapiens; identical to SEQ ID NO: 315379
  chr12:2046134-2046245
  hypo

SEQ ID NO: 441173 - DNA, 212 bp, Homo sapiens; identical to SEQ ID NO: 264430
  chr12:2048775-2048987
  hypo

SEQ ID NO: 441174 - DNA, 73 bp, Homo sapiens; identical to SEQ ID NO: 202820
  chr12:2163510-2163583
  hypo

SEQ ID NO: 441175 - DNA, 209 bp, Homo sapiens; identical to SEQ ID NO: 264432
  chr12:2222748-2222957
  hypo

SEQ ID NO: 441176 - DNA, 155 bp, Homo sapiens; identical to SEQ ID NO: 264433
  chr12:2224504-2224659
  hypo

SEQ ID NO: 441177 - DNA, 108 bp, Homo sapiens; identical to SEQ ID NO: 264434
  chr12:2591271-2591379
  hypo

SEQ ID NO: 441178 - DNA, 90 bp, Homo sapiens; identical to SEQ ID NO: 214709
  chr12:2595422-2595512
  hypo

SEQ ID NO: 441179 - DNA, 57 bp, Homo sapiens; identical to SEQ ID NO: 264436
  chr12:2597995-2598052
  hypo

SEQ ID NO: 441180 - DNA, 36 bp, Homo sapiens; identical to SEQ ID NO: 264439
  chr12:2654536-2654572
  hypo

SEQ ID NO: 441181 - DNA, 426 bp, Homo sapiens; identical to SEQ ID NO: 264440
  chr12:2664072-2664498
  hypo

SEQ ID NO: 441182 - DNA, 33 bp, Homo sapiens; identical to SEQ ID NO: 264441
  chr12:2743147-2743180
  hypo

SEQ ID NO: 441183 - DNA, 114 bp, Homo sapiens; identical to SEQ ID NO: 264442
  chr12:2777032-2777146
  hypo

SEQ ID NO: 441184 - DNA, 83 bp, Homo sapiens; identical to SEQ ID NO: 214712
  chr12:2778072-2778155
  hypo

SEQ ID NO: 441185 - DNA, 83 bp, Homo sapiens; identical to SEQ ID NO: 264446
  chr12:2798044-2798127
  hypo

SEQ ID NO: 441186 - DNA, 82 bp, Homo sapiens; identical to SEQ ID NO: 264447
  chr12:2846932-2847014
  hypo

SEQ ID NO: 441187 - DNA, 196 bp, Homo sapiens; identical to SEQ ID NO: 214718
  chr12:3118651-3118847
  hypo

SEQ ID NO: 441188 - DNA, 224 bp, Homo sapiens; identical to SEQ ID NO: 288654
  chr12:3129381-3129605
  hypo

SEQ ID NO: 441189 - DNA, 36 bp, Homo sapiens; identical to SEQ ID NO: 214720
  chr12:3147030-3147066
  hypo

SEQ ID NO: 441190 - DNA, 46 bp, Homo sapiens; identical to SEQ ID NO: 214722
  chr12:3215227-3215273
  hypo

SEQ ID NO: 441191 - DNA, 98 bp, Homo sapiens; identical to SEQ ID NO: 264457
  chr12:3266175-3266273
  hypo

SEQ ID NO: 441192 - DNA, 178 bp, Homo sapiens; identical to SEQ ID NO: 214723
  chr12:3302735-3302913
  hypo

SEQ ID NO: 441193 - DNA, 129 bp, Homo sapiens; identical to SEQ ID NO: 264459
  chr12:3316845-3316974
  hypo

SEQ ID NO: 441194 - DNA, 303 bp, Homo sapiens; identical to SEQ ID NO: 264460
  chr12:3324917-3325220
  hypo

SEQ ID NO: 441195 - DNA, 45 bp, Homo sapiens; identical to SEQ ID NO: 264461
  chr12:3333941-3333986
  hypo

SEQ ID NO: 441196 - DNA, 44 bp, Homo sapiens; identical to SEQ ID NO: 264462
  chr12:3369201-3369245
  hypo

SEQ ID NO: 441197 - DNA, 109 bp, Homo sapiens; identical to SEQ ID NO: 264463
  chr12:3370679-3370788
  hypo

SEQ ID NO: 441198 - DNA, 245 bp, Homo sapiens; identical to SEQ ID NO: 264464
  chr12:3389522-3389767
  hypo

SEQ ID NO: 441199 - DNA, 111 bp, Homo sapiens; identical to SEQ ID NO: 214725
  chr12:3390417-3390528
  hypo

SEQ ID NO: 441200 - DNA, 152 bp, Homo sapiens; identical to SEQ ID NO: 264468
  chr12:3420373-3420525
  hypo

SEQ ID NO: 441201 - DNA, 205 bp, Homo sapiens; identical to SEQ ID NO: 315423
  chr12:3562709-3562914
  hypo

SEQ ID NO: 441202 - DNA, 38 bp, Homo sapiens; identical to SEQ ID NO: 421568
  chr12:3600988-3601026
  hypo

SEQ ID NO: 441203 - DNA, 86 bp, Homo sapiens; identical to SEQ ID NO: 202830
  chr12:3601256-3601342
  hypo

SEQ ID NO: 441204 - DNA, 101 bp, Homo sapiens; identical to SEQ ID NO: 202831
  chr12:3601377-3601478
  hypo

SEQ ID NO: 441205 - DNA, 36 bp, Homo sapiens; identical to SEQ ID NO: 264471
  chr12:3998558-3998594
  hypo

SEQ ID NO: 441206 - DNA, 92 bp, Homo sapiens; identical to SEQ ID NO: 264472
  chr12:4033270-4033362
  hypo

SEQ ID NO: 441207 - DNA, 222 bp, Homo sapiens; identical to SEQ ID NO: 264473
  chr12:4060807-4061029
  hypo

SEQ ID NO: 441208 - DNA, 137 bp, Homo sapiens; identical to SEQ ID NO: 264474
  chr12:4304033-4304170
  hypo

SEQ ID NO: 441209 - DNA, 70 bp, Homo sapiens; identical to SEQ ID NO: 315434
  chr12:4309610-4309680
  hypo

SEQ ID NO: 441210 - DNA, 67 bp, Homo sapiens; identical to SEQ ID NO: 315435
  chr12:4309714-4309781
  hypo

SEQ ID NO: 441211 - DNA, 65 bp, Homo sapiens; identical to SEQ ID NO: 264476
  chr12:4362284-4362349
  hypo

SEQ ID NO: 441212 - DNA, 153 bp, Homo sapiens; identical to SEQ ID NO: 214737
  chr12:4433845-4433998
  hypo

SEQ ID NO: 441213 - DNA, 38 bp, Homo sapiens; identical to SEQ ID NO: 264478
  chr12:4534348-4534386
  hypo

SEQ ID NO: 441214 - DNA, 292 bp, Homo sapiens; identical to SEQ ID NO: 264482
  chr12:4737611-4737903
  hypo

SEQ ID NO: 441215 - DNA, 42 bp, Homo sapiens; identical to SEQ ID NO: 264483
  chr12:4810316-4810358
  hypo

SEQ ID NO: 441216 - DNA, 101 bp, Homo sapiens; identical to SEQ ID NO: 264484
  chr12:4872384-4872485
  hypo

SEQ ID NO: 441217 - DNA, 125 bp, Homo sapiens; identical to SEQ ID NO: 202847
  chr12:4918558-4918683
  hypo

SEQ ID NO: 441218 - DNA, 176 bp, Homo sapiens; identical to SEQ ID NO: 202848
  chr12:4918713-4918889
  hypo

SEQ ID NO: 441219 - DNA, 44 bp, Homo sapiens; identical to SEQ ID NO: 264486
  chr12:5087446-5087490
  hypo

SEQ ID NO: 441220 - DNA, 121 bp, Homo sapiens; identical to SEQ ID NO: 264487
  chr12:5208523-5208644
  hypo

SEQ ID NO: 441221 - DNA, 40 bp, Homo sapiens; identical to SEQ ID NO: 264488
  chr12:5231585-5231625
  hypo

SEQ ID NO: 441222 - DNA, 120 bp, Homo sapiens; identical to SEQ ID NO: 264490
  chr12:5252653-5252773
  hypo

SEQ ID NO: 441223 - DNA, 86 bp, Homo sapiens; identical to SEQ ID NO: 264491
  chr12:5319955-5320041
  hypo

SEQ ID NO: 441224 - DNA, 91 bp, Homo sapiens; identical to SEQ ID NO: 264494
  chr12:5344278-5344369
  hypo

SEQ ID NO: 441225 - DNA, 86 bp, Homo sapiens; identical to SEQ ID NO: 264496
  chr12:5435949-5436035
  hypo

SEQ ID NO: 441226 - DNA, 85 bp, Homo sapiens; identical to SEQ ID NO: 264497
  chr12:5437112-5437197
  hypo

SEQ ID NO: 441227 - DNA, 36 bp, Homo sapiens; identical to SEQ ID NO: 264498
  chr12:5532611-5532647
  hypo

SEQ ID NO: 441228 - DNA, 38 bp, Homo sapiens; identical to SEQ ID NO: 264499
  chr12:5579368-5579406
  hypo

SEQ ID NO: 441229 - DNA, 216 bp, Homo sapiens; identical to SEQ ID NO: 264500
  chr12:5589467-5589683
  hypo

SEQ ID NO: 441230 - DNA, 202 bp, Homo sapiens; identical to SEQ ID NO: 264501
  chr12:5603080-5603282
  hypo

SEQ ID NO: 441231 - DNA, 321 bp, Homo sapiens; identical to SEQ ID NO: 264503
  chr12:5632712-5633033
  hypo

SEQ ID NO: 441232 - DNA, 119 bp, Homo sapiens; identical to SEQ ID NO: 264504
  chr12:5672755-5672874
  hypo

SEQ ID NO: 441233 - DNA, 108 bp, Homo sapiens; identical to SEQ ID NO: 264505
  chr12:5674728-5674836
  hypo

SEQ ID NO: 441234 - DNA, 125 bp, Homo sapiens; identical to SEQ ID NO: 264506
  chr12:5687506-5687631
  hypo

SEQ ID NO: 441235 - DNA, 174 bp, Homo sapiens; identical to SEQ ID NO: 264507
  chr12:5697256-5697430
  hypo

SEQ ID NO: 441236 - DNA, 128 bp, Homo sapiens; identical to SEQ ID NO: 214745
  chr12:5726939-5727067
  hypo

SEQ ID NO: 441237 - DNA, 202 bp, Homo sapiens; identical to SEQ ID NO: 264510
  chr12:5951755-5951957
  hypo

SEQ ID NO: 441238 - DNA, 161 bp, Homo sapiens; identical to SEQ ID NO: 214746
  chr12:6030343-6030504
  hypo

SEQ ID NO: 441239 - DNA, 60 bp, Homo sapiens; identical to SEQ ID NO: 264512
  chr12:6030959-6031019
  hypo

SEQ ID NO: 441240 - DNA, 40 bp, Homo sapiens; identical to SEQ ID NO: 214747
  chr12:6159830-6159870
  hypo

SEQ ID NO: 441241 - DNA, 47 bp, Homo sapiens; identical to SEQ ID NO: 264514
  chr12:6172072-6172119
  hypo

SEQ ID NO: 441242 - DNA, 95 bp, Homo sapiens; identical to SEQ ID NO: 264515
  chr12:6199649-6199744
  hypo

SEQ ID NO: 441243 - DNA, 79 bp, Homo sapiens; identical to SEQ ID NO: 214748
  chr12:6220788-6220867
  hypo

SEQ ID NO: 441244 - DNA, 83 bp, Homo sapiens; identical to SEQ ID NO: 264517
  chr12:6284864-6284947
  hypo

SEQ ID NO: 441245 - DNA, 85 bp, Homo sapiens; identical to SEQ ID NO: 214749
  chr12:6294432-6294517
  hypo

SEQ ID NO: 441246 - DNA, 823 bp, Homo sapiens; identical to SEQ ID NO: 202854
  chr12:6309398-6310221
  hypo

SEQ ID NO: 441247 - DNA, 44 bp, Homo sapiens; identical to SEQ ID NO: 264520
  chr12:6336636-6336680
  hypo

SEQ ID NO: 441248 - DNA, 76 bp, Homo sapiens; identical to SEQ ID NO: 264522
  chr12:6363069-6363145
  hypo

SEQ ID NO: 441249 - DNA, 306 bp, Homo sapiens; identical to SEQ ID NO: 264523
  chr12:6373751-6374057
  hypo

SEQ ID NO: 441250 - DNA, 88 bp, Homo sapiens; identical to SEQ ID NO: 264524
  chr12:6375951-6376039
  hypo

SEQ ID NO: 441251 - DNA, 35 bp, Homo sapiens; identical to SEQ ID NO: 264525
  chr12:6381467-6381502
  hypo

SEQ ID NO: 441252 - DNA, 184 bp, Homo sapiens; identical to SEQ ID NO: 202855
  chr12:6387950-6388134
  hypo

SEQ ID NO: 441253 - DNA, 187 bp, Homo sapiens; identical to SEQ ID NO: 214753
  chr12:6388701-6388888
  hypo

SEQ ID NO: 441254 - DNA, 43 bp, Homo sapiens; identical to SEQ ID NO: 392916
  chr12:6391153-6391196
  hypo

SEQ ID NO: 441255 - DNA, 38 bp, Homo sapiens; identical to SEQ ID NO: 214755
  chr12:6396069-6396107
  hypo

SEQ ID NO: 441256 - DNA, 105 bp, Homo sapiens; identical to SEQ ID NO: 214756
  chr12:6421423-6421528
  hypo

SEQ ID NO: 441257 - DNA, 50 bp, Homo sapiens; identical to SEQ ID NO: 214757
  chr12:6422991-6423041
  hypo

SEQ ID NO: 441258 - DNA, 245 bp, Homo sapiens; identical to SEQ ID NO: 264531
  chr12:6425447-6425692
  hypo

SEQ ID NO: 441259 - DNA, 214 bp, Homo sapiens; identical to SEQ ID NO: 214759
  chr12:6438303-6438517
  hypo

SEQ ID NO: 441260 - DNA, 158 bp, Homo sapiens; identical to SEQ ID NO: 214760
  chr12:6464388-6464546
  hypo

SEQ ID NO: 441261 - DNA, 38 bp, Homo sapiens; identical to SEQ ID NO: 264534
  chr12:6481166-6481204
  hypo

SEQ ID NO: 441262 - DNA, 97 bp, Homo sapiens; identical to SEQ ID NO: 264536
  chr12:6514987-6515084
  hypo

SEQ ID NO: 441263 - DNA, 120 bp, Homo sapiens; identical to SEQ ID NO: 264537
  chr12:6531710-6531830
  hypo

SEQ ID NO: 441264 - DNA, 186 bp, Homo sapiens; identical to SEQ ID NO: 264538
  chr12:6587832-6588018
  hypo

SEQ ID NO: 441265 - DNA, 497 bp, Homo sapiens; identical to SEQ ID NO: 264539
  chr12:6636152-6636649
  hypo

SEQ ID NO: 441266 - DNA, 475 bp, Homo sapiens; identical to SEQ ID NO: 214764
  chr12:6678912-6679387
  hypo

SEQ ID NO: 441267 - DNA, 38 bp, Homo sapiens; identical to SEQ ID NO: 264544
  chr12:6749347-6749385
  hypo

SEQ ID NO: 441268 - DNA, 106 bp, Homo sapiens; identical to SEQ ID NO: 288703
  chr12:6809093-6809199
  hypo

SEQ ID NO: 441269 - DNA, 124 bp, Homo sapiens; identical to SEQ ID NO: 288704
  chr12:6809692-6809816
  hypo

SEQ ID NO: 441270 - DNA, 44 bp, Homo sapiens; identical to SEQ ID NO: 214765
  chr12:6831877-6831921
  hypo

SEQ ID NO: 441271 - DNA, 36 bp, Homo sapiens; identical to SEQ ID NO: 264546
  chr12:6848750-6848786
  hypo

SEQ ID NO: 441272 - DNA, 239 bp, Homo sapiens; identical to SEQ ID NO: 264547
  chr12:6857750-6857989
  hypo

SEQ ID NO: 441273 - DNA, 47 bp, Homo sapiens; identical to SEQ ID NO: 264548
  chr12:6868198-6868245
  hypo

SEQ ID NO: 441274 - DNA, 45 bp, Homo sapiens; identical to SEQ ID NO: 264549
  chr12:6871063-6871108
  hypo

SEQ ID NO: 441275 - DNA, 55 bp, Homo sapiens; identical to SEQ ID NO: 264550
  chr12:7249425-7249480
  hypo

SEQ ID NO: 441276 - DNA, 48 bp, Homo sapiens; identical to SEQ ID NO: 264551
  chr12:7351759-7351807
  hypo

SEQ ID NO: 441277 - DNA, 88 bp, Homo sapiens; identical to SEQ ID NO: 264552
  chr12:7368502-7368590
  hypo

SEQ ID NO: 441278 - DNA, 42 bp, Homo sapiens; identical to SEQ ID NO: 264553
  chr12:7826421-7826463
  hypo

SEQ ID NO: 441279 - DNA, 37 bp, Homo sapiens; identical to SEQ ID NO: 264555
  chr12:7910484-7910521
  hypo

SEQ ID NO: 441280 - DNA, 32 bp, Homo sapiens; identical to SEQ ID NO: 264557
  chr12:7968173-7968205
  hypo

SEQ ID NO: 441281 - DNA, 120 bp, Homo sapiens; identical to SEQ ID NO: 264558
  chr12:7969976-7970096
  hypo

SEQ ID NO: 441282 - DNA, 80 bp, Homo sapiens; identical to SEQ ID NO: 315529
  chr12:8001717-8001797
  hypo

SEQ ID NO: 441283 - DNA, 32 bp, Homo sapiens; identical to SEQ ID NO: 214768
  chr12:8009570-8009602
  hypo

SEQ ID NO: 441284 - DNA, 32 bp, Homo sapiens; identical to SEQ ID NO: 214769
  chr12:8017218-8017250
  hypo

SEQ ID NO: 441285 - DNA, 64 bp, Homo sapiens; identical to SEQ ID NO: 264562
  chr12:8022094-8022158
  hypo

SEQ ID NO: 441286 - DNA, 31 bp, Homo sapiens; identical to SEQ ID NO: 264563
  chr12:8071329-8071360
  hypo

SEQ ID NO: 441287 - DNA, 38 bp, Homo sapiens; identical to SEQ ID NO: 264564
  chr12:8072019-8072057
  hypo

SEQ ID NO: 441288 - DNA, 38 bp, Homo sapiens; identical to SEQ ID NO: 264565
  chr12:8072297-8072335
  hypo

SEQ ID NO: 441289 - DNA, 31 bp, Homo sapiens; identical to SEQ ID NO: 214770
  chr12:8146997-8147028
  hypo

SEQ ID NO: 441290 - DNA, 31 bp, Homo sapiens; identical to SEQ ID NO: 214771
  chr12:8147088-8147119
  hypo

SEQ ID NO: 441291 - DNA, 98 bp, Homo sapiens; identical to SEQ ID NO: 264568
  chr12:8178281-8178379
  hypo

SEQ ID NO: 441292 - DNA, 31 bp, Homo sapiens; identical to SEQ ID NO: 214772
  chr12:8180905-8180936
  hypo

SEQ ID NO: 441293 - DNA, 120 bp, Homo sapiens; identical to SEQ ID NO: 214773
  chr12:8181176-8181296
  hypo

SEQ ID NO: 441294 - DNA, 36 bp, Homo sapiens; identical to SEQ ID NO: 264571
  chr12:8252176-8252212
  hypo

SEQ ID NO: 441295 - DNA, 32 bp, Homo sapiens; identical to SEQ ID NO: 214774
  chr12:8398731-8398763
  hypo

SEQ ID NO: 441296 - DNA, 36 bp, Homo sapiens; identical to SEQ ID NO: 214775
  chr12:8423886-8423922
  hypo

SEQ ID NO: 441297 - DNA, 120 bp, Homo sapiens; identical to SEQ ID NO: 264574
  chr12:8597879-8597999
  hypo

SEQ ID NO: 441298 - DNA, 47 bp, Homo sapiens; identical to SEQ ID NO: 264575
  chr12:8601976-8602023
  hypo

SEQ ID NO: 441299 - DNA, 150 bp, Homo sapiens; identical to SEQ ID NO: 214778
  chr12:8808409-8808559
  hypo

SEQ ID NO: 441300 - DNA, 33 bp, Homo sapiens; identical to SEQ ID NO: 214779
  chr12:8808923-8808956
  hypo

SEQ ID NO: 441301 - DNA, 32 bp, Homo sapiens; identical to SEQ ID NO: 214780
  chr12:8890590-8890622
  hypo

SEQ ID NO: 441302 - DNA, 180 bp, Homo sapiens; identical to SEQ ID NO: 214781
  chr12:8893949-8894129
  hypo

SEQ ID NO: 441303 - DNA, 42 bp, Homo sapiens; identical to SEQ ID NO: 264583
  chr12:8936109-8936151
  hypo

SEQ ID NO: 441304 - DNA, 120 bp, Homo sapiens; identical to SEQ ID NO: 264584
  chr12:8936631-8936751
  hypo

SEQ ID NO: 441305 - DNA, 70 bp, Homo sapiens; identical to SEQ ID NO: 315556
  chr12:8995605-8995675
  hypo

SEQ ID NO: 441306 - DNA, 52 bp, Homo sapiens
  chr12:9108768-9108820
  hypo
aaagaacagcaggtgaaaggctgtagccctcctgccctctcctggcaccagg

SEQ ID NO: 441307 - DNA, 33 bp, Homo sapiens
  chr12:9109035-9109068
  hypo
gcatttttttttctttttcttttgagacagagt

SEQ ID NO: 441308 - DNA, 99 bp, Homo sapiens; identical to SEQ ID NO: 264588
  chr12:9109308-9109407
  hypo

SEQ ID NO: 441309 - DNA, 199 bp, Homo sapiens; identical to SEQ ID NO: 214783
  chr12:9585208-9585407
  hypo

SEQ ID NO: 441310 - DNA, 36 bp, Homo sapiens; identical to SEQ ID NO: 264591
  chr12:9824089-9824125
  hypo

SEQ ID NO: 441311 - DNA, 206 bp, Homo sapiens; identical to SEQ ID NO: 264592
  chr12:10025415-10025621
  hypo

SEQ ID NO: 441312 - DNA, 214 bp, Homo sapiens; identical to SEQ ID NO: 264593
  chr12:10073226-10073440
  hypo

SEQ ID NO: 441313 - DNA, 47 bp, Homo sapiens; identical to SEQ ID NO: 214784
  chr12:10264178-10264225
  hypo

SEQ ID NO: 441314 - DNA, 112 bp, Homo sapiens; identical to SEQ ID NO: 214785
  chr12:10267999-10268111
  hypo

SEQ ID NO: 441315 - DNA, 122 bp, Homo sapiens; identical to SEQ ID NO: 264596
  chr12:10523866-10523988
  hypo

SEQ ID NO: 441316 - DNA, 32 bp, Homo sapiens; identical to SEQ ID NO: 214786
  chr12:10767896-10767928
  hypo

SEQ ID NO: 441317 - DNA, 36 bp, Homo sapiens; identical to SEQ ID NO: 315568
  chr12:10823868-10823904
  hypo

SEQ ID NO: 441318 - DNA, 44 bp, Homo sapiens; identical to SEQ ID NO: 202870
  chr12:11801643-11801687
  hypo

SEQ ID NO: 441319 - DNA, 427 bp, Homo sapiens; identical to SEQ ID NO: 202871
  chr12:11802787-11803214
  hypo

SEQ ID NO: 441320 - DNA, 198 bp, Homo sapiens; identical to SEQ ID NO: 202872
  chr12:11905383-11905581
  hypo

SEQ ID NO: 441321 - DNA, 165 bp, Homo sapiens; identical to SEQ ID NO: 202873
  chr12:11992073-11992238
  hypo

SEQ ID NO: 441322 - DNA, 65 bp, Homo sapiens; identical to SEQ ID NO: 264599
  chr12:12001023-12001088
  hypo

SEQ ID NO: 441323 - DNA, 382 bp, Homo sapiens; identical to SEQ ID NO: 202874
  chr12:12006113-12006495
  hypo

SEQ ID NO: 441324 - DNA, 546 bp, Homo sapiens; identical to SEQ ID NO: 202875
  chr12:12022357-12022903
  hypo

SEQ ID NO: 441325 - DNA, 147 bp, Homo sapiens; identical to SEQ ID NO: 202876
  chr12:12037378-12037525
  hypo

SEQ ID NO: 441326 - DNA, 101 bp, Homo sapiens; identical to SEQ ID NO: 202877
  chr12:12038859-12038960
  hypo

SEQ ID NO: 441327 - DNA, 2801 bp, Homo sapiens; identical to SEQ ID NO: 202878
  chr12:12043874-12046675
  hypo

SEQ ID NO: 441328 - DNA, 1481 bp, Homo sapiens; identical to SEQ ID NO: 202879
  chr12:12046855-12048336
  hypo

SEQ ID NO: 441329 - DNA, 188 bp, Homo sapiens; identical to SEQ ID NO: 214797
  chr12:12184633-12184821
  hypo

SEQ ID NO: 441330 - DNA, 302 bp, Homo sapiens; identical to SEQ ID NO: 264602
  chr12:12476519-12476821
  hypo

SEQ ID NO: 441331 - DNA, 40 bp, Homo sapiens; identical to SEQ ID NO: 214798
  chr12:12604522-12604562
  hypo

SEQ ID NO: 441332 - DNA, 90 bp, Homo sapiens; identical to SEQ ID NO: 264608
  chr12:12656416-12656506
  hypo

SEQ ID NO: 441333 - DNA, 59 bp, Homo sapiens; identical to SEQ ID NO: 288740
  chr12:12869129-12869188
  hypo

SEQ ID NO: 441334 - DNA, 189 bp, Homo sapiens; identical to SEQ ID NO: 288741
  chr12:12869412-12869601
  hypo

SEQ ID NO: 441335 - DNA, 286 bp, Homo sapiens; identical to SEQ ID NO: 288744
  chr12:12877458-12877744
  hypo

SEQ ID NO: 441336 - DNA, 82 bp, Homo sapiens; identical to SEQ ID NO: 264612
  chr12:12902967-12903049
  hypo

SEQ ID NO: 441337 - DNA, 31 bp, Homo sapiens; identical to SEQ ID NO: 264613
  chr12:12923066-12923097
  hypo

SEQ ID NO: 441338 - DNA, 176 bp, Homo sapiens; identical to SEQ ID NO: 214801
  chr12:12989449-12989625
  hypo

SEQ ID NO: 441339 - DNA, 147 bp, Homo sapiens; identical to SEQ ID NO: 264615
  chr12:12990441-12990588
  hypo

SEQ ID NO: 441340 - DNA, 89 bp, Homo sapiens; identical to SEQ ID NO: 264616
  chr12:12990618-12990707
  hypo

SEQ ID NO: 441341 - DNA, 37 bp, Homo sapiens; identical to SEQ ID NO: 264617
  chr12:13003128-13003165
  hypo

SEQ ID NO: 441342 - DNA, 114 bp, Homo sapiens; identical to SEQ ID NO: 214802
  chr12:13035881-13035995
  hypo

SEQ ID NO: 441343 - DNA, 37 bp, Homo sapiens; identical to SEQ ID NO: 264619
  chr12:13050517-13050554
  hypo

SEQ ID NO: 441344 - DNA, 36 bp, Homo sapiens; identical to SEQ ID NO: 264620
  chr12:13050854-13050890
  hypo

SEQ ID NO: 441345 - DNA, 86 bp, Homo sapiens; identical to SEQ ID NO: 264621
  chr12:13056218-13056304
  hypo

SEQ ID NO: 441346 - DNA, 71 bp, Homo sapiens; identical to SEQ ID NO: 288747
  chr12:13069193-13069264
  hypo

SEQ ID NO: 441347 - DNA, 108 bp, Homo sapiens; identical to SEQ ID NO: 121940
  chr12:13069316-13069424
  hypo

SEQ ID NO: 441348 - DNA, 447 bp, Homo sapiens; identical to SEQ ID NO: 202885
  chr12:13152998-13153445
  hypo

SEQ ID NO: 441349 - DNA, 93 bp, Homo sapiens; identical to SEQ ID NO: 224308
  chr12:13154241-13154334
  hypo

SEQ ID NO: 441350 - DNA, 233 bp, Homo sapiens; identical to SEQ ID NO: 264623
  chr12:13173189-13173422
  hypo

SEQ ID NO: 441351 - DNA, 174 bp, Homo sapiens; identical to SEQ ID NO: 214805
  chr12:13222376-13222550
  hypo

SEQ ID NO: 441352 - DNA, 191 bp, Homo sapiens; identical to SEQ ID NO: 264626
  chr12:13237737-13237928
  hypo

SEQ ID NO: 441353 - DNA, 51 bp, Homo sapiens; identical to SEQ ID NO: 264627
  chr12:13281247-13281298
  hypo

SEQ ID NO: 441354 - DNA, 145 bp, Homo sapiens; identical to SEQ ID NO: 315609
  chr12:13519064-13519209
  hypo

SEQ ID NO: 441355 - DNA, 603 bp, Homo sapiens; identical to SEQ ID NO: 214806
  chr12:13716472-13717075
  hypo

SEQ ID NO: 441356 - DNA, 36 bp, Homo sapiens; identical to SEQ ID NO: 264630
  chr12:14469618-14469654
  hypo

SEQ ID NO: 441357 - DNA, 36 bp, Homo sapiens; identical to SEQ ID NO: 214807
  chr12:14721513-14721549
  hypo

SEQ ID NO: 441358 - DNA, 197 bp, Homo sapiens; identical to SEQ ID NO: 264633
  chr12:14743808-14744005
  hypo

SEQ ID NO: 441359 - DNA, 87 bp, Homo sapiens; identical to SEQ ID NO: 214809
  chr12:14818119-14818206
  hypo

SEQ ID NO: 441360 - DNA, 75 bp, Homo sapiens; identical to SEQ ID NO: 214810
  chr12:14818749-14818824
  hypo

SEQ ID NO: 441361 - DNA, 165 bp, Homo sapiens; identical to SEQ ID NO: 214811
  chr12:14818867-14819032
  hypo

SEQ ID NO: 441362 - DNA, 240 bp, Homo sapiens; identical to SEQ ID NO: 214812
  chr12:14819092-14819332
  hypo

SEQ ID NO: 441363 - DNA, 72 bp, Homo sapiens; identical to SEQ ID NO: 264637
  chr12:15057301-15057373
  hypo

SEQ ID NO: 441364 - DNA, 120 bp, Homo sapiens; identical to SEQ ID NO: 264638
  chr12:15095459-15095579
  hypo

SEQ ID NO: 441365 - DNA, 58 bp, Homo sapiens; identical to SEQ ID NO: 264639
  chr12:16109905-16109963
  hypo

SEQ ID NO: 441366 - DNA, 196 bp, Homo sapiens; identical to SEQ ID NO: 214814
  chr12:16150422-16150618
  hypo

SEQ ID NO: 441367 - DNA, 112 bp, Homo sapiens; identical to SEQ ID NO: 264641
  chr12:19260900-19261012
  hypo

SEQ ID NO: 441368 - DNA, 311 bp, Homo sapiens; identical to SEQ ID NO: 264642
  chr12:19459336-19459647
  hypo

SEQ ID NO: 441369 - DNA, 151 bp, Homo sapiens; identical to SEQ ID NO: 264643
  chr12:19512469-19512620
  hypo

SEQ ID NO: 441370 - DNA, 36 bp, Homo sapiens; identical to SEQ ID NO: 214819
  chr12:19539887-19539923
  hypo

SEQ ID NO: 441371 - DNA, 84 bp, Homo sapiens; identical to SEQ ID NO: 264645
  chr12:19549593-19549677
  hypo

SEQ ID NO: 441372 - DNA, 35 bp, Homo sapiens; identical to SEQ ID NO: 264646
  chr12:19636459-19636494
  hypo

SEQ ID NO: 441373 - DNA, 43 bp, Homo sapiens; identical to SEQ ID NO: 264647
  chr12:19928383-19928426
  hypo

SEQ ID NO: 441374 - DNA, 180 bp, Homo sapiens; identical to SEQ ID NO: 214820
  chr12:20704639-20704819
  hypo

SEQ ID NO: 441375 - DNA, 109 bp, Homo sapiens; identical to SEQ ID NO: 214822
  chr12:21847672-21847781
  hypo

SEQ ID NO: 441376 - DNA, 156 bp, Homo sapiens; identical to SEQ ID NO: 264651
  chr12:22161232-22161388
  hypo

SEQ ID NO: 441377 - DNA, 137 bp, Homo sapiens; identical to SEQ ID NO: 226549
  chr12:22529506-22529643
  hypo

SEQ ID NO: 441378 - DNA, 87 bp, Homo sapiens; identical to SEQ ID NO: 315641
  chr12:22698196-22698283
  hypo

SEQ ID NO: 441379 - DNA, 115 bp, Homo sapiens; identical to SEQ ID NO: 264654
  chr12:24323135-24323250
  hypo

SEQ ID NO: 441380 - DNA, 37 bp, Homo sapiens; identical to SEQ ID NO: 264655
  chr12:24617258-24617295
  hypo

SEQ ID NO: 441381 - DNA, 54 bp, Homo sapiens; identical to SEQ ID NO: 264656
  chr12:24679251-24679305
  hypo

SEQ ID NO: 441382 - DNA, 120 bp, Homo sapiens; identical to SEQ ID NO: 264657
  chr12:25203074-25203194
  hypo

SEQ ID NO: 441383 - DNA, 259 bp, Homo sapiens; identical to SEQ ID NO: 202917
  chr12:25404339-25404598
  hypo

SEQ ID NO: 441384 - DNA, 206 bp, Homo sapiens; identical to SEQ ID NO: 214827
  chr12:25537194-25537400
  hypo

SEQ ID NO: 441385 - DNA, 142 bp, Homo sapiens; identical to SEQ ID NO: 224326
  chr12:25538253-25538395
  hypo

SEQ ID NO: 441386 - DNA, 165 bp, Homo sapiens; identical to SEQ ID NO: 214829
  chr12:26492034-26492199
  hypo

SEQ ID NO: 441387 - DNA, 63 bp, Homo sapiens; identical to SEQ ID NO: 264662
  chr12:26893421-26893484
  hypo

SEQ ID NO: 441388 - DNA, 34 bp, Homo sapiens; identical to SEQ ID NO: 264663
  chr12:26949667-26949701
  hypo

SEQ ID NO: 441389 - DNA, 199 bp, Homo sapiens; identical to SEQ ID NO: 214830
  chr12:26966974-26967173
  hypo

SEQ ID NO: 441390 - DNA, 106 bp, Homo sapiens; identical to SEQ ID NO: 288808
  chr12:27486689-27486795
  hypo

SEQ ID NO: 441391 - DNA, 87 bp, Homo sapiens; identical to SEQ ID NO: 264666
  chr12:27600853-27600940
  hypo

SEQ ID NO: 441392 - DNA, 153 bp, Homo sapiens; identical to SEQ ID NO: 264667
  chr12:27671115-27671268
  hypo

SEQ ID NO: 441393 - DNA, 78 bp, Homo sapiens; identical to SEQ ID NO: 214832
  chr12:27742381-27742459
  hypo

SEQ ID NO: 441394 - DNA, 138 bp, Homo sapiens; identical to SEQ ID NO: 264670
  chr12:27842659-27842797
  hypo

SEQ ID NO: 441395 - DNA, 114 bp, Homo sapiens; identical to SEQ ID NO: 214833
  chr12:27950701-27950815
  hypo

SEQ ID NO: 441396 - DNA, 210 bp, Homo sapiens; identical to SEQ ID NO: 288812
  chr12:28123786-28123996
  hypo

SEQ ID NO: 441397 - DNA, 203 bp, Homo sapiens; identical to SEQ ID NO: 288814
  chr12:29301531-29301734
  hypo

SEQ ID NO: 441398 - DNA, 45 bp, Homo sapiens; identical to SEQ ID NO: 264673
  chr12:29889831-29889876
  hypo

SEQ ID NO: 441399 - DNA, 34 bp, Homo sapiens; identical to SEQ ID NO: 264674
  chr12:29890152-29890186
  hypo

SEQ ID NO: 441400 - DNA, 159 bp, Homo sapiens; identical to SEQ ID NO: 264675
  chr12:29945371-29945530
  hypo

SEQ ID NO: 441401 - DNA, 178 bp, Homo sapiens; identical to SEQ ID NO: 264676
  chr12:30274285-30274463
  hypo

SEQ ID NO: 441402 - DNA, 42 bp, Homo sapiens; identical to SEQ ID NO: 264677
  chr12:30473847-30473889
  hypo

SEQ ID NO: 441403 - DNA, 35 bp, Homo sapiens; identical to SEQ ID NO: 264679
  chr12:30950607-30950642
  hypo

SEQ ID NO: 441404 - DNA, 108 bp, Homo sapiens; identical to SEQ ID NO: 264682
  chr12:31399695-31399803
  hypo

SEQ ID NO: 441405 - DNA, 35 bp, Homo sapiens; identical to SEQ ID NO: 264683
  chr12:31663419-31663454
  hypo

SEQ ID NO: 441406 - DNA, 36 bp, Homo sapiens; identical to SEQ ID NO: 264684
  chr12:31881031-31881067
  hypo

SEQ ID NO: 441407 - DNA, 110 bp, Homo sapiens; identical to SEQ ID NO: 264685
  chr12:31973813-31973923
  hypo

SEQ ID NO: 441408 - DNA, 36 bp, Homo sapiens; identical to SEQ ID NO: 214837
  chr12:31986810-31986846
  hypo

SEQ ID NO: 441409 - DNA, 39 bp, Homo sapiens; identical to SEQ ID NO: 214838
  chr12:32140933-32140972
  hypo

SEQ ID NO: 441410 - DNA, 161 bp, Homo sapiens
  chr12:32142773-32142934
  hypo
aaactctgtctcaaaaaaaaagtcagttagcattgaaacatgcatatgggaaaaacttgcatcaatgaagaaatatactcttaatcagaacaggacaaataacctaaagaggagggaatgaagagcagtgagaggcctgacagtgggaaaacaatgcctct

SEQ ID NO: 441411 - DNA, 142 bp, Homo sapiens; identical to SEQ ID NO: 214840
  chr12:32155239-32155381
  hypo

SEQ ID NO: 441412 - DNA, 36 bp, Homo sapiens; identical to SEQ ID NO: 315685
  chr12:32597609-32597645
  hypo

SEQ ID NO: 441413 - DNA, 34 bp, Homo sapiens; identical to SEQ ID NO: 214841
  chr12:32831180-32831214
  hypo

SEQ ID NO: 441414 - DNA, 43 bp, Homo sapiens; identical to SEQ ID NO: 264694
  chr12:32995444-32995487
  hypo

SEQ ID NO: 441415 - DNA, 87 bp, Homo sapiens; identical to SEQ ID NO: 264695
  chr12:33034690-33034777
  hypo

SEQ ID NO: 441416 - DNA, 136 bp, Homo sapiens; identical to SEQ ID NO: 202937
  chr12:33592092-33592228
  hypo

SEQ ID NO: 441417 - DNA, 58 bp, Homo sapiens; identical to SEQ ID NO: 398975
  chr12:33592320-33592378
  hypo

SEQ ID NO: 441418 - DNA, 682 bp, Homo sapiens; identical to SEQ ID NO: 214848
  chr12:34319319-34320001
  hypo

SEQ ID NO: 441419 - DNA, 122 bp, Homo sapiens; identical to SEQ ID NO: 264697
  chr12:34357282-34357404
  hypo

SEQ ID NO: 441420 - DNA, 45 bp, Homo sapiens; identical to SEQ ID NO: 315699
  chr12:34364381-34364426
  hypo

SEQ ID NO: 441421 - DNA, 204 bp, Homo sapiens; identical to SEQ ID NO: 315700
  chr12:34364531-34364735
  hypo

SEQ ID NO: 441422 - DNA, 72 bp, Homo sapiens; identical to SEQ ID NO: 264700
  chr12:37971169-37971241
  hypo

SEQ ID NO: 441423 - DNA, 42 bp, Homo sapiens; identical to SEQ ID NO: 264701
  chr12:38543128-38543170
  hypo

SEQ ID NO: 441424 - DNA, 572 bp, Homo sapiens; identical to SEQ ID NO: 214851
  chr12:38548366-38548938
  hypo

SEQ ID NO: 441425 - DNA, 123 bp, Homo sapiens; identical to SEQ ID NO: 214852
  chr12:38548968-38549091
  hypo

SEQ ID NO: 441426 - DNA, 196 bp, Homo sapiens; identical to SEQ ID NO: 315705
  chr12:38550957-38551153
  hypo

SEQ ID NO: 441427 - DNA, 60 bp, Homo sapiens; identical to SEQ ID NO: 214854
  chr12:38551305-38551365
  hypo

SEQ ID NO: 441428 - DNA, 34 bp, Homo sapiens; identical to SEQ ID NO: 315707
  chr12:38551794-38551828
  hypo

SEQ ID NO: 441429 - DNA, 83 bp, Homo sapiens; identical to SEQ ID NO: 264705
  chr12:38552283-38552366
  hypo

SEQ ID NO: 441430 - DNA, 587 bp, Homo sapiens; identical to SEQ ID NO: 315709
  chr12:38553243-38553830
  hypo

SEQ ID NO: 441431 - DNA, 338 bp, Homo sapiens; identical to SEQ ID NO: 214856
  chr12:38553866-38554204
  hypo

SEQ ID NO: 441432 - DNA, 371 bp, Homo sapiens; identical to SEQ ID NO: 315711
  chr12:38554258-38554629
  hypo

SEQ ID NO: 441433 - DNA, 135 bp, Homo sapiens; identical to SEQ ID NO: 264707
  chr12:38555926-38556061
  hypo

SEQ ID NO: 441434 - DNA, 47 bp, Homo sapiens; identical to SEQ ID NO: 315718
  chr12:41925115-41925162
  hypo

SEQ ID NO: 441435 - DNA, 120 bp, Homo sapiens; identical to SEQ ID NO: 264710
  chr12:41967350-41967470
  hypo

SEQ ID NO: 441436 - DNA, 120 bp, Homo sapiens; identical to SEQ ID NO: 264711
  chr12:42066119-42066239
  hypo

SEQ ID NO: 441437 - DNA, 98 bp, Homo sapiens; identical to SEQ ID NO: 264712
  chr12:42503371-42503469
  hypo

SEQ ID NO: 441438 - DNA, 32 bp, Homo sapiens; identical to SEQ ID NO: 264713
  chr12:42504945-42504977
  hypo

SEQ ID NO: 441439 - DNA, 40 bp, Homo sapiens; identical to SEQ ID NO: 264714
  chr12:42758694-42758734
  hypo

SEQ ID NO: 441440 - DNA, 183 bp, Homo sapiens; identical to SEQ ID NO: 264715
  chr12:42836274-42836457
  hypo

SEQ ID NO: 441441 - DNA, 150 bp, Homo sapiens; identical to SEQ ID NO: 264716
  chr12:42847594-42847744
  hypo

SEQ ID NO: 441442 - DNA, 41 bp, Homo sapiens; identical to SEQ ID NO: 264717
  chr12:42848888-42848929
  hypo

SEQ ID NO: 441443 - DNA, 78 bp, Homo sapiens; identical to SEQ ID NO: 264718
  chr12:42854066-42854144
  hypo

SEQ ID NO: 441444 - DNA, 89 bp, Homo sapiens; identical to SEQ ID NO: 214863
  chr12:42857519-42857608
  hypo

SEQ ID NO: 441445 - DNA, 38 bp, Homo sapiens; identical to SEQ ID NO: 264720
  chr12:43159470-43159508
  hypo

SEQ ID NO: 441446 - DNA, 33 bp, Homo sapiens; identical to SEQ ID NO: 264721
  chr12:44214605-44214638
  hypo

SEQ ID NO: 441447 - DNA, 205 bp, Homo sapiens; identical to SEQ ID NO: 264722
  chr12:44278770-44278975
  hypo

SEQ ID NO: 441448 - DNA, 43 bp, Homo sapiens; identical to SEQ ID NO: 264723
  chr12:45344717-45344760
  hypo

SEQ ID NO: 441449 - DNA, 85 bp, Homo sapiens; identical to SEQ ID NO: 264724
  chr12:45826930-45827015
  hypo

SEQ ID NO: 441450 - DNA, 133 bp, Homo sapiens; identical to SEQ ID NO: 264725
  chr12:45862284-45862417
  hypo

SEQ ID NO: 441451 - DNA, 36 bp, Homo sapiens; identical to SEQ ID NO: 214864
  chr12:46610346-46610382
  hypo

SEQ ID NO: 441452 - DNA, 36 bp, Homo sapiens; identical to SEQ ID NO: 214865
  chr12:46610622-46610658
  hypo

SEQ ID NO: 441453 - DNA, 42 bp, Homo sapiens; identical to SEQ ID NO: 264728
  chr12:46634310-46634352
  hypo

SEQ ID NO: 441454 - DNA, 131 bp, Homo sapiens; identical to SEQ ID NO: 264729
  chr12:46757484-46757615
  hypo

SEQ ID NO: 441455 - DNA, 39 bp, Homo sapiens; identical to SEQ ID NO: 264731
  chr12:47603245-47603284
  hypo

SEQ ID NO: 441456 - DNA, 149 bp, Homo sapiens; identical to SEQ ID NO: 264733
  chr12:47699297-47699446
  hypo

SEQ ID NO: 441457 - DNA, 120 bp, Homo sapiens; identical to SEQ ID NO: 264734
  chr12:47799205-47799325
  hypo

SEQ ID NO: 441458 - DNA, 191 bp, Homo sapiens; identical to SEQ ID NO: 264735
  chr12:48191883-48192074
  hypo

SEQ ID NO: 441459 - DNA, 48 bp, Homo sapiens; identical to SEQ ID NO: 264736
  chr12:48218921-48218969
  hypo

SEQ ID NO: 441460 - DNA, 39 bp, Homo sapiens; identical to SEQ ID NO: 264737
  chr12:48226920-48226959
  hypo

SEQ ID NO: 441461 - DNA, 90 bp, Homo sapiens; identical to SEQ ID NO: 264738
  chr12:48238689-48238779
  hypo

SEQ ID NO: 441462 - DNA, 97 bp, Homo sapiens; identical to SEQ ID NO: 264739
  chr12:48240443-48240540
  hypo

SEQ ID NO: 441463 - DNA, 119 bp, Homo sapiens; identical to SEQ ID NO: 315755
  chr12:48347939-48348058
  hypo

SEQ ID NO: 441464 - DNA, 32 bp, Homo sapiens; identical to SEQ ID NO: 264742
  chr12:48727661-48727693
  hypo

SEQ ID NO: 441465 - DNA, 59 bp, Homo sapiens; identical to SEQ ID NO: 214871
  chr12:48745168-48745227
  hypo

SEQ ID NO: 441466 - DNA, 76 bp, Homo sapiens; identical to SEQ ID NO: 264744
  chr12:48838930-48839006
  hypo

SEQ ID NO: 441467 - DNA, 335 bp, Homo sapiens; identical to SEQ ID NO: 202960
  chr12:49182447-49182782
  hypo

SEQ ID NO: 441468 - DNA, 326 bp, Homo sapiens; identical to SEQ ID NO: 288881
  chr12:49183004-49183330
  hypo

SEQ ID NO: 441469 - DNA, 38 bp, Homo sapiens; identical to SEQ ID NO: 214875
  chr12:49191468-49191506
  hypo

SEQ ID NO: 441470 - DNA, 481 bp, Homo sapiens; identical to SEQ ID NO: 202963
  chr12:49351242-49351723
  hypo

SEQ ID NO: 441471 - DNA, 527 bp, Homo sapiens; identical to SEQ ID NO: 288887
  chr12:49371614-49372141
  hypo

SEQ ID NO: 441472 - DNA, 76 bp, Homo sapiens; identical to SEQ ID NO: 288888
  chr12:49372236-49372312
  hypo

SEQ ID NO: 441473 - DNA, 41 bp, Homo sapiens; identical to SEQ ID NO: 202966
  chr12:49375529-49375570
  hypo

SEQ ID NO: 441474 - DNA, 48 bp, Homo sapiens; identical to SEQ ID NO: 214882
  chr12:49436025-49436073
  hypo

SEQ ID NO: 441475 - DNA, 231 bp, Homo sapiens; identical to SEQ ID NO: 264750
  chr12:49443423-49443654
  hypo

SEQ ID NO: 441476 - DNA, 44 bp, Homo sapiens; identical to SEQ ID NO: 264751
  chr12:49520524-49520568
  hypo

SEQ ID NO: 441477 - DNA, 154 bp, Homo sapiens; identical to SEQ ID NO: 214883
  chr12:49620906-49621060
  hypo

SEQ ID NO: 441478 - DNA, 85 bp, Homo sapiens; identical to SEQ ID NO: 264753
  chr12:49647106-49647191
  hypo

SEQ ID NO: 441479 - DNA, 301 bp, Homo sapiens; identical to SEQ ID NO: 202975
  chr12:49761541-49761842
  hypo

SEQ ID NO: 441480 - DNA, 383 bp, Homo sapiens; identical to SEQ ID NO: 264755
  chr12:49927213-49927596
  hypo

SEQ ID NO: 441481 - DNA, 92 bp, Homo sapiens; identical to SEQ ID NO: 224355
  chr12:49932286-49932378
  hypo

SEQ ID NO: 441482 - DNA, 233 bp, Homo sapiens; identical to SEQ ID NO: 288917
  chr12:49933026-49933259
  hypo

SEQ ID NO: 441483 - DNA, 141 bp, Homo sapiens; identical to SEQ ID NO: 288918
  chr12:49933289-49933430
  hypo

SEQ ID NO: 441484 - DNA, 247 bp, Homo sapiens; identical to SEQ ID NO: 214885
  chr12:49935483-49935730
  hypo

SEQ ID NO: 441485 - DNA, 363 bp, Homo sapiens; identical to SEQ ID NO: 315786
  chr12:50036036-50036399
  hypo

SEQ ID NO: 441486 - DNA, 182 bp, Homo sapiens; identical to SEQ ID NO: 214887
  chr12:50185746-50185928
  hypo

SEQ ID NO: 441487 - DNA, 151 bp, Homo sapiens; identical to SEQ ID NO: 264761
  chr12:50237319-50237470
  hypo

SEQ ID NO: 441488 - DNA, 38 bp, Homo sapiens; identical to SEQ ID NO: 264762
  chr12:50262263-50262301
  hypo

SEQ ID NO: 441489 - DNA, 193 bp, Homo sapiens; identical to SEQ ID NO: 264763
  chr12:50269011-50269204
  hypo

SEQ ID NO: 441490 - DNA, 46 bp, Homo sapiens; identical to SEQ ID NO: 264764
  chr12:50282793-50282839
  hypo

SEQ ID NO: 441491 - DNA, 184 bp, Homo sapiens; identical to SEQ ID NO: 264765
  chr12:50296427-50296611
  hypo

SEQ ID NO: 441492 - DNA, 307 bp, Homo sapiens; identical to SEQ ID NO: 214889
  chr12:50366185-50366492
  hypo

SEQ ID NO: 441493 - DNA, 233 bp, Homo sapiens; identical to SEQ ID NO: 214890
  chr12:50400184-50400417
  hypo

SEQ ID NO: 441494 - DNA, 184 bp, Homo sapiens; identical to SEQ ID NO: 264769
  chr12:50467724-50467908
  hypo

SEQ ID NO: 441495 - DNA, 180 bp, Homo sapiens; identical to SEQ ID NO: 264771
  chr12:50602878-50603058
  hypo

SEQ ID NO: 441496 - DNA, 505 bp, Homo sapiens; identical to SEQ ID NO: 288927
  chr12:50677034-50677539
  hypo

SEQ ID NO: 441497 - DNA, 80 bp, Homo sapiens; identical to SEQ ID NO: 264772
  chr12:50785992-50786072
  hypo

SEQ ID NO: 441498 - DNA, 136 bp, Homo sapiens; identical to SEQ ID NO: 214892
  chr12:51116977-51117113
  hypo

SEQ ID NO: 441499 - DNA, 40 bp, Homo sapiens; identical to SEQ ID NO: 214893
  chr12:51148430-51148470
  hypo

SEQ ID NO: 441500 - DNA, 112 bp, Homo sapiens; identical to SEQ ID NO: 214894
  chr12:51346409-51346521
  hypo

SEQ ID NO: 441501 - DNA, 181 bp, Homo sapiens; identical to SEQ ID NO: 214895
  chr12:51346933-51347114
  hypo

SEQ ID NO: 441502 - DNA, 120 bp, Homo sapiens; identical to SEQ ID NO: 264778
  chr12:51407288-51407408
  hypo

SEQ ID NO: 441503 - DNA, 120 bp, Homo sapiens; identical to SEQ ID NO: 264779
  chr12:51407528-51407648
  hypo

SEQ ID NO: 441504 - DNA, 113 bp, Homo sapiens; identical to SEQ ID NO: 264781
  chr12:51461520-51461633
  hypo

SEQ ID NO: 441505 - DNA, 120 bp, Homo sapiens; identical to SEQ ID NO: 264782
  chr12:51478095-51478215
  hypo

SEQ ID NO: 441506 - DNA, 151 bp, Homo sapiens; identical to SEQ ID NO: 214897
  chr12:51479055-51479206
  hypo

SEQ ID NO: 441507 - DNA, 111 bp, Homo sapiens; identical to SEQ ID NO: 264785
  chr12:51592045-51592156
  hypo

SEQ ID NO: 441508 - DNA, 32 bp, Homo sapiens; identical to SEQ ID NO: 224358
  chr12:51610959-51610991
  hypo

SEQ ID NO: 441509 - DNA, 120 bp, Homo sapiens; identical to SEQ ID NO: 264786
  chr12:51615467-51615587
  hypo

SEQ ID NO: 441510 - DNA, 240 bp, Homo sapiens; identical to SEQ ID NO: 264787
  chr12:51794744-51794984
  hypo

SEQ ID NO: 441511 - DNA, 81 bp, Homo sapiens; identical to SEQ ID NO: 264788
  chr12:51795224-51795305
  hypo

SEQ ID NO: 441512 - DNA, 689 bp, Homo sapiens; identical to SEQ ID NO: 288937
  chr12:51818412-51819101
  hypo

SEQ ID NO: 441513 - DNA, 94 bp, Homo sapiens; identical to SEQ ID NO: 264790
  chr12:51873686-51873780
  hypo

SEQ ID NO: 441514 - DNA, 328 bp, Homo sapiens; identical to SEQ ID NO: 264791
  chr12:51919431-51919759
  hypo

SEQ ID NO: 441515 - DNA, 147 bp, Homo sapiens; identical to SEQ ID NO: 288941
  chr12:52345764-52345911
  hypo

SEQ ID NO: 441516 - DNA, 149 bp, Homo sapiens; identical to SEQ ID NO: 288943
  chr12:52416804-52416953
  hypo

SEQ ID NO: 441517 - DNA, 179 bp, Homo sapiens; identical to SEQ ID NO: 288944
  chr12:52416985-52417164
  hypo

SEQ ID NO: 441518 - DNA, 191 bp, Homo sapiens; identical to SEQ ID NO: 288945
  chr12:52427134-52427325
  hypo

SEQ ID NO: 441519 - DNA, 39 bp, Homo sapiens; identical to SEQ ID NO: 264795
  chr12:52462471-52462510
  hypo

SEQ ID NO: 441520 - DNA, 82 bp, Homo sapiens; identical to SEQ ID NO: 315829
  chr12:52490992-52491074
  hypo

SEQ ID NO: 441521 - DNA, 44 bp, Homo sapiens; identical to SEQ ID NO: 315830
  chr12:52491127-52491171
  hypo

SEQ ID NO: 441522 - DNA, 122 bp, Homo sapiens; identical to SEQ ID NO: 214900
  chr12:52539734-52539856
  hypo

SEQ ID NO: 441523 - DNA, 308 bp, Homo sapiens; identical to SEQ ID NO: 264799
  chr12:52567344-52567652
  hypo

SEQ ID NO: 441524 - DNA, 98 bp, Homo sapiens; identical to SEQ ID NO: 264800
  chr12:52647005-52647103
  hypo

SEQ ID NO: 441525 - DNA, 153 bp, Homo sapiens; identical to SEQ ID NO: 264801
  chr12:52647390-52647543
  hypo

SEQ ID NO: 441526 - DNA, 42 bp, Homo sapiens; identical to SEQ ID NO: 264802
  chr12:52648051-52648093
  hypo

SEQ ID NO: 441527 - DNA, 59 bp, Homo sapiens; identical to SEQ ID NO: 264803
  chr12:52750116-52750175
  hypo

SEQ ID NO: 441528 - DNA, 114 bp, Homo sapiens; identical to SEQ ID NO: 264804
  chr12:52779175-52779289
  hypo

SEQ ID NO: 441529 - DNA, 348 bp, Homo sapiens; identical to SEQ ID NO: 264805
  chr12:52793641-52793989
  hypo

SEQ ID NO: 441530 - DNA, 95 bp, Homo sapiens; identical to SEQ ID NO: 264806
  chr12:52906094-52906189
  hypo

SEQ ID NO: 441531 - DNA, 172 bp, Homo sapiens; identical to SEQ ID NO: 264807
  chr12:52910443-52910615
  hypo

SEQ ID NO: 441532 - DNA, 72 bp, Homo sapiens; identical to SEQ ID NO: 264808
  chr12:52911390-52911462
  hypo

SEQ ID NO: 441533 - DNA, 105 bp, Homo sapiens; identical to SEQ ID NO: 214905
  chr12:53040689-53040794
  hypo

SEQ ID NO: 441534 - DNA, 56 bp, Homo sapiens; identical to SEQ ID NO: 264812
  chr12:53041516-53041572
  hypo

SEQ ID NO: 441535 - DNA, 56 bp, Homo sapiens; identical to SEQ ID NO: 264813
  chr12:53041986-53042042
  hypo

SEQ ID NO: 441536 - DNA, 293 bp, Homo sapiens; identical to SEQ ID NO: 315850
  chr12:53068868-53069161
  hypo

SEQ ID NO: 441537 - DNA, 421 bp, Homo sapiens; identical to SEQ ID NO: 264816
  chr12:53183249-53183670
  hypo

SEQ ID NO: 441538 - DNA, 203 bp, Homo sapiens; identical to SEQ ID NO: 264818
  chr12:53214328-53214531
  hypo

SEQ ID NO: 441539 - DNA, 64 bp, Homo sapiens; identical to SEQ ID NO: 214908
  chr12:53241431-53241495
  hypo

SEQ ID NO: 441540 - DNA, 33 bp, Homo sapiens; identical to SEQ ID NO: 264820
  chr12:53345414-53345447
  hypo

SEQ ID NO: 441541 - DNA, 160 bp, Homo sapiens; identical to SEQ ID NO: 264821
  chr12:53452999-53453159
  hypo

SEQ ID NO: 441542 - DNA, 75 bp, Homo sapiens; identical to SEQ ID NO: 264822
  chr12:53454239-53454314
  hypo

SEQ ID NO: 441543 - DNA, 81 bp, Homo sapiens; identical to SEQ ID NO: 264823
  chr12:53463204-53463285
  hypo

SEQ ID NO: 441544 - DNA, 86 bp, Homo sapiens; identical to SEQ ID NO: 214909
  chr12:53467253-53467339
  hypo

SEQ ID NO: 441545 - DNA, 75 bp, Homo sapiens; identical to SEQ ID NO: 264826
  chr12:53509321-53509396
  hypo

SEQ ID NO: 441546 - DNA, 40 bp, Homo sapiens; identical to SEQ ID NO: 214910
  chr12:53517536-53517576
  hypo

SEQ ID NO: 441547 - DNA, 58 bp, Homo sapiens; identical to SEQ ID NO: 264828
  chr12:53547966-53548024
  hypo

SEQ ID NO: 441548 - DNA, 125 bp, Homo sapiens; identical to SEQ ID NO: 264831
  chr12:53677870-53677995
  hypo

SEQ ID NO: 441549 - DNA, 59 bp, Homo sapiens; identical to SEQ ID NO: 214912
  chr12:53686627-53686686
  hypo

SEQ ID NO: 441550 - DNA, 138 bp, Homo sapiens; identical to SEQ ID NO: 202995
  chr12:53765064-53765202
  hypo

SEQ ID NO: 441551 - DNA, 240 bp, Homo sapiens; identical to SEQ ID NO: 264834
  chr12:53778351-53778591
  hypo

SEQ ID NO: 441552 - DNA, 57 bp, Homo sapiens; identical to SEQ ID NO: 315870
  chr12:53785410-53785467
  hypo

SEQ ID NO: 441553 - DNA, 92 bp, Homo sapiens; identical to SEQ ID NO: 264836
  chr12:53796833-53796925
  hypo

SEQ ID NO: 441554 - DNA, 43 bp, Homo sapiens; identical to SEQ ID NO: 264838
  chr12:53823277-53823320
  hypo

SEQ ID NO: 441555 - DNA, 35 bp, Homo sapiens; identical to SEQ ID NO: 264839
  chr12:53830285-53830320
  hypo

SEQ ID NO: 441556 - DNA, 53 bp, Homo sapiens; identical to SEQ ID NO: 315874
  chr12:53832417-53832470
  hypo

SEQ ID NO: 441557 - DNA, 41 bp, Homo sapiens; identical to SEQ ID NO: 264841
  chr12:53836912-53836953
  hypo

SEQ ID NO: 441558 - DNA, 157 bp, Homo sapiens; identical to SEQ ID NO: 264842
  chr12:53898408-53898565
  hypo

SEQ ID NO: 441559 - DNA, 204 bp, Homo sapiens; identical to SEQ ID NO: 214915
  chr12:53899813-53900017
  hypo

SEQ ID NO: 441560 - DNA, 404 bp, Homo sapiens; identical to SEQ ID NO: 264844
  chr12:53994392-53994796
  hypo

SEQ ID NO: 441561 - DNA, 36 bp, Homo sapiens; identical to SEQ ID NO: 264845
  chr12:54023346-54023382
  hypo

SEQ ID NO: 441562 - DNA, 44 bp, Homo sapiens; identical to SEQ ID NO: 264846
  chr12:54031206-54031250
  hypo

SEQ ID NO: 441563 - DNA, 87 bp, Homo sapiens; identical to SEQ ID NO: 264847
  chr12:54051791-54051878
  hypo

SEQ ID NO: 441564 - DNA, 44 bp, Homo sapiens; identical to SEQ ID NO: 264849
  chr12:54629097-54629141
  hypo

SEQ ID NO: 441565 - DNA, 148 bp, Homo sapiens; identical to SEQ ID NO: 264850
  chr12:54651109-54651257
  hypo

SEQ ID NO: 441566 - DNA, 59 bp, Homo sapiens; identical to SEQ ID NO: 409035
  chr12:54651287-54651346
  hypo

SEQ ID NO: 441567 - DNA, 41 bp, Homo sapiens; identical to SEQ ID NO: 203030
  chr12:54686414-54686455
  hypo

SEQ ID NO: 441568 - DNA, 38 bp, Homo sapiens; identical to SEQ ID NO: 264852
  chr12:54718115-54718153
  hypo

SEQ ID NO: 441569 - DNA, 56 bp, Homo sapiens; identical to SEQ ID NO: 315894
  chr12:54767804-54767860
  hypo

SEQ ID NO: 441570 - DNA, 277 bp, Homo sapiens; identical to SEQ ID NO: 289049
  chr12:54812879-54813156
  hypo

SEQ ID NO: 441571 - DNA, 31 bp, Homo sapiens; identical to SEQ ID NO: 264855
  chr12:54890476-54890507
  hypo

SEQ ID NO: 441572 - DNA, 91 bp, Homo sapiens; identical to SEQ ID NO: 264856
  chr12:55310066-55310157
  hypo

SEQ ID NO: 441573 - DNA, 39 bp, Homo sapiens; identical to SEQ ID NO: 214924
  chr12:55481152-55481191
  hypo

SEQ ID NO: 441574 - DNA, 36 bp, Homo sapiens; identical to SEQ ID NO: 264858
  chr12:55511044-55511080
  hypo

SEQ ID NO: 441575 - DNA, 278 bp, Homo sapiens; identical to SEQ ID NO: 264859
  chr12:56078877-56079155
  hypo

SEQ ID NO: 441576 - DNA, 33 bp, Homo sapiens; identical to SEQ ID NO: 264860
  chr12:56108936-56108969
  hypo

SEQ ID NO: 441577 - DNA, 180 bp, Homo sapiens; identical to SEQ ID NO: 264861
  chr12:56116619-56116799
  hypo

SEQ ID NO: 441578 - DNA, 269 bp, Homo sapiens; identical to SEQ ID NO: 214926
  chr12:56142456-56142725
  hypo

SEQ ID NO: 441579 - DNA, 88 bp, Homo sapiens; identical to SEQ ID NO: 214927
  chr12:56182547-56182635
  hypo

SEQ ID NO: 441580 - DNA, 31 bp, Homo sapiens; identical to SEQ ID NO: 214929
  chr12:56183705-56183736
  hypo

SEQ ID NO: 441581 - DNA, 140 bp, Homo sapiens; identical to SEQ ID NO: 264866
  chr12:56230959-56231099
  hypo

SEQ ID NO: 441582 - DNA, 42 bp, Homo sapiens; identical to SEQ ID NO: 224382
  chr12:56326151-56326193
  hypo

SEQ ID NO: 441583 - DNA, 137 bp, Homo sapiens; identical to SEQ ID NO: 264867
  chr12:56329173-56329310
  hypo

SEQ ID NO: 441584 - DNA, 196 bp, Homo sapiens; identical to SEQ ID NO: 264868
  chr12:56329557-56329753
  hypo

SEQ ID NO: 441585 - DNA, 120 bp, Homo sapiens; identical to SEQ ID NO: 264869
  chr12:56354598-56354718
  hypo

SEQ ID NO: 441586 - DNA, 151 bp, Homo sapiens; identical to SEQ ID NO: 203036
  chr12:56390556-56390707
  hypo

SEQ ID NO: 441587 - DNA, 348 bp, Homo sapiens; identical to SEQ ID NO: 122505
  chr12:56473998-56474346
  hypo

SEQ ID NO: 441588 - DNA, 174 bp, Homo sapiens; identical to SEQ ID NO: 264871
  chr12:56480248-56480422
  hypo

SEQ ID NO: 441589 - DNA, 56 bp, Homo sapiens; identical to SEQ ID NO: 264872
  chr12:56504406-56504462
  hypo

SEQ ID NO: 441590 - DNA, 148 bp, Homo sapiens; identical to SEQ ID NO: 214933
  chr12:56601395-56601543
  hypo

SEQ ID NO: 441591 - DNA, 200 bp, Homo sapiens; identical to SEQ ID NO: 214936
  chr12:56993681-56993881
  hypo

SEQ ID NO: 441592 - DNA, 62 bp, Homo sapiens; identical to SEQ ID NO: 315922
  chr12:57054418-57054480
  hypo

SEQ ID NO: 441593 - DNA, 35 bp, Homo sapiens; identical to SEQ ID NO: 264879
  chr12:57211451-57211486
  hypo

SEQ ID NO: 441594 - DNA, 108 bp, Homo sapiens; identical to SEQ ID NO: 264880
  chr12:57431637-57431745
  hypo

SEQ ID NO: 441595 - DNA, 32 bp, Homo sapiens; identical to SEQ ID NO: 214937
  chr12:57446184-57446216
  hypo

SEQ ID NO: 441596 - DNA, 172 bp, Homo sapiens; identical to SEQ ID NO: 214938
  chr12:57489924-57490096
  hypo

SEQ ID NO: 441597 - DNA, 74 bp, Homo sapiens; identical to SEQ ID NO: 264883
  chr12:57499242-57499316
  hypo

SEQ ID NO: 441598 - DNA, 91 bp, Homo sapiens; identical to SEQ ID NO: 264884
  chr12:57559573-57559664
  hypo

SEQ ID NO: 441599 - DNA, 114 bp, Homo sapiens; identical to SEQ ID NO: 214939
  chr12:57559925-57560039
  hypo

SEQ ID NO: 441600 - DNA, 356 bp, Homo sapiens; identical to SEQ ID NO: 264886
  chr12:57570816-57571172
  hypo

SEQ ID NO: 441601 - DNA, 35 bp, Homo sapiens; identical to SEQ ID NO: 264887
  chr12:57572148-57572183
  hypo

SEQ ID NO: 441602 - DNA, 38 bp, Homo sapiens; identical to SEQ ID NO: 264888
  chr12:57577265-57577303
  hypo

SEQ ID NO: 441603 - DNA, 182 bp, Homo sapiens; identical to SEQ ID NO: 264889
  chr12:57583524-57583706
  hypo

SEQ ID NO: 441604 - DNA, 71 bp, Homo sapiens; identical to SEQ ID NO: 214941
  chr12:57584915-57584986
  hypo

SEQ ID NO: 441605 - DNA, 197 bp, Homo sapiens; identical to SEQ ID NO: 264891
  chr12:57593155-57593352
  hypo

SEQ ID NO: 441606 - DNA, 67 bp, Homo sapiens; identical to SEQ ID NO: 214942
  chr12:57595540-57595607
  hypo

SEQ ID NO: 441607 - DNA, 149 bp, Homo sapiens; identical to SEQ ID NO: 264893
  chr12:57596873-57597022
  hypo

SEQ ID NO: 441608 - DNA, 78 bp, Homo sapiens; identical to SEQ ID NO: 264894
  chr12:57601872-57601950
  hypo

SEQ ID NO: 441609 - DNA, 80 bp, Homo sapiens; identical to SEQ ID NO: 264896
  chr12:57642438-57642518
  hypo

SEQ ID NO: 441610 - DNA, 150 bp, Homo sapiens; identical to SEQ ID NO: 264897
  chr12:57858461-57858611
  hypo

SEQ ID NO: 441611 - DNA, 56 bp, Homo sapiens; identical to SEQ ID NO: 264898
  chr12:57868221-57868277
  hypo

SEQ ID NO: 441612 - DNA, 82 bp, Homo sapiens; identical to SEQ ID NO: 214943
  chr12:57885677-57885759
  hypo

SEQ ID NO: 441613 - DNA, 103 bp, Homo sapiens; identical to SEQ ID NO: 264901
  chr12:57963865-57963968
  hypo

SEQ ID NO: 441614 - DNA, 105 bp, Homo sapiens; identical to SEQ ID NO: 214944
  chr12:57982779-57982884
  hypo

SEQ ID NO: 441615 - DNA, 42 bp, Homo sapiens; identical to SEQ ID NO: 264903
  chr12:57986074-57986116
  hypo

SEQ ID NO: 441616 - DNA, 86 bp, Homo sapiens; identical to SEQ ID NO: 264904
  chr12:58068674-58068760
  hypo

SEQ ID NO: 441617 - DNA, 44 bp, Homo sapiens; identical to SEQ ID NO: 264905
  chr12:58122681-58122725
  hypo

SEQ ID NO: 441618 - DNA, 36 bp, Homo sapiens; identical to SEQ ID NO: 264906
  chr12:58124644-58124680
  hypo

SEQ ID NO: 441619 - DNA, 166 bp, Homo sapiens; identical to SEQ ID NO: 214945
  chr12:58152861-58153027
  hypo

SEQ ID NO: 441620 - DNA, 251 bp, Homo sapiens; identical to SEQ ID NO: 203054
  chr12:58159038-58159289
  hypo

SEQ ID NO: 441621 - DNA, 147 bp, Homo sapiens; identical to SEQ ID NO: 203055
  chr12:58159346-58159493
  hypo

SEQ ID NO: 441622 - DNA, 102 bp, Homo sapiens; identical to SEQ ID NO: 214948
  chr12:58241599-58241701
  hypo

SEQ ID NO: 441623 - DNA, 374 bp, Homo sapiens; identical to SEQ ID NO: 224387
  chr12:58259123-58259497
  hypo

SEQ ID NO: 441624 - DNA, 41 bp, Homo sapiens; identical to SEQ ID NO: 264911
  chr12:58274994-58275035
  hypo

SEQ ID NO: 441625 - DNA, 280 bp, Homo sapiens; identical to SEQ ID NO: 224388
  chr12:58290227-58290507
  hypo

SEQ ID NO: 441626 - DNA, 188 bp, Homo sapiens; identical to SEQ ID NO: 203059
  chr12:59313474-59313662
  hypo

SEQ ID NO: 441627 - DNA, 397 bp, Homo sapiens; identical to SEQ ID NO: 421866
  chr12:59989602-59989999
  hypo

SEQ ID NO: 441628 - DNA, 123 bp, Homo sapiens; identical to SEQ ID NO: 214955
  chr12:60507737-60507860
  hypo

SEQ ID NO: 441629 - DNA, 44 bp, Homo sapiens; identical to SEQ ID NO: 214956
  chr12:60507890-60507934
  hypo

SEQ ID NO: 441630 - DNA, 189 bp, Homo sapiens; identical to SEQ ID NO: 264915
  chr12:61582596-61582785
  hypo

SEQ ID NO: 441631 - DNA, 121 bp, Homo sapiens; identical to SEQ ID NO: 264916
  chr12:62266114-62266235
  hypo

SEQ ID NO: 441632 - DNA, 157 bp, Homo sapiens; identical to SEQ ID NO: 264917
  chr12:63014933-63015090
  hypo

SEQ ID NO: 441633 - DNA, 42 bp, Homo sapiens; identical to SEQ ID NO: 264919
  chr12:63126532-63126574
  hypo

SEQ ID NO: 441634 - DNA, 192 bp, Homo sapiens; identical to SEQ ID NO: 214959
  chr12:63271246-63271438
  hypo

SEQ ID NO: 441635 - DNA, 266 bp, Homo sapiens; identical to SEQ ID NO: 264922
  chr12:63397171-63397437
  hypo

SEQ ID NO: 441636 - DNA, 33 bp, Homo sapiens; identical to SEQ ID NO: 264923
  chr12:63397758-63397791
  hypo

SEQ ID NO: 441637 - DNA, 329 bp, Homo sapiens; identical to SEQ ID NO: 203072
  chr12:64237615-64237944
  hypo

SEQ ID NO: 441638 - DNA, 110 bp, Homo sapiens; identical to SEQ ID NO: 203073
  chr12:64238195-64238305
  hypo

SEQ ID NO: 441639 - DNA, 98 bp, Homo sapiens; identical to SEQ ID NO: 264925
  chr12:64373753-64373851
  hypo

SEQ ID NO: 441640 - DNA, 275 bp, Homo sapiens; identical to SEQ ID NO: 214962
  chr12:64521629-64521904
  hypo

SEQ ID NO: 441641 - DNA, 269 bp, Homo sapiens; identical to SEQ ID NO: 315979
  chr12:64782916-64783185
  hypo

SEQ ID NO: 441642 - DNA, 48 bp, Homo sapiens; identical to SEQ ID NO: 315981
  chr12:64799659-64799707
  hypo

SEQ ID NO: 441643 - DNA, 396 bp, Homo sapiens; identical to SEQ ID NO: 203076
  chr12:64845175-64845571
  hypo

SEQ ID NO: 441644 - DNA, 144 bp, Homo sapiens; identical to SEQ ID NO: 264930
  chr12:64993418-64993562
  hypo

SEQ ID NO: 441645 - DNA, 32 bp, Homo sapiens; identical to SEQ ID NO: 264931
  chr12:65030351-65030383
  hypo

SEQ ID NO: 441646 - DNA, 32 bp, Homo sapiens; identical to SEQ ID NO: 214966
  chr12:65557469-65557501
  hypo

SEQ ID NO: 441647 - DNA, 272 bp, Homo sapiens; identical to SEQ ID NO: 289145
  chr12:65564381-65564653
  hypo

SEQ ID NO: 441648 - DNA, 50 bp, Homo sapiens; identical to SEQ ID NO: 49821
  chr12:65564722-65564772
  hypo

SEQ ID NO: 441649 - DNA, 41 bp, Homo sapiens; identical to SEQ ID NO: 214967
  chr12:66213996-66214037
  hypo

SEQ ID NO: 441650 - DNA, 31 bp, Homo sapiens; identical to SEQ ID NO: 264936
  chr12:66248227-66248258
  hypo

SEQ ID NO: 441651 - DNA, 33 bp, Homo sapiens; identical to SEQ ID NO: 264937
  chr12:66269546-66269579
  hypo

SEQ ID NO: 441652 - DNA, 89 bp, Homo sapiens; identical to SEQ ID NO: 264938
  chr12:66343866-66343955
  hypo

SEQ ID NO: 441653 - DNA, 92 bp, Homo sapiens; identical to SEQ ID NO: 264940
  chr12:66843698-66843790
  hypo

SEQ ID NO: 441654 - DNA, 94 bp, Homo sapiens; identical to SEQ ID NO: 264941
  chr12:66889676-66889770
  hypo

SEQ ID NO: 441655 - DNA, 35 bp, Homo sapiens; identical to SEQ ID NO: 264942
  chr12:68433185-68433220
  hypo

SEQ ID NO: 441656 - DNA, 35 bp, Homo sapiens; identical to SEQ ID NO: 264943
  chr12:68433460-68433495
  hypo

SEQ ID NO: 441657 - DNA, 33 bp, Homo sapiens; identical to SEQ ID NO: 264945
  chr12:69002754-69002787
  hypo

SEQ ID NO: 441658 - DNA, 64 bp, Homo sapiens; identical to SEQ ID NO: 224404
  chr12:69080591-69080655
  hypo

SEQ ID NO: 441659 - DNA, 47 bp, Homo sapiens; identical to SEQ ID NO: 224405
  chr12:69080866-69080913
  hypo

SEQ ID NO: 441660 - DNA, 43 bp, Homo sapiens; identical to SEQ ID NO: 214968
  chr12:69133795-69133838
  hypo

SEQ ID NO: 441661 - DNA, 209 bp, Homo sapiens; identical to SEQ ID NO: 214969
  chr12:69190343-69190552
  hypo

SEQ ID NO: 441662 - DNA, 43 bp, Homo sapiens; identical to SEQ ID NO: 264948
  chr12:69193920-69193963
  hypo

SEQ ID NO: 441663 - DNA, 72 bp, Homo sapiens; identical to SEQ ID NO: 316003
  chr12:69203731-69203803
  hypo

SEQ ID NO: 441664 - DNA, 104 bp, Homo sapiens; identical to SEQ ID NO: 264950
  chr12:69218066-69218170
  hypo

SEQ ID NO: 441665 - DNA, 137 bp, Homo sapiens; identical to SEQ ID NO: 264951
  chr12:69219402-69219539
  hypo

SEQ ID NO: 441666 - DNA, 39 bp, Homo sapiens; identical to SEQ ID NO: 203092
  chr12:69241507-69241546
  hypo

SEQ ID NO: 441667 - DNA, 198 bp, Homo sapiens; identical to SEQ ID NO: 264955
  chr12:69277880-69278078
  hypo

SEQ ID NO: 441668 - DNA, 114 bp, Homo sapiens; identical to SEQ ID NO: 264956
  chr12:69461743-69461857
  hypo

SEQ ID NO: 441669 - DNA, 64 bp, Homo sapiens; identical to SEQ ID NO: 264957
  chr12:69639025-69639089
  hypo

SEQ ID NO: 441670 - DNA, 102 bp, Homo sapiens; identical to SEQ ID NO: 214971
  chr12:69644224-69644326
  hypo

SEQ ID NO: 441671 - DNA, 98 bp, Homo sapiens; identical to SEQ ID NO: 264959
  chr12:69799148-69799246
  hypo

SEQ ID NO: 441672 - DNA, 33 bp, Homo sapiens; identical to SEQ ID NO: 264960
  chr12:69820434-69820467
  hypo

SEQ ID NO: 441673 - DNA, 178 bp, Homo sapiens; identical to SEQ ID NO: 214973
  chr12:70004624-70004802
  hypo

SEQ ID NO: 441674 - DNA, 108 bp, Homo sapiens
  chr12:70087357-70087465
  hypo
tgagtgaataaacaaacataaagaattttcaaaggaattctggaggtcctgtctcagctgagaagagcccatggaaggaaaagccattcatagtacctgcttcaacca

SEQ ID NO: 441675 - DNA, 72 bp, Homo sapiens; identical to SEQ ID NO: 264965
  chr12:70135096-70135168
  hypo

SEQ ID NO: 441676 - DNA, 36 bp, Homo sapiens; identical to SEQ ID NO: 316018
  chr12:70173198-70173234
  hypo

SEQ ID NO: 441677 - DNA, 132 bp, Homo sapiens; identical to SEQ ID NO: 316019
  chr12:70173275-70173407
  hypo

SEQ ID NO: 441678 - DNA, 33 bp, Homo sapiens; identical to SEQ ID NO: 264967
  chr12:70435915-70435948
  hypo

SEQ ID NO: 441679 - DNA, 171 bp, Homo sapiens; identical to SEQ ID NO: 214974
  chr12:70648187-70648358
  hypo

SEQ ID NO: 441680 - DNA, 76 bp, Homo sapiens; identical to SEQ ID NO: 316022
  chr12:70651452-70651528
  hypo

SEQ ID NO: 441681 - DNA, 205 bp, Homo sapiens; identical to SEQ ID NO: 264970
  chr12:70765937-70766142
  hypo

SEQ ID NO: 441682 - DNA, 194 bp, Homo sapiens; identical to SEQ ID NO: 264971
  chr12:70954498-70954692
  hypo

SEQ ID NO: 441683 - DNA, 42 bp, Homo sapiens; identical to SEQ ID NO: 214975
  chr12:72098321-72098363
  hypo

SEQ ID NO: 441684 - DNA, 120 bp, Homo sapiens; identical to SEQ ID NO: 214976
  chr12:72127145-72127265
  hypo

SEQ ID NO: 441685 - DNA, 77 bp, Homo sapiens
  chr12:72272263-72272340
  hypo
gatagggttagggttaatagggatggtggtgagggtttttgtttttttttttggaggagtctctctctttcatccag

SEQ ID NO: 441686 - DNA, 40 bp, Homo sapiens; identical to SEQ ID NO: 214978
  chr12:72642202-72642242
  hypo

SEQ ID NO: 441687 - DNA, 102 bp, Homo sapiens; identical to SEQ ID NO: 264977
  chr12:73130929-73131031
  hypo

SEQ ID NO: 441688 - DNA, 166 bp, Homo sapiens; identical to SEQ ID NO: 264978
  chr12:74564711-74564877
  hypo

SEQ ID NO: 441689 - DNA, 237 bp, Homo sapiens; identical to SEQ ID NO: 264979
  chr12:75699403-75699640
  hypo

SEQ ID NO: 441690 - DNA, 44 bp, Homo sapiens; identical to SEQ ID NO: 264980
  chr12:75702602-75702646
  hypo

SEQ ID NO: 441691 - DNA, 31 bp, Homo sapiens; identical to SEQ ID NO: 264981
  chr12:76706641-76706672
  hypo

SEQ ID NO: 441692 - DNA, 70 bp, Homo sapiens; identical to SEQ ID NO: 264984
  chr12:77002013-77002083
  hypo

SEQ ID NO: 441693 - DNA, 48 bp, Homo sapiens; identical to SEQ ID NO: 409103
  chr12:77216280-77216328
  hypo

SEQ ID NO: 441694 - DNA, 114 bp, Homo sapiens; identical to SEQ ID NO: 203107
  chr12:77272744-77272858
  hypo

SEQ ID NO: 441695 - DNA, 54 bp, Homo sapiens; identical to SEQ ID NO: 264987
  chr12:77424235-77424289
  hypo

SEQ ID NO: 441696 - DNA, 32 bp, Homo sapiens; identical to SEQ ID NO: 214983
  chr12:77453497-77453529
  hypo

SEQ ID NO: 441697 - DNA, 164 bp, Homo sapiens; identical to SEQ ID NO: 214984
  chr12:79926688-79926852
  hypo

SEQ ID NO: 441698 - DNA, 855 bp, Homo sapiens; identical to SEQ ID NO: 224407
  chr12:80084234-80085089
  hypo

SEQ ID NO: 441699 - DNA, 41 bp, Homo sapiens; identical to SEQ ID NO: 264991
  chr12:80871262-80871303
  hypo

SEQ ID NO: 441700 - DNA, 414 bp, Homo sapiens; identical to SEQ ID NO: 122764
  chr12:83080990-83081404
  hypo

SEQ ID NO: 441701 - DNA, 43 bp, Homo sapiens; identical to SEQ ID NO: 264992
  chr12:84323713-84323756
  hypo

SEQ ID NO: 441702 - DNA, 38 bp, Homo sapiens; identical to SEQ ID NO: 264993
  chr12:86216675-86216713
  hypo

SEQ ID NO: 441703 - DNA, 40 bp, Homo sapiens; identical to SEQ ID NO: 214988
  chr12:89020039-89020079
  hypo

SEQ ID NO: 441704 - DNA, 158 bp, Homo sapiens; identical to SEQ ID NO: 264995
  chr12:89772134-89772292
  hypo

SEQ ID NO: 441705 - DNA, 94 bp, Homo sapiens; identical to SEQ ID NO: 214990
  chr12:89800520-89800614
  hypo

SEQ ID NO: 441706 - DNA, 33 bp, Homo sapiens; identical to SEQ ID NO: 214991
  chr12:89915163-89915196
  hypo

SEQ ID NO: 441707 - DNA, 157 bp, Homo sapiens; identical to SEQ ID NO: 264998
  chr12:89916944-89917101
  hypo

SEQ ID NO: 441708 - DNA, 33 bp, Homo sapiens; identical to SEQ ID NO: 264999
  chr12:89973340-89973373
  hypo

SEQ ID NO: 441709 - DNA, 126 bp, Homo sapiens; identical to SEQ ID NO: 214992
  chr12:90049546-90049672
  hypo

SEQ ID NO: 441710 - DNA, 75 bp, Homo sapiens; identical to SEQ ID NO: 265003
  chr12:93475466-93475541
  hypo

SEQ ID NO: 441711 - DNA, 39 bp, Homo sapiens; identical to SEQ ID NO: 265004
  chr12:93476370-93476409
  hypo

SEQ ID NO: 441712 - DNA, 327 bp, Homo sapiens; identical to SEQ ID NO: 265005
  chr12:93709062-93709389
  hypo

SEQ ID NO: 441713 - DNA, 96 bp, Homo sapiens; identical to SEQ ID NO: 265007
  chr12:93738883-93738979
  hypo

SEQ ID NO: 441714 - DNA, 64 bp, Homo sapiens; identical to SEQ ID NO: 203132
  chr12:93985620-93985684
  hypo

SEQ ID NO: 441715 - DNA, 141 bp, Homo sapiens; identical to SEQ ID NO: 265008
  chr12:94093737-94093878
  hypo

SEQ ID NO: 441716 - DNA, 42 bp, Homo sapiens; identical to SEQ ID NO: 214996
  chr12:94145345-94145387
  hypo

SEQ ID NO: 441717 - DNA, 150 bp, Homo sapiens
  chr12:94145627-94145777
  hypo
gactctgtttcaaaaacacaaacaaaaaatcctttatctttactttgctcctttcaggatagctctggaatttgaatctgctttccagagctttattctcaactgccagcctcatttttcatactgtagttacttaagggtggaggtagt

SEQ ID NO: 441718 - DNA, 40 bp, Homo sapiens; identical to SEQ ID NO: 265011
  chr12:94203995-94204035
  hypo

SEQ ID NO: 441719 - DNA, 56 bp, Homo sapiens; identical to SEQ ID NO: 265012
  chr12:94233300-94233356
  hypo

SEQ ID NO: 441720 - DNA, 104 bp, Homo sapiens; identical to SEQ ID NO: 265013
  chr12:94235585-94235689
  hypo

SEQ ID NO: 441721 - DNA, 34 bp, Homo sapiens; identical to SEQ ID NO: 203135
  chr12:94544417-94544451
  hypo

SEQ ID NO: 441722 - DNA, 251 bp, Homo sapiens; identical to SEQ ID NO: 265014
  chr12:94658439-94658690
  hypo

SEQ ID NO: 441723 - DNA, 77 bp, Homo sapiens; identical to SEQ ID NO: 265015
  chr12:95397956-95398033
  hypo

SEQ ID NO: 441724 - DNA, 89 bp, Homo sapiens; identical to SEQ ID NO: 265017
  chr12:95492921-95493010
  hypo

SEQ ID NO: 441725 - DNA, 41 bp, Homo sapiens; identical to SEQ ID NO: 265018
  chr12:95562127-95562168
  hypo

SEQ ID NO: 441726 - DNA, 209 bp, Homo sapiens; identical to SEQ ID NO: 265020
  chr12:95676257-95676466
  hypo

SEQ ID NO: 441727 - DNA, 37 bp, Homo sapiens; identical to SEQ ID NO: 265021
  chr12:95900348-95900385
  hypo

SEQ ID NO: 441728 - DNA, 153 bp, Homo sapiens; identical to SEQ ID NO: 265022
  chr12:96115682-96115835
  hypo

SEQ ID NO: 441729 - DNA, 94 bp, Homo sapiens; identical to SEQ ID NO: 265023
  chr12:96131819-96131913
  hypo

SEQ ID NO: 441730 - DNA, 32 bp, Homo sapiens; identical to SEQ ID NO: 265025
  chr12:96437261-96437293
  hypo

SEQ ID NO: 441731 - DNA, 92 bp, Homo sapiens; identical to SEQ ID NO: 265026
  chr12:96437413-96437505
  hypo

SEQ ID NO: 441732 - DNA, 206 bp, Homo sapiens; identical to SEQ ID NO: 224419
  chr12:96587648-96587854
  hypo

SEQ ID NO: 441733 - DNA, 59 bp, Homo sapiens; identical to SEQ ID NO: 265028
  chr12:96613304-96613363
  hypo

SEQ ID NO: 441734 - DNA, 33 bp, Homo sapiens; identical to SEQ ID NO: 224420
  chr12:96618052-96618085
  hypo

SEQ ID NO: 441735 - DNA, 77 bp, Homo sapiens; identical to SEQ ID NO: 265029
  chr12:96633652-96633729
  hypo

SEQ ID NO: 441736 - DNA, 83 bp, Homo sapiens; identical to SEQ ID NO: 265030
  chr12:96641021-96641104
  hypo

SEQ ID NO: 441737 - DNA, 62 bp, Homo sapiens; identical to SEQ ID NO: 215005
  chr12:97339536-97339598
  hypo

SEQ ID NO: 441738 - DNA, 200 bp, Homo sapiens; identical to SEQ ID NO: 215006
  chr12:98947901-98948101
  hypo

SEQ ID NO: 441739 - DNA, 35 bp, Homo sapiens; identical to SEQ ID NO: 215007
  chr12:98948341-98948376
  hypo

SEQ ID NO: 441740 - DNA, 85 bp, Homo sapiens; identical to SEQ ID NO: 215008
  chr12:98983724-98983809
  hypo

SEQ ID NO: 441741 - DNA, 120 bp, Homo sapiens; identical to SEQ ID NO: 265036
  chr12:100624655-100624775
  hypo

SEQ ID NO: 441742 - DNA, 169 bp, Homo sapiens; identical to SEQ ID NO: 215009
  chr12:101711200-101711369
  hypo

SEQ ID NO: 441743 - DNA, 94 bp, Homo sapiens; identical to SEQ ID NO: 215010
  chr12:101718176-101718270
  hypo

SEQ ID NO: 441744 - DNA, 196 bp, Homo sapiens; identical to SEQ ID NO: 265040
  chr12:101720929-101721125
  hypo

SEQ ID NO: 441745 - DNA, 36 bp, Homo sapiens; identical to SEQ ID NO: 265041
  chr12:101962172-101962208
  hypo

SEQ ID NO: 441746 - DNA, 192 bp, Homo sapiens; identical to SEQ ID NO: 265042
  chr12:102108364-102108556
  hypo

SEQ ID NO: 441747 - DNA, 197 bp, Homo sapiens; identical to SEQ ID NO: 215011
  chr12:102132858-102133055
  hypo

SEQ ID NO: 441748 - DNA, 56 bp, Homo sapiens; identical to SEQ ID NO: 215012
  chr12:102133325-102133381
  hypo

SEQ ID NO: 441749 - DNA, 36 bp, Homo sapiens; identical to SEQ ID NO: 265045
  chr12:102134948-102134984
  hypo

SEQ ID NO: 441750 - DNA, 33 bp, Homo sapiens; identical to SEQ ID NO: 265046
  chr12:102276171-102276204
  hypo

SEQ ID NO: 441751 - DNA, 31 bp, Homo sapiens; identical to SEQ ID NO: 265048
  chr12:102457128-102457159
  hypo

SEQ ID NO: 441752 - DNA, 150 bp, Homo sapiens; identical to SEQ ID NO: 265049
  chr12:102457339-102457489
  hypo

SEQ ID NO: 441753 - DNA, 202 bp, Homo sapiens; identical to SEQ ID NO: 122896
  chr12:103696193-103696395
  hypo

SEQ ID NO: 441754 - DNA, 92 bp, Homo sapiens; identical to SEQ ID NO: 265050
  chr12:103926638-103926730
  hypo

SEQ ID NO: 441755 - DNA, 98 bp, Homo sapiens; identical to SEQ ID NO: 265051
  chr12:103970054-103970152
  hypo

SEQ ID NO: 441756 - DNA, 126 bp, Homo sapiens; identical to SEQ ID NO: 265052
  chr12:104169295-104169421
  hypo

SEQ ID NO: 441757 - DNA, 39 bp, Homo sapiens; identical to SEQ ID NO: 215014
  chr12:104220732-104220771
  hypo

SEQ ID NO: 441758 - DNA, 98 bp, Homo sapiens; identical to SEQ ID NO: 203156
  chr12:104459023-104459121
  hypo

SEQ ID NO: 441759 - DNA, 42 bp, Homo sapiens; identical to SEQ ID NO: 215017
  chr12:104685528-104685570
  hypo

SEQ ID NO: 441760 - DNA, 92 bp, Homo sapiens; identical to SEQ ID NO: 215018
  chr12:104686067-104686159
  hypo

SEQ ID NO: 441761 - DNA, 35 bp, Homo sapiens; identical to SEQ ID NO: 215019
  chr12:104691424-104691459
  hypo

SEQ ID NO: 441762 - DNA, 83 bp, Homo sapiens; identical to SEQ ID NO: 316126
  chr12:104698303-104698386
  hypo

SEQ ID NO: 441763 - DNA, 36 bp, Homo sapiens; identical to SEQ ID NO: 215020
  chr12:104702054-104702090
  hypo

SEQ ID NO: 441764 - DNA, 35 bp, Homo sapiens; identical to SEQ ID NO: 215021
  chr12:104703967-104704002
  hypo

SEQ ID NO: 441765 - DNA, 143 bp, Homo sapiens; identical to SEQ ID NO: 265063
  chr12:104799424-104799567
  hypo

SEQ ID NO: 441766 - DNA, 175 bp, Homo sapiens; identical to SEQ ID NO: 215023
  chr12:105096586-105096761
  hypo

SEQ ID NO: 441767 - DNA, 131 bp, Homo sapiens; identical to SEQ ID NO: 265065
  chr12:105097266-105097397
  hypo

SEQ ID NO: 441768 - DNA, 49 bp, Homo sapiens; identical to SEQ ID NO: 215024
  chr12:105132876-105132925
  hypo

SEQ ID NO: 441769 - DNA, 146 bp, Homo sapiens; identical to SEQ ID NO: 265069
  chr12:105607980-105608126
  hypo

SEQ ID NO: 441770 - DNA, 40 bp, Homo sapiens; identical to SEQ ID NO: 265070
  chr12:105773503-105773543
  hypo

SEQ ID NO: 441771 - DNA, 204 bp, Homo sapiens; identical to SEQ ID NO: 265071
  chr12:105955873-105956077
  hypo

SEQ ID NO: 441772 - DNA, 158 bp, Homo sapiens; identical to SEQ ID NO: 265072
  chr12:105956297-105956455
  hypo

SEQ ID NO: 441773 - DNA, 117 bp, Homo sapiens; identical to SEQ ID NO: 215025
  chr12:106460688-106460805
  hypo

SEQ ID NO: 441774 - DNA, 588 bp, Homo sapiens; identical to SEQ ID NO: 289297
  chr12:106532406-106532994
  hypo

SEQ ID NO: 441775 - DNA, 264 bp, Homo sapiens; identical to SEQ ID NO: 203162
  chr12:106640992-106641256
  hypo

SEQ ID NO: 441776 - DNA, 54 bp, Homo sapiens; identical to SEQ ID NO: 203163
  chr12:106641515-106641569
  hypo

SEQ ID NO: 441777 - DNA, 142 bp, Homo sapiens; identical to SEQ ID NO: 265074
  chr12:106643971-106644113
  hypo

SEQ ID NO: 441778 - DNA, 59 bp, Homo sapiens; identical to SEQ ID NO: 265075
  chr12:106669249-106669308
  hypo

SEQ ID NO: 441779 - DNA, 42 bp, Homo sapiens; identical to SEQ ID NO: 265076
  chr12:106829974-106830016
  hypo

SEQ ID NO: 441780 - DNA, 189 bp, Homo sapiens; identical to SEQ ID NO: 215028
  chr12:106881472-106881661
  hypo

SEQ ID NO: 441781 - DNA, 42 bp, Homo sapiens; identical to SEQ ID NO: 265078
  chr12:107103207-107103249
  hypo

SEQ ID NO: 441782 - DNA, 39 bp, Homo sapiens; identical to SEQ ID NO: 265079
  chr12:107114442-107114481
  hypo

SEQ ID NO: 441783 - DNA, 985 bp, Homo sapiens; identical to SEQ ID NO: 289305
  chr12:107167936-107168921
  hypo

SEQ ID NO: 441784 - DNA, 87 bp, Homo sapiens; identical to SEQ ID NO: 265080
  chr12:107436703-107436790
  hypo

SEQ ID NO: 441785 - DNA, 113 bp, Homo sapiens; identical to SEQ ID NO: 265081
  chr12:107436820-107436933
  hypo

SEQ ID NO: 441786 - DNA, 41 bp, Homo sapiens; identical to SEQ ID NO: 226552
  chr12:108298348-108298389
  hypo

SEQ ID NO: 441787 - DNA, 32 bp, Homo sapiens; identical to SEQ ID NO: 215032
  chr12:108963690-108963722
  hypo

SEQ ID NO: 441788 - DNA, 92 bp, Homo sapiens; identical to SEQ ID NO: 265085
  chr12:108985671-108985763
  hypo

SEQ ID NO: 441789 - DNA, 43 bp, Homo sapiens; identical to SEQ ID NO: 265086
  chr12:109014134-109014177
  hypo

SEQ ID NO: 441790 - DNA, 169 bp, Homo sapiens; identical to SEQ ID NO: 265088
  chr12:109181383-109181552
  hypo

SEQ ID NO: 441791 - DNA, 80 bp, Homo sapiens; identical to SEQ ID NO: 265089
  chr12:109195703-109195783
  hypo

SEQ ID NO: 441792 - DNA, 180 bp, Homo sapiens; identical to SEQ ID NO: 265090
  chr12:109204591-109204771
  hypo

SEQ ID NO: 441793 - DNA, 134 bp, Homo sapiens; identical to SEQ ID NO: 265092
  chr12:109209742-109209876
  hypo

SEQ ID NO: 441794 - DNA, 126 bp, Homo sapiens; identical to SEQ ID NO: 215035
  chr12:109213025-109213151
  hypo

SEQ ID NO: 441795 - DNA, 41 bp, Homo sapiens; identical to SEQ ID NO: 265096
  chr12:109540086-109540127
  hypo

SEQ ID NO: 441796 - DNA, 156 bp, Homo sapiens; identical to SEQ ID NO: 265097
  chr12:109637356-109637512
  hypo

SEQ ID NO: 441797 - DNA, 210 bp, Homo sapiens; identical to SEQ ID NO: 265098
  chr12:109717149-109717359
  hypo

SEQ ID NO: 441798 - DNA, 589 bp, Homo sapiens; identical to SEQ ID NO: 289331
  chr12:109746919-109747508
  hypo

SEQ ID NO: 441799 - DNA, 98 bp, Homo sapiens; identical to SEQ ID NO: 316174
  chr12:109796964-109797062
  hypo

SEQ ID NO: 441800 - DNA, 39 bp, Homo sapiens; identical to SEQ ID NO: 265101
  chr12:109878129-109878168
  hypo

SEQ ID NO: 441801 - DNA, 195 bp, Homo sapiens; identical to SEQ ID NO: 265102
  chr12:109881228-109881423
  hypo

SEQ ID NO: 441802 - DNA, 214 bp, Homo sapiens; identical to SEQ ID NO: 265103
  chr12:109886526-109886740
  hypo

SEQ ID NO: 441803 - DNA, 175 bp, Homo sapiens; identical to SEQ ID NO: 215038
  chr12:109887568-109887743
  hypo

SEQ ID NO: 441804 - DNA, 199 bp, Homo sapiens; identical to SEQ ID NO: 265105
  chr12:109887946-109888145
  hypo

SEQ ID NO: 441805 - DNA, 33 bp, Homo sapiens; identical to SEQ ID NO: 265107
  chr12:109916584-109916617
  hypo

SEQ ID NO: 441806 - DNA, 46 bp, Homo sapiens; identical to SEQ ID NO: 265108
  chr12:109935639-109935685
  hypo

SEQ ID NO: 441807 - DNA, 303 bp, Homo sapiens; identical to SEQ ID NO: 265109
  chr12:109935997-109936300
  hypo

SEQ ID NO: 441808 - DNA, 159 bp, Homo sapiens; identical to SEQ ID NO: 265110
  chr12:109936815-109936974
  hypo

SEQ ID NO: 441809 - DNA, 76 bp, Homo sapiens; identical to SEQ ID NO: 265112
  chr12:109973151-109973227
  hypo

SEQ ID NO: 441810 - DNA, 141 bp, Homo sapiens; identical to SEQ ID NO: 265114
  chr12:110164950-110165091
  hypo

SEQ ID NO: 441811 - DNA, 43 bp, Homo sapiens; identical to SEQ ID NO: 265115
  chr12:110170347-110170390
  hypo

SEQ ID NO: 441812 - DNA, 338 bp, Homo sapiens; identical to SEQ ID NO: 265116
  chr12:110224374-110224712
  hypo

SEQ ID NO: 441813 - DNA, 34 bp, Homo sapiens; identical to SEQ ID NO: 265117
  chr12:110250928-110250962
  hypo

SEQ ID NO: 441814 - DNA, 71 bp, Homo sapiens; identical to SEQ ID NO: 265120
  chr12:110357433-110357504
  hypo

SEQ ID NO: 441815 - DNA, 192 bp, Homo sapiens; identical to SEQ ID NO: 215041
  chr12:110378869-110379061
  hypo

SEQ ID NO: 441816 - DNA, 36 bp, Homo sapiens; identical to SEQ ID NO: 215042
  chr12:110388924-110388960
  hypo

SEQ ID NO: 441817 - DNA, 162 bp, Homo sapiens; identical to SEQ ID NO: 265124
  chr12:110489068-110489230
  hypo

SEQ ID NO: 441818 - DNA, 37 bp, Homo sapiens; identical to SEQ ID NO: 265127
  chr12:110563479-110563516
  hypo

SEQ ID NO: 441819 - DNA, 63 bp, Homo sapiens; identical to SEQ ID NO: 316202
  chr12:110563722-110563785
  hypo

SEQ ID NO: 441820 - DNA, 31 bp, Homo sapiens; identical to SEQ ID NO: 265130
  chr12:110767512-110767543
  hypo

SEQ ID NO: 441821 - DNA, 155 bp, Homo sapiens; identical to SEQ ID NO: 316205
  chr12:110782524-110782679
  hypo

SEQ ID NO: 441822 - DNA, 101 bp, Homo sapiens; identical to SEQ ID NO: 265133
  chr12:110783743-110783844
  hypo

SEQ ID NO: 441823 - DNA, 54 bp, Homo sapiens; identical to SEQ ID NO: 409168
  chr12:110783925-110783979
  hypo

SEQ ID NO: 441824 - DNA, 303 bp, Homo sapiens; identical to SEQ ID NO: 265136
  chr12:110785458-110785761
  hypo

SEQ ID NO: 441825 - DNA, 148 bp, Homo sapiens; identical to SEQ ID NO: 215046
  chr12:110806697-110806845
  hypo

SEQ ID NO: 441826 - DNA, 164 bp, Homo sapiens; identical to SEQ ID NO: 265138
  chr12:110807995-110808159
  hypo

SEQ ID NO: 441827 - DNA, 201 bp, Homo sapiens; identical to SEQ ID NO: 215047
  chr12:110808573-110808774
  hypo

SEQ ID NO: 441828 - DNA, 97 bp, Homo sapiens; identical to SEQ ID NO: 215049
  chr12:110916597-110916694
  hypo

SEQ ID NO: 441829 - DNA, 37 bp, Homo sapiens; identical to SEQ ID NO: 215050
  chr12:110916994-110917031
  hypo

SEQ ID NO: 441830 - DNA, 316 bp, Homo sapiens; identical to SEQ ID NO: 215051
  chr12:111083708-111084024
  hypo

SEQ ID NO: 441831 - DNA, 153 bp, Homo sapiens; identical to SEQ ID NO: 215052
  chr12:111087519-111087672
  hypo

SEQ ID NO: 441832 - DNA, 120 bp, Homo sapiens; identical to SEQ ID NO: 215053
  chr12:111195775-111195895
  hypo

SEQ ID NO: 441833 - DNA, 33 bp, Homo sapiens; identical to SEQ ID NO: 422020
  chr12:111285042-111285075
  hypo

SEQ ID NO: 441834 - DNA, 242 bp, Homo sapiens; identical to SEQ ID NO: 265149
  chr12:111501288-111501530
  hypo

SEQ ID NO: 441835 - DNA, 180 bp, Homo sapiens; identical to SEQ ID NO: 265153
  chr12:111829848-111830028
  hypo

SEQ ID NO: 441836 - DNA, 61 bp, Homo sapiens; identical to SEQ ID NO: 265154
  chr12:111855883-111855944
  hypo

SEQ ID NO: 441837 - DNA, 113 bp, Homo sapiens; identical to SEQ ID NO: 215059
  chr12:111885452-111885565
  hypo

SEQ ID NO: 441838 - DNA, 42 bp, Homo sapiens; identical to SEQ ID NO: 265156
  chr12:112015341-112015383
  hypo

SEQ ID NO: 441839 - DNA, 220 bp, Homo sapiens; identical to SEQ ID NO: 265157
  chr12:112082001-112082221
  hypo

SEQ ID NO: 441840 - DNA, 81 bp, Homo sapiens; identical to SEQ ID NO: 215060
  chr12:112082472-112082553
  hypo

SEQ ID NO: 441841 - DNA, 86 bp, Homo sapiens; identical to SEQ ID NO: 265159
  chr12:112110965-112111051
  hypo

SEQ ID NO: 441842 - DNA, 120 bp, Homo sapiens; identical to SEQ ID NO: 265160
  chr12:112126606-112126726
  hypo

SEQ ID NO: 441843 - DNA, 168 bp, Homo sapiens; identical to SEQ ID NO: 265161
  chr12:112171648-112171816
  hypo

SEQ ID NO: 441844 - DNA, 54 bp, Homo sapiens; identical to SEQ ID NO: 215061
  chr12:112194070-112194124
  hypo

SEQ ID NO: 441845 - DNA, 91 bp, Homo sapiens; identical to SEQ ID NO: 265164
  chr12:112218335-112218426
  hypo

SEQ ID NO: 441846 - DNA, 82 bp, Homo sapiens; identical to SEQ ID NO: 215062
  chr12:112288155-112288237
  hypo

SEQ ID NO: 441847 - DNA, 34 bp, Homo sapiens; identical to SEQ ID NO: 265167
  chr12:112560194-112560228
  hypo

SEQ ID NO: 441848 - DNA, 90 bp, Homo sapiens; identical to SEQ ID NO: 215063
  chr12:112574643-112574733
  hypo

SEQ ID NO: 441849 - DNA, 35 bp, Homo sapiens; identical to SEQ ID NO: 215064
  chr12:112575271-112575306
  hypo

SEQ ID NO: 441850 - DNA, 31 bp, Homo sapiens; identical to SEQ ID NO: 215065
  chr12:112591128-112591159
  hypo

SEQ ID NO: 441851 - DNA, 151 bp, Homo sapiens
  chr12:112610022-112610173
  hypo
ctctttggaaacacaggggcacctgaatgggccttcctgcaatcctagcttttaacaaaaacatggtgttccccattatgaaggctaatgcctctactgcaagttatcagactataaatgcttctcactccccatggcagcctggcctcag

SEQ ID NO: 441852 - DNA, 93 bp, Homo sapiens; identical to SEQ ID NO: 215069
  chr12:112612659-112612752
  hypo

SEQ ID NO: 441853 - DNA, 70 bp, Homo sapiens; identical to SEQ ID NO: 215070
  chr12:112616770-112616840
  hypo

SEQ ID NO: 441854 - DNA, 230 bp, Homo sapiens; identical to SEQ ID NO: 265176
  chr12:112620317-112620547
  hypo

SEQ ID NO: 441855 - DNA, 251 bp, Homo sapiens; identical to SEQ ID NO: 265177
  chr12:112622465-112622716
  hypo

SEQ ID NO: 441856 - DNA, 382 bp, Homo sapiens; identical to SEQ ID NO: 215071
  chr12:112657024-112657406
  hypo

SEQ ID NO: 441857 - DNA, 42 bp, Homo sapiens; identical to SEQ ID NO: 224443
  chr12:112689847-112689889
  hypo

SEQ ID NO: 441858 - DNA, 53 bp, Homo sapiens; identical to SEQ ID NO: 265183
  chr12:112753046-112753099
  hypo

SEQ ID NO: 441859 - DNA, 35 bp, Homo sapiens; identical to SEQ ID NO: 203186
  chr12:112884177-112884212
  hypo

SEQ ID NO: 441860 - DNA, 481 bp, Homo sapiens; identical to SEQ ID NO: 265184
  chr12:112893631-112894112
  hypo

SEQ ID NO: 441861 - DNA, 58 bp, Homo sapiens; identical to SEQ ID NO: 203187
  chr12:112915451-112915509
  hypo

SEQ ID NO: 441862 - DNA, 116 bp, Homo sapiens; identical to SEQ ID NO: 203188
  chr12:112924321-112924437
  hypo

SEQ ID NO: 441863 - DNA, 49 bp, Homo sapiens; identical to SEQ ID NO: 203189
  chr12:112926827-112926876
  hypo

SEQ ID NO: 441864 - DNA, 65 bp, Homo sapiens; identical to SEQ ID NO: 203190
  chr12:112926914-112926979
  hypo

SEQ ID NO: 441865 - DNA, 248 bp, Homo sapiens; identical to SEQ ID NO: 215080
  chr12:113598986-113599234
  hypo

SEQ ID NO: 441866 - DNA, 156 bp, Homo sapiens; identical to SEQ ID NO: 215081
  chr12:113629777-113629933
  hypo

SEQ ID NO: 441867 - DNA, 308 bp, Homo sapiens; identical to SEQ ID NO: 215082
  chr12:113669642-113669950
  hypo

SEQ ID NO: 441868 - DNA, 201 bp, Homo sapiens; identical to SEQ ID NO: 316273
  chr12:113690093-113690294
  hypo

SEQ ID NO: 441869 - DNA, 196 bp, Homo sapiens; identical to SEQ ID NO: 316274
  chr12:113690324-113690520
  hypo

SEQ ID NO: 441870 - DNA, 176 bp, Homo sapiens; identical to SEQ ID NO: 265193
  chr12:113734198-113734374
  hypo

SEQ ID NO: 441871 - DNA, 107 bp, Homo sapiens; identical to SEQ ID NO: 265194
  chr12:114163037-114163144
  hypo

SEQ ID NO: 441872 - DNA, 61 bp, Homo sapiens; identical to SEQ ID NO: 215085
  chr12:114254876-114254937
  hypo

SEQ ID NO: 441873 - DNA, 197 bp, Homo sapiens; identical to SEQ ID NO: 215089
  chr12:114282867-114283064
  hypo

SEQ ID NO: 441874 - DNA, 199 bp, Homo sapiens; identical to SEQ ID NO: 316286
  chr12:114295304-114295503
  hypo

SEQ ID NO: 441875 - DNA, 139 bp, Homo sapiens; identical to SEQ ID NO: 215091
  chr12:114318248-114318387
  hypo

SEQ ID NO: 441876 - DNA, 109 bp, Homo sapiens; identical to SEQ ID NO: 265202
  chr12:114318957-114319066
  hypo

SEQ ID NO: 441877 - DNA, 151 bp, Homo sapiens; identical to SEQ ID NO: 265205
  chr12:114349904-114350055
  hypo

SEQ ID NO: 441878 - DNA, 283 bp, Homo sapiens; identical to SEQ ID NO: 265206
  chr12:114399937-114400220
  hypo

SEQ ID NO: 441879 - DNA, 147 bp, Homo sapiens; identical to SEQ ID NO: 203201
  chr12:114841493-114841640
  hypo

SEQ ID NO: 441880 - DNA, 117 bp, Homo sapiens; identical to SEQ ID NO: 265207
  chr12:114982647-114982764
  hypo

SEQ ID NO: 441881 - DNA, 79 bp, Homo sapiens; identical to SEQ ID NO: 215095
  chr12:114983017-114983096
  hypo

SEQ ID NO: 441882 - DNA, 235 bp, Homo sapiens; identical to SEQ ID NO: 265209
  chr12:115188683-115188918
  hypo

SEQ ID NO: 441883 - DNA, 88 bp, Homo sapiens; identical to SEQ ID NO: 265210
  chr12:115192172-115192260
  hypo

SEQ ID NO: 441884 - DNA, 140 bp, Homo sapiens; identical to SEQ ID NO: 265211
  chr12:115204970-115205110
  hypo

SEQ ID NO: 441885 - DNA, 149 bp, Homo sapiens; identical to SEQ ID NO: 265213
  chr12:115544514-115544663
  hypo

SEQ ID NO: 441886 - DNA, 43 bp, Homo sapiens; identical to SEQ ID NO: 265214
  chr12:116040841-116040884
  hypo

SEQ ID NO: 441887 - DNA, 138 bp, Homo sapiens; identical to SEQ ID NO: 265216
  chr12:116401202-116401340
  hypo

SEQ ID NO: 441888 - DNA, 315 bp, Homo sapiens; identical to SEQ ID NO: 265218
  chr12:116475434-116475749
  hypo

SEQ ID NO: 441889 - DNA, 35 bp, Homo sapiens; identical to SEQ ID NO: 265219
  chr12:116678339-116678374
  hypo

SEQ ID NO: 441890 - DNA, 34 bp, Homo sapiens; identical to SEQ ID NO: 265220
  chr12:116678614-116678648
  hypo

SEQ ID NO: 441891 - DNA, 42 bp, Homo sapiens; identical to SEQ ID NO: 265221
  chr12:116724732-116724774
  hypo

SEQ ID NO: 441892 - DNA, 66 bp, Homo sapiens; identical to SEQ ID NO: 316310
  chr12:116756739-116756805
  hypo

SEQ ID NO: 441893 - DNA, 69 bp, Homo sapiens; identical to SEQ ID NO: 265225
  chr12:116757111-116757180
  hypo

SEQ ID NO: 441894 - DNA, 43 bp, Homo sapiens; identical to SEQ ID NO: 265226
  chr12:116770791-116770834
  hypo

SEQ ID NO: 441895 - DNA, 92 bp, Homo sapiens; identical to SEQ ID NO: 265227
  chr12:116804026-116804118
  hypo

SEQ ID NO: 441896 - DNA, 34 bp, Homo sapiens; identical to SEQ ID NO: 265229
  chr12:116936895-116936929
  hypo

SEQ ID NO: 441897 - DNA, 54 bp, Homo sapiens; identical to SEQ ID NO: 215099
  chr12:116941370-116941424
  hypo

SEQ ID NO: 441898 - DNA, 199 bp, Homo sapiens; identical to SEQ ID NO: 289418
  chr12:116972230-116972429
  hypo

SEQ ID NO: 441899 - DNA, 40 bp, Homo sapiens; identical to SEQ ID NO: 265232
  chr12:116981481-116981521
  hypo

SEQ ID NO: 441900 - DNA, 192 bp, Homo sapiens; identical to SEQ ID NO: 215100
  chr12:116999941-117000133
  hypo

SEQ ID NO: 441901 - DNA, 210 bp, Homo sapiens; identical to SEQ ID NO: 265234
  chr12:117135886-117136096
  hypo

SEQ ID NO: 441902 - DNA, 324 bp, Homo sapiens; identical to SEQ ID NO: 215101
  chr12:117150057-117150381
  hypo

SEQ ID NO: 441903 - DNA, 100 bp, Homo sapiens; identical to SEQ ID NO: 215102
  chr12:117150587-117150687
  hypo

SEQ ID NO: 441904 - DNA, 194 bp, Homo sapiens; identical to SEQ ID NO: 265238
  chr12:117157435-117157629
  hypo

SEQ ID NO: 441905 - DNA, 84 bp, Homo sapiens; identical to SEQ ID NO: 265239
  chr12:117160857-117160941
  hypo

SEQ ID NO: 441906 - DNA, 61 bp, Homo sapiens; identical to SEQ ID NO: 265240
  chr12:117161612-117161673
  hypo

SEQ ID NO: 441907 - DNA, 41 bp, Homo sapiens; identical to SEQ ID NO: 265241
  chr12:117162195-117162236
  hypo

SEQ ID NO: 441908 - DNA, 116 bp, Homo sapiens; identical to SEQ ID NO: 265245
  chr12:117461716-117461832
  hypo

SEQ ID NO: 441909 - DNA, 205 bp, Homo sapiens; identical to SEQ ID NO: 265246
  chr12:117464845-117465050
  hypo

SEQ ID NO: 441910 - DNA, 134 bp, Homo sapiens; identical to SEQ ID NO: 215109
  chr12:117476986-117477120
  hypo

SEQ ID NO: 441911 - DNA, 49 bp, Homo sapiens; identical to SEQ ID NO: 215110
  chr12:117484292-117484341
  hypo

SEQ ID NO: 441912 - DNA, 202 bp, Homo sapiens; identical to SEQ ID NO: 215111
  chr12:117484371-117484573
  hypo

SEQ ID NO: 441913 - DNA, 287 bp, Homo sapiens; identical to SEQ ID NO: 265252
  chr12:117484911-117485198
  hypo

SEQ ID NO: 441914 - DNA, 115 bp, Homo sapiens; identical to SEQ ID NO: 265253
  chr12:117487070-117487185
  hypo

SEQ ID NO: 441915 - DNA, 40 bp, Homo sapiens; identical to SEQ ID NO: 215112
  chr12:117529341-117529381
  hypo

SEQ ID NO: 441916 - DNA, 296 bp, Homo sapiens; identical to SEQ ID NO: 265257
  chr12:117579415-117579711
  hypo

SEQ ID NO: 441917 - DNA, 81 bp, Homo sapiens; identical to SEQ ID NO: 265258
  chr12:117583676-117583757
  hypo

SEQ ID NO: 441918 - DNA, 180 bp, Homo sapiens; identical to SEQ ID NO: 265259
  chr12:117586330-117586510
  hypo

SEQ ID NO: 441919 - DNA, 61 bp, Homo sapiens; identical to SEQ ID NO: 265260
  chr12:117588319-117588380
  hypo

SEQ ID NO: 441920 - DNA, 43 bp, Homo sapiens; identical to SEQ ID NO: 215113
  chr12:117588696-117588739
  hypo

SEQ ID NO: 441921 - DNA, 103 bp, Homo sapiens; identical to SEQ ID NO: 215114
  chr12:117588799-117588902
  hypo

SEQ ID NO: 441922 - DNA, 289 bp, Homo sapiens; identical to SEQ ID NO: 215115
  chr12:117593454-117593743
  hypo

SEQ ID NO: 441923 - DNA, 86 bp, Homo sapiens; identical to SEQ ID NO: 265264
  chr12:117597670-117597756
  hypo

SEQ ID NO: 441924 - DNA, 165 bp, Homo sapiens; identical to SEQ ID NO: 265267
  chr12:117600622-117600787
  hypo

SEQ ID NO: 441925 - DNA, 87 bp, Homo sapiens; identical to SEQ ID NO: 215118
  chr12:117788578-117788665
  hypo

SEQ ID NO: 441926 - DNA, 196 bp, Homo sapiens; identical to SEQ ID NO: 265270
  chr12:118293044-118293240
  hypo

SEQ ID NO: 441927 - DNA, 225 bp, Homo sapiens; identical to SEQ ID NO: 265271
  chr12:118293460-118293685
  hypo

SEQ ID NO: 441928 - DNA, 59 bp, Homo sapiens; identical to SEQ ID NO: 265272
  chr12:118313383-118313442
  hypo

SEQ ID NO: 441929 - DNA, 57 bp, Homo sapiens; identical to SEQ ID NO: 265273
  chr12:118318419-118318476
  hypo

SEQ ID NO: 441930 - DNA, 44 bp, Homo sapiens; identical to SEQ ID NO: 316362
  chr12:118331669-118331713
  hypo

SEQ ID NO: 441931 - DNA, 33 bp, Homo sapiens; identical to SEQ ID NO: 265275
  chr12:118361694-118361727
  hypo

SEQ ID NO: 441932 - DNA, 32 bp, Homo sapiens; identical to SEQ ID NO: 265276
  chr12:118361967-118361999
  hypo

SEQ ID NO: 441933 - DNA, 107 bp, Homo sapiens; identical to SEQ ID NO: 215121
  chr12:118474193-118474300
  hypo

SEQ ID NO: 441934 - DNA, 120 bp, Homo sapiens; identical to SEQ ID NO: 215122
  chr12:118481549-118481669
  hypo

SEQ ID NO: 441935 - DNA, 48 bp, Homo sapiens; identical to SEQ ID NO: 265280
  chr12:118533281-118533329
  hypo

SEQ ID NO: 441936 - DNA, 325 bp, Homo sapiens; identical to SEQ ID NO: 215123
  chr12:118583595-118583920
  hypo

SEQ ID NO: 441937 - DNA, 213 bp, Homo sapiens; identical to SEQ ID NO: 215124
  chr12:118590038-118590251
  hypo

SEQ ID NO: 441938 - DNA, 45 bp, Homo sapiens; identical to SEQ ID NO: 215125
  chr12:118860436-118860481
  hypo

SEQ ID NO: 441939 - DNA, 31 bp, Homo sapiens; identical to SEQ ID NO: 265284
  chr12:118870267-118870298
  hypo

SEQ ID NO: 441940 - DNA, 31 bp, Homo sapiens; identical to SEQ ID NO: 265285
  chr12:118870538-118870569
  hypo

SEQ ID NO: 441941 - DNA, 99 bp, Homo sapiens; identical to SEQ ID NO: 215126
  chr12:119626324-119626423
  hypo

SEQ ID NO: 441942 - DNA, 51 bp, Homo sapiens; identical to SEQ ID NO: 215127
  chr12:120117233-120117284
  hypo

SEQ ID NO: 441943 - DNA, 378 bp, Homo sapiens; identical to SEQ ID NO: 215128
  chr12:120117590-120117968
  hypo

SEQ ID NO: 441944 - DNA, 153 bp, Homo sapiens; identical to SEQ ID NO: 265289
  chr12:120127978-120128131
  hypo

SEQ ID NO: 441945 - DNA, 196 bp, Homo sapiens; identical to SEQ ID NO: 215129
  chr12:120134818-120135014
  hypo

SEQ ID NO: 441946 - DNA, 394 bp, Homo sapiens; identical to SEQ ID NO: 265291
  chr12:120137279-120137673
  hypo

SEQ ID NO: 441947 - DNA, 102 bp, Homo sapiens; identical to SEQ ID NO: 265293
  chr12:120150400-120150502
  hypo

SEQ ID NO: 441948 - DNA, 175 bp, Homo sapiens; identical to SEQ ID NO: 316383
  chr12:120151876-120152051
  hypo

SEQ ID NO: 441949 - DNA, 37 bp, Homo sapiens; identical to SEQ ID NO: 316384
  chr12:120152105-120152142
  hypo

SEQ ID NO: 441950 - DNA, 434 bp, Homo sapiens; identical to SEQ ID NO: 215133
  chr12:120155994-120156428
  hypo

SEQ ID NO: 441951 - DNA, 97 bp, Homo sapiens; identical to SEQ ID NO: 265300
  chr12:120214487-120214584
  hypo

SEQ ID NO: 441952 - DNA, 304 bp, Homo sapiens; identical to SEQ ID NO: 265301
  chr12:120222343-120222647
  hypo

SEQ ID NO: 441953 - DNA, 363 bp, Homo sapiens; identical to SEQ ID NO: 265302
  chr12:120241060-120241423
  hypo

SEQ ID NO: 441954 - DNA, 35 bp, Homo sapiens; identical to SEQ ID NO: 265303
  chr12:120241909-120241944
  hypo

SEQ ID NO: 441955 - DNA, 36 bp, Homo sapiens; identical to SEQ ID NO: 265304
  chr12:120265239-120265275
  hypo

SEQ ID NO: 441956 - DNA, 97 bp, Homo sapiens; identical to SEQ ID NO: 265305
  chr12:120339153-120339250
  hypo

SEQ ID NO: 441957 - DNA, 32 bp, Homo sapiens; identical to SEQ ID NO: 265306
  chr12:120431043-120431075
  hypo

SEQ ID NO: 441958 - DNA, 149 bp, Homo sapiens; identical to SEQ ID NO: 265307
  chr12:120540010-120540159
  hypo

SEQ ID NO: 441959 - DNA, 35 bp, Homo sapiens; identical to SEQ ID NO: 215137
  chr12:120545353-120545388
  hypo

SEQ ID NO: 441960 - DNA, 297 bp, Homo sapiens; identical to SEQ ID NO: 215138
  chr12:120565538-120565835
  hypo

SEQ ID NO: 441961 - DNA, 115 bp, Homo sapiens; identical to SEQ ID NO: 265313
  chr12:120597713-120597828
  hypo

SEQ ID NO: 441962 - DNA, 164 bp, Homo sapiens; identical to SEQ ID NO: 316407
  chr12:120620161-120620325
  hypo

SEQ ID NO: 441963 - DNA, 282 bp, Homo sapiens; identical to SEQ ID NO: 265316
  chr12:120647681-120647963
  hypo

SEQ ID NO: 441964 - DNA, 75 bp, Homo sapiens; identical to SEQ ID NO: 265317
  chr12:120662007-120662082
  hypo

SEQ ID NO: 441965 - DNA, 89 bp, Homo sapiens; identical to SEQ ID NO: 265318
  chr12:120725460-120725549
  hypo

SEQ ID NO: 441966 - DNA, 120 bp, Homo sapiens; identical to SEQ ID NO: 265319
  chr12:120736009-120736129
  hypo

SEQ ID NO: 441967 - DNA, 83 bp, Homo sapiens; identical to SEQ ID NO: 215143
  chr12:120758714-120758797
  hypo

SEQ ID NO: 441968 - DNA, 240 bp, Homo sapiens; identical to SEQ ID NO: 215144
  chr12:120908355-120908595
  hypo

SEQ ID NO: 441969 - DNA, 43 bp, Homo sapiens; identical to SEQ ID NO: 265322
  chr12:120909713-120909756
  hypo

SEQ ID NO: 441970 - DNA, 36 bp, Homo sapiens; identical to SEQ ID NO: 265323
  chr12:120927818-120927854
  hypo

SEQ ID NO: 441971 - DNA, 36 bp, Homo sapiens; identical to SEQ ID NO: 215145
  chr12:120956375-120956411
  hypo

SEQ ID NO: 441972 - DNA, 40 bp, Homo sapiens; identical to SEQ ID NO: 265325
  chr12:120983607-120983647
  hypo

SEQ ID NO: 441973 - DNA, 31 bp, Homo sapiens; identical to SEQ ID NO: 215146
  chr12:120991484-120991515
  hypo

SEQ ID NO: 441974 - DNA, 253 bp, Homo sapiens; identical to SEQ ID NO: 224466
  chr12:121077958-121078211
  hypo

SEQ ID NO: 441975 - DNA, 38 bp, Homo sapiens; identical to SEQ ID NO: 265327
  chr12:121135003-121135041
  hypo

SEQ ID NO: 441976 - DNA, 94 bp, Homo sapiens; identical to SEQ ID NO: 215147
  chr12:121166589-121166683
  hypo

SEQ ID NO: 441977 - DNA, 40 bp, Homo sapiens; identical to SEQ ID NO: 265329
  chr12:121197975-121198015
  hypo

SEQ ID NO: 441978 - DNA, 179 bp, Homo sapiens; identical to SEQ ID NO: 265330
  chr12:121198381-121198560
  hypo

SEQ ID NO: 441979 - DNA, 135 bp, Homo sapiens; identical to SEQ ID NO: 265331
  chr12:121199362-121199497
  hypo

SEQ ID NO: 441980 - DNA, 39 bp, Homo sapiens; identical to SEQ ID NO: 265332
  chr12:121199754-121199793
  hypo

SEQ ID NO: 441981 - DNA, 149 bp, Homo sapiens; identical to SEQ ID NO: 265336
  chr12:121212805-121212954
  hypo

SEQ ID NO: 441982 - DNA, 31 bp, Homo sapiens; identical to SEQ ID NO: 265337
  chr12:121289697-121289728
  hypo

SEQ ID NO: 441983 - DNA, 37 bp, Homo sapiens; identical to SEQ ID NO: 215150
  chr12:121352799-121352836
  hypo

SEQ ID NO: 441984 - DNA, 279 bp, Homo sapiens; identical to SEQ ID NO: 265340
  chr12:121363905-121364184
  hypo

SEQ ID NO: 441985 - DNA, 35 bp, Homo sapiens; identical to SEQ ID NO: 215151
  chr12:121531380-121531415
  hypo

SEQ ID NO: 441986 - DNA, 31 bp, Homo sapiens; identical to SEQ ID NO: 316436
  chr12:121653376-121653407
  hypo

SEQ ID NO: 441987 - DNA, 170 bp, Homo sapiens; identical to SEQ ID NO: 265345
  chr12:121675681-121675851
  hypo

SEQ ID NO: 441988 - DNA, 135 bp, Homo sapiens; identical to SEQ ID NO: 265347
  chr12:121693277-121693412
  hypo

SEQ ID NO: 441989 - DNA, 149 bp, Homo sapiens; identical to SEQ ID NO: 265348
  chr12:121706435-121706584
  hypo

SEQ ID NO: 441990 - DNA, 178 bp, Homo sapiens; identical to SEQ ID NO: 215155
  chr12:121711833-121712011
  hypo

SEQ ID NO: 441991 - DNA, 77 bp, Homo sapiens; identical to SEQ ID NO: 215156
  chr12:121754200-121754277
  hypo

SEQ ID NO: 441992 - DNA, 120 bp, Homo sapiens; identical to SEQ ID NO: 265352
  chr12:122136316-122136436
  hypo

SEQ ID NO: 441993 - DNA, 101 bp, Homo sapiens; identical to SEQ ID NO: 265353
  chr12:122158112-122158213
  hypo

SEQ ID NO: 441994 - DNA, 77 bp, Homo sapiens
  chr12:122179184-122179261
  hypo
gagttctttgtattgtttttgtaattctgcaagcttgaaattattattattactattattattattttgagacagag

SEQ ID NO: 441995 - DNA, 280 bp, Homo sapiens; identical to SEQ ID NO: 215159
  chr12:122182117-122182397
  hypo

SEQ ID NO: 441996 - DNA, 95 bp, Homo sapiens; identical to SEQ ID NO: 215163
  chr12:122213469-122213564
  hypo

SEQ ID NO: 441997 - DNA, 169 bp, Homo sapiens; identical to SEQ ID NO: 215166
  chr12:122218793-122218962
  hypo

SEQ ID NO: 441998 - DNA, 102 bp, Homo sapiens; identical to SEQ ID NO: 265363
  chr12:122246168-122246270
  hypo

SEQ ID NO: 441999 - DNA, 204 bp, Homo sapiens; identical to SEQ ID NO: 215169
  chr12:122252457-122252661
  hypo

SEQ ID NO: 442000 - DNA, 79 bp, Homo sapiens; identical to SEQ ID NO: 265365
  chr12:122255282-122255361
  hypo

SEQ ID NO: 442001 - DNA, 165 bp, Homo sapiens; identical to SEQ ID NO: 215170
  chr12:122261814-122261979
  hypo

SEQ ID NO: 442002 - DNA, 121 bp, Homo sapiens; identical to SEQ ID NO: 265367
  chr12:122265477-122265598
  hypo

SEQ ID NO: 442003 - DNA, 110 bp, Homo sapiens; identical to SEQ ID NO: 265368
  chr12:122268640-122268750
  hypo

SEQ ID NO: 442004 - DNA, 211 bp, Homo sapiens; identical to SEQ ID NO: 215171
  chr12:122276669-122276880
  hypo

SEQ ID NO: 442005 - DNA, 41 bp, Homo sapiens; identical to SEQ ID NO: 215172
  chr12:122282339-122282380
  hypo

SEQ ID NO: 442006 - DNA, 78 bp, Homo sapiens; identical to SEQ ID NO: 265372
  chr12:122353722-122353800
  hypo

SEQ ID NO: 442007 - DNA, 117 bp, Homo sapiens; identical to SEQ ID NO: 265373
  chr12:122396582-122396699
  hypo

SEQ ID NO: 442008 - DNA, 34 bp, Homo sapiens; identical to SEQ ID NO: 215173
  chr12:122425316-122425350
  hypo

SEQ ID NO: 442009 - DNA, 58 bp, Homo sapiens; identical to SEQ ID NO: 265375
  chr12:122438023-122438081
  hypo

SEQ ID NO: 442010 - DNA, 56 bp, Homo sapiens; identical to SEQ ID NO: 409252
  chr12:122439787-122439843
  hypo

SEQ ID NO: 442011 - DNA, 160 bp, Homo sapiens; identical to SEQ ID NO: 215174
  chr12:122444435-122444595
  hypo

SEQ ID NO: 442012 - DNA, 85 bp, Homo sapiens; identical to SEQ ID NO: 215175
  chr12:122455990-122456075
  hypo

SEQ ID NO: 442013 - DNA, 39 bp, Homo sapiens; identical to SEQ ID NO: 265379
  chr12:122458548-122458587
  hypo

SEQ ID NO: 442014 - DNA, 238 bp, Homo sapiens; identical to SEQ ID NO: 224470
  chr12:122459882-122460120
  hypo

SEQ ID NO: 442015 - DNA, 384 bp, Homo sapiens; identical to SEQ ID NO: 265381
  chr12:122471978-122472362
  hypo

SEQ ID NO: 442016 - DNA, 84 bp, Homo sapiens; identical to SEQ ID NO: 265382
  chr12:122472662-122472746
  hypo

SEQ ID NO: 442017 - DNA, 141 bp, Homo sapiens; identical to SEQ ID NO: 316484
  chr12:122473251-122473392
  hypo

SEQ ID NO: 442018 - DNA, 59 bp, Homo sapiens; identical to SEQ ID NO: 316485
  chr12:122473522-122473581
  hypo

SEQ ID NO: 442019 - DNA, 120 bp, Homo sapiens; identical to SEQ ID NO: 265384
  chr12:122474042-122474162
  hypo

SEQ ID NO: 442020 - DNA, 143 bp, Homo sapiens; identical to SEQ ID NO: 265385
  chr12:122474514-122474657
  hypo

SEQ ID NO: 442021 - DNA, 213 bp, Homo sapiens; identical to SEQ ID NO: 215178
  chr12:122479007-122479220
  hypo

SEQ ID NO: 442022 - DNA, 145 bp, Homo sapiens; identical to SEQ ID NO: 215181
  chr12:122483263-122483408
  hypo

SEQ ID NO: 442023 - DNA, 318 bp, Homo sapiens; identical to SEQ ID NO: 265391
  chr12:122491189-122491507
  hypo

SEQ ID NO: 442024 - DNA, 195 bp, Homo sapiens; identical to SEQ ID NO: 265392
  chr12:122493939-122494134
  hypo

SEQ ID NO: 442025 - DNA, 93 bp, Homo sapiens; identical to SEQ ID NO: 265393
  chr12:122511273-122511366
  hypo

SEQ ID NO: 442026 - DNA, 39 bp, Homo sapiens; identical to SEQ ID NO: 316496
  chr12:122591533-122591572
  hypo

SEQ ID NO: 442027 - DNA, 171 bp, Homo sapiens; identical to SEQ ID NO: 265398
  chr12:122623390-122623561
  hypo

SEQ ID NO: 442028 - DNA, 449 bp, Homo sapiens; identical to SEQ ID NO: 265401
  chr12:122712004-122712453
  hypo

SEQ ID NO: 442029 - DNA, 176 bp, Homo sapiens; identical to SEQ ID NO: 265402
  chr12:122734927-122735103
  hypo

SEQ ID NO: 442030 - DNA, 31 bp, Homo sapiens; identical to SEQ ID NO: 265403
  chr12:122752535-122752566
  hypo

SEQ ID NO: 442031 - DNA, 59 bp, Homo sapiens; identical to SEQ ID NO: 265404
  chr12:122877152-122877211
  hypo

SEQ ID NO: 442032 - DNA, 36 bp, Homo sapiens; identical to SEQ ID NO: 265405
  chr12:122878701-122878737
  hypo

SEQ ID NO: 442033 - DNA, 202 bp, Homo sapiens; identical to SEQ ID NO: 203241
  chr12:122907627-122907829
  hypo

SEQ ID NO: 442034 - DNA, 139 bp, Homo sapiens; identical to SEQ ID NO: 289470
  chr12:122907838-122907977
  hypo

SEQ ID NO: 442035 - DNA, 44 bp, Homo sapiens; identical to SEQ ID NO: 265407
  chr12:122908028-122908072
  hypo

SEQ ID NO: 442036 - DNA, 43 bp, Homo sapiens; identical to SEQ ID NO: 265408
  chr12:122908102-122908145
  hypo

SEQ ID NO: 442037 - DNA, 34 bp, Homo sapiens; identical to SEQ ID NO: 265409
  chr12:122908260-122908294
  hypo

SEQ ID NO: 442038 - DNA, 32 bp, Homo sapiens; identical to SEQ ID NO: 265410
  chr12:122950311-122950343
  hypo

SEQ ID NO: 442039 - DNA, 103 bp, Homo sapiens; identical to SEQ ID NO: 215189
  chr12:122952405-122952508
  hypo

SEQ ID NO: 442040 - DNA, 133 bp, Homo sapiens; identical to SEQ ID NO: 215190
  chr12:122958416-122958549
  hypo

SEQ ID NO: 442041 - DNA, 124 bp, Homo sapiens; identical to SEQ ID NO: 316517
  chr12:122958579-122958703
  hypo

SEQ ID NO: 442042 - DNA, 120 bp, Homo sapiens; identical to SEQ ID NO: 265414
  chr12:123031662-123031782
  hypo

SEQ ID NO: 442043 - DNA, 76 bp, Homo sapiens; identical to SEQ ID NO: 265415
  chr12:123031902-123031978
  hypo

SEQ ID NO: 442044 - DNA, 164 bp, Homo sapiens; identical to SEQ ID NO: 215193
  chr12:123044412-123044576
  hypo

SEQ ID NO: 442045 - DNA, 36 bp, Homo sapiens; identical to SEQ ID NO: 265417
  chr12:123097245-123097281
  hypo

SEQ ID NO: 442046 - DNA, 37 bp, Homo sapiens; identical to SEQ ID NO: 215194
  chr12:123120645-123120682
  hypo

SEQ ID NO: 442047 - DNA, 36 bp, Homo sapiens; identical to SEQ ID NO: 215195
  chr12:123120922-123120958
  hypo

SEQ ID NO: 442048 - DNA, 931 bp, Homo sapiens; identical to SEQ ID NO: 265421
  chr12:123213913-123214844
  hypo

SEQ ID NO: 442049 - DNA, 205 bp, Homo sapiens; identical to SEQ ID NO: 265423
  chr12:123324497-123324702
  hypo

SEQ ID NO: 442050 - DNA, 143 bp, Homo sapiens; identical to SEQ ID NO: 316529
  chr12:123333079-123333222
  hypo

SEQ ID NO: 442051 - DNA, 207 bp, Homo sapiens; identical to SEQ ID NO: 316530
  chr12:123333393-123333600
  hypo

SEQ ID NO: 442052 - DNA, 336 bp, Homo sapiens; identical to SEQ ID NO: 265426
  chr12:123340660-123340996
  hypo

SEQ ID NO: 442053 - DNA, 77 bp, Homo sapiens; identical to SEQ ID NO: 265427
  chr12:123359583-123359660
  hypo

SEQ ID NO: 442054 - DNA, 87 bp, Homo sapiens; identical to SEQ ID NO: 215200
  chr12:123409957-123410044
  hypo

SEQ ID NO: 442055 - DNA, 325 bp, Homo sapiens; identical to SEQ ID NO: 265429
  chr12:123416625-123416950
  hypo

SEQ ID NO: 442056 - DNA, 105 bp, Homo sapiens; identical to SEQ ID NO: 265430
  chr12:123428943-123429048
  hypo

SEQ ID NO: 442057 - DNA, 57 bp, Homo sapiens; identical to SEQ ID NO: 265433
  chr12:123446773-123446830
  hypo

SEQ ID NO: 442058 - DNA, 167 bp, Homo sapiens; identical to SEQ ID NO: 265434
  chr12:123470902-123471069
  hypo

SEQ ID NO: 442059 - DNA, 191 bp, Homo sapiens; identical to SEQ ID NO: 265435
  chr12:123481877-123482068
  hypo

SEQ ID NO: 442060 - DNA, 157 bp, Homo sapiens; identical to SEQ ID NO: 215201
  chr12:123542055-123542212
  hypo

SEQ ID NO: 442061 - DNA, 42 bp, Homo sapiens; identical to SEQ ID NO: 265437
  chr12:123563306-123563348
  hypo

SEQ ID NO: 442062 - DNA, 259 bp, Homo sapiens; identical to SEQ ID NO: 265438
  chr12:123579931-123580190
  hypo

SEQ ID NO: 442063 - DNA, 31 bp, Homo sapiens; identical to SEQ ID NO: 265439
  chr12:123584528-123584559
  hypo

SEQ ID NO: 442064 - DNA, 103 bp, Homo sapiens; identical to SEQ ID NO: 265440
  chr12:123618508-123618611
  hypo

SEQ ID NO: 442065 - DNA, 163 bp, Homo sapiens; identical to SEQ ID NO: 265441
  chr12:123618851-123619014
  hypo

SEQ ID NO: 442066 - DNA, 38 bp, Homo sapiens; identical to SEQ ID NO: 215202
  chr12:123636568-123636606
  hypo

SEQ ID NO: 442067 - DNA, 313 bp, Homo sapiens; identical to SEQ ID NO: 316549
  chr12:123636636-123636949
  hypo

SEQ ID NO: 442068 - DNA, 41 bp, Homo sapiens; identical to SEQ ID NO: 265443
  chr12:123736871-123736912
  hypo

SEQ ID NO: 442069 - DNA, 180 bp, Homo sapiens; identical to SEQ ID NO: 265444
  chr12:123737476-123737656
  hypo

SEQ ID NO: 442070 - DNA, 328 bp, Homo sapiens; identical to SEQ ID NO: 289480
  chr12:123754875-123755203
  hypo

SEQ ID NO: 442071 - DNA, 152 bp, Homo sapiens; identical to SEQ ID NO: 265445
  chr12:123757399-123757551
  hypo

SEQ ID NO: 442072 - DNA, 537 bp, Homo sapiens; identical to SEQ ID NO: 265446
  chr12:123773444-123773981
  hypo

SEQ ID NO: 442073 - DNA, 66 bp, Homo sapiens; identical to SEQ ID NO: 316555
  chr12:123881627-123881693
  hypo

SEQ ID NO: 442074 - DNA, 42 bp, Homo sapiens; identical to SEQ ID NO: 265448
  chr12:123881965-123882007
  hypo

SEQ ID NO: 442075 - DNA, 154 bp, Homo sapiens; identical to SEQ ID NO: 265449
  chr12:123882805-123882959
  hypo

SEQ ID NO: 442076 - DNA, 43 bp, Homo sapiens; identical to SEQ ID NO: 265450
  chr12:123894663-123894706
  hypo

SEQ ID NO: 442077 - DNA, 411 bp, Homo sapiens; identical to SEQ ID NO: 289484
  chr12:123920727-123921138
  hypo

SEQ ID NO: 442078 - DNA, 364 bp, Homo sapiens; identical to SEQ ID NO: 265451
  chr12:123959873-123960237
  hypo

SEQ ID NO: 442079 - DNA, 319 bp, Homo sapiens; identical to SEQ ID NO: 289485
  chr12:124017664-124017983
  hypo

SEQ ID NO: 442080 - DNA, 43 bp, Homo sapiens; identical to SEQ ID NO: 265455
  chr12:124085762-124085805
  hypo

SEQ ID NO: 442081 - DNA, 125 bp, Homo sapiens; identical to SEQ ID NO: 215207
  chr12:124111672-124111797
  hypo

SEQ ID NO: 442082 - DNA, 38 bp, Homo sapiens; identical to SEQ ID NO: 265457
  chr12:124128645-124128683
  hypo

SEQ ID NO: 442083 - DNA, 276 bp, Homo sapiens; identical to SEQ ID NO: 215208
  chr12:124141811-124142087
  hypo

SEQ ID NO: 442084 - DNA, 142 bp, Homo sapiens; identical to SEQ ID NO: 265459
  chr12:124152494-124152636
  hypo

SEQ ID NO: 442085 - DNA, 48 bp, Homo sapiens; identical to SEQ ID NO: 265461
  chr12:124175161-124175209
  hypo

SEQ ID NO: 442086 - DNA, 167 bp, Homo sapiens; identical to SEQ ID NO: 215209
  chr12:124272114-124272281
  hypo

SEQ ID NO: 442087 - DNA, 42 bp, Homo sapiens; identical to SEQ ID NO: 215211
  chr12:124338357-124338399
  hypo

SEQ ID NO: 442088 - DNA, 41 bp, Homo sapiens; identical to SEQ ID NO: 215212
  chr12:124338459-124338500
  hypo

SEQ ID NO: 442089 - DNA, 53 bp, Homo sapiens; identical to SEQ ID NO: 316575
  chr12:124393604-124393657
  hypo

SEQ ID NO: 442090 - DNA, 125 bp, Homo sapiens; identical to SEQ ID NO: 265467
  chr12:124398892-124399017
  hypo

SEQ ID NO: 442091 - DNA, 81 bp, Homo sapiens; identical to SEQ ID NO: 215213
  chr12:124404099-124404180
  hypo

SEQ ID NO: 442092 - DNA, 68 bp, Homo sapiens; identical to SEQ ID NO: 215214
  chr12:124404272-124404340
  hypo

SEQ ID NO: 442093 - DNA, 102 bp, Homo sapiens; identical to SEQ ID NO: 265469
  chr12:124423712-124423814
  hypo

SEQ ID NO: 442094 - DNA, 39 bp, Homo sapiens; identical to SEQ ID NO: 265471
  chr12:124444122-124444161
  hypo

SEQ ID NO: 442095 - DNA, 36 bp, Homo sapiens; identical to SEQ ID NO: 215215
  chr12:124514725-124514761
  hypo

SEQ ID NO: 442096 - DNA, 114 bp, Homo sapiens; identical to SEQ ID NO: 265473
  chr12:124562301-124562415
  hypo

SEQ ID NO: 442097 - DNA, 50 bp, Homo sapiens; identical to SEQ ID NO: 265474
  chr12:124582793-124582843
  hypo

SEQ ID NO: 442098 - DNA, 82 bp, Homo sapiens; identical to SEQ ID NO: 316584
  chr12:124651851-124651933
  hypo

SEQ ID NO: 442099 - DNA, 145 bp, Homo sapiens; identical to SEQ ID NO: 265476
  chr12:124668398-124668543
  hypo

SEQ ID NO: 442100 - DNA, 323 bp, Homo sapiens; identical to SEQ ID NO: 265477
  chr12:124669010-124669333
  hypo

SEQ ID NO: 442101 - DNA, 103 bp, Homo sapiens; identical to SEQ ID NO: 265478
  chr12:124693754-124693857
  hypo

SEQ ID NO: 442102 - DNA, 252 bp, Homo sapiens; identical to SEQ ID NO: 265479
  chr12:124716386-124716638
  hypo

SEQ ID NO: 442103 - DNA, 352 bp, Homo sapiens; identical to SEQ ID NO: 265481
  chr12:124791415-124791767
  hypo

SEQ ID NO: 442104 - DNA, 225 bp, Homo sapiens; identical to SEQ ID NO: 265482
  chr12:124798801-124799026
  hypo

SEQ ID NO: 442105 - DNA, 245 bp, Homo sapiens; identical to SEQ ID NO: 265483
  chr12:124819439-124819684
  hypo

SEQ ID NO: 442106 - DNA, 375 bp, Homo sapiens; identical to SEQ ID NO: 265484
  chr12:124821027-124821402
  hypo

SEQ ID NO: 442107 - DNA, 123 bp, Homo sapiens; identical to SEQ ID NO: 265485
  chr12:124827621-124827744
  hypo

SEQ ID NO: 442108 - DNA, 184 bp, Homo sapiens; identical to SEQ ID NO: 265486
  chr12:124829274-124829458
  hypo

SEQ ID NO: 442109 - DNA, 100 bp, Homo sapiens; identical to SEQ ID NO: 265487
  chr12:124831187-124831287
  hypo

SEQ ID NO: 442110 - DNA, 263 bp, Homo sapiens; identical to SEQ ID NO: 215224
  chr12:124856543-124856806
  hypo

SEQ ID NO: 442111 - DNA, 190 bp, Homo sapiens; identical to SEQ ID NO: 265495
  chr12:124881245-124881435
  hypo

SEQ ID NO: 442112 - DNA, 213 bp, Homo sapiens; identical to SEQ ID NO: 265496
  chr12:124881710-124881923
  hypo

SEQ ID NO: 442113 - DNA, 33 bp, Homo sapiens; identical to SEQ ID NO: 215230
  chr12:124894790-124894823
  hypo

SEQ ID NO: 442114 - DNA, 722 bp, Homo sapiens; identical to SEQ ID NO: 265500
  chr12:124895907-124896629
  hypo

SEQ ID NO: 442115 - DNA, 172 bp, Homo sapiens; identical to SEQ ID NO: 265501
  chr12:124901267-124901439
  hypo

SEQ ID NO: 442116 - DNA, 293 bp, Homo sapiens; identical to SEQ ID NO: 215232
  chr12:124911265-124911558
  hypo

SEQ ID NO: 442117 - DNA, 71 bp, Homo sapiens; identical to SEQ ID NO: 265503
  chr12:124915171-124915242
  hypo

SEQ ID NO: 442118 - DNA, 592 bp, Homo sapiens; identical to SEQ ID NO: 265504
  chr12:124929576-124930168
  hypo

SEQ ID NO: 442119 - DNA, 33 bp, Homo sapiens; identical to SEQ ID NO: 172812
  chr12:124948049-124948082
  hypo

SEQ ID NO: 442120 - DNA, 249 bp, Homo sapiens; identical to SEQ ID NO: 265507
  chr12:124959724-124959973
  hypo

SEQ ID NO: 442121 - DNA, 268 bp, Homo sapiens; identical to SEQ ID NO: 265508
  chr12:124964413-124964681
  hypo

SEQ ID NO: 442122 - DNA, 230 bp, Homo sapiens; identical to SEQ ID NO: 265509
  chr12:124966043-124966273
  hypo

SEQ ID NO: 442123 - DNA, 172 bp, Homo sapiens; identical to SEQ ID NO: 215234
  chr12:124967300-124967472
  hypo

SEQ ID NO: 442124 - DNA, 165 bp, Homo sapiens; identical to SEQ ID NO: 215235
  chr12:124971726-124971891
  hypo

SEQ ID NO: 442125 - DNA, 134 bp, Homo sapiens; identical to SEQ ID NO: 215237
  chr12:124980537-124980671
  hypo

SEQ ID NO: 442126 - DNA, 883 bp, Homo sapiens; identical to SEQ ID NO: 316627
  chr12:125000464-125001347
  hypo

SEQ ID NO: 442127 - DNA, 273 bp, Homo sapiens; identical to SEQ ID NO: 265517
  chr12:125008003-125008276
  hypo

SEQ ID NO: 442128 - DNA, 224 bp, Homo sapiens; identical to SEQ ID NO: 215239
  chr12:125009052-125009276
  hypo

SEQ ID NO: 442129 - DNA, 40 bp, Homo sapiens; identical to SEQ ID NO: 215240
  chr12:125009306-125009346
  hypo

SEQ ID NO: 442130 - DNA, 430 bp, Homo sapiens; identical to SEQ ID NO: 265519
  chr12:125042262-125042692
  hypo

SEQ ID NO: 442131 - DNA, 53 bp, Homo sapiens; identical to SEQ ID NO: 215242
  chr12:125062418-125062471
  hypo

SEQ ID NO: 442132 - DNA, 86 bp, Homo sapiens; identical to SEQ ID NO: 265524
  chr12:125103114-125103200
  hypo

SEQ ID NO: 442133 - DNA, 105 bp, Homo sapiens; identical to SEQ ID NO: 265525
  chr12:125105685-125105790
  hypo

SEQ ID NO: 442134 - DNA, 153 bp, Homo sapiens; identical to SEQ ID NO: 316639
  chr12:125119170-125119323
  hypo

SEQ ID NO: 442135 - DNA, 84 bp, Homo sapiens; identical to SEQ ID NO: 265527
  chr12:125128937-125129021
  hypo

SEQ ID NO: 442136 - DNA, 230 bp, Homo sapiens; identical to SEQ ID NO: 265528
  chr12:125145440-125145670
  hypo

SEQ ID NO: 442137 - DNA, 137 bp, Homo sapiens; identical to SEQ ID NO: 215246
  chr12:125151971-125152108
  hypo

SEQ ID NO: 442138 - DNA, 111 bp, Homo sapiens; identical to SEQ ID NO: 215247
  chr12:125152254-125152365
  hypo

SEQ ID NO: 442139 - DNA, 45 bp, Homo sapiens; identical to SEQ ID NO: 265530
  chr12:125177731-125177776
  hypo

SEQ ID NO: 442140 - DNA, 353 bp, Homo sapiens; identical to SEQ ID NO: 316645
  chr12:125184198-125184551
  hypo

SEQ ID NO: 442141 - DNA, 137 bp, Homo sapiens; identical to SEQ ID NO: 215249
  chr12:125184581-125184718
  hypo

SEQ ID NO: 442142 - DNA, 151 bp, Homo sapiens; identical to SEQ ID NO: 265532
  chr12:125221107-125221258
  hypo

SEQ ID NO: 442143 - DNA, 51 bp, Homo sapiens; identical to SEQ ID NO: 265533
  chr12:125223362-125223413
  hypo

SEQ ID NO: 442144 - DNA, 156 bp, Homo sapiens; identical to SEQ ID NO: 215250
  chr12:125223879-125224035
  hypo

SEQ ID NO: 442145 - DNA, 35 bp, Homo sapiens; identical to SEQ ID NO: 265535
  chr12:125224155-125224190
  hypo

SEQ ID NO: 442146 - DNA, 140 bp, Homo sapiens; identical to SEQ ID NO: 215251
  chr12:125236641-125236781
  hypo

SEQ ID NO: 442147 - DNA, 83 bp, Homo sapiens; identical to SEQ ID NO: 265537
  chr12:125257116-125257199
  hypo

SEQ ID NO: 442148 - DNA, 518 bp, Homo sapiens; identical to SEQ ID NO: 265538
  chr12:125277444-125277962
  hypo

SEQ ID NO: 442149 - DNA, 226 bp, Homo sapiens; identical to SEQ ID NO: 265539
  chr12:125299402-125299628
  hypo

SEQ ID NO: 442150 - DNA, 70 bp, Homo sapiens; identical to SEQ ID NO: 265540
  chr12:125301969-125302039
  hypo

SEQ ID NO: 442151 - DNA, 84 bp, Homo sapiens; identical to SEQ ID NO: 215252
  chr12:125333253-125333337
  hypo

SEQ ID NO: 442152 - DNA, 153 bp, Homo sapiens; identical to SEQ ID NO: 215253
  chr12:125447387-125447540
  hypo

SEQ ID NO: 442153 - DNA, 107 bp, Homo sapiens; identical to SEQ ID NO: 265544
  chr12:125448950-125449057
  hypo

SEQ ID NO: 442154 - DNA, 189 bp, Homo sapiens; identical to SEQ ID NO: 265545
  chr12:125498606-125498795
  hypo

SEQ ID NO: 442155 - DNA, 38 bp, Homo sapiens; identical to SEQ ID NO: 215255
  chr12:125565910-125565948
  hypo

SEQ ID NO: 442156 - DNA, 274 bp, Homo sapiens; identical to SEQ ID NO: 316662
  chr12:125566139-125566413
  hypo

SEQ ID NO: 442157 - DNA, 216 bp, Homo sapiens; identical to SEQ ID NO: 215257
  chr12:125578190-125578406
  hypo

SEQ ID NO: 442158 - DNA, 43 bp, Homo sapiens; identical to SEQ ID NO: 215258
  chr12:125578565-125578608
  hypo

SEQ ID NO: 442159 - DNA, 111 bp, Homo sapiens; identical to SEQ ID NO: 316666
  chr12:125609559-125609670
  hypo

SEQ ID NO: 442160 - DNA, 76 bp, Homo sapiens; identical to SEQ ID NO: 215259
  chr12:125636433-125636509
  hypo

SEQ ID NO: 442161 - DNA, 93 bp, Homo sapiens; identical to SEQ ID NO: 265553
  chr12:128310534-128310627
  hypo

SEQ ID NO: 442162 - DNA, 108 bp, Homo sapiens; identical to SEQ ID NO: 265554
  chr12:128313387-128313495
  hypo

SEQ ID NO: 442163 - DNA, 69 bp, Homo sapiens; identical to SEQ ID NO: 265555
  chr12:128386219-128386288
  hypo

SEQ ID NO: 442164 - DNA, 37 bp, Homo sapiens; identical to SEQ ID NO: 265556
  chr12:128439870-128439907
  hypo

SEQ ID NO: 442165 - DNA, 263 bp, Homo sapiens; identical to SEQ ID NO: 215261
  chr12:128773737-128774000
  hypo

SEQ ID NO: 442166 - DNA, 137 bp, Homo sapiens; identical to SEQ ID NO: 265560
  chr12:129148503-129148640
  hypo

SEQ ID NO: 442167 - DNA, 56 bp, Homo sapiens; identical to SEQ ID NO: 215263
  chr12:129148670-129148726
  hypo

SEQ ID NO: 442168 - DNA, 45 bp, Homo sapiens; identical to SEQ ID NO: 265562
  chr12:129151360-129151405
  hypo

SEQ ID NO: 442169 - DNA, 197 bp, Homo sapiens; identical to SEQ ID NO: 265563
  chr12:129180361-129180558
  hypo

SEQ ID NO: 442170 - DNA, 206 bp, Homo sapiens; identical to SEQ ID NO: 265565
  chr12:129298024-129298230
  hypo

SEQ ID NO: 442171 - DNA, 68 bp, Homo sapiens; identical to SEQ ID NO: 265566
  chr12:129305165-129305233
  hypo

SEQ ID NO: 442172 - DNA, 31 bp, Homo sapiens; identical to SEQ ID NO: 265567
  chr12:129806103-129806134
  hypo

SEQ ID NO: 442173 - DNA, 39 bp, Homo sapiens; identical to SEQ ID NO: 265569
  chr12:130060596-130060635
  hypo

SEQ ID NO: 442174 - DNA, 35 bp, Homo sapiens; identical to SEQ ID NO: 265571
  chr12:130326761-130326796
  hypo

SEQ ID NO: 442175 - DNA, 138 bp, Homo sapiens; identical to SEQ ID NO: 265573
  chr12:130628827-130628965
  hypo

SEQ ID NO: 442176 - DNA, 211 bp, Homo sapiens; identical to SEQ ID NO: 203258
  chr12:130646344-130646555
  hypo

SEQ ID NO: 442177 - DNA, 55 bp, Homo sapiens; identical to SEQ ID NO: 265575
  chr12:130744952-130745007
  hypo

SEQ ID NO: 442178 - DNA, 38 bp, Homo sapiens; identical to SEQ ID NO: 265577
  chr12:130828450-130828488
  hypo

SEQ ID NO: 442179 - DNA, 143 bp, Homo sapiens; identical to SEQ ID NO: 215272
  chr12:130852207-130852350
  hypo

SEQ ID NO: 442180 - DNA, 42 bp, Homo sapiens; identical to SEQ ID NO: 265579
  chr12:130883021-130883063
  hypo

SEQ ID NO: 442181 - DNA, 33 bp, Homo sapiens; identical to SEQ ID NO: 215273
  chr12:130894171-130894204
  hypo

SEQ ID NO: 442182 - DNA, 224 bp, Homo sapiens; identical to SEQ ID NO: 215274
  chr12:130906937-130907161
  hypo

SEQ ID NO: 442183 - DNA, 36 bp, Homo sapiens; identical to SEQ ID NO: 265584
  chr12:130907881-130907917
  hypo

SEQ ID NO: 442184 - DNA, 381 bp, Homo sapiens; identical to SEQ ID NO: 265586
  chr12:130913639-130914020
  hypo

SEQ ID NO: 442185 - DNA, 258 bp, Homo sapiens; identical to SEQ ID NO: 265587
  chr12:130915750-130916008
  hypo

SEQ ID NO: 442186 - DNA, 577 bp, Homo sapiens; identical to SEQ ID NO: 265588
  chr12:130918920-130919497
  hypo

SEQ ID NO: 442187 - DNA, 79 bp, Homo sapiens; identical to SEQ ID NO: 316713
  chr12:130920513-130920592
  hypo

SEQ ID NO: 442188 - DNA, 580 bp, Homo sapiens; identical to SEQ ID NO: 316714
  chr12:130921383-130921963
  hypo

SEQ ID NO: 442189 - DNA, 39 bp, Homo sapiens; identical to SEQ ID NO: 265591
  chr12:130922987-130923026
  hypo

SEQ ID NO: 442190 - DNA, 141 bp, Homo sapiens; identical to SEQ ID NO: 215279
  chr12:130925068-130925209
  hypo

SEQ ID NO: 442191 - DNA, 436 bp, Homo sapiens; identical to SEQ ID NO: 265593
  chr12:130926606-130927042
  hypo

SEQ ID NO: 442192 - DNA, 102 bp, Homo sapiens; identical to SEQ ID NO: 265594
  chr12:130929720-130929822
  hypo

SEQ ID NO: 442193 - DNA, 292 bp, Homo sapiens; identical to SEQ ID NO: 265595
  chr12:130931808-130932100
  hypo

SEQ ID NO: 442194 - DNA, 332 bp, Homo sapiens; identical to SEQ ID NO: 265597
  chr12:130934697-130935029
  hypo

SEQ ID NO: 442195 - DNA, 415 bp, Homo sapiens; identical to SEQ ID NO: 265598
  chr12:130939634-130940049
  hypo

SEQ ID NO: 442196 - DNA, 89 bp, Homo sapiens; identical to SEQ ID NO: 215282
  chr12:130941113-130941202
  hypo

SEQ ID NO: 442197 - DNA, 190 bp, Homo sapiens; identical to SEQ ID NO: 265600
  chr12:130954679-130954869
  hypo

SEQ ID NO: 442198 - DNA, 175 bp, Homo sapiens; identical to SEQ ID NO: 265601
  chr12:130958396-130958571
  hypo

SEQ ID NO: 442199 - DNA, 143 bp, Homo sapiens; identical to SEQ ID NO: 265602
  chr12:130963328-130963471
  hypo

SEQ ID NO: 442200 - DNA, 251 bp, Homo sapiens; identical to SEQ ID NO: 316727
  chr12:130968370-130968621
  hypo

SEQ ID NO: 442201 - DNA, 125 bp, Homo sapiens; identical to SEQ ID NO: 215284
  chr12:130968690-130968815
  hypo

SEQ ID NO: 442202 - DNA, 281 bp, Homo sapiens; identical to SEQ ID NO: 215285
  chr12:130985315-130985596
  hypo

SEQ ID NO: 442203 - DNA, 209 bp, Homo sapiens; identical to SEQ ID NO: 265607
  chr12:131097715-131097924
  hypo

SEQ ID NO: 442204 - DNA, 151 bp, Homo sapiens; identical to SEQ ID NO: 265608
  chr12:131102208-131102359
  hypo

SEQ ID NO: 442205 - DNA, 95 bp, Homo sapiens
  chr12:131111165-131111260
  hypo
gactaccactggcatcaccacaatctcctccatcaccatgactaccagtcatcaccatctcttccatcacaactactgcttcatcacacctcctc

SEQ ID NO: 442206 - DNA, 157 bp, Homo sapiens; identical to SEQ ID NO: 265610
  chr12:131111290-131111447
  hypo

SEQ ID NO: 442207 - DNA, 141 bp, Homo sapiens; identical to SEQ ID NO: 265611
  chr12:131111477-131111618
  hypo

SEQ ID NO: 442208 - DNA, 180 bp, Homo sapiens; identical to SEQ ID NO: 265612
  chr12:131125871-131126051
  hypo

SEQ ID NO: 442209 - DNA, 50 bp, Homo sapiens; identical to SEQ ID NO: 265613
  chr12:131129060-131129110
  hypo

SEQ ID NO: 442210 - DNA, 459 bp, Homo sapiens; identical to SEQ ID NO: 265614
  chr12:131133585-131134044
  hypo

SEQ ID NO: 442211 - DNA, 77 bp, Homo sapiens; identical to SEQ ID NO: 265615
  chr12:131149029-131149106
  hypo

SEQ ID NO: 442212 - DNA, 57 bp, Homo sapiens; identical to SEQ ID NO: 265616
  chr12:131157701-131157758
  hypo

SEQ ID NO: 442213 - DNA, 60 bp, Homo sapiens; identical to SEQ ID NO: 265617
  chr12:131157788-131157848
  hypo

SEQ ID NO: 442214 - DNA, 79 bp, Homo sapiens; identical to SEQ ID NO: 215288
  chr12:131159259-131159338
  hypo

SEQ ID NO: 442215 - DNA, 287 bp, Homo sapiens; identical to SEQ ID NO: 215291
  chr12:131164354-131164641
  hypo

SEQ ID NO: 442216 - DNA, 31 bp, Homo sapiens; identical to SEQ ID NO: 265621
  chr12:131173699-131173730
  hypo

SEQ ID NO: 442217 - DNA, 132 bp, Homo sapiens; identical to SEQ ID NO: 265622
  chr12:131174313-131174445
  hypo

SEQ ID NO: 442218 - DNA, 188 bp, Homo sapiens; identical to SEQ ID NO: 265623
  chr12:131182719-131182907
  hypo

SEQ ID NO: 442219 - DNA, 42 bp, Homo sapiens; identical to SEQ ID NO: 265624
  chr12:131186211-131186253
  hypo

SEQ ID NO: 442220 - DNA, 222 bp, Homo sapiens; identical to SEQ ID NO: 265625
  chr12:131189179-131189401
  hypo

SEQ ID NO: 442221 - DNA, 154 bp, Homo sapiens; identical to SEQ ID NO: 265627
  chr12:131249877-131250031
  hypo

SEQ ID NO: 442222 - DNA, 80 bp, Homo sapiens; identical to SEQ ID NO: 265628
  chr12:131264841-131264921
  hypo

SEQ ID NO: 442223 - DNA, 273 bp, Homo sapiens; identical to SEQ ID NO: 265629
  chr12:131264951-131265224
  hypo

SEQ ID NO: 442224 - DNA, 40 bp, Homo sapiens; identical to SEQ ID NO: 215294
  chr12:131294422-131294462
  hypo

SEQ ID NO: 442225 - DNA, 225 bp, Homo sapiens; identical to SEQ ID NO: 265636
  chr12:131402641-131402866
  hypo

SEQ ID NO: 442226 - DNA, 385 bp, Homo sapiens; identical to SEQ ID NO: 265638
  chr12:131443181-131443566
  hypo

SEQ ID NO: 442227 - DNA, 222 bp, Homo sapiens; identical to SEQ ID NO: 265639
  chr12:131478126-131478348
  hypo

SEQ ID NO: 442228 - DNA, 108 bp, Homo sapiens; identical to SEQ ID NO: 265641
  chr12:131499288-131499396
  hypo

SEQ ID NO: 442229 - DNA, 83 bp, Homo sapiens; identical to SEQ ID NO: 265642
  chr12:131501103-131501186
  hypo

SEQ ID NO: 442230 - DNA, 146 bp, Homo sapiens; identical to SEQ ID NO: 265643
  chr12:131512465-131512611
  hypo

SEQ ID NO: 442231 - DNA, 73 bp, Homo sapiens; identical to SEQ ID NO: 265644
  chr12:131513785-131513858
  hypo

SEQ ID NO: 442232 - DNA, 216 bp, Homo sapiens; identical to SEQ ID NO: 265645
  chr12:131515098-131515314
  hypo

SEQ ID NO: 442233 - DNA, 237 bp, Homo sapiens; identical to SEQ ID NO: 316776
  chr12:131518464-131518701
  hypo

SEQ ID NO: 442234 - DNA, 140 bp, Homo sapiens; identical to SEQ ID NO: 316777
  chr12:131518757-131518897
  hypo

SEQ ID NO: 442235 - DNA, 47 bp, Homo sapiens; identical to SEQ ID NO: 316778
  chr12:131556228-131556275
  hypo

SEQ ID NO: 442236 - DNA, 724 bp, Homo sapiens; identical to SEQ ID NO: 215295
  chr12:131572481-131573205
  hypo

SEQ ID NO: 442237 - DNA, 183 bp, Homo sapiens; identical to SEQ ID NO: 215296
  chr12:131573235-131573418
  hypo

SEQ ID NO: 442238 - DNA, 330 bp, Homo sapiens; identical to SEQ ID NO: 265650
  chr12:131581012-131581342
  hypo

SEQ ID NO: 442239 - DNA, 127 bp, Homo sapiens; identical to SEQ ID NO: 265653
  chr12:131687733-131687860
  hypo

SEQ ID NO: 442240 - DNA, 140 bp, Homo sapiens; identical to SEQ ID NO: 265654
  chr12:131747238-131747378
  hypo

SEQ ID NO: 442241 - DNA, 177 bp, Homo sapiens; identical to SEQ ID NO: 265655
  chr12:131758656-131758833
  hypo

SEQ ID NO: 442242 - DNA, 155 bp, Homo sapiens; identical to SEQ ID NO: 316787
  chr12:131766862-131767017
  hypo

SEQ ID NO: 442243 - DNA, 377 bp, Homo sapiens; identical to SEQ ID NO: 316788
  chr12:131767050-131767427
  hypo

SEQ ID NO: 442244 - DNA, 134 bp, Homo sapiens; identical to SEQ ID NO: 316789
  chr12:131834063-131834197
  hypo

SEQ ID NO: 442245 - DNA, 350 bp, Homo sapiens; identical to SEQ ID NO: 215299
  chr12:131836988-131837338
  hypo

SEQ ID NO: 442246 - DNA, 151 bp, Homo sapiens; identical to SEQ ID NO: 265659
  chr12:131872313-131872464
  hypo

SEQ ID NO: 442247 - DNA, 197 bp, Homo sapiens; identical to SEQ ID NO: 316792
  chr12:131943499-131943696
  hypo

SEQ ID NO: 442248 - DNA, 78 bp, Homo sapiens; identical to SEQ ID NO: 316793
  chr12:131943823-131943901
  hypo

SEQ ID NO: 442249 - DNA, 60 bp, Homo sapiens; identical to SEQ ID NO: 316794
  chr12:131978695-131978755
  hypo

SEQ ID NO: 442250 - DNA, 46 bp, Homo sapiens; identical to SEQ ID NO: 265662
  chr12:131999408-131999454
  hypo

SEQ ID NO: 442251 - DNA, 109 bp, Homo sapiens; identical to SEQ ID NO: 265663
  chr12:132014576-132014685
  hypo

SEQ ID NO: 442252 - DNA, 271 bp, Homo sapiens; identical to SEQ ID NO: 316797
  chr12:132060404-132060675
  hypo

SEQ ID NO: 442253 - DNA, 45 bp, Homo sapiens; identical to SEQ ID NO: 265665
  chr12:132069344-132069389
  hypo

SEQ ID NO: 442254 - DNA, 206 bp, Homo sapiens; identical to SEQ ID NO: 265666
  chr12:132069627-132069833
  hypo

SEQ ID NO: 442255 - DNA, 57 bp, Homo sapiens; identical to SEQ ID NO: 265668
  chr12:132097243-132097300
  hypo

SEQ ID NO: 442256 - DNA, 151 bp, Homo sapiens; identical to SEQ ID NO: 265669
  chr12:132101821-132101972
  hypo

SEQ ID NO: 442257 - DNA, 76 bp, Homo sapiens; identical to SEQ ID NO: 265670
  chr12:132158658-132158734
  hypo

SEQ ID NO: 442258 - DNA, 125 bp, Homo sapiens; identical to SEQ ID NO: 215301
  chr12:132169365-132169490
  hypo

SEQ ID NO: 442259 - DNA, 241 bp, Homo sapiens; identical to SEQ ID NO: 265672
  chr12:132177128-132177369
  hypo

SEQ ID NO: 442260 - DNA, 32 bp, Homo sapiens; identical to SEQ ID NO: 316806
  chr12:132197245-132197277
  hypo

SEQ ID NO: 442261 - DNA, 64 bp, Homo sapiens; identical to SEQ ID NO: 215302
  chr12:132205019-132205083
  hypo

SEQ ID NO: 442262 - DNA, 118 bp, Homo sapiens; identical to SEQ ID NO: 215304
  chr12:132221105-132221223
  hypo

SEQ ID NO: 442263 - DNA, 230 bp, Homo sapiens; identical to SEQ ID NO: 265679
  chr12:132241086-132241316
  hypo

SEQ ID NO: 442264 - DNA, 81 bp, Homo sapiens; identical to SEQ ID NO: 265681
  chr12:132242312-132242393
  hypo

SEQ ID NO: 442265 - DNA, 75 bp, Homo sapiens; identical to SEQ ID NO: 215307
  chr12:132243979-132244054
  hypo

SEQ ID NO: 442266 - DNA, 39 bp, Homo sapiens; identical to SEQ ID NO: 409368
  chr12:132249402-132249441
  hypo

SEQ ID NO: 442267 - DNA, 325 bp, Homo sapiens; identical to SEQ ID NO: 215308
  chr12:132259528-132259853
  hypo

SEQ ID NO: 442268 - DNA, 226 bp, Homo sapiens; identical to SEQ ID NO: 215309
  chr12:132259883-132260109
  hypo

SEQ ID NO: 442269 - DNA, 111 bp, Homo sapiens; identical to SEQ ID NO: 215310
  chr12:132263619-132263730
  hypo

SEQ ID NO: 442270 - DNA, 320 bp, Homo sapiens; identical to SEQ ID NO: 265689
  chr12:132270820-132271140
  hypo

SEQ ID NO: 442271 - DNA, 61 bp, Homo sapiens; identical to SEQ ID NO: 215312
  chr12:132284638-132284699
  hypo

SEQ ID NO: 442272 - DNA, 208 bp, Homo sapiens; identical to SEQ ID NO: 215313
  chr12:132285800-132286008
  hypo

SEQ ID NO: 442273 - DNA, 49 bp, Homo sapiens; identical to SEQ ID NO: 316825
  chr12:132286229-132286278
  hypo

SEQ ID NO: 442274 - DNA, 165 bp, Homo sapiens; identical to SEQ ID NO: 316827
  chr12:132324904-132325069
  hypo

SEQ ID NO: 442275 - DNA, 75 bp, Homo sapiens; identical to SEQ ID NO: 316828
  chr12:132325390-132325465
  hypo

SEQ ID NO: 442276 - DNA, 111 bp, Homo sapiens; identical to SEQ ID NO: 265693
  chr12:132326247-132326358
  hypo

SEQ ID NO: 442277 - DNA, 247 bp, Homo sapiens; identical to SEQ ID NO: 265694
  chr12:132328364-132328611
  hypo

SEQ ID NO: 442278 - DNA, 37 bp, Homo sapiens; identical to SEQ ID NO: 203262
  chr12:132380828-132380865
  hypo

SEQ ID NO: 442279 - DNA, 34 bp, Homo sapiens; identical to SEQ ID NO: 265701
  chr12:132397845-132397879
  hypo

SEQ ID NO: 442280 - DNA, 130 bp, Homo sapiens; identical to SEQ ID NO: 215316
  chr12:132400435-132400565
  hypo

SEQ ID NO: 442281 - DNA, 292 bp, Homo sapiens; identical to SEQ ID NO: 265703
  chr12:132406594-132406886
  hypo

SEQ ID NO: 442282 - DNA, 181 bp, Homo sapiens; identical to SEQ ID NO: 265706
  chr12:132474661-132474842
  hypo

SEQ ID NO: 442283 - DNA, 50 bp, Homo sapiens; identical to SEQ ID NO: 224491
  chr12:132480346-132480396
  hypo

SEQ ID NO: 442284 - DNA, 271 bp, Homo sapiens; identical to SEQ ID NO: 215320
  chr12:132514252-132514523
  hypo

SEQ ID NO: 442285 - DNA, 73 bp, Homo sapiens; identical to SEQ ID NO: 215321
  chr12:132529444-132529517
  hypo

SEQ ID NO: 442286 - DNA, 334 bp, Homo sapiens
  chr12:132537629-132537963
  hypo
gtggtacttgtctgtcttaaaacttgcctgtatgtttttaacctttgcgtctgtctttcagtggaatcaactatgacaagccgctgcctcccatccaggtggcatctctccgtgcagagcgaatcgcaaaagagaaaaaggtcagcgccctgggcccttctgcttgagtgggaaaatgtggtgactgtgacttcatccagggggtatgcaggccgagtctgcccctccagtggctcctcttccttcctggcccctcaggctctggctgatcagcagaaggcacagcagccggccgtggcccagccacccccgccccagccgcagcccccaccac

SEQ ID NO: 442287 - DNA, 175 bp, Homo sapiens; identical to SEQ ID NO: 215324
  chr12:132541957-132542132
  hypo

SEQ ID NO: 442288 - DNA, 206 bp, Homo sapiens; identical to SEQ ID NO: 215325
  chr12:132546645-132546851
  hypo

SEQ ID NO: 442289 - DNA, 63 bp, Homo sapiens; identical to SEQ ID NO: 265713
  chr12:132547231-132547294
  hypo

SEQ ID NO: 442290 - DNA, 193 bp, Homo sapiens; identical to SEQ ID NO: 265714
  chr12:132548919-132549112
  hypo

SEQ ID NO: 442291 - DNA, 483 bp, Homo sapiens; identical to SEQ ID NO: 265715
  chr12:132549416-132549899
  hypo

SEQ ID NO: 442292 - DNA, 236 bp, Homo sapiens; identical to SEQ ID NO: 215327
  chr12:132551505-132551741
  hypo

SEQ ID NO: 442293 - DNA, 100 bp, Homo sapiens; identical to SEQ ID NO: 265717
  chr12:132553984-132554084
  hypo

SEQ ID NO: 442294 - DNA, 371 bp, Homo sapiens; identical to SEQ ID NO: 215328
  chr12:132556450-132556821
  hypo

SEQ ID NO: 442295 - DNA, 225 bp, Homo sapiens; identical to SEQ ID NO: 265719
  chr12:132561923-132562148
  hypo

SEQ ID NO: 442296 - DNA, 141 bp, Homo sapiens; identical to SEQ ID NO: 265720
  chr12:132567363-132567504
  hypo

SEQ ID NO: 442297 - DNA, 38 bp, Homo sapiens; identical to SEQ ID NO: 265721
  chr12:132567750-132567788
  hypo

SEQ ID NO: 442298 - DNA, 38 bp, Homo sapiens; identical to SEQ ID NO: 215329
  chr12:132581294-132581332
  hypo

SEQ ID NO: 442299 - DNA, 98 bp, Homo sapiens; identical to SEQ ID NO: 215330
  chr12:132581392-132581490
  hypo

SEQ ID NO: 442300 - DNA, 84 bp, Homo sapiens; identical to SEQ ID NO: 265725
  chr12:132601574-132601658
  hypo

SEQ ID NO: 442301 - DNA, 165 bp, Homo sapiens; identical to SEQ ID NO: 265728
  chr12:132622473-132622638
  hypo

SEQ ID NO: 442302 - DNA, 100 bp, Homo sapiens; identical to SEQ ID NO: 215332
  chr12:132630793-132630893
  hypo

SEQ ID NO: 442303 - DNA, 43 bp, Homo sapiens; identical to SEQ ID NO: 215336
  chr12:132653184-132653227
  hypo

SEQ ID NO: 442304 - DNA, 252 bp, Homo sapiens; identical to SEQ ID NO: 265733
  chr12:132665276-132665528
  hypo

SEQ ID NO: 442305 - DNA, 66 bp, Homo sapiens; identical to SEQ ID NO: 265737
  chr12:132682715-132682781
  hypo

SEQ ID NO: 442306 - DNA, 107 bp, Homo sapiens; identical to SEQ ID NO: 316874
  chr12:132694697-132694804
  hypo

SEQ ID NO: 442307 - DNA, 89 bp, Homo sapiens; identical to SEQ ID NO: 265740
  chr12:132695506-132695595
  hypo

SEQ ID NO: 442308 - DNA, 480 bp, Homo sapiens; identical to SEQ ID NO: 265741
  chr12:132698402-132698882
  hypo

SEQ ID NO: 442309 - DNA, 194 bp, Homo sapiens; identical to SEQ ID NO: 316879
  chr12:132985471-132985665
  hypo

SEQ ID NO: 442310 - DNA, 142 bp, Homo sapiens; identical to SEQ ID NO: 316880
  chr12:132985713-132985855
  hypo

SEQ ID NO: 442311 - DNA, 193 bp, Homo sapiens; identical to SEQ ID NO: 215341
  chr12:133009778-133009971
  hypo

SEQ ID NO: 442312 - DNA, 398 bp, Homo sapiens; identical to SEQ ID NO: 265747
  chr12:133018848-133019246
  hypo

SEQ ID NO: 442313 - DNA, 41 bp, Homo sapiens; identical to SEQ ID NO: 215342
  chr12:133019660-133019701
  hypo

SEQ ID NO: 442314 - DNA, 504 bp, Homo sapiens; identical to SEQ ID NO: 265749
  chr12:133088531-133089035
  hypo

SEQ ID NO: 442315 - DNA, 221 bp, Homo sapiens; identical to SEQ ID NO: 265751
  chr12:133099878-133100099
  hypo

SEQ ID NO: 442316 - DNA, 57 bp, Homo sapiens
  chr12:133102024-133102081
  hypo
ggtgggtcctgggtaggtcctccccgtcctggtagagtgtgttatcagtgtgtgcgc

SEQ ID NO: 442317 - DNA, 231 bp, Homo sapiens; identical to SEQ ID NO: 85438
  chr12:133102581-133102812
  hypo

SEQ ID NO: 442318 - DNA, 44 bp, Homo sapiens; identical to SEQ ID NO: 215349
  chr12:133122901-133122945
  hypo

SEQ ID NO: 442319 - DNA, 608 bp, Homo sapiens; identical to SEQ ID NO: 265756
  chr12:133123360-133123968
  hypo

SEQ ID NO: 442320 - DNA, 147 bp, Homo sapiens; identical to SEQ ID NO: 265757
  chr12:133129458-133129605
  hypo

SEQ ID NO: 442321 - DNA, 148 bp, Homo sapiens; identical to SEQ ID NO: 265758
  chr12:133129829-133129977
  hypo

SEQ ID NO: 442322 - DNA, 214 bp, Homo sapiens; identical to SEQ ID NO: 215351
  chr12:133131957-133132171
  hypo

SEQ ID NO: 442323 - DNA, 44 bp, Homo sapiens; identical to SEQ ID NO: 265760
  chr12:133146996-133147040
  hypo

SEQ ID NO: 442324 - DNA, 94 bp, Homo sapiens; identical to SEQ ID NO: 265762
  chr12:133148941-133149035
  hypo

SEQ ID NO: 442325 - DNA, 60 bp, Homo sapiens; identical to SEQ ID NO: 265763
  chr12:133149549-133149609
  hypo

SEQ ID NO: 442326 - DNA, 148 bp, Homo sapiens; identical to SEQ ID NO: 215354
  chr12:133156531-133156679
  hypo

SEQ ID NO: 442327 - DNA, 266 bp, Homo sapiens; identical to SEQ ID NO: 316904
  chr12:133167932-133168198
  hypo

SEQ ID NO: 442328 - DNA, 136 bp, Homo sapiens; identical to SEQ ID NO: 215356
  chr12:133168293-133168429
  hypo

SEQ ID NO: 442329 - DNA, 150 bp, Homo sapiens; identical to SEQ ID NO: 316906
  chr12:133168795-133168945
  hypo

SEQ ID NO: 442330 - DNA, 180 bp, Homo sapiens; identical to SEQ ID NO: 316907
  chr12:133172481-133172661
  hypo

SEQ ID NO: 442331 - DNA, 216 bp, Homo sapiens; identical to SEQ ID NO: 316908
  chr12:133172691-133172907
  hypo

SEQ ID NO: 442332 - DNA, 209 bp, Homo sapiens; identical to SEQ ID NO: 215359
  chr12:133209151-133209360
  hypo

SEQ ID NO: 442333 - DNA, 151 bp, Homo sapiens; identical to SEQ ID NO: 215360
  chr12:133210035-133210186
  hypo

SEQ ID NO: 442334 - DNA, 59 bp, Homo sapiens; identical to SEQ ID NO: 215361
  chr12:133220203-133220262
  hypo

SEQ ID NO: 442335 - DNA, 153 bp, Homo sapiens; identical to SEQ ID NO: 215362
  chr12:133222188-133222341
  hypo

SEQ ID NO: 442336 - DNA, 44 bp, Homo sapiens; identical to SEQ ID NO: 215363
  chr12:133225533-133225577
  hypo

SEQ ID NO: 442337 - DNA, 566 bp, Homo sapiens; identical to SEQ ID NO: 265774
  chr12:133225891-133226457
  hypo

SEQ ID NO: 442338 - DNA, 63 bp, Homo sapiens; identical to SEQ ID NO: 265775
  chr12:133250822-133250885
  hypo

SEQ ID NO: 442339 - DNA, 64 bp, Homo sapiens; identical to SEQ ID NO: 316918
  chr12:133262782-133262846
  hypo

SEQ ID NO: 442340 - DNA, 120 bp, Homo sapiens; identical to SEQ ID NO: 265777
  chr12:133262906-133263026
  hypo

SEQ ID NO: 442341 - DNA, 61 bp, Homo sapiens; identical to SEQ ID NO: 215365
  chr12:133277669-133277730
  hypo

SEQ ID NO: 442342 - DNA, 86 bp, Homo sapiens; identical to SEQ ID NO: 215367
  chr12:133308293-133308379
  hypo

SEQ ID NO: 442343 - DNA, 305 bp, Homo sapiens; identical to SEQ ID NO: 215368
  chr12:133312071-133312376
  hypo

SEQ ID NO: 442344 - DNA, 31 bp, Homo sapiens; identical to SEQ ID NO: 215369
  chr12:133348835-133348866
  hypo

SEQ ID NO: 442345 - DNA, 392 bp, Homo sapiens; identical to SEQ ID NO: 215370
  chr12:133351310-133351702
  hypo

SEQ ID NO: 442346 - DNA, 513 bp, Homo sapiens; identical to SEQ ID NO: 215372
  chr12:133356750-133357263
  hypo

SEQ ID NO: 442347 - DNA, 229 bp, Homo sapiens; identical to SEQ ID NO: 265786
  chr12:133365635-133365864
  hypo

SEQ ID NO: 442348 - DNA, 376 bp, Homo sapiens; identical to SEQ ID NO: 265787
  chr12:133380424-133380800
  hypo

SEQ ID NO: 442349 - DNA, 127 bp, Homo sapiens; identical to SEQ ID NO: 265788
  chr12:133381358-133381485
  hypo

SEQ ID NO: 442350 - DNA, 179 bp, Homo sapiens; identical to SEQ ID NO: 265789
  chr12:133383641-133383820
  hypo

SEQ ID NO: 442351 - DNA, 200 bp, Homo sapiens; identical to SEQ ID NO: 215374
  chr12:133384551-133384751
  hypo

SEQ ID NO: 442352 - DNA, 581 bp, Homo sapiens; identical to SEQ ID NO: 265792
  chr12:133403534-133404115
  hypo

SEQ ID NO: 442353 - DNA, 136 bp, Homo sapiens; identical to SEQ ID NO: 215375
  chr12:133412307-133412443
  hypo

SEQ ID NO: 442354 - DNA, 69 bp, Homo sapiens; identical to SEQ ID NO: 215376
  chr12:133414280-133414349
  hypo

SEQ ID NO: 442355 - DNA, 108 bp, Homo sapiens; identical to SEQ ID NO: 265795
  chr12:133417245-133417353
  hypo

SEQ ID NO: 442356 - DNA, 41 bp, Homo sapiens; identical to SEQ ID NO: 265796
  chr12:133421487-133421528
  hypo

SEQ ID NO: 442357 - DNA, 222 bp, Homo sapiens; identical to SEQ ID NO: 265797
  chr12:133424359-133424581
  hypo

SEQ ID NO: 442358 - DNA, 98 bp, Homo sapiens; identical to SEQ ID NO: 265800
  chr12:133441852-133441950
  hypo

SEQ ID NO: 442359 - DNA, 442 bp, Homo sapiens; identical to SEQ ID NO: 226553
  chr12:133443618-133444060
  hypo

SEQ ID NO: 442360 - DNA, 74 bp, Homo sapiens; identical to SEQ ID NO: 215380
  chr12:133448788-133448862
  hypo

SEQ ID NO: 442361 - DNA, 125 bp, Homo sapiens; identical to SEQ ID NO: 215381
  chr12:133449100-133449225
  hypo

SEQ ID NO: 442362 - DNA, 172 bp, Homo sapiens; identical to SEQ ID NO: 265804
  chr12:133450372-133450544
  hypo

SEQ ID NO: 442363 - DNA, 241 bp, Homo sapiens; identical to SEQ ID NO: 203267
  chr12:133706775-133707016
  hypo

SEQ ID NO: 442364 - DNA, 136 bp, Homo sapiens; identical to SEQ ID NO: 265805
  chr12:133716926-133717062
  hypo

SEQ ID NO: 442365 - DNA, 35 bp, Homo sapiens; identical to SEQ ID NO: 265806
  chr12:133721475-133721510
  hypo

SEQ ID NO: 442366 - DNA, 102 bp, Homo sapiens; identical to SEQ ID NO: 265807
  chr13:19239973-19240075
  hypo

SEQ ID NO: 442367 - DNA, 179 bp, Homo sapiens; identical to SEQ ID NO: 265808
  chr13:19664765-19664944
  hypo

SEQ ID NO: 442368 - DNA, 200 bp, Homo sapiens; identical to SEQ ID NO: 265809
  chr13:19692226-19692426
  hypo

SEQ ID NO: 442369 - DNA, 77 bp, Homo sapiens; identical to SEQ ID NO: 265810
  chr13:20235856-20235933
  hypo

SEQ ID NO: 442370 - DNA, 120 bp, Homo sapiens; identical to SEQ ID NO: 265811
  chr13:20265680-20265800
  hypo

SEQ ID NO: 442371 - DNA, 38 bp, Homo sapiens; identical to SEQ ID NO: 265813
  chr13:20496685-20496723
  hypo

SEQ ID NO: 442372 - DNA, 85 bp, Homo sapiens; identical to SEQ ID NO: 215387
  chr13:20521929-20522014
  hypo

SEQ ID NO: 442373 - DNA, 87 bp, Homo sapiens; identical to SEQ ID NO: 265815
  chr13:20748824-20748911
  hypo

SEQ ID NO: 442374 - DNA, 746 bp, Homo sapiens; identical to SEQ ID NO: 422155
  chr13:20766341-20767087
  hypo

SEQ ID NO: 442375 - DNA, 104 bp, Homo sapiens; identical to SEQ ID NO: 265816
  chr13:20969540-20969644
  hypo

SEQ ID NO: 442376 - DNA, 321 bp, Homo sapiens; identical to SEQ ID NO: 265817
  chr13:20975930-20976251
  hypo

SEQ ID NO: 442377 - DNA, 72 bp, Homo sapiens; identical to SEQ ID NO: 265819
  chr13:21005162-21005234
  hypo

SEQ ID NO: 442378 - DNA, 313 bp, Homo sapiens; identical to SEQ ID NO: 265820
  chr13:21047373-21047686
  hypo

SEQ ID NO: 442379 - DNA, 65 bp, Homo sapiens; identical to SEQ ID NO: 215391
  chr13:21057583-21057648
  hypo

SEQ ID NO: 442380 - DNA, 721 bp, Homo sapiens; identical to SEQ ID NO: 289549
  chr13:21099487-21100208
  hypo

SEQ ID NO: 442381 - DNA, 111 bp, Homo sapiens; identical to SEQ ID NO: 289551
  chr13:21141668-21141779
  hypo

SEQ ID NO: 442382 - DNA, 116 bp, Homo sapiens; identical to SEQ ID NO: 265823
  chr13:21304077-21304193
  hypo

SEQ ID NO: 442383 - DNA, 222 bp, Homo sapiens; identical to SEQ ID NO: 265825
  chr13:21562961-21563183
  hypo

SEQ ID NO: 442384 - DNA, 318 bp, Homo sapiens; identical to SEQ ID NO: 215393
  chr13:21572946-21573264
  hypo

SEQ ID NO: 442385 - DNA, 250 bp, Homo sapiens; identical to SEQ ID NO: 265827
  chr13:21597248-21597498
  hypo

SEQ ID NO: 442386 - DNA, 120 bp, Homo sapiens; identical to SEQ ID NO: 265828
  chr13:21633733-21633853
  hypo

SEQ ID NO: 442387 - DNA, 222 bp, Homo sapiens; identical to SEQ ID NO: 422161
  chr13:21635534-21635756
  hypo

SEQ ID NO: 442388 - DNA, 228 bp, Homo sapiens; identical to SEQ ID NO: 9203
  chr13:21635777-21636005
  hypo

SEQ ID NO: 442389 - DNA, 49 bp, Homo sapiens; identical to SEQ ID NO: 265829
  chr13:21677730-21677779
  hypo

SEQ ID NO: 442390 - DNA, 112 bp, Homo sapiens; identical to SEQ ID NO: 265830
  chr13:21678550-21678662
  hypo

SEQ ID NO: 442391 - DNA, 67 bp, Homo sapiens; identical to SEQ ID NO: 316982
  chr13:21713746-21713813
  hypo

SEQ ID NO: 442392 - DNA, 46 bp, Homo sapiens; identical to SEQ ID NO: 215397
  chr13:21809435-21809481
  hypo

SEQ ID NO: 442393 - DNA, 31 bp, Homo sapiens; identical to SEQ ID NO: 265833
  chr13:21863996-21864027
  hypo

SEQ ID NO: 442394 - DNA, 69 bp, Homo sapiens; identical to SEQ ID NO: 265834
  chr13:21894157-21894226
  hypo

SEQ ID NO: 442395 - DNA, 147 bp, Homo sapiens; identical to SEQ ID NO: 265835
  chr13:22021309-22021456
  hypo

SEQ ID NO: 442396 - DNA, 135 bp, Homo sapiens; identical to SEQ ID NO: 265838
  chr13:22058108-22058243
  hypo

SEQ ID NO: 442397 - DNA, 36 bp, Homo sapiens; identical to SEQ ID NO: 215398
  chr13:22091944-22091980
  hypo

SEQ ID NO: 442398 - DNA, 160 bp, Homo sapiens; identical to SEQ ID NO: 215399
  chr13:22214672-22214832
  hypo

SEQ ID NO: 442399 - DNA, 34 bp, Homo sapiens; identical to SEQ ID NO: 265841
  chr13:22239916-22239950
  hypo

SEQ ID NO: 442400 - DNA, 400 bp, Homo sapiens; identical to SEQ ID NO: 289563
  chr13:22244999-22245399
  hypo

SEQ ID NO: 442401 - DNA, 96 bp, Homo sapiens; identical to SEQ ID NO: 203283
  chr13:22247845-22247941
  hypo

SEQ ID NO: 442402 - DNA, 34 bp, Homo sapiens; identical to SEQ ID NO: 265842
  chr13:22338337-22338371
  hypo

SEQ ID NO: 442403 - DNA, 45 bp, Homo sapiens; identical to SEQ ID NO: 215404
  chr13:22350434-22350479
  hypo

SEQ ID NO: 442404 - DNA, 31 bp, Homo sapiens; identical to SEQ ID NO: 215405
  chr13:22392838-22392869
  hypo

SEQ ID NO: 442405 - DNA, 187 bp, Homo sapiens; identical to SEQ ID NO: 265846
  chr13:22417569-22417756
  hypo

SEQ ID NO: 442406 - DNA, 44 bp, Homo sapiens; identical to SEQ ID NO: 265847
  chr13:22467018-22467062
  hypo

SEQ ID NO: 442407 - DNA, 45 bp, Homo sapiens; identical to SEQ ID NO: 265848
  chr13:22496749-22496794
  hypo

SEQ ID NO: 442408 - DNA, 157 bp, Homo sapiens; identical to SEQ ID NO: 265849
  chr13:22511719-22511876
  hypo

SEQ ID NO: 442409 - DNA, 180 bp, Homo sapiens; identical to SEQ ID NO: 215407
  chr13:22539244-22539424
  hypo

SEQ ID NO: 442410 - DNA, 199 bp, Homo sapiens; identical to SEQ ID NO: 265851
  chr13:22785989-22786188
  hypo

SEQ ID NO: 442411 - DNA, 91 bp, Homo sapiens; identical to SEQ ID NO: 265852
  chr13:22786757-22786848
  hypo

SEQ ID NO: 442412 - DNA, 369 bp, Homo sapiens; identical to SEQ ID NO: 265853
  chr13:23508831-23509200
  hypo

SEQ ID NO: 442413 - DNA, 140 bp, Homo sapiens; identical to SEQ ID NO: 265854
  chr13:23629553-23629693
  hypo

SEQ ID NO: 442414 - DNA, 32 bp, Homo sapiens; identical to SEQ ID NO: 265855
  chr13:23654298-23654330
  hypo

SEQ ID NO: 442415 - DNA, 201 bp, Homo sapiens; identical to SEQ ID NO: 215409
  chr13:23897356-23897557
  hypo

SEQ ID NO: 442416 - DNA, 155 bp, Homo sapiens; identical to SEQ ID NO: 265858
  chr13:23910726-23910881
  hypo

SEQ ID NO: 442417 - DNA, 83 bp, Homo sapiens; identical to SEQ ID NO: 317011
  chr13:24289678-24289761
  hypo

SEQ ID NO: 442418 - DNA, 252 bp, Homo sapiens; identical to SEQ ID NO: 265860
  chr13:24408049-24408301
  hypo

SEQ ID NO: 442419 - DNA, 35 bp, Homo sapiens; identical to SEQ ID NO: 265861
  chr13:24527676-24527711
  hypo

SEQ ID NO: 442420 - DNA, 184 bp, Homo sapiens; identical to SEQ ID NO: 317014
  chr13:24658298-24658482
  hypo

SEQ ID NO: 442421 - DNA, 358 bp, Homo sapiens; identical to SEQ ID NO: 215411
  chr13:24718516-24718874
  hypo

SEQ ID NO: 442422 - DNA, 38 bp, Homo sapiens; identical to SEQ ID NO: 265864
  chr13:24720491-24720529
  hypo

SEQ ID NO: 442423 - DNA, 45 bp, Homo sapiens; identical to SEQ ID NO: 265865
  chr13:24720559-24720604
  hypo

SEQ ID NO: 442424 - DNA, 304 bp, Homo sapiens; identical to SEQ ID NO: 422176
  chr13:24734667-24734971
  hypo

SEQ ID NO: 442425 - DNA, 43 bp, Homo sapiens; identical to SEQ ID NO: 265866
  chr13:24781502-24781545
  hypo

SEQ ID NO: 442426 - DNA, 89 bp, Homo sapiens; identical to SEQ ID NO: 215413
  chr13:24797623-24797712
  hypo

SEQ ID NO: 442427 - DNA, 48 bp, Homo sapiens; identical to SEQ ID NO: 265868
  chr13:24815548-24815596
  hypo

SEQ ID NO: 442428 - DNA, 51 bp, Homo sapiens; identical to SEQ ID NO: 265869
  chr13:24819243-24819294
  hypo

SEQ ID NO: 442429 - DNA, 109 bp, Homo sapiens; identical to SEQ ID NO: 265870
  chr13:24868948-24869057
  hypo

SEQ ID NO: 442430 - DNA, 70 bp, Homo sapiens; identical to SEQ ID NO: 215414
  chr13:25026104-25026174
  hypo

SEQ ID NO: 442431 - DNA, 37 bp, Homo sapiens; identical to SEQ ID NO: 265873
  chr13:25084393-25084430
  hypo

SEQ ID NO: 442432 - DNA, 33 bp, Homo sapiens; identical to SEQ ID NO: 265874
  chr13:25463715-25463748
  hypo

SEQ ID NO: 442433 - DNA, 48 bp, Homo sapiens; identical to SEQ ID NO: 265875
  chr13:25469373-25469421
  hypo

SEQ ID NO: 442434 - DNA, 41 bp, Homo sapiens; identical to SEQ ID NO: 215416
  chr13:25642761-25642802
  hypo

SEQ ID NO: 442435 - DNA, 164 bp, Homo sapiens; identical to SEQ ID NO: 215418
  chr13:25932257-25932421
  hypo

SEQ ID NO: 442436 - DNA, 292 bp, Homo sapiens; identical to SEQ ID NO: 265880
  chr13:25939930-25940222
  hypo

SEQ ID NO: 442437 - DNA, 93 bp, Homo sapiens; identical to SEQ ID NO: 203290
  chr13:25946858-25946951
  hypo

SEQ ID NO: 442438 - DNA, 59 bp, Homo sapiens; identical to SEQ ID NO: 317034
  chr13:26354975-26355034
  hypo

SEQ ID NO: 442439 - DNA, 58 bp, Homo sapiens; identical to SEQ ID NO: 265882
  chr13:26548842-26548900
  hypo

SEQ ID NO: 442440 - DNA, 239 bp, Homo sapiens; identical to SEQ ID NO: 203293
  chr13:27334980-27335219
  hypo

SEQ ID NO: 442441 - DNA, 37 bp, Homo sapiens; identical to SEQ ID NO: 215421
  chr13:27556411-27556448
  hypo

SEQ ID NO: 442442 - DNA, 178 bp, Homo sapiens; identical to SEQ ID NO: 317038
  chr13:27610258-27610436
  hypo

SEQ ID NO: 442443 - DNA, 178 bp, Homo sapiens; identical to SEQ ID NO: 215422
  chr13:27620503-27620681
  hypo

SEQ ID NO: 442444 - DNA, 399 bp, Homo sapiens; identical to SEQ ID NO: 215423
  chr13:27690601-27691000
  hypo

SEQ ID NO: 442445 - DNA, 98 bp, Homo sapiens; identical to SEQ ID NO: 215424
  chr13:27691060-27691158
  hypo

SEQ ID NO: 442446 - DNA, 275 bp, Homo sapiens; identical to SEQ ID NO: 203294
  chr13:27744759-27745034
  hypo

SEQ ID NO: 442447 - DNA, 111 bp, Homo sapiens; identical to SEQ ID NO: 265888
  chr13:27786256-27786367
  hypo

SEQ ID NO: 442448 - DNA, 39 bp, Homo sapiens; identical to SEQ ID NO: 265889
  chr13:27786397-27786436
  hypo

SEQ ID NO: 442449 - DNA, 31 bp, Homo sapiens; identical to SEQ ID NO: 215426
  chr13:27914840-27914871
  hypo

SEQ ID NO: 442450 - DNA, 91 bp, Homo sapiens; identical to SEQ ID NO: 215427
  chr13:27915171-27915262
  hypo

SEQ ID NO: 442451 - DNA, 85 bp, Homo sapiens; identical to SEQ ID NO: 265892
  chr13:27934850-27934935
  hypo

SEQ ID NO: 442452 - DNA, 49 bp, Homo sapiens; identical to SEQ ID NO: 265893
  chr13:28124055-28124104
  hypo

SEQ ID NO: 442453 - DNA, 226 bp, Homo sapiens; identical to SEQ ID NO: 203301
  chr13:28493981-28494207
  hypo

SEQ ID NO: 442454 - DNA, 243 bp, Homo sapiens; identical to SEQ ID NO: 215430
  chr13:28575159-28575402
  hypo

SEQ ID NO: 442455 - DNA, 34 bp, Homo sapiens; identical to SEQ ID NO: 203311
  chr13:28592658-28592692
  hypo

SEQ ID NO: 442456 - DNA, 210 bp, Homo sapiens; identical to SEQ ID NO: 203312
  chr13:28608023-28608233
  hypo

SEQ ID NO: 442457 - DNA, 167 bp, Homo sapiens; identical to SEQ ID NO: 203313
  chr13:28608355-28608522
  hypo

SEQ ID NO: 442458 - DNA, 106 bp, Homo sapiens; identical to SEQ ID NO: 203314
  chr13:28636040-28636146
  hypo

SEQ ID NO: 442459 - DNA, 38 bp, Homo sapiens; identical to SEQ ID NO: 265897
  chr13:28662983-28663021
  hypo

SEQ ID NO: 442460 - DNA, 120 bp, Homo sapiens; identical to SEQ ID NO: 409473
  chr13:28745728-28745848
  hypo

SEQ ID NO: 442461 - DNA, 56 bp, Homo sapiens; identical to SEQ ID NO: 265900
  chr13:28838072-28838128
  hypo

SEQ ID NO: 442462 - DNA, 86 bp, Homo sapiens; identical to SEQ ID NO: 265901
  chr13:29298157-29298243
  hypo

SEQ ID NO: 442463 - DNA, 204 bp, Homo sapiens; identical to SEQ ID NO: 215440
  chr13:29920653-29920857
  hypo

SEQ ID NO: 442464 - DNA, 95 bp, Homo sapiens; identical to SEQ ID NO: 265905
  chr13:30079033-30079128
  hypo

SEQ ID NO: 442465 - DNA, 242 bp, Homo sapiens; identical to SEQ ID NO: 265907
  chr13:30082638-30082880
  hypo

SEQ ID NO: 442466 - DNA, 149 bp, Homo sapiens; identical to SEQ ID NO: 215442
  chr13:30087251-30087400
  hypo

SEQ ID NO: 442467 - DNA, 54 bp, Homo sapiens; identical to SEQ ID NO: 265909
  chr13:30088601-30088655
  hypo

SEQ ID NO: 442468 - DNA, 45 bp, Homo sapiens; identical to SEQ ID NO: 215443
  chr13:30101132-30101177
  hypo

SEQ ID NO: 442469 - DNA, 38 bp, Homo sapiens; identical to SEQ ID NO: 215447
  chr13:30128333-30128371
  hypo

SEQ ID NO: 442470 - DNA, 118 bp, Homo sapiens; identical to SEQ ID NO: 317075
  chr13:30141718-30141836
  hypo

SEQ ID NO: 442471 - DNA, 350 bp, Homo sapiens; identical to SEQ ID NO: 265915
  chr13:30146275-30146625
  hypo

SEQ ID NO: 442472 - DNA, 200 bp, Homo sapiens; identical to SEQ ID NO: 265917
  chr13:30163603-30163803
  hypo

SEQ ID NO: 442473 - DNA, 36 bp, Homo sapiens; identical to SEQ ID NO: 265918
  chr13:30314401-30314437
  hypo

SEQ ID NO: 442474 - DNA, 31 bp, Homo sapiens; identical to SEQ ID NO: 265919
  chr13:30355023-30355054
  hypo

SEQ ID NO: 442475 - DNA, 390 bp, Homo sapiens; identical to SEQ ID NO: 203319
  chr13:30982478-30982868
  hypo

SEQ ID NO: 442476 - DNA, 142 bp, Homo sapiens; identical to SEQ ID NO: 265923
  chr13:30992817-30992959
  hypo

SEQ ID NO: 442477 - DNA, 49 bp, Homo sapiens; identical to SEQ ID NO: 265926
  chr13:31061045-31061094
  hypo

SEQ ID NO: 442478 - DNA, 43 bp, Homo sapiens; identical to SEQ ID NO: 215450
  chr13:31185329-31185372
  hypo

SEQ ID NO: 442479 - DNA, 206 bp, Homo sapiens; identical to SEQ ID NO: 215451
  chr13:31208407-31208613
  hypo

SEQ ID NO: 442480 - DNA, 35 bp, Homo sapiens; identical to SEQ ID NO: 265929
  chr13:31259579-31259614
  hypo

SEQ ID NO: 442481 - DNA, 52 bp, Homo sapiens; identical to SEQ ID NO: 265930
  chr13:31259644-31259696
  hypo

SEQ ID NO: 442482 - DNA, 341 bp, Homo sapiens; identical to SEQ ID NO: 265931
  chr13:31305985-31306326
  hypo

SEQ ID NO: 442483 - DNA, 55 bp, Homo sapiens; identical to SEQ ID NO: 215453
  chr13:31579360-31579415
  hypo

SEQ ID NO: 442484 - DNA, 303 bp, Homo sapiens; identical to SEQ ID NO: 289629
  chr13:32889501-32889804
  hypo

SEQ ID NO: 442485 - DNA, 106 bp, Homo sapiens; identical to SEQ ID NO: 224534
  chr13:32890558-32890664
  hypo

SEQ ID NO: 442486 - DNA, 249 bp, Homo sapiens; identical to SEQ ID NO: 224535
  chr13:32893213-32893462
  hypo

SEQ ID NO: 442487 - DNA, 109 bp, Homo sapiens; identical to SEQ ID NO: 224536
  chr13:32899212-32899321
  hypo

SEQ ID NO: 442488 - DNA, 182 bp, Homo sapiens; identical to SEQ ID NO: 224537
  chr13:32900237-32900419
  hypo

SEQ ID NO: 442489 - DNA, 115 bp, Homo sapiens; identical to SEQ ID NO: 224538
  chr13:32900635-32900750
  hypo

SEQ ID NO: 442490 - DNA, 50 bp, Homo sapiens; identical to SEQ ID NO: 224539
  chr13:32903579-32903629
  hypo

SEQ ID NO: 442491 - DNA, 159 bp, Homo sapiens; identical to SEQ ID NO: 289636
  chr13:32905055-32905214
  hypo

SEQ ID NO: 442492 - DNA, 1116 bp, Homo sapiens; identical to SEQ ID NO: 224541
  chr13:32906408-32907524
  hypo

SEQ ID NO: 442493 - DNA, 4932 bp, Homo sapiens; identical to SEQ ID NO: 224542
  chr13:32910401-32915333
  hypo

SEQ ID NO: 442494 - DNA, 96 bp, Homo sapiens; identical to SEQ ID NO: 224543
  chr13:32918694-32918790
  hypo

SEQ ID NO: 442495 - DNA, 70 bp, Homo sapiens; identical to SEQ ID NO: 224544
  chr13:32920963-32921033
  hypo

SEQ ID NO: 442496 - DNA, 428 bp, Homo sapiens; identical to SEQ ID NO: 224545
  chr13:32928997-32929425
  hypo

SEQ ID NO: 442497 - DNA, 182 bp, Homo sapiens; identical to SEQ ID NO: 224546
  chr13:32930564-32930746
  hypo

SEQ ID NO: 442498 - DNA, 188 bp, Homo sapiens; identical to SEQ ID NO: 224547
  chr13:32931878-32932066
  hypo

SEQ ID NO: 442499 - DNA, 171 bp, Homo sapiens; identical to SEQ ID NO: 224548
  chr13:32936659-32936830
  hypo

SEQ ID NO: 442500 - DNA, 355 bp, Homo sapiens; identical to SEQ ID NO: 224549
  chr13:32937315-32937670
  hypo

SEQ ID NO: 442501 - DNA, 156 bp, Homo sapiens; identical to SEQ ID NO: 224550
  chr13:32944538-32944694
  hypo

SEQ ID NO: 442502 - DNA, 145 bp, Homo sapiens; identical to SEQ ID NO: 224551
  chr13:32945092-32945237
  hypo

SEQ ID NO: 442503 - DNA, 122 bp, Homo sapiens; identical to SEQ ID NO: 224552
  chr13:32950806-32950928
  hypo

SEQ ID NO: 442504 - DNA, 199 bp, Homo sapiens; identical to SEQ ID NO: 224553
  chr13:32953453-32953652
  hypo

SEQ ID NO: 442505 - DNA, 396 bp, Homo sapiens; identical to SEQ ID NO: 224554
  chr13:32953886-32954282
  hypo

SEQ ID NO: 442506 - DNA, 245 bp, Homo sapiens; identical to SEQ ID NO: 224555
  chr13:32968825-32969070
  hypo

SEQ ID NO: 442507 - DNA, 147 bp, Homo sapiens; identical to SEQ ID NO: 224556
  chr13:32971034-32971181
  hypo

SEQ ID NO: 442508 - DNA, 876 bp, Homo sapiens; identical to SEQ ID NO: 224557
  chr13:32972298-32973174
  hypo

SEQ ID NO: 442509 - DNA, 515 bp, Homo sapiens; identical to SEQ ID NO: 224558
  chr13:32973294-32973809
  hypo

SEQ ID NO: 442510 - DNA, 35 bp, Homo sapiens; identical to SEQ ID NO: 215456
  chr13:33103876-33103911
  hypo

SEQ ID NO: 442511 - DNA, 122 bp, Homo sapiens; identical to SEQ ID NO: 265939
  chr13:33266483-33266605
  hypo

SEQ ID NO: 442512 - DNA, 56 bp, Homo sapiens; identical to SEQ ID NO: 265940
  chr13:33510409-33510465
  hypo

SEQ ID NO: 442513 - DNA, 135 bp, Homo sapiens; identical to SEQ ID NO: 289658
  chr13:33589987-33590122
  hypo

SEQ ID NO: 442514 - DNA, 259 bp, Homo sapiens; identical to SEQ ID NO: 289659
  chr13:33590208-33590467
  hypo

SEQ ID NO: 442515 - DNA, 87 bp, Homo sapiens; identical to SEQ ID NO: 265941
  chr13:33640654-33640741
  hypo

SEQ ID NO: 442516 - DNA, 52 bp, Homo sapiens; identical to SEQ ID NO: 265942
  chr13:33687132-33687184
  hypo

SEQ ID NO: 442517 - DNA, 36 bp, Homo sapiens; identical to SEQ ID NO: 265943
  chr13:36673374-36673410
  hypo

SEQ ID NO: 442518 - DNA, 77 bp, Homo sapiens; identical to SEQ ID NO: 265945
  chr13:36789490-36789567
  hypo

SEQ ID NO: 442519 - DNA, 171 bp, Homo sapiens; identical to SEQ ID NO: 317135
  chr13:36909035-36909206
  hypo

SEQ ID NO: 442520 - DNA, 304 bp, Homo sapiens; identical to SEQ ID NO: 203332
  chr13:37393232-37393536
  hypo

SEQ ID NO: 442521 - DNA, 162 bp, Homo sapiens; identical to SEQ ID NO: 265947
  chr13:37453825-37453987
  hypo

SEQ ID NO: 442522 - DNA, 60 bp, Homo sapiens; identical to SEQ ID NO: 265950
  chr13:37838971-37839031
  hypo

SEQ ID NO: 442523 - DNA, 77 bp, Homo sapiens; identical to SEQ ID NO: 265951
  chr13:39358216-39358293
  hypo

SEQ ID NO: 442524 - DNA, 33 bp, Homo sapiens; identical to SEQ ID NO: 203337
  chr13:39612009-39612042
  hypo

SEQ ID NO: 442525 - DNA, 200 bp, Homo sapiens; identical to SEQ ID NO: 265952
  chr13:39694434-39694634
  hypo

SEQ ID NO: 442526 - DNA, 224 bp, Homo sapiens; identical to SEQ ID NO: 265953
  chr13:40762416-40762640
  hypo

SEQ ID NO: 442527 - DNA, 163 bp, Homo sapiens; identical to SEQ ID NO: 289692
  chr13:41345169-41345332
  hypo

SEQ ID NO: 442528 - DNA, 223 bp, Homo sapiens; identical to SEQ ID NO: 289693
  chr13:41345361-41345584
  hypo

SEQ ID NO: 442529 - DNA, 85 bp, Homo sapiens; identical to SEQ ID NO: 265954
  chr13:41450220-41450305
  hypo

SEQ ID NO: 442530 - DNA, 120 bp, Homo sapiens; identical to SEQ ID NO: 265956
  chr13:41561358-41561478
  hypo

SEQ ID NO: 442531 - DNA, 146 bp, Homo sapiens; identical to SEQ ID NO: 265957
  chr13:41567499-41567645
  hypo

SEQ ID NO: 442532 - DNA, 326 bp, Homo sapiens; identical to SEQ ID NO: 289697
  chr13:41767766-41768092
  hypo

SEQ ID NO: 442533 - DNA, 81 bp, Homo sapiens; identical to SEQ ID NO: 265960
  chr13:42026224-42026305
  hypo

SEQ ID NO: 442534 - DNA, 33 bp, Homo sapiens; identical to SEQ ID NO: 265961
  chr13:42600814-42600847
  hypo

SEQ ID NO: 442535 - DNA, 162 bp, Homo sapiens; identical to SEQ ID NO: 224571
  chr13:42615145-42615307
  hypo

SEQ ID NO: 442536 - DNA, 202 bp, Homo sapiens; identical to SEQ ID NO: 289703
  chr13:42615560-42615762
  hypo

SEQ ID NO: 442537 - DNA, 182 bp, Homo sapiens; identical to SEQ ID NO: 289704
  chr13:42615836-42616018
  hypo

SEQ ID NO: 442538 - DNA, 42 bp, Homo sapiens; identical to SEQ ID NO: 215467
  chr13:43217491-43217533
  hypo

SEQ ID NO: 442539 - DNA, 84 bp, Homo sapiens; identical to SEQ ID NO: 215469
  chr13:43596563-43596647
  hypo

SEQ ID NO: 442540 - DNA, 41 bp, Homo sapiens; identical to SEQ ID NO: 265965
  chr13:43598748-43598789
  hypo

SEQ ID NO: 442541 - DNA, 79 bp, Homo sapiens; identical to SEQ ID NO: 317166
  chr13:43728071-43728150
  hypo

SEQ ID NO: 442542 - DNA, 177 bp, Homo sapiens; identical to SEQ ID NO: 265968
  chr13:44543798-44543975
  hypo

SEQ ID NO: 442543 - DNA, 337 bp, Homo sapiens; identical to SEQ ID NO: 215471
  chr13:44544879-44545216
  hypo

SEQ ID NO: 442544 - DNA, 103 bp, Homo sapiens; identical to SEQ ID NO: 265970
  chr13:44947061-44947164
  hypo

SEQ ID NO: 442545 - DNA, 205 bp, Homo sapiens; identical to SEQ ID NO: 224576
  chr13:44991619-44991824
  hypo

SEQ ID NO: 442546 - DNA, 252 bp, Homo sapiens; identical to SEQ ID NO: 265972
  chr13:45003134-45003386
  hypo

SEQ ID NO: 442547 - DNA, 104 bp, Homo sapiens; identical to SEQ ID NO: 9329
  chr13:45150766-45150870
  hypo

SEQ ID NO: 442548 - DNA, 87 bp, Homo sapiens; identical to SEQ ID NO: 215473
  chr13:45154328-45154415
  hypo

SEQ ID NO: 442549 - DNA, 319 bp, Homo sapiens; identical to SEQ ID NO: 265974
  chr13:45383495-45383814
  hypo

SEQ ID NO: 442550 - DNA, 101 bp, Homo sapiens; identical to SEQ ID NO: 265976
  chr13:45493229-45493330
  hypo

SEQ ID NO: 442551 - DNA, 192 bp, Homo sapiens; identical to SEQ ID NO: 265977
  chr13:45500374-45500566
  hypo

SEQ ID NO: 442552 - DNA, 78 bp, Homo sapiens; identical to SEQ ID NO: 317179
  chr13:45564803-45564881
  hypo

SEQ ID NO: 442553 - DNA, 137 bp, Homo sapiens; identical to SEQ ID NO: 265979
  chr13:45741238-45741375
  hypo

SEQ ID NO: 442554 - DNA, 129 bp, Homo sapiens; identical to SEQ ID NO: 393185
  chr13:45926492-45926621
  hypo

SEQ ID NO: 442555 - DNA, 104 bp, Homo sapiens; identical to SEQ ID NO: 215475
  chr13:45936013-45936117
  hypo

SEQ ID NO: 442556 - DNA, 41 bp, Homo sapiens; identical to SEQ ID NO: 215476
  chr13:45938917-45938958
  hypo

SEQ ID NO: 442557 - DNA, 64 bp, Homo sapiens; identical to SEQ ID NO: 265984
  chr13:45939385-45939449
  hypo

SEQ ID NO: 442558 - DNA, 41 bp, Homo sapiens; identical to SEQ ID NO: 265985
  chr13:45939905-45939946
  hypo

SEQ ID NO: 442559 - DNA, 162 bp, Homo sapiens; identical to SEQ ID NO: 265987
  chr13:45965401-45965563
  hypo

SEQ ID NO: 442560 - DNA, 136 bp, Homo sapiens; identical to SEQ ID NO: 215477
  chr13:46037882-46038018
  hypo

SEQ ID NO: 442561 - DNA, 87 bp, Homo sapiens; identical to SEQ ID NO: 215478
  chr13:46287705-46287792
  hypo

SEQ ID NO: 442562 - DNA, 77 bp, Homo sapiens; identical to SEQ ID NO: 215479
  chr13:46288451-46288528
  hypo

SEQ ID NO: 442563 - DNA, 87 bp, Homo sapiens; identical to SEQ ID NO: 265991
  chr13:46318163-46318250
  hypo

SEQ ID NO: 442564 - DNA, 107 bp, Homo sapiens; identical to SEQ ID NO: 215480
  chr13:46543045-46543152
  hypo

SEQ ID NO: 442565 - DNA, 145 bp, Homo sapiens; identical to SEQ ID NO: 265993
  chr13:46660689-46660834
  hypo

SEQ ID NO: 442566 - DNA, 260 bp, Homo sapiens; identical to SEQ ID NO: 265995
  chr13:46946183-46946443
  hypo

SEQ ID NO: 442567 - DNA, 44 bp, Homo sapiens; identical to SEQ ID NO: 386495
  chr13:46948591-46948635
  hypo

SEQ ID NO: 442568 - DNA, 36 bp, Homo sapiens; identical to SEQ ID NO: 265997
  chr13:47349768-47349804
  hypo

SEQ ID NO: 442569 - DNA, 76 bp, Homo sapiens; identical to SEQ ID NO: 265998
  chr13:48318851-48318927
  hypo

SEQ ID NO: 442570 - DNA, 40 bp, Homo sapiens; identical to SEQ ID NO: 215483
  chr13:48731919-48731959
  hypo

SEQ ID NO: 442571 - DNA, 159 bp, Homo sapiens; identical to SEQ ID NO: 266000
  chr13:49076869-49077028
  hypo

SEQ ID NO: 442572 - DNA, 36 bp, Homo sapiens; identical to SEQ ID NO: 215484
  chr13:49848524-49848560
  hypo

SEQ ID NO: 442573 - DNA, 67 bp, Homo sapiens; identical to SEQ ID NO: 266004
  chr13:49883683-49883750
  hypo

SEQ ID NO: 442574 - DNA, 278 bp, Homo sapiens; identical to SEQ ID NO: 266005
  chr13:49884960-49885238
  hypo

SEQ ID NO: 442575 - DNA, 121 bp, Homo sapiens; identical to SEQ ID NO: 266006
  chr13:49914522-49914643
  hypo

SEQ ID NO: 442576 - DNA, 191 bp, Homo sapiens; identical to SEQ ID NO: 215485
  chr13:49922251-49922442
  hypo

SEQ ID NO: 442577 - DNA, 182 bp, Homo sapiens; identical to SEQ ID NO: 266010
  chr13:50411347-50411529
  hypo

SEQ ID NO: 442578 - DNA, 32 bp, Homo sapiens; identical to SEQ ID NO: 266011
  chr13:51568863-51568895
  hypo

SEQ ID NO: 442579 - DNA, 32 bp, Homo sapiens; identical to SEQ ID NO: 266012
  chr13:52242304-52242336
  hypo

SEQ ID NO: 442580 - DNA, 92 bp, Homo sapiens; identical to SEQ ID NO: 215486
  chr13:52334720-52334812
  hypo

SEQ ID NO: 442581 - DNA, 161 bp, Homo sapiens; identical to SEQ ID NO: 215488
  chr13:52390091-52390252
  hypo

SEQ ID NO: 442582 - DNA, 134 bp, Homo sapiens; identical to SEQ ID NO: 317218
  chr13:52532670-52532804
  hypo

SEQ ID NO: 442583 - DNA, 37 bp, Homo sapiens; identical to SEQ ID NO: 215490
  chr13:52565193-52565230
  hypo

SEQ ID NO: 442584 - DNA, 291 bp, Homo sapiens; identical to SEQ ID NO: 224578
  chr13:52585269-52585560
  hypo

SEQ ID NO: 442585 - DNA, 85 bp, Homo sapiens; identical to SEQ ID NO: 224579
  chr13:52702430-52702515
  hypo

SEQ ID NO: 442586 - DNA, 545 bp, Homo sapiens; identical to SEQ ID NO: 289760
  chr13:52702767-52703312
  hypo

SEQ ID NO: 442587 - DNA, 32 bp, Homo sapiens; identical to SEQ ID NO: 215492
  chr13:52770512-52770544
  hypo

SEQ ID NO: 442588 - DNA, 36 bp, Homo sapiens; identical to SEQ ID NO: 266022
  chr13:53175586-53175622
  hypo

SEQ ID NO: 442589 - DNA, 45 bp, Homo sapiens; identical to SEQ ID NO: 289773
  chr13:53426008-53426053
  hypo

SEQ ID NO: 442590 - DNA, 124 bp, Homo sapiens; identical to SEQ ID NO: 266023
  chr13:60232278-60232402
  hypo

SEQ ID NO: 442591 - DNA, 160 bp, Homo sapiens; identical to SEQ ID NO: 215493
  chr13:60492535-60492695
  hypo

SEQ ID NO: 442592 - DNA, 213 bp, Homo sapiens; identical to SEQ ID NO: 224583
  chr13:60972272-60972485
  hypo

SEQ ID NO: 442593 - DNA, 243 bp, Homo sapiens; identical to SEQ ID NO: 224584
  chr13:67799457-67799700
  hypo

SEQ ID NO: 442594 - DNA, 32 bp, Homo sapiens; identical to SEQ ID NO: 224585
  chr13:67801107-67801139
  hypo

SEQ ID NO: 442595 - DNA, 254 bp, Homo sapiens; identical to SEQ ID NO: 224586
  chr13:67801447-67801701
  hypo

SEQ ID NO: 442596 - DNA, 95 bp, Homo sapiens; identical to SEQ ID NO: 266027
  chr13:72305716-72305811
  hypo

SEQ ID NO: 442597 - DNA, 74 bp, Homo sapiens; identical to SEQ ID NO: 317238
  chr13:73619519-73619593
  hypo

SEQ ID NO: 442598 - DNA, 37 bp, Homo sapiens; identical to SEQ ID NO: 317239
  chr13:73619623-73619660
  hypo

SEQ ID NO: 442599 - DNA, 34 bp, Homo sapiens; identical to SEQ ID NO: 215495
  chr13:73619752-73619786
  hypo

SEQ ID NO: 442600 - DNA, 157 bp, Homo sapiens; identical to SEQ ID NO: 266030
  chr13:73636133-73636290
  hypo

SEQ ID NO: 442601 - DNA, 51 bp, Homo sapiens; identical to SEQ ID NO: 215496
  chr13:73636846-73636897
  hypo

SEQ ID NO: 442602 - DNA, 50 bp, Homo sapiens; identical to SEQ ID NO: 266032
  chr13:73640031-73640081
  hypo

SEQ ID NO: 442603 - DNA, 38 bp, Homo sapiens; identical to SEQ ID NO: 266033
  chr13:73642917-73642955
  hypo

SEQ ID NO: 442604 - DNA, 203 bp, Homo sapiens; identical to SEQ ID NO: 266035
  chr13:73824308-73824511
  hypo

SEQ ID NO: 442605 - DNA, 101 bp, Homo sapiens; identical to SEQ ID NO: 266036
  chr13:73972455-73972556
  hypo

SEQ ID NO: 442606 - DNA, 143 bp, Homo sapiens; identical to SEQ ID NO: 266037
  chr13:74248145-74248288
  hypo

SEQ ID NO: 442607 - DNA, 75 bp, Homo sapiens; identical to SEQ ID NO: 266039
  chr13:74352828-74352903
  hypo

SEQ ID NO: 442608 - DNA, 144 bp, Homo sapiens; identical to SEQ ID NO: 266040
  chr13:74445354-74445498
  hypo

SEQ ID NO: 442609 - DNA, 200 bp, Homo sapiens; identical to SEQ ID NO: 203388
  chr13:74709334-74709534
  hypo

SEQ ID NO: 442610 - DNA, 35 bp, Homo sapiens; identical to SEQ ID NO: 203389
  chr13:75794021-75794056
  hypo

SEQ ID NO: 442611 - DNA, 186 bp, Homo sapiens; identical to SEQ ID NO: 266041
  chr13:75936267-75936453
  hypo

SEQ ID NO: 442612 - DNA, 1065 bp, Homo sapiens; identical to SEQ ID NO: 203391
  chr13:76055056-76056121
  hypo

SEQ ID NO: 442613 - DNA, 32 bp, Homo sapiens; identical to SEQ ID NO: 266044
  chr13:77356969-77357001
  hypo

SEQ ID NO: 442614 - DNA, 103 bp, Homo sapiens; identical to SEQ ID NO: 266046
  chr13:78633633-78633736
  hypo

SEQ ID NO: 442615 - DNA, 36 bp, Homo sapiens; identical to SEQ ID NO: 215504
  chr13:79992932-79992968
  hypo

SEQ ID NO: 442616 - DNA, 35 bp, Homo sapiens; identical to SEQ ID NO: 215505
  chr13:79993208-79993243
  hypo

SEQ ID NO: 442617 - DNA, 499 bp, Homo sapiens; identical to SEQ ID NO: 203402
  chr13:80916947-80917446
  hypo

SEQ ID NO: 442618 - DNA, 40 bp, Homo sapiens; identical to SEQ ID NO: 266049
  chr13:83206248-83206288
  hypo

SEQ ID NO: 442619 - DNA, 40 bp, Homo sapiens; identical to SEQ ID NO: 266050
  chr13:83206528-83206568
  hypo

SEQ ID NO: 442620 - DNA, 108 bp, Homo sapiens; identical to SEQ ID NO: 266051
  chr13:84107123-84107231
  hypo

SEQ ID NO: 442621 - DNA, 43 bp, Homo sapiens; identical to SEQ ID NO: 266052
  chr13:84267883-84267926
  hypo

SEQ ID NO: 442622 - DNA, 60 bp, Homo sapiens; identical to SEQ ID NO: 266053
  chr13:84481754-84481814
  hypo

SEQ ID NO: 442623 - DNA, 115 bp, Homo sapiens; identical to SEQ ID NO: 266054
  chr13:86083230-86083345
  hypo

SEQ ID NO: 442624 - DNA, 201 bp, Homo sapiens; identical to SEQ ID NO: 266055
  chr13:86086568-86086769
  hypo

SEQ ID NO: 442625 - DNA, 51 bp, Homo sapiens; identical to SEQ ID NO: 266056
  chr13:87732415-87732466
  hypo

SEQ ID NO: 442626 - DNA, 40 bp, Homo sapiens; identical to SEQ ID NO: 266058
  chr13:92746466-92746506
  hypo

SEQ ID NO: 442627 - DNA, 103 bp, Homo sapiens; identical to SEQ ID NO: 266059
  chr13:92858652-92858755
  hypo

SEQ ID NO: 442628 - DNA, 150 bp, Homo sapiens; identical to SEQ ID NO: 266060
  chr13:95061643-95061793
  hypo

SEQ ID NO: 442629 - DNA, 149 bp, Homo sapiens; identical to SEQ ID NO: 215509
  chr13:95238872-95239021
  hypo

SEQ ID NO: 442630 - DNA, 460 bp, Homo sapiens; identical to SEQ ID NO: 289846
  chr13:95354380-95354840
  hypo

SEQ ID NO: 442631 - DNA, 175 bp, Homo sapiens; identical to SEQ ID NO: 50787
  chr13:95355116-95355291
  hypo

SEQ ID NO: 442632 - DNA, 197 bp, Homo sapiens; identical to SEQ ID NO: 266062
  chr13:95411483-95411680
  hypo

SEQ ID NO: 442633 - DNA, 159 bp, Homo sapiens; identical to SEQ ID NO: 266063
  chr13:95683564-95683723
  hypo

SEQ ID NO: 442634 - DNA, 120 bp, Homo sapiens; identical to SEQ ID NO: 266064
  chr13:95693147-95693267
  hypo

SEQ ID NO: 442635 - DNA, 108 bp, Homo sapiens; identical to SEQ ID NO: 215510
  chr13:95751946-95752054
  hypo

SEQ ID NO: 442636 - DNA, 162 bp, Homo sapiens; identical to SEQ ID NO: 266066
  chr13:95767877-95768039
  hypo

SEQ ID NO: 442637 - DNA, 153 bp, Homo sapiens; identical to SEQ ID NO: 266068
  chr13:95788979-95789132
  hypo

SEQ ID NO: 442638 - DNA, 42 bp, Homo sapiens; identical to SEQ ID NO: 266069
  chr13:95839496-95839538
  hypo

SEQ ID NO: 442639 - DNA, 137 bp, Homo sapiens; identical to SEQ ID NO: 215511
  chr13:95852551-95852688
  hypo

SEQ ID NO: 442640 - DNA, 46 bp, Homo sapiens; identical to SEQ ID NO: 266071
  chr13:95869960-95870006
  hypo

SEQ ID NO: 442641 - DNA, 209 bp, Homo sapiens; identical to SEQ ID NO: 215512
  chr13:96061946-96062155
  hypo

SEQ ID NO: 442642 - DNA, 92 bp, Homo sapiens; identical to SEQ ID NO: 215514
  chr13:96126087-96126179
  hypo

SEQ ID NO: 442643 - DNA, 184 bp, Homo sapiens; identical to SEQ ID NO: 215515
  chr13:96353304-96353488
  hypo

SEQ ID NO: 442644 - DNA, 99 bp, Homo sapiens; identical to SEQ ID NO: 317300
  chr13:97599745-97599844
  hypo

SEQ ID NO: 442645 - DNA, 103 bp, Homo sapiens; identical to SEQ ID NO: 266079
  chr13:97599964-97600067
  hypo

SEQ ID NO: 442646 - DNA, 292 bp, Homo sapiens; identical to SEQ ID NO: 266080
  chr13:97980686-97980978
  hypo

SEQ ID NO: 442647 - DNA, 228 bp, Homo sapiens; identical to SEQ ID NO: 266082
  chr13:97999151-97999379
  hypo

SEQ ID NO: 442648 - DNA, 111 bp, Homo sapiens; identical to SEQ ID NO: 266083
  chr13:98528398-98528509
  hypo

SEQ ID NO: 442649 - DNA, 80 bp, Homo sapiens; identical to SEQ ID NO: 215519
  chr13:98679646-98679726
  hypo

SEQ ID NO: 442650 - DNA, 90 bp, Homo sapiens; identical to SEQ ID NO: 266085
  chr13:98688094-98688184
  hypo

SEQ ID NO: 442651 - DNA, 39 bp, Homo sapiens; identical to SEQ ID NO: 266086
  chr13:98695035-98695074
  hypo

SEQ ID NO: 442652 - DNA, 92 bp, Homo sapiens; identical to SEQ ID NO: 266087
  chr13:98761016-98761108
  hypo

SEQ ID NO: 442653 - DNA, 146 bp, Homo sapiens; identical to SEQ ID NO: 266088
  chr13:98768945-98769091
  hypo

SEQ ID NO: 442654 - DNA, 702 bp, Homo sapiens; identical to SEQ ID NO: 289857
  chr13:98795069-98795771
  hypo

SEQ ID NO: 442655 - DNA, 44 bp, Homo sapiens; identical to SEQ ID NO: 266090
  chr13:98851326-98851370
  hypo

SEQ ID NO: 442656 - DNA, 93 bp, Homo sapiens; identical to SEQ ID NO: 266092
  chr13:98873757-98873850
  hypo

SEQ ID NO: 442657 - DNA, 43 bp, Homo sapiens; identical to SEQ ID NO: 215523
  chr13:98917861-98917904
  hypo

SEQ ID NO: 442658 - DNA, 212 bp, Homo sapiens; identical to SEQ ID NO: 266094
  chr13:98965960-98966172
  hypo

SEQ ID NO: 442659 - DNA, 187 bp, Homo sapiens; identical to SEQ ID NO: 266095
  chr13:98981025-98981212
  hypo

SEQ ID NO: 442660 - DNA, 367 bp, Homo sapiens; identical to SEQ ID NO: 266097
  chr13:99047503-99047870
  hypo

SEQ ID NO: 442661 - DNA, 218 bp, Homo sapiens; identical to SEQ ID NO: 266098
  chr13:99059218-99059436
  hypo

SEQ ID NO: 442662 - DNA, 376 bp, Homo sapiens; identical to SEQ ID NO: 266099
  chr13:99068034-99068410
  hypo

SEQ ID NO: 442663 - DNA, 42 bp, Homo sapiens; identical to SEQ ID NO: 266100
  chr13:99072616-99072658
  hypo

SEQ ID NO: 442664 - DNA, 108 bp, Homo sapiens; identical to SEQ ID NO: 266101
  chr13:99095616-99095724
  hypo

SEQ ID NO: 442665 - DNA, 444 bp, Homo sapiens; identical to SEQ ID NO: 266102
  chr13:99101263-99101707
  hypo

SEQ ID NO: 442666 - DNA, 194 bp, Homo sapiens; identical to SEQ ID NO: 289858
  chr13:99128923-99129117
  hypo

SEQ ID NO: 442667 - DNA, 95 bp, Homo sapiens; identical to SEQ ID NO: 266105
  chr13:99141397-99141492
  hypo

SEQ ID NO: 442668 - DNA, 113 bp, Homo sapiens; identical to SEQ ID NO: 266106
  chr13:99157093-99157206
  hypo

SEQ ID NO: 442669 - DNA, 168 bp, Homo sapiens; identical to SEQ ID NO: 266108
  chr13:99192183-99192351
  hypo

SEQ ID NO: 442670 - DNA, 166 bp, Homo sapiens; identical to SEQ ID NO: 215527
  chr13:99204543-99204709
  hypo

SEQ ID NO: 442671 - DNA, 154 bp, Homo sapiens; identical to SEQ ID NO: 266110
  chr13:99219592-99219746
  hypo

SEQ ID NO: 442672 - DNA, 329 bp, Homo sapiens; identical to SEQ ID NO: 203419
  chr13:99229764-99230093
  hypo

SEQ ID NO: 442673 - DNA, 33 bp, Homo sapiens; identical to SEQ ID NO: 266111
  chr13:99235379-99235412
  hypo

SEQ ID NO: 442674 - DNA, 41 bp, Homo sapiens; identical to SEQ ID NO: 215529
  chr13:99293494-99293535
  hypo

SEQ ID NO: 442675 - DNA, 255 bp, Homo sapiens; identical to SEQ ID NO: 266113
  chr13:99328243-99328498
  hypo

SEQ ID NO: 442676 - DNA, 144 bp, Homo sapiens; identical to SEQ ID NO: 266114
  chr13:99328718-99328862
  hypo

SEQ ID NO: 442677 - DNA, 70 bp, Homo sapiens; identical to SEQ ID NO: 266115
  chr13:99376081-99376151
  hypo

SEQ ID NO: 442678 - DNA, 106 bp, Homo sapiens; identical to SEQ ID NO: 266116
  chr13:99376181-99376287
  hypo

SEQ ID NO: 442679 - DNA, 42 bp, Homo sapiens; identical to SEQ ID NO: 266117
  chr13:99427801-99427843
  hypo

SEQ ID NO: 442680 - DNA, 236 bp, Homo sapiens; identical to SEQ ID NO: 317342
  chr13:99428268-99428504
  hypo

SEQ ID NO: 442681 - DNA, 58 bp, Homo sapiens; identical to SEQ ID NO: 266119
  chr13:99444808-99444866
  hypo

SEQ ID NO: 442682 - DNA, 354 bp, Homo sapiens; identical to SEQ ID NO: 203421
  chr13:99739098-99739452
  hypo

SEQ ID NO: 442683 - DNA, 101 bp, Homo sapiens; identical to SEQ ID NO: 215531
  chr13:99851316-99851417
  hypo

SEQ ID NO: 442684 - DNA, 40 bp, Homo sapiens; identical to SEQ ID NO: 215533
  chr13:99863141-99863181
  hypo

SEQ ID NO: 442685 - DNA, 124 bp, Homo sapiens; identical to SEQ ID NO: 266123
  chr13:100005097-100005221
  hypo

SEQ ID NO: 442686 - DNA, 99 bp, Homo sapiens; identical to SEQ ID NO: 266124
  chr13:100020047-100020146
  hypo

SEQ ID NO: 442687 - DNA, 32 bp, Homo sapiens; identical to SEQ ID NO: 266125
  chr13:100020351-100020383
  hypo

SEQ ID NO: 442688 - DNA, 108 bp, Homo sapiens; identical to SEQ ID NO: 266126
  chr13:100033196-100033304
  hypo

SEQ ID NO: 442689 - DNA, 160 bp, Homo sapiens; identical to SEQ ID NO: 215534
  chr13:100035864-100036024
  hypo

SEQ ID NO: 442690 - DNA, 129 bp, Homo sapiens; identical to SEQ ID NO: 266128
  chr13:100036956-100037085
  hypo

SEQ ID NO: 442691 - DNA, 319 bp, Homo sapiens; identical to SEQ ID NO: 266129
  chr13:100067888-100068207
  hypo

SEQ ID NO: 442692 - DNA, 192 bp, Homo sapiens; identical to SEQ ID NO: 215536
  chr13:100068977-100069169
  hypo

SEQ ID NO: 442693 - DNA, 97 bp, Homo sapiens; identical to SEQ ID NO: 215537
  chr13:100307598-100307695
  hypo

SEQ ID NO: 442694 - DNA, 185 bp, Homo sapiens; identical to SEQ ID NO: 266133
  chr13:100482066-100482251
  hypo

SEQ ID NO: 442695 - DNA, 45 bp, Homo sapiens; identical to SEQ ID NO: 399339
  chr13:100622177-100622222
  hypo

SEQ ID NO: 442696 - DNA, 422 bp, Homo sapiens; identical to SEQ ID NO: 203432
  chr13:100633420-100633842
  hypo

SEQ ID NO: 442697 - DNA, 95 bp, Homo sapiens; identical to SEQ ID NO: 266136
  chr13:100678151-100678246
  hypo

SEQ ID NO: 442698 - DNA, 91 bp, Homo sapiens; identical to SEQ ID NO: 266137
  chr13:101091896-101091987
  hypo

SEQ ID NO: 442699 - DNA, 101 bp, Homo sapiens; identical to SEQ ID NO: 266138
  chr13:101129318-101129419
  hypo

SEQ ID NO: 442700 - DNA, 105 bp, Homo sapiens; identical to SEQ ID NO: 266139
  chr13:101160649-101160754
  hypo

SEQ ID NO: 442701 - DNA, 112 bp, Homo sapiens; identical to SEQ ID NO: 215544
  chr13:101184480-101184592
  hypo

SEQ ID NO: 442702 - DNA, 36 bp, Homo sapiens; identical to SEQ ID NO: 266142
  chr13:101297339-101297375
  hypo

SEQ ID NO: 442703 - DNA, 167 bp, Homo sapiens; identical to SEQ ID NO: 215545
  chr13:101297851-101298018
  hypo

SEQ ID NO: 442704 - DNA, 58 bp, Homo sapiens; identical to SEQ ID NO: 27185
  chr13:101302821-101302879
  hypo

SEQ ID NO: 442705 - DNA, 209 bp, Homo sapiens; identical to SEQ ID NO: 215547
  chr13:101317803-101318012
  hypo

SEQ ID NO: 442706 - DNA, 32 bp, Homo sapiens; identical to SEQ ID NO: 215549
  chr13:103262164-103262196
  hypo

SEQ ID NO: 442707 - DNA, 146 bp, Homo sapiens; identical to SEQ ID NO: 203438
  chr13:103450867-103451013
  hypo

SEQ ID NO: 442708 - DNA, 1602 bp, Homo sapiens; identical to SEQ ID NO: 289892
  chr13:103451043-103452645
  hypo

SEQ ID NO: 442709 - DNA, 38 bp, Homo sapiens; identical to SEQ ID NO: 266147
  chr13:103456537-103456575
  hypo

SEQ ID NO: 442710 - DNA, 70 bp, Homo sapiens; identical to SEQ ID NO: 266148
  chr13:103523455-103523525
  hypo

SEQ ID NO: 442711 - DNA, 44 bp, Homo sapiens; identical to SEQ ID NO: 215552
  chr13:103568843-103568887
  hypo

SEQ ID NO: 442712 - DNA, 38 bp, Homo sapiens; identical to SEQ ID NO: 317384
  chr13:103569193-103569231
  hypo

SEQ ID NO: 442713 - DNA, 92 bp, Homo sapiens; identical to SEQ ID NO: 266151
  chr13:105300810-105300902
  hypo

SEQ ID NO: 442714 - DNA, 33 bp, Homo sapiens; identical to SEQ ID NO: 266153
  chr13:106718244-106718277
  hypo

SEQ ID NO: 442715 - DNA, 63 bp, Homo sapiens; identical to SEQ ID NO: 266154
  chr13:106739741-106739804
  hypo

SEQ ID NO: 442716 - DNA, 168 bp, Homo sapiens; identical to SEQ ID NO: 266155
  chr13:106788564-106788732
  hypo

SEQ ID NO: 442717 - DNA, 268 bp, Homo sapiens; identical to SEQ ID NO: 266157
  chr13:107078199-107078467
  hypo

SEQ ID NO: 442718 - DNA, 131 bp, Homo sapiens; identical to SEQ ID NO: 266158
  chr13:107125447-107125578
  hypo

SEQ ID NO: 442719 - DNA, 42 bp, Homo sapiens; identical to SEQ ID NO: 266159
  chr13:107128750-107128792
  hypo

SEQ ID NO: 442720 - DNA, 52 bp, Homo sapiens; identical to SEQ ID NO: 266160
  chr13:107229932-107229984
  hypo

SEQ ID NO: 442721 - DNA, 168 bp, Homo sapiens; identical to SEQ ID NO: 266161
  chr13:107248708-107248876
  hypo

SEQ ID NO: 442722 - DNA, 40 bp, Homo sapiens; identical to SEQ ID NO: 266162
  chr13:108816275-108816315
  hypo

SEQ ID NO: 442723 - DNA, 37 bp, Homo sapiens; identical to SEQ ID NO: 264655
  chr13:108841825-108841862
  hypo

SEQ ID NO: 442724 - DNA, 147 bp, Homo sapiens; identical to SEQ ID NO: 317405
  chr13:109779669-109779816
  hypo

SEQ ID NO: 442725 - DNA, 108 bp, Homo sapiens; identical to SEQ ID NO: 215563
  chr13:109779846-109779954
  hypo

SEQ ID NO: 442726 - DNA, 44 bp, Homo sapiens; identical to SEQ ID NO: 215564
  chr13:109934405-109934449
  hypo

SEQ ID NO: 442727 - DNA, 116 bp, Homo sapiens; identical to SEQ ID NO: 215565
  chr13:109985085-109985201
  hypo

SEQ ID NO: 442728 - DNA, 177 bp, Homo sapiens; identical to SEQ ID NO: 266168
  chr13:110407325-110407502
  hypo

SEQ ID NO: 442729 - DNA, 204 bp, Homo sapiens; identical to SEQ ID NO: 215566
  chr13:110408018-110408222
  hypo

SEQ ID NO: 442730 - DNA, 44 bp, Homo sapiens; identical to SEQ ID NO: 215567
  chr13:110424383-110424427
  hypo

SEQ ID NO: 442731 - DNA, 350 bp, Homo sapiens; identical to SEQ ID NO: 317413
  chr13:110424587-110424937
  hypo

SEQ ID NO: 442732 - DNA, 863 bp, Homo sapiens; identical to SEQ ID NO: 289911
  chr13:110438956-110439819
  hypo

SEQ ID NO: 442733 - DNA, 283 bp, Homo sapiens; identical to SEQ ID NO: 266176
  chr13:110804670-110804953
  hypo

SEQ ID NO: 442734 - DNA, 221 bp, Homo sapiens; identical to SEQ ID NO: 266177
  chr13:110831442-110831663
  hypo

SEQ ID NO: 442735 - DNA, 42 bp, Homo sapiens; identical to SEQ ID NO: 266181
  chr13:111087191-111087233
  hypo

SEQ ID NO: 442736 - DNA, 34 bp, Homo sapiens; identical to SEQ ID NO: 266182
  chr13:111109170-111109204
  hypo

SEQ ID NO: 442737 - DNA, 103 bp, Homo sapiens; identical to SEQ ID NO: 215569
  chr13:111122538-111122641
  hypo

SEQ ID NO: 442738 - DNA, 589 bp, Homo sapiens; identical to SEQ ID NO: 266184
  chr13:111127026-111127615
  hypo

SEQ ID NO: 442739 - DNA, 170 bp, Homo sapiens; identical to SEQ ID NO: 215570
  chr13:111135308-111135478
  hypo

SEQ ID NO: 442740 - DNA, 46 bp, Homo sapiens; identical to SEQ ID NO: 215571
  chr13:111144433-111144479
  hypo

SEQ ID NO: 442741 - DNA, 195 bp, Homo sapiens; identical to SEQ ID NO: 266187
  chr13:111145418-111145613
  hypo

SEQ ID NO: 442742 - DNA, 191 bp, Homo sapiens; identical to SEQ ID NO: 266188
  chr13:111168953-111169144
  hypo

SEQ ID NO: 442743 - DNA, 828 bp, Homo sapiens; identical to SEQ ID NO: 203455
  chr13:111213552-111214380
  hypo

SEQ ID NO: 442744 - DNA, 343 bp, Homo sapiens; identical to SEQ ID NO: 289917
  chr13:111267965-111268308
  hypo

SEQ ID NO: 442745 - DNA, 130 bp, Homo sapiens; identical to SEQ ID NO: 317429
  chr13:111277664-111277794
  hypo

SEQ ID NO: 442746 - DNA, 31 bp, Homo sapiens
  chr13:111277824-111277855
  hypo
ggtgggggagcttgggcctgttggaaatggc

SEQ ID NO: 442747 - DNA, 186 bp, Homo sapiens; identical to SEQ ID NO: 266191
  chr13:111279860-111280046
  hypo

SEQ ID NO: 442748 - DNA, 189 bp, Homo sapiens; identical to SEQ ID NO: 266192
  chr13:111280869-111281058
  hypo

SEQ ID NO: 442749 - DNA, 174 bp, Homo sapiens; identical to SEQ ID NO: 215576
  chr13:111288424-111288598
  hypo

SEQ ID NO: 442750 - DNA, 282 bp, Homo sapiens; identical to SEQ ID NO: 215578
  chr13:111290653-111290935
  hypo

SEQ ID NO: 442751 - DNA, 226 bp, Homo sapiens; identical to SEQ ID NO: 215579
  chr13:111294870-111295096
  hypo

SEQ ID NO: 442752 - DNA, 194 bp, Homo sapiens; identical to SEQ ID NO: 266197
  chr13:111295806-111296000
  hypo

SEQ ID NO: 442753 - DNA, 199 bp, Homo sapiens; identical to SEQ ID NO: 215580
  chr13:111301303-111301502
  hypo

SEQ ID NO: 442754 - DNA, 289 bp, Homo sapiens; identical to SEQ ID NO: 215581
  chr13:111305194-111305483
  hypo

SEQ ID NO: 442755 - DNA, 587 bp, Homo sapiens; identical to SEQ ID NO: 215582
  chr13:111305920-111306507
  hypo

SEQ ID NO: 442756 - DNA, 195 bp, Homo sapiens; identical to SEQ ID NO: 266202
  chr13:111334624-111334819
  hypo

SEQ ID NO: 442757 - DNA, 112 bp, Homo sapiens; identical to SEQ ID NO: 317444
  chr13:111337780-111337892
  hypo

SEQ ID NO: 442758 - DNA, 37 bp, Homo sapiens; identical to SEQ ID NO: 266204
  chr13:111363566-111363603
  hypo

SEQ ID NO: 442759 - DNA, 117 bp, Homo sapiens; identical to SEQ ID NO: 215585
  chr13:111363972-111364089
  hypo

SEQ ID NO: 442760 - DNA, 79 bp, Homo sapiens; identical to SEQ ID NO: 266206
  chr13:111589026-111589105
  hypo

SEQ ID NO: 442761 - DNA, 355 bp, Homo sapiens; identical to SEQ ID NO: 215586
  chr13:111682505-111682860
  hypo

SEQ ID NO: 442762 - DNA, 47 bp, Homo sapiens; identical to SEQ ID NO: 266208
  chr13:111738321-111738368
  hypo

SEQ ID NO: 442763 - DNA, 102 bp, Homo sapiens; identical to SEQ ID NO: 266209
  chr13:111747877-111747979
  hypo

SEQ ID NO: 442764 - DNA, 167 bp, Homo sapiens; identical to SEQ ID NO: 266210
  chr13:111773929-111774096
  hypo

SEQ ID NO: 442765 - DNA, 357 bp, Homo sapiens; identical to SEQ ID NO: 393227
  chr13:111881497-111881854
  hypo

SEQ ID NO: 442766 - DNA, 137 bp, Homo sapiens; identical to SEQ ID NO: 266212
  chr13:111884809-111884946
  hypo

SEQ ID NO: 442767 - DNA, 101 bp, Homo sapiens; identical to SEQ ID NO: 317456
  chr13:111932740-111932841
  hypo

SEQ ID NO: 442768 - DNA, 109 bp, Homo sapiens; identical to SEQ ID NO: 317457
  chr13:111932871-111932980
  hypo

SEQ ID NO: 442769 - DNA, 253 bp, Homo sapiens; identical to SEQ ID NO: 215589
  chr13:111935987-111936240
  hypo

SEQ ID NO: 442770 - DNA, 150 bp, Homo sapiens; identical to SEQ ID NO: 266218
  chr13:111937757-111937907
  hypo

SEQ ID NO: 442771 - DNA, 105 bp, Homo sapiens; identical to SEQ ID NO: 215590
  chr13:111940174-111940279
  hypo

SEQ ID NO: 442772 - DNA, 42 bp, Homo sapiens; identical to SEQ ID NO: 266220
  chr13:111943424-111943466
  hypo

SEQ ID NO: 442773 - DNA, 101 bp, Homo sapiens; identical to SEQ ID NO: 215591
  chr13:111967886-111967987
  hypo

SEQ ID NO: 442774 - DNA, 32 bp, Homo sapiens; identical to SEQ ID NO: 266223
  chr13:111980235-111980267
  hypo

SEQ ID NO: 442775 - DNA, 186 bp, Homo sapiens; identical to SEQ ID NO: 215592
  chr13:111980478-111980664
  hypo

SEQ ID NO: 442776 - DNA, 56 bp, Homo sapiens; identical to SEQ ID NO: 215593
  chr13:112051223-112051279
  hypo

SEQ ID NO: 442777 - DNA, 111 bp, Homo sapiens; identical to SEQ ID NO: 317468
  chr13:112062637-112062748
  hypo

SEQ ID NO: 442778 - DNA, 68 bp, Homo sapiens; identical to SEQ ID NO: 317469
  chr13:112062778-112062846
  hypo

SEQ ID NO: 442779 - DNA, 81 bp, Homo sapiens; identical to SEQ ID NO: 266229
  chr13:112170646-112170727
  hypo

SEQ ID NO: 442780 - DNA, 651 bp, Homo sapiens; identical to SEQ ID NO: 215594
  chr13:112199983-112200634
  hypo

SEQ ID NO: 442781 - DNA, 85 bp, Homo sapiens; identical to SEQ ID NO: 215595
  chr13:112200906-112200991
  hypo

SEQ ID NO: 442782 - DNA, 198 bp, Homo sapiens; identical to SEQ ID NO: 266232
  chr13:112274814-112275012
  hypo

SEQ ID NO: 442783 - DNA, 282 bp, Homo sapiens; identical to SEQ ID NO: 266233
  chr13:112275480-112275762
  hypo

SEQ ID NO: 442784 - DNA, 122 bp, Homo sapiens; identical to SEQ ID NO: 266234
  chr13:112297655-112297777
  hypo

SEQ ID NO: 442785 - DNA, 106 bp, Homo sapiens; identical to SEQ ID NO: 317476
  chr13:112320937-112321043
  hypo

SEQ ID NO: 442786 - DNA, 247 bp, Homo sapiens; identical to SEQ ID NO: 317477
  chr13:112321075-112321322
  hypo

SEQ ID NO: 442787 - DNA, 304 bp, Homo sapiens; identical to SEQ ID NO: 266236
  chr13:112321606-112321910
  hypo

SEQ ID NO: 442788 - DNA, 179 bp, Homo sapiens; identical to SEQ ID NO: 266238
  chr13:112334238-112334417
  hypo

SEQ ID NO: 442789 - DNA, 87 bp, Homo sapiens; identical to SEQ ID NO: 266239
  chr13:112336761-112336848
  hypo

SEQ ID NO: 442790 - DNA, 231 bp, Homo sapiens; identical to SEQ ID NO: 317481
  chr13:112559742-112559973
  hypo

SEQ ID NO: 442791 - DNA, 50 bp, Homo sapiens; identical to SEQ ID NO: 215597
  chr13:112573544-112573594
  hypo

SEQ ID NO: 442792 - DNA, 433 bp, Homo sapiens; identical to SEQ ID NO: 266242
  chr13:112610839-112611272
  hypo

SEQ ID NO: 442793 - DNA, 197 bp, Homo sapiens; identical to SEQ ID NO: 266243
  chr13:112611302-112611499
  hypo

SEQ ID NO: 442794 - DNA, 45 bp, Homo sapiens; identical to SEQ ID NO: 215598
  chr13:112618854-112618899
  hypo

SEQ ID NO: 442795 - DNA, 149 bp, Homo sapiens; identical to SEQ ID NO: 215599
  chr13:112618980-112619129
  hypo

SEQ ID NO: 442796 - DNA, 121 bp, Homo sapiens; identical to SEQ ID NO: 266245
  chr13:112620245-112620366
  hypo

SEQ ID NO: 442797 - DNA, 82 bp, Homo sapiens; identical to SEQ ID NO: 266246
  chr13:112625061-112625143
  hypo

SEQ ID NO: 442798 - DNA, 174 bp, Homo sapiens; identical to SEQ ID NO: 266247
  chr13:112668109-112668283
  hypo

SEQ ID NO: 442799 - DNA, 91 bp, Homo sapiens; identical to SEQ ID NO: 317490
  chr13:112679894-112679985
  hypo

SEQ ID NO: 442800 - DNA, 90 bp, Homo sapiens; identical to SEQ ID NO: 266249
  chr13:112682967-112683057
  hypo

SEQ ID NO: 442801 - DNA, 32 bp, Homo sapiens
  chr13:112690651-112690683
  hypo
tgcattttcctcagcagcagggccaggcccac

SEQ ID NO: 442802 - DNA, 247 bp, Homo sapiens; identical to SEQ ID NO: 289927
  chr13:112722597-112722844
  hypo

SEQ ID NO: 442803 - DNA, 100 bp, Homo sapiens; identical to SEQ ID NO: 289928
  chr13:112728350-112728450
  hypo

SEQ ID NO: 442804 - DNA, 53 bp, Homo sapiens; identical to SEQ ID NO: 266253
  chr13:112804754-112804807
  hypo

SEQ ID NO: 442805 - DNA, 114 bp, Homo sapiens; identical to SEQ ID NO: 266254
  chr13:112804837-112804951
  hypo

SEQ ID NO: 442806 - DNA, 62 bp, Homo sapiens; identical to SEQ ID NO: 317499
  chr13:112805011-112805073
  hypo

SEQ ID NO: 442807 - DNA, 45 bp, Homo sapiens; identical to SEQ ID NO: 317500
  chr13:112805103-112805148
  hypo

SEQ ID NO: 442808 - DNA, 63 bp, Homo sapiens; identical to SEQ ID NO: 266256
  chr13:112841713-112841776
  hypo

SEQ ID NO: 442809 - DNA, 216 bp, Homo sapiens; identical to SEQ ID NO: 266257
  chr13:112882621-112882837
  hypo

SEQ ID NO: 442810 - DNA, 478 bp, Homo sapiens; identical to SEQ ID NO: 266258
  chr13:112885758-112886236
  hypo

SEQ ID NO: 442811 - DNA, 150 bp, Homo sapiens; identical to SEQ ID NO: 266259
  chr13:112887634-112887784
  hypo

SEQ ID NO: 442812 - DNA, 52 bp, Homo sapiens; identical to SEQ ID NO: 266260
  chr13:112887814-112887866
  hypo

SEQ ID NO: 442813 - DNA, 147 bp, Homo sapiens; identical to SEQ ID NO: 266261
  chr13:112901218-112901365
  hypo

SEQ ID NO: 442814 - DNA, 152 bp, Homo sapiens; identical to SEQ ID NO: 266262
  chr13:112904339-112904491
  hypo

SEQ ID NO: 442815 - DNA, 249 bp, Homo sapiens; identical to SEQ ID NO: 266263
  chr13:112906488-112906737
  hypo

SEQ ID NO: 442816 - DNA, 52 bp, Homo sapiens; identical to SEQ ID NO: 215602
  chr13:112998006-112998058
  hypo

SEQ ID NO: 442817 - DNA, 33 bp, Homo sapiens; identical to SEQ ID NO: 215603
  chr13:112998135-112998168
  hypo

SEQ ID NO: 442818 - DNA, 45 bp, Homo sapiens; identical to SEQ ID NO: 266266
  chr13:113008186-113008231
  hypo

SEQ ID NO: 442819 - DNA, 52 bp, Homo sapiens; identical to SEQ ID NO: 266267
  chr13:113086508-113086560
  hypo

SEQ ID NO: 442820 - DNA, 146 bp, Homo sapiens; identical to SEQ ID NO: 266270
  chr13:113108782-113108928
  hypo

SEQ ID NO: 442821 - DNA, 42 bp, Homo sapiens; identical to SEQ ID NO: 266271
  chr13:113111904-113111946
  hypo

SEQ ID NO: 442822 - DNA, 106 bp, Homo sapiens; identical to SEQ ID NO: 266272
  chr13:113120931-113121037
  hypo

SEQ ID NO: 442823 - DNA, 55 bp, Homo sapiens; identical to SEQ ID NO: 266273
  chr13:113121067-113121122
  hypo

SEQ ID NO: 442824 - DNA, 122 bp, Homo sapiens; identical to SEQ ID NO: 266274
  chr13:113163202-113163324
  hypo

SEQ ID NO: 442825 - DNA, 40 bp, Homo sapiens; identical to SEQ ID NO: 266275
  chr13:113174159-113174199
  hypo

SEQ ID NO: 442826 - DNA, 35 bp, Homo sapiens; identical to SEQ ID NO: 224653
  chr13:113261127-113261162
  hypo

SEQ ID NO: 442827 - DNA, 52 bp, Homo sapiens; identical to SEQ ID NO: 409660
  chr13:113274868-113274920
  hypo

SEQ ID NO: 442828 - DNA, 67 bp, Homo sapiens; identical to SEQ ID NO: 266281
  chr13:113301705-113301772
  hypo

SEQ ID NO: 442829 - DNA, 241 bp, Homo sapiens; identical to SEQ ID NO: 266282
  chr13:113312401-113312642
  hypo

SEQ ID NO: 442830 - DNA, 98 bp, Homo sapiens; identical to SEQ ID NO: 266283
  chr13:113342679-113342777
  hypo

SEQ ID NO: 442831 - DNA, 176 bp, Homo sapiens; identical to SEQ ID NO: 215608
  chr13:113346804-113346980
  hypo

SEQ ID NO: 442832 - DNA, 506 bp, Homo sapiens; identical to SEQ ID NO: 266285
  chr13:113347507-113348013
  hypo

SEQ ID NO: 442833 - DNA, 450 bp, Homo sapiens; identical to SEQ ID NO: 393240
  chr13:113351290-113351740
  hypo

SEQ ID NO: 442834 - DNA, 523 bp, Homo sapiens; identical to SEQ ID NO: 266287
  chr13:113356666-113357189
  hypo

SEQ ID NO: 442835 - DNA, 337 bp, Homo sapiens; identical to SEQ ID NO: 266288
  chr13:113358329-113358666
  hypo

SEQ ID NO: 442836 - DNA, 387 bp, Homo sapiens; identical to SEQ ID NO: 266289
  chr13:113364153-113364540
  hypo

SEQ ID NO: 442837 - DNA, 266 bp, Homo sapiens; identical to SEQ ID NO: 266290
  chr13:113366788-113367054
  hypo

SEQ ID NO: 442838 - DNA, 241 bp, Homo sapiens; identical to SEQ ID NO: 266291
  chr13:113368823-113369064
  hypo

SEQ ID NO: 442839 - DNA, 370 bp, Homo sapiens; identical to SEQ ID NO: 266293
  chr13:113371106-113371476
  hypo

SEQ ID NO: 442840 - DNA, 125 bp, Homo sapiens; identical to SEQ ID NO: 266294
  chr13:113375330-113375455
  hypo

SEQ ID NO: 442841 - DNA, 90 bp, Homo sapiens; identical to SEQ ID NO: 266296
  chr13:113382140-113382230
  hypo

SEQ ID NO: 442842 - DNA, 249 bp, Homo sapiens; identical to SEQ ID NO: 266297
  chr13:113382654-113382903
  hypo

SEQ ID NO: 442843 - DNA, 205 bp, Homo sapiens; identical to SEQ ID NO: 266299
  chr13:113391636-113391841
  hypo

SEQ ID NO: 442844 - DNA, 110 bp, Homo sapiens; identical to SEQ ID NO: 215616
  chr13:113396992-113397102
  hypo

SEQ ID NO: 442845 - DNA, 391 bp, Homo sapiens; identical to SEQ ID NO: 215617
  chr13:113398309-113398700
  hypo

SEQ ID NO: 442846 - DNA, 49 bp, Homo sapiens
  chr13:113400834-113400883
  hypo
gtgtaggtagtatctcattgtggggttttgttgttgttttttagagaca

SEQ ID NO: 442847 - DNA, 113 bp, Homo sapiens; identical to SEQ ID NO: 317551
  chr13:113401317-113401430
  hypo

SEQ ID NO: 442848 - DNA, 121 bp, Homo sapiens; identical to SEQ ID NO: 215621
  chr13:113401469-113401590
  hypo

SEQ ID NO: 442849 - DNA, 67 bp, Homo sapiens; identical to SEQ ID NO: 266304
  chr13:113411148-113411215
  hypo

SEQ ID NO: 442850 - DNA, 111 bp, Homo sapiens; identical to SEQ ID NO: 215622
  chr13:113417108-113417219
  hypo

SEQ ID NO: 442851 - DNA, 982 bp, Homo sapiens; identical to SEQ ID NO: 266307
  chr13:113419198-113420180
  hypo

SEQ ID NO: 442852 - DNA, 539 bp, Homo sapiens; identical to SEQ ID NO: 215626
  chr13:113425234-113425773
  hypo

SEQ ID NO: 442853 - DNA, 76 bp, Homo sapiens; identical to SEQ ID NO: 174452
  chr13:113426593-113426669
  hypo

SEQ ID NO: 442854 - DNA, 92 bp, Homo sapiens; identical to SEQ ID NO: 266311
  chr13:113426947-113427039
  hypo

SEQ ID NO: 442855 - DNA, 132 bp, Homo sapiens; identical to SEQ ID NO: 266312
  chr13:113428311-113428443
  hypo

SEQ ID NO: 442856 - DNA, 105 bp, Homo sapiens; identical to SEQ ID NO: 266313
  chr13:113435265-113435370
  hypo

SEQ ID NO: 442857 - DNA, 243 bp, Homo sapiens; identical to SEQ ID NO: 266314
  chr13:113445467-113445710
  hypo

SEQ ID NO: 442858 - DNA, 190 bp, Homo sapiens; identical to SEQ ID NO: 215628
  chr13:113446210-113446400
  hypo

SEQ ID NO: 442859 - DNA, 439 bp, Homo sapiens; identical to SEQ ID NO: 215630
  chr13:113461413-113461852
  hypo

SEQ ID NO: 442860 - DNA, 244 bp, Homo sapiens; identical to SEQ ID NO: 266318
  chr13:113466631-113466875
  hypo

SEQ ID NO: 442861 - DNA, 111 bp, Homo sapiens; identical to SEQ ID NO: 215631
  chr13:113472458-113472569
  hypo

SEQ ID NO: 442862 - DNA, 248 bp, Homo sapiens; identical to SEQ ID NO: 266320
  chr13:113474180-113474428
  hypo

SEQ ID NO: 442863 - DNA, 37 bp, Homo sapiens; identical to SEQ ID NO: 215634
  chr13:113482707-113482744
  hypo

SEQ ID NO: 442864 - DNA, 304 bp, Homo sapiens; identical to SEQ ID NO: 215635
  chr13:113488276-113488580
  hypo

SEQ ID NO: 442865 - DNA, 153 bp, Homo sapiens; identical to SEQ ID NO: 266324
  chr13:113489720-113489873
  hypo

SEQ ID NO: 442866 - DNA, 35 bp, Homo sapiens; identical to SEQ ID NO: 266325
  chr13:113493552-113493587
  hypo

SEQ ID NO: 442867 - DNA, 95 bp, Homo sapiens; identical to SEQ ID NO: 27306
  chr13:113498378-113498473
  hypo

SEQ ID NO: 442868 - DNA, 54 bp, Homo sapiens; identical to SEQ ID NO: 266328
  chr13:113499309-113499363
  hypo

SEQ ID NO: 442869 - DNA, 45 bp, Homo sapiens; identical to SEQ ID NO: 266329
  chr13:113500588-113500633
  hypo

SEQ ID NO: 442870 - DNA, 605 bp, Homo sapiens; identical to SEQ ID NO: 266332
  chr13:113513506-113514111
  hypo

SEQ ID NO: 442871 - DNA, 75 bp, Homo sapiens; identical to SEQ ID NO: 215639
  chr13:113516326-113516401
  hypo

SEQ ID NO: 442872 - DNA, 439 bp, Homo sapiens; identical to SEQ ID NO: 266334
  chr13:113534533-113534972
  hypo

SEQ ID NO: 442873 - DNA, 141 bp, Homo sapiens; identical to SEQ ID NO: 215640
  chr13:113536448-113536589
  hypo

SEQ ID NO: 442874 - DNA, 180 bp, Homo sapiens; identical to SEQ ID NO: 215641
  chr13:113537191-113537371
  hypo

SEQ ID NO: 442875 - DNA, 99 bp, Homo sapiens; identical to SEQ ID NO: 266337
  chr13:113537723-113537822
  hypo

SEQ ID NO: 442876 - DNA, 208 bp, Homo sapiens; identical to SEQ ID NO: 215642
  chr13:113539438-113539646
  hypo

SEQ ID NO: 442877 - DNA, 84 bp, Homo sapiens; identical to SEQ ID NO: 266339
  chr13:113543111-113543195
  hypo

SEQ ID NO: 442878 - DNA, 689 bp, Homo sapiens; identical to SEQ ID NO: 266340
  chr13:113544111-113544800
  hypo

SEQ ID NO: 442879 - DNA, 200 bp, Homo sapiens; identical to SEQ ID NO: 266341
  chr13:113545811-113546011
  hypo

SEQ ID NO: 442880 - DNA, 366 bp, Homo sapiens; identical to SEQ ID NO: 266342
  chr13:113553328-113553694
  hypo

SEQ ID NO: 442881 - DNA, 45 bp, Homo sapiens; identical to SEQ ID NO: 215644
  chr13:113555445-113555490
  hypo

SEQ ID NO: 442882 - DNA, 45 bp, Homo sapiens; identical to SEQ ID NO: 215645
  chr13:113555730-113555775
  hypo

SEQ ID NO: 442883 - DNA, 242 bp, Homo sapiens; identical to SEQ ID NO: 266346
  chr13:113565660-113565902
  hypo

SEQ ID NO: 442884 - DNA, 182 bp, Homo sapiens; identical to SEQ ID NO: 266347
  chr13:113570827-113571009
  hypo

SEQ ID NO: 442885 - DNA, 132 bp, Homo sapiens; identical to SEQ ID NO: 266348
  chr13:113571418-113571550
  hypo

SEQ ID NO: 442886 - DNA, 710 bp, Homo sapiens; identical to SEQ ID NO: 224654
  chr13:113597560-113598270
  hypo

SEQ ID NO: 442887 - DNA, 31 bp, Homo sapiens; identical to SEQ ID NO: 266350
  chr13:113599072-113599103
  hypo

SEQ ID NO: 442888 - DNA, 184 bp, Homo sapiens; identical to SEQ ID NO: 266351
  chr13:113622064-113622248
  hypo

SEQ ID NO: 442889 - DNA, 118 bp, Homo sapiens; identical to SEQ ID NO: 266353
  chr13:113631096-113631214
  hypo

SEQ ID NO: 442890 - DNA, 92 bp, Homo sapiens; identical to SEQ ID NO: 215649
  chr13:113644356-113644448
  hypo

SEQ ID NO: 442891 - DNA, 61 bp, Homo sapiens; identical to SEQ ID NO: 266356
  chr13:113649447-113649508
  hypo

SEQ ID NO: 442892 - DNA, 287 bp, Homo sapiens; identical to SEQ ID NO: 266357
  chr13:113649731-113650018
  hypo

SEQ ID NO: 442893 - DNA, 100 bp, Homo sapiens; identical to SEQ ID NO: 266358
  chr13:113650921-113651021
  hypo

SEQ ID NO: 442894 - DNA, 38 bp, Homo sapiens; identical to SEQ ID NO: 266359
  chr13:113654369-113654407
  hypo

SEQ ID NO: 442895 - DNA, 119 bp, Homo sapiens; identical to SEQ ID NO: 266360
  chr13:113661971-113662090
  hypo

SEQ ID NO: 442896 - DNA, 196 bp, Homo sapiens; identical to SEQ ID NO: 215650
  chr13:113663192-113663388
  hypo

SEQ ID NO: 442897 - DNA, 36 bp, Homo sapiens; identical to SEQ ID NO: 266362
  chr13:113666831-113666867
  hypo

SEQ ID NO: 442898 - DNA, 187 bp, Homo sapiens; identical to SEQ ID NO: 266364
  chr13:113672313-113672500
  hypo

SEQ ID NO: 442899 - DNA, 36 bp, Homo sapiens; identical to SEQ ID NO: 266365
  chr13:113684751-113684787
  hypo

SEQ ID NO: 442900 - DNA, 67 bp, Homo sapiens; identical to SEQ ID NO: 266366
  chr13:113696468-113696535
  hypo

SEQ ID NO: 442901 - DNA, 140 bp, Homo sapiens; identical to SEQ ID NO: 266367
  chr13:113696849-113696989
  hypo

SEQ ID NO: 442902 - DNA, 309 bp, Homo sapiens; identical to SEQ ID NO: 266368
  chr13:113700864-113701173
  hypo

SEQ ID NO: 442903 - DNA, 182 bp, Homo sapiens; identical to SEQ ID NO: 266369
  chr13:113703693-113703875
  hypo

SEQ ID NO: 442904 - DNA, 62 bp, Homo sapiens; identical to SEQ ID NO: 215651
  chr13:113718439-113718501
  hypo

SEQ ID NO: 442905 - DNA, 115 bp, Homo sapiens; identical to SEQ ID NO: 317621
  chr13:113718649-113718764
  hypo

SEQ ID NO: 442906 - DNA, 62 bp, Homo sapiens; identical to SEQ ID NO: 215652
  chr13:113719023-113719085
  hypo

SEQ ID NO: 442907 - DNA, 786 bp, Homo sapiens; identical to SEQ ID NO: 317623
  chr13:113719189-113719975
  hypo

SEQ ID NO: 442908 - DNA, 143 bp, Homo sapiens; identical to SEQ ID NO: 266372
  chr13:113724281-113724424
  hypo

SEQ ID NO: 442909 - DNA, 110 bp, Homo sapiens; identical to SEQ ID NO: 215654
  chr13:113731262-113731372
  hypo

SEQ ID NO: 442910 - DNA, 96 bp, Homo sapiens; identical to SEQ ID NO: 266374
  chr13:113739496-113739592
  hypo

SEQ ID NO: 442911 - DNA, 220 bp, Homo sapiens; identical to SEQ ID NO: 317627
  chr13:113776046-113776266
  hypo

SEQ ID NO: 442912 - DNA, 103 bp, Homo sapiens; identical to SEQ ID NO: 266379
  chr13:113866200-113866303
  hypo

SEQ ID NO: 442913 - DNA, 243 bp, Homo sapiens; identical to SEQ ID NO: 266380
  chr13:113884095-113884338
  hypo

SEQ ID NO: 442914 - DNA, 115 bp, Homo sapiens; identical to SEQ ID NO: 215662
  chr13:113887885-113888000
  hypo

SEQ ID NO: 442915 - DNA, 87 bp, Homo sapiens; identical to SEQ ID NO: 203465
  chr13:113951225-113951312
  hypo

SEQ ID NO: 442916 - DNA, 31 bp, Homo sapiens; identical to SEQ ID NO: 215664
  chr13:113953158-113953189
  hypo

SEQ ID NO: 442917 - DNA, 290 bp, Homo sapiens; identical to SEQ ID NO: 266384
  chr13:113980176-113980466
  hypo

SEQ ID NO: 442918 - DNA, 258 bp, Homo sapiens; identical to SEQ ID NO: 266385
  chr13:113983361-113983619
  hypo

SEQ ID NO: 442919 - DNA, 37 bp, Homo sapiens; identical to SEQ ID NO: 266389
  chr13:113990086-113990123
  hypo

SEQ ID NO: 442920 - DNA, 83 bp, Homo sapiens; identical to SEQ ID NO: 266390
  chr13:114002279-114002362
  hypo

SEQ ID NO: 442921 - DNA, 97 bp, Homo sapiens; identical to SEQ ID NO: 266391
  chr13:114003076-114003173
  hypo

SEQ ID NO: 442922 - DNA, 346 bp, Homo sapiens; identical to SEQ ID NO: 266392
  chr13:114004199-114004545
  hypo

SEQ ID NO: 442923 - DNA, 362 bp, Homo sapiens; identical to SEQ ID NO: 266393
  chr13:114004970-114005332
  hypo

SEQ ID NO: 442924 - DNA, 297 bp, Homo sapiens; identical to SEQ ID NO: 266394
  chr13:114009498-114009795
  hypo

SEQ ID NO: 442925 - DNA, 84 bp, Homo sapiens; identical to SEQ ID NO: 266395
  chr13:114032122-114032206
  hypo

SEQ ID NO: 442926 - DNA, 220 bp, Homo sapiens; identical to SEQ ID NO: 266399
  chr13:114063699-114063919
  hypo

SEQ ID NO: 442927 - DNA, 171 bp, Homo sapiens; identical to SEQ ID NO: 317656
  chr13:114064570-114064741
  hypo

SEQ ID NO: 442928 - DNA, 150 bp, Homo sapiens; identical to SEQ ID NO: 266401
  chr13:114065026-114065176
  hypo

SEQ ID NO: 442929 - DNA, 168 bp, Homo sapiens; identical to SEQ ID NO: 266403
  chr13:114077019-114077187
  hypo

SEQ ID NO: 442930 - DNA, 60 bp, Homo sapiens; identical to SEQ ID NO: 317659
  chr13:114080529-114080589
  hypo

SEQ ID NO: 442931 - DNA, 109 bp, Homo sapiens; identical to SEQ ID NO: 317660
  chr13:114080619-114080728
  hypo

SEQ ID NO: 442932 - DNA, 227 bp, Homo sapiens; identical to SEQ ID NO: 317661
  chr13:114082757-114082984
  hypo

SEQ ID NO: 442933 - DNA, 175 bp, Homo sapiens; identical to SEQ ID NO: 215672
  chr13:114085572-114085747
  hypo

SEQ ID NO: 442934 - DNA, 154 bp, Homo sapiens; identical to SEQ ID NO: 215674
  chr13:114115142-114115296
  hypo

SEQ ID NO: 442935 - DNA, 206 bp, Homo sapiens; identical to SEQ ID NO: 266410
  chr13:114148519-114148725
  hypo

SEQ ID NO: 442936 - DNA, 109 bp, Homo sapiens; identical to SEQ ID NO: 266411
  chr13:114183220-114183329
  hypo

SEQ ID NO: 442937 - DNA, 60 bp, Homo sapiens; identical to SEQ ID NO: 215676
  chr13:114185957-114186017
  hypo

SEQ ID NO: 442938 - DNA, 85 bp, Homo sapiens; identical to SEQ ID NO: 215678
  chr13:114188957-114189042
  hypo

SEQ ID NO: 442939 - DNA, 139 bp, Homo sapiens; identical to SEQ ID NO: 215682
  chr13:114192725-114192864
  hypo

SEQ ID NO: 442940 - DNA, 149 bp, Homo sapiens; identical to SEQ ID NO: 215683
  chr13:114202335-114202484
  hypo

SEQ ID NO: 442941 - DNA, 300 bp, Homo sapiens; identical to SEQ ID NO: 215684
  chr13:114202514-114202814
  hypo

SEQ ID NO: 442942 - DNA, 104 bp, Homo sapiens; identical to SEQ ID NO: 215685
  chr13:114202853-114202957
  hypo

SEQ ID NO: 442943 - DNA, 76 bp, Homo sapiens; identical to SEQ ID NO: 215686
  chr13:114203747-114203823
  hypo

SEQ ID NO: 442944 - DNA, 94 bp, Homo sapiens; identical to SEQ ID NO: 317681
  chr13:114204000-114204094
  hypo

SEQ ID NO: 442945 - DNA, 296 bp, Homo sapiens; identical to SEQ ID NO: 266421
  chr13:114204953-114205249
  hypo

SEQ ID NO: 442946 - DNA, 31 bp, Homo sapiens; identical to SEQ ID NO: 266423
  chr13:114221386-114221417
  hypo

SEQ ID NO: 442947 - DNA, 50 bp, Homo sapiens; identical to SEQ ID NO: 215688
  chr13:114237564-114237614
  hypo

SEQ ID NO: 442948 - DNA, 164 bp, Homo sapiens; identical to SEQ ID NO: 266425
  chr13:114240860-114241024
  hypo

SEQ ID NO: 442949 - DNA, 42 bp, Homo sapiens; identical to SEQ ID NO: 215689
  chr13:114244325-114244367
  hypo

SEQ ID NO: 442950 - DNA, 145 bp, Homo sapiens; identical to SEQ ID NO: 215690
  chr13:114246191-114246336
  hypo

SEQ ID NO: 442951 - DNA, 850 bp, Homo sapiens; identical to SEQ ID NO: 215691
  chr13:114251689-114252539
  hypo

SEQ ID NO: 442952 - DNA, 85 bp, Homo sapiens; identical to SEQ ID NO: 266429
  chr13:114258210-114258295
  hypo

SEQ ID NO: 442953 - DNA, 101 bp, Homo sapiens; identical to SEQ ID NO: 266431
  chr13:114281663-114281764
  hypo

SEQ ID NO: 442954 - DNA, 114 bp, Homo sapiens; identical to SEQ ID NO: 266432
  chr13:114283432-114283546
  hypo

SEQ ID NO: 442955 - DNA, 725 bp, Homo sapiens; identical to SEQ ID NO: 203469
  chr13:114285627-114286352
  hypo

SEQ ID NO: 442956 - DNA, 41 bp, Homo sapiens; identical to SEQ ID NO: 266436
  chr13:114288213-114288254
  hypo

SEQ ID NO: 442957 - DNA, 100 bp, Homo sapiens; identical to SEQ ID NO: 266437
  chr13:114290175-114290275
  hypo

SEQ ID NO: 442958 - DNA, 157 bp, Homo sapiens; identical to SEQ ID NO: 266438
  chr13:114290658-114290815
  hypo

SEQ ID NO: 442959 - DNA, 174 bp, Homo sapiens; identical to SEQ ID NO: 266439
  chr13:114292581-114292755
  hypo

SEQ ID NO: 442960 - DNA, 42 bp, Homo sapiens; identical to SEQ ID NO: 266443
  chr13:114296440-114296482
  hypo

SEQ ID NO: 442961 - DNA, 47 bp, Homo sapiens; identical to SEQ ID NO: 393270
  chr13:114302558-114302605
  hypo

SEQ ID NO: 442962 - DNA, 263 bp, Homo sapiens; identical to SEQ ID NO: 317709
  chr13:114318243-114318506
  hypo

SEQ ID NO: 442963 - DNA, 118 bp, Homo sapiens; identical to SEQ ID NO: 266452
  chr13:114459436-114459554
  hypo

SEQ ID NO: 442964 - DNA, 357 bp, Homo sapiens; identical to SEQ ID NO: 266453
  chr13:114460623-114460980
  hypo

SEQ ID NO: 442965 - DNA, 57 bp, Homo sapiens; identical to SEQ ID NO: 317712
  chr13:114492851-114492908
  hypo

SEQ ID NO: 442966 - DNA, 142 bp, Homo sapiens; identical to SEQ ID NO: 317713
  chr13:114497267-114497409
  hypo

SEQ ID NO: 442967 - DNA, 31 bp, Homo sapiens; identical to SEQ ID NO: 317714
  chr13:114497439-114497470
  hypo

SEQ ID NO: 442968 - DNA, 100 bp, Homo sapiens; identical to SEQ ID NO: 317716
  chr13:114499969-114500069
  hypo

SEQ ID NO: 442969 - DNA, 135 bp, Homo sapiens; identical to SEQ ID NO: 266460
  chr13:114508569-114508704
  hypo

SEQ ID NO: 442970 - DNA, 69 bp, Homo sapiens; identical to SEQ ID NO: 317720
  chr13:114517613-114517682
  hypo

SEQ ID NO: 442971 - DNA, 51 bp, Homo sapiens; identical to SEQ ID NO: 317721
  chr13:114517712-114517763
  hypo

SEQ ID NO: 442972 - DNA, 176 bp, Homo sapiens; identical to SEQ ID NO: 266464
  chr13:114551825-114552001
  hypo

SEQ ID NO: 442973 - DNA, 151 bp, Homo sapiens; identical to SEQ ID NO: 266465
  chr13:114565257-114565408
  hypo

SEQ ID NO: 442974 - DNA, 229 bp, Homo sapiens; identical to SEQ ID NO: 266468
  chr13:114741916-114742145
  hypo

SEQ ID NO: 442975 - DNA, 56 bp, Homo sapiens; identical to SEQ ID NO: 317733
  chr13:114760878-114760934
  hypo

SEQ ID NO: 442976 - DNA, 168 bp, Homo sapiens; identical to SEQ ID NO: 215709
  chr13:114764876-114765044
  hypo

SEQ ID NO: 442977 - DNA, 228 bp, Homo sapiens; identical to SEQ ID NO: 266475
  chr13:114767009-114767237
  hypo

SEQ ID NO: 442978 - DNA, 77 bp, Homo sapiens; identical to SEQ ID NO: 266477
  chr13:114768255-114768332
  hypo

SEQ ID NO: 442979 - DNA, 172 bp, Homo sapiens; identical to SEQ ID NO: 215710
  chr13:114771065-114771237
  hypo

SEQ ID NO: 442980 - DNA, 74 bp, Homo sapiens; identical to SEQ ID NO: 266480
  chr13:114773207-114773281
  hypo

SEQ ID NO: 442981 - DNA, 108 bp, Homo sapiens; identical to SEQ ID NO: 317742
  chr13:114774839-114774947
  hypo

SEQ ID NO: 442982 - DNA, 55 bp, Homo sapiens; identical to SEQ ID NO: 266488
  chr13:114781425-114781480
  hypo

SEQ ID NO: 442983 - DNA, 42 bp, Homo sapiens; identical to SEQ ID NO: 266489
  chr13:114786709-114786751
  hypo

SEQ ID NO: 442984 - DNA, 243 bp, Homo sapiens; identical to SEQ ID NO: 266490
  chr13:114789849-114790092
  hypo

SEQ ID NO: 442985 - DNA, 144 bp, Homo sapiens; identical to SEQ ID NO: 215715
  chr13:114791748-114791892
  hypo

SEQ ID NO: 442986 - DNA, 48 bp, Homo sapiens; identical to SEQ ID NO: 266494
  chr13:114804554-114804602
  hypo

SEQ ID NO: 442987 - DNA, 65 bp, Homo sapiens; identical to SEQ ID NO: 266495
  chr13:114804861-114804926
  hypo

SEQ ID NO: 442988 - DNA, 204 bp, Homo sapiens; identical to SEQ ID NO: 266496
  chr13:114805211-114805415
  hypo

SEQ ID NO: 442989 - DNA, 43 bp, Homo sapiens; identical to SEQ ID NO: 215717
  chr13:114807147-114807190
  hypo

SEQ ID NO: 442990 - DNA, 34 bp, Homo sapiens; identical to SEQ ID NO: 266499
  chr13:114812023-114812057
  hypo

SEQ ID NO: 442991 - DNA, 252 bp, Homo sapiens; identical to SEQ ID NO: 317759
  chr13:114812198-114812450
  hypo

SEQ ID NO: 442992 - DNA, 228 bp, Homo sapiens; identical to SEQ ID NO: 266501
  chr13:114841890-114842118
  hypo

SEQ ID NO: 442993 - DNA, 90 bp, Homo sapiens; identical to SEQ ID NO: 266502
  chr13:114846580-114846670
  hypo

SEQ ID NO: 442994 - DNA, 187 bp, Homo sapiens; identical to SEQ ID NO: 215719
  chr13:114847025-114847212
  hypo

SEQ ID NO: 442995 - DNA, 43 bp, Homo sapiens; identical to SEQ ID NO: 215720
  chr13:114855701-114855744
  hypo

SEQ ID NO: 442996 - DNA, 69 bp, Homo sapiens; identical to SEQ ID NO: 266505
  chr13:114861675-114861744
  hypo

SEQ ID NO: 442997 - DNA, 861 bp, Homo sapiens; identical to SEQ ID NO: 266506
  chr13:114867637-114868498
  hypo

SEQ ID NO: 442998 - DNA, 171 bp, Homo sapiens; identical to SEQ ID NO: 266507
  chr13:114868528-114868699
  hypo

SEQ ID NO: 442999 - DNA, 84 bp, Homo sapiens; identical to SEQ ID NO: 215722
  chr13:114869700-114869784
  hypo

SEQ ID NO: 443000 - DNA, 70 bp, Homo sapiens; identical to SEQ ID NO: 215723
  chr13:114881847-114881917
  hypo

SEQ ID NO: 443001 - DNA, 89 bp, Homo sapiens; identical to SEQ ID NO: 266515
  chr13:115025097-115025186
  hypo

SEQ ID NO: 443002 - DNA, 119 bp, Homo sapiens; identical to SEQ ID NO: 289965
  chr14:21121460-21121579
  hypo

SEQ ID NO: 443003 - DNA, 420 bp, Homo sapiens; identical to SEQ ID NO: 289967
  chr14:21150255-21150675
  hypo

SEQ ID NO: 443004 - DNA, 816 bp, Homo sapiens; identical to SEQ ID NO: 289969
  chr14:21152235-21153051
  hypo

SEQ ID NO: 443005 - DNA, 33 bp, Homo sapiens; identical to SEQ ID NO: 266518
  chr14:21253764-21253797
  hypo

SEQ ID NO: 443006 - DNA, 42 bp, Homo sapiens; identical to SEQ ID NO: 266519
  chr14:21304102-21304144
  hypo

SEQ ID NO: 443007 - DNA, 240 bp, Homo sapiens; identical to SEQ ID NO: 215728
  chr14:21304264-21304504
  hypo

SEQ ID NO: 443008 - DNA, 274 bp, Homo sapiens; identical to SEQ ID NO: 266521
  chr14:21464749-21465023
  hypo

SEQ ID NO: 443009 - DNA, 249 bp, Homo sapiens; identical to SEQ ID NO: 289975
  chr14:21493821-21494070
  hypo

SEQ ID NO: 443010 - DNA, 105 bp, Homo sapiens; identical to SEQ ID NO: 124214
  chr14:21494160-21494265
  hypo

SEQ ID NO: 443011 - DNA, 32 bp, Homo sapiens; identical to SEQ ID NO: 266522
  chr14:21549738-21549770
  hypo

SEQ ID NO: 443012 - DNA, 41 bp, Homo sapiens; identical to SEQ ID NO: 215730
  chr14:21688656-21688697
  hypo

SEQ ID NO: 443013 - DNA, 82 bp, Homo sapiens; identical to SEQ ID NO: 266527
  chr14:21752061-21752143
  hypo

SEQ ID NO: 443014 - DNA, 38 bp, Homo sapiens; identical to SEQ ID NO: 266528
  chr14:21789024-21789062
  hypo

SEQ ID NO: 443015 - DNA, 72 bp, Homo sapiens; identical to SEQ ID NO: 266531
  chr14:21971445-21971517
  hypo

SEQ ID NO: 443016 - DNA, 161 bp, Homo sapiens; identical to SEQ ID NO: 317792
  chr14:21980069-21980230
  hypo

SEQ ID NO: 443017 - DNA, 120 bp, Homo sapiens; identical to SEQ ID NO: 266534
  chr14:23183246-23183366
  hypo

SEQ ID NO: 443018 - DNA, 59 bp, Homo sapiens; identical to SEQ ID NO: 266535
  chr14:23311696-23311755
  hypo

SEQ ID NO: 443019 - DNA, 90 bp, Homo sapiens; identical to SEQ ID NO: 266537
  chr14:23323996-23324086
  hypo

SEQ ID NO: 443020 - DNA, 63 bp, Homo sapiens; identical to SEQ ID NO: 266538
  chr14:23400229-23400292
  hypo

SEQ ID NO: 443021 - DNA, 147 bp, Homo sapiens; identical to SEQ ID NO: 317800
  chr14:23427093-23427240
  hypo

SEQ ID NO: 443022 - DNA, 120 bp, Homo sapiens; identical to SEQ ID NO: 215732
  chr14:23470948-23471068
  hypo

SEQ ID NO: 443023 - DNA, 448 bp, Homo sapiens; identical to SEQ ID NO: 266541
  chr14:23511622-23512070
  hypo

SEQ ID NO: 443024 - DNA, 33 bp, Homo sapiens; identical to SEQ ID NO: 266542
  chr14:23517722-23517755
  hypo

SEQ ID NO: 443025 - DNA, 104 bp, Homo sapiens; identical to SEQ ID NO: 215733
  chr14:23518259-23518363
  hypo

SEQ ID NO: 443026 - DNA, 98 bp, Homo sapiens; identical to SEQ ID NO: 266544
  chr14:23528347-23528445
  hypo

SEQ ID NO: 443027 - DNA, 88 bp, Homo sapiens; identical to SEQ ID NO: 266545
  chr14:23530469-23530557
  hypo

SEQ ID NO: 443028 - DNA, 41 bp, Homo sapiens; identical to SEQ ID NO: 266546
  chr14:23537841-23537882
  hypo

SEQ ID NO: 443029 - DNA, 86 bp, Homo sapiens; identical to SEQ ID NO: 266547
  chr14:23559266-23559352
  hypo

SEQ ID NO: 443030 - DNA, 45 bp, Homo sapiens; identical to SEQ ID NO: 215734
  chr14:23719831-23719876
  hypo

SEQ ID NO: 443031 - DNA, 154 bp, Homo sapiens; identical to SEQ ID NO: 215735
  chr14:23757712-23757866
  hypo

SEQ ID NO: 443032 - DNA, 188 bp, Homo sapiens; identical to SEQ ID NO: 203499
  chr14:23776071-23776259
  hypo

SEQ ID NO: 443033 - DNA, 94 bp, Homo sapiens; identical to SEQ ID NO: 215738
  chr14:23793466-23793560
  hypo

SEQ ID NO: 443034 - DNA, 148 bp, Homo sapiens; identical to SEQ ID NO: 215739
  chr14:23815819-23815967
  hypo

SEQ ID NO: 443035 - DNA, 145 bp, Homo sapiens; identical to SEQ ID NO: 266556
  chr14:23853628-23853773
  hypo

SEQ ID NO: 443036 - DNA, 146 bp, Homo sapiens; identical to SEQ ID NO: 266558
  chr14:23938090-23938236
  hypo

SEQ ID NO: 443037 - DNA, 174 bp, Homo sapiens; identical to SEQ ID NO: 174906
  chr14:23982724-23982898
  hypo

SEQ ID NO: 443038 - DNA, 63 bp, Homo sapiens; identical to SEQ ID NO: 266560
  chr14:24081962-24082025
  hypo

SEQ ID NO: 443039 - DNA, 46 bp, Homo sapiens; identical to SEQ ID NO: 266561
  chr14:24108494-24108540
  hypo

SEQ ID NO: 443040 - DNA, 116 bp, Homo sapiens; identical to SEQ ID NO: 266562
  chr14:24427534-24427650
  hypo

SEQ ID NO: 443041 - DNA, 38 bp, Homo sapiens; identical to SEQ ID NO: 266563
  chr14:24542844-24542882
  hypo

SEQ ID NO: 443042 - DNA, 97 bp, Homo sapiens; identical to SEQ ID NO: 215741
  chr14:24629478-24629575
  hypo

SEQ ID NO: 443043 - DNA, 94 bp, Homo sapiens; identical to SEQ ID NO: 266565
  chr14:24722549-24722643
  hypo

SEQ ID NO: 443044 - DNA, 502 bp, Homo sapiens; identical to SEQ ID NO: 266566
  chr14:24731055-24731557
  hypo

SEQ ID NO: 443045 - DNA, 53 bp, Homo sapiens; identical to SEQ ID NO: 215744
  chr14:24733719-24733772
  hypo

SEQ ID NO: 443046 - DNA, 62 bp, Homo sapiens; identical to SEQ ID NO: 266568
  chr14:24839212-24839274
  hypo

SEQ ID NO: 443047 - DNA, 31 bp, Homo sapiens; identical to SEQ ID NO: 266569
  chr14:24859466-24859497
  hypo

SEQ ID NO: 443048 - DNA, 109 bp, Homo sapiens; identical to SEQ ID NO: 266570
  chr14:25113297-25113406
  hypo

SEQ ID NO: 443049 - DNA, 70 bp, Homo sapiens; identical to SEQ ID NO: 266571
  chr14:26802501-26802571
  hypo

SEQ ID NO: 443050 - DNA, 42 bp, Homo sapiens; identical to SEQ ID NO: 290058
  chr14:30397398-30397440
  hypo

SEQ ID NO: 443051 - DNA, 37 bp, Homo sapiens; identical to SEQ ID NO: 266572
  chr14:30790494-30790531
  hypo

SEQ ID NO: 443052 - DNA, 84 bp, Homo sapiens; identical to SEQ ID NO: 266574
  chr14:31035127-31035211
  hypo

SEQ ID NO: 443053 - DNA, 32 bp, Homo sapiens; identical to SEQ ID NO: 266575
  chr14:31079528-31079560
  hypo

SEQ ID NO: 443054 - DNA, 48 bp, Homo sapiens; identical to SEQ ID NO: 215746
  chr14:31456398-31456446
  hypo

SEQ ID NO: 443055 - DNA, 100 bp, Homo sapiens; identical to SEQ ID NO: 215747
  chr14:31456881-31456981
  hypo

SEQ ID NO: 443056 - DNA, 61 bp, Homo sapiens; identical to SEQ ID NO: 215748
  chr14:31478679-31478740
  hypo

SEQ ID NO: 443057 - DNA, 205 bp, Homo sapiens; identical to SEQ ID NO: 215749
  chr14:31484306-31484511
  hypo

SEQ ID NO: 443058 - DNA, 36 bp, Homo sapiens; identical to SEQ ID NO: 266580
  chr14:31527415-31527451
  hypo

SEQ ID NO: 443059 - DNA, 120 bp, Homo sapiens; identical to SEQ ID NO: 266581
  chr14:31542683-31542803
  hypo

SEQ ID NO: 443060 - DNA, 41 bp, Homo sapiens; identical to SEQ ID NO: 215750
  chr14:31629124-31629165
  hypo

SEQ ID NO: 443061 - DNA, 91 bp, Homo sapiens; identical to SEQ ID NO: 266583
  chr14:31632735-31632826
  hypo

SEQ ID NO: 443062 - DNA, 33 bp, Homo sapiens; identical to SEQ ID NO: 215751
  chr14:31648025-31648058
  hypo

SEQ ID NO: 443063 - DNA, 87 bp, Homo sapiens; identical to SEQ ID NO: 266585
  chr14:31671012-31671099
  hypo

SEQ ID NO: 443064 - DNA, 41 bp, Homo sapiens; identical to SEQ ID NO: 266586
  chr14:31847700-31847741
  hypo

SEQ ID NO: 443065 - DNA, 79 bp, Homo sapiens; identical to SEQ ID NO: 215752
  chr14:31925274-31925353
  hypo

SEQ ID NO: 443066 - DNA, 31 bp, Homo sapiens; identical to SEQ ID NO: 266589
  chr14:32287762-32287793
  hypo

SEQ ID NO: 443067 - DNA, 31 bp, Homo sapiens; identical to SEQ ID NO: 266590
  chr14:32288033-32288064
  hypo

SEQ ID NO: 443068 - DNA, 84 bp, Homo sapiens; identical to SEQ ID NO: 266591
  chr14:32413188-32413272
  hypo

SEQ ID NO: 443069 - DNA, 39 bp, Homo sapiens; identical to SEQ ID NO: 266592
  chr14:32543359-32543398
  hypo

SEQ ID NO: 443070 - DNA, 44 bp, Homo sapiens; identical to SEQ ID NO: 215753
  chr14:32597576-32597620
  hypo

SEQ ID NO: 443071 - DNA, 113 bp, Homo sapiens; identical to SEQ ID NO: 266594
  chr14:32902046-32902159
  hypo

SEQ ID NO: 443072 - DNA, 73 bp, Homo sapiens; identical to SEQ ID NO: 266595
  chr14:34165621-34165694
  hypo

SEQ ID NO: 443073 - DNA, 99 bp, Homo sapiens; identical to SEQ ID NO: 266596
  chr14:34308655-34308754
  hypo

SEQ ID NO: 443074 - DNA, 36 bp, Homo sapiens; identical to SEQ ID NO: 266597
  chr14:34334928-34334964
  hypo

SEQ ID NO: 443075 - DNA, 37 bp, Homo sapiens; identical to SEQ ID NO: 215755
  chr14:34415281-34415318
  hypo

SEQ ID NO: 443076 - DNA, 33 bp, Homo sapiens; identical to SEQ ID NO: 215756
  chr14:34918992-34919025
  hypo

SEQ ID NO: 443077 - DNA, 41 bp, Homo sapiens; identical to SEQ ID NO: 266600
  chr14:34949999-34950040
  hypo

SEQ ID NO: 443078 - DNA, 42 bp, Homo sapiens; identical to SEQ ID NO: 266601
  chr14:35009569-35009611
  hypo

SEQ ID NO: 443079 - DNA, 161 bp, Homo sapiens; identical to SEQ ID NO: 266602
  chr14:35022415-35022576
  hypo

SEQ ID NO: 443080 - DNA, 54 bp, Homo sapiens; identical to SEQ ID NO: 317866
  chr14:35032073-35032127
  hypo

SEQ ID NO: 443081 - DNA, 37 bp, Homo sapiens; identical to SEQ ID NO: 317867
  chr14:35032157-35032194
  hypo

SEQ ID NO: 443082 - DNA, 36 bp, Homo sapiens; identical to SEQ ID NO: 215757
  chr14:35117759-35117795
  hypo

SEQ ID NO: 443083 - DNA, 32 bp, Homo sapiens; identical to SEQ ID NO: 266606
  chr14:35136957-35136989
  hypo

SEQ ID NO: 443084 - DNA, 48 bp, Homo sapiens; identical to SEQ ID NO: 266607
  chr14:35147557-35147605
  hypo

SEQ ID NO: 443085 - DNA, 37 bp, Homo sapiens; identical to SEQ ID NO: 266608
  chr14:35266883-35266920
  hypo

SEQ ID NO: 443086 - DNA, 120 bp, Homo sapiens; identical to SEQ ID NO: 266609
  chr14:35266980-35267100
  hypo

SEQ ID NO: 443087 - DNA, 48 bp, Homo sapiens; identical to SEQ ID NO: 266610
  chr14:35331322-35331370
  hypo

SEQ ID NO: 443088 - DNA, 32 bp, Homo sapiens; identical to SEQ ID NO: 266611
  chr14:35389182-35389214
  hypo

SEQ ID NO: 443089 - DNA, 31 bp, Homo sapiens; identical to SEQ ID NO: 266612
  chr14:35389454-35389485
  hypo

SEQ ID NO: 443090 - DNA, 97 bp, Homo sapiens; identical to SEQ ID NO: 215758
  chr14:35578168-35578265
  hypo

SEQ ID NO: 443091 - DNA, 279 bp, Homo sapiens; identical to SEQ ID NO: 266615
  chr14:35808161-35808440
  hypo

SEQ ID NO: 443092 - DNA, 393 bp, Homo sapiens; identical to SEQ ID NO: 215760
  chr14:36288873-36289266
  hypo

SEQ ID NO: 443093 - DNA, 38 bp, Homo sapiens; identical to SEQ ID NO: 266618
  chr14:36301411-36301449
  hypo

SEQ ID NO: 443094 - DNA, 54 bp, Homo sapiens; identical to SEQ ID NO: 266620
  chr14:36738436-36738490
  hypo

SEQ ID NO: 443095 - DNA, 34 bp, Homo sapiens; identical to SEQ ID NO: 215761
  chr14:37174263-37174297
  hypo

SEQ ID NO: 443096 - DNA, 43 bp, Homo sapiens; identical to SEQ ID NO: 266622
  chr14:37665913-37665956
  hypo

SEQ ID NO: 443097 - DNA, 42 bp, Homo sapiens; identical to SEQ ID NO: 266623
  chr14:37666136-37666178
  hypo

SEQ ID NO: 443098 - DNA, 97 bp, Homo sapiens; identical to SEQ ID NO: 266625
  chr14:39648716-39648813
  hypo

SEQ ID NO: 443099 - DNA, 243 bp, Homo sapiens; identical to SEQ ID NO: 203560
  chr14:39735535-39735778
  hypo

SEQ ID NO: 443100 - DNA, 291 bp, Homo sapiens; identical to SEQ ID NO: 215765
  chr14:39911460-39911751
  hypo

SEQ ID NO: 443101 - DNA, 37 bp, Homo sapiens; identical to SEQ ID NO: 215766
  chr14:39914481-39914518
  hypo

SEQ ID NO: 443102 - DNA, 37 bp, Homo sapiens; identical to SEQ ID NO: 215767
  chr14:40470106-40470143
  hypo

SEQ ID NO: 443103 - DNA, 104 bp, Homo sapiens; identical to SEQ ID NO: 215768
  chr14:43839406-43839510
  hypo

SEQ ID NO: 443104 - DNA, 88 bp, Homo sapiens; identical to SEQ ID NO: 317895
  chr14:44004251-44004339
  hypo

SEQ ID NO: 443105 - DNA, 71 bp, Homo sapiens; identical to SEQ ID NO: 317896
  chr14:44004432-44004503
  hypo

SEQ ID NO: 443106 - DNA, 32 bp, Homo sapiens; identical to SEQ ID NO: 266631
  chr14:45437464-45437496
  hypo

SEQ ID NO: 443107 - DNA, 31 bp, Homo sapiens; identical to SEQ ID NO: 266632
  chr14:45437736-45437767
  hypo

SEQ ID NO: 443108 - DNA, 51 bp, Homo sapiens; identical to SEQ ID NO: 215770
  chr14:45579811-45579862
  hypo

SEQ ID NO: 443109 - DNA, 44 bp, Homo sapiens; identical to SEQ ID NO: 215771
  chr14:50327506-50327550
  hypo

SEQ ID NO: 443110 - DNA, 156 bp, Homo sapiens; identical to SEQ ID NO: 317904
  chr14:50333499-50333655
  hypo

SEQ ID NO: 443111 - DNA, 37 bp, Homo sapiens; identical to SEQ ID NO: 266640
  chr14:50373518-50373555
  hypo

SEQ ID NO: 443112 - DNA, 32 bp, Homo sapiens; identical to SEQ ID NO: 266642
  chr14:50540507-50540539
  hypo

SEQ ID NO: 443113 - DNA, 40 bp, Homo sapiens; identical to SEQ ID NO: 266644
  chr14:50589170-50589210
  hypo

SEQ ID NO: 443114 - DNA, 39 bp, Homo sapiens; identical to SEQ ID NO: 266646
  chr14:50777877-50777916
  hypo

SEQ ID NO: 443115 - DNA, 120 bp, Homo sapiens; identical to SEQ ID NO: 266647
  chr14:50828854-50828974
  hypo

SEQ ID NO: 443116 - DNA, 266 bp, Homo sapiens; identical to SEQ ID NO: 266648
  chr14:50903479-50903745
  hypo

SEQ ID NO: 443117 - DNA, 276 bp, Homo sapiens; identical to SEQ ID NO: 290160
  chr14:50999522-50999798
  hypo

SEQ ID NO: 443118 - DNA, 34 bp, Homo sapiens; identical to SEQ ID NO: 266649
  chr14:51092388-51092422
  hypo

SEQ ID NO: 443119 - DNA, 42 bp, Homo sapiens; identical to SEQ ID NO: 266651
  chr14:51148375-51148417
  hypo

SEQ ID NO: 443120 - DNA, 41 bp, Homo sapiens; identical to SEQ ID NO: 215778
  chr14:51836280-51836321
  hypo

SEQ ID NO: 443121 - DNA, 1663 bp, Homo sapiens; identical to SEQ ID NO: 290168
  chr14:52117843-52119506
  hypo

SEQ ID NO: 443122 - DNA, 394 bp, Homo sapiens; identical to SEQ ID NO: 215780
  chr14:52210541-52210935
  hypo

SEQ ID NO: 443123 - DNA, 90 bp, Homo sapiens; identical to SEQ ID NO: 266655
  chr14:52211309-52211399
  hypo

SEQ ID NO: 443124 - DNA, 85 bp, Homo sapiens; identical to SEQ ID NO: 266656
  chr14:52211429-52211514
  hypo

SEQ ID NO: 443125 - DNA, 48 bp, Homo sapiens; identical to SEQ ID NO: 215781
  chr14:52373771-52373819
  hypo

SEQ ID NO: 443126 - DNA, 84 bp, Homo sapiens; identical to SEQ ID NO: 266660
  chr14:53196020-53196104
  hypo

SEQ ID NO: 443127 - DNA, 44 bp, Homo sapiens; identical to SEQ ID NO: 290201
  chr14:55032358-55032402
  hypo

SEQ ID NO: 443128 - DNA, 33 bp, Homo sapiens; identical to SEQ ID NO: 266663
  chr14:55035098-55035131
  hypo

SEQ ID NO: 443129 - DNA, 31 bp, Homo sapiens; identical to SEQ ID NO: 266664
  chr14:55035161-55035192
  hypo

SEQ ID NO: 443130 - DNA, 120 bp, Homo sapiens; identical to SEQ ID NO: 215783
  chr14:55517470-55517590
  hypo

SEQ ID NO: 443131 - DNA, 201 bp, Homo sapiens; identical to SEQ ID NO: 215785
  chr14:55590026-55590227
  hypo

SEQ ID NO: 443132 - DNA, 214 bp, Homo sapiens; identical to SEQ ID NO: 266668
  chr14:55731632-55731846
  hypo

SEQ ID NO: 443133 - DNA, 86 bp, Homo sapiens; identical to SEQ ID NO: 215786
  chr14:55740426-55740512
  hypo

SEQ ID NO: 443134 - DNA, 164 bp, Homo sapiens; identical to SEQ ID NO: 215790
  chr14:55819829-55819993
  hypo

SEQ ID NO: 443135 - DNA, 31 bp, Homo sapiens; identical to SEQ ID NO: 215791
  chr14:55894600-55894631
  hypo

SEQ ID NO: 443136 - DNA, 180 bp, Homo sapiens; identical to SEQ ID NO: 215792
  chr14:55894691-55894871
  hypo

SEQ ID NO: 443137 - DNA, 179 bp, Homo sapiens; identical to SEQ ID NO: 290208
  chr14:56047800-56047979
  hypo

SEQ ID NO: 443138 - DNA, 55 bp, Homo sapiens; identical to SEQ ID NO: 215793
  chr14:56088961-56089016
  hypo

SEQ ID NO: 443139 - DNA, 567 bp, Homo sapiens; identical to SEQ ID NO: 224694
  chr14:56585472-56586039
  hypo

SEQ ID NO: 443140 - DNA, 96 bp, Homo sapiens; identical to SEQ ID NO: 266677
  chr14:56608021-56608117
  hypo

SEQ ID NO: 443141 - DNA, 221 bp, Homo sapiens; identical to SEQ ID NO: 266678
  chr14:56757000-56757221
  hypo

SEQ ID NO: 443142 - DNA, 52 bp, Homo sapiens; identical to SEQ ID NO: 266680
  chr14:57052072-57052124
  hypo

SEQ ID NO: 443143 - DNA, 77 bp, Homo sapiens; identical to SEQ ID NO: 215794
  chr14:57073649-57073726
  hypo

SEQ ID NO: 443144 - DNA, 214 bp, Homo sapiens; identical to SEQ ID NO: 266683
  chr14:58708563-58708777
  hypo

SEQ ID NO: 443145 - DNA, 258 bp, Homo sapiens; identical to SEQ ID NO: 266684
  chr14:58761578-58761836
  hypo

SEQ ID NO: 443146 - DNA, 97 bp, Homo sapiens; identical to SEQ ID NO: 266685
  chr14:58863447-58863544
  hypo

SEQ ID NO: 443147 - DNA, 143 bp, Homo sapiens; identical to SEQ ID NO: 317960
  chr14:58922736-58922879
  hypo

SEQ ID NO: 443148 - DNA, 243 bp, Homo sapiens; identical to SEQ ID NO: 215798
  chr14:59112403-59112646
  hypo

SEQ ID NO: 443149 - DNA, 471 bp, Homo sapiens; identical to SEQ ID NO: 266690
  chr14:59113228-59113699
  hypo

SEQ ID NO: 443150 - DNA, 34 bp, Homo sapiens; identical to SEQ ID NO: 266691
  chr14:59715783-59715817
  hypo

SEQ ID NO: 443151 - DNA, 34 bp, Homo sapiens; identical to SEQ ID NO: 266692
  chr14:59734888-59734922
  hypo

SEQ ID NO: 443152 - DNA, 306 bp, Homo sapiens; identical to SEQ ID NO: 266693
  chr14:59809360-59809666
  hypo

SEQ ID NO: 443153 - DNA, 145 bp, Homo sapiens; identical to SEQ ID NO: 215799
  chr14:59810623-59810768
  hypo

SEQ ID NO: 443154 - DNA, 164 bp, Homo sapiens; identical to SEQ ID NO: 215800
  chr14:59821078-59821242
  hypo

SEQ ID NO: 443155 - DNA, 169 bp, Homo sapiens; identical to SEQ ID NO: 215801
  chr14:59935188-59935357
  hypo

SEQ ID NO: 443156 - DNA, 77 bp, Homo sapiens; identical to SEQ ID NO: 215802
  chr14:59961997-59962074
  hypo

SEQ ID NO: 443157 - DNA, 719 bp, Homo sapiens; identical to SEQ ID NO: 215804
  chr14:60193647-60194366
  hypo

SEQ ID NO: 443158 - DNA, 156 bp, Homo sapiens; identical to SEQ ID NO: 266699
  chr14:60557424-60557580
  hypo

SEQ ID NO: 443159 - DNA, 184 bp, Homo sapiens; identical to SEQ ID NO: 266700
  chr14:61246679-61246863
  hypo

SEQ ID NO: 443160 - DNA, 92 bp, Homo sapiens; identical to SEQ ID NO: 266701
  chr14:61929139-61929231
  hypo

SEQ ID NO: 443161 - DNA, 79 bp, Homo sapiens; identical to SEQ ID NO: 266702
  chr14:61992777-61992856
  hypo

SEQ ID NO: 443162 - DNA, 66 bp, Homo sapiens; identical to SEQ ID NO: 266703
  chr14:61995224-61995290
  hypo

SEQ ID NO: 443163 - DNA, 148 bp, Homo sapiens; identical to SEQ ID NO: 215809
  chr14:62015169-62015317
  hypo

SEQ ID NO: 443164 - DNA, 49 bp, Homo sapiens; identical to SEQ ID NO: 266705
  chr14:62021521-62021570
  hypo

SEQ ID NO: 443165 - DNA, 54 bp, Homo sapiens; identical to SEQ ID NO: 266706
  chr14:62027306-62027360
  hypo

SEQ ID NO: 443166 - DNA, 55 bp, Homo sapiens; identical to SEQ ID NO: 422632
  chr14:62106065-62106120
  hypo

SEQ ID NO: 443167 - DNA, 35 bp, Homo sapiens; identical to SEQ ID NO: 266708
  chr14:62227900-62227935
  hypo

SEQ ID NO: 443168 - DNA, 196 bp, Homo sapiens; identical to SEQ ID NO: 215812
  chr14:62523573-62523769
  hypo

SEQ ID NO: 443169 - DNA, 233 bp, Homo sapiens; identical to SEQ ID NO: 266711
  chr14:64061786-64062019
  hypo

SEQ ID NO: 443170 - DNA, 35 bp, Homo sapiens; identical to SEQ ID NO: 224711
  chr14:64182960-64182995
  hypo

SEQ ID NO: 443171 - DNA, 42 bp, Homo sapiens; identical to SEQ ID NO: 215813
  chr14:64190117-64190159
  hypo

SEQ ID NO: 443172 - DNA, 44 bp, Homo sapiens; identical to SEQ ID NO: 215814
  chr14:64191361-64191405
  hypo

SEQ ID NO: 443173 - DNA, 35 bp, Homo sapiens; identical to SEQ ID NO: 266715
  chr14:64227545-64227580
  hypo

SEQ ID NO: 443174 - DNA, 221 bp, Homo sapiens; identical to SEQ ID NO: 290271
  chr14:64760852-64761073
  hypo

SEQ ID NO: 443175 - DNA, 504 bp, Homo sapiens; identical to SEQ ID NO: 290272
  chr14:64761254-64761758
  hypo

SEQ ID NO: 443176 - DNA, 154 bp, Homo sapiens; identical to SEQ ID NO: 215816
  chr14:64884526-64884680
  hypo

SEQ ID NO: 443177 - DNA, 80 bp, Homo sapiens; identical to SEQ ID NO: 215817
  chr14:64888236-64888316
  hypo

SEQ ID NO: 443178 - DNA, 32 bp, Homo sapiens; identical to SEQ ID NO: 215818
  chr14:64904876-64904908
  hypo

SEQ ID NO: 443179 - DNA, 81 bp, Homo sapiens; identical to SEQ ID NO: 266720
  chr14:64905829-64905910
  hypo

SEQ ID NO: 443180 - DNA, 43 bp, Homo sapiens; identical to SEQ ID NO: 266721
  chr14:64992809-64992852
  hypo

SEQ ID NO: 443181 - DNA, 43 bp, Homo sapiens; identical to SEQ ID NO: 203633
  chr14:65005557-65005600
  hypo

SEQ ID NO: 443182 - DNA, 97 bp, Homo sapiens; identical to SEQ ID NO: 290276
  chr14:65006319-65006416
  hypo

SEQ ID NO: 443183 - DNA, 38 bp, Homo sapiens; identical to SEQ ID NO: 266724
  chr14:65122507-65122545
  hypo

SEQ ID NO: 443184 - DNA, 190 bp, Homo sapiens; identical to SEQ ID NO: 215820
  chr14:65150031-65150221
  hypo

SEQ ID NO: 443185 - DNA, 291 bp, Homo sapiens; identical to SEQ ID NO: 266726
  chr14:65194543-65194834
  hypo

SEQ ID NO: 443186 - DNA, 146 bp, Homo sapiens; identical to SEQ ID NO: 266729
  chr14:65215874-65216020
  hypo

SEQ ID NO: 443187 - DNA, 142 bp, Homo sapiens; identical to SEQ ID NO: 215824
  chr14:65220230-65220372
  hypo

SEQ ID NO: 443188 - DNA, 84 bp, Homo sapiens; identical to SEQ ID NO: 215826
  chr14:65237647-65237731
  hypo

SEQ ID NO: 443189 - DNA, 54 bp, Homo sapiens; identical to SEQ ID NO: 215828
  chr14:65248987-65249041
  hypo

SEQ ID NO: 443190 - DNA, 397 bp, Homo sapiens; identical to SEQ ID NO: 266736
  chr14:65259855-65260252
  hypo

SEQ ID NO: 443191 - DNA, 89 bp, Homo sapiens; identical to SEQ ID NO: 266737
  chr14:65266471-65266560
  hypo

SEQ ID NO: 443192 - DNA, 128 bp, Homo sapiens; identical to SEQ ID NO: 266742
  chr14:65422098-65422226
  hypo

SEQ ID NO: 443193 - DNA, 34 bp, Homo sapiens; identical to SEQ ID NO: 215830
  chr14:65492492-65492526
  hypo

SEQ ID NO: 443194 - DNA, 119 bp, Homo sapiens; identical to SEQ ID NO: 215831
  chr14:65493164-65493283
  hypo

SEQ ID NO: 443195 - DNA, 35 bp, Homo sapiens; identical to SEQ ID NO: 266745
  chr14:65532138-65532173
  hypo

SEQ ID NO: 443196 - DNA, 394 bp, Homo sapiens; identical to SEQ ID NO: 266746
  chr14:65532353-65532747
  hypo

SEQ ID NO: 443197 - DNA, 34 bp, Homo sapiens; identical to SEQ ID NO: 266747
  chr14:65631813-65631847
  hypo

SEQ ID NO: 443198 - DNA, 176 bp, Homo sapiens; identical to SEQ ID NO: 266748
  chr14:65746810-65746986
  hypo

SEQ ID NO: 443199 - DNA, 218 bp, Homo sapiens; identical to SEQ ID NO: 266749
  chr14:66479541-66479759
  hypo

SEQ ID NO: 443200 - DNA, 61 bp, Homo sapiens; identical to SEQ ID NO: 266751
  chr14:66560926-66560987
  hypo

SEQ ID NO: 443201 - DNA, 42 bp, Homo sapiens; identical to SEQ ID NO: 215832
  chr14:66814104-66814146
  hypo

SEQ ID NO: 443202 - DNA, 32 bp, Homo sapiens; identical to SEQ ID NO: 266753
  chr14:66976290-66976322
  hypo

SEQ ID NO: 443203 - DNA, 48 bp, Homo sapiens; identical to SEQ ID NO: 266754
  chr14:66976357-66976405
  hypo

SEQ ID NO: 443204 - DNA, 37 bp, Homo sapiens; identical to SEQ ID NO: 266755
  chr14:66976456-66976493
  hypo

SEQ ID NO: 443205 - DNA, 169 bp, Homo sapiens; identical to SEQ ID NO: 215833
  chr14:67864421-67864590
  hypo

SEQ ID NO: 443206 - DNA, 84 bp, Homo sapiens; identical to SEQ ID NO: 215834
  chr14:67876365-67876449
  hypo

SEQ ID NO: 443207 - DNA, 179 bp, Homo sapiens; identical to SEQ ID NO: 266760
  chr14:67888349-67888528
  hypo

SEQ ID NO: 443208 - DNA, 142 bp, Homo sapiens; identical to SEQ ID NO: 266761
  chr14:67893184-67893326
  hypo

SEQ ID NO: 443209 - DNA, 82 bp, Homo sapiens; identical to SEQ ID NO: 215835
  chr14:68130375-68130457
  hypo

SEQ ID NO: 443210 - DNA, 54 bp, Homo sapiens; identical to SEQ ID NO: 266764
  chr14:68163051-68163105
  hypo

SEQ ID NO: 443211 - DNA, 329 bp, Homo sapiens; identical to SEQ ID NO: 266765
  chr14:68265539-68265868
  hypo

SEQ ID NO: 443212 - DNA, 98 bp, Homo sapiens; identical to SEQ ID NO: 215836
  chr14:68829198-68829296
  hypo

SEQ ID NO: 443213 - DNA, 42 bp, Homo sapiens; identical to SEQ ID NO: 266767
  chr14:68968539-68968581
  hypo

SEQ ID NO: 443214 - DNA, 98 bp, Homo sapiens; identical to SEQ ID NO: 266768
  chr14:68993117-68993215
  hypo

SEQ ID NO: 443215 - DNA, 132 bp, Homo sapiens; identical to SEQ ID NO: 266769
  chr14:69014215-69014347
  hypo

SEQ ID NO: 443216 - DNA, 99 bp, Homo sapiens; identical to SEQ ID NO: 266770
  chr14:69050653-69050752
  hypo

SEQ ID NO: 443217 - DNA, 252 bp, Homo sapiens; identical to SEQ ID NO: 266771
  chr14:69052663-69052915
  hypo

SEQ ID NO: 443218 - DNA, 88 bp, Homo sapiens; identical to SEQ ID NO: 318050
  chr14:69143561-69143649
  hypo

SEQ ID NO: 443219 - DNA, 34 bp, Homo sapiens; identical to SEQ ID NO: 266774
  chr14:69144067-69144101
  hypo

SEQ ID NO: 443220 - DNA, 177 bp, Homo sapiens; identical to SEQ ID NO: 266775
  chr14:69144733-69144910
  hypo

SEQ ID NO: 443221 - DNA, 43 bp, Homo sapiens; identical to SEQ ID NO: 266776
  chr14:69153995-69154038
  hypo

SEQ ID NO: 443222 - DNA, 34 bp, Homo sapiens; identical to SEQ ID NO: 266777
  chr14:69154693-69154727
  hypo

SEQ ID NO: 443223 - DNA, 93 bp, Homo sapiens; identical to SEQ ID NO: 266778
  chr14:69218775-69218868
  hypo

SEQ ID NO: 443224 - DNA, 40 bp, Homo sapiens; identical to SEQ ID NO: 266781
  chr14:69337465-69337505
  hypo

SEQ ID NO: 443225 - DNA, 174 bp, Homo sapiens; identical to SEQ ID NO: 266783
  chr14:69347540-69347714
  hypo

SEQ ID NO: 443226 - DNA, 53 bp, Homo sapiens; identical to SEQ ID NO: 266784
  chr14:69352139-69352192
  hypo

SEQ ID NO: 443227 - DNA, 147 bp, Homo sapiens; identical to SEQ ID NO: 215841
  chr14:69352454-69352601
  hypo

SEQ ID NO: 443228 - DNA, 38 bp, Homo sapiens; identical to SEQ ID NO: 266787
  chr14:69385004-69385042
  hypo

SEQ ID NO: 443229 - DNA, 565 bp, Homo sapiens; identical to SEQ ID NO: 203650
  chr14:69444743-69445308
  hypo

SEQ ID NO: 443230 - DNA, 299 bp, Homo sapiens; identical to SEQ ID NO: 203651
  chr14:69445727-69446026
  hypo

SEQ ID NO: 443231 - DNA, 163 bp, Homo sapiens; identical to SEQ ID NO: 215845
  chr14:69550073-69550236
  hypo

SEQ ID NO: 443232 - DNA, 104 bp, Homo sapiens; identical to SEQ ID NO: 203653
  chr14:69618203-69618307
  hypo

SEQ ID NO: 443233 - DNA, 95 bp, Homo sapiens; identical to SEQ ID NO: 203654
  chr14:69658738-69658833
  hypo

SEQ ID NO: 443234 - DNA, 66 bp, Homo sapiens; identical to SEQ ID NO: 266791
  chr14:69824243-69824309
  hypo

SEQ ID NO: 443235 - DNA, 140 bp, Homo sapiens; identical to SEQ ID NO: 318074
  chr14:69867591-69867731
  hypo

SEQ ID NO: 443236 - DNA, 83 bp, Homo sapiens; identical to SEQ ID NO: 318075
  chr14:69867761-69867844
  hypo

SEQ ID NO: 443237 - DNA, 353 bp, Homo sapiens; identical to SEQ ID NO: 224719
  chr14:70041211-70041564
  hypo

SEQ ID NO: 443238 - DNA, 87 bp, Homo sapiens; identical to SEQ ID NO: 266794
  chr14:70387802-70387889
  hypo

SEQ ID NO: 443239 - DNA, 526 bp, Homo sapiens; identical to SEQ ID NO: 290328
  chr14:70826032-70826558
  hypo

SEQ ID NO: 443240 - DNA, 60 bp, Homo sapiens; identical to SEQ ID NO: 224724
  chr14:71108798-71108858
  hypo

SEQ ID NO: 443241 - DNA, 40 bp, Homo sapiens; identical to SEQ ID NO: 266795
  chr14:71443359-71443399
  hypo

SEQ ID NO: 443242 - DNA, 43 bp, Homo sapiens; identical to SEQ ID NO: 266796
  chr14:71811496-71811539
  hypo

SEQ ID NO: 443243 - DNA, 67 bp, Homo sapiens; identical to SEQ ID NO: 266797
  chr14:72204250-72204317
  hypo

SEQ ID NO: 443244 - DNA, 42 bp, Homo sapiens; identical to SEQ ID NO: 266798
  chr14:72431251-72431293
  hypo

SEQ ID NO: 443245 - DNA, 36 bp, Homo sapiens; identical to SEQ ID NO: 215851
  chr14:72939848-72939884
  hypo

SEQ ID NO: 443246 - DNA, 35 bp, Homo sapiens; identical to SEQ ID NO: 215852
  chr14:72940124-72940159
  hypo

SEQ ID NO: 443247 - DNA, 38 bp, Homo sapiens; identical to SEQ ID NO: 266807
  chr14:73213601-73213639
  hypo

SEQ ID NO: 443248 - DNA, 156 bp, Homo sapiens
  chr14:73302744-73302900
  hypo
ggggagatgctggagacacaagtggctttgaaattagcacaacttacatggcctccaggtctgctgtggaaatccaggtccaaagaagaagccagtgaggaacaggaggctgatcattgtgttctcagaaggggttggagcctctggggagggggc

SEQ ID NO: 443249 - DNA, 215 bp, Homo sapiens; identical to SEQ ID NO: 266810
  chr14:73302930-73303145
  hypo

SEQ ID NO: 443250 - DNA, 61 bp, Homo sapiens; identical to SEQ ID NO: 422688
  chr14:73359629-73359690
  hypo

SEQ ID NO: 443251 - DNA, 474 bp, Homo sapiens; identical to SEQ ID NO: 290341
  chr14:73393144-73393618
  hypo

SEQ ID NO: 443252 - DNA, 73 bp, Homo sapiens; identical to SEQ ID NO: 215858
  chr14:73428614-73428687
  hypo

SEQ ID NO: 443253 - DNA, 335 bp, Homo sapiens; identical to SEQ ID NO: 215859
  chr14:73459712-73460047
  hypo

SEQ ID NO: 443254 - DNA, 251 bp, Homo sapiens; identical to SEQ ID NO: 266816
  chr14:73464663-73464914
  hypo

SEQ ID NO: 443255 - DNA, 180 bp, Homo sapiens; identical to SEQ ID NO: 266817
  chr14:73482390-73482570
  hypo

SEQ ID NO: 443256 - DNA, 89 bp, Homo sapiens; identical to SEQ ID NO: 266818
  chr14:73482875-73482964
  hypo

SEQ ID NO: 443257 - DNA, 31 bp, Homo sapiens; identical to SEQ ID NO: 266819
  chr14:73687399-73687430
  hypo

SEQ ID NO: 443258 - DNA, 364 bp, Homo sapiens; identical to SEQ ID NO: 266820
  chr14:73708407-73708771
  hypo

SEQ ID NO: 443259 - DNA, 35 bp, Homo sapiens; identical to SEQ ID NO: 215860
  chr14:73855377-73855412
  hypo

SEQ ID NO: 443260 - DNA, 37 bp, Homo sapiens; identical to SEQ ID NO: 266822
  chr14:73926314-73926351
  hypo

SEQ ID NO: 443261 - DNA, 154 bp, Homo sapiens; identical to SEQ ID NO: 203662
  chr14:74111425-74111579
  hypo

SEQ ID NO: 443262 - DNA, 93 bp, Homo sapiens; identical to SEQ ID NO: 215862
  chr14:74113149-74113242
  hypo

SEQ ID NO: 443263 - DNA, 32 bp, Homo sapiens; identical to SEQ ID NO: 266825
  chr14:74142425-74142457
  hypo

SEQ ID NO: 443264 - DNA, 521 bp, Homo sapiens; identical to SEQ ID NO: 290348
  chr14:74180377-74180898
  hypo

SEQ ID NO: 443265 - DNA, 1185 bp, Homo sapiens; identical to SEQ ID NO: 266826
  chr14:74184829-74186014
  hypo

SEQ ID NO: 443266 - DNA, 244 bp, Homo sapiens; identical to SEQ ID NO: 266827
  chr14:74196426-74196670
  hypo

SEQ ID NO: 443267 - DNA, 262 bp, Homo sapiens; identical to SEQ ID NO: 266828
  chr14:74206017-74206279
  hypo

SEQ ID NO: 443268 - DNA, 39 bp, Homo sapiens; identical to SEQ ID NO: 215866
  chr14:74244737-74244776
  hypo

SEQ ID NO: 443269 - DNA, 136 bp, Homo sapiens; identical to SEQ ID NO: 9841
  chr14:74253328-74253464
  hypo

SEQ ID NO: 443270 - DNA, 69 bp, Homo sapiens; identical to SEQ ID NO: 318122
  chr14:74273439-74273508
  hypo

SEQ ID NO: 443271 - DNA, 35 bp, Homo sapiens; identical to SEQ ID NO: 215868
  chr14:74369046-74369081
  hypo

SEQ ID NO: 443272 - DNA, 91 bp, Homo sapiens; identical to SEQ ID NO: 215869
  chr14:74418713-74418804
  hypo

SEQ ID NO: 443273 - DNA, 88 bp, Homo sapiens; identical to SEQ ID NO: 215870
  chr14:74626548-74626636
  hypo

SEQ ID NO: 443274 - DNA, 161 bp, Homo sapiens; identical to SEQ ID NO: 215871
  chr14:74628386-74628547
  hypo

SEQ ID NO: 443275 - DNA, 85 bp, Homo sapiens; identical to SEQ ID NO: 266835
  chr14:74954263-74954348
  hypo

SEQ ID NO: 443276 - DNA, 94 bp, Homo sapiens; identical to SEQ ID NO: 215872
  chr14:74957659-74957753
  hypo

SEQ ID NO: 443277 - DNA, 34 bp, Homo sapiens; identical to SEQ ID NO: 266837
  chr14:74958053-74958087
  hypo

SEQ ID NO: 443278 - DNA, 81 bp, Homo sapiens; identical to SEQ ID NO: 266839
  chr14:75062987-75063068
  hypo

SEQ ID NO: 443279 - DNA, 39 bp, Homo sapiens; identical to SEQ ID NO: 266840
  chr14:75416062-75416101
  hypo

SEQ ID NO: 443280 - DNA, 71 bp, Homo sapiens; identical to SEQ ID NO: 215873
  chr14:75423075-75423146
  hypo

SEQ ID NO: 443281 - DNA, 41 bp, Homo sapiens; identical to SEQ ID NO: 266843
  chr14:75616514-75616555
  hypo

SEQ ID NO: 443282 - DNA, 196 bp, Homo sapiens; identical to SEQ ID NO: 203675
  chr14:75743668-75743864
  hypo

SEQ ID NO: 443283 - DNA, 165 bp, Homo sapiens; identical to SEQ ID NO: 203676
  chr14:75743897-75744062
  hypo

SEQ ID NO: 443284 - DNA, 71 bp, Homo sapiens; identical to SEQ ID NO: 215876
  chr14:75747281-75747352
  hypo

SEQ ID NO: 443285 - DNA, 326 bp, Homo sapiens; identical to SEQ ID NO: 266846
  chr14:75747940-75748266
  hypo

SEQ ID NO: 443286 - DNA, 404 bp, Homo sapiens; identical to SEQ ID NO: 266849
  chr14:76012913-76013317
  hypo

SEQ ID NO: 443287 - DNA, 35 bp, Homo sapiens; identical to SEQ ID NO: 215879
  chr14:76128639-76128674
  hypo

SEQ ID NO: 443288 - DNA, 175 bp, Homo sapiens; identical to SEQ ID NO: 266851
  chr14:76431242-76431417
  hypo

SEQ ID NO: 443289 - DNA, 86 bp, Homo sapiens; identical to SEQ ID NO: 215881
  chr14:76446468-76446554
  hypo

SEQ ID NO: 443290 - DNA, 321 bp, Homo sapiens; identical to SEQ ID NO: 87130
  chr14:76446750-76447071
  hypo

SEQ ID NO: 443291 - DNA, 160 bp, Homo sapiens; identical to SEQ ID NO: 215883
  chr14:76447285-76447445
  hypo

SEQ ID NO: 443292 - DNA, 104 bp, Homo sapiens; identical to SEQ ID NO: 318148
  chr14:76461806-76461910
  hypo

SEQ ID NO: 443293 - DNA, 114 bp, Homo sapiens; identical to SEQ ID NO: 266856
  chr14:76600679-76600793
  hypo

SEQ ID NO: 443294 - DNA, 89 bp, Homo sapiens; identical to SEQ ID NO: 266857
  chr14:76628408-76628497
  hypo

SEQ ID NO: 443295 - DNA, 32 bp, Homo sapiens; identical to SEQ ID NO: 266858
  chr14:76738013-76738045
  hypo

SEQ ID NO: 443296 - DNA, 577 bp, Homo sapiens; identical to SEQ ID NO: 266859
  chr14:76905595-76906172
  hypo

SEQ ID NO: 443297 - DNA, 36 bp, Homo sapiens; identical to SEQ ID NO: 215884
  chr14:76998229-76998265
  hypo

SEQ ID NO: 443298 - DNA, 136 bp, Homo sapiens; identical to SEQ ID NO: 318154
  chr14:77242297-77242433
  hypo

SEQ ID NO: 443299 - DNA, 91 bp, Homo sapiens; identical to SEQ ID NO: 266862
  chr14:77370516-77370607
  hypo

SEQ ID NO: 443300 - DNA, 33 bp, Homo sapiens; identical to SEQ ID NO: 266863
  chr14:77426436-77426469
  hypo

SEQ ID NO: 443301 - DNA, 103 bp, Homo sapiens; identical to SEQ ID NO: 266864
  chr14:77433610-77433713
  hypo

SEQ ID NO: 443302 - DNA, 60 bp, Homo sapiens; identical to SEQ ID NO: 266865
  chr14:77434976-77435036
  hypo

SEQ ID NO: 443303 - DNA, 38 bp, Homo sapiens; identical to SEQ ID NO: 266866
  chr14:77437670-77437708
  hypo

SEQ ID NO: 443304 - DNA, 295 bp, Homo sapiens; identical to SEQ ID NO: 203682
  chr14:77493464-77493759
  hypo

SEQ ID NO: 443305 - DNA, 180 bp, Homo sapiens; identical to SEQ ID NO: 266867
  chr14:77580196-77580376
  hypo

SEQ ID NO: 443306 - DNA, 568 bp, Homo sapiens; identical to SEQ ID NO: 290397
  chr14:77605688-77606256
  hypo

SEQ ID NO: 443307 - DNA, 138 bp, Homo sapiens; identical to SEQ ID NO: 290400
  chr14:77736729-77736867
  hypo

SEQ ID NO: 443308 - DNA, 97 bp, Homo sapiens; identical to SEQ ID NO: 290401
  chr14:77736883-77736980
  hypo

SEQ ID NO: 443309 - DNA, 163 bp, Homo sapiens; identical to SEQ ID NO: 266868
  chr14:77769161-77769324
  hypo

SEQ ID NO: 443310 - DNA, 31 bp, Homo sapiens; identical to SEQ ID NO: 215888
  chr14:77935683-77935714
  hypo

SEQ ID NO: 443311 - DNA, 102 bp, Homo sapiens; identical to SEQ ID NO: 266870
  chr14:77937151-77937253
  hypo

SEQ ID NO: 443312 - DNA, 101 bp, Homo sapiens; identical to SEQ ID NO: 266871
  chr14:77939354-77939455
  hypo

SEQ ID NO: 443313 - DNA, 69 bp, Homo sapiens; identical to SEQ ID NO: 266872
  chr14:77942016-77942085
  hypo

SEQ ID NO: 443314 - DNA, 37 bp, Homo sapiens; identical to SEQ ID NO: 266873
  chr14:78152933-78152970
  hypo

SEQ ID NO: 443315 - DNA, 144 bp, Homo sapiens; identical to SEQ ID NO: 215890
  chr14:78189475-78189619
  hypo

SEQ ID NO: 443316 - DNA, 36 bp, Homo sapiens; identical to SEQ ID NO: 266877
  chr14:78228357-78228393
  hypo

SEQ ID NO: 443317 - DNA, 31 bp, Homo sapiens; identical to SEQ ID NO: 266879
  chr14:78268994-78269025
  hypo

SEQ ID NO: 443318 - DNA, 95 bp, Homo sapiens; identical to SEQ ID NO: 215891
  chr14:78335482-78335577
  hypo

SEQ ID NO: 443319 - DNA, 34 bp, Homo sapiens; identical to SEQ ID NO: 215892
  chr14:78335637-78335671
  hypo

SEQ ID NO: 443320 - DNA, 37 bp, Homo sapiens; identical to SEQ ID NO: 215893
  chr14:78388714-78388751
  hypo

SEQ ID NO: 443321 - DNA, 207 bp, Homo sapiens; identical to SEQ ID NO: 215894
  chr14:81231425-81231632
  hypo

SEQ ID NO: 443322 - DNA, 75 bp, Homo sapiens; identical to SEQ ID NO: 266884
  chr14:81439765-81439840
  hypo

SEQ ID NO: 443323 - DNA, 40 bp, Homo sapiens; identical to SEQ ID NO: 318184
  chr14:81489205-81489245
  hypo

SEQ ID NO: 443324 - DNA, 114 bp, Homo sapiens; identical to SEQ ID NO: 266886
  chr14:81609903-81610017
  hypo

SEQ ID NO: 443325 - DNA, 37 bp, Homo sapiens; identical to SEQ ID NO: 266888
  chr14:81904519-81904556
  hypo

SEQ ID NO: 443326 - DNA, 102 bp, Homo sapiens; identical to SEQ ID NO: 266889
  chr14:82295806-82295908
  hypo

SEQ ID NO: 443327 - DNA, 34 bp, Homo sapiens; identical to SEQ ID NO: 266890
  chr14:86054380-86054414
  hypo

SEQ ID NO: 443328 - DNA, 75 bp, Homo sapiens; identical to SEQ ID NO: 266891
  chr14:87963380-87963455
  hypo

SEQ ID NO: 443329 - DNA, 78 bp, Homo sapiens; identical to SEQ ID NO: 215895
  chr14:88457502-88457580
  hypo

SEQ ID NO: 443330 - DNA, 77 bp, Homo sapiens; identical to SEQ ID NO: 215896
  chr14:88457820-88457897
  hypo

SEQ ID NO: 443331 - DNA, 33 bp, Homo sapiens; identical to SEQ ID NO: 215898
  chr14:88527464-88527497
  hypo

SEQ ID NO: 443332 - DNA, 33 bp, Homo sapiens; identical to SEQ ID NO: 215899
  chr14:88527737-88527770
  hypo

SEQ ID NO: 443333 - DNA, 147 bp, Homo sapiens; identical to SEQ ID NO: 266896
  chr14:88587438-88587585
  hypo

SEQ ID NO: 443334 - DNA, 168 bp, Homo sapiens; identical to SEQ ID NO: 215900
  chr14:88625251-88625419
  hypo

SEQ ID NO: 443335 - DNA, 36 bp, Homo sapiens; identical to SEQ ID NO: 215901
  chr14:88686789-88686825
  hypo

SEQ ID NO: 443336 - DNA, 102 bp, Homo sapiens; identical to SEQ ID NO: 266899
  chr14:88954653-88954755
  hypo

SEQ ID NO: 443337 - DNA, 782 bp, Homo sapiens; identical to SEQ ID NO: 203701
  chr14:89020631-89021413
  hypo

SEQ ID NO: 443338 - DNA, 725 bp, Homo sapiens; identical to SEQ ID NO: 290430
  chr14:89290490-89291215
  hypo

SEQ ID NO: 443339 - DNA, 180 bp, Homo sapiens; identical to SEQ ID NO: 215906
  chr14:89292610-89292790
  hypo

SEQ ID NO: 443340 - DNA, 238 bp, Homo sapiens; identical to SEQ ID NO: 203703
  chr14:89506861-89507099
  hypo

SEQ ID NO: 443341 - DNA, 87 bp, Homo sapiens; identical to SEQ ID NO: 318208
  chr14:89579158-89579245
  hypo

SEQ ID NO: 443342 - DNA, 181 bp, Homo sapiens; identical to SEQ ID NO: 266904
  chr14:89646424-89646605
  hypo

SEQ ID NO: 443343 - DNA, 166 bp, Homo sapiens; identical to SEQ ID NO: 215910
  chr14:89711495-89711661
  hypo

SEQ ID NO: 443344 - DNA, 207 bp, Homo sapiens; identical to SEQ ID NO: 266907
  chr14:89720605-89720812
  hypo

SEQ ID NO: 443345 - DNA, 216 bp, Homo sapiens; identical to SEQ ID NO: 266908
  chr14:89775981-89776197
  hypo

SEQ ID NO: 443346 - DNA, 152 bp, Homo sapiens; identical to SEQ ID NO: 266910
  chr14:89803723-89803875
  hypo

SEQ ID NO: 443347 - DNA, 247 bp, Homo sapiens; identical to SEQ ID NO: 215911
  chr14:89811174-89811421
  hypo

SEQ ID NO: 443348 - DNA, 235 bp, Homo sapiens; identical to SEQ ID NO: 266916
  chr14:89956432-89956667
  hypo

SEQ ID NO: 443349 - DNA, 88 bp, Homo sapiens; identical to SEQ ID NO: 266917
  chr14:90097939-90098027
  hypo

SEQ ID NO: 443350 - DNA, 182 bp, Homo sapiens; identical to SEQ ID NO: 224749
  chr14:90167708-90167890
  hypo

SEQ ID NO: 443351 - DNA, 39 bp, Homo sapiens; identical to SEQ ID NO: 266918
  chr14:90323676-90323715
  hypo

SEQ ID NO: 443352 - DNA, 235 bp, Homo sapiens; identical to SEQ ID NO: 266919
  chr14:90358154-90358389
  hypo

SEQ ID NO: 443353 - DNA, 360 bp, Homo sapiens; identical to SEQ ID NO: 290438
  chr14:90420659-90421019
  hypo

SEQ ID NO: 443354 - DNA, 200 bp, Homo sapiens; identical to SEQ ID NO: 9902
  chr14:90421129-90421329
  hypo

SEQ ID NO: 443355 - DNA, 727 bp, Homo sapiens; identical to SEQ ID NO: 203709
  chr14:90422068-90422795
  hypo

SEQ ID NO: 443356 - DNA, 167 bp, Homo sapiens; identical to SEQ ID NO: 266920
  chr14:90429698-90429865
  hypo

SEQ ID NO: 443357 - DNA, 163 bp, Homo sapiens; identical to SEQ ID NO: 215917
  chr14:90505789-90505952
  hypo

SEQ ID NO: 443358 - DNA, 188 bp, Homo sapiens; identical to SEQ ID NO: 422761
  chr14:90527324-90527512
  hypo

SEQ ID NO: 443359 - DNA, 91 bp, Homo sapiens; identical to SEQ ID NO: 266922
  chr14:90747429-90747520
  hypo

SEQ ID NO: 443360 - DNA, 214 bp, Homo sapiens; identical to SEQ ID NO: 266925
  chr14:90980461-90980675
  hypo

SEQ ID NO: 443361 - DNA, 109 bp, Homo sapiens; identical to SEQ ID NO: 318240
  chr14:90983360-90983469
  hypo

SEQ ID NO: 443362 - DNA, 164 bp, Homo sapiens; identical to SEQ ID NO: 266927
  chr14:90988561-90988725
  hypo

SEQ ID NO: 443363 - DNA, 90 bp, Homo sapiens; identical to SEQ ID NO: 266928
  chr14:90989573-90989663
  hypo

SEQ ID NO: 443364 - DNA, 168 bp, Homo sapiens; identical to SEQ ID NO: 266929
  chr14:91007706-91007874
  hypo

SEQ ID NO: 443365 - DNA, 103 bp, Homo sapiens; identical to SEQ ID NO: 266930
  chr14:91077534-91077637
  hypo

SEQ ID NO: 443366 - DNA, 176 bp, Homo sapiens; identical to SEQ ID NO: 266931
  chr14:91091768-91091944
  hypo

SEQ ID NO: 443367 - DNA, 131 bp, Homo sapiens; identical to SEQ ID NO: 215923
  chr14:91127198-91127329
  hypo

SEQ ID NO: 443368 - DNA, 187 bp, Homo sapiens; identical to SEQ ID NO: 266933
  chr14:91589623-91589810
  hypo

SEQ ID NO: 443369 - DNA, 35 bp, Homo sapiens; identical to SEQ ID NO: 266934
  chr14:91590535-91590570
  hypo

SEQ ID NO: 443370 - DNA, 38 bp, Homo sapiens; identical to SEQ ID NO: 318250
  chr14:91691822-91691860
  hypo

SEQ ID NO: 443371 - DNA, 157 bp, Homo sapiens; identical to SEQ ID NO: 266937
  chr14:91701162-91701319
  hypo

SEQ ID NO: 443372 - DNA, 161 bp, Homo sapiens; identical to SEQ ID NO: 266938
  chr14:91712444-91712605
  hypo

SEQ ID NO: 443373 - DNA, 62 bp, Homo sapiens; identical to SEQ ID NO: 215925
  chr14:91739006-91739068
  hypo

SEQ ID NO: 443374 - DNA, 408 bp, Homo sapiens; identical to SEQ ID NO: 266941
  chr14:91744077-91744485
  hypo

SEQ ID NO: 443375 - DNA, 67 bp, Homo sapiens; identical to SEQ ID NO: 318259
  chr14:91758193-91758260
  hypo

SEQ ID NO: 443376 - DNA, 395 bp, Homo sapiens; identical to SEQ ID NO: 215929
  chr14:91770038-91770433
  hypo

SEQ ID NO: 443377 - DNA, 100 bp, Homo sapiens; identical to SEQ ID NO: 215930
  chr14:91775792-91775892
  hypo

SEQ ID NO: 443378 - DNA, 123 bp, Homo sapiens; identical to SEQ ID NO: 318262
  chr14:91780259-91780382
  hypo

SEQ ID NO: 443379 - DNA, 168 bp, Homo sapiens; identical to SEQ ID NO: 215931
  chr14:91781818-91781986
  hypo

SEQ ID NO: 443380 - DNA, 252 bp, Homo sapiens; identical to SEQ ID NO: 266951
  chr14:91801542-91801794
  hypo

SEQ ID NO: 443381 - DNA, 413 bp, Homo sapiens; identical to SEQ ID NO: 266952
  chr14:91804341-91804754
  hypo

SEQ ID NO: 443382 - DNA, 104 bp, Homo sapiens; identical to SEQ ID NO: 215934
  chr14:91825112-91825216
  hypo

SEQ ID NO: 443383 - DNA, 53 bp, Homo sapiens; identical to SEQ ID NO: 215935
  chr14:91841581-91841634
  hypo

SEQ ID NO: 443384 - DNA, 224 bp, Homo sapiens; identical to SEQ ID NO: 266958
  chr14:91841940-91842164
  hypo

SEQ ID NO: 443385 - DNA, 236 bp, Homo sapiens; identical to SEQ ID NO: 215936
  chr14:91842554-91842790
  hypo

SEQ ID NO: 443386 - DNA, 189 bp, Homo sapiens; identical to SEQ ID NO: 215937
  chr14:91848934-91849123
  hypo

SEQ ID NO: 443387 - DNA, 207 bp, Homo sapiens; identical to SEQ ID NO: 215938
  chr14:91850943-91851150
  hypo

SEQ ID NO: 443388 - DNA, 213 bp, Homo sapiens; identical to SEQ ID NO: 266962
  chr14:91871519-91871732
  hypo

SEQ ID NO: 443389 - DNA, 479 bp, Homo sapiens; identical to SEQ ID NO: 290461
  chr14:91976436-91976915
  hypo

SEQ ID NO: 443390 - DNA, 199 bp, Homo sapiens; identical to SEQ ID NO: 215940
  chr14:92492743-92492942
  hypo

SEQ ID NO: 443391 - DNA, 43 bp, Homo sapiens; identical to SEQ ID NO: 266964
  chr14:92507492-92507535
  hypo

SEQ ID NO: 443392 - DNA, 39 bp, Homo sapiens; identical to SEQ ID NO: 266966
  chr14:92573383-92573422
  hypo

SEQ ID NO: 443393 - DNA, 43 bp, Homo sapiens; identical to SEQ ID NO: 266967
  chr14:92825888-92825931
  hypo

SEQ ID NO: 443394 - DNA, 44 bp, Homo sapiens; identical to SEQ ID NO: 266968
  chr14:92992506-92992550
  hypo

SEQ ID NO: 443395 - DNA, 338 bp, Homo sapiens; identical to SEQ ID NO: 266969
  chr14:92994813-92995151
  hypo

SEQ ID NO: 443396 - DNA, 44 bp, Homo sapiens; identical to SEQ ID NO: 266970
  chr14:93042658-93042702
  hypo

SEQ ID NO: 443397 - DNA, 225 bp, Homo sapiens; identical to SEQ ID NO: 266971
  chr14:93115303-93115528
  hypo

SEQ ID NO: 443398 - DNA, 129 bp, Homo sapiens; identical to SEQ ID NO: 266972
  chr14:93140294-93140423
  hypo

SEQ ID NO: 443399 - DNA, 100 bp, Homo sapiens; identical to SEQ ID NO: 266973
  chr14:93149543-93149643
  hypo

SEQ ID NO: 443400 - DNA, 103 bp, Homo sapiens; identical to SEQ ID NO: 266975
  chr14:93226911-93227014
  hypo

SEQ ID NO: 443401 - DNA, 713 bp, Homo sapiens; identical to SEQ ID NO: 266977
  chr14:93423289-93424002
  hypo

SEQ ID NO: 443402 - DNA, 211 bp, Homo sapiens; identical to SEQ ID NO: 266979
  chr14:93426323-93426534
  hypo

SEQ ID NO: 443403 - DNA, 240 bp, Homo sapiens; identical to SEQ ID NO: 266980
  chr14:93426785-93427025
  hypo

SEQ ID NO: 443404 - DNA, 189 bp, Homo sapiens; identical to SEQ ID NO: 215945
  chr14:93486022-93486211
  hypo

SEQ ID NO: 443405 - DNA, 181 bp, Homo sapiens; identical to SEQ ID NO: 266983
  chr14:93494484-93494665
  hypo

SEQ ID NO: 443406 - DNA, 136 bp, Homo sapiens; identical to SEQ ID NO: 266984
  chr14:93495039-93495175
  hypo

SEQ ID NO: 443407 - DNA, 180 bp, Homo sapiens; identical to SEQ ID NO: 266985
  chr14:93510736-93510916
  hypo

SEQ ID NO: 443408 - DNA, 350 bp, Homo sapiens; identical to SEQ ID NO: 318301
  chr14:93521883-93522233
  hypo

SEQ ID NO: 443409 - DNA, 46 bp, Homo sapiens; identical to SEQ ID NO: 215946
  chr14:93525816-93525862
  hypo

SEQ ID NO: 443410 - DNA, 281 bp, Homo sapiens; identical to SEQ ID NO: 266988
  chr14:93533287-93533568
  hypo

SEQ ID NO: 443411 - DNA, 54 bp, Homo sapiens; identical to SEQ ID NO: 266989
  chr14:93557922-93557976
  hypo

SEQ ID NO: 443412 - DNA, 33 bp, Homo sapiens; identical to SEQ ID NO: 215948
  chr14:93570836-93570869
  hypo

SEQ ID NO: 443413 - DNA, 120 bp, Homo sapiens; identical to SEQ ID NO: 266991
  chr14:93630791-93630911
  hypo

SEQ ID NO: 443414 - DNA, 127 bp, Homo sapiens; identical to SEQ ID NO: 318307
  chr14:93697057-93697184
  hypo

SEQ ID NO: 443415 - DNA, 120 bp, Homo sapiens; identical to SEQ ID NO: 266994
  chr14:93756455-93756575
  hypo

SEQ ID NO: 443416 - DNA, 85 bp, Homo sapiens; identical to SEQ ID NO: 215950
  chr14:93763605-93763690
  hypo

SEQ ID NO: 443417 - DNA, 312 bp, Homo sapiens; identical to SEQ ID NO: 266996
  chr14:93813480-93813792
  hypo

SEQ ID NO: 443418 - DNA, 100 bp, Homo sapiens; identical to SEQ ID NO: 266997
  chr14:94048704-94048804
  hypo

SEQ ID NO: 443419 - DNA, 242 bp, Homo sapiens; identical to SEQ ID NO: 266998
  chr14:94187385-94187627
  hypo

SEQ ID NO: 443420 - DNA, 371 bp, Homo sapiens; identical to SEQ ID NO: 267000
  chr14:94392582-94392953
  hypo

SEQ ID NO: 443421 - DNA, 58 bp, Homo sapiens; identical to SEQ ID NO: 267001
  chr14:94393219-94393277
  hypo

SEQ ID NO: 443422 - DNA, 71 bp, Homo sapiens; identical to SEQ ID NO: 203730
  chr14:94640376-94640447
  hypo

SEQ ID NO: 443423 - DNA, 175 bp, Homo sapiens; identical to SEQ ID NO: 267005
  chr14:94829568-94829743
  hypo

SEQ ID NO: 443424 - DNA, 124 bp, Homo sapiens; identical to SEQ ID NO: 267006
  chr14:95538387-95538511
  hypo

SEQ ID NO: 443425 - DNA, 148 bp, Homo sapiens; identical to SEQ ID NO: 267007
  chr14:95693650-95693798
  hypo

SEQ ID NO: 443426 - DNA, 42 bp, Homo sapiens; identical to SEQ ID NO: 267008
  chr14:95701034-95701076
  hypo

SEQ ID NO: 443427 - DNA, 301 bp, Homo sapiens; identical to SEQ ID NO: 318327
  chr14:95740116-95740417
  hypo

SEQ ID NO: 443428 - DNA, 36 bp, Homo sapiens; identical to SEQ ID NO: 203734
  chr14:95864478-95864514
  hypo

SEQ ID NO: 443429 - DNA, 148 bp, Homo sapiens; identical to SEQ ID NO: 267010
  chr14:95880712-95880860
  hypo

SEQ ID NO: 443430 - DNA, 312 bp, Homo sapiens; identical to SEQ ID NO: 318330
  chr14:95905972-95906284
  hypo

SEQ ID NO: 443431 - DNA, 129 bp, Homo sapiens; identical to SEQ ID NO: 318331
  chr14:95906356-95906485
  hypo

SEQ ID NO: 443432 - DNA, 274 bp, Homo sapiens; identical to SEQ ID NO: 290496
  chr14:95932315-95932589
  hypo

SEQ ID NO: 443433 - DNA, 35 bp, Homo sapiens; identical to SEQ ID NO: 215957
  chr14:96015607-96015642
  hypo

SEQ ID NO: 443434 - DNA, 295 bp, Homo sapiens; identical to SEQ ID NO: 203736
  chr14:96152751-96153046
  hypo

SEQ ID NO: 443435 - DNA, 40 bp, Homo sapiens; identical to SEQ ID NO: 203737
  chr14:96342210-96342250
  hypo

SEQ ID NO: 443436 - DNA, 80 bp, Homo sapiens; identical to SEQ ID NO: 215962
  chr14:96547952-96548032
  hypo

SEQ ID NO: 443437 - DNA, 295 bp, Homo sapiens; identical to SEQ ID NO: 267017
  chr14:96552858-96553153
  hypo

SEQ ID NO: 443438 - DNA, 202 bp, Homo sapiens; identical to SEQ ID NO: 215963
  chr14:96653271-96653473
  hypo

SEQ ID NO: 443439 - DNA, 489 bp, Homo sapiens; identical to SEQ ID NO: 267019
  chr14:96730194-96730683
  hypo

SEQ ID NO: 443440 - DNA, 186 bp, Homo sapiens; identical to SEQ ID NO: 267020
  chr14:96745877-96746063
  hypo

SEQ ID NO: 443441 - DNA, 37 bp, Homo sapiens; identical to SEQ ID NO: 267021
  chr14:96822200-96822237
  hypo

SEQ ID NO: 443442 - DNA, 78 bp, Homo sapiens; identical to SEQ ID NO: 267022
  chr14:96831096-96831174
  hypo

SEQ ID NO: 443443 - DNA, 141 bp, Homo sapiens; identical to SEQ ID NO: 215964
  chr14:96911952-96912093
  hypo

SEQ ID NO: 443444 - DNA, 36 bp, Homo sapiens; identical to SEQ ID NO: 267024
  chr14:96912990-96913026
  hypo

SEQ ID NO: 443445 - DNA, 82 bp, Homo sapiens; identical to SEQ ID NO: 267025
  chr14:96970710-96970792
  hypo

SEQ ID NO: 443446 - DNA, 92 bp, Homo sapiens; identical to SEQ ID NO: 267027
  chr14:97128737-97128829
  hypo

SEQ ID NO: 443447 - DNA, 37 bp, Homo sapiens; identical to SEQ ID NO: 215965
  chr14:97338413-97338450
  hypo

SEQ ID NO: 443448 - DNA, 140 bp, Homo sapiens; identical to SEQ ID NO: 267030
  chr14:97361314-97361454
  hypo

SEQ ID NO: 443449 - DNA, 42 bp, Homo sapiens; identical to SEQ ID NO: 267031
  chr14:97389552-97389594
  hypo

SEQ ID NO: 443450 - DNA, 65 bp, Homo sapiens; identical to SEQ ID NO: 267032
  chr14:97404572-97404637
  hypo

SEQ ID NO: 443451 - DNA, 33 bp, Homo sapiens; identical to SEQ ID NO: 267034
  chr14:97589660-97589693
  hypo

SEQ ID NO: 443452 - DNA, 57 bp, Homo sapiens; identical to SEQ ID NO: 203741
  chr14:97685959-97686016
  hypo

SEQ ID NO: 443453 - DNA, 214 bp, Homo sapiens; identical to SEQ ID NO: 267035
  chr14:99509012-99509226
  hypo

SEQ ID NO: 443454 - DNA, 117 bp, Homo sapiens; identical to SEQ ID NO: 215967
  chr14:99651822-99651939
  hypo

SEQ ID NO: 443455 - DNA, 330 bp, Homo sapiens; identical to SEQ ID NO: 267037
  chr14:99655545-99655875
  hypo

SEQ ID NO: 443456 - DNA, 97 bp, Homo sapiens; identical to SEQ ID NO: 267038
  chr14:99681714-99681811
  hypo

SEQ ID NO: 443457 - DNA, 77 bp, Homo sapiens; identical to SEQ ID NO: 215968
  chr14:99707131-99707208
  hypo

SEQ ID NO: 443458 - DNA, 71 bp, Homo sapiens; identical to SEQ ID NO: 267040
  chr14:99725776-99725847
  hypo

SEQ ID NO: 443459 - DNA, 223 bp, Homo sapiens; identical to SEQ ID NO: 267041
  chr14:99810717-99810940
  hypo

SEQ ID NO: 443460 - DNA, 178 bp, Homo sapiens; identical to SEQ ID NO: 267044
  chr14:99889214-99889392
  hypo

SEQ ID NO: 443461 - DNA, 205 bp, Homo sapiens; identical to SEQ ID NO: 215970
  chr14:99893210-99893415
  hypo

SEQ ID NO: 443462 - DNA, 225 bp, Homo sapiens; identical to SEQ ID NO: 267047
  chr14:99931509-99931734
  hypo

SEQ ID NO: 443463 - DNA, 241 bp, Homo sapiens; identical to SEQ ID NO: 267048
  chr14:99932772-99933013
  hypo

SEQ ID NO: 443464 - DNA, 567 bp, Homo sapiens; identical to SEQ ID NO: 267049
  chr14:99969303-99969870
  hypo

SEQ ID NO: 443465 - DNA, 100 bp, Homo sapiens; identical to SEQ ID NO: 215971
  chr14:99975812-99975912
  hypo

SEQ ID NO: 443466 - DNA, 61 bp, Homo sapiens; identical to SEQ ID NO: 215972
  chr14:99976343-99976404
  hypo

SEQ ID NO: 443467 - DNA, 81 bp, Homo sapiens; identical to SEQ ID NO: 267052
  chr14:99978205-99978286
  hypo

SEQ ID NO: 443468 - DNA, 1691 bp, Homo sapiens; identical to SEQ ID NO: 51671
  chr14:100069898-100071589
  hypo

SEQ ID NO: 443469 - DNA, 177 bp, Homo sapiens; identical to SEQ ID NO: 267053
  chr14:100118139-100118316
  hypo

SEQ ID NO: 443470 - DNA, 1115 bp, Homo sapiens; identical to SEQ ID NO: 290525
  chr14:100149732-100150847
  hypo

SEQ ID NO: 443471 - DNA, 270 bp, Homo sapiens; identical to SEQ ID NO: 267055
  chr14:100402447-100402717
  hypo

SEQ ID NO: 443472 - DNA, 162 bp, Homo sapiens; identical to SEQ ID NO: 290528
  chr14:100437167-100437329
  hypo

SEQ ID NO: 443473 - DNA, 183 bp, Homo sapiens; identical to SEQ ID NO: 267057
  chr14:100551051-100551234
  hypo

SEQ ID NO: 443474 - DNA, 62 bp, Homo sapiens; identical to SEQ ID NO: 215976
  chr14:100587318-100587380
  hypo

SEQ ID NO: 443475 - DNA, 245 bp, Homo sapiens; identical to SEQ ID NO: 267060
  chr14:100599148-100599393
  hypo

SEQ ID NO: 443476 - DNA, 397 bp, Homo sapiens; identical to SEQ ID NO: 267061
  chr14:100615563-100615960
  hypo

SEQ ID NO: 443477 - DNA, 248 bp, Homo sapiens; identical to SEQ ID NO: 290532
  chr14:100625926-100626174
  hypo

SEQ ID NO: 443478 - DNA, 64 bp, Homo sapiens; identical to SEQ ID NO: 125211
  chr14:100626295-100626359
  hypo

SEQ ID NO: 443479 - DNA, 87 bp, Homo sapiens; identical to SEQ ID NO: 215979
  chr14:100644135-100644222
  hypo

SEQ ID NO: 443480 - DNA, 228 bp, Homo sapiens; identical to SEQ ID NO: 267065
  chr14:100681486-100681714
  hypo

SEQ ID NO: 443481 - DNA, 206 bp, Homo sapiens; identical to SEQ ID NO: 267066
  chr14:100684860-100685066
  hypo

SEQ ID NO: 443482 - DNA, 97 bp, Homo sapiens; identical to SEQ ID NO: 267068
  chr14:100747814-100747911
  hypo

SEQ ID NO: 443483 - DNA, 34 bp, Homo sapiens; identical to SEQ ID NO: 215984
  chr14:100754246-100754280
  hypo

SEQ ID NO: 443484 - DNA, 103 bp, Homo sapiens; identical to SEQ ID NO: 267072
  chr14:100758850-100758953
  hypo

SEQ ID NO: 443485 - DNA, 402 bp, Homo sapiens; identical to SEQ ID NO: 290536
  chr14:100771908-100772310
  hypo

SEQ ID NO: 443486 - DNA, 370 bp, Homo sapiens; identical to SEQ ID NO: 203757
  chr14:100773262-100773632
  hypo

SEQ ID NO: 443487 - DNA, 244 bp, Homo sapiens; identical to SEQ ID NO: 267073
  chr14:100795242-100795486
  hypo

SEQ ID NO: 443488 - DNA, 145 bp, Homo sapiens; identical to SEQ ID NO: 267074
  chr14:100795807-100795952
  hypo

SEQ ID NO: 443489 - DNA, 41 bp, Homo sapiens; identical to SEQ ID NO: 267075
  chr14:100812221-100812262
  hypo

SEQ ID NO: 443490 - DNA, 198 bp, Homo sapiens; identical to SEQ ID NO: 215986
  chr14:100847790-100847988
  hypo

SEQ ID NO: 443491 - DNA, 126 bp, Homo sapiens; identical to SEQ ID NO: 267078
  chr14:100910095-100910221
  hypo

SEQ ID NO: 443492 - DNA, 161 bp, Homo sapiens; identical to SEQ ID NO: 267079
  chr14:100937837-100937998
  hypo

SEQ ID NO: 443493 - DNA, 67 bp, Homo sapiens; identical to SEQ ID NO: 267080
  chr14:100940878-100940945
  hypo

SEQ ID NO: 443494 - DNA, 42 bp, Homo sapiens; identical to SEQ ID NO: 267081
  chr14:100980664-100980706
  hypo

SEQ ID NO: 443495 - DNA, 193 bp, Homo sapiens; identical to SEQ ID NO: 267082
  chr14:100990019-100990212
  hypo

SEQ ID NO: 443496 - DNA, 1413 bp, Homo sapiens; identical to SEQ ID NO: 267083
  chr14:101003646-101005059
  hypo

SEQ ID NO: 443497 - DNA, 198 bp, Homo sapiens; identical to SEQ ID NO: 267084
  chr14:101005497-101005695
  hypo

SEQ ID NO: 443498 - DNA, 319 bp, Homo sapiens; identical to SEQ ID NO: 267085
  chr14:101060508-101060827
  hypo

SEQ ID NO: 443499 - DNA, 110 bp, Homo sapiens; identical to SEQ ID NO: 215988
  chr14:101133882-101133992
  hypo

SEQ ID NO: 443500 - DNA, 136 bp, Homo sapiens; identical to SEQ ID NO: 267089
  chr14:101155083-101155219
  hypo

SEQ ID NO: 443501 - DNA, 78 bp, Homo sapiens; identical to SEQ ID NO: 203758
  chr14:101192402-101192480
  hypo

SEQ ID NO: 443502 - DNA, 178 bp, Homo sapiens; identical to SEQ ID NO: 290542
  chr14:101192969-101193147
  hypo

SEQ ID NO: 443503 - DNA, 391 bp, Homo sapiens; identical to SEQ ID NO: 267090
  chr14:101198382-101198773
  hypo

SEQ ID NO: 443504 - DNA, 269 bp, Homo sapiens; identical to SEQ ID NO: 215992
  chr14:101348432-101348701
  hypo

SEQ ID NO: 443505 - DNA, 206 bp, Homo sapiens; identical to SEQ ID NO: 267095
  chr14:101377326-101377532
  hypo

SEQ ID NO: 443506 - DNA, 321 bp, Homo sapiens; identical to SEQ ID NO: 267097
  chr14:101491363-101491684
  hypo

SEQ ID NO: 443507 - DNA, 133 bp, Homo sapiens; identical to SEQ ID NO: 318430
  chr14:101506260-101506393
  hypo

SEQ ID NO: 443508 - DNA, 194 bp, Homo sapiens; identical to SEQ ID NO: 267100
  chr14:101515982-101516176
  hypo

SEQ ID NO: 443509 - DNA, 471 bp, Homo sapiens; identical to SEQ ID NO: 318432
  chr14:101531769-101532240
  hypo

SEQ ID NO: 443510 - DNA, 381 bp, Homo sapiens; identical to SEQ ID NO: 267102
  chr14:101569746-101570127
  hypo

SEQ ID NO: 443511 - DNA, 274 bp, Homo sapiens; identical to SEQ ID NO: 215997
  chr14:101579008-101579282
  hypo

SEQ ID NO: 443512 - DNA, 311 bp, Homo sapiens; identical to SEQ ID NO: 267104
  chr14:101592184-101592495
  hypo

SEQ ID NO: 443513 - DNA, 50 bp, Homo sapiens; identical to SEQ ID NO: 215998
  chr14:101638848-101638898
  hypo

SEQ ID NO: 443514 - DNA, 203 bp, Homo sapiens; identical to SEQ ID NO: 267106
  chr14:101640848-101641051
  hypo

SEQ ID NO: 443515 - DNA, 519 bp, Homo sapiens; identical to SEQ ID NO: 267107
  chr14:101693619-101694138
  hypo

SEQ ID NO: 443516 - DNA, 87 bp, Homo sapiens; identical to SEQ ID NO: 318439
  chr14:101694470-101694557
  hypo

SEQ ID NO: 443517 - DNA, 35 bp, Homo sapiens; identical to SEQ ID NO: 267109
  chr14:101716824-101716859
  hypo

SEQ ID NO: 443518 - DNA, 34 bp, Homo sapiens; identical to SEQ ID NO: 267110
  chr14:101727903-101727937
  hypo

SEQ ID NO: 443519 - DNA, 115 bp, Homo sapiens; identical to SEQ ID NO: 267111
  chr14:101834398-101834513
  hypo

SEQ ID NO: 443520 - DNA, 272 bp, Homo sapiens; identical to SEQ ID NO: 267112
  chr14:101874589-101874861
  hypo

SEQ ID NO: 443521 - DNA, 118 bp, Homo sapiens; identical to SEQ ID NO: 267114
  chr14:101994455-101994573
  hypo

SEQ ID NO: 443522 - DNA, 155 bp, Homo sapiens; identical to SEQ ID NO: 267115
  chr14:102018353-102018508
  hypo

SEQ ID NO: 443523 - DNA, 305 bp, Homo sapiens; identical to SEQ ID NO: 267116
  chr14:102053854-102054159
  hypo

SEQ ID NO: 443524 - DNA, 89 bp, Homo sapiens; identical to SEQ ID NO: 215999
  chr14:102093963-102094052
  hypo

SEQ ID NO: 443525 - DNA, 113 bp, Homo sapiens; identical to SEQ ID NO: 216000
  chr14:102094128-102094241
  hypo

SEQ ID NO: 443526 - DNA, 281 bp, Homo sapiens; identical to SEQ ID NO: 267119
  chr14:102175310-102175591
  hypo

SEQ ID NO: 443527 - DNA, 127 bp, Homo sapiens; identical to SEQ ID NO: 267120
  chr14:102186689-102186816
  hypo

SEQ ID NO: 443528 - DNA, 128 bp, Homo sapiens; identical to SEQ ID NO: 386592
  chr14:102230011-102230139
  hypo

SEQ ID NO: 443529 - DNA, 152 bp, Homo sapiens; identical to SEQ ID NO: 267122
  chr14:102239453-102239605
  hypo

SEQ ID NO: 443530 - DNA, 35 bp, Homo sapiens; identical to SEQ ID NO: 267123
  chr14:102286260-102286295
  hypo

SEQ ID NO: 443531 - DNA, 166 bp, Homo sapiens; identical to SEQ ID NO: 216001
  chr14:102293900-102294066
  hypo

SEQ ID NO: 443532 - DNA, 94 bp, Homo sapiens; identical to SEQ ID NO: 267125
  chr14:102302011-102302105
  hypo

SEQ ID NO: 443533 - DNA, 245 bp, Homo sapiens; identical to SEQ ID NO: 267127
  chr14:102307821-102308066
  hypo

SEQ ID NO: 443534 - DNA, 299 bp, Homo sapiens; identical to SEQ ID NO: 267128
  chr14:102325127-102325426
  hypo

SEQ ID NO: 443535 - DNA, 324 bp, Homo sapiens; identical to SEQ ID NO: 267129
  chr14:102330613-102330937
  hypo

SEQ ID NO: 443536 - DNA, 206 bp, Homo sapiens; identical to SEQ ID NO: 216003
  chr14:102343692-102343898
  hypo

SEQ ID NO: 443537 - DNA, 210 bp, Homo sapiens; identical to SEQ ID NO: 216006
  chr14:102360720-102360930
  hypo

SEQ ID NO: 443538 - DNA, 245 bp, Homo sapiens; identical to SEQ ID NO: 267135
  chr14:102361139-102361384
  hypo

SEQ ID NO: 443539 - DNA, 342 bp, Homo sapiens; identical to SEQ ID NO: 267137
  chr14:102391503-102391845
  hypo

SEQ ID NO: 443540 - DNA, 191 bp, Homo sapiens; identical to SEQ ID NO: 267138
  chr14:102392534-102392725
  hypo

SEQ ID NO: 443541 - DNA, 80 bp, Homo sapiens; identical to SEQ ID NO: 267139
  chr14:102396659-102396739
  hypo

SEQ ID NO: 443542 - DNA, 161 bp, Homo sapiens; identical to SEQ ID NO: 267140
  chr14:102398577-102398738
  hypo

SEQ ID NO: 443543 - DNA, 31 bp, Homo sapiens; identical to SEQ ID NO: 267141
  chr14:102416015-102416046
  hypo

SEQ ID NO: 443544 - DNA, 127 bp, Homo sapiens; identical to SEQ ID NO: 267143
  chr14:102429249-102429376
  hypo

SEQ ID NO: 443545 - DNA, 35 bp, Homo sapiens; identical to SEQ ID NO: 267144
  chr14:102450595-102450630
  hypo

SEQ ID NO: 443546 - DNA, 121 bp, Homo sapiens; identical to SEQ ID NO: 267147
  chr14:102499706-102499827
  hypo

SEQ ID NO: 443547 - DNA, 108 bp, Homo sapiens; identical to SEQ ID NO: 267149
  chr14:102510267-102510375
  hypo

SEQ ID NO: 443548 - DNA, 61 bp, Homo sapiens; identical to SEQ ID NO: 318485
  chr14:102530234-102530295
  hypo

SEQ ID NO: 443549 - DNA, 85 bp, Homo sapiens; identical to SEQ ID NO: 267154
  chr14:102592764-102592849
  hypo

SEQ ID NO: 443550 - DNA, 190 bp, Homo sapiens; identical to SEQ ID NO: 216013
  chr14:102635326-102635516
  hypo

SEQ ID NO: 443551 - DNA, 292 bp, Homo sapiens; identical to SEQ ID NO: 216014
  chr14:102650992-102651284
  hypo

SEQ ID NO: 443552 - DNA, 90 bp, Homo sapiens; identical to SEQ ID NO: 267157
  chr14:102668988-102669078
  hypo

SEQ ID NO: 443553 - DNA, 118 bp, Homo sapiens; identical to SEQ ID NO: 267158
  chr14:102680415-102680533
  hypo

SEQ ID NO: 443554 - DNA, 87 bp, Homo sapiens; identical to SEQ ID NO: 393390
  chr14:102681974-102682061
  hypo

SEQ ID NO: 443555 - DNA, 289 bp, Homo sapiens; identical to SEQ ID NO: 267160
  chr14:102685939-102686228
  hypo

SEQ ID NO: 443556 - DNA, 448 bp, Homo sapiens; identical to SEQ ID NO: 267162
  chr14:102695442-102695890
  hypo

SEQ ID NO: 443557 - DNA, 233 bp, Homo sapiens; identical to SEQ ID NO: 216018
  chr14:102793000-102793233
  hypo

SEQ ID NO: 443558 - DNA, 36 bp, Homo sapiens; identical to SEQ ID NO: 267164
  chr14:102900923-102900959
  hypo

SEQ ID NO: 443559 - DNA, 143 bp, Homo sapiens; identical to SEQ ID NO: 267165
  chr14:102901395-102901538
  hypo

SEQ ID NO: 443560 - DNA, 159 bp, Homo sapiens; identical to SEQ ID NO: 318498
  chr14:102909003-102909162
  hypo

SEQ ID NO: 443561 - DNA, 289 bp, Homo sapiens; identical to SEQ ID NO: 318499
  chr14:102909192-102909481
  hypo

SEQ ID NO: 443562 - DNA, 80 bp, Homo sapiens; identical to SEQ ID NO: 216019
  chr14:102931213-102931293
  hypo

SEQ ID NO: 443563 - DNA, 108 bp, Homo sapiens; identical to SEQ ID NO: 267168
  chr14:102931755-102931863
  hypo

SEQ ID NO: 443564 - DNA, 75 bp, Homo sapiens; identical to SEQ ID NO: 267170
  chr14:102961171-102961246
  hypo

SEQ ID NO: 443565 - DNA, 352 bp, Homo sapiens; identical to SEQ ID NO: 267171
  chr14:102961892-102962244
  hypo

SEQ ID NO: 443566 - DNA, 168 bp, Homo sapiens; identical to SEQ ID NO: 216021
  chr14:102966288-102966456
  hypo

SEQ ID NO: 443567 - DNA, 154 bp, Homo sapiens; identical to SEQ ID NO: 267176
  chr14:103019457-103019611
  hypo

SEQ ID NO: 443568 - DNA, 95 bp, Homo sapiens; identical to SEQ ID NO: 216024
  chr14:103046497-103046592
  hypo

SEQ ID NO: 443569 - DNA, 31 bp, Homo sapiens; identical to SEQ ID NO: 267178
  chr14:103055786-103055817
  hypo

SEQ ID NO: 443570 - DNA, 36 bp, Homo sapiens; identical to SEQ ID NO: 216025
  chr14:103109324-103109360
  hypo

SEQ ID NO: 443571 - DNA, 36 bp, Homo sapiens; identical to SEQ ID NO: 267180
  chr14:103109600-103109636
  hypo

SEQ ID NO: 443572 - DNA, 120 bp, Homo sapiens; identical to SEQ ID NO: 216026
  chr14:103144544-103144664
  hypo

SEQ ID NO: 443573 - DNA, 39 bp, Homo sapiens; identical to SEQ ID NO: 267182
  chr14:103193874-103193913
  hypo

SEQ ID NO: 443574 - DNA, 202 bp, Homo sapiens; identical to SEQ ID NO: 267183
  chr14:103215840-103216042
  hypo

SEQ ID NO: 443575 - DNA, 173 bp, Homo sapiens; identical to SEQ ID NO: 203767
  chr14:103242390-103242563
  hypo

SEQ ID NO: 443576 - DNA, 314 bp, Homo sapiens; identical to SEQ ID NO: 267186
  chr14:103242915-103243229
  hypo

SEQ ID NO: 443577 - DNA, 89 bp, Homo sapiens; identical to SEQ ID NO: 318520
  chr14:103277697-103277786
  hypo

SEQ ID NO: 443578 - DNA, 423 bp, Homo sapiens; identical to SEQ ID NO: 267189
  chr14:103363893-103364316
  hypo

SEQ ID NO: 443579 - DNA, 55 bp, Homo sapiens; identical to SEQ ID NO: 267190
  chr14:103366993-103367048
  hypo

SEQ ID NO: 443580 - DNA, 144 bp, Homo sapiens; identical to SEQ ID NO: 267192
  chr14:103391460-103391604
  hypo

SEQ ID NO: 443581 - DNA, 92 bp, Homo sapiens; identical to SEQ ID NO: 267193
  chr14:103397491-103397583
  hypo

SEQ ID NO: 443582 - DNA, 240 bp, Homo sapiens; identical to SEQ ID NO: 318527
  chr14:103406319-103406559
  hypo

SEQ ID NO: 443583 - DNA, 136 bp, Homo sapiens; identical to SEQ ID NO: 216032
  chr14:103407161-103407297
  hypo

SEQ ID NO: 443584 - DNA, 506 bp, Homo sapiens; identical to SEQ ID NO: 267196
  chr14:103408301-103408807
  hypo

SEQ ID NO: 443585 - DNA, 44 bp, Homo sapiens; identical to SEQ ID NO: 318531
  chr14:103416814-103416858
  hypo

SEQ ID NO: 443586 - DNA, 199 bp, Homo sapiens; identical to SEQ ID NO: 216035
  chr14:103421194-103421393
  hypo

SEQ ID NO: 443587 - DNA, 55 bp, Homo sapiens; identical to SEQ ID NO: 384547
  chr14:103430379-103430434
  hypo

SEQ ID NO: 443588 - DNA, 124 bp, Homo sapiens; identical to SEQ ID NO: 290568
  chr14:103430509-103430633
  hypo

SEQ ID NO: 443589 - DNA, 145 bp, Homo sapiens; identical to SEQ ID NO: 267202
  chr14:103432740-103432885
  hypo

SEQ ID NO: 443590 - DNA, 150 bp, Homo sapiens; identical to SEQ ID NO: 216040
  chr14:103442296-103442446
  hypo

SEQ ID NO: 443591 - DNA, 213 bp, Homo sapiens; identical to SEQ ID NO: 216041
  chr14:103444036-103444249
  hypo

SEQ ID NO: 443592 - DNA, 552 bp, Homo sapiens; identical to SEQ ID NO: 267207
  chr14:103453117-103453669
  hypo

SEQ ID NO: 443593 - DNA, 276 bp, Homo sapiens; identical to SEQ ID NO: 216043
  chr14:103460344-103460620
  hypo

SEQ ID NO: 443594 - DNA, 355 bp, Homo sapiens; identical to SEQ ID NO: 267210
  chr14:103467947-103468302
  hypo

SEQ ID NO: 443595 - DNA, 67 bp, Homo sapiens; identical to SEQ ID NO: 267211
  chr14:103470286-103470353
  hypo

SEQ ID NO: 443596 - DNA, 43 bp, Homo sapiens; identical to SEQ ID NO: 267213
  chr14:103487486-103487529
  hypo

SEQ ID NO: 443597 - DNA, 1541 bp, Homo sapiens; identical to SEQ ID NO: 203770
  chr14:103523058-103524599
  hypo

SEQ ID NO: 443598 - DNA, 34 bp, Homo sapiens; identical to SEQ ID NO: 267214
  chr14:103525032-103525066
  hypo

SEQ ID NO: 443599 - DNA, 93 bp, Homo sapiens; identical to SEQ ID NO: 267215
  chr14:103525306-103525399
  hypo

SEQ ID NO: 443600 - DNA, 215 bp, Homo sapiens; identical to SEQ ID NO: 267216
  chr14:103538914-103539129
  hypo

SEQ ID NO: 443601 - DNA, 307 bp, Homo sapiens; identical to SEQ ID NO: 267217
  chr14:103539677-103539984
  hypo

SEQ ID NO: 443602 - DNA, 77 bp, Homo sapiens; identical to SEQ ID NO: 203771
  chr14:103541957-103542034
  hypo

SEQ ID NO: 443603 - DNA, 169 bp, Homo sapiens; identical to SEQ ID NO: 267218
  chr14:103576354-103576523
  hypo

SEQ ID NO: 443604 - DNA, 33 bp, Homo sapiens; identical to SEQ ID NO: 267219
  chr14:103583158-103583191
  hypo

SEQ ID NO: 443605 - DNA, 219 bp, Homo sapiens; identical to SEQ ID NO: 290575
  chr14:103593755-103593974
  hypo

SEQ ID NO: 443606 - DNA, 289 bp, Homo sapiens; identical to SEQ ID NO: 290576
  chr14:103594004-103594293
  hypo

SEQ ID NO: 443607 - DNA, 142 bp, Homo sapiens; identical to SEQ ID NO: 267221
  chr14:103594643-103594785
  hypo

SEQ ID NO: 443608 - DNA, 407 bp, Homo sapiens; identical to SEQ ID NO: 267222
  chr14:103596229-103596636
  hypo

SEQ ID NO: 443609 - DNA, 72 bp, Homo sapiens; identical to SEQ ID NO: 267223
  chr14:103697779-103697851
  hypo

SEQ ID NO: 443610 - DNA, 57 bp, Homo sapiens; identical to SEQ ID NO: 267224
  chr14:103699248-103699305
  hypo

SEQ ID NO: 443611 - DNA, 35 bp, Homo sapiens; identical to SEQ ID NO: 267226
  chr14:103802598-103802633
  hypo

SEQ ID NO: 443612 - DNA, 167 bp, Homo sapiens; identical to SEQ ID NO: 267227
  chr14:103803090-103803257
  hypo

SEQ ID NO: 443613 - DNA, 158 bp, Homo sapiens; identical to SEQ ID NO: 267228
  chr14:103966175-103966333
  hypo

SEQ ID NO: 443614 - DNA, 439 bp, Homo sapiens; identical to SEQ ID NO: 267231
  chr14:103981303-103981742
  hypo

SEQ ID NO: 443615 - DNA, 284 bp, Homo sapiens; identical to SEQ ID NO: 267235
  chr14:104012458-104012742
  hypo

SEQ ID NO: 443616 - DNA, 454 bp, Homo sapiens; identical to SEQ ID NO: 267236
  chr14:104017444-104017898
  hypo

SEQ ID NO: 443617 - DNA, 37 bp, Homo sapiens; identical to SEQ ID NO: 216056
  chr14:104041400-104041437
  hypo

SEQ ID NO: 443618 - DNA, 119 bp, Homo sapiens; identical to SEQ ID NO: 216060
  chr14:104061735-104061854
  hypo

SEQ ID NO: 443619 - DNA, 119 bp, Homo sapiens; identical to SEQ ID NO: 290588
  chr14:104094604-104094723
  hypo

SEQ ID NO: 443620 - DNA, 119 bp, Homo sapiens; identical to SEQ ID NO: 318582
  chr14:104121158-104121277
  hypo

SEQ ID NO: 443621 - DNA, 114 bp, Homo sapiens; identical to SEQ ID NO: 216061
  chr14:104152224-104152338
  hypo

SEQ ID NO: 443622 - DNA, 153 bp, Homo sapiens; identical to SEQ ID NO: 267248
  chr14:104169506-104169659
  hypo

SEQ ID NO: 443623 - DNA, 131 bp, Homo sapiens; identical to SEQ ID NO: 267249
  chr14:104188353-104188484
  hypo

SEQ ID NO: 443624 - DNA, 152 bp, Homo sapiens; identical to SEQ ID NO: 267252
  chr14:104200030-104200182
  hypo

SEQ ID NO: 443625 - DNA, 121 bp, Homo sapiens; identical to SEQ ID NO: 216070
  chr14:104204087-104204208
  hypo

SEQ ID NO: 443626 - DNA, 65 bp, Homo sapiens; identical to SEQ ID NO: 267255
  chr14:104222924-104222989
  hypo

SEQ ID NO: 443627 - DNA, 88 bp, Homo sapiens; identical to SEQ ID NO: 216071
  chr14:104231446-104231534
  hypo

SEQ ID NO: 443628 - DNA, 45 bp, Homo sapiens; identical to SEQ ID NO: 216072
  chr14:104335355-104335400
  hypo

SEQ ID NO: 443629 - DNA, 202 bp, Homo sapiens; identical to SEQ ID NO: 216073
  chr14:104335677-104335879
  hypo

SEQ ID NO: 443630 - DNA, 82 bp, Homo sapiens; identical to SEQ ID NO: 216074
  chr14:104349424-104349506
  hypo

SEQ ID NO: 443631 - DNA, 129 bp, Homo sapiens; identical to SEQ ID NO: 216075
  chr14:104353834-104353963
  hypo

SEQ ID NO: 443632 - DNA, 603 bp, Homo sapiens; identical to SEQ ID NO: 267261
  chr14:104393986-104394589
  hypo

SEQ ID NO: 443633 - DNA, 63 bp, Homo sapiens; identical to SEQ ID NO: 216078
  chr14:104548475-104548538
  hypo

SEQ ID NO: 443634 - DNA, 231 bp, Homo sapiens; identical to SEQ ID NO: 267264
  chr14:104570011-104570242
  hypo

SEQ ID NO: 443635 - DNA, 111 bp, Homo sapiens; identical to SEQ ID NO: 267265
  chr14:104571681-104571792
  hypo

SEQ ID NO: 443636 - DNA, 112 bp, Homo sapiens; identical to SEQ ID NO: 267266
  chr14:104600535-104600647
  hypo

SEQ ID NO: 443637 - DNA, 35 bp, Homo sapiens; identical to SEQ ID NO: 267270
  chr14:104627959-104627994
  hypo

SEQ ID NO: 443638 - DNA, 120 bp, Homo sapiens; identical to SEQ ID NO: 318621
  chr14:104647088-104647208
  hypo

SEQ ID NO: 443639 - DNA, 193 bp, Homo sapiens; identical to SEQ ID NO: 267281
  chr14:104655996-104656189
  hypo

SEQ ID NO: 443640 - DNA, 96 bp, Homo sapiens; identical to SEQ ID NO: 267282
  chr14:104678739-104678835
  hypo

SEQ ID NO: 443641 - DNA, 398 bp, Homo sapiens; identical to SEQ ID NO: 318624
  chr14:104679858-104680256
  hypo

SEQ ID NO: 443642 - DNA, 362 bp, Homo sapiens; identical to SEQ ID NO: 318625
  chr14:104695970-104696332
  hypo

SEQ ID NO: 443643 - DNA, 133 bp, Homo sapiens; identical to SEQ ID NO: 267285
  chr14:104718711-104718844
  hypo

SEQ ID NO: 443644 - DNA, 90 bp, Homo sapiens; identical to SEQ ID NO: 216083
  chr14:104733749-104733839
  hypo

SEQ ID NO: 443645 - DNA, 70 bp, Homo sapiens; identical to SEQ ID NO: 267288
  chr14:104761170-104761240
  hypo

SEQ ID NO: 443646 - DNA, 205 bp, Homo sapiens; identical to SEQ ID NO: 318630
  chr14:104770380-104770585
  hypo

SEQ ID NO: 443647 - DNA, 129 bp, Homo sapiens; identical to SEQ ID NO: 216084
  chr14:104800476-104800605
  hypo

SEQ ID NO: 443648 - DNA, 334 bp, Homo sapiens; identical to SEQ ID NO: 318632
  chr14:104800643-104800977
  hypo

SEQ ID NO: 443649 - DNA, 108 bp, Homo sapiens; identical to SEQ ID NO: 267291
  chr14:104812558-104812666
  hypo

SEQ ID NO: 443650 - DNA, 96 bp, Homo sapiens; identical to SEQ ID NO: 267292
  chr14:104813189-104813285
  hypo

SEQ ID NO: 443651 - DNA, 36 bp, Homo sapiens; identical to SEQ ID NO: 267293
  chr14:104813345-104813381
  hypo

SEQ ID NO: 443652 - DNA, 207 bp, Homo sapiens; identical to SEQ ID NO: 267294
  chr14:104824380-104824587
  hypo

SEQ ID NO: 443653 - DNA, 255 bp, Homo sapiens; identical to SEQ ID NO: 267295
  chr14:104839337-104839592
  hypo

SEQ ID NO: 443654 - DNA, 46 bp, Homo sapiens; identical to SEQ ID NO: 216086
  chr14:104854591-104854637
  hypo

SEQ ID NO: 443655 - DNA, 185 bp, Homo sapiens; identical to SEQ ID NO: 216087
  chr14:104854673-104854858
  hypo

SEQ ID NO: 443656 - DNA, 69 bp, Homo sapiens; identical to SEQ ID NO: 267298
  chr14:104893581-104893650
  hypo

SEQ ID NO: 443657 - DNA, 271 bp, Homo sapiens; identical to SEQ ID NO: 216088
  chr14:104895986-104896257
  hypo

SEQ ID NO: 443658 - DNA, 85 bp, Homo sapiens; identical to SEQ ID NO: 216089
  chr14:105102963-105103048
  hypo

SEQ ID NO: 443659 - DNA, 67 bp, Homo sapiens; identical to SEQ ID NO: 267303
  chr14:105119951-105120018
  hypo

SEQ ID NO: 443660 - DNA, 304 bp, Homo sapiens; identical to SEQ ID NO: 267304
  chr14:105149126-105149430
  hypo

SEQ ID NO: 443661 - DNA, 114 bp, Homo sapiens; identical to SEQ ID NO: 216091
  chr14:105153068-105153182
  hypo

SEQ ID NO: 443662 - DNA, 122 bp, Homo sapiens; identical to SEQ ID NO: 318647
  chr14:105157363-105157485
  hypo

SEQ ID NO: 443663 - DNA, 64 bp, Homo sapiens; identical to SEQ ID NO: 318648
  chr14:105174394-105174458
  hypo

SEQ ID NO: 443664 - DNA, 56 bp, Homo sapiens; identical to SEQ ID NO: 216092
  chr14:105181888-105181944
  hypo

SEQ ID NO: 443665 - DNA, 161 bp, Homo sapiens; identical to SEQ ID NO: 267309
  chr14:105182343-105182504
  hypo

SEQ ID NO: 443666 - DNA, 337 bp, Homo sapiens; identical to SEQ ID NO: 290602
  chr14:105195466-105195803
  hypo

SEQ ID NO: 443667 - DNA, 198 bp, Homo sapiens; identical to SEQ ID NO: 267312
  chr14:105201187-105201385
  hypo

SEQ ID NO: 443668 - DNA, 157 bp, Homo sapiens; identical to SEQ ID NO: 216095
  chr14:105204798-105204955
  hypo

SEQ ID NO: 443669 - DNA, 44 bp, Homo sapiens; identical to SEQ ID NO: 216096
  chr14:105223769-105223813
  hypo

SEQ ID NO: 443670 - DNA, 108 bp, Homo sapiens; identical to SEQ ID NO: 267317
  chr14:105225798-105225906
  hypo

SEQ ID NO: 443671 - DNA, 166 bp, Homo sapiens; identical to SEQ ID NO: 267318
  chr14:105226172-105226338
  hypo

SEQ ID NO: 443672 - DNA, 94 bp, Homo sapiens; identical to SEQ ID NO: 216097
  chr14:105236575-105236669
  hypo

SEQ ID NO: 443673 - DNA, 58 bp, Homo sapiens; identical to SEQ ID NO: 216099
  chr14:105245408-105245466
  hypo

SEQ ID NO: 443674 - DNA, 317 bp, Homo sapiens; identical to SEQ ID NO: 290604
  chr14:105269022-105269339
  hypo

SEQ ID NO: 443675 - DNA, 64 bp, Homo sapiens; identical to SEQ ID NO: 267327
  chr14:105270250-105270314
  hypo

SEQ ID NO: 443676 - DNA, 128 bp, Homo sapiens; identical to SEQ ID NO: 267328
  chr14:105273627-105273755
  hypo

SEQ ID NO: 443677 - DNA, 188 bp, Homo sapiens; identical to SEQ ID NO: 267329
  chr14:105335727-105335915
  hypo

SEQ ID NO: 443678 - DNA, 189 bp, Homo sapiens; identical to SEQ ID NO: 267330
  chr14:105347539-105347728
  hypo

SEQ ID NO: 443679 - DNA, 67 bp, Homo sapiens; identical to SEQ ID NO: 267331
  chr14:105349524-105349591
  hypo

SEQ ID NO: 443680 - DNA, 155 bp, Homo sapiens; identical to SEQ ID NO: 267332
  chr14:105349621-105349776
  hypo

SEQ ID NO: 443681 - DNA, 108 bp, Homo sapiens; identical to SEQ ID NO: 216103
  chr14:105350162-105350270
  hypo

SEQ ID NO: 443682 - DNA, 62 bp, Homo sapiens; identical to SEQ ID NO: 267334
  chr14:105351133-105351195
  hypo

SEQ ID NO: 443683 - DNA, 240 bp, Homo sapiens; identical to SEQ ID NO: 267335
  chr14:105352620-105352860
  hypo

SEQ ID NO: 443684 - DNA, 71 bp, Homo sapiens; identical to SEQ ID NO: 267336
  chr14:105355231-105355302
  hypo

SEQ ID NO: 443685 - DNA, 125 bp, Homo sapiens; identical to SEQ ID NO: 267337
  chr14:105362737-105362862
  hypo

SEQ ID NO: 443686 - DNA, 37 bp, Homo sapiens; identical to SEQ ID NO: 216104
  chr14:105457659-105457696
  hypo

SEQ ID NO: 443687 - DNA, 581 bp, Homo sapiens; identical to SEQ ID NO: 216105
  chr14:105457777-105458358
  hypo

SEQ ID NO: 443688 - DNA, 54 bp, Homo sapiens; identical to SEQ ID NO: 267339
  chr14:105464945-105464999
  hypo

SEQ ID NO: 443689 - DNA, 95 bp, Homo sapiens; identical to SEQ ID NO: 267340
  chr14:105468472-105468567
  hypo

SEQ ID NO: 443690 - DNA, 300 bp, Homo sapiens; identical to SEQ ID NO: 216106
  chr14:105469615-105469915
  hypo

SEQ ID NO: 443691 - DNA, 124 bp, Homo sapiens; identical to SEQ ID NO: 267343
  chr14:105478880-105479004
  hypo

SEQ ID NO: 443692 - DNA, 97 bp, Homo sapiens; identical to SEQ ID NO: 290613
  chr14:105511596-105511693
  hypo

SEQ ID NO: 443693 - DNA, 38 bp, Homo sapiens; identical to SEQ ID NO: 267344
  chr14:105516268-105516306
  hypo

SEQ ID NO: 443694 - DNA, 50 bp, Homo sapiens; identical to SEQ ID NO: 216108
  chr14:105533295-105533345
  hypo

SEQ ID NO: 443695 - DNA, 173 bp, Homo sapiens; identical to SEQ ID NO: 216109
  chr14:105538393-105538566
  hypo

SEQ ID NO: 443696 - DNA, 33 bp, Homo sapiens; identical to SEQ ID NO: 267349
  chr14:105547474-105547507
  hypo

SEQ ID NO: 443697 - DNA, 45 bp, Homo sapiens; identical to SEQ ID NO: 267350
  chr14:105610437-105610482
  hypo

SEQ ID NO: 443698 - DNA, 220 bp, Homo sapiens; identical to SEQ ID NO: 216111
  chr14:105612116-105612336
  hypo

SEQ ID NO: 443699 - DNA, 378 bp, Homo sapiens; identical to SEQ ID NO: 267353
  chr14:105612739-105613117
  hypo

SEQ ID NO: 443700 - DNA, 214 bp, Homo sapiens; identical to SEQ ID NO: 267354
  chr14:105616974-105617188
  hypo

SEQ ID NO: 443701 - DNA, 324 bp, Homo sapiens; identical to SEQ ID NO: 267355
  chr14:105621962-105622286
  hypo

SEQ ID NO: 443702 - DNA, 57 bp, Homo sapiens; identical to SEQ ID NO: 216113
  chr14:105639401-105639458
  hypo

SEQ ID NO: 443703 - DNA, 155 bp, Homo sapiens; identical to SEQ ID NO: 290617
  chr14:105647609-105647764
  hypo

SEQ ID NO: 443704 - DNA, 98 bp, Homo sapiens; identical to SEQ ID NO: 216115
  chr14:105688874-105688972
  hypo

SEQ ID NO: 443705 - DNA, 270 bp, Homo sapiens; identical to SEQ ID NO: 267360
  chr14:105690180-105690450
  hypo

SEQ ID NO: 443706 - DNA, 180 bp, Homo sapiens; identical to SEQ ID NO: 267362
  chr14:105717870-105718050
  hypo

SEQ ID NO: 443707 - DNA, 79 bp, Homo sapiens; identical to SEQ ID NO: 267363
  chr14:105720530-105720609
  hypo

SEQ ID NO: 443708 - DNA, 180 bp, Homo sapiens; identical to SEQ ID NO: 203794
  chr14:105781805-105781985
  hypo

SEQ ID NO: 443709 - DNA, 94 bp, Homo sapiens; identical to SEQ ID NO: 216119
  chr14:105796585-105796679
  hypo

SEQ ID NO: 443710 - DNA, 202 bp, Homo sapiens; identical to SEQ ID NO: 224811
  chr15:20478123-20478325
  hypo

SEQ ID NO: 443711 - DNA, 148 bp, Homo sapiens; identical to SEQ ID NO: 267369
  chr15:22803359-22803507
  hypo

SEQ ID NO: 443712 - DNA, 760 bp, Homo sapiens; identical to SEQ ID NO: 290622
  chr15:22892004-22892764
  hypo

SEQ ID NO: 443713 - DNA, 60 bp, Homo sapiens; identical to SEQ ID NO: 267371
  chr15:22920760-22920820
  hypo

SEQ ID NO: 443714 - DNA, 118 bp, Homo sapiens; identical to SEQ ID NO: 216121
  chr15:22929815-22929933
  hypo

SEQ ID NO: 443715 - DNA, 44 bp, Homo sapiens; identical to SEQ ID NO: 267374
  chr15:22930284-22930328
  hypo

SEQ ID NO: 443716 - DNA, 293 bp, Homo sapiens; identical to SEQ ID NO: 267375
  chr15:22933549-22933842
  hypo

SEQ ID NO: 443717 - DNA, 52 bp, Homo sapiens; identical to SEQ ID NO: 267376
  chr15:22940780-22940832
  hypo

SEQ ID NO: 443718 - DNA, 86 bp, Homo sapiens; identical to SEQ ID NO: 216122
  chr15:22945063-22945149
  hypo

SEQ ID NO: 443719 - DNA, 142 bp, Homo sapiens; identical to SEQ ID NO: 216123
  chr15:22966142-22966284
  hypo

SEQ ID NO: 443720 - DNA, 116 bp, Homo sapiens; identical to SEQ ID NO: 216124
  chr15:22968266-22968382
  hypo

SEQ ID NO: 443721 - DNA, 240 bp, Homo sapiens; identical to SEQ ID NO: 267381
  chr15:22968629-22968869
  hypo

SEQ ID NO: 443722 - DNA, 82 bp, Homo sapiens; identical to SEQ ID NO: 318732
  chr15:22977248-22977330
  hypo

SEQ ID NO: 443723 - DNA, 103 bp, Homo sapiens; identical to SEQ ID NO: 216126
  chr15:22979738-22979841
  hypo

SEQ ID NO: 443724 - DNA, 114 bp, Homo sapiens; identical to SEQ ID NO: 267384
  chr15:22994699-22994813
  hypo

SEQ ID NO: 443725 - DNA, 35 bp, Homo sapiens; identical to SEQ ID NO: 216127
  chr15:23077086-23077121
  hypo

SEQ ID NO: 443726 - DNA, 353 bp, Homo sapiens; identical to SEQ ID NO: 318736
  chr15:23084862-23085215
  hypo

SEQ ID NO: 443727 - DNA, 229 bp, Homo sapiens; identical to SEQ ID NO: 267387
  chr15:25863450-25863679
  hypo

SEQ ID NO: 443728 - DNA, 152 bp, Homo sapiens; identical to SEQ ID NO: 267388
  chr15:25918277-25918429
  hypo

SEQ ID NO: 443729 - DNA, 51 bp, Homo sapiens; identical to SEQ ID NO: 267389
  chr15:25940021-25940072
  hypo

SEQ ID NO: 443730 - DNA, 301 bp, Homo sapiens; identical to SEQ ID NO: 216129
  chr15:25963361-25963662
  hypo

SEQ ID NO: 443731 - DNA, 158 bp, Homo sapiens; identical to SEQ ID NO: 267391
  chr15:25972184-25972342
  hypo

SEQ ID NO: 443732 - DNA, 104 bp, Homo sapiens; identical to SEQ ID NO: 267395
  chr15:27494275-27494379
  hypo

SEQ ID NO: 443733 - DNA, 274 bp, Homo sapiens; identical to SEQ ID NO: 267396
  chr15:27959332-27959606
  hypo

SEQ ID NO: 443734 - DNA, 94 bp, Homo sapiens; identical to SEQ ID NO: 267397
  chr15:27959726-27959820
  hypo

SEQ ID NO: 443735 - DNA, 125 bp, Homo sapiens; identical to SEQ ID NO: 216132
  chr15:28356786-28356911
  hypo

SEQ ID NO: 443736 - DNA, 149 bp, Homo sapiens; identical to SEQ ID NO: 267399
  chr15:28358254-28358403
  hypo

SEQ ID NO: 443737 - DNA, 92 bp, Homo sapiens; identical to SEQ ID NO: 267401
  chr15:28377832-28377924
  hypo

SEQ ID NO: 443738 - DNA, 50 bp, Homo sapiens; identical to SEQ ID NO: 318752
  chr15:28389777-28389827
  hypo

SEQ ID NO: 443739 - DNA, 65 bp, Homo sapiens; identical to SEQ ID NO: 216133
  chr15:28390033-28390098
  hypo

SEQ ID NO: 443740 - DNA, 86 bp, Homo sapiens; identical to SEQ ID NO: 216136
  chr15:28900534-28900620
  hypo

SEQ ID NO: 443741 - DNA, 120 bp, Homo sapiens; identical to SEQ ID NO: 267406
  chr15:29029577-29029697
  hypo

SEQ ID NO: 443742 - DNA, 152 bp, Homo sapiens; identical to SEQ ID NO: 216137
  chr15:29101155-29101307
  hypo

SEQ ID NO: 443743 - DNA, 32 bp, Homo sapiens; identical to SEQ ID NO: 216138
  chr15:29101367-29101399
  hypo

SEQ ID NO: 443744 - DNA, 45 bp, Homo sapiens; identical to SEQ ID NO: 203802
  chr15:29107356-29107401
  hypo

SEQ ID NO: 443745 - DNA, 86 bp, Homo sapiens; identical to SEQ ID NO: 216140
  chr15:29111213-29111299
  hypo

SEQ ID NO: 443746 - DNA, 43 bp, Homo sapiens; identical to SEQ ID NO: 267410
  chr15:29114837-29114880
  hypo

SEQ ID NO: 443747 - DNA, 502 bp, Homo sapiens; identical to SEQ ID NO: 267412
  chr15:29140040-29140542
  hypo

SEQ ID NO: 443748 - DNA, 89 bp, Homo sapiens; identical to SEQ ID NO: 267413
  chr15:29144522-29144611
  hypo

SEQ ID NO: 443749 - DNA, 92 bp, Homo sapiens; identical to SEQ ID NO: 267415
  chr15:29146201-29146293
  hypo

SEQ ID NO: 443750 - DNA, 66 bp, Homo sapiens; identical to SEQ ID NO: 267416
  chr15:29223574-29223640
  hypo

SEQ ID NO: 443751 - DNA, 350 bp, Homo sapiens; identical to SEQ ID NO: 216141
  chr15:29236505-29236855
  hypo

SEQ ID NO: 443752 - DNA, 1187 bp, Homo sapiens; identical to SEQ ID NO: 267419
  chr15:29345750-29346937
  hypo

SEQ ID NO: 443753 - DNA, 157 bp, Homo sapiens; identical to SEQ ID NO: 267420
  chr15:29357222-29357379
  hypo

SEQ ID NO: 443754 - DNA, 83 bp, Homo sapiens; identical to SEQ ID NO: 318772
  chr15:29389587-29389670
  hypo

SEQ ID NO: 443755 - DNA, 71 bp, Homo sapiens; identical to SEQ ID NO: 318773
  chr15:29389700-29389771
  hypo

SEQ ID NO: 443756 - DNA, 39 bp, Homo sapiens; identical to SEQ ID NO: 290642
  chr15:29395819-29395858
  hypo

SEQ ID NO: 443757 - DNA, 65 bp, Homo sapiens; identical to SEQ ID NO: 290643
  chr15:29396084-29396149
  hypo

SEQ ID NO: 443758 - DNA, 156 bp, Homo sapiens; identical to SEQ ID NO: 216143
  chr15:29398812-29398968
  hypo

SEQ ID NO: 443759 - DNA, 42 bp, Homo sapiens; identical to SEQ ID NO: 267423
  chr15:29403248-29403290
  hypo

SEQ ID NO: 443760 - DNA, 427 bp, Homo sapiens; identical to SEQ ID NO: 216144
  chr15:29410106-29410533
  hypo

SEQ ID NO: 443761 - DNA, 172 bp, Homo sapiens; identical to SEQ ID NO: 216145
  chr15:29410566-29410738
  hypo

SEQ ID NO: 443762 - DNA, 187 bp, Homo sapiens; identical to SEQ ID NO: 267426
  chr15:29411084-29411271
  hypo

SEQ ID NO: 443763 - DNA, 61 bp, Homo sapiens; identical to SEQ ID NO: 216146
  chr15:29415482-29415543
  hypo

SEQ ID NO: 443764 - DNA, 61 bp, Homo sapiens; identical to SEQ ID NO: 410152
  chr15:29418534-29418595
  hypo

SEQ ID NO: 443765 - DNA, 60 bp, Homo sapiens; identical to SEQ ID NO: 216150
  chr15:29428200-29428260
  hypo

SEQ ID NO: 443766 - DNA, 109 bp, Homo sapiens; identical to SEQ ID NO: 267432
  chr15:29431470-29431579
  hypo

SEQ ID NO: 443767 - DNA, 64 bp, Homo sapiens; identical to SEQ ID NO: 216151
  chr15:29448969-29449033
  hypo

SEQ ID NO: 443768 - DNA, 65 bp, Homo sapiens; identical to SEQ ID NO: 267434
  chr15:29487547-29487612
  hypo

SEQ ID NO: 443769 - DNA, 78 bp, Homo sapiens; identical to SEQ ID NO: 267435
  chr15:29697962-29698040
  hypo

SEQ ID NO: 443770 - DNA, 72 bp, Homo sapiens; identical to SEQ ID NO: 267436
  chr15:30022825-30022897
  hypo

SEQ ID NO: 443771 - DNA, 37 bp, Homo sapiens; identical to SEQ ID NO: 267437
  chr15:30024947-30024984
  hypo

SEQ ID NO: 443772 - DNA, 42 bp, Homo sapiens; identical to SEQ ID NO: 267438
  chr15:30333821-30333863
  hypo

SEQ ID NO: 443773 - DNA, 55 bp, Homo sapiens; identical to SEQ ID NO: 216157
  chr15:31194968-31195023
  hypo

SEQ ID NO: 443774 - DNA, 90 bp, Homo sapiens; identical to SEQ ID NO: 267442
  chr15:31239318-31239408
  hypo

SEQ ID NO: 443775 - DNA, 34 bp, Homo sapiens; identical to SEQ ID NO: 216158
  chr15:31290000-31290034
  hypo

SEQ ID NO: 443776 - DNA, 33 bp, Homo sapiens; identical to SEQ ID NO: 216159
  chr15:31290274-31290307
  hypo

SEQ ID NO: 443777 - DNA, 210 bp, Homo sapiens; identical to SEQ ID NO: 267445
  chr15:31332301-31332511
  hypo

SEQ ID NO: 443778 - DNA, 157 bp, Homo sapiens; identical to SEQ ID NO: 216160
  chr15:31395008-31395165
  hypo

SEQ ID NO: 443779 - DNA, 75 bp, Homo sapiens; identical to SEQ ID NO: 267449
  chr15:31490444-31490519
  hypo

SEQ ID NO: 443780 - DNA, 161 bp, Homo sapiens; identical to SEQ ID NO: 224818
  chr15:31508793-31508954
  hypo

SEQ ID NO: 443781 - DNA, 44 bp, Homo sapiens; identical to SEQ ID NO: 267450
  chr15:31512245-31512289
  hypo

SEQ ID NO: 443782 - DNA, 315 bp, Homo sapiens; identical to SEQ ID NO: 216161
  chr15:31533287-31533602
  hypo

SEQ ID NO: 443783 - DNA, 40 bp, Homo sapiens; identical to SEQ ID NO: 216162
  chr15:31533632-31533672
  hypo

SEQ ID NO: 443784 - DNA, 38 bp, Homo sapiens; identical to SEQ ID NO: 267456
  chr15:31611580-31611618
  hypo

SEQ ID NO: 443785 - DNA, 50 bp, Homo sapiens; identical to SEQ ID NO: 267457
  chr15:31632061-31632111
  hypo

SEQ ID NO: 443786 - DNA, 457 bp, Homo sapiens; identical to SEQ ID NO: 267462
  chr15:31776581-31777038
  hypo

SEQ ID NO: 443787 - DNA, 200 bp, Homo sapiens; identical to SEQ ID NO: 216164
  chr15:31851205-31851405
  hypo

SEQ ID NO: 443788 - DNA, 38 bp, Homo sapiens; identical to SEQ ID NO: 267464
  chr15:32942576-32942614
  hypo

SEQ ID NO: 443789 - DNA, 106 bp, Homo sapiens; identical to SEQ ID NO: 267465
  chr15:33358715-33358821
  hypo

SEQ ID NO: 443790 - DNA, 133 bp, Homo sapiens; identical to SEQ ID NO: 267466
  chr15:33359132-33359265
  hypo

SEQ ID NO: 443791 - DNA, 120 bp, Homo sapiens; identical to SEQ ID NO: 267468
  chr15:33541443-33541563
  hypo

SEQ ID NO: 443792 - DNA, 34 bp, Homo sapiens; identical to SEQ ID NO: 216166
  chr15:33550215-33550249
  hypo

SEQ ID NO: 443793 - DNA, 210 bp, Homo sapiens; identical to SEQ ID NO: 51852
  chr15:33603879-33604089
  hypo

SEQ ID NO: 443794 - DNA, 118 bp, Homo sapiens; identical to SEQ ID NO: 267470
  chr15:33746678-33746796
  hypo

SEQ ID NO: 443795 - DNA, 149 bp, Homo sapiens; identical to SEQ ID NO: 267472
  chr15:33969176-33969325
  hypo

SEQ ID NO: 443796 - DNA, 98 bp, Homo sapiens; identical to SEQ ID NO: 267473
  chr15:34142220-34142318
  hypo

SEQ ID NO: 443797 - DNA, 120 bp, Homo sapiens; identical to SEQ ID NO: 267474
  chr15:34322808-34322928
  hypo

SEQ ID NO: 443798 - DNA, 510 bp, Homo sapiens; identical to SEQ ID NO: 267475
  chr15:34358082-34358592
  hypo

SEQ ID NO: 443799 - DNA, 210 bp, Homo sapiens; identical to SEQ ID NO: 267476
  chr15:34395526-34395736
  hypo

SEQ ID NO: 443800 - DNA, 44 bp, Homo sapiens; identical to SEQ ID NO: 267478
  chr15:34524063-34524107
  hypo

SEQ ID NO: 443801 - DNA, 82 bp, Homo sapiens; identical to SEQ ID NO: 216169
  chr15:34546026-34546108
  hypo

SEQ ID NO: 443802 - DNA, 152 bp, Homo sapiens; identical to SEQ ID NO: 267480
  chr15:34630947-34631099
  hypo

SEQ ID NO: 443803 - DNA, 31 bp, Homo sapiens; identical to SEQ ID NO: 267485
  chr15:35384634-35384665
  hypo

SEQ ID NO: 443804 - DNA, 129 bp, Homo sapiens; identical to SEQ ID NO: 216174
  chr15:35385319-35385448
  hypo

SEQ ID NO: 443805 - DNA, 80 bp, Homo sapiens; identical to SEQ ID NO: 216175
  chr15:35414092-35414172
  hypo

SEQ ID NO: 443806 - DNA, 77 bp, Homo sapiens; identical to SEQ ID NO: 216176
  chr15:35529459-35529536
  hypo

SEQ ID NO: 443807 - DNA, 146 bp, Homo sapiens; identical to SEQ ID NO: 267489
  chr15:36870094-36870240
  hypo

SEQ ID NO: 443808 - DNA, 679 bp, Homo sapiens; identical to SEQ ID NO: 224830
  chr15:37393563-37394242
  hypo

SEQ ID NO: 443809 - DNA, 64 bp, Homo sapiens; identical to SEQ ID NO: 267490
  chr15:37783013-37783077
  hypo

SEQ ID NO: 443810 - DNA, 135 bp, Homo sapiens; identical to SEQ ID NO: 203833
  chr15:38365202-38365337
  hypo

SEQ ID NO: 443811 - DNA, 561 bp, Homo sapiens; identical to SEQ ID NO: 290693
  chr15:38543129-38543690
  hypo

SEQ ID NO: 443812 - DNA, 31 bp, Homo sapiens; identical to SEQ ID NO: 267491
  chr15:38652448-38652479
  hypo

SEQ ID NO: 443813 - DNA, 84 bp, Homo sapiens; identical to SEQ ID NO: 216180
  chr15:39415395-39415479
  hypo

SEQ ID NO: 443814 - DNA, 217 bp, Homo sapiens; identical to SEQ ID NO: 267493
  chr15:39703028-39703245
  hypo

SEQ ID NO: 443815 - DNA, 218 bp, Homo sapiens; identical to SEQ ID NO: 267494
  chr15:39742868-39743086
  hypo

SEQ ID NO: 443816 - DNA, 158 bp, Homo sapiens; identical to SEQ ID NO: 216182
  chr15:39881427-39881585
  hypo

SEQ ID NO: 443817 - DNA, 45 bp, Homo sapiens; identical to SEQ ID NO: 224834
  chr15:39958298-39958343
  hypo

SEQ ID NO: 443818 - DNA, 34 bp, Homo sapiens; identical to SEQ ID NO: 267497
  chr15:39986669-39986703
  hypo

SEQ ID NO: 443819 - DNA, 344 bp, Homo sapiens; identical to SEQ ID NO: 203835
  chr15:40074971-40075315
  hypo

SEQ ID NO: 443820 - DNA, 66 bp, Homo sapiens; identical to SEQ ID NO: 224836
  chr15:40094250-40094316
  hypo

SEQ ID NO: 443821 - DNA, 148 bp, Homo sapiens; identical to SEQ ID NO: 237856
  chr15:40225953-40226101
  hypo

SEQ ID NO: 443822 - DNA, 64 bp, Homo sapiens; identical to SEQ ID NO: 267498
  chr15:40280196-40280260
  hypo

SEQ ID NO: 443823 - DNA, 48 bp, Homo sapiens; identical to SEQ ID NO: 267499
  chr15:40336685-40336733
  hypo

SEQ ID NO: 443824 - DNA, 118 bp, Homo sapiens; identical to SEQ ID NO: 318869
  chr15:40368064-40368182
  hypo

SEQ ID NO: 443825 - DNA, 171 bp, Homo sapiens; identical to SEQ ID NO: 267501
  chr15:40377026-40377197
  hypo

SEQ ID NO: 443826 - DNA, 76 bp, Homo sapiens; identical to SEQ ID NO: 267502
  chr15:40405039-40405115
  hypo

SEQ ID NO: 443827 - DNA, 75 bp, Homo sapiens; identical to SEQ ID NO: 267503
  chr15:40405235-40405310
  hypo

SEQ ID NO: 443828 - DNA, 85 bp, Homo sapiens; identical to SEQ ID NO: 267507
  chr15:40558266-40558351
  hypo

SEQ ID NO: 443829 - DNA, 36 bp, Homo sapiens; identical to SEQ ID NO: 203836
  chr15:40559555-40559591
  hypo

SEQ ID NO: 443830 - DNA, 215 bp, Homo sapiens; identical to SEQ ID NO: 267509
  chr15:40645375-40645590
  hypo

SEQ ID NO: 443831 - DNA, 103 bp, Homo sapiens; identical to SEQ ID NO: 267511
  chr15:40701402-40701505
  hypo

SEQ ID NO: 443832 - DNA, 43 bp, Homo sapiens; identical to SEQ ID NO: 267512
  chr15:40701565-40701608
  hypo

SEQ ID NO: 443833 - DNA, 189 bp, Homo sapiens; identical to SEQ ID NO: 267513
  chr15:40716012-40716201
  hypo

SEQ ID NO: 443834 - DNA, 33 bp, Homo sapiens; identical to SEQ ID NO: 267514
  chr15:40766007-40766040
  hypo

SEQ ID NO: 443835 - DNA, 33 bp, Homo sapiens; identical to SEQ ID NO: 216189
  chr15:40782124-40782157
  hypo

SEQ ID NO: 443836 - DNA, 31 bp, Homo sapiens; identical to SEQ ID NO: 267516
  chr15:40854469-40854500
  hypo

SEQ ID NO: 443837 - DNA, 32 bp, Homo sapiens; identical to SEQ ID NO: 267518
  chr15:40933191-40933223
  hypo

SEQ ID NO: 443838 - DNA, 69 bp, Homo sapiens; identical to SEQ ID NO: 216190
  chr15:41044231-41044300
  hypo

SEQ ID NO: 443839 - DNA, 56 bp, Homo sapiens; identical to SEQ ID NO: 203838
  chr15:41046993-41047049
  hypo

SEQ ID NO: 443840 - DNA, 171 bp, Homo sapiens; identical to SEQ ID NO: 216192
  chr15:41059265-41059436
  hypo

SEQ ID NO: 443841 - DNA, 404 bp, Homo sapiens; identical to SEQ ID NO: 318891
  chr15:41059466-41059870
  hypo

SEQ ID NO: 443842 - DNA, 150 bp, Homo sapiens; identical to SEQ ID NO: 216194
  chr15:41082365-41082515
  hypo

SEQ ID NO: 443843 - DNA, 104 bp, Homo sapiens; identical to SEQ ID NO: 216196
  chr15:41120622-41120726
  hypo

SEQ ID NO: 443844 - DNA, 172 bp, Homo sapiens; identical to SEQ ID NO: 216197
  chr15:41121306-41121478
  hypo

SEQ ID NO: 443845 - DNA, 156 bp, Homo sapiens; identical to SEQ ID NO: 224840
  chr15:41136285-41136441
  hypo

SEQ ID NO: 443846 - DNA, 78 bp, Homo sapiens; identical to SEQ ID NO: 216200
  chr15:41165167-41165245
  hypo

SEQ ID NO: 443847 - DNA, 37 bp, Homo sapiens; identical to SEQ ID NO: 267526
  chr15:41235297-41235334
  hypo

SEQ ID NO: 443848 - DNA, 93 bp, Homo sapiens; identical to SEQ ID NO: 267527
  chr15:41253508-41253601
  hypo

SEQ ID NO: 443849 - DNA, 225 bp, Homo sapiens; identical to SEQ ID NO: 267528
  chr15:41276133-41276358
  hypo

SEQ ID NO: 443850 - DNA, 150 bp, Homo sapiens; identical to SEQ ID NO: 177044
  chr15:41316676-41316826
  hypo

SEQ ID NO: 443851 - DNA, 33 bp, Homo sapiens; identical to SEQ ID NO: 216201
  chr15:41622889-41622922
  hypo

SEQ ID NO: 443852 - DNA, 91 bp, Homo sapiens; identical to SEQ ID NO: 216202
  chr15:41732307-41732398
  hypo

SEQ ID NO: 443853 - DNA, 215 bp, Homo sapiens; identical to SEQ ID NO: 267533
  chr15:41769812-41770027
  hypo

SEQ ID NO: 443854 - DNA, 41 bp, Homo sapiens; identical to SEQ ID NO: 267534
  chr15:41840741-41840782
  hypo

SEQ ID NO: 443855 - DNA, 109 bp, Homo sapiens; identical to SEQ ID NO: 267535
  chr15:41842774-41842883
  hypo

SEQ ID NO: 443856 - DNA, 200 bp, Homo sapiens; identical to SEQ ID NO: 224842
  chr15:42112223-42112423
  hypo

SEQ ID NO: 443857 - DNA, 37 bp, Homo sapiens; identical to SEQ ID NO: 216203
  chr15:42117757-42117794
  hypo

SEQ ID NO: 443858 - DNA, 384 bp, Homo sapiens; identical to SEQ ID NO: 267537
  chr15:42122290-42122674
  hypo

SEQ ID NO: 443859 - DNA, 243 bp, Homo sapiens; identical to SEQ ID NO: 267538
  chr15:42147780-42148023
  hypo

SEQ ID NO: 443860 - DNA, 120 bp, Homo sapiens; identical to SEQ ID NO: 267539
  chr15:42151063-42151183
  hypo

SEQ ID NO: 443861 - DNA, 146 bp, Homo sapiens; identical to SEQ ID NO: 216204
  chr15:42153325-42153471
  hypo

SEQ ID NO: 443862 - DNA, 55 bp, Homo sapiens; identical to SEQ ID NO: 216205
  chr15:42160236-42160291
  hypo

SEQ ID NO: 443863 - DNA, 67 bp, Homo sapiens; identical to SEQ ID NO: 267543
  chr15:42162807-42162874
  hypo

SEQ ID NO: 443864 - DNA, 71 bp, Homo sapiens; identical to SEQ ID NO: 216206
  chr15:42167406-42167477
  hypo

SEQ ID NO: 443865 - DNA, 174 bp, Homo sapiens; identical to SEQ ID NO: 267545
  chr15:42171430-42171604
  hypo

SEQ ID NO: 443866 - DNA, 168 bp, Homo sapiens; identical to SEQ ID NO: 267546
  chr15:42185523-42185691
  hypo

SEQ ID NO: 443867 - DNA, 191 bp, Homo sapiens; identical to SEQ ID NO: 216207
  chr15:42192981-42193172
  hypo

SEQ ID NO: 443868 - DNA, 101 bp, Homo sapiens; identical to SEQ ID NO: 267548
  chr15:42211495-42211596
  hypo

SEQ ID NO: 443869 - DNA, 104 bp, Homo sapiens; identical to SEQ ID NO: 267549
  chr15:42232134-42232238
  hypo

SEQ ID NO: 443870 - DNA, 163 bp, Homo sapiens; identical to SEQ ID NO: 267550
  chr15:42232298-42232461
  hypo

SEQ ID NO: 443871 - DNA, 37 bp, Homo sapiens; identical to SEQ ID NO: 267551
  chr15:42280070-42280107
  hypo

SEQ ID NO: 443872 - DNA, 174 bp, Homo sapiens; identical to SEQ ID NO: 267552
  chr15:42284449-42284623
  hypo

SEQ ID NO: 443873 - DNA, 62 bp, Homo sapiens; identical to SEQ ID NO: 267553
  chr15:42302479-42302541
  hypo

SEQ ID NO: 443874 - DNA, 99 bp, Homo sapiens; identical to SEQ ID NO: 267554
  chr15:42350764-42350863
  hypo

SEQ ID NO: 443875 - DNA, 45 bp, Homo sapiens; identical to SEQ ID NO: 267555
  chr15:42362298-42362343
  hypo

SEQ ID NO: 443876 - DNA, 110 bp, Homo sapiens; identical to SEQ ID NO: 216208
  chr15:42362997-42363107
  hypo

SEQ ID NO: 443877 - DNA, 64 bp, Homo sapiens; identical to SEQ ID NO: 267557
  chr15:42363982-42364046
  hypo

SEQ ID NO: 443878 - DNA, 44 bp, Homo sapiens; identical to SEQ ID NO: 216209
  chr15:42388224-42388268
  hypo

SEQ ID NO: 443879 - DNA, 192 bp, Homo sapiens; identical to SEQ ID NO: 216210
  chr15:42434610-42434802
  hypo

SEQ ID NO: 443880 - DNA, 183 bp, Homo sapiens; identical to SEQ ID NO: 267560
  chr15:42438905-42439088
  hypo

SEQ ID NO: 443881 - DNA, 158 bp, Homo sapiens; identical to SEQ ID NO: 267561
  chr15:42446543-42446701
  hypo

SEQ ID NO: 443882 - DNA, 76 bp, Homo sapiens; identical to SEQ ID NO: 267562
  chr15:42446969-42447045
  hypo

SEQ ID NO: 443883 - DNA, 199 bp, Homo sapiens; identical to SEQ ID NO: 318938
  chr15:42447819-42448018
  hypo

SEQ ID NO: 443884 - DNA, 193 bp, Homo sapiens; identical to SEQ ID NO: 216211
  chr15:42451757-42451950
  hypo

SEQ ID NO: 443885 - DNA, 119 bp, Homo sapiens; identical to SEQ ID NO: 216212
  chr15:42452409-42452528
  hypo

SEQ ID NO: 443886 - DNA, 57 bp, Homo sapiens; identical to SEQ ID NO: 267566
  chr15:42470689-42470746
  hypo

SEQ ID NO: 443887 - DNA, 34 bp, Homo sapiens; identical to SEQ ID NO: 216213
  chr15:42562652-42562686
  hypo

SEQ ID NO: 443888 - DNA, 193 bp, Homo sapiens; identical to SEQ ID NO: 267568
  chr15:42644703-42644896
  hypo

SEQ ID NO: 443889 - DNA, 251 bp, Homo sapiens; identical to SEQ ID NO: 267570
  chr15:42686336-42686587
  hypo

SEQ ID NO: 443890 - DNA, 68 bp, Homo sapiens; identical to SEQ ID NO: 267571
  chr15:42696332-42696400
  hypo

SEQ ID NO: 443891 - DNA, 180 bp, Homo sapiens; identical to SEQ ID NO: 267572
  chr15:42711709-42711889
  hypo

SEQ ID NO: 443892 - DNA, 69 bp, Homo sapiens; identical to SEQ ID NO: 267573
  chr15:42742089-42742158
  hypo

SEQ ID NO: 443893 - DNA, 72 bp, Homo sapiens; identical to SEQ ID NO: 318948
  chr15:42748435-42748507
  hypo

SEQ ID NO: 443894 - DNA, 211 bp, Homo sapiens; identical to SEQ ID NO: 318949
  chr15:42784414-42784625
  hypo

SEQ ID NO: 443895 - DNA, 40 bp, Homo sapiens; identical to SEQ ID NO: 267576
  chr15:42806617-42806657
  hypo

SEQ ID NO: 443896 - DNA, 120 bp, Homo sapiens; identical to SEQ ID NO: 267577
  chr15:42819326-42819446
  hypo

SEQ ID NO: 443897 - DNA, 91 bp, Homo sapiens; identical to SEQ ID NO: 267578
  chr15:43019854-43019945
  hypo

SEQ ID NO: 443898 - DNA, 33 bp, Homo sapiens; identical to SEQ ID NO: 267580
  chr15:43124802-43124835
  hypo

SEQ ID NO: 443899 - DNA, 92 bp, Homo sapiens; identical to SEQ ID NO: 267581
  chr15:43124895-43124987
  hypo

SEQ ID NO: 443900 - DNA, 192 bp, Homo sapiens; identical to SEQ ID NO: 267582
  chr15:43300433-43300625
  hypo

SEQ ID NO: 443901 - DNA, 41 bp, Homo sapiens; identical to SEQ ID NO: 216216
  chr15:43406098-43406139
  hypo

SEQ ID NO: 443902 - DNA, 176 bp, Homo sapiens; identical to SEQ ID NO: 318958
  chr15:43527646-43527822
  hypo

SEQ ID NO: 443903 - DNA, 50 bp, Homo sapiens; identical to SEQ ID NO: 267586
  chr15:43574742-43574792
  hypo

SEQ ID NO: 443904 - DNA, 128 bp, Homo sapiens; identical to SEQ ID NO: 267587
  chr15:43574822-43574950
  hypo

SEQ ID NO: 443905 - DNA, 96 bp, Homo sapiens; identical to SEQ ID NO: 267588
  chr15:43610151-43610247
  hypo

SEQ ID NO: 443906 - DNA, 70 bp, Homo sapiens; identical to SEQ ID NO: 318962
  chr15:43661821-43661891
  hypo

SEQ ID NO: 443907 - DNA, 195 bp, Homo sapiens; identical to SEQ ID NO: 267590
  chr15:43820127-43820322
  hypo

SEQ ID NO: 443908 - DNA, 67 bp, Homo sapiens; identical to SEQ ID NO: 267591
  chr15:43941020-43941087
  hypo

SEQ ID NO: 443909 - DNA, 111 bp, Homo sapiens; identical to SEQ ID NO: 216217
  chr15:44037226-44037337
  hypo

SEQ ID NO: 443910 - DNA, 32 bp, Homo sapiens; identical to SEQ ID NO: 216218
  chr15:44037901-44037933
  hypo

SEQ ID NO: 443911 - DNA, 157 bp, Homo sapiens; identical to SEQ ID NO: 224843
  chr15:44038552-44038709
  hypo

SEQ ID NO: 443912 - DNA, 242 bp, Homo sapiens; identical to SEQ ID NO: 318968
  chr15:44091896-44092138
  hypo

SEQ ID NO: 443913 - DNA, 250 bp, Homo sapiens; identical to SEQ ID NO: 267596
  chr15:44105318-44105568
  hypo

SEQ ID NO: 443914 - DNA, 42 bp, Homo sapiens; identical to SEQ ID NO: 267597
  chr15:44117884-44117926
  hypo

SEQ ID NO: 443915 - DNA, 41 bp, Homo sapiens; identical to SEQ ID NO: 267598
  chr15:44435788-44435829
  hypo

SEQ ID NO: 443916 - DNA, 794 bp, Homo sapiens; identical to SEQ ID NO: 203855
  chr15:44486896-44487690
  hypo

SEQ ID NO: 443917 - DNA, 33 bp, Homo sapiens; identical to SEQ ID NO: 267599
  chr15:44523585-44523618
  hypo

SEQ ID NO: 443918 - DNA, 37 bp, Homo sapiens; identical to SEQ ID NO: 267600
  chr15:44823850-44823887
  hypo

SEQ ID NO: 443919 - DNA, 36 bp, Homo sapiens; identical to SEQ ID NO: 267601
  chr15:45274984-45275020
  hypo

SEQ ID NO: 443920 - DNA, 37 bp, Homo sapiens; identical to SEQ ID NO: 267602
  chr15:45391480-45391517
  hypo

SEQ ID NO: 443921 - DNA, 203 bp, Homo sapiens; identical to SEQ ID NO: 267603
  chr15:45397863-45398066
  hypo

SEQ ID NO: 443922 - DNA, 144 bp, Homo sapiens; identical to SEQ ID NO: 267604
  chr15:45436256-45436400
  hypo

SEQ ID NO: 443923 - DNA, 196 bp, Homo sapiens; identical to SEQ ID NO: 216220
  chr15:45439952-45440148
  hypo

SEQ ID NO: 443924 - DNA, 31 bp, Homo sapiens; identical to SEQ ID NO: 267608
  chr15:45450627-45450658
  hypo

SEQ ID NO: 443925 - DNA, 40 bp, Homo sapiens; identical to SEQ ID NO: 267609
  chr15:45465162-45465202
  hypo

SEQ ID NO: 443926 - DNA, 56 bp, Homo sapiens; identical to SEQ ID NO: 267611
  chr15:45742670-45742726
  hypo

SEQ ID NO: 443927 - DNA, 61 bp, Homo sapiens; identical to SEQ ID NO: 267612
  chr15:45742970-45743031
  hypo

SEQ ID NO: 443928 - DNA, 120 bp, Homo sapiens; identical to SEQ ID NO: 267613
  chr15:45809769-45809889
  hypo

SEQ ID NO: 443929 - DNA, 139 bp, Homo sapiens; identical to SEQ ID NO: 267614
  chr15:45960772-45960911
  hypo

SEQ ID NO: 443930 - DNA, 194 bp, Homo sapiens; identical to SEQ ID NO: 267617
  chr15:48707764-48707958
  hypo

SEQ ID NO: 443931 - DNA, 137 bp, Homo sapiens; identical to SEQ ID NO: 267619
  chr15:49411763-49411900
  hypo

SEQ ID NO: 443932 - DNA, 139 bp, Homo sapiens; identical to SEQ ID NO: 216228
  chr15:49658851-49658990
  hypo

SEQ ID NO: 443933 - DNA, 217 bp, Homo sapiens; identical to SEQ ID NO: 216230
  chr15:49997486-49997703
  hypo

SEQ ID NO: 443934 - DNA, 93 bp, Homo sapiens; identical to SEQ ID NO: 267623
  chr15:50158729-50158822
  hypo

SEQ ID NO: 443935 - DNA, 37 bp, Homo sapiens; identical to SEQ ID NO: 216231
  chr15:51016480-51016517
  hypo

SEQ ID NO: 443936 - DNA, 31 bp, Homo sapiens; identical to SEQ ID NO: 267625
  chr15:51059307-51059338
  hypo

SEQ ID NO: 443937 - DNA, 58 bp, Homo sapiens; identical to SEQ ID NO: 216232
  chr15:51176888-51176946
  hypo

SEQ ID NO: 443938 - DNA, 120 bp, Homo sapiens; identical to SEQ ID NO: 267627
  chr15:51182345-51182465
  hypo

SEQ ID NO: 443939 - DNA, 185 bp, Homo sapiens; identical to SEQ ID NO: 216233
  chr15:51476314-51476499
  hypo

SEQ ID NO: 443940 - DNA, 115 bp, Homo sapiens; identical to SEQ ID NO: 290807
  chr15:51633851-51633966
  hypo

SEQ ID NO: 443941 - DNA, 153 bp, Homo sapiens; identical to SEQ ID NO: 290808
  chr15:51634175-51634328
  hypo

SEQ ID NO: 443942 - DNA, 197 bp, Homo sapiens; identical to SEQ ID NO: 267630
  chr15:51659607-51659804
  hypo

SEQ ID NO: 443943 - DNA, 59 bp, Homo sapiens; identical to SEQ ID NO: 216234
  chr15:52000705-52000764
  hypo

SEQ ID NO: 443944 - DNA, 41 bp, Homo sapiens; identical to SEQ ID NO: 267632
  chr15:52089410-52089451
  hypo

SEQ ID NO: 443945 - DNA, 89 bp, Homo sapiens; identical to SEQ ID NO: 267633
  chr15:52276808-52276897
  hypo

SEQ ID NO: 443946 - DNA, 95 bp, Homo sapiens; identical to SEQ ID NO: 267634
  chr15:52310149-52310244
  hypo

SEQ ID NO: 443947 - DNA, 72 bp, Homo sapiens; identical to SEQ ID NO: 267635
  chr15:52387470-52387542
  hypo

SEQ ID NO: 443948 - DNA, 36 bp, Homo sapiens; identical to SEQ ID NO: 267636
  chr15:52579878-52579914
  hypo

SEQ ID NO: 443949 - DNA, 35 bp, Homo sapiens; identical to SEQ ID NO: 267637
  chr15:52580154-52580189
  hypo

SEQ ID NO: 443950 - DNA, 223 bp, Homo sapiens; identical to SEQ ID NO: 267638
  chr15:52611441-52611664
  hypo

SEQ ID NO: 443951 - DNA, 605 bp, Homo sapiens; identical to SEQ ID NO: 290818
  chr15:52820415-52821020
  hypo

SEQ ID NO: 443952 - DNA, 31 bp, Homo sapiens; identical to SEQ ID NO: 216237
  chr15:52968138-52968169
  hypo

SEQ ID NO: 443953 - DNA, 44 bp, Homo sapiens; identical to SEQ ID NO: 267642
  chr15:55074345-55074389
  hypo

SEQ ID NO: 443954 - DNA, 33 bp, Homo sapiens; identical to SEQ ID NO: 267643
  chr15:55313741-55313774
  hypo

SEQ ID NO: 443955 - DNA, 89 bp, Homo sapiens; identical to SEQ ID NO: 203885
  chr15:55699900-55699989
  hypo

SEQ ID NO: 443956 - DNA, 34 bp, Homo sapiens; identical to SEQ ID NO: 267645
  chr15:55777915-55777949
  hypo

SEQ ID NO: 443957 - DNA, 37 bp, Homo sapiens; identical to SEQ ID NO: 216240
  chr15:55881585-55881622
  hypo

SEQ ID NO: 443958 - DNA, 35 bp, Homo sapiens; identical to SEQ ID NO: 267648
  chr15:55893171-55893206
  hypo

SEQ ID NO: 443959 - DNA, 79 bp, Homo sapiens; identical to SEQ ID NO: 290832
  chr15:56035510-56035589
  hypo

SEQ ID NO: 443960 - DNA, 82 bp, Homo sapiens; identical to SEQ ID NO: 125767
  chr15:56035677-56035759
  hypo

SEQ ID NO: 443961 - DNA, 42 bp, Homo sapiens; identical to SEQ ID NO: 267650
  chr15:56105143-56105185
  hypo

SEQ ID NO: 443962 - DNA, 184 bp, Homo sapiens; identical to SEQ ID NO: 267651
  chr15:56140361-56140545
  hypo

SEQ ID NO: 443963 - DNA, 87 bp, Homo sapiens; identical to SEQ ID NO: 216241
  chr15:56170930-56171017
  hypo

SEQ ID NO: 443964 - DNA, 504 bp, Homo sapiens; identical to SEQ ID NO: 203886
  chr15:56285864-56286368
  hypo

SEQ ID NO: 443965 - DNA, 35 bp, Homo sapiens; identical to SEQ ID NO: 267654
  chr15:57204848-57204883
  hypo

SEQ ID NO: 443966 - DNA, 36 bp, Homo sapiens; identical to SEQ ID NO: 267655
  chr15:57209353-57209389
  hypo

SEQ ID NO: 443967 - DNA, 340 bp, Homo sapiens; identical to SEQ ID NO: 224859
  chr15:57210212-57210552
  hypo

SEQ ID NO: 443968 - DNA, 74 bp, Homo sapiens; identical to SEQ ID NO: 267656
  chr15:57565298-57565372
  hypo

SEQ ID NO: 443969 - DNA, 294 bp, Homo sapiens; identical to SEQ ID NO: 267657
  chr15:57611511-57611805
  hypo

SEQ ID NO: 443970 - DNA, 145 bp, Homo sapiens; identical to SEQ ID NO: 267658
  chr15:57614726-57614871
  hypo

SEQ ID NO: 443971 - DNA, 257 bp, Homo sapiens; identical to SEQ ID NO: 267660
  chr15:57620372-57620629
  hypo

SEQ ID NO: 443972 - DNA, 184 bp, Homo sapiens; identical to SEQ ID NO: 267661
  chr15:57731150-57731334
  hypo

SEQ ID NO: 443973 - DNA, 129 bp, Homo sapiens; identical to SEQ ID NO: 216246
  chr15:57792923-57793052
  hypo

SEQ ID NO: 443974 - DNA, 156 bp, Homo sapiens; identical to SEQ ID NO: 267663
  chr15:57923147-57923303
  hypo

SEQ ID NO: 443975 - DNA, 392 bp, Homo sapiens; identical to SEQ ID NO: 267664
  chr15:57993255-57993647
  hypo

SEQ ID NO: 443976 - DNA, 226 bp, Homo sapiens; identical to SEQ ID NO: 267665
  chr15:58001325-58001551
  hypo

SEQ ID NO: 443977 - DNA, 166 bp, Homo sapiens; identical to SEQ ID NO: 267667
  chr15:58761931-58762097
  hypo

SEQ ID NO: 443978 - DNA, 31 bp, Homo sapiens; identical to SEQ ID NO: 216249
  chr15:58896583-58896614
  hypo

SEQ ID NO: 443979 - DNA, 37 bp, Homo sapiens; identical to SEQ ID NO: 216250
  chr15:59158760-59158797
  hypo

SEQ ID NO: 443980 - DNA, 213 bp, Homo sapiens; identical to SEQ ID NO: 267672
  chr15:59243451-59243664
  hypo

SEQ ID NO: 443981 - DNA, 40 bp, Homo sapiens; identical to SEQ ID NO: 267673
  chr15:59291804-59291844
  hypo

SEQ ID NO: 443982 - DNA, 61 bp, Homo sapiens; identical to SEQ ID NO: 267674
  chr15:59450930-59450991
  hypo

SEQ ID NO: 443983 - DNA, 84 bp, Homo sapiens; identical to SEQ ID NO: 216251
  chr15:59454860-59454944
  hypo

SEQ ID NO: 443984 - DNA, 116 bp, Homo sapiens; identical to SEQ ID NO: 267676
  chr15:59474906-59475022
  hypo

SEQ ID NO: 443985 - DNA, 74 bp, Homo sapiens; identical to SEQ ID NO: 267677
  chr15:59499025-59499099
  hypo

SEQ ID NO: 443986 - DNA, 34 bp, Homo sapiens; identical to SEQ ID NO: 267678
  chr15:59525452-59525486
  hypo

SEQ ID NO: 443987 - DNA, 102 bp, Homo sapiens; identical to SEQ ID NO: 267679
  chr15:59561665-59561767
  hypo

SEQ ID NO: 443988 - DNA, 86 bp, Homo sapiens; identical to SEQ ID NO: 216252
  chr15:59580024-59580110
  hypo

SEQ ID NO: 443989 - DNA, 76 bp, Homo sapiens; identical to SEQ ID NO: 267681
  chr15:59639391-59639467
  hypo

SEQ ID NO: 443990 - DNA, 111 bp, Homo sapiens; identical to SEQ ID NO: 267682
  chr15:59648543-59648654
  hypo

SEQ ID NO: 443991 - DNA, 132 bp, Homo sapiens; identical to SEQ ID NO: 203894
  chr15:59663973-59664105
  hypo

SEQ ID NO: 443992 - DNA, 512 bp, Homo sapiens; identical to SEQ ID NO: 290847
  chr15:59664435-59664947
  hypo

SEQ ID NO: 443993 - DNA, 164 bp, Homo sapiens; identical to SEQ ID NO: 216255
  chr15:59685907-59686071
  hypo

SEQ ID NO: 443994 - DNA, 86 bp, Homo sapiens; identical to SEQ ID NO: 267684
  chr15:59906439-59906525
  hypo

SEQ ID NO: 443995 - DNA, 45 bp, Homo sapiens; identical to SEQ ID NO: 267685
  chr15:59989017-59989062
  hypo

SEQ ID NO: 443996 - DNA, 154 bp, Homo sapiens; identical to SEQ ID NO: 267686
  chr15:60672390-60672544
  hypo

SEQ ID NO: 443997 - DNA, 92 bp, Homo sapiens; identical to SEQ ID NO: 267687
  chr15:60680001-60680093
  hypo

SEQ ID NO: 443998 - DNA, 78 bp, Homo sapiens; identical to SEQ ID NO: 203901
  chr15:60690265-60690343
  hypo

SEQ ID NO: 443999 - DNA, 35 bp, Homo sapiens; identical to SEQ ID NO: 267688
  chr15:60694278-60694313
  hypo

SEQ ID NO: 444000 - DNA, 196 bp, Homo sapiens; identical to SEQ ID NO: 267689
  chr15:60865562-60865758
  hypo

SEQ ID NO: 444001 - DNA, 52 bp, Homo sapiens; identical to SEQ ID NO: 267690
  chr15:61012492-61012544
  hypo

SEQ ID NO: 444002 - DNA, 226 bp, Homo sapiens; identical to SEQ ID NO: 267691
  chr15:61231724-61231950
  hypo

SEQ ID NO: 444003 - DNA, 95 bp, Homo sapiens; identical to SEQ ID NO: 216260
  chr15:61932014-61932109
  hypo

SEQ ID NO: 444004 - DNA, 93 bp, Homo sapiens; identical to SEQ ID NO: 267694
  chr15:61948808-61948901
  hypo

SEQ ID NO: 444005 - DNA, 195 bp, Homo sapiens; identical to SEQ ID NO: 319086
  chr15:62367508-62367703
  hypo

SEQ ID NO: 444006 - DNA, 97 bp, Homo sapiens; identical to SEQ ID NO: 203912
  chr15:62456139-62456236
  hypo

SEQ ID NO: 444007 - DNA, 204 bp, Homo sapiens; identical to SEQ ID NO: 389283
  chr15:62456395-62456599
  hypo

SEQ ID NO: 444008 - DNA, 72 bp, Homo sapiens; identical to SEQ ID NO: 267696
  chr15:62591901-62591973
  hypo

SEQ ID NO: 444009 - DNA, 217 bp, Homo sapiens; identical to SEQ ID NO: 267698
  chr15:62750295-62750512
  hypo

SEQ ID NO: 444010 - DNA, 45 bp, Homo sapiens; identical to SEQ ID NO: 267699
  chr15:62752750-62752795
  hypo

SEQ ID NO: 444011 - DNA, 41 bp, Homo sapiens; identical to SEQ ID NO: 267700
  chr15:62753414-62753455
  hypo

SEQ ID NO: 444012 - DNA, 99 bp, Homo sapiens; identical to SEQ ID NO: 216266
  chr15:62776552-62776651
  hypo

SEQ ID NO: 444013 - DNA, 38 bp, Homo sapiens; identical to SEQ ID NO: 216267
  chr15:62776891-62776929
  hypo

SEQ ID NO: 444014 - DNA, 152 bp, Homo sapiens; identical to SEQ ID NO: 267704
  chr15:62779386-62779538
  hypo

SEQ ID NO: 444015 - DNA, 32 bp, Homo sapiens; identical to SEQ ID NO: 216268
  chr15:62791806-62791838
  hypo

SEQ ID NO: 444016 - DNA, 180 bp, Homo sapiens; identical to SEQ ID NO: 216269
  chr15:62792078-62792258
  hypo

SEQ ID NO: 444017 - DNA, 180 bp, Homo sapiens; identical to SEQ ID NO: 216270
  chr15:62799429-62799609
  hypo

SEQ ID NO: 444018 - DNA, 76 bp, Homo sapiens; identical to SEQ ID NO: 267708
  chr15:62810501-62810577
  hypo

SEQ ID NO: 444019 - DNA, 73 bp, Homo sapiens; identical to SEQ ID NO: 216271
  chr15:62828095-62828168
  hypo

SEQ ID NO: 444020 - DNA, 93 bp, Homo sapiens; identical to SEQ ID NO: 267712
  chr15:62863460-62863553
  hypo

SEQ ID NO: 444021 - DNA, 40 bp, Homo sapiens; identical to SEQ ID NO: 216272
  chr15:62880086-62880126
  hypo

SEQ ID NO: 444022 - DNA, 52 bp, Homo sapiens; identical to SEQ ID NO: 216273
  chr15:62898023-62898075
  hypo

SEQ ID NO: 444023 - DNA, 97 bp, Homo sapiens; identical to SEQ ID NO: 216274
  chr15:62959085-62959182
  hypo

SEQ ID NO: 444024 - DNA, 88 bp, Homo sapiens; identical to SEQ ID NO: 267716
  chr15:62966654-62966742
  hypo

SEQ ID NO: 444025 - DNA, 35 bp, Homo sapiens; identical to SEQ ID NO: 267717
  chr15:62967409-62967444
  hypo

SEQ ID NO: 444026 - DNA, 184 bp, Homo sapiens; identical to SEQ ID NO: 216275
  chr15:62968124-62968308
  hypo

SEQ ID NO: 444027 - DNA, 184 bp, Homo sapiens; identical to SEQ ID NO: 267722
  chr15:63012433-63012617
  hypo

SEQ ID NO: 444028 - DNA, 141 bp, Homo sapiens; identical to SEQ ID NO: 267723
  chr15:63017545-63017686
  hypo

SEQ ID NO: 444029 - DNA, 161 bp, Homo sapiens; identical to SEQ ID NO: 267724
  chr15:63028501-63028662
  hypo

SEQ ID NO: 444030 - DNA, 72 bp, Homo sapiens; identical to SEQ ID NO: 267727
  chr15:63036390-63036462
  hypo

SEQ ID NO: 444031 - DNA, 127 bp, Homo sapiens; identical to SEQ ID NO: 216280
  chr15:63060546-63060673
  hypo

SEQ ID NO: 444032 - DNA, 82 bp, Homo sapiens; identical to SEQ ID NO: 216281
  chr15:63062564-63062646
  hypo

SEQ ID NO: 444033 - DNA, 101 bp, Homo sapiens; identical to SEQ ID NO: 267731
  chr15:63063189-63063290
  hypo

SEQ ID NO: 444034 - DNA, 346 bp, Homo sapiens; identical to SEQ ID NO: 267733
  chr15:63068833-63069179
  hypo

SEQ ID NO: 444035 - DNA, 156 bp, Homo sapiens; identical to SEQ ID NO: 216285
  chr15:63084827-63084983
  hypo

SEQ ID NO: 444036 - DNA, 150 bp, Homo sapiens; identical to SEQ ID NO: 267740
  chr15:63091223-63091373
  hypo

SEQ ID NO: 444037 - DNA, 181 bp, Homo sapiens; identical to SEQ ID NO: 267741
  chr15:63092761-63092942
  hypo

SEQ ID NO: 444038 - DNA, 93 bp, Homo sapiens; identical to SEQ ID NO: 267742
  chr15:63100845-63100938
  hypo

SEQ ID NO: 444039 - DNA, 64 bp, Homo sapiens; identical to SEQ ID NO: 267743
  chr15:63111787-63111851
  hypo

SEQ ID NO: 444040 - DNA, 172 bp, Homo sapiens; identical to SEQ ID NO: 216291
  chr15:63129979-63130151
  hypo

SEQ ID NO: 444041 - DNA, 211 bp, Homo sapiens; identical to SEQ ID NO: 203916
  chr15:63130456-63130667
  hypo

SEQ ID NO: 444042 - DNA, 266 bp, Homo sapiens; identical to SEQ ID NO: 267748
  chr15:63167175-63167441
  hypo

SEQ ID NO: 444043 - DNA, 89 bp, Homo sapiens; identical to SEQ ID NO: 216294
  chr15:63245891-63245980
  hypo

SEQ ID NO: 444044 - DNA, 100 bp, Homo sapiens; identical to SEQ ID NO: 267750
  chr15:63267856-63267956
  hypo

SEQ ID NO: 444045 - DNA, 92 bp, Homo sapiens; identical to SEQ ID NO: 267751
  chr15:63282596-63282688
  hypo

SEQ ID NO: 444046 - DNA, 47 bp, Homo sapiens; identical to SEQ ID NO: 216295
  chr15:63321676-63321723
  hypo

SEQ ID NO: 444047 - DNA, 178 bp, Homo sapiens; identical to SEQ ID NO: 267753
  chr15:63382905-63383083
  hypo

SEQ ID NO: 444048 - DNA, 144 bp, Homo sapiens; identical to SEQ ID NO: 267754
  chr15:63585219-63585363
  hypo

SEQ ID NO: 444049 - DNA, 204 bp, Homo sapiens; identical to SEQ ID NO: 267755
  chr15:63592833-63593037
  hypo

SEQ ID NO: 444050 - DNA, 199 bp, Homo sapiens; identical to SEQ ID NO: 267757
  chr15:63614192-63614391
  hypo

SEQ ID NO: 444051 - DNA, 136 bp, Homo sapiens; identical to SEQ ID NO: 267758
  chr15:63647633-63647769
  hypo

SEQ ID NO: 444052 - DNA, 67 bp, Homo sapiens; identical to SEQ ID NO: 267759
  chr15:63660076-63660143
  hypo

SEQ ID NO: 444053 - DNA, 62 bp, Homo sapiens; identical to SEQ ID NO: 216296
  chr15:63753619-63753681
  hypo

SEQ ID NO: 444054 - DNA, 45 bp, Homo sapiens; identical to SEQ ID NO: 267763
  chr15:63772320-63772365
  hypo

SEQ ID NO: 444055 - DNA, 45 bp, Homo sapiens; identical to SEQ ID NO: 216297
  chr15:63772605-63772650
  hypo

SEQ ID NO: 444056 - DNA, 58 bp, Homo sapiens; identical to SEQ ID NO: 216301
  chr15:63901443-63901501
  hypo

SEQ ID NO: 444057 - DNA, 79 bp, Homo sapiens; identical to SEQ ID NO: 267767
  chr15:64109577-64109656
  hypo

SEQ ID NO: 444058 - DNA, 96 bp, Homo sapiens; identical to SEQ ID NO: 267768
  chr15:64234750-64234846
  hypo

SEQ ID NO: 444059 - DNA, 80 bp, Homo sapiens; identical to SEQ ID NO: 267771
  chr15:64481962-64482042
  hypo

SEQ ID NO: 444060 - DNA, 137 bp, Homo sapiens; identical to SEQ ID NO: 319168
  chr15:64649916-64650053
  hypo

SEQ ID NO: 444061 - DNA, 147 bp, Homo sapiens; identical to SEQ ID NO: 267773
  chr15:64670701-64670848
  hypo

SEQ ID NO: 444062 - DNA, 32 bp, Homo sapiens; identical to SEQ ID NO: 410301
  chr15:64674891-64674923
  hypo

SEQ ID NO: 444063 - DNA, 120 bp, Homo sapiens; identical to SEQ ID NO: 216304
  chr15:64682671-64682791
  hypo

SEQ ID NO: 444064 - DNA, 84 bp, Homo sapiens; identical to SEQ ID NO: 267777
  chr15:64715655-64715739
  hypo

SEQ ID NO: 444065 - DNA, 88 bp, Homo sapiens; identical to SEQ ID NO: 216306
  chr15:64865096-64865184
  hypo

SEQ ID NO: 444066 - DNA, 39 bp, Homo sapiens; identical to SEQ ID NO: 267779
  chr15:65041216-65041255
  hypo

SEQ ID NO: 444067 - DNA, 186 bp, Homo sapiens; identical to SEQ ID NO: 216307
  chr15:65119040-65119226
  hypo

SEQ ID NO: 444068 - DNA, 102 bp, Homo sapiens; identical to SEQ ID NO: 216308
  chr15:65119640-65119742
  hypo

SEQ ID NO: 444069 - DNA, 419 bp, Homo sapiens; identical to SEQ ID NO: 290896
  chr15:65203768-65204187
  hypo

SEQ ID NO: 444070 - DNA, 40 bp, Homo sapiens; identical to SEQ ID NO: 290897
  chr15:65204235-65204275
  hypo

SEQ ID NO: 444071 - DNA, 33 bp, Homo sapiens; identical to SEQ ID NO: 216309
  chr15:65214147-65214180
  hypo

SEQ ID NO: 444072 - DNA, 78 bp, Homo sapiens; identical to SEQ ID NO: 267785
  chr15:65349771-65349849
  hypo

SEQ ID NO: 444073 - DNA, 143 bp, Homo sapiens; identical to SEQ ID NO: 267786
  chr15:65380109-65380252
  hypo

SEQ ID NO: 444074 - DNA, 195 bp, Homo sapiens; identical to SEQ ID NO: 267787
  chr15:65538640-65538835
  hypo

SEQ ID NO: 444075 - DNA, 187 bp, Homo sapiens; identical to SEQ ID NO: 319185
  chr15:65625301-65625488
  hypo

SEQ ID NO: 444076 - DNA, 267 bp, Homo sapiens; identical to SEQ ID NO: 290909
  chr15:65714831-65715098
  hypo

SEQ ID NO: 444077 - DNA, 43 bp, Homo sapiens; identical to SEQ ID NO: 216310
  chr15:65901233-65901276
  hypo

SEQ ID NO: 444078 - DNA, 42 bp, Homo sapiens; identical to SEQ ID NO: 267792
  chr15:66618556-66618598
  hypo

SEQ ID NO: 444079 - DNA, 53 bp, Homo sapiens; identical to SEQ ID NO: 267793
  chr15:66886756-66886809
  hypo

SEQ ID NO: 444080 - DNA, 81 bp, Homo sapiens; identical to SEQ ID NO: 216311
  chr15:66929157-66929238
  hypo

SEQ ID NO: 444081 - DNA, 43 bp, Homo sapiens; identical to SEQ ID NO: 267796
  chr15:66951024-66951067
  hypo

SEQ ID NO: 444082 - DNA, 131 bp, Homo sapiens; identical to SEQ ID NO: 319193
  chr15:66963541-66963672
  hypo

SEQ ID NO: 444083 - DNA, 159 bp, Homo sapiens; identical to SEQ ID NO: 319194
  chr15:66964083-66964242
  hypo

SEQ ID NO: 444084 - DNA, 261 bp, Homo sapiens; identical to SEQ ID NO: 290918
  chr15:66994356-66994617
  hypo

SEQ ID NO: 444085 - DNA, 910 bp, Homo sapiens; identical to SEQ ID NO: 290920
  chr15:66995267-66996177
  hypo

SEQ ID NO: 444086 - DNA, 90 bp, Homo sapiens; identical to SEQ ID NO: 216314
  chr15:67011791-67011881
  hypo

SEQ ID NO: 444087 - DNA, 213 bp, Homo sapiens; identical to SEQ ID NO: 267800
  chr15:67049571-67049784
  hypo

SEQ ID NO: 444088 - DNA, 668 bp, Homo sapiens; identical to SEQ ID NO: 267801
  chr15:67073254-67073922
  hypo

SEQ ID NO: 444089 - DNA, 93 bp, Homo sapiens; identical to SEQ ID NO: 267802
  chr15:67088298-67088391
  hypo

SEQ ID NO: 444090 - DNA, 167 bp, Homo sapiens; identical to SEQ ID NO: 267803
  chr15:67100821-67100988
  hypo

SEQ ID NO: 444091 - DNA, 142 bp, Homo sapiens; identical to SEQ ID NO: 216317
  chr15:67137812-67137954
  hypo

SEQ ID NO: 444092 - DNA, 44 bp, Homo sapiens; identical to SEQ ID NO: 267805
  chr15:67149350-67149394
  hypo

SEQ ID NO: 444093 - DNA, 86 bp, Homo sapiens; identical to SEQ ID NO: 267806
  chr15:67368276-67368362
  hypo

SEQ ID NO: 444094 - DNA, 212 bp, Homo sapiens; identical to SEQ ID NO: 267807
  chr15:67457570-67457782
  hypo

SEQ ID NO: 444095 - DNA, 96 bp, Homo sapiens; identical to SEQ ID NO: 267808
  chr15:67480893-67480989
  hypo

SEQ ID NO: 444096 - DNA, 77 bp, Homo sapiens; identical to SEQ ID NO: 267809
  chr15:67481788-67481865
  hypo

SEQ ID NO: 444097 - DNA, 122 bp, Homo sapiens; identical to SEQ ID NO: 267810
  chr15:67482198-67482320
  hypo

SEQ ID NO: 444098 - DNA, 341 bp, Homo sapiens; identical to SEQ ID NO: 267812
  chr15:67757461-67757802
  hypo

SEQ ID NO: 444099 - DNA, 105 bp, Homo sapiens; identical to SEQ ID NO: 267813
  chr15:68085074-68085179
  hypo

SEQ ID NO: 444100 - DNA, 547 bp, Homo sapiens; identical to SEQ ID NO: 267814
  chr15:68098612-68099159
  hypo

SEQ ID NO: 444101 - DNA, 71 bp, Homo sapiens; identical to SEQ ID NO: 224883
  chr15:68177208-68177279
  hypo

SEQ ID NO: 444102 - DNA, 105 bp, Homo sapiens; identical to SEQ ID NO: 267815
  chr15:68394333-68394438
  hypo

SEQ ID NO: 444103 - DNA, 233 bp, Homo sapiens; identical to SEQ ID NO: 216319
  chr15:68502839-68503072
  hypo

SEQ ID NO: 444104 - DNA, 43 bp, Homo sapiens; identical to SEQ ID NO: 216320
  chr15:68506853-68506896
  hypo

SEQ ID NO: 444105 - DNA, 185 bp, Homo sapiens; identical to SEQ ID NO: 267818
  chr15:68614578-68614763
  hypo

SEQ ID NO: 444106 - DNA, 84 bp, Homo sapiens; identical to SEQ ID NO: 216321
  chr15:68624699-68624783
  hypo

SEQ ID NO: 444107 - DNA, 128 bp, Homo sapiens; identical to SEQ ID NO: 267820
  chr15:68854101-68854229
  hypo

SEQ ID NO: 444108 - DNA, 31 bp, Homo sapiens; identical to SEQ ID NO: 267821
  chr15:68854259-68854290
  hypo

SEQ ID NO: 444109 - DNA, 40 bp, Homo sapiens; identical to SEQ ID NO: 267824
  chr15:68899868-68899908
  hypo

SEQ ID NO: 444110 - DNA, 258 bp, Homo sapiens; identical to SEQ ID NO: 216323
  chr15:69002974-69003232
  hypo

SEQ ID NO: 444111 - DNA, 93 bp, Homo sapiens; identical to SEQ ID NO: 216324
  chr15:69003955-69004048
  hypo

SEQ ID NO: 444112 - DNA, 180 bp, Homo sapiens; identical to SEQ ID NO: 267829
  chr15:69011590-69011770
  hypo

SEQ ID NO: 444113 - DNA, 250 bp, Homo sapiens; identical to SEQ ID NO: 267830
  chr15:69076663-69076913
  hypo

SEQ ID NO: 444114 - DNA, 489 bp, Homo sapiens; identical to SEQ ID NO: 267831
  chr15:69099731-69100220
  hypo

SEQ ID NO: 444115 - DNA, 113 bp, Homo sapiens; identical to SEQ ID NO: 267832
  chr15:69285723-69285836
  hypo

SEQ ID NO: 444116 - DNA, 141 bp, Homo sapiens; identical to SEQ ID NO: 216326
  chr15:69322604-69322745
  hypo

SEQ ID NO: 444117 - DNA, 180 bp, Homo sapiens; identical to SEQ ID NO: 216327
  chr15:69322967-69323147
  hypo

SEQ ID NO: 444118 - DNA, 33 bp, Homo sapiens; identical to SEQ ID NO: 267835
  chr15:69325018-69325051
  hypo

SEQ ID NO: 444119 - DNA, 32 bp, Homo sapiens; identical to SEQ ID NO: 267836
  chr15:69369617-69369649
  hypo

SEQ ID NO: 444120 - DNA, 184 bp, Homo sapiens; identical to SEQ ID NO: 216328
  chr15:69387167-69387351
  hypo

SEQ ID NO: 444121 - DNA, 39 bp, Homo sapiens; identical to SEQ ID NO: 216329
  chr15:69461181-69461220
  hypo

SEQ ID NO: 444122 - DNA, 77 bp, Homo sapiens; identical to SEQ ID NO: 267839
  chr15:69481791-69481868
  hypo

SEQ ID NO: 444123 - DNA, 37 bp, Homo sapiens; identical to SEQ ID NO: 267840
  chr15:69566086-69566123
  hypo

SEQ ID NO: 444124 - DNA, 160 bp, Homo sapiens; identical to SEQ ID NO: 267841
  chr15:69577241-69577401
  hypo

SEQ ID NO: 444125 - DNA, 214 bp, Homo sapiens; identical to SEQ ID NO: 216330
  chr15:69590152-69590366
  hypo

SEQ ID NO: 444126 - DNA, 78 bp, Homo sapiens; identical to SEQ ID NO: 216331
  chr15:69715405-69715483
  hypo

SEQ ID NO: 444127 - DNA, 48 bp, Homo sapiens; identical to SEQ ID NO: 267844
  chr15:69754275-69754323
  hypo

SEQ ID NO: 444128 - DNA, 131 bp, Homo sapiens; identical to SEQ ID NO: 267845
  chr15:69793874-69794005
  hypo

SEQ ID NO: 444129 - DNA, 119 bp, Homo sapiens; identical to SEQ ID NO: 267846
  chr15:69851550-69851669
  hypo

SEQ ID NO: 444130 - DNA, 200 bp, Homo sapiens; identical to SEQ ID NO: 267847
  chr15:69879205-69879405
  hypo

SEQ ID NO: 444131 - DNA, 141 bp, Homo sapiens; identical to SEQ ID NO: 216332
  chr15:69883340-69883481
  hypo

SEQ ID NO: 444132 - DNA, 34 bp, Homo sapiens; identical to SEQ ID NO: 267849
  chr15:69900972-69901006
  hypo

SEQ ID NO: 444133 - DNA, 155 bp, Homo sapiens; identical to SEQ ID NO: 267850
  chr15:69925151-69925306
  hypo

SEQ ID NO: 444134 - DNA, 150 bp, Homo sapiens; identical to SEQ ID NO: 216333
  chr15:70126641-70126791
  hypo

SEQ ID NO: 444135 - DNA, 246 bp, Homo sapiens; identical to SEQ ID NO: 267852
  chr15:70133513-70133759
  hypo

SEQ ID NO: 444136 - DNA, 199 bp, Homo sapiens; identical to SEQ ID NO: 267853
  chr15:70339879-70340078
  hypo

SEQ ID NO: 444137 - DNA, 116 bp, Homo sapiens; identical to SEQ ID NO: 216334
  chr15:70342264-70342380
  hypo

SEQ ID NO: 444138 - DNA, 71 bp, Homo sapiens; identical to SEQ ID NO: 319253
  chr15:70347466-70347537
  hypo

SEQ ID NO: 444139 - DNA, 33 bp, Homo sapiens; identical to SEQ ID NO: 319254
  chr15:70347575-70347608
  hypo

SEQ ID NO: 444140 - DNA, 70 bp, Homo sapiens; identical to SEQ ID NO: 224884
  chr15:70388126-70388196
  hypo

SEQ ID NO: 444141 - DNA, 285 bp, Homo sapiens; identical to SEQ ID NO: 290962
  chr15:70388412-70388697
  hypo

SEQ ID NO: 444142 - DNA, 76 bp, Homo sapiens; identical to SEQ ID NO: 203948
  chr15:70391279-70391355
  hypo

SEQ ID NO: 444143 - DNA, 180 bp, Homo sapiens; identical to SEQ ID NO: 267859
  chr15:70703922-70704102
  hypo

SEQ ID NO: 444144 - DNA, 36 bp, Homo sapiens; identical to SEQ ID NO: 267860
  chr15:70707944-70707980
  hypo

SEQ ID NO: 444145 - DNA, 96 bp, Homo sapiens; identical to SEQ ID NO: 267862
  chr15:70926695-70926791
  hypo

SEQ ID NO: 444146 - DNA, 99 bp, Homo sapiens; identical to SEQ ID NO: 216338
  chr15:71047985-71048084
  hypo

SEQ ID NO: 444147 - DNA, 35 bp, Homo sapiens; identical to SEQ ID NO: 216339
  chr15:71124501-71124536
  hypo

SEQ ID NO: 444148 - DNA, 120 bp, Homo sapiens; identical to SEQ ID NO: 267865
  chr15:71152087-71152207
  hypo

SEQ ID NO: 444149 - DNA, 31 bp, Homo sapiens; identical to SEQ ID NO: 216343
  chr15:71466447-71466478
  hypo

SEQ ID NO: 444150 - DNA, 179 bp, Homo sapiens; identical to SEQ ID NO: 267868
  chr15:71704016-71704195
  hypo

SEQ ID NO: 444151 - DNA, 38 bp, Homo sapiens; identical to SEQ ID NO: 267869
  chr15:71880351-71880389
  hypo

SEQ ID NO: 444152 - DNA, 99 bp, Homo sapiens; identical to SEQ ID NO: 267870
  chr15:71966264-71966363
  hypo

SEQ ID NO: 444153 - DNA, 391 bp, Homo sapiens; identical to SEQ ID NO: 267871
  chr15:72039024-72039415
  hypo

SEQ ID NO: 444154 - DNA, 175 bp, Homo sapiens; identical to SEQ ID NO: 216344
  chr15:72040756-72040931
  hypo

SEQ ID NO: 444155 - DNA, 199 bp, Homo sapiens; identical to SEQ ID NO: 267873
  chr15:72042476-72042675
  hypo

SEQ ID NO: 444156 - DNA, 258 bp, Homo sapiens; identical to SEQ ID NO: 267874
  chr15:72081593-72081851
  hypo

SEQ ID NO: 444157 - DNA, 287 bp, Homo sapiens; identical to SEQ ID NO: 267875
  chr15:72082357-72082644
  hypo

SEQ ID NO: 444158 - DNA, 123 bp, Homo sapiens; identical to SEQ ID NO: 267876
  chr15:72093246-72093369
  hypo

SEQ ID NO: 444159 - DNA, 147 bp, Homo sapiens; identical to SEQ ID NO: 267877
  chr15:72109741-72109888
  hypo

SEQ ID NO: 444160 - DNA, 41 bp, Homo sapiens; identical to SEQ ID NO: 216347
  chr15:72471183-72471224
  hypo

SEQ ID NO: 444161 - DNA, 303 bp, Homo sapiens; identical to SEQ ID NO: 423086
  chr15:72522952-72523255
  hypo

SEQ ID NO: 444162 - DNA, 37 bp, Homo sapiens; identical to SEQ ID NO: 267882
  chr15:72525047-72525084
  hypo

SEQ ID NO: 444163 - DNA, 37 bp, Homo sapiens; identical to SEQ ID NO: 267883
  chr15:72525324-72525361
  hypo

SEQ ID NO: 444164 - DNA, 80 bp, Homo sapiens; identical to SEQ ID NO: 267885
  chr15:72743819-72743899
  hypo

SEQ ID NO: 444165 - DNA, 42 bp, Homo sapiens; identical to SEQ ID NO: 267886
  chr15:72758599-72758641
  hypo

SEQ ID NO: 444166 - DNA, 95 bp, Homo sapiens; identical to SEQ ID NO: 267889
  chr15:73147250-73147345
  hypo

SEQ ID NO: 444167 - DNA, 297 bp, Homo sapiens; identical to SEQ ID NO: 290985
  chr15:73344008-73344305
  hypo

SEQ ID NO: 444168 - DNA, 46 bp, Homo sapiens; identical to SEQ ID NO: 267891
  chr15:73616153-73616199
  hypo

SEQ ID NO: 444169 - DNA, 111 bp, Homo sapiens; identical to SEQ ID NO: 267892
  chr15:73616437-73616548
  hypo

SEQ ID NO: 444170 - DNA, 57 bp, Homo sapiens; identical to SEQ ID NO: 267893
  chr15:73634701-73634758
  hypo

SEQ ID NO: 444171 - DNA, 99 bp, Homo sapiens; identical to SEQ ID NO: 267894
  chr15:73635760-73635859
  hypo

SEQ ID NO: 444172 - DNA, 84 bp, Homo sapiens; identical to SEQ ID NO: 216351
  chr15:73735440-73735524
  hypo

SEQ ID NO: 444173 - DNA, 333 bp, Homo sapiens; identical to SEQ ID NO: 216352
  chr15:73889351-73889684
  hypo

SEQ ID NO: 444174 - DNA, 180 bp, Homo sapiens; identical to SEQ ID NO: 267897
  chr15:73898087-73898267
  hypo

SEQ ID NO: 444175 - DNA, 412 bp, Homo sapiens; identical to SEQ ID NO: 290989
  chr15:74045243-74045655
  hypo

SEQ ID NO: 444176 - DNA, 201 bp, Homo sapiens; identical to SEQ ID NO: 267898
  chr15:74188046-74188247
  hypo

SEQ ID NO: 444177 - DNA, 32 bp, Homo sapiens; identical to SEQ ID NO: 267899
  chr15:74223034-74223066
  hypo

SEQ ID NO: 444178 - DNA, 408 bp, Homo sapiens; identical to SEQ ID NO: 267900
  chr15:74315317-74315725
  hypo

SEQ ID NO: 444179 - DNA, 116 bp, Homo sapiens; identical to SEQ ID NO: 267901
  chr15:74333742-74333858
  hypo

SEQ ID NO: 444180 - DNA, 91 bp, Homo sapiens; identical to SEQ ID NO: 216356
  chr15:74679876-74679967
  hypo

SEQ ID NO: 444181 - DNA, 42 bp, Homo sapiens; identical to SEQ ID NO: 267903
  chr15:74688410-74688452
  hypo

SEQ ID NO: 444182 - DNA, 174 bp, Homo sapiens; identical to SEQ ID NO: 267904
  chr15:74702942-74703116
  hypo

SEQ ID NO: 444183 - DNA, 38 bp, Homo sapiens; identical to SEQ ID NO: 267906
  chr15:74819046-74819084
  hypo

SEQ ID NO: 444184 - DNA, 31 bp, Homo sapiens; identical to SEQ ID NO: 267907
  chr15:74839796-74839827
  hypo

SEQ ID NO: 444185 - DNA, 71 bp, Homo sapiens; identical to SEQ ID NO: 319314
  chr15:74903825-74903896
  hypo

SEQ ID NO: 444186 - DNA, 176 bp, Homo sapiens; identical to SEQ ID NO: 291004
  chr15:74912313-74912489
  hypo

SEQ ID NO: 444187 - DNA, 125 bp, Homo sapiens; identical to SEQ ID NO: 267910
  chr15:74913937-74914062
  hypo

SEQ ID NO: 444188 - DNA, 591 bp, Homo sapiens; identical to SEQ ID NO: 267911
  chr15:75091223-75091814
  hypo

SEQ ID NO: 444189 - DNA, 64 bp, Homo sapiens; identical to SEQ ID NO: 267912
  chr15:75093183-75093247
  hypo

SEQ ID NO: 444190 - DNA, 47 bp, Homo sapiens; identical to SEQ ID NO: 267913
  chr15:75093277-75093324
  hypo

SEQ ID NO: 444191 - DNA, 82 bp, Homo sapiens; identical to SEQ ID NO: 267914
  chr15:75093354-75093436
  hypo

SEQ ID NO: 444192 - DNA, 183 bp, Homo sapiens; identical to SEQ ID NO: 216358
  chr15:75094768-75094951
  hypo

SEQ ID NO: 444193 - DNA, 103 bp, Homo sapiens; identical to SEQ ID NO: 216359
  chr15:75158701-75158804
  hypo

SEQ ID NO: 444194 - DNA, 42 bp, Homo sapiens; identical to SEQ ID NO: 216360
  chr15:75158924-75158966
  hypo

SEQ ID NO: 444195 - DNA, 142 bp, Homo sapiens; identical to SEQ ID NO: 216361
  chr15:75221041-75221183
  hypo

SEQ ID NO: 444196 - DNA, 58 bp, Homo sapiens; identical to SEQ ID NO: 267920
  chr15:75293194-75293252
  hypo

SEQ ID NO: 444197 - DNA, 32 bp, Homo sapiens; identical to SEQ ID NO: 216363
  chr15:75413015-75413047
  hypo

SEQ ID NO: 444198 - DNA, 103 bp, Homo sapiens; identical to SEQ ID NO: 267922
  chr15:75498358-75498461
  hypo

SEQ ID NO: 444199 - DNA, 113 bp, Homo sapiens; identical to SEQ ID NO: 267923
  chr15:75500845-75500958
  hypo

SEQ ID NO: 444200 - DNA, 151 bp, Homo sapiens; identical to SEQ ID NO: 267924
  chr15:75594676-75594827
  hypo

SEQ ID NO: 444201 - DNA, 69 bp, Homo sapiens; identical to SEQ ID NO: 216364
  chr15:75614951-75615020
  hypo

SEQ ID NO: 444202 - DNA, 455 bp, Homo sapiens; identical to SEQ ID NO: 126081
  chr15:75640520-75640975
  hypo

SEQ ID NO: 444203 - DNA, 215 bp, Homo sapiens; identical to SEQ ID NO: 267926
  chr15:75648427-75648642
  hypo

SEQ ID NO: 444204 - DNA, 104 bp, Homo sapiens; identical to SEQ ID NO: 216367
  chr15:75664801-75664905
  hypo

SEQ ID NO: 444205 - DNA, 196 bp, Homo sapiens; identical to SEQ ID NO: 216368
  chr15:75672985-75673181
  hypo

SEQ ID NO: 444206 - DNA, 36 bp, Homo sapiens; identical to SEQ ID NO: 216369
  chr15:75726682-75726718
  hypo

SEQ ID NO: 444207 - DNA, 258 bp, Homo sapiens; identical to SEQ ID NO: 267930
  chr15:75760809-75761067
  hypo

SEQ ID NO: 444208 - DNA, 205 bp, Homo sapiens; identical to SEQ ID NO: 267931
  chr15:75949260-75949465
  hypo

SEQ ID NO: 444209 - DNA, 126 bp, Homo sapiens; identical to SEQ ID NO: 216370
  chr15:75981377-75981503
  hypo

SEQ ID NO: 444210 - DNA, 153 bp, Homo sapiens; identical to SEQ ID NO: 267933
  chr15:75997150-75997303
  hypo

SEQ ID NO: 444211 - DNA, 263 bp, Homo sapiens; identical to SEQ ID NO: 267934
  chr15:76019477-76019740
  hypo

SEQ ID NO: 444212 - DNA, 186 bp, Homo sapiens; identical to SEQ ID NO: 216371
  chr15:76083847-76084033
  hypo

SEQ ID NO: 444213 - DNA, 42 bp, Homo sapiens; identical to SEQ ID NO: 267938
  chr15:77072238-77072280
  hypo

SEQ ID NO: 444214 - DNA, 120 bp, Homo sapiens; identical to SEQ ID NO: 267939
  chr15:77072340-77072460
  hypo

SEQ ID NO: 444215 - DNA, 392 bp, Homo sapiens; identical to SEQ ID NO: 267940
  chr15:77321763-77322155
  hypo

SEQ ID NO: 444216 - DNA, 34 bp, Homo sapiens; identical to SEQ ID NO: 267941
  chr15:77332740-77332774
  hypo

SEQ ID NO: 444217 - DNA, 34 bp, Homo sapiens; identical to SEQ ID NO: 216373
  chr15:77333014-77333048
  hypo

SEQ ID NO: 444218 - DNA, 31 bp, Homo sapiens; identical to SEQ ID NO: 267943
  chr15:77358028-77358059
  hypo

SEQ ID NO: 444219 - DNA, 183 bp, Homo sapiens; identical to SEQ ID NO: 267944
  chr15:77473436-77473619
  hypo

SEQ ID NO: 444220 - DNA, 209 bp, Homo sapiens; identical to SEQ ID NO: 267945
  chr15:77880953-77881162
  hypo

SEQ ID NO: 444221 - DNA, 204 bp, Homo sapiens; identical to SEQ ID NO: 267948
  chr15:77936322-77936526
  hypo

SEQ ID NO: 444222 - DNA, 143 bp, Homo sapiens; identical to SEQ ID NO: 291049
  chr15:78110977-78111120
  hypo

SEQ ID NO: 444223 - DNA, 80 bp, Homo sapiens; identical to SEQ ID NO: 291050
  chr15:78111210-78111290
  hypo

SEQ ID NO: 444224 - DNA, 183 bp, Homo sapiens; identical to SEQ ID NO: 267950
  chr15:78159874-78160057
  hypo

SEQ ID NO: 444225 - DNA, 151 bp, Homo sapiens; identical to SEQ ID NO: 267951
  chr15:78165453-78165604
  hypo

SEQ ID NO: 444226 - DNA, 95 bp, Homo sapiens; identical to SEQ ID NO: 267952
  chr15:78181925-78182020
  hypo

SEQ ID NO: 444227 - DNA, 340 bp, Homo sapiens; identical to SEQ ID NO: 267953
  chr15:78189972-78190312
  hypo

SEQ ID NO: 444228 - DNA, 531 bp, Homo sapiens; identical to SEQ ID NO: 267954
  chr15:78191122-78191653
  hypo

SEQ ID NO: 444229 - DNA, 58 bp, Homo sapiens; identical to SEQ ID NO: 216375
  chr15:78193841-78193899
  hypo

SEQ ID NO: 444230 - DNA, 172 bp, Homo sapiens; identical to SEQ ID NO: 267956
  chr15:78267623-78267795
  hypo

SEQ ID NO: 444231 - DNA, 171 bp, Homo sapiens; identical to SEQ ID NO: 216376
  chr15:78268339-78268510
  hypo

SEQ ID NO: 444232 - DNA, 37 bp, Homo sapiens; identical to SEQ ID NO: 267958
  chr15:78285344-78285381
  hypo

SEQ ID NO: 444233 - DNA, 38 bp, Homo sapiens; identical to SEQ ID NO: 267959
  chr15:78295565-78295603
  hypo

SEQ ID NO: 444234 - DNA, 93 bp, Homo sapiens; identical to SEQ ID NO: 267960
  chr15:78403530-78403623
  hypo

SEQ ID NO: 444235 - DNA, 79 bp, Homo sapiens; identical to SEQ ID NO: 216377
  chr15:78450091-78450170
  hypo

SEQ ID NO: 444236 - DNA, 178 bp, Homo sapiens; identical to SEQ ID NO: 216378
  chr15:78463270-78463448
  hypo

SEQ ID NO: 444237 - DNA, 37 bp, Homo sapiens; identical to SEQ ID NO: 267963
  chr15:78487124-78487161
  hypo

SEQ ID NO: 444238 - DNA, 175 bp, Homo sapiens; identical to SEQ ID NO: 267964
  chr15:78498325-78498500
  hypo

SEQ ID NO: 444239 - DNA, 101 bp, Homo sapiens; identical to SEQ ID NO: 216379
  chr15:78501675-78501776
  hypo

SEQ ID NO: 444240 - DNA, 45 bp, Homo sapiens; identical to SEQ ID NO: 216380
  chr15:78501942-78501987
  hypo

SEQ ID NO: 444241 - DNA, 81 bp, Homo sapiens; identical to SEQ ID NO: 216381
  chr15:78510187-78510268
  hypo

SEQ ID NO: 444242 - DNA, 78 bp, Homo sapiens; identical to SEQ ID NO: 267967
  chr15:78554709-78554787
  hypo

SEQ ID NO: 444243 - DNA, 45 bp, Homo sapiens; identical to SEQ ID NO: 267968
  chr15:78555195-78555240
  hypo

SEQ ID NO: 444244 - DNA, 149 bp, Homo sapiens; identical to SEQ ID NO: 216382
  chr15:78566544-78566693
  hypo

SEQ ID NO: 444245 - DNA, 118 bp, Homo sapiens; identical to SEQ ID NO: 267971
  chr15:78577626-78577744
  hypo

SEQ ID NO: 444246 - DNA, 97 bp, Homo sapiens; identical to SEQ ID NO: 267973
  chr15:78681251-78681348
  hypo

SEQ ID NO: 444247 - DNA, 188 bp, Homo sapiens; identical to SEQ ID NO: 267974
  chr15:78698064-78698252
  hypo

SEQ ID NO: 444248 - DNA, 188 bp, Homo sapiens; identical to SEQ ID NO: 216383
  chr15:78699264-78699452
  hypo

SEQ ID NO: 444249 - DNA, 152 bp, Homo sapiens; identical to SEQ ID NO: 267976
  chr15:78922145-78922297
  hypo

SEQ ID NO: 444250 - DNA, 71 bp, Homo sapiens; identical to SEQ ID NO: 216384
  chr15:79031606-79031677
  hypo

SEQ ID NO: 444251 - DNA, 133 bp, Homo sapiens; identical to SEQ ID NO: 267978
  chr15:79050495-79050628
  hypo

SEQ ID NO: 444252 - DNA, 239 bp, Homo sapiens; identical to SEQ ID NO: 267979
  chr15:79055678-79055917
  hypo

SEQ ID NO: 444253 - DNA, 232 bp, Homo sapiens; identical to SEQ ID NO: 267980
  chr15:79056239-79056471
  hypo

SEQ ID NO: 444254 - DNA, 264 bp, Homo sapiens; identical to SEQ ID NO: 267981
  chr15:79069814-79070078
  hypo

SEQ ID NO: 444255 - DNA, 206 bp, Homo sapiens; identical to SEQ ID NO: 267985
  chr15:79218012-79218218
  hypo

SEQ ID NO: 444256 - DNA, 103 bp, Homo sapiens; identical to SEQ ID NO: 267986
  chr15:79222387-79222490
  hypo

SEQ ID NO: 444257 - DNA, 101 bp, Homo sapiens; identical to SEQ ID NO: 203989
  chr15:79237308-79237409
  hypo

SEQ ID NO: 444258 - DNA, 125 bp, Homo sapiens; identical to SEQ ID NO: 216387
  chr15:79309573-79309698
  hypo

SEQ ID NO: 444259 - DNA, 133 bp, Homo sapiens; identical to SEQ ID NO: 267988
  chr15:79310062-79310195
  hypo

SEQ ID NO: 444260 - DNA, 111 bp, Homo sapiens; identical to SEQ ID NO: 267989
  chr15:79471666-79471777
  hypo

SEQ ID NO: 444261 - DNA, 75 bp, Homo sapiens; identical to SEQ ID NO: 203992
  chr15:79723976-79724051
  hypo

SEQ ID NO: 444262 - DNA, 223 bp, Homo sapiens; identical to SEQ ID NO: 267990
  chr15:80216925-80217148
  hypo

SEQ ID NO: 444263 - DNA, 79 bp, Homo sapiens; identical to SEQ ID NO: 267991
  chr15:80217366-80217445
  hypo

SEQ ID NO: 444264 - DNA, 95 bp, Homo sapiens; identical to SEQ ID NO: 267992
  chr15:80219641-80219736
  hypo

SEQ ID NO: 444265 - DNA, 39 bp, Homo sapiens; identical to SEQ ID NO: 267994
  chr15:80434194-80434233
  hypo

SEQ ID NO: 444266 - DNA, 36 bp, Homo sapiens; identical to SEQ ID NO: 216390
  chr15:80451294-80451330
  hypo

SEQ ID NO: 444267 - DNA, 246 bp, Homo sapiens; identical to SEQ ID NO: 267997
  chr15:80478408-80478654
  hypo

SEQ ID NO: 444268 - DNA, 162 bp, Homo sapiens; identical to SEQ ID NO: 267998
  chr15:80759864-80760026
  hypo

SEQ ID NO: 444269 - DNA, 113 bp, Homo sapiens; identical to SEQ ID NO: 267999
  chr15:80889494-80889607
  hypo

SEQ ID NO: 444270 - DNA, 235 bp, Homo sapiens; identical to SEQ ID NO: 268000
  chr15:80907144-80907379
  hypo

SEQ ID NO: 444271 - DNA, 176 bp, Homo sapiens; identical to SEQ ID NO: 216393
  chr15:81041839-81042015
  hypo

SEQ ID NO: 444272 - DNA, 370 bp, Homo sapiens; identical to SEQ ID NO: 268002
  chr15:81164289-81164659
  hypo

SEQ ID NO: 444273 - DNA, 94 bp, Homo sapiens; identical to SEQ ID NO: 268003
  chr15:81199005-81199099
  hypo

SEQ ID NO: 444274 - DNA, 229 bp, Homo sapiens; identical to SEQ ID NO: 268004
  chr15:81224341-81224570
  hypo

SEQ ID NO: 444275 - DNA, 151 bp, Homo sapiens; identical to SEQ ID NO: 268005
  chr15:81235652-81235803
  hypo

SEQ ID NO: 444276 - DNA, 120 bp, Homo sapiens; identical to SEQ ID NO: 216394
  chr15:81247852-81247972
  hypo

SEQ ID NO: 444277 - DNA, 46 bp, Homo sapiens; identical to SEQ ID NO: 268007
  chr15:81262921-81262967
  hypo

SEQ ID NO: 444278 - DNA, 169 bp, Homo sapiens; identical to SEQ ID NO: 268008
  chr15:81342115-81342284
  hypo

SEQ ID NO: 444279 - DNA, 183 bp, Homo sapiens; identical to SEQ ID NO: 216396
  chr15:81605218-81605401
  hypo

SEQ ID NO: 444280 - DNA, 200 bp, Homo sapiens; identical to SEQ ID NO: 268010
  chr15:81605679-81605879
  hypo

SEQ ID NO: 444281 - DNA, 43 bp, Homo sapiens; identical to SEQ ID NO: 268011
  chr15:82276016-82276059
  hypo

SEQ ID NO: 444282 - DNA, 104 bp, Homo sapiens; identical to SEQ ID NO: 268012
  chr15:83379974-83380078
  hypo

SEQ ID NO: 444283 - DNA, 91 bp, Homo sapiens; identical to SEQ ID NO: 268013
  chr15:83440820-83440911
  hypo

SEQ ID NO: 444284 - DNA, 94 bp, Homo sapiens; identical to SEQ ID NO: 268014
  chr15:83459217-83459311
  hypo

SEQ ID NO: 444285 - DNA, 375 bp, Homo sapiens; identical to SEQ ID NO: 291085
  chr15:83654593-83654968
  hypo

SEQ ID NO: 444286 - DNA, 134 bp, Homo sapiens; identical to SEQ ID NO: 224915
  chr15:83680651-83680785
  hypo

SEQ ID NO: 444287 - DNA, 60 bp, Homo sapiens; identical to SEQ ID NO: 268017
  chr15:83698963-83699023
  hypo

SEQ ID NO: 444288 - DNA, 41 bp, Homo sapiens; identical to SEQ ID NO: 216402
  chr15:83827862-83827903
  hypo

SEQ ID NO: 444289 - DNA, 139 bp, Homo sapiens; identical to SEQ ID NO: 291090
  chr15:84034239-84034378
  hypo

SEQ ID NO: 444290 - DNA, 86 bp, Homo sapiens; identical to SEQ ID NO: 291091
  chr15:84034412-84034498
  hypo

SEQ ID NO: 444291 - DNA, 217 bp, Homo sapiens; identical to SEQ ID NO: 268019
  chr15:84827426-84827643
  hypo

SEQ ID NO: 444292 - DNA, 577 bp, Homo sapiens; identical to SEQ ID NO: 291096
  chr15:85143661-85144238
  hypo

SEQ ID NO: 444293 - DNA, 148 bp, Homo sapiens; identical to SEQ ID NO: 204015
  chr15:85200368-85200516
  hypo

SEQ ID NO: 444294 - DNA, 123 bp, Homo sapiens; identical to SEQ ID NO: 291099
  chr15:85258869-85258992
  hypo

SEQ ID NO: 444295 - DNA, 74 bp, Homo sapiens; identical to SEQ ID NO: 216404
  chr15:85383065-85383139
  hypo

SEQ ID NO: 444296 - DNA, 82 bp, Homo sapiens; identical to SEQ ID NO: 268022
  chr15:85401076-85401158
  hypo

SEQ ID NO: 444297 - DNA, 89 bp, Homo sapiens; identical to SEQ ID NO: 216405
  chr15:85478275-85478364
  hypo

SEQ ID NO: 444298 - DNA, 437 bp, Homo sapiens; identical to SEQ ID NO: 291101
  chr15:85525136-85525573
  hypo

SEQ ID NO: 444299 - DNA, 101 bp, Homo sapiens; identical to SEQ ID NO: 268024
  chr15:85680561-85680662
  hypo

SEQ ID NO: 444300 - DNA, 203 bp, Homo sapiens; identical to SEQ ID NO: 319450
  chr15:85680889-85681092
  hypo

SEQ ID NO: 444301 - DNA, 66 bp, Homo sapiens; identical to SEQ ID NO: 216407
  chr15:85681122-85681188
  hypo

SEQ ID NO: 444302 - DNA, 151 bp, Homo sapiens; identical to SEQ ID NO: 216408
  chr15:85695659-85695810
  hypo

SEQ ID NO: 444303 - DNA, 120 bp, Homo sapiens; identical to SEQ ID NO: 268027
  chr15:85725512-85725632
  hypo

SEQ ID NO: 444304 - DNA, 42 bp, Homo sapiens; identical to SEQ ID NO: 268028
  chr15:85774090-85774132
  hypo

SEQ ID NO: 444305 - DNA, 32 bp, Homo sapiens; identical to SEQ ID NO: 216409
  chr15:85886327-85886359
  hypo

SEQ ID NO: 444306 - DNA, 31 bp, Homo sapiens; identical to SEQ ID NO: 268030
  chr15:86095826-86095857
  hypo

SEQ ID NO: 444307 - DNA, 31 bp, Homo sapiens; identical to SEQ ID NO: 216410
  chr15:86096037-86096068
  hypo

SEQ ID NO: 444308 - DNA, 116 bp, Homo sapiens; identical to SEQ ID NO: 268032
  chr15:86220154-86220270
  hypo

SEQ ID NO: 444309 - DNA, 367 bp, Homo sapiens; identical to SEQ ID NO: 268033
  chr15:86284347-86284714
  hypo

SEQ ID NO: 444310 - DNA, 97 bp, Homo sapiens; identical to SEQ ID NO: 268034
  chr15:86293194-86293291
  hypo

SEQ ID NO: 444311 - DNA, 166 bp, Homo sapiens; identical to SEQ ID NO: 268035
  chr15:86295446-86295612
  hypo

SEQ ID NO: 444312 - DNA, 363 bp, Homo sapiens; identical to SEQ ID NO: 268037
  chr15:86313542-86313905
  hypo

SEQ ID NO: 444313 - DNA, 98 bp, Homo sapiens; identical to SEQ ID NO: 268038
  chr15:86332522-86332620
  hypo

SEQ ID NO: 444314 - DNA, 42 bp, Homo sapiens; identical to SEQ ID NO: 268039
  chr15:88493813-88493855
  hypo

SEQ ID NO: 444315 - DNA, 266 bp, Homo sapiens; identical to SEQ ID NO: 268040
  chr15:89179287-89179553
  hypo

SEQ ID NO: 444316 - DNA, 219 bp, Homo sapiens; identical to SEQ ID NO: 268041
  chr15:89284711-89284930
  hypo

SEQ ID NO: 444317 - DNA, 227 bp, Homo sapiens; identical to SEQ ID NO: 268043
  chr15:89388857-89389084
  hypo

SEQ ID NO: 444318 - DNA, 186 bp, Homo sapiens; identical to SEQ ID NO: 216411
  chr15:89404008-89404194
  hypo

SEQ ID NO: 444319 - DNA, 35 bp, Homo sapiens; identical to SEQ ID NO: 268045
  chr15:89605894-89605929
  hypo

SEQ ID NO: 444320 - DNA, 139 bp, Homo sapiens; identical to SEQ ID NO: 268046
  chr15:89659579-89659718
  hypo

SEQ ID NO: 444321 - DNA, 45 bp, Homo sapiens; identical to SEQ ID NO: 268047
  chr15:89807367-89807412
  hypo

SEQ ID NO: 444322 - DNA, 40 bp, Homo sapiens; identical to SEQ ID NO: 216412
  chr15:89809026-89809066
  hypo

SEQ ID NO: 444323 - DNA, 345 bp, Homo sapiens; identical to SEQ ID NO: 291120
  chr15:89905400-89905745
  hypo

SEQ ID NO: 444324 - DNA, 234 bp, Homo sapiens; identical to SEQ ID NO: 291121
  chr15:89905890-89906124
  hypo

SEQ ID NO: 444325 - DNA, 68 bp, Homo sapiens; identical to SEQ ID NO: 216414
  chr15:90171832-90171900
  hypo

SEQ ID NO: 444326 - DNA, 72 bp, Homo sapiens; identical to SEQ ID NO: 268051
  chr15:90192228-90192300
  hypo

SEQ ID NO: 444327 - DNA, 250 bp, Homo sapiens; identical to SEQ ID NO: 268052
  chr15:90192511-90192761
  hypo

SEQ ID NO: 444328 - DNA, 58 bp, Homo sapiens; identical to SEQ ID NO: 216415
  chr15:90192966-90193024
  hypo

SEQ ID NO: 444329 - DNA, 243 bp, Homo sapiens; identical to SEQ ID NO: 268054
  chr15:90214507-90214750
  hypo

SEQ ID NO: 444330 - DNA, 32 bp, Homo sapiens; identical to SEQ ID NO: 216416
  chr15:90296997-90297029
  hypo

SEQ ID NO: 444331 - DNA, 41 bp, Homo sapiens; identical to SEQ ID NO: 268056
  chr15:90317994-90318035
  hypo

SEQ ID NO: 444332 - DNA, 80 bp, Homo sapiens; identical to SEQ ID NO: 268057
  chr15:90342641-90342721
  hypo

SEQ ID NO: 444333 - DNA, 85 bp, Homo sapiens
  chr15:90378894-90378979
  hypo
gagtatgagacaaattctcactgttatctgcttaatgctaaaaaaaaaaaaaaaaaaaaagcaaaaacaaaaacaaacaagcagg

SEQ ID NO: 444334 - DNA, 136 bp, Homo sapiens; identical to SEQ ID NO: 216417
  chr15:90451518-90451654
  hypo

SEQ ID NO: 444335 - DNA, 140 bp, Homo sapiens; identical to SEQ ID NO: 291136
  chr15:90455670-90455810
  hypo

SEQ ID NO: 444336 - DNA, 242 bp, Homo sapiens; identical to SEQ ID NO: 204031
  chr15:90455967-90456209
  hypo

SEQ ID NO: 444337 - DNA, 36 bp, Homo sapiens; identical to SEQ ID NO: 216421
  chr15:90548960-90548996
  hypo

SEQ ID NO: 444338 - DNA, 92 bp, Homo sapiens; identical to SEQ ID NO: 268063
  chr15:90590718-90590810
  hypo

SEQ ID NO: 444339 - DNA, 159 bp, Homo sapiens; identical to SEQ ID NO: 216422
  chr15:90606083-90606242
  hypo

SEQ ID NO: 444340 - DNA, 153 bp, Homo sapiens; identical to SEQ ID NO: 268066
  chr15:90617275-90617428
  hypo

SEQ ID NO: 444341 - DNA, 68 bp, Homo sapiens; identical to SEQ ID NO: 204032
  chr15:90628227-90628295
  hypo

SEQ ID NO: 444342 - DNA, 243 bp, Homo sapiens; identical to SEQ ID NO: 204033
  chr15:90631580-90631823
  hypo

SEQ ID NO: 444343 - DNA, 81 bp, Homo sapiens; identical to SEQ ID NO: 204034
  chr15:90634777-90634858
  hypo

SEQ ID NO: 444344 - DNA, 32 bp, Homo sapiens; identical to SEQ ID NO: 268067
  chr15:90702246-90702278
  hypo

SEQ ID NO: 444345 - DNA, 146 bp, Homo sapiens; identical to SEQ ID NO: 268068
  chr15:90719188-90719334
  hypo

SEQ ID NO: 444346 - DNA, 36 bp, Homo sapiens; identical to SEQ ID NO: 216427
  chr15:90729568-90729604
  hypo

SEQ ID NO: 444347 - DNA, 254 bp, Homo sapiens; identical to SEQ ID NO: 268070
  chr15:90746124-90746378
  hypo

SEQ ID NO: 444348 - DNA, 36 bp, Homo sapiens; identical to SEQ ID NO: 268072
  chr15:90751191-90751227
  hypo

SEQ ID NO: 444349 - DNA, 202 bp, Homo sapiens; identical to SEQ ID NO: 216429
  chr15:90753863-90754065
  hypo

SEQ ID NO: 444350 - DNA, 151 bp, Homo sapiens; identical to SEQ ID NO: 216432
  chr15:90761175-90761326
  hypo

SEQ ID NO: 444351 - DNA, 217 bp, Homo sapiens; identical to SEQ ID NO: 204035
  chr15:90792593-90792810
  hypo

SEQ ID NO: 444352 - DNA, 200 bp, Homo sapiens; identical to SEQ ID NO: 268076
  chr15:90806189-90806389
  hypo

SEQ ID NO: 444353 - DNA, 60 bp, Homo sapiens; identical to SEQ ID NO: 291143
  chr15:90891947-90892007
  hypo

SEQ ID NO: 444354 - DNA, 120 bp, Homo sapiens; identical to SEQ ID NO: 216435
  chr15:91072203-91072323
  hypo

SEQ ID NO: 444355 - DNA, 37 bp, Homo sapiens; identical to SEQ ID NO: 216436
  chr15:91072383-91072420
  hypo

SEQ ID NO: 444356 - DNA, 95 bp, Homo sapiens; identical to SEQ ID NO: 268080
  chr15:91083105-91083200
  hypo

SEQ ID NO: 444357 - DNA, 80 bp, Homo sapiens; identical to SEQ ID NO: 268081
  chr15:91162925-91163005
  hypo

SEQ ID NO: 444358 - DNA, 39 bp, Homo sapiens; identical to SEQ ID NO: 268084
  chr15:91268410-91268449
  hypo

SEQ ID NO: 444359 - DNA, 40 bp, Homo sapiens; identical to SEQ ID NO: 216437
  chr15:91311952-91311992
  hypo

SEQ ID NO: 444360 - DNA, 40 bp, Homo sapiens; identical to SEQ ID NO: 216438
  chr15:91312232-91312272
  hypo

SEQ ID NO: 444361 - DNA, 50 bp, Homo sapiens; identical to SEQ ID NO: 216439
  chr15:91312875-91312925
  hypo

SEQ ID NO: 444362 - DNA, 43 bp, Homo sapiens; identical to SEQ ID NO: 268089
  chr15:91365251-91365294
  hypo

SEQ ID NO: 444363 - DNA, 196 bp, Homo sapiens; identical to SEQ ID NO: 268090
  chr15:91407799-91407995
  hypo

SEQ ID NO: 444364 - DNA, 72 bp, Homo sapiens; identical to SEQ ID NO: 204036
  chr15:91414358-91414430
  hypo

SEQ ID NO: 444365 - DNA, 285 bp, Homo sapiens; identical to SEQ ID NO: 268092
  chr15:91425022-91425307
  hypo

SEQ ID NO: 444366 - DNA, 92 bp, Homo sapiens; identical to SEQ ID NO: 268093
  chr15:91497739-91497831
  hypo

SEQ ID NO: 444367 - DNA, 109 bp, Homo sapiens; identical to SEQ ID NO: 319530
  chr15:91500831-91500940
  hypo

SEQ ID NO: 444368 - DNA, 120 bp, Homo sapiens; identical to SEQ ID NO: 216443
  chr15:91501898-91502018
  hypo

SEQ ID NO: 444369 - DNA, 134 bp, Homo sapiens; identical to SEQ ID NO: 268097
  chr15:91557050-91557184
  hypo

SEQ ID NO: 444370 - DNA, 117 bp, Homo sapiens; identical to SEQ ID NO: 268098
  chr15:91584151-91584268
  hypo

SEQ ID NO: 444371 - DNA, 319 bp, Homo sapiens; identical to SEQ ID NO: 268100
  chr15:92006743-92007062
  hypo

SEQ ID NO: 444372 - DNA, 39 bp, Homo sapiens; identical to SEQ ID NO: 268101
  chr15:92021563-92021602
  hypo

SEQ ID NO: 444373 - DNA, 131 bp, Homo sapiens; identical to SEQ ID NO: 268103
  chr15:92509294-92509425
  hypo

SEQ ID NO: 444374 - DNA, 194 bp, Homo sapiens; identical to SEQ ID NO: 268104
  chr15:92987936-92988130
  hypo

SEQ ID NO: 444375 - DNA, 186 bp, Homo sapiens; identical to SEQ ID NO: 216447
  chr15:93153520-93153706
  hypo

SEQ ID NO: 444376 - DNA, 74 bp, Homo sapiens; identical to SEQ ID NO: 268106
  chr15:93176138-93176212
  hypo

SEQ ID NO: 444377 - DNA, 180 bp, Homo sapiens; identical to SEQ ID NO: 268108
  chr15:93316009-93316189
  hypo

SEQ ID NO: 444378 - DNA, 120 bp, Homo sapiens; identical to SEQ ID NO: 216448
  chr15:93350343-93350463
  hypo

SEQ ID NO: 444379 - DNA, 123 bp, Homo sapiens; identical to SEQ ID NO: 268111
  chr15:93362349-93362472
  hypo

SEQ ID NO: 444380 - DNA, 31 bp, Homo sapiens; identical to SEQ ID NO: 216449
  chr15:93368949-93368980
  hypo

SEQ ID NO: 444381 - DNA, 120 bp, Homo sapiens; identical to SEQ ID NO: 268113
  chr15:93399862-93399982
  hypo

SEQ ID NO: 444382 - DNA, 77 bp, Homo sapiens; identical to SEQ ID NO: 268118
  chr15:93524851-93524928
  hypo

SEQ ID NO: 444383 - DNA, 137 bp, Homo sapiens; identical to SEQ ID NO: 216451
  chr15:93546307-93546444
  hypo

SEQ ID NO: 444384 - DNA, 81 bp, Homo sapiens; identical to SEQ ID NO: 216452
  chr15:93567908-93567989
  hypo

SEQ ID NO: 444385 - DNA, 665 bp, Homo sapiens; identical to SEQ ID NO: 268121
  chr15:93588122-93588787
  hypo

SEQ ID NO: 444386 - DNA, 37 bp, Homo sapiens; identical to SEQ ID NO: 216456
  chr15:93642692-93642729
  hypo

SEQ ID NO: 444387 - DNA, 44 bp, Homo sapiens; identical to SEQ ID NO: 268124
  chr15:93897785-93897829
  hypo

SEQ ID NO: 444388 - DNA, 100 bp, Homo sapiens; identical to SEQ ID NO: 268125
  chr15:93957516-93957616
  hypo

SEQ ID NO: 444389 - DNA, 32 bp, Homo sapiens; identical to SEQ ID NO: 216457
  chr15:94014475-94014507
  hypo

SEQ ID NO: 444390 - DNA, 42 bp, Homo sapiens; identical to SEQ ID NO: 268127
  chr15:94025234-94025276
  hypo

SEQ ID NO: 444391 - DNA, 32 bp, Homo sapiens; identical to SEQ ID NO: 268129
  chr15:94442495-94442527
  hypo

SEQ ID NO: 444392 - DNA, 300 bp, Homo sapiens; identical to SEQ ID NO: 384586
  chr15:94774274-94774574
  hypo

SEQ ID NO: 444393 - DNA, 220 bp, Homo sapiens; identical to SEQ ID NO: 268131
  chr15:94778462-94778682
  hypo

SEQ ID NO: 444394 - DNA, 43 bp, Homo sapiens; identical to SEQ ID NO: 216459
  chr15:94794563-94794606
  hypo

SEQ ID NO: 444395 - DNA, 76 bp, Homo sapiens; identical to SEQ ID NO: 268133
  chr15:94841669-94841745
  hypo

SEQ ID NO: 444396 - DNA, 76 bp, Homo sapiens; identical to SEQ ID NO: 268135
  chr15:94925967-94926043
  hypo

SEQ ID NO: 444397 - DNA, 56 bp, Homo sapiens; identical to SEQ ID NO: 268136
  chr15:95019094-95019150
  hypo

SEQ ID NO: 444398 - DNA, 212 bp, Homo sapiens; identical to SEQ ID NO: 268137
  chr15:95019400-95019612
  hypo

SEQ ID NO: 444399 - DNA, 390 bp, Homo sapiens; identical to SEQ ID NO: 268138
  chr15:95398763-95399153
  hypo

SEQ ID NO: 444400 - DNA, 89 bp, Homo sapiens; identical to SEQ ID NO: 268139
  chr15:96007651-96007740
  hypo

SEQ ID NO: 444401 - DNA, 34 bp, Homo sapiens; identical to SEQ ID NO: 268140
  chr15:96817336-96817370
  hypo

SEQ ID NO: 444402 - DNA, 81 bp, Homo sapiens; identical to SEQ ID NO: 268141
  chr15:96817400-96817481
  hypo

SEQ ID NO: 444403 - DNA, 377 bp, Homo sapiens; identical to SEQ ID NO: 389321
  chr15:96873421-96873798
  hypo

SEQ ID NO: 444404 - DNA, 212 bp, Homo sapiens; identical to SEQ ID NO: 268142
  chr15:98292427-98292639
  hypo

SEQ ID NO: 444405 - DNA, 136 bp, Homo sapiens; identical to SEQ ID NO: 216461
  chr15:98448107-98448243
  hypo

SEQ ID NO: 444406 - DNA, 268 bp, Homo sapiens; identical to SEQ ID NO: 291185
  chr15:98503609-98503877
  hypo

SEQ ID NO: 444407 - DNA, 168 bp, Homo sapiens; identical to SEQ ID NO: 291186
  chr15:98503946-98504114
  hypo

SEQ ID NO: 444408 - DNA, 56 bp, Homo sapiens; identical to SEQ ID NO: 268144
  chr15:98757743-98757799
  hypo

SEQ ID NO: 444409 - DNA, 34 bp, Homo sapiens; identical to SEQ ID NO: 291188
  chr15:98836393-98836427
  hypo

SEQ ID NO: 444410 - DNA, 139 bp, Homo sapiens; identical to SEQ ID NO: 268145
  chr15:98947754-98947893
  hypo

SEQ ID NO: 444411 - DNA, 276 bp, Homo sapiens; identical to SEQ ID NO: 291189
  chr15:98971414-98971690
  hypo

SEQ ID NO: 444412 - DNA, 259 bp, Homo sapiens; identical to SEQ ID NO: 268146
  chr15:99055007-99055266
  hypo

SEQ ID NO: 444413 - DNA, 123 bp, Homo sapiens; identical to SEQ ID NO: 268147
  chr15:99105788-99105911
  hypo

SEQ ID NO: 444414 - DNA, 212 bp, Homo sapiens; identical to SEQ ID NO: 268148
  chr15:99136066-99136278
  hypo

SEQ ID NO: 444415 - DNA, 180 bp, Homo sapiens; identical to SEQ ID NO: 268149
  chr15:99161542-99161722
  hypo

SEQ ID NO: 444416 - DNA, 56 bp, Homo sapiens; identical to SEQ ID NO: 268150
  chr15:99190074-99190130
  hypo

SEQ ID NO: 444417 - DNA, 45 bp, Homo sapiens; identical to SEQ ID NO: 268151
  chr15:99190189-99190234
  hypo

SEQ ID NO: 444418 - DNA, 33 bp, Homo sapiens; identical to SEQ ID NO: 268152
  chr15:99190315-99190348
  hypo

SEQ ID NO: 444419 - DNA, 510 bp, Homo sapiens; identical to SEQ ID NO: 291193
  chr15:99191216-99191726
  hypo

SEQ ID NO: 444420 - DNA, 210 bp, Homo sapiens; identical to SEQ ID NO: 126471
  chr15:99191748-99191958
  hypo

SEQ ID NO: 444421 - DNA, 582 bp, Homo sapiens; identical to SEQ ID NO: 291195
  chr15:99192162-99192744
  hypo

SEQ ID NO: 444422 - DNA, 223 bp, Homo sapiens; identical to SEQ ID NO: 268153
  chr15:99210728-99210951
  hypo

SEQ ID NO: 444423 - DNA, 76 bp, Homo sapiens; identical to SEQ ID NO: 268154
  chr15:99215806-99215882
  hypo

SEQ ID NO: 444424 - DNA, 37 bp, Homo sapiens; identical to SEQ ID NO: 216469
  chr15:99244847-99244884
  hypo

SEQ ID NO: 444425 - DNA, 63 bp, Homo sapiens; identical to SEQ ID NO: 268157
  chr15:99250992-99251055
  hypo

SEQ ID NO: 444426 - DNA, 124 bp, Homo sapiens; identical to SEQ ID NO: 268160
  chr15:99271450-99271574
  hypo

SEQ ID NO: 444427 - DNA, 341 bp, Homo sapiens; identical to SEQ ID NO: 268162
  chr15:99338922-99339263
  hypo

SEQ ID NO: 444428 - DNA, 38 bp, Homo sapiens; identical to SEQ ID NO: 216472
  chr15:99340602-99340640
  hypo

SEQ ID NO: 444429 - DNA, 180 bp, Homo sapiens; identical to SEQ ID NO: 268164
  chr15:99349404-99349584
  hypo

SEQ ID NO: 444430 - DNA, 172 bp, Homo sapiens; identical to SEQ ID NO: 268165
  chr15:99352651-99352823
  hypo

SEQ ID NO: 444431 - DNA, 120 bp, Homo sapiens; identical to SEQ ID NO: 216473
  chr15:99354751-99354871
  hypo

SEQ ID NO: 444432 - DNA, 69 bp, Homo sapiens; identical to SEQ ID NO: 268167
  chr15:99364726-99364795
  hypo

SEQ ID NO: 444433 - DNA, 159 bp, Homo sapiens; identical to SEQ ID NO: 216474
  chr15:99371126-99371285
  hypo

SEQ ID NO: 444434 - DNA, 93 bp, Homo sapiens; identical to SEQ ID NO: 268169
  chr15:99400735-99400828
  hypo

SEQ ID NO: 444435 - DNA, 42 bp, Homo sapiens; identical to SEQ ID NO: 268170
  chr15:99411823-99411865
  hypo

SEQ ID NO: 444436 - DNA, 136 bp, Homo sapiens; identical to SEQ ID NO: 268171
  chr15:99426895-99427031
  hypo

SEQ ID NO: 444437 - DNA, 85 bp, Homo sapiens; identical to SEQ ID NO: 268172
  chr15:99430912-99430997
  hypo

SEQ ID NO: 444438 - DNA, 79 bp, Homo sapiens; identical to SEQ ID NO: 268173
  chr15:99433317-99433396
  hypo

SEQ ID NO: 444439 - DNA, 120 bp, Homo sapiens; identical to SEQ ID NO: 268174
  chr15:99433456-99433576
  hypo

SEQ ID NO: 444440 - DNA, 108 bp, Homo sapiens; identical to SEQ ID NO: 216476
  chr15:99440185-99440293
  hypo

SEQ ID NO: 444441 - DNA, 41 bp, Homo sapiens; identical to SEQ ID NO: 216478
  chr15:99461820-99461861
  hypo

SEQ ID NO: 444442 - DNA, 105 bp, Homo sapiens; identical to SEQ ID NO: 216482
  chr15:99512752-99512857
  hypo

SEQ ID NO: 444443 - DNA, 97 bp, Homo sapiens; identical to SEQ ID NO: 268189
  chr15:99954583-99954680
  hypo

SEQ ID NO: 444444 - DNA, 472 bp, Homo sapiens; identical to SEQ ID NO: 268190
  chr15:99966717-99967189
  hypo

SEQ ID NO: 444445 - DNA, 98 bp, Homo sapiens; identical to SEQ ID NO: 268191
  chr15:99984008-99984106
  hypo

SEQ ID NO: 444446 - DNA, 234 bp, Homo sapiens; identical to SEQ ID NO: 268192
  chr15:100007568-100007802
  hypo

SEQ ID NO: 444447 - DNA, 60 bp, Homo sapiens; identical to SEQ ID NO: 291201
  chr15:100273844-100273904
  hypo

SEQ ID NO: 444448 - DNA, 51 bp, Homo sapiens; identical to SEQ ID NO: 204069
  chr15:100273946-100273997
  hypo

SEQ ID NO: 444449 - DNA, 92 bp, Homo sapiens; identical to SEQ ID NO: 216486
  chr15:100274190-100274282
  hypo

SEQ ID NO: 444450 - DNA, 99 bp, Homo sapiens; identical to SEQ ID NO: 268194
  chr15:100290729-100290828
  hypo

SEQ ID NO: 444451 - DNA, 209 bp, Homo sapiens; identical to SEQ ID NO: 216487
  chr15:100649031-100649240
  hypo

SEQ ID NO: 444452 - DNA, 204 bp, Homo sapiens; identical to SEQ ID NO: 216488
  chr15:100726606-100726810
  hypo

SEQ ID NO: 444453 - DNA, 254 bp, Homo sapiens; identical to SEQ ID NO: 268197
  chr15:100739956-100740210
  hypo

SEQ ID NO: 444454 - DNA, 102 bp, Homo sapiens; identical to SEQ ID NO: 216489
  chr15:100791527-100791629
  hypo

SEQ ID NO: 444455 - DNA, 145 bp, Homo sapiens; identical to SEQ ID NO: 268199
  chr15:100851744-100851889
  hypo

SEQ ID NO: 444456 - DNA, 177 bp, Homo sapiens; identical to SEQ ID NO: 268200
  chr15:100880285-100880462
  hypo

SEQ ID NO: 444457 - DNA, 42 bp, Homo sapiens; identical to SEQ ID NO: 268201
  chr15:101059359-101059401
  hypo

SEQ ID NO: 444458 - DNA, 237 bp, Homo sapiens; identical to SEQ ID NO: 216491
  chr15:101099270-101099507
  hypo

SEQ ID NO: 444459 - DNA, 35 bp, Homo sapiens; identical to SEQ ID NO: 268203
  chr15:101194866-101194901
  hypo

SEQ ID NO: 444460 - DNA, 193 bp, Homo sapiens; identical to SEQ ID NO: 216492
  chr15:101267000-101267193
  hypo

SEQ ID NO: 444461 - DNA, 106 bp, Homo sapiens; identical to SEQ ID NO: 268205
  chr15:101427825-101427931
  hypo

SEQ ID NO: 444462 - DNA, 174 bp, Homo sapiens; identical to SEQ ID NO: 216494
  chr15:101469411-101469585
  hypo

SEQ ID NO: 444463 - DNA, 89 bp, Homo sapiens; identical to SEQ ID NO: 319658
  chr15:101535315-101535404
  hypo

SEQ ID NO: 444464 - DNA, 100 bp, Homo sapiens; identical to SEQ ID NO: 268209
  chr15:101591989-101592089
  hypo

SEQ ID NO: 444465 - DNA, 243 bp, Homo sapiens; identical to SEQ ID NO: 268211
  chr15:101719768-101720011
  hypo

SEQ ID NO: 444466 - DNA, 107 bp, Homo sapiens; identical to SEQ ID NO: 268212
  chr15:101720485-101720592
  hypo

SEQ ID NO: 444467 - DNA, 81 bp, Homo sapiens; identical to SEQ ID NO: 268214
  chr15:101739034-101739115
  hypo

SEQ ID NO: 444468 - DNA, 154 bp, Homo sapiens; identical to SEQ ID NO: 224959
  chr15:101791012-101791166
  hypo

SEQ ID NO: 444469 - DNA, 170 bp, Homo sapiens; identical to SEQ ID NO: 268216
  chr15:101809434-101809604
  hypo

SEQ ID NO: 444470 - DNA, 185 bp, Homo sapiens; identical to SEQ ID NO: 319667
  chr15:101818142-101818327
  hypo

SEQ ID NO: 444471 - DNA, 175 bp, Homo sapiens; identical to SEQ ID NO: 319668
  chr15:101818357-101818532
  hypo

SEQ ID NO: 444472 - DNA, 338 bp, Homo sapiens; identical to SEQ ID NO: 291215
  chr15:101835610-101835948
  hypo

SEQ ID NO: 444473 - DNA, 465 bp, Homo sapiens; identical to SEQ ID NO: 268219
  chr15:101850124-101850589
  hypo

SEQ ID NO: 444474 - DNA, 196 bp, Homo sapiens; identical to SEQ ID NO: 216497
  chr15:101862667-101862863
  hypo

SEQ ID NO: 444475 - DNA, 116 bp, Homo sapiens; identical to SEQ ID NO: 268221
  chr15:101865103-101865219
  hypo

SEQ ID NO: 444476 - DNA, 33 bp, Homo sapiens; identical to SEQ ID NO: 216499
  chr15:101949373-101949406
  hypo

SEQ ID NO: 444477 - DNA, 32 bp, Homo sapiens; identical to SEQ ID NO: 216500
  chr15:101949766-101949798
  hypo

SEQ ID NO: 444478 - DNA, 137 bp, Homo sapiens; identical to SEQ ID NO: 268226
  chr15:101966967-101967104
  hypo

SEQ ID NO: 444479 - DNA, 42 bp, Homo sapiens; identical to SEQ ID NO: 268227
  chr15:101967391-101967433
  hypo

SEQ ID NO: 444480 - DNA, 129 bp, Homo sapiens; identical to SEQ ID NO: 268228
  chr15:101968052-101968181
  hypo

SEQ ID NO: 444481 - DNA, 214 bp, Homo sapiens; identical to SEQ ID NO: 216501
  chr15:101974813-101975027
  hypo

SEQ ID NO: 444482 - DNA, 114 bp, Homo sapiens; identical to SEQ ID NO: 268230
  chr15:101977435-101977549
  hypo

SEQ ID NO: 444483 - DNA, 39 bp, Homo sapiens; identical to SEQ ID NO: 268231
  chr15:101998574-101998613
  hypo

SEQ ID NO: 444484 - DNA, 172 bp, Homo sapiens; identical to SEQ ID NO: 216502
  chr15:102004885-102005057
  hypo

SEQ ID NO: 444485 - DNA, 213 bp, Homo sapiens; identical to SEQ ID NO: 268233
  chr15:102017128-102017341
  hypo

SEQ ID NO: 444486 - DNA, 283 bp, Homo sapiens; identical to SEQ ID NO: 268235
  chr15:102022132-102022415
  hypo

SEQ ID NO: 444487 - DNA, 75 bp, Homo sapiens; identical to SEQ ID NO: 268236
  chr15:102030590-102030665
  hypo

SEQ ID NO: 444488 - DNA, 161 bp, Homo sapiens; identical to SEQ ID NO: 268238
  chr15:102070179-102070340
  hypo

SEQ ID NO: 444489 - DNA, 156 bp, Homo sapiens; identical to SEQ ID NO: 268239
  chr15:102070859-102071015
  hypo

SEQ ID NO: 444490 - DNA, 504 bp, Homo sapiens; identical to SEQ ID NO: 268240
  chr15:102075402-102075906
  hypo

SEQ ID NO: 444491 - DNA, 36 bp, Homo sapiens; identical to SEQ ID NO: 268241
  chr15:102076394-102076430
  hypo

SEQ ID NO: 444492 - DNA, 174 bp, Homo sapiens; identical to SEQ ID NO: 216506
  chr15:102251172-102251346
  hypo

SEQ ID NO: 444493 - DNA, 119 bp, Homo sapiens; identical to SEQ ID NO: 216507
  chr16:84351-84470
  hypo

SEQ ID NO: 444494 - DNA, 259 bp, Homo sapiens; identical to SEQ ID NO: 268247
  chr16:91469-91728
  hypo

SEQ ID NO: 444495 - DNA, 75 bp, Homo sapiens
  chr16:94325-94400
  hypo
cacacacacacacacaaaatctcagaggttctccagggtgcaaataaaagcaccagtcagttttataatagactt

SEQ ID NO: 444496 - DNA, 93 bp, Homo sapiens; identical to SEQ ID NO: 216509
  chr16:101672-101765
  hypo

SEQ ID NO: 444497 - DNA, 118 bp, Homo sapiens; identical to SEQ ID NO: 216510
  chr16:111055-111173
  hypo

SEQ ID NO: 444498 - DNA, 147 bp, Homo sapiens; identical to SEQ ID NO: 268251
  chr16:111739-111886
  hypo

SEQ ID NO: 444499 - DNA, 54 bp, Homo sapiens; identical to SEQ ID NO: 216511
  chr16:112973-113027
  hypo

SEQ ID NO: 444500 - DNA, 275 bp, Homo sapiens; identical to SEQ ID NO: 268254
  chr16:114727-115002
  hypo

SEQ ID NO: 444501 - DNA, 293 bp, Homo sapiens; identical to SEQ ID NO: 216514
  chr16:117786-118079
  hypo

SEQ ID NO: 444502 - DNA, 143 bp, Homo sapiens; identical to SEQ ID NO: 216515
  chr16:136642-136785
  hypo

SEQ ID NO: 444503 - DNA, 365 bp, Homo sapiens; identical to SEQ ID NO: 291221
  chr16:204521-204886
  hypo

SEQ ID NO: 444504 - DNA, 356 bp, Homo sapiens; identical to SEQ ID NO: 291222
  chr16:231052-231408
  hypo

SEQ ID NO: 444505 - DNA, 40 bp, Homo sapiens; identical to SEQ ID NO: 216518
  chr16:232125-232165
  hypo

SEQ ID NO: 444506 - DNA, 39 bp, Homo sapiens; identical to SEQ ID NO: 268260
  chr16:232585-232624
  hypo

SEQ ID NO: 444507 - DNA, 89 bp, Homo sapiens; identical to SEQ ID NO: 268262
  chr16:255869-255958
  hypo

SEQ ID NO: 444508 - DNA, 36 bp, Homo sapiens; identical to SEQ ID NO: 216519
  chr16:299613-299649
  hypo

SEQ ID NO: 444509 - DNA, 74 bp, Homo sapiens; identical to SEQ ID NO: 216520
  chr16:299877-299951
  hypo

SEQ ID NO: 444510 - DNA, 36 bp, Homo sapiens; identical to SEQ ID NO: 268266
  chr16:310516-310552
  hypo

SEQ ID NO: 444511 - DNA, 50 bp, Homo sapiens; identical to SEQ ID NO: 268268
  chr16:316210-316260
  hypo

SEQ ID NO: 444512 - DNA, 212 bp, Homo sapiens; identical to SEQ ID NO: 224967
  chr16:325890-326102
  hypo

SEQ ID NO: 444513 - DNA, 188 bp, Homo sapiens; identical to SEQ ID NO: 268272
  chr16:334795-334983
  hypo

SEQ ID NO: 444514 - DNA, 136 bp, Homo sapiens; identical to SEQ ID NO: 268274
  chr16:339477-339613
  hypo

SEQ ID NO: 444515 - DNA, 121 bp, Homo sapiens; identical to SEQ ID NO: 268275
  chr16:341171-341292
  hypo

SEQ ID NO: 444516 - DNA, 84 bp, Homo sapiens; identical to SEQ ID NO: 291226
  chr16:347192-347276
  hypo

SEQ ID NO: 444517 - DNA, 134 bp, Homo sapiens; identical to SEQ ID NO: 216522
  chr16:354255-354389
  hypo

SEQ ID NO: 444518 - DNA, 333 bp, Homo sapiens; identical to SEQ ID NO: 216523
  chr16:356183-356516
  hypo

SEQ ID NO: 444519 - DNA, 190 bp, Homo sapiens; identical to SEQ ID NO: 216524
  chr16:360132-360322
  hypo

SEQ ID NO: 444520 - DNA, 143 bp, Homo sapiens; identical to SEQ ID NO: 216525
  chr16:364475-364618
  hypo

SEQ ID NO: 444521 - DNA, 81 bp, Homo sapiens; identical to SEQ ID NO: 216526
  chr16:364964-365045
  hypo

SEQ ID NO: 444522 - DNA, 261 bp, Homo sapiens; identical to SEQ ID NO: 52626
  chr16:374858-375119
  hypo

SEQ ID NO: 444523 - DNA, 46 bp, Homo sapiens; identical to SEQ ID NO: 268283
  chr16:400402-400448
  hypo

SEQ ID NO: 444524 - DNA, 266 bp, Homo sapiens; identical to SEQ ID NO: 268286
  chr16:422074-422340
  hypo

SEQ ID NO: 444525 - DNA, 115 bp, Homo sapiens; identical to SEQ ID NO: 268287
  chr16:426699-426814
  hypo

SEQ ID NO: 444526 - DNA, 109 bp, Homo sapiens; identical to SEQ ID NO: 319740
  chr16:428821-428930
  hypo

SEQ ID NO: 444527 - DNA, 503 bp, Homo sapiens; identical to SEQ ID NO: 319741
  chr16:429073-429576
  hypo

SEQ ID NO: 444528 - DNA, 92 bp, Homo sapiens; identical to SEQ ID NO: 268289
  chr16:439056-439148
  hypo

SEQ ID NO: 444529 - DNA, 180 bp, Homo sapiens; identical to SEQ ID NO: 216530
  chr16:460351-460531
  hypo

SEQ ID NO: 444530 - DNA, 39 bp, Homo sapiens; identical to SEQ ID NO: 386687
  chr16:468014-468053
  hypo

SEQ ID NO: 444531 - DNA, 78 bp, Homo sapiens; identical to SEQ ID NO: 319747
  chr16:501383-501461
  hypo

SEQ ID NO: 444532 - DNA, 120 bp, Homo sapiens; identical to SEQ ID NO: 216531
  chr16:505065-505185
  hypo

SEQ ID NO: 444533 - DNA, 31 bp, Homo sapiens; identical to SEQ ID NO: 268295
  chr16:505485-505516
  hypo

SEQ ID NO: 444534 - DNA, 49 bp, Homo sapiens; identical to SEQ ID NO: 268296
  chr16:512665-512714
  hypo

SEQ ID NO: 444535 - DNA, 305 bp, Homo sapiens; identical to SEQ ID NO: 268297
  chr16:514976-515281
  hypo

SEQ ID NO: 444536 - DNA, 568 bp, Homo sapiens; identical to SEQ ID NO: 268300
  chr16:525278-525846
  hypo

SEQ ID NO: 444537 - DNA, 217 bp, Homo sapiens; identical to SEQ ID NO: 268301
  chr16:532454-532671
  hypo

SEQ ID NO: 444538 - DNA, 163 bp, Homo sapiens; identical to SEQ ID NO: 216536
  chr16:534203-534366
  hypo

SEQ ID NO: 444539 - DNA, 62 bp, Homo sapiens; identical to SEQ ID NO: 268305
  chr16:541776-541838
  hypo

SEQ ID NO: 444540 - DNA, 103 bp, Homo sapiens; identical to SEQ ID NO: 291229
  chr16:565623-565726
  hypo

SEQ ID NO: 444541 - DNA, 45 bp, Homo sapiens; identical to SEQ ID NO: 268306
  chr16:567191-567236
  hypo

SEQ ID NO: 444542 - DNA, 65 bp, Homo sapiens; identical to SEQ ID NO: 268308
  chr16:573426-573491
  hypo

SEQ ID NO: 444543 - DNA, 251 bp, Homo sapiens; identical to SEQ ID NO: 291230
  chr16:577428-577679
  hypo

SEQ ID NO: 444544 - DNA, 479 bp, Homo sapiens; identical to SEQ ID NO: 268309
  chr16:584707-585186
  hypo

SEQ ID NO: 444545 - DNA, 72 bp, Homo sapiens; identical to SEQ ID NO: 216541
  chr16:587258-587330
  hypo

SEQ ID NO: 444546 - DNA, 165 bp, Homo sapiens; identical to SEQ ID NO: 216542
  chr16:588070-588235
  hypo

SEQ ID NO: 444547 - DNA, 67 bp, Homo sapiens; identical to SEQ ID NO: 216543
  chr16:588487-588554
  hypo

SEQ ID NO: 444548 - DNA, 666 bp, Homo sapiens; identical to SEQ ID NO: 268314
  chr16:595534-596200
  hypo

SEQ ID NO: 444549 - DNA, 363 bp, Homo sapiens; identical to SEQ ID NO: 268315
  chr16:604992-605355
  hypo

SEQ ID NO: 444550 - DNA, 40 bp, Homo sapiens; identical to SEQ ID NO: 216546
  chr16:613512-613552
  hypo

SEQ ID NO: 444551 - DNA, 45 bp, Homo sapiens; identical to SEQ ID NO: 216547
  chr16:614710-614755
  hypo

SEQ ID NO: 444552 - DNA, 107 bp, Homo sapiens; identical to SEQ ID NO: 319777
  chr16:615257-615364
  hypo

SEQ ID NO: 444553 - DNA, 234 bp, Homo sapiens; identical to SEQ ID NO: 268320
  chr16:617604-617838
  hypo

SEQ ID NO: 444554 - DNA, 785 bp, Homo sapiens; identical to SEQ ID NO: 268321
  chr16:623991-624776
  hypo

SEQ ID NO: 444555 - DNA, 32 bp, Homo sapiens; identical to SEQ ID NO: 319780
  chr16:643850-643882
  hypo

SEQ ID NO: 444556 - DNA, 589 bp, Homo sapiens; identical to SEQ ID NO: 319781
  chr16:643994-644583
  hypo

SEQ ID NO: 444557 - DNA, 295 bp, Homo sapiens; identical to SEQ ID NO: 268323
  chr16:660723-661018
  hypo

SEQ ID NO: 444558 - DNA, 44 bp, Homo sapiens; identical to SEQ ID NO: 393594
  chr16:666664-666708
  hypo

SEQ ID NO: 444559 - DNA, 130 bp, Homo sapiens; identical to SEQ ID NO: 410565
  chr16:668274-668404
  hypo

SEQ ID NO: 444560 - DNA, 166 bp, Homo sapiens; identical to SEQ ID NO: 216553
  chr16:670661-670827
  hypo

SEQ ID NO: 444561 - DNA, 291 bp, Homo sapiens; identical to SEQ ID NO: 216554
  chr16:671080-671371
  hypo

SEQ ID NO: 444562 - DNA, 246 bp, Homo sapiens; identical to SEQ ID NO: 216555
  chr16:671426-671672
  hypo

SEQ ID NO: 444563 - DNA, 324 bp, Homo sapiens; identical to SEQ ID NO: 319790
  chr16:672806-673130
  hypo

SEQ ID NO: 444564 - DNA, 91 bp, Homo sapiens; identical to SEQ ID NO: 268330
  chr16:675966-676057
  hypo

SEQ ID NO: 444565 - DNA, 205 bp, Homo sapiens; identical to SEQ ID NO: 268333
  chr16:684417-684622
  hypo

SEQ ID NO: 444566 - DNA, 145 bp, Homo sapiens; identical to SEQ ID NO: 268334
  chr16:689010-689155
  hypo

SEQ ID NO: 444567 - DNA, 83 bp, Homo sapiens; identical to SEQ ID NO: 268335
  chr16:712804-712887
  hypo

SEQ ID NO: 444568 - DNA, 121 bp, Homo sapiens; identical to SEQ ID NO: 268336
  chr16:714161-714282
  hypo

SEQ ID NO: 444569 - DNA, 41 bp, Homo sapiens; identical to SEQ ID NO: 268337
  chr16:716021-716062
  hypo

SEQ ID NO: 444570 - DNA, 50 bp, Homo sapiens; identical to SEQ ID NO: 204077
  chr16:717960-718010
  hypo

SEQ ID NO: 444571 - DNA, 119 bp, Homo sapiens; identical to SEQ ID NO: 216561
  chr16:728001-728120
  hypo

SEQ ID NO: 444572 - DNA, 137 bp, Homo sapiens; identical to SEQ ID NO: 216562
  chr16:736747-736884
  hypo

SEQ ID NO: 444573 - DNA, 44 bp, Homo sapiens; identical to SEQ ID NO: 268344
  chr16:737200-737244
  hypo

SEQ ID NO: 444574 - DNA, 111 bp, Homo sapiens; identical to SEQ ID NO: 204079
  chr16:765207-765318
  hypo

SEQ ID NO: 444575 - DNA, 62 bp, Homo sapiens; identical to SEQ ID NO: 224976
  chr16:765586-765648
  hypo

SEQ ID NO: 444576 - DNA, 518 bp, Homo sapiens; identical to SEQ ID NO: 216565
  chr16:767027-767545
  hypo

SEQ ID NO: 444577 - DNA, 95 bp, Homo sapiens; identical to SEQ ID NO: 268347
  chr16:771678-771773
  hypo

SEQ ID NO: 444578 - DNA, 583 bp, Homo sapiens; identical to SEQ ID NO: 268348
  chr16:771803-772386
  hypo

SEQ ID NO: 444579 - DNA, 255 bp, Homo sapiens; identical to SEQ ID NO: 291239
  chr16:778111-778366
  hypo

SEQ ID NO: 444580 - DNA, 121 bp, Homo sapiens; identical to SEQ ID NO: 224978
  chr16:778761-778882
  hypo

SEQ ID NO: 444581 - DNA, 162 bp, Homo sapiens; identical to SEQ ID NO: 268349
  chr16:783583-783745
  hypo

SEQ ID NO: 444582 - DNA, 44 bp, Homo sapiens; identical to SEQ ID NO: 319817
  chr16:798359-798403
  hypo

SEQ ID NO: 444583 - DNA, 260 bp, Homo sapiens; identical to SEQ ID NO: 268351
  chr16:798433-798693
  hypo

SEQ ID NO: 444584 - DNA, 144 bp, Homo sapiens; identical to SEQ ID NO: 216568
  chr16:809245-809389
  hypo

SEQ ID NO: 444585 - DNA, 477 bp, Homo sapiens; identical to SEQ ID NO: 268354
  chr16:816636-817113
  hypo

SEQ ID NO: 444586 - DNA, 99 bp, Homo sapiens; identical to SEQ ID NO: 268356
  chr16:830347-830446
  hypo

SEQ ID NO: 444587 - DNA, 410 bp, Homo sapiens; identical to SEQ ID NO: 268358
  chr16:844997-845407
  hypo

SEQ ID NO: 444588 - DNA, 104 bp, Homo sapiens; identical to SEQ ID NO: 268362
  chr16:876966-877070
  hypo

SEQ ID NO: 444589 - DNA, 299 bp, Homo sapiens; identical to SEQ ID NO: 319828
  chr16:898860-899159
  hypo

SEQ ID NO: 444590 - DNA, 41 bp, Homo sapiens; identical to SEQ ID NO: 216574
  chr16:899189-899230
  hypo

SEQ ID NO: 444591 - DNA, 275 bp, Homo sapiens; identical to SEQ ID NO: 268365
  chr16:902049-902324
  hypo

SEQ ID NO: 444592 - DNA, 96 bp, Homo sapiens; identical to SEQ ID NO: 216575
  chr16:919967-920063
  hypo

SEQ ID NO: 444593 - DNA, 44 bp, Homo sapiens; identical to SEQ ID NO: 319832
  chr16:924504-924548
  hypo

SEQ ID NO: 444594 - DNA, 220 bp, Homo sapiens; identical to SEQ ID NO: 319833
  chr16:929566-929786
  hypo

SEQ ID NO: 444595 - DNA, 343 bp, Homo sapiens; identical to SEQ ID NO: 319837
  chr16:946357-946700
  hypo

SEQ ID NO: 444596 - DNA, 207 bp, Homo sapiens; identical to SEQ ID NO: 216579
  chr16:947037-947244
  hypo

SEQ ID NO: 444597 - DNA, 129 bp, Homo sapiens; identical to SEQ ID NO: 216580
  chr16:949645-949774
  hypo

SEQ ID NO: 444598 - DNA, 36 bp, Homo sapiens; identical to SEQ ID NO: 216581
  chr16:962797-962833
  hypo

SEQ ID NO: 444599 - DNA, 85 bp, Homo sapiens; identical to SEQ ID NO: 319841
  chr16:963398-963483
  hypo

SEQ ID NO: 444600 - DNA, 178 bp, Homo sapiens; identical to SEQ ID NO: 268375
  chr16:966496-966674
  hypo

SEQ ID NO: 444601 - DNA, 126 bp, Homo sapiens; identical to SEQ ID NO: 268376
  chr16:967568-967694
  hypo

SEQ ID NO: 444602 - DNA, 142 bp, Homo sapiens; identical to SEQ ID NO: 268377
  chr16:967906-968048
  hypo

SEQ ID NO: 444603 - DNA, 154 bp, Homo sapiens; identical to SEQ ID NO: 319845
  chr16:969055-969209
  hypo

SEQ ID NO: 444604 - DNA, 244 bp, Homo sapiens; identical to SEQ ID NO: 319846
  chr16:969239-969483
  hypo

SEQ ID NO: 444605 - DNA, 35 bp, Homo sapiens; identical to SEQ ID NO: 268379
  chr16:969858-969893
  hypo

SEQ ID NO: 444606 - DNA, 171 bp, Homo sapiens; identical to SEQ ID NO: 268381
  chr16:1014778-1014949
  hypo

SEQ ID NO: 444607 - DNA, 465 bp, Homo sapiens; identical to SEQ ID NO: 319852
  chr16:1017655-1018120
  hypo

SEQ ID NO: 444608 - DNA, 366 bp, Homo sapiens; identical to SEQ ID NO: 268384
  chr16:1022298-1022664
  hypo

SEQ ID NO: 444609 - DNA, 44 bp, Homo sapiens; identical to SEQ ID NO: 319857
  chr16:1037685-1037729
  hypo

SEQ ID NO: 444610 - DNA, 185 bp, Homo sapiens; identical to SEQ ID NO: 178852
  chr16:1037750-1037935
  hypo

SEQ ID NO: 444611 - DNA, 573 bp, Homo sapiens; identical to SEQ ID NO: 319860
  chr16:1075861-1076434
  hypo

SEQ ID NO: 444612 - DNA, 227 bp, Homo sapiens; identical to SEQ ID NO: 319861
  chr16:1077659-1077886
  hypo

SEQ ID NO: 444613 - DNA, 48 bp, Homo sapiens; identical to SEQ ID NO: 319862
  chr16:1077949-1077997
  hypo

SEQ ID NO: 444614 - DNA, 119 bp, Homo sapiens; identical to SEQ ID NO: 216587
  chr16:1081654-1081773
  hypo

SEQ ID NO: 444615 - DNA, 36 bp, Homo sapiens; identical to SEQ ID NO: 268392
  chr16:1095307-1095343
  hypo

SEQ ID NO: 444616 - DNA, 399 bp, Homo sapiens; identical to SEQ ID NO: 268393
  chr16:1110841-1111240
  hypo

SEQ ID NO: 444617 - DNA, 95 bp, Homo sapiens; identical to SEQ ID NO: 319866
  chr16:1111876-1111971
  hypo

SEQ ID NO: 444618 - DNA, 49 bp, Homo sapiens; identical to SEQ ID NO: 319867
  chr16:1112017-1112066
  hypo

SEQ ID NO: 444619 - DNA, 255 bp, Homo sapiens; identical to SEQ ID NO: 268395
  chr16:1112295-1112550
  hypo

SEQ ID NO: 444620 - DNA, 718 bp, Homo sapiens; identical to SEQ ID NO: 319870
  chr16:1129367-1130085
  hypo

SEQ ID NO: 444621 - DNA, 79 bp, Homo sapiens; identical to SEQ ID NO: 319872
  chr16:1187523-1187602
  hypo

SEQ ID NO: 444622 - DNA, 339 bp, Homo sapiens; identical to SEQ ID NO: 319873
  chr16:1187632-1187971
  hypo

SEQ ID NO: 444623 - DNA, 109 bp, Homo sapiens; identical to SEQ ID NO: 216588
  chr16:1198574-1198683
  hypo

SEQ ID NO: 444624 - DNA, 227 bp, Homo sapiens; identical to SEQ ID NO: 268402
  chr16:1199857-1200084
  hypo

SEQ ID NO: 444625 - DNA, 118 bp, Homo sapiens; identical to SEQ ID NO: 319876
  chr16:1207089-1207207
  hypo

SEQ ID NO: 444626 - DNA, 98 bp, Homo sapiens; identical to SEQ ID NO: 319877
  chr16:1207528-1207626
  hypo

SEQ ID NO: 444627 - DNA, 211 bp, Homo sapiens; identical to SEQ ID NO: 268406
  chr16:1214594-1214805
  hypo

SEQ ID NO: 444628 - DNA, 162 bp, Homo sapiens; identical to SEQ ID NO: 319879
  chr16:1215023-1215185
  hypo

SEQ ID NO: 444629 - DNA, 408 bp, Homo sapiens; identical to SEQ ID NO: 319880
  chr16:1216537-1216945
  hypo

SEQ ID NO: 444630 - DNA, 207 bp, Homo sapiens; identical to SEQ ID NO: 319881
  chr16:1216975-1217182
  hypo

SEQ ID NO: 444631 - DNA, 348 bp, Homo sapiens; identical to SEQ ID NO: 216590
  chr16:1236137-1236485
  hypo

SEQ ID NO: 444632 - DNA, 211 bp, Homo sapiens; identical to SEQ ID NO: 319884
  chr16:1237141-1237352
  hypo

SEQ ID NO: 444633 - DNA, 73 bp, Homo sapiens; identical to SEQ ID NO: 268412
  chr16:1247873-1247946
  hypo

SEQ ID NO: 444634 - DNA, 83 bp, Homo sapiens; identical to SEQ ID NO: 268417
  chr16:1254185-1254268
  hypo

SEQ ID NO: 444635 - DNA, 250 bp, Homo sapiens; identical to SEQ ID NO: 319892
  chr16:1262512-1262762
  hypo

SEQ ID NO: 444636 - DNA, 58 bp, Homo sapiens; identical to SEQ ID NO: 319895
  chr16:1267126-1267184
  hypo

SEQ ID NO: 444637 - DNA, 35 bp, Homo sapiens; identical to SEQ ID NO: 319896
  chr16:1267214-1267249
  hypo

SEQ ID NO: 444638 - DNA, 217 bp, Homo sapiens; identical to SEQ ID NO: 319897
  chr16:1267479-1267696
  hypo

SEQ ID NO: 444639 - DNA, 94 bp, Homo sapiens; identical to SEQ ID NO: 216597
  chr16:1268565-1268659
  hypo

SEQ ID NO: 444640 - DNA, 39 bp, Homo sapiens; identical to SEQ ID NO: 216600
  chr16:1273470-1273509
  hypo

SEQ ID NO: 444641 - DNA, 39 bp, Homo sapiens; identical to SEQ ID NO: 268426
  chr16:1341419-1341458
  hypo

SEQ ID NO: 444642 - DNA, 133 bp, Homo sapiens; identical to SEQ ID NO: 268427
  chr16:1365759-1365892
  hypo

SEQ ID NO: 444643 - DNA, 142 bp, Homo sapiens; identical to SEQ ID NO: 216601
  chr16:1367993-1368135
  hypo

SEQ ID NO: 444644 - DNA, 33 bp, Homo sapiens; identical to SEQ ID NO: 268429
  chr16:1369126-1369159
  hypo

SEQ ID NO: 444645 - DNA, 193 bp, Homo sapiens; identical to SEQ ID NO: 216602
  chr16:1369189-1369382
  hypo

SEQ ID NO: 444646 - DNA, 100 bp, Homo sapiens; identical to SEQ ID NO: 268431
  chr16:1370327-1370427
  hypo

SEQ ID NO: 444647 - DNA, 83 bp, Homo sapiens; identical to SEQ ID NO: 268432
  chr16:1374351-1374434
  hypo

SEQ ID NO: 444648 - DNA, 144 bp, Homo sapiens; identical to SEQ ID NO: 291244
  chr16:1384098-1384242
  hypo

SEQ ID NO: 444649 - DNA, 145 bp, Homo sapiens; identical to SEQ ID NO: 268433
  chr16:1390248-1390393
  hypo

SEQ ID NO: 444650 - DNA, 55 bp, Homo sapiens; identical to SEQ ID NO: 319912
  chr16:1391650-1391705
  hypo

SEQ ID NO: 444651 - DNA, 74 bp, Homo sapiens; identical to SEQ ID NO: 268437
  chr16:1406894-1406968
  hypo

SEQ ID NO: 444652 - DNA, 274 bp, Homo sapiens; identical to SEQ ID NO: 319917
  chr16:1407936-1408210
  hypo

SEQ ID NO: 444653 - DNA, 178 bp, Homo sapiens; identical to SEQ ID NO: 268440
  chr16:1414467-1414645
  hypo

SEQ ID NO: 444654 - DNA, 145 bp, Homo sapiens; identical to SEQ ID NO: 268441
  chr16:1416341-1416486
  hypo

SEQ ID NO: 444655 - DNA, 243 bp, Homo sapiens; identical to SEQ ID NO: 204080
  chr16:1429037-1429280
  hypo

SEQ ID NO: 444656 - DNA, 248 bp, Homo sapiens; identical to SEQ ID NO: 268447
  chr16:1435412-1435660
  hypo

SEQ ID NO: 444657 - DNA, 72 bp, Homo sapiens; identical to SEQ ID NO: 216610
  chr16:1462654-1462726
  hypo

SEQ ID NO: 444658 - DNA, 32 bp, Homo sapiens; identical to SEQ ID NO: 216611
  chr16:1465337-1465369
  hypo

SEQ ID NO: 444659 - DNA, 34 bp, Homo sapiens; identical to SEQ ID NO: 268450
  chr16:1466431-1466465
  hypo

SEQ ID NO: 444660 - DNA, 59 bp, Homo sapiens; identical to SEQ ID NO: 393610
  chr16:1472168-1472227
  hypo

SEQ ID NO: 444661 - DNA, 150 bp, Homo sapiens; identical to SEQ ID NO: 268452
  chr16:1484608-1484758
  hypo

SEQ ID NO: 444662 - DNA, 41 bp, Homo sapiens; identical to SEQ ID NO: 319931
  chr16:1487860-1487901
  hypo

SEQ ID NO: 444663 - DNA, 42 bp, Homo sapiens; identical to SEQ ID NO: 319932
  chr16:1488051-1488093
  hypo

SEQ ID NO: 444664 - DNA, 183 bp, Homo sapiens; identical to SEQ ID NO: 319933
  chr16:1488497-1488680
  hypo

SEQ ID NO: 444665 - DNA, 103 bp, Homo sapiens; identical to SEQ ID NO: 319934
  chr16:1488710-1488813
  hypo

SEQ ID NO: 444666 - DNA, 849 bp, Homo sapiens; identical to SEQ ID NO: 268457
  chr16:1510691-1511540
  hypo

SEQ ID NO: 444667 - DNA, 156 bp, Homo sapiens; identical to SEQ ID NO: 216616
  chr16:1523650-1523806
  hypo

SEQ ID NO: 444668 - DNA, 36 bp, Homo sapiens; identical to SEQ ID NO: 268459
  chr16:1536441-1536477
  hypo

SEQ ID NO: 444669 - DNA, 334 bp, Homo sapiens; identical to SEQ ID NO: 268460
  chr16:1541164-1541498
  hypo

SEQ ID NO: 444670 - DNA, 396 bp, Homo sapiens; identical to SEQ ID NO: 268461
  chr16:1557352-1557748
  hypo

SEQ ID NO: 444671 - DNA, 232 bp, Homo sapiens; identical to SEQ ID NO: 216618
  chr16:1560777-1561009
  hypo

SEQ ID NO: 444672 - DNA, 42 bp, Homo sapiens; identical to SEQ ID NO: 268463
  chr16:1575251-1575293
  hypo

SEQ ID NO: 444673 - DNA, 166 bp, Homo sapiens; identical to SEQ ID NO: 268464
  chr16:1575857-1576023
  hypo

SEQ ID NO: 444674 - DNA, 599 bp, Homo sapiens; identical to SEQ ID NO: 319945
  chr16:1576053-1576652
  hypo

SEQ ID NO: 444675 - DNA, 195 bp, Homo sapiens; identical to SEQ ID NO: 268466
  chr16:1578983-1579178
  hypo

SEQ ID NO: 444676 - DNA, 118 bp, Homo sapiens; identical to SEQ ID NO: 268467
  chr16:1579423-1579541
  hypo

SEQ ID NO: 444677 - DNA, 67 bp, Homo sapiens; identical to SEQ ID NO: 216621
  chr16:1613977-1614044
  hypo

SEQ ID NO: 444678 - DNA, 251 bp, Homo sapiens; identical to SEQ ID NO: 268470
  chr16:1614793-1615044
  hypo

SEQ ID NO: 444679 - DNA, 55 bp, Homo sapiens; identical to SEQ ID NO: 319952
  chr16:1642685-1642740
  hypo

SEQ ID NO: 444680 - DNA, 62 bp, Homo sapiens; identical to SEQ ID NO: 410622
  chr16:1652583-1652645
  hypo

SEQ ID NO: 444681 - DNA, 434 bp, Homo sapiens; identical to SEQ ID NO: 224987
  chr16:1660449-1660883
  hypo

SEQ ID NO: 444682 - DNA, 700 bp, Homo sapiens; identical to SEQ ID NO: 224988
  chr16:1664481-1665181
  hypo

SEQ ID NO: 444683 - DNA, 176 bp, Homo sapiens; identical to SEQ ID NO: 268474
  chr16:1666426-1666602
  hypo

SEQ ID NO: 444684 - DNA, 196 bp, Homo sapiens; identical to SEQ ID NO: 216624
  chr16:1668009-1668205
  hypo

SEQ ID NO: 444685 - DNA, 47 bp, Homo sapiens
  chr16:1677136-1677183
  hypo
ggtgagccttgttctttttttttttttggagatggaatctcactctg

SEQ ID NO: 444686 - DNA, 206 bp, Homo sapiens; identical to SEQ ID NO: 268477
  chr16:1678527-1678733
  hypo

SEQ ID NO: 444687 - DNA, 82 bp, Homo sapiens; identical to SEQ ID NO: 268478
  chr16:1681341-1681423
  hypo

SEQ ID NO: 444688 - DNA, 128 bp, Homo sapiens; identical to SEQ ID NO: 216627
  chr16:1701258-1701386
  hypo

SEQ ID NO: 444689 - DNA, 143 bp, Homo sapiens; identical to SEQ ID NO: 216630
  chr16:1705539-1705682
  hypo

SEQ ID NO: 444690 - DNA, 93 bp, Homo sapiens; identical to SEQ ID NO: 268483
  chr16:1708014-1708107
  hypo

SEQ ID NO: 444691 - DNA, 39 bp, Homo sapiens; identical to SEQ ID NO: 268484
  chr16:1712683-1712722
  hypo

SEQ ID NO: 444692 - DNA, 128 bp, Homo sapiens; identical to SEQ ID NO: 268485
  chr16:1719761-1719889
  hypo

SEQ ID NO: 444693 - DNA, 123 bp, Homo sapiens; identical to SEQ ID NO: 268486
  chr16:1723672-1723795
  hypo

SEQ ID NO: 444694 - DNA, 36 bp, Homo sapiens
  chr16:1730076-1730112
  hypo
tccatggaacagtgattattatgcctaggtctgcac

SEQ ID NO: 444695 - DNA, 198 bp, Homo sapiens; identical to SEQ ID NO: 268489
  chr16:1731569-1731767
  hypo

SEQ ID NO: 444696 - DNA, 164 bp, Homo sapiens; identical to SEQ ID NO: 268491
  chr16:1735954-1736118
  hypo

SEQ ID NO: 444697 - DNA, 161 bp, Homo sapiens; identical to SEQ ID NO: 319979
  chr16:1739991-1740152
  hypo

SEQ ID NO: 444698 - DNA, 83 bp, Homo sapiens; identical to SEQ ID NO: 319980
  chr16:1740206-1740289
  hypo

SEQ ID NO: 444699 - DNA, 68 bp, Homo sapiens; identical to SEQ ID NO: 268495
  chr16:1748235-1748303
  hypo

SEQ ID NO: 444700 - DNA, 121 bp, Homo sapiens; identical to SEQ ID NO: 268496
  chr16:1748861-1748982
  hypo

SEQ ID NO: 444701 - DNA, 90 bp, Homo sapiens; identical to SEQ ID NO: 268498
  chr16:1751083-1751173
  hypo

SEQ ID NO: 444702 - DNA, 106 bp, Homo sapiens; identical to SEQ ID NO: 268500
  chr16:1795484-1795590
  hypo

SEQ ID NO: 444703 - DNA, 105 bp, Homo sapiens; identical to SEQ ID NO: 216636
  chr16:1804798-1804903
  hypo

SEQ ID NO: 444704 - DNA, 164 bp, Homo sapiens; identical to SEQ ID NO: 216637
  chr16:1805218-1805382
  hypo

SEQ ID NO: 444705 - DNA, 34 bp, Homo sapiens; identical to SEQ ID NO: 268504
  chr16:1807114-1807148
  hypo

SEQ ID NO: 444706 - DNA, 123 bp, Homo sapiens; identical to SEQ ID NO: 268506
  chr16:1810314-1810437
  hypo

SEQ ID NO: 444707 - DNA, 73 bp, Homo sapiens; identical to SEQ ID NO: 268510
  chr16:1815140-1815213
  hypo

SEQ ID NO: 444708 - DNA, 307 bp, Homo sapiens; identical to SEQ ID NO: 216642
  chr16:1818407-1818714
  hypo

SEQ ID NO: 444709 - DNA, 227 bp, Homo sapiens; identical to SEQ ID NO: 268512
  chr16:1827934-1828161
  hypo

SEQ ID NO: 444710 - DNA, 173 bp, Homo sapiens; identical to SEQ ID NO: 320001
  chr16:1831184-1831357
  hypo

SEQ ID NO: 444711 - DNA, 94 bp, Homo sapiens; identical to SEQ ID NO: 268514
  chr16:1835078-1835172
  hypo

SEQ ID NO: 444712 - DNA, 65 bp, Homo sapiens; identical to SEQ ID NO: 268515
  chr16:1839100-1839165
  hypo

SEQ ID NO: 444713 - DNA, 37 bp, Homo sapiens; identical to SEQ ID NO: 268517
  chr16:1881884-1881921
  hypo

SEQ ID NO: 444714 - DNA, 43 bp, Homo sapiens; identical to SEQ ID NO: 320006
  chr16:1889555-1889598
  hypo

SEQ ID NO: 444715 - DNA, 31 bp, Homo sapiens; identical to SEQ ID NO: 320007
  chr16:1889628-1889659
  hypo

SEQ ID NO: 444716 - DNA, 31 bp, Homo sapiens; identical to SEQ ID NO: 268519
  chr16:1895226-1895257
  hypo

SEQ ID NO: 444717 - DNA, 36 bp, Homo sapiens; identical to SEQ ID NO: 268520
  chr16:1938628-1938664
  hypo

SEQ ID NO: 444718 - DNA, 32 bp, Homo sapiens; identical to SEQ ID NO: 268521
  chr16:1944317-1944349
  hypo

SEQ ID NO: 444719 - DNA, 294 bp, Homo sapiens; identical to SEQ ID NO: 320011
  chr16:1946679-1946973
  hypo

SEQ ID NO: 444720 - DNA, 66 bp, Homo sapiens; identical to SEQ ID NO: 320012
  chr16:1947003-1947069
  hypo

SEQ ID NO: 444721 - DNA, 162 bp, Homo sapiens; identical to SEQ ID NO: 320013
  chr16:1960052-1960214
  hypo

SEQ ID NO: 444722 - DNA, 100 bp, Homo sapiens; identical to SEQ ID NO: 268524
  chr16:1985415-1985515
  hypo

SEQ ID NO: 444723 - DNA, 379 bp, Homo sapiens; identical to SEQ ID NO: 268525
  chr16:1989198-1989577
  hypo

SEQ ID NO: 444724 - DNA, 110 bp, Homo sapiens; identical to SEQ ID NO: 216644
  chr16:1997451-1997561
  hypo

SEQ ID NO: 444725 - DNA, 418 bp, Homo sapiens; identical to SEQ ID NO: 268528
  chr16:2000529-2000947
  hypo

SEQ ID NO: 444726 - DNA, 515 bp, Homo sapiens; identical to SEQ ID NO: 268529
  chr16:2003499-2004014
  hypo

SEQ ID NO: 444727 - DNA, 120 bp, Homo sapiens; identical to SEQ ID NO: 268530
  chr16:2007511-2007631
  hypo

SEQ ID NO: 444728 - DNA, 120 bp, Homo sapiens; identical to SEQ ID NO: 268531
  chr16:2012608-2012728
  hypo

SEQ ID NO: 444729 - DNA, 216 bp, Homo sapiens; identical to SEQ ID NO: 268532
  chr16:2012908-2013124
  hypo

SEQ ID NO: 444730 - DNA, 208 bp, Homo sapiens; identical to SEQ ID NO: 268533
  chr16:2016682-2016890
  hypo

SEQ ID NO: 444731 - DNA, 368 bp, Homo sapiens; identical to SEQ ID NO: 268534
  chr16:2024265-2024633
  hypo

SEQ ID NO: 444732 - DNA, 308 bp, Homo sapiens; identical to SEQ ID NO: 216649
  chr16:2049434-2049742
  hypo

SEQ ID NO: 444733 - DNA, 140 bp, Homo sapiens; identical to SEQ ID NO: 268539
  chr16:2099383-2099523
  hypo

SEQ ID NO: 444734 - DNA, 116 bp, Homo sapiens; identical to SEQ ID NO: 320039
  chr16:2124089-2124205
  hypo

SEQ ID NO: 444735 - DNA, 148 bp, Homo sapiens; identical to SEQ ID NO: 216657
  chr16:2125861-2126009
  hypo

SEQ ID NO: 444736 - DNA, 172 bp, Homo sapiens; identical to SEQ ID NO: 268546
  chr16:2126990-2127162
  hypo

SEQ ID NO: 444737 - DNA, 39 bp, Homo sapiens; identical to SEQ ID NO: 268549
  chr16:2134065-2134104
  hypo

SEQ ID NO: 444738 - DNA, 212 bp, Homo sapiens; identical to SEQ ID NO: 268550
  chr16:2134434-2134646
  hypo

SEQ ID NO: 444739 - DNA, 71 bp, Homo sapiens; identical to SEQ ID NO: 216659
  chr16:2135230-2135301
  hypo

SEQ ID NO: 444740 - DNA, 314 bp, Homo sapiens; identical to SEQ ID NO: 216660
  chr16:2135330-2135644
  hypo

SEQ ID NO: 444741 - DNA, 71 bp, Homo sapiens; identical to SEQ ID NO: 268553
  chr16:2144843-2144914
  hypo

SEQ ID NO: 444742 - DNA, 78 bp, Homo sapiens; identical to SEQ ID NO: 320052
  chr16:2145547-2145625
  hypo

SEQ ID NO: 444743 - DNA, 151 bp, Homo sapiens; identical to SEQ ID NO: 320053
  chr16:2145727-2145878
  hypo

SEQ ID NO: 444744 - DNA, 63 bp, Homo sapiens; identical to SEQ ID NO: 216665
  chr16:2146462-2146525
  hypo

SEQ ID NO: 444745 - DNA, 36 bp, Homo sapiens; identical to SEQ ID NO: 268556
  chr16:2147116-2147152
  hypo

SEQ ID NO: 444746 - DNA, 67 bp, Homo sapiens; identical to SEQ ID NO: 268557
  chr16:2147356-2147423
  hypo

SEQ ID NO: 444747 - DNA, 56 bp, Homo sapiens; identical to SEQ ID NO: 216666
  chr16:2193200-2193256
  hypo

SEQ ID NO: 444748 - DNA, 383 bp, Homo sapiens; identical to SEQ ID NO: 268559
  chr16:2211793-2212176
  hypo

SEQ ID NO: 444749 - DNA, 101 bp, Homo sapiens; identical to SEQ ID NO: 320060
  chr16:2212858-2212959
  hypo

SEQ ID NO: 444750 - DNA, 54 bp, Homo sapiens; identical to SEQ ID NO: 268562
  chr16:2226066-2226120
  hypo

SEQ ID NO: 444751 - DNA, 65 bp, Homo sapiens; identical to SEQ ID NO: 268568
  chr16:2235438-2235503
  hypo

SEQ ID NO: 444752 - DNA, 242 bp, Homo sapiens; identical to SEQ ID NO: 268569
  chr16:2239261-2239503
  hypo

SEQ ID NO: 444753 - DNA, 341 bp, Homo sapiens; identical to SEQ ID NO: 268570
  chr16:2260756-2261097
  hypo

SEQ ID NO: 444754 - DNA, 188 bp, Homo sapiens; identical to SEQ ID NO: 268574
  chr16:2284111-2284299
  hypo

SEQ ID NO: 444755 - DNA, 50 bp, Homo sapiens; identical to SEQ ID NO: 268576
  chr16:2294342-2294392
  hypo

SEQ ID NO: 444756 - DNA, 146 bp, Homo sapiens; identical to SEQ ID NO: 224992
  chr16:2295263-2295409
  hypo

SEQ ID NO: 444757 - DNA, 120 bp, Homo sapiens; identical to SEQ ID NO: 268577
  chr16:2306144-2306264
  hypo

SEQ ID NO: 444758 - DNA, 94 bp, Homo sapiens; identical to SEQ ID NO: 216677
  chr16:2314153-2314247
  hypo

SEQ ID NO: 444759 - DNA, 185 bp, Homo sapiens; identical to SEQ ID NO: 268579
  chr16:2338097-2338282
  hypo

SEQ ID NO: 444760 - DNA, 160 bp, Homo sapiens; identical to SEQ ID NO: 268580
  chr16:2339391-2339551
  hypo

SEQ ID NO: 444761 - DNA, 396 bp, Homo sapiens; identical to SEQ ID NO: 268581
  chr16:2347405-2347801
  hypo

SEQ ID NO: 444762 - DNA, 54 bp, Homo sapiens; identical to SEQ ID NO: 268583
  chr16:2369672-2369726
  hypo

SEQ ID NO: 444763 - DNA, 621 bp, Homo sapiens; identical to SEQ ID NO: 268584
  chr16:2382128-2382749
  hypo

SEQ ID NO: 444764 - DNA, 149 bp, Homo sapiens; identical to SEQ ID NO: 268585
  chr16:2475885-2476034
  hypo

SEQ ID NO: 444765 - DNA, 108 bp, Homo sapiens; identical to SEQ ID NO: 268589
  chr16:2501133-2501241
  hypo

SEQ ID NO: 444766 - DNA, 115 bp, Homo sapiens; identical to SEQ ID NO: 268590
  chr16:2505252-2505367
  hypo

SEQ ID NO: 444767 - DNA, 99 bp, Homo sapiens; identical to SEQ ID NO: 216680
  chr16:2508556-2508655
  hypo

SEQ ID NO: 444768 - DNA, 268 bp, Homo sapiens; identical to SEQ ID NO: 291276
  chr16:2521459-2521727
  hypo

SEQ ID NO: 444769 - DNA, 119 bp, Homo sapiens; identical to SEQ ID NO: 291277
  chr16:2521857-2521976
  hypo

SEQ ID NO: 444770 - DNA, 32 bp, Homo sapiens; identical to SEQ ID NO: 320101
  chr16:2531772-2531804
  hypo

SEQ ID NO: 444771 - DNA, 47 bp, Homo sapiens; identical to SEQ ID NO: 268594
  chr16:2539901-2539948
  hypo

SEQ ID NO: 444772 - DNA, 145 bp, Homo sapiens; identical to SEQ ID NO: 216688
  chr16:2579464-2579609
  hypo

SEQ ID NO: 444773 - DNA, 465 bp, Homo sapiens; identical to SEQ ID NO: 268600
  chr16:2645427-2645892
  hypo

SEQ ID NO: 444774 - DNA, 122 bp, Homo sapiens; identical to SEQ ID NO: 268601
  chr16:2647311-2647433
  hypo

SEQ ID NO: 444775 - DNA, 249 bp, Homo sapiens; identical to SEQ ID NO: 216691
  chr16:2648042-2648291
  hypo

SEQ ID NO: 444776 - DNA, 66 bp, Homo sapiens; identical to SEQ ID NO: 268603
  chr16:2716589-2716655
  hypo

SEQ ID NO: 444777 - DNA, 209 bp, Homo sapiens; identical to SEQ ID NO: 268604
  chr16:2716878-2717087
  hypo

SEQ ID NO: 444778 - DNA, 101 bp, Homo sapiens; identical to SEQ ID NO: 268605
  chr16:2725742-2725843
  hypo

SEQ ID NO: 444779 - DNA, 36 bp, Homo sapiens; identical to SEQ ID NO: 268606
  chr16:2731315-2731351
  hypo

SEQ ID NO: 444780 - DNA, 165 bp, Homo sapiens; identical to SEQ ID NO: 320120
  chr16:2819593-2819758
  hypo

SEQ ID NO: 444781 - DNA, 35 bp, Homo sapiens; identical to SEQ ID NO: 268613
  chr16:2959166-2959201
  hypo

SEQ ID NO: 444782 - DNA, 232 bp, Homo sapiens; identical to SEQ ID NO: 268615
  chr16:2975080-2975312
  hypo

SEQ ID NO: 444783 - DNA, 65 bp, Homo sapiens; identical to SEQ ID NO: 268617
  chr16:3051091-3051156
  hypo

SEQ ID NO: 444784 - DNA, 136 bp, Homo sapiens; identical to SEQ ID NO: 268618
  chr16:3052305-3052441
  hypo

SEQ ID NO: 444785 - DNA, 35 bp, Homo sapiens; identical to SEQ ID NO: 268619
  chr16:3053165-3053200
  hypo

SEQ ID NO: 444786 - DNA, 48 bp, Homo sapiens; identical to SEQ ID NO: 216697
  chr16:3062887-3062935
  hypo

SEQ ID NO: 444787 - DNA, 37 bp, Homo sapiens; identical to SEQ ID NO: 291287
  chr16:3097009-3097046
  hypo

SEQ ID NO: 444788 - DNA, 469 bp, Homo sapiens; identical to SEQ ID NO: 393630
  chr16:3139975-3140444
  hypo

SEQ ID NO: 444789 - DNA, 61 bp, Homo sapiens; identical to SEQ ID NO: 268622
  chr16:3165156-3165217
  hypo

SEQ ID NO: 444790 - DNA, 133 bp, Homo sapiens; identical to SEQ ID NO: 268623
  chr16:3167169-3167302
  hypo

SEQ ID NO: 444791 - DNA, 67 bp, Homo sapiens; identical to SEQ ID NO: 268624
  chr16:3169009-3169076
  hypo

SEQ ID NO: 444792 - DNA, 439 bp, Homo sapiens; identical to SEQ ID NO: 268625
  chr16:3169370-3169809
  hypo

SEQ ID NO: 444793 - DNA, 128 bp, Homo sapiens; identical to SEQ ID NO: 216700
  chr16:3170504-3170632
  hypo

SEQ ID NO: 444794 - DNA, 187 bp, Homo sapiens; identical to SEQ ID NO: 216701
  chr16:3189117-3189304
  hypo

SEQ ID NO: 444795 - DNA, 44 bp, Homo sapiens; identical to SEQ ID NO: 268628
  chr16:3189704-3189748
  hypo

SEQ ID NO: 444796 - DNA, 322 bp, Homo sapiens; identical to SEQ ID NO: 204094
  chr16:3200663-3200985
  hypo

SEQ ID NO: 444797 - DNA, 107 bp, Homo sapiens; identical to SEQ ID NO: 320144
  chr16:3211536-3211643
  hypo

SEQ ID NO: 444798 - DNA, 125 bp, Homo sapiens; identical to SEQ ID NO: 216705
  chr16:3286323-3286448
  hypo

SEQ ID NO: 444799 - DNA, 87 bp, Homo sapiens; identical to SEQ ID NO: 216706
  chr16:3315530-3315617
  hypo

SEQ ID NO: 444800 - DNA, 137 bp, Homo sapiens; identical to SEQ ID NO: 216707
  chr16:3515977-3516114
  hypo

SEQ ID NO: 444801 - DNA, 145 bp, Homo sapiens; identical to SEQ ID NO: 268637
  chr16:3542403-3542548
  hypo

SEQ ID NO: 444802 - DNA, 88 bp, Homo sapiens; identical to SEQ ID NO: 216708
  chr16:3552081-3552169
  hypo

SEQ ID NO: 444803 - DNA, 37 bp, Homo sapiens; identical to SEQ ID NO: 216709
  chr16:3552775-3552812
  hypo

SEQ ID NO: 444804 - DNA, 181 bp, Homo sapiens; identical to SEQ ID NO: 268640
  chr16:3599033-3599214
  hypo

SEQ ID NO: 444805 - DNA, 118 bp, Homo sapiens; identical to SEQ ID NO: 268641
  chr16:3635039-3635157
  hypo

SEQ ID NO: 444806 - DNA, 121 bp, Homo sapiens; identical to SEQ ID NO: 268643
  chr16:3704780-3704901
  hypo

SEQ ID NO: 444807 - DNA, 77 bp, Homo sapiens; identical to SEQ ID NO: 268644
  chr16:3706729-3706806
  hypo

SEQ ID NO: 444808 - DNA, 165 bp, Homo sapiens; identical to SEQ ID NO: 216710
  chr16:3707025-3707190
  hypo

SEQ ID NO: 444809 - DNA, 354 bp, Homo sapiens; identical to SEQ ID NO: 216712
  chr16:3776074-3776428
  hypo

SEQ ID NO: 444810 - DNA, 146 bp, Homo sapiens; identical to SEQ ID NO: 268649
  chr16:3777135-3777281
  hypo

SEQ ID NO: 444811 - DNA, 131 bp, Homo sapiens; identical to SEQ ID NO: 268650
  chr16:3781042-3781173
  hypo

SEQ ID NO: 444812 - DNA, 1164 bp, Homo sapiens; identical to SEQ ID NO: 204099
  chr16:3781398-3782562
  hypo

SEQ ID NO: 444813 - DNA, 924 bp, Homo sapiens; identical to SEQ ID NO: 216714
  chr16:3784366-3785290
  hypo

SEQ ID NO: 444814 - DNA, 182 bp, Homo sapiens; identical to SEQ ID NO: 216715
  chr16:3785796-3785978
  hypo

SEQ ID NO: 444815 - DNA, 152 bp, Homo sapiens; identical to SEQ ID NO: 216716
  chr16:3802012-3802164
  hypo

SEQ ID NO: 444816 - DNA, 209 bp, Homo sapiens; identical to SEQ ID NO: 216718
  chr16:3812494-3812703
  hypo

SEQ ID NO: 444817 - DNA, 42 bp, Homo sapiens; identical to SEQ ID NO: 268660
  chr16:3870817-3870859
  hypo

SEQ ID NO: 444818 - DNA, 50 bp, Homo sapiens; identical to SEQ ID NO: 268661
  chr16:3873408-3873458
  hypo

SEQ ID NO: 444819 - DNA, 78 bp, Homo sapiens; identical to SEQ ID NO: 268663
  chr16:3925259-3925337
  hypo

SEQ ID NO: 444820 - DNA, 309 bp, Homo sapiens; identical to SEQ ID NO: 204100
  chr16:3931082-3931391
  hypo

SEQ ID NO: 444821 - DNA, 111 bp, Homo sapiens; identical to SEQ ID NO: 225001
  chr16:3989147-3989258
  hypo

SEQ ID NO: 444822 - DNA, 86 bp, Homo sapiens; identical to SEQ ID NO: 216721
  chr16:3998751-3998837
  hypo

SEQ ID NO: 444823 - DNA, 75 bp, Homo sapiens; identical to SEQ ID NO: 268666
  chr16:4016326-4016401
  hypo

SEQ ID NO: 444824 - DNA, 237 bp, Homo sapiens; identical to SEQ ID NO: 268667
  chr16:4021225-4021462
  hypo

SEQ ID NO: 444825 - DNA, 138 bp, Homo sapiens; identical to SEQ ID NO: 268668
  chr16:4029240-4029378
  hypo

SEQ ID NO: 444826 - DNA, 218 bp, Homo sapiens; identical to SEQ ID NO: 268669
  chr16:4030046-4030264
  hypo

SEQ ID NO: 444827 - DNA, 273 bp, Homo sapiens; identical to SEQ ID NO: 268672
  chr16:4160070-4160343
  hypo

SEQ ID NO: 444828 - DNA, 106 bp, Homo sapiens; identical to SEQ ID NO: 179392
  chr16:4164069-4164175
  hypo

SEQ ID NO: 444829 - DNA, 554 bp, Homo sapiens; identical to SEQ ID NO: 268674
  chr16:4164399-4164953
  hypo

SEQ ID NO: 444830 - DNA, 85 bp, Homo sapiens; identical to SEQ ID NO: 268675
  chr16:4174071-4174156
  hypo

SEQ ID NO: 444831 - DNA, 79 bp, Homo sapiens; identical to SEQ ID NO: 268676
  chr16:4183952-4184031
  hypo

SEQ ID NO: 444832 - DNA, 71 bp, Homo sapiens; identical to SEQ ID NO: 320191
  chr16:4203567-4203638
  hypo

SEQ ID NO: 444833 - DNA, 549 bp, Homo sapiens; identical to SEQ ID NO: 268679
  chr16:4257893-4258442
  hypo

SEQ ID NO: 444834 - DNA, 482 bp, Homo sapiens; identical to SEQ ID NO: 268680
  chr16:4268166-4268648
  hypo

SEQ ID NO: 444835 - DNA, 52 bp, Homo sapiens; identical to SEQ ID NO: 216728
  chr16:4312582-4312634
  hypo

SEQ ID NO: 444836 - DNA, 153 bp, Homo sapiens; identical to SEQ ID NO: 268683
  chr16:4313275-4313428
  hypo

SEQ ID NO: 444837 - DNA, 377 bp, Homo sapiens; identical to SEQ ID NO: 225006
  chr16:4357423-4357800
  hypo

SEQ ID NO: 444838 - DNA, 462 bp, Homo sapiens; identical to SEQ ID NO: 268684
  chr16:4372512-4372974
  hypo

SEQ ID NO: 444839 - DNA, 306 bp, Homo sapiens; identical to SEQ ID NO: 268685
  chr16:4382286-4382592
  hypo

SEQ ID NO: 444840 - DNA, 204 bp, Homo sapiens; identical to SEQ ID NO: 320203
  chr16:4385112-4385316
  hypo

SEQ ID NO: 444841 - DNA, 44 bp, Homo sapiens; identical to SEQ ID NO: 268688
  chr16:4414173-4414217
  hypo

SEQ ID NO: 444842 - DNA, 116 bp, Homo sapiens; identical to SEQ ID NO: 268689
  chr16:4428515-4428631
  hypo

SEQ ID NO: 444843 - DNA, 42 bp, Homo sapiens; identical to SEQ ID NO: 268690
  chr16:4429224-4429266
  hypo

SEQ ID NO: 444844 - DNA, 176 bp, Homo sapiens; identical to SEQ ID NO: 268692
  chr16:4437960-4438136
  hypo

SEQ ID NO: 444845 - DNA, 466 bp, Homo sapiens; identical to SEQ ID NO: 320212
  chr16:4442609-4443075
  hypo

SEQ ID NO: 444846 - DNA, 249 bp, Homo sapiens; identical to SEQ ID NO: 216735
  chr16:4511753-4512002
  hypo

SEQ ID NO: 444847 - DNA, 92 bp, Homo sapiens; identical to SEQ ID NO: 268699
  chr16:4527578-4527670
  hypo

SEQ ID NO: 444848 - DNA, 45 bp, Homo sapiens; identical to SEQ ID NO: 268701
  chr16:4606718-4606763
  hypo

SEQ ID NO: 444849 - DNA, 116 bp, Homo sapiens; identical to SEQ ID NO: 268702
  chr16:4644648-4644764
  hypo

SEQ ID NO: 444850 - DNA, 246 bp, Homo sapiens; identical to SEQ ID NO: 268704
  chr16:4665340-4665586
  hypo

SEQ ID NO: 444851 - DNA, 100 bp, Homo sapiens; identical to SEQ ID NO: 268705
  chr16:4671351-4671451
  hypo

SEQ ID NO: 444852 - DNA, 92 bp, Homo sapiens; identical to SEQ ID NO: 216736
  chr16:4689936-4690028
  hypo

SEQ ID NO: 444853 - DNA, 526 bp, Homo sapiens; identical to SEQ ID NO: 216737
  chr16:4704660-4705186
  hypo

SEQ ID NO: 444854 - DNA, 455 bp, Homo sapiens; identical to SEQ ID NO: 268708
  chr16:4717781-4718236
  hypo

SEQ ID NO: 444855 - DNA, 226 bp, Homo sapiens; identical to SEQ ID NO: 268711
  chr16:4731810-4732036
  hypo

SEQ ID NO: 444856 - DNA, 67 bp, Homo sapiens; identical to SEQ ID NO: 268712
  chr16:4748493-4748560
  hypo

SEQ ID NO: 444857 - DNA, 101 bp, Homo sapiens; identical to SEQ ID NO: 268713
  chr16:4748901-4749002
  hypo

SEQ ID NO: 444858 - DNA, 142 bp, Homo sapiens; identical to SEQ ID NO: 268716
  chr16:4795507-4795649
  hypo

SEQ ID NO: 444859 - DNA, 134 bp, Homo sapiens; identical to SEQ ID NO: 268718
  chr16:4841348-4841482
  hypo

SEQ ID NO: 444860 - DNA, 93 bp, Homo sapiens; identical to SEQ ID NO: 216743
  chr16:4845270-4845363
  hypo

SEQ ID NO: 444861 - DNA, 393 bp, Homo sapiens; identical to SEQ ID NO: 291320
  chr16:4852797-4853190
  hypo

SEQ ID NO: 444862 - DNA, 96 bp, Homo sapiens; identical to SEQ ID NO: 216745
  chr16:4900508-4900604
  hypo

SEQ ID NO: 444863 - DNA, 117 bp, Homo sapiens; identical to SEQ ID NO: 216746
  chr16:4900634-4900751
  hypo

SEQ ID NO: 444864 - DNA, 50 bp, Homo sapiens; identical to SEQ ID NO: 320244
  chr16:4931479-4931529
  hypo

SEQ ID NO: 444865 - DNA, 78 bp, Homo sapiens; identical to SEQ ID NO: 320245
  chr16:4931559-4931637
  hypo

SEQ ID NO: 444866 - DNA, 511 bp, Homo sapiens; identical to SEQ ID NO: 268727
  chr16:4933220-4933731
  hypo

SEQ ID NO: 444867 - DNA, 80 bp, Homo sapiens; identical to SEQ ID NO: 268728
  chr16:4960036-4960116
  hypo

SEQ ID NO: 444868 - DNA, 157 bp, Homo sapiens; identical to SEQ ID NO: 216751
  chr16:4971735-4971892
  hypo

SEQ ID NO: 444869 - DNA, 167 bp, Homo sapiens; identical to SEQ ID NO: 216752
  chr16:4980311-4980478
  hypo

SEQ ID NO: 444870 - DNA, 366 bp, Homo sapiens; identical to SEQ ID NO: 268731
  chr16:4981429-4981795
  hypo

SEQ ID NO: 444871 - DNA, 207 bp, Homo sapiens; identical to SEQ ID NO: 268732
  chr16:5084818-5085025
  hypo

SEQ ID NO: 444872 - DNA, 141 bp, Homo sapiens; identical to SEQ ID NO: 291323
  chr16:5121865-5122006
  hypo

SEQ ID NO: 444873 - DNA, 204 bp, Homo sapiens; identical to SEQ ID NO: 268733
  chr16:5406087-5406291
  hypo

SEQ ID NO: 444874 - DNA, 78 bp, Homo sapiens; identical to SEQ ID NO: 268734
  chr16:5481660-5481738
  hypo

SEQ ID NO: 444875 - DNA, 206 bp, Homo sapiens; identical to SEQ ID NO: 216754
  chr16:5628622-5628828
  hypo

SEQ ID NO: 444876 - DNA, 31 bp, Homo sapiens; identical to SEQ ID NO: 268737
  chr16:6838744-6838775
  hypo

SEQ ID NO: 444877 - DNA, 99 bp, Homo sapiens; identical to SEQ ID NO: 268738
  chr16:6860826-6860925
  hypo

SEQ ID NO: 444878 - DNA, 34 bp, Homo sapiens; identical to SEQ ID NO: 268739
  chr16:6885177-6885211
  hypo

SEQ ID NO: 444879 - DNA, 32 bp, Homo sapiens; identical to SEQ ID NO: 268740
  chr16:8410251-8410283
  hypo

SEQ ID NO: 444880 - DNA, 252 bp, Homo sapiens; identical to SEQ ID NO: 216755
  chr16:8722899-8723151
  hypo

SEQ ID NO: 444881 - DNA, 244 bp, Homo sapiens; identical to SEQ ID NO: 320266
  chr16:8870109-8870353
  hypo

SEQ ID NO: 444882 - DNA, 129 bp, Homo sapiens; identical to SEQ ID NO: 268746
  chr16:9013680-9013809
  hypo

SEQ ID NO: 444883 - DNA, 31 bp, Homo sapiens; identical to SEQ ID NO: 268747
  chr16:9016042-9016073
  hypo

SEQ ID NO: 444884 - DNA, 135 bp, Homo sapiens; identical to SEQ ID NO: 268749
  chr16:9218839-9218974
  hypo

SEQ ID NO: 444885 - DNA, 80 bp, Homo sapiens; identical to SEQ ID NO: 216760
  chr16:9222467-9222547
  hypo

SEQ ID NO: 444886 - DNA, 175 bp, Homo sapiens; identical to SEQ ID NO: 268751
  chr16:10031818-10031993
  hypo

SEQ ID NO: 444887 - DNA, 97 bp, Homo sapiens; identical to SEQ ID NO: 268752
  chr16:10517770-10517867
  hypo

SEQ ID NO: 444888 - DNA, 186 bp, Homo sapiens; identical to SEQ ID NO: 216761
  chr16:10631325-10631511
  hypo

SEQ ID NO: 444889 - DNA, 772 bp, Homo sapiens; identical to SEQ ID NO: 204120
  chr16:10673913-10674685
  hypo

SEQ ID NO: 444890 - DNA, 257 bp, Homo sapiens; identical to SEQ ID NO: 216763
  chr16:10868652-10868909
  hypo

SEQ ID NO: 444891 - DNA, 38 bp, Homo sapiens; identical to SEQ ID NO: 268756
  chr16:10913111-10913149
  hypo

SEQ ID NO: 444892 - DNA, 38 bp, Homo sapiens; identical to SEQ ID NO: 268757
  chr16:10913329-10913367
  hypo

SEQ ID NO: 444893 - DNA, 199 bp, Homo sapiens; identical to SEQ ID NO: 268758
  chr16:11000393-11000592
  hypo

SEQ ID NO: 444894 - DNA, 114 bp, Homo sapiens; identical to SEQ ID NO: 204121
  chr16:11035552-11035666
  hypo

SEQ ID NO: 444895 - DNA, 54 bp, Homo sapiens; identical to SEQ ID NO: 268760
  chr16:11072431-11072485
  hypo

SEQ ID NO: 444896 - DNA, 314 bp, Homo sapiens; identical to SEQ ID NO: 268761
  chr16:11072844-11073158
  hypo

SEQ ID NO: 444897 - DNA, 196 bp, Homo sapiens; identical to SEQ ID NO: 268762
  chr16:11085470-11085666
  hypo

SEQ ID NO: 444898 - DNA, 47 bp, Homo sapiens; identical to SEQ ID NO: 216766
  chr16:11118477-11118524
  hypo

SEQ ID NO: 444899 - DNA, 208 bp, Homo sapiens; identical to SEQ ID NO: 216767
  chr16:11118554-11118762
  hypo

SEQ ID NO: 444900 - DNA, 53 bp, Homo sapiens; identical to SEQ ID NO: 268765
  chr16:11157538-11157591
  hypo

SEQ ID NO: 444901 - DNA, 186 bp, Homo sapiens; identical to SEQ ID NO: 216769
  chr16:11174343-11174529
  hypo

SEQ ID NO: 444902 - DNA, 234 bp, Homo sapiens; identical to SEQ ID NO: 268768
  chr16:11192355-11192589
  hypo

SEQ ID NO: 444903 - DNA, 41 bp, Homo sapiens; identical to SEQ ID NO: 268771
  chr16:11225773-11225814
  hypo

SEQ ID NO: 444904 - DNA, 178 bp, Homo sapiens; identical to SEQ ID NO: 320300
  chr16:11232440-11232618
  hypo

SEQ ID NO: 444905 - DNA, 110 bp, Homo sapiens; identical to SEQ ID NO: 216775
  chr16:11232663-11232773
  hypo

SEQ ID NO: 444906 - DNA, 213 bp, Homo sapiens; identical to SEQ ID NO: 268773
  chr16:11249099-11249312
  hypo

SEQ ID NO: 444907 - DNA, 49 bp, Homo sapiens; identical to SEQ ID NO: 268774
  chr16:11249342-11249391
  hypo

SEQ ID NO: 444908 - DNA, 226 bp, Homo sapiens; identical to SEQ ID NO: 268775
  chr16:11249644-11249870
  hypo

SEQ ID NO: 444909 - DNA, 104 bp, Homo sapiens; identical to SEQ ID NO: 216776
  chr16:11265077-11265181
  hypo

SEQ ID NO: 444910 - DNA, 134 bp, Homo sapiens; identical to SEQ ID NO: 268777
  chr16:11267978-11268112
  hypo

SEQ ID NO: 444911 - DNA, 393 bp, Homo sapiens; identical to SEQ ID NO: 268778
  chr16:11272123-11272516
  hypo

SEQ ID NO: 444912 - DNA, 596 bp, Homo sapiens; identical to SEQ ID NO: 268779
  chr16:11275089-11275685
  hypo

SEQ ID NO: 444913 - DNA, 138 bp, Homo sapiens; identical to SEQ ID NO: 320309
  chr16:11282895-11283033
  hypo

SEQ ID NO: 444914 - DNA, 119 bp, Homo sapiens; identical to SEQ ID NO: 268781
  chr16:11323718-11323837
  hypo

SEQ ID NO: 444915 - DNA, 119 bp, Homo sapiens; identical to SEQ ID NO: 268782
  chr16:11344316-11344435
  hypo

SEQ ID NO: 444916 - DNA, 416 bp, Homo sapiens; identical to SEQ ID NO: 225015
  chr16:11348663-11349079
  hypo

SEQ ID NO: 444917 - DNA, 52 bp, Homo sapiens; identical to SEQ ID NO: 216777
  chr16:11370335-11370387
  hypo

SEQ ID NO: 444918 - DNA, 387 bp, Homo sapiens; identical to SEQ ID NO: 268784
  chr16:11398035-11398422
  hypo

SEQ ID NO: 444919 - DNA, 47 bp, Homo sapiens; identical to SEQ ID NO: 268785
  chr16:11443253-11443300
  hypo

SEQ ID NO: 444920 - DNA, 121 bp, Homo sapiens; identical to SEQ ID NO: 268786
  chr16:11541944-11542065
  hypo

SEQ ID NO: 444921 - DNA, 160 bp, Homo sapiens; identical to SEQ ID NO: 216779
  chr16:11622039-11622199
  hypo

SEQ ID NO: 444922 - DNA, 161 bp, Homo sapiens; identical to SEQ ID NO: 268788
  chr16:11641619-11641780
  hypo

SEQ ID NO: 444923 - DNA, 108 bp, Homo sapiens; identical to SEQ ID NO: 216780
  chr16:11703386-11703494
  hypo

SEQ ID NO: 444924 - DNA, 158 bp, Homo sapiens; identical to SEQ ID NO: 268790
  chr16:11712391-11712549
  hypo

SEQ ID NO: 444925 - DNA, 110 bp, Homo sapiens; identical to SEQ ID NO: 320321
  chr16:11770050-11770160
  hypo

SEQ ID NO: 444926 - DNA, 134 bp, Homo sapiens; identical to SEQ ID NO: 320322
  chr16:11770190-11770324
  hypo

SEQ ID NO: 444927 - DNA, 214 bp, Homo sapiens; identical to SEQ ID NO: 216782
  chr16:11775050-11775264
  hypo

SEQ ID NO: 444928 - DNA, 72 bp, Homo sapiens; identical to SEQ ID NO: 268794
  chr16:11786030-11786102
  hypo

SEQ ID NO: 444929 - DNA, 187 bp, Homo sapiens; identical to SEQ ID NO: 216783
  chr16:11792617-11792804
  hypo

SEQ ID NO: 444930 - DNA, 213 bp, Homo sapiens; identical to SEQ ID NO: 268796
  chr16:11793450-11793663
  hypo

SEQ ID NO: 444931 - DNA, 31 bp, Homo sapiens; identical to SEQ ID NO: 268797
  chr16:11809451-11809482
  hypo

SEQ ID NO: 444932 - DNA, 180 bp, Homo sapiens; identical to SEQ ID NO: 216784
  chr16:11831275-11831455
  hypo

SEQ ID NO: 444933 - DNA, 45 bp, Homo sapiens; identical to SEQ ID NO: 268799
  chr16:11851041-11851086
  hypo

SEQ ID NO: 444934 - DNA, 179 bp, Homo sapiens; identical to SEQ ID NO: 320331
  chr16:11853076-11853255
  hypo

SEQ ID NO: 444935 - DNA, 141 bp, Homo sapiens; identical to SEQ ID NO: 216785
  chr16:11879780-11879921
  hypo

SEQ ID NO: 444936 - DNA, 39 bp, Homo sapiens; identical to SEQ ID NO: 216786
  chr16:11900211-11900250
  hypo

SEQ ID NO: 444937 - DNA, 40 bp, Homo sapiens; identical to SEQ ID NO: 216787
  chr16:11968754-11968794
  hypo

SEQ ID NO: 444938 - DNA, 44 bp, Homo sapiens; identical to SEQ ID NO: 268806
  chr16:11989479-11989523
  hypo

SEQ ID NO: 444939 - DNA, 180 bp, Homo sapiens; identical to SEQ ID NO: 216789
  chr16:12011433-12011613
  hypo

SEQ ID NO: 444940 - DNA, 120 bp, Homo sapiens; identical to SEQ ID NO: 268809
  chr16:12018078-12018198
  hypo

SEQ ID NO: 444941 - DNA, 36 bp, Homo sapiens; identical to SEQ ID NO: 268810
  chr16:12042328-12042364
  hypo

SEQ ID NO: 444942 - DNA, 120 bp, Homo sapiens; identical to SEQ ID NO: 268811
  chr16:12068910-12069030
  hypo

SEQ ID NO: 444943 - DNA, 148 bp, Homo sapiens; identical to SEQ ID NO: 268813
  chr16:12118317-12118465
  hypo

SEQ ID NO: 444944 - DNA, 78 bp, Homo sapiens; identical to SEQ ID NO: 216792
  chr16:12136759-12136837
  hypo

SEQ ID NO: 444945 - DNA, 111 bp, Homo sapiens; identical to SEQ ID NO: 216793
  chr16:12142577-12142688
  hypo

SEQ ID NO: 444946 - DNA, 33 bp, Homo sapiens; identical to SEQ ID NO: 268817
  chr16:12157506-12157539
  hypo

SEQ ID NO: 444947 - DNA, 479 bp, Homo sapiens; identical to SEQ ID NO: 268818
  chr16:12172489-12172968
  hypo

SEQ ID NO: 444948 - DNA, 196 bp, Homo sapiens; identical to SEQ ID NO: 268821
  chr16:12237125-12237321
  hypo

SEQ ID NO: 444949 - DNA, 181 bp, Homo sapiens; identical to SEQ ID NO: 268822
  chr16:12264697-12264878
  hypo

SEQ ID NO: 444950 - DNA, 54 bp, Homo sapiens; identical to SEQ ID NO: 268823
  chr16:12272503-12272557
  hypo

SEQ ID NO: 444951 - DNA, 85 bp, Homo sapiens; identical to SEQ ID NO: 268824
  chr16:12286197-12286282
  hypo

SEQ ID NO: 444952 - DNA, 188 bp, Homo sapiens; identical to SEQ ID NO: 268826
  chr16:12293539-12293727
  hypo

SEQ ID NO: 444953 - DNA, 83 bp, Homo sapiens; identical to SEQ ID NO: 268827
  chr16:12327925-12328008
  hypo

SEQ ID NO: 444954 - DNA, 101 bp, Homo sapiens; identical to SEQ ID NO: 268828
  chr16:12331021-12331122
  hypo

SEQ ID NO: 444955 - DNA, 169 bp, Homo sapiens; identical to SEQ ID NO: 268829
  chr16:12377985-12378154
  hypo

SEQ ID NO: 444956 - DNA, 84 bp, Homo sapiens; identical to SEQ ID NO: 268830
  chr16:12390747-12390831
  hypo

SEQ ID NO: 444957 - DNA, 82 bp, Homo sapiens; identical to SEQ ID NO: 268831
  chr16:12399116-12399198
  hypo

SEQ ID NO: 444958 - DNA, 358 bp, Homo sapiens; identical to SEQ ID NO: 268832
  chr16:12412005-12412363
  hypo

SEQ ID NO: 444959 - DNA, 92 bp, Homo sapiens; identical to SEQ ID NO: 268833
  chr16:12415815-12415907
  hypo

SEQ ID NO: 444960 - DNA, 80 bp, Homo sapiens; identical to SEQ ID NO: 268834
  chr16:12497524-12497604
  hypo

SEQ ID NO: 444961 - DNA, 135 bp, Homo sapiens; identical to SEQ ID NO: 268835
  chr16:12498045-12498180
  hypo

SEQ ID NO: 444962 - DNA, 327 bp, Homo sapiens; identical to SEQ ID NO: 268837
  chr16:12579140-12579467
  hypo

SEQ ID NO: 444963 - DNA, 36 bp, Homo sapiens; identical to SEQ ID NO: 320369
  chr16:12758795-12758831
  hypo

SEQ ID NO: 444964 - DNA, 56 bp, Homo sapiens; identical to SEQ ID NO: 268840
  chr16:12777325-12777381
  hypo

SEQ ID NO: 444965 - DNA, 35 bp, Homo sapiens; identical to SEQ ID NO: 268841
  chr16:12782489-12782524
  hypo

SEQ ID NO: 444966 - DNA, 91 bp, Homo sapiens; identical to SEQ ID NO: 268842
  chr16:12800830-12800921
  hypo

SEQ ID NO: 444967 - DNA, 128 bp, Homo sapiens; identical to SEQ ID NO: 268843
  chr16:12850875-12851003
  hypo

SEQ ID NO: 444968 - DNA, 102 bp, Homo sapiens; identical to SEQ ID NO: 268844
  chr16:12867590-12867692
  hypo

SEQ ID NO: 444969 - DNA, 126 bp, Homo sapiens; identical to SEQ ID NO: 268845
  chr16:13157454-13157580
  hypo

SEQ ID NO: 444970 - DNA, 80 bp, Homo sapiens; identical to SEQ ID NO: 268846
  chr16:13643878-13643958
  hypo

SEQ ID NO: 444971 - DNA, 45 bp, Homo sapiens; identical to SEQ ID NO: 268847
  chr16:13740878-13740923
  hypo

SEQ ID NO: 444972 - DNA, 177 bp, Homo sapiens; identical to SEQ ID NO: 225021
  chr16:13877530-13877707
  hypo

SEQ ID NO: 444973 - DNA, 206 bp, Homo sapiens; identical to SEQ ID NO: 268848
  chr16:13977142-13977348
  hypo

SEQ ID NO: 444974 - DNA, 83 bp, Homo sapiens; identical to SEQ ID NO: 268849
  chr16:14494054-14494137
  hypo

SEQ ID NO: 444975 - DNA, 35 bp, Homo sapiens; identical to SEQ ID NO: 268850
  chr16:14525417-14525452
  hypo

SEQ ID NO: 444976 - DNA, 95 bp, Homo sapiens; identical to SEQ ID NO: 268851
  chr16:14525692-14525787
  hypo

SEQ ID NO: 444977 - DNA, 77 bp, Homo sapiens; identical to SEQ ID NO: 268852
  chr16:14632542-14632619
  hypo

SEQ ID NO: 444978 - DNA, 69 bp, Homo sapiens; identical to SEQ ID NO: 268853
  chr16:14692498-14692567
  hypo

SEQ ID NO: 444979 - DNA, 111 bp, Homo sapiens; identical to SEQ ID NO: 216800
  chr16:14725660-14725771
  hypo

SEQ ID NO: 444980 - DNA, 101 bp, Homo sapiens; identical to SEQ ID NO: 268855
  chr16:14728323-14728424
  hypo

SEQ ID NO: 444981 - DNA, 86 bp, Homo sapiens; identical to SEQ ID NO: 268857
  chr16:14734691-14734777
  hypo

SEQ ID NO: 444982 - DNA, 38 bp, Homo sapiens; identical to SEQ ID NO: 216801
  chr16:14735318-14735356
  hypo

SEQ ID NO: 444983 - DNA, 401 bp, Homo sapiens; identical to SEQ ID NO: 268859
  chr16:14761337-14761738
  hypo

SEQ ID NO: 444984 - DNA, 152 bp, Homo sapiens; identical to SEQ ID NO: 216803
  chr16:14763027-14763179
  hypo

SEQ ID NO: 444985 - DNA, 38 bp, Homo sapiens; identical to SEQ ID NO: 268861
  chr16:15055595-15055633
  hypo

SEQ ID NO: 444986 - DNA, 234 bp, Homo sapiens; identical to SEQ ID NO: 268862
  chr16:15122678-15122912
  hypo

SEQ ID NO: 444987 - DNA, 58 bp, Homo sapiens; identical to SEQ ID NO: 320396
  chr16:15191479-15191537
  hypo

SEQ ID NO: 444988 - DNA, 191 bp, Homo sapiens; identical to SEQ ID NO: 268865
  chr16:15541440-15541631
  hypo

SEQ ID NO: 444989 - DNA, 93 bp, Homo sapiens; identical to SEQ ID NO: 268866
  chr16:15602903-15602996
  hypo

SEQ ID NO: 444990 - DNA, 103 bp, Homo sapiens; identical to SEQ ID NO: 268868
  chr16:15606081-15606184
  hypo

SEQ ID NO: 444991 - DNA, 314 bp, Homo sapiens; identical to SEQ ID NO: 216805
  chr16:15606940-15607254
  hypo

SEQ ID NO: 444992 - DNA, 120 bp, Homo sapiens; identical to SEQ ID NO: 216806
  chr16:15607783-15607903
  hypo

SEQ ID NO: 444993 - DNA, 162 bp, Homo sapiens; identical to SEQ ID NO: 216807
  chr16:15608920-15609082
  hypo

SEQ ID NO: 444994 - DNA, 43 bp, Homo sapiens; identical to SEQ ID NO: 268872
  chr16:15626664-15626707
  hypo

SEQ ID NO: 444995 - DNA, 91 bp, Homo sapiens; identical to SEQ ID NO: 216808
  chr16:15649666-15649757
  hypo

SEQ ID NO: 444996 - DNA, 68 bp, Homo sapiens; identical to SEQ ID NO: 216809
  chr16:15693241-15693309
  hypo

SEQ ID NO: 444997 - DNA, 247 bp, Homo sapiens; identical to SEQ ID NO: 268875
  chr16:15704142-15704389
  hypo

SEQ ID NO: 444998 - DNA, 83 bp, Homo sapiens; identical to SEQ ID NO: 216811
  chr16:15707174-15707257
  hypo

SEQ ID NO: 444999 - DNA, 82 bp, Homo sapiens; identical to SEQ ID NO: 216812
  chr16:15707963-15708045
  hypo

SEQ ID NO: 445000 - DNA, 45 bp, Homo sapiens; identical to SEQ ID NO: 268878
  chr16:15710353-15710398
  hypo

SEQ ID NO: 445001 - DNA, 260 bp, Homo sapiens; identical to SEQ ID NO: 216813
  chr16:15723202-15723462
  hypo

SEQ ID NO: 445002 - DNA, 104 bp, Homo sapiens; identical to SEQ ID NO: 268880
  chr16:15728112-15728216
  hypo

SEQ ID NO: 445003 - DNA, 127 bp, Homo sapiens; identical to SEQ ID NO: 216814
  chr16:15729537-15729664
  hypo

SEQ ID NO: 445004 - DNA, 181 bp, Homo sapiens; identical to SEQ ID NO: 268882
  chr16:15729933-15730114
  hypo

SEQ ID NO: 445005 - DNA, 34 bp, Homo sapiens; identical to SEQ ID NO: 320414
  chr16:15746763-15746797
  hypo

SEQ ID NO: 445006 - DNA, 39 bp, Homo sapiens; identical to SEQ ID NO: 320415
  chr16:15746825-15746864
  hypo

SEQ ID NO: 445007 - DNA, 99 bp, Homo sapiens; identical to SEQ ID NO: 216815
  chr16:15747494-15747593
  hypo

SEQ ID NO: 445008 - DNA, 53 bp, Homo sapiens; identical to SEQ ID NO: 216816
  chr16:15762731-15762784
  hypo

SEQ ID NO: 445009 - DNA, 55 bp, Homo sapiens; identical to SEQ ID NO: 268888
  chr16:15798699-15798754
  hypo

SEQ ID NO: 445010 - DNA, 82 bp, Homo sapiens; identical to SEQ ID NO: 216817
  chr16:15799467-15799549
  hypo

SEQ ID NO: 445011 - DNA, 78 bp, Homo sapiens; identical to SEQ ID NO: 268890
  chr16:15808722-15808800
  hypo

SEQ ID NO: 445012 - DNA, 34 bp, Homo sapiens; identical to SEQ ID NO: 410788
  chr16:15820529-15820563
  hypo

SEQ ID NO: 445013 - DNA, 141 bp, Homo sapiens; identical to SEQ ID NO: 268892
  chr16:15843925-15844066
  hypo

SEQ ID NO: 445014 - DNA, 83 bp, Homo sapiens; identical to SEQ ID NO: 268893
  chr16:15979202-15979285
  hypo

SEQ ID NO: 445015 - DNA, 42 bp, Homo sapiens; identical to SEQ ID NO: 268894
  chr16:15991506-15991548
  hypo

SEQ ID NO: 445016 - DNA, 76 bp, Homo sapiens; identical to SEQ ID NO: 268895
  chr16:16019074-16019150
  hypo

SEQ ID NO: 445017 - DNA, 31 bp, Homo sapiens; identical to SEQ ID NO: 268896
  chr16:16022603-16022634
  hypo

SEQ ID NO: 445018 - DNA, 35 bp, Homo sapiens; identical to SEQ ID NO: 268897
  chr16:16041979-16042014
  hypo

SEQ ID NO: 445019 - DNA, 39 bp, Homo sapiens; identical to SEQ ID NO: 268898
  chr16:16090901-16090940
  hypo

SEQ ID NO: 445020 - DNA, 234 bp, Homo sapiens; identical to SEQ ID NO: 268900
  chr16:16180668-16180902
  hypo

SEQ ID NO: 445021 - DNA, 306 bp, Homo sapiens; identical to SEQ ID NO: 216820
  chr16:16208594-16208900
  hypo

SEQ ID NO: 445022 - DNA, 206 bp, Homo sapiens; identical to SEQ ID NO: 216821
  chr16:16219544-16219750
  hypo

SEQ ID NO: 445023 - DNA, 43 bp, Homo sapiens; identical to SEQ ID NO: 268905
  chr16:16245755-16245798
  hypo

SEQ ID NO: 445024 - DNA, 279 bp, Homo sapiens; identical to SEQ ID NO: 268906
  chr16:16259432-16259711
  hypo

SEQ ID NO: 445025 - DNA, 186 bp, Homo sapiens; identical to SEQ ID NO: 216823
  chr16:16282899-16283085
  hypo

SEQ ID NO: 445026 - DNA, 42 bp, Homo sapiens; identical to SEQ ID NO: 268908
  chr16:17054605-17054647
  hypo

SEQ ID NO: 445027 - DNA, 75 bp, Homo sapiens; identical to SEQ ID NO: 268909
  chr16:17294379-17294454
  hypo

SEQ ID NO: 445028 - DNA, 138 bp, Homo sapiens; identical to SEQ ID NO: 268910
  chr16:17357449-17357587
  hypo

SEQ ID NO: 445029 - DNA, 42 bp, Homo sapiens; identical to SEQ ID NO: 216824
  chr16:17754966-17755008
  hypo

SEQ ID NO: 445030 - DNA, 37 bp, Homo sapiens; identical to SEQ ID NO: 268912
  chr16:18036046-18036083
  hypo

SEQ ID NO: 445031 - DNA, 50 bp, Homo sapiens; identical to SEQ ID NO: 268913
  chr16:18076376-18076426
  hypo

SEQ ID NO: 445032 - DNA, 43 bp, Homo sapiens; identical to SEQ ID NO: 216826
  chr16:18884774-18884817
  hypo

SEQ ID NO: 445033 - DNA, 160 bp, Homo sapiens; identical to SEQ ID NO: 268918
  chr16:19051022-19051182
  hypo

SEQ ID NO: 445034 - DNA, 36 bp, Homo sapiens; identical to SEQ ID NO: 268919
  chr16:19085558-19085594
  hypo

SEQ ID NO: 445035 - DNA, 42 bp, Homo sapiens; identical to SEQ ID NO: 216827
  chr16:19184226-19184268
  hypo

SEQ ID NO: 445036 - DNA, 355 bp, Homo sapiens; identical to SEQ ID NO: 216828
  chr16:19185277-19185632
  hypo

SEQ ID NO: 445037 - DNA, 89 bp, Homo sapiens; identical to SEQ ID NO: 268922
  chr16:19252128-19252217
  hypo

SEQ ID NO: 445038 - DNA, 158 bp, Homo sapiens; identical to SEQ ID NO: 216829
  chr16:19431054-19431212
  hypo

SEQ ID NO: 445039 - DNA, 31 bp, Homo sapiens; identical to SEQ ID NO: 90082
  chr16:19456420-19456451
  hypo

SEQ ID NO: 445040 - DNA, 81 bp, Homo sapiens; identical to SEQ ID NO: 268925
  chr16:19485545-19485626
  hypo

SEQ ID NO: 445041 - DNA, 130 bp, Homo sapiens; identical to SEQ ID NO: 268926
  chr16:19528378-19528508
  hypo

SEQ ID NO: 445042 - DNA, 45 bp, Homo sapiens; identical to SEQ ID NO: 268927
  chr16:19568731-19568776
  hypo

SEQ ID NO: 445043 - DNA, 92 bp, Homo sapiens; identical to SEQ ID NO: 268930
  chr16:19665686-19665778
  hypo

SEQ ID NO: 445044 - DNA, 86 bp, Homo sapiens; identical to SEQ ID NO: 268931
  chr16:19706325-19706411
  hypo

SEQ ID NO: 445045 - DNA, 224 bp, Homo sapiens; identical to SEQ ID NO: 216832
  chr16:19719066-19719290
  hypo

SEQ ID NO: 445046 - DNA, 100 bp, Homo sapiens; identical to SEQ ID NO: 268934
  chr16:19743742-19743842
  hypo

SEQ ID NO: 445047 - DNA, 185 bp, Homo sapiens; identical to SEQ ID NO: 216833
  chr16:19845505-19845690
  hypo

SEQ ID NO: 445048 - DNA, 343 bp, Homo sapiens; identical to SEQ ID NO: 216834
  chr16:19904164-19904507
  hypo

SEQ ID NO: 445049 - DNA, 83 bp, Homo sapiens; identical to SEQ ID NO: 268938
  chr16:20335323-20335406
  hypo

SEQ ID NO: 445050 - DNA, 35 bp, Homo sapiens; identical to SEQ ID NO: 268939
  chr16:20702408-20702443
  hypo

SEQ ID NO: 445051 - DNA, 164 bp, Homo sapiens; identical to SEQ ID NO: 216835
  chr16:20754570-20754734
  hypo

SEQ ID NO: 445052 - DNA, 39 bp, Homo sapiens; identical to SEQ ID NO: 216836
  chr16:20803222-20803261
  hypo

SEQ ID NO: 445053 - DNA, 79 bp, Homo sapiens; identical to SEQ ID NO: 268942
  chr16:20816394-20816473
  hypo

SEQ ID NO: 445054 - DNA, 182 bp, Homo sapiens; identical to SEQ ID NO: 204133
  chr16:20817451-20817633
  hypo

SEQ ID NO: 445055 - DNA, 75 bp, Homo sapiens; identical to SEQ ID NO: 268944
  chr16:20822044-20822119
  hypo

SEQ ID NO: 445056 - DNA, 100 bp, Homo sapiens; identical to SEQ ID NO: 216838
  chr16:20823438-20823538
  hypo

SEQ ID NO: 445057 - DNA, 139 bp, Homo sapiens; identical to SEQ ID NO: 268946
  chr16:20966046-20966185
  hypo

SEQ ID NO: 445058 - DNA, 157 bp, Homo sapiens; identical to SEQ ID NO: 268947
  chr16:21174564-21174721
  hypo

SEQ ID NO: 445059 - DNA, 53 bp, Homo sapiens; identical to SEQ ID NO: 216839
  chr16:21178770-21178823
  hypo

SEQ ID NO: 445060 - DNA, 46 bp, Homo sapiens
  chr16:21515406-21515452
  hypo
ggctgcagtgacctatgatcctgccactgcactccaggctgggctg

SEQ ID NO: 445061 - DNA, 33 bp, Homo sapiens
  chr16:21515493-21515526
  hypo
ggggcaccatggatggctgactcctgtaatccc

SEQ ID NO: 445062 - DNA, 233 bp, Homo sapiens; identical to SEQ ID NO: 268952
  chr16:21535692-21535925
  hypo

SEQ ID NO: 445063 - DNA, 149 bp, Homo sapiens; identical to SEQ ID NO: 320481
  chr16:21539210-21539359
  hypo

SEQ ID NO: 445064 - DNA, 40 bp, Homo sapiens; identical to SEQ ID NO: 216844
  chr16:21633194-21633234
  hypo

SEQ ID NO: 445065 - DNA, 80 bp, Homo sapiens; identical to SEQ ID NO: 216845
  chr16:21635698-21635778
  hypo

SEQ ID NO: 445066 - DNA, 34 bp, Homo sapiens; identical to SEQ ID NO: 216846
  chr16:21666771-21666805
  hypo

SEQ ID NO: 445067 - DNA, 80 bp, Homo sapiens; identical to SEQ ID NO: 216847
  chr16:22083799-22083879
  hypo

SEQ ID NO: 445068 - DNA, 80 bp, Homo sapiens; identical to SEQ ID NO: 216848
  chr16:22084119-22084199
  hypo

SEQ ID NO: 445069 - DNA, 42 bp, Homo sapiens; identical to SEQ ID NO: 268964
  chr16:22216816-22216858
  hypo

SEQ ID NO: 445070 - DNA, 230 bp, Homo sapiens; identical to SEQ ID NO: 291386
  chr16:22217232-22217462
  hypo

SEQ ID NO: 445071 - DNA, 123 bp, Homo sapiens; identical to SEQ ID NO: 268965
  chr16:22236967-22237090
  hypo

SEQ ID NO: 445072 - DNA, 90 bp, Homo sapiens; identical to SEQ ID NO: 216849
  chr16:22285049-22285139
  hypo

SEQ ID NO: 445073 - DNA, 189 bp, Homo sapiens; identical to SEQ ID NO: 268967
  chr16:22324533-22324722
  hypo

SEQ ID NO: 445074 - DNA, 192 bp, Homo sapiens; identical to SEQ ID NO: 216852
  chr16:22358431-22358623
  hypo

SEQ ID NO: 445075 - DNA, 79 bp, Homo sapiens; identical to SEQ ID NO: 216853
  chr16:22398761-22398840
  hypo

SEQ ID NO: 445076 - DNA, 89 bp, Homo sapiens; identical to SEQ ID NO: 268971
  chr16:22411852-22411941
  hypo

SEQ ID NO: 445077 - DNA, 153 bp, Homo sapiens; identical to SEQ ID NO: 268972
  chr16:22792389-22792542
  hypo

SEQ ID NO: 445078 - DNA, 42 bp, Homo sapiens; identical to SEQ ID NO: 268973
  chr16:23093841-23093883
  hypo

SEQ ID NO: 445079 - DNA, 34 bp, Homo sapiens; identical to SEQ ID NO: 268974
  chr16:23157624-23157658
  hypo

SEQ ID NO: 445080 - DNA, 198 bp, Homo sapiens; identical to SEQ ID NO: 291390
  chr16:23194201-23194399
  hypo

SEQ ID NO: 445081 - DNA, 201 bp, Homo sapiens; identical to SEQ ID NO: 291391
  chr16:23194436-23194637
  hypo

SEQ ID NO: 445082 - DNA, 136 bp, Homo sapiens; identical to SEQ ID NO: 291392
  chr16:23313253-23313389
  hypo

SEQ ID NO: 445083 - DNA, 33 bp, Homo sapiens; identical to SEQ ID NO: 268975
  chr16:23331328-23331361
  hypo

SEQ ID NO: 445084 - DNA, 96 bp, Homo sapiens; identical to SEQ ID NO: 268976
  chr16:23332278-23332374
  hypo

SEQ ID NO: 445085 - DNA, 155 bp, Homo sapiens; identical to SEQ ID NO: 268978
  chr16:23402871-23403026
  hypo

SEQ ID NO: 445086 - DNA, 359 bp, Homo sapiens; identical to SEQ ID NO: 268979
  chr16:23410367-23410726
  hypo

SEQ ID NO: 445087 - DNA, 49 bp, Homo sapiens; identical to SEQ ID NO: 268981
  chr16:23481441-23481490
  hypo

SEQ ID NO: 445088 - DNA, 200 bp, Homo sapiens; identical to SEQ ID NO: 268982
  chr16:23496842-23497042
  hypo

SEQ ID NO: 445089 - DNA, 35 bp, Homo sapiens; identical to SEQ ID NO: 268984
  chr16:23510926-23510961
  hypo

SEQ ID NO: 445090 - DNA, 72 bp, Homo sapiens; identical to SEQ ID NO: 268985
  chr16:23511603-23511675
  hypo

SEQ ID NO: 445091 - DNA, 384 bp, Homo sapiens; identical to SEQ ID NO: 268988
  chr16:23577993-23578377
  hypo

SEQ ID NO: 445092 - DNA, 144 bp, Homo sapiens; identical to SEQ ID NO: 320519
  chr16:23595588-23595732
  hypo

SEQ ID NO: 445093 - DNA, 36 bp, Homo sapiens; identical to SEQ ID NO: 320520
  chr16:23595762-23595798
  hypo

SEQ ID NO: 445094 - DNA, 85 bp, Homo sapiens; identical to SEQ ID NO: 268990
  chr16:23606211-23606296
  hypo

SEQ ID NO: 445095 - DNA, 172 bp, Homo sapiens; identical to SEQ ID NO: 268992
  chr16:23702179-23702351
  hypo

SEQ ID NO: 445096 - DNA, 97 bp, Homo sapiens; identical to SEQ ID NO: 204138
  chr16:23766000-23766097
  hypo

SEQ ID NO: 445097 - DNA, 103 bp, Homo sapiens; identical to SEQ ID NO: 204139
  chr16:23766130-23766233
  hypo

SEQ ID NO: 445098 - DNA, 86 bp, Homo sapiens; identical to SEQ ID NO: 268994
  chr16:24079284-24079370
  hypo

SEQ ID NO: 445099 - DNA, 142 bp, Homo sapiens; identical to SEQ ID NO: 216859
  chr16:24118921-24119063
  hypo

SEQ ID NO: 445100 - DNA, 121 bp, Homo sapiens; identical to SEQ ID NO: 268996
  chr16:24131552-24131673
  hypo

SEQ ID NO: 445101 - DNA, 42 bp, Homo sapiens; identical to SEQ ID NO: 268997
  chr16:24288802-24288844
  hypo

SEQ ID NO: 445102 - DNA, 44 bp, Homo sapiens; identical to SEQ ID NO: 204140
  chr16:24354628-24354672
  hypo

SEQ ID NO: 445103 - DNA, 250 bp, Homo sapiens; identical to SEQ ID NO: 320531
  chr16:24372758-24373008
  hypo

SEQ ID NO: 445104 - DNA, 41 bp, Homo sapiens; identical to SEQ ID NO: 268999
  chr16:24587543-24587584
  hypo

SEQ ID NO: 445105 - DNA, 34 bp, Homo sapiens; identical to SEQ ID NO: 269000
  chr16:24707390-24707424
  hypo

SEQ ID NO: 445106 - DNA, 80 bp, Homo sapiens; identical to SEQ ID NO: 216861
  chr16:24772184-24772264
  hypo

SEQ ID NO: 445107 - DNA, 153 bp, Homo sapiens; identical to SEQ ID NO: 216863
  chr16:25006925-25007078
  hypo

SEQ ID NO: 445108 - DNA, 125 bp, Homo sapiens; identical to SEQ ID NO: 269006
  chr16:25009670-25009795
  hypo

SEQ ID NO: 445109 - DNA, 82 bp, Homo sapiens; identical to SEQ ID NO: 320540
  chr16:25071330-25071412
  hypo

SEQ ID NO: 445110 - DNA, 84 bp, Homo sapiens; identical to SEQ ID NO: 269008
  chr16:25168834-25168918
  hypo

SEQ ID NO: 445111 - DNA, 42 bp, Homo sapiens; identical to SEQ ID NO: 216864
  chr16:25266495-25266537
  hypo

SEQ ID NO: 445112 - DNA, 107 bp, Homo sapiens; identical to SEQ ID NO: 216865
  chr16:25266573-25266680
  hypo

SEQ ID NO: 445113 - DNA, 31 bp, Homo sapiens; identical to SEQ ID NO: 269010
  chr16:25290985-25291016
  hypo

SEQ ID NO: 445114 - DNA, 118 bp, Homo sapiens; identical to SEQ ID NO: 320545
  chr16:27052120-27052238
  hypo

SEQ ID NO: 445115 - DNA, 119 bp, Homo sapiens; identical to SEQ ID NO: 320546
  chr16:27052308-27052427
  hypo

SEQ ID NO: 445116 - DNA, 158 bp, Homo sapiens; identical to SEQ ID NO: 269012
  chr16:27063490-27063648
  hypo

SEQ ID NO: 445117 - DNA, 143 bp, Homo sapiens; identical to SEQ ID NO: 204142
  chr16:27121251-27121394
  hypo

SEQ ID NO: 445118 - DNA, 35 bp, Homo sapiens; identical to SEQ ID NO: 269013
  chr16:27219620-27219655
  hypo

SEQ ID NO: 445119 - DNA, 37 bp, Homo sapiens; identical to SEQ ID NO: 269014
  chr16:27220819-27220856
  hypo

SEQ ID NO: 445120 - DNA, 32 bp, Homo sapiens; identical to SEQ ID NO: 269015
  chr16:27242669-27242701
  hypo

SEQ ID NO: 445121 - DNA, 477 bp, Homo sapiens; identical to SEQ ID NO: 269016
  chr16:27244720-27245197
  hypo

SEQ ID NO: 445122 - DNA, 165 bp, Homo sapiens; identical to SEQ ID NO: 269017
  chr16:27268604-27268769
  hypo

SEQ ID NO: 445123 - DNA, 258 bp, Homo sapiens; identical to SEQ ID NO: 204144
  chr16:27280121-27280379
  hypo

SEQ ID NO: 445124 - DNA, 36 bp, Homo sapiens; identical to SEQ ID NO: 216868
  chr16:27309235-27309271
  hypo

SEQ ID NO: 445125 - DNA, 179 bp, Homo sapiens; identical to SEQ ID NO: 269019
  chr16:27356584-27356763
  hypo

SEQ ID NO: 445126 - DNA, 81 bp, Homo sapiens; identical to SEQ ID NO: 216869
  chr16:27475124-27475205
  hypo

SEQ ID NO: 445127 - DNA, 73 bp, Homo sapiens; identical to SEQ ID NO: 216870
  chr16:27475235-27475308
  hypo

SEQ ID NO: 445128 - DNA, 574 bp, Homo sapiens; identical to SEQ ID NO: 216871
  chr16:27475618-27476192
  hypo

SEQ ID NO: 445129 - DNA, 188 bp, Homo sapiens; identical to SEQ ID NO: 269023
  chr16:27506624-27506812
  hypo

SEQ ID NO: 445130 - DNA, 338 bp, Homo sapiens; identical to SEQ ID NO: 216872
  chr16:27510216-27510554
  hypo

SEQ ID NO: 445131 - DNA, 238 bp, Homo sapiens; identical to SEQ ID NO: 269025
  chr16:27517091-27517329
  hypo

SEQ ID NO: 445132 - DNA, 68 bp, Homo sapiens; identical to SEQ ID NO: 216873
  chr16:27523536-27523604
  hypo

SEQ ID NO: 445133 - DNA, 37 bp, Homo sapiens; identical to SEQ ID NO: 216874
  chr16:27539546-27539583
  hypo

SEQ ID NO: 445134 - DNA, 160 bp, Homo sapiens; identical to SEQ ID NO: 269030
  chr16:27568346-27568506
  hypo

SEQ ID NO: 445135 - DNA, 103 bp, Homo sapiens; identical to SEQ ID NO: 269031
  chr16:27640048-27640151
  hypo

SEQ ID NO: 445136 - DNA, 113 bp, Homo sapiens; identical to SEQ ID NO: 269032
  chr16:27735234-27735347
  hypo

SEQ ID NO: 445137 - DNA, 543 bp, Homo sapiens; identical to SEQ ID NO: 269033
  chr16:27748861-27749404
  hypo

SEQ ID NO: 445138 - DNA, 42 bp, Homo sapiens; identical to SEQ ID NO: 269037
  chr16:27945907-27945949
  hypo

SEQ ID NO: 445139 - DNA, 172 bp, Homo sapiens; identical to SEQ ID NO: 216876
  chr16:28043670-28043842
  hypo

SEQ ID NO: 445140 - DNA, 94 bp, Homo sapiens; identical to SEQ ID NO: 269039
  chr16:28093979-28094073
  hypo

SEQ ID NO: 445141 - DNA, 194 bp, Homo sapiens; identical to SEQ ID NO: 320576
  chr16:28104368-28104562
  hypo

SEQ ID NO: 445142 - DNA, 156 bp, Homo sapiens; identical to SEQ ID NO: 216878
  chr16:28116153-28116309
  hypo

SEQ ID NO: 445143 - DNA, 164 bp, Homo sapiens; identical to SEQ ID NO: 216879
  chr16:28128687-28128851
  hypo

SEQ ID NO: 445144 - DNA, 141 bp, Homo sapiens; identical to SEQ ID NO: 216880
  chr16:28332354-28332495
  hypo

SEQ ID NO: 445145 - DNA, 111 bp, Homo sapiens; identical to SEQ ID NO: 269045
  chr16:28585539-28585650
  hypo

SEQ ID NO: 445146 - DNA, 120 bp, Homo sapiens; identical to SEQ ID NO: 216881
  chr16:28822780-28822900
  hypo

SEQ ID NO: 445147 - DNA, 129 bp, Homo sapiens; identical to SEQ ID NO: 269047
  chr16:28845818-28845947
  hypo

SEQ ID NO: 445148 - DNA, 203 bp, Homo sapiens; identical to SEQ ID NO: 269050
  chr16:28911981-28912184
  hypo

SEQ ID NO: 445149 - DNA, 231 bp, Homo sapiens; identical to SEQ ID NO: 216883
  chr16:28914705-28914936
  hypo

SEQ ID NO: 445150 - DNA, 74 bp, Homo sapiens; identical to SEQ ID NO: 216884
  chr16:28915762-28915836
  hypo

SEQ ID NO: 445151 - DNA, 530 bp, Homo sapiens; identical to SEQ ID NO: 269053
  chr16:28922055-28922585
  hypo

SEQ ID NO: 445152 - DNA, 113 bp, Homo sapiens; identical to SEQ ID NO: 216887
  chr16:29001662-29001775
  hypo

SEQ ID NO: 445153 - DNA, 99 bp, Homo sapiens; identical to SEQ ID NO: 269056
  chr16:29023076-29023175
  hypo

SEQ ID NO: 445154 - DNA, 178 bp, Homo sapiens; identical to SEQ ID NO: 269057
  chr16:29118743-29118921
  hypo

SEQ ID NO: 445155 - DNA, 217 bp, Homo sapiens; identical to SEQ ID NO: 269058
  chr16:29150831-29151048
  hypo

SEQ ID NO: 445156 - DNA, 187 bp, Homo sapiens; identical to SEQ ID NO: 269061
  chr16:29198308-29198495
  hypo

SEQ ID NO: 445157 - DNA, 35 bp, Homo sapiens; identical to SEQ ID NO: 269062
  chr16:29229643-29229678
  hypo

SEQ ID NO: 445158 - DNA, 175 bp, Homo sapiens; identical to SEQ ID NO: 320599
  chr16:29230296-29230471
  hypo

SEQ ID NO: 445159 - DNA, 105 bp, Homo sapiens; identical to SEQ ID NO: 269064
  chr16:29231513-29231618
  hypo

SEQ ID NO: 445160 - DNA, 77 bp, Homo sapiens; identical to SEQ ID NO: 269066
  chr16:29262666-29262743
  hypo

SEQ ID NO: 445161 - DNA, 117 bp, Homo sapiens; identical to SEQ ID NO: 216890
  chr16:29324695-29324812
  hypo

SEQ ID NO: 445162 - DNA, 34 bp, Homo sapiens; identical to SEQ ID NO: 269068
  chr16:29420290-29420324
  hypo

SEQ ID NO: 445163 - DNA, 79 bp, Homo sapiens; identical to SEQ ID NO: 204150
  chr16:29606232-29606311
  hypo

SEQ ID NO: 445164 - DNA, 35 bp, Homo sapiens; identical to SEQ ID NO: 225043
  chr16:29691806-29691841
  hypo

SEQ ID NO: 445165 - DNA, 99 bp, Homo sapiens; identical to SEQ ID NO: 269069
  chr16:29697748-29697847
  hypo

SEQ ID NO: 445166 - DNA, 180 bp, Homo sapiens; identical to SEQ ID NO: 269070
  chr16:29703876-29704056
  hypo

SEQ ID NO: 445167 - DNA, 413 bp, Homo sapiens; identical to SEQ ID NO: 216893
  chr16:29755602-29756015
  hypo

SEQ ID NO: 445168 - DNA, 84 bp, Homo sapiens; identical to SEQ ID NO: 269072
  chr16:29797109-29797193
  hypo

SEQ ID NO: 445169 - DNA, 31 bp, Homo sapiens; identical to SEQ ID NO: 269073
  chr16:29820500-29820531
  hypo

SEQ ID NO: 445170 - DNA, 225 bp, Homo sapiens; identical to SEQ ID NO: 269074
  chr16:29820788-29821013
  hypo

SEQ ID NO: 445171 - DNA, 83 bp, Homo sapiens; identical to SEQ ID NO: 269075
  chr16:29821043-29821126
  hypo

SEQ ID NO: 445172 - DNA, 285 bp, Homo sapiens; identical to SEQ ID NO: 204153
  chr16:29822515-29822800
  hypo

SEQ ID NO: 445173 - DNA, 123 bp, Homo sapiens; identical to SEQ ID NO: 269076
  chr16:29825625-29825748
  hypo

SEQ ID NO: 445174 - DNA, 34 bp, Homo sapiens; identical to SEQ ID NO: 269078
  chr16:29834879-29834913
  hypo

SEQ ID NO: 445175 - DNA, 120 bp, Homo sapiens; identical to SEQ ID NO: 216895
  chr16:29835153-29835273
  hypo

SEQ ID NO: 445176 - DNA, 136 bp, Homo sapiens; identical to SEQ ID NO: 204154
  chr16:29836031-29836167
  hypo

SEQ ID NO: 445177 - DNA, 217 bp, Homo sapiens; identical to SEQ ID NO: 269080
  chr16:29853060-29853277
  hypo

SEQ ID NO: 445178 - DNA, 34 bp, Homo sapiens; identical to SEQ ID NO: 269082
  chr16:29866930-29866964
  hypo

SEQ ID NO: 445179 - DNA, 161 bp, Homo sapiens; identical to SEQ ID NO: 269083
  chr16:29873348-29873509
  hypo

SEQ ID NO: 445180 - DNA, 168 bp, Homo sapiens; identical to SEQ ID NO: 204157
  chr16:29910605-29910773
  hypo

SEQ ID NO: 445181 - DNA, 398 bp, Homo sapiens; identical to SEQ ID NO: 216899
  chr16:29912776-29913174
  hypo

SEQ ID NO: 445182 - DNA, 133 bp, Homo sapiens; identical to SEQ ID NO: 216900
  chr16:29913204-29913337
  hypo

SEQ ID NO: 445183 - DNA, 104 bp, Homo sapiens; identical to SEQ ID NO: 269085
  chr16:29971777-29971881
  hypo

SEQ ID NO: 445184 - DNA, 215 bp, Homo sapiens; identical to SEQ ID NO: 269086
  chr16:29997641-29997856
  hypo

SEQ ID NO: 445185 - DNA, 170 bp, Homo sapiens; identical to SEQ ID NO: 269087
  chr16:30000466-30000636
  hypo

SEQ ID NO: 445186 - DNA, 287 bp, Homo sapiens; identical to SEQ ID NO: 216901
  chr16:30000930-30001217
  hypo

SEQ ID NO: 445187 - DNA, 37 bp, Homo sapiens; identical to SEQ ID NO: 269090
  chr16:30018172-30018209
  hypo

SEQ ID NO: 445188 - DNA, 56 bp, Homo sapiens; identical to SEQ ID NO: 216902
  chr16:30018522-30018578
  hypo

SEQ ID NO: 445189 - DNA, 121 bp, Homo sapiens; identical to SEQ ID NO: 269092
  chr16:30040914-30041035
  hypo

SEQ ID NO: 445190 - DNA, 120 bp, Homo sapiens; identical to SEQ ID NO: 269094
  chr16:30073149-30073269
  hypo

SEQ ID NO: 445191 - DNA, 33 bp, Homo sapiens; identical to SEQ ID NO: 269095
  chr16:30079668-30079701
  hypo

SEQ ID NO: 445192 - DNA, 127 bp, Homo sapiens; identical to SEQ ID NO: 216905
  chr16:30125291-30125418
  hypo

SEQ ID NO: 445193 - DNA, 43 bp, Homo sapiens; identical to SEQ ID NO: 269101
  chr16:30195390-30195433
  hypo

SEQ ID NO: 445194 - DNA, 403 bp, Homo sapiens; identical to SEQ ID NO: 216907
  chr16:30199143-30199546
  hypo

SEQ ID NO: 445195 - DNA, 157 bp, Homo sapiens; identical to SEQ ID NO: 269104
  chr16:30402328-30402485
  hypo

SEQ ID NO: 445196 - DNA, 52 bp, Homo sapiens; identical to SEQ ID NO: 269106
  chr16:30442022-30442074
  hypo

SEQ ID NO: 445197 - DNA, 39 bp, Homo sapiens; identical to SEQ ID NO: 269107
  chr16:30506741-30506780
  hypo

SEQ ID NO: 445198 - DNA, 111 bp, Homo sapiens; identical to SEQ ID NO: 269109
  chr16:30567840-30567951
  hypo

SEQ ID NO: 445199 - DNA, 689 bp, Homo sapiens; identical to SEQ ID NO: 291456
  chr16:30596384-30597073
  hypo

SEQ ID NO: 445200 - DNA, 38 bp, Homo sapiens; identical to SEQ ID NO: 269110
  chr16:30609413-30609451
  hypo

SEQ ID NO: 445201 - DNA, 47 bp, Homo sapiens; identical to SEQ ID NO: 269112
  chr16:30737305-30737352
  hypo

SEQ ID NO: 445202 - DNA, 115 bp, Homo sapiens; identical to SEQ ID NO: 216909
  chr16:30780232-30780347
  hypo

SEQ ID NO: 445203 - DNA, 56 bp, Homo sapiens; identical to SEQ ID NO: 216910
  chr16:30784032-30784088
  hypo

SEQ ID NO: 445204 - DNA, 100 bp, Homo sapiens; identical to SEQ ID NO: 216911
  chr16:30794665-30794765
  hypo

SEQ ID NO: 445205 - DNA, 41 bp, Homo sapiens; identical to SEQ ID NO: 269119
  chr16:30831399-30831440
  hypo

SEQ ID NO: 445206 - DNA, 47 bp, Homo sapiens; identical to SEQ ID NO: 216913
  chr16:30835266-30835313
  hypo

SEQ ID NO: 445207 - DNA, 660 bp, Homo sapiens; identical to SEQ ID NO: 269122
  chr16:30845547-30846207
  hypo

SEQ ID NO: 445208 - DNA, 153 bp, Homo sapiens; identical to SEQ ID NO: 225049
  chr16:30905625-30905778
  hypo

SEQ ID NO: 445209 - DNA, 42 bp, Homo sapiens; identical to SEQ ID NO: 269124
  chr16:30938666-30938708
  hypo

SEQ ID NO: 445210 - DNA, 146 bp, Homo sapiens; identical to SEQ ID NO: 269125
  chr16:30939038-30939184
  hypo

SEQ ID NO: 445211 - DNA, 198 bp, Homo sapiens; identical to SEQ ID NO: 269126
  chr16:30939779-30939977
  hypo

SEQ ID NO: 445212 - DNA, 458 bp, Homo sapiens; identical to SEQ ID NO: 269127
  chr16:30958051-30958509
  hypo

SEQ ID NO: 445213 - DNA, 267 bp, Homo sapiens; identical to SEQ ID NO: 291472
  chr16:30964613-30964880
  hypo

SEQ ID NO: 445214 - DNA, 64 bp, Homo sapiens; identical to SEQ ID NO: 216919
  chr16:30968112-30968176
  hypo

SEQ ID NO: 445215 - DNA, 226 bp, Homo sapiens; identical to SEQ ID NO: 269130
  chr16:30991260-30991486
  hypo

SEQ ID NO: 445216 - DNA, 148 bp, Homo sapiens; identical to SEQ ID NO: 216920
  chr16:30993851-30993999
  hypo

SEQ ID NO: 445217 - DNA, 204 bp, Homo sapiens; identical to SEQ ID NO: 216921
  chr16:30995028-30995232
  hypo

SEQ ID NO: 445218 - DNA, 150 bp, Homo sapiens; identical to SEQ ID NO: 269134
  chr16:30999438-30999588
  hypo

SEQ ID NO: 445219 - DNA, 210 bp, Homo sapiens; identical to SEQ ID NO: 269135
  chr16:31000909-31001119
  hypo

SEQ ID NO: 445220 - DNA, 63 bp, Homo sapiens; identical to SEQ ID NO: 269136
  chr16:31009764-31009827
  hypo

SEQ ID NO: 445221 - DNA, 142 bp, Homo sapiens; identical to SEQ ID NO: 269137
  chr16:31012794-31012936
  hypo

SEQ ID NO: 445222 - DNA, 104 bp, Homo sapiens; identical to SEQ ID NO: 269138
  chr16:31013740-31013844
  hypo

SEQ ID NO: 445223 - DNA, 37 bp, Homo sapiens; identical to SEQ ID NO: 269139
  chr16:31039944-31039981
  hypo

SEQ ID NO: 445224 - DNA, 108 bp, Homo sapiens; identical to SEQ ID NO: 269140
  chr16:31073553-31073661
  hypo

SEQ ID NO: 445225 - DNA, 334 bp, Homo sapiens; identical to SEQ ID NO: 225052
  chr16:31075206-31075540
  hypo

SEQ ID NO: 445226 - DNA, 230 bp, Homo sapiens; identical to SEQ ID NO: 269141
  chr16:31099849-31100079
  hypo

SEQ ID NO: 445227 - DNA, 319 bp, Homo sapiens; identical to SEQ ID NO: 204175
  chr16:31117073-31117392
  hypo

SEQ ID NO: 445228 - DNA, 271 bp, Homo sapiens; identical to SEQ ID NO: 204176
  chr16:31153837-31154108
  hypo

SEQ ID NO: 445229 - DNA, 110 bp, Homo sapiens; identical to SEQ ID NO: 269145
  chr16:31384660-31384770
  hypo

SEQ ID NO: 445230 - DNA, 114 bp, Homo sapiens; identical to SEQ ID NO: 269146
  chr16:31415513-31415627
  hypo

SEQ ID NO: 445231 - DNA, 306 bp, Homo sapiens; identical to SEQ ID NO: 269147
  chr16:31422484-31422790
  hypo

SEQ ID NO: 445232 - DNA, 50 bp, Homo sapiens; identical to SEQ ID NO: 269148
  chr16:31438631-31438681
  hypo

SEQ ID NO: 445233 - DNA, 403 bp, Homo sapiens; identical to SEQ ID NO: 291484
  chr16:31453960-31454363
  hypo

SEQ ID NO: 445234 - DNA, 202 bp, Homo sapiens; identical to SEQ ID NO: 269150
  chr16:31464579-31464781
  hypo

SEQ ID NO: 445235 - DNA, 351 bp, Homo sapiens; identical to SEQ ID NO: 269151
  chr16:31475825-31476176
  hypo

SEQ ID NO: 445236 - DNA, 184 bp, Homo sapiens; identical to SEQ ID NO: 225056
  chr16:31487758-31487942
  hypo

SEQ ID NO: 445237 - DNA, 67 bp, Homo sapiens; identical to SEQ ID NO: 216931
  chr16:31497941-31498008
  hypo

SEQ ID NO: 445238 - DNA, 164 bp, Homo sapiens; identical to SEQ ID NO: 269155
  chr16:31508122-31508286
  hypo

SEQ ID NO: 445239 - DNA, 37 bp, Homo sapiens; identical to SEQ ID NO: 216934
  chr16:31557995-31558032
  hypo

SEQ ID NO: 445240 - DNA, 60 bp, Homo sapiens; identical to SEQ ID NO: 269157
  chr16:31607115-31607175
  hypo

SEQ ID NO: 445241 - DNA, 125 bp, Homo sapiens; identical to SEQ ID NO: 269158
  chr16:31725813-31725938
  hypo

SEQ ID NO: 445242 - DNA, 36 bp, Homo sapiens; identical to SEQ ID NO: 269160
  chr16:32649134-32649170
  hypo

SEQ ID NO: 445243 - DNA, 175 bp, Homo sapiens; identical to SEQ ID NO: 269161
  chr16:34986007-34986182
  hypo

SEQ ID NO: 445244 - DNA, 97 bp, Homo sapiens; identical to SEQ ID NO: 216936
  chr16:46717908-46718005
  hypo

SEQ ID NO: 445245 - DNA, 109 bp, Homo sapiens; identical to SEQ ID NO: 216937
  chr16:46781699-46781808
  hypo

SEQ ID NO: 445246 - DNA, 93 bp, Homo sapiens; identical to SEQ ID NO: 269167
  chr16:46941061-46941154
  hypo

SEQ ID NO: 445247 - DNA, 137 bp, Homo sapiens; identical to SEQ ID NO: 216939
  chr16:46945509-46945646
  hypo

SEQ ID NO: 445248 - DNA, 78 bp, Homo sapiens; identical to SEQ ID NO: 216940
  chr16:46952490-46952568
  hypo

SEQ ID NO: 445249 - DNA, 34 bp, Homo sapiens; identical to SEQ ID NO: 216941
  chr16:46992085-46992119
  hypo

SEQ ID NO: 445250 - DNA, 44 bp, Homo sapiens; identical to SEQ ID NO: 216942
  chr16:47001892-47001936
  hypo

SEQ ID NO: 445251 - DNA, 40 bp, Homo sapiens; identical to SEQ ID NO: 216944
  chr16:47288965-47289005
  hypo

SEQ ID NO: 445252 - DNA, 189 bp, Homo sapiens; identical to SEQ ID NO: 216945
  chr16:48177832-48178021
  hypo

SEQ ID NO: 445253 - DNA, 107 bp, Homo sapiens; identical to SEQ ID NO: 269174
  chr16:48209332-48209439
  hypo

SEQ ID NO: 445254 - DNA, 45 bp, Homo sapiens; identical to SEQ ID NO: 216946
  chr16:48290944-48290989
  hypo

SEQ ID NO: 445255 - DNA, 214 bp, Homo sapiens; identical to SEQ ID NO: 269176
  chr16:48291761-48291975
  hypo

SEQ ID NO: 445256 - DNA, 351 bp, Homo sapiens; identical to SEQ ID NO: 216947
  chr16:48381406-48381757
  hypo

SEQ ID NO: 445257 - DNA, 97 bp, Homo sapiens; identical to SEQ ID NO: 269178
  chr16:48420736-48420833
  hypo

SEQ ID NO: 445258 - DNA, 153 bp, Homo sapiens; identical to SEQ ID NO: 269179
  chr16:48530539-48530692
  hypo

SEQ ID NO: 445259 - DNA, 86 bp, Homo sapiens; identical to SEQ ID NO: 216948
  chr16:48530910-48530996
  hypo

SEQ ID NO: 445260 - DNA, 99 bp, Homo sapiens; identical to SEQ ID NO: 269181
  chr16:48535068-48535167
  hypo

SEQ ID NO: 445261 - DNA, 156 bp, Homo sapiens; identical to SEQ ID NO: 216949
  chr16:48577583-48577739
  hypo

SEQ ID NO: 445262 - DNA, 95 bp, Homo sapiens; identical to SEQ ID NO: 216950
  chr16:48641693-48641788
  hypo

SEQ ID NO: 445263 - DNA, 114 bp, Homo sapiens; identical to SEQ ID NO: 269186
  chr16:49465046-49465160
  hypo

SEQ ID NO: 445264 - DNA, 41 bp, Homo sapiens; identical to SEQ ID NO: 320737
  chr16:49577674-49577715
  hypo

SEQ ID NO: 445265 - DNA, 31 bp, Homo sapiens; identical to SEQ ID NO: 320738
  chr16:49577767-49577798
  hypo

SEQ ID NO: 445266 - DNA, 221 bp, Homo sapiens; identical to SEQ ID NO: 269188
  chr16:49670789-49671010
  hypo

SEQ ID NO: 445267 - DNA, 107 bp, Homo sapiens; identical to SEQ ID NO: 269189
  chr16:49671511-49671618
  hypo

SEQ ID NO: 445268 - DNA, 37 bp, Homo sapiens; identical to SEQ ID NO: 320741
  chr16:49671969-49672006
  hypo

SEQ ID NO: 445269 - DNA, 388 bp, Homo sapiens; identical to SEQ ID NO: 269191
  chr16:49672243-49672631
  hypo

SEQ ID NO: 445270 - DNA, 32 bp, Homo sapiens; identical to SEQ ID NO: 216951
  chr16:50218668-50218700
  hypo

SEQ ID NO: 445271 - DNA, 44 bp, Homo sapiens; identical to SEQ ID NO: 216952
  chr16:50227517-50227561
  hypo

SEQ ID NO: 445272 - DNA, 87 bp, Homo sapiens; identical to SEQ ID NO: 269196
  chr16:50272245-50272332
  hypo

SEQ ID NO: 445273 - DNA, 143 bp, Homo sapiens; identical to SEQ ID NO: 269197
  chr16:50285663-50285806
  hypo

SEQ ID NO: 445274 - DNA, 141 bp, Homo sapiens; identical to SEQ ID NO: 320750
  chr16:50336215-50336356
  hypo

SEQ ID NO: 445275 - DNA, 239 bp, Homo sapiens; identical to SEQ ID NO: 216956
  chr16:50336386-50336625
  hypo

SEQ ID NO: 445276 - DNA, 116 bp, Homo sapiens; identical to SEQ ID NO: 269200
  chr16:50346833-50346949
  hypo

SEQ ID NO: 445277 - DNA, 277 bp, Homo sapiens; identical to SEQ ID NO: 269201
  chr16:50425278-50425555
  hypo

SEQ ID NO: 445278 - DNA, 183 bp, Homo sapiens; identical to SEQ ID NO: 216957
  chr16:50633343-50633526
  hypo

SEQ ID NO: 445279 - DNA, 72 bp, Homo sapiens; identical to SEQ ID NO: 269203
  chr16:50666332-50666404
  hypo

SEQ ID NO: 445280 - DNA, 66 bp, Homo sapiens; identical to SEQ ID NO: 204188
  chr16:50773734-50773800
  hypo

SEQ ID NO: 445281 - DNA, 57 bp, Homo sapiens; identical to SEQ ID NO: 216959
  chr16:50897229-50897286
  hypo

SEQ ID NO: 445282 - DNA, 578 bp, Homo sapiens; identical to SEQ ID NO: 269205
  chr16:51025075-51025653
  hypo

SEQ ID NO: 445283 - DNA, 99 bp, Homo sapiens; identical to SEQ ID NO: 291516
  chr16:51189084-51189183
  hypo

SEQ ID NO: 445284 - DNA, 58 bp, Homo sapiens; identical to SEQ ID NO: 204191
  chr16:51189374-51189432
  hypo

SEQ ID NO: 445285 - DNA, 93 bp, Homo sapiens; identical to SEQ ID NO: 269206
  chr16:52498848-52498941
  hypo

SEQ ID NO: 445286 - DNA, 45 bp, Homo sapiens; identical to SEQ ID NO: 216962
  chr16:53448551-53448596
  hypo

SEQ ID NO: 445287 - DNA, 61 bp, Homo sapiens; identical to SEQ ID NO: 320764
  chr16:53467395-53467456
  hypo

SEQ ID NO: 445288 - DNA, 240 bp, Homo sapiens; identical to SEQ ID NO: 216964
  chr16:53659274-53659514
  hypo

SEQ ID NO: 445289 - DNA, 82 bp, Homo sapiens; identical to SEQ ID NO: 216965
  chr16:53825645-53825727
  hypo

SEQ ID NO: 445290 - DNA, 35 bp, Homo sapiens; identical to SEQ ID NO: 269214
  chr16:54198162-54198197
  hypo

SEQ ID NO: 445291 - DNA, 95 bp, Homo sapiens; identical to SEQ ID NO: 269215
  chr16:54441923-54442018
  hypo

SEQ ID NO: 445292 - DNA, 212 bp, Homo sapiens; identical to SEQ ID NO: 269216
  chr16:55052638-55052850
  hypo

SEQ ID NO: 445293 - DNA, 46 bp, Homo sapiens; identical to SEQ ID NO: 216967
  chr16:55053597-55053643
  hypo

SEQ ID NO: 445294 - DNA, 35 bp, Homo sapiens; identical to SEQ ID NO: 269218
  chr16:55215532-55215567
  hypo

SEQ ID NO: 445295 - DNA, 34 bp, Homo sapiens; identical to SEQ ID NO: 269219
  chr16:55215807-55215841
  hypo

SEQ ID NO: 445296 - DNA, 195 bp, Homo sapiens; identical to SEQ ID NO: 291546
  chr16:55362578-55362773
  hypo

SEQ ID NO: 445297 - DNA, 142 bp, Homo sapiens; identical to SEQ ID NO: 204212
  chr16:55513539-55513681
  hypo

SEQ ID NO: 445298 - DNA, 210 bp, Homo sapiens; identical to SEQ ID NO: 216969
  chr16:55739211-55739421
  hypo

SEQ ID NO: 445299 - DNA, 55 bp, Homo sapiens; identical to SEQ ID NO: 225070
  chr16:56227984-56228039
  hypo

SEQ ID NO: 445300 - DNA, 254 bp, Homo sapiens; identical to SEQ ID NO: 269221
  chr16:56309852-56310106
  hypo

SEQ ID NO: 445301 - DNA, 54 bp, Homo sapiens; identical to SEQ ID NO: 269222
  chr16:56345486-56345540
  hypo

SEQ ID NO: 445302 - DNA, 165 bp, Homo sapiens; identical to SEQ ID NO: 269224
  chr16:56368690-56368855
  hypo

SEQ ID NO: 445303 - DNA, 253 bp, Homo sapiens; identical to SEQ ID NO: 269225
  chr16:56370683-56370936
  hypo

SEQ ID NO: 445304 - DNA, 189 bp, Homo sapiens; identical to SEQ ID NO: 216975
  chr16:56398931-56399120
  hypo

SEQ ID NO: 445305 - DNA, 194 bp, Homo sapiens; identical to SEQ ID NO: 269228
  chr16:56407221-56407415
  hypo

SEQ ID NO: 445306 - DNA, 217 bp, Homo sapiens; identical to SEQ ID NO: 291563
  chr16:56642231-56642448
  hypo

SEQ ID NO: 445307 - DNA, 74 bp, Homo sapiens; identical to SEQ ID NO: 269230
  chr16:56812017-56812091
  hypo

SEQ ID NO: 445308 - DNA, 311 bp, Homo sapiens; identical to SEQ ID NO: 216978
  chr16:56857408-56857719
  hypo

SEQ ID NO: 445309 - DNA, 40 bp, Homo sapiens; identical to SEQ ID NO: 269233
  chr16:56869746-56869786
  hypo

SEQ ID NO: 445310 - DNA, 43 bp, Homo sapiens; identical to SEQ ID NO: 269234
  chr16:56902581-56902624
  hypo

SEQ ID NO: 445311 - DNA, 266 bp, Homo sapiens; identical to SEQ ID NO: 216979
  chr16:56928223-56928489
  hypo

SEQ ID NO: 445312 - DNA, 78 bp, Homo sapiens; identical to SEQ ID NO: 269236
  chr16:56951555-56951633
  hypo

SEQ ID NO: 445313 - DNA, 39 bp, Homo sapiens; identical to SEQ ID NO: 269237
  chr16:56953540-56953579
  hypo

SEQ ID NO: 445314 - DNA, 360 bp, Homo sapiens; identical to SEQ ID NO: 291576
  chr16:57126699-57127059
  hypo

SEQ ID NO: 445315 - DNA, 168 bp, Homo sapiens; identical to SEQ ID NO: 269239
  chr16:57289764-57289932
  hypo

SEQ ID NO: 445316 - DNA, 373 bp, Homo sapiens; identical to SEQ ID NO: 269240
  chr16:57298909-57299282
  hypo

SEQ ID NO: 445317 - DNA, 94 bp, Homo sapiens; identical to SEQ ID NO: 269241
  chr16:57304016-57304110
  hypo

SEQ ID NO: 445318 - DNA, 84 bp, Homo sapiens; identical to SEQ ID NO: 269242
  chr16:57304959-57305043
  hypo

SEQ ID NO: 445319 - DNA, 31 bp, Homo sapiens; identical to SEQ ID NO: 216981
  chr16:57326589-57326620
  hypo

SEQ ID NO: 445320 - DNA, 316 bp, Homo sapiens; identical to SEQ ID NO: 269244
  chr16:57416036-57416352
  hypo

SEQ ID NO: 445321 - DNA, 274 bp, Homo sapiens; identical to SEQ ID NO: 269245
  chr16:57537288-57537562
  hypo

SEQ ID NO: 445322 - DNA, 188 bp, Homo sapiens; identical to SEQ ID NO: 269247
  chr16:57601801-57601989
  hypo

SEQ ID NO: 445323 - DNA, 59 bp, Homo sapiens; identical to SEQ ID NO: 269248
  chr16:57657365-57657424
  hypo

SEQ ID NO: 445324 - DNA, 108 bp, Homo sapiens; identical to SEQ ID NO: 269249
  chr16:57674290-57674398
  hypo

SEQ ID NO: 445325 - DNA, 57 bp, Homo sapiens; identical to SEQ ID NO: 269250
  chr16:57686683-57686740
  hypo

SEQ ID NO: 445326 - DNA, 101 bp, Homo sapiens; identical to SEQ ID NO: 216983
  chr16:57697546-57697647
  hypo

SEQ ID NO: 445327 - DNA, 224 bp, Homo sapiens; identical to SEQ ID NO: 216984
  chr16:57734046-57734270
  hypo

SEQ ID NO: 445328 - DNA, 75 bp, Homo sapiens; identical to SEQ ID NO: 269253
  chr16:57737538-57737613
  hypo

SEQ ID NO: 445329 - DNA, 207 bp, Homo sapiens; identical to SEQ ID NO: 269254
  chr16:57759978-57760185
  hypo

SEQ ID NO: 445330 - DNA, 338 bp, Homo sapiens; identical to SEQ ID NO: 320821
  chr16:57935116-57935454
  hypo

SEQ ID NO: 445331 - DNA, 48 bp, Homo sapiens; identical to SEQ ID NO: 320822
  chr16:57935605-57935653
  hypo

SEQ ID NO: 445332 - DNA, 749 bp, Homo sapiens; identical to SEQ ID NO: 291587
  chr16:58059829-58060578
  hypo

SEQ ID NO: 445333 - DNA, 147 bp, Homo sapiens; identical to SEQ ID NO: 269258
  chr16:58062996-58063143
  hypo

SEQ ID NO: 445334 - DNA, 67 bp, Homo sapiens; identical to SEQ ID NO: 216988
  chr16:58076202-58076269
  hypo

SEQ ID NO: 445335 - DNA, 151 bp, Homo sapiens; identical to SEQ ID NO: 269260
  chr16:58077138-58077289
  hypo

SEQ ID NO: 445336 - DNA, 212 bp, Homo sapiens; identical to SEQ ID NO: 269262
  chr16:58119931-58120143
  hypo

SEQ ID NO: 445337 - DNA, 124 bp, Homo sapiens; identical to SEQ ID NO: 204230
  chr16:58426260-58426384
  hypo

SEQ ID NO: 445338 - DNA, 133 bp, Homo sapiens; identical to SEQ ID NO: 216991
  chr16:61615418-61615551
  hypo

SEQ ID NO: 445339 - DNA, 290 bp, Homo sapiens; identical to SEQ ID NO: 269269
  chr16:66420654-66420944
  hypo

SEQ ID NO: 445340 - DNA, 127 bp, Homo sapiens; identical to SEQ ID NO: 291603
  chr16:66461989-66462116
  hypo

SEQ ID NO: 445341 - DNA, 161 bp, Homo sapiens; identical to SEQ ID NO: 269270
  chr16:66514521-66514682
  hypo

SEQ ID NO: 445342 - DNA, 116 bp, Homo sapiens; identical to SEQ ID NO: 269271
  chr16:66542831-66542947
  hypo

SEQ ID NO: 445343 - DNA, 159 bp, Homo sapiens; identical to SEQ ID NO: 269272
  chr16:66579299-66579458
  hypo

SEQ ID NO: 445344 - DNA, 618 bp, Homo sapiens; identical to SEQ ID NO: 269273
  chr16:66600011-66600629
  hypo

SEQ ID NO: 445345 - DNA, 74 bp, Homo sapiens; identical to SEQ ID NO: 320844
  chr16:66652463-66652537
  hypo

SEQ ID NO: 445346 - DNA, 173 bp, Homo sapiens; identical to SEQ ID NO: 29297
  chr16:66652773-66652946
  hypo

SEQ ID NO: 445347 - DNA, 316 bp, Homo sapiens; identical to SEQ ID NO: 291606
  chr16:66730083-66730399
  hypo

SEQ ID NO: 445348 - DNA, 64 bp, Homo sapiens; identical to SEQ ID NO: 269275
  chr16:66752187-66752251
  hypo

SEQ ID NO: 445349 - DNA, 180 bp, Homo sapiens; identical to SEQ ID NO: 216996
  chr16:66781286-66781466
  hypo

SEQ ID NO: 445350 - DNA, 757 bp, Homo sapiens; identical to SEQ ID NO: 269277
  chr16:66835306-66836063
  hypo

SEQ ID NO: 445351 - DNA, 81 bp, Homo sapiens; identical to SEQ ID NO: 216998
  chr16:66942966-66943047
  hypo

SEQ ID NO: 445352 - DNA, 246 bp, Homo sapiens; identical to SEQ ID NO: 291609
  chr16:66959003-66959249
  hypo

SEQ ID NO: 445353 - DNA, 120 bp, Homo sapiens; identical to SEQ ID NO: 269279
  chr16:66986333-66986453
  hypo

SEQ ID NO: 445354 - DNA, 43 bp, Homo sapiens; identical to SEQ ID NO: 269281
  chr16:67138796-67138839
  hypo

SEQ ID NO: 445355 - DNA, 203 bp, Homo sapiens; identical to SEQ ID NO: 291611
  chr16:67183854-67184057
  hypo

SEQ ID NO: 445356 - DNA, 208 bp, Homo sapiens; identical to SEQ ID NO: 269283
  chr16:67213017-67213225
  hypo

SEQ ID NO: 445357 - DNA, 101 bp, Homo sapiens; identical to SEQ ID NO: 269285
  chr16:67222915-67223016
  hypo

SEQ ID NO: 445358 - DNA, 251 bp, Homo sapiens; identical to SEQ ID NO: 269286
  chr16:67235496-67235747
  hypo

SEQ ID NO: 445359 - DNA, 32 bp, Homo sapiens; identical to SEQ ID NO: 269287
  chr16:67241298-67241330
  hypo

SEQ ID NO: 445360 - DNA, 231 bp, Homo sapiens; identical to SEQ ID NO: 217005
  chr16:67270958-67271189
  hypo

SEQ ID NO: 445361 - DNA, 215 bp, Homo sapiens; identical to SEQ ID NO: 204249
  chr16:67280008-67280223
  hypo

SEQ ID NO: 445362 - DNA, 457 bp, Homo sapiens; identical to SEQ ID NO: 204251
  chr16:67281140-67281597
  hypo

SEQ ID NO: 445363 - DNA, 69 bp, Homo sapiens; identical to SEQ ID NO: 269291
  chr16:67337018-67337087
  hypo

SEQ ID NO: 445364 - DNA, 368 bp, Homo sapiens; identical to SEQ ID NO: 217008
  chr16:67469689-67470057
  hypo

SEQ ID NO: 445365 - DNA, 49 bp, Homo sapiens; identical to SEQ ID NO: 217009
  chr16:67470488-67470537
  hypo

SEQ ID NO: 445366 - DNA, 122 bp, Homo sapiens; identical to SEQ ID NO: 217010
  chr16:67470863-67470985
  hypo

SEQ ID NO: 445367 - DNA, 79 bp, Homo sapiens; identical to SEQ ID NO: 217011
  chr16:67472275-67472354
  hypo

SEQ ID NO: 445368 - DNA, 218 bp, Homo sapiens; identical to SEQ ID NO: 269297
  chr16:67478341-67478559
  hypo

SEQ ID NO: 445369 - DNA, 41 bp, Homo sapiens; identical to SEQ ID NO: 217013
  chr16:67511577-67511618
  hypo

SEQ ID NO: 445370 - DNA, 64 bp, Homo sapiens; identical to SEQ ID NO: 217014
  chr16:67518130-67518194
  hypo

SEQ ID NO: 445371 - DNA, 201 bp, Homo sapiens; identical to SEQ ID NO: 225094
  chr16:67563142-67563343
  hypo

SEQ ID NO: 445372 - DNA, 65 bp, Homo sapiens; identical to SEQ ID NO: 225095
  chr16:67563576-67563641
  hypo

SEQ ID NO: 445373 - DNA, 145 bp, Homo sapiens; identical to SEQ ID NO: 225096
  chr16:67564103-67564248
  hypo

SEQ ID NO: 445374 - DNA, 467 bp, Homo sapiens; identical to SEQ ID NO: 291636
  chr16:67571536-67572003
  hypo

SEQ ID NO: 445375 - DNA, 66 bp, Homo sapiens; identical to SEQ ID NO: 269300
  chr16:67574479-67574545
  hypo

SEQ ID NO: 445376 - DNA, 119 bp, Homo sapiens; identical to SEQ ID NO: 291638
  chr16:67700713-67700832
  hypo

SEQ ID NO: 445377 - DNA, 271 bp, Homo sapiens; identical to SEQ ID NO: 291639
  chr16:67701091-67701362
  hypo

SEQ ID NO: 445378 - DNA, 99 bp, Homo sapiens; identical to SEQ ID NO: 269304
  chr16:67848821-67848920
  hypo

SEQ ID NO: 445379 - DNA, 202 bp, Homo sapiens; identical to SEQ ID NO: 217018
  chr16:67920022-67920224
  hypo

SEQ ID NO: 445380 - DNA, 140 bp, Homo sapiens; identical to SEQ ID NO: 217019
  chr16:67965742-67965882
  hypo

SEQ ID NO: 445381 - DNA, 39 bp, Homo sapiens; identical to SEQ ID NO: 269308
  chr16:68250713-68250752
  hypo

SEQ ID NO: 445382 - DNA, 57 bp, Homo sapiens; identical to SEQ ID NO: 204267
  chr16:68298829-68298886
  hypo

SEQ ID NO: 445383 - DNA, 810 bp, Homo sapiens; identical to SEQ ID NO: 53222
  chr16:68481955-68482765
  hypo

SEQ ID NO: 445384 - DNA, 260 bp, Homo sapiens; identical to SEQ ID NO: 269311
  chr16:68525540-68525800
  hypo

SEQ ID NO: 445385 - DNA, 231 bp, Homo sapiens; identical to SEQ ID NO: 269312
  chr16:68526075-68526306
  hypo

SEQ ID NO: 445386 - DNA, 91 bp, Homo sapiens; identical to SEQ ID NO: 225106
  chr16:68564224-68564315
  hypo

SEQ ID NO: 445387 - DNA, 35 bp, Homo sapiens; identical to SEQ ID NO: 269313
  chr16:68697407-68697442
  hypo

SEQ ID NO: 445388 - DNA, 191 bp, Homo sapiens; identical to SEQ ID NO: 217030
  chr16:68737004-68737195
  hypo

SEQ ID NO: 445389 - DNA, 34 bp, Homo sapiens; identical to SEQ ID NO: 217031
  chr16:68739594-68739628
  hypo

SEQ ID NO: 445390 - DNA, 120 bp, Homo sapiens; identical to SEQ ID NO: 217032
  chr16:68743256-68743376
  hypo

SEQ ID NO: 445391 - DNA, 45 bp, Homo sapiens; identical to SEQ ID NO: 269317
  chr16:68755703-68755748
  hypo

SEQ ID NO: 445392 - DNA, 88 bp, Homo sapiens; identical to SEQ ID NO: 269319
  chr16:68782327-68782415
  hypo

SEQ ID NO: 445393 - DNA, 37 bp, Homo sapiens; identical to SEQ ID NO: 269320
  chr16:68838288-68838325
  hypo

SEQ ID NO: 445394 - DNA, 167 bp, Homo sapiens; identical to SEQ ID NO: 217033
  chr16:68849366-68849533
  hypo

SEQ ID NO: 445395 - DNA, 140 bp, Homo sapiens; identical to SEQ ID NO: 269322
  chr16:68854968-68855108
  hypo

SEQ ID NO: 445396 - DNA, 224 bp, Homo sapiens; identical to SEQ ID NO: 269323
  chr16:68856757-68856981
  hypo

SEQ ID NO: 445397 - DNA, 82 bp, Homo sapiens; identical to SEQ ID NO: 217035
  chr16:68876700-68876782
  hypo

SEQ ID NO: 445398 - DNA, 77 bp, Homo sapiens; identical to SEQ ID NO: 217036
  chr16:68942210-68942287
  hypo

SEQ ID NO: 445399 - DNA, 34 bp, Homo sapiens; identical to SEQ ID NO: 269326
  chr16:69077094-69077128
  hypo

SEQ ID NO: 445400 - DNA, 134 bp, Homo sapiens; identical to SEQ ID NO: 217037
  chr16:69129258-69129392
  hypo

SEQ ID NO: 445401 - DNA, 45 bp, Homo sapiens; identical to SEQ ID NO: 217038
  chr16:69133540-69133585
  hypo

SEQ ID NO: 445402 - DNA, 45 bp, Homo sapiens; identical to SEQ ID NO: 217039
  chr16:69133633-69133678
  hypo

SEQ ID NO: 445403 - DNA, 251 bp, Homo sapiens; identical to SEQ ID NO: 269329
  chr16:69134520-69134771
  hypo

SEQ ID NO: 445404 - DNA, 963 bp, Homo sapiens; identical to SEQ ID NO: 291667
  chr16:69139582-69140545
  hypo

SEQ ID NO: 445405 - DNA, 278 bp, Homo sapiens; identical to SEQ ID NO: 269331
  chr16:69264949-69265227
  hypo

SEQ ID NO: 445406 - DNA, 35 bp, Homo sapiens; identical to SEQ ID NO: 269333
  chr16:69344404-69344439
  hypo

SEQ ID NO: 445407 - DNA, 34 bp, Homo sapiens; identical to SEQ ID NO: 269334
  chr16:69344499-69344533
  hypo

SEQ ID NO: 445408 - DNA, 33 bp, Homo sapiens; identical to SEQ ID NO: 217041
  chr16:69352180-69352213
  hypo

SEQ ID NO: 445409 - DNA, 126 bp, Homo sapiens; identical to SEQ ID NO: 217046
  chr16:69358551-69358677
  hypo

SEQ ID NO: 445410 - DNA, 89 bp, Homo sapiens; identical to SEQ ID NO: 204274
  chr16:69373055-69373144
  hypo

SEQ ID NO: 445411 - DNA, 100 bp, Homo sapiens; identical to SEQ ID NO: 269339
  chr16:69391672-69391772
  hypo

SEQ ID NO: 445412 - DNA, 32 bp, Homo sapiens; identical to SEQ ID NO: 269340
  chr16:69397588-69397620
  hypo

SEQ ID NO: 445413 - DNA, 36 bp, Homo sapiens; identical to SEQ ID NO: 217049
  chr16:69439224-69439260
  hypo

SEQ ID NO: 445414 - DNA, 230 bp, Homo sapiens; identical to SEQ ID NO: 269342
  chr16:69446265-69446495
  hypo

SEQ ID NO: 445415 - DNA, 84 bp, Homo sapiens; identical to SEQ ID NO: 217050
  chr16:69495121-69495205
  hypo

SEQ ID NO: 445416 - DNA, 145 bp, Homo sapiens; identical to SEQ ID NO: 269344
  chr16:69557041-69557186
  hypo

SEQ ID NO: 445417 - DNA, 275 bp, Homo sapiens; identical to SEQ ID NO: 217051
  chr16:69557609-69557884
  hypo

SEQ ID NO: 445418 - DNA, 134 bp, Homo sapiens; identical to SEQ ID NO: 269346
  chr16:69560823-69560957
  hypo

SEQ ID NO: 445419 - DNA, 41 bp, Homo sapiens; identical to SEQ ID NO: 269347
  chr16:69613048-69613089
  hypo

SEQ ID NO: 445420 - DNA, 38 bp, Homo sapiens; identical to SEQ ID NO: 217052
  chr16:69642741-69642779
  hypo

SEQ ID NO: 445421 - DNA, 240 bp, Homo sapiens; identical to SEQ ID NO: 217053
  chr16:69757714-69757954
  hypo

SEQ ID NO: 445422 - DNA, 87 bp, Homo sapiens; identical to SEQ ID NO: 269350
  chr16:69759428-69759515
  hypo

SEQ ID NO: 445423 - DNA, 240 bp, Homo sapiens; identical to SEQ ID NO: 217054
  chr16:69761437-69761677
  hypo

SEQ ID NO: 445424 - DNA, 182 bp, Homo sapiens; identical to SEQ ID NO: 217055
  chr16:69825950-69826132
  hypo

SEQ ID NO: 445425 - DNA, 159 bp, Homo sapiens; identical to SEQ ID NO: 269357
  chr16:69955523-69955682
  hypo

SEQ ID NO: 445426 - DNA, 150 bp, Homo sapiens; identical to SEQ ID NO: 217061
  chr16:70151413-70151563
  hypo

SEQ ID NO: 445427 - DNA, 160 bp, Homo sapiens; identical to SEQ ID NO: 269359
  chr16:70185997-70186157
  hypo

SEQ ID NO: 445428 - DNA, 289 bp, Homo sapiens; identical to SEQ ID NO: 217062
  chr16:70196488-70196777
  hypo

SEQ ID NO: 445429 - DNA, 130 bp, Homo sapiens; identical to SEQ ID NO: 217063
  chr16:70286315-70286445
  hypo

SEQ ID NO: 445430 - DNA, 176 bp, Homo sapiens; identical to SEQ ID NO: 217064
  chr16:70328602-70328778
  hypo

SEQ ID NO: 445431 - DNA, 54 bp, Homo sapiens; identical to SEQ ID NO: 217065
  chr16:70399211-70399265
  hypo

SEQ ID NO: 445432 - DNA, 55 bp, Homo sapiens; identical to SEQ ID NO: 269365
  chr16:70442006-70442061
  hypo

SEQ ID NO: 445433 - DNA, 46 bp, Homo sapiens; identical to SEQ ID NO: 269366
  chr16:70442308-70442354
  hypo

SEQ ID NO: 445434 - DNA, 376 bp, Homo sapiens; identical to SEQ ID NO: 204275
  chr16:70472227-70472603
  hypo

SEQ ID NO: 445435 - DNA, 120 bp, Homo sapiens; identical to SEQ ID NO: 269367
  chr16:70479294-70479414
  hypo

SEQ ID NO: 445436 - DNA, 50 bp, Homo sapiens; identical to SEQ ID NO: 217067
  chr16:70507080-70507130
  hypo

SEQ ID NO: 445437 - DNA, 40 bp, Homo sapiens; identical to SEQ ID NO: 217068
  chr16:70508778-70508818
  hypo

SEQ ID NO: 445438 - DNA, 102 bp, Homo sapiens; identical to SEQ ID NO: 217069
  chr16:70595195-70595297
  hypo

SEQ ID NO: 445439 - DNA, 432 bp, Homo sapiens; identical to SEQ ID NO: 269372
  chr16:70680609-70681041
  hypo

SEQ ID NO: 445440 - DNA, 349 bp, Homo sapiens; identical to SEQ ID NO: 269373
  chr16:70727987-70728336
  hypo

SEQ ID NO: 445441 - DNA, 187 bp, Homo sapiens; identical to SEQ ID NO: 269374
  chr16:70754253-70754440
  hypo

SEQ ID NO: 445442 - DNA, 148 bp, Homo sapiens; identical to SEQ ID NO: 217072
  chr16:70783611-70783759
  hypo

SEQ ID NO: 445443 - DNA, 116 bp, Homo sapiens; identical to SEQ ID NO: 269378
  chr16:70795368-70795484
  hypo

SEQ ID NO: 445444 - DNA, 37 bp, Homo sapiens; identical to SEQ ID NO: 269379
  chr16:70796478-70796515
  hypo

SEQ ID NO: 445445 - DNA, 96 bp, Homo sapiens; identical to SEQ ID NO: 269382
  chr16:70829399-70829495
  hypo

SEQ ID NO: 445446 - DNA, 45 bp, Homo sapiens; identical to SEQ ID NO: 217075
  chr16:71324585-71324630
  hypo

SEQ ID NO: 445447 - DNA, 182 bp, Homo sapiens; identical to SEQ ID NO: 269384
  chr16:71537485-71537667
  hypo

SEQ ID NO: 445448 - DNA, 92 bp, Homo sapiens; identical to SEQ ID NO: 269385
  chr16:71661396-71661488
  hypo

SEQ ID NO: 445449 - DNA, 148 bp, Homo sapiens; identical to SEQ ID NO: 269386
  chr16:71674493-71674641
  hypo

SEQ ID NO: 445450 - DNA, 42 bp, Homo sapiens; identical to SEQ ID NO: 217077
  chr16:71716353-71716395
  hypo

SEQ ID NO: 445451 - DNA, 136 bp, Homo sapiens; identical to SEQ ID NO: 217078
  chr16:71748846-71748982
  hypo

SEQ ID NO: 445452 - DNA, 35 bp, Homo sapiens; identical to SEQ ID NO: 269391
  chr16:71756040-71756075
  hypo

SEQ ID NO: 445453 - DNA, 89 bp, Homo sapiens; identical to SEQ ID NO: 269393
  chr16:71878716-71878805
  hypo

SEQ ID NO: 445454 - DNA, 230 bp, Homo sapiens; identical to SEQ ID NO: 269394
  chr16:71894094-71894324
  hypo

SEQ ID NO: 445455 - DNA, 34 bp, Homo sapiens; identical to SEQ ID NO: 269395
  chr16:71948332-71948366
  hypo

SEQ ID NO: 445456 - DNA, 38 bp, Homo sapiens; identical to SEQ ID NO: 269396
  chr16:72018727-72018765
  hypo

SEQ ID NO: 445457 - DNA, 32 bp, Homo sapiens; identical to SEQ ID NO: 269397
  chr16:72032871-72032903
  hypo

SEQ ID NO: 445458 - DNA, 333 bp, Homo sapiens; identical to SEQ ID NO: 217083
  chr16:72461254-72461587
  hypo

SEQ ID NO: 445459 - DNA, 81 bp, Homo sapiens; identical to SEQ ID NO: 217084
  chr16:72461701-72461782
  hypo

SEQ ID NO: 445460 - DNA, 208 bp, Homo sapiens; identical to SEQ ID NO: 204280
  chr16:72699010-72699218
  hypo

SEQ ID NO: 445461 - DNA, 148 bp, Homo sapiens; identical to SEQ ID NO: 269401
  chr16:72906617-72906765
  hypo

SEQ ID NO: 445462 - DNA, 198 bp, Homo sapiens; identical to SEQ ID NO: 269402
  chr16:72916141-72916339
  hypo

SEQ ID NO: 445463 - DNA, 115 bp, Homo sapiens; identical to SEQ ID NO: 217086
  chr16:72945691-72945806
  hypo

SEQ ID NO: 445464 - DNA, 212 bp, Homo sapiens; identical to SEQ ID NO: 217087
  chr16:72949233-72949445
  hypo

SEQ ID NO: 445465 - DNA, 118 bp, Homo sapiens; identical to SEQ ID NO: 217088
  chr16:72957814-72957932
  hypo

SEQ ID NO: 445466 - DNA, 174 bp, Homo sapiens; identical to SEQ ID NO: 269406
  chr16:72958495-72958669
  hypo

SEQ ID NO: 445467 - DNA, 410 bp, Homo sapiens; identical to SEQ ID NO: 269407
  chr16:72958709-72959119
  hypo

SEQ ID NO: 445468 - DNA, 67 bp, Homo sapiens; identical to SEQ ID NO: 321008
  chr16:72963492-72963559
  hypo

SEQ ID NO: 445469 - DNA, 101 bp, Homo sapiens; identical to SEQ ID NO: 217089
  chr16:72984703-72984804
  hypo

SEQ ID NO: 445470 - DNA, 413 bp, Homo sapiens; identical to SEQ ID NO: 269410
  chr16:72991203-72991616
  hypo

SEQ ID NO: 445471 - DNA, 1013 bp, Homo sapiens; identical to SEQ ID NO: 269412
  chr16:72993525-72994538
  hypo

SEQ ID NO: 445472 - DNA, 192 bp, Homo sapiens; identical to SEQ ID NO: 269413
  chr16:72997030-72997222
  hypo

SEQ ID NO: 445473 - DNA, 86 bp, Homo sapiens; identical to SEQ ID NO: 217092
  chr16:73007796-73007882
  hypo

SEQ ID NO: 445474 - DNA, 96 bp, Homo sapiens; identical to SEQ ID NO: 269415
  chr16:73029802-73029898
  hypo

SEQ ID NO: 445475 - DNA, 47 bp, Homo sapiens; identical to SEQ ID NO: 269416
  chr16:73047783-73047830
  hypo

SEQ ID NO: 445476 - DNA, 334 bp, Homo sapiens; identical to SEQ ID NO: 291692
  chr16:73091551-73091885
  hypo

SEQ ID NO: 445477 - DNA, 217 bp, Homo sapiens; identical to SEQ ID NO: 53263
  chr16:73091900-73092117
  hypo

SEQ ID NO: 445478 - DNA, 166 bp, Homo sapiens; identical to SEQ ID NO: 291694
  chr16:73092380-73092546
  hypo

SEQ ID NO: 445479 - DNA, 94 bp, Homo sapiens; identical to SEQ ID NO: 217095
  chr16:73208571-73208665
  hypo

SEQ ID NO: 445480 - DNA, 36 bp, Homo sapiens; identical to SEQ ID NO: 269418
  chr16:73222730-73222766
  hypo

SEQ ID NO: 445481 - DNA, 211 bp, Homo sapiens; identical to SEQ ID NO: 269419
  chr16:73675853-73676064
  hypo

SEQ ID NO: 445482 - DNA, 35 bp, Homo sapiens; identical to SEQ ID NO: 269420
  chr16:74408512-74408547
  hypo

SEQ ID NO: 445483 - DNA, 89 bp, Homo sapiens; identical to SEQ ID NO: 217096
  chr16:74490377-74490466
  hypo

SEQ ID NO: 445484 - DNA, 45 bp, Homo sapiens; identical to SEQ ID NO: 269422
  chr16:74511568-74511613
  hypo

SEQ ID NO: 445485 - DNA, 43 bp, Homo sapiens; identical to SEQ ID NO: 269423
  chr16:74540183-74540226
  hypo

SEQ ID NO: 445486 - DNA, 205 bp, Homo sapiens; identical to SEQ ID NO: 269424
  chr16:74554955-74555160
  hypo

SEQ ID NO: 445487 - DNA, 32 bp, Homo sapiens; identical to SEQ ID NO: 217098
  chr16:74694094-74694126
  hypo

SEQ ID NO: 445488 - DNA, 32 bp, Homo sapiens; identical to SEQ ID NO: 217099
  chr16:74694366-74694398
  hypo

SEQ ID NO: 445489 - DNA, 435 bp, Homo sapiens; identical to SEQ ID NO: 269428
  chr16:74752677-74753112
  hypo

SEQ ID NO: 445490 - DNA, 79 bp, Homo sapiens; identical to SEQ ID NO: 225115
  chr16:74808949-74809028
  hypo

SEQ ID NO: 445491 - DNA, 149 bp, Homo sapiens; identical to SEQ ID NO: 269430
  chr16:74872626-74872775
  hypo

SEQ ID NO: 445492 - DNA, 146 bp, Homo sapiens; identical to SEQ ID NO: 269432
  chr16:74901700-74901846
  hypo

SEQ ID NO: 445493 - DNA, 94 bp, Homo sapiens; identical to SEQ ID NO: 411032
  chr16:74908780-74908874
  hypo

SEQ ID NO: 445494 - DNA, 103 bp, Homo sapiens; identical to SEQ ID NO: 269434
  chr16:74917222-74917325
  hypo

SEQ ID NO: 445495 - DNA, 40 bp, Homo sapiens; identical to SEQ ID NO: 204287
  chr16:75018963-75019003
  hypo

SEQ ID NO: 445496 - DNA, 43 bp, Homo sapiens; identical to SEQ ID NO: 217106
  chr16:75057287-75057330
  hypo

SEQ ID NO: 445497 - DNA, 32 bp, Homo sapiens; identical to SEQ ID NO: 269438
  chr16:75075662-75075694
  hypo

SEQ ID NO: 445498 - DNA, 44 bp, Homo sapiens; identical to SEQ ID NO: 217107
  chr16:75113037-75113081
  hypo

SEQ ID NO: 445499 - DNA, 44 bp, Homo sapiens; identical to SEQ ID NO: 217108
  chr16:75113381-75113425
  hypo

SEQ ID NO: 445500 - DNA, 40 bp, Homo sapiens; identical to SEQ ID NO: 217109
  chr16:75113750-75113790
  hypo

SEQ ID NO: 445501 - DNA, 297 bp, Homo sapiens; identical to SEQ ID NO: 217112
  chr16:75138821-75139118
  hypo

SEQ ID NO: 445502 - DNA, 154 bp, Homo sapiens; identical to SEQ ID NO: 321052
  chr16:75226944-75227098
  hypo

SEQ ID NO: 445503 - DNA, 65 bp, Homo sapiens; identical to SEQ ID NO: 321053
  chr16:75227128-75227193
  hypo

SEQ ID NO: 445504 - DNA, 95 bp, Homo sapiens; identical to SEQ ID NO: 269449
  chr16:75258689-75258784
  hypo

SEQ ID NO: 445505 - DNA, 307 bp, Homo sapiens; identical to SEQ ID NO: 291712
  chr16:75299751-75300058
  hypo

SEQ ID NO: 445506 - DNA, 44 bp, Homo sapiens; identical to SEQ ID NO: 269454
  chr16:75479780-75479824
  hypo

SEQ ID NO: 445507 - DNA, 76 bp, Homo sapiens; identical to SEQ ID NO: 217117
  chr16:75495229-75495305
  hypo

SEQ ID NO: 445508 - DNA, 457 bp, Homo sapiens; identical to SEQ ID NO: 269456
  chr16:75513119-75513576
  hypo

SEQ ID NO: 445509 - DNA, 34 bp, Homo sapiens; identical to SEQ ID NO: 269457
  chr16:75527396-75527430
  hypo

SEQ ID NO: 445510 - DNA, 176 bp, Homo sapiens; identical to SEQ ID NO: 291713
  chr16:75529727-75529903
  hypo

SEQ ID NO: 445511 - DNA, 404 bp, Homo sapiens; identical to SEQ ID NO: 269459
  chr16:75563100-75563504
  hypo

SEQ ID NO: 445512 - DNA, 138 bp, Homo sapiens; identical to SEQ ID NO: 217120
  chr16:75606235-75606373
  hypo

SEQ ID NO: 445513 - DNA, 88 bp, Homo sapiens; identical to SEQ ID NO: 217121
  chr16:75622685-75622773
  hypo

SEQ ID NO: 445514 - DNA, 580 bp, Homo sapiens; identical to SEQ ID NO: 217123
  chr16:77228259-77228839
  hypo

SEQ ID NO: 445515 - DNA, 43 bp, Homo sapiens; identical to SEQ ID NO: 217124
  chr16:77229453-77229496
  hypo

SEQ ID NO: 445516 - DNA, 370 bp, Homo sapiens; identical to SEQ ID NO: 269465
  chr16:77232998-77233368
  hypo

SEQ ID NO: 445517 - DNA, 255 bp, Homo sapiens; identical to SEQ ID NO: 291722
  chr16:77747179-77747434
  hypo

SEQ ID NO: 445518 - DNA, 44 bp, Homo sapiens; identical to SEQ ID NO: 291725
  chr16:78139958-78140002
  hypo

SEQ ID NO: 445519 - DNA, 33 bp, Homo sapiens; identical to SEQ ID NO: 217132
  chr16:78159169-78159202
  hypo

SEQ ID NO: 445520 - DNA, 32 bp, Homo sapiens; identical to SEQ ID NO: 225129
  chr16:78425003-78425035
  hypo

SEQ ID NO: 445521 - DNA, 206 bp, Homo sapiens; identical to SEQ ID NO: 269473
  chr16:78519525-78519731
  hypo

SEQ ID NO: 445522 - DNA, 103 bp, Homo sapiens; identical to SEQ ID NO: 204305
  chr16:79636191-79636294
  hypo

SEQ ID NO: 445523 - DNA, 115 bp, Homo sapiens; identical to SEQ ID NO: 399976
  chr16:79804693-79804808
  hypo

SEQ ID NO: 445524 - DNA, 76 bp, Homo sapiens; identical to SEQ ID NO: 217134
  chr16:80641602-80641678
  hypo

SEQ ID NO: 445525 - DNA, 225 bp, Homo sapiens; identical to SEQ ID NO: 321087
  chr16:80641903-80642128
  hypo

SEQ ID NO: 445526 - DNA, 38 bp, Homo sapiens; identical to SEQ ID NO: 217135
  chr16:80654697-80654735
  hypo

SEQ ID NO: 445527 - DNA, 158 bp, Homo sapiens; identical to SEQ ID NO: 269478
  chr16:80714339-80714497
  hypo

SEQ ID NO: 445528 - DNA, 36 bp, Homo sapiens; identical to SEQ ID NO: 269479
  chr16:80931968-80932004
  hypo

SEQ ID NO: 445529 - DNA, 134 bp, Homo sapiens; identical to SEQ ID NO: 269481
  chr16:81087464-81087598
  hypo

SEQ ID NO: 445530 - DNA, 115 bp, Homo sapiens; identical to SEQ ID NO: 269482
  chr16:81309505-81309620
  hypo

SEQ ID NO: 445531 - DNA, 198 bp, Homo sapiens; identical to SEQ ID NO: 217137
  chr16:81315519-81315717
  hypo

SEQ ID NO: 445532 - DNA, 201 bp, Homo sapiens; identical to SEQ ID NO: 217138
  chr16:81323324-81323525
  hypo

SEQ ID NO: 445533 - DNA, 191 bp, Homo sapiens; identical to SEQ ID NO: 269485
  chr16:81335173-81335364
  hypo

SEQ ID NO: 445534 - DNA, 41 bp, Homo sapiens; identical to SEQ ID NO: 217139
  chr16:81453688-81453729
  hypo

SEQ ID NO: 445535 - DNA, 188 bp, Homo sapiens; identical to SEQ ID NO: 217140
  chr16:81492930-81493118
  hypo

SEQ ID NO: 445536 - DNA, 42 bp, Homo sapiens; identical to SEQ ID NO: 269489
  chr16:81493362-81493404
  hypo

SEQ ID NO: 445537 - DNA, 250 bp, Homo sapiens; identical to SEQ ID NO: 217141
  chr16:81505617-81505867
  hypo

SEQ ID NO: 445538 - DNA, 113 bp, Homo sapiens; identical to SEQ ID NO: 269491
  chr16:81520548-81520661
  hypo

SEQ ID NO: 445539 - DNA, 317 bp, Homo sapiens; identical to SEQ ID NO: 269493
  chr16:81556854-81557171
  hypo

SEQ ID NO: 445540 - DNA, 102 bp, Homo sapiens; identical to SEQ ID NO: 321106
  chr16:81557201-81557303
  hypo

SEQ ID NO: 445541 - DNA, 253 bp, Homo sapiens; identical to SEQ ID NO: 217144
  chr16:81557355-81557608
  hypo

SEQ ID NO: 445542 - DNA, 31 bp, Homo sapiens; identical to SEQ ID NO: 269498
  chr16:81581959-81581990
  hypo

SEQ ID NO: 445543 - DNA, 262 bp, Homo sapiens; identical to SEQ ID NO: 269499
  chr16:81620081-81620343
  hypo

SEQ ID NO: 445544 - DNA, 46 bp, Homo sapiens; identical to SEQ ID NO: 269502
  chr16:81654530-81654576
  hypo

SEQ ID NO: 445545 - DNA, 44 bp, Homo sapiens; identical to SEQ ID NO: 269503
  chr16:81655118-81655162
  hypo

SEQ ID NO: 445546 - DNA, 108 bp, Homo sapiens; identical to SEQ ID NO: 269504
  chr16:81655707-81655815
  hypo

SEQ ID NO: 445547 - DNA, 142 bp, Homo sapiens; identical to SEQ ID NO: 217152
  chr16:81684997-81685139
  hypo

SEQ ID NO: 445548 - DNA, 164 bp, Homo sapiens; identical to SEQ ID NO: 269508
  chr16:81700317-81700481
  hypo

SEQ ID NO: 445549 - DNA, 453 bp, Homo sapiens; identical to SEQ ID NO: 269511
  chr16:81737255-81737708
  hypo

SEQ ID NO: 445550 - DNA, 359 bp, Homo sapiens; identical to SEQ ID NO: 269512
  chr16:81741576-81741935
  hypo

SEQ ID NO: 445551 - DNA, 377 bp, Homo sapiens; identical to SEQ ID NO: 269514
  chr16:81924958-81925335
  hypo

SEQ ID NO: 445552 - DNA, 197 bp, Homo sapiens; identical to SEQ ID NO: 269516
  chr16:81942077-81942274
  hypo

SEQ ID NO: 445553 - DNA, 173 bp, Homo sapiens; identical to SEQ ID NO: 269517
  chr16:81958725-81958898
  hypo

SEQ ID NO: 445554 - DNA, 207 bp, Homo sapiens; identical to SEQ ID NO: 217153
  chr16:82172390-82172597
  hypo

SEQ ID NO: 445555 - DNA, 44 bp, Homo sapiens; identical to SEQ ID NO: 269519
  chr16:83862928-83862972
  hypo

SEQ ID NO: 445556 - DNA, 453 bp, Homo sapiens; identical to SEQ ID NO: 217154
  chr16:83863590-83864043
  hypo

SEQ ID NO: 445557 - DNA, 150 bp, Homo sapiens; identical to SEQ ID NO: 217155
  chr16:83941759-83941909
  hypo

SEQ ID NO: 445558 - DNA, 383 bp, Homo sapiens; identical to SEQ ID NO: 269523
  chr16:83945610-83945993
  hypo

SEQ ID NO: 445559 - DNA, 468 bp, Homo sapiens; identical to SEQ ID NO: 269524
  chr16:83957599-83958067
  hypo

SEQ ID NO: 445560 - DNA, 127 bp, Homo sapiens; identical to SEQ ID NO: 321140
  chr16:83969106-83969233
  hypo

SEQ ID NO: 445561 - DNA, 41 bp, Homo sapiens; identical to SEQ ID NO: 217157
  chr16:83999491-83999532
  hypo

SEQ ID NO: 445562 - DNA, 39 bp, Homo sapiens; identical to SEQ ID NO: 217158
  chr16:84004407-84004446
  hypo

SEQ ID NO: 445563 - DNA, 180 bp, Homo sapiens; identical to SEQ ID NO: 269529
  chr16:84017889-84018069
  hypo

SEQ ID NO: 445564 - DNA, 74 bp, Homo sapiens; identical to SEQ ID NO: 321144
  chr16:84074762-84074836
  hypo

SEQ ID NO: 445565 - DNA, 87 bp, Homo sapiens; identical to SEQ ID NO: 321145
  chr16:84074871-84074958
  hypo

SEQ ID NO: 445566 - DNA, 152 bp, Homo sapiens; identical to SEQ ID NO: 269531
  chr16:84085875-84086027
  hypo

SEQ ID NO: 445567 - DNA, 242 bp, Homo sapiens; identical to SEQ ID NO: 321147
  chr16:84129122-84129364
  hypo

SEQ ID NO: 445568 - DNA, 81 bp, Homo sapiens; identical to SEQ ID NO: 321148
  chr16:84129394-84129475
  hypo

SEQ ID NO: 445569 - DNA, 55 bp, Homo sapiens; identical to SEQ ID NO: 386778
  chr16:84132212-84132267
  hypo

SEQ ID NO: 445570 - DNA, 236 bp, Homo sapiens; identical to SEQ ID NO: 269534
  chr16:84153001-84153237
  hypo

SEQ ID NO: 445571 - DNA, 156 bp, Homo sapiens; identical to SEQ ID NO: 269536
  chr16:84191396-84191552
  hypo

SEQ ID NO: 445572 - DNA, 208 bp, Homo sapiens; identical to SEQ ID NO: 269537
  chr16:84224887-84225095
  hypo

SEQ ID NO: 445573 - DNA, 150 bp, Homo sapiens; identical to SEQ ID NO: 269538
  chr16:84270371-84270521
  hypo

SEQ ID NO: 445574 - DNA, 194 bp, Homo sapiens; identical to SEQ ID NO: 269539
  chr16:84296330-84296524
  hypo

SEQ ID NO: 445575 - DNA, 195 bp, Homo sapiens; identical to SEQ ID NO: 269540
  chr16:84343757-84343952
  hypo

SEQ ID NO: 445576 - DNA, 113 bp, Homo sapiens; identical to SEQ ID NO: 217160
  chr16:84423862-84423975
  hypo

SEQ ID NO: 445577 - DNA, 133 bp, Homo sapiens; identical to SEQ ID NO: 269543
  chr16:84496272-84496405
  hypo

SEQ ID NO: 445578 - DNA, 273 bp, Homo sapiens; identical to SEQ ID NO: 269544
  chr16:84535207-84535480
  hypo

SEQ ID NO: 445579 - DNA, 212 bp, Homo sapiens; identical to SEQ ID NO: 217164
  chr16:84535780-84535992
  hypo

SEQ ID NO: 445580 - DNA, 255 bp, Homo sapiens; identical to SEQ ID NO: 269546
  chr16:84537368-84537623
  hypo

SEQ ID NO: 445581 - DNA, 32 bp, Homo sapiens; identical to SEQ ID NO: 269547
  chr16:84553146-84553178
  hypo

SEQ ID NO: 445582 - DNA, 139 bp, Homo sapiens; identical to SEQ ID NO: 217165
  chr16:84593079-84593218
  hypo

SEQ ID NO: 445583 - DNA, 104 bp, Homo sapiens; identical to SEQ ID NO: 269549
  chr16:84602924-84603028
  hypo

SEQ ID NO: 445584 - DNA, 388 bp, Homo sapiens; identical to SEQ ID NO: 269550
  chr16:84607793-84608181
  hypo

SEQ ID NO: 445585 - DNA, 58 bp, Homo sapiens; identical to SEQ ID NO: 321168
  chr16:84617727-84617785
  hypo

SEQ ID NO: 445586 - DNA, 254 bp, Homo sapiens; identical to SEQ ID NO: 269552
  chr16:84683895-84684149
  hypo

SEQ ID NO: 445587 - DNA, 218 bp, Homo sapiens; identical to SEQ ID NO: 269553
  chr16:84695419-84695637
  hypo

SEQ ID NO: 445588 - DNA, 102 bp, Homo sapiens; identical to SEQ ID NO: 269554
  chr16:84717283-84717385
  hypo

SEQ ID NO: 445589 - DNA, 41 bp, Homo sapiens; identical to SEQ ID NO: 269555
  chr16:84735938-84735979
  hypo

SEQ ID NO: 445590 - DNA, 185 bp, Homo sapiens; identical to SEQ ID NO: 217167
  chr16:84749467-84749652
  hypo

SEQ ID NO: 445591 - DNA, 231 bp, Homo sapiens; identical to SEQ ID NO: 269558
  chr16:84800549-84800780
  hypo

SEQ ID NO: 445592 - DNA, 450 bp, Homo sapiens; identical to SEQ ID NO: 269562
  chr16:84824664-84825114
  hypo

SEQ ID NO: 445593 - DNA, 69 bp, Homo sapiens; identical to SEQ ID NO: 269563
  chr16:84868032-84868101
  hypo

SEQ ID NO: 445594 - DNA, 148 bp, Homo sapiens; identical to SEQ ID NO: 269564
  chr16:84886291-84886439
  hypo

SEQ ID NO: 445595 - DNA, 158 bp, Homo sapiens; identical to SEQ ID NO: 269565
  chr16:84904248-84904406
  hypo

SEQ ID NO: 445596 - DNA, 45 bp, Homo sapiens; identical to SEQ ID NO: 269566
  chr16:84954215-84954260
  hypo

SEQ ID NO: 445597 - DNA, 182 bp, Homo sapiens; identical to SEQ ID NO: 217171
  chr16:84965070-84965252
  hypo

SEQ ID NO: 445598 - DNA, 198 bp, Homo sapiens; identical to SEQ ID NO: 269568
  chr16:84974274-84974472
  hypo

SEQ ID NO: 445599 - DNA, 277 bp, Homo sapiens; identical to SEQ ID NO: 269569
  chr16:84987803-84988080
  hypo

SEQ ID NO: 445600 - DNA, 41 bp, Homo sapiens; identical to SEQ ID NO: 269570
  chr16:84997910-84997951
  hypo

SEQ ID NO: 445601 - DNA, 102 bp, Homo sapiens; identical to SEQ ID NO: 217174
  chr16:85001517-85001619
  hypo

SEQ ID NO: 445602 - DNA, 82 bp, Homo sapiens; identical to SEQ ID NO: 217175
  chr16:85001679-85001761
  hypo

SEQ ID NO: 445603 - DNA, 143 bp, Homo sapiens; identical to SEQ ID NO: 217177
  chr16:85008291-85008434
  hypo

SEQ ID NO: 445604 - DNA, 186 bp, Homo sapiens; identical to SEQ ID NO: 269575
  chr16:85008678-85008864
  hypo

SEQ ID NO: 445605 - DNA, 341 bp, Homo sapiens; identical to SEQ ID NO: 269576
  chr16:85009390-85009731
  hypo

SEQ ID NO: 445606 - DNA, 118 bp, Homo sapiens; identical to SEQ ID NO: 269578
  chr16:85011214-85011332
  hypo

SEQ ID NO: 445607 - DNA, 120 bp, Homo sapiens; identical to SEQ ID NO: 269579
  chr16:85013863-85013983
  hypo

SEQ ID NO: 445608 - DNA, 97 bp, Homo sapiens; identical to SEQ ID NO: 269580
  chr16:85015385-85015482
  hypo

SEQ ID NO: 445609 - DNA, 458 bp, Homo sapiens; identical to SEQ ID NO: 269581
  chr16:85019752-85020210
  hypo

SEQ ID NO: 445610 - DNA, 143 bp, Homo sapiens; identical to SEQ ID NO: 269582
  chr16:85024470-85024613
  hypo

SEQ ID NO: 445611 - DNA, 93 bp, Homo sapiens; identical to SEQ ID NO: 269583
  chr16:85026076-85026169
  hypo

SEQ ID NO: 445612 - DNA, 147 bp, Homo sapiens; identical to SEQ ID NO: 269585
  chr16:85029250-85029397
  hypo

SEQ ID NO: 445613 - DNA, 42 bp, Homo sapiens; identical to SEQ ID NO: 269586
  chr16:85030031-85030073
  hypo

SEQ ID NO: 445614 - DNA, 39 bp, Homo sapiens; identical to SEQ ID NO: 269587
  chr16:85032152-85032191
  hypo

SEQ ID NO: 445615 - DNA, 85 bp, Homo sapiens; identical to SEQ ID NO: 217180
  chr16:85033742-85033827
  hypo

SEQ ID NO: 445616 - DNA, 85 bp, Homo sapiens; identical to SEQ ID NO: 269589
  chr16:85037000-85037085
  hypo

SEQ ID NO: 445617 - DNA, 97 bp, Homo sapiens; identical to SEQ ID NO: 225138
  chr16:85143894-85143991
  hypo

SEQ ID NO: 445618 - DNA, 46 bp, Homo sapiens; identical to SEQ ID NO: 217182
  chr16:85147115-85147161
  hypo

SEQ ID NO: 445619 - DNA, 162 bp, Homo sapiens; identical to SEQ ID NO: 269592
  chr16:85151028-85151190
  hypo

SEQ ID NO: 445620 - DNA, 208 bp, Homo sapiens; identical to SEQ ID NO: 217183
  chr16:85196722-85196930
  hypo

SEQ ID NO: 445621 - DNA, 173 bp, Homo sapiens; identical to SEQ ID NO: 217184
  chr16:85214271-85214444
  hypo

SEQ ID NO: 445622 - DNA, 374 bp, Homo sapiens; identical to SEQ ID NO: 269595
  chr16:85216377-85216751
  hypo

SEQ ID NO: 445623 - DNA, 88 bp, Homo sapiens; identical to SEQ ID NO: 269596
  chr16:85241883-85241971
  hypo

SEQ ID NO: 445624 - DNA, 200 bp, Homo sapiens; identical to SEQ ID NO: 217185
  chr16:85245559-85245759
  hypo

SEQ ID NO: 445625 - DNA, 45 bp, Homo sapiens; identical to SEQ ID NO: 269598
  chr16:85283528-85283573
  hypo

SEQ ID NO: 445626 - DNA, 187 bp, Homo sapiens; identical to SEQ ID NO: 269599
  chr16:85305676-85305863
  hypo

SEQ ID NO: 445627 - DNA, 43 bp, Homo sapiens; identical to SEQ ID NO: 269600
  chr16:85305893-85305936
  hypo

SEQ ID NO: 445628 - DNA, 53 bp, Homo sapiens; identical to SEQ ID NO: 321222
  chr16:85317797-85317850
  hypo

SEQ ID NO: 445629 - DNA, 107 bp, Homo sapiens; identical to SEQ ID NO: 321223
  chr16:85317882-85317989
  hypo

SEQ ID NO: 445630 - DNA, 214 bp, Homo sapiens; identical to SEQ ID NO: 321224
  chr16:85318221-85318435
  hypo

SEQ ID NO: 445631 - DNA, 84 bp, Homo sapiens; identical to SEQ ID NO: 217187
  chr16:85321496-85321580
  hypo

SEQ ID NO: 445632 - DNA, 169 bp, Homo sapiens; identical to SEQ ID NO: 217188
  chr16:85327232-85327401
  hypo

SEQ ID NO: 445633 - DNA, 172 bp, Homo sapiens; identical to SEQ ID NO: 269606
  chr16:85329623-85329795
  hypo

SEQ ID NO: 445634 - DNA, 44 bp, Homo sapiens; identical to SEQ ID NO: 217189
  chr16:85332745-85332789
  hypo

SEQ ID NO: 445635 - DNA, 95 bp, Homo sapiens; identical to SEQ ID NO: 217190
  chr16:85336635-85336730
  hypo

SEQ ID NO: 445636 - DNA, 194 bp, Homo sapiens; identical to SEQ ID NO: 269610
  chr16:85351334-85351528
  hypo

SEQ ID NO: 445637 - DNA, 83 bp, Homo sapiens; identical to SEQ ID NO: 269611
  chr16:85369411-85369494
  hypo

SEQ ID NO: 445638 - DNA, 208 bp, Homo sapiens; identical to SEQ ID NO: 269612
  chr16:85377785-85377993
  hypo

SEQ ID NO: 445639 - DNA, 157 bp, Homo sapiens; identical to SEQ ID NO: 269613
  chr16:85389787-85389944
  hypo

SEQ ID NO: 445640 - DNA, 36 bp, Homo sapiens; identical to SEQ ID NO: 217191
  chr16:85399704-85399740
  hypo

SEQ ID NO: 445641 - DNA, 48 bp, Homo sapiens; identical to SEQ ID NO: 217192
  chr16:85399770-85399818
  hypo

SEQ ID NO: 445642 - DNA, 161 bp, Homo sapiens; identical to SEQ ID NO: 217194
  chr16:85410442-85410603
  hypo

SEQ ID NO: 445643 - DNA, 153 bp, Homo sapiens; identical to SEQ ID NO: 217195
  chr16:85417768-85417921
  hypo

SEQ ID NO: 445644 - DNA, 116 bp, Homo sapiens; identical to SEQ ID NO: 217196
  chr16:85423785-85423901
  hypo

SEQ ID NO: 445645 - DNA, 171 bp, Homo sapiens; identical to SEQ ID NO: 217197
  chr16:85426317-85426488
  hypo

SEQ ID NO: 445646 - DNA, 111 bp, Homo sapiens; identical to SEQ ID NO: 217198
  chr16:85428081-85428192
  hypo

SEQ ID NO: 445647 - DNA, 285 bp, Homo sapiens; identical to SEQ ID NO: 269621
  chr16:85428653-85428938
  hypo

SEQ ID NO: 445648 - DNA, 94 bp, Homo sapiens; identical to SEQ ID NO: 217199
  chr16:85432465-85432559
  hypo

SEQ ID NO: 445649 - DNA, 144 bp, Homo sapiens; identical to SEQ ID NO: 269624
  chr16:85454710-85454854
  hypo

SEQ ID NO: 445650 - DNA, 32 bp, Homo sapiens; identical to SEQ ID NO: 269625
  chr16:85457902-85457934
  hypo

SEQ ID NO: 445651 - DNA, 38 bp, Homo sapiens; identical to SEQ ID NO: 269626
  chr16:85458421-85458459
  hypo

SEQ ID NO: 445652 - DNA, 137 bp, Homo sapiens; identical to SEQ ID NO: 269630
  chr16:85492605-85492742
  hypo

SEQ ID NO: 445653 - DNA, 148 bp, Homo sapiens; identical to SEQ ID NO: 217203
  chr16:85497297-85497445
  hypo

SEQ ID NO: 445654 - DNA, 130 bp, Homo sapiens; identical to SEQ ID NO: 217204
  chr16:85497475-85497605
  hypo

SEQ ID NO: 445655 - DNA, 148 bp, Homo sapiens; identical to SEQ ID NO: 269633
  chr16:85498783-85498931
  hypo

SEQ ID NO: 445656 - DNA, 59 bp, Homo sapiens; identical to SEQ ID NO: 269634
  chr16:85506194-85506253
  hypo

SEQ ID NO: 445657 - DNA, 141 bp, Homo sapiens; identical to SEQ ID NO: 269636
  chr16:85520266-85520407
  hypo

SEQ ID NO: 445658 - DNA, 41 bp, Homo sapiens; identical to SEQ ID NO: 217207
  chr16:85523184-85523225
  hypo

SEQ ID NO: 445659 - DNA, 413 bp, Homo sapiens; identical to SEQ ID NO: 269638
  chr16:85529540-85529953
  hypo

SEQ ID NO: 445660 - DNA, 107 bp, Homo sapiens; identical to SEQ ID NO: 217209
  chr16:85535588-85535695
  hypo

SEQ ID NO: 445661 - DNA, 173 bp, Homo sapiens; identical to SEQ ID NO: 321265
  chr16:85537318-85537491
  hypo

SEQ ID NO: 445662 - DNA, 321 bp, Homo sapiens; identical to SEQ ID NO: 217211
  chr16:85541368-85541689
  hypo

SEQ ID NO: 445663 - DNA, 196 bp, Homo sapiens; identical to SEQ ID NO: 217212
  chr16:85543126-85543322
  hypo

SEQ ID NO: 445664 - DNA, 70 bp, Homo sapiens; identical to SEQ ID NO: 269643
  chr16:85543643-85543713
  hypo

SEQ ID NO: 445665 - DNA, 279 bp, Homo sapiens; identical to SEQ ID NO: 269644
  chr16:85554503-85554782
  hypo

SEQ ID NO: 445666 - DNA, 133 bp, Homo sapiens; identical to SEQ ID NO: 269645
  chr16:85555419-85555552
  hypo

SEQ ID NO: 445667 - DNA, 281 bp, Homo sapiens; identical to SEQ ID NO: 269646
  chr16:85566453-85566734
  hypo

SEQ ID NO: 445668 - DNA, 279 bp, Homo sapiens; identical to SEQ ID NO: 423632
  chr16:85589833-85590112
  hypo

SEQ ID NO: 445669 - DNA, 521 bp, Homo sapiens; identical to SEQ ID NO: 269648
  chr16:85616219-85616740
  hypo

SEQ ID NO: 445670 - DNA, 70 bp, Homo sapiens; identical to SEQ ID NO: 269651
  chr16:85643877-85643947
  hypo

SEQ ID NO: 445671 - DNA, 63 bp, Homo sapiens; identical to SEQ ID NO: 269652
  chr16:85644011-85644074
  hypo

SEQ ID NO: 445672 - DNA, 528 bp, Homo sapiens; identical to SEQ ID NO: 269653
  chr16:85661248-85661776
  hypo

SEQ ID NO: 445673 - DNA, 280 bp, Homo sapiens; identical to SEQ ID NO: 321281
  chr16:85672904-85673184
  hypo

SEQ ID NO: 445674 - DNA, 74 bp, Homo sapiens; identical to SEQ ID NO: 217223
  chr16:85678761-85678835
  hypo

SEQ ID NO: 445675 - DNA, 337 bp, Homo sapiens; identical to SEQ ID NO: 269661
  chr16:85682220-85682557
  hypo

SEQ ID NO: 445676 - DNA, 433 bp, Homo sapiens; identical to SEQ ID NO: 269662
  chr16:85682761-85683194
  hypo

SEQ ID NO: 445677 - DNA, 88 bp, Homo sapiens; identical to SEQ ID NO: 217226
  chr16:85683224-85683312
  hypo

SEQ ID NO: 445678 - DNA, 82 bp, Homo sapiens; identical to SEQ ID NO: 217228
  chr16:85693857-85693939
  hypo

SEQ ID NO: 445679 - DNA, 79 bp, Homo sapiens; identical to SEQ ID NO: 217230
  chr16:85704416-85704495
  hypo

SEQ ID NO: 445680 - DNA, 234 bp, Homo sapiens; identical to SEQ ID NO: 269671
  chr16:85743824-85744058
  hypo

SEQ ID NO: 445681 - DNA, 60 bp, Homo sapiens; identical to SEQ ID NO: 269672
  chr16:85847019-85847079
  hypo

SEQ ID NO: 445682 - DNA, 137 bp, Homo sapiens; identical to SEQ ID NO: 269673
  chr16:85849284-85849421
  hypo

SEQ ID NO: 445683 - DNA, 37 bp, Homo sapiens; identical to SEQ ID NO: 269674
  chr16:85954880-85954917
  hypo

SEQ ID NO: 445684 - DNA, 420 bp, Homo sapiens; identical to SEQ ID NO: 269675
  chr16:85966401-85966821
  hypo

SEQ ID NO: 445685 - DNA, 215 bp, Homo sapiens; identical to SEQ ID NO: 269676
  chr16:85985997-85986212
  hypo

SEQ ID NO: 445686 - DNA, 297 bp, Homo sapiens; identical to SEQ ID NO: 269677
  chr16:86096353-86096650
  hypo

SEQ ID NO: 445687 - DNA, 163 bp, Homo sapiens; identical to SEQ ID NO: 217233
  chr16:86101896-86102059
  hypo

SEQ ID NO: 445688 - DNA, 266 bp, Homo sapiens; identical to SEQ ID NO: 217234
  chr16:86102114-86102380
  hypo

SEQ ID NO: 445689 - DNA, 109 bp, Homo sapiens; identical to SEQ ID NO: 269679
  chr16:86244209-86244318
  hypo

SEQ ID NO: 445690 - DNA, 357 bp, Homo sapiens; identical to SEQ ID NO: 269680
  chr16:86560978-86561335
  hypo

SEQ ID NO: 445691 - DNA, 48 bp, Homo sapiens; identical to SEQ ID NO: 269681
  chr16:86561824-86561872
  hypo

SEQ ID NO: 445692 - DNA, 122 bp, Homo sapiens; identical to SEQ ID NO: 269682
  chr16:86562411-86562533
  hypo

SEQ ID NO: 445693 - DNA, 189 bp, Homo sapiens; identical to SEQ ID NO: 269683
  chr16:86570329-86570518
  hypo

SEQ ID NO: 445694 - DNA, 155 bp, Homo sapiens; identical to SEQ ID NO: 269685
  chr16:86740874-86741029
  hypo

SEQ ID NO: 445695 - DNA, 160 bp, Homo sapiens; identical to SEQ ID NO: 269686
  chr16:86741299-86741459
  hypo

SEQ ID NO: 445696 - DNA, 132 bp, Homo sapiens; identical to SEQ ID NO: 321317
  chr16:86878502-86878634
  hypo

SEQ ID NO: 445697 - DNA, 103 bp, Homo sapiens; identical to SEQ ID NO: 217237
  chr16:87022725-87022828
  hypo

SEQ ID NO: 445698 - DNA, 46 bp, Homo sapiens; identical to SEQ ID NO: 217238
  chr16:87092621-87092667
  hypo

SEQ ID NO: 445699 - DNA, 35 bp, Homo sapiens; identical to SEQ ID NO: 269691
  chr16:87146940-87146975
  hypo

SEQ ID NO: 445700 - DNA, 126 bp, Homo sapiens; identical to SEQ ID NO: 269693
  chr16:87177254-87177380
  hypo

SEQ ID NO: 445701 - DNA, 117 bp, Homo sapiens; identical to SEQ ID NO: 217239
  chr16:87219677-87219794
  hypo

SEQ ID NO: 445702 - DNA, 215 bp, Homo sapiens; identical to SEQ ID NO: 269696
  chr16:87249996-87250211
  hypo

SEQ ID NO: 445703 - DNA, 137 bp, Homo sapiens; identical to SEQ ID NO: 269697
  chr16:87250241-87250378
  hypo

SEQ ID NO: 445704 - DNA, 209 bp, Homo sapiens; identical to SEQ ID NO: 269698
  chr16:87289526-87289735
  hypo

SEQ ID NO: 445705 - DNA, 37 bp, Homo sapiens; identical to SEQ ID NO: 217240
  chr16:87310542-87310579
  hypo

SEQ ID NO: 445706 - DNA, 104 bp, Homo sapiens; identical to SEQ ID NO: 217241
  chr16:87391987-87392091
  hypo

SEQ ID NO: 445707 - DNA, 141 bp, Homo sapiens; identical to SEQ ID NO: 269703
  chr16:87420752-87420893
  hypo

SEQ ID NO: 445708 - DNA, 48 bp, Homo sapiens; identical to SEQ ID NO: 217244
  chr16:87443507-87443555
  hypo

SEQ ID NO: 445709 - DNA, 47 bp, Homo sapiens; identical to SEQ ID NO: 217246
  chr16:87447846-87447893
  hypo

SEQ ID NO: 445710 - DNA, 178 bp, Homo sapiens; identical to SEQ ID NO: 269707
  chr16:87465351-87465529
  hypo

SEQ ID NO: 445711 - DNA, 141 bp, Homo sapiens; identical to SEQ ID NO: 269708
  chr16:87465771-87465912
  hypo

SEQ ID NO: 445712 - DNA, 95 bp, Homo sapiens; identical to SEQ ID NO: 269710
  chr16:87493948-87494043
  hypo

SEQ ID NO: 445713 - DNA, 169 bp, Homo sapiens; identical to SEQ ID NO: 269712
  chr16:87625740-87625909
  hypo

SEQ ID NO: 445714 - DNA, 279 bp, Homo sapiens; identical to SEQ ID NO: 291794
  chr16:87635461-87635740
  hypo

SEQ ID NO: 445715 - DNA, 85 bp, Homo sapiens; identical to SEQ ID NO: 423646
  chr16:87635827-87635912
  hypo

SEQ ID NO: 445716 - DNA, 179 bp, Homo sapiens; identical to SEQ ID NO: 217252
  chr16:87681106-87681285
  hypo

SEQ ID NO: 445717 - DNA, 101 bp, Homo sapiens; identical to SEQ ID NO: 217253
  chr16:87681315-87681416
  hypo

SEQ ID NO: 445718 - DNA, 100 bp, Homo sapiens; identical to SEQ ID NO: 269715
  chr16:87724407-87724507
  hypo

SEQ ID NO: 445719 - DNA, 137 bp, Homo sapiens; identical to SEQ ID NO: 321354
  chr16:87740771-87740908
  hypo

SEQ ID NO: 445720 - DNA, 178 bp, Homo sapiens; identical to SEQ ID NO: 269720
  chr16:87756599-87756777
  hypo

SEQ ID NO: 445721 - DNA, 97 bp, Homo sapiens; identical to SEQ ID NO: 217257
  chr16:87782716-87782813
  hypo

SEQ ID NO: 445722 - DNA, 150 bp, Homo sapiens; identical to SEQ ID NO: 269723
  chr16:87784654-87784804
  hypo

SEQ ID NO: 445723 - DNA, 35 bp, Homo sapiens; identical to SEQ ID NO: 269724
  chr16:87807642-87807677
  hypo

SEQ ID NO: 445724 - DNA, 160 bp, Homo sapiens; identical to SEQ ID NO: 269725
  chr16:87856804-87856964
  hypo

SEQ ID NO: 445725 - DNA, 215 bp, Homo sapiens; identical to SEQ ID NO: 269727
  chr16:87874192-87874407
  hypo

SEQ ID NO: 445726 - DNA, 151 bp, Homo sapiens; identical to SEQ ID NO: 217259
  chr16:87895432-87895583
  hypo

SEQ ID NO: 445727 - DNA, 82 bp, Homo sapiens; identical to SEQ ID NO: 269729
  chr16:87911934-87912016
  hypo

SEQ ID NO: 445728 - DNA, 92 bp, Homo sapiens; identical to SEQ ID NO: 217260
  chr16:87916177-87916269
  hypo

SEQ ID NO: 445729 - DNA, 79 bp, Homo sapiens; identical to SEQ ID NO: 217261
  chr16:87916329-87916408
  hypo

SEQ ID NO: 445730 - DNA, 45 bp, Homo sapiens; identical to SEQ ID NO: 269732
  chr16:87934808-87934853
  hypo

SEQ ID NO: 445731 - DNA, 107 bp, Homo sapiens; identical to SEQ ID NO: 411166
  chr16:87962666-87962773
  hypo

SEQ ID NO: 445732 - DNA, 37 bp, Homo sapiens; identical to SEQ ID NO: 269734
  chr16:87983755-87983792
  hypo

SEQ ID NO: 445733 - DNA, 32 bp, Homo sapiens; identical to SEQ ID NO: 269735
  chr16:88004307-88004339
  hypo

SEQ ID NO: 445734 - DNA, 130 bp, Homo sapiens; identical to SEQ ID NO: 225161
  chr16:88031994-88032124
  hypo

SEQ ID NO: 445735 - DNA, 293 bp, Homo sapiens; identical to SEQ ID NO: 269737
  chr16:88047709-88048002
  hypo

SEQ ID NO: 445736 - DNA, 300 bp, Homo sapiens; identical to SEQ ID NO: 217263
  chr16:88049613-88049913
  hypo

SEQ ID NO: 445737 - DNA, 49 bp, Homo sapiens; identical to SEQ ID NO: 321379
  chr16:88056264-88056313
  hypo

SEQ ID NO: 445738 - DNA, 67 bp, Homo sapiens; identical to SEQ ID NO: 321380
  chr16:88056343-88056410
  hypo

SEQ ID NO: 445739 - DNA, 98 bp, Homo sapiens; identical to SEQ ID NO: 269741
  chr16:88056979-88057077
  hypo

SEQ ID NO: 445740 - DNA, 280 bp, Homo sapiens; identical to SEQ ID NO: 291802
  chr16:88060796-88061076
  hypo

SEQ ID NO: 445741 - DNA, 282 bp, Homo sapiens; identical to SEQ ID NO: 217264
  chr16:88073665-88073947
  hypo

SEQ ID NO: 445742 - DNA, 49 bp, Homo sapiens; identical to SEQ ID NO: 217265
  chr16:88078972-88079021
  hypo

SEQ ID NO: 445743 - DNA, 50 bp, Homo sapiens; identical to SEQ ID NO: 269744
  chr16:88084706-88084756
  hypo

SEQ ID NO: 445744 - DNA, 301 bp, Homo sapiens; identical to SEQ ID NO: 269747
  chr16:88097580-88097881
  hypo

SEQ ID NO: 445745 - DNA, 40 bp, Homo sapiens; identical to SEQ ID NO: 217269
  chr16:88106973-88107013
  hypo

SEQ ID NO: 445746 - DNA, 568 bp, Homo sapiens; identical to SEQ ID NO: 269751
  chr16:88109979-88110547
  hypo

SEQ ID NO: 445747 - DNA, 87 bp, Homo sapiens; identical to SEQ ID NO: 269753
  chr16:88151480-88151567
  hypo

SEQ ID NO: 445748 - DNA, 34 bp, Homo sapiens; identical to SEQ ID NO: 321397
  chr16:88164301-88164335
  hypo

SEQ ID NO: 445749 - DNA, 116 bp, Homo sapiens; identical to SEQ ID NO: 321398
  chr16:88164572-88164688
  hypo

SEQ ID NO: 445750 - DNA, 147 bp, Homo sapiens; identical to SEQ ID NO: 269755
  chr16:88233713-88233860
  hypo

SEQ ID NO: 445751 - DNA, 91 bp, Homo sapiens; identical to SEQ ID NO: 269756
  chr16:88237696-88237787
  hypo

SEQ ID NO: 445752 - DNA, 71 bp, Homo sapiens; identical to SEQ ID NO: 217272
  chr16:88260676-88260747
  hypo

SEQ ID NO: 445753 - DNA, 327 bp, Homo sapiens; identical to SEQ ID NO: 217273
  chr16:88338949-88339276
  hypo

SEQ ID NO: 445754 - DNA, 132 bp, Homo sapiens; identical to SEQ ID NO: 321403
  chr16:88356136-88356268
  hypo

SEQ ID NO: 445755 - DNA, 129 bp, Homo sapiens; identical to SEQ ID NO: 269760
  chr16:88361636-88361765
  hypo

SEQ ID NO: 445756 - DNA, 268 bp, Homo sapiens; identical to SEQ ID NO: 269762
  chr16:88385554-88385822
  hypo

SEQ ID NO: 445757 - DNA, 76 bp, Homo sapiens; identical to SEQ ID NO: 269763
  chr16:88442479-88442555
  hypo

SEQ ID NO: 445758 - DNA, 431 bp, Homo sapiens; identical to SEQ ID NO: 321409
  chr16:88460215-88460646
  hypo

SEQ ID NO: 445759 - DNA, 635 bp, Homo sapiens; identical to SEQ ID NO: 269766
  chr16:88479696-88480331
  hypo

SEQ ID NO: 445760 - DNA, 229 bp, Homo sapiens; identical to SEQ ID NO: 321411
  chr16:88480664-88480893
  hypo

SEQ ID NO: 445761 - DNA, 746 bp, Homo sapiens; identical to SEQ ID NO: 217276
  chr16:88480934-88481680
  hypo

SEQ ID NO: 445762 - DNA, 189 bp, Homo sapiens; identical to SEQ ID NO: 217277
  chr16:88493599-88493788
  hypo

SEQ ID NO: 445763 - DNA, 32 bp, Homo sapiens; identical to SEQ ID NO: 217278
  chr16:88498087-88498119
  hypo

SEQ ID NO: 445764 - DNA, 69 bp, Homo sapiens; identical to SEQ ID NO: 269772
  chr16:88501887-88501956
  hypo

SEQ ID NO: 445765 - DNA, 83 bp, Homo sapiens; identical to SEQ ID NO: 269775
  chr16:88513364-88513447
  hypo

SEQ ID NO: 445766 - DNA, 45 bp, Homo sapiens; identical to SEQ ID NO: 217281
  chr16:88537675-88537720
  hypo

SEQ ID NO: 445767 - DNA, 205 bp, Homo sapiens; identical to SEQ ID NO: 269777
  chr16:88538054-88538259
  hypo

SEQ ID NO: 445768 - DNA, 394 bp, Homo sapiens; identical to SEQ ID NO: 217282
  chr16:88545423-88545817
  hypo

SEQ ID NO: 445769 - DNA, 374 bp, Homo sapiens; identical to SEQ ID NO: 321422
  chr16:88547819-88548193
  hypo

SEQ ID NO: 445770 - DNA, 503 bp, Homo sapiens; identical to SEQ ID NO: 321423
  chr16:88550903-88551406
  hypo

SEQ ID NO: 445771 - DNA, 306 bp, Homo sapiens; identical to SEQ ID NO: 217284
  chr16:88551574-88551880
  hypo

SEQ ID NO: 445772 - DNA, 214 bp, Homo sapiens; identical to SEQ ID NO: 269782
  chr16:88596786-88597000
  hypo

SEQ ID NO: 445773 - DNA, 44 bp, Homo sapiens; identical to SEQ ID NO: 217285
  chr16:88642725-88642769
  hypo

SEQ ID NO: 445774 - DNA, 113 bp, Homo sapiens; identical to SEQ ID NO: 269785
  chr16:88644982-88645095
  hypo

SEQ ID NO: 445775 - DNA, 144 bp, Homo sapiens; identical to SEQ ID NO: 217286
  chr16:88645407-88645551
  hypo

SEQ ID NO: 445776 - DNA, 39 bp, Homo sapiens; identical to SEQ ID NO: 217287
  chr16:88647117-88647156
  hypo

SEQ ID NO: 445777 - DNA, 185 bp, Homo sapiens; identical to SEQ ID NO: 217288
  chr16:88647913-88648098
  hypo

SEQ ID NO: 445778 - DNA, 198 bp, Homo sapiens; identical to SEQ ID NO: 217289
  chr16:88649040-88649238
  hypo

SEQ ID NO: 445779 - DNA, 258 bp, Homo sapiens; identical to SEQ ID NO: 269790
  chr16:88664686-88664944
  hypo

SEQ ID NO: 445780 - DNA, 493 bp, Homo sapiens; identical to SEQ ID NO: 269791
  chr16:88673630-88674123
  hypo

SEQ ID NO: 445781 - DNA, 225 bp, Homo sapiens; identical to SEQ ID NO: 269792
  chr16:88683207-88683432
  hypo

SEQ ID NO: 445782 - DNA, 36 bp, Homo sapiens; identical to SEQ ID NO: 269794
  chr16:88684167-88684203
  hypo

SEQ ID NO: 445783 - DNA, 64 bp, Homo sapiens; identical to SEQ ID NO: 217291
  chr16:88689149-88689213
  hypo

SEQ ID NO: 445784 - DNA, 38 bp, Homo sapiens; identical to SEQ ID NO: 217292
  chr16:88690944-88690982
  hypo

SEQ ID NO: 445785 - DNA, 124 bp, Homo sapiens; identical to SEQ ID NO: 217293
  chr16:88698502-88698626
  hypo

SEQ ID NO: 445786 - DNA, 447 bp, Homo sapiens; identical to SEQ ID NO: 269799
  chr16:88702316-88702763
  hypo

SEQ ID NO: 445787 - DNA, 711 bp, Homo sapiens; identical to SEQ ID NO: 269800
  chr16:88711755-88712466
  hypo

SEQ ID NO: 445788 - DNA, 91 bp, Homo sapiens; identical to SEQ ID NO: 225166
  chr16:88721558-88721649
  hypo

SEQ ID NO: 445789 - DNA, 65 bp, Homo sapiens; identical to SEQ ID NO: 321443
  chr16:88722261-88722326
  hypo

SEQ ID NO: 445790 - DNA, 113 bp, Homo sapiens; identical to SEQ ID NO: 217296
  chr16:88722817-88722930
  hypo

SEQ ID NO: 445791 - DNA, 192 bp, Homo sapiens; identical to SEQ ID NO: 269802
  chr16:88722960-88723152
  hypo

SEQ ID NO: 445792 - DNA, 317 bp, Homo sapiens; identical to SEQ ID NO: 217298
  chr16:88725339-88725656
  hypo

SEQ ID NO: 445793 - DNA, 163 bp, Homo sapiens; identical to SEQ ID NO: 217299
  chr16:88725686-88725849
  hypo

SEQ ID NO: 445794 - DNA, 127 bp, Homo sapiens; identical to SEQ ID NO: 217300
  chr16:88738306-88738433
  hypo

SEQ ID NO: 445795 - DNA, 54 bp, Homo sapiens; identical to SEQ ID NO: 269805
  chr16:88756879-88756933
  hypo

SEQ ID NO: 445796 - DNA, 133 bp, Homo sapiens; identical to SEQ ID NO: 225167
  chr16:88764923-88765056
  hypo

SEQ ID NO: 445797 - DNA, 322 bp, Homo sapiens; identical to SEQ ID NO: 269807
  chr16:88776937-88777259
  hypo

SEQ ID NO: 445798 - DNA, 31 bp, Homo sapiens; identical to SEQ ID NO: 269808
  chr16:88780638-88780669
  hypo

SEQ ID NO: 445799 - DNA, 38 bp, Homo sapiens; identical to SEQ ID NO: 269809
  chr16:88780699-88780737
  hypo

SEQ ID NO: 445800 - DNA, 177 bp, Homo sapiens; identical to SEQ ID NO: 269810
  chr16:88780767-88780944
  hypo

SEQ ID NO: 445801 - DNA, 38 bp, Homo sapiens; identical to SEQ ID NO: 269811
  chr16:88785880-88785918
  hypo

SEQ ID NO: 445802 - DNA, 101 bp, Homo sapiens; identical to SEQ ID NO: 217303
  chr16:88787977-88788078
  hypo

SEQ ID NO: 445803 - DNA, 62 bp, Homo sapiens; identical to SEQ ID NO: 217304
  chr16:88788384-88788446
  hypo

SEQ ID NO: 445804 - DNA, 206 bp, Homo sapiens; identical to SEQ ID NO: 321464
  chr16:88794360-88794566
  hypo

SEQ ID NO: 445805 - DNA, 45 bp, Homo sapiens; identical to SEQ ID NO: 321465
  chr16:88794761-88794806
  hypo

SEQ ID NO: 445806 - DNA, 34 bp, Homo sapiens; identical to SEQ ID NO: 269817
  chr16:88796722-88796756
  hypo

SEQ ID NO: 445807 - DNA, 201 bp, Homo sapiens; identical to SEQ ID NO: 269820
  chr16:88799617-88799818
  hypo

SEQ ID NO: 445808 - DNA, 602 bp, Homo sapiens; identical to SEQ ID NO: 269822
  chr16:88800570-88801172
  hypo

SEQ ID NO: 445809 - DNA, 152 bp, Homo sapiens; identical to SEQ ID NO: 269823
  chr16:88801433-88801585
  hypo

SEQ ID NO: 445810 - DNA, 80 bp, Homo sapiens; identical to SEQ ID NO: 269826
  chr16:88810535-88810615
  hypo

SEQ ID NO: 445811 - DNA, 105 bp, Homo sapiens; identical to SEQ ID NO: 225168
  chr16:88817839-88817944
  hypo

SEQ ID NO: 445812 - DNA, 382 bp, Homo sapiens; identical to SEQ ID NO: 269827
  chr16:88821278-88821660
  hypo

SEQ ID NO: 445813 - DNA, 41 bp, Homo sapiens; identical to SEQ ID NO: 269828
  chr16:88823488-88823529
  hypo

SEQ ID NO: 445814 - DNA, 114 bp, Homo sapiens; identical to SEQ ID NO: 217312
  chr16:88826508-88826622
  hypo

SEQ ID NO: 445815 - DNA, 59 bp, Homo sapiens; identical to SEQ ID NO: 217313
  chr16:88831171-88831230
  hypo

SEQ ID NO: 445816 - DNA, 142 bp, Homo sapiens; identical to SEQ ID NO: 217314
  chr16:88831297-88831439
  hypo

SEQ ID NO: 445817 - DNA, 105 bp, Homo sapiens; identical to SEQ ID NO: 269832
  chr16:88831981-88832086
  hypo

SEQ ID NO: 445818 - DNA, 114 bp, Homo sapiens; identical to SEQ ID NO: 204339
  chr16:88851818-88851932
  hypo

SEQ ID NO: 445819 - DNA, 37 bp, Homo sapiens; identical to SEQ ID NO: 321487
  chr16:88871965-88872002
  hypo

SEQ ID NO: 445820 - DNA, 507 bp, Homo sapiens; identical to SEQ ID NO: 204340
  chr16:88878527-88879034
  hypo

SEQ ID NO: 445821 - DNA, 433 bp, Homo sapiens; identical to SEQ ID NO: 321489
  chr16:88883579-88884012
  hypo

SEQ ID NO: 445822 - DNA, 254 bp, Homo sapiens; identical to SEQ ID NO: 321490
  chr16:88884279-88884533
  hypo

SEQ ID NO: 445823 - DNA, 157 bp, Homo sapiens; identical to SEQ ID NO: 269836
  chr16:88892177-88892334
  hypo

SEQ ID NO: 445824 - DNA, 66 bp, Homo sapiens; identical to SEQ ID NO: 269838
  chr16:88894327-88894393
  hypo

SEQ ID NO: 445825 - DNA, 46 bp, Homo sapiens; identical to SEQ ID NO: 217317
  chr16:88897188-88897234
  hypo

SEQ ID NO: 445826 - DNA, 239 bp, Homo sapiens; identical to SEQ ID NO: 217319
  chr16:88927321-88927560
  hypo

SEQ ID NO: 445827 - DNA, 149 bp, Homo sapiens; identical to SEQ ID NO: 217320
  chr16:88933926-88934075
  hypo

SEQ ID NO: 445828 - DNA, 52 bp, Homo sapiens; identical to SEQ ID NO: 217321
  chr16:88942321-88942373
  hypo

SEQ ID NO: 445829 - DNA, 54 bp, Homo sapiens; identical to SEQ ID NO: 217323
  chr16:88945018-88945072
  hypo

SEQ ID NO: 445830 - DNA, 381 bp, Homo sapiens; identical to SEQ ID NO: 204341
  chr16:88950011-88950392
  hypo

SEQ ID NO: 445831 - DNA, 42 bp, Homo sapiens; identical to SEQ ID NO: 217327
  chr16:88958253-88958295
  hypo

SEQ ID NO: 445832 - DNA, 339 bp, Homo sapiens; identical to SEQ ID NO: 321506
  chr16:88958479-88958818
  hypo

SEQ ID NO: 445833 - DNA, 117 bp, Homo sapiens; identical to SEQ ID NO: 321507
  chr16:88958899-88959016
  hypo

SEQ ID NO: 445834 - DNA, 101 bp, Homo sapiens; identical to SEQ ID NO: 321509
  chr16:88961769-88961870
  hypo

SEQ ID NO: 445835 - DNA, 254 bp, Homo sapiens; identical to SEQ ID NO: 321510
  chr16:88961900-88962154
  hypo

SEQ ID NO: 445836 - DNA, 45 bp, Homo sapiens; identical to SEQ ID NO: 321511
  chr16:88965557-88965602
  hypo

SEQ ID NO: 445837 - DNA, 80 bp, Homo sapiens; identical to SEQ ID NO: 269864
  chr16:88968850-88968930
  hypo

SEQ ID NO: 445838 - DNA, 485 bp, Homo sapiens; identical to SEQ ID NO: 217330
  chr16:88978122-88978607
  hypo

SEQ ID NO: 445839 - DNA, 102 bp, Homo sapiens; identical to SEQ ID NO: 321517
  chr16:88997823-88997925
  hypo

SEQ ID NO: 445840 - DNA, 38 bp, Homo sapiens; identical to SEQ ID NO: 269870
  chr16:89004837-89004875
  hypo

SEQ ID NO: 445841 - DNA, 48 bp, Homo sapiens; identical to SEQ ID NO: 269871
  chr16:89004905-89004953
  hypo

SEQ ID NO: 445842 - DNA, 201 bp, Homo sapiens; identical to SEQ ID NO: 321523
  chr16:89010085-89010286
  hypo

SEQ ID NO: 445843 - DNA, 143 bp, Homo sapiens; identical to SEQ ID NO: 269873
  chr16:89012313-89012456
  hypo

SEQ ID NO: 445844 - DNA, 294 bp, Homo sapiens; identical to SEQ ID NO: 269874
  chr16:89016745-89017039
  hypo

SEQ ID NO: 445845 - DNA, 200 bp, Homo sapiens; identical to SEQ ID NO: 269876
  chr16:89027649-89027849
  hypo

SEQ ID NO: 445846 - DNA, 53 bp, Homo sapiens; identical to SEQ ID NO: 269879
  chr16:89072218-89072271
  hypo

SEQ ID NO: 445847 - DNA, 164 bp, Homo sapiens; identical to SEQ ID NO: 269881
  chr16:89089219-89089383
  hypo

SEQ ID NO: 445848 - DNA, 224 bp, Homo sapiens; identical to SEQ ID NO: 269882
  chr16:89089443-89089667
  hypo

SEQ ID NO: 445849 - DNA, 78 bp, Homo sapiens; identical to SEQ ID NO: 321531
  chr16:89103370-89103448
  hypo

SEQ ID NO: 445850 - DNA, 125 bp, Homo sapiens; identical to SEQ ID NO: 321532
  chr16:89103837-89103962
  hypo

SEQ ID NO: 445851 - DNA, 102 bp, Homo sapiens; identical to SEQ ID NO: 269886
  chr16:89115645-89115747
  hypo

SEQ ID NO: 445852 - DNA, 87 bp, Homo sapiens; identical to SEQ ID NO: 321536
  chr16:89122410-89122497
  hypo

SEQ ID NO: 445853 - DNA, 418 bp, Homo sapiens; identical to SEQ ID NO: 269890
  chr16:89129270-89129688
  hypo

SEQ ID NO: 445854 - DNA, 724 bp, Homo sapiens; identical to SEQ ID NO: 321538
  chr16:89130512-89131236
  hypo

SEQ ID NO: 445855 - DNA, 39 bp, Homo sapiens; identical to SEQ ID NO: 217339
  chr16:89131266-89131305
  hypo

SEQ ID NO: 445856 - DNA, 277 bp, Homo sapiens; identical to SEQ ID NO: 269892
  chr16:89132011-89132288
  hypo

SEQ ID NO: 445857 - DNA, 137 bp, Homo sapiens; identical to SEQ ID NO: 321541
  chr16:89137879-89138016
  hypo

SEQ ID NO: 445858 - DNA, 211 bp, Homo sapiens; identical to SEQ ID NO: 217341
  chr16:89139281-89139492
  hypo

SEQ ID NO: 445859 - DNA, 53 bp, Homo sapiens; identical to SEQ ID NO: 217342
  chr16:89139898-89139951
  hypo

SEQ ID NO: 445860 - DNA, 312 bp, Homo sapiens; identical to SEQ ID NO: 217343
  chr16:89140055-89140367
  hypo

SEQ ID NO: 445861 - DNA, 704 bp, Homo sapiens; identical to SEQ ID NO: 321545
  chr16:89140434-89141138
  hypo

SEQ ID NO: 445862 - DNA, 240 bp, Homo sapiens; identical to SEQ ID NO: 269897
  chr16:89147081-89147321
  hypo

SEQ ID NO: 445863 - DNA, 37 bp, Homo sapiens; identical to SEQ ID NO: 269898
  chr16:89149007-89149044
  hypo

SEQ ID NO: 445864 - DNA, 153 bp, Homo sapiens; identical to SEQ ID NO: 269899
  chr16:89162716-89162869
  hypo

SEQ ID NO: 445865 - DNA, 106 bp, Homo sapiens; identical to SEQ ID NO: 269900
  chr16:89163233-89163339
  hypo

SEQ ID NO: 445866 - DNA, 424 bp, Homo sapiens; identical to SEQ ID NO: 269901
  chr16:89165356-89165780
  hypo

SEQ ID NO: 445867 - DNA, 63 bp, Homo sapiens
  chr16:89169475-89169538
  hypo
cagttataaccatgtactgtaatcaagttatgtgaaagtgctctctctcttcaaaataccttc

SEQ ID NO: 445868 - DNA, 66 bp, Homo sapiens; identical to SEQ ID NO: 217349
  chr16:89172068-89172134
  hypo

SEQ ID NO: 445869 - DNA, 102 bp, Homo sapiens; identical to SEQ ID NO: 321556
  chr16:89172536-89172638
  hypo

SEQ ID NO: 445870 - DNA, 324 bp, Homo sapiens; identical to SEQ ID NO: 269905
  chr16:89179513-89179837
  hypo

SEQ ID NO: 445871 - DNA, 363 bp, Homo sapiens; identical to SEQ ID NO: 217351
  chr16:89198318-89198681
  hypo

SEQ ID NO: 445872 - DNA, 58 bp, Homo sapiens
  chr16:89219255-89219313
  hypo
ctggcccaggcaacagtgagatcctgtcctagaaagaaaagagaaaaaaagaaaaatg

SEQ ID NO: 445873 - DNA, 86 bp, Homo sapiens; identical to SEQ ID NO: 321567
  chr16:89225782-89225868
  hypo

SEQ ID NO: 445874 - DNA, 215 bp, Homo sapiens; identical to SEQ ID NO: 321568
  chr16:89226047-89226262
  hypo

SEQ ID NO: 445875 - DNA, 170 bp, Homo sapiens; identical to SEQ ID NO: 321569
  chr16:89245121-89245291
  hypo

SEQ ID NO: 445876 - DNA, 201 bp, Homo sapiens; identical to SEQ ID NO: 321570
  chr16:89245442-89245643
  hypo

SEQ ID NO: 445877 - DNA, 98 bp, Homo sapiens; identical to SEQ ID NO: 217359
  chr16:89255153-89255251
  hypo

SEQ ID NO: 445878 - DNA, 157 bp, Homo sapiens; identical to SEQ ID NO: 127778
  chr16:89267957-89268114
  hypo

SEQ ID NO: 445879 - DNA, 35 bp, Homo sapiens; identical to SEQ ID NO: 269918
  chr16:89279952-89279987
  hypo

SEQ ID NO: 445880 - DNA, 80 bp, Homo sapiens; identical to SEQ ID NO: 269919
  chr16:89292227-89292307
  hypo

SEQ ID NO: 445881 - DNA, 42 bp, Homo sapiens; identical to SEQ ID NO: 269920
  chr16:89347101-89347143
  hypo

SEQ ID NO: 445882 - DNA, 143 bp, Homo sapiens; identical to SEQ ID NO: 269921
  chr16:89351879-89352022
  hypo

SEQ ID NO: 445883 - DNA, 63 bp, Homo sapiens; identical to SEQ ID NO: 217362
  chr16:89354320-89354383
  hypo

SEQ ID NO: 445884 - DNA, 314 bp, Homo sapiens; identical to SEQ ID NO: 217364
  chr16:89359017-89359331
  hypo

SEQ ID NO: 445885 - DNA, 154 bp, Homo sapiens; identical to SEQ ID NO: 321584
  chr16:89360166-89360320
  hypo

SEQ ID NO: 445886 - DNA, 100 bp, Homo sapiens; identical to SEQ ID NO: 269927
  chr16:89366815-89366915
  hypo

SEQ ID NO: 445887 - DNA, 43 bp, Homo sapiens; identical to SEQ ID NO: 269928
  chr16:89366945-89366988
  hypo

SEQ ID NO: 445888 - DNA, 31 bp, Homo sapiens; identical to SEQ ID NO: 269929
  chr16:89387488-89387519
  hypo

SEQ ID NO: 445889 - DNA, 51 bp, Homo sapiens; identical to SEQ ID NO: 269930
  chr16:89389596-89389647
  hypo

SEQ ID NO: 445890 - DNA, 197 bp, Homo sapiens; identical to SEQ ID NO: 269932
  chr16:89437347-89437544
  hypo

SEQ ID NO: 445891 - DNA, 45 bp, Homo sapiens; identical to SEQ ID NO: 217367
  chr16:89437574-89437619
  hypo

SEQ ID NO: 445892 - DNA, 324 bp, Homo sapiens; identical to SEQ ID NO: 269934
  chr16:89438583-89438907
  hypo

SEQ ID NO: 445893 - DNA, 120 bp, Homo sapiens; identical to SEQ ID NO: 217368
  chr16:89442145-89442265
  hypo

SEQ ID NO: 445894 - DNA, 77 bp, Homo sapiens; identical to SEQ ID NO: 269939
  chr16:89461030-89461107
  hypo

SEQ ID NO: 445895 - DNA, 40 bp, Homo sapiens; identical to SEQ ID NO: 269940
  chr16:89468177-89468217
  hypo

SEQ ID NO: 445896 - DNA, 70 bp, Homo sapiens; identical to SEQ ID NO: 269942
  chr16:89471629-89471699
  hypo

SEQ ID NO: 445897 - DNA, 241 bp, Homo sapiens; identical to SEQ ID NO: 217372
  chr16:89500005-89500246
  hypo

SEQ ID NO: 445898 - DNA, 208 bp, Homo sapiens; identical to SEQ ID NO: 269945
  chr16:89531901-89532109
  hypo

SEQ ID NO: 445899 - DNA, 37 bp, Homo sapiens; identical to SEQ ID NO: 217374
  chr16:89545055-89545092
  hypo

SEQ ID NO: 445900 - DNA, 99 bp, Homo sapiens; identical to SEQ ID NO: 217375
  chr16:89548161-89548260
  hypo

SEQ ID NO: 445901 - DNA, 32 bp, Homo sapiens; identical to SEQ ID NO: 269948
  chr16:89553884-89553916
  hypo

SEQ ID NO: 445902 - DNA, 39 bp, Homo sapiens; identical to SEQ ID NO: 269952
  chr16:89584297-89584336
  hypo

SEQ ID NO: 445903 - DNA, 208 bp, Homo sapiens; identical to SEQ ID NO: 269953
  chr16:89588832-89589040
  hypo

SEQ ID NO: 445904 - DNA, 159 bp, Homo sapiens; identical to SEQ ID NO: 269954
  chr16:89597145-89597304
  hypo

SEQ ID NO: 445905 - DNA, 113 bp, Homo sapiens; identical to SEQ ID NO: 269955
  chr16:89603719-89603832
  hypo

SEQ ID NO: 445906 - DNA, 263 bp, Homo sapiens; identical to SEQ ID NO: 204348
  chr16:89614907-89615170
  hypo

SEQ ID NO: 445907 - DNA, 153 bp, Homo sapiens; identical to SEQ ID NO: 204349
  chr16:89627717-89627870
  hypo

SEQ ID NO: 445908 - DNA, 300 bp, Homo sapiens; identical to SEQ ID NO: 217380
  chr16:89647764-89648064
  hypo

SEQ ID NO: 445909 - DNA, 56 bp, Homo sapiens; identical to SEQ ID NO: 217381
  chr16:89649562-89649618
  hypo

SEQ ID NO: 445910 - DNA, 255 bp, Homo sapiens; identical to SEQ ID NO: 269961
  chr16:89649648-89649903
  hypo

SEQ ID NO: 445911 - DNA, 186 bp, Homo sapiens; identical to SEQ ID NO: 321620
  chr16:89663966-89664152
  hypo

SEQ ID NO: 445912 - DNA, 142 bp, Homo sapiens; identical to SEQ ID NO: 321621
  chr16:89674365-89674507
  hypo

SEQ ID NO: 445913 - DNA, 35 bp, Homo sapiens; identical to SEQ ID NO: 321622
  chr16:89674563-89674598
  hypo

SEQ ID NO: 445914 - DNA, 83 bp, Homo sapiens; identical to SEQ ID NO: 321623
  chr16:89688046-89688129
  hypo

SEQ ID NO: 445915 - DNA, 146 bp, Homo sapiens; identical to SEQ ID NO: 217383
  chr16:89697117-89697263
  hypo

SEQ ID NO: 445916 - DNA, 210 bp, Homo sapiens; identical to SEQ ID NO: 321625
  chr16:89704274-89704484
  hypo

SEQ ID NO: 445917 - DNA, 178 bp, Homo sapiens; identical to SEQ ID NO: 321626
  chr16:89704696-89704874
  hypo

SEQ ID NO: 445918 - DNA, 47 bp, Homo sapiens; identical to SEQ ID NO: 217386
  chr16:89715825-89715872
  hypo

SEQ ID NO: 445919 - DNA, 65 bp, Homo sapiens; identical to SEQ ID NO: 217387
  chr16:89755908-89755973
  hypo

SEQ ID NO: 445920 - DNA, 97 bp, Homo sapiens; identical to SEQ ID NO: 269971
  chr16:89762087-89762184
  hypo

SEQ ID NO: 445921 - DNA, 75 bp, Homo sapiens; identical to SEQ ID NO: 217390
  chr16:89800299-89800374
  hypo

SEQ ID NO: 445922 - DNA, 85 bp, Homo sapiens; identical to SEQ ID NO: 217391
  chr16:89807744-89807829
  hypo

SEQ ID NO: 445923 - DNA, 39 bp, Homo sapiens; identical to SEQ ID NO: 269976
  chr16:89809822-89809861
  hypo

SEQ ID NO: 445924 - DNA, 102 bp, Homo sapiens; identical to SEQ ID NO: 217392
  chr16:89815125-89815227
  hypo

SEQ ID NO: 445925 - DNA, 36 bp, Homo sapiens; identical to SEQ ID NO: 269978
  chr16:89824587-89824623
  hypo

SEQ ID NO: 445926 - DNA, 38 bp, Homo sapiens; identical to SEQ ID NO: 217393
  chr16:89830047-89830085
  hypo

SEQ ID NO: 445927 - DNA, 131 bp, Homo sapiens; identical to SEQ ID NO: 269980
  chr16:89845487-89845618
  hypo

SEQ ID NO: 445928 - DNA, 130 bp, Homo sapiens; identical to SEQ ID NO: 321642
  chr16:89846018-89846148
  hypo

SEQ ID NO: 445929 - DNA, 64 bp, Homo sapiens; identical to SEQ ID NO: 321643
  chr16:89846240-89846304
  hypo

SEQ ID NO: 445930 - DNA, 162 bp, Homo sapiens; identical to SEQ ID NO: 269982
  chr16:89846596-89846758
  hypo

SEQ ID NO: 445931 - DNA, 237 bp, Homo sapiens; identical to SEQ ID NO: 291832
  chr16:89894335-89894572
  hypo

SEQ ID NO: 445932 - DNA, 106 bp, Homo sapiens; identical to SEQ ID NO: 269986
  chr16:89918308-89918414
  hypo

SEQ ID NO: 445933 - DNA, 64 bp, Homo sapiens; identical to SEQ ID NO: 269987
  chr16:89920072-89920136
  hypo

SEQ ID NO: 445934 - DNA, 87 bp, Homo sapiens; identical to SEQ ID NO: 269988
  chr16:89926090-89926177
  hypo

SEQ ID NO: 445935 - DNA, 183 bp, Homo sapiens; identical to SEQ ID NO: 269990
  chr16:89949813-89949996
  hypo

SEQ ID NO: 445936 - DNA, 208 bp, Homo sapiens; identical to SEQ ID NO: 217398
  chr16:89960587-89960795
  hypo

SEQ ID NO: 445937 - DNA, 310 bp, Homo sapiens; identical to SEQ ID NO: 217399
  chr16:89966590-89966900
  hypo

SEQ ID NO: 445938 - DNA, 37 bp, Homo sapiens; identical to SEQ ID NO: 269993
  chr16:89970851-89970888
  hypo

SEQ ID NO: 445939 - DNA, 96 bp, Homo sapiens; identical to SEQ ID NO: 269994
  chr16:89971008-89971104
  hypo

SEQ ID NO: 445940 - DNA, 69 bp, Homo sapiens; identical to SEQ ID NO: 269996
  chr16:89982538-89982607
  hypo

SEQ ID NO: 445941 - DNA, 381 bp, Homo sapiens; identical to SEQ ID NO: 269997
  chr16:89985819-89986200
  hypo

SEQ ID NO: 445942 - DNA, 318 bp, Homo sapiens; identical to SEQ ID NO: 321664
  chr16:90037382-90037700
  hypo

SEQ ID NO: 445943 - DNA, 137 bp, Homo sapiens; identical to SEQ ID NO: 321665
  chr16:90037740-90037877
  hypo

SEQ ID NO: 445944 - DNA, 102 bp, Homo sapiens; identical to SEQ ID NO: 217404
  chr16:90044787-90044889
  hypo

SEQ ID NO: 445945 - DNA, 95 bp, Homo sapiens; identical to SEQ ID NO: 217405
  chr16:90053009-90053104
  hypo

SEQ ID NO: 445946 - DNA, 189 bp, Homo sapiens; identical to SEQ ID NO: 217406
  chr16:90053307-90053496
  hypo

SEQ ID NO: 445947 - DNA, 123 bp, Homo sapiens; identical to SEQ ID NO: 270002
  chr16:90057596-90057719
  hypo

SEQ ID NO: 445948 - DNA, 135 bp, Homo sapiens; identical to SEQ ID NO: 217407
  chr16:90059132-90059267
  hypo

SEQ ID NO: 445949 - DNA, 284 bp, Homo sapiens; identical to SEQ ID NO: 270005
  chr16:90068123-90068407
  hypo

SEQ ID NO: 445950 - DNA, 461 bp, Homo sapiens; identical to SEQ ID NO: 270006
  chr16:90072249-90072710
  hypo

SEQ ID NO: 445951 - DNA, 45 bp, Homo sapiens; identical to SEQ ID NO: 225179
  chr16:90087050-90087095
  hypo

SEQ ID NO: 445952 - DNA, 206 bp, Homo sapiens; identical to SEQ ID NO: 270007
  chr16:90109929-90110135
  hypo

SEQ ID NO: 445953 - DNA, 81 bp, Homo sapiens; identical to SEQ ID NO: 270008
  chr16:90115266-90115347
  hypo

SEQ ID NO: 445954 - DNA, 54 bp, Homo sapiens; identical to SEQ ID NO: 321678
  chr17:401102-401156
  hypo

SEQ ID NO: 445955 - DNA, 152 bp, Homo sapiens; identical to SEQ ID NO: 217412
  chr17:512963-513115
  hypo

SEQ ID NO: 445956 - DNA, 41 bp, Homo sapiens; identical to SEQ ID NO: 270011
  chr17:523202-523243
  hypo

SEQ ID NO: 445957 - DNA, 71 bp, Homo sapiens; identical to SEQ ID NO: 423681
  chr17:523856-523927
  hypo

SEQ ID NO: 445958 - DNA, 114 bp, Homo sapiens; identical to SEQ ID NO: 217414
  chr17:536283-536397
  hypo

SEQ ID NO: 445959 - DNA, 116 bp, Homo sapiens; identical to SEQ ID NO: 321683
  chr17:536432-536548
  hypo

SEQ ID NO: 445960 - DNA, 49 bp, Homo sapiens; identical to SEQ ID NO: 217417
  chr17:591791-591840
  hypo

SEQ ID NO: 445961 - DNA, 278 bp, Homo sapiens; identical to SEQ ID NO: 270017
  chr17:633611-633889
  hypo

SEQ ID NO: 445962 - DNA, 263 bp, Homo sapiens; identical to SEQ ID NO: 217419
  chr17:634276-634539
  hypo

SEQ ID NO: 445963 - DNA, 78 bp, Homo sapiens; identical to SEQ ID NO: 225182
  chr17:635476-635554
  hypo

SEQ ID NO: 445964 - DNA, 138 bp, Homo sapiens; identical to SEQ ID NO: 204358
  chr17:635798-635936
  hypo

SEQ ID NO: 445965 - DNA, 299 bp, Homo sapiens; identical to SEQ ID NO: 53517
  chr17:635959-636258
  hypo

SEQ ID NO: 445966 - DNA, 140 bp, Homo sapiens; identical to SEQ ID NO: 270019
  chr17:641127-641267
  hypo

SEQ ID NO: 445967 - DNA, 257 bp, Homo sapiens; identical to SEQ ID NO: 217422
  chr17:662966-663223
  hypo

SEQ ID NO: 445968 - DNA, 137 bp, Homo sapiens; identical to SEQ ID NO: 217423
  chr17:663955-664092
  hypo

SEQ ID NO: 445969 - DNA, 36 bp, Homo sapiens; identical to SEQ ID NO: 270022
  chr17:684166-684202
  hypo

SEQ ID NO: 445970 - DNA, 464 bp, Homo sapiens; identical to SEQ ID NO: 217426
  chr17:693367-693831
  hypo

SEQ ID NO: 445971 - DNA, 198 bp, Homo sapiens; identical to SEQ ID NO: 270025
  chr17:710849-711047
  hypo

SEQ ID NO: 445972 - DNA, 103 bp, Homo sapiens; identical to SEQ ID NO: 270026
  chr17:730082-730185
  hypo

SEQ ID NO: 445973 - DNA, 33 bp, Homo sapiens; identical to SEQ ID NO: 270027
  chr17:744617-744650
  hypo

SEQ ID NO: 445974 - DNA, 34 bp, Homo sapiens; identical to SEQ ID NO: 270028
  chr17:797966-798000
  hypo

SEQ ID NO: 445975 - DNA, 96 bp, Homo sapiens; identical to SEQ ID NO: 270029
  chr17:817716-817812
  hypo

SEQ ID NO: 445976 - DNA, 92 bp, Homo sapiens; identical to SEQ ID NO: 217427
  chr17:835941-836033
  hypo

SEQ ID NO: 445977 - DNA, 150 bp, Homo sapiens; identical to SEQ ID NO: 217428
  chr17:836153-836303
  hypo

SEQ ID NO: 445978 - DNA, 409 bp, Homo sapiens; identical to SEQ ID NO: 270032
  chr17:839511-839920
  hypo

SEQ ID NO: 445979 - DNA, 79 bp, Homo sapiens; identical to SEQ ID NO: 217429
  chr17:851784-851863
  hypo

SEQ ID NO: 445980 - DNA, 136 bp, Homo sapiens; identical to SEQ ID NO: 217430
  chr17:851893-852029
  hypo

SEQ ID NO: 445981 - DNA, 32 bp, Homo sapiens; identical to SEQ ID NO: 217431
  chr17:864608-864640
  hypo

SEQ ID NO: 445982 - DNA, 180 bp, Homo sapiens; identical to SEQ ID NO: 270036
  chr17:874468-874648
  hypo

SEQ ID NO: 445983 - DNA, 68 bp, Homo sapiens; identical to SEQ ID NO: 321712
  chr17:876752-876820
  hypo

SEQ ID NO: 445984 - DNA, 84 bp, Homo sapiens; identical to SEQ ID NO: 225185
  chr17:883202-883286
  hypo

SEQ ID NO: 445985 - DNA, 64 bp, Homo sapiens; identical to SEQ ID NO: 217432
  chr17:916258-916322
  hypo

SEQ ID NO: 445986 - DNA, 525 bp, Homo sapiens; identical to SEQ ID NO: 270040
  chr17:929504-930029
  hypo

SEQ ID NO: 445987 - DNA, 66 bp, Homo sapiens; identical to SEQ ID NO: 270042
  chr17:952745-952811
  hypo

SEQ ID NO: 445988 - DNA, 496 bp, Homo sapiens; identical to SEQ ID NO: 270043
  chr17:972915-973411
  hypo

SEQ ID NO: 445989 - DNA, 89 bp, Homo sapiens; identical to SEQ ID NO: 270044
  chr17:978612-978701
  hypo

SEQ ID NO: 445990 - DNA, 288 bp, Homo sapiens; identical to SEQ ID NO: 270045
  chr17:995006-995294
  hypo

SEQ ID NO: 445991 - DNA, 65 bp, Homo sapiens; identical to SEQ ID NO: 270047
  chr17:1043599-1043664
  hypo

SEQ ID NO: 445992 - DNA, 110 bp, Homo sapiens; identical to SEQ ID NO: 270048
  chr17:1053213-1053323
  hypo

SEQ ID NO: 445993 - DNA, 59 bp, Homo sapiens; identical to SEQ ID NO: 270049
  chr17:1053672-1053731
  hypo

SEQ ID NO: 445994 - DNA, 137 bp, Homo sapiens; identical to SEQ ID NO: 270050
  chr17:1094003-1094140
  hypo

SEQ ID NO: 445995 - DNA, 73 bp, Homo sapiens; identical to SEQ ID NO: 225186
  chr17:1132222-1132295
  hypo

SEQ ID NO: 445996 - DNA, 42 bp, Homo sapiens; identical to SEQ ID NO: 270051
  chr17:1158236-1158278
  hypo

SEQ ID NO: 445997 - DNA, 36 bp, Homo sapiens; identical to SEQ ID NO: 321728
  chr17:1193058-1193094
  hypo

SEQ ID NO: 445998 - DNA, 151 bp, Homo sapiens; identical to SEQ ID NO: 321729
  chr17:1193124-1193275
  hypo

SEQ ID NO: 445999 - DNA, 53 bp, Homo sapiens; identical to SEQ ID NO: 270053
  chr17:1208267-1208320
  hypo

SEQ ID NO: 446000 - DNA, 214 bp, Homo sapiens; identical to SEQ ID NO: 270054
  chr17:1240771-1240985
  hypo

SEQ ID NO: 446001 - DNA, 51 bp, Homo sapiens; identical to SEQ ID NO: 411316
  chr17:1241045-1241096
  hypo

SEQ ID NO: 446002 - DNA, 98 bp, Homo sapiens; identical to SEQ ID NO: 270056
  chr17:1244357-1244455
  hypo

SEQ ID NO: 446003 - DNA, 87 bp, Homo sapiens; identical to SEQ ID NO: 270058
  chr17:1255769-1255856
  hypo

SEQ ID NO: 446004 - DNA, 44 bp, Homo sapiens; identical to SEQ ID NO: 270059
  chr17:1298785-1298829
  hypo

SEQ ID NO: 446005 - DNA, 208 bp, Homo sapiens; identical to SEQ ID NO: 270060
  chr17:1352363-1352571
  hypo

SEQ ID NO: 446006 - DNA, 204 bp, Homo sapiens; identical to SEQ ID NO: 270061
  chr17:1373309-1373513
  hypo

SEQ ID NO: 446007 - DNA, 235 bp, Homo sapiens; identical to SEQ ID NO: 270062
  chr17:1375239-1375474
  hypo

SEQ ID NO: 446008 - DNA, 81 bp, Homo sapiens; identical to SEQ ID NO: 217435
  chr17:1376039-1376120
  hypo

SEQ ID NO: 446009 - DNA, 235 bp, Homo sapiens; identical to SEQ ID NO: 270064
  chr17:1386238-1386473
  hypo

SEQ ID NO: 446010 - DNA, 135 bp, Homo sapiens; identical to SEQ ID NO: 217436
  chr17:1386690-1386825
  hypo

SEQ ID NO: 446011 - DNA, 116 bp, Homo sapiens; identical to SEQ ID NO: 217437
  chr17:1387481-1387597
  hypo

SEQ ID NO: 446012 - DNA, 164 bp, Homo sapiens; identical to SEQ ID NO: 217439
  chr17:1410272-1410436
  hypo

SEQ ID NO: 446013 - DNA, 67 bp, Homo sapiens; identical to SEQ ID NO: 270070
  chr17:1437270-1437337
  hypo

SEQ ID NO: 446014 - DNA, 186 bp, Homo sapiens; identical to SEQ ID NO: 321752
  chr17:1494364-1494550
  hypo

SEQ ID NO: 446015 - DNA, 197 bp, Homo sapiens; identical to SEQ ID NO: 270075
  chr17:1523771-1523968
  hypo

SEQ ID NO: 446016 - DNA, 204 bp, Homo sapiens; identical to SEQ ID NO: 270076
  chr17:1527254-1527458
  hypo

SEQ ID NO: 446017 - DNA, 39 bp, Homo sapiens; identical to SEQ ID NO: 270079
  chr17:1562742-1562781
  hypo

SEQ ID NO: 446018 - DNA, 183 bp, Homo sapiens; identical to SEQ ID NO: 204364
  chr17:1588082-1588265
  hypo

SEQ ID NO: 446019 - DNA, 802 bp, Homo sapiens; identical to SEQ ID NO: 291859
  chr17:1613225-1614027
  hypo

SEQ ID NO: 446020 - DNA, 120 bp, Homo sapiens; identical to SEQ ID NO: 270080
  chr17:1694044-1694164
  hypo

SEQ ID NO: 446021 - DNA, 156 bp, Homo sapiens; identical to SEQ ID NO: 217446
  chr17:1694900-1695056
  hypo

SEQ ID NO: 446022 - DNA, 180 bp, Homo sapiens; identical to SEQ ID NO: 270082
  chr17:1695176-1695356
  hypo

SEQ ID NO: 446023 - DNA, 220 bp, Homo sapiens; identical to SEQ ID NO: 270083
  chr17:1703829-1704049
  hypo

SEQ ID NO: 446024 - DNA, 161 bp, Homo sapiens; identical to SEQ ID NO: 217452
  chr17:1792141-1792302
  hypo

SEQ ID NO: 446025 - DNA, 466 bp, Homo sapiens; identical to SEQ ID NO: 217453
  chr17:1801623-1802089
  hypo

SEQ ID NO: 446026 - DNA, 58 bp, Homo sapiens; identical to SEQ ID NO: 270090
  chr17:1802318-1802376
  hypo

SEQ ID NO: 446027 - DNA, 281 bp, Homo sapiens; identical to SEQ ID NO: 270091
  chr17:1817208-1817489
  hypo

SEQ ID NO: 446028 - DNA, 146 bp, Homo sapiens; identical to SEQ ID NO: 321770
  chr17:1824435-1824581
  hypo

SEQ ID NO: 446029 - DNA, 79 bp, Homo sapiens; identical to SEQ ID NO: 321771
  chr17:1824611-1824690
  hypo

SEQ ID NO: 446030 - DNA, 52 bp, Homo sapiens; identical to SEQ ID NO: 217454
  chr17:1837750-1837802
  hypo

SEQ ID NO: 446031 - DNA, 174 bp, Homo sapiens; identical to SEQ ID NO: 217455
  chr17:1938562-1938736
  hypo

SEQ ID NO: 446032 - DNA, 53 bp, Homo sapiens; identical to SEQ ID NO: 217456
  chr17:1940206-1940259
  hypo

SEQ ID NO: 446033 - DNA, 665 bp, Homo sapiens; identical to SEQ ID NO: 291873
  chr17:1961434-1962099
  hypo

SEQ ID NO: 446034 - DNA, 175 bp, Homo sapiens; identical to SEQ ID NO: 270096
  chr17:1990505-1990680
  hypo

SEQ ID NO: 446035 - DNA, 47 bp, Homo sapiens; identical to SEQ ID NO: 270097
  chr17:2006932-2006979
  hypo

SEQ ID NO: 446036 - DNA, 31 bp, Homo sapiens; identical to SEQ ID NO: 217457
  chr17:2015469-2015500
  hypo

SEQ ID NO: 446037 - DNA, 64 bp, Homo sapiens; identical to SEQ ID NO: 270099
  chr17:2111757-2111821
  hypo

SEQ ID NO: 446038 - DNA, 50 bp, Homo sapiens; identical to SEQ ID NO: 270100
  chr17:2135566-2135616
  hypo

SEQ ID NO: 446039 - DNA, 148 bp, Homo sapiens; identical to SEQ ID NO: 217458
  chr17:2146555-2146703
  hypo

SEQ ID NO: 446040 - DNA, 162 bp, Homo sapiens; identical to SEQ ID NO: 291874
  chr17:2156702-2156864
  hypo

SEQ ID NO: 446041 - DNA, 147 bp, Homo sapiens; identical to SEQ ID NO: 270102
  chr17:2181379-2181526
  hypo

SEQ ID NO: 446042 - DNA, 156 bp, Homo sapiens; identical to SEQ ID NO: 217459
  chr17:2182384-2182540
  hypo

SEQ ID NO: 446043 - DNA, 95 bp, Homo sapiens; identical to SEQ ID NO: 321786
  chr17:2249956-2250051
  hypo

SEQ ID NO: 446044 - DNA, 32 bp, Homo sapiens; identical to SEQ ID NO: 321787
  chr17:2250081-2250113
  hypo

SEQ ID NO: 446045 - DNA, 38 bp, Homo sapiens; identical to SEQ ID NO: 270108
  chr17:2263307-2263345
  hypo

SEQ ID NO: 446046 - DNA, 51 bp, Homo sapiens; identical to SEQ ID NO: 321789
  chr17:2278750-2278801
  hypo

SEQ ID NO: 446047 - DNA, 452 bp, Homo sapiens; identical to SEQ ID NO: 321790
  chr17:2278925-2279377
  hypo

SEQ ID NO: 446048 - DNA, 128 bp, Homo sapiens; identical to SEQ ID NO: 270111
  chr17:2290294-2290422
  hypo

SEQ ID NO: 446049 - DNA, 50 bp, Homo sapiens; identical to SEQ ID NO: 204369
  chr17:2302239-2302289
  hypo

SEQ ID NO: 446050 - DNA, 66 bp, Homo sapiens; identical to SEQ ID NO: 386842
  chr17:2326291-2326357
  hypo

SEQ ID NO: 446051 - DNA, 39 bp, Homo sapiens; identical to SEQ ID NO: 217463
  chr17:2326810-2326849
  hypo

SEQ ID NO: 446052 - DNA, 120 bp, Homo sapiens; identical to SEQ ID NO: 217464
  chr17:2388546-2388666
  hypo

SEQ ID NO: 446053 - DNA, 77 bp, Homo sapiens; identical to SEQ ID NO: 270117
  chr17:2539951-2540028
  hypo

SEQ ID NO: 446054 - DNA, 39 bp, Homo sapiens; identical to SEQ ID NO: 270118
  chr17:2590520-2590559
  hypo

SEQ ID NO: 446055 - DNA, 203 bp, Homo sapiens; identical to SEQ ID NO: 217465
  chr17:2595624-2595827
  hypo

SEQ ID NO: 446056 - DNA, 235 bp, Homo sapiens; identical to SEQ ID NO: 270120
  chr17:2599038-2599273
  hypo

SEQ ID NO: 446057 - DNA, 85 bp, Homo sapiens; identical to SEQ ID NO: 217467
  chr17:2603725-2603810
  hypo

SEQ ID NO: 446058 - DNA, 34 bp, Homo sapiens; identical to SEQ ID NO: 217468
  chr17:2616132-2616166
  hypo

SEQ ID NO: 446059 - DNA, 273 bp, Homo sapiens; identical to SEQ ID NO: 270123
  chr17:2616826-2617099
  hypo

SEQ ID NO: 446060 - DNA, 77 bp, Homo sapiens; identical to SEQ ID NO: 204370
  chr17:2627362-2627439
  hypo

SEQ ID NO: 446061 - DNA, 44 bp, Homo sapiens; identical to SEQ ID NO: 217470
  chr17:2684790-2684834
  hypo

SEQ ID NO: 446062 - DNA, 240 bp, Homo sapiens; identical to SEQ ID NO: 217471
  chr17:2684894-2685134
  hypo

SEQ ID NO: 446063 - DNA, 44 bp, Homo sapiens; identical to SEQ ID NO: 217472
  chr17:2685194-2685238
  hypo

SEQ ID NO: 446064 - DNA, 95 bp, Homo sapiens; identical to SEQ ID NO: 270127
  chr17:2708584-2708679
  hypo

SEQ ID NO: 446065 - DNA, 84 bp, Homo sapiens; identical to SEQ ID NO: 270128
  chr17:2767337-2767421
  hypo

SEQ ID NO: 446066 - DNA, 101 bp, Homo sapiens; identical to SEQ ID NO: 270129
  chr17:2799189-2799290
  hypo

SEQ ID NO: 446067 - DNA, 156 bp, Homo sapiens; identical to SEQ ID NO: 270131
  chr17:2811367-2811523
  hypo

SEQ ID NO: 446068 - DNA, 145 bp, Homo sapiens; identical to SEQ ID NO: 270132
  chr17:2868866-2869011
  hypo

SEQ ID NO: 446069 - DNA, 287 bp, Homo sapiens; identical to SEQ ID NO: 217474
  chr17:2908449-2908736
  hypo

SEQ ID NO: 446070 - DNA, 168 bp, Homo sapiens; identical to SEQ ID NO: 270134
  chr17:3374890-3375058
  hypo

SEQ ID NO: 446071 - DNA, 35 bp, Homo sapiens; identical to SEQ ID NO: 217475
  chr17:3375581-3375616
  hypo

SEQ ID NO: 446072 - DNA, 86 bp, Homo sapiens; identical to SEQ ID NO: 270136
  chr17:3474665-3474751
  hypo

SEQ ID NO: 446073 - DNA, 321 bp, Homo sapiens; identical to SEQ ID NO: 270137
  chr17:3486255-3486576
  hypo

SEQ ID NO: 446074 - DNA, 72 bp, Homo sapiens; identical to SEQ ID NO: 217476
  chr17:3500360-3500432
  hypo

SEQ ID NO: 446075 - DNA, 121 bp, Homo sapiens; identical to SEQ ID NO: 270139
  chr17:3560847-3560968
  hypo

SEQ ID NO: 446076 - DNA, 84 bp, Homo sapiens; identical to SEQ ID NO: 270140
  chr17:3561543-3561627
  hypo

SEQ ID NO: 446077 - DNA, 250 bp, Homo sapiens; identical to SEQ ID NO: 270141
  chr17:3562849-3563099
  hypo

SEQ ID NO: 446078 - DNA, 43 bp, Homo sapiens; identical to SEQ ID NO: 217477
  chr17:3577299-3577342
  hypo

SEQ ID NO: 446079 - DNA, 190 bp, Homo sapiens; identical to SEQ ID NO: 270144
  chr17:3653522-3653712
  hypo

SEQ ID NO: 446080 - DNA, 99 bp, Homo sapiens; identical to SEQ ID NO: 270145
  chr17:3660155-3660254
  hypo

SEQ ID NO: 446081 - DNA, 67 bp, Homo sapiens; identical to SEQ ID NO: 217480
  chr17:3664936-3665003
  hypo

SEQ ID NO: 446082 - DNA, 158 bp, Homo sapiens; identical to SEQ ID NO: 270147
  chr17:3711312-3711470
  hypo

SEQ ID NO: 446083 - DNA, 73 bp, Homo sapiens; identical to SEQ ID NO: 217482
  chr17:3721569-3721642
  hypo

SEQ ID NO: 446084 - DNA, 39 bp, Homo sapiens; identical to SEQ ID NO: 321834
  chr17:3741553-3741592
  hypo

SEQ ID NO: 446085 - DNA, 240 bp, Homo sapiens; identical to SEQ ID NO: 321835
  chr17:3755034-3755274
  hypo

SEQ ID NO: 446086 - DNA, 155 bp, Homo sapiens; identical to SEQ ID NO: 225197
  chr17:3778891-3779046
  hypo

SEQ ID NO: 446087 - DNA, 111 bp, Homo sapiens; identical to SEQ ID NO: 270152
  chr17:3793345-3793456
  hypo

SEQ ID NO: 446088 - DNA, 175 bp, Homo sapiens; identical to SEQ ID NO: 217483
  chr17:3844263-3844438
  hypo

SEQ ID NO: 446089 - DNA, 135 bp, Homo sapiens; identical to SEQ ID NO: 217484
  chr17:3844806-3844941
  hypo

SEQ ID NO: 446090 - DNA, 370 bp, Homo sapiens; identical to SEQ ID NO: 270155
  chr17:3850755-3851125
  hypo

SEQ ID NO: 446091 - DNA, 91 bp, Homo sapiens; identical to SEQ ID NO: 217486
  chr17:3884835-3884926
  hypo

SEQ ID NO: 446092 - DNA, 558 bp, Homo sapiens; identical to SEQ ID NO: 270158
  chr17:3980237-3980795
  hypo

SEQ ID NO: 446093 - DNA, 31 bp, Homo sapiens; identical to SEQ ID NO: 217488
  chr17:4039291-4039322
  hypo

SEQ ID NO: 446094 - DNA, 31 bp, Homo sapiens; identical to SEQ ID NO: 217489
  chr17:4039622-4039653
  hypo

SEQ ID NO: 446095 - DNA, 104 bp, Homo sapiens; identical to SEQ ID NO: 270162
  chr17:4048008-4048112
  hypo

SEQ ID NO: 446096 - DNA, 31 bp, Homo sapiens; identical to SEQ ID NO: 270164
  chr17:4063865-4063896
  hypo

SEQ ID NO: 446097 - DNA, 288 bp, Homo sapiens; identical to SEQ ID NO: 270165
  chr17:4074112-4074400
  hypo

SEQ ID NO: 446098 - DNA, 85 bp, Homo sapiens; identical to SEQ ID NO: 217490
  chr17:4076474-4076559
  hypo

SEQ ID NO: 446099 - DNA, 307 bp, Homo sapiens; identical to SEQ ID NO: 270167
  chr17:4079169-4079476
  hypo

SEQ ID NO: 446100 - DNA, 41 bp, Homo sapiens; identical to SEQ ID NO: 270168
  chr17:4090911-4090952
  hypo

SEQ ID NO: 446101 - DNA, 106 bp, Homo sapiens
  chr17:4144869-4144975
  hypo
tgagcttctaacagaagctgtatgactccagagttcaacctcaaccatcatgatgcactctccaactagttccaagactgttttgctttgatcatctcaagagaaa

SEQ ID NO: 446102 - DNA, 206 bp, Homo sapiens; identical to SEQ ID NO: 270171
  chr17:4151786-4151992
  hypo

SEQ ID NO: 446103 - DNA, 45 bp, Homo sapiens; identical to SEQ ID NO: 217491
  chr17:4161526-4161571
  hypo

SEQ ID NO: 446104 - DNA, 141 bp, Homo sapiens; identical to SEQ ID NO: 217492
  chr17:4215641-4215782
  hypo

SEQ ID NO: 446105 - DNA, 120 bp, Homo sapiens; identical to SEQ ID NO: 270175
  chr17:4250033-4250153
  hypo

SEQ ID NO: 446106 - DNA, 36 bp, Homo sapiens; identical to SEQ ID NO: 217494
  chr17:4273440-4273476
  hypo

SEQ ID NO: 446107 - DNA, 37 bp, Homo sapiens; identical to SEQ ID NO: 270177
  chr17:4289153-4289190
  hypo

SEQ ID NO: 446108 - DNA, 87 bp, Homo sapiens; identical to SEQ ID NO: 217496
  chr17:4461986-4462073
  hypo

SEQ ID NO: 446109 - DNA, 122 bp, Homo sapiens; identical to SEQ ID NO: 270183
  chr17:4643851-4643973
  hypo

SEQ ID NO: 446110 - DNA, 42 bp, Homo sapiens; identical to SEQ ID NO: 225200
  chr17:4647512-4647554
  hypo

SEQ ID NO: 446111 - DNA, 36 bp, Homo sapiens; identical to SEQ ID NO: 270184
  chr17:4649705-4649741
  hypo

SEQ ID NO: 446112 - DNA, 118 bp, Homo sapiens; identical to SEQ ID NO: 204382
  chr17:4901561-4901679
  hypo

SEQ ID NO: 446113 - DNA, 157 bp, Homo sapiens; identical to SEQ ID NO: 217502
  chr17:4916076-4916233
  hypo

SEQ ID NO: 446114 - DNA, 31 bp, Homo sapiens; identical to SEQ ID NO: 270188
  chr17:4928167-4928198
  hypo

SEQ ID NO: 446115 - DNA, 281 bp, Homo sapiens; identical to SEQ ID NO: 291909
  chr17:4938733-4939014
  hypo

SEQ ID NO: 446116 - DNA, 35 bp, Homo sapiens; identical to SEQ ID NO: 270189
  chr17:5168548-5168583
  hypo

SEQ ID NO: 446117 - DNA, 164 bp, Homo sapiens; identical to SEQ ID NO: 217505
  chr17:5392214-5392378
  hypo

SEQ ID NO: 446118 - DNA, 171 bp, Homo sapiens; identical to SEQ ID NO: 217506
  chr17:5405104-5405275
  hypo

SEQ ID NO: 446119 - DNA, 163 bp, Homo sapiens; identical to SEQ ID NO: 270193
  chr17:5465216-5465379
  hypo

SEQ ID NO: 446120 - DNA, 147 bp, Homo sapiens; identical to SEQ ID NO: 217507
  chr17:6023533-6023680
  hypo

SEQ ID NO: 446121 - DNA, 157 bp, Homo sapiens; identical to SEQ ID NO: 217508
  chr17:6023875-6024032
  hypo

SEQ ID NO: 446122 - DNA, 138 bp, Homo sapiens; identical to SEQ ID NO: 270195
  chr17:6419897-6420035
  hypo

SEQ ID NO: 446123 - DNA, 174 bp, Homo sapiens; identical to SEQ ID NO: 270196
  chr17:6456918-6457092
  hypo

SEQ ID NO: 446124 - DNA, 603 bp, Homo sapiens; identical to SEQ ID NO: 291921
  chr17:6459172-6459775
  hypo

SEQ ID NO: 446125 - DNA, 42 bp, Homo sapiens; identical to SEQ ID NO: 217509
  chr17:6470126-6470168
  hypo

SEQ ID NO: 446126 - DNA, 37 bp, Homo sapiens; identical to SEQ ID NO: 270199
  chr17:6755547-6755584
  hypo

SEQ ID NO: 446127 - DNA, 37 bp, Homo sapiens; identical to SEQ ID NO: 270200
  chr17:6755824-6755861
  hypo

SEQ ID NO: 446128 - DNA, 92 bp, Homo sapiens; identical to SEQ ID NO: 270201
  chr17:6899902-6899994
  hypo

SEQ ID NO: 446129 - DNA, 39 bp, Homo sapiens; identical to SEQ ID NO: 270202
  chr17:7048539-7048578
  hypo

SEQ ID NO: 446130 - DNA, 159 bp, Homo sapiens; identical to SEQ ID NO: 270203
  chr17:7076077-7076236
  hypo

SEQ ID NO: 446131 - DNA, 64 bp, Homo sapiens; identical to SEQ ID NO: 217510
  chr17:7077090-7077154
  hypo

SEQ ID NO: 446132 - DNA, 34 bp, Homo sapiens; identical to SEQ ID NO: 270205
  chr17:7116701-7116735
  hypo

SEQ ID NO: 446133 - DNA, 211 bp, Homo sapiens; identical to SEQ ID NO: 270206
  chr17:7121867-7122078
  hypo

SEQ ID NO: 446134 - DNA, 190 bp, Homo sapiens; identical to SEQ ID NO: 291934
  chr17:7146325-7146515
  hypo

SEQ ID NO: 446135 - DNA, 76 bp, Homo sapiens; identical to SEQ ID NO: 291935
  chr17:7146588-7146664
  hypo

SEQ ID NO: 446136 - DNA, 56 bp, Homo sapiens; identical to SEQ ID NO: 270210
  chr17:7192899-7192955
  hypo

SEQ ID NO: 446137 - DNA, 293 bp, Homo sapiens; identical to SEQ ID NO: 291942
  chr17:7199730-7200023
  hypo

SEQ ID NO: 446138 - DNA, 302 bp, Homo sapiens; identical to SEQ ID NO: 270212
  chr17:7227167-7227469
  hypo

SEQ ID NO: 446139 - DNA, 140 bp, Homo sapiens; identical to SEQ ID NO: 321913
  chr17:7285130-7285270
  hypo

SEQ ID NO: 446140 - DNA, 51 bp, Homo sapiens; identical to SEQ ID NO: 270214
  chr17:7292301-7292352
  hypo

SEQ ID NO: 446141 - DNA, 43 bp, Homo sapiens; identical to SEQ ID NO: 270215
  chr17:7318437-7318480
  hypo

SEQ ID NO: 446142 - DNA, 33 bp, Homo sapiens; identical to SEQ ID NO: 270216
  chr17:7318916-7318949
  hypo

SEQ ID NO: 446143 - DNA, 629 bp, Homo sapiens; identical to SEQ ID NO: 291948
  chr17:7340252-7340881
  hypo

SEQ ID NO: 446144 - DNA, 160 bp, Homo sapiens; identical to SEQ ID NO: 217518
  chr17:7367404-7367564
  hypo

SEQ ID NO: 446145 - DNA, 72 bp, Homo sapiens; identical to SEQ ID NO: 217519
  chr17:7368875-7368947
  hypo

SEQ ID NO: 446146 - DNA, 35 bp, Homo sapiens; identical to SEQ ID NO: 270220
  chr17:7384627-7384662
  hypo

SEQ ID NO: 446147 - DNA, 249 bp, Homo sapiens; identical to SEQ ID NO: 321923
  chr17:7419658-7419907
  hypo

SEQ ID NO: 446148 - DNA, 222 bp, Homo sapiens; identical to SEQ ID NO: 321924
  chr17:7460247-7460469
  hypo

SEQ ID NO: 446149 - DNA, 101 bp, Homo sapiens; identical to SEQ ID NO: 217522
  chr17:7480063-7480164
  hypo

SEQ ID NO: 446150 - DNA, 385 bp, Homo sapiens; identical to SEQ ID NO: 291954
  chr17:7486279-7486664
  hypo

SEQ ID NO: 446151 - DNA, 317 bp, Homo sapiens; identical to SEQ ID NO: 291955
  chr17:7486947-7487264
  hypo

SEQ ID NO: 446152 - DNA, 619 bp, Homo sapiens; identical to SEQ ID NO: 217523
  chr17:7491960-7492579
  hypo

SEQ ID NO: 446153 - DNA, 40 bp, Homo sapiens; identical to SEQ ID NO: 411390
  chr17:7493109-7493149
  hypo

SEQ ID NO: 446154 - DNA, 273 bp, Homo sapiens; identical to SEQ ID NO: 270229
  chr17:7493323-7493596
  hypo

SEQ ID NO: 446155 - DNA, 83 bp, Homo sapiens
  chr17:7493626-7493709
  hypo
cccctccctgaagcacaggcaatttaaagccaattctttccacaatgggatcaaacacagggggatgaagtgccctcagggcc

SEQ ID NO: 446156 - DNA, 97 bp, Homo sapiens; identical to SEQ ID NO: 270231
  chr17:7496712-7496809
  hypo

SEQ ID NO: 446157 - DNA, 41 bp, Homo sapiens; identical to SEQ ID NO: 217525
  chr17:7536911-7536952
  hypo

SEQ ID NO: 446158 - DNA, 165 bp, Homo sapiens; identical to SEQ ID NO: 204402
  chr17:7571719-7571884
  hypo

SEQ ID NO: 446159 - DNA, 773 bp, Homo sapiens; identical to SEQ ID NO: 204403
  chr17:7572184-7572957
  hypo

SEQ ID NO: 446160 - DNA, 46 bp, Homo sapiens; identical to SEQ ID NO: 204404
  chr17:7573922-7573968
  hypo

SEQ ID NO: 446161 - DNA, 301 bp, Homo sapiens; identical to SEQ ID NO: 204405
  chr17:7576546-7576847
  hypo

SEQ ID NO: 446162 - DNA, 163 bp, Homo sapiens; identical to SEQ ID NO: 204406
  chr17:7578570-7578733
  hypo

SEQ ID NO: 446163 - DNA, 36 bp, Homo sapiens; identical to SEQ ID NO: 204407
  chr17:7579249-7579285
  hypo

SEQ ID NO: 446164 - DNA, 60 bp, Homo sapiens; identical to SEQ ID NO: 204408
  chr17:7579880-7579940
  hypo

SEQ ID NO: 446165 - DNA, 329 bp, Homo sapiens; identical to SEQ ID NO: 204409
  chr17:7590625-7590954
  hypo

SEQ ID NO: 446166 - DNA, 206 bp, Homo sapiens; identical to SEQ ID NO: 270233
  chr17:7662608-7662814
  hypo

SEQ ID NO: 446167 - DNA, 139 bp, Homo sapiens; identical to SEQ ID NO: 270235
  chr17:7702407-7702546
  hypo

SEQ ID NO: 446168 - DNA, 176 bp, Homo sapiens; identical to SEQ ID NO: 270236
  chr17:7710676-7710852
  hypo

SEQ ID NO: 446169 - DNA, 33 bp, Homo sapiens; identical to SEQ ID NO: 321946
  chr17:7727216-7727249
  hypo

SEQ ID NO: 446170 - DNA, 95 bp, Homo sapiens; identical to SEQ ID NO: 217535
  chr17:7769321-7769416
  hypo

SEQ ID NO: 446171 - DNA, 35 bp, Homo sapiens; identical to SEQ ID NO: 217536
  chr17:7769716-7769751
  hypo

SEQ ID NO: 446172 - DNA, 42 bp, Homo sapiens; identical to SEQ ID NO: 270240
  chr17:7797154-7797196
  hypo

SEQ ID NO: 446173 - DNA, 184 bp, Homo sapiens; identical to SEQ ID NO: 217537
  chr17:7798625-7798809
  hypo

SEQ ID NO: 446174 - DNA, 101 bp, Homo sapiens; identical to SEQ ID NO: 217538
  chr17:7800249-7800350
  hypo

SEQ ID NO: 446175 - DNA, 478 bp, Homo sapiens; identical to SEQ ID NO: 270245
  chr17:7809785-7810263
  hypo

SEQ ID NO: 446176 - DNA, 49 bp, Homo sapiens; identical to SEQ ID NO: 217542
  chr17:7811072-7811121
  hypo

SEQ ID NO: 446177 - DNA, 126 bp, Homo sapiens; identical to SEQ ID NO: 270247
  chr17:7812554-7812680
  hypo

SEQ ID NO: 446178 - DNA, 79 bp, Homo sapiens; identical to SEQ ID NO: 217543
  chr17:7813720-7813799
  hypo

SEQ ID NO: 446179 - DNA, 120 bp, Homo sapiens; identical to SEQ ID NO: 217544
  chr17:7892730-7892850
  hypo

SEQ ID NO: 446180 - DNA, 213 bp, Homo sapiens; identical to SEQ ID NO: 270252
  chr17:8064842-8065055
  hypo

SEQ ID NO: 446181 - DNA, 472 bp, Homo sapiens; identical to SEQ ID NO: 217546
  chr17:8138410-8138882
  hypo

SEQ ID NO: 446182 - DNA, 38 bp, Homo sapiens; identical to SEQ ID NO: 270257
  chr17:8276463-8276501
  hypo

SEQ ID NO: 446183 - DNA, 244 bp, Homo sapiens; identical to SEQ ID NO: 321967
  chr17:8295898-8296142
  hypo

SEQ ID NO: 446184 - DNA, 258 bp, Homo sapiens; identical to SEQ ID NO: 217549
  chr17:8311456-8311714
  hypo

SEQ ID NO: 446185 - DNA, 103 bp, Homo sapiens; identical to SEQ ID NO: 270260
  chr17:8319005-8319108
  hypo

SEQ ID NO: 446186 - DNA, 83 bp, Homo sapiens; identical to SEQ ID NO: 217550
  chr17:8325971-8326054
  hypo

SEQ ID NO: 446187 - DNA, 59 bp, Homo sapiens; identical to SEQ ID NO: 217551
  chr17:8365227-8365286
  hypo

SEQ ID NO: 446188 - DNA, 142 bp, Homo sapiens; identical to SEQ ID NO: 270263
  chr17:8371939-8372081
  hypo

SEQ ID NO: 446189 - DNA, 379 bp, Homo sapiens; identical to SEQ ID NO: 270268
  chr17:8430760-8431139
  hypo

SEQ ID NO: 446190 - DNA, 158 bp, Homo sapiens; identical to SEQ ID NO: 217553
  chr17:8438422-8438580
  hypo

SEQ ID NO: 446191 - DNA, 104 bp, Homo sapiens; identical to SEQ ID NO: 270270
  chr17:8458246-8458350
  hypo

SEQ ID NO: 446192 - DNA, 57 bp, Homo sapiens; identical to SEQ ID NO: 270271
  chr17:8471465-8471522
  hypo

SEQ ID NO: 446193 - DNA, 386 bp, Homo sapiens; identical to SEQ ID NO: 270272
  chr17:8638483-8638869
  hypo

SEQ ID NO: 446194 - DNA, 126 bp, Homo sapiens; identical to SEQ ID NO: 217554
  chr17:8700777-8700903
  hypo

SEQ ID NO: 446195 - DNA, 156 bp, Homo sapiens; identical to SEQ ID NO: 270275
  chr17:8738595-8738751
  hypo

SEQ ID NO: 446196 - DNA, 33 bp, Homo sapiens; identical to SEQ ID NO: 225226
  chr17:8759640-8759673
  hypo

SEQ ID NO: 446197 - DNA, 88 bp, Homo sapiens; identical to SEQ ID NO: 270277
  chr17:8814770-8814858
  hypo

SEQ ID NO: 446198 - DNA, 102 bp, Homo sapiens; identical to SEQ ID NO: 270278
  chr17:8932900-8933002
  hypo

SEQ ID NO: 446199 - DNA, 44 bp, Homo sapiens; identical to SEQ ID NO: 270280
  chr17:9041943-9041987
  hypo

SEQ ID NO: 446200 - DNA, 147 bp, Homo sapiens; identical to SEQ ID NO: 217556
  chr17:9054227-9054374
  hypo

SEQ ID NO: 446201 - DNA, 37 bp, Homo sapiens; identical to SEQ ID NO: 270282
  chr17:9065578-9065615
  hypo

SEQ ID NO: 446202 - DNA, 44 bp, Homo sapiens; identical to SEQ ID NO: 321991
  chr17:9065675-9065719
  hypo

SEQ ID NO: 446203 - DNA, 106 bp, Homo sapiens; identical to SEQ ID NO: 321992
  chr17:9065749-9065855
  hypo

SEQ ID NO: 446204 - DNA, 456 bp, Homo sapiens; identical to SEQ ID NO: 270284
  chr17:9065915-9066371
  hypo

SEQ ID NO: 446205 - DNA, 117 bp, Homo sapiens; identical to SEQ ID NO: 270285
  chr17:9066671-9066788
  hypo

SEQ ID NO: 446206 - DNA, 33 bp, Homo sapiens; identical to SEQ ID NO: 270286
  chr17:9122496-9122529
  hypo

SEQ ID NO: 446207 - DNA, 275 bp, Homo sapiens; identical to SEQ ID NO: 270287
  chr17:9124886-9125161
  hypo

SEQ ID NO: 446208 - DNA, 204 bp, Homo sapiens; identical to SEQ ID NO: 217558
  chr17:9127008-9127212
  hypo

SEQ ID NO: 446209 - DNA, 191 bp, Homo sapiens; identical to SEQ ID NO: 217559
  chr17:9150998-9151189
  hypo

SEQ ID NO: 446210 - DNA, 77 bp, Homo sapiens; identical to SEQ ID NO: 270290
  chr17:9153811-9153888
  hypo

SEQ ID NO: 446211 - DNA, 210 bp, Homo sapiens; identical to SEQ ID NO: 270291
  chr17:9154766-9154976
  hypo

SEQ ID NO: 446212 - DNA, 193 bp, Homo sapiens; identical to SEQ ID NO: 270293
  chr17:9264056-9264249
  hypo

SEQ ID NO: 446213 - DNA, 31 bp, Homo sapiens; identical to SEQ ID NO: 217561
  chr17:9393283-9393314
  hypo

SEQ ID NO: 446214 - DNA, 164 bp, Homo sapiens; identical to SEQ ID NO: 270295
  chr17:9474685-9474849
  hypo

SEQ ID NO: 446215 - DNA, 38 bp, Homo sapiens; identical to SEQ ID NO: 270296
  chr17:9576953-9576991
  hypo

SEQ ID NO: 446216 - DNA, 329 bp, Homo sapiens; identical to SEQ ID NO: 270298
  chr17:9674879-9675208
  hypo

SEQ ID NO: 446217 - DNA, 104 bp, Homo sapiens; identical to SEQ ID NO: 270300
  chr17:9719770-9719874
  hypo

SEQ ID NO: 446218 - DNA, 171 bp, Homo sapiens; identical to SEQ ID NO: 322011
  chr17:9807968-9808139
  hypo

SEQ ID NO: 446219 - DNA, 265 bp, Homo sapiens; identical to SEQ ID NO: 322012
  chr17:9808175-9808440
  hypo

SEQ ID NO: 446220 - DNA, 99 bp, Homo sapiens; identical to SEQ ID NO: 217564
  chr17:9893605-9893704
  hypo

SEQ ID NO: 446221 - DNA, 184 bp, Homo sapiens; identical to SEQ ID NO: 270305
  chr17:10216484-10216668
  hypo

SEQ ID NO: 446222 - DNA, 64 bp, Homo sapiens; identical to SEQ ID NO: 270306
  chr17:10561724-10561788
  hypo

SEQ ID NO: 446223 - DNA, 169 bp, Homo sapiens; identical to SEQ ID NO: 270307
  chr17:11774905-11775074
  hypo

SEQ ID NO: 446224 - DNA, 62 bp, Homo sapiens; identical to SEQ ID NO: 270308
  chr17:12018835-12018897
  hypo

SEQ ID NO: 446225 - DNA, 203 bp, Homo sapiens; identical to SEQ ID NO: 217567
  chr17:12517842-12518045
  hypo

SEQ ID NO: 446226 - DNA, 44 bp, Homo sapiens; identical to SEQ ID NO: 217568
  chr17:12744163-12744207
  hypo

SEQ ID NO: 446227 - DNA, 135 bp, Homo sapiens; identical to SEQ ID NO: 204432
  chr17:12877185-12877320
  hypo

SEQ ID NO: 446228 - DNA, 48 bp, Homo sapiens; identical to SEQ ID NO: 204433
  chr17:12877650-12877698
  hypo

SEQ ID NO: 446229 - DNA, 242 bp, Homo sapiens; identical to SEQ ID NO: 217571
  chr17:12905698-12905940
  hypo

SEQ ID NO: 446230 - DNA, 283 bp, Homo sapiens; identical to SEQ ID NO: 270314
  chr17:13950031-13950314
  hypo

SEQ ID NO: 446231 - DNA, 44 bp, Homo sapiens; identical to SEQ ID NO: 217574
  chr17:14236462-14236506
  hypo

SEQ ID NO: 446232 - DNA, 38 bp, Homo sapiens; identical to SEQ ID NO: 270316
  chr17:14674674-14674712
  hypo

SEQ ID NO: 446233 - DNA, 80 bp, Homo sapiens; identical to SEQ ID NO: 270317
  chr17:14739356-14739436
  hypo

SEQ ID NO: 446234 - DNA, 89 bp, Homo sapiens; identical to SEQ ID NO: 217575
  chr17:15411143-15411232
  hypo

SEQ ID NO: 446235 - DNA, 153 bp, Homo sapiens; identical to SEQ ID NO: 270319
  chr17:15500064-15500217
  hypo

SEQ ID NO: 446236 - DNA, 87 bp, Homo sapiens; identical to SEQ ID NO: 270320
  chr17:15608019-15608106
  hypo

SEQ ID NO: 446237 - DNA, 45 bp, Homo sapiens; identical to SEQ ID NO: 270321
  chr17:15843704-15843749
  hypo

SEQ ID NO: 446238 - DNA, 31 bp, Homo sapiens; identical to SEQ ID NO: 270322
  chr17:15870826-15870857
  hypo

SEQ ID NO: 446239 - DNA, 186 bp, Homo sapiens; identical to SEQ ID NO: 270323
  chr17:15873031-15873217
  hypo

SEQ ID NO: 446240 - DNA, 55 bp, Homo sapiens; identical to SEQ ID NO: 270324
  chr17:15952212-15952267
  hypo

SEQ ID NO: 446241 - DNA, 211 bp, Homo sapiens; identical to SEQ ID NO: 217576
  chr17:15952498-15952709
  hypo

SEQ ID NO: 446242 - DNA, 120 bp, Homo sapiens; identical to SEQ ID NO: 270326
  chr17:16149817-16149937
  hypo

SEQ ID NO: 446243 - DNA, 40 bp, Homo sapiens; identical to SEQ ID NO: 270328
  chr17:16305047-16305087
  hypo

SEQ ID NO: 446244 - DNA, 209 bp, Homo sapiens; identical to SEQ ID NO: 270329
  chr17:16369823-16370032
  hypo

SEQ ID NO: 446245 - DNA, 121 bp, Homo sapiens; identical to SEQ ID NO: 217582
  chr17:16385291-16385412
  hypo

SEQ ID NO: 446246 - DNA, 273 bp, Homo sapiens; identical to SEQ ID NO: 217583
  chr17:16391199-16391472
  hypo

SEQ ID NO: 446247 - DNA, 57 bp, Homo sapiens; identical to SEQ ID NO: 225243
  chr17:16395229-16395286
  hypo

SEQ ID NO: 446248 - DNA, 172 bp, Homo sapiens; identical to SEQ ID NO: 270332
  chr17:16399904-16400076
  hypo

SEQ ID NO: 446249 - DNA, 200 bp, Homo sapiens; identical to SEQ ID NO: 270333
  chr17:16434315-16434515
  hypo

SEQ ID NO: 446250 - DNA, 197 bp, Homo sapiens; identical to SEQ ID NO: 270335
  chr17:16927737-16927934
  hypo

SEQ ID NO: 446251 - DNA, 44 bp, Homo sapiens; identical to SEQ ID NO: 270336
  chr17:16929738-16929782
  hypo

SEQ ID NO: 446252 - DNA, 200 bp, Homo sapiens; identical to SEQ ID NO: 270337
  chr17:16960605-16960805
  hypo

SEQ ID NO: 446253 - DNA, 294 bp, Homo sapiens; identical to SEQ ID NO: 270338
  chr17:16994699-16994993
  hypo

SEQ ID NO: 446254 - DNA, 119 bp, Homo sapiens; identical to SEQ ID NO: 270339
  chr17:17012232-17012351
  hypo

SEQ ID NO: 446255 - DNA, 484 bp, Homo sapiens; identical to SEQ ID NO: 270343
  chr17:17067430-17067914
  hypo

SEQ ID NO: 446256 - DNA, 351 bp, Homo sapiens; identical to SEQ ID NO: 217587
  chr17:17080460-17080811
  hypo

SEQ ID NO: 446257 - DNA, 200 bp, Homo sapiens; identical to SEQ ID NO: 270345
  chr17:17083737-17083937
  hypo

SEQ ID NO: 446258 - DNA, 401 bp, Homo sapiens; identical to SEQ ID NO: 270347
  chr17:17105843-17106244
  hypo

SEQ ID NO: 446259 - DNA, 63 bp, Homo sapiens; identical to SEQ ID NO: 322072
  chr17:17123825-17123888
  hypo

SEQ ID NO: 446260 - DNA, 260 bp, Homo sapiens; identical to SEQ ID NO: 270350
  chr17:17124507-17124767
  hypo

SEQ ID NO: 446261 - DNA, 98 bp, Homo sapiens; identical to SEQ ID NO: 270351
  chr17:17142228-17142326
  hypo

SEQ ID NO: 446262 - DNA, 59 bp, Homo sapiens; identical to SEQ ID NO: 270352
  chr17:17223897-17223956
  hypo

SEQ ID NO: 446263 - DNA, 206 bp, Homo sapiens; identical to SEQ ID NO: 270354
  chr17:17250660-17250866
  hypo

SEQ ID NO: 446264 - DNA, 311 bp, Homo sapiens; identical to SEQ ID NO: 217590
  chr17:17251122-17251433
  hypo

SEQ ID NO: 446265 - DNA, 101 bp, Homo sapiens; identical to SEQ ID NO: 270356
  chr17:17255033-17255134
  hypo

SEQ ID NO: 446266 - DNA, 124 bp, Homo sapiens; identical to SEQ ID NO: 270357
  chr17:17280606-17280730
  hypo

SEQ ID NO: 446267 - DNA, 36 bp, Homo sapiens; identical to SEQ ID NO: 270358
  chr17:17303348-17303384
  hypo

SEQ ID NO: 446268 - DNA, 183 bp, Homo sapiens; identical to SEQ ID NO: 270359
  chr17:17325164-17325347
  hypo

SEQ ID NO: 446269 - DNA, 77 bp, Homo sapiens; identical to SEQ ID NO: 217591
  chr17:17330586-17330663
  hypo

SEQ ID NO: 446270 - DNA, 247 bp, Homo sapiens; identical to SEQ ID NO: 270361
  chr17:17344148-17344395
  hypo

SEQ ID NO: 446271 - DNA, 52 bp, Homo sapiens; identical to SEQ ID NO: 217593
  chr17:17402429-17402481
  hypo

SEQ ID NO: 446272 - DNA, 36 bp, Homo sapiens; identical to SEQ ID NO: 270363
  chr17:17431920-17431956
  hypo

SEQ ID NO: 446273 - DNA, 132 bp, Homo sapiens; identical to SEQ ID NO: 217594
  chr17:17447945-17448077
  hypo

SEQ ID NO: 446274 - DNA, 92 bp, Homo sapiens; identical to SEQ ID NO: 270366
  chr17:17590235-17590327
  hypo

SEQ ID NO: 446275 - DNA, 31 bp, Homo sapiens; identical to SEQ ID NO: 270367
  chr17:17590447-17590478
  hypo

SEQ ID NO: 446276 - DNA, 130 bp, Homo sapiens; identical to SEQ ID NO: 270368
  chr17:17602525-17602655
  hypo

SEQ ID NO: 446277 - DNA, 111 bp, Homo sapiens; identical to SEQ ID NO: 270369
  chr17:17614485-17614596
  hypo

SEQ ID NO: 446278 - DNA, 296 bp, Homo sapiens; identical to SEQ ID NO: 270370
  chr17:17615237-17615533
  hypo

SEQ ID NO: 446279 - DNA, 92 bp, Homo sapiens; identical to SEQ ID NO: 217595
  chr17:17618837-17618929
  hypo

SEQ ID NO: 446280 - DNA, 35 bp, Homo sapiens; identical to SEQ ID NO: 270373
  chr17:17697718-17697753
  hypo

SEQ ID NO: 446281 - DNA, 66 bp, Homo sapiens; identical to SEQ ID NO: 270374
  chr17:17717225-17717291
  hypo

SEQ ID NO: 446282 - DNA, 87 bp, Homo sapiens; identical to SEQ ID NO: 270376
  chr17:17748668-17748755
  hypo

SEQ ID NO: 446283 - DNA, 182 bp, Homo sapiens; identical to SEQ ID NO: 270377
  chr17:17881580-17881762
  hypo

SEQ ID NO: 446284 - DNA, 108 bp, Homo sapiens; identical to SEQ ID NO: 270378
  chr17:17908138-17908246
  hypo

SEQ ID NO: 446285 - DNA, 90 bp, Homo sapiens; identical to SEQ ID NO: 217598
  chr17:17910221-17910311
  hypo

SEQ ID NO: 446286 - DNA, 135 bp, Homo sapiens; identical to SEQ ID NO: 217599
  chr17:17910351-17910486
  hypo

SEQ ID NO: 446287 - DNA, 174 bp, Homo sapiens; identical to SEQ ID NO: 270381
  chr17:18026591-18026765
  hypo

SEQ ID NO: 446288 - DNA, 188 bp, Homo sapiens; identical to SEQ ID NO: 217601
  chr17:18139366-18139554
  hypo

SEQ ID NO: 446289 - DNA, 98 bp, Homo sapiens; identical to SEQ ID NO: 270384
  chr17:18144920-18145018
  hypo

SEQ ID NO: 446290 - DNA, 453 bp, Homo sapiens; identical to SEQ ID NO: 270385
  chr17:18149873-18150326
  hypo

SEQ ID NO: 446291 - DNA, 77 bp, Homo sapiens; identical to SEQ ID NO: 270388
  chr17:18167537-18167614
  hypo

SEQ ID NO: 446292 - DNA, 61 bp, Homo sapiens; identical to SEQ ID NO: 270389
  chr17:18267503-18267564
  hypo

SEQ ID NO: 446293 - DNA, 38 bp, Homo sapiens; identical to SEQ ID NO: 270390
  chr17:18278353-18278391
  hypo

SEQ ID NO: 446294 - DNA, 139 bp, Homo sapiens; identical to SEQ ID NO: 270391
  chr17:18399916-18400055
  hypo

SEQ ID NO: 446295 - DNA, 79 bp, Homo sapiens; identical to SEQ ID NO: 270392
  chr17:18527462-18527541
  hypo

SEQ ID NO: 446296 - DNA, 217 bp, Homo sapiens; identical to SEQ ID NO: 270393
  chr17:18677636-18677853
  hypo

SEQ ID NO: 446297 - DNA, 34 bp, Homo sapiens; identical to SEQ ID NO: 270394
  chr17:18760368-18760402
  hypo

SEQ ID NO: 446298 - DNA, 196 bp, Homo sapiens; identical to SEQ ID NO: 270395
  chr17:18853337-18853533
  hypo

SEQ ID NO: 446299 - DNA, 169 bp, Homo sapiens; identical to SEQ ID NO: 270398
  chr17:18885752-18885921
  hypo

SEQ ID NO: 446300 - DNA, 94 bp, Homo sapiens; identical to SEQ ID NO: 270399
  chr17:18895396-18895490
  hypo

SEQ ID NO: 446301 - DNA, 190 bp, Homo sapiens; identical to SEQ ID NO: 217603
  chr17:18918297-18918487
  hypo

SEQ ID NO: 446302 - DNA, 88 bp, Homo sapiens; identical to SEQ ID NO: 270401
  chr17:19203399-19203487
  hypo

SEQ ID NO: 446303 - DNA, 79 bp, Homo sapiens; identical to SEQ ID NO: 217605
  chr17:19211655-19211734
  hypo

SEQ ID NO: 446304 - DNA, 216 bp, Homo sapiens; identical to SEQ ID NO: 322128
  chr17:19211764-19211980
  hypo

SEQ ID NO: 446305 - DNA, 102 bp, Homo sapiens; identical to SEQ ID NO: 217606
  chr17:19233948-19234050
  hypo

SEQ ID NO: 446306 - DNA, 49 bp, Homo sapiens; identical to SEQ ID NO: 270404
  chr17:19234671-19234720
  hypo

SEQ ID NO: 446307 - DNA, 268 bp, Homo sapiens; identical to SEQ ID NO: 270406
  chr17:19606607-19606875
  hypo

SEQ ID NO: 446308 - DNA, 90 bp, Homo sapiens; identical to SEQ ID NO: 270407
  chr17:19616225-19616315
  hypo

SEQ ID NO: 446309 - DNA, 401 bp, Homo sapiens; identical to SEQ ID NO: 270408
  chr17:19617063-19617464
  hypo

SEQ ID NO: 446310 - DNA, 77 bp, Homo sapiens; identical to SEQ ID NO: 217610
  chr17:19618657-19618734
  hypo

SEQ ID NO: 446311 - DNA, 65 bp, Homo sapiens; identical to SEQ ID NO: 217611
  chr17:19641468-19641533
  hypo

SEQ ID NO: 446312 - DNA, 58 bp, Homo sapiens; identical to SEQ ID NO: 270412
  chr17:19642884-19642942
  hypo

SEQ ID NO: 446313 - DNA, 37 bp, Homo sapiens; identical to SEQ ID NO: 270413
  chr17:19643641-19643678
  hypo

SEQ ID NO: 446314 - DNA, 174 bp, Homo sapiens; identical to SEQ ID NO: 270414
  chr17:19644760-19644934
  hypo

SEQ ID NO: 446315 - DNA, 36 bp, Homo sapiens; identical to SEQ ID NO: 270416
  chr17:19647412-19647448
  hypo

SEQ ID NO: 446316 - DNA, 88 bp, Homo sapiens; identical to SEQ ID NO: 270417
  chr17:19650045-19650133
  hypo

SEQ ID NO: 446317 - DNA, 44 bp, Homo sapiens; identical to SEQ ID NO: 270418
  chr17:19686487-19686531
  hypo

SEQ ID NO: 446318 - DNA, 104 bp, Homo sapiens; identical to SEQ ID NO: 217612
  chr17:19687003-19687107
  hypo

SEQ ID NO: 446319 - DNA, 120 bp, Homo sapiens; identical to SEQ ID NO: 270420
  chr17:19736607-19736727
  hypo

SEQ ID NO: 446320 - DNA, 71 bp, Homo sapiens; identical to SEQ ID NO: 270423
  chr17:19772163-19772234
  hypo

SEQ ID NO: 446321 - DNA, 45 bp, Homo sapiens; identical to SEQ ID NO: 270424
  chr17:19773273-19773318
  hypo

SEQ ID NO: 446322 - DNA, 93 bp, Homo sapiens; identical to SEQ ID NO: 270426
  chr17:19861688-19861781
  hypo

SEQ ID NO: 446323 - DNA, 120 bp, Homo sapiens; identical to SEQ ID NO: 270428
  chr17:19902538-19902658
  hypo

SEQ ID NO: 446324 - DNA, 100 bp, Homo sapiens; identical to SEQ ID NO: 270429
  chr17:19989101-19989201
  hypo

SEQ ID NO: 446325 - DNA, 172 bp, Homo sapiens; identical to SEQ ID NO: 217615
  chr17:20013842-20014014
  hypo

SEQ ID NO: 446326 - DNA, 246 bp, Homo sapiens; identical to SEQ ID NO: 204463
  chr17:20059180-20059426
  hypo

SEQ ID NO: 446327 - DNA, 120 bp, Homo sapiens; identical to SEQ ID NO: 270431
  chr17:20065370-20065490
  hypo

SEQ ID NO: 446328 - DNA, 34 bp, Homo sapiens; identical to SEQ ID NO: 270432
  chr17:20065730-20065764
  hypo

SEQ ID NO: 446329 - DNA, 83 bp, Homo sapiens; identical to SEQ ID NO: 217617
  chr17:20087136-20087219
  hypo

SEQ ID NO: 446330 - DNA, 377 bp, Homo sapiens; identical to SEQ ID NO: 270434
  chr17:20107950-20108327
  hypo

SEQ ID NO: 446331 - DNA, 78 bp, Homo sapiens; identical to SEQ ID NO: 270435
  chr17:20141015-20141093
  hypo

SEQ ID NO: 446332 - DNA, 42 bp, Homo sapiens; identical to SEQ ID NO: 270436
  chr17:20163532-20163574
  hypo

SEQ ID NO: 446333 - DNA, 76 bp, Homo sapiens; identical to SEQ ID NO: 217618
  chr17:20170298-20170374
  hypo

SEQ ID NO: 446334 - DNA, 137 bp, Homo sapiens; identical to SEQ ID NO: 270438
  chr17:20190317-20190454
  hypo

SEQ ID NO: 446335 - DNA, 33 bp, Homo sapiens; identical to SEQ ID NO: 270439
  chr17:20220061-20220094
  hypo

SEQ ID NO: 446336 - DNA, 82 bp, Homo sapiens; identical to SEQ ID NO: 270440
  chr17:20467688-20467770
  hypo

SEQ ID NO: 446337 - DNA, 153 bp, Homo sapiens; identical to SEQ ID NO: 270441
  chr17:20805561-20805714
  hypo

SEQ ID NO: 446338 - DNA, 187 bp, Homo sapiens; identical to SEQ ID NO: 270444
  chr17:20841354-20841541
  hypo

SEQ ID NO: 446339 - DNA, 133 bp, Homo sapiens; identical to SEQ ID NO: 217619
  chr17:20905669-20905802
  hypo

SEQ ID NO: 446340 - DNA, 439 bp, Homo sapiens; identical to SEQ ID NO: 270447
  chr17:20908044-20908483
  hypo

SEQ ID NO: 446341 - DNA, 195 bp, Homo sapiens; identical to SEQ ID NO: 217620
  chr17:20914087-20914282
  hypo

SEQ ID NO: 446342 - DNA, 185 bp, Homo sapiens; identical to SEQ ID NO: 217621
  chr17:20919060-20919245
  hypo

SEQ ID NO: 446343 - DNA, 130 bp, Homo sapiens; identical to SEQ ID NO: 270450
  chr17:20920703-20920833
  hypo

SEQ ID NO: 446344 - DNA, 94 bp, Homo sapiens; identical to SEQ ID NO: 270451
  chr17:20950574-20950668
  hypo

SEQ ID NO: 446345 - DNA, 43 bp, Homo sapiens; identical to SEQ ID NO: 270452
  chr17:21100034-21100077
  hypo

SEQ ID NO: 446346 - DNA, 41 bp, Homo sapiens; identical to SEQ ID NO: 270454
  chr17:21128221-21128262
  hypo

SEQ ID NO: 446347 - DNA, 83 bp, Homo sapiens; identical to SEQ ID NO: 217622
  chr17:21160808-21160891
  hypo

SEQ ID NO: 446348 - DNA, 87 bp, Homo sapiens; identical to SEQ ID NO: 270456
  chr17:21204236-21204323
  hypo

SEQ ID NO: 446349 - DNA, 47 bp, Homo sapiens; identical to SEQ ID NO: 217623
  chr17:21221775-21221822
  hypo

SEQ ID NO: 446350 - DNA, 181 bp, Homo sapiens; identical to SEQ ID NO: 217624
  chr17:21793592-21793773
  hypo

SEQ ID NO: 446351 - DNA, 215 bp, Homo sapiens; identical to SEQ ID NO: 270459
  chr17:21832214-21832429
  hypo

SEQ ID NO: 446352 - DNA, 211 bp, Homo sapiens; identical to SEQ ID NO: 270460
  chr17:25336166-25336377
  hypo

SEQ ID NO: 446353 - DNA, 130 bp, Homo sapiens; identical to SEQ ID NO: 270461
  chr17:25485413-25485543
  hypo

SEQ ID NO: 446354 - DNA, 72 bp, Homo sapiens; identical to SEQ ID NO: 270465
  chr17:25680101-25680173
  hypo

SEQ ID NO: 446355 - DNA, 118 bp, Homo sapiens; identical to SEQ ID NO: 270466
  chr17:25748141-25748259
  hypo

SEQ ID NO: 446356 - DNA, 127 bp, Homo sapiens; identical to SEQ ID NO: 270467
  chr17:25829641-25829768
  hypo

SEQ ID NO: 446357 - DNA, 210 bp, Homo sapiens; identical to SEQ ID NO: 322192
  chr17:25878807-25879017
  hypo

SEQ ID NO: 446358 - DNA, 354 bp, Homo sapiens; identical to SEQ ID NO: 322193
  chr17:25879047-25879401
  hypo

SEQ ID NO: 446359 - DNA, 173 bp, Homo sapiens; identical to SEQ ID NO: 217628
  chr17:25904461-25904634
  hypo

SEQ ID NO: 446360 - DNA, 115 bp, Homo sapiens; identical to SEQ ID NO: 322195
  chr17:25907595-25907710
  hypo

SEQ ID NO: 446361 - DNA, 60 bp, Homo sapiens; identical to SEQ ID NO: 217630
  chr17:25931232-25931292
  hypo

SEQ ID NO: 446362 - DNA, 34 bp, Homo sapiens; identical to SEQ ID NO: 217632
  chr17:25933867-25933901
  hypo

SEQ ID NO: 446363 - DNA, 97 bp, Homo sapiens; identical to SEQ ID NO: 217634
  chr17:25948172-25948269
  hypo

SEQ ID NO: 446364 - DNA, 110 bp, Homo sapiens; identical to SEQ ID NO: 270479
  chr17:25970770-25970880
  hypo

SEQ ID NO: 446365 - DNA, 118 bp, Homo sapiens; identical to SEQ ID NO: 270480
  chr17:25971187-25971305
  hypo

SEQ ID NO: 446366 - DNA, 48 bp, Homo sapiens; identical to SEQ ID NO: 292097
  chr17:26120916-26120964
  hypo

SEQ ID NO: 446367 - DNA, 80 bp, Homo sapiens; identical to SEQ ID NO: 217635
  chr17:26263499-26263579
  hypo

SEQ ID NO: 446368 - DNA, 39 bp, Homo sapiens; identical to SEQ ID NO: 270482
  chr17:26530852-26530891
  hypo

SEQ ID NO: 446369 - DNA, 77 bp, Homo sapiens; identical to SEQ ID NO: 270485
  chr17:26862778-26862855
  hypo

SEQ ID NO: 446370 - DNA, 101 bp, Homo sapiens; identical to SEQ ID NO: 217636
  chr17:26864424-26864525
  hypo

SEQ ID NO: 446371 - DNA, 332 bp, Homo sapiens; identical to SEQ ID NO: 204469
  chr17:26925694-26926026
  hypo

SEQ ID NO: 446372 - DNA, 342 bp, Homo sapiens; identical to SEQ ID NO: 11045
  chr17:26926083-26926425
  hypo

SEQ ID NO: 446373 - DNA, 135 bp, Homo sapiens; identical to SEQ ID NO: 217639
  chr17:26959955-26960090
  hypo

SEQ ID NO: 446374 - DNA, 238 bp, Homo sapiens; identical to SEQ ID NO: 217640
  chr17:26960859-26961097
  hypo

SEQ ID NO: 446375 - DNA, 191 bp, Homo sapiens; identical to SEQ ID NO: 217642
  chr17:26962146-26962337
  hypo

SEQ ID NO: 446376 - DNA, 129 bp, Homo sapiens; identical to SEQ ID NO: 217643
  chr17:27011597-27011726
  hypo

SEQ ID NO: 446377 - DNA, 64 bp, Homo sapiens; identical to SEQ ID NO: 270492
  chr17:27028074-27028138
  hypo

SEQ ID NO: 446378 - DNA, 283 bp, Homo sapiens; identical to SEQ ID NO: 322219
  chr17:27056869-27057152
  hypo

SEQ ID NO: 446379 - DNA, 176 bp, Homo sapiens; identical to SEQ ID NO: 270494
  chr17:27074939-27075115
  hypo

SEQ ID NO: 446380 - DNA, 128 bp, Homo sapiens; identical to SEQ ID NO: 270495
  chr17:27075316-27075444
  hypo

SEQ ID NO: 446381 - DNA, 35 bp, Homo sapiens; identical to SEQ ID NO: 270497
  chr17:27086030-27086065
  hypo

SEQ ID NO: 446382 - DNA, 35 bp, Homo sapiens; identical to SEQ ID NO: 217645
  chr17:27138132-27138167
  hypo

SEQ ID NO: 446383 - DNA, 96 bp, Homo sapiens; identical to SEQ ID NO: 270499
  chr17:27171310-27171406
  hypo

SEQ ID NO: 446384 - DNA, 38 bp, Homo sapiens; identical to SEQ ID NO: 270500
  chr17:27179810-27179848
  hypo

SEQ ID NO: 446385 - DNA, 492 bp, Homo sapiens; identical to SEQ ID NO: 270503
  chr17:27228011-27228503
  hypo

SEQ ID NO: 446386 - DNA, 87 bp, Homo sapiens; identical to SEQ ID NO: 292117
  chr17:27333201-27333288
  hypo

SEQ ID NO: 446387 - DNA, 65 bp, Homo sapiens; identical to SEQ ID NO: 270504
  chr17:27393154-27393219
  hypo

SEQ ID NO: 446388 - DNA, 532 bp, Homo sapiens; identical to SEQ ID NO: 217647
  chr17:27406521-27407053
  hypo

SEQ ID NO: 446389 - DNA, 69 bp, Homo sapiens; identical to SEQ ID NO: 217648
  chr17:27407262-27407331
  hypo

SEQ ID NO: 446390 - DNA, 66 bp, Homo sapiens; identical to SEQ ID NO: 217649
  chr17:27407717-27407783
  hypo

SEQ ID NO: 446391 - DNA, 165 bp, Homo sapiens; identical to SEQ ID NO: 217650
  chr17:27411026-27411191
  hypo

SEQ ID NO: 446392 - DNA, 156 bp, Homo sapiens; identical to SEQ ID NO: 270510
  chr17:27412341-27412497
  hypo

SEQ ID NO: 446393 - DNA, 36 bp, Homo sapiens; identical to SEQ ID NO: 270512
  chr17:27421183-27421219
  hypo

SEQ ID NO: 446394 - DNA, 108 bp, Homo sapiens; identical to SEQ ID NO: 217653
  chr17:27421468-27421576
  hypo

SEQ ID NO: 446395 - DNA, 133 bp, Homo sapiens; identical to SEQ ID NO: 217656
  chr17:27902814-27902947
  hypo

SEQ ID NO: 446396 - DNA, 199 bp, Homo sapiens; identical to SEQ ID NO: 217657
  chr17:27903154-27903353
  hypo

SEQ ID NO: 446397 - DNA, 36 bp, Homo sapiens; identical to SEQ ID NO: 270518
  chr17:27908746-27908782
  hypo

SEQ ID NO: 446398 - DNA, 723 bp, Homo sapiens; identical to SEQ ID NO: 270520
  chr17:27934686-27935409
  hypo

SEQ ID NO: 446399 - DNA, 95 bp, Homo sapiens; identical to SEQ ID NO: 217659
  chr17:27939247-27939342
  hypo

SEQ ID NO: 446400 - DNA, 903 bp, Homo sapiens; identical to SEQ ID NO: 292123
  chr17:27942512-27943415
  hypo

SEQ ID NO: 446401 - DNA, 242 bp, Homo sapiens; identical to SEQ ID NO: 204481
  chr17:28563016-28563258
  hypo

SEQ ID NO: 446402 - DNA, 176 bp, Homo sapiens; identical to SEQ ID NO: 322255
  chr17:28715809-28715985
  hypo

SEQ ID NO: 446403 - DNA, 35 bp, Homo sapiens; identical to SEQ ID NO: 270524
  chr17:28740014-28740049
  hypo

SEQ ID NO: 446404 - DNA, 73 bp, Homo sapiens; identical to SEQ ID NO: 411514
  chr17:29232004-29232077
  hypo

SEQ ID NO: 446405 - DNA, 85 bp, Homo sapiens; identical to SEQ ID NO: 322258
  chr17:29234397-29234482
  hypo

SEQ ID NO: 446406 - DNA, 33 bp, Homo sapiens; identical to SEQ ID NO: 217663
  chr17:29247879-29247912
  hypo

SEQ ID NO: 446407 - DNA, 488 bp, Homo sapiens; identical to SEQ ID NO: 128356
  chr17:29421899-29422387
  hypo

SEQ ID NO: 446408 - DNA, 144 bp, Homo sapiens; identical to SEQ ID NO: 204486
  chr17:29483000-29483144
  hypo

SEQ ID NO: 446409 - DNA, 91 bp, Homo sapiens; identical to SEQ ID NO: 204487
  chr17:29486027-29486118
  hypo

SEQ ID NO: 446410 - DNA, 191 bp, Homo sapiens; identical to SEQ ID NO: 204488
  chr17:29490203-29490394
  hypo

SEQ ID NO: 446411 - DNA, 109 bp, Homo sapiens; identical to SEQ ID NO: 204489
  chr17:29496908-29497017
  hypo

SEQ ID NO: 446412 - DNA, 68 bp, Homo sapiens; identical to SEQ ID NO: 204490
  chr17:29508439-29508507
  hypo

SEQ ID NO: 446413 - DNA, 46 bp, Homo sapiens; identical to SEQ ID NO: 204491
  chr17:29508715-29508761
  hypo

SEQ ID NO: 446414 - DNA, 163 bp, Homo sapiens; identical to SEQ ID NO: 204492
  chr17:29509520-29509683
  hypo

SEQ ID NO: 446415 - DNA, 174 bp, Homo sapiens; identical to SEQ ID NO: 204493
  chr17:29527439-29527613
  hypo

SEQ ID NO: 446416 - DNA, 123 bp, Homo sapiens; identical to SEQ ID NO: 204494
  chr17:29528054-29528177
  hypo

SEQ ID NO: 446417 - DNA, 75 bp, Homo sapiens; identical to SEQ ID NO: 204495
  chr17:29528428-29528503
  hypo

SEQ ID NO: 446418 - DNA, 140 bp, Homo sapiens; identical to SEQ ID NO: 204496
  chr17:29533249-29533389
  hypo

SEQ ID NO: 446419 - DNA, 59 bp, Homo sapiens; identical to SEQ ID NO: 204497
  chr17:29541468-29541527
  hypo

SEQ ID NO: 446420 - DNA, 47 bp, Homo sapiens; identical to SEQ ID NO: 204498
  chr17:29541556-29541603
  hypo

SEQ ID NO: 446421 - DNA, 136 bp, Homo sapiens; identical to SEQ ID NO: 204499
  chr17:29546009-29546145
  hypo

SEQ ID NO: 446422 - DNA, 80 bp, Homo sapiens; identical to SEQ ID NO: 204500
  chr17:29548867-29548947
  hypo

SEQ ID NO: 446423 - DNA, 124 bp, Homo sapiens; identical to SEQ ID NO: 204501
  chr17:29550461-29550585
  hypo

SEQ ID NO: 446424 - DNA, 156 bp, Homo sapiens; identical to SEQ ID NO: 204502
  chr17:29552112-29552268
  hypo

SEQ ID NO: 446425 - DNA, 250 bp, Homo sapiens; identical to SEQ ID NO: 204503
  chr17:29553452-29553702
  hypo

SEQ ID NO: 446426 - DNA, 74 bp, Homo sapiens; identical to SEQ ID NO: 204504
  chr17:29554235-29554309
  hypo

SEQ ID NO: 446427 - DNA, 84 bp, Homo sapiens; identical to SEQ ID NO: 204505
  chr17:29554540-29554624
  hypo

SEQ ID NO: 446428 - DNA, 441 bp, Homo sapiens; identical to SEQ ID NO: 204506
  chr17:29556042-29556483
  hypo

SEQ ID NO: 446429 - DNA, 140 bp, Homo sapiens; identical to SEQ ID NO: 204507
  chr17:29556852-29556992
  hypo

SEQ ID NO: 446430 - DNA, 123 bp, Homo sapiens; identical to SEQ ID NO: 204508
  chr17:29557277-29557400
  hypo

SEQ ID NO: 446431 - DNA, 84 bp, Homo sapiens; identical to SEQ ID NO: 204509
  chr17:29557859-29557943
  hypo

SEQ ID NO: 446432 - DNA, 117 bp, Homo sapiens; identical to SEQ ID NO: 204510
  chr17:29559090-29559207
  hypo

SEQ ID NO: 446433 - DNA, 514 bp, Homo sapiens; identical to SEQ ID NO: 204511
  chr17:29559717-29560231
  hypo

SEQ ID NO: 446434 - DNA, 104 bp, Homo sapiens; identical to SEQ ID NO: 204512
  chr17:29562628-29562732
  hypo

SEQ ID NO: 446435 - DNA, 278 bp, Homo sapiens; identical to SEQ ID NO: 204513
  chr17:29562761-29563039
  hypo

SEQ ID NO: 446436 - DNA, 136 bp, Homo sapiens; identical to SEQ ID NO: 204514
  chr17:29576001-29576137
  hypo

SEQ ID NO: 446437 - DNA, 63 bp, Homo sapiens; identical to SEQ ID NO: 204515
  chr17:29579955-29580018
  hypo

SEQ ID NO: 446438 - DNA, 159 bp, Homo sapiens; identical to SEQ ID NO: 204516
  chr17:29585361-29585520
  hypo

SEQ ID NO: 446439 - DNA, 98 bp, Homo sapiens; identical to SEQ ID NO: 204517
  chr17:29586049-29586147
  hypo

SEQ ID NO: 446440 - DNA, 147 bp, Homo sapiens; identical to SEQ ID NO: 204518
  chr17:29587386-29587533
  hypo

SEQ ID NO: 446441 - DNA, 147 bp, Homo sapiens; identical to SEQ ID NO: 204519
  chr17:29588728-29588875
  hypo

SEQ ID NO: 446442 - DNA, 111 bp, Homo sapiens; identical to SEQ ID NO: 204520
  chr17:29592246-29592357
  hypo

SEQ ID NO: 446443 - DNA, 433 bp, Homo sapiens; identical to SEQ ID NO: 204521
  chr17:29652837-29653270
  hypo

SEQ ID NO: 446444 - DNA, 341 bp, Homo sapiens; identical to SEQ ID NO: 204522
  chr17:29654516-29654857
  hypo

SEQ ID NO: 446445 - DNA, 203 bp, Homo sapiens; identical to SEQ ID NO: 204523
  chr17:29657313-29657516
  hypo

SEQ ID NO: 446446 - DNA, 194 bp, Homo sapiens; identical to SEQ ID NO: 204524
  chr17:29661855-29662049
  hypo

SEQ ID NO: 446447 - DNA, 582 bp, Homo sapiens; identical to SEQ ID NO: 204525
  chr17:29663350-29663932
  hypo

SEQ ID NO: 446448 - DNA, 215 bp, Homo sapiens; identical to SEQ ID NO: 204526
  chr17:29664385-29664600
  hypo

SEQ ID NO: 446449 - DNA, 321 bp, Homo sapiens; identical to SEQ ID NO: 204527
  chr17:29664836-29665157
  hypo

SEQ ID NO: 446450 - DNA, 102 bp, Homo sapiens; identical to SEQ ID NO: 204528
  chr17:29665721-29665823
  hypo

SEQ ID NO: 446451 - DNA, 141 bp, Homo sapiens; identical to SEQ ID NO: 204529
  chr17:29667522-29667663
  hypo

SEQ ID NO: 446452 - DNA, 127 bp, Homo sapiens; identical to SEQ ID NO: 204530
  chr17:29670026-29670153
  hypo

SEQ ID NO: 446453 - DNA, 141 bp, Homo sapiens; identical to SEQ ID NO: 204531
  chr17:29676130-29676271
  hypo

SEQ ID NO: 446454 - DNA, 142 bp, Homo sapiens; identical to SEQ ID NO: 204532
  chr17:29677200-29677342
  hypo

SEQ ID NO: 446455 - DNA, 158 bp, Homo sapiens; identical to SEQ ID NO: 204533
  chr17:29679274-29679432
  hypo

SEQ ID NO: 446456 - DNA, 123 bp, Homo sapiens; identical to SEQ ID NO: 204534
  chr17:29683477-29683600
  hypo

SEQ ID NO: 446457 - DNA, 410 bp, Homo sapiens; identical to SEQ ID NO: 204535
  chr17:29683977-29684387
  hypo

SEQ ID NO: 446458 - DNA, 143 bp, Homo sapiens; identical to SEQ ID NO: 204536
  chr17:29685497-29685640
  hypo

SEQ ID NO: 446459 - DNA, 47 bp, Homo sapiens; identical to SEQ ID NO: 204537
  chr17:29685986-29686033
  hypo

SEQ ID NO: 446460 - DNA, 217 bp, Homo sapiens; identical to SEQ ID NO: 204538
  chr17:29687504-29687721
  hypo

SEQ ID NO: 446461 - DNA, 3665 bp, Homo sapiens; identical to SEQ ID NO: 204539
  chr17:29701030-29704695
  hypo

SEQ ID NO: 446462 - DNA, 149 bp, Homo sapiens; identical to SEQ ID NO: 270529
  chr17:29855419-29855568
  hypo

SEQ ID NO: 446463 - DNA, 241 bp, Homo sapiens; identical to SEQ ID NO: 270534
  chr17:30348356-30348597
  hypo

SEQ ID NO: 446464 - DNA, 149 bp, Homo sapiens; identical to SEQ ID NO: 217720
  chr17:30529221-30529370
  hypo

SEQ ID NO: 446465 - DNA, 40 bp, Homo sapiens; identical to SEQ ID NO: 270536
  chr17:30582939-30582979
  hypo

SEQ ID NO: 446466 - DNA, 1559 bp, Homo sapiens; identical to SEQ ID NO: 292193
  chr17:30592474-30594033
  hypo

SEQ ID NO: 446467 - DNA, 32 bp, Homo sapiens; identical to SEQ ID NO: 270537
  chr17:30684634-30684666
  hypo

SEQ ID NO: 446468 - DNA, 89 bp, Homo sapiens; identical to SEQ ID NO: 204542
  chr17:30813422-30813511
  hypo

SEQ ID NO: 446469 - DNA, 116 bp, Homo sapiens; identical to SEQ ID NO: 270540
  chr17:30823891-30824007
  hypo

SEQ ID NO: 446470 - DNA, 199 bp, Homo sapiens; identical to SEQ ID NO: 217724
  chr17:30844875-30845074
  hypo

SEQ ID NO: 446471 - DNA, 330 bp, Homo sapiens; identical to SEQ ID NO: 217725
  chr17:30954335-30954665
  hypo

SEQ ID NO: 446472 - DNA, 253 bp, Homo sapiens; identical to SEQ ID NO: 270543
  chr17:31047963-31048216
  hypo

SEQ ID NO: 446473 - DNA, 108 bp, Homo sapiens; identical to SEQ ID NO: 204545
  chr17:31203740-31203848
  hypo

SEQ ID NO: 446474 - DNA, 42 bp, Homo sapiens; identical to SEQ ID NO: 270546
  chr17:32520158-32520200
  hypo

SEQ ID NO: 446475 - DNA, 165 bp, Homo sapiens; identical to SEQ ID NO: 270548
  chr17:33348605-33348770
  hypo

SEQ ID NO: 446476 - DNA, 98 bp, Homo sapiens; identical to SEQ ID NO: 217729
  chr17:33568807-33568905
  hypo

SEQ ID NO: 446477 - DNA, 77 bp, Homo sapiens; identical to SEQ ID NO: 270552
  chr17:33578345-33578422
  hypo

SEQ ID NO: 446478 - DNA, 34 bp, Homo sapiens; identical to SEQ ID NO: 270553
  chr17:33898171-33898205
  hypo

SEQ ID NO: 446479 - DNA, 76 bp, Homo sapiens; identical to SEQ ID NO: 270555
  chr17:33924082-33924158
  hypo

SEQ ID NO: 446480 - DNA, 112 bp, Homo sapiens; identical to SEQ ID NO: 270556
  chr17:35039667-35039779
  hypo

SEQ ID NO: 446481 - DNA, 172 bp, Homo sapiens; identical to SEQ ID NO: 270557
  chr17:35045439-35045611
  hypo

SEQ ID NO: 446482 - DNA, 117 bp, Homo sapiens; identical to SEQ ID NO: 270558
  chr17:35099227-35099344
  hypo

SEQ ID NO: 446483 - DNA, 208 bp, Homo sapiens; identical to SEQ ID NO: 217731
  chr17:35336168-35336376
  hypo

SEQ ID NO: 446484 - DNA, 35 bp, Homo sapiens; identical to SEQ ID NO: 217732
  chr17:35414066-35414101
  hypo

SEQ ID NO: 446485 - DNA, 164 bp, Homo sapiens; identical to SEQ ID NO: 270561
  chr17:35488971-35489135
  hypo

SEQ ID NO: 446486 - DNA, 140 bp, Homo sapiens; identical to SEQ ID NO: 270562
  chr17:35501215-35501355
  hypo

SEQ ID NO: 446487 - DNA, 456 bp, Homo sapiens; identical to SEQ ID NO: 292228
  chr17:35716404-35716860
  hypo

SEQ ID NO: 446488 - DNA, 38 bp, Homo sapiens; identical to SEQ ID NO: 217733
  chr17:35802039-35802077
  hypo

SEQ ID NO: 446489 - DNA, 31 bp, Homo sapiens; identical to SEQ ID NO: 217734
  chr17:35845347-35845378
  hypo

SEQ ID NO: 446490 - DNA, 162 bp, Homo sapiens; identical to SEQ ID NO: 217735
  chr17:35872861-35873023
  hypo

SEQ ID NO: 446491 - DNA, 82 bp, Homo sapiens; identical to SEQ ID NO: 270567
  chr17:36076477-36076559
  hypo

SEQ ID NO: 446492 - DNA, 46 bp, Homo sapiens; identical to SEQ ID NO: 11164
  chr17:36762362-36762408
  hypo

SEQ ID NO: 446493 - DNA, 42 bp, Homo sapiens; identical to SEQ ID NO: 270568
  chr17:36818503-36818545
  hypo

SEQ ID NO: 446494 - DNA, 37 bp, Homo sapiens; identical to SEQ ID NO: 204569
  chr17:36904350-36904387
  hypo

SEQ ID NO: 446495 - DNA, 450 bp, Homo sapiens; identical to SEQ ID NO: 204570
  chr17:36905017-36905467
  hypo

SEQ ID NO: 446496 - DNA, 61 bp, Homo sapiens; identical to SEQ ID NO: 217741
  chr17:36927315-36927376
  hypo

SEQ ID NO: 446497 - DNA, 42 bp, Homo sapiens; identical to SEQ ID NO: 217742
  chr17:36967822-36967864
  hypo

SEQ ID NO: 446498 - DNA, 39 bp, Homo sapiens; identical to SEQ ID NO: 270573
  chr17:37000766-37000805
  hypo

SEQ ID NO: 446499 - DNA, 120 bp, Homo sapiens; identical to SEQ ID NO: 270575
  chr17:37012074-37012194
  hypo

SEQ ID NO: 446500 - DNA, 151 bp, Homo sapiens; identical to SEQ ID NO: 270577
  chr17:37084534-37084685
  hypo

SEQ ID NO: 446501 - DNA, 31 bp, Homo sapiens; identical to SEQ ID NO: 270578
  chr17:37111337-37111368
  hypo

SEQ ID NO: 446502 - DNA, 150 bp, Homo sapiens; identical to SEQ ID NO: 270579
  chr17:37171929-37172079
  hypo

SEQ ID NO: 446503 - DNA, 35 bp, Homo sapiens; identical to SEQ ID NO: 270580
  chr17:37276419-37276454
  hypo

SEQ ID NO: 446504 - DNA, 81 bp, Homo sapiens; identical to SEQ ID NO: 270581
  chr17:37313706-37313787
  hypo

SEQ ID NO: 446505 - DNA, 39 bp, Homo sapiens; identical to SEQ ID NO: 217744
  chr17:37445220-37445259
  hypo

SEQ ID NO: 446506 - DNA, 34 bp, Homo sapiens; identical to SEQ ID NO: 217745
  chr17:37452478-37452512
  hypo

SEQ ID NO: 446507 - DNA, 31 bp, Homo sapiens; identical to SEQ ID NO: 217746
  chr17:37455741-37455772
  hypo

SEQ ID NO: 446508 - DNA, 85 bp, Homo sapiens; identical to SEQ ID NO: 217747
  chr17:37483846-37483931
  hypo

SEQ ID NO: 446509 - DNA, 180 bp, Homo sapiens; identical to SEQ ID NO: 270587
  chr17:37583288-37583468
  hypo

SEQ ID NO: 446510 - DNA, 39 bp, Homo sapiens; identical to SEQ ID NO: 217748
  chr17:37694844-37694883
  hypo

SEQ ID NO: 446511 - DNA, 33 bp, Homo sapiens; identical to SEQ ID NO: 217749
  chr17:37701201-37701234
  hypo

SEQ ID NO: 446512 - DNA, 146 bp, Homo sapiens; identical to SEQ ID NO: 292264
  chr17:37762839-37762985
  hypo

SEQ ID NO: 446513 - DNA, 339 bp, Homo sapiens; identical to SEQ ID NO: 204583
  chr17:37774745-37775084
  hypo

SEQ ID NO: 446514 - DNA, 118 bp, Homo sapiens; identical to SEQ ID NO: 292268
  chr17:37783775-37783893
  hypo

SEQ ID NO: 446515 - DNA, 52 bp, Homo sapiens; identical to SEQ ID NO: 204587
  chr17:37823746-37823798
  hypo

SEQ ID NO: 446516 - DNA, 525 bp, Homo sapiens; identical to SEQ ID NO: 292272
  chr17:37823945-37824470
  hypo

SEQ ID NO: 446517 - DNA, 93 bp, Homo sapiens; identical to SEQ ID NO: 292273
  chr17:37844398-37844491
  hypo

SEQ ID NO: 446518 - DNA, 31 bp, Homo sapiens; identical to SEQ ID NO: 322392
  chr17:37887589-37887620
  hypo

SEQ ID NO: 446519 - DNA, 47 bp, Homo sapiens; identical to SEQ ID NO: 225345
  chr17:38024015-38024062
  hypo

SEQ ID NO: 446520 - DNA, 84 bp, Homo sapiens; identical to SEQ ID NO: 270594
  chr17:38075339-38075423
  hypo

SEQ ID NO: 446521 - DNA, 120 bp, Homo sapiens; identical to SEQ ID NO: 217758
  chr17:38105714-38105834
  hypo

SEQ ID NO: 446522 - DNA, 39 bp, Homo sapiens; identical to SEQ ID NO: 204593
  chr17:38228513-38228552
  hypo

SEQ ID NO: 446523 - DNA, 46 bp, Homo sapiens; identical to SEQ ID NO: 217762
  chr17:38244541-38244587
  hypo

SEQ ID NO: 446524 - DNA, 504 bp, Homo sapiens; identical to SEQ ID NO: 217763
  chr17:38249240-38249744
  hypo

SEQ ID NO: 446525 - DNA, 164 bp, Homo sapiens; identical to SEQ ID NO: 270600
  chr17:38250103-38250267
  hypo

SEQ ID NO: 446526 - DNA, 124 bp, Homo sapiens; identical to SEQ ID NO: 217764
  chr17:38251853-38251977
  hypo

SEQ ID NO: 446527 - DNA, 120 bp, Homo sapiens; identical to SEQ ID NO: 270602
  chr17:38276209-38276329
  hypo

SEQ ID NO: 446528 - DNA, 328 bp, Homo sapiens; identical to SEQ ID NO: 270603
  chr17:38334998-38335326
  hypo

SEQ ID NO: 446529 - DNA, 37 bp, Homo sapiens; identical to SEQ ID NO: 217765
  chr17:38380418-38380455
  hypo

SEQ ID NO: 446530 - DNA, 78 bp, Homo sapiens; identical to SEQ ID NO: 217768
  chr17:38511651-38511729
  hypo

SEQ ID NO: 446531 - DNA, 91 bp, Homo sapiens; identical to SEQ ID NO: 217769
  chr17:38513565-38513656
  hypo

SEQ ID NO: 446532 - DNA, 41 bp, Homo sapiens; identical to SEQ ID NO: 270607
  chr17:38638673-38638714
  hypo

SEQ ID NO: 446533 - DNA, 97 bp, Homo sapiens; identical to SEQ ID NO: 270608
  chr17:38656559-38656656
  hypo

SEQ ID NO: 446534 - DNA, 321 bp, Homo sapiens; identical to SEQ ID NO: 217770
  chr17:38668670-38668991
  hypo

SEQ ID NO: 446535 - DNA, 42 bp, Homo sapiens; identical to SEQ ID NO: 270610
  chr17:38692022-38692064
  hypo

SEQ ID NO: 446536 - DNA, 224 bp, Homo sapiens; identical to SEQ ID NO: 270611
  chr17:38711764-38711988
  hypo

SEQ ID NO: 446537 - DNA, 323 bp, Homo sapiens; identical to SEQ ID NO: 270612
  chr17:38774236-38774559
  hypo

SEQ ID NO: 446538 - DNA, 339 bp, Homo sapiens; identical to SEQ ID NO: 270613
  chr17:39657291-39657630
  hypo

SEQ ID NO: 446539 - DNA, 229 bp, Homo sapiens; identical to SEQ ID NO: 217774
  chr17:39659565-39659794
  hypo

SEQ ID NO: 446540 - DNA, 109 bp, Homo sapiens; identical to SEQ ID NO: 270617
  chr17:39661340-39661449
  hypo

SEQ ID NO: 446541 - DNA, 148 bp, Homo sapiens; identical to SEQ ID NO: 270618
  chr17:39671696-39671844
  hypo

SEQ ID NO: 446542 - DNA, 498 bp, Homo sapiens; identical to SEQ ID NO: 270619
  chr17:39672145-39672643
  hypo

SEQ ID NO: 446543 - DNA, 411 bp, Homo sapiens; identical to SEQ ID NO: 270620
  chr17:39673044-39673455
  hypo

SEQ ID NO: 446544 - DNA, 118 bp, Homo sapiens; identical to SEQ ID NO: 217776
  chr17:39676657-39676775
  hypo

SEQ ID NO: 446545 - DNA, 452 bp, Homo sapiens; identical to SEQ ID NO: 217777
  chr17:39680350-39680802
  hypo

SEQ ID NO: 446546 - DNA, 142 bp, Homo sapiens; identical to SEQ ID NO: 217778
  chr17:39681121-39681263
  hypo

SEQ ID NO: 446547 - DNA, 111 bp, Homo sapiens; identical to SEQ ID NO: 270625
  chr17:39694232-39694343
  hypo

SEQ ID NO: 446548 - DNA, 63 bp, Homo sapiens; identical to SEQ ID NO: 322432
  chr17:39803737-39803800
  hypo

SEQ ID NO: 446549 - DNA, 128 bp, Homo sapiens; identical to SEQ ID NO: 322433
  chr17:39855695-39855823
  hypo

SEQ ID NO: 446550 - DNA, 286 bp, Homo sapiens; identical to SEQ ID NO: 270629
  chr17:40318143-40318429
  hypo

SEQ ID NO: 446551 - DNA, 136 bp, Homo sapiens; identical to SEQ ID NO: 270630
  chr17:40330251-40330387
  hypo

SEQ ID NO: 446552 - DNA, 53 bp, Homo sapiens; identical to SEQ ID NO: 225351
  chr17:40333432-40333485
  hypo

SEQ ID NO: 446553 - DNA, 118 bp, Homo sapiens; identical to SEQ ID NO: 217782
  chr17:40337520-40337638
  hypo

SEQ ID NO: 446554 - DNA, 105 bp, Homo sapiens; identical to SEQ ID NO: 217783
  chr17:40353736-40353841
  hypo

SEQ ID NO: 446555 - DNA, 203 bp, Homo sapiens; identical to SEQ ID NO: 270633
  chr17:40362204-40362407
  hypo

SEQ ID NO: 446556 - DNA, 138 bp, Homo sapiens; identical to SEQ ID NO: 217784
  chr17:40370156-40370294
  hypo

SEQ ID NO: 446557 - DNA, 81 bp, Homo sapiens; identical to SEQ ID NO: 217787
  chr17:40387769-40387850
  hypo

SEQ ID NO: 446558 - DNA, 50 bp, Homo sapiens; identical to SEQ ID NO: 424018
  chr17:40427515-40427565
  hypo

SEQ ID NO: 446559 - DNA, 33 bp, Homo sapiens; identical to SEQ ID NO: 270639
  chr17:40427609-40427642
  hypo

SEQ ID NO: 446560 - DNA, 33 bp, Homo sapiens; identical to SEQ ID NO: 270640
  chr17:40427746-40427779
  hypo

SEQ ID NO: 446561 - DNA, 517 bp, Homo sapiens; identical to SEQ ID NO: 292311
  chr17:40428745-40429262
  hypo

SEQ ID NO: 446562 - DNA, 147 bp, Homo sapiens; identical to SEQ ID NO: 217790
  chr17:40447592-40447739
  hypo

SEQ ID NO: 446563 - DNA, 165 bp, Homo sapiens; identical to SEQ ID NO: 270643
  chr17:40453235-40453400
  hypo

SEQ ID NO: 446564 - DNA, 36 bp, Homo sapiens; identical to SEQ ID NO: 217791
  chr17:40453899-40453935
  hypo

SEQ ID NO: 446565 - DNA, 418 bp, Homo sapiens; identical to SEQ ID NO: 270645
  chr17:40456105-40456523
  hypo

SEQ ID NO: 446566 - DNA, 159 bp, Homo sapiens; identical to SEQ ID NO: 270646
  chr17:40458359-40458518
  hypo

SEQ ID NO: 446567 - DNA, 107 bp, Homo sapiens; identical to SEQ ID NO: 270647
  chr17:40459507-40459614
  hypo

SEQ ID NO: 446568 - DNA, 42 bp, Homo sapiens; identical to SEQ ID NO: 270649
  chr17:40514602-40514644
  hypo

SEQ ID NO: 446569 - DNA, 35 bp, Homo sapiens; identical to SEQ ID NO: 270650
  chr17:40533448-40533483
  hypo

SEQ ID NO: 446570 - DNA, 557 bp, Homo sapiens; identical to SEQ ID NO: 128645
  chr17:40574882-40575439
  hypo

SEQ ID NO: 446571 - DNA, 42 bp, Homo sapiens; identical to SEQ ID NO: 270652
  chr17:40609955-40609997
  hypo

SEQ ID NO: 446572 - DNA, 76 bp, Homo sapiens; identical to SEQ ID NO: 217794
  chr17:40616719-40616795
  hypo

SEQ ID NO: 446573 - DNA, 191 bp, Homo sapiens; identical to SEQ ID NO: 322463
  chr17:40689405-40689596
  hypo

SEQ ID NO: 446574 - DNA, 48 bp, Homo sapiens; identical to SEQ ID NO: 322464
  chr17:40689642-40689690
  hypo

SEQ ID NO: 446575 - DNA, 196 bp, Homo sapiens; identical to SEQ ID NO: 270655
  chr17:40695505-40695701
  hypo

SEQ ID NO: 446576 - DNA, 610 bp, Homo sapiens; identical to SEQ ID NO: 270656
  chr17:40699094-40699704
  hypo

SEQ ID NO: 446577 - DNA, 93 bp, Homo sapiens; identical to SEQ ID NO: 217795
  chr17:40705245-40705338
  hypo

SEQ ID NO: 446578 - DNA, 67 bp, Homo sapiens; identical to SEQ ID NO: 322468
  chr17:40705838-40705905
  hypo

SEQ ID NO: 446579 - DNA, 42 bp, Homo sapiens; identical to SEQ ID NO: 270658
  chr17:40711057-40711099
  hypo

SEQ ID NO: 446580 - DNA, 33 bp, Homo sapiens; identical to SEQ ID NO: 270659
  chr17:40743622-40743655
  hypo

SEQ ID NO: 446581 - DNA, 100 bp, Homo sapiens; identical to SEQ ID NO: 322471
  chr17:40801993-40802093
  hypo

SEQ ID NO: 446582 - DNA, 40 bp, Homo sapiens; identical to SEQ ID NO: 217796
  chr17:40804385-40804425
  hypo

SEQ ID NO: 446583 - DNA, 104 bp, Homo sapiens; identical to SEQ ID NO: 270662
  chr17:40820751-40820855
  hypo

SEQ ID NO: 446584 - DNA, 108 bp, Homo sapiens; identical to SEQ ID NO: 217797
  chr17:40847766-40847874
  hypo

SEQ ID NO: 446585 - DNA, 33 bp, Homo sapiens; identical to SEQ ID NO: 270664
  chr17:40856548-40856581
  hypo

SEQ ID NO: 446586 - DNA, 55 bp, Homo sapiens; identical to SEQ ID NO: 270665
  chr17:40897648-40897703
  hypo

SEQ ID NO: 446587 - DNA, 95 bp, Homo sapiens; identical to SEQ ID NO: 270666
  chr17:40929522-40929617
  hypo

SEQ ID NO: 446588 - DNA, 35 bp, Homo sapiens; identical to SEQ ID NO: 270667
  chr17:40939517-40939552
  hypo

SEQ ID NO: 446589 - DNA, 211 bp, Homo sapiens; identical to SEQ ID NO: 292328
  chr17:40950645-40950856
  hypo

SEQ ID NO: 446590 - DNA, 93 bp, Homo sapiens; identical to SEQ ID NO: 322480
  chr17:40951180-40951273
  hypo

SEQ ID NO: 446591 - DNA, 58 bp, Homo sapiens; identical to SEQ ID NO: 217798
  chr17:41131474-41131532
  hypo

SEQ ID NO: 446592 - DNA, 38 bp, Homo sapiens; identical to SEQ ID NO: 270671
  chr17:41152508-41152546
  hypo

SEQ ID NO: 446593 - DNA, 43 bp, Homo sapiens; identical to SEQ ID NO: 270672
  chr17:41177996-41178039
  hypo

SEQ ID NO: 446594 - DNA, 134 bp, Homo sapiens; identical to SEQ ID NO: 322484
  chr17:41188391-41188525
  hypo

SEQ ID NO: 446595 - DNA, 514 bp, Homo sapiens; identical to SEQ ID NO: 225356
  chr17:41196311-41196825
  hypo

SEQ ID NO: 446596 - DNA, 589 bp, Homo sapiens; identical to SEQ ID NO: 292334
  chr17:41197125-41197714
  hypo

SEQ ID NO: 446597 - DNA, 76 bp, Homo sapiens; identical to SEQ ID NO: 292335
  chr17:41197743-41197819
  hypo

SEQ ID NO: 446598 - DNA, 61 bp, Homo sapiens; identical to SEQ ID NO: 225358
  chr17:41199659-41199720
  hypo

SEQ ID NO: 446599 - DNA, 32 bp, Homo sapiens; identical to SEQ ID NO: 292337
  chr17:41203102-41203134
  hypo

SEQ ID NO: 446600 - DNA, 38 bp, Homo sapiens; identical to SEQ ID NO: 292338
  chr17:41209114-41209152
  hypo

SEQ ID NO: 446601 - DNA, 41 bp, Homo sapiens; identical to SEQ ID NO: 225362
  chr17:41215349-41215390
  hypo

SEQ ID NO: 446602 - DNA, 88 bp, Homo sapiens; identical to SEQ ID NO: 225364
  chr17:41219624-41219712
  hypo

SEQ ID NO: 446603 - DNA, 311 bp, Homo sapiens; identical to SEQ ID NO: 225365
  chr17:41222944-41223255
  hypo

SEQ ID NO: 446604 - DNA, 191 bp, Homo sapiens; identical to SEQ ID NO: 225366
  chr17:41226347-41226538
  hypo

SEQ ID NO: 446605 - DNA, 127 bp, Homo sapiens; identical to SEQ ID NO: 225367
  chr17:41228504-41228631
  hypo

SEQ ID NO: 446606 - DNA, 172 bp, Homo sapiens; identical to SEQ ID NO: 225368
  chr17:41234420-41234592
  hypo

SEQ ID NO: 446607 - DNA, 89 bp, Homo sapiens; identical to SEQ ID NO: 225369
  chr17:41242960-41243049
  hypo

SEQ ID NO: 446608 - DNA, 2013 bp, Homo sapiens; identical to SEQ ID NO: 424051
  chr17:41243451-41245464
  hypo

SEQ ID NO: 446609 - DNA, 572 bp, Homo sapiens; identical to SEQ ID NO: 424052
  chr17:41246305-41246877
  hypo

SEQ ID NO: 446610 - DNA, 77 bp, Homo sapiens; identical to SEQ ID NO: 225371
  chr17:41247862-41247939
  hypo

SEQ ID NO: 446611 - DNA, 46 bp, Homo sapiens; identical to SEQ ID NO: 225372
  chr17:41249260-41249306
  hypo

SEQ ID NO: 446612 - DNA, 106 bp, Homo sapiens; identical to SEQ ID NO: 225373
  chr17:41251791-41251897
  hypo

SEQ ID NO: 446613 - DNA, 140 bp, Homo sapiens; identical to SEQ ID NO: 225374
  chr17:41256138-41256278
  hypo

SEQ ID NO: 446614 - DNA, 89 bp, Homo sapiens; identical to SEQ ID NO: 225375
  chr17:41256884-41256973
  hypo

SEQ ID NO: 446615 - DNA, 78 bp, Homo sapiens; identical to SEQ ID NO: 225376
  chr17:41258472-41258550
  hypo

SEQ ID NO: 446616 - DNA, 57 bp, Homo sapiens; identical to SEQ ID NO: 292353
  chr17:41276075-41276132
  hypo

SEQ ID NO: 446617 - DNA, 120 bp, Homo sapiens; identical to SEQ ID NO: 322506
  chr17:41290192-41290312
  hypo

SEQ ID NO: 446618 - DNA, 37 bp, Homo sapiens; identical to SEQ ID NO: 270676
  chr17:41320359-41320396
  hypo

SEQ ID NO: 446619 - DNA, 36 bp, Homo sapiens; identical to SEQ ID NO: 270677
  chr17:41320636-41320672
  hypo

SEQ ID NO: 446620 - DNA, 147 bp, Homo sapiens; identical to SEQ ID NO: 217799
  chr17:41389669-41389816
  hypo

SEQ ID NO: 446621 - DNA, 33 bp, Homo sapiens; identical to SEQ ID NO: 270680
  chr17:41444581-41444614
  hypo

SEQ ID NO: 446622 - DNA, 235 bp, Homo sapiens; identical to SEQ ID NO: 270681
  chr17:41456127-41456362
  hypo

SEQ ID NO: 446623 - DNA, 42 bp, Homo sapiens; identical to SEQ ID NO: 217801
  chr17:41570142-41570184
  hypo

SEQ ID NO: 446624 - DNA, 136 bp, Homo sapiens; identical to SEQ ID NO: 270683
  chr17:41610027-41610163
  hypo

SEQ ID NO: 446625 - DNA, 41 bp, Homo sapiens; identical to SEQ ID NO: 217802
  chr17:41692630-41692671
  hypo

SEQ ID NO: 446626 - DNA, 101 bp, Homo sapiens; identical to SEQ ID NO: 292360
  chr17:41723353-41723454
  hypo

SEQ ID NO: 446627 - DNA, 244 bp, Homo sapiens; identical to SEQ ID NO: 292361
  chr17:41723534-41723778
  hypo

SEQ ID NO: 446628 - DNA, 41 bp, Homo sapiens; identical to SEQ ID NO: 217804
  chr17:41895347-41895388
  hypo

SEQ ID NO: 446629 - DNA, 37 bp, Homo sapiens; identical to SEQ ID NO: 270687
  chr17:41915919-41915956
  hypo

SEQ ID NO: 446630 - DNA, 122 bp, Homo sapiens; identical to SEQ ID NO: 292372
  chr17:42015411-42015533
  hypo

SEQ ID NO: 446631 - DNA, 291 bp, Homo sapiens; identical to SEQ ID NO: 292373
  chr17:42015571-42015862
  hypo

SEQ ID NO: 446632 - DNA, 57 bp, Homo sapiens; identical to SEQ ID NO: 217805
  chr17:42019594-42019651
  hypo

SEQ ID NO: 446633 - DNA, 124 bp, Homo sapiens; identical to SEQ ID NO: 270690
  chr17:42098921-42099045
  hypo

SEQ ID NO: 446634 - DNA, 96 bp, Homo sapiens; identical to SEQ ID NO: 270691
  chr17:42100159-42100255
  hypo

SEQ ID NO: 446635 - DNA, 453 bp, Homo sapiens; identical to SEQ ID NO: 270692
  chr17:42109843-42110296
  hypo

SEQ ID NO: 446636 - DNA, 208 bp, Homo sapiens; identical to SEQ ID NO: 292383
  chr17:42200974-42201182
  hypo

SEQ ID NO: 446637 - DNA, 91 bp, Homo sapiens; identical to SEQ ID NO: 270695
  chr17:42249458-42249549
  hypo

SEQ ID NO: 446638 - DNA, 433 bp, Homo sapiens; identical to SEQ ID NO: 292387
  chr17:42287874-42288307
  hypo

SEQ ID NO: 446639 - DNA, 117 bp, Homo sapiens; identical to SEQ ID NO: 217809
  chr17:42289050-42289167
  hypo

SEQ ID NO: 446640 - DNA, 216 bp, Homo sapiens; identical to SEQ ID NO: 270698
  chr17:42292484-42292700
  hypo

SEQ ID NO: 446641 - DNA, 614 bp, Homo sapiens; identical to SEQ ID NO: 292390
  chr17:42298856-42299470
  hypo

SEQ ID NO: 446642 - DNA, 418 bp, Homo sapiens; identical to SEQ ID NO: 270700
  chr17:42328460-42328878
  hypo

SEQ ID NO: 446643 - DNA, 60 bp, Homo sapiens; identical to SEQ ID NO: 217811
  chr17:42395460-42395520
  hypo

SEQ ID NO: 446644 - DNA, 40 bp, Homo sapiens; identical to SEQ ID NO: 217812
  chr17:42395550-42395590
  hypo

SEQ ID NO: 446645 - DNA, 198 bp, Homo sapiens; identical to SEQ ID NO: 270706
  chr17:42427016-42427214
  hypo

SEQ ID NO: 446646 - DNA, 388 bp, Homo sapiens; identical to SEQ ID NO: 217815
  chr17:42427764-42428152
  hypo

SEQ ID NO: 446647 - DNA, 152 bp, Homo sapiens; identical to SEQ ID NO: 204631
  chr17:42441042-42441194
  hypo

SEQ ID NO: 446648 - DNA, 180 bp, Homo sapiens; identical to SEQ ID NO: 270708
  chr17:42590362-42590542
  hypo

SEQ ID NO: 446649 - DNA, 75 bp, Homo sapiens; identical to SEQ ID NO: 204634
  chr17:42635073-42635148
  hypo

SEQ ID NO: 446650 - DNA, 95 bp, Homo sapiens; identical to SEQ ID NO: 270709
  chr17:42706595-42706690
  hypo

SEQ ID NO: 446651 - DNA, 159 bp, Homo sapiens; identical to SEQ ID NO: 217819
  chr17:42942200-42942359
  hypo

SEQ ID NO: 446652 - DNA, 63 bp, Homo sapiens; identical to SEQ ID NO: 217820
  chr17:42981556-42981619
  hypo

SEQ ID NO: 446653 - DNA, 207 bp, Homo sapiens; identical to SEQ ID NO: 217821
  chr17:42992858-42993065
  hypo

SEQ ID NO: 446654 - DNA, 309 bp, Homo sapiens; identical to SEQ ID NO: 217823
  chr17:43121047-43121356
  hypo

SEQ ID NO: 446655 - DNA, 85 bp, Homo sapiens; identical to SEQ ID NO: 217825
  chr17:43124006-43124091
  hypo

SEQ ID NO: 446656 - DNA, 33 bp, Homo sapiens; identical to SEQ ID NO: 217826
  chr17:43173433-43173466
  hypo

SEQ ID NO: 446657 - DNA, 185 bp, Homo sapiens; identical to SEQ ID NO: 217827
  chr17:43179707-43179892
  hypo

SEQ ID NO: 446658 - DNA, 88 bp, Homo sapiens; identical to SEQ ID NO: 217829
  chr17:43181005-43181093
  hypo

SEQ ID NO: 446659 - DNA, 47 bp, Homo sapiens; identical to SEQ ID NO: 270722
  chr17:43193914-43193961
  hypo

SEQ ID NO: 446660 - DNA, 53 bp, Homo sapiens; identical to SEQ ID NO: 217830
  chr17:43196206-43196259
  hypo

SEQ ID NO: 446661 - DNA, 223 bp, Homo sapiens; identical to SEQ ID NO: 270724
  chr17:43208547-43208770
  hypo

SEQ ID NO: 446662 - DNA, 98 bp, Homo sapiens; identical to SEQ ID NO: 217831
  chr17:43211171-43211269
  hypo

SEQ ID NO: 446663 - DNA, 31 bp, Homo sapiens; identical to SEQ ID NO: 270726
  chr17:43234070-43234101
  hypo

SEQ ID NO: 446664 - DNA, 91 bp, Homo sapiens; identical to SEQ ID NO: 270727
  chr17:43246546-43246637
  hypo

SEQ ID NO: 446665 - DNA, 32 bp, Homo sapiens; identical to SEQ ID NO: 270729
  chr17:43296203-43296235
  hypo

SEQ ID NO: 446666 - DNA, 113 bp, Homo sapiens; identical to SEQ ID NO: 217833
  chr17:43321183-43321296
  hypo

SEQ ID NO: 446667 - DNA, 88 bp, Homo sapiens; identical to SEQ ID NO: 217834
  chr17:43321347-43321435
  hypo

SEQ ID NO: 446668 - DNA, 162 bp, Homo sapiens; identical to SEQ ID NO: 270731
  chr17:43347689-43347851
  hypo

SEQ ID NO: 446669 - DNA, 99 bp, Homo sapiens; identical to SEQ ID NO: 217836
  chr17:44799504-44799603
  hypo

SEQ ID NO: 446670 - DNA, 571 bp, Homo sapiens; identical to SEQ ID NO: 217837
  chr17:44845576-44846147
  hypo

SEQ ID NO: 446671 - DNA, 77 bp, Homo sapiens; identical to SEQ ID NO: 270735
  chr17:45253201-45253278
  hypo

SEQ ID NO: 446672 - DNA, 37 bp, Homo sapiens; identical to SEQ ID NO: 270736
  chr17:45590572-45590609
  hypo

SEQ ID NO: 446673 - DNA, 81 bp, Homo sapiens; identical to SEQ ID NO: 217838
  chr17:45599273-45599354
  hypo

SEQ ID NO: 446674 - DNA, 89 bp, Homo sapiens; identical to SEQ ID NO: 411659
  chr17:45689950-45690039
  hypo

SEQ ID NO: 446675 - DNA, 228 bp, Homo sapiens; identical to SEQ ID NO: 217839
  chr17:45885682-45885910
  hypo

SEQ ID NO: 446676 - DNA, 54 bp, Homo sapiens; identical to SEQ ID NO: 270740
  chr17:45886228-45886282
  hypo

SEQ ID NO: 446677 - DNA, 103 bp, Homo sapiens; identical to SEQ ID NO: 270741
  chr17:45891076-45891179
  hypo

SEQ ID NO: 446678 - DNA, 389 bp, Homo sapiens; identical to SEQ ID NO: 270742
  chr17:45894355-45894744
  hypo

SEQ ID NO: 446679 - DNA, 81 bp, Homo sapiens; identical to SEQ ID NO: 270743
  chr17:45943943-45944024
  hypo

SEQ ID NO: 446680 - DNA, 151 bp, Homo sapiens; identical to SEQ ID NO: 270744
  chr17:45944324-45944475
  hypo

SEQ ID NO: 446681 - DNA, 37 bp, Homo sapiens; identical to SEQ ID NO: 217841
  chr17:45970935-45970972
  hypo

SEQ ID NO: 446682 - DNA, 37 bp, Homo sapiens; identical to SEQ ID NO: 270747
  chr17:46017956-46017993
  hypo

SEQ ID NO: 446683 - DNA, 37 bp, Homo sapiens; identical to SEQ ID NO: 270748
  chr17:46018233-46018270
  hypo

SEQ ID NO: 446684 - DNA, 99 bp, Homo sapiens; identical to SEQ ID NO: 322594
  chr17:46080828-46080927
  hypo

SEQ ID NO: 446685 - DNA, 33 bp, Homo sapiens; identical to SEQ ID NO: 217842
  chr17:46123911-46123944
  hypo

SEQ ID NO: 446686 - DNA, 125 bp, Homo sapiens
  chr17:46152449-46152574
  hypo
gtggcttttctgactgtaaaaacaagatgggtagaacaattttatctatatgggactattatccagactggaaccattcctgtgtctctgattaatgtaatcacaaactcttttttttttttttt

SEQ ID NO: 446687 - DNA, 152 bp, Homo sapiens; identical to SEQ ID NO: 217846
  chr17:46152814-46152966
  hypo

SEQ ID NO: 446688 - DNA, 44 bp, Homo sapiens; identical to SEQ ID NO: 270753
  chr17:46170653-46170697
  hypo

SEQ ID NO: 446689 - DNA, 57 bp, Homo sapiens; identical to SEQ ID NO: 270754
  chr17:46176826-46176883
  hypo

SEQ ID NO: 446690 - DNA, 37 bp, Homo sapiens; identical to SEQ ID NO: 270756
  chr17:46223566-46223603
  hypo

SEQ ID NO: 446691 - DNA, 120 bp, Homo sapiens; identical to SEQ ID NO: 270757
  chr17:46235537-46235657
  hypo

SEQ ID NO: 446692 - DNA, 31 bp, Homo sapiens; identical to SEQ ID NO: 270758
  chr17:46409045-46409076
  hypo

SEQ ID NO: 446693 - DNA, 140 bp, Homo sapiens; identical to SEQ ID NO: 292447
  chr17:46570076-46570216
  hypo

SEQ ID NO: 446694 - DNA, 238 bp, Homo sapiens; identical to SEQ ID NO: 270759
  chr17:46607012-46607250
  hypo

SEQ ID NO: 446695 - DNA, 297 bp, Homo sapiens; identical to SEQ ID NO: 225401
  chr17:46683517-46683814
  hypo

SEQ ID NO: 446696 - DNA, 162 bp, Homo sapiens; identical to SEQ ID NO: 204670
  chr17:46696376-46696538
  hypo

SEQ ID NO: 446697 - DNA, 266 bp, Homo sapiens; identical to SEQ ID NO: 292462
  chr17:46696643-46696909
  hypo

SEQ ID NO: 446698 - DNA, 92 bp, Homo sapiens; identical to SEQ ID NO: 292468
  chr17:46724660-46724752
  hypo

SEQ ID NO: 446699 - DNA, 113 bp, Homo sapiens; identical to SEQ ID NO: 292472
  chr17:46805459-46805572
  hypo

SEQ ID NO: 446700 - DNA, 57 bp, Homo sapiens; identical to SEQ ID NO: 204678
  chr17:46806111-46806168
  hypo

SEQ ID NO: 446701 - DNA, 90 bp, Homo sapiens; identical to SEQ ID NO: 270760
  chr17:46983833-46983923
  hypo

SEQ ID NO: 446702 - DNA, 34 bp, Homo sapiens; identical to SEQ ID NO: 270761
  chr17:46993884-46993918
  hypo

SEQ ID NO: 446703 - DNA, 210 bp, Homo sapiens; identical to SEQ ID NO: 270762
  chr17:47092596-47092806
  hypo

SEQ ID NO: 446704 - DNA, 192 bp, Homo sapiens; identical to SEQ ID NO: 322623
  chr17:47170372-47170564
  hypo

SEQ ID NO: 446705 - DNA, 119 bp, Homo sapiens; identical to SEQ ID NO: 322624
  chr17:47170956-47171075
  hypo

SEQ ID NO: 446706 - DNA, 180 bp, Homo sapiens; identical to SEQ ID NO: 270765
  chr17:47177621-47177801
  hypo

SEQ ID NO: 446707 - DNA, 125 bp, Homo sapiens; identical to SEQ ID NO: 292490
  chr17:47301641-47301766
  hypo

SEQ ID NO: 446708 - DNA, 434 bp, Homo sapiens; identical to SEQ ID NO: 128936
  chr17:47301801-47302235
  hypo

SEQ ID NO: 446709 - DNA, 643 bp, Homo sapiens; identical to SEQ ID NO: 292492
  chr17:47307801-47308444
  hypo

SEQ ID NO: 446710 - DNA, 39 bp, Homo sapiens; identical to SEQ ID NO: 217856
  chr17:47442684-47442723
  hypo

SEQ ID NO: 446711 - DNA, 53 bp, Homo sapiens; identical to SEQ ID NO: 292495
  chr17:47547746-47547799
  hypo

SEQ ID NO: 446712 - DNA, 95 bp, Homo sapiens; identical to SEQ ID NO: 217857
  chr17:47583840-47583935
  hypo

SEQ ID NO: 446713 - DNA, 445 bp, Homo sapiens; identical to SEQ ID NO: 270768
  chr17:47629443-47629888
  hypo

SEQ ID NO: 446714 - DNA, 39 bp, Homo sapiens; identical to SEQ ID NO: 322635
  chr17:47657458-47657497
  hypo

SEQ ID NO: 446715 - DNA, 34 bp, Homo sapiens; identical to SEQ ID NO: 270771
  chr17:47851979-47852013
  hypo

SEQ ID NO: 446716 - DNA, 92 bp, Homo sapiens; identical to SEQ ID NO: 217858
  chr17:47895284-47895376
  hypo

SEQ ID NO: 446717 - DNA, 162 bp, Homo sapiens; identical to SEQ ID NO: 217859
  chr17:47911774-47911936
  hypo

SEQ ID NO: 446718 - DNA, 281 bp, Homo sapiens; identical to SEQ ID NO: 292505
  chr17:47928527-47928808
  hypo

SEQ ID NO: 446719 - DNA, 173 bp, Homo sapiens; identical to SEQ ID NO: 225421
  chr17:47929093-47929266
  hypo

SEQ ID NO: 446720 - DNA, 63 bp, Homo sapiens; identical to SEQ ID NO: 217860
  chr17:47998383-47998446
  hypo

SEQ ID NO: 446721 - DNA, 545 bp, Homo sapiens; identical to SEQ ID NO: 292513
  chr17:48072070-48072615
  hypo

SEQ ID NO: 446722 - DNA, 42 bp, Homo sapiens; identical to SEQ ID NO: 217862
  chr17:48139110-48139152
  hypo

SEQ ID NO: 446723 - DNA, 113 bp, Homo sapiens; identical to SEQ ID NO: 270776
  chr17:48183244-48183357
  hypo

SEQ ID NO: 446724 - DNA, 140 bp, Homo sapiens; identical to SEQ ID NO: 217863
  chr17:48243308-48243448
  hypo

SEQ ID NO: 446725 - DNA, 79 bp, Homo sapiens; identical to SEQ ID NO: 270778
  chr17:48258096-48258175
  hypo

SEQ ID NO: 446726 - DNA, 219 bp, Homo sapiens; identical to SEQ ID NO: 270779
  chr17:48258578-48258797
  hypo

SEQ ID NO: 446727 - DNA, 196 bp, Homo sapiens; identical to SEQ ID NO: 270780
  chr17:48263246-48263442
  hypo

SEQ ID NO: 446728 - DNA, 33 bp, Homo sapiens; identical to SEQ ID NO: 217864
  chr17:48268219-48268252
  hypo

SEQ ID NO: 446729 - DNA, 159 bp, Homo sapiens; identical to SEQ ID NO: 270782
  chr17:48530415-48530574
  hypo

SEQ ID NO: 446730 - DNA, 46 bp, Homo sapiens; identical to SEQ ID NO: 270783
  chr17:48539230-48539276
  hypo

SEQ ID NO: 446731 - DNA, 40 bp, Homo sapiens; identical to SEQ ID NO: 217865
  chr17:48555662-48555702
  hypo

SEQ ID NO: 446732 - DNA, 40 bp, Homo sapiens; identical to SEQ ID NO: 270786
  chr17:48589712-48589752
  hypo

SEQ ID NO: 446733 - DNA, 603 bp, Homo sapiens; identical to SEQ ID NO: 270788
  chr17:48613866-48614469
  hypo

SEQ ID NO: 446734 - DNA, 45 bp, Homo sapiens; identical to SEQ ID NO: 322657
  chr17:48620600-48620645
  hypo

SEQ ID NO: 446735 - DNA, 93 bp, Homo sapiens; identical to SEQ ID NO: 322658
  chr17:48653424-48653517
  hypo

SEQ ID NO: 446736 - DNA, 156 bp, Homo sapiens; identical to SEQ ID NO: 217869
  chr17:48763550-48763706
  hypo

SEQ ID NO: 446737 - DNA, 208 bp, Homo sapiens; identical to SEQ ID NO: 270793
  chr17:48764876-48765084
  hypo

SEQ ID NO: 446738 - DNA, 105 bp, Homo sapiens; identical to SEQ ID NO: 217872
  chr17:48881298-48881403
  hypo

SEQ ID NO: 446739 - DNA, 37 bp, Homo sapiens; identical to SEQ ID NO: 270797
  chr17:48890603-48890640
  hypo

SEQ ID NO: 446740 - DNA, 60 bp, Homo sapiens; identical to SEQ ID NO: 217873
  chr17:48911127-48911187
  hypo

SEQ ID NO: 446741 - DNA, 98 bp, Homo sapiens; identical to SEQ ID NO: 217874
  chr17:48911230-48911328
  hypo

SEQ ID NO: 446742 - DNA, 191 bp, Homo sapiens; identical to SEQ ID NO: 270799
  chr17:48921801-48921992
  hypo

SEQ ID NO: 446743 - DNA, 505 bp, Homo sapiens; identical to SEQ ID NO: 270800
  chr17:48970596-48971101
  hypo

SEQ ID NO: 446744 - DNA, 82 bp, Homo sapiens; identical to SEQ ID NO: 270801
  chr17:48971131-48971213
  hypo

SEQ ID NO: 446745 - DNA, 146 bp, Homo sapiens; identical to SEQ ID NO: 270802
  chr17:48995485-48995631
  hypo

SEQ ID NO: 446746 - DNA, 115 bp, Homo sapiens; identical to SEQ ID NO: 204711
  chr17:49028000-49028115
  hypo

SEQ ID NO: 446747 - DNA, 32 bp, Homo sapiens; identical to SEQ ID NO: 270803
  chr17:49047591-49047623
  hypo

SEQ ID NO: 446748 - DNA, 36 bp, Homo sapiens; identical to SEQ ID NO: 217876
  chr17:49129052-49129088
  hypo

SEQ ID NO: 446749 - DNA, 32 bp, Homo sapiens; identical to SEQ ID NO: 270805
  chr17:49194752-49194784
  hypo

SEQ ID NO: 446750 - DNA, 34 bp, Homo sapiens; identical to SEQ ID NO: 217877
  chr17:49229605-49229639
  hypo

SEQ ID NO: 446751 - DNA, 46 bp, Homo sapiens; identical to SEQ ID NO: 270808
  chr17:49354211-49354257
  hypo

SEQ ID NO: 446752 - DNA, 78 bp, Homo sapiens; identical to SEQ ID NO: 217879
  chr17:52832078-52832156
  hypo

SEQ ID NO: 446753 - DNA, 43 bp, Homo sapiens; identical to SEQ ID NO: 270810
  chr17:52865183-52865226
  hypo

SEQ ID NO: 446754 - DNA, 36 bp, Homo sapiens; identical to SEQ ID NO: 217880
  chr17:53314420-53314456
  hypo

SEQ ID NO: 446755 - DNA, 36 bp, Homo sapiens; identical to SEQ ID NO: 270812
  chr17:53398066-53398102
  hypo

SEQ ID NO: 446756 - DNA, 76 bp, Homo sapiens; identical to SEQ ID NO: 217881
  chr17:53409743-53409819
  hypo

SEQ ID NO: 446757 - DNA, 100 bp, Homo sapiens; identical to SEQ ID NO: 270814
  chr17:53410259-53410359
  hypo

SEQ ID NO: 446758 - DNA, 80 bp, Homo sapiens; identical to SEQ ID NO: 270816
  chr17:53550719-53550799
  hypo

SEQ ID NO: 446759 - DNA, 37 bp, Homo sapiens; identical to SEQ ID NO: 270817
  chr17:53579056-53579093
  hypo

SEQ ID NO: 446760 - DNA, 185 bp, Homo sapiens; identical to SEQ ID NO: 270818
  chr17:53852162-53852347
  hypo

SEQ ID NO: 446761 - DNA, 32 bp, Homo sapiens; identical to SEQ ID NO: 292551
  chr17:54672364-54672396
  hypo

SEQ ID NO: 446762 - DNA, 353 bp, Homo sapiens; identical to SEQ ID NO: 204717
  chr17:54910847-54911200
  hypo

SEQ ID NO: 446763 - DNA, 271 bp, Homo sapiens; identical to SEQ ID NO: 217885
  chr17:54976882-54977153
  hypo

SEQ ID NO: 446764 - DNA, 93 bp, Homo sapiens; identical to SEQ ID NO: 217886
  chr17:55037155-55037248
  hypo

SEQ ID NO: 446765 - DNA, 35 bp, Homo sapiens; identical to SEQ ID NO: 270821
  chr17:55161300-55161335
  hypo

SEQ ID NO: 446766 - DNA, 43 bp, Homo sapiens; identical to SEQ ID NO: 322698
  chr17:55184835-55184878
  hypo

SEQ ID NO: 446767 - DNA, 124 bp, Homo sapiens; identical to SEQ ID NO: 322699
  chr17:55363924-55364048
  hypo

SEQ ID NO: 446768 - DNA, 154 bp, Homo sapiens; identical to SEQ ID NO: 322700
  chr17:55364229-55364383
  hypo

SEQ ID NO: 446769 - DNA, 62 bp, Homo sapiens; identical to SEQ ID NO: 270824
  chr17:55368497-55368559
  hypo

SEQ ID NO: 446770 - DNA, 58 bp, Homo sapiens; identical to SEQ ID NO: 217887
  chr17:55378749-55378807
  hypo

SEQ ID NO: 446771 - DNA, 66 bp, Homo sapiens; identical to SEQ ID NO: 217888
  chr17:55379076-55379142
  hypo

SEQ ID NO: 446772 - DNA, 34 bp, Homo sapiens; identical to SEQ ID NO: 217889
  chr17:55426663-55426697
  hypo

SEQ ID NO: 446773 - DNA, 44 bp, Homo sapiens; identical to SEQ ID NO: 217890
  chr17:55519664-55519708
  hypo

SEQ ID NO: 446774 - DNA, 124 bp, Homo sapiens; identical to SEQ ID NO: 270829
  chr17:55536230-55536354
  hypo

SEQ ID NO: 446775 - DNA, 67 bp, Homo sapiens; identical to SEQ ID NO: 270830
  chr17:55605295-55605362
  hypo

SEQ ID NO: 446776 - DNA, 32 bp, Homo sapiens; identical to SEQ ID NO: 270831
  chr17:55615595-55615627
  hypo

SEQ ID NO: 446777 - DNA, 144 bp, Homo sapiens; identical to SEQ ID NO: 270832
  chr17:55643992-55644136
  hypo

SEQ ID NO: 446778 - DNA, 91 bp, Homo sapiens; identical to SEQ ID NO: 270834
  chr17:55647400-55647491
  hypo

SEQ ID NO: 446779 - DNA, 182 bp, Homo sapiens; identical to SEQ ID NO: 217892
  chr17:55752305-55752487
  hypo

SEQ ID NO: 446780 - DNA, 70 bp, Homo sapiens; identical to SEQ ID NO: 217894
  chr17:55828323-55828393
  hypo

SEQ ID NO: 446781 - DNA, 136 bp, Homo sapiens; identical to SEQ ID NO: 270840
  chr17:56009116-56009252
  hypo

SEQ ID NO: 446782 - DNA, 462 bp, Homo sapiens; identical to SEQ ID NO: 225439
  chr17:56032083-56032545
  hypo

SEQ ID NO: 446783 - DNA, 39 bp, Homo sapiens; identical to SEQ ID NO: 270842
  chr17:56037720-56037759
  hypo

SEQ ID NO: 446784 - DNA, 476 bp, Homo sapiens; identical to SEQ ID NO: 292570
  chr17:56296380-56296856
  hypo

SEQ ID NO: 446785 - DNA, 77 bp, Homo sapiens; identical to SEQ ID NO: 270843
  chr17:56389453-56389530
  hypo

SEQ ID NO: 446786 - DNA, 610 bp, Homo sapiens; identical to SEQ ID NO: 204722
  chr17:56401719-56402329
  hypo

SEQ ID NO: 446787 - DNA, 360 bp, Homo sapiens; identical to SEQ ID NO: 424195
  chr17:56429846-56430206
  hypo

SEQ ID NO: 446788 - DNA, 32 bp, Homo sapiens; identical to SEQ ID NO: 217899
  chr17:56471400-56471432
  hypo

SEQ ID NO: 446789 - DNA, 150 bp, Homo sapiens; identical to SEQ ID NO: 217900
  chr17:56569817-56569967
  hypo

SEQ ID NO: 446790 - DNA, 41 bp, Homo sapiens; identical to SEQ ID NO: 270850
  chr17:57007398-57007439
  hypo

SEQ ID NO: 446791 - DNA, 209 bp, Homo sapiens; identical to SEQ ID NO: 217901
  chr17:57185658-57185867
  hypo

SEQ ID NO: 446792 - DNA, 78 bp, Homo sapiens; identical to SEQ ID NO: 270854
  chr17:57465465-57465543
  hypo

SEQ ID NO: 446793 - DNA, 180 bp, Homo sapiens; identical to SEQ ID NO: 217904
  chr17:57476111-57476291
  hypo

SEQ ID NO: 446794 - DNA, 76 bp, Homo sapiens; identical to SEQ ID NO: 217905
  chr17:57591255-57591331
  hypo

SEQ ID NO: 446795 - DNA, 58 bp, Homo sapiens; identical to SEQ ID NO: 270857
  chr17:57743551-57743609
  hypo

SEQ ID NO: 446796 - DNA, 40 bp, Homo sapiens; identical to SEQ ID NO: 270860
  chr17:57788142-57788182
  hypo

SEQ ID NO: 446797 - DNA, 31 bp, Homo sapiens; identical to SEQ ID NO: 217907
  chr17:57832470-57832501
  hypo

SEQ ID NO: 446798 - DNA, 104 bp, Homo sapiens; identical to SEQ ID NO: 270863
  chr17:57902282-57902386
  hypo

SEQ ID NO: 446799 - DNA, 39 bp, Homo sapiens; identical to SEQ ID NO: 270864
  chr17:57932454-57932493
  hypo

SEQ ID NO: 446800 - DNA, 77 bp, Homo sapiens; identical to SEQ ID NO: 217908
  chr17:57937325-57937402
  hypo

SEQ ID NO: 446801 - DNA, 42 bp, Homo sapiens; identical to SEQ ID NO: 270866
  chr17:57938218-57938260
  hypo

SEQ ID NO: 446802 - DNA, 104 bp, Homo sapiens; identical to SEQ ID NO: 270869
  chr17:58497635-58497739
  hypo

SEQ ID NO: 446803 - DNA, 59 bp, Homo sapiens; identical to SEQ ID NO: 217909
  chr17:58512811-58512870
  hypo

SEQ ID NO: 446804 - DNA, 33 bp, Homo sapiens; identical to SEQ ID NO: 270871
  chr17:58559518-58559551
  hypo

SEQ ID NO: 446805 - DNA, 36 bp, Homo sapiens; identical to SEQ ID NO: 217910
  chr17:58590466-58590502
  hypo

SEQ ID NO: 446806 - DNA, 44 bp, Homo sapiens; identical to SEQ ID NO: 270873
  chr17:58628050-58628094
  hypo

SEQ ID NO: 446807 - DNA, 801 bp, Homo sapiens; identical to SEQ ID NO: 204729
  chr17:58677543-58678344
  hypo

SEQ ID NO: 446808 - DNA, 77 bp, Homo sapiens; identical to SEQ ID NO: 217912
  chr17:58690758-58690835
  hypo

SEQ ID NO: 446809 - DNA, 242 bp, Homo sapiens; identical to SEQ ID NO: 204730
  chr17:58700868-58701110
  hypo

SEQ ID NO: 446810 - DNA, 125 bp, Homo sapiens; identical to SEQ ID NO: 204731
  chr17:58711213-58711338
  hypo

SEQ ID NO: 446811 - DNA, 191 bp, Homo sapiens; identical to SEQ ID NO: 204732
  chr17:58725252-58725443
  hypo

SEQ ID NO: 446812 - DNA, 250 bp, Homo sapiens; identical to SEQ ID NO: 204733
  chr17:58733952-58734202
  hypo

SEQ ID NO: 446813 - DNA, 1530 bp, Homo sapiens; identical to SEQ ID NO: 204734
  chr17:58740342-58741872
  hypo

SEQ ID NO: 446814 - DNA, 749 bp, Homo sapiens; identical to SEQ ID NO: 204735
  chr17:58742892-58743641
  hypo

SEQ ID NO: 446815 - DNA, 141 bp, Homo sapiens; identical to SEQ ID NO: 270875
  chr17:59161859-59162000
  hypo

SEQ ID NO: 446816 - DNA, 159 bp, Homo sapiens; identical to SEQ ID NO: 270877
  chr17:59278997-59279156
  hypo

SEQ ID NO: 446817 - DNA, 41 bp, Homo sapiens; identical to SEQ ID NO: 217920
  chr17:59395455-59395496
  hypo

SEQ ID NO: 446818 - DNA, 123 bp, Homo sapiens; identical to SEQ ID NO: 270879
  chr17:59415328-59415451
  hypo

SEQ ID NO: 446819 - DNA, 361 bp, Homo sapiens; identical to SEQ ID NO: 270880
  chr17:59430810-59431171
  hypo

SEQ ID NO: 446820 - DNA, 44 bp, Homo sapiens; identical to SEQ ID NO: 270881
  chr17:59431396-59431440
  hypo

SEQ ID NO: 446821 - DNA, 162 bp, Homo sapiens; identical to SEQ ID NO: 217921
  chr17:59434280-59434442
  hypo

SEQ ID NO: 446822 - DNA, 70 bp, Homo sapiens; identical to SEQ ID NO: 270883
  chr17:59445737-59445807
  hypo

SEQ ID NO: 446823 - DNA, 599 bp, Homo sapiens; identical to SEQ ID NO: 270884
  chr17:59520971-59521570
  hypo

SEQ ID NO: 446824 - DNA, 180 bp, Homo sapiens; identical to SEQ ID NO: 217922
  chr17:60014065-60014245
  hypo

SEQ ID NO: 446825 - DNA, 32 bp, Homo sapiens; identical to SEQ ID NO: 217923
  chr17:60084915-60084947
  hypo

SEQ ID NO: 446826 - DNA, 80 bp, Homo sapiens; identical to SEQ ID NO: 270888
  chr17:60218566-60218646
  hypo

SEQ ID NO: 446827 - DNA, 39 bp, Homo sapiens; identical to SEQ ID NO: 270889
  chr17:60517095-60517134
  hypo

SEQ ID NO: 446828 - DNA, 167 bp, Homo sapiens; identical to SEQ ID NO: 217924
  chr17:60525979-60526146
  hypo

SEQ ID NO: 446829 - DNA, 38 bp, Homo sapiens; identical to SEQ ID NO: 217925
  chr17:60564359-60564397
  hypo

SEQ ID NO: 446830 - DNA, 87 bp, Homo sapiens; identical to SEQ ID NO: 217926
  chr17:60564888-60564975
  hypo

SEQ ID NO: 446831 - DNA, 44 bp, Homo sapiens; identical to SEQ ID NO: 270895
  chr17:60691187-60691231
  hypo

SEQ ID NO: 446832 - DNA, 318 bp, Homo sapiens; identical to SEQ ID NO: 270897
  chr17:60747507-60747825
  hypo

SEQ ID NO: 446833 - DNA, 149 bp, Homo sapiens; identical to SEQ ID NO: 270898
  chr17:60747905-60748054
  hypo

SEQ ID NO: 446834 - DNA, 119 bp, Homo sapiens; identical to SEQ ID NO: 270899
  chr17:60748865-60748984
  hypo

SEQ ID NO: 446835 - DNA, 41 bp, Homo sapiens; identical to SEQ ID NO: 270900
  chr17:60750844-60750885
  hypo

SEQ ID NO: 446836 - DNA, 150 bp, Homo sapiens; identical to SEQ ID NO: 217928
  chr17:60753744-60753894
  hypo

SEQ ID NO: 446837 - DNA, 74 bp, Homo sapiens; identical to SEQ ID NO: 270903
  chr17:60755990-60756064
  hypo

SEQ ID NO: 446838 - DNA, 252 bp, Homo sapiens; identical to SEQ ID NO: 270904
  chr17:60757611-60757863
  hypo

SEQ ID NO: 446839 - DNA, 49 bp, Homo sapiens; identical to SEQ ID NO: 217930
  chr17:60758441-60758490
  hypo

SEQ ID NO: 446840 - DNA, 103 bp, Homo sapiens; identical to SEQ ID NO: 270906
  chr17:60759235-60759338
  hypo

SEQ ID NO: 446841 - DNA, 51 bp, Homo sapiens; identical to SEQ ID NO: 225460
  chr17:60771357-60771408
  hypo

SEQ ID NO: 446842 - DNA, 192 bp, Homo sapiens; identical to SEQ ID NO: 292604
  chr17:60781450-60781642
  hypo

SEQ ID NO: 446843 - DNA, 165 bp, Homo sapiens; identical to SEQ ID NO: 270910
  chr17:60793413-60793578
  hypo

SEQ ID NO: 446844 - DNA, 221 bp, Homo sapiens; identical to SEQ ID NO: 270911
  chr17:60858152-60858373
  hypo

SEQ ID NO: 446845 - DNA, 34 bp, Homo sapiens; identical to SEQ ID NO: 217936
  chr17:61000668-61000702
  hypo

SEQ ID NO: 446846 - DNA, 104 bp, Homo sapiens; identical to SEQ ID NO: 270913
  chr17:61050279-61050383
  hypo

SEQ ID NO: 446847 - DNA, 120 bp, Homo sapiens; identical to SEQ ID NO: 270914
  chr17:61382595-61382715
  hypo

SEQ ID NO: 446848 - DNA, 184 bp, Homo sapiens; identical to SEQ ID NO: 270915
  chr17:61498925-61499109
  hypo

SEQ ID NO: 446849 - DNA, 393 bp, Homo sapiens; identical to SEQ ID NO: 270916
  chr17:61514950-61515343
  hypo

SEQ ID NO: 446850 - DNA, 75 bp, Homo sapiens; identical to SEQ ID NO: 270917
  chr17:61521531-61521606
  hypo

SEQ ID NO: 446851 - DNA, 210 bp, Homo sapiens; identical to SEQ ID NO: 270918
  chr17:61527570-61527780
  hypo

SEQ ID NO: 446852 - DNA, 114 bp, Homo sapiens; identical to SEQ ID NO: 270919
  chr17:61601564-61601678
  hypo

SEQ ID NO: 446853 - DNA, 339 bp, Homo sapiens; identical to SEQ ID NO: 322811
  chr17:61607516-61607855
  hypo

SEQ ID NO: 446854 - DNA, 89 bp, Homo sapiens; identical to SEQ ID NO: 270921
  chr17:61611415-61611504
  hypo

SEQ ID NO: 446855 - DNA, 103 bp, Homo sapiens; identical to SEQ ID NO: 217940
  chr17:61637142-61637245
  hypo

SEQ ID NO: 446856 - DNA, 92 bp, Homo sapiens; identical to SEQ ID NO: 217942
  chr17:61864835-61864927
  hypo

SEQ ID NO: 446857 - DNA, 41 bp, Homo sapiens; identical to SEQ ID NO: 270926
  chr17:61892318-61892359
  hypo

SEQ ID NO: 446858 - DNA, 283 bp, Homo sapiens; identical to SEQ ID NO: 292622
  chr17:61921000-61921283
  hypo

SEQ ID NO: 446859 - DNA, 78 bp, Homo sapiens; identical to SEQ ID NO: 270927
  chr17:61925862-61925940
  hypo

SEQ ID NO: 446860 - DNA, 148 bp, Homo sapiens; identical to SEQ ID NO: 217944
  chr17:62010938-62011086
  hypo

SEQ ID NO: 446861 - DNA, 231 bp, Homo sapiens; identical to SEQ ID NO: 270929
  chr17:62022680-62022911
  hypo

SEQ ID NO: 446862 - DNA, 344 bp, Homo sapiens; identical to SEQ ID NO: 270930
  chr17:62050024-62050368
  hypo

SEQ ID NO: 446863 - DNA, 193 bp, Homo sapiens; identical to SEQ ID NO: 270931
  chr17:62067099-62067292
  hypo

SEQ ID NO: 446864 - DNA, 115 bp, Homo sapiens; identical to SEQ ID NO: 270932
  chr17:62131680-62131795
  hypo

SEQ ID NO: 446865 - DNA, 37 bp, Homo sapiens; identical to SEQ ID NO: 217945
  chr17:62209843-62209880
  hypo

SEQ ID NO: 446866 - DNA, 165 bp, Homo sapiens; identical to SEQ ID NO: 270934
  chr17:62236399-62236564
  hypo

SEQ ID NO: 446867 - DNA, 40 bp, Homo sapiens; identical to SEQ ID NO: 270935
  chr17:62659472-62659512
  hypo

SEQ ID NO: 446868 - DNA, 34 bp, Homo sapiens; identical to SEQ ID NO: 270936
  chr17:62659957-62659991
  hypo

SEQ ID NO: 446869 - DNA, 66 bp, Homo sapiens; identical to SEQ ID NO: 270937
  chr17:62773360-62773426
  hypo

SEQ ID NO: 446870 - DNA, 37 bp, Homo sapiens; identical to SEQ ID NO: 270940
  chr17:62831163-62831200
  hypo

SEQ ID NO: 446871 - DNA, 62 bp, Homo sapiens; identical to SEQ ID NO: 204753
  chr17:62915906-62915968
  hypo

SEQ ID NO: 446872 - DNA, 320 bp, Homo sapiens; identical to SEQ ID NO: 270941
  chr17:62935835-62936155
  hypo

SEQ ID NO: 446873 - DNA, 86 bp, Homo sapiens; identical to SEQ ID NO: 270942
  chr17:63056651-63056737
  hypo

SEQ ID NO: 446874 - DNA, 99 bp, Homo sapiens; identical to SEQ ID NO: 270943
  chr17:63069466-63069565
  hypo

SEQ ID NO: 446875 - DNA, 31 bp, Homo sapiens; identical to SEQ ID NO: 270945
  chr17:63459276-63459307
  hypo

SEQ ID NO: 446876 - DNA, 85 bp, Homo sapiens; identical to SEQ ID NO: 270946
  chr17:63497915-63498000
  hypo

SEQ ID NO: 446877 - DNA, 350 bp, Homo sapiens; identical to SEQ ID NO: 217948
  chr17:63534022-63534372
  hypo

SEQ ID NO: 446878 - DNA, 865 bp, Homo sapiens; identical to SEQ ID NO: 424236
  chr17:63556529-63557394
  hypo

SEQ ID NO: 446879 - DNA, 121 bp, Homo sapiens; identical to SEQ ID NO: 204755
  chr17:64257870-64257991
  hypo

SEQ ID NO: 446880 - DNA, 173 bp, Homo sapiens; identical to SEQ ID NO: 225472
  chr17:64298539-64298712
  hypo

SEQ ID NO: 446881 - DNA, 73 bp, Homo sapiens; identical to SEQ ID NO: 217954
  chr17:64752172-64752245
  hypo

SEQ ID NO: 446882 - DNA, 221 bp, Homo sapiens; identical to SEQ ID NO: 270952
  chr17:64953396-64953617
  hypo

SEQ ID NO: 446883 - DNA, 142 bp, Homo sapiens; identical to SEQ ID NO: 270953
  chr17:65027610-65027752
  hypo

SEQ ID NO: 446884 - DNA, 37 bp, Homo sapiens; identical to SEQ ID NO: 217955
  chr17:65109642-65109679
  hypo

SEQ ID NO: 446885 - DNA, 56 bp, Homo sapiens; identical to SEQ ID NO: 225474
  chr17:65242142-65242198
  hypo

SEQ ID NO: 446886 - DNA, 91 bp, Homo sapiens; identical to SEQ ID NO: 270956
  chr17:65297543-65297634
  hypo

SEQ ID NO: 446887 - DNA, 40 bp, Homo sapiens; identical to SEQ ID NO: 270957
  chr17:65298392-65298432
  hypo

SEQ ID NO: 446888 - DNA, 42 bp, Homo sapiens; identical to SEQ ID NO: 270958
  chr17:65314671-65314713
  hypo

SEQ ID NO: 446889 - DNA, 41 bp, Homo sapiens; identical to SEQ ID NO: 204758
  chr17:65352419-65352460
  hypo

SEQ ID NO: 446890 - DNA, 44 bp, Homo sapiens; identical to SEQ ID NO: 270961
  chr17:65573104-65573148
  hypo

SEQ ID NO: 446891 - DNA, 271 bp, Homo sapiens; identical to SEQ ID NO: 270962
  chr17:65668882-65669153
  hypo

SEQ ID NO: 446892 - DNA, 37 bp, Homo sapiens; identical to SEQ ID NO: 217957
  chr17:65711559-65711596
  hypo

SEQ ID NO: 446893 - DNA, 39 bp, Homo sapiens; identical to SEQ ID NO: 217958
  chr17:65712253-65712292
  hypo

SEQ ID NO: 446894 - DNA, 201 bp, Homo sapiens; identical to SEQ ID NO: 270965
  chr17:66384596-66384797
  hypo

SEQ ID NO: 446895 - DNA, 32 bp, Homo sapiens; identical to SEQ ID NO: 217961
  chr17:66421685-66421717
  hypo

SEQ ID NO: 446896 - DNA, 230 bp, Homo sapiens; identical to SEQ ID NO: 270972
  chr17:66446928-66447158
  hypo

SEQ ID NO: 446897 - DNA, 308 bp, Homo sapiens; identical to SEQ ID NO: 217965
  chr17:66538786-66539094
  hypo

SEQ ID NO: 446898 - DNA, 507 bp, Homo sapiens; identical to SEQ ID NO: 270975
  chr17:66539462-66539969
  hypo

SEQ ID NO: 446899 - DNA, 146 bp, Homo sapiens; identical to SEQ ID NO: 204761
  chr17:66596140-66596286
  hypo

SEQ ID NO: 446900 - DNA, 127 bp, Homo sapiens; identical to SEQ ID NO: 270977
  chr17:67081066-67081193
  hypo

SEQ ID NO: 446901 - DNA, 209 bp, Homo sapiens; identical to SEQ ID NO: 270978
  chr17:67468376-67468585
  hypo

SEQ ID NO: 446902 - DNA, 31 bp, Homo sapiens; identical to SEQ ID NO: 270979
  chr17:68197136-68197167
  hypo

SEQ ID NO: 446903 - DNA, 51 bp, Homo sapiens; identical to SEQ ID NO: 204765
  chr17:70270193-70270244
  hypo

SEQ ID NO: 446904 - DNA, 93 bp, Homo sapiens; identical to SEQ ID NO: 217972
  chr17:70380740-70380833
  hypo

SEQ ID NO: 446905 - DNA, 148 bp, Homo sapiens; identical to SEQ ID NO: 270982
  chr17:70409455-70409603
  hypo

SEQ ID NO: 446906 - DNA, 342 bp, Homo sapiens; identical to SEQ ID NO: 270983
  chr17:70441816-70442158
  hypo

SEQ ID NO: 446907 - DNA, 64 bp, Homo sapiens; identical to SEQ ID NO: 270984
  chr17:70507522-70507586
  hypo

SEQ ID NO: 446908 - DNA, 85 bp, Homo sapiens; identical to SEQ ID NO: 270986
  chr17:70705003-70705088
  hypo

SEQ ID NO: 446909 - DNA, 603 bp, Homo sapiens; identical to SEQ ID NO: 322892
  chr17:70712101-70712704
  hypo

SEQ ID NO: 446910 - DNA, 87 bp, Homo sapiens; identical to SEQ ID NO: 322893
  chr17:70712734-70712821
  hypo

SEQ ID NO: 446911 - DNA, 33 bp, Homo sapiens; identical to SEQ ID NO: 270989
  chr17:70785406-70785439
  hypo

SEQ ID NO: 446912 - DNA, 120 bp, Homo sapiens; identical to SEQ ID NO: 270990
  chr17:70948870-70948990
  hypo

SEQ ID NO: 446913 - DNA, 34 bp, Homo sapiens; identical to SEQ ID NO: 270991
  chr17:71026284-71026318
  hypo

SEQ ID NO: 446914 - DNA, 46 bp, Homo sapiens; identical to SEQ ID NO: 270992
  chr17:71126821-71126867
  hypo

SEQ ID NO: 446915 - DNA, 42 bp, Homo sapiens; identical to SEQ ID NO: 270993
  chr17:71190856-71190898
  hypo

SEQ ID NO: 446916 - DNA, 149 bp, Homo sapiens; identical to SEQ ID NO: 217977
  chr17:71202870-71203019
  hypo

SEQ ID NO: 446917 - DNA, 209 bp, Homo sapiens; identical to SEQ ID NO: 217978
  chr17:71269220-71269429
  hypo

SEQ ID NO: 446918 - DNA, 87 bp, Homo sapiens; identical to SEQ ID NO: 217979
  chr17:71272524-71272611
  hypo

SEQ ID NO: 446919 - DNA, 86 bp, Homo sapiens; identical to SEQ ID NO: 270999
  chr17:71276454-71276540
  hypo

SEQ ID NO: 446920 - DNA, 166 bp, Homo sapiens; identical to SEQ ID NO: 217980
  chr17:71280549-71280715
  hypo

SEQ ID NO: 446921 - DNA, 1600 bp, Homo sapiens; identical to SEQ ID NO: 292664
  chr17:71306967-71308567
  hypo

SEQ ID NO: 446922 - DNA, 102 bp, Homo sapiens; identical to SEQ ID NO: 217983
  chr17:71312422-71312524
  hypo

SEQ ID NO: 446923 - DNA, 258 bp, Homo sapiens; identical to SEQ ID NO: 271003
  chr17:71325320-71325578
  hypo

SEQ ID NO: 446924 - DNA, 154 bp, Homo sapiens; identical to SEQ ID NO: 271004
  chr17:71326305-71326459
  hypo

SEQ ID NO: 446925 - DNA, 199 bp, Homo sapiens; identical to SEQ ID NO: 271005
  chr17:71345761-71345960
  hypo

SEQ ID NO: 446926 - DNA, 204 bp, Homo sapiens; identical to SEQ ID NO: 217985
  chr17:71354224-71354428
  hypo

SEQ ID NO: 446927 - DNA, 137 bp, Homo sapiens; identical to SEQ ID NO: 217986
  chr17:71364486-71364623
  hypo

SEQ ID NO: 446928 - DNA, 120 bp, Homo sapiens; identical to SEQ ID NO: 322917
  chr17:71391356-71391476
  hypo

SEQ ID NO: 446929 - DNA, 83 bp, Homo sapiens; identical to SEQ ID NO: 271009
  chr17:71401759-71401842
  hypo

SEQ ID NO: 446930 - DNA, 90 bp, Homo sapiens; identical to SEQ ID NO: 271010
  chr17:71417096-71417186
  hypo

SEQ ID NO: 446931 - DNA, 241 bp, Homo sapiens; identical to SEQ ID NO: 271011
  chr17:71419536-71419777
  hypo

SEQ ID NO: 446932 - DNA, 128 bp, Homo sapiens; identical to SEQ ID NO: 271012
  chr17:71420061-71420189
  hypo

SEQ ID NO: 446933 - DNA, 170 bp, Homo sapiens; identical to SEQ ID NO: 217988
  chr17:71492642-71492812
  hypo

SEQ ID NO: 446934 - DNA, 229 bp, Homo sapiens; identical to SEQ ID NO: 271015
  chr17:71507291-71507520
  hypo

SEQ ID NO: 446935 - DNA, 35 bp, Homo sapiens; identical to SEQ ID NO: 271016
  chr17:71533240-71533275
  hypo

SEQ ID NO: 446936 - DNA, 160 bp, Homo sapiens; identical to SEQ ID NO: 271019
  chr17:71772787-71772947
  hypo

SEQ ID NO: 446937 - DNA, 144 bp, Homo sapiens; identical to SEQ ID NO: 271020
  chr17:72020385-72020529
  hypo

SEQ ID NO: 446938 - DNA, 55 bp, Homo sapiens; identical to SEQ ID NO: 271021
  chr17:72198104-72198159
  hypo

SEQ ID NO: 446939 - DNA, 472 bp, Homo sapiens; identical to SEQ ID NO: 292670
  chr17:72208668-72209140
  hypo

SEQ ID NO: 446940 - DNA, 83 bp, Homo sapiens; identical to SEQ ID NO: 271023
  chr17:72221625-72221708
  hypo

SEQ ID NO: 446941 - DNA, 42 bp, Homo sapiens; identical to SEQ ID NO: 271024
  chr17:72243967-72244009
  hypo

SEQ ID NO: 446942 - DNA, 446 bp, Homo sapiens; identical to SEQ ID NO: 322935
  chr17:72249046-72249492
  hypo

SEQ ID NO: 446943 - DNA, 222 bp, Homo sapiens; identical to SEQ ID NO: 271026
  chr17:72249921-72250143
  hypo

SEQ ID NO: 446944 - DNA, 336 bp, Homo sapiens; identical to SEQ ID NO: 271027
  chr17:72260300-72260636
  hypo

SEQ ID NO: 446945 - DNA, 58 bp, Homo sapiens
  chr17:72277705-72277763
  hypo
attgccctcctcagagagcaactgcaataactaaacagggtaatgcttagcatatagt

SEQ ID NO: 446946 - DNA, 34 bp, Homo sapiens; identical to SEQ ID NO: 217993
  chr17:72290214-72290248
  hypo

SEQ ID NO: 446947 - DNA, 49 bp, Homo sapiens; identical to SEQ ID NO: 271032
  chr17:72370873-72370922
  hypo

SEQ ID NO: 446948 - DNA, 150 bp, Homo sapiens; identical to SEQ ID NO: 271033
  chr17:72391682-72391832
  hypo

SEQ ID NO: 446949 - DNA, 193 bp, Homo sapiens; identical to SEQ ID NO: 271034
  chr17:72700708-72700901
  hypo

SEQ ID NO: 446950 - DNA, 162 bp, Homo sapiens; identical to SEQ ID NO: 271035
  chr17:72799715-72799877
  hypo

SEQ ID NO: 446951 - DNA, 149 bp, Homo sapiens; identical to SEQ ID NO: 322949
  chr17:72800465-72800614
  hypo

SEQ ID NO: 446952 - DNA, 34 bp, Homo sapiens; identical to SEQ ID NO: 271037
  chr17:72808771-72808805
  hypo

SEQ ID NO: 446953 - DNA, 269 bp, Homo sapiens; identical to SEQ ID NO: 217998
  chr17:72811189-72811458
  hypo

SEQ ID NO: 446954 - DNA, 209 bp, Homo sapiens; identical to SEQ ID NO: 271040
  chr17:72818431-72818640
  hypo

SEQ ID NO: 446955 - DNA, 98 bp, Homo sapiens; identical to SEQ ID NO: 271044
  chr17:72827958-72828056
  hypo

SEQ ID NO: 446956 - DNA, 258 bp, Homo sapiens; identical to SEQ ID NO: 204780
  chr17:72920292-72920550
  hypo

SEQ ID NO: 446957 - DNA, 216 bp, Homo sapiens; identical to SEQ ID NO: 292685
  chr17:72920580-72920796
  hypo

SEQ ID NO: 446958 - DNA, 155 bp, Homo sapiens; identical to SEQ ID NO: 271046
  chr17:72940421-72940576
  hypo

SEQ ID NO: 446959 - DNA, 904 bp, Homo sapiens; identical to SEQ ID NO: 292689
  chr17:72983606-72984510
  hypo

SEQ ID NO: 446960 - DNA, 43 bp, Homo sapiens; identical to SEQ ID NO: 271047
  chr17:72999880-72999923
  hypo

SEQ ID NO: 446961 - DNA, 120 bp, Homo sapiens; identical to SEQ ID NO: 271048
  chr17:73003500-73003620
  hypo

SEQ ID NO: 446962 - DNA, 145 bp, Homo sapiens; identical to SEQ ID NO: 271049
  chr17:73003740-73003885
  hypo

SEQ ID NO: 446963 - DNA, 236 bp, Homo sapiens; identical to SEQ ID NO: 271050
  chr17:73016427-73016663
  hypo

SEQ ID NO: 446964 - DNA, 266 bp, Homo sapiens; identical to SEQ ID NO: 271051
  chr17:73016884-73017150
  hypo

SEQ ID NO: 446965 - DNA, 209 bp, Homo sapiens; identical to SEQ ID NO: 271052
  chr17:73055604-73055813
  hypo

SEQ ID NO: 446966 - DNA, 34 bp, Homo sapiens; identical to SEQ ID NO: 271053
  chr17:73067479-73067513
  hypo

SEQ ID NO: 446967 - DNA, 405 bp, Homo sapiens; identical to SEQ ID NO: 271054
  chr17:73075227-73075632
  hypo

SEQ ID NO: 446968 - DNA, 363 bp, Homo sapiens; identical to SEQ ID NO: 225497
  chr17:73084122-73084485
  hypo

SEQ ID NO: 446969 - DNA, 240 bp, Homo sapiens; identical to SEQ ID NO: 271055
  chr17:73086308-73086548
  hypo

SEQ ID NO: 446970 - DNA, 113 bp, Homo sapiens; identical to SEQ ID NO: 322974
  chr17:73089510-73089623
  hypo

SEQ ID NO: 446971 - DNA, 369 bp, Homo sapiens; identical to SEQ ID NO: 322975
  chr17:73090127-73090496
  hypo

SEQ ID NO: 446972 - DNA, 36 bp, Homo sapiens; identical to SEQ ID NO: 271059
  chr17:73094149-73094185
  hypo

SEQ ID NO: 446973 - DNA, 43 bp, Homo sapiens; identical to SEQ ID NO: 218009
  chr17:73095832-73095875
  hypo

SEQ ID NO: 446974 - DNA, 351 bp, Homo sapiens; identical to SEQ ID NO: 271061
  chr17:73096166-73096517
  hypo

SEQ ID NO: 446975 - DNA, 46 bp, Homo sapiens; identical to SEQ ID NO: 322982
  chr17:73115914-73115960
  hypo

SEQ ID NO: 446976 - DNA, 221 bp, Homo sapiens; identical to SEQ ID NO: 271065
  chr17:73131495-73131716
  hypo

SEQ ID NO: 446977 - DNA, 161 bp, Homo sapiens; identical to SEQ ID NO: 218012
  chr17:73132152-73132313
  hypo

SEQ ID NO: 446978 - DNA, 34 bp, Homo sapiens; identical to SEQ ID NO: 218013
  chr17:73136019-73136053
  hypo

SEQ ID NO: 446979 - DNA, 32 bp, Homo sapiens; identical to SEQ ID NO: 218014
  chr17:73148048-73148080
  hypo

SEQ ID NO: 446980 - DNA, 40 bp, Homo sapiens; identical to SEQ ID NO: 271069
  chr17:73151712-73151752
  hypo

SEQ ID NO: 446981 - DNA, 120 bp, Homo sapiens; identical to SEQ ID NO: 218015
  chr17:73154765-73154885
  hypo

SEQ ID NO: 446982 - DNA, 120 bp, Homo sapiens; identical to SEQ ID NO: 271071
  chr17:73172030-73172150
  hypo

SEQ ID NO: 446983 - DNA, 180 bp, Homo sapiens; identical to SEQ ID NO: 218016
  chr17:73209661-73209841
  hypo

SEQ ID NO: 446984 - DNA, 151 bp, Homo sapiens; identical to SEQ ID NO: 218018
  chr17:73241507-73241658
  hypo

SEQ ID NO: 446985 - DNA, 31 bp, Homo sapiens; identical to SEQ ID NO: 218019
  chr17:73241838-73241869
  hypo

SEQ ID NO: 446986 - DNA, 38 bp, Homo sapiens; identical to SEQ ID NO: 271078
  chr17:73242142-73242180
  hypo

SEQ ID NO: 446987 - DNA, 78 bp, Homo sapiens; identical to SEQ ID NO: 218021
  chr17:73245039-73245117
  hypo

SEQ ID NO: 446988 - DNA, 214 bp, Homo sapiens; identical to SEQ ID NO: 271081
  chr17:73274193-73274407
  hypo

SEQ ID NO: 446989 - DNA, 397 bp, Homo sapiens; identical to SEQ ID NO: 218023
  chr17:73311549-73311946
  hypo

SEQ ID NO: 446990 - DNA, 83 bp, Homo sapiens; identical to SEQ ID NO: 204789
  chr17:73422368-73422451
  hypo

SEQ ID NO: 446991 - DNA, 202 bp, Homo sapiens; identical to SEQ ID NO: 271083
  chr17:73465135-73465337
  hypo

SEQ ID NO: 446992 - DNA, 142 bp, Homo sapiens; identical to SEQ ID NO: 218025
  chr17:73498113-73498255
  hypo

SEQ ID NO: 446993 - DNA, 483 bp, Homo sapiens; identical to SEQ ID NO: 225499
  chr17:73511002-73511485
  hypo

SEQ ID NO: 446994 - DNA, 230 bp, Homo sapiens; identical to SEQ ID NO: 323007
  chr17:73517993-73518223
  hypo

SEQ ID NO: 446995 - DNA, 117 bp, Homo sapiens; identical to SEQ ID NO: 218028
  chr17:73518286-73518403
  hypo

SEQ ID NO: 446996 - DNA, 77 bp, Homo sapiens; identical to SEQ ID NO: 184556
  chr17:73532630-73532707
  hypo

SEQ ID NO: 446997 - DNA, 99 bp, Homo sapiens; identical to SEQ ID NO: 271087
  chr17:73543234-73543333
  hypo

SEQ ID NO: 446998 - DNA, 50 bp, Homo sapiens; identical to SEQ ID NO: 271089
  chr17:73569825-73569875
  hypo

SEQ ID NO: 446999 - DNA, 214 bp, Homo sapiens; identical to SEQ ID NO: 225501
  chr17:73585691-73585905
  hypo

SEQ ID NO: 447000 - DNA, 136 bp, Homo sapiens; identical to SEQ ID NO: 271092
  chr17:73590839-73590975
  hypo

SEQ ID NO: 447001 - DNA, 286 bp, Homo sapiens; identical to SEQ ID NO: 323016
  chr17:73606094-73606380
  hypo

SEQ ID NO: 447002 - DNA, 71 bp, Homo sapiens; identical to SEQ ID NO: 218031
  chr17:73606459-73606530
  hypo

SEQ ID NO: 447003 - DNA, 56 bp, Homo sapiens; identical to SEQ ID NO: 271094
  chr17:73607689-73607745
  hypo

SEQ ID NO: 447004 - DNA, 78 bp, Homo sapiens; identical to SEQ ID NO: 271096
  chr17:73611623-73611701
  hypo

SEQ ID NO: 447005 - DNA, 38 bp, Homo sapiens; identical to SEQ ID NO: 271099
  chr17:73618512-73618550
  hypo

SEQ ID NO: 447006 - DNA, 75 bp, Homo sapiens; identical to SEQ ID NO: 323027
  chr17:73638313-73638388
  hypo

SEQ ID NO: 447007 - DNA, 47 bp, Homo sapiens; identical to SEQ ID NO: 218036
  chr17:73639435-73639482
  hypo

SEQ ID NO: 447008 - DNA, 157 bp, Homo sapiens; identical to SEQ ID NO: 218037
  chr17:73639512-73639669
  hypo

SEQ ID NO: 447009 - DNA, 156 bp, Homo sapiens; identical to SEQ ID NO: 218038
  chr17:73680637-73680793
  hypo

SEQ ID NO: 447010 - DNA, 443 bp, Homo sapiens; identical to SEQ ID NO: 271105
  chr17:73691884-73692327
  hypo

SEQ ID NO: 447011 - DNA, 46 bp, Homo sapiens; identical to SEQ ID NO: 271107
  chr17:73718995-73719041
  hypo

SEQ ID NO: 447012 - DNA, 220 bp, Homo sapiens; identical to SEQ ID NO: 271108
  chr17:73726225-73726445
  hypo

SEQ ID NO: 447013 - DNA, 35 bp, Homo sapiens; identical to SEQ ID NO: 271109
  chr17:73736028-73736063
  hypo

SEQ ID NO: 447014 - DNA, 63 bp, Homo sapiens; identical to SEQ ID NO: 271110
  chr17:73739826-73739889
  hypo

SEQ ID NO: 447015 - DNA, 71 bp, Homo sapiens; identical to SEQ ID NO: 271111
  chr17:73753020-73753091
  hypo

SEQ ID NO: 447016 - DNA, 49 bp, Homo sapiens; identical to SEQ ID NO: 271112
  chr17:73792091-73792140
  hypo

SEQ ID NO: 447017 - DNA, 36 bp, Homo sapiens; identical to SEQ ID NO: 218040
  chr17:73800544-73800580
  hypo

SEQ ID NO: 447018 - DNA, 44 bp, Homo sapiens; identical to SEQ ID NO: 218043
  chr17:73822058-73822102
  hypo

SEQ ID NO: 447019 - DNA, 165 bp, Homo sapiens; identical to SEQ ID NO: 218044
  chr17:73830728-73830893
  hypo

SEQ ID NO: 447020 - DNA, 420 bp, Homo sapiens; identical to SEQ ID NO: 271120
  chr17:73836061-73836481
  hypo

SEQ ID NO: 447021 - DNA, 315 bp, Homo sapiens; identical to SEQ ID NO: 271121
  chr17:73870804-73871119
  hypo

SEQ ID NO: 447022 - DNA, 45 bp, Homo sapiens; identical to SEQ ID NO: 225503
  chr17:73874667-73874712
  hypo

SEQ ID NO: 447023 - DNA, 65 bp, Homo sapiens; identical to SEQ ID NO: 218045
  chr17:73887194-73887259
  hypo

SEQ ID NO: 447024 - DNA, 160 bp, Homo sapiens; identical to SEQ ID NO: 218046
  chr17:73890917-73891077
  hypo

SEQ ID NO: 447025 - DNA, 80 bp, Homo sapiens; identical to SEQ ID NO: 323050
  chr17:73895617-73895697
  hypo

SEQ ID NO: 447026 - DNA, 31 bp, Homo sapiens; identical to SEQ ID NO: 218047
  chr17:73904785-73904816
  hypo

SEQ ID NO: 447027 - DNA, 170 bp, Homo sapiens; identical to SEQ ID NO: 271127
  chr17:73911102-73911272
  hypo

SEQ ID NO: 447028 - DNA, 44 bp, Homo sapiens; identical to SEQ ID NO: 271128
  chr17:73915888-73915932
  hypo

SEQ ID NO: 447029 - DNA, 128 bp, Homo sapiens; identical to SEQ ID NO: 271129
  chr17:73923089-73923217
  hypo

SEQ ID NO: 447030 - DNA, 102 bp, Homo sapiens; identical to SEQ ID NO: 271133
  chr17:74008701-74008803
  hypo

SEQ ID NO: 447031 - DNA, 36 bp, Homo sapiens; identical to SEQ ID NO: 271135
  chr17:74014165-74014201
  hypo

SEQ ID NO: 447032 - DNA, 383 bp, Homo sapiens; identical to SEQ ID NO: 271137
  chr17:74021479-74021862
  hypo

SEQ ID NO: 447033 - DNA, 145 bp, Homo sapiens; identical to SEQ ID NO: 323065
  chr17:74028159-74028304
  hypo

SEQ ID NO: 447034 - DNA, 122 bp, Homo sapiens; identical to SEQ ID NO: 323066
  chr17:74028413-74028535
  hypo

SEQ ID NO: 447035 - DNA, 32 bp, Homo sapiens; identical to SEQ ID NO: 271139
  chr17:74040832-74040864
  hypo

SEQ ID NO: 447036 - DNA, 31 bp, Homo sapiens; identical to SEQ ID NO: 271140
  chr17:74041104-74041135
  hypo

SEQ ID NO: 447037 - DNA, 170 bp, Homo sapiens; identical to SEQ ID NO: 271142
  chr17:74046449-74046619
  hypo

SEQ ID NO: 447038 - DNA, 44 bp, Homo sapiens; identical to SEQ ID NO: 218053
  chr17:74049485-74049529
  hypo

SEQ ID NO: 447039 - DNA, 40 bp, Homo sapiens; identical to SEQ ID NO: 218054
  chr17:74050637-74050677
  hypo

SEQ ID NO: 447040 - DNA, 39 bp, Homo sapiens; identical to SEQ ID NO: 218055
  chr17:74050857-74050896
  hypo

SEQ ID NO: 447041 - DNA, 131 bp, Homo sapiens; identical to SEQ ID NO: 204799
  chr17:74072580-74072711
  hypo

SEQ ID NO: 447042 - DNA, 121 bp, Homo sapiens; identical to SEQ ID NO: 271147
  chr17:74081023-74081144
  hypo

SEQ ID NO: 447043 - DNA, 71 bp, Homo sapiens; identical to SEQ ID NO: 271148
  chr17:74086417-74086488
  hypo

SEQ ID NO: 447044 - DNA, 50 bp, Homo sapiens; identical to SEQ ID NO: 271150
  chr17:74094005-74094055
  hypo

SEQ ID NO: 447045 - DNA, 59 bp, Homo sapiens; identical to SEQ ID NO: 292726
  chr17:74235822-74235881
  hypo

SEQ ID NO: 447046 - DNA, 163 bp, Homo sapiens; identical to SEQ ID NO: 424305
  chr17:74235976-74236139
  hypo

SEQ ID NO: 447047 - DNA, 113 bp, Homo sapiens; identical to SEQ ID NO: 218057
  chr17:74275071-74275184
  hypo

SEQ ID NO: 447048 - DNA, 509 bp, Homo sapiens; identical to SEQ ID NO: 271153
  chr17:74303710-74304219
  hypo

SEQ ID NO: 447049 - DNA, 33 bp, Homo sapiens; identical to SEQ ID NO: 271154
  chr17:74333712-74333745
  hypo

SEQ ID NO: 447050 - DNA, 168 bp, Homo sapiens; identical to SEQ ID NO: 271155
  chr17:74364507-74364675
  hypo

SEQ ID NO: 447051 - DNA, 39 bp, Homo sapiens
  chr17:74388648-74388687
  hypo
cttgcctggaatcattgaaccctggctaagagaaatact

SEQ ID NO: 447052 - DNA, 39 bp, Homo sapiens; identical to SEQ ID NO: 271161
  chr17:74397333-74397372
  hypo

SEQ ID NO: 447053 - DNA, 118 bp, Homo sapiens; identical to SEQ ID NO: 218063
  chr17:74415734-74415852
  hypo

SEQ ID NO: 447054 - DNA, 34 bp, Homo sapiens; identical to SEQ ID NO: 218064
  chr17:74427555-74427589
  hypo

SEQ ID NO: 447055 - DNA, 132 bp, Homo sapiens; identical to SEQ ID NO: 271165
  chr17:74472949-74473081
  hypo

SEQ ID NO: 447056 - DNA, 150 bp, Homo sapiens; identical to SEQ ID NO: 271167
  chr17:74529368-74529518
  hypo

SEQ ID NO: 447057 - DNA, 194 bp, Homo sapiens; identical to SEQ ID NO: 218067
  chr17:74531809-74532003
  hypo

SEQ ID NO: 447058 - DNA, 68 bp, Homo sapiens; identical to SEQ ID NO: 218068
  chr17:74533185-74533253
  hypo

SEQ ID NO: 447059 - DNA, 93 bp, Homo sapiens; identical to SEQ ID NO: 218069
  chr17:74551787-74551880
  hypo

SEQ ID NO: 447060 - DNA, 180 bp, Homo sapiens; identical to SEQ ID NO: 271172
  chr17:74574205-74574385
  hypo

SEQ ID NO: 447061 - DNA, 34 bp, Homo sapiens; identical to SEQ ID NO: 218070
  chr17:74579152-74579186
  hypo

SEQ ID NO: 447062 - DNA, 149 bp, Homo sapiens; identical to SEQ ID NO: 271175
  chr17:74623752-74623901
  hypo

SEQ ID NO: 447063 - DNA, 180 bp, Homo sapiens; identical to SEQ ID NO: 271177
  chr17:74629609-74629789
  hypo

SEQ ID NO: 447064 - DNA, 41 bp, Homo sapiens; identical to SEQ ID NO: 271178
  chr17:74638682-74638723
  hypo

SEQ ID NO: 447065 - DNA, 79 bp, Homo sapiens; identical to SEQ ID NO: 271179
  chr17:74640873-74640952
  hypo

SEQ ID NO: 447066 - DNA, 250 bp, Homo sapiens; identical to SEQ ID NO: 218074
  chr17:74667047-74667297
  hypo

SEQ ID NO: 447067 - DNA, 224 bp, Homo sapiens; identical to SEQ ID NO: 204804
  chr17:74732259-74732483
  hypo

SEQ ID NO: 447068 - DNA, 232 bp, Homo sapiens; identical to SEQ ID NO: 204805
  chr17:74732973-74733205
  hypo

SEQ ID NO: 447069 - DNA, 253 bp, Homo sapiens; identical to SEQ ID NO: 218077
  chr17:74771040-74771293
  hypo

SEQ ID NO: 447070 - DNA, 87 bp, Homo sapiens; identical to SEQ ID NO: 218078
  chr17:74771572-74771659
  hypo

SEQ ID NO: 447071 - DNA, 88 bp, Homo sapiens; identical to SEQ ID NO: 204806
  chr17:74864229-74864317
  hypo

SEQ ID NO: 447072 - DNA, 59 bp, Homo sapiens; identical to SEQ ID NO: 271186
  chr17:74928819-74928878
  hypo

SEQ ID NO: 447073 - DNA, 37 bp, Homo sapiens; identical to SEQ ID NO: 218082
  chr17:75196310-75196347
  hypo

SEQ ID NO: 447074 - DNA, 216 bp, Homo sapiens; identical to SEQ ID NO: 218083
  chr17:75196527-75196743
  hypo

SEQ ID NO: 447075 - DNA, 349 bp, Homo sapiens; identical to SEQ ID NO: 218087
  chr17:75209343-75209692
  hypo

SEQ ID NO: 447076 - DNA, 35 bp, Homo sapiens; identical to SEQ ID NO: 271193
  chr17:75300269-75300304
  hypo

SEQ ID NO: 447077 - DNA, 114 bp, Homo sapiens; identical to SEQ ID NO: 271194
  chr17:75303152-75303266
  hypo

SEQ ID NO: 447078 - DNA, 59 bp, Homo sapiens; identical to SEQ ID NO: 271195
  chr17:75304442-75304501
  hypo

SEQ ID NO: 447079 - DNA, 158 bp, Homo sapiens; identical to SEQ ID NO: 271196
  chr17:75306482-75306640
  hypo

SEQ ID NO: 447080 - DNA, 201 bp, Homo sapiens; identical to SEQ ID NO: 271197
  chr17:75354844-75355045
  hypo

SEQ ID NO: 447081 - DNA, 146 bp, Homo sapiens; identical to SEQ ID NO: 271198
  chr17:75373025-75373171
  hypo

SEQ ID NO: 447082 - DNA, 387 bp, Homo sapiens; identical to SEQ ID NO: 271199
  chr17:75398244-75398631
  hypo

SEQ ID NO: 447083 - DNA, 115 bp, Homo sapiens; identical to SEQ ID NO: 323141
  chr17:75413667-75413782
  hypo

SEQ ID NO: 447084 - DNA, 334 bp, Homo sapiens; identical to SEQ ID NO: 218092
  chr17:75413812-75414146
  hypo

SEQ ID NO: 447085 - DNA, 166 bp, Homo sapiens; identical to SEQ ID NO: 271202
  chr17:75420113-75420279
  hypo

SEQ ID NO: 447086 - DNA, 278 bp, Homo sapiens; identical to SEQ ID NO: 218093
  chr17:75434081-75434359
  hypo

SEQ ID NO: 447087 - DNA, 141 bp, Homo sapiens; identical to SEQ ID NO: 271204
  chr17:75445189-75445330
  hypo

SEQ ID NO: 447088 - DNA, 88 bp, Homo sapiens; identical to SEQ ID NO: 271205
  chr17:75452015-75452103
  hypo

SEQ ID NO: 447089 - DNA, 59 bp, Homo sapiens; identical to SEQ ID NO: 271206
  chr17:75452368-75452427
  hypo

SEQ ID NO: 447090 - DNA, 147 bp, Homo sapiens; identical to SEQ ID NO: 218094
  chr17:75452754-75452901
  hypo

SEQ ID NO: 447091 - DNA, 183 bp, Homo sapiens; identical to SEQ ID NO: 218095
  chr17:75473918-75474101
  hypo

SEQ ID NO: 447092 - DNA, 313 bp, Homo sapiens; identical to SEQ ID NO: 271209
  chr17:75476524-75476837
  hypo

SEQ ID NO: 447093 - DNA, 515 bp, Homo sapiens; identical to SEQ ID NO: 218096
  chr17:75476867-75477382
  hypo

SEQ ID NO: 447094 - DNA, 105 bp, Homo sapiens; identical to SEQ ID NO: 93616
  chr17:75478248-75478353
  hypo

SEQ ID NO: 447095 - DNA, 122 bp, Homo sapiens; identical to SEQ ID NO: 218097
  chr17:75490716-75490838
  hypo

SEQ ID NO: 447096 - DNA, 73 bp, Homo sapiens; identical to SEQ ID NO: 271213
  chr17:75502859-75502932
  hypo

SEQ ID NO: 447097 - DNA, 222 bp, Homo sapiens; identical to SEQ ID NO: 271214
  chr17:75522311-75522533
  hypo

SEQ ID NO: 447098 - DNA, 220 bp, Homo sapiens; identical to SEQ ID NO: 323156
  chr17:75523272-75523492
  hypo

SEQ ID NO: 447099 - DNA, 41 bp, Homo sapiens; identical to SEQ ID NO: 271218
  chr17:75586408-75586449
  hypo

SEQ ID NO: 447100 - DNA, 116 bp, Homo sapiens; identical to SEQ ID NO: 271219
  chr17:75599499-75599615
  hypo

SEQ ID NO: 447101 - DNA, 31 bp, Homo sapiens; identical to SEQ ID NO: 271220
  chr17:75603635-75603666
  hypo

SEQ ID NO: 447102 - DNA, 206 bp, Homo sapiens; identical to SEQ ID NO: 271221
  chr17:75643461-75643667
  hypo

SEQ ID NO: 447103 - DNA, 49 bp, Homo sapiens; identical to SEQ ID NO: 271222
  chr17:75733570-75733619
  hypo

SEQ ID NO: 447104 - DNA, 67 bp, Homo sapiens; identical to SEQ ID NO: 323162
  chr17:75797044-75797111
  hypo

SEQ ID NO: 447105 - DNA, 34 bp, Homo sapiens; identical to SEQ ID NO: 271225
  chr17:75798045-75798079
  hypo

SEQ ID NO: 447106 - DNA, 61 bp, Homo sapiens; identical to SEQ ID NO: 271226
  chr17:75828065-75828126
  hypo

SEQ ID NO: 447107 - DNA, 151 bp, Homo sapiens; identical to SEQ ID NO: 271227
  chr17:75840892-75841043
  hypo

SEQ ID NO: 447108 - DNA, 133 bp, Homo sapiens; identical to SEQ ID NO: 271228
  chr17:75844070-75844203
  hypo

SEQ ID NO: 447109 - DNA, 182 bp, Homo sapiens; identical to SEQ ID NO: 271230
  chr17:75875369-75875551
  hypo

SEQ ID NO: 447110 - DNA, 42 bp, Homo sapiens; identical to SEQ ID NO: 271231
  chr17:75896717-75896759
  hypo

SEQ ID NO: 447111 - DNA, 48 bp, Homo sapiens; identical to SEQ ID NO: 271233
  chr17:76046728-76046776
  hypo

SEQ ID NO: 447112 - DNA, 42 bp, Homo sapiens; identical to SEQ ID NO: 271234
  chr17:76076532-76076574
  hypo

SEQ ID NO: 447113 - DNA, 68 bp, Homo sapiens; identical to SEQ ID NO: 271235
  chr17:76089069-76089137
  hypo

SEQ ID NO: 447114 - DNA, 53 bp, Homo sapiens; identical to SEQ ID NO: 271237
  chr17:76104281-76104334
  hypo

SEQ ID NO: 447115 - DNA, 62 bp, Homo sapiens; identical to SEQ ID NO: 271238
  chr17:76106967-76107029
  hypo

SEQ ID NO: 447116 - DNA, 133 bp, Homo sapiens; identical to SEQ ID NO: 218101
  chr17:76114990-76115123
  hypo

SEQ ID NO: 447117 - DNA, 309 bp, Homo sapiens; identical to SEQ ID NO: 271240
  chr17:76118506-76118815
  hypo

SEQ ID NO: 447118 - DNA, 117 bp, Homo sapiens; identical to SEQ ID NO: 218102
  chr17:76121808-76121925
  hypo

SEQ ID NO: 447119 - DNA, 189 bp, Homo sapiens; identical to SEQ ID NO: 218103
  chr17:76129456-76129645
  hypo

SEQ ID NO: 447120 - DNA, 142 bp, Homo sapiens; identical to SEQ ID NO: 271243
  chr17:76132637-76132779
  hypo

SEQ ID NO: 447121 - DNA, 240 bp, Homo sapiens; identical to SEQ ID NO: 218104
  chr17:76145402-76145642
  hypo

SEQ ID NO: 447122 - DNA, 197 bp, Homo sapiens; identical to SEQ ID NO: 218105
  chr17:76152520-76152717
  hypo

SEQ ID NO: 447123 - DNA, 95 bp, Homo sapiens; identical to SEQ ID NO: 218106
  chr17:76153510-76153605
  hypo

SEQ ID NO: 447124 - DNA, 94 bp, Homo sapiens; identical to SEQ ID NO: 218107
  chr17:76153905-76153999
  hypo

SEQ ID NO: 447125 - DNA, 273 bp, Homo sapiens; identical to SEQ ID NO: 271249
  chr17:76166933-76167206
  hypo

SEQ ID NO: 447126 - DNA, 44 bp, Homo sapiens; identical to SEQ ID NO: 271251
  chr17:76173533-76173577
  hypo

SEQ ID NO: 447127 - DNA, 199 bp, Homo sapiens; identical to SEQ ID NO: 271252
  chr17:76175395-76175594
  hypo

SEQ ID NO: 447128 - DNA, 80 bp, Homo sapiens; identical to SEQ ID NO: 218109
  chr17:76176965-76177045
  hypo

SEQ ID NO: 447129 - DNA, 40 bp, Homo sapiens; identical to SEQ ID NO: 271255
  chr17:76209678-76209718
  hypo

SEQ ID NO: 447130 - DNA, 195 bp, Homo sapiens; identical to SEQ ID NO: 218111
  chr17:76232494-76232689
  hypo

SEQ ID NO: 447131 - DNA, 41 bp, Homo sapiens; identical to SEQ ID NO: 93666
  chr17:76275113-76275154
  hypo

SEQ ID NO: 447132 - DNA, 384 bp, Homo sapiens; identical to SEQ ID NO: 225519
  chr17:76338191-76338575
  hypo

SEQ ID NO: 447133 - DNA, 166 bp, Homo sapiens; identical to SEQ ID NO: 204813
  chr17:76349231-76349397
  hypo

SEQ ID NO: 447134 - DNA, 38 bp, Homo sapiens; identical to SEQ ID NO: 271261
  chr17:76396177-76396215
  hypo

SEQ ID NO: 447135 - DNA, 39 bp, Homo sapiens; identical to SEQ ID NO: 323202
  chr17:76396873-76396912
  hypo

SEQ ID NO: 447136 - DNA, 139 bp, Homo sapiens; identical to SEQ ID NO: 218114
  chr17:76397569-76397708
  hypo

SEQ ID NO: 447137 - DNA, 100 bp, Homo sapiens; identical to SEQ ID NO: 218115
  chr17:76404659-76404759
  hypo

SEQ ID NO: 447138 - DNA, 292 bp, Homo sapiens; identical to SEQ ID NO: 218116
  chr17:76404803-76405095
  hypo

SEQ ID NO: 447139 - DNA, 48 bp, Homo sapiens; identical to SEQ ID NO: 218117
  chr17:76405130-76405178
  hypo

SEQ ID NO: 447140 - DNA, 146 bp, Homo sapiens; identical to SEQ ID NO: 271266
  chr17:76430187-76430333
  hypo

SEQ ID NO: 447141 - DNA, 181 bp, Homo sapiens; identical to SEQ ID NO: 271267
  chr17:76441610-76441791
  hypo

SEQ ID NO: 447142 - DNA, 143 bp, Homo sapiens; identical to SEQ ID NO: 323210
  chr17:76455189-76455332
  hypo

SEQ ID NO: 447143 - DNA, 41 bp, Homo sapiens; identical to SEQ ID NO: 218120
  chr17:76456117-76456158
  hypo

SEQ ID NO: 447144 - DNA, 193 bp, Homo sapiens; identical to SEQ ID NO: 271270
  chr17:76457712-76457905
  hypo

SEQ ID NO: 447145 - DNA, 141 bp, Homo sapiens; identical to SEQ ID NO: 271271
  chr17:76459428-76459569
  hypo

SEQ ID NO: 447146 - DNA, 272 bp, Homo sapiens; identical to SEQ ID NO: 271272
  chr17:76460803-76461075
  hypo

SEQ ID NO: 447147 - DNA, 238 bp, Homo sapiens; identical to SEQ ID NO: 271273
  chr17:76464457-76464695
  hypo

SEQ ID NO: 447148 - DNA, 172 bp, Homo sapiens; identical to SEQ ID NO: 271275
  chr17:76487505-76487677
  hypo

SEQ ID NO: 447149 - DNA, 95 bp, Homo sapiens; identical to SEQ ID NO: 323218
  chr17:76498806-76498901
  hypo

SEQ ID NO: 447150 - DNA, 86 bp, Homo sapiens; identical to SEQ ID NO: 323219
  chr17:76498972-76499058
  hypo

SEQ ID NO: 447151 - DNA, 261 bp, Homo sapiens; identical to SEQ ID NO: 271277
  chr17:76501115-76501376
  hypo

SEQ ID NO: 447152 - DNA, 90 bp, Homo sapiens; identical to SEQ ID NO: 271278
  chr17:76503568-76503658
  hypo

SEQ ID NO: 447153 - DNA, 576 bp, Homo sapiens; identical to SEQ ID NO: 271279
  chr17:76522592-76523168
  hypo

SEQ ID NO: 447154 - DNA, 306 bp, Homo sapiens; identical to SEQ ID NO: 218121
  chr17:76526260-76526566
  hypo

SEQ ID NO: 447155 - DNA, 39 bp, Homo sapiens; identical to SEQ ID NO: 218122
  chr17:76526629-76526668
  hypo

SEQ ID NO: 447156 - DNA, 464 bp, Homo sapiens; identical to SEQ ID NO: 271281
  chr17:76533246-76533710
  hypo

SEQ ID NO: 447157 - DNA, 48 bp, Homo sapiens; identical to SEQ ID NO: 271282
  chr17:76556843-76556891
  hypo

SEQ ID NO: 447158 - DNA, 138 bp, Homo sapiens; identical to SEQ ID NO: 271283
  chr17:76563675-76563813
  hypo

SEQ ID NO: 447159 - DNA, 64 bp, Homo sapiens; identical to SEQ ID NO: 271284
  chr17:76566020-76566084
  hypo

SEQ ID NO: 447160 - DNA, 175 bp, Homo sapiens; identical to SEQ ID NO: 271285
  chr17:76617893-76618068
  hypo

SEQ ID NO: 447161 - DNA, 66 bp, Homo sapiens; identical to SEQ ID NO: 271286
  chr17:76618316-76618382
  hypo

SEQ ID NO: 447162 - DNA, 177 bp, Homo sapiens; identical to SEQ ID NO: 271287
  chr17:76618703-76618880
  hypo

SEQ ID NO: 447163 - DNA, 214 bp, Homo sapiens; identical to SEQ ID NO: 271288
  chr17:76669915-76670129
  hypo

SEQ ID NO: 447164 - DNA, 160 bp, Homo sapiens; identical to SEQ ID NO: 323233
  chr17:76670818-76670978
  hypo

SEQ ID NO: 447165 - DNA, 241 bp, Homo sapiens; identical to SEQ ID NO: 271290
  chr17:76673414-76673655
  hypo

SEQ ID NO: 447166 - DNA, 436 bp, Homo sapiens; identical to SEQ ID NO: 271291
  chr17:76677378-76677814
  hypo

SEQ ID NO: 447167 - DNA, 197 bp, Homo sapiens; identical to SEQ ID NO: 271292
  chr17:76690199-76690396
  hypo

SEQ ID NO: 447168 - DNA, 188 bp, Homo sapiens; identical to SEQ ID NO: 218124
  chr17:76722780-76722968
  hypo

SEQ ID NO: 447169 - DNA, 44 bp, Homo sapiens; identical to SEQ ID NO: 218125
  chr17:76766753-76766797
  hypo

SEQ ID NO: 447170 - DNA, 62 bp, Homo sapiens; identical to SEQ ID NO: 271295
  chr17:76801793-76801855
  hypo

SEQ ID NO: 447171 - DNA, 206 bp, Homo sapiens; identical to SEQ ID NO: 271298
  chr17:76857916-76858122
  hypo

SEQ ID NO: 447172 - DNA, 32 bp, Homo sapiens; identical to SEQ ID NO: 323243
  chr17:76897271-76897303
  hypo

SEQ ID NO: 447173 - DNA, 130 bp, Homo sapiens; identical to SEQ ID NO: 54663
  chr17:76921422-76921552
  hypo

SEQ ID NO: 447174 - DNA, 145 bp, Homo sapiens; identical to SEQ ID NO: 271300
  chr17:76933825-76933970
  hypo

SEQ ID NO: 447175 - DNA, 39 bp, Homo sapiens; identical to SEQ ID NO: 271301
  chr17:76963990-76964029
  hypo

SEQ ID NO: 447176 - DNA, 72 bp, Homo sapiens; identical to SEQ ID NO: 218129
  chr17:76977964-76978036
  hypo

SEQ ID NO: 447177 - DNA, 211 bp, Homo sapiens; identical to SEQ ID NO: 271303
  chr17:76987616-76987827
  hypo

SEQ ID NO: 447178 - DNA, 152 bp, Homo sapiens; identical to SEQ ID NO: 93724
  chr17:76995121-76995273
  hypo

SEQ ID NO: 447179 - DNA, 156 bp, Homo sapiens; identical to SEQ ID NO: 271308
  chr17:76997943-76998099
  hypo

SEQ ID NO: 447180 - DNA, 194 bp, Homo sapiens; identical to SEQ ID NO: 218139
  chr17:76998994-76999188
  hypo

SEQ ID NO: 447181 - DNA, 145 bp, Homo sapiens; identical to SEQ ID NO: 218140
  chr17:76999462-76999607
  hypo

SEQ ID NO: 447182 - DNA, 154 bp, Homo sapiens; identical to SEQ ID NO: 271312
  chr17:77002125-77002279
  hypo

SEQ ID NO: 447183 - DNA, 60 bp, Homo sapiens; identical to SEQ ID NO: 218141
  chr17:77043872-77043932
  hypo

SEQ ID NO: 447184 - DNA, 237 bp, Homo sapiens; identical to SEQ ID NO: 271315
  chr17:77044161-77044398
  hypo

SEQ ID NO: 447185 - DNA, 90 bp, Homo sapiens; identical to SEQ ID NO: 218142
  chr17:77069647-77069737
  hypo

SEQ ID NO: 447186 - DNA, 80 bp, Homo sapiens; identical to SEQ ID NO: 225522
  chr17:77070949-77071029
  hypo

SEQ ID NO: 447187 - DNA, 383 bp, Homo sapiens; identical to SEQ ID NO: 271320
  chr17:77076344-77076727
  hypo

SEQ ID NO: 447188 - DNA, 60 bp, Homo sapiens; identical to SEQ ID NO: 271322
  chr17:77086021-77086081
  hypo

SEQ ID NO: 447189 - DNA, 46 bp, Homo sapiens; identical to SEQ ID NO: 271325
  chr17:77121065-77121111
  hypo

SEQ ID NO: 447190 - DNA, 215 bp, Homo sapiens; identical to SEQ ID NO: 218150
  chr17:77127501-77127716
  hypo

SEQ ID NO: 447191 - DNA, 272 bp, Homo sapiens; identical to SEQ ID NO: 271328
  chr17:77141618-77141890
  hypo

SEQ ID NO: 447192 - DNA, 51 bp, Homo sapiens; identical to SEQ ID NO: 271329
  chr17:77194211-77194262
  hypo

SEQ ID NO: 447193 - DNA, 172 bp, Homo sapiens; identical to SEQ ID NO: 323280
  chr17:77200443-77200615
  hypo

SEQ ID NO: 447194 - DNA, 85 bp, Homo sapiens; identical to SEQ ID NO: 271331
  chr17:77206526-77206611
  hypo

SEQ ID NO: 447195 - DNA, 213 bp, Homo sapiens; identical to SEQ ID NO: 271332
  chr17:77224254-77224467
  hypo

SEQ ID NO: 447196 - DNA, 69 bp, Homo sapiens; identical to SEQ ID NO: 271333
  chr17:77283969-77284038
  hypo

SEQ ID NO: 447197 - DNA, 116 bp, Homo sapiens; identical to SEQ ID NO: 271334
  chr17:77294569-77294685
  hypo

SEQ ID NO: 447198 - DNA, 60 bp, Homo sapiens; identical to SEQ ID NO: 271335
  chr17:77333541-77333601
  hypo

SEQ ID NO: 447199 - DNA, 92 bp, Homo sapiens; identical to SEQ ID NO: 271336
  chr17:77345898-77345990
  hypo

SEQ ID NO: 447200 - DNA, 70 bp, Homo sapiens; identical to SEQ ID NO: 271337
  chr17:77346020-77346090
  hypo

SEQ ID NO: 447201 - DNA, 31 bp, Homo sapiens; identical to SEQ ID NO: 271338
  chr17:77385164-77385195
  hypo

SEQ ID NO: 447202 - DNA, 37 bp, Homo sapiens; identical to SEQ ID NO: 271339
  chr17:77395380-77395417
  hypo

SEQ ID NO: 447203 - DNA, 174 bp, Homo sapiens; identical to SEQ ID NO: 204822
  chr17:77771456-77771630
  hypo

SEQ ID NO: 447204 - DNA, 386 bp, Homo sapiens; identical to SEQ ID NO: 225527
  chr17:77774854-77775240
  hypo

SEQ ID NO: 447205 - DNA, 130 bp, Homo sapiens; identical to SEQ ID NO: 323297
  chr17:77808750-77808880
  hypo

SEQ ID NO: 447206 - DNA, 382 bp, Homo sapiens; identical to SEQ ID NO: 292784
  chr17:77813600-77813982
  hypo

SEQ ID NO: 447207 - DNA, 211 bp, Homo sapiens; identical to SEQ ID NO: 218156
  chr17:77824717-77824928
  hypo

SEQ ID NO: 447208 - DNA, 63 bp, Homo sapiens; identical to SEQ ID NO: 271346
  chr17:77900547-77900610
  hypo

SEQ ID NO: 447209 - DNA, 193 bp, Homo sapiens; identical to SEQ ID NO: 218157
  chr17:77912319-77912512
  hypo

SEQ ID NO: 447210 - DNA, 153 bp, Homo sapiens; identical to SEQ ID NO: 218158
  chr17:77913051-77913204
  hypo

SEQ ID NO: 447211 - DNA, 142 bp, Homo sapiens; identical to SEQ ID NO: 271349
  chr17:77913691-77913833
  hypo

SEQ ID NO: 447212 - DNA, 333 bp, Homo sapiens
  chr17:77918540-77918873
  hypo
gtctgaagccagccacgtgggacgggaaggcagtcgccgtatggggggctaatgtgtggctgtgggtggggggcggcgaggcggacaggggcagcaggcagggtggccacggtggttcaggggccatggtcccaacctccccagccctggcccctgccctggtcacctggtagtgggcccagcaggcctcccagatccgcagcgcttcggcctcggggaactcccgcttgaagcacagaaggagccagcggtggcagaagagcatctgcaggccgtcctcgcccagcgagaccaggtgctggtagaagcgcacgtgcgtcagccgcagcagct

SEQ ID NO: 447213 - DNA, 97 bp, Homo sapiens; identical to SEQ ID NO: 411921
  chr17:77921727-77921824
  hypo

SEQ ID NO: 447214 - DNA, 37 bp, Homo sapiens; identical to SEQ ID NO: 323313
  chr17:77926415-77926452
  hypo

SEQ ID NO: 447215 - DNA, 203 bp, Homo sapiens; identical to SEQ ID NO: 323314
  chr17:77926558-77926761
  hypo

SEQ ID NO: 447216 - DNA, 189 bp, Homo sapiens; identical to SEQ ID NO: 271357
  chr17:77928336-77928525
  hypo

SEQ ID NO: 447217 - DNA, 92 bp, Homo sapiens; identical to SEQ ID NO: 271360
  chr17:77937609-77937701
  hypo

SEQ ID NO: 447218 - DNA, 83 bp, Homo sapiens; identical to SEQ ID NO: 218167
  chr17:77946278-77946361
  hypo

SEQ ID NO: 447219 - DNA, 54 bp, Homo sapiens; identical to SEQ ID NO: 323320
  chr17:77948844-77948898
  hypo

SEQ ID NO: 447220 - DNA, 33 bp, Homo sapiens; identical to SEQ ID NO: 218168
  chr17:77951521-77951554
  hypo

SEQ ID NO: 447221 - DNA, 281 bp, Homo sapiens; identical to SEQ ID NO: 271364
  chr17:77953037-77953318
  hypo

SEQ ID NO: 447222 - DNA, 400 bp, Homo sapiens; identical to SEQ ID NO: 271365
  chr17:77953787-77954187
  hypo

SEQ ID NO: 447223 - DNA, 61 bp, Homo sapiens; identical to SEQ ID NO: 271366
  chr17:77954476-77954537
  hypo

SEQ ID NO: 447224 - DNA, 269 bp, Homo sapiens; identical to SEQ ID NO: 271367
  chr17:77955471-77955740
  hypo

SEQ ID NO: 447225 - DNA, 100 bp, Homo sapiens; identical to SEQ ID NO: 271368
  chr17:77956294-77956394
  hypo

SEQ ID NO: 447226 - DNA, 106 bp, Homo sapiens; identical to SEQ ID NO: 271369
  chr17:77975264-77975370
  hypo

SEQ ID NO: 447227 - DNA, 484 bp, Homo sapiens; identical to SEQ ID NO: 271370
  chr17:77975731-77976215
  hypo

SEQ ID NO: 447228 - DNA, 305 bp, Homo sapiens; identical to SEQ ID NO: 218170
  chr17:77980905-77981210
  hypo

SEQ ID NO: 447229 - DNA, 553 bp, Homo sapiens; identical to SEQ ID NO: 271373
  chr17:77983870-77984423
  hypo

SEQ ID NO: 447230 - DNA, 384 bp, Homo sapiens; identical to SEQ ID NO: 271374
  chr17:77987119-77987503
  hypo

SEQ ID NO: 447231 - DNA, 31 bp, Homo sapiens; identical to SEQ ID NO: 218173
  chr17:77991173-77991204
  hypo

SEQ ID NO: 447232 - DNA, 101 bp, Homo sapiens; identical to SEQ ID NO: 271376
  chr17:78007924-78008025
  hypo

SEQ ID NO: 447233 - DNA, 100 bp, Homo sapiens; identical to SEQ ID NO: 204832
  chr17:78009418-78009518
  hypo

SEQ ID NO: 447234 - DNA, 579 bp, Homo sapiens; identical to SEQ ID NO: 204833
  chr17:78009924-78010503
  hypo

SEQ ID NO: 447235 - DNA, 175 bp, Homo sapiens; identical to SEQ ID NO: 271377
  chr17:78022348-78022523
  hypo

SEQ ID NO: 447236 - DNA, 172 bp, Homo sapiens; identical to SEQ ID NO: 218176
  chr17:78023956-78024128
  hypo

SEQ ID NO: 447237 - DNA, 187 bp, Homo sapiens; identical to SEQ ID NO: 271379
  chr17:78024751-78024938
  hypo

SEQ ID NO: 447238 - DNA, 225 bp, Homo sapiens; identical to SEQ ID NO: 271380
  chr17:78026928-78027153
  hypo

SEQ ID NO: 447239 - DNA, 216 bp, Homo sapiens; identical to SEQ ID NO: 271381
  chr17:78032357-78032573
  hypo

SEQ ID NO: 447240 - DNA, 146 bp, Homo sapiens; identical to SEQ ID NO: 271382
  chr17:78033081-78033227
  hypo

SEQ ID NO: 447241 - DNA, 212 bp, Homo sapiens; identical to SEQ ID NO: 271384
  chr17:78055253-78055465
  hypo

SEQ ID NO: 447242 - DNA, 157 bp, Homo sapiens; identical to SEQ ID NO: 271386
  chr17:78061502-78061659
  hypo

SEQ ID NO: 447243 - DNA, 194 bp, Homo sapiens; identical to SEQ ID NO: 271388
  chr17:78077294-78077488
  hypo

SEQ ID NO: 447244 - DNA, 194 bp, Homo sapiens; identical to SEQ ID NO: 323348
  chr17:78083553-78083747
  hypo

SEQ ID NO: 447245 - DNA, 37 bp, Homo sapiens; identical to SEQ ID NO: 323349
  chr17:78083818-78083855
  hypo

SEQ ID NO: 447246 - DNA, 112 bp, Homo sapiens; identical to SEQ ID NO: 218179
  chr17:78086406-78086518
  hypo

SEQ ID NO: 447247 - DNA, 200 bp, Homo sapiens; identical to SEQ ID NO: 271394
  chr17:78155302-78155502
  hypo

SEQ ID NO: 447248 - DNA, 172 bp, Homo sapiens; identical to SEQ ID NO: 218180
  chr17:78158229-78158401
  hypo

SEQ ID NO: 447249 - DNA, 40 bp, Homo sapiens; identical to SEQ ID NO: 271396
  chr17:78159115-78159155
  hypo

SEQ ID NO: 447250 - DNA, 200 bp, Homo sapiens; identical to SEQ ID NO: 218182
  chr17:78165107-78165307
  hypo

SEQ ID NO: 447251 - DNA, 33 bp, Homo sapiens; identical to SEQ ID NO: 271399
  chr17:78179550-78179583
  hypo

SEQ ID NO: 447252 - DNA, 84 bp, Homo sapiens; identical to SEQ ID NO: 271400
  chr17:78182032-78182116
  hypo

SEQ ID NO: 447253 - DNA, 96 bp, Homo sapiens; identical to SEQ ID NO: 271401
  chr17:78188823-78188919
  hypo

SEQ ID NO: 447254 - DNA, 257 bp, Homo sapiens; identical to SEQ ID NO: 271402
  chr17:78190741-78190998
  hypo

SEQ ID NO: 447255 - DNA, 129 bp, Homo sapiens; identical to SEQ ID NO: 218183
  chr17:78195404-78195533
  hypo

SEQ ID NO: 447256 - DNA, 83 bp, Homo sapiens; identical to SEQ ID NO: 271404
  chr17:78227883-78227966
  hypo

SEQ ID NO: 447257 - DNA, 183 bp, Homo sapiens; identical to SEQ ID NO: 271405
  chr17:78256873-78257056
  hypo

SEQ ID NO: 447258 - DNA, 31 bp, Homo sapiens; identical to SEQ ID NO: 271407
  chr17:78280676-78280707
  hypo

SEQ ID NO: 447259 - DNA, 194 bp, Homo sapiens; identical to SEQ ID NO: 218186
  chr17:78326748-78326942
  hypo

SEQ ID NO: 447260 - DNA, 59 bp, Homo sapiens; identical to SEQ ID NO: 218187
  chr17:78330433-78330492
  hypo

SEQ ID NO: 447261 - DNA, 304 bp, Homo sapiens; identical to SEQ ID NO: 271410
  chr17:78337245-78337549
  hypo

SEQ ID NO: 447262 - DNA, 54 bp, Homo sapiens; identical to SEQ ID NO: 271411
  chr17:78338098-78338152
  hypo

SEQ ID NO: 447263 - DNA, 277 bp, Homo sapiens; identical to SEQ ID NO: 218188
  chr17:78354368-78354645
  hypo

SEQ ID NO: 447264 - DNA, 58 bp, Homo sapiens; identical to SEQ ID NO: 271414
  chr17:78362264-78362322
  hypo

SEQ ID NO: 447265 - DNA, 105 bp, Homo sapiens; identical to SEQ ID NO: 271415
  chr17:78387298-78387403
  hypo

SEQ ID NO: 447266 - DNA, 178 bp, Homo sapiens; identical to SEQ ID NO: 204835
  chr17:78388504-78388682
  hypo

SEQ ID NO: 447267 - DNA, 90 bp, Homo sapiens; identical to SEQ ID NO: 225538
  chr17:78389461-78389551
  hypo

SEQ ID NO: 447268 - DNA, 46 bp, Homo sapiens; identical to SEQ ID NO: 271416
  chr17:78395662-78395708
  hypo

SEQ ID NO: 447269 - DNA, 379 bp, Homo sapiens; identical to SEQ ID NO: 271417
  chr17:78404956-78405335
  hypo

SEQ ID NO: 447270 - DNA, 72 bp, Homo sapiens; identical to SEQ ID NO: 271418
  chr17:78416215-78416287
  hypo

SEQ ID NO: 447271 - DNA, 496 bp, Homo sapiens; identical to SEQ ID NO: 292798
  chr17:78428377-78428873
  hypo

SEQ ID NO: 447272 - DNA, 136 bp, Homo sapiens; identical to SEQ ID NO: 271419
  chr17:78442642-78442778
  hypo

SEQ ID NO: 447273 - DNA, 343 bp, Homo sapiens; identical to SEQ ID NO: 292799
  chr17:78450959-78451302
  hypo

SEQ ID NO: 447274 - DNA, 117 bp, Homo sapiens; identical to SEQ ID NO: 271420
  chr17:78475921-78476038
  hypo

SEQ ID NO: 447275 - DNA, 155 bp, Homo sapiens; identical to SEQ ID NO: 271422
  chr17:78529319-78529474
  hypo

SEQ ID NO: 447276 - DNA, 32 bp, Homo sapiens; identical to SEQ ID NO: 271423
  chr17:78561142-78561174
  hypo

SEQ ID NO: 447277 - DNA, 127 bp, Homo sapiens; identical to SEQ ID NO: 271424
  chr17:78582535-78582662
  hypo

SEQ ID NO: 447278 - DNA, 84 bp, Homo sapiens; identical to SEQ ID NO: 411957
  chr17:78590518-78590602
  hypo

SEQ ID NO: 447279 - DNA, 34 bp, Homo sapiens; identical to SEQ ID NO: 271430
  chr17:78617731-78617765
  hypo

SEQ ID NO: 447280 - DNA, 85 bp, Homo sapiens; identical to SEQ ID NO: 271431
  chr17:78620631-78620716
  hypo

SEQ ID NO: 447281 - DNA, 47 bp, Homo sapiens; identical to SEQ ID NO: 271432
  chr17:78630808-78630855
  hypo

SEQ ID NO: 447282 - DNA, 179 bp, Homo sapiens; identical to SEQ ID NO: 271433
  chr17:78637757-78637936
  hypo

SEQ ID NO: 447283 - DNA, 409 bp, Homo sapiens; identical to SEQ ID NO: 271434
  chr17:78642231-78642640
  hypo

SEQ ID NO: 447284 - DNA, 250 bp, Homo sapiens; identical to SEQ ID NO: 218194
  chr17:78667554-78667804
  hypo

SEQ ID NO: 447285 - DNA, 184 bp, Homo sapiens; identical to SEQ ID NO: 271438
  chr17:78691303-78691487
  hypo

SEQ ID NO: 447286 - DNA, 188 bp, Homo sapiens; identical to SEQ ID NO: 225542
  chr17:78720009-78720197
  hypo

SEQ ID NO: 447287 - DNA, 89 bp, Homo sapiens; identical to SEQ ID NO: 271440
  chr17:78745063-78745152
  hypo

SEQ ID NO: 447288 - DNA, 290 bp, Homo sapiens; identical to SEQ ID NO: 271441
  chr17:78747664-78747954
  hypo

SEQ ID NO: 447289 - DNA, 208 bp, Homo sapiens; identical to SEQ ID NO: 218196
  chr17:78759715-78759923
  hypo

SEQ ID NO: 447290 - DNA, 45 bp, Homo sapiens; identical to SEQ ID NO: 218197
  chr17:78760396-78760441
  hypo

SEQ ID NO: 447291 - DNA, 53 bp, Homo sapiens; identical to SEQ ID NO: 218198
  chr17:78760830-78760883
  hypo

SEQ ID NO: 447292 - DNA, 31 bp, Homo sapiens; identical to SEQ ID NO: 271447
  chr17:78782970-78783001
  hypo

SEQ ID NO: 447293 - DNA, 31 bp, Homo sapiens; identical to SEQ ID NO: 271448
  chr17:78783241-78783272
  hypo

SEQ ID NO: 447294 - DNA, 115 bp, Homo sapiens; identical to SEQ ID NO: 218200
  chr17:78789606-78789721
  hypo

SEQ ID NO: 447295 - DNA, 196 bp, Homo sapiens; identical to SEQ ID NO: 323411
  chr17:78794034-78794230
  hypo

SEQ ID NO: 447296 - DNA, 36 bp, Homo sapiens; identical to SEQ ID NO: 218201
  chr17:78796145-78796181
  hypo

SEQ ID NO: 447297 - DNA, 186 bp, Homo sapiens; identical to SEQ ID NO: 271453
  chr17:78801932-78802118
  hypo

SEQ ID NO: 447298 - DNA, 192 bp, Homo sapiens; identical to SEQ ID NO: 271454
  chr17:78805984-78806176
  hypo

SEQ ID NO: 447299 - DNA, 141 bp, Homo sapiens; identical to SEQ ID NO: 218202
  chr17:78811169-78811310
  hypo

SEQ ID NO: 447300 - DNA, 281 bp, Homo sapiens; identical to SEQ ID NO: 271456
  chr17:78811561-78811842
  hypo

SEQ ID NO: 447301 - DNA, 401 bp, Homo sapiens; identical to SEQ ID NO: 271457
  chr17:78812101-78812502
  hypo

SEQ ID NO: 447302 - DNA, 233 bp, Homo sapiens; identical to SEQ ID NO: 271458
  chr17:78818427-78818660
  hypo

SEQ ID NO: 447303 - DNA, 76 bp, Homo sapiens; identical to SEQ ID NO: 271459
  chr17:78822274-78822350
  hypo

SEQ ID NO: 447304 - DNA, 93 bp, Homo sapiens; identical to SEQ ID NO: 271460
  chr17:78836325-78836418
  hypo

SEQ ID NO: 447305 - DNA, 33 bp, Homo sapiens; identical to SEQ ID NO: 323421
  chr17:78867012-78867045
  hypo

SEQ ID NO: 447306 - DNA, 53 bp, Homo sapiens; identical to SEQ ID NO: 323422
  chr17:78867110-78867163
  hypo

SEQ ID NO: 447307 - DNA, 232 bp, Homo sapiens; identical to SEQ ID NO: 271463
  chr17:78870192-78870424
  hypo

SEQ ID NO: 447308 - DNA, 52 bp, Homo sapiens; identical to SEQ ID NO: 271464
  chr17:78871406-78871458
  hypo

SEQ ID NO: 447309 - DNA, 183 bp, Homo sapiens; identical to SEQ ID NO: 218206
  chr17:78873841-78874024
  hypo

SEQ ID NO: 447310 - DNA, 449 bp, Homo sapiens; identical to SEQ ID NO: 218207
  chr17:78876642-78877091
  hypo

SEQ ID NO: 447311 - DNA, 109 bp, Homo sapiens; identical to SEQ ID NO: 218208
  chr17:78877957-78878066
  hypo

SEQ ID NO: 447312 - DNA, 345 bp, Homo sapiens; identical to SEQ ID NO: 271470
  chr17:78882480-78882825
  hypo

SEQ ID NO: 447313 - DNA, 197 bp, Homo sapiens; identical to SEQ ID NO: 271472
  chr17:78894343-78894540
  hypo

SEQ ID NO: 447314 - DNA, 198 bp, Homo sapiens; identical to SEQ ID NO: 271474
  chr17:78936614-78936812
  hypo

SEQ ID NO: 447315 - DNA, 202 bp, Homo sapiens; identical to SEQ ID NO: 271475
  chr17:78940079-78940281
  hypo

SEQ ID NO: 447316 - DNA, 185 bp, Homo sapiens; identical to SEQ ID NO: 218210
  chr17:78968280-78968465
  hypo

SEQ ID NO: 447317 - DNA, 37 bp, Homo sapiens; identical to SEQ ID NO: 271477
  chr17:78975640-78975677
  hypo

SEQ ID NO: 447318 - DNA, 71 bp, Homo sapiens; identical to SEQ ID NO: 323438
  chr17:78999784-78999855
  hypo

SEQ ID NO: 447319 - DNA, 37 bp, Homo sapiens; identical to SEQ ID NO: 323439
  chr17:79001617-79001654
  hypo

SEQ ID NO: 447320 - DNA, 211 bp, Homo sapiens; identical to SEQ ID NO: 93943
  chr17:79027367-79027578
  hypo

SEQ ID NO: 447321 - DNA, 182 bp, Homo sapiens; identical to SEQ ID NO: 218214
  chr17:79042375-79042557
  hypo

SEQ ID NO: 447322 - DNA, 444 bp, Homo sapiens; identical to SEQ ID NO: 271484
  chr17:79044047-79044491
  hypo

SEQ ID NO: 447323 - DNA, 54 bp, Homo sapiens; identical to SEQ ID NO: 271487
  chr17:79047314-79047368
  hypo

SEQ ID NO: 447324 - DNA, 32 bp, Homo sapiens; identical to SEQ ID NO: 271489
  chr17:79050214-79050246
  hypo

SEQ ID NO: 447325 - DNA, 155 bp, Homo sapiens; identical to SEQ ID NO: 271490
  chr17:79050944-79051099
  hypo

SEQ ID NO: 447326 - DNA, 694 bp, Homo sapiens; identical to SEQ ID NO: 218216
  chr17:79051339-79052033
  hypo

SEQ ID NO: 447327 - DNA, 34 bp, Homo sapiens; identical to SEQ ID NO: 271492
  chr17:79052330-79052364
  hypo

SEQ ID NO: 447328 - DNA, 163 bp, Homo sapiens; identical to SEQ ID NO: 271493
  chr17:79052899-79053062
  hypo

SEQ ID NO: 447329 - DNA, 140 bp, Homo sapiens; identical to SEQ ID NO: 271495
  chr17:79059745-79059885
  hypo

SEQ ID NO: 447330 - DNA, 133 bp, Homo sapiens; identical to SEQ ID NO: 271498
  chr17:79061383-79061516
  hypo

SEQ ID NO: 447331 - DNA, 363 bp, Homo sapiens; identical to SEQ ID NO: 218219
  chr17:79062265-79062628
  hypo

SEQ ID NO: 447332 - DNA, 226 bp, Homo sapiens; identical to SEQ ID NO: 218220
  chr17:79062658-79062884
  hypo

SEQ ID NO: 447333 - DNA, 97 bp, Homo sapiens; identical to SEQ ID NO: 218221
  chr17:79065509-79065606
  hypo

SEQ ID NO: 447334 - DNA, 55 bp, Homo sapiens; identical to SEQ ID NO: 271502
  chr17:79067466-79067521
  hypo

SEQ ID NO: 447335 - DNA, 74 bp, Homo sapiens; identical to SEQ ID NO: 218222
  chr17:79072579-79072653
  hypo

SEQ ID NO: 447336 - DNA, 327 bp, Homo sapiens; identical to SEQ ID NO: 271505
  chr17:79073679-79074006
  hypo

SEQ ID NO: 447337 - DNA, 36 bp, Homo sapiens; identical to SEQ ID NO: 218227
  chr17:79078512-79078548
  hypo

SEQ ID NO: 447338 - DNA, 530 bp, Homo sapiens; identical to SEQ ID NO: 271509
  chr17:79079546-79080076
  hypo

SEQ ID NO: 447339 - DNA, 123 bp, Homo sapiens; identical to SEQ ID NO: 218230
  chr17:79083370-79083493
  hypo

SEQ ID NO: 447340 - DNA, 49 bp, Homo sapiens; identical to SEQ ID NO: 218231
  chr17:79084399-79084448
  hypo

SEQ ID NO: 447341 - DNA, 37 bp, Homo sapiens; identical to SEQ ID NO: 323477
  chr17:79094705-79094742
  hypo

SEQ ID NO: 447342 - DNA, 43 bp, Homo sapiens; identical to SEQ ID NO: 323478
  chr17:79094788-79094831
  hypo

SEQ ID NO: 447343 - DNA, 196 bp, Homo sapiens; identical to SEQ ID NO: 218235
  chr17:79097959-79098155
  hypo

SEQ ID NO: 447344 - DNA, 105 bp, Homo sapiens; identical to SEQ ID NO: 323480
  chr17:79098203-79098308
  hypo

SEQ ID NO: 447345 - DNA, 356 bp, Homo sapiens; identical to SEQ ID NO: 218238
  chr17:79102634-79102990
  hypo

SEQ ID NO: 447346 - DNA, 39 bp, Homo sapiens; identical to SEQ ID NO: 218239
  chr17:79104768-79104807
  hypo

SEQ ID NO: 447347 - DNA, 197 bp, Homo sapiens; identical to SEQ ID NO: 218240
  chr17:79108114-79108311
  hypo

SEQ ID NO: 447348 - DNA, 54 bp, Homo sapiens; identical to SEQ ID NO: 271524
  chr17:79114515-79114569
  hypo

SEQ ID NO: 447349 - DNA, 148 bp, Homo sapiens; identical to SEQ ID NO: 271525
  chr17:79133081-79133229
  hypo

SEQ ID NO: 447350 - DNA, 184 bp, Homo sapiens; identical to SEQ ID NO: 271526
  chr17:79135399-79135583
  hypo

SEQ ID NO: 447351 - DNA, 182 bp, Homo sapiens; identical to SEQ ID NO: 271527
  chr17:79135804-79135986
  hypo

SEQ ID NO: 447352 - DNA, 264 bp, Homo sapiens; identical to SEQ ID NO: 271528
  chr17:79154928-79155192
  hypo

SEQ ID NO: 447353 - DNA, 134 bp, Homo sapiens; identical to SEQ ID NO: 323491
  chr17:79155575-79155709
  hypo

SEQ ID NO: 447354 - DNA, 36 bp, Homo sapiens; identical to SEQ ID NO: 271531
  chr17:79168720-79168756
  hypo

SEQ ID NO: 447355 - DNA, 278 bp, Homo sapiens; identical to SEQ ID NO: 271532
  chr17:79169406-79169684
  hypo

SEQ ID NO: 447356 - DNA, 33 bp, Homo sapiens; identical to SEQ ID NO: 218242
  chr17:79183372-79183405
  hypo

SEQ ID NO: 447357 - DNA, 33 bp, Homo sapiens; identical to SEQ ID NO: 292806
  chr17:79205174-79205207
  hypo

SEQ ID NO: 447358 - DNA, 340 bp, Homo sapiens; identical to SEQ ID NO: 271535
  chr17:79206046-79206386
  hypo

SEQ ID NO: 447359 - DNA, 70 bp, Homo sapiens; identical to SEQ ID NO: 218243
  chr17:79216891-79216961
  hypo

SEQ ID NO: 447360 - DNA, 478 bp, Homo sapiens; identical to SEQ ID NO: 271537
  chr17:79223889-79224367
  hypo

SEQ ID NO: 447361 - DNA, 41 bp, Homo sapiens; identical to SEQ ID NO: 218244
  chr17:79226334-79226375
  hypo

SEQ ID NO: 447362 - DNA, 125 bp, Homo sapiens; identical to SEQ ID NO: 218245
  chr17:79230308-79230433
  hypo

SEQ ID NO: 447363 - DNA, 177 bp, Homo sapiens; identical to SEQ ID NO: 218246
  chr17:79234793-79234970
  hypo

SEQ ID NO: 447364 - DNA, 96 bp, Homo sapiens; identical to SEQ ID NO: 218247
  chr17:79294051-79294147
  hypo

SEQ ID NO: 447365 - DNA, 336 bp, Homo sapiens; identical to SEQ ID NO: 218248
  chr17:79296202-79296538
  hypo

SEQ ID NO: 447366 - DNA, 180 bp, Homo sapiens; identical to SEQ ID NO: 204843
  chr17:79319124-79319304
  hypo

SEQ ID NO: 447367 - DNA, 59 bp, Homo sapiens; identical to SEQ ID NO: 271546
  chr17:79523604-79523663
  hypo

SEQ ID NO: 447368 - DNA, 254 bp, Homo sapiens; identical to SEQ ID NO: 271547
  chr17:79539642-79539896
  hypo

SEQ ID NO: 447369 - DNA, 96 bp, Homo sapiens; identical to SEQ ID NO: 271549
  chr17:79543263-79543359
  hypo

SEQ ID NO: 447370 - DNA, 98 bp, Homo sapiens; identical to SEQ ID NO: 271551
  chr17:79597564-79597662
  hypo

SEQ ID NO: 447371 - DNA, 203 bp, Homo sapiens; identical to SEQ ID NO: 218250
  chr17:79609053-79609256
  hypo

SEQ ID NO: 447372 - DNA, 38 bp, Homo sapiens; identical to SEQ ID NO: 218253
  chr17:79634636-79634674
  hypo

SEQ ID NO: 447373 - DNA, 84 bp, Homo sapiens; identical to SEQ ID NO: 218254
  chr17:79634756-79634840
  hypo

SEQ ID NO: 447374 - DNA, 124 bp, Homo sapiens; identical to SEQ ID NO: 218255
  chr17:79635130-79635254
  hypo

SEQ ID NO: 447375 - DNA, 42 bp, Homo sapiens; identical to SEQ ID NO: 271558
  chr17:79637467-79637509
  hypo

SEQ ID NO: 447376 - DNA, 69 bp, Homo sapiens
  chr17:79649213-79649282
  hypo
gctgccaaacttcctcccctgggcctcacagacctggcactgggagagcaaaactgcattttttaatta

SEQ ID NO: 447377 - DNA, 60 bp, Homo sapiens; identical to SEQ ID NO: 218257
  chr17:79653803-79653863
  hypo

SEQ ID NO: 447378 - DNA, 35 bp, Homo sapiens; identical to SEQ ID NO: 271562
  chr17:79657392-79657427
  hypo

SEQ ID NO: 447379 - DNA, 40 bp, Homo sapiens; identical to SEQ ID NO: 218259
  chr17:79658810-79658850
  hypo

SEQ ID NO: 447380 - DNA, 64 bp, Homo sapiens; identical to SEQ ID NO: 271564
  chr17:79664245-79664309
  hypo

SEQ ID NO: 447381 - DNA, 57 bp, Homo sapiens; identical to SEQ ID NO: 323526
  chr17:79668328-79668385
  hypo

SEQ ID NO: 447382 - DNA, 58 bp, Homo sapiens; identical to SEQ ID NO: 271566
  chr17:79674301-79674359
  hypo

SEQ ID NO: 447383 - DNA, 153 bp, Homo sapiens; identical to SEQ ID NO: 218260
  chr17:79682601-79682754
  hypo

SEQ ID NO: 447384 - DNA, 251 bp, Homo sapiens; identical to SEQ ID NO: 271568
  chr17:79687598-79687849
  hypo

SEQ ID NO: 447385 - DNA, 102 bp, Homo sapiens; identical to SEQ ID NO: 218261
  chr17:79705356-79705458
  hypo

SEQ ID NO: 447386 - DNA, 260 bp, Homo sapiens; identical to SEQ ID NO: 271571
  chr17:79772552-79772812
  hypo

SEQ ID NO: 447387 - DNA, 42 bp, Homo sapiens; identical to SEQ ID NO: 271572
  chr17:79776471-79776513
  hypo

SEQ ID NO: 447388 - DNA, 41 bp, Homo sapiens; identical to SEQ ID NO: 271573
  chr17:79776573-79776614
  hypo

SEQ ID NO: 447389 - DNA, 278 bp, Homo sapiens; identical to SEQ ID NO: 271574
  chr17:79792218-79792496
  hypo

SEQ ID NO: 447390 - DNA, 165 bp, Homo sapiens; identical to SEQ ID NO: 271576
  chr17:79803521-79803686
  hypo

SEQ ID NO: 447391 - DNA, 243 bp, Homo sapiens; identical to SEQ ID NO: 271577
  chr17:79804099-79804342
  hypo

SEQ ID NO: 447392 - DNA, 177 bp, Homo sapiens; identical to SEQ ID NO: 218263
  chr17:79844241-79844418
  hypo

SEQ ID NO: 447393 - DNA, 309 bp, Homo sapiens; identical to SEQ ID NO: 218264
  chr17:79846191-79846500
  hypo

SEQ ID NO: 447394 - DNA, 120 bp, Homo sapiens; identical to SEQ ID NO: 218265
  chr17:79851770-79851890
  hypo

SEQ ID NO: 447395 - DNA, 31 bp, Homo sapiens; identical to SEQ ID NO: 218266
  chr17:79863961-79863992
  hypo

SEQ ID NO: 447396 - DNA, 191 bp, Homo sapiens; identical to SEQ ID NO: 271583
  chr17:79869958-79870149
  hypo

SEQ ID NO: 447397 - DNA, 371 bp, Homo sapiens; identical to SEQ ID NO: 271585
  chr17:79871391-79871762
  hypo

SEQ ID NO: 447398 - DNA, 126 bp, Homo sapiens; identical to SEQ ID NO: 271587
  chr17:79880223-79880349
  hypo

SEQ ID NO: 447399 - DNA, 187 bp, Homo sapiens; identical to SEQ ID NO: 204844
  chr17:79885890-79886077
  hypo

SEQ ID NO: 447400 - DNA, 83 bp, Homo sapiens; identical to SEQ ID NO: 218270
  chr17:79892730-79892813
  hypo

SEQ ID NO: 447401 - DNA, 412 bp, Homo sapiens; identical to SEQ ID NO: 323553
  chr17:79892890-79893302
  hypo

SEQ ID NO: 447402 - DNA, 232 bp, Homo sapiens; identical to SEQ ID NO: 323554
  chr17:79899061-79899293
  hypo

SEQ ID NO: 447403 - DNA, 170 bp, Homo sapiens; identical to SEQ ID NO: 271591
  chr17:79906753-79906923
  hypo

SEQ ID NO: 447404 - DNA, 69 bp, Homo sapiens; identical to SEQ ID NO: 218274
  chr17:79914600-79914669
  hypo

SEQ ID NO: 447405 - DNA, 80 bp, Homo sapiens; identical to SEQ ID NO: 292819
  chr17:79917289-79917369
  hypo

SEQ ID NO: 447406 - DNA, 45 bp, Homo sapiens; identical to SEQ ID NO: 292820
  chr17:79917435-79917480
  hypo

SEQ ID NO: 447407 - DNA, 208 bp, Homo sapiens; identical to SEQ ID NO: 271594
  chr17:79940109-79940317
  hypo

SEQ ID NO: 447408 - DNA, 84 bp, Homo sapiens; identical to SEQ ID NO: 218275
  chr17:79942955-79943039
  hypo

SEQ ID NO: 447409 - DNA, 77 bp, Homo sapiens; identical to SEQ ID NO: 218276
  chr17:79946358-79946435
  hypo

SEQ ID NO: 447410 - DNA, 506 bp, Homo sapiens; identical to SEQ ID NO: 271597
  chr17:79950561-79951067
  hypo

SEQ ID NO: 447411 - DNA, 382 bp, Homo sapiens; identical to SEQ ID NO: 218277
  chr17:79951969-79952351
  hypo

SEQ ID NO: 447412 - DNA, 41 bp, Homo sapiens; identical to SEQ ID NO: 218278
  chr17:79952381-79952422
  hypo

SEQ ID NO: 447413 - DNA, 378 bp, Homo sapiens; identical to SEQ ID NO: 271599
  chr17:79961365-79961743
  hypo

SEQ ID NO: 447414 - DNA, 269 bp, Homo sapiens; identical to SEQ ID NO: 271600
  chr17:79963939-79964208
  hypo

SEQ ID NO: 447415 - DNA, 158 bp, Homo sapiens; identical to SEQ ID NO: 271601
  chr17:79964538-79964696
  hypo

SEQ ID NO: 447416 - DNA, 236 bp, Homo sapiens; identical to SEQ ID NO: 271602
  chr17:79972011-79972247
  hypo

SEQ ID NO: 447417 - DNA, 280 bp, Homo sapiens; identical to SEQ ID NO: 323570
  chr17:79977136-79977416
  hypo

SEQ ID NO: 447418 - DNA, 209 bp, Homo sapiens; identical to SEQ ID NO: 323571
  chr17:79977446-79977655
  hypo

SEQ ID NO: 447419 - DNA, 40 bp, Homo sapiens; identical to SEQ ID NO: 204847
  chr17:79989900-79989940
  hypo

SEQ ID NO: 447420 - DNA, 373 bp, Homo sapiens; identical to SEQ ID NO: 218283
  chr17:80005250-80005623
  hypo

SEQ ID NO: 447421 - DNA, 180 bp, Homo sapiens; identical to SEQ ID NO: 225553
  chr17:80009037-80009217
  hypo

SEQ ID NO: 447422 - DNA, 84 bp, Homo sapiens; identical to SEQ ID NO: 271605
  chr17:80011809-80011893
  hypo

SEQ ID NO: 447423 - DNA, 267 bp, Homo sapiens; identical to SEQ ID NO: 218284
  chr17:80018605-80018872
  hypo

SEQ ID NO: 447424 - DNA, 137 bp, Homo sapiens; identical to SEQ ID NO: 218287
  chr17:80030812-80030949
  hypo

SEQ ID NO: 447425 - DNA, 44 bp, Homo sapiens; identical to SEQ ID NO: 271609
  chr17:80031799-80031843
  hypo

SEQ ID NO: 447426 - DNA, 64 bp, Homo sapiens; identical to SEQ ID NO: 218288
  chr17:80038872-80038936
  hypo

SEQ ID NO: 447427 - DNA, 87 bp, Homo sapiens; identical to SEQ ID NO: 218289
  chr17:80040622-80040709
  hypo

SEQ ID NO: 447428 - DNA, 199 bp, Homo sapiens; identical to SEQ ID NO: 271612
  chr17:80041640-80041839
  hypo

SEQ ID NO: 447429 - DNA, 231 bp, Homo sapiens; identical to SEQ ID NO: 218290
  chr17:80042509-80042740
  hypo

SEQ ID NO: 447430 - DNA, 59 bp, Homo sapiens; identical to SEQ ID NO: 218293
  chr17:80047423-80047482
  hypo

SEQ ID NO: 447431 - DNA, 282 bp, Homo sapiens; identical to SEQ ID NO: 271618
  chr17:80062707-80062989
  hypo

SEQ ID NO: 447432 - DNA, 104 bp, Homo sapiens; identical to SEQ ID NO: 271619
  chr17:80077690-80077794
  hypo

SEQ ID NO: 447433 - DNA, 284 bp, Homo sapiens; identical to SEQ ID NO: 271620
  chr17:80084435-80084719
  hypo

SEQ ID NO: 447434 - DNA, 114 bp, Homo sapiens; identical to SEQ ID NO: 218295
  chr17:80085172-80085286
  hypo

SEQ ID NO: 447435 - DNA, 167 bp, Homo sapiens; identical to SEQ ID NO: 31053
  chr17:80085323-80085490
  hypo

SEQ ID NO: 447436 - DNA, 38 bp, Homo sapiens; identical to SEQ ID NO: 271622
  chr17:80100748-80100786
  hypo

SEQ ID NO: 447437 - DNA, 187 bp, Homo sapiens; identical to SEQ ID NO: 271623
  chr17:80135500-80135687
  hypo

SEQ ID NO: 447438 - DNA, 71 bp, Homo sapiens; identical to SEQ ID NO: 218297
  chr17:80139084-80139155
  hypo

SEQ ID NO: 447439 - DNA, 160 bp, Homo sapiens; identical to SEQ ID NO: 218298
  chr17:80144203-80144363
  hypo

SEQ ID NO: 447440 - DNA, 236 bp, Homo sapiens; identical to SEQ ID NO: 271626
  chr17:80159381-80159617
  hypo

SEQ ID NO: 447441 - DNA, 109 bp, Homo sapiens; identical to SEQ ID NO: 271627
  chr17:80176133-80176242
  hypo

SEQ ID NO: 447442 - DNA, 759 bp, Homo sapiens; identical to SEQ ID NO: 292830
  chr17:80189391-80190150
  hypo

SEQ ID NO: 447443 - DNA, 176 bp, Homo sapiens; identical to SEQ ID NO: 271629
  chr17:80202410-80202586
  hypo

SEQ ID NO: 447444 - DNA, 138 bp, Homo sapiens; identical to SEQ ID NO: 271630
  chr17:80207968-80208106
  hypo

SEQ ID NO: 447445 - DNA, 481 bp, Homo sapiens; identical to SEQ ID NO: 323607
  chr17:80221651-80222132
  hypo

SEQ ID NO: 447446 - DNA, 59 bp, Homo sapiens; identical to SEQ ID NO: 323608
  chr17:80222162-80222221
  hypo

SEQ ID NO: 447447 - DNA, 35 bp, Homo sapiens; identical to SEQ ID NO: 271632
  chr17:80224602-80224637
  hypo

SEQ ID NO: 447448 - DNA, 47 bp, Homo sapiens; identical to SEQ ID NO: 271635
  chr17:80232301-80232348
  hypo

SEQ ID NO: 447449 - DNA, 88 bp, Homo sapiens; identical to SEQ ID NO: 218301
  chr17:80239662-80239750
  hypo

SEQ ID NO: 447450 - DNA, 74 bp, Homo sapiens; identical to SEQ ID NO: 323612
  chr17:80240741-80240815
  hypo

SEQ ID NO: 447451 - DNA, 140 bp, Homo sapiens; identical to SEQ ID NO: 271638
  chr17:80247838-80247978
  hypo

SEQ ID NO: 447452 - DNA, 62 bp, Homo sapiens; identical to SEQ ID NO: 218302
  chr17:80252004-80252066
  hypo

SEQ ID NO: 447453 - DNA, 98 bp, Homo sapiens; identical to SEQ ID NO: 218303
  chr17:80257491-80257589
  hypo

SEQ ID NO: 447454 - DNA, 48 bp, Homo sapiens; identical to SEQ ID NO: 218304
  chr17:80260760-80260808
  hypo

SEQ ID NO: 447455 - DNA, 114 bp, Homo sapiens; identical to SEQ ID NO: 271643
  chr17:80275866-80275980
  hypo

SEQ ID NO: 447456 - DNA, 188 bp, Homo sapiens; identical to SEQ ID NO: 218305
  chr17:80285255-80285443
  hypo

SEQ ID NO: 447457 - DNA, 43 bp, Homo sapiens; identical to SEQ ID NO: 323620
  chr17:80289191-80289234
  hypo

SEQ ID NO: 447458 - DNA, 58 bp, Homo sapiens; identical to SEQ ID NO: 271646
  chr17:80290202-80290260
  hypo

SEQ ID NO: 447459 - DNA, 89 bp, Homo sapiens; identical to SEQ ID NO: 218306
  chr17:80303790-80303879
  hypo

SEQ ID NO: 447460 - DNA, 152 bp, Homo sapiens; identical to SEQ ID NO: 271650
  chr17:80352181-80352333
  hypo

SEQ ID NO: 447461 - DNA, 141 bp, Homo sapiens; identical to SEQ ID NO: 271651
  chr17:80354750-80354891
  hypo

SEQ ID NO: 447462 - DNA, 323 bp, Homo sapiens; identical to SEQ ID NO: 271652
  chr17:80355877-80356200
  hypo

SEQ ID NO: 447463 - DNA, 134 bp, Homo sapiens; identical to SEQ ID NO: 271653
  chr17:80369331-80369465
  hypo

SEQ ID NO: 447464 - DNA, 118 bp, Homo sapiens; identical to SEQ ID NO: 271654
  chr17:80371142-80371260
  hypo

SEQ ID NO: 447465 - DNA, 39 bp, Homo sapiens; identical to SEQ ID NO: 271655
  chr17:80391608-80391647
  hypo

SEQ ID NO: 447466 - DNA, 118 bp, Homo sapiens; identical to SEQ ID NO: 271656
  chr17:80393112-80393230
  hypo

SEQ ID NO: 447467 - DNA, 433 bp, Homo sapiens; identical to SEQ ID NO: 271658
  chr17:80397797-80398230
  hypo

SEQ ID NO: 447468 - DNA, 147 bp, Homo sapiens; identical to SEQ ID NO: 323637
  chr17:80448730-80448877
  hypo

SEQ ID NO: 447469 - DNA, 159 bp, Homo sapiens; identical to SEQ ID NO: 271661
  chr17:80451150-80451309
  hypo

SEQ ID NO: 447470 - DNA, 33 bp, Homo sapiens; identical to SEQ ID NO: 271662
  chr17:80451584-80451617
  hypo

SEQ ID NO: 447471 - DNA, 100 bp, Homo sapiens; identical to SEQ ID NO: 271664
  chr17:80487529-80487629
  hypo

SEQ ID NO: 447472 - DNA, 52 bp, Homo sapiens
  chr17:80491688-80491740
  hypo
gcacagctgtaggttagctgggcctggcacagctaggttagctgggtgtggt

SEQ ID NO: 447473 - DNA, 216 bp, Homo sapiens; identical to SEQ ID NO: 204848
  chr17:80503130-80503346
  hypo

SEQ ID NO: 447474 - DNA, 46 bp, Homo sapiens; identical to SEQ ID NO: 412049
  chr17:80517078-80517124
  hypo

SEQ ID NO: 447475 - DNA, 191 bp, Homo sapiens; identical to SEQ ID NO: 271669
  chr17:80524560-80524751
  hypo

SEQ ID NO: 447476 - DNA, 217 bp, Homo sapiens; identical to SEQ ID NO: 271672
  chr17:80562621-80562838
  hypo

SEQ ID NO: 447477 - DNA, 80 bp, Homo sapiens
  chr17:80563138-80563218
  hypo
tcttctgaagaggtacttgggtattcaagttcccacacaggaacactttgatcttcaggccctgaaaatctggtgtggat

SEQ ID NO: 447478 - DNA, 80 bp, Homo sapiens; identical to SEQ ID NO: 271675
  chr17:80578336-80578416
  hypo

SEQ ID NO: 447479 - DNA, 120 bp, Homo sapiens; identical to SEQ ID NO: 218316
  chr17:80593584-80593704
  hypo

SEQ ID NO: 447480 - DNA, 35 bp, Homo sapiens; identical to SEQ ID NO: 271677
  chr17:80600025-80600060
  hypo

SEQ ID NO: 447481 - DNA, 34 bp, Homo sapiens; identical to SEQ ID NO: 271679
  chr17:80600300-80600334
  hypo

SEQ ID NO: 447482 - DNA, 86 bp, Homo sapiens; identical to SEQ ID NO: 271680
  chr17:80600935-80601021
  hypo

SEQ ID NO: 447483 - DNA, 120 bp, Homo sapiens; identical to SEQ ID NO: 271681
  chr17:80603958-80604078
  hypo

SEQ ID NO: 447484 - DNA, 139 bp, Homo sapiens; identical to SEQ ID NO: 218317
  chr17:80604378-80604517
  hypo

SEQ ID NO: 447485 - DNA, 119 bp, Homo sapiens; identical to SEQ ID NO: 271683
  chr17:80607968-80608087
  hypo

SEQ ID NO: 447486 - DNA, 111 bp, Homo sapiens; identical to SEQ ID NO: 218318
  chr17:80614273-80614384
  hypo

SEQ ID NO: 447487 - DNA, 110 bp, Homo sapiens; identical to SEQ ID NO: 271685
  chr17:80624871-80624981
  hypo

SEQ ID NO: 447488 - DNA, 80 bp, Homo sapiens; identical to SEQ ID NO: 218319
  chr17:80645605-80645685
  hypo

SEQ ID NO: 447489 - DNA, 202 bp, Homo sapiens; identical to SEQ ID NO: 400376
  chr17:80656845-80657047
  hypo

SEQ ID NO: 447490 - DNA, 229 bp, Homo sapiens; identical to SEQ ID NO: 271689
  chr17:80660560-80660789
  hypo

SEQ ID NO: 447491 - DNA, 61 bp, Homo sapiens; identical to SEQ ID NO: 271690
  chr17:80661017-80661078
  hypo

SEQ ID NO: 447492 - DNA, 85 bp, Homo sapiens; identical to SEQ ID NO: 271691
  chr17:80661330-80661415
  hypo

SEQ ID NO: 447493 - DNA, 116 bp, Homo sapiens; identical to SEQ ID NO: 271692
  chr17:80671048-80671164
  hypo

SEQ ID NO: 447494 - DNA, 159 bp, Homo sapiens; identical to SEQ ID NO: 271693
  chr17:80671194-80671353
  hypo

SEQ ID NO: 447495 - DNA, 74 bp, Homo sapiens; identical to SEQ ID NO: 218323
  chr17:80678256-80678330
  hypo

SEQ ID NO: 447496 - DNA, 37 bp, Homo sapiens; identical to SEQ ID NO: 323672
  chr17:80692926-80692963
  hypo

SEQ ID NO: 447497 - DNA, 31 bp, Homo sapiens
  chr17:80712354-80712385
  hypo
gcatgtcttgtgatctcaagaataatggctg

SEQ ID NO: 447498 - DNA, 66 bp, Homo sapiens; identical to SEQ ID NO: 323676
  chr17:80712972-80713038
  hypo

SEQ ID NO: 447499 - DNA, 257 bp, Homo sapiens; identical to SEQ ID NO: 271699
  chr17:80720793-80721050
  hypo

SEQ ID NO: 447500 - DNA, 162 bp, Homo sapiens; identical to SEQ ID NO: 271700
  chr17:80732519-80732681
  hypo

SEQ ID NO: 447501 - DNA, 40 bp, Homo sapiens; identical to SEQ ID NO: 271701
  chr17:80744319-80744359
  hypo

SEQ ID NO: 447502 - DNA, 273 bp, Homo sapiens; identical to SEQ ID NO: 271703
  chr17:80745052-80745325
  hypo

SEQ ID NO: 447503 - DNA, 93 bp, Homo sapiens; identical to SEQ ID NO: 323685
  chr17:80749276-80749369
  hypo

SEQ ID NO: 447504 - DNA, 127 bp, Homo sapiens; identical to SEQ ID NO: 218330
  chr17:80767312-80767439
  hypo

SEQ ID NO: 447505 - DNA, 112 bp, Homo sapiens; identical to SEQ ID NO: 271711
  chr17:80771620-80771732
  hypo

SEQ ID NO: 447506 - DNA, 165 bp, Homo sapiens; identical to SEQ ID NO: 271713
  chr17:80775961-80776126
  hypo

SEQ ID NO: 447507 - DNA, 189 bp, Homo sapiens; identical to SEQ ID NO: 271714
  chr17:80793757-80793946
  hypo

SEQ ID NO: 447508 - DNA, 119 bp, Homo sapiens; identical to SEQ ID NO: 271717
  chr17:80816746-80816865
  hypo

SEQ ID NO: 447509 - DNA, 33 bp, Homo sapiens; identical to SEQ ID NO: 271718
  chr17:80818624-80818657
  hypo

SEQ ID NO: 447510 - DNA, 217 bp, Homo sapiens; identical to SEQ ID NO: 218335
  chr17:80819087-80819304
  hypo

SEQ ID NO: 447511 - DNA, 35 bp, Homo sapiens; identical to SEQ ID NO: 271720
  chr17:80820743-80820778
  hypo

SEQ ID NO: 447512 - DNA, 34 bp, Homo sapiens; identical to SEQ ID NO: 271721
  chr17:80825506-80825540
  hypo

SEQ ID NO: 447513 - DNA, 58 bp, Homo sapiens; identical to SEQ ID NO: 271722
  chr17:80827938-80827996
  hypo

SEQ ID NO: 447514 - DNA, 84 bp, Homo sapiens; identical to SEQ ID NO: 271723
  chr17:80828571-80828655
  hypo

SEQ ID NO: 447515 - DNA, 78 bp, Homo sapiens; identical to SEQ ID NO: 218336
  chr17:80830876-80830954
  hypo

SEQ ID NO: 447516 - DNA, 154 bp, Homo sapiens; identical to SEQ ID NO: 271725
  chr17:80831395-80831549
  hypo

SEQ ID NO: 447517 - DNA, 355 bp, Homo sapiens; identical to SEQ ID NO: 271727
  chr17:80839229-80839584
  hypo

SEQ ID NO: 447518 - DNA, 401 bp, Homo sapiens; identical to SEQ ID NO: 323709
  chr17:80847894-80848295
  hypo

SEQ ID NO: 447519 - DNA, 55 bp, Homo sapiens; identical to SEQ ID NO: 271731
  chr17:80859905-80859960
  hypo

SEQ ID NO: 447520 - DNA, 310 bp, Homo sapiens; identical to SEQ ID NO: 271734
  chr17:80867900-80868210
  hypo

SEQ ID NO: 447521 - DNA, 157 bp, Homo sapiens; identical to SEQ ID NO: 271735
  chr17:80873073-80873230
  hypo

SEQ ID NO: 447522 - DNA, 152 bp, Homo sapiens; identical to SEQ ID NO: 218342
  chr17:80882754-80882906
  hypo

SEQ ID NO: 447523 - DNA, 851 bp, Homo sapiens; identical to SEQ ID NO: 271738
  chr17:80888853-80889704
  hypo

SEQ ID NO: 447524 - DNA, 54 bp, Homo sapiens; identical to SEQ ID NO: 218343
  chr17:80894204-80894258
  hypo

SEQ ID NO: 447525 - DNA, 126 bp, Homo sapiens; identical to SEQ ID NO: 218344
  chr17:80895933-80896059
  hypo

SEQ ID NO: 447526 - DNA, 226 bp, Homo sapiens; identical to SEQ ID NO: 271741
  chr17:80897174-80897400
  hypo

SEQ ID NO: 447527 - DNA, 107 bp, Homo sapiens; identical to SEQ ID NO: 271742
  chr17:80897430-80897537
  hypo

SEQ ID NO: 447528 - DNA, 349 bp, Homo sapiens; identical to SEQ ID NO: 271743
  chr17:80898972-80899321
  hypo

SEQ ID NO: 447529 - DNA, 114 bp, Homo sapiens; identical to SEQ ID NO: 218345
  chr17:80917377-80917491
  hypo

SEQ ID NO: 447530 - DNA, 363 bp, Homo sapiens; identical to SEQ ID NO: 271745
  chr17:80918442-80918805
  hypo

SEQ ID NO: 447531 - DNA, 201 bp, Homo sapiens; identical to SEQ ID NO: 218347
  chr17:80935245-80935446
  hypo

SEQ ID NO: 447532 - DNA, 164 bp, Homo sapiens; identical to SEQ ID NO: 218348
  chr17:80964419-80964583
  hypo

SEQ ID NO: 447533 - DNA, 195 bp, Homo sapiens; identical to SEQ ID NO: 218349
  chr17:80965439-80965634
  hypo

SEQ ID NO: 447534 - DNA, 178 bp, Homo sapiens; identical to SEQ ID NO: 271750
  chr17:80967462-80967640
  hypo

SEQ ID NO: 447535 - DNA, 82 bp, Homo sapiens; identical to SEQ ID NO: 271752
  chr17:80982744-80982826
  hypo

SEQ ID NO: 447536 - DNA, 34 bp, Homo sapiens; identical to SEQ ID NO: 271754
  chr17:80997455-80997489
  hypo

SEQ ID NO: 447537 - DNA, 36 bp, Homo sapiens; identical to SEQ ID NO: 225566
  chr17:81009162-81009198
  hypo

SEQ ID NO: 447538 - DNA, 62 bp, Homo sapiens; identical to SEQ ID NO: 271756
  chr17:81014244-81014306
  hypo

SEQ ID NO: 447539 - DNA, 221 bp, Homo sapiens; identical to SEQ ID NO: 323737
  chr17:81015979-81016200
  hypo

SEQ ID NO: 447540 - DNA, 127 bp, Homo sapiens; identical to SEQ ID NO: 218351
  chr17:81021377-81021504
  hypo

SEQ ID NO: 447541 - DNA, 372 bp, Homo sapiens; identical to SEQ ID NO: 323739
  chr17:81032434-81032806
  hypo

SEQ ID NO: 447542 - DNA, 321 bp, Homo sapiens; identical to SEQ ID NO: 323740
  chr17:81032836-81033157
  hypo

SEQ ID NO: 447543 - DNA, 237 bp, Homo sapiens; identical to SEQ ID NO: 323741
  chr17:81033517-81033754
  hypo

SEQ ID NO: 447544 - DNA, 325 bp, Homo sapiens; identical to SEQ ID NO: 424380
  chr17:81038242-81038567
  hypo

SEQ ID NO: 447545 - DNA, 309 bp, Homo sapiens; identical to SEQ ID NO: 323745
  chr17:81042717-81043026
  hypo

SEQ ID NO: 447546 - DNA, 71 bp, Homo sapiens; identical to SEQ ID NO: 218354
  chr17:81043193-81043264
  hypo

SEQ ID NO: 447547 - DNA, 315 bp, Homo sapiens; identical to SEQ ID NO: 271765
  chr17:81051924-81052239
  hypo

SEQ ID NO: 447548 - DNA, 180 bp, Homo sapiens; identical to SEQ ID NO: 271767
  chr17:81063043-81063223
  hypo

SEQ ID NO: 447549 - DNA, 113 bp, Homo sapiens; identical to SEQ ID NO: 218356
  chr17:81068540-81068653
  hypo

SEQ ID NO: 447550 - DNA, 176 bp, Homo sapiens; identical to SEQ ID NO: 218357
  chr17:81068791-81068967
  hypo

SEQ ID NO: 447551 - DNA, 261 bp, Homo sapiens; identical to SEQ ID NO: 271770
  chr17:81101703-81101964
  hypo

SEQ ID NO: 447552 - DNA, 192 bp, Homo sapiens; identical to SEQ ID NO: 271771
  chr17:81102241-81102433
  hypo

SEQ ID NO: 447553 - DNA, 177 bp, Homo sapiens; identical to SEQ ID NO: 271772
  chr17:81104183-81104360
  hypo

SEQ ID NO: 447554 - DNA, 44 bp, Homo sapiens; identical to SEQ ID NO: 271773
  chr18:72942-72986
  hypo

SEQ ID NO: 447555 - DNA, 92 bp, Homo sapiens; identical to SEQ ID NO: 218359
  chr18:196512-196604
  hypo

SEQ ID NO: 447556 - DNA, 91 bp, Homo sapiens; identical to SEQ ID NO: 271776
  chr18:320960-321051
  hypo

SEQ ID NO: 447557 - DNA, 137 bp, Homo sapiens; identical to SEQ ID NO: 271777
  chr18:380756-380893
  hypo

SEQ ID NO: 447558 - DNA, 42 bp, Homo sapiens; identical to SEQ ID NO: 271778
  chr18:460335-460377
  hypo

SEQ ID NO: 447559 - DNA, 793 bp, Homo sapiens; identical to SEQ ID NO: 271779
  chr18:580159-580952
  hypo

SEQ ID NO: 447560 - DNA, 37 bp, Homo sapiens; identical to SEQ ID NO: 218363
  chr18:698119-698156
  hypo

SEQ ID NO: 447561 - DNA, 422 bp, Homo sapiens; identical to SEQ ID NO: 292854
  chr18:712016-712438
  hypo

SEQ ID NO: 447562 - DNA, 163 bp, Homo sapiens; identical to SEQ ID NO: 271782
  chr18:930036-930199
  hypo

SEQ ID NO: 447563 - DNA, 95 bp, Homo sapiens; identical to SEQ ID NO: 271783
  chr18:1098042-1098137
  hypo

SEQ ID NO: 447564 - DNA, 80 bp, Homo sapiens; identical to SEQ ID NO: 271784
  chr18:1772178-1772258
  hypo

SEQ ID NO: 447565 - DNA, 77 bp, Homo sapiens; identical to SEQ ID NO: 271785
  chr18:1798116-1798193
  hypo

SEQ ID NO: 447566 - DNA, 46 bp, Homo sapiens; identical to SEQ ID NO: 271786
  chr18:1800381-1800427
  hypo

SEQ ID NO: 447567 - DNA, 93 bp, Homo sapiens; identical to SEQ ID NO: 271787
  chr18:1847233-1847326
  hypo

SEQ ID NO: 447568 - DNA, 34 bp, Homo sapiens; identical to SEQ ID NO: 271788
  chr18:1928649-1928683
  hypo

SEQ ID NO: 447569 - DNA, 63 bp, Homo sapiens; identical to SEQ ID NO: 271789
  chr18:1955269-1955332
  hypo

SEQ ID NO: 447570 - DNA, 329 bp, Homo sapiens; identical to SEQ ID NO: 271790
  chr18:2405969-2406298
  hypo

SEQ ID NO: 447571 - DNA, 92 bp, Homo sapiens; identical to SEQ ID NO: 271791
  chr18:2565718-2565810
  hypo

SEQ ID NO: 447572 - DNA, 285 bp, Homo sapiens; identical to SEQ ID NO: 292858
  chr18:2571378-2571663
  hypo

SEQ ID NO: 447573 - DNA, 192 bp, Homo sapiens; identical to SEQ ID NO: 271792
  chr18:2851484-2851676
  hypo

SEQ ID NO: 447574 - DNA, 180 bp, Homo sapiens; identical to SEQ ID NO: 271793
  chr18:2876295-2876475
  hypo

SEQ ID NO: 447575 - DNA, 136 bp, Homo sapiens; identical to SEQ ID NO: 204861
  chr18:2907034-2907170
  hypo

SEQ ID NO: 447576 - DNA, 127 bp, Homo sapiens; identical to SEQ ID NO: 218370
  chr18:2910112-2910239
  hypo

SEQ ID NO: 447577 - DNA, 34 bp, Homo sapiens; identical to SEQ ID NO: 271795
  chr18:2910452-2910486
  hypo

SEQ ID NO: 447578 - DNA, 49 bp, Homo sapiens; identical to SEQ ID NO: 323791
  chr18:2913121-2913170
  hypo

SEQ ID NO: 447579 - DNA, 127 bp, Homo sapiens; identical to SEQ ID NO: 271797
  chr18:2921216-2921343
  hypo

SEQ ID NO: 447580 - DNA, 216 bp, Homo sapiens; identical to SEQ ID NO: 271798
  chr18:2921975-2922191
  hypo

SEQ ID NO: 447581 - DNA, 211 bp, Homo sapiens; identical to SEQ ID NO: 271799
  chr18:2937551-2937762
  hypo

SEQ ID NO: 447582 - DNA, 165 bp, Homo sapiens; identical to SEQ ID NO: 218371
  chr18:3011266-3011431
  hypo

SEQ ID NO: 447583 - DNA, 162 bp, Homo sapiens; identical to SEQ ID NO: 271801
  chr18:3026813-3026975
  hypo

SEQ ID NO: 447584 - DNA, 233 bp, Homo sapiens; identical to SEQ ID NO: 271803
  chr18:3061440-3061673
  hypo

SEQ ID NO: 447585 - DNA, 118 bp, Homo sapiens; identical to SEQ ID NO: 323800
  chr18:3126668-3126786
  hypo

SEQ ID NO: 447586 - DNA, 126 bp, Homo sapiens; identical to SEQ ID NO: 271806
  chr18:3135595-3135721
  hypo

SEQ ID NO: 447587 - DNA, 188 bp, Homo sapiens; identical to SEQ ID NO: 218374
  chr18:3214253-3214441
  hypo

SEQ ID NO: 447588 - DNA, 31 bp, Homo sapiens
  chr18:3215393-3215424
  hypo
gggagctcaaaatcaacctggccaacacagt

SEQ ID NO: 447589 - DNA, 36 bp, Homo sapiens; identical to SEQ ID NO: 271811
  chr18:3412987-3413023
  hypo

SEQ ID NO: 447590 - DNA, 238 bp, Homo sapiens; identical to SEQ ID NO: 271812
  chr18:3415134-3415372
  hypo

SEQ ID NO: 447591 - DNA, 35 bp, Homo sapiens; identical to SEQ ID NO: 271813
  chr18:3417143-3417178
  hypo

SEQ ID NO: 447592 - DNA, 90 bp, Homo sapiens; identical to SEQ ID NO: 271814
  chr18:3421739-3421829
  hypo

SEQ ID NO: 447593 - DNA, 89 bp, Homo sapiens; identical to SEQ ID NO: 271815
  chr18:3439668-3439757
  hypo

SEQ ID NO: 447594 - DNA, 86 bp, Homo sapiens; identical to SEQ ID NO: 218378
  chr18:3443525-3443611
  hypo

SEQ ID NO: 447595 - DNA, 120 bp, Homo sapiens; identical to SEQ ID NO: 218379
  chr18:3443851-3443971
  hypo

SEQ ID NO: 447596 - DNA, 94 bp, Homo sapiens; identical to SEQ ID NO: 218380
  chr18:3445349-3445443
  hypo

SEQ ID NO: 447597 - DNA, 631 bp, Homo sapiens; identical to SEQ ID NO: 204865
  chr18:3447898-3448529
  hypo

SEQ ID NO: 447598 - DNA, 35 bp, Homo sapiens; identical to SEQ ID NO: 225577
  chr18:3448760-3448795
  hypo

SEQ ID NO: 447599 - DNA, 808 bp, Homo sapiens; identical to SEQ ID NO: 424397
  chr18:3451456-3452264
  hypo

SEQ ID NO: 447600 - DNA, 42 bp, Homo sapiens; identical to SEQ ID NO: 218384
  chr18:3534580-3534622
  hypo

SEQ ID NO: 447601 - DNA, 38 bp, Homo sapiens; identical to SEQ ID NO: 218385
  chr18:3535411-3535449
  hypo

SEQ ID NO: 447602 - DNA, 32 bp, Homo sapiens; identical to SEQ ID NO: 271821
  chr18:3570505-3570537
  hypo

SEQ ID NO: 447603 - DNA, 62 bp, Homo sapiens; identical to SEQ ID NO: 271825
  chr18:3592367-3592429
  hypo

SEQ ID NO: 447604 - DNA, 36 bp, Homo sapiens; identical to SEQ ID NO: 218387
  chr18:3600255-3600291
  hypo

SEQ ID NO: 447605 - DNA, 35 bp, Homo sapiens; identical to SEQ ID NO: 218388
  chr18:3600531-3600566
  hypo

SEQ ID NO: 447606 - DNA, 92 bp, Homo sapiens; identical to SEQ ID NO: 271828
  chr18:3602008-3602100
  hypo

SEQ ID NO: 447607 - DNA, 76 bp, Homo sapiens; identical to SEQ ID NO: 271829
  chr18:3608039-3608115
  hypo

SEQ ID NO: 447608 - DNA, 93 bp, Homo sapiens; identical to SEQ ID NO: 271830
  chr18:3610054-3610147
  hypo

SEQ ID NO: 447609 - DNA, 35 bp, Homo sapiens; identical to SEQ ID NO: 271831
  chr18:3628499-3628534
  hypo

SEQ ID NO: 447610 - DNA, 154 bp, Homo sapiens; identical to SEQ ID NO: 218389
  chr18:3637284-3637438
  hypo

SEQ ID NO: 447611 - DNA, 37 bp, Homo sapiens; identical to SEQ ID NO: 271833
  chr18:3640025-3640062
  hypo

SEQ ID NO: 447612 - DNA, 139 bp, Homo sapiens; identical to SEQ ID NO: 271834
  chr18:3648338-3648477
  hypo

SEQ ID NO: 447613 - DNA, 99 bp, Homo sapiens; identical to SEQ ID NO: 271835
  chr18:3668966-3669065
  hypo

SEQ ID NO: 447614 - DNA, 79 bp, Homo sapiens; identical to SEQ ID NO: 218390
  chr18:3669445-3669524
  hypo

SEQ ID NO: 447615 - DNA, 286 bp, Homo sapiens; identical to SEQ ID NO: 271837
  chr18:3729121-3729407
  hypo

SEQ ID NO: 447616 - DNA, 64 bp, Homo sapiens; identical to SEQ ID NO: 271839
  chr18:3920623-3920687
  hypo

SEQ ID NO: 447617 - DNA, 169 bp, Homo sapiens; identical to SEQ ID NO: 271840
  chr18:3931025-3931194
  hypo

SEQ ID NO: 447618 - DNA, 76 bp, Homo sapiens; identical to SEQ ID NO: 218393
  chr18:4009176-4009252
  hypo

SEQ ID NO: 447619 - DNA, 37 bp, Homo sapiens; identical to SEQ ID NO: 271843
  chr18:4042775-4042812
  hypo

SEQ ID NO: 447620 - DNA, 90 bp, Homo sapiens; identical to SEQ ID NO: 292875
  chr18:4455561-4455651
  hypo

SEQ ID NO: 447621 - DNA, 154 bp, Homo sapiens; identical to SEQ ID NO: 271845
  chr18:5149403-5149557
  hypo

SEQ ID NO: 447622 - DNA, 35 bp, Homo sapiens; identical to SEQ ID NO: 271846
  chr18:5388296-5388331
  hypo

SEQ ID NO: 447623 - DNA, 221 bp, Homo sapiens; identical to SEQ ID NO: 271847
  chr18:5469572-5469793
  hypo

SEQ ID NO: 447624 - DNA, 40 bp, Homo sapiens; identical to SEQ ID NO: 271848
  chr18:5533864-5533904
  hypo

SEQ ID NO: 447625 - DNA, 198 bp, Homo sapiens; identical to SEQ ID NO: 271849
  chr18:6284881-6285079
  hypo

SEQ ID NO: 447626 - DNA, 242 bp, Homo sapiens; identical to SEQ ID NO: 292883
  chr18:6414203-6414445
  hypo

SEQ ID NO: 447627 - DNA, 165 bp, Homo sapiens; identical to SEQ ID NO: 271850
  chr18:6444200-6444365
  hypo

SEQ ID NO: 447628 - DNA, 383 bp, Homo sapiens; identical to SEQ ID NO: 218395
  chr18:6929367-6929750
  hypo

SEQ ID NO: 447629 - DNA, 257 bp, Homo sapiens; identical to SEQ ID NO: 323854
  chr18:6929787-6930044
  hypo

SEQ ID NO: 447630 - DNA, 69 bp, Homo sapiens; identical to SEQ ID NO: 218397
  chr18:6953009-6953078
  hypo

SEQ ID NO: 447631 - DNA, 134 bp, Homo sapiens; identical to SEQ ID NO: 204879
  chr18:7116637-7116771
  hypo

SEQ ID NO: 447632 - DNA, 80 bp, Homo sapiens; identical to SEQ ID NO: 218399
  chr18:7351750-7351830
  hypo

SEQ ID NO: 447633 - DNA, 50 bp, Homo sapiens; identical to SEQ ID NO: 225593
  chr18:8016761-8016811
  hypo

SEQ ID NO: 447634 - DNA, 409 bp, Homo sapiens; identical to SEQ ID NO: 271854
  chr18:8348210-8348619
  hypo

SEQ ID NO: 447635 - DNA, 200 bp, Homo sapiens; identical to SEQ ID NO: 292896
  chr18:8367259-8367459
  hypo

SEQ ID NO: 447636 - DNA, 81 bp, Homo sapiens; identical to SEQ ID NO: 129727
  chr18:8367503-8367584
  hypo

SEQ ID NO: 447637 - DNA, 33 bp, Homo sapiens; identical to SEQ ID NO: 271855
  chr18:8400564-8400597
  hypo

SEQ ID NO: 447638 - DNA, 63 bp, Homo sapiens; identical to SEQ ID NO: 218407
  chr18:8662986-8663049
  hypo

SEQ ID NO: 447639 - DNA, 217 bp, Homo sapiens; identical to SEQ ID NO: 271861
  chr18:8708639-8708856
  hypo

SEQ ID NO: 447640 - DNA, 56 bp, Homo sapiens; identical to SEQ ID NO: 271862
  chr18:8711911-8711967
  hypo

SEQ ID NO: 447641 - DNA, 183 bp, Homo sapiens; identical to SEQ ID NO: 271863
  chr18:8732473-8732656
  hypo

SEQ ID NO: 447642 - DNA, 145 bp, Homo sapiens; identical to SEQ ID NO: 218408
  chr18:8733060-8733205
  hypo

SEQ ID NO: 447643 - DNA, 65 bp, Homo sapiens; identical to SEQ ID NO: 271865
  chr18:8733742-8733807
  hypo

SEQ ID NO: 447644 - DNA, 43 bp, Homo sapiens; identical to SEQ ID NO: 204885
  chr18:8748272-8748315
  hypo

SEQ ID NO: 447645 - DNA, 99 bp, Homo sapiens; identical to SEQ ID NO: 323877
  chr18:8778934-8779033
  hypo

SEQ ID NO: 447646 - DNA, 215 bp, Homo sapiens; identical to SEQ ID NO: 271867
  chr18:8783992-8784207
  hypo

SEQ ID NO: 447647 - DNA, 62 bp, Homo sapiens; identical to SEQ ID NO: 271868
  chr18:8787325-8787387
  hypo

SEQ ID NO: 447648 - DNA, 124 bp, Homo sapiens; identical to SEQ ID NO: 271869
  chr18:8794467-8794591
  hypo

SEQ ID NO: 447649 - DNA, 154 bp, Homo sapiens; identical to SEQ ID NO: 271872
  chr18:8814259-8814413
  hypo

SEQ ID NO: 447650 - DNA, 71 bp, Homo sapiens; identical to SEQ ID NO: 323884
  chr18:8823065-8823136
  hypo

SEQ ID NO: 447651 - DNA, 33 bp, Homo sapiens; identical to SEQ ID NO: 323885
  chr18:8823181-8823214
  hypo

SEQ ID NO: 447652 - DNA, 89 bp, Homo sapiens; identical to SEQ ID NO: 271874
  chr18:8826027-8826116
  hypo

SEQ ID NO: 447653 - DNA, 177 bp, Homo sapiens; identical to SEQ ID NO: 218413
  chr18:8829963-8830140
  hypo

SEQ ID NO: 447654 - DNA, 140 bp, Homo sapiens; identical to SEQ ID NO: 271876
  chr18:8856547-8856687
  hypo

SEQ ID NO: 447655 - DNA, 188 bp, Homo sapiens; identical to SEQ ID NO: 271877
  chr18:8937278-8937466
  hypo

SEQ ID NO: 447656 - DNA, 31 bp, Homo sapiens; identical to SEQ ID NO: 218414
  chr18:9101197-9101228
  hypo

SEQ ID NO: 447657 - DNA, 31 bp, Homo sapiens; identical to SEQ ID NO: 218415
  chr18:9101468-9101499
  hypo

SEQ ID NO: 447658 - DNA, 93 bp, Homo sapiens; identical to SEQ ID NO: 218416
  chr18:9285997-9286090
  hypo

SEQ ID NO: 447659 - DNA, 156 bp, Homo sapiens; identical to SEQ ID NO: 271882
  chr18:9288473-9288629
  hypo

SEQ ID NO: 447660 - DNA, 224 bp, Homo sapiens; identical to SEQ ID NO: 271886
  chr18:9428291-9428515
  hypo

SEQ ID NO: 447661 - DNA, 42 bp, Homo sapiens; identical to SEQ ID NO: 271888
  chr18:9514021-9514063
  hypo

SEQ ID NO: 447662 - DNA, 78 bp, Homo sapiens; identical to SEQ ID NO: 31213
  chr18:9535962-9536040
  hypo

SEQ ID NO: 447663 - DNA, 173 bp, Homo sapiens; identical to SEQ ID NO: 218422
  chr18:9615460-9615633
  hypo

SEQ ID NO: 447664 - DNA, 79 bp, Homo sapiens; identical to SEQ ID NO: 271896
  chr18:9758085-9758164
  hypo

SEQ ID NO: 447665 - DNA, 162 bp, Homo sapiens; identical to SEQ ID NO: 218424
  chr18:9797400-9797562
  hypo

SEQ ID NO: 447666 - DNA, 153 bp, Homo sapiens; identical to SEQ ID NO: 271898
  chr18:9800802-9800955
  hypo

SEQ ID NO: 447667 - DNA, 128 bp, Homo sapiens; identical to SEQ ID NO: 271899
  chr18:9833346-9833474
  hypo

SEQ ID NO: 447668 - DNA, 156 bp, Homo sapiens; identical to SEQ ID NO: 323912
  chr18:9835951-9836107
  hypo

SEQ ID NO: 447669 - DNA, 269 bp, Homo sapiens; identical to SEQ ID NO: 271901
  chr18:9838068-9838337
  hypo

SEQ ID NO: 447670 - DNA, 89 bp, Homo sapiens; identical to SEQ ID NO: 271902
  chr18:9883100-9883189
  hypo

SEQ ID NO: 447671 - DNA, 215 bp, Homo sapiens; identical to SEQ ID NO: 271903
  chr18:9887794-9888009
  hypo

SEQ ID NO: 447672 - DNA, 138 bp, Homo sapiens; identical to SEQ ID NO: 271905
  chr18:9917587-9917725
  hypo

SEQ ID NO: 447673 - DNA, 136 bp, Homo sapiens; identical to SEQ ID NO: 271906
  chr18:9962327-9962463
  hypo

SEQ ID NO: 447674 - DNA, 285 bp, Homo sapiens; identical to SEQ ID NO: 271907
  chr18:10031148-10031433
  hypo

SEQ ID NO: 447675 - DNA, 83 bp, Homo sapiens; identical to SEQ ID NO: 271908
  chr18:10047642-10047725
  hypo

SEQ ID NO: 447676 - DNA, 103 bp, Homo sapiens; identical to SEQ ID NO: 271909
  chr18:10069172-10069275
  hypo

SEQ ID NO: 447677 - DNA, 249 bp, Homo sapiens; identical to SEQ ID NO: 271910
  chr18:10150712-10150961
  hypo

SEQ ID NO: 447678 - DNA, 46 bp, Homo sapiens; identical to SEQ ID NO: 271912
  chr18:10166509-10166555
  hypo

SEQ ID NO: 447679 - DNA, 98 bp, Homo sapiens; identical to SEQ ID NO: 271913
  chr18:10336858-10336956
  hypo

SEQ ID NO: 447680 - DNA, 61 bp, Homo sapiens; identical to SEQ ID NO: 323925
  chr18:10414334-10414395
  hypo

SEQ ID NO: 447681 - DNA, 187 bp, Homo sapiens; identical to SEQ ID NO: 323926
  chr18:10414425-10414612
  hypo

SEQ ID NO: 447682 - DNA, 146 bp, Homo sapiens; identical to SEQ ID NO: 271915
  chr18:10460167-10460313
  hypo

SEQ ID NO: 447683 - DNA, 191 bp, Homo sapiens; identical to SEQ ID NO: 218425
  chr18:10474225-10474416
  hypo

SEQ ID NO: 447684 - DNA, 259 bp, Homo sapiens; identical to SEQ ID NO: 323929
  chr18:10474462-10474721
  hypo

SEQ ID NO: 447685 - DNA, 64 bp, Homo sapiens; identical to SEQ ID NO: 271918
  chr18:10538267-10538331
  hypo

SEQ ID NO: 447686 - DNA, 32 bp, Homo sapiens; identical to SEQ ID NO: 271919
  chr18:10578689-10578721
  hypo

SEQ ID NO: 447687 - DNA, 81 bp, Homo sapiens; identical to SEQ ID NO: 271922
  chr18:11024138-11024219
  hypo

SEQ ID NO: 447688 - DNA, 38 bp, Homo sapiens; identical to SEQ ID NO: 271923
  chr18:11116413-11116451
  hypo

SEQ ID NO: 447689 - DNA, 234 bp, Homo sapiens; identical to SEQ ID NO: 323936
  chr18:11533023-11533257
  hypo

SEQ ID NO: 447690 - DNA, 40 bp, Homo sapiens; identical to SEQ ID NO: 271925
  chr18:11534215-11534255
  hypo

SEQ ID NO: 447691 - DNA, 59 bp, Homo sapiens; identical to SEQ ID NO: 323938
  chr18:11571325-11571384
  hypo

SEQ ID NO: 447692 - DNA, 45 bp, Homo sapiens; identical to SEQ ID NO: 271927
  chr18:11589694-11589739
  hypo

SEQ ID NO: 447693 - DNA, 389 bp, Homo sapiens; identical to SEQ ID NO: 271928
  chr18:11821762-11822151
  hypo

SEQ ID NO: 447694 - DNA, 87 bp, Homo sapiens; identical to SEQ ID NO: 218428
  chr18:11877623-11877710
  hypo

SEQ ID NO: 447695 - DNA, 42 bp, Homo sapiens; identical to SEQ ID NO: 218429
  chr18:11877747-11877789
  hypo

SEQ ID NO: 447696 - DNA, 175 bp, Homo sapiens; identical to SEQ ID NO: 271930
  chr18:11881075-11881250
  hypo

SEQ ID NO: 447697 - DNA, 36 bp, Homo sapiens; identical to SEQ ID NO: 271931
  chr18:11929334-11929370
  hypo

SEQ ID NO: 447698 - DNA, 45 bp, Homo sapiens; identical to SEQ ID NO: 271936
  chr18:11999660-11999705
  hypo

SEQ ID NO: 447699 - DNA, 64 bp, Homo sapiens; identical to SEQ ID NO: 271937
  chr18:12059558-12059622
  hypo

SEQ ID NO: 447700 - DNA, 213 bp, Homo sapiens; identical to SEQ ID NO: 218432
  chr18:12093611-12093824
  hypo

SEQ ID NO: 447701 - DNA, 696 bp, Homo sapiens; identical to SEQ ID NO: 218434
  chr18:12279587-12280283
  hypo

SEQ ID NO: 447702 - DNA, 138 bp, Homo sapiens; identical to SEQ ID NO: 271942
  chr18:12291804-12291942
  hypo

SEQ ID NO: 447703 - DNA, 688 bp, Homo sapiens; identical to SEQ ID NO: 204895
  chr18:12308209-12308897
  hypo

SEQ ID NO: 447704 - DNA, 129 bp, Homo sapiens; identical to SEQ ID NO: 204896
  chr18:12308927-12309056
  hypo

SEQ ID NO: 447705 - DNA, 70 bp, Homo sapiens
  chr18:12375057-12375127
  hypo
aaaaaaaaaaaaagaaaagaaaagaaaagggatcagagcttggtaaaacagggaaatggatacaggaaac

SEQ ID NO: 447706 - DNA, 268 bp, Homo sapiens; identical to SEQ ID NO: 271945
  chr18:12396677-12396945
  hypo

SEQ ID NO: 447707 - DNA, 98 bp, Homo sapiens; identical to SEQ ID NO: 218443
  chr18:12431471-12431569
  hypo

SEQ ID NO: 447708 - DNA, 317 bp, Homo sapiens; identical to SEQ ID NO: 218444
  chr18:12432919-12433236
  hypo

SEQ ID NO: 447709 - DNA, 161 bp, Homo sapiens; identical to SEQ ID NO: 271949
  chr18:12460294-12460455
  hypo

SEQ ID NO: 447710 - DNA, 38 bp, Homo sapiens; identical to SEQ ID NO: 271950
  chr18:12699046-12699084
  hypo

SEQ ID NO: 447711 - DNA, 33 bp, Homo sapiens; identical to SEQ ID NO: 271951
  chr18:12701659-12701692
  hypo

SEQ ID NO: 447712 - DNA, 86 bp, Homo sapiens; identical to SEQ ID NO: 271952
  chr18:12741269-12741355
  hypo

SEQ ID NO: 447713 - DNA, 35 bp, Homo sapiens; identical to SEQ ID NO: 218445
  chr18:12849993-12850028
  hypo

SEQ ID NO: 447714 - DNA, 76 bp, Homo sapiens; identical to SEQ ID NO: 271954
  chr18:12854822-12854898
  hypo

SEQ ID NO: 447715 - DNA, 39 bp, Homo sapiens; identical to SEQ ID NO: 271955
  chr18:12856102-12856141
  hypo

SEQ ID NO: 447716 - DNA, 37 bp, Homo sapiens; identical to SEQ ID NO: 218446
  chr18:12949141-12949178
  hypo

SEQ ID NO: 447717 - DNA, 135 bp, Homo sapiens; identical to SEQ ID NO: 271961
  chr18:13162994-13163129
  hypo

SEQ ID NO: 447718 - DNA, 90 bp, Homo sapiens; identical to SEQ ID NO: 271962
  chr18:13165627-13165717
  hypo

SEQ ID NO: 447719 - DNA, 101 bp, Homo sapiens; identical to SEQ ID NO: 271963
  chr18:13181960-13182061
  hypo

SEQ ID NO: 447720 - DNA, 221 bp, Homo sapiens; identical to SEQ ID NO: 218450
  chr18:13212918-13213139
  hypo

SEQ ID NO: 447721 - DNA, 95 bp, Homo sapiens; identical to SEQ ID NO: 424430
  chr18:13218078-13218173
  hypo

SEQ ID NO: 447722 - DNA, 201 bp, Homo sapiens; identical to SEQ ID NO: 323986
  chr18:13231318-13231519
  hypo

SEQ ID NO: 447723 - DNA, 299 bp, Homo sapiens; identical to SEQ ID NO: 271968
  chr18:13252607-13252906
  hypo

SEQ ID NO: 447724 - DNA, 182 bp, Homo sapiens; identical to SEQ ID NO: 271969
  chr18:13254436-13254618
  hypo

SEQ ID NO: 447725 - DNA, 89 bp, Homo sapiens; identical to SEQ ID NO: 271970
  chr18:13257121-13257210
  hypo

SEQ ID NO: 447726 - DNA, 236 bp, Homo sapiens; identical to SEQ ID NO: 218455
  chr18:13292802-13293038
  hypo

SEQ ID NO: 447727 - DNA, 148 bp, Homo sapiens; identical to SEQ ID NO: 271972
  chr18:13296052-13296200
  hypo

SEQ ID NO: 447728 - DNA, 140 bp, Homo sapiens; identical to SEQ ID NO: 271973
  chr18:13311612-13311752
  hypo

SEQ ID NO: 447729 - DNA, 54 bp, Homo sapiens; identical to SEQ ID NO: 271974
  chr18:13381476-13381530
  hypo

SEQ ID NO: 447730 - DNA, 310 bp, Homo sapiens; identical to SEQ ID NO: 271975
  chr18:13387328-13387638
  hypo

SEQ ID NO: 447731 - DNA, 130 bp, Homo sapiens; identical to SEQ ID NO: 271976
  chr18:13393100-13393230
  hypo

SEQ ID NO: 447732 - DNA, 128 bp, Homo sapiens; identical to SEQ ID NO: 271977
  chr18:13400464-13400592
  hypo

SEQ ID NO: 447733 - DNA, 279 bp, Homo sapiens; identical to SEQ ID NO: 271978
  chr18:13404255-13404534
  hypo

SEQ ID NO: 447734 - DNA, 38 bp, Homo sapiens; identical to SEQ ID NO: 271979
  chr18:13404774-13404812
  hypo

SEQ ID NO: 447735 - DNA, 77 bp, Homo sapiens; identical to SEQ ID NO: 271980
  chr18:13412928-13413005
  hypo

SEQ ID NO: 447736 - DNA, 40 bp, Homo sapiens; identical to SEQ ID NO: 271982
  chr18:13426842-13426882
  hypo

SEQ ID NO: 447737 - DNA, 202 bp, Homo sapiens; identical to SEQ ID NO: 271985
  chr18:13458111-13458313
  hypo

SEQ ID NO: 447738 - DNA, 125 bp, Homo sapiens; identical to SEQ ID NO: 324006
  chr18:13460975-13461100
  hypo

SEQ ID NO: 447739 - DNA, 98 bp, Homo sapiens; identical to SEQ ID NO: 324007
  chr18:13461383-13461481
  hypo

SEQ ID NO: 447740 - DNA, 86 bp, Homo sapiens; identical to SEQ ID NO: 271987
  chr18:13461541-13461627
  hypo

SEQ ID NO: 447741 - DNA, 42 bp, Homo sapiens; identical to SEQ ID NO: 271988
  chr18:13462966-13463008
  hypo

SEQ ID NO: 447742 - DNA, 43 bp, Homo sapiens; identical to SEQ ID NO: 324010
  chr18:13477929-13477972
  hypo

SEQ ID NO: 447743 - DNA, 38 bp, Homo sapiens; identical to SEQ ID NO: 271990
  chr18:13481383-13481421
  hypo

SEQ ID NO: 447744 - DNA, 99 bp, Homo sapiens; identical to SEQ ID NO: 271991
  chr18:13481451-13481550
  hypo

SEQ ID NO: 447745 - DNA, 120 bp, Homo sapiens; identical to SEQ ID NO: 218459
  chr18:13498452-13498572
  hypo

SEQ ID NO: 447746 - DNA, 84 bp, Homo sapiens; identical to SEQ ID NO: 218460
  chr18:13498973-13499057
  hypo

SEQ ID NO: 447747 - DNA, 240 bp, Homo sapiens; identical to SEQ ID NO: 218461
  chr18:13499117-13499357
  hypo

SEQ ID NO: 447748 - DNA, 60 bp, Homo sapiens; identical to SEQ ID NO: 271997
  chr18:13503353-13503413
  hypo

SEQ ID NO: 447749 - DNA, 44 bp, Homo sapiens; identical to SEQ ID NO: 271998
  chr18:13505525-13505569
  hypo

SEQ ID NO: 447750 - DNA, 119 bp, Homo sapiens; identical to SEQ ID NO: 271999
  chr18:13514461-13514580
  hypo

SEQ ID NO: 447751 - DNA, 150 bp, Homo sapiens; identical to SEQ ID NO: 272000
  chr18:13518870-13519020
  hypo

SEQ ID NO: 447752 - DNA, 147 bp, Homo sapiens; identical to SEQ ID NO: 272001
  chr18:13519311-13519458
  hypo

SEQ ID NO: 447753 - DNA, 202 bp, Homo sapiens; identical to SEQ ID NO: 218463
  chr18:13525325-13525527
  hypo

SEQ ID NO: 447754 - DNA, 74 bp, Homo sapiens; identical to SEQ ID NO: 272003
  chr18:13528924-13528998
  hypo

SEQ ID NO: 447755 - DNA, 269 bp, Homo sapiens; identical to SEQ ID NO: 218464
  chr18:13532099-13532368
  hypo

SEQ ID NO: 447756 - DNA, 226 bp, Homo sapiens; identical to SEQ ID NO: 272005
  chr18:13550420-13550646
  hypo

SEQ ID NO: 447757 - DNA, 35 bp, Homo sapiens; identical to SEQ ID NO: 272006
  chr18:13571915-13571950
  hypo

SEQ ID NO: 447758 - DNA, 254 bp, Homo sapiens; identical to SEQ ID NO: 324028
  chr18:13583825-13584079
  hypo

SEQ ID NO: 447759 - DNA, 57 bp, Homo sapiens; identical to SEQ ID NO: 272008
  chr18:13590480-13590537
  hypo

SEQ ID NO: 447760 - DNA, 182 bp, Homo sapiens; identical to SEQ ID NO: 324030
  chr18:13621726-13621908
  hypo

SEQ ID NO: 447761 - DNA, 117 bp, Homo sapiens; identical to SEQ ID NO: 272010
  chr18:13654304-13654421
  hypo

SEQ ID NO: 447762 - DNA, 145 bp, Homo sapiens; identical to SEQ ID NO: 272013
  chr18:14221785-14221930
  hypo

SEQ ID NO: 447763 - DNA, 33 bp, Homo sapiens; identical to SEQ ID NO: 272014
  chr18:18700054-18700087
  hypo

SEQ ID NO: 447764 - DNA, 88 bp, Homo sapiens; identical to SEQ ID NO: 272015
  chr18:18997462-18997550
  hypo

SEQ ID NO: 447765 - DNA, 120 bp, Homo sapiens; identical to SEQ ID NO: 218465
  chr18:19064405-19064525
  hypo

SEQ ID NO: 447766 - DNA, 180 bp, Homo sapiens; identical to SEQ ID NO: 272017
  chr18:19216811-19216991
  hypo

SEQ ID NO: 447767 - DNA, 204 bp, Homo sapiens; identical to SEQ ID NO: 324041
  chr18:19243757-19243961
  hypo

SEQ ID NO: 447768 - DNA, 32 bp, Homo sapiens; identical to SEQ ID NO: 218466
  chr18:19253263-19253295
  hypo

SEQ ID NO: 447769 - DNA, 236 bp, Homo sapiens; identical to SEQ ID NO: 424436
  chr18:19751030-19751266
  hypo

SEQ ID NO: 447770 - DNA, 62 bp, Homo sapiens; identical to SEQ ID NO: 292951
  chr18:19751774-19751836
  hypo

SEQ ID NO: 447771 - DNA, 168 bp, Homo sapiens; identical to SEQ ID NO: 129825
  chr18:19751869-19752037
  hypo

SEQ ID NO: 447772 - DNA, 59 bp, Homo sapiens; identical to SEQ ID NO: 272021
  chr18:19769948-19770007
  hypo

SEQ ID NO: 447773 - DNA, 34 bp, Homo sapiens; identical to SEQ ID NO: 218468
  chr18:19778302-19778336
  hypo

SEQ ID NO: 447774 - DNA, 132 bp, Homo sapiens; identical to SEQ ID NO: 272024
  chr18:20380480-20380612
  hypo

SEQ ID NO: 447775 - DNA, 217 bp, Homo sapiens; identical to SEQ ID NO: 272025
  chr18:20696270-20696487
  hypo

SEQ ID NO: 447776 - DNA, 242 bp, Homo sapiens; identical to SEQ ID NO: 292957
  chr18:20715395-20715637
  hypo

SEQ ID NO: 447777 - DNA, 163 bp, Homo sapiens; identical to SEQ ID NO: 272026
  chr18:20770343-20770506
  hypo

SEQ ID NO: 447778 - DNA, 219 bp, Homo sapiens; identical to SEQ ID NO: 218475
  chr18:20790547-20790766
  hypo

SEQ ID NO: 447779 - DNA, 260 bp, Homo sapiens; identical to SEQ ID NO: 218476
  chr18:20800425-20800685
  hypo

SEQ ID NO: 447780 - DNA, 329 bp, Homo sapiens; identical to SEQ ID NO: 272029
  chr18:20829538-20829867
  hypo

SEQ ID NO: 447781 - DNA, 193 bp, Homo sapiens; identical to SEQ ID NO: 218477
  chr18:20846712-20846905
  hypo

SEQ ID NO: 447782 - DNA, 256 bp, Homo sapiens; identical to SEQ ID NO: 272031
  chr18:20853662-20853918
  hypo

SEQ ID NO: 447783 - DNA, 47 bp, Homo sapiens; identical to SEQ ID NO: 272032
  chr18:20882093-20882140
  hypo

SEQ ID NO: 447784 - DNA, 42 bp, Homo sapiens; identical to SEQ ID NO: 218478
  chr18:20910923-20910965
  hypo

SEQ ID NO: 447785 - DNA, 43 bp, Homo sapiens; identical to SEQ ID NO: 272035
  chr18:21042374-21042417
  hypo

SEQ ID NO: 447786 - DNA, 155 bp, Homo sapiens; identical to SEQ ID NO: 272036
  chr18:21104196-21104351
  hypo

SEQ ID NO: 447787 - DNA, 48 bp, Homo sapiens; identical to SEQ ID NO: 218480
  chr18:21164538-21164586
  hypo

SEQ ID NO: 447788 - DNA, 575 bp, Homo sapiens; identical to SEQ ID NO: 204919
  chr18:21242241-21242816
  hypo

SEQ ID NO: 447789 - DNA, 44 bp, Homo sapiens; identical to SEQ ID NO: 272038
  chr18:21306854-21306898
  hypo

SEQ ID NO: 447790 - DNA, 203 bp, Homo sapiens; identical to SEQ ID NO: 272039
  chr18:21388620-21388823
  hypo

SEQ ID NO: 447791 - DNA, 73 bp, Homo sapiens; identical to SEQ ID NO: 272040
  chr18:21422659-21422732
  hypo

SEQ ID NO: 447792 - DNA, 42 bp, Homo sapiens; identical to SEQ ID NO: 272041
  chr18:21426405-21426447
  hypo

SEQ ID NO: 447793 - DNA, 78 bp, Homo sapiens; identical to SEQ ID NO: 272042
  chr18:21461950-21462028
  hypo

SEQ ID NO: 447794 - DNA, 154 bp, Homo sapiens; identical to SEQ ID NO: 272043
  chr18:21508086-21508240
  hypo

SEQ ID NO: 447795 - DNA, 247 bp, Homo sapiens; identical to SEQ ID NO: 225613
  chr18:21594467-21594714
  hypo

SEQ ID NO: 447796 - DNA, 120 bp, Homo sapiens; identical to SEQ ID NO: 272044
  chr18:21608975-21609095
  hypo

SEQ ID NO: 447797 - DNA, 192 bp, Homo sapiens; identical to SEQ ID NO: 272045
  chr18:21656908-21657100
  hypo

SEQ ID NO: 447798 - DNA, 165 bp, Homo sapiens; identical to SEQ ID NO: 272046
  chr18:21702069-21702234
  hypo

SEQ ID NO: 447799 - DNA, 116 bp, Homo sapiens; identical to SEQ ID NO: 218482
  chr18:21849311-21849427
  hypo

SEQ ID NO: 447800 - DNA, 204 bp, Homo sapiens; identical to SEQ ID NO: 272048
  chr18:22098635-22098839
  hypo

SEQ ID NO: 447801 - DNA, 32 bp, Homo sapiens; identical to SEQ ID NO: 272049
  chr18:22552213-22552245
  hypo

SEQ ID NO: 447802 - DNA, 186 bp, Homo sapiens; identical to SEQ ID NO: 272050
  chr18:22597055-22597241
  hypo

SEQ ID NO: 447803 - DNA, 69 bp, Homo sapiens; identical to SEQ ID NO: 272051
  chr18:22636372-22636441
  hypo

SEQ ID NO: 447804 - DNA, 147 bp, Homo sapiens; identical to SEQ ID NO: 204928
  chr18:22653839-22653986
  hypo

SEQ ID NO: 447805 - DNA, 44 bp, Homo sapiens; identical to SEQ ID NO: 218484
  chr18:22658458-22658502
  hypo

SEQ ID NO: 447806 - DNA, 70 bp, Homo sapiens; identical to SEQ ID NO: 272054
  chr18:22721843-22721913
  hypo

SEQ ID NO: 447807 - DNA, 260 bp, Homo sapiens; identical to SEQ ID NO: 218485
  chr18:22756673-22756933
  hypo

SEQ ID NO: 447808 - DNA, 74 bp, Homo sapiens; identical to SEQ ID NO: 272056
  chr18:22787366-22787440
  hypo

SEQ ID NO: 447809 - DNA, 418 bp, Homo sapiens; identical to SEQ ID NO: 272058
  chr18:22806990-22807408
  hypo

SEQ ID NO: 447810 - DNA, 154 bp, Homo sapiens; identical to SEQ ID NO: 218486
  chr18:23652341-23652495
  hypo

SEQ ID NO: 447811 - DNA, 130 bp, Homo sapiens; identical to SEQ ID NO: 218487
  chr18:23988507-23988637
  hypo

SEQ ID NO: 447812 - DNA, 227 bp, Homo sapiens; identical to SEQ ID NO: 272061
  chr18:24059431-24059658
  hypo

SEQ ID NO: 447813 - DNA, 32 bp, Homo sapiens; identical to SEQ ID NO: 272062
  chr18:24409812-24409844
  hypo

SEQ ID NO: 447814 - DNA, 37 bp, Homo sapiens; identical to SEQ ID NO: 272063
  chr18:26202689-26202726
  hypo

SEQ ID NO: 447815 - DNA, 139 bp, Homo sapiens; identical to SEQ ID NO: 272064
  chr18:27755725-27755864
  hypo

SEQ ID NO: 447816 - DNA, 99 bp, Homo sapiens; identical to SEQ ID NO: 272065
  chr18:27932659-27932758
  hypo

SEQ ID NO: 447817 - DNA, 150 bp, Homo sapiens; identical to SEQ ID NO: 218489
  chr18:28934936-28935086
  hypo

SEQ ID NO: 447818 - DNA, 120 bp, Homo sapiens; identical to SEQ ID NO: 272067
  chr18:29026532-29026652
  hypo

SEQ ID NO: 447819 - DNA, 172 bp, Homo sapiens; identical to SEQ ID NO: 218490
  chr18:29199777-29199949
  hypo

SEQ ID NO: 447820 - DNA, 43 bp, Homo sapiens; identical to SEQ ID NO: 272069
  chr18:29200381-29200424
  hypo

SEQ ID NO: 447821 - DNA, 36 bp, Homo sapiens; identical to SEQ ID NO: 204939
  chr18:29265160-29265196
  hypo

SEQ ID NO: 447822 - DNA, 45 bp, Homo sapiens; identical to SEQ ID NO: 218492
  chr18:29269413-29269458
  hypo

SEQ ID NO: 447823 - DNA, 54 bp, Homo sapiens; identical to SEQ ID NO: 218493
  chr18:29293795-29293849
  hypo

SEQ ID NO: 447824 - DNA, 99 bp, Homo sapiens; identical to SEQ ID NO: 272072
  chr18:29325111-29325210
  hypo

SEQ ID NO: 447825 - DNA, 61 bp, Homo sapiens; identical to SEQ ID NO: 272073
  chr18:29366854-29366915
  hypo

SEQ ID NO: 447826 - DNA, 51 bp, Homo sapiens; identical to SEQ ID NO: 225622
  chr18:29598683-29598734
  hypo

SEQ ID NO: 447827 - DNA, 157 bp, Homo sapiens; identical to SEQ ID NO: 272076
  chr18:29610273-29610430
  hypo

SEQ ID NO: 447828 - DNA, 80 bp, Homo sapiens; identical to SEQ ID NO: 272077
  chr18:29670904-29670984
  hypo

SEQ ID NO: 447829 - DNA, 1425 bp, Homo sapiens; identical to SEQ ID NO: 293003
  chr18:30050221-30051646
  hypo

SEQ ID NO: 447830 - DNA, 178 bp, Homo sapiens; identical to SEQ ID NO: 55008
  chr18:31803673-31803851
  hypo

SEQ ID NO: 447831 - DNA, 72 bp, Homo sapiens; identical to SEQ ID NO: 272078
  chr18:32702565-32702637
  hypo

SEQ ID NO: 447832 - DNA, 80 bp, Homo sapiens; identical to SEQ ID NO: 272080
  chr18:32989494-32989574
  hypo

SEQ ID NO: 447833 - DNA, 127 bp, Homo sapiens; identical to SEQ ID NO: 272081
  chr18:32991120-32991247
  hypo

SEQ ID NO: 447834 - DNA, 118 bp, Homo sapiens; identical to SEQ ID NO: 272082
  chr18:33041505-33041623
  hypo

SEQ ID NO: 447835 - DNA, 78 bp, Homo sapiens; identical to SEQ ID NO: 225628
  chr18:33077970-33078048
  hypo

SEQ ID NO: 447836 - DNA, 72 bp, Homo sapiens; identical to SEQ ID NO: 218500
  chr18:33078662-33078734
  hypo

SEQ ID NO: 447837 - DNA, 94 bp, Homo sapiens; identical to SEQ ID NO: 272084
  chr18:33485572-33485666
  hypo

SEQ ID NO: 447838 - DNA, 440 bp, Homo sapiens; identical to SEQ ID NO: 293026
  chr18:33530135-33530575
  hypo

SEQ ID NO: 447839 - DNA, 38 bp, Homo sapiens; identical to SEQ ID NO: 272085
  chr18:33550615-33550653
  hypo

SEQ ID NO: 447840 - DNA, 656 bp, Homo sapiens; identical to SEQ ID NO: 293028
  chr18:33766769-33767425
  hypo

SEQ ID NO: 447841 - DNA, 131 bp, Homo sapiens; identical to SEQ ID NO: 272086
  chr18:34297789-34297920
  hypo

SEQ ID NO: 447842 - DNA, 35 bp, Homo sapiens; identical to SEQ ID NO: 272087
  chr18:34366183-34366218
  hypo

SEQ ID NO: 447843 - DNA, 51 bp, Homo sapiens; identical to SEQ ID NO: 293039
  chr18:35145809-35145860
  hypo

SEQ ID NO: 447844 - DNA, 120 bp, Homo sapiens; identical to SEQ ID NO: 218504
  chr18:36298627-36298747
  hypo

SEQ ID NO: 447845 - DNA, 120 bp, Homo sapiens; identical to SEQ ID NO: 218505
  chr18:36889351-36889471
  hypo

SEQ ID NO: 447846 - DNA, 120 bp, Homo sapiens; identical to SEQ ID NO: 218506
  chr18:36939330-36939450
  hypo

SEQ ID NO: 447847 - DNA, 82 bp, Homo sapiens; identical to SEQ ID NO: 272093
  chr18:37109505-37109587
  hypo

SEQ ID NO: 447848 - DNA, 47 bp, Homo sapiens; identical to SEQ ID NO: 272095
  chr18:42295260-42295307
  hypo

SEQ ID NO: 447849 - DNA, 67 bp, Homo sapiens; identical to SEQ ID NO: 204969
  chr18:42531892-42531959
  hypo

SEQ ID NO: 447850 - DNA, 139 bp, Homo sapiens; identical to SEQ ID NO: 272097
  chr18:43299705-43299844
  hypo

SEQ ID NO: 447851 - DNA, 192 bp, Homo sapiens; identical to SEQ ID NO: 272098
  chr18:43307167-43307359
  hypo

SEQ ID NO: 447852 - DNA, 66 bp, Homo sapiens; identical to SEQ ID NO: 272099
  chr18:43410024-43410090
  hypo

SEQ ID NO: 447853 - DNA, 180 bp, Homo sapiens; identical to SEQ ID NO: 272100
  chr18:43450342-43450522
  hypo

SEQ ID NO: 447854 - DNA, 32 bp, Homo sapiens; identical to SEQ ID NO: 218512
  chr18:43599472-43599504
  hypo

SEQ ID NO: 447855 - DNA, 193 bp, Homo sapiens; identical to SEQ ID NO: 272102
  chr18:43613983-43614176
  hypo

SEQ ID NO: 447856 - DNA, 120 bp, Homo sapiens; identical to SEQ ID NO: 218513
  chr18:43767225-43767345
  hypo

SEQ ID NO: 447857 - DNA, 67 bp, Homo sapiens; identical to SEQ ID NO: 272104
  chr18:43779976-43780043
  hypo

SEQ ID NO: 447858 - DNA, 97 bp, Homo sapiens; identical to SEQ ID NO: 272105
  chr18:43906113-43906210
  hypo

SEQ ID NO: 447859 - DNA, 336 bp, Homo sapiens; identical to SEQ ID NO: 272106
  chr18:43906510-43906846
  hypo

SEQ ID NO: 447860 - DNA, 33 bp, Homo sapiens; identical to SEQ ID NO: 225641
  chr18:43924114-43924147
  hypo

SEQ ID NO: 447861 - DNA, 44 bp, Homo sapiens; identical to SEQ ID NO: 218515
  chr18:44010836-44010880
  hypo

SEQ ID NO: 447862 - DNA, 44 bp, Homo sapiens; identical to SEQ ID NO: 218517
  chr18:44700791-44700835
  hypo

SEQ ID NO: 447863 - DNA, 290 bp, Homo sapiens; identical to SEQ ID NO: 272112
  chr18:45121093-45121383
  hypo

SEQ ID NO: 447864 - DNA, 34 bp, Homo sapiens; identical to SEQ ID NO: 272113
  chr18:45186646-45186680
  hypo

SEQ ID NO: 447865 - DNA, 200 bp, Homo sapiens; identical to SEQ ID NO: 272115
  chr18:45554569-45554769
  hypo

SEQ ID NO: 447866 - DNA, 322 bp, Homo sapiens; identical to SEQ ID NO: 272116
  chr18:45567034-45567356
  hypo

SEQ ID NO: 447867 - DNA, 189 bp, Homo sapiens; identical to SEQ ID NO: 272117
  chr18:45579501-45579690
  hypo

SEQ ID NO: 447868 - DNA, 86 bp, Homo sapiens; identical to SEQ ID NO: 272118
  chr18:45594043-45594129
  hypo

SEQ ID NO: 447869 - DNA, 194 bp, Homo sapiens; identical to SEQ ID NO: 272119
  chr18:45820419-45820613
  hypo

SEQ ID NO: 447870 - DNA, 154 bp, Homo sapiens; identical to SEQ ID NO: 218521
  chr18:45917050-45917204
  hypo

SEQ ID NO: 447871 - DNA, 86 bp, Homo sapiens; identical to SEQ ID NO: 272121
  chr18:46041295-46041381
  hypo

SEQ ID NO: 447872 - DNA, 2253 bp, Homo sapiens; identical to SEQ ID NO: 293081
  chr18:46065664-46067917
  hypo

SEQ ID NO: 447873 - DNA, 291 bp, Homo sapiens; identical to SEQ ID NO: 272122
  chr18:46142031-46142322
  hypo

SEQ ID NO: 447874 - DNA, 46 bp, Homo sapiens; identical to SEQ ID NO: 324177
  chr18:46142352-46142398
  hypo

SEQ ID NO: 447875 - DNA, 135 bp, Homo sapiens; identical to SEQ ID NO: 272124
  chr18:46189304-46189439
  hypo

SEQ ID NO: 447876 - DNA, 228 bp, Homo sapiens; identical to SEQ ID NO: 272126
  chr18:46385808-46386036
  hypo

SEQ ID NO: 447877 - DNA, 49 bp, Homo sapiens; identical to SEQ ID NO: 186561
  chr18:46386611-46386660
  hypo

SEQ ID NO: 447878 - DNA, 139 bp, Homo sapiens; identical to SEQ ID NO: 272129
  chr18:46481278-46481417
  hypo

SEQ ID NO: 447879 - DNA, 81 bp, Homo sapiens; identical to SEQ ID NO: 272130
  chr18:46486896-46486977
  hypo

SEQ ID NO: 447880 - DNA, 104 bp, Homo sapiens; identical to SEQ ID NO: 204986
  chr18:46501913-46502017
  hypo

SEQ ID NO: 447881 - DNA, 84 bp, Homo sapiens; identical to SEQ ID NO: 272131
  chr18:46524824-46524908
  hypo

SEQ ID NO: 447882 - DNA, 255 bp, Homo sapiens; identical to SEQ ID NO: 272132
  chr18:46547227-46547482
  hypo

SEQ ID NO: 447883 - DNA, 231 bp, Homo sapiens; identical to SEQ ID NO: 218528
  chr18:46578116-46578347
  hypo

SEQ ID NO: 447884 - DNA, 88 bp, Homo sapiens; identical to SEQ ID NO: 218531
  chr18:47812104-47812192
  hypo

SEQ ID NO: 447885 - DNA, 270 bp, Homo sapiens; identical to SEQ ID NO: 218532
  chr18:48190331-48190601
  hypo

SEQ ID NO: 447886 - DNA, 228 bp, Homo sapiens; identical to SEQ ID NO: 204993
  chr18:48494204-48494432
  hypo

SEQ ID NO: 447887 - DNA, 158 bp, Homo sapiens; identical to SEQ ID NO: 272140
  chr18:48661656-48661814
  hypo

SEQ ID NO: 447888 - DNA, 85 bp, Homo sapiens; identical to SEQ ID NO: 218534
  chr18:48664888-48664973
  hypo

SEQ ID NO: 447889 - DNA, 120 bp, Homo sapiens; identical to SEQ ID NO: 218535
  chr18:48725413-48725533
  hypo

SEQ ID NO: 447890 - DNA, 95 bp, Homo sapiens; identical to SEQ ID NO: 272143
  chr18:48725593-48725688
  hypo

SEQ ID NO: 447891 - DNA, 223 bp, Homo sapiens; identical to SEQ ID NO: 272144
  chr18:52576694-52576917
  hypo

SEQ ID NO: 447892 - DNA, 195 bp, Homo sapiens; identical to SEQ ID NO: 186617
  chr18:53074508-53074703
  hypo

SEQ ID NO: 447893 - DNA, 31 bp, Homo sapiens; identical to SEQ ID NO: 218536
  chr18:53106926-53106957
  hypo

SEQ ID NO: 447894 - DNA, 159 bp, Homo sapiens; identical to SEQ ID NO: 272148
  chr18:53126065-53126224
  hypo

SEQ ID NO: 447895 - DNA, 40 bp, Homo sapiens; identical to SEQ ID NO: 205004
  chr18:53257761-53257801
  hypo

SEQ ID NO: 447896 - DNA, 32 bp, Homo sapiens; identical to SEQ ID NO: 272149
  chr18:53333160-53333192
  hypo

SEQ ID NO: 447897 - DNA, 163 bp, Homo sapiens; identical to SEQ ID NO: 218539
  chr18:54398593-54398756
  hypo

SEQ ID NO: 447898 - DNA, 53 bp, Homo sapiens; identical to SEQ ID NO: 218541
  chr18:55315834-55315887
  hypo

SEQ ID NO: 447899 - DNA, 133 bp, Homo sapiens; identical to SEQ ID NO: 218542
  chr18:55329689-55329822
  hypo

SEQ ID NO: 447900 - DNA, 110 bp, Homo sapiens; identical to SEQ ID NO: 272155
  chr18:55398780-55398890
  hypo

SEQ ID NO: 447901 - DNA, 45 bp, Homo sapiens; identical to SEQ ID NO: 272156
  chr18:55426742-55426787
  hypo

SEQ ID NO: 447902 - DNA, 44 bp, Homo sapiens; identical to SEQ ID NO: 218543
  chr18:55427027-55427071
  hypo

SEQ ID NO: 447903 - DNA, 187 bp, Homo sapiens; identical to SEQ ID NO: 272158
  chr18:55760789-55760976
  hypo

SEQ ID NO: 447904 - DNA, 180 bp, Homo sapiens; identical to SEQ ID NO: 272159
  chr18:55784750-55784930
  hypo

SEQ ID NO: 447905 - DNA, 33 bp, Homo sapiens; identical to SEQ ID NO: 272160
  chr18:55817734-55817767
  hypo

SEQ ID NO: 447906 - DNA, 39 bp, Homo sapiens; identical to SEQ ID NO: 272161
  chr18:55821161-55821200
  hypo

SEQ ID NO: 447907 - DNA, 55 bp, Homo sapiens; identical to SEQ ID NO: 272162
  chr18:55847725-55847780
  hypo

SEQ ID NO: 447908 - DNA, 117 bp, Homo sapiens; identical to SEQ ID NO: 272166
  chr18:55922278-55922395
  hypo

SEQ ID NO: 447909 - DNA, 192 bp, Homo sapiens; identical to SEQ ID NO: 272167
  chr18:55923975-55924167
  hypo

SEQ ID NO: 447910 - DNA, 184 bp, Homo sapiens; identical to SEQ ID NO: 272168
  chr18:55945680-55945864
  hypo

SEQ ID NO: 447911 - DNA, 42 bp, Homo sapiens; identical to SEQ ID NO: 272169
  chr18:55947809-55947851
  hypo

SEQ ID NO: 447912 - DNA, 173 bp, Homo sapiens; identical to SEQ ID NO: 272170
  chr18:55977131-55977304
  hypo

SEQ ID NO: 447913 - DNA, 183 bp, Homo sapiens; identical to SEQ ID NO: 324227
  chr18:55992342-55992525
  hypo

SEQ ID NO: 447914 - DNA, 47 bp, Homo sapiens; identical to SEQ ID NO: 272172
  chr18:56002735-56002782
  hypo

SEQ ID NO: 447915 - DNA, 38 bp, Homo sapiens; identical to SEQ ID NO: 272174
  chr18:56036807-56036845
  hypo

SEQ ID NO: 447916 - DNA, 136 bp, Homo sapiens; identical to SEQ ID NO: 272175
  chr18:56062044-56062180
  hypo

SEQ ID NO: 447917 - DNA, 115 bp, Homo sapiens; identical to SEQ ID NO: 272176
  chr18:56063563-56063678
  hypo

SEQ ID NO: 447918 - DNA, 141 bp, Homo sapiens; identical to SEQ ID NO: 272177
  chr18:56359260-56359401
  hypo

SEQ ID NO: 447919 - DNA, 136 bp, Homo sapiens; identical to SEQ ID NO: 218545
  chr18:56483782-56483918
  hypo

SEQ ID NO: 447920 - DNA, 61 bp, Homo sapiens; identical to SEQ ID NO: 272180
  chr18:56814249-56814310
  hypo

SEQ ID NO: 447921 - DNA, 43 bp, Homo sapiens; identical to SEQ ID NO: 293133
  chr18:56888694-56888737
  hypo

SEQ ID NO: 447922 - DNA, 132 bp, Homo sapiens; identical to SEQ ID NO: 324237
  chr18:57684742-57684874
  hypo

SEQ ID NO: 447923 - DNA, 202 bp, Homo sapiens; identical to SEQ ID NO: 272184
  chr18:59533473-59533675
  hypo

SEQ ID NO: 447924 - DNA, 35 bp, Homo sapiens; identical to SEQ ID NO: 272185
  chr18:59589239-59589274
  hypo

SEQ ID NO: 447925 - DNA, 52 bp, Homo sapiens
  chr18:59728760-59728812
  hypo
aaaaaaaaaaatgcaataaaatagtgaggacaaaagggcaacattccattcc

SEQ ID NO: 447926 - DNA, 83 bp, Homo sapiens; identical to SEQ ID NO: 272187
  chr18:59834319-59834402
  hypo

SEQ ID NO: 447927 - DNA, 39 bp, Homo sapiens; identical to SEQ ID NO: 218547
  chr18:59975663-59975702
  hypo

SEQ ID NO: 447928 - DNA, 86 bp, Homo sapiens; identical to SEQ ID NO: 272189
  chr18:59987232-59987318
  hypo

SEQ ID NO: 447929 - DNA, 39 bp, Homo sapiens; identical to SEQ ID NO: 205026
  chr18:59992691-59992730
  hypo

SEQ ID NO: 447930 - DNA, 164 bp, Homo sapiens; identical to SEQ ID NO: 272190
  chr18:60004628-60004792
  hypo

SEQ ID NO: 447931 - DNA, 188 bp, Homo sapiens; identical to SEQ ID NO: 272191
  chr18:60077430-60077618
  hypo

SEQ ID NO: 447932 - DNA, 41 bp, Homo sapiens; identical to SEQ ID NO: 218550
  chr18:60110314-60110355
  hypo

SEQ ID NO: 447933 - DNA, 180 bp, Homo sapiens; identical to SEQ ID NO: 272194
  chr18:60111709-60111889
  hypo

SEQ ID NO: 447934 - DNA, 164 bp, Homo sapiens; identical to SEQ ID NO: 218551
  chr18:60117014-60117178
  hypo

SEQ ID NO: 447935 - DNA, 157 bp, Homo sapiens; identical to SEQ ID NO: 272197
  chr18:60154518-60154675
  hypo

SEQ ID NO: 447936 - DNA, 501 bp, Homo sapiens; identical to SEQ ID NO: 293150
  chr18:60189547-60190048
  hypo

SEQ ID NO: 447937 - DNA, 1612 bp, Homo sapiens; identical to SEQ ID NO: 55170
  chr18:60190084-60191696
  hypo

SEQ ID NO: 447938 - DNA, 95 bp, Homo sapiens; identical to SEQ ID NO: 225665
  chr18:60191979-60192074
  hypo

SEQ ID NO: 447939 - DNA, 97 bp, Homo sapiens; identical to SEQ ID NO: 205029
  chr18:60194122-60194219
  hypo

SEQ ID NO: 447940 - DNA, 146 bp, Homo sapiens; identical to SEQ ID NO: 272198
  chr18:60210294-60210440
  hypo

SEQ ID NO: 447941 - DNA, 83 bp, Homo sapiens; identical to SEQ ID NO: 218556
  chr18:60216459-60216542
  hypo

SEQ ID NO: 447942 - DNA, 165 bp, Homo sapiens; identical to SEQ ID NO: 272200
  chr18:60217646-60217811
  hypo

SEQ ID NO: 447943 - DNA, 136 bp, Homo sapiens; identical to SEQ ID NO: 218558
  chr18:60234752-60234888
  hypo

SEQ ID NO: 447944 - DNA, 34 bp, Homo sapiens; identical to SEQ ID NO: 272203
  chr18:60242135-60242169
  hypo

SEQ ID NO: 447945 - DNA, 70 bp, Homo sapiens; identical to SEQ ID NO: 218559
  chr18:60273154-60273224
  hypo

SEQ ID NO: 447946 - DNA, 90 bp, Homo sapiens; identical to SEQ ID NO: 272205
  chr18:60377413-60377503
  hypo

SEQ ID NO: 447947 - DNA, 1435 bp, Homo sapiens; identical to SEQ ID NO: 205030
  chr18:60382939-60384374
  hypo

SEQ ID NO: 447948 - DNA, 186 bp, Homo sapiens; identical to SEQ ID NO: 218561
  chr18:60523278-60523464
  hypo

SEQ ID NO: 447949 - DNA, 33 bp, Homo sapiens; identical to SEQ ID NO: 272208
  chr18:60534964-60534997
  hypo

SEQ ID NO: 447950 - DNA, 37 bp, Homo sapiens; identical to SEQ ID NO: 218562
  chr18:60549764-60549801
  hypo

SEQ ID NO: 447951 - DNA, 97 bp, Homo sapiens; identical to SEQ ID NO: 272211
  chr18:60614284-60614381
  hypo

SEQ ID NO: 447952 - DNA, 202 bp, Homo sapiens; identical to SEQ ID NO: 218564
  chr18:60645390-60645592
  hypo

SEQ ID NO: 447953 - DNA, 210 bp, Homo sapiens; identical to SEQ ID NO: 218565
  chr18:60645979-60646189
  hypo

SEQ ID NO: 447954 - DNA, 43 bp, Homo sapiens; identical to SEQ ID NO: 272214
  chr18:60654359-60654402
  hypo

SEQ ID NO: 447955 - DNA, 226 bp, Homo sapiens; identical to SEQ ID NO: 272215
  chr18:60813471-60813697
  hypo

SEQ ID NO: 447956 - DNA, 191 bp, Homo sapiens; identical to SEQ ID NO: 272216
  chr18:60878883-60879074
  hypo

SEQ ID NO: 447957 - DNA, 88 bp, Homo sapiens; identical to SEQ ID NO: 272217
  chr18:60935229-60935317
  hypo

SEQ ID NO: 447958 - DNA, 111 bp, Homo sapiens; identical to SEQ ID NO: 272218
  chr18:60959765-60959876
  hypo

SEQ ID NO: 447959 - DNA, 165 bp, Homo sapiens; identical to SEQ ID NO: 272219
  chr18:60973501-60973666
  hypo

SEQ ID NO: 447960 - DNA, 169 bp, Homo sapiens; identical to SEQ ID NO: 272220
  chr18:60992577-60992746
  hypo

SEQ ID NO: 447961 - DNA, 39 bp, Homo sapiens; identical to SEQ ID NO: 272222
  chr18:61450038-61450077
  hypo

SEQ ID NO: 447962 - DNA, 323 bp, Homo sapiens; identical to SEQ ID NO: 424545
  chr18:63417370-63417693
  hypo

SEQ ID NO: 447963 - DNA, 111 bp, Homo sapiens; identical to SEQ ID NO: 218567
  chr18:66360549-66360660
  hypo

SEQ ID NO: 447964 - DNA, 42 bp, Homo sapiens; identical to SEQ ID NO: 272224
  chr18:67073950-67073992
  hypo

SEQ ID NO: 447965 - DNA, 149 bp, Homo sapiens; identical to SEQ ID NO: 293168
  chr18:67955797-67955946
  hypo

SEQ ID NO: 447966 - DNA, 353 bp, Homo sapiens; identical to SEQ ID NO: 205037
  chr18:67956670-67957023
  hypo

SEQ ID NO: 447967 - DNA, 36 bp, Homo sapiens; identical to SEQ ID NO: 272225
  chr18:67957153-67957189
  hypo

SEQ ID NO: 447968 - DNA, 90 bp, Homo sapiens; identical to SEQ ID NO: 272226
  chr18:67985374-67985464
  hypo

SEQ ID NO: 447969 - DNA, 266 bp, Homo sapiens; identical to SEQ ID NO: 218569
  chr18:67991029-67991295
  hypo

SEQ ID NO: 447970 - DNA, 370 bp, Homo sapiens; identical to SEQ ID NO: 218570
  chr18:67991980-67992350
  hypo

SEQ ID NO: 447971 - DNA, 361 bp, Homo sapiens; identical to SEQ ID NO: 272229
  chr18:67992600-67992961
  hypo

SEQ ID NO: 447972 - DNA, 40 bp, Homo sapiens; identical to SEQ ID NO: 218572
  chr18:68042712-68042752
  hypo

SEQ ID NO: 447973 - DNA, 45 bp, Homo sapiens; identical to SEQ ID NO: 218573
  chr18:68053094-68053139
  hypo

SEQ ID NO: 447974 - DNA, 52 bp, Homo sapiens; identical to SEQ ID NO: 218574
  chr18:71844279-71844331
  hypo

SEQ ID NO: 447975 - DNA, 99 bp, Homo sapiens; identical to SEQ ID NO: 218575
  chr18:71844361-71844460
  hypo

SEQ ID NO: 447976 - DNA, 83 bp, Homo sapiens; identical to SEQ ID NO: 272233
  chr18:71847878-71847961
  hypo

SEQ ID NO: 447977 - DNA, 172 bp, Homo sapiens; identical to SEQ ID NO: 272234
  chr18:71867254-71867426
  hypo

SEQ ID NO: 447978 - DNA, 33 bp, Homo sapiens; identical to SEQ ID NO: 272235
  chr18:71874053-71874086
  hypo

SEQ ID NO: 447979 - DNA, 99 bp, Homo sapiens; identical to SEQ ID NO: 218576
  chr18:71879693-71879792
  hypo

SEQ ID NO: 447980 - DNA, 171 bp, Homo sapiens; identical to SEQ ID NO: 218577
  chr18:71889077-71889248
  hypo

SEQ ID NO: 447981 - DNA, 48 bp, Homo sapiens; identical to SEQ ID NO: 218578
  chr18:71904650-71904698
  hypo

SEQ ID NO: 447982 - DNA, 222 bp, Homo sapiens; identical to SEQ ID NO: 293176
  chr18:71958562-71958784
  hypo

SEQ ID NO: 447983 - DNA, 61 bp, Homo sapiens; identical to SEQ ID NO: 218579
  chr18:71983206-71983267
  hypo

SEQ ID NO: 447984 - DNA, 460 bp, Homo sapiens; identical to SEQ ID NO: 272240
  chr18:72177631-72178091
  hypo

SEQ ID NO: 447985 - DNA, 336 bp, Homo sapiens; identical to SEQ ID NO: 272241
  chr18:72189898-72190234
  hypo

SEQ ID NO: 447986 - DNA, 51 bp, Homo sapiens; identical to SEQ ID NO: 272243
  chr18:72239212-72239263
  hypo

SEQ ID NO: 447987 - DNA, 33 bp, Homo sapiens; identical to SEQ ID NO: 324309
  chr18:72335127-72335160
  hypo

SEQ ID NO: 447988 - DNA, 195 bp, Homo sapiens; identical to SEQ ID NO: 324310
  chr18:72335202-72335397
  hypo

SEQ ID NO: 447989 - DNA, 56 bp, Homo sapiens; identical to SEQ ID NO: 272245
  chr18:72342003-72342059
  hypo

SEQ ID NO: 447990 - DNA, 62 bp, Homo sapiens; identical to SEQ ID NO: 218582
  chr18:72344372-72344434
  hypo

SEQ ID NO: 447991 - DNA, 136 bp, Homo sapiens; identical to SEQ ID NO: 272248
  chr18:72378034-72378170
  hypo

SEQ ID NO: 447992 - DNA, 215 bp, Homo sapiens; identical to SEQ ID NO: 272249
  chr18:72543641-72543856
  hypo

SEQ ID NO: 447993 - DNA, 170 bp, Homo sapiens; identical to SEQ ID NO: 272250
  chr18:72568950-72569120
  hypo

SEQ ID NO: 447994 - DNA, 158 bp, Homo sapiens; identical to SEQ ID NO: 272251
  chr18:72604260-72604418
  hypo

SEQ ID NO: 447995 - DNA, 245 bp, Homo sapiens; identical to SEQ ID NO: 272252
  chr18:72611942-72612187
  hypo

SEQ ID NO: 447996 - DNA, 137 bp, Homo sapiens; identical to SEQ ID NO: 272253
  chr18:72617315-72617452
  hypo

SEQ ID NO: 447997 - DNA, 32 bp, Homo sapiens; identical to SEQ ID NO: 272256
  chr18:72670449-72670481
  hypo

SEQ ID NO: 447998 - DNA, 126 bp, Homo sapiens; identical to SEQ ID NO: 218584
  chr18:72741505-72741631
  hypo

SEQ ID NO: 447999 - DNA, 244 bp, Homo sapiens; identical to SEQ ID NO: 272259
  chr18:72777722-72777966
  hypo

SEQ ID NO: 448000 - DNA, 75 bp, Homo sapiens; identical to SEQ ID NO: 272260
  chr18:72778315-72778390
  hypo

SEQ ID NO: 448001 - DNA, 166 bp, Homo sapiens; identical to SEQ ID NO: 272261
  chr18:72819560-72819726
  hypo

SEQ ID NO: 448002 - DNA, 511 bp, Homo sapiens; identical to SEQ ID NO: 324329
  chr18:72844252-72844763
  hypo

SEQ ID NO: 448003 - DNA, 138 bp, Homo sapiens; identical to SEQ ID NO: 324330
  chr18:72844808-72844946
  hypo

SEQ ID NO: 448004 - DNA, 273 bp, Homo sapiens; identical to SEQ ID NO: 324331
  chr18:72895946-72896219
  hypo

SEQ ID NO: 448005 - DNA, 165 bp, Homo sapiens; identical to SEQ ID NO: 272264
  chr18:72914982-72915147
  hypo

SEQ ID NO: 448006 - DNA, 237 bp, Homo sapiens; identical to SEQ ID NO: 293181
  chr18:72921091-72921328
  hypo

SEQ ID NO: 448007 - DNA, 295 bp, Homo sapiens; identical to SEQ ID NO: 272265
  chr18:72956539-72956834
  hypo

SEQ ID NO: 448008 - DNA, 485 bp, Homo sapiens; identical to SEQ ID NO: 272266
  chr18:72960668-72961153
  hypo

SEQ ID NO: 448009 - DNA, 76 bp, Homo sapiens; identical to SEQ ID NO: 272267
  chr18:72972083-72972159
  hypo

SEQ ID NO: 448010 - DNA, 34 bp, Homo sapiens; identical to SEQ ID NO: 272268
  chr18:73282767-73282801
  hypo

SEQ ID NO: 448011 - DNA, 224 bp, Homo sapiens; identical to SEQ ID NO: 218589
  chr18:74062315-74062539
  hypo

SEQ ID NO: 448012 - DNA, 153 bp, Homo sapiens; identical to SEQ ID NO: 324339
  chr18:74062578-74062731
  hypo

SEQ ID NO: 448013 - DNA, 96 bp, Homo sapiens; identical to SEQ ID NO: 272270
  chr18:74065277-74065373
  hypo

SEQ ID NO: 448014 - DNA, 111 bp, Homo sapiens; identical to SEQ ID NO: 272273
  chr18:74069464-74069575
  hypo

SEQ ID NO: 448015 - DNA, 89 bp, Homo sapiens; identical to SEQ ID NO: 272275
  chr18:74074287-74074376
  hypo

SEQ ID NO: 448016 - DNA, 389 bp, Homo sapiens; identical to SEQ ID NO: 272276
  chr18:74082314-74082703
  hypo

SEQ ID NO: 448017 - DNA, 33 bp, Homo sapiens; identical to SEQ ID NO: 272277
  chr18:74082939-74082972
  hypo

SEQ ID NO: 448018 - DNA, 162 bp, Homo sapiens; identical to SEQ ID NO: 272279
  chr18:74089153-74089315
  hypo

SEQ ID NO: 448019 - DNA, 154 bp, Homo sapiens; identical to SEQ ID NO: 272281
  chr18:74093649-74093803
  hypo

SEQ ID NO: 448020 - DNA, 52 bp, Homo sapiens; identical to SEQ ID NO: 218595
  chr18:74094279-74094331
  hypo

SEQ ID NO: 448021 - DNA, 34 bp, Homo sapiens; identical to SEQ ID NO: 218597
  chr18:74113520-74113554
  hypo

SEQ ID NO: 448022 - DNA, 63 bp, Homo sapiens; identical to SEQ ID NO: 272286
  chr18:74116224-74116287
  hypo

SEQ ID NO: 448023 - DNA, 117 bp, Homo sapiens; identical to SEQ ID NO: 272287
  chr18:74118864-74118981
  hypo

SEQ ID NO: 448024 - DNA, 60 bp, Homo sapiens; identical to SEQ ID NO: 272288
  chr18:74119406-74119466
  hypo

SEQ ID NO: 448025 - DNA, 137 bp, Homo sapiens; identical to SEQ ID NO: 272290
  chr18:74128214-74128351
  hypo

SEQ ID NO: 448026 - DNA, 259 bp, Homo sapiens; identical to SEQ ID NO: 218601
  chr18:74133243-74133502
  hypo

SEQ ID NO: 448027 - DNA, 161 bp, Homo sapiens; identical to SEQ ID NO: 272294
  chr18:74135457-74135618
  hypo

SEQ ID NO: 448028 - DNA, 45 bp, Homo sapiens; identical to SEQ ID NO: 272295
  chr18:74136486-74136531
  hypo

SEQ ID NO: 448029 - DNA, 239 bp, Homo sapiens; identical to SEQ ID NO: 272296
  chr18:74141719-74141958
  hypo

SEQ ID NO: 448030 - DNA, 93 bp, Homo sapiens; identical to SEQ ID NO: 272297
  chr18:74143480-74143573
  hypo

SEQ ID NO: 448031 - DNA, 465 bp, Homo sapiens; identical to SEQ ID NO: 272298
  chr18:74143894-74144359
  hypo

SEQ ID NO: 448032 - DNA, 51 bp, Homo sapiens; identical to SEQ ID NO: 272300
  chr18:74147444-74147495
  hypo

SEQ ID NO: 448033 - DNA, 283 bp, Homo sapiens; identical to SEQ ID NO: 272302
  chr18:74149035-74149318
  hypo

SEQ ID NO: 448034 - DNA, 171 bp, Homo sapiens; identical to SEQ ID NO: 272303
  chr18:74149887-74150058
  hypo

SEQ ID NO: 448035 - DNA, 65 bp, Homo sapiens; identical to SEQ ID NO: 272305
  chr18:74156516-74156581
  hypo

SEQ ID NO: 448036 - DNA, 52 bp, Homo sapiens; identical to SEQ ID NO: 95126
  chr18:74172240-74172292
  hypo

SEQ ID NO: 448037 - DNA, 74 bp, Homo sapiens; identical to SEQ ID NO: 272315
  chr18:74196405-74196479
  hypo

SEQ ID NO: 448038 - DNA, 150 bp, Homo sapiens; identical to SEQ ID NO: 272316
  chr18:74260505-74260655
  hypo

SEQ ID NO: 448039 - DNA, 203 bp, Homo sapiens; identical to SEQ ID NO: 272317
  chr18:74275176-74275379
  hypo

SEQ ID NO: 448040 - DNA, 34 bp, Homo sapiens; identical to SEQ ID NO: 272318
  chr18:74299118-74299152
  hypo

SEQ ID NO: 448041 - DNA, 312 bp, Homo sapiens; identical to SEQ ID NO: 272319
  chr18:74301965-74302277
  hypo

SEQ ID NO: 448042 - DNA, 140 bp, Homo sapiens; identical to SEQ ID NO: 324397
  chr18:74399785-74399925
  hypo

SEQ ID NO: 448043 - DNA, 280 bp, Homo sapiens; identical to SEQ ID NO: 272325
  chr18:74420127-74420407
  hypo

SEQ ID NO: 448044 - DNA, 35 bp, Homo sapiens; identical to SEQ ID NO: 272326
  chr18:74420789-74420824
  hypo

SEQ ID NO: 448045 - DNA, 44 bp, Homo sapiens; identical to SEQ ID NO: 272327
  chr18:74424292-74424336
  hypo

SEQ ID NO: 448046 - DNA, 120 bp, Homo sapiens; identical to SEQ ID NO: 272329
  chr18:74443717-74443837
  hypo

SEQ ID NO: 448047 - DNA, 38 bp, Homo sapiens; identical to SEQ ID NO: 272330
  chr18:74471098-74471136
  hypo

SEQ ID NO: 448048 - DNA, 47 bp, Homo sapiens; identical to SEQ ID NO: 218617
  chr18:74500998-74501045
  hypo

SEQ ID NO: 448049 - DNA, 31 bp, Homo sapiens; identical to SEQ ID NO: 218618
  chr18:74501267-74501298
  hypo

SEQ ID NO: 448050 - DNA, 171 bp, Homo sapiens; identical to SEQ ID NO: 272335
  chr18:74586687-74586858
  hypo

SEQ ID NO: 448051 - DNA, 187 bp, Homo sapiens; identical to SEQ ID NO: 218620
  chr18:74592528-74592715
  hypo

SEQ ID NO: 448052 - DNA, 209 bp, Homo sapiens; identical to SEQ ID NO: 218621
  chr18:74625650-74625859
  hypo

SEQ ID NO: 448053 - DNA, 62 bp, Homo sapiens; identical to SEQ ID NO: 272338
  chr18:74627687-74627749
  hypo

SEQ ID NO: 448054 - DNA, 361 bp, Homo sapiens; identical to SEQ ID NO: 272339
  chr18:74631683-74632044
  hypo

SEQ ID NO: 448055 - DNA, 79 bp, Homo sapiens; identical to SEQ ID NO: 218623
  chr18:74633615-74633694
  hypo

SEQ ID NO: 448056 - DNA, 39 bp, Homo sapiens; identical to SEQ ID NO: 272341
  chr18:74680273-74680312
  hypo

SEQ ID NO: 448057 - DNA, 230 bp, Homo sapiens; identical to SEQ ID NO: 272342
  chr18:74691007-74691237
  hypo

SEQ ID NO: 448058 - DNA, 34 bp, Homo sapiens; identical to SEQ ID NO: 272344
  chr18:74697571-74697605
  hypo

SEQ ID NO: 448059 - DNA, 196 bp, Homo sapiens; identical to SEQ ID NO: 272345
  chr18:74720163-74720359
  hypo

SEQ ID NO: 448060 - DNA, 134 bp, Homo sapiens; identical to SEQ ID NO: 272346
  chr18:74720707-74720841
  hypo

SEQ ID NO: 448061 - DNA, 136 bp, Homo sapiens; identical to SEQ ID NO: 272348
  chr18:74723211-74723347
  hypo

SEQ ID NO: 448062 - DNA, 155 bp, Homo sapiens; identical to SEQ ID NO: 272349
  chr18:74726189-74726344
  hypo

SEQ ID NO: 448063 - DNA, 66 bp, Homo sapiens; identical to SEQ ID NO: 272350
  chr18:74726374-74726440
  hypo

SEQ ID NO: 448064 - DNA, 99 bp, Homo sapiens; identical to SEQ ID NO: 218625
  chr18:74729467-74729566
  hypo

SEQ ID NO: 448065 - DNA, 237 bp, Homo sapiens; identical to SEQ ID NO: 272353
  chr18:74731842-74732079
  hypo

SEQ ID NO: 448066 - DNA, 146 bp, Homo sapiens; identical to SEQ ID NO: 218626
  chr18:74733725-74733871
  hypo

SEQ ID NO: 448067 - DNA, 284 bp, Homo sapiens; identical to SEQ ID NO: 272355
  chr18:74734080-74734364
  hypo

SEQ ID NO: 448068 - DNA, 83 bp, Homo sapiens; identical to SEQ ID NO: 272359
  chr18:74761164-74761247
  hypo

SEQ ID NO: 448069 - DNA, 185 bp, Homo sapiens; identical to SEQ ID NO: 218630
  chr18:74763242-74763427
  hypo

SEQ ID NO: 448070 - DNA, 232 bp, Homo sapiens; identical to SEQ ID NO: 218633
  chr18:74782716-74782948
  hypo

SEQ ID NO: 448071 - DNA, 141 bp, Homo sapiens; identical to SEQ ID NO: 272364
  chr18:74794117-74794258
  hypo

SEQ ID NO: 448072 - DNA, 100 bp, Homo sapiens; identical to SEQ ID NO: 218634
  chr18:74805146-74805246
  hypo

SEQ ID NO: 448073 - DNA, 117 bp, Homo sapiens; identical to SEQ ID NO: 218635
  chr18:74806769-74806886
  hypo

SEQ ID NO: 448074 - DNA, 244 bp, Homo sapiens; identical to SEQ ID NO: 272368
  chr18:74815191-74815435
  hypo

SEQ ID NO: 448075 - DNA, 178 bp, Homo sapiens; identical to SEQ ID NO: 272369
  chr18:74822939-74823117
  hypo

SEQ ID NO: 448076 - DNA, 429 bp, Homo sapiens; identical to SEQ ID NO: 218636
  chr18:74832019-74832448
  hypo

SEQ ID NO: 448077 - DNA, 37 bp, Homo sapiens; identical to SEQ ID NO: 218637
  chr18:74841696-74841733
  hypo

SEQ ID NO: 448078 - DNA, 40 bp, Homo sapiens; identical to SEQ ID NO: 218638
  chr18:74847361-74847401
  hypo

SEQ ID NO: 448079 - DNA, 76 bp, Homo sapiens; identical to SEQ ID NO: 324449
  chr18:74867171-74867247
  hypo

SEQ ID NO: 448080 - DNA, 134 bp, Homo sapiens; identical to SEQ ID NO: 324450
  chr18:74877216-74877350
  hypo

SEQ ID NO: 448081 - DNA, 136 bp, Homo sapiens; identical to SEQ ID NO: 272375
  chr18:75087208-75087344
  hypo

SEQ ID NO: 448082 - DNA, 287 bp, Homo sapiens; identical to SEQ ID NO: 324452
  chr18:75088254-75088541
  hypo

SEQ ID NO: 448083 - DNA, 208 bp, Homo sapiens; identical to SEQ ID NO: 272377
  chr18:75120506-75120714
  hypo

SEQ ID NO: 448084 - DNA, 100 bp, Homo sapiens; identical to SEQ ID NO: 272378
  chr18:75214587-75214687
  hypo

SEQ ID NO: 448085 - DNA, 37 bp, Homo sapiens; identical to SEQ ID NO: 272382
  chr18:75361204-75361241
  hypo

SEQ ID NO: 448086 - DNA, 62 bp, Homo sapiens; identical to SEQ ID NO: 272383
  chr18:75571260-75571322
  hypo

SEQ ID NO: 448087 - DNA, 42 bp, Homo sapiens; identical to SEQ ID NO: 272384
  chr18:75845223-75845265
  hypo

SEQ ID NO: 448088 - DNA, 71 bp, Homo sapiens; identical to SEQ ID NO: 272386
  chr18:75957356-75957427
  hypo

SEQ ID NO: 448089 - DNA, 155 bp, Homo sapiens; identical to SEQ ID NO: 272393
  chr18:76252107-76252262
  hypo

SEQ ID NO: 448090 - DNA, 61 bp, Homo sapiens; identical to SEQ ID NO: 272396
  chr18:76437856-76437917
  hypo

SEQ ID NO: 448091 - DNA, 165 bp, Homo sapiens; identical to SEQ ID NO: 218651
  chr18:76477630-76477795
  hypo

SEQ ID NO: 448092 - DNA, 65 bp, Homo sapiens; identical to SEQ ID NO: 272400
  chr18:76491137-76491202
  hypo

SEQ ID NO: 448093 - DNA, 128 bp, Homo sapiens; identical to SEQ ID NO: 272401
  chr18:76491232-76491360
  hypo

SEQ ID NO: 448094 - DNA, 114 bp, Homo sapiens; identical to SEQ ID NO: 272403
  chr18:76531049-76531163
  hypo

SEQ ID NO: 448095 - DNA, 210 bp, Homo sapiens; identical to SEQ ID NO: 272405
  chr18:76546830-76547040
  hypo

SEQ ID NO: 448096 - DNA, 212 bp, Homo sapiens; identical to SEQ ID NO: 272409
  chr18:76660960-76661172
  hypo

SEQ ID NO: 448097 - DNA, 96 bp, Homo sapiens; identical to SEQ ID NO: 272411
  chr18:76689833-76689929
  hypo

SEQ ID NO: 448098 - DNA, 161 bp, Homo sapiens; identical to SEQ ID NO: 218660
  chr18:77050733-77050894
  hypo

SEQ ID NO: 448099 - DNA, 202 bp, Homo sapiens; identical to SEQ ID NO: 272416
  chr18:77089862-77090064
  hypo

SEQ ID NO: 448100 - DNA, 171 bp, Homo sapiens; identical to SEQ ID NO: 272418
  chr18:77127871-77128042
  hypo

SEQ ID NO: 448101 - DNA, 163 bp, Homo sapiens; identical to SEQ ID NO: 272419
  chr18:77138794-77138957
  hypo

SEQ ID NO: 448102 - DNA, 45 bp, Homo sapiens; identical to SEQ ID NO: 272420
  chr18:77143641-77143686
  hypo

SEQ ID NO: 448103 - DNA, 58 bp, Homo sapiens; identical to SEQ ID NO: 272421
  chr18:77145392-77145450
  hypo

SEQ ID NO: 448104 - DNA, 87 bp, Homo sapiens; identical to SEQ ID NO: 272422
  chr18:77161630-77161717
  hypo

SEQ ID NO: 448105 - DNA, 379 bp, Homo sapiens; identical to SEQ ID NO: 218663
  chr18:77166684-77167063
  hypo

SEQ ID NO: 448106 - DNA, 358 bp, Homo sapiens; identical to SEQ ID NO: 218664
  chr18:77174745-77175103
  hypo

SEQ ID NO: 448107 - DNA, 353 bp, Homo sapiens; identical to SEQ ID NO: 324505
  chr18:77181426-77181779
  hypo

SEQ ID NO: 448108 - DNA, 273 bp, Homo sapiens; identical to SEQ ID NO: 272426
  chr18:77183185-77183458
  hypo

SEQ ID NO: 448109 - DNA, 268 bp, Homo sapiens; identical to SEQ ID NO: 272427
  chr18:77185306-77185574
  hypo

SEQ ID NO: 448110 - DNA, 56 bp, Homo sapiens; identical to SEQ ID NO: 324508
  chr18:77186375-77186431
  hypo

SEQ ID NO: 448111 - DNA, 53 bp, Homo sapiens; identical to SEQ ID NO: 324509
  chr18:77186466-77186519
  hypo

SEQ ID NO: 448112 - DNA, 200 bp, Homo sapiens; identical to SEQ ID NO: 272429
  chr18:77192931-77193131
  hypo

SEQ ID NO: 448113 - DNA, 356 bp, Homo sapiens; identical to SEQ ID NO: 293196
  chr18:77193428-77193784
  hypo

SEQ ID NO: 448114 - DNA, 441 bp, Homo sapiens; identical to SEQ ID NO: 272430
  chr18:77194172-77194613
  hypo

SEQ ID NO: 448115 - DNA, 116 bp, Homo sapiens; identical to SEQ ID NO: 218667
  chr18:77194820-77194936
  hypo

SEQ ID NO: 448116 - DNA, 169 bp, Homo sapiens; identical to SEQ ID NO: 218668
  chr18:77194978-77195147
  hypo

SEQ ID NO: 448117 - DNA, 1761 bp, Homo sapiens; identical to SEQ ID NO: 218669
  chr18:77196527-77198288
  hypo

SEQ ID NO: 448118 - DNA, 1042 bp, Homo sapiens; identical to SEQ ID NO: 218670
  chr18:77199644-77200686
  hypo

SEQ ID NO: 448119 - DNA, 36 bp, Homo sapiens; identical to SEQ ID NO: 272435
  chr18:77201348-77201384
  hypo

SEQ ID NO: 448120 - DNA, 158 bp, Homo sapiens; identical to SEQ ID NO: 324519
  chr18:77201765-77201923
  hypo

SEQ ID NO: 448121 - DNA, 1262 bp, Homo sapiens; identical to SEQ ID NO: 218671
  chr18:77204185-77205447
  hypo

SEQ ID NO: 448122 - DNA, 157 bp, Homo sapiens; identical to SEQ ID NO: 272438
  chr18:77208090-77208247
  hypo

SEQ ID NO: 448123 - DNA, 139 bp, Homo sapiens; identical to SEQ ID NO: 272439
  chr18:77208867-77209006
  hypo

SEQ ID NO: 448124 - DNA, 42 bp, Homo sapiens; identical to SEQ ID NO: 272440
  chr18:77209431-77209473
  hypo

SEQ ID NO: 448125 - DNA, 927 bp, Homo sapiens; identical to SEQ ID NO: 218672
  chr18:77210976-77211903
  hypo

SEQ ID NO: 448126 - DNA, 451 bp, Homo sapiens; identical to SEQ ID NO: 272442
  chr18:77212145-77212596
  hypo

SEQ ID NO: 448127 - DNA, 458 bp, Homo sapiens; identical to SEQ ID NO: 218674
  chr18:77212957-77213415
  hypo

SEQ ID NO: 448128 - DNA, 45 bp, Homo sapiens; identical to SEQ ID NO: 272444
  chr18:77213652-77213697
  hypo

SEQ ID NO: 448129 - DNA, 175 bp, Homo sapiens; identical to SEQ ID NO: 218675
  chr18:77215331-77215506
  hypo

SEQ ID NO: 448130 - DNA, 253 bp, Homo sapiens; identical to SEQ ID NO: 324529
  chr18:77235786-77236039
  hypo

SEQ ID NO: 448131 - DNA, 358 bp, Homo sapiens; identical to SEQ ID NO: 324530
  chr18:77246872-77247230
  hypo

SEQ ID NO: 448132 - DNA, 506 bp, Homo sapiens; identical to SEQ ID NO: 272448
  chr18:77251269-77251775
  hypo

SEQ ID NO: 448133 - DNA, 88 bp, Homo sapiens; identical to SEQ ID NO: 218677
  chr18:77255660-77255748
  hypo

SEQ ID NO: 448134 - DNA, 322 bp, Homo sapiens; identical to SEQ ID NO: 218678
  chr18:77255784-77256106
  hypo

SEQ ID NO: 448135 - DNA, 108 bp, Homo sapiens; identical to SEQ ID NO: 272450
  chr18:77263494-77263602
  hypo

SEQ ID NO: 448136 - DNA, 60 bp, Homo sapiens; identical to SEQ ID NO: 272451
  chr18:77269734-77269794
  hypo

SEQ ID NO: 448137 - DNA, 249 bp, Homo sapiens; identical to SEQ ID NO: 272454
  chr18:77276519-77276768
  hypo

SEQ ID NO: 448138 - DNA, 172 bp, Homo sapiens; identical to SEQ ID NO: 272455
  chr18:77284566-77284738
  hypo

SEQ ID NO: 448139 - DNA, 123 bp, Homo sapiens; identical to SEQ ID NO: 324540
  chr18:77288114-77288237
  hypo

SEQ ID NO: 448140 - DNA, 139 bp, Homo sapiens; identical to SEQ ID NO: 218681
  chr18:77288439-77288578
  hypo

SEQ ID NO: 448141 - DNA, 189 bp, Homo sapiens; identical to SEQ ID NO: 272457
  chr18:77304066-77304255
  hypo

SEQ ID NO: 448142 - DNA, 133 bp, Homo sapiens
  chr18:77307810-77307943
  hypo
tggtgtggctgcagctgtgtttggagcatgcaggagaagcccctccagatgcccacgagcccccaccactttggtgcccgtcctgccagccgtgctgcgggcgccctgggctcgctcttgtcaccccatcccc

SEQ ID NO: 448143 - DNA, 216 bp, Homo sapiens; identical to SEQ ID NO: 324545
  chr18:77309734-77309950
  hypo

SEQ ID NO: 448144 - DNA, 577 bp, Homo sapiens; identical to SEQ ID NO: 324546
  chr18:77312927-77313504
  hypo

SEQ ID NO: 448145 - DNA, 331 bp, Homo sapiens; identical to SEQ ID NO: 272462
  chr18:77314336-77314667
  hypo

SEQ ID NO: 448146 - DNA, 213 bp, Homo sapiens; identical to SEQ ID NO: 218686
  chr18:77315293-77315506
  hypo

SEQ ID NO: 448147 - DNA, 89 bp, Homo sapiens; identical to SEQ ID NO: 218687
  chr18:77315538-77315627
  hypo

SEQ ID NO: 448148 - DNA, 41 bp, Homo sapiens; identical to SEQ ID NO: 218688
  chr18:77315948-77315989
  hypo

SEQ ID NO: 448149 - DNA, 697 bp, Homo sapiens; identical to SEQ ID NO: 272465
  chr18:77317749-77318446
  hypo

SEQ ID NO: 448150 - DNA, 136 bp, Homo sapiens; identical to SEQ ID NO: 272466
  chr18:77319168-77319304
  hypo

SEQ ID NO: 448151 - DNA, 61 bp, Homo sapiens; identical to SEQ ID NO: 218689
  chr18:77320767-77320828
  hypo

SEQ ID NO: 448152 - DNA, 591 bp, Homo sapiens; identical to SEQ ID NO: 272472
  chr18:77340201-77340792
  hypo

SEQ ID NO: 448153 - DNA, 150 bp, Homo sapiens; identical to SEQ ID NO: 272473
  chr18:77347862-77348012
  hypo

SEQ ID NO: 448154 - DNA, 84 bp, Homo sapiens; identical to SEQ ID NO: 218693
  chr18:77356569-77356653
  hypo

SEQ ID NO: 448155 - DNA, 74 bp, Homo sapiens; identical to SEQ ID NO: 218694
  chr18:77356683-77356757
  hypo

SEQ ID NO: 448156 - DNA, 63 bp, Homo sapiens; identical to SEQ ID NO: 324565
  chr18:77365607-77365670
  hypo

SEQ ID NO: 448157 - DNA, 89 bp, Homo sapiens; identical to SEQ ID NO: 272479
  chr18:77366225-77366314
  hypo

SEQ ID NO: 448158 - DNA, 67 bp, Homo sapiens; identical to SEQ ID NO: 272480
  chr18:77368583-77368650
  hypo

SEQ ID NO: 448159 - DNA, 65 bp, Homo sapiens; identical to SEQ ID NO: 272481
  chr18:77375217-77375282
  hypo

SEQ ID NO: 448160 - DNA, 159 bp, Homo sapiens; identical to SEQ ID NO: 272482
  chr18:77382549-77382708
  hypo

SEQ ID NO: 448161 - DNA, 103 bp, Homo sapiens; identical to SEQ ID NO: 272483
  chr18:77390502-77390605
  hypo

SEQ ID NO: 448162 - DNA, 204 bp, Homo sapiens; identical to SEQ ID NO: 324571
  chr18:77410198-77410402
  hypo

SEQ ID NO: 448163 - DNA, 246 bp, Homo sapiens; identical to SEQ ID NO: 272485
  chr18:77438002-77438248
  hypo

SEQ ID NO: 448164 - DNA, 83 bp, Homo sapiens; identical to SEQ ID NO: 218697
  chr18:77457661-77457744
  hypo

SEQ ID NO: 448165 - DNA, 316 bp, Homo sapiens; identical to SEQ ID NO: 218698
  chr18:77463264-77463580
  hypo

SEQ ID NO: 448166 - DNA, 81 bp, Homo sapiens; identical to SEQ ID NO: 272490
  chr18:77479162-77479243
  hypo

SEQ ID NO: 448167 - DNA, 260 bp, Homo sapiens; identical to SEQ ID NO: 272491
  chr18:77485494-77485754
  hypo

SEQ ID NO: 448168 - DNA, 39 bp, Homo sapiens; identical to SEQ ID NO: 272492
  chr18:77493027-77493066
  hypo

SEQ ID NO: 448169 - DNA, 441 bp, Homo sapiens; identical to SEQ ID NO: 272493
  chr18:77493433-77493874
  hypo

SEQ ID NO: 448170 - DNA, 212 bp, Homo sapiens; identical to SEQ ID NO: 272495
  chr18:77503023-77503235
  hypo

SEQ ID NO: 448171 - DNA, 96 bp, Homo sapiens; identical to SEQ ID NO: 272496
  chr18:77503529-77503625
  hypo

SEQ ID NO: 448172 - DNA, 245 bp, Homo sapiens; identical to SEQ ID NO: 272499
  chr18:77511471-77511716
  hypo

SEQ ID NO: 448173 - DNA, 151 bp, Homo sapiens; identical to SEQ ID NO: 272506
  chr18:77561347-77561498
  hypo

SEQ ID NO: 448174 - DNA, 254 bp, Homo sapiens; identical to SEQ ID NO: 272507
  chr18:77562267-77562521
  hypo

SEQ ID NO: 448175 - DNA, 39 bp, Homo sapiens; identical to SEQ ID NO: 272510
  chr18:77615733-77615772
  hypo

SEQ ID NO: 448176 - DNA, 142 bp, Homo sapiens; identical to SEQ ID NO: 218709
  chr18:77627461-77627603
  hypo

SEQ ID NO: 448177 - DNA, 324 bp, Homo sapiens; identical to SEQ ID NO: 324604
  chr18:77629025-77629349
  hypo

SEQ ID NO: 448178 - DNA, 133 bp, Homo sapiens; identical to SEQ ID NO: 272515
  chr18:77631595-77631728
  hypo

SEQ ID NO: 448179 - DNA, 367 bp, Homo sapiens; identical to SEQ ID NO: 218712
  chr18:77638243-77638610
  hypo

SEQ ID NO: 448180 - DNA, 230 bp, Homo sapiens; identical to SEQ ID NO: 272519
  chr18:77643802-77644032
  hypo

SEQ ID NO: 448181 - DNA, 536 bp, Homo sapiens; identical to SEQ ID NO: 324613
  chr18:77664461-77664997
  hypo

SEQ ID NO: 448182 - DNA, 65 bp, Homo sapiens; identical to SEQ ID NO: 324614
  chr18:77665033-77665098
  hypo

SEQ ID NO: 448183 - DNA, 278 bp, Homo sapiens; identical to SEQ ID NO: 272522
  chr18:77675215-77675493
  hypo

SEQ ID NO: 448184 - DNA, 130 bp, Homo sapiens; identical to SEQ ID NO: 272523
  chr18:77685460-77685590
  hypo

SEQ ID NO: 448185 - DNA, 158 bp, Homo sapiens; identical to SEQ ID NO: 205049
  chr18:77710773-77710931
  hypo

SEQ ID NO: 448186 - DNA, 35 bp, Homo sapiens; identical to SEQ ID NO: 225692
  chr18:77712073-77712108
  hypo

SEQ ID NO: 448187 - DNA, 46 bp, Homo sapiens; identical to SEQ ID NO: 272525
  chr18:77729387-77729433
  hypo

SEQ ID NO: 448188 - DNA, 61 bp, Homo sapiens; identical to SEQ ID NO: 272526
  chr18:77729463-77729524
  hypo

SEQ ID NO: 448189 - DNA, 55 bp, Homo sapiens; identical to SEQ ID NO: 272527
  chr18:77740912-77740967
  hypo

SEQ ID NO: 448190 - DNA, 175 bp, Homo sapiens; identical to SEQ ID NO: 272528
  chr18:77753637-77753812
  hypo

SEQ ID NO: 448191 - DNA, 92 bp, Homo sapiens; identical to SEQ ID NO: 272529
  chr18:77772123-77772215
  hypo

SEQ ID NO: 448192 - DNA, 135 bp, Homo sapiens; identical to SEQ ID NO: 225693
  chr18:77794468-77794603
  hypo

SEQ ID NO: 448193 - DNA, 165 bp, Homo sapiens; identical to SEQ ID NO: 272530
  chr18:77804217-77804382
  hypo

SEQ ID NO: 448194 - DNA, 381 bp, Homo sapiens; identical to SEQ ID NO: 272531
  chr18:77804875-77805256
  hypo

SEQ ID NO: 448195 - DNA, 93 bp, Homo sapiens; identical to SEQ ID NO: 272532
  chr18:77805635-77805728
  hypo

SEQ ID NO: 448196 - DNA, 73 bp, Homo sapiens; identical to SEQ ID NO: 272534
  chr18:77828030-77828103
  hypo

SEQ ID NO: 448197 - DNA, 31 bp, Homo sapiens; identical to SEQ ID NO: 205051
  chr18:77867028-77867059
  hypo

SEQ ID NO: 448198 - DNA, 38 bp, Homo sapiens; identical to SEQ ID NO: 272535
  chr18:77913923-77913961
  hypo

SEQ ID NO: 448199 - DNA, 168 bp, Homo sapiens; identical to SEQ ID NO: 218717
  chr18:77939058-77939226
  hypo

SEQ ID NO: 448200 - DNA, 193 bp, Homo sapiens; identical to SEQ ID NO: 218718
  chr18:77942205-77942398
  hypo

SEQ ID NO: 448201 - DNA, 88 bp, Homo sapiens; identical to SEQ ID NO: 272539
  chr18:77957216-77957304
  hypo

SEQ ID NO: 448202 - DNA, 185 bp, Homo sapiens; identical to SEQ ID NO: 272540
  chr18:77988259-77988444
  hypo

SEQ ID NO: 448203 - DNA, 167 bp, Homo sapiens; identical to SEQ ID NO: 272542
  chr19:327875-328042
  hypo

SEQ ID NO: 448204 - DNA, 34 bp, Homo sapiens; identical to SEQ ID NO: 272543
  chr19:369328-369362
  hypo

SEQ ID NO: 448205 - DNA, 269 bp, Homo sapiens; identical to SEQ ID NO: 272544
  chr19:370622-370891
  hypo

SEQ ID NO: 448206 - DNA, 386 bp, Homo sapiens; identical to SEQ ID NO: 324642
  chr19:401090-401476
  hypo

SEQ ID NO: 448207 - DNA, 159 bp, Homo sapiens; identical to SEQ ID NO: 272547
  chr19:401847-402006
  hypo

SEQ ID NO: 448208 - DNA, 294 bp, Homo sapiens; identical to SEQ ID NO: 272550
  chr19:416971-417265
  hypo

SEQ ID NO: 448209 - DNA, 266 bp, Homo sapiens; identical to SEQ ID NO: 272551
  chr19:417295-417561
  hypo

SEQ ID NO: 448210 - DNA, 876 bp, Homo sapiens; identical to SEQ ID NO: 272553
  chr19:424489-425365
  hypo

SEQ ID NO: 448211 - DNA, 37 bp, Homo sapiens; identical to SEQ ID NO: 218723
  chr19:434176-434213
  hypo

SEQ ID NO: 448212 - DNA, 36 bp, Homo sapiens; identical to SEQ ID NO: 272555
  chr19:434753-434789
  hypo

SEQ ID NO: 448213 - DNA, 278 bp, Homo sapiens; identical to SEQ ID NO: 272556
  chr19:435182-435460
  hypo

SEQ ID NO: 448214 - DNA, 89 bp, Homo sapiens; identical to SEQ ID NO: 324653
  chr19:436223-436312
  hypo

SEQ ID NO: 448215 - DNA, 268 bp, Homo sapiens; identical to SEQ ID NO: 324654
  chr19:436346-436614
  hypo

SEQ ID NO: 448216 - DNA, 48 bp, Homo sapiens; identical to SEQ ID NO: 324655
  chr19:436644-436692
  hypo

SEQ ID NO: 448217 - DNA, 34 bp, Homo sapiens; identical to SEQ ID NO: 272558
  chr19:449972-450006
  hypo

SEQ ID NO: 448218 - DNA, 220 bp, Homo sapiens; identical to SEQ ID NO: 272559
  chr19:450886-451106
  hypo

SEQ ID NO: 448219 - DNA, 509 bp, Homo sapiens; identical to SEQ ID NO: 218724
  chr19:453563-454072
  hypo

SEQ ID NO: 448220 - DNA, 355 bp, Homo sapiens; identical to SEQ ID NO: 272561
  chr19:455241-455596
  hypo

SEQ ID NO: 448221 - DNA, 120 bp, Homo sapiens; identical to SEQ ID NO: 272562
  chr19:477567-477687
  hypo

SEQ ID NO: 448222 - DNA, 33 bp, Homo sapiens; identical to SEQ ID NO: 272563
  chr19:477807-477840
  hypo

SEQ ID NO: 448223 - DNA, 34 bp, Homo sapiens; identical to SEQ ID NO: 272564
  chr19:484683-484717
  hypo

SEQ ID NO: 448224 - DNA, 116 bp, Homo sapiens; identical to SEQ ID NO: 272566
  chr19:487188-487304
  hypo

SEQ ID NO: 448225 - DNA, 41 bp, Homo sapiens; identical to SEQ ID NO: 205062
  chr19:507106-507147
  hypo

SEQ ID NO: 448226 - DNA, 217 bp, Homo sapiens; identical to SEQ ID NO: 272568
  chr19:529761-529978
  hypo

SEQ ID NO: 448227 - DNA, 81 bp, Homo sapiens; identical to SEQ ID NO: 218727
  chr19:536230-536311
  hypo

SEQ ID NO: 448228 - DNA, 82 bp, Homo sapiens; identical to SEQ ID NO: 272571
  chr19:540964-541046
  hypo

SEQ ID NO: 448229 - DNA, 344 bp, Homo sapiens; identical to SEQ ID NO: 272572
  chr19:541697-542041
  hypo

SEQ ID NO: 448230 - DNA, 387 bp, Homo sapiens; identical to SEQ ID NO: 272573
  chr19:542336-542723
  hypo

SEQ ID NO: 448231 - DNA, 39 bp, Homo sapiens; identical to SEQ ID NO: 272574
  chr19:546049-546088
  hypo

SEQ ID NO: 448232 - DNA, 45 bp, Homo sapiens; identical to SEQ ID NO: 272577
  chr19:559344-559389
  hypo

SEQ ID NO: 448233 - DNA, 102 bp, Homo sapiens; identical to SEQ ID NO: 324676
  chr19:559629-559731
  hypo

SEQ ID NO: 448234 - DNA, 121 bp, Homo sapiens; identical to SEQ ID NO: 324677
  chr19:559808-559929
  hypo

SEQ ID NO: 448235 - DNA, 37 bp, Homo sapiens; identical to SEQ ID NO: 272579
  chr19:561123-561160
  hypo

SEQ ID NO: 448236 - DNA, 59 bp, Homo sapiens; identical to SEQ ID NO: 272580
  chr19:562309-562368
  hypo

SEQ ID NO: 448237 - DNA, 126 bp, Homo sapiens; identical to SEQ ID NO: 272582
  chr19:585310-585436
  hypo

SEQ ID NO: 448238 - DNA, 180 bp, Homo sapiens; identical to SEQ ID NO: 324682
  chr19:592198-592378
  hypo

SEQ ID NO: 448239 - DNA, 145 bp, Homo sapiens; identical to SEQ ID NO: 272584
  chr19:600909-601054
  hypo

SEQ ID NO: 448240 - DNA, 407 bp, Homo sapiens
  chr19:618455-618862
  hypo
gagcggcacccacgccgtccggagacgcccacctgtagcagtgcagggcggtgagcatcatgtgggaggagtccagcgagtggatgaagttgggcgggaagccgttcttctgcttacgtgtgttgggctttctgaggacggaacaggtgccggtgggggcggcccagggacacccctaactggccgctgtctccaccgtggctgctctccagacccccggccaggccccagcccgggccccccactcaccggctgatgtctccgttgtgggtgtaggtgatgctctgaattccacctcctatttgctaaaaaggggaaggggccggtgagtcccacccgaggcccagcacggtggtggtacattgaggtggtggtacactggggtagtggcacgctaggatggtggc

SEQ ID NO: 448241 - DNA, 620 bp, Homo sapiens; identical to SEQ ID NO: 218734
  chr19:619067-619687
  hypo

SEQ ID NO: 448242 - DNA, 63 bp, Homo sapiens; identical to SEQ ID NO: 218735
  chr19:623406-623469
  hypo

SEQ ID NO: 448243 - DNA, 218 bp, Homo sapiens; identical to SEQ ID NO: 324691
  chr19:624025-624243
  hypo

SEQ ID NO: 448244 - DNA, 76 bp, Homo sapiens; identical to SEQ ID NO: 324693
  chr19:634388-634464
  hypo

SEQ ID NO: 448245 - DNA, 73 bp, Homo sapiens; identical to SEQ ID NO: 324694
  chr19:635380-635453
  hypo

SEQ ID NO: 448246 - DNA, 71 bp, Homo sapiens; identical to SEQ ID NO: 412422
  chr19:638277-638348
  hypo

SEQ ID NO: 448247 - DNA, 237 bp, Homo sapiens; identical to SEQ ID NO: 293222
  chr19:639660-639897
  hypo

SEQ ID NO: 448248 - DNA, 31 bp, Homo sapiens; identical to SEQ ID NO: 293223
  chr19:640138-640169
  hypo

SEQ ID NO: 448249 - DNA, 298 bp, Homo sapiens; identical to SEQ ID NO: 95427
  chr19:647140-647438
  hypo

SEQ ID NO: 448250 - DNA, 52 bp, Homo sapiens; identical to SEQ ID NO: 218740
  chr19:647728-647780
  hypo

SEQ ID NO: 448251 - DNA, 130 bp, Homo sapiens; identical to SEQ ID NO: 218741
  chr19:651271-651401
  hypo

SEQ ID NO: 448252 - DNA, 132 bp, Homo sapiens; identical to SEQ ID NO: 293228
  chr19:680400-680532
  hypo

SEQ ID NO: 448253 - DNA, 458 bp, Homo sapiens; identical to SEQ ID NO: 324705
  chr19:688902-689360
  hypo

SEQ ID NO: 448254 - DNA, 172 bp, Homo sapiens; identical to SEQ ID NO: 218742
  chr19:731146-731318
  hypo

SEQ ID NO: 448255 - DNA, 37 bp, Homo sapiens; identical to SEQ ID NO: 218744
  chr19:737032-737069
  hypo

SEQ ID NO: 448256 - DNA, 41 bp, Homo sapiens; identical to SEQ ID NO: 272605
  chr19:741879-741920
  hypo

SEQ ID NO: 448257 - DNA, 41 bp, Homo sapiens; identical to SEQ ID NO: 272606
  chr19:741980-742021
  hypo

SEQ ID NO: 448258 - DNA, 277 bp, Homo sapiens; identical to SEQ ID NO: 272607
  chr19:746555-746832
  hypo

SEQ ID NO: 448259 - DNA, 90 bp, Homo sapiens; identical to SEQ ID NO: 218745
  chr19:748210-748300
  hypo

SEQ ID NO: 448260 - DNA, 33 bp, Homo sapiens; identical to SEQ ID NO: 272610
  chr19:754570-754603
  hypo

SEQ ID NO: 448261 - DNA, 94 bp, Homo sapiens; identical to SEQ ID NO: 218746
  chr19:758091-758185
  hypo

SEQ ID NO: 448262 - DNA, 56 bp, Homo sapiens; identical to SEQ ID NO: 272612
  chr19:762948-763004
  hypo

SEQ ID NO: 448263 - DNA, 85 bp, Homo sapiens; identical to SEQ ID NO: 272613
  chr19:776817-776902
  hypo

SEQ ID NO: 448264 - DNA, 62 bp, Homo sapiens; identical to SEQ ID NO: 272615
  chr19:807308-807370
  hypo

SEQ ID NO: 448265 - DNA, 319 bp, Homo sapiens; identical to SEQ ID NO: 272616
  chr19:813011-813330
  hypo

SEQ ID NO: 448266 - DNA, 311 bp, Homo sapiens; identical to SEQ ID NO: 324725
  chr19:868909-869220
  hypo

SEQ ID NO: 448267 - DNA, 71 bp, Homo sapiens; identical to SEQ ID NO: 218751
  chr19:869266-869337
  hypo

SEQ ID NO: 448268 - DNA, 96 bp, Homo sapiens; identical to SEQ ID NO: 272620
  chr19:869627-869723
  hypo

SEQ ID NO: 448269 - DNA, 180 bp, Homo sapiens; identical to SEQ ID NO: 218752
  chr19:874508-874688
  hypo

SEQ ID NO: 448270 - DNA, 92 bp, Homo sapiens; identical to SEQ ID NO: 272624
  chr19:882615-882707
  hypo

SEQ ID NO: 448271 - DNA, 197 bp, Homo sapiens
  chr19:884855-885052
  hypo
gcccccgagggcaggcccagggcctccgcagccggcgggagactcacccacgggggagatctgctggaagatgttgttcacggggagtccctccttgcgcagggaccagcactccacgatgctgctggtctggctggacgcgcacaaaagcacctgcgggggaggtgggggtgagggctgacccggcactgctgtgg

SEQ ID NO: 448272 - DNA, 262 bp, Homo sapiens
  chr19:885112-885374
  hypo
gtctcttcagccacgcctgcccctcgggccctcctggattccagcccaggcctgtccccagagcccaacatccactcacaggaacgcaaatgtccccggatggtgccctcccacagggacagcaaagggacacagggaaccaagtcaggggcttcaaggagtttggggcgttactgattcctaattacaacaggaatccaggcgacctggtgtggtcggctcaacagtggcccccagaacatcccatcctcagccctaggac

SEQ ID NO: 448273 - DNA, 508 bp, Homo sapiens; identical to SEQ ID NO: 272627
  chr19:898612-899120
  hypo

SEQ ID NO: 448274 - DNA, 33 bp, Homo sapiens; identical to SEQ ID NO: 272630
  chr19:927379-927412
  hypo

SEQ ID NO: 448275 - DNA, 50 bp, Homo sapiens; identical to SEQ ID NO: 272631
  chr19:927524-927574
  hypo

SEQ ID NO: 448276 - DNA, 329 bp, Homo sapiens; identical to SEQ ID NO: 218760
  chr19:932112-932441
  hypo

SEQ ID NO: 448277 - DNA, 71 bp, Homo sapiens; identical to SEQ ID NO: 218761
  chr19:932471-932542
  hypo

SEQ ID NO: 448278 - DNA, 587 bp, Homo sapiens; identical to SEQ ID NO: 272634
  chr19:938279-938866
  hypo

SEQ ID NO: 448279 - DNA, 228 bp, Homo sapiens; identical to SEQ ID NO: 293236
  chr19:942807-943035
  hypo

SEQ ID NO: 448280 - DNA, 197 bp, Homo sapiens; identical to SEQ ID NO: 218765
  chr19:944444-944641
  hypo

SEQ ID NO: 448281 - DNA, 77 bp, Homo sapiens; identical to SEQ ID NO: 218766
  chr19:944821-944898
  hypo

SEQ ID NO: 448282 - DNA, 132 bp, Homo sapiens; identical to SEQ ID NO: 272640
  chr19:945357-945489
  hypo

SEQ ID NO: 448283 - DNA, 72 bp, Homo sapiens
  chr19:946175-946247
  hypo
gtcactgcctgggggaggagaacactgggtatttcatttttatttttttgttttttttacttttactttttc

SEQ ID NO: 448284 - DNA, 85 bp, Homo sapiens; identical to SEQ ID NO: 272645
  chr19:959193-959278
  hypo

SEQ ID NO: 448285 - DNA, 69 bp, Homo sapiens; identical to SEQ ID NO: 324755
  chr19:959518-959587
  hypo

SEQ ID NO: 448286 - DNA, 41 bp, Homo sapiens; identical to SEQ ID NO: 324756
  chr19:959802-959843
  hypo

SEQ ID NO: 448287 - DNA, 48 bp, Homo sapiens; identical to SEQ ID NO: 272647
  chr19:962810-962858
  hypo

SEQ ID NO: 448288 - DNA, 313 bp, Homo sapiens; identical to SEQ ID NO: 272648
  chr19:962888-963201
  hypo

SEQ ID NO: 448289 - DNA, 219 bp, Homo sapiens; identical to SEQ ID NO: 272649
  chr19:966707-966926
  hypo

SEQ ID NO: 448290 - DNA, 257 bp, Homo sapiens; identical to SEQ ID NO: 272650
  chr19:968535-968792
  hypo

SEQ ID NO: 448291 - DNA, 81 bp, Homo sapiens; identical to SEQ ID NO: 218768
  chr19:994442-994523
  hypo

SEQ ID NO: 448292 - DNA, 160 bp, Homo sapiens; identical to SEQ ID NO: 293239
  chr19:1000337-1000497
  hypo

SEQ ID NO: 448293 - DNA, 370 bp, Homo sapiens; identical to SEQ ID NO: 293240
  chr19:1000630-1001000
  hypo

SEQ ID NO: 448294 - DNA, 52 bp, Homo sapiens; identical to SEQ ID NO: 272653
  chr19:1004379-1004431
  hypo

SEQ ID NO: 448295 - DNA, 57 bp, Homo sapiens; identical to SEQ ID NO: 272654
  chr19:1004461-1004518
  hypo

SEQ ID NO: 448296 - DNA, 401 bp, Homo sapiens; identical to SEQ ID NO: 324768
  chr19:1007203-1007604
  hypo

SEQ ID NO: 448297 - DNA, 243 bp, Homo sapiens; identical to SEQ ID NO: 324769
  chr19:1007665-1007908
  hypo

SEQ ID NO: 448298 - DNA, 360 bp, Homo sapiens; identical to SEQ ID NO: 324770
  chr19:1007941-1008301
  hypo

SEQ ID NO: 448299 - DNA, 370 bp, Homo sapiens; identical to SEQ ID NO: 272657
  chr19:1009749-1010119
  hypo

SEQ ID NO: 448300 - DNA, 173 bp, Homo sapiens; identical to SEQ ID NO: 272658
  chr19:1010992-1011165
  hypo

SEQ ID NO: 448301 - DNA, 123 bp, Homo sapiens; identical to SEQ ID NO: 218773
  chr19:1032230-1032353
  hypo

SEQ ID NO: 448302 - DNA, 113 bp, Homo sapiens; identical to SEQ ID NO: 218774
  chr19:1032383-1032496
  hypo

SEQ ID NO: 448303 - DNA, 78 bp, Homo sapiens; identical to SEQ ID NO: 272662
  chr19:1033554-1033632
  hypo

SEQ ID NO: 448304 - DNA, 35 bp, Homo sapiens; identical to SEQ ID NO: 218775
  chr19:1035214-1035249
  hypo

SEQ ID NO: 448305 - DNA, 257 bp, Homo sapiens; identical to SEQ ID NO: 218776
  chr19:1047460-1047717
  hypo

SEQ ID NO: 448306 - DNA, 89 bp, Homo sapiens; identical to SEQ ID NO: 218777
  chr19:1047747-1047836
  hypo

SEQ ID NO: 448307 - DNA, 212 bp, Homo sapiens; identical to SEQ ID NO: 272667
  chr19:1050963-1051175
  hypo

SEQ ID NO: 448308 - DNA, 261 bp, Homo sapiens; identical to SEQ ID NO: 272669
  chr19:1055085-1055346
  hypo

SEQ ID NO: 448309 - DNA, 162 bp, Homo sapiens; identical to SEQ ID NO: 225704
  chr19:1071620-1071782
  hypo

SEQ ID NO: 448310 - DNA, 480 bp, Homo sapiens; identical to SEQ ID NO: 272670
  chr19:1077669-1078149
  hypo

SEQ ID NO: 448311 - DNA, 35 bp, Homo sapiens; identical to SEQ ID NO: 324787
  chr19:1082938-1082973
  hypo

SEQ ID NO: 448312 - DNA, 305 bp, Homo sapiens; identical to SEQ ID NO: 324788
  chr19:1083009-1083314
  hypo

SEQ ID NO: 448313 - DNA, 67 bp, Homo sapiens; identical to SEQ ID NO: 272673
  chr19:1084544-1084611
  hypo

SEQ ID NO: 448314 - DNA, 43 bp, Homo sapiens; identical to SEQ ID NO: 272674
  chr19:1089505-1089548
  hypo

SEQ ID NO: 448315 - DNA, 244 bp, Homo sapiens; identical to SEQ ID NO: 272675
  chr19:1090868-1091112
  hypo

SEQ ID NO: 448316 - DNA, 126 bp, Homo sapiens; identical to SEQ ID NO: 324792
  chr19:1105727-1105853
  hypo

SEQ ID NO: 448317 - DNA, 516 bp, Homo sapiens; identical to SEQ ID NO: 412454
  chr19:1108138-1108654
  hypo

SEQ ID NO: 448318 - DNA, 184 bp, Homo sapiens; identical to SEQ ID NO: 272678
  chr19:1110422-1110606
  hypo

SEQ ID NO: 448319 - DNA, 304 bp, Homo sapiens; identical to SEQ ID NO: 324795
  chr19:1111949-1112253
  hypo

SEQ ID NO: 448320 - DNA, 311 bp, Homo sapiens; identical to SEQ ID NO: 218785
  chr19:1117275-1117586
  hypo

SEQ ID NO: 448321 - DNA, 221 bp, Homo sapiens; identical to SEQ ID NO: 272683
  chr19:1133596-1133817
  hypo

SEQ ID NO: 448322 - DNA, 35 bp, Homo sapiens; identical to SEQ ID NO: 272684
  chr19:1133847-1133882
  hypo

SEQ ID NO: 448323 - DNA, 50 bp, Homo sapiens; identical to SEQ ID NO: 272687
  chr19:1167628-1167678
  hypo

SEQ ID NO: 448324 - DNA, 670 bp, Homo sapiens; identical to SEQ ID NO: 324805
  chr19:1169515-1170185
  hypo

SEQ ID NO: 448325 - DNA, 33 bp, Homo sapiens; identical to SEQ ID NO: 218791
  chr19:1170230-1170263
  hypo

SEQ ID NO: 448326 - DNA, 225 bp, Homo sapiens; identical to SEQ ID NO: 272691
  chr19:1172305-1172530
  hypo

SEQ ID NO: 448327 - DNA, 365 bp, Homo sapiens; identical to SEQ ID NO: 225705
  chr19:1173036-1173401
  hypo

SEQ ID NO: 448328 - DNA, 33 bp, Homo sapiens; identical to SEQ ID NO: 225706
  chr19:1173617-1173650
  hypo

SEQ ID NO: 448329 - DNA, 267 bp, Homo sapiens; identical to SEQ ID NO: 218795
  chr19:1178810-1179077
  hypo

SEQ ID NO: 448330 - DNA, 95 bp, Homo sapiens; identical to SEQ ID NO: 272694
  chr19:1182347-1182442
  hypo

SEQ ID NO: 448331 - DNA, 968 bp, Homo sapiens; identical to SEQ ID NO: 293247
  chr19:1206691-1207659
  hypo

SEQ ID NO: 448332 - DNA, 76 bp, Homo sapiens; identical to SEQ ID NO: 218797
  chr19:1213519-1213595
  hypo

SEQ ID NO: 448333 - DNA, 232 bp, Homo sapiens; identical to SEQ ID NO: 218800
  chr19:1227659-1227891
  hypo

SEQ ID NO: 448334 - DNA, 1660 bp, Homo sapiens; identical to SEQ ID NO: 324821
  chr19:1228172-1229832
  hypo

SEQ ID NO: 448335 - DNA, 389 bp, Homo sapiens; identical to SEQ ID NO: 324822
  chr19:1234516-1234905
  hypo

SEQ ID NO: 448336 - DNA, 104 bp, Homo sapiens; identical to SEQ ID NO: 218803
  chr19:1235389-1235493
  hypo

SEQ ID NO: 448337 - DNA, 90 bp, Homo sapiens; identical to SEQ ID NO: 272704
  chr19:1256137-1256227
  hypo

SEQ ID NO: 448338 - DNA, 36 bp, Homo sapiens; identical to SEQ ID NO: 272706
  chr19:1277515-1277551
  hypo

SEQ ID NO: 448339 - DNA, 42 bp, Homo sapiens; identical to SEQ ID NO: 272707
  chr19:1280525-1280567
  hypo

SEQ ID NO: 448340 - DNA, 85 bp, Homo sapiens; identical to SEQ ID NO: 324829
  chr19:1289082-1289167
  hypo

SEQ ID NO: 448341 - DNA, 51 bp, Homo sapiens; identical to SEQ ID NO: 218805
  chr19:1296939-1296990
  hypo

SEQ ID NO: 448342 - DNA, 180 bp, Homo sapiens; identical to SEQ ID NO: 272712
  chr19:1304765-1304945
  hypo

SEQ ID NO: 448343 - DNA, 188 bp, Homo sapiens; identical to SEQ ID NO: 272714
  chr19:1310928-1311116
  hypo

SEQ ID NO: 448344 - DNA, 105 bp, Homo sapiens; identical to SEQ ID NO: 272719
  chr19:1334648-1334753
  hypo

SEQ ID NO: 448345 - DNA, 131 bp, Homo sapiens; identical to SEQ ID NO: 324838
  chr19:1340766-1340897
  hypo

SEQ ID NO: 448346 - DNA, 54 bp, Homo sapiens; identical to SEQ ID NO: 324839
  chr19:1340982-1341036
  hypo

SEQ ID NO: 448347 - DNA, 268 bp, Homo sapiens; identical to SEQ ID NO: 218809
  chr19:1360025-1360293
  hypo

SEQ ID NO: 448348 - DNA, 180 bp, Homo sapiens; identical to SEQ ID NO: 272724
  chr19:1373035-1373215
  hypo

SEQ ID NO: 448349 - DNA, 453 bp, Homo sapiens; identical to SEQ ID NO: 272725
  chr19:1386825-1387278
  hypo

SEQ ID NO: 448350 - DNA, 358 bp, Homo sapiens; identical to SEQ ID NO: 272726
  chr19:1388331-1388689
  hypo

SEQ ID NO: 448351 - DNA, 47 bp, Homo sapiens; identical to SEQ ID NO: 293254
  chr19:1401653-1401700
  hypo

SEQ ID NO: 448352 - DNA, 141 bp, Homo sapiens; identical to SEQ ID NO: 272728
  chr19:1403846-1403987
  hypo

SEQ ID NO: 448353 - DNA, 161 bp, Homo sapiens; identical to SEQ ID NO: 272729
  chr19:1416664-1416825
  hypo

SEQ ID NO: 448354 - DNA, 195 bp, Homo sapiens; identical to SEQ ID NO: 272730
  chr19:1423006-1423201
  hypo

SEQ ID NO: 448355 - DNA, 327 bp, Homo sapiens; identical to SEQ ID NO: 272732
  chr19:1424660-1424987
  hypo

SEQ ID NO: 448356 - DNA, 413 bp, Homo sapiens; identical to SEQ ID NO: 272733
  chr19:1425396-1425809
  hypo

SEQ ID NO: 448357 - DNA, 151 bp, Homo sapiens; identical to SEQ ID NO: 272734
  chr19:1430408-1430559
  hypo

SEQ ID NO: 448358 - DNA, 215 bp, Homo sapiens; identical to SEQ ID NO: 272735
  chr19:1432575-1432790
  hypo

SEQ ID NO: 448359 - DNA, 97 bp, Homo sapiens; identical to SEQ ID NO: 293257
  chr19:1446334-1446431
  hypo

SEQ ID NO: 448360 - DNA, 40 bp, Homo sapiens; identical to SEQ ID NO: 293258
  chr19:1447079-1447119
  hypo

SEQ ID NO: 448361 - DNA, 180 bp, Homo sapiens; identical to SEQ ID NO: 324858
  chr19:1461033-1461213
  hypo

SEQ ID NO: 448362 - DNA, 117 bp, Homo sapiens; identical to SEQ ID NO: 324859
  chr19:1461243-1461360
  hypo

SEQ ID NO: 448363 - DNA, 668 bp, Homo sapiens; identical to SEQ ID NO: 272738
  chr19:1482910-1483578
  hypo

SEQ ID NO: 448364 - DNA, 183 bp, Homo sapiens; identical to SEQ ID NO: 205082
  chr19:1546217-1546400
  hypo

SEQ ID NO: 448365 - DNA, 57 bp, Homo sapiens; identical to SEQ ID NO: 272743
  chr19:1546766-1546823
  hypo

SEQ ID NO: 448366 - DNA, 33 bp, Homo sapiens; identical to SEQ ID NO: 218819
  chr19:1555127-1555160
  hypo

SEQ ID NO: 448367 - DNA, 104 bp, Homo sapiens; identical to SEQ ID NO: 225714
  chr19:1568463-1568567
  hypo

SEQ ID NO: 448368 - DNA, 342 bp, Homo sapiens; identical to SEQ ID NO: 324875
  chr19:1578503-1578845
  hypo

SEQ ID NO: 448369 - DNA, 68 bp, Homo sapiens; identical to SEQ ID NO: 218821
  chr19:1579338-1579406
  hypo

SEQ ID NO: 448370 - DNA, 51 bp, Homo sapiens; identical to SEQ ID NO: 272748
  chr19:1579659-1579710
  hypo

SEQ ID NO: 448371 - DNA, 165 bp, Homo sapiens; identical to SEQ ID NO: 272749
  chr19:1612194-1612359
  hypo

SEQ ID NO: 448372 - DNA, 170 bp, Homo sapiens; identical to SEQ ID NO: 218822
  chr19:1612624-1612794
  hypo

SEQ ID NO: 448373 - DNA, 262 bp, Homo sapiens; identical to SEQ ID NO: 218823
  chr19:1617230-1617492
  hypo

SEQ ID NO: 448374 - DNA, 391 bp, Homo sapiens; identical to SEQ ID NO: 272752
  chr19:1638548-1638939
  hypo

SEQ ID NO: 448375 - DNA, 90 bp, Homo sapiens; identical to SEQ ID NO: 272753
  chr19:1665100-1665190
  hypo

SEQ ID NO: 448376 - DNA, 141 bp, Homo sapiens; identical to SEQ ID NO: 324884
  chr19:1729049-1729190
  hypo

SEQ ID NO: 448377 - DNA, 556 bp, Homo sapiens; identical to SEQ ID NO: 324885
  chr19:1729276-1729832
  hypo

SEQ ID NO: 448378 - DNA, 143 bp, Homo sapiens; identical to SEQ ID NO: 324893
  chr19:1805820-1805963
  hypo

SEQ ID NO: 448379 - DNA, 265 bp, Homo sapiens; identical to SEQ ID NO: 324894
  chr19:1806028-1806293
  hypo

SEQ ID NO: 448380 - DNA, 66 bp, Homo sapiens; identical to SEQ ID NO: 324895
  chr19:1806323-1806389
  hypo

SEQ ID NO: 448381 - DNA, 64 bp, Homo sapiens; identical to SEQ ID NO: 272762
  chr19:1810965-1811029
  hypo

SEQ ID NO: 448382 - DNA, 517 bp, Homo sapiens; identical to SEQ ID NO: 272763
  chr19:1815903-1816420
  hypo

SEQ ID NO: 448383 - DNA, 363 bp, Homo sapiens; identical to SEQ ID NO: 218830
  chr19:1818538-1818901
  hypo

SEQ ID NO: 448384 - DNA, 175 bp, Homo sapiens; identical to SEQ ID NO: 218831
  chr19:1822372-1822547
  hypo

SEQ ID NO: 448385 - DNA, 238 bp, Homo sapiens; identical to SEQ ID NO: 272766
  chr19:1827067-1827305
  hypo

SEQ ID NO: 448386 - DNA, 530 bp, Homo sapiens; identical to SEQ ID NO: 272767
  chr19:1827338-1827868
  hypo

SEQ ID NO: 448387 - DNA, 170 bp, Homo sapiens; identical to SEQ ID NO: 293307
  chr19:1876315-1876485
  hypo

SEQ ID NO: 448388 - DNA, 156 bp, Homo sapiens; identical to SEQ ID NO: 130373
  chr19:1876538-1876694
  hypo

SEQ ID NO: 448389 - DNA, 57 bp, Homo sapiens; identical to SEQ ID NO: 218833
  chr19:1882112-1882169
  hypo

SEQ ID NO: 448390 - DNA, 205 bp, Homo sapiens; identical to SEQ ID NO: 218834
  chr19:1907661-1907866
  hypo

SEQ ID NO: 448391 - DNA, 321 bp, Homo sapiens; identical to SEQ ID NO: 412487
  chr19:1913105-1913426
  hypo

SEQ ID NO: 448392 - DNA, 609 bp, Homo sapiens; identical to SEQ ID NO: 218836
  chr19:1913964-1914573
  hypo

SEQ ID NO: 448393 - DNA, 176 bp, Homo sapiens; identical to SEQ ID NO: 324910
  chr19:1914603-1914779
  hypo

SEQ ID NO: 448394 - DNA, 305 bp, Homo sapiens; identical to SEQ ID NO: 272772
  chr19:1914809-1915114
  hypo

SEQ ID NO: 448395 - DNA, 88 bp, Homo sapiens; identical to SEQ ID NO: 218838
  chr19:1918818-1918906
  hypo

SEQ ID NO: 448396 - DNA, 92 bp, Homo sapiens; identical to SEQ ID NO: 218839
  chr19:1920122-1920214
  hypo

SEQ ID NO: 448397 - DNA, 799 bp, Homo sapiens; identical to SEQ ID NO: 272775
  chr19:1920872-1921671
  hypo

SEQ ID NO: 448398 - DNA, 221 bp, Homo sapiens; identical to SEQ ID NO: 272776
  chr19:1955298-1955519
  hypo

SEQ ID NO: 448399 - DNA, 182 bp, Homo sapiens; identical to SEQ ID NO: 272779
  chr19:1970824-1971006
  hypo

SEQ ID NO: 448400 - DNA, 283 bp, Homo sapiens; identical to SEQ ID NO: 272782
  chr19:1979736-1980019
  hypo

SEQ ID NO: 448401 - DNA, 152 bp, Homo sapiens; identical to SEQ ID NO: 272783
  chr19:1980883-1981035
  hypo

SEQ ID NO: 448402 - DNA, 329 bp, Homo sapiens; identical to SEQ ID NO: 218845
  chr19:1985877-1986206
  hypo

SEQ ID NO: 448403 - DNA, 268 bp, Homo sapiens; identical to SEQ ID NO: 218846
  chr19:1999991-2000259
  hypo

SEQ ID NO: 448404 - DNA, 99 bp, Homo sapiens; identical to SEQ ID NO: 272789
  chr19:2005108-2005207
  hypo

SEQ ID NO: 448405 - DNA, 90 bp, Homo sapiens; identical to SEQ ID NO: 218848
  chr19:2038525-2038615
  hypo

SEQ ID NO: 448406 - DNA, 247 bp, Homo sapiens; identical to SEQ ID NO: 272792
  chr19:2046071-2046318
  hypo

SEQ ID NO: 448407 - DNA, 516 bp, Homo sapiens; identical to SEQ ID NO: 272793
  chr19:2079596-2080112
  hypo

SEQ ID NO: 448408 - DNA, 42 bp, Homo sapiens; identical to SEQ ID NO: 272794
  chr19:2080626-2080668
  hypo

SEQ ID NO: 448409 - DNA, 40 bp, Homo sapiens; identical to SEQ ID NO: 218850
  chr19:2088265-2088305
  hypo

SEQ ID NO: 448410 - DNA, 272 bp, Homo sapiens; identical to SEQ ID NO: 272796
  chr19:2097985-2098257
  hypo

SEQ ID NO: 448411 - DNA, 107 bp, Homo sapiens; identical to SEQ ID NO: 272797
  chr19:2113981-2114088
  hypo

SEQ ID NO: 448412 - DNA, 114 bp, Homo sapiens; identical to SEQ ID NO: 272798
  chr19:2115182-2115296
  hypo

SEQ ID NO: 448413 - DNA, 264 bp, Homo sapiens; identical to SEQ ID NO: 272799
  chr19:2116558-2116822
  hypo

SEQ ID NO: 448414 - DNA, 49 bp, Homo sapiens; identical to SEQ ID NO: 218851
  chr19:2120004-2120053
  hypo

SEQ ID NO: 448415 - DNA, 47 bp, Homo sapiens; identical to SEQ ID NO: 272801
  chr19:2122386-2122433
  hypo

SEQ ID NO: 448416 - DNA, 31 bp, Homo sapiens; identical to SEQ ID NO: 218852
  chr19:2136920-2136951
  hypo

SEQ ID NO: 448417 - DNA, 333 bp, Homo sapiens; identical to SEQ ID NO: 272803
  chr19:2140169-2140502
  hypo

SEQ ID NO: 448418 - DNA, 200 bp, Homo sapiens; identical to SEQ ID NO: 218854
  chr19:2148550-2148750
  hypo

SEQ ID NO: 448419 - DNA, 31 bp, Homo sapiens; identical to SEQ ID NO: 218855
  chr19:2160536-2160567
  hypo

SEQ ID NO: 448420 - DNA, 443 bp, Homo sapiens; identical to SEQ ID NO: 205099
  chr19:2168903-2169346
  hypo

SEQ ID NO: 448421 - DNA, 315 bp, Homo sapiens; identical to SEQ ID NO: 272806
  chr19:2176355-2176670
  hypo

SEQ ID NO: 448422 - DNA, 54 bp, Homo sapiens
  chr19:2182517-2182571
  hypo
tgtctcaagaaacaaaacccaaacaagaaagagtgctccagggctgtggcttcc

SEQ ID NO: 448423 - DNA, 58 bp, Homo sapiens; identical to SEQ ID NO: 324950
  chr19:2191533-2191591
  hypo

SEQ ID NO: 448424 - DNA, 95 bp, Homo sapiens; identical to SEQ ID NO: 324951
  chr19:2191691-2191786
  hypo

SEQ ID NO: 448425 - DNA, 230 bp, Homo sapiens; identical to SEQ ID NO: 218859
  chr19:2213811-2214041
  hypo

SEQ ID NO: 448426 - DNA, 210 bp, Homo sapiens; identical to SEQ ID NO: 324954
  chr19:2214155-2214365
  hypo

SEQ ID NO: 448427 - DNA, 139 bp, Homo sapiens; identical to SEQ ID NO: 218860
  chr19:2215593-2215732
  hypo

SEQ ID NO: 448428 - DNA, 576 bp, Homo sapiens; identical to SEQ ID NO: 218861
  chr19:2216069-2216645
  hypo

SEQ ID NO: 448429 - DNA, 283 bp, Homo sapiens; identical to SEQ ID NO: 272814
  chr19:2219731-2220014
  hypo

SEQ ID NO: 448430 - DNA, 44 bp, Homo sapiens; identical to SEQ ID NO: 31774
  chr19:2222843-2222887
  hypo

SEQ ID NO: 448431 - DNA, 192 bp, Homo sapiens; identical to SEQ ID NO: 272817
  chr19:2229560-2229752
  hypo

SEQ ID NO: 448432 - DNA, 132 bp, Homo sapiens; identical to SEQ ID NO: 272818
  chr19:2232597-2232729
  hypo

SEQ ID NO: 448433 - DNA, 80 bp, Homo sapiens; identical to SEQ ID NO: 218864
  chr19:2243435-2243515
  hypo

SEQ ID NO: 448434 - DNA, 484 bp, Homo sapiens; identical to SEQ ID NO: 218865
  chr19:2243571-2244055
  hypo

SEQ ID NO: 448435 - DNA, 297 bp, Homo sapiens; identical to SEQ ID NO: 272821
  chr19:2247479-2247776
  hypo

SEQ ID NO: 448436 - DNA, 268 bp, Homo sapiens; identical to SEQ ID NO: 272822
  chr19:2255405-2255673
  hypo

SEQ ID NO: 448437 - DNA, 83 bp, Homo sapiens; identical to SEQ ID NO: 218869
  chr19:2275595-2275678
  hypo

SEQ ID NO: 448438 - DNA, 397 bp, Homo sapiens; identical to SEQ ID NO: 218870
  chr19:2275940-2276337
  hypo

SEQ ID NO: 448439 - DNA, 205 bp, Homo sapiens; identical to SEQ ID NO: 272824
  chr19:2278466-2278671
  hypo

SEQ ID NO: 448440 - DNA, 157 bp, Homo sapiens; identical to SEQ ID NO: 218871
  chr19:2321612-2321769
  hypo

SEQ ID NO: 448441 - DNA, 276 bp, Homo sapiens; identical to SEQ ID NO: 293321
  chr19:2328966-2329242
  hypo

SEQ ID NO: 448442 - DNA, 63 bp, Homo sapiens; identical to SEQ ID NO: 218873
  chr19:2330407-2330470
  hypo

SEQ ID NO: 448443 - DNA, 112 bp, Homo sapiens; identical to SEQ ID NO: 324975
  chr19:2331161-2331273
  hypo

SEQ ID NO: 448444 - DNA, 62 bp, Homo sapiens; identical to SEQ ID NO: 324976
  chr19:2331443-2331505
  hypo

SEQ ID NO: 448445 - DNA, 175 bp, Homo sapiens; identical to SEQ ID NO: 272828
  chr19:2334601-2334776
  hypo

SEQ ID NO: 448446 - DNA, 270 bp, Homo sapiens; identical to SEQ ID NO: 324979
  chr19:2358667-2358937
  hypo

SEQ ID NO: 448447 - DNA, 85 bp, Homo sapiens; identical to SEQ ID NO: 272834
  chr19:2399106-2399191
  hypo

SEQ ID NO: 448448 - DNA, 189 bp, Homo sapiens; identical to SEQ ID NO: 272835
  chr19:2408350-2408539
  hypo

SEQ ID NO: 448449 - DNA, 92 bp, Homo sapiens; identical to SEQ ID NO: 218875
  chr19:2434913-2435005
  hypo

SEQ ID NO: 448450 - DNA, 173 bp, Homo sapiens; identical to SEQ ID NO: 218876
  chr19:2441909-2442082
  hypo

SEQ ID NO: 448451 - DNA, 196 bp, Homo sapiens; identical to SEQ ID NO: 272839
  chr19:2449202-2449398
  hypo

SEQ ID NO: 448452 - DNA, 40 bp, Homo sapiens; identical to SEQ ID NO: 272840
  chr19:2509906-2509946
  hypo

SEQ ID NO: 448453 - DNA, 400 bp, Homo sapiens; identical to SEQ ID NO: 324990
  chr19:2513506-2513906
  hypo

SEQ ID NO: 448454 - DNA, 54 bp, Homo sapiens; identical to SEQ ID NO: 218880
  chr19:2518575-2518629
  hypo

SEQ ID NO: 448455 - DNA, 154 bp, Homo sapiens; identical to SEQ ID NO: 272846
  chr19:2672826-2672980
  hypo

SEQ ID NO: 448456 - DNA, 34 bp, Homo sapiens; identical to SEQ ID NO: 218882
  chr19:2682927-2682961
  hypo

SEQ ID NO: 448457 - DNA, 58 bp, Homo sapiens; identical to SEQ ID NO: 218883
  chr19:2683833-2683891
  hypo

SEQ ID NO: 448458 - DNA, 76 bp, Homo sapiens; identical to SEQ ID NO: 272849
  chr19:2733948-2734024
  hypo

SEQ ID NO: 448459 - DNA, 275 bp, Homo sapiens; identical to SEQ ID NO: 272850
  chr19:2753323-2753598
  hypo

SEQ ID NO: 448460 - DNA, 583 bp, Homo sapiens; identical to SEQ ID NO: 272851
  chr19:2754375-2754958
  hypo

SEQ ID NO: 448461 - DNA, 181 bp, Homo sapiens; identical to SEQ ID NO: 272852
  chr19:2761827-2762008
  hypo

SEQ ID NO: 448462 - DNA, 164 bp, Homo sapiens; identical to SEQ ID NO: 272853
  chr19:2789345-2789509
  hypo

SEQ ID NO: 448463 - DNA, 64 bp, Homo sapiens
  chr19:2795261-2795325
  hypo
atgtgcactttcatttcctttcctggccatcctagtgtgacccaaacaccccatccccacatgg

SEQ ID NO: 448464 - DNA, 187 bp, Homo sapiens; identical to SEQ ID NO: 218888
  chr19:2812073-2812260
  hypo

SEQ ID NO: 448465 - DNA, 87 bp, Homo sapiens; identical to SEQ ID NO: 272857
  chr19:2881140-2881227
  hypo

SEQ ID NO: 448466 - DNA, 159 bp, Homo sapiens; identical to SEQ ID NO: 325009
  chr19:2899803-2899962
  hypo

SEQ ID NO: 448467 - DNA, 37 bp, Homo sapiens; identical to SEQ ID NO: 218889
  chr19:2908411-2908448
  hypo

SEQ ID NO: 448468 - DNA, 97 bp, Homo sapiens; identical to SEQ ID NO: 272860
  chr19:2908688-2908785
  hypo

SEQ ID NO: 448469 - DNA, 146 bp, Homo sapiens; identical to SEQ ID NO: 218890
  chr19:2919931-2920077
  hypo

SEQ ID NO: 448470 - DNA, 33 bp, Homo sapiens; identical to SEQ ID NO: 272862
  chr19:2927484-2927517
  hypo

SEQ ID NO: 448471 - DNA, 88 bp, Homo sapiens; identical to SEQ ID NO: 218891
  chr19:2934502-2934590
  hypo

SEQ ID NO: 448472 - DNA, 37 bp, Homo sapiens; identical to SEQ ID NO: 218892
  chr19:2938054-2938091
  hypo

SEQ ID NO: 448473 - DNA, 77 bp, Homo sapiens; identical to SEQ ID NO: 218893
  chr19:2938994-2939071
  hypo

SEQ ID NO: 448474 - DNA, 69 bp, Homo sapiens; identical to SEQ ID NO: 218894
  chr19:2941878-2941947
  hypo

SEQ ID NO: 448475 - DNA, 835 bp, Homo sapiens; identical to SEQ ID NO: 205108
  chr19:2944614-2945449
  hypo

SEQ ID NO: 448476 - DNA, 632 bp, Homo sapiens; identical to SEQ ID NO: 205109
  chr19:2950418-2951050
  hypo

SEQ ID NO: 448477 - DNA, 208 bp, Homo sapiens; identical to SEQ ID NO: 272867
  chr19:2956972-2957180
  hypo

SEQ ID NO: 448478 - DNA, 141 bp, Homo sapiens; identical to SEQ ID NO: 205110
  chr19:2977372-2977513
  hypo

SEQ ID NO: 448479 - DNA, 92 bp, Homo sapiens; identical to SEQ ID NO: 272868
  chr19:2995961-2996053
  hypo

SEQ ID NO: 448480 - DNA, 61 bp, Homo sapiens; identical to SEQ ID NO: 218898
  chr19:2996848-2996909
  hypo

SEQ ID NO: 448481 - DNA, 92 bp, Homo sapiens; identical to SEQ ID NO: 272871
  chr19:3006699-3006791
  hypo

SEQ ID NO: 448482 - DNA, 143 bp, Homo sapiens; identical to SEQ ID NO: 272872
  chr19:3053351-3053494
  hypo

SEQ ID NO: 448483 - DNA, 114 bp, Homo sapiens; identical to SEQ ID NO: 272873
  chr19:3055115-3055229
  hypo

SEQ ID NO: 448484 - DNA, 672 bp, Homo sapiens; identical to SEQ ID NO: 272874
  chr19:3055432-3056104
  hypo

SEQ ID NO: 448485 - DNA, 289 bp, Homo sapiens; identical to SEQ ID NO: 272875
  chr19:3056309-3056598
  hypo

SEQ ID NO: 448486 - DNA, 87 bp, Homo sapiens; identical to SEQ ID NO: 205112
  chr19:3094304-3094391
  hypo

SEQ ID NO: 448487 - DNA, 174 bp, Homo sapiens; identical to SEQ ID NO: 205113
  chr19:3094777-3094951
  hypo

SEQ ID NO: 448488 - DNA, 111 bp, Homo sapiens; identical to SEQ ID NO: 218903
  chr19:3109616-3109727
  hypo

SEQ ID NO: 448489 - DNA, 340 bp, Homo sapiens; identical to SEQ ID NO: 218904
  chr19:3113301-3113641
  hypo

SEQ ID NO: 448490 - DNA, 80 bp, Homo sapiens; identical to SEQ ID NO: 272880
  chr19:3117184-3117264
  hypo

SEQ ID NO: 448491 - DNA, 37 bp, Homo sapiens; identical to SEQ ID NO: 218906
  chr19:3118890-3118927
  hypo

SEQ ID NO: 448492 - DNA, 146 bp, Homo sapiens; identical to SEQ ID NO: 218907
  chr19:3118956-3119102
  hypo

SEQ ID NO: 448493 - DNA, 140 bp, Homo sapiens; identical to SEQ ID NO: 272882
  chr19:3135020-3135160
  hypo

SEQ ID NO: 448494 - DNA, 670 bp, Homo sapiens; identical to SEQ ID NO: 272883
  chr19:3148406-3149076
  hypo

SEQ ID NO: 448495 - DNA, 52 bp, Homo sapiens; identical to SEQ ID NO: 272884
  chr19:3151442-3151494
  hypo

SEQ ID NO: 448496 - DNA, 117 bp, Homo sapiens; identical to SEQ ID NO: 272885
  chr19:3151729-3151846
  hypo

SEQ ID NO: 448497 - DNA, 210 bp, Homo sapiens; identical to SEQ ID NO: 218909
  chr19:3155758-3155968
  hypo

SEQ ID NO: 448498 - DNA, 39 bp, Homo sapiens; identical to SEQ ID NO: 272887
  chr19:3170964-3171003
  hypo

SEQ ID NO: 448499 - DNA, 565 bp, Homo sapiens; identical to SEQ ID NO: 272888
  chr19:3196028-3196593
  hypo

SEQ ID NO: 448500 - DNA, 360 bp, Homo sapiens; identical to SEQ ID NO: 272889
  chr19:3214890-3215250
  hypo

SEQ ID NO: 448501 - DNA, 103 bp, Homo sapiens; identical to SEQ ID NO: 218912
  chr19:3296495-3296598
  hypo

SEQ ID NO: 448502 - DNA, 141 bp, Homo sapiens; identical to SEQ ID NO: 325050
  chr19:3296765-3296906
  hypo

SEQ ID NO: 448503 - DNA, 34 bp, Homo sapiens; identical to SEQ ID NO: 272892
  chr19:3308018-3308052
  hypo

SEQ ID NO: 448504 - DNA, 481 bp, Homo sapiens; identical to SEQ ID NO: 225733
  chr19:3367271-3367752
  hypo

SEQ ID NO: 448505 - DNA, 90 bp, Homo sapiens; identical to SEQ ID NO: 272893
  chr19:3381003-3381093
  hypo

SEQ ID NO: 448506 - DNA, 749 bp, Homo sapiens; identical to SEQ ID NO: 272894
  chr19:3381393-3382142
  hypo

SEQ ID NO: 448507 - DNA, 53 bp, Homo sapiens; identical to SEQ ID NO: 272895
  chr19:3410578-3410631
  hypo

SEQ ID NO: 448508 - DNA, 120 bp, Homo sapiens; identical to SEQ ID NO: 272896
  chr19:3422335-3422455
  hypo

SEQ ID NO: 448509 - DNA, 146 bp, Homo sapiens; identical to SEQ ID NO: 272897
  chr19:3424687-3424833
  hypo

SEQ ID NO: 448510 - DNA, 90 bp, Homo sapiens; identical to SEQ ID NO: 218916
  chr19:3449010-3449100
  hypo

SEQ ID NO: 448511 - DNA, 32 bp, Homo sapiens; identical to SEQ ID NO: 272899
  chr19:3453421-3453453
  hypo

SEQ ID NO: 448512 - DNA, 137 bp, Homo sapiens; identical to SEQ ID NO: 272900
  chr19:3453941-3454078
  hypo

SEQ ID NO: 448513 - DNA, 157 bp, Homo sapiens; identical to SEQ ID NO: 218917
  chr19:3456283-3456440
  hypo

SEQ ID NO: 448514 - DNA, 139 bp, Homo sapiens; identical to SEQ ID NO: 218918
  chr19:3464751-3464890
  hypo

SEQ ID NO: 448515 - DNA, 34 bp, Homo sapiens; identical to SEQ ID NO: 218919
  chr19:3465695-3465729
  hypo

SEQ ID NO: 448516 - DNA, 83 bp, Homo sapiens; identical to SEQ ID NO: 272905
  chr19:3494337-3494420
  hypo

SEQ ID NO: 448517 - DNA, 104 bp, Homo sapiens; identical to SEQ ID NO: 272907
  chr19:3494900-3495004
  hypo

SEQ ID NO: 448518 - DNA, 69 bp, Homo sapiens; identical to SEQ ID NO: 272908
  chr19:3509503-3509572
  hypo

SEQ ID NO: 448519 - DNA, 92 bp, Homo sapiens; identical to SEQ ID NO: 272909
  chr19:3522932-3523024
  hypo

SEQ ID NO: 448520 - DNA, 381 bp, Homo sapiens; identical to SEQ ID NO: 218921
  chr19:3531590-3531971
  hypo

SEQ ID NO: 448521 - DNA, 42 bp, Homo sapiens; identical to SEQ ID NO: 272915
  chr19:3568766-3568808
  hypo

SEQ ID NO: 448522 - DNA, 57 bp, Homo sapiens; identical to SEQ ID NO: 225734
  chr19:3573237-3573294
  hypo

SEQ ID NO: 448523 - DNA, 209 bp, Homo sapiens; identical to SEQ ID NO: 218923
  chr19:3577496-3577705
  hypo

SEQ ID NO: 448524 - DNA, 269 bp, Homo sapiens; identical to SEQ ID NO: 293353
  chr19:3585428-3585697
  hypo

SEQ ID NO: 448525 - DNA, 82 bp, Homo sapiens; identical to SEQ ID NO: 218926
  chr19:3600528-3600610
  hypo

SEQ ID NO: 448526 - DNA, 118 bp, Homo sapiens; identical to SEQ ID NO: 293354
  chr19:3606360-3606478
  hypo

SEQ ID NO: 448527 - DNA, 489 bp, Homo sapiens; identical to SEQ ID NO: 225737
  chr19:3606743-3607232
  hypo

SEQ ID NO: 448528 - DNA, 123 bp, Homo sapiens; identical to SEQ ID NO: 272920
  chr19:3624529-3624652
  hypo

SEQ ID NO: 448529 - DNA, 122 bp, Homo sapiens; identical to SEQ ID NO: 272921
  chr19:3630283-3630405
  hypo

SEQ ID NO: 448530 - DNA, 163 bp, Homo sapiens; identical to SEQ ID NO: 218927
  chr19:3638707-3638870
  hypo

SEQ ID NO: 448531 - DNA, 133 bp, Homo sapiens; identical to SEQ ID NO: 272923
  chr19:3642943-3643076
  hypo

SEQ ID NO: 448532 - DNA, 427 bp, Homo sapiens; identical to SEQ ID NO: 272924
  chr19:3643106-3643533
  hypo

SEQ ID NO: 448533 - DNA, 160 bp, Homo sapiens; identical to SEQ ID NO: 218928
  chr19:3648545-3648705
  hypo

SEQ ID NO: 448534 - DNA, 231 bp, Homo sapiens; identical to SEQ ID NO: 272926
  chr19:3651844-3652075
  hypo

SEQ ID NO: 448535 - DNA, 139 bp, Homo sapiens; identical to SEQ ID NO: 293356
  chr19:3670990-3671129
  hypo

SEQ ID NO: 448536 - DNA, 72 bp, Homo sapiens; identical to SEQ ID NO: 293357
  chr19:3671894-3671966
  hypo

SEQ ID NO: 448537 - DNA, 56 bp, Homo sapiens; identical to SEQ ID NO: 130472
  chr19:3672066-3672122
  hypo

SEQ ID NO: 448538 - DNA, 192 bp, Homo sapiens; identical to SEQ ID NO: 272928
  chr19:3676226-3676418
  hypo

SEQ ID NO: 448539 - DNA, 34 bp, Homo sapiens; identical to SEQ ID NO: 272929
  chr19:3680259-3680293
  hypo

SEQ ID NO: 448540 - DNA, 87 bp, Homo sapiens; identical to SEQ ID NO: 218930
  chr19:3694859-3694946
  hypo

SEQ ID NO: 448541 - DNA, 395 bp, Homo sapiens; identical to SEQ ID NO: 272932
  chr19:3709474-3709869
  hypo

SEQ ID NO: 448542 - DNA, 160 bp, Homo sapiens; identical to SEQ ID NO: 272933
  chr19:3728587-3728747
  hypo

SEQ ID NO: 448543 - DNA, 212 bp, Homo sapiens; identical to SEQ ID NO: 272934
  chr19:3730410-3730622
  hypo

SEQ ID NO: 448544 - DNA, 95 bp, Homo sapiens; identical to SEQ ID NO: 218932
  chr19:3739005-3739100
  hypo

SEQ ID NO: 448545 - DNA, 398 bp, Homo sapiens; identical to SEQ ID NO: 218933
  chr19:3740455-3740853
  hypo

SEQ ID NO: 448546 - DNA, 42 bp, Homo sapiens; identical to SEQ ID NO: 218936
  chr19:3754228-3754270
  hypo

SEQ ID NO: 448547 - DNA, 307 bp, Homo sapiens; identical to SEQ ID NO: 218937
  chr19:3767181-3767488
  hypo

SEQ ID NO: 448548 - DNA, 141 bp, Homo sapiens; identical to SEQ ID NO: 272941
  chr19:3771587-3771728
  hypo

SEQ ID NO: 448549 - DNA, 385 bp, Homo sapiens; identical to SEQ ID NO: 218941
  chr19:3792900-3793285
  hypo

SEQ ID NO: 448550 - DNA, 39 bp, Homo sapiens; identical to SEQ ID NO: 272945
  chr19:3807698-3807737
  hypo

SEQ ID NO: 448551 - DNA, 303 bp, Homo sapiens; identical to SEQ ID NO: 272946
  chr19:3816598-3816901
  hypo

SEQ ID NO: 448552 - DNA, 135 bp, Homo sapiens; identical to SEQ ID NO: 272947
  chr19:3823138-3823273
  hypo

SEQ ID NO: 448553 - DNA, 229 bp, Homo sapiens; identical to SEQ ID NO: 325117
  chr19:3827530-3827759
  hypo

SEQ ID NO: 448554 - DNA, 480 bp, Homo sapiens; identical to SEQ ID NO: 325118
  chr19:3855704-3856184
  hypo

SEQ ID NO: 448555 - DNA, 36 bp, Homo sapiens; identical to SEQ ID NO: 325119
  chr19:3856216-3856252
  hypo

SEQ ID NO: 448556 - DNA, 31 bp, Homo sapiens; identical to SEQ ID NO: 272950
  chr19:3885951-3885982
  hypo

SEQ ID NO: 448557 - DNA, 54 bp, Homo sapiens
  chr19:3966533-3966587
  hypo
aagaagcctgcctaagaacagaccaggccaggagaggggagccaccaggcactg

SEQ ID NO: 448558 - DNA, 76 bp, Homo sapiens; identical to SEQ ID NO: 272956
  chr19:3979328-3979404
  hypo

SEQ ID NO: 448559 - DNA, 107 bp, Homo sapiens; identical to SEQ ID NO: 218950
  chr19:3979896-3980003
  hypo

SEQ ID NO: 448560 - DNA, 459 bp, Homo sapiens; identical to SEQ ID NO: 325129
  chr19:3982274-3982733
  hypo

SEQ ID NO: 448561 - DNA, 99 bp, Homo sapiens; identical to SEQ ID NO: 325130
  chr19:3983095-3983194
  hypo

SEQ ID NO: 448562 - DNA, 39 bp, Homo sapiens; identical to SEQ ID NO: 272960
  chr19:3994890-3994929
  hypo

SEQ ID NO: 448563 - DNA, 33 bp, Homo sapiens; identical to SEQ ID NO: 272961
  chr19:3997224-3997257
  hypo

SEQ ID NO: 448564 - DNA, 675 bp, Homo sapiens; identical to SEQ ID NO: 272962
  chr19:4032609-4033284
  hypo

SEQ ID NO: 448565 - DNA, 283 bp, Homo sapiens; identical to SEQ ID NO: 272963
  chr19:4033314-4033597
  hypo

SEQ ID NO: 448566 - DNA, 33 bp, Homo sapiens; identical to SEQ ID NO: 95909
  chr19:4033631-4033664
  hypo

SEQ ID NO: 448567 - DNA, 369 bp, Homo sapiens; identical to SEQ ID NO: 272965
  chr19:4037867-4038236
  hypo

SEQ ID NO: 448568 - DNA, 61 bp, Homo sapiens; identical to SEQ ID NO: 272966
  chr19:4042780-4042841
  hypo

SEQ ID NO: 448569 - DNA, 38 bp, Homo sapiens
  chr19:4042871-4042909
  hypo
gctgcccctctggccttatcctgtgccagctgcctgcc

SEQ ID NO: 448570 - DNA, 87 bp, Homo sapiens; identical to SEQ ID NO: 325140
  chr19:4044504-4044591
  hypo

SEQ ID NO: 448571 - DNA, 39 bp, Homo sapiens; identical to SEQ ID NO: 325141
  chr19:4044933-4044972
  hypo

SEQ ID NO: 448572 - DNA, 63 bp, Homo sapiens; identical to SEQ ID NO: 325142
  chr19:4045002-4045065
  hypo

SEQ ID NO: 448573 - DNA, 188 bp, Homo sapiens; identical to SEQ ID NO: 272970
  chr19:4046238-4046426
  hypo

SEQ ID NO: 448574 - DNA, 47 bp, Homo sapiens; identical to SEQ ID NO: 218954
  chr19:4047771-4047818
  hypo

SEQ ID NO: 448575 - DNA, 45 bp, Homo sapiens; identical to SEQ ID NO: 325145
  chr19:4050362-4050407
  hypo

SEQ ID NO: 448576 - DNA, 236 bp, Homo sapiens; identical to SEQ ID NO: 272975
  chr19:4062303-4062539
  hypo

SEQ ID NO: 448577 - DNA, 39 bp, Homo sapiens; identical to SEQ ID NO: 218961
  chr19:4093667-4093706
  hypo

SEQ ID NO: 448578 - DNA, 240 bp, Homo sapiens; identical to SEQ ID NO: 272979
  chr19:4116487-4116727
  hypo

SEQ ID NO: 448579 - DNA, 189 bp, Homo sapiens; identical to SEQ ID NO: 272980
  chr19:4116974-4117163
  hypo

SEQ ID NO: 448580 - DNA, 143 bp, Homo sapiens; identical to SEQ ID NO: 272981
  chr19:4168249-4168392
  hypo

SEQ ID NO: 448581 - DNA, 377 bp, Homo sapiens; identical to SEQ ID NO: 272982
  chr19:4175003-4175380
  hypo

SEQ ID NO: 448582 - DNA, 173 bp, Homo sapiens; identical to SEQ ID NO: 272983
  chr19:4236966-4237139
  hypo

SEQ ID NO: 448583 - DNA, 176 bp, Homo sapiens; identical to SEQ ID NO: 293381
  chr19:4278909-4279085
  hypo

SEQ ID NO: 448584 - DNA, 352 bp, Homo sapiens; identical to SEQ ID NO: 293382
  chr19:4279785-4280137
  hypo

SEQ ID NO: 448585 - DNA, 102 bp, Homo sapiens; identical to SEQ ID NO: 272985
  chr19:4292187-4292289
  hypo

SEQ ID NO: 448586 - DNA, 331 bp, Homo sapiens; identical to SEQ ID NO: 272986
  chr19:4311899-4312230
  hypo

SEQ ID NO: 448587 - DNA, 114 bp, Homo sapiens; identical to SEQ ID NO: 272987
  chr19:4322986-4323100
  hypo

SEQ ID NO: 448588 - DNA, 42 bp, Homo sapiens; identical to SEQ ID NO: 272988
  chr19:4360669-4360711
  hypo

SEQ ID NO: 448589 - DNA, 393 bp, Homo sapiens; identical to SEQ ID NO: 218967
  chr19:4371567-4371960
  hypo

SEQ ID NO: 448590 - DNA, 48 bp, Homo sapiens; identical to SEQ ID NO: 272991
  chr19:4419788-4419836
  hypo

SEQ ID NO: 448591 - DNA, 61 bp, Homo sapiens; identical to SEQ ID NO: 218968
  chr19:4429586-4429647
  hypo

SEQ ID NO: 448592 - DNA, 185 bp, Homo sapiens; identical to SEQ ID NO: 218970
  chr19:4442913-4443098
  hypo

SEQ ID NO: 448593 - DNA, 415 bp, Homo sapiens; identical to SEQ ID NO: 218971
  chr19:4446322-4446737
  hypo

SEQ ID NO: 448594 - DNA, 237 bp, Homo sapiens; identical to SEQ ID NO: 218972
  chr19:4483097-4483334
  hypo

SEQ ID NO: 448595 - DNA, 37 bp, Homo sapiens; identical to SEQ ID NO: 218973
  chr19:4544028-4544065
  hypo

SEQ ID NO: 448596 - DNA, 38 bp, Homo sapiens; identical to SEQ ID NO: 218975
  chr19:4554410-4554448
  hypo

SEQ ID NO: 448597 - DNA, 207 bp, Homo sapiens; identical to SEQ ID NO: 273004
  chr19:4566461-4566668
  hypo

SEQ ID NO: 448598 - DNA, 35 bp, Homo sapiens; identical to SEQ ID NO: 273005
  chr19:4578035-4578070
  hypo

SEQ ID NO: 448599 - DNA, 452 bp, Homo sapiens; identical to SEQ ID NO: 293390
  chr19:4580776-4581228
  hypo

SEQ ID NO: 448600 - DNA, 78 bp, Homo sapiens; identical to SEQ ID NO: 273006
  chr19:4627183-4627261
  hypo

SEQ ID NO: 448601 - DNA, 80 bp, Homo sapiens; identical to SEQ ID NO: 325188
  chr19:4672904-4672984
  hypo

SEQ ID NO: 448602 - DNA, 207 bp, Homo sapiens; identical to SEQ ID NO: 273011
  chr19:4678845-4679052
  hypo

SEQ ID NO: 448603 - DNA, 74 bp, Homo sapiens; identical to SEQ ID NO: 218978
  chr19:4683997-4684071
  hypo

SEQ ID NO: 448604 - DNA, 141 bp, Homo sapiens; identical to SEQ ID NO: 273014
  chr19:4687368-4687509
  hypo

SEQ ID NO: 448605 - DNA, 32 bp, Homo sapiens; identical to SEQ ID NO: 273017
  chr19:4755951-4755983
  hypo

SEQ ID NO: 448606 - DNA, 300 bp, Homo sapiens; identical to SEQ ID NO: 273018
  chr19:4789386-4789686
  hypo

SEQ ID NO: 448607 - DNA, 120 bp, Homo sapiens; identical to SEQ ID NO: 218979
  chr19:4798239-4798359
  hypo

SEQ ID NO: 448608 - DNA, 145 bp, Homo sapiens; identical to SEQ ID NO: 218982
  chr19:4851495-4851640
  hypo

SEQ ID NO: 448609 - DNA, 166 bp, Homo sapiens; identical to SEQ ID NO: 273026
  chr19:4851997-4852163
  hypo

SEQ ID NO: 448610 - DNA, 34 bp, Homo sapiens; identical to SEQ ID NO: 273027
  chr19:4902800-4902834
  hypo

SEQ ID NO: 448611 - DNA, 219 bp, Homo sapiens; identical to SEQ ID NO: 273028
  chr19:4914580-4914799
  hypo

SEQ ID NO: 448612 - DNA, 68 bp, Homo sapiens; identical to SEQ ID NO: 273029
  chr19:4930783-4930851
  hypo

SEQ ID NO: 448613 - DNA, 191 bp, Homo sapiens; identical to SEQ ID NO: 218983
  chr19:4941804-4941995
  hypo

SEQ ID NO: 448614 - DNA, 129 bp, Homo sapiens; identical to SEQ ID NO: 218984
  chr19:4944359-4944488
  hypo

SEQ ID NO: 448615 - DNA, 59 bp, Homo sapiens; identical to SEQ ID NO: 218985
  chr19:4962295-4962354
  hypo

SEQ ID NO: 448616 - DNA, 116 bp, Homo sapiens; identical to SEQ ID NO: 218986
  chr19:4962384-4962500
  hypo

SEQ ID NO: 448617 - DNA, 81 bp, Homo sapiens; identical to SEQ ID NO: 273034
  chr19:4973466-4973547
  hypo

SEQ ID NO: 448618 - DNA, 81 bp, Homo sapiens; identical to SEQ ID NO: 273036
  chr19:4988235-4988316
  hypo

SEQ ID NO: 448619 - DNA, 282 bp, Homo sapiens; identical to SEQ ID NO: 218989
  chr19:4990572-4990854
  hypo

SEQ ID NO: 448620 - DNA, 42 bp, Homo sapiens; identical to SEQ ID NO: 218990
  chr19:4991094-4991136
  hypo

SEQ ID NO: 448621 - DNA, 221 bp, Homo sapiens; identical to SEQ ID NO: 273039
  chr19:5013968-5014189
  hypo

SEQ ID NO: 448622 - DNA, 151 bp, Homo sapiens; identical to SEQ ID NO: 273040
  chr19:5022644-5022795
  hypo

SEQ ID NO: 448623 - DNA, 134 bp, Homo sapiens; identical to SEQ ID NO: 273042
  chr19:5031056-5031190
  hypo

SEQ ID NO: 448624 - DNA, 523 bp, Homo sapiens; identical to SEQ ID NO: 273043
  chr19:5035321-5035844
  hypo

SEQ ID NO: 448625 - DNA, 40 bp, Homo sapiens; identical to SEQ ID NO: 273046
  chr19:5049196-5049236
  hypo

SEQ ID NO: 448626 - DNA, 311 bp, Homo sapiens; identical to SEQ ID NO: 325232
  chr19:5058359-5058670
  hypo

SEQ ID NO: 448627 - DNA, 77 bp, Homo sapiens; identical to SEQ ID NO: 325233
  chr19:5058700-5058777
  hypo

SEQ ID NO: 448628 - DNA, 268 bp, Homo sapiens; identical to SEQ ID NO: 218996
  chr19:5060971-5061239
  hypo

SEQ ID NO: 448629 - DNA, 517 bp, Homo sapiens; identical to SEQ ID NO: 273050
  chr19:5068442-5068959
  hypo

SEQ ID NO: 448630 - DNA, 100 bp, Homo sapiens; identical to SEQ ID NO: 273051
  chr19:5079967-5080067
  hypo

SEQ ID NO: 448631 - DNA, 657 bp, Homo sapiens; identical to SEQ ID NO: 273052
  chr19:5080389-5081046
  hypo

SEQ ID NO: 448632 - DNA, 157 bp, Homo sapiens; identical to SEQ ID NO: 273053
  chr19:5083118-5083275
  hypo

SEQ ID NO: 448633 - DNA, 148 bp, Homo sapiens; identical to SEQ ID NO: 273054
  chr19:5087015-5087163
  hypo

SEQ ID NO: 448634 - DNA, 96 bp, Homo sapiens; identical to SEQ ID NO: 273055
  chr19:5092021-5092117
  hypo

SEQ ID NO: 448635 - DNA, 79 bp, Homo sapiens; identical to SEQ ID NO: 273057
  chr19:5110734-5110813
  hypo

SEQ ID NO: 448636 - DNA, 203 bp, Homo sapiens; identical to SEQ ID NO: 273059
  chr19:5144146-5144349
  hypo

SEQ ID NO: 448637 - DNA, 382 bp, Homo sapiens; identical to SEQ ID NO: 273060
  chr19:5148669-5149051
  hypo

SEQ ID NO: 448638 - DNA, 36 bp, Homo sapiens; identical to SEQ ID NO: 273061
  chr19:5154721-5154757
  hypo

SEQ ID NO: 448639 - DNA, 95 bp, Homo sapiens; identical to SEQ ID NO: 325250
  chr19:5155022-5155117
  hypo

SEQ ID NO: 448640 - DNA, 173 bp, Homo sapiens; identical to SEQ ID NO: 273063
  chr19:5210689-5210862
  hypo

SEQ ID NO: 448641 - DNA, 175 bp, Homo sapiens; identical to SEQ ID NO: 273064
  chr19:5218522-5218697
  hypo

SEQ ID NO: 448642 - DNA, 73 bp, Homo sapiens; identical to SEQ ID NO: 273065
  chr19:5223285-5223358
  hypo

SEQ ID NO: 448643 - DNA, 364 bp, Homo sapiens; identical to SEQ ID NO: 273066
  chr19:5231254-5231618
  hypo

SEQ ID NO: 448644 - DNA, 988 bp, Homo sapiens; identical to SEQ ID NO: 273067
  chr19:5237605-5238593
  hypo

SEQ ID NO: 448645 - DNA, 419 bp, Homo sapiens; identical to SEQ ID NO: 219000
  chr19:5245671-5246090
  hypo

SEQ ID NO: 448646 - DNA, 69 bp, Homo sapiens; identical to SEQ ID NO: 273069
  chr19:5251285-5251354
  hypo

SEQ ID NO: 448647 - DNA, 100 bp, Homo sapiens; identical to SEQ ID NO: 219001
  chr19:5274368-5274468
  hypo

SEQ ID NO: 448648 - DNA, 410 bp, Homo sapiens; identical to SEQ ID NO: 273072
  chr19:5307584-5307994
  hypo

SEQ ID NO: 448649 - DNA, 184 bp, Homo sapiens; identical to SEQ ID NO: 273073
  chr19:5312165-5312349
  hypo

SEQ ID NO: 448650 - DNA, 409 bp, Homo sapiens; identical to SEQ ID NO: 273074
  chr19:5334919-5335328
  hypo

SEQ ID NO: 448651 - DNA, 223 bp, Homo sapiens; identical to SEQ ID NO: 273075
  chr19:5455292-5455515
  hypo

SEQ ID NO: 448652 - DNA, 35 bp, Homo sapiens; identical to SEQ ID NO: 273077
  chr19:5577528-5577563
  hypo

SEQ ID NO: 448653 - DNA, 111 bp, Homo sapiens; identical to SEQ ID NO: 273078
  chr19:5582381-5582492
  hypo

SEQ ID NO: 448654 - DNA, 139 bp, Homo sapiens; identical to SEQ ID NO: 219004
  chr19:5587166-5587305
  hypo

SEQ ID NO: 448655 - DNA, 41 bp, Homo sapiens; identical to SEQ ID NO: 273083
  chr19:5641156-5641197
  hypo

SEQ ID NO: 448656 - DNA, 275 bp, Homo sapiens; identical to SEQ ID NO: 273084
  chr19:5661522-5661797
  hypo

SEQ ID NO: 448657 - DNA, 103 bp, Homo sapiens; identical to SEQ ID NO: 273085
  chr19:5667770-5667873
  hypo

SEQ ID NO: 448658 - DNA, 139 bp, Homo sapiens; identical to SEQ ID NO: 325274
  chr19:5668103-5668242
  hypo

SEQ ID NO: 448659 - DNA, 77 bp, Homo sapiens; identical to SEQ ID NO: 325275
  chr19:5668272-5668349
  hypo

SEQ ID NO: 448660 - DNA, 92 bp, Homo sapiens; identical to SEQ ID NO: 325276
  chr19:5676242-5676334
  hypo

SEQ ID NO: 448661 - DNA, 238 bp, Homo sapiens; identical to SEQ ID NO: 273088
  chr19:5694369-5694607
  hypo

SEQ ID NO: 448662 - DNA, 366 bp, Homo sapiens; identical to SEQ ID NO: 219010
  chr19:5695870-5696236
  hypo

SEQ ID NO: 448663 - DNA, 57 bp, Homo sapiens; identical to SEQ ID NO: 273090
  chr19:5703577-5703634
  hypo

SEQ ID NO: 448664 - DNA, 222 bp, Homo sapiens; identical to SEQ ID NO: 273091
  chr19:5711861-5712083
  hypo

SEQ ID NO: 448665 - DNA, 44 bp, Homo sapiens; identical to SEQ ID NO: 273092
  chr19:5722397-5722441
  hypo

SEQ ID NO: 448666 - DNA, 59 bp, Homo sapiens; identical to SEQ ID NO: 412643
  chr19:5759561-5759620
  hypo

SEQ ID NO: 448667 - DNA, 37 bp, Homo sapiens; identical to SEQ ID NO: 273094
  chr19:5776294-5776331
  hypo

SEQ ID NO: 448668 - DNA, 94 bp, Homo sapiens; identical to SEQ ID NO: 273095
  chr19:5784778-5784872
  hypo

SEQ ID NO: 448669 - DNA, 40 bp, Homo sapiens; identical to SEQ ID NO: 219012
  chr19:5785227-5785267
  hypo

SEQ ID NO: 448670 - DNA, 198 bp, Homo sapiens; identical to SEQ ID NO: 219013
  chr19:5785480-5785678
  hypo

SEQ ID NO: 448671 - DNA, 226 bp, Homo sapiens; identical to SEQ ID NO: 325290
  chr19:5792486-5792712
  hypo

SEQ ID NO: 448672 - DNA, 36 bp, Homo sapiens; identical to SEQ ID NO: 325291
  chr19:5792782-5792818
  hypo

SEQ ID NO: 448673 - DNA, 141 bp, Homo sapiens; identical to SEQ ID NO: 205137
  chr19:5804852-5804993
  hypo

SEQ ID NO: 448674 - DNA, 46 bp, Homo sapiens; identical to SEQ ID NO: 273101
  chr19:5824983-5825029
  hypo

SEQ ID NO: 448675 - DNA, 50 bp, Homo sapiens; identical to SEQ ID NO: 219020
  chr19:5826124-5826174
  hypo

SEQ ID NO: 448676 - DNA, 114 bp, Homo sapiens; identical to SEQ ID NO: 325298
  chr19:5826209-5826323
  hypo

SEQ ID NO: 448677 - DNA, 38 bp, Homo sapiens; identical to SEQ ID NO: 219022
  chr19:5834509-5834547
  hypo

SEQ ID NO: 448678 - DNA, 358 bp, Homo sapiens; identical to SEQ ID NO: 219023
  chr19:5844274-5844632
  hypo

SEQ ID NO: 448679 - DNA, 106 bp, Homo sapiens; identical to SEQ ID NO: 219024
  chr19:5844662-5844768
  hypo

SEQ ID NO: 448680 - DNA, 117 bp, Homo sapiens; identical to SEQ ID NO: 273107
  chr19:5846506-5846623
  hypo

SEQ ID NO: 448681 - DNA, 75 bp, Homo sapiens; identical to SEQ ID NO: 273108
  chr19:5858550-5858625
  hypo

SEQ ID NO: 448682 - DNA, 390 bp, Homo sapiens; identical to SEQ ID NO: 273109
  chr19:5867192-5867582
  hypo

SEQ ID NO: 448683 - DNA, 120 bp, Homo sapiens; identical to SEQ ID NO: 273110
  chr19:5878604-5878724
  hypo

SEQ ID NO: 448684 - DNA, 545 bp, Homo sapiens; identical to SEQ ID NO: 325308
  chr19:5909794-5910339
  hypo

SEQ ID NO: 448685 - DNA, 159 bp, Homo sapiens; identical to SEQ ID NO: 219026
  chr19:5914411-5914570
  hypo

SEQ ID NO: 448686 - DNA, 225 bp, Homo sapiens; identical to SEQ ID NO: 219029
  chr19:5925831-5926056
  hypo

SEQ ID NO: 448687 - DNA, 150 bp, Homo sapiens; identical to SEQ ID NO: 219030
  chr19:5927750-5927900
  hypo

SEQ ID NO: 448688 - DNA, 158 bp, Homo sapiens; identical to SEQ ID NO: 273119
  chr19:5957316-5957474
  hypo

SEQ ID NO: 448689 - DNA, 157 bp, Homo sapiens; identical to SEQ ID NO: 273120
  chr19:5957770-5957927
  hypo

SEQ ID NO: 448690 - DNA, 162 bp, Homo sapiens; identical to SEQ ID NO: 219032
  chr19:5985339-5985501
  hypo

SEQ ID NO: 448691 - DNA, 53 bp, Homo sapiens; identical to SEQ ID NO: 219034
  chr19:5996649-5996702
  hypo

SEQ ID NO: 448692 - DNA, 522 bp, Homo sapiens; identical to SEQ ID NO: 273126
  chr19:5997028-5997550
  hypo

SEQ ID NO: 448693 - DNA, 571 bp, Homo sapiens; identical to SEQ ID NO: 273127
  chr19:5998429-5999000
  hypo

SEQ ID NO: 448694 - DNA, 450 bp, Homo sapiens; identical to SEQ ID NO: 273128
  chr19:5999240-5999690
  hypo

SEQ ID NO: 448695 - DNA, 654 bp, Homo sapiens; identical to SEQ ID NO: 273130
  chr19:6002450-6003104
  hypo

SEQ ID NO: 448696 - DNA, 99 bp, Homo sapiens; identical to SEQ ID NO: 273131
  chr19:6003433-6003532
  hypo

SEQ ID NO: 448697 - DNA, 225 bp, Homo sapiens; identical to SEQ ID NO: 219037
  chr19:6003832-6004057
  hypo

SEQ ID NO: 448698 - DNA, 61 bp, Homo sapiens; identical to SEQ ID NO: 412661
  chr19:6005135-6005196
  hypo

SEQ ID NO: 448699 - DNA, 199 bp, Homo sapiens; identical to SEQ ID NO: 219040
  chr19:6005978-6006177
  hypo

SEQ ID NO: 448700 - DNA, 89 bp, Homo sapiens
  chr19:6008305-6008394
  hypo
ggtggatgggggcccagaaacagatgttctgccccaccccatgcagtcagggaatttgttttttctttctttttctttttctttttttt

SEQ ID NO: 448701 - DNA, 94 bp, Homo sapiens; identical to SEQ ID NO: 273138
  chr19:6010177-6010271
  hypo

SEQ ID NO: 448702 - DNA, 92 bp, Homo sapiens; identical to SEQ ID NO: 219043
  chr19:6012586-6012678
  hypo

SEQ ID NO: 448703 - DNA, 46 bp, Homo sapiens; identical to SEQ ID NO: 219044
  chr19:6013009-6013055
  hypo

SEQ ID NO: 448704 - DNA, 278 bp, Homo sapiens; identical to SEQ ID NO: 273141
  chr19:6015901-6016179
  hypo

SEQ ID NO: 448705 - DNA, 76 bp, Homo sapiens; identical to SEQ ID NO: 219046
  chr19:6018261-6018337
  hypo

SEQ ID NO: 448706 - DNA, 135 bp, Homo sapiens; identical to SEQ ID NO: 273144
  chr19:6019758-6019893
  hypo

SEQ ID NO: 448707 - DNA, 390 bp, Homo sapiens; identical to SEQ ID NO: 273146
  chr19:6021709-6022099
  hypo

SEQ ID NO: 448708 - DNA, 685 bp, Homo sapiens; identical to SEQ ID NO: 273149
  chr19:6026055-6026740
  hypo

SEQ ID NO: 448709 - DNA, 580 bp, Homo sapiens; identical to SEQ ID NO: 273150
  chr19:6026959-6027539
  hypo

SEQ ID NO: 448710 - DNA, 164 bp, Homo sapiens; identical to SEQ ID NO: 219050
  chr19:6040234-6040398
  hypo

SEQ ID NO: 448711 - DNA, 137 bp, Homo sapiens; identical to SEQ ID NO: 219053
  chr19:6046169-6046306
  hypo

SEQ ID NO: 448712 - DNA, 181 bp, Homo sapiens; identical to SEQ ID NO: 219054
  chr19:6062926-6063107
  hypo

SEQ ID NO: 448713 - DNA, 36 bp, Homo sapiens; identical to SEQ ID NO: 273158
  chr19:6076061-6076097
  hypo

SEQ ID NO: 448714 - DNA, 96 bp, Homo sapiens; identical to SEQ ID NO: 273159
  chr19:6076337-6076433
  hypo

SEQ ID NO: 448715 - DNA, 32 bp, Homo sapiens; identical to SEQ ID NO: 273160
  chr19:6083195-6083227
  hypo

SEQ ID NO: 448716 - DNA, 776 bp, Homo sapiens; identical to SEQ ID NO: 205141
  chr19:6110226-6111002
  hypo

SEQ ID NO: 448717 - DNA, 267 bp, Homo sapiens; identical to SEQ ID NO: 273163
  chr19:6215002-6215269
  hypo

SEQ ID NO: 448718 - DNA, 235 bp, Homo sapiens; identical to SEQ ID NO: 273165
  chr19:6230445-6230680
  hypo

SEQ ID NO: 448719 - DNA, 113 bp, Homo sapiens; identical to SEQ ID NO: 273166
  chr19:6236570-6236683
  hypo

SEQ ID NO: 448720 - DNA, 219 bp, Homo sapiens; identical to SEQ ID NO: 273167
  chr19:6241968-6242187
  hypo

SEQ ID NO: 448721 - DNA, 164 bp, Homo sapiens; identical to SEQ ID NO: 273168
  chr19:6249578-6249742
  hypo

SEQ ID NO: 448722 - DNA, 141 bp, Homo sapiens; identical to SEQ ID NO: 273170
  chr19:6345241-6345382
  hypo

SEQ ID NO: 448723 - DNA, 423 bp, Homo sapiens; identical to SEQ ID NO: 273171
  chr19:6374177-6374600
  hypo

SEQ ID NO: 448724 - DNA, 143 bp, Homo sapiens; identical to SEQ ID NO: 219061
  chr19:6414854-6414997
  hypo

SEQ ID NO: 448725 - DNA, 100 bp, Homo sapiens; identical to SEQ ID NO: 273173
  chr19:6417746-6417846
  hypo

SEQ ID NO: 448726 - DNA, 118 bp, Homo sapiens; identical to SEQ ID NO: 273175
  chr19:6433456-6433574
  hypo

SEQ ID NO: 448727 - DNA, 120 bp, Homo sapiens; identical to SEQ ID NO: 273176
  chr19:6461712-6461832
  hypo

SEQ ID NO: 448728 - DNA, 141 bp, Homo sapiens; identical to SEQ ID NO: 273177
  chr19:6541535-6541676
  hypo

SEQ ID NO: 448729 - DNA, 236 bp, Homo sapiens; identical to SEQ ID NO: 273180
  chr19:6750239-6750475
  hypo

SEQ ID NO: 448730 - DNA, 270 bp, Homo sapiens; identical to SEQ ID NO: 273181
  chr19:6829821-6830091
  hypo

SEQ ID NO: 448731 - DNA, 120 bp, Homo sapiens; identical to SEQ ID NO: 219063
  chr19:7100509-7100629
  hypo

SEQ ID NO: 448732 - DNA, 38 bp, Homo sapiens; identical to SEQ ID NO: 273183
  chr19:7103100-7103138
  hypo

SEQ ID NO: 448733 - DNA, 82 bp, Homo sapiens; identical to SEQ ID NO: 219064
  chr19:7116309-7116391
  hypo

SEQ ID NO: 448734 - DNA, 180 bp, Homo sapiens; identical to SEQ ID NO: 273185
  chr19:7135548-7135728
  hypo

SEQ ID NO: 448735 - DNA, 89 bp, Homo sapiens; identical to SEQ ID NO: 273186
  chr19:7141680-7141769
  hypo

SEQ ID NO: 448736 - DNA, 38 bp, Homo sapiens; identical to SEQ ID NO: 325385
  chr19:7157628-7157666
  hypo

SEQ ID NO: 448737 - DNA, 43 bp, Homo sapiens; identical to SEQ ID NO: 273188
  chr19:7158216-7158259
  hypo

SEQ ID NO: 448738 - DNA, 103 bp, Homo sapiens; identical to SEQ ID NO: 273189
  chr19:7169226-7169329
  hypo

SEQ ID NO: 448739 - DNA, 96 bp, Homo sapiens; identical to SEQ ID NO: 219066
  chr19:7194737-7194833
  hypo

SEQ ID NO: 448740 - DNA, 81 bp, Homo sapiens; identical to SEQ ID NO: 273192
  chr19:7236595-7236676
  hypo

SEQ ID NO: 448741 - DNA, 42 bp, Homo sapiens; identical to SEQ ID NO: 273193
  chr19:7245761-7245803
  hypo

SEQ ID NO: 448742 - DNA, 42 bp, Homo sapiens; identical to SEQ ID NO: 273194
  chr19:7256901-7256943
  hypo

SEQ ID NO: 448743 - DNA, 84 bp, Homo sapiens; identical to SEQ ID NO: 273195
  chr19:7265367-7265451
  hypo

SEQ ID NO: 448744 - DNA, 120 bp, Homo sapiens; identical to SEQ ID NO: 273197
  chr19:7274391-7274511
  hypo

SEQ ID NO: 448745 - DNA, 1375 bp, Homo sapiens; identical to SEQ ID NO: 293433
  chr19:7293746-7295121
  hypo

SEQ ID NO: 448746 - DNA, 188 bp, Homo sapiens; identical to SEQ ID NO: 219070
  chr19:7484059-7484247
  hypo

SEQ ID NO: 448747 - DNA, 179 bp, Homo sapiens; identical to SEQ ID NO: 219071
  chr19:7484791-7484970
  hypo

SEQ ID NO: 448748 - DNA, 96 bp, Homo sapiens; identical to SEQ ID NO: 273200
  chr19:7487170-7487266
  hypo

SEQ ID NO: 448749 - DNA, 100 bp, Homo sapiens; identical to SEQ ID NO: 273201
  chr19:7489520-7489620
  hypo

SEQ ID NO: 448750 - DNA, 39 bp, Homo sapiens; identical to SEQ ID NO: 273202
  chr19:7489860-7489899
  hypo

SEQ ID NO: 448751 - DNA, 42 bp, Homo sapiens; identical to SEQ ID NO: 273204
  chr19:7524840-7524882
  hypo

SEQ ID NO: 448752 - DNA, 201 bp, Homo sapiens; identical to SEQ ID NO: 273205
  chr19:7525505-7525706
  hypo

SEQ ID NO: 448753 - DNA, 220 bp, Homo sapiens; identical to SEQ ID NO: 273206
  chr19:7531952-7532172
  hypo

SEQ ID NO: 448754 - DNA, 316 bp, Homo sapiens; identical to SEQ ID NO: 219073
  chr19:7535298-7535614
  hypo

SEQ ID NO: 448755 - DNA, 242 bp, Homo sapiens; identical to SEQ ID NO: 293435
  chr19:7553842-7554084
  hypo

SEQ ID NO: 448756 - DNA, 180 bp, Homo sapiens; identical to SEQ ID NO: 273209
  chr19:7555031-7555211
  hypo

SEQ ID NO: 448757 - DNA, 663 bp, Homo sapiens; identical to SEQ ID NO: 273210
  chr19:7619582-7620245
  hypo

SEQ ID NO: 448758 - DNA, 232 bp, Homo sapiens; identical to SEQ ID NO: 273211
  chr19:7621735-7621967
  hypo

SEQ ID NO: 448759 - DNA, 172 bp, Homo sapiens; identical to SEQ ID NO: 273212
  chr19:7626304-7626476
  hypo

SEQ ID NO: 448760 - DNA, 75 bp, Homo sapiens
  chr19:7646057-7646132
  hypo
gttaatgcatgcaattctgtgggtattactggttacctttgtaaatatttgagtatgtatttgtggatattatct

SEQ ID NO: 448761 - DNA, 159 bp, Homo sapiens; identical to SEQ ID NO: 273214
  chr19:7655856-7656015
  hypo

SEQ ID NO: 448762 - DNA, 83 bp, Homo sapiens; identical to SEQ ID NO: 205151
  chr19:7660603-7660686
  hypo

SEQ ID NO: 448763 - DNA, 278 bp, Homo sapiens; identical to SEQ ID NO: 55532
  chr19:7660714-7660992
  hypo

SEQ ID NO: 448764 - DNA, 1166 bp, Homo sapiens; identical to SEQ ID NO: 205153
  chr19:7676864-7678030
  hypo

SEQ ID NO: 448765 - DNA, 613 bp, Homo sapiens; identical to SEQ ID NO: 273216
  chr19:7680032-7680645
  hypo

SEQ ID NO: 448766 - DNA, 99 bp, Homo sapiens; identical to SEQ ID NO: 273217
  chr19:7681577-7681676
  hypo

SEQ ID NO: 448767 - DNA, 90 bp, Homo sapiens; identical to SEQ ID NO: 219079
  chr19:7682911-7683001
  hypo

SEQ ID NO: 448768 - DNA, 109 bp, Homo sapiens; identical to SEQ ID NO: 219081
  chr19:7701077-7701186
  hypo

SEQ ID NO: 448769 - DNA, 259 bp, Homo sapiens; identical to SEQ ID NO: 219082
  chr19:7711957-7712216
  hypo

SEQ ID NO: 448770 - DNA, 61 bp, Homo sapiens; identical to SEQ ID NO: 273223
  chr19:7747699-7747760
  hypo

SEQ ID NO: 448771 - DNA, 44 bp, Homo sapiens; identical to SEQ ID NO: 273225
  chr19:7862879-7862923
  hypo

SEQ ID NO: 448772 - DNA, 146 bp, Homo sapiens; identical to SEQ ID NO: 325430
  chr19:7914804-7914950
  hypo

SEQ ID NO: 448773 - DNA, 196 bp, Homo sapiens; identical to SEQ ID NO: 273227
  chr19:7917147-7917343
  hypo

SEQ ID NO: 448774 - DNA, 312 bp, Homo sapiens; identical to SEQ ID NO: 273228
  chr19:7920730-7921042
  hypo

SEQ ID NO: 448775 - DNA, 50 bp, Homo sapiens; identical to SEQ ID NO: 219085
  chr19:7989496-7989546
  hypo

SEQ ID NO: 448776 - DNA, 170 bp, Homo sapiens; identical to SEQ ID NO: 205157
  chr19:7990126-7990296
  hypo

SEQ ID NO: 448777 - DNA, 300 bp, Homo sapiens; identical to SEQ ID NO: 205158
  chr19:7990894-7991194
  hypo

SEQ ID NO: 448778 - DNA, 58 bp, Homo sapiens; identical to SEQ ID NO: 273233
  chr19:7993373-7993431
  hypo

SEQ ID NO: 448779 - DNA, 439 bp, Homo sapiens; identical to SEQ ID NO: 273234
  chr19:7993744-7994183
  hypo

SEQ ID NO: 448780 - DNA, 486 bp, Homo sapiens; identical to SEQ ID NO: 273236
  chr19:7998974-7999460
  hypo

SEQ ID NO: 448781 - DNA, 206 bp, Homo sapiens; identical to SEQ ID NO: 273238
  chr19:8028628-8028834
  hypo

SEQ ID NO: 448782 - DNA, 235 bp, Homo sapiens; identical to SEQ ID NO: 273239
  chr19:8052094-8052329
  hypo

SEQ ID NO: 448783 - DNA, 89 bp, Homo sapiens; identical to SEQ ID NO: 273240
  chr19:8052777-8052866
  hypo

SEQ ID NO: 448784 - DNA, 49 bp, Homo sapiens; identical to SEQ ID NO: 325447
  chr19:8082469-8082518
  hypo

SEQ ID NO: 448785 - DNA, 56 bp, Homo sapiens; identical to SEQ ID NO: 325448
  chr19:8082560-8082616
  hypo

SEQ ID NO: 448786 - DNA, 175 bp, Homo sapiens; identical to SEQ ID NO: 273243
  chr19:8127043-8127218
  hypo

SEQ ID NO: 448787 - DNA, 145 bp, Homo sapiens; identical to SEQ ID NO: 219092
  chr19:8148323-8148468
  hypo

SEQ ID NO: 448788 - DNA, 604 bp, Homo sapiens; identical to SEQ ID NO: 273245
  chr19:8191121-8191725
  hypo

SEQ ID NO: 448789 - DNA, 99 bp, Homo sapiens; identical to SEQ ID NO: 273246
  chr19:8201335-8201434
  hypo

SEQ ID NO: 448790 - DNA, 37 bp, Homo sapiens; identical to SEQ ID NO: 273247
  chr19:8203390-8203427
  hypo

SEQ ID NO: 448791 - DNA, 52 bp, Homo sapiens; identical to SEQ ID NO: 325455
  chr19:8253593-8253645
  hypo

SEQ ID NO: 448792 - DNA, 45 bp, Homo sapiens; identical to SEQ ID NO: 273249
  chr19:8440196-8440241
  hypo

SEQ ID NO: 448793 - DNA, 253 bp, Homo sapiens; identical to SEQ ID NO: 273251
  chr19:8468435-8468688
  hypo

SEQ ID NO: 448794 - DNA, 120 bp, Homo sapiens; identical to SEQ ID NO: 273252
  chr19:8472051-8472171
  hypo

SEQ ID NO: 448795 - DNA, 120 bp, Homo sapiens; identical to SEQ ID NO: 273253
  chr19:8474998-8475118
  hypo

SEQ ID NO: 448796 - DNA, 40 bp, Homo sapiens; identical to SEQ ID NO: 325462
  chr19:8475525-8475565
  hypo

SEQ ID NO: 448797 - DNA, 228 bp, Homo sapiens; identical to SEQ ID NO: 273255
  chr19:8495657-8495885
  hypo

SEQ ID NO: 448798 - DNA, 156 bp, Homo sapiens; identical to SEQ ID NO: 219096
  chr19:8528411-8528567
  hypo

SEQ ID NO: 448799 - DNA, 38 bp, Homo sapiens; identical to SEQ ID NO: 219097
  chr19:8539870-8539908
  hypo

SEQ ID NO: 448800 - DNA, 37 bp, Homo sapiens; identical to SEQ ID NO: 273261
  chr19:8547111-8547148
  hypo

SEQ ID NO: 448801 - DNA, 164 bp, Homo sapiens; identical to SEQ ID NO: 273262
  chr19:8554605-8554769
  hypo

SEQ ID NO: 448802 - DNA, 188 bp, Homo sapiens; identical to SEQ ID NO: 273264
  chr19:8575552-8575740
  hypo

SEQ ID NO: 448803 - DNA, 65 bp, Homo sapiens; identical to SEQ ID NO: 219100
  chr19:8577130-8577195
  hypo

SEQ ID NO: 448804 - DNA, 227 bp, Homo sapiens; identical to SEQ ID NO: 225772
  chr19:8579005-8579232
  hypo

SEQ ID NO: 448805 - DNA, 204 bp, Homo sapiens; identical to SEQ ID NO: 219101
  chr19:8587385-8587589
  hypo

SEQ ID NO: 448806 - DNA, 179 bp, Homo sapiens; identical to SEQ ID NO: 273268
  chr19:8604833-8605012
  hypo

SEQ ID NO: 448807 - DNA, 228 bp, Homo sapiens; identical to SEQ ID NO: 273270
  chr19:8618012-8618240
  hypo

SEQ ID NO: 448808 - DNA, 55 bp, Homo sapiens; identical to SEQ ID NO: 273271
  chr19:8934836-8934891
  hypo

SEQ ID NO: 448809 - DNA, 157 bp, Homo sapiens; identical to SEQ ID NO: 273273
  chr19:9130022-9130179
  hypo

SEQ ID NO: 448810 - DNA, 223 bp, Homo sapiens; identical to SEQ ID NO: 273274
  chr19:9204274-9204497
  hypo

SEQ ID NO: 448811 - DNA, 86 bp, Homo sapiens; identical to SEQ ID NO: 219103
  chr19:9343354-9343440
  hypo

SEQ ID NO: 448812 - DNA, 44 bp, Homo sapiens; identical to SEQ ID NO: 219104
  chr19:9371593-9371637
  hypo

SEQ ID NO: 448813 - DNA, 37 bp, Homo sapiens; identical to SEQ ID NO: 273277
  chr19:9459898-9459935
  hypo

SEQ ID NO: 448814 - DNA, 217 bp, Homo sapiens; identical to SEQ ID NO: 205164
  chr19:9648914-9649131
  hypo

SEQ ID NO: 448815 - DNA, 101 bp, Homo sapiens; identical to SEQ ID NO: 293476
  chr19:9649390-9649491
  hypo

SEQ ID NO: 448816 - DNA, 91 bp, Homo sapiens; identical to SEQ ID NO: 273278
  chr19:9845537-9845628
  hypo

SEQ ID NO: 448817 - DNA, 105 bp, Homo sapiens; identical to SEQ ID NO: 273279
  chr19:9894646-9894751
  hypo

SEQ ID NO: 448818 - DNA, 38 bp, Homo sapiens; identical to SEQ ID NO: 273280
  chr19:9921966-9922004
  hypo

SEQ ID NO: 448819 - DNA, 38 bp, Homo sapiens; identical to SEQ ID NO: 325493
  chr19:9937315-9937353
  hypo

SEQ ID NO: 448820 - DNA, 86 bp, Homo sapiens; identical to SEQ ID NO: 273283
  chr19:9961443-9961529
  hypo

SEQ ID NO: 448821 - DNA, 135 bp, Homo sapiens; identical to SEQ ID NO: 273284
  chr19:9961559-9961694
  hypo

SEQ ID NO: 448822 - DNA, 226 bp, Homo sapiens; identical to SEQ ID NO: 273285
  chr19:9965157-9965383
  hypo

SEQ ID NO: 448823 - DNA, 91 bp, Homo sapiens; identical to SEQ ID NO: 273286
  chr19:9967993-9968084
  hypo

SEQ ID NO: 448824 - DNA, 170 bp, Homo sapiens; identical to SEQ ID NO: 273287
  chr19:10016590-10016760
  hypo

SEQ ID NO: 448825 - DNA, 274 bp, Homo sapiens; identical to SEQ ID NO: 325500
  chr19:10142052-10142326
  hypo

SEQ ID NO: 448826 - DNA, 33 bp, Homo sapiens; identical to SEQ ID NO: 273289
  chr19:10171191-10171224
  hypo

SEQ ID NO: 448827 - DNA, 42 bp, Homo sapiens; identical to SEQ ID NO: 273290
  chr19:10204397-10204439
  hypo

SEQ ID NO: 448828 - DNA, 114 bp, Homo sapiens; identical to SEQ ID NO: 273291
  chr19:10220395-10220509
  hypo

SEQ ID NO: 448829 - DNA, 143 bp, Homo sapiens; identical to SEQ ID NO: 219110
  chr19:10231242-10231385
  hypo

SEQ ID NO: 448830 - DNA, 115 bp, Homo sapiens; identical to SEQ ID NO: 219111
  chr19:10246096-10246211
  hypo

SEQ ID NO: 448831 - DNA, 253 bp, Homo sapiens; identical to SEQ ID NO: 219112
  chr19:10246253-10246506
  hypo

SEQ ID NO: 448832 - DNA, 416 bp, Homo sapiens; identical to SEQ ID NO: 219113
  chr19:10246566-10246982
  hypo

SEQ ID NO: 448833 - DNA, 262 bp, Homo sapiens; identical to SEQ ID NO: 225775
  chr19:10252656-10252918
  hypo

SEQ ID NO: 448834 - DNA, 210 bp, Homo sapiens; identical to SEQ ID NO: 293487
  chr19:10253329-10253539
  hypo

SEQ ID NO: 448835 - DNA, 90 bp, Homo sapiens; identical to SEQ ID NO: 219114
  chr19:10253815-10253905
  hypo

SEQ ID NO: 448836 - DNA, 32 bp, Homo sapiens; identical to SEQ ID NO: 273296
  chr19:10295209-10295241
  hypo

SEQ ID NO: 448837 - DNA, 31 bp, Homo sapiens; identical to SEQ ID NO: 273297
  chr19:10295301-10295332
  hypo

SEQ ID NO: 448838 - DNA, 145 bp, Homo sapiens; identical to SEQ ID NO: 219115
  chr19:10295674-10295819
  hypo

SEQ ID NO: 448839 - DNA, 114 bp, Homo sapiens; identical to SEQ ID NO: 273299
  chr19:10338378-10338492
  hypo

SEQ ID NO: 448840 - DNA, 146 bp, Homo sapiens; identical to SEQ ID NO: 273300
  chr19:10350517-10350663
  hypo

SEQ ID NO: 448841 - DNA, 184 bp, Homo sapiens; identical to SEQ ID NO: 225777
  chr19:10363159-10363343
  hypo

SEQ ID NO: 448842 - DNA, 42 bp, Homo sapiens; identical to SEQ ID NO: 273302
  chr19:10385884-10385926
  hypo

SEQ ID NO: 448843 - DNA, 42 bp, Homo sapiens; identical to SEQ ID NO: 273303
  chr19:10394496-10394538
  hypo

SEQ ID NO: 448844 - DNA, 284 bp, Homo sapiens; identical to SEQ ID NO: 293497
  chr19:10399791-10400075
  hypo

SEQ ID NO: 448845 - DNA, 306 bp, Homo sapiens; identical to SEQ ID NO: 273305
  chr19:10420150-10420456
  hypo

SEQ ID NO: 448846 - DNA, 329 bp, Homo sapiens; identical to SEQ ID NO: 273306
  chr19:10432996-10433325
  hypo

SEQ ID NO: 448847 - DNA, 145 bp, Homo sapiens; identical to SEQ ID NO: 225785
  chr19:10589794-10589939
  hypo

SEQ ID NO: 448848 - DNA, 116 bp, Homo sapiens; identical to SEQ ID NO: 219126
  chr19:10685492-10685608
  hypo

SEQ ID NO: 448849 - DNA, 34 bp, Homo sapiens
  chr19:10687626-10687660
  hypo
gcccagctcctcttaatatttttatagaggcagg

SEQ ID NO: 448850 - DNA, 133 bp, Homo sapiens
  chr19:10687720-10687853
  hypo
agcctctcaaagtactggcattccagtcatgagccatcacacctgactgggtctctgatttgttctctgccttgttctcatggctcctgggcagcccccacactactccagtcccctccacccccagatcccc

SEQ ID NO: 448851 - DNA, 42 bp, Homo sapiens; identical to SEQ ID NO: 273313
  chr19:10689002-10689044
  hypo

SEQ ID NO: 448852 - DNA, 145 bp, Homo sapiens; identical to SEQ ID NO: 273314
  chr19:10732739-10732884
  hypo

SEQ ID NO: 448853 - DNA, 104 bp, Homo sapiens; identical to SEQ ID NO: 273315
  chr19:10742231-10742335
  hypo

SEQ ID NO: 448854 - DNA, 108 bp, Homo sapiens; identical to SEQ ID NO: 219130
  chr19:10747314-10747422
  hypo

SEQ ID NO: 448855 - DNA, 544 bp, Homo sapiens; identical to SEQ ID NO: 273318
  chr19:10792601-10793145
  hypo

SEQ ID NO: 448856 - DNA, 36 bp, Homo sapiens; identical to SEQ ID NO: 219132
  chr19:10794362-10794398
  hypo

SEQ ID NO: 448857 - DNA, 317 bp, Homo sapiens; identical to SEQ ID NO: 273321
  chr19:10818162-10818479
  hypo

SEQ ID NO: 448858 - DNA, 147 bp, Homo sapiens; identical to SEQ ID NO: 273322
  chr19:10822778-10822925
  hypo

SEQ ID NO: 448859 - DNA, 31 bp, Homo sapiens; identical to SEQ ID NO: 219136
  chr19:10824430-10824461
  hypo

SEQ ID NO: 448860 - DNA, 164 bp, Homo sapiens; identical to SEQ ID NO: 273325
  chr19:10848455-10848619
  hypo

SEQ ID NO: 448861 - DNA, 204 bp, Homo sapiens; identical to SEQ ID NO: 325553
  chr19:10859009-10859213
  hypo

SEQ ID NO: 448862 - DNA, 52 bp, Homo sapiens; identical to SEQ ID NO: 412734
  chr19:10875607-10875659
  hypo

SEQ ID NO: 448863 - DNA, 207 bp, Homo sapiens; identical to SEQ ID NO: 273331
  chr19:10881732-10881939
  hypo

SEQ ID NO: 448864 - DNA, 298 bp, Homo sapiens; identical to SEQ ID NO: 273332
  chr19:10907904-10908202
  hypo

SEQ ID NO: 448865 - DNA, 90 bp, Homo sapiens; identical to SEQ ID NO: 273333
  chr19:10927555-10927645
  hypo

SEQ ID NO: 448866 - DNA, 57 bp, Homo sapiens; identical to SEQ ID NO: 273334
  chr19:10928043-10928100
  hypo

SEQ ID NO: 448867 - DNA, 129 bp, Homo sapiens; identical to SEQ ID NO: 273335
  chr19:10928842-10928971
  hypo

SEQ ID NO: 448868 - DNA, 151 bp, Homo sapiens; identical to SEQ ID NO: 325565
  chr19:11002590-11002741
  hypo

SEQ ID NO: 448869 - DNA, 45 bp, Homo sapiens; identical to SEQ ID NO: 219144
  chr19:11017077-11017122
  hypo

SEQ ID NO: 448870 - DNA, 263 bp, Homo sapiens; identical to SEQ ID NO: 273344
  chr19:11026626-11026889
  hypo

SEQ ID NO: 448871 - DNA, 196 bp, Homo sapiens; identical to SEQ ID NO: 273346
  chr19:11031991-11032187
  hypo

SEQ ID NO: 448872 - DNA, 180 bp, Homo sapiens; identical to SEQ ID NO: 273347
  chr19:11068308-11068488
  hypo

SEQ ID NO: 448873 - DNA, 39 bp, Homo sapiens; identical to SEQ ID NO: 273348
  chr19:11077567-11077606
  hypo

SEQ ID NO: 448874 - DNA, 101 bp, Homo sapiens; identical to SEQ ID NO: 273349
  chr19:11084520-11084621
  hypo

SEQ ID NO: 448875 - DNA, 36 bp, Homo sapiens; identical to SEQ ID NO: 219146
  chr19:11117137-11117173
  hypo

SEQ ID NO: 448876 - DNA, 183 bp, Homo sapiens; identical to SEQ ID NO: 219148
  chr19:11145621-11145804
  hypo

SEQ ID NO: 448877 - DNA, 248 bp, Homo sapiens; identical to SEQ ID NO: 273355
  chr19:11151830-11152078
  hypo

SEQ ID NO: 448878 - DNA, 330 bp, Homo sapiens; identical to SEQ ID NO: 273357
  chr19:11154843-11155173
  hypo

SEQ ID NO: 448879 - DNA, 51 bp, Homo sapiens
  chr19:11172377-11172428
  hypo
tatttaaagtttggcaggtccctggcaaggtgccctggcaggggtggccaa

SEQ ID NO: 448880 - DNA, 84 bp, Homo sapiens; identical to SEQ ID NO: 424770
  chr19:11200027-11200111
  hypo

SEQ ID NO: 448881 - DNA, 460 bp, Homo sapiens; identical to SEQ ID NO: 205181
  chr19:11200842-11201302
  hypo

SEQ ID NO: 448882 - DNA, 270 bp, Homo sapiens; identical to SEQ ID NO: 273361
  chr19:11213902-11214172
  hypo

SEQ ID NO: 448883 - DNA, 233 bp, Homo sapiens; identical to SEQ ID NO: 219153
  chr19:11215985-11216218
  hypo

SEQ ID NO: 448884 - DNA, 153 bp, Homo sapiens; identical to SEQ ID NO: 219154
  chr19:11289073-11289226
  hypo

SEQ ID NO: 448885 - DNA, 330 bp, Homo sapiens; identical to SEQ ID NO: 205183
  chr19:11308102-11308432
  hypo

SEQ ID NO: 448886 - DNA, 59 bp, Homo sapiens; identical to SEQ ID NO: 273367
  chr19:11319674-11319733
  hypo

SEQ ID NO: 448887 - DNA, 176 bp, Homo sapiens; identical to SEQ ID NO: 273368
  chr19:11327510-11327686
  hypo

SEQ ID NO: 448888 - DNA, 63 bp, Homo sapiens; identical to SEQ ID NO: 273369
  chr19:11333607-11333670
  hypo

SEQ ID NO: 448889 - DNA, 150 bp, Homo sapiens; identical to SEQ ID NO: 219157
  chr19:11339623-11339773
  hypo

SEQ ID NO: 448890 - DNA, 42 bp, Homo sapiens; identical to SEQ ID NO: 225794
  chr19:11373072-11373114
  hypo

SEQ ID NO: 448891 - DNA, 300 bp, Homo sapiens; identical to SEQ ID NO: 219159
  chr19:11473074-11473374
  hypo

SEQ ID NO: 448892 - DNA, 134 bp, Homo sapiens; identical to SEQ ID NO: 273372
  chr19:11510383-11510517
  hypo

SEQ ID NO: 448893 - DNA, 40 bp, Homo sapiens; identical to SEQ ID NO: 219160
  chr19:11549272-11549312
  hypo

SEQ ID NO: 448894 - DNA, 184 bp, Homo sapiens; identical to SEQ ID NO: 219161
  chr19:11559278-11559462
  hypo

SEQ ID NO: 448895 - DNA, 401 bp, Homo sapiens; identical to SEQ ID NO: 273375
  chr19:11559905-11560306
  hypo

SEQ ID NO: 448896 - DNA, 155 bp, Homo sapiens; identical to SEQ ID NO: 219163
  chr19:11565669-11565824
  hypo

SEQ ID NO: 448897 - DNA, 528 bp, Homo sapiens; identical to SEQ ID NO: 273378
  chr19:11598119-11598647
  hypo

SEQ ID NO: 448898 - DNA, 370 bp, Homo sapiens; identical to SEQ ID NO: 219165
  chr19:11605729-11606099
  hypo

SEQ ID NO: 448899 - DNA, 96 bp, Homo sapiens; identical to SEQ ID NO: 273382
  chr19:11699967-11700063
  hypo

SEQ ID NO: 448900 - DNA, 39 bp, Homo sapiens; identical to SEQ ID NO: 325616
  chr19:11788684-11788723
  hypo

SEQ ID NO: 448901 - DNA, 156 bp, Homo sapiens; identical to SEQ ID NO: 273384
  chr19:11794320-11794476
  hypo

SEQ ID NO: 448902 - DNA, 148 bp, Homo sapiens; identical to SEQ ID NO: 273385
  chr19:11820662-11820810
  hypo

SEQ ID NO: 448903 - DNA, 44 bp, Homo sapiens; identical to SEQ ID NO: 325619
  chr19:11926785-11926829
  hypo

SEQ ID NO: 448904 - DNA, 89 bp, Homo sapiens; identical to SEQ ID NO: 273388
  chr19:11961501-11961590
  hypo

SEQ ID NO: 448905 - DNA, 42 bp, Homo sapiens; identical to SEQ ID NO: 273389
  chr19:12177042-12177084
  hypo

SEQ ID NO: 448906 - DNA, 37 bp, Homo sapiens; identical to SEQ ID NO: 273390
  chr19:12177363-12177400
  hypo

SEQ ID NO: 448907 - DNA, 33 bp, Homo sapiens; identical to SEQ ID NO: 205204
  chr19:12204551-12204584
  hypo

SEQ ID NO: 448908 - DNA, 360 bp, Homo sapiens; identical to SEQ ID NO: 273391
  chr19:12205465-12205825
  hypo

SEQ ID NO: 448909 - DNA, 89 bp, Homo sapiens; identical to SEQ ID NO: 273392
  chr19:12260460-12260549
  hypo

SEQ ID NO: 448910 - DNA, 43 bp, Homo sapiens; identical to SEQ ID NO: 273393
  chr19:12416132-12416175
  hypo

SEQ ID NO: 448911 - DNA, 111 bp, Homo sapiens; identical to SEQ ID NO: 219170
  chr19:12418638-12418749
  hypo

SEQ ID NO: 448912 - DNA, 145 bp, Homo sapiens; identical to SEQ ID NO: 273395
  chr19:12461696-12461841
  hypo

SEQ ID NO: 448913 - DNA, 251 bp, Homo sapiens; identical to SEQ ID NO: 273396
  chr19:12691091-12691342
  hypo

SEQ ID NO: 448914 - DNA, 40 bp, Homo sapiens; identical to SEQ ID NO: 273397
  chr19:12701915-12701955
  hypo

SEQ ID NO: 448915 - DNA, 132 bp, Homo sapiens; identical to SEQ ID NO: 225804
  chr19:12707774-12707906
  hypo

SEQ ID NO: 448916 - DNA, 120 bp, Homo sapiens; identical to SEQ ID NO: 219173
  chr19:12710770-12710890
  hypo

SEQ ID NO: 448917 - DNA, 95 bp, Homo sapiens; identical to SEQ ID NO: 219174
  chr19:12729967-12730062
  hypo

SEQ ID NO: 448918 - DNA, 120 bp, Homo sapiens; identical to SEQ ID NO: 219175
  chr19:12746886-12747006
  hypo

SEQ ID NO: 448919 - DNA, 70 bp, Homo sapiens; identical to SEQ ID NO: 273402
  chr19:12748932-12749002
  hypo

SEQ ID NO: 448920 - DNA, 78 bp, Homo sapiens; identical to SEQ ID NO: 273404
  chr19:12755553-12755631
  hypo

SEQ ID NO: 448921 - DNA, 186 bp, Homo sapiens; identical to SEQ ID NO: 273405
  chr19:12757981-12758167
  hypo

SEQ ID NO: 448922 - DNA, 197 bp, Homo sapiens; identical to SEQ ID NO: 219176
  chr19:12794668-12794865
  hypo

SEQ ID NO: 448923 - DNA, 33 bp, Homo sapiens; identical to SEQ ID NO: 273407
  chr19:12795863-12795896
  hypo

SEQ ID NO: 448924 - DNA, 51 bp, Homo sapiens; identical to SEQ ID NO: 219178
  chr19:12811290-12811341
  hypo

SEQ ID NO: 448925 - DNA, 204 bp, Homo sapiens; identical to SEQ ID NO: 219179
  chr19:12817328-12817532
  hypo

SEQ ID NO: 448926 - DNA, 190 bp, Homo sapiens; identical to SEQ ID NO: 273410
  chr19:12885520-12885710
  hypo

SEQ ID NO: 448927 - DNA, 101 bp, Homo sapiens; identical to SEQ ID NO: 273412
  chr19:12928674-12928775
  hypo

SEQ ID NO: 448928 - DNA, 149 bp, Homo sapiens; identical to SEQ ID NO: 273413
  chr19:12953398-12953547
  hypo

SEQ ID NO: 448929 - DNA, 218 bp, Homo sapiens; identical to SEQ ID NO: 325652
  chr19:12969190-12969408
  hypo

SEQ ID NO: 448930 - DNA, 156 bp, Homo sapiens; identical to SEQ ID NO: 325653
  chr19:12969470-12969626
  hypo

SEQ ID NO: 448931 - DNA, 88 bp, Homo sapiens; identical to SEQ ID NO: 325655
  chr19:12985226-12985314
  hypo

SEQ ID NO: 448932 - DNA, 295 bp, Homo sapiens; identical to SEQ ID NO: 273417
  chr19:12985537-12985832
  hypo

SEQ ID NO: 448933 - DNA, 73 bp, Homo sapiens; identical to SEQ ID NO: 273418
  chr19:12986930-12987003
  hypo

SEQ ID NO: 448934 - DNA, 45 bp, Homo sapiens; identical to SEQ ID NO: 273419
  chr19:13007716-13007761
  hypo

SEQ ID NO: 448935 - DNA, 89 bp, Homo sapiens; identical to SEQ ID NO: 219181
  chr19:13010440-13010529
  hypo

SEQ ID NO: 448936 - DNA, 75 bp, Homo sapiens; identical to SEQ ID NO: 273421
  chr19:13017983-13018058
  hypo

SEQ ID NO: 448937 - DNA, 146 bp, Homo sapiens; identical to SEQ ID NO: 273422
  chr19:13023066-13023212
  hypo

SEQ ID NO: 448938 - DNA, 36 bp, Homo sapiens; identical to SEQ ID NO: 226559
  chr19:13029431-13029467
  hypo

SEQ ID NO: 448939 - DNA, 106 bp, Homo sapiens; identical to SEQ ID NO: 293600
  chr19:13029767-13029873
  hypo

SEQ ID NO: 448940 - DNA, 77 bp, Homo sapiens; identical to SEQ ID NO: 205218
  chr19:13030316-13030393
  hypo

SEQ ID NO: 448941 - DNA, 513 bp, Homo sapiens; identical to SEQ ID NO: 205219
  chr19:13049935-13050448
  hypo

SEQ ID NO: 448942 - DNA, 828 bp, Homo sapiens; identical to SEQ ID NO: 205220
  chr19:13050858-13051686
  hypo

SEQ ID NO: 448943 - DNA, 931 bp, Homo sapiens; identical to SEQ ID NO: 205221
  chr19:13054373-13055304
  hypo

SEQ ID NO: 448944 - DNA, 49 bp, Homo sapiens; identical to SEQ ID NO: 325669
  chr19:13071906-13071955
  hypo

SEQ ID NO: 448945 - DNA, 131 bp, Homo sapiens; identical to SEQ ID NO: 205222
  chr19:13094456-13094587
  hypo

SEQ ID NO: 448946 - DNA, 983 bp, Homo sapiens; identical to SEQ ID NO: 293609
  chr19:13106028-13107011
  hypo

SEQ ID NO: 448947 - DNA, 354 bp, Homo sapiens; identical to SEQ ID NO: 293610
  chr19:13107035-13107389
  hypo

SEQ ID NO: 448948 - DNA, 35 bp, Homo sapiens
  chr19:13110309-13110344
  hypo
acacacacacacacacacacaaatatgcaccaatg

SEQ ID NO: 448949 - DNA, 147 bp, Homo sapiens; identical to SEQ ID NO: 273429
  chr19:13111557-13111704
  hypo

SEQ ID NO: 448950 - DNA, 93 bp, Homo sapiens; identical to SEQ ID NO: 219197
  chr19:13115952-13116045
  hypo

SEQ ID NO: 448951 - DNA, 337 bp, Homo sapiens; identical to SEQ ID NO: 273433
  chr19:13117705-13118042
  hypo

SEQ ID NO: 448952 - DNA, 36 bp, Homo sapiens; identical to SEQ ID NO: 273434
  chr19:13119308-13119344
  hypo

SEQ ID NO: 448953 - DNA, 173 bp, Homo sapiens; identical to SEQ ID NO: 273436
  chr19:13150456-13150629
  hypo

SEQ ID NO: 448954 - DNA, 228 bp, Homo sapiens; identical to SEQ ID NO: 273437
  chr19:13151483-13151711
  hypo

SEQ ID NO: 448955 - DNA, 37 bp, Homo sapiens; identical to SEQ ID NO: 273438
  chr19:13154726-13154763
  hypo

SEQ ID NO: 448956 - DNA, 98 bp, Homo sapiens; identical to SEQ ID NO: 219199
  chr19:13160324-13160422
  hypo

SEQ ID NO: 448957 - DNA, 178 bp, Homo sapiens; identical to SEQ ID NO: 273441
  chr19:13177633-13177811
  hypo

SEQ ID NO: 448958 - DNA, 39 bp, Homo sapiens; identical to SEQ ID NO: 219200
  chr19:13179793-13179832
  hypo

SEQ ID NO: 448959 - DNA, 80 bp, Homo sapiens; identical to SEQ ID NO: 219201
  chr19:13196307-13196387
  hypo

SEQ ID NO: 448960 - DNA, 211 bp, Homo sapiens; identical to SEQ ID NO: 273447
  chr19:13197662-13197873
  hypo

SEQ ID NO: 448961 - DNA, 53 bp, Homo sapiens; identical to SEQ ID NO: 219202
  chr19:13199713-13199766
  hypo

SEQ ID NO: 448962 - DNA, 89 bp, Homo sapiens; identical to SEQ ID NO: 219205
  chr19:13218631-13218720
  hypo

SEQ ID NO: 448963 - DNA, 107 bp, Homo sapiens; identical to SEQ ID NO: 273451
  chr19:13249109-13249216
  hypo

SEQ ID NO: 448964 - DNA, 112 bp, Homo sapiens; identical to SEQ ID NO: 273452
  chr19:13252910-13253022
  hypo

SEQ ID NO: 448965 - DNA, 119 bp, Homo sapiens; identical to SEQ ID NO: 225817
  chr19:13263755-13263874
  hypo

SEQ ID NO: 448966 - DNA, 817 bp, Homo sapiens; identical to SEQ ID NO: 293620
  chr19:13264169-13264986
  hypo

SEQ ID NO: 448967 - DNA, 62 bp, Homo sapiens; identical to SEQ ID NO: 205232
  chr19:13274019-13274081
  hypo

SEQ ID NO: 448968 - DNA, 42 bp, Homo sapiens; identical to SEQ ID NO: 273453
  chr19:13287254-13287296
  hypo

SEQ ID NO: 448969 - DNA, 131 bp, Homo sapiens; identical to SEQ ID NO: 273454
  chr19:13309845-13309976
  hypo

SEQ ID NO: 448970 - DNA, 55 bp, Homo sapiens; identical to SEQ ID NO: 219208
  chr19:13332535-13332590
  hypo

SEQ ID NO: 448971 - DNA, 205 bp, Homo sapiens; identical to SEQ ID NO: 273456
  chr19:13346307-13346512
  hypo

SEQ ID NO: 448972 - DNA, 69 bp, Homo sapiens; identical to SEQ ID NO: 273457
  chr19:13347071-13347140
  hypo

SEQ ID NO: 448973 - DNA, 130 bp, Homo sapiens; identical to SEQ ID NO: 219209
  chr19:13397529-13397659
  hypo

SEQ ID NO: 448974 - DNA, 139 bp, Homo sapiens; identical to SEQ ID NO: 273459
  chr19:13458299-13458438
  hypo

SEQ ID NO: 448975 - DNA, 105 bp, Homo sapiens; identical to SEQ ID NO: 273460
  chr19:13490331-13490436
  hypo

SEQ ID NO: 448976 - DNA, 38 bp, Homo sapiens; identical to SEQ ID NO: 273461
  chr19:13580551-13580589
  hypo

SEQ ID NO: 448977 - DNA, 159 bp, Homo sapiens; identical to SEQ ID NO: 219210
  chr19:13873457-13873616
  hypo

SEQ ID NO: 448978 - DNA, 199 bp, Homo sapiens; identical to SEQ ID NO: 273464
  chr19:13919891-13920090
  hypo

SEQ ID NO: 448979 - DNA, 49 bp, Homo sapiens; identical to SEQ ID NO: 325720
  chr19:13936528-13936577
  hypo

SEQ ID NO: 448980 - DNA, 71 bp, Homo sapiens; identical to SEQ ID NO: 325721
  chr19:13936712-13936783
  hypo

SEQ ID NO: 448981 - DNA, 136 bp, Homo sapiens; identical to SEQ ID NO: 273466
  chr19:13941061-13941197
  hypo

SEQ ID NO: 448982 - DNA, 117 bp, Homo sapiens; identical to SEQ ID NO: 325723
  chr19:13943491-13943608
  hypo

SEQ ID NO: 448983 - DNA, 418 bp, Homo sapiens; identical to SEQ ID NO: 205234
  chr19:13961290-13961708
  hypo

SEQ ID NO: 448984 - DNA, 38 bp, Homo sapiens; identical to SEQ ID NO: 273469
  chr19:13969423-13969461
  hypo

SEQ ID NO: 448985 - DNA, 221 bp, Homo sapiens; identical to SEQ ID NO: 225824
  chr19:13975797-13976018
  hypo

SEQ ID NO: 448986 - DNA, 97 bp, Homo sapiens; identical to SEQ ID NO: 273470
  chr19:13987350-13987447
  hypo

SEQ ID NO: 448987 - DNA, 209 bp, Homo sapiens; identical to SEQ ID NO: 219213
  chr19:14000962-14001171
  hypo

SEQ ID NO: 448988 - DNA, 41 bp, Homo sapiens; identical to SEQ ID NO: 325730
  chr19:14029922-14029963
  hypo

SEQ ID NO: 448989 - DNA, 55 bp, Homo sapiens; identical to SEQ ID NO: 325731
  chr19:14029998-14030053
  hypo

SEQ ID NO: 448990 - DNA, 408 bp, Homo sapiens; identical to SEQ ID NO: 325732
  chr19:14043632-14044040
  hypo

SEQ ID NO: 448991 - DNA, 88 bp, Homo sapiens; identical to SEQ ID NO: 273475
  chr19:14066988-14067076
  hypo

SEQ ID NO: 448992 - DNA, 273 bp, Homo sapiens; identical to SEQ ID NO: 273476
  chr19:14072645-14072918
  hypo

SEQ ID NO: 448993 - DNA, 35 bp, Homo sapiens; identical to SEQ ID NO: 273480
  chr19:14084906-14084941
  hypo

SEQ ID NO: 448994 - DNA, 50 bp, Homo sapiens; identical to SEQ ID NO: 273481
  chr19:14084971-14085021
  hypo

SEQ ID NO: 448995 - DNA, 131 bp, Homo sapiens; identical to SEQ ID NO: 273482
  chr19:14085051-14085182
  hypo

SEQ ID NO: 448996 - DNA, 234 bp, Homo sapiens; identical to SEQ ID NO: 293630
  chr19:14089418-14089652
  hypo

SEQ ID NO: 448997 - DNA, 57 bp, Homo sapiens; identical to SEQ ID NO: 293631
  chr19:14089812-14089869
  hypo

SEQ ID NO: 448998 - DNA, 40 bp, Homo sapiens; identical to SEQ ID NO: 219217
  chr19:14225013-14225053
  hypo

SEQ ID NO: 448999 - DNA, 48 bp, Homo sapiens; identical to SEQ ID NO: 225827
  chr19:14316561-14316609
  hypo

SEQ ID NO: 449000 - DNA, 33 bp, Homo sapiens; identical to SEQ ID NO: 273487
  chr19:14352486-14352519
  hypo

SEQ ID NO: 449001 - DNA, 43 bp, Homo sapiens; identical to SEQ ID NO: 273488
  chr19:14447097-14447140
  hypo

SEQ ID NO: 449002 - DNA, 142 bp, Homo sapiens; identical to SEQ ID NO: 219218
  chr19:14509047-14509189
  hypo

SEQ ID NO: 449003 - DNA, 443 bp, Homo sapiens; identical to SEQ ID NO: 225828
  chr19:14516821-14517264
  hypo

SEQ ID NO: 449004 - DNA, 101 bp, Homo sapiens; identical to SEQ ID NO: 219219
  chr19:14532585-14532686
  hypo

SEQ ID NO: 449005 - DNA, 373 bp, Homo sapiens; identical to SEQ ID NO: 219220
  chr19:14551929-14552302
  hypo

SEQ ID NO: 449006 - DNA, 245 bp, Homo sapiens; identical to SEQ ID NO: 273493
  chr19:14591231-14591476
  hypo

SEQ ID NO: 449007 - DNA, 143 bp, Homo sapiens; identical to SEQ ID NO: 205239
  chr19:14607038-14607181
  hypo

SEQ ID NO: 449008 - DNA, 290 bp, Homo sapiens; identical to SEQ ID NO: 273494
  chr19:14616946-14617236
  hypo

SEQ ID NO: 449009 - DNA, 107 bp, Homo sapiens; identical to SEQ ID NO: 273496
  chr19:14636954-14637061
  hypo

SEQ ID NO: 449010 - DNA, 34 bp, Homo sapiens; identical to SEQ ID NO: 273497
  chr19:14648832-14648866
  hypo

SEQ ID NO: 449011 - DNA, 152 bp, Homo sapiens; identical to SEQ ID NO: 273498
  chr19:14660736-14660888
  hypo

SEQ ID NO: 449012 - DNA, 143 bp, Homo sapiens; identical to SEQ ID NO: 273501
  chr19:14676333-14676476
  hypo

SEQ ID NO: 449013 - DNA, 122 bp, Homo sapiens; identical to SEQ ID NO: 219225
  chr19:14863011-14863133
  hypo

SEQ ID NO: 449014 - DNA, 59 bp, Homo sapiens; identical to SEQ ID NO: 219226
  chr19:14863163-14863222
  hypo

SEQ ID NO: 449015 - DNA, 46 bp, Homo sapiens; identical to SEQ ID NO: 205241
  chr19:14887561-14887607
  hypo

SEQ ID NO: 449016 - DNA, 96 bp, Homo sapiens; identical to SEQ ID NO: 219228
  chr19:14912989-14913085
  hypo

SEQ ID NO: 449017 - DNA, 85 bp, Homo sapiens; identical to SEQ ID NO: 273505
  chr19:15033674-15033759
  hypo

SEQ ID NO: 449018 - DNA, 43 bp, Homo sapiens; identical to SEQ ID NO: 273506
  chr19:15044831-15044874
  hypo

SEQ ID NO: 449019 - DNA, 36 bp, Homo sapiens; identical to SEQ ID NO: 293646
  chr19:15091053-15091089
  hypo

SEQ ID NO: 449020 - DNA, 133 bp, Homo sapiens; identical to SEQ ID NO: 273508
  chr19:15209505-15209638
  hypo

SEQ ID NO: 449021 - DNA, 159 bp, Homo sapiens; identical to SEQ ID NO: 219229
  chr19:15224770-15224929
  hypo

SEQ ID NO: 449022 - DNA, 417 bp, Homo sapiens; identical to SEQ ID NO: 219230
  chr19:15252000-15252417
  hypo

SEQ ID NO: 449023 - DNA, 41 bp, Homo sapiens; identical to SEQ ID NO: 219231
  chr19:15252900-15252941
  hypo

SEQ ID NO: 449024 - DNA, 71 bp, Homo sapiens; identical to SEQ ID NO: 273513
  chr19:15276698-15276769
  hypo

SEQ ID NO: 449025 - DNA, 77 bp, Homo sapiens; identical to SEQ ID NO: 219232
  chr19:15281186-15281263
  hypo

SEQ ID NO: 449026 - DNA, 232 bp, Homo sapiens; identical to SEQ ID NO: 273515
  chr19:15281503-15281735
  hypo

SEQ ID NO: 449027 - DNA, 167 bp, Homo sapiens; identical to SEQ ID NO: 273516
  chr19:15284956-15285123
  hypo

SEQ ID NO: 449028 - DNA, 81 bp, Homo sapiens; identical to SEQ ID NO: 273519
  chr19:15346126-15346207
  hypo

SEQ ID NO: 449029 - DNA, 188 bp, Homo sapiens; identical to SEQ ID NO: 219234
  chr19:15352349-15352537
  hypo

SEQ ID NO: 449030 - DNA, 172 bp, Homo sapiens; identical to SEQ ID NO: 189115
  chr19:15360255-15360427
  hypo

SEQ ID NO: 449031 - DNA, 396 bp, Homo sapiens; identical to SEQ ID NO: 219235
  chr19:15375241-15375637
  hypo

SEQ ID NO: 449032 - DNA, 128 bp, Homo sapiens; identical to SEQ ID NO: 273525
  chr19:15401109-15401237
  hypo

SEQ ID NO: 449033 - DNA, 105 bp, Homo sapiens; identical to SEQ ID NO: 219237
  chr19:15422154-15422259
  hypo

SEQ ID NO: 449034 - DNA, 240 bp, Homo sapiens; identical to SEQ ID NO: 273528
  chr19:15426970-15427210
  hypo

SEQ ID NO: 449035 - DNA, 87 bp, Homo sapiens; identical to SEQ ID NO: 293653
  chr19:15479821-15479908
  hypo

SEQ ID NO: 449036 - DNA, 206 bp, Homo sapiens; identical to SEQ ID NO: 273529
  chr19:15487800-15488006
  hypo

SEQ ID NO: 449037 - DNA, 120 bp, Homo sapiens; identical to SEQ ID NO: 219238
  chr19:15506075-15506195
  hypo

SEQ ID NO: 449038 - DNA, 340 bp, Homo sapiens; identical to SEQ ID NO: 219239
  chr19:15538869-15539209
  hypo

SEQ ID NO: 449039 - DNA, 121 bp, Homo sapiens; identical to SEQ ID NO: 273534
  chr19:15551195-15551316
  hypo

SEQ ID NO: 449040 - DNA, 36 bp, Homo sapiens; identical to SEQ ID NO: 226560
  chr19:15694860-15694896
  hypo

SEQ ID NO: 449041 - DNA, 77 bp, Homo sapiens; identical to SEQ ID NO: 273537
  chr19:15937637-15937714
  hypo

SEQ ID NO: 449042 - DNA, 187 bp, Homo sapiens; identical to SEQ ID NO: 219241
  chr19:16025606-16025793
  hypo

SEQ ID NO: 449043 - DNA, 53 bp, Homo sapiens; identical to SEQ ID NO: 273539
  chr19:16147950-16148003
  hypo

SEQ ID NO: 449044 - DNA, 153 bp, Homo sapiens; identical to SEQ ID NO: 273540
  chr19:16198711-16198864
  hypo

SEQ ID NO: 449045 - DNA, 38 bp, Homo sapiens; identical to SEQ ID NO: 273542
  chr19:16221419-16221457
  hypo

SEQ ID NO: 449046 - DNA, 214 bp, Homo sapiens; identical to SEQ ID NO: 131000
  chr19:16222493-16222707
  hypo

SEQ ID NO: 449047 - DNA, 231 bp, Homo sapiens; identical to SEQ ID NO: 273543
  chr19:16226302-16226533
  hypo

SEQ ID NO: 449048 - DNA, 94 bp, Homo sapiens; identical to SEQ ID NO: 219247
  chr19:16235972-16236066
  hypo

SEQ ID NO: 449049 - DNA, 295 bp, Homo sapiens; identical to SEQ ID NO: 273547
  chr19:16240097-16240392
  hypo

SEQ ID NO: 449050 - DNA, 239 bp, Homo sapiens; identical to SEQ ID NO: 219248
  chr19:16243047-16243286
  hypo

SEQ ID NO: 449051 - DNA, 270 bp, Homo sapiens; identical to SEQ ID NO: 273549
  chr19:16318743-16319013
  hypo

SEQ ID NO: 449052 - DNA, 170 bp, Homo sapiens; identical to SEQ ID NO: 219249
  chr19:16320831-16321001
  hypo

SEQ ID NO: 449053 - DNA, 162 bp, Homo sapiens; identical to SEQ ID NO: 219250
  chr19:16328981-16329143
  hypo

SEQ ID NO: 449054 - DNA, 128 bp, Homo sapiens; identical to SEQ ID NO: 273552
  chr19:16337602-16337730
  hypo

SEQ ID NO: 449055 - DNA, 291 bp, Homo sapiens; identical to SEQ ID NO: 273553
  chr19:16337760-16338051
  hypo

SEQ ID NO: 449056 - DNA, 52 bp, Homo sapiens; identical to SEQ ID NO: 219252
  chr19:16343122-16343174
  hypo

SEQ ID NO: 449057 - DNA, 42 bp, Homo sapiens; identical to SEQ ID NO: 273555
  chr19:16469773-16469815
  hypo

SEQ ID NO: 449058 - DNA, 284 bp, Homo sapiens; identical to SEQ ID NO: 219253
  chr19:16485430-16485714
  hypo

SEQ ID NO: 449059 - DNA, 263 bp, Homo sapiens; identical to SEQ ID NO: 273558
  chr19:16495386-16495649
  hypo

SEQ ID NO: 449060 - DNA, 139 bp, Homo sapiens; identical to SEQ ID NO: 273559
  chr19:16511197-16511336
  hypo

SEQ ID NO: 449061 - DNA, 626 bp, Homo sapiens; identical to SEQ ID NO: 273560
  chr19:16511801-16512427
  hypo

SEQ ID NO: 449062 - DNA, 54 bp, Homo sapiens; identical to SEQ ID NO: 219255
  chr19:16513151-16513205
  hypo

SEQ ID NO: 449063 - DNA, 155 bp, Homo sapiens; identical to SEQ ID NO: 273562
  chr19:16528334-16528489
  hypo

SEQ ID NO: 449064 - DNA, 35 bp, Homo sapiens; identical to SEQ ID NO: 219256
  chr19:16550467-16550502
  hypo

SEQ ID NO: 449065 - DNA, 132 bp, Homo sapiens; identical to SEQ ID NO: 273564
  chr19:16552745-16552877
  hypo

SEQ ID NO: 449066 - DNA, 85 bp, Homo sapiens; identical to SEQ ID NO: 273565
  chr19:16620061-16620146
  hypo

SEQ ID NO: 449067 - DNA, 458 bp, Homo sapiens; identical to SEQ ID NO: 325839
  chr19:16620440-16620898
  hypo

SEQ ID NO: 449068 - DNA, 43 bp, Homo sapiens; identical to SEQ ID NO: 219258
  chr19:16631183-16631226
  hypo

SEQ ID NO: 449069 - DNA, 120 bp, Homo sapiens; identical to SEQ ID NO: 205254
  chr19:16638141-16638261
  hypo

SEQ ID NO: 449070 - DNA, 187 bp, Homo sapiens; identical to SEQ ID NO: 273570
  chr19:16643385-16643572
  hypo

SEQ ID NO: 449071 - DNA, 83 bp, Homo sapiens; identical to SEQ ID NO: 219260
  chr19:16680107-16680190
  hypo

SEQ ID NO: 449072 - DNA, 390 bp, Homo sapiens; identical to SEQ ID NO: 273573
  chr19:16680657-16681047
  hypo

SEQ ID NO: 449073 - DNA, 51 bp, Homo sapiens
  chr19:16681565-16681616
  hypo
gtctggcttctgatcccagaggtcccctgacagaaatctcttgtcaagaag

SEQ ID NO: 449074 - DNA, 117 bp, Homo sapiens; identical to SEQ ID NO: 273575
  chr19:16735189-16735306
  hypo

SEQ ID NO: 449075 - DNA, 190 bp, Homo sapiens; identical to SEQ ID NO: 273576
  chr19:16735778-16735968
  hypo

SEQ ID NO: 449076 - DNA, 165 bp, Homo sapiens; identical to SEQ ID NO: 273578
  chr19:16757897-16758062
  hypo

SEQ ID NO: 449077 - DNA, 111 bp, Homo sapiens; identical to SEQ ID NO: 273580
  chr19:16763932-16764043
  hypo

SEQ ID NO: 449078 - DNA, 140 bp, Homo sapiens; identical to SEQ ID NO: 273582
  chr19:16781235-16781375
  hypo

SEQ ID NO: 449079 - DNA, 97 bp, Homo sapiens; identical to SEQ ID NO: 273583
  chr19:16835422-16835519
  hypo

SEQ ID NO: 449080 - DNA, 551 bp, Homo sapiens; identical to SEQ ID NO: 273584
  chr19:17000717-17001268
  hypo

SEQ ID NO: 449081 - DNA, 36 bp, Homo sapiens; identical to SEQ ID NO: 273585
  chr19:17009182-17009218
  hypo

SEQ ID NO: 449082 - DNA, 169 bp, Homo sapiens; identical to SEQ ID NO: 273586
  chr19:17091354-17091523
  hypo

SEQ ID NO: 449083 - DNA, 76 bp, Homo sapiens; identical to SEQ ID NO: 225842
  chr19:17137592-17137668
  hypo

SEQ ID NO: 449084 - DNA, 36 bp, Homo sapiens; identical to SEQ ID NO: 219266
  chr19:17160653-17160689
  hypo

SEQ ID NO: 449085 - DNA, 371 bp, Homo sapiens; identical to SEQ ID NO: 273588
  chr19:17160719-17161090
  hypo

SEQ ID NO: 449086 - DNA, 137 bp, Homo sapiens; identical to SEQ ID NO: 219269
  chr19:17220150-17220287
  hypo

SEQ ID NO: 449087 - DNA, 342 bp, Homo sapiens; identical to SEQ ID NO: 219270
  chr19:17240193-17240535
  hypo

SEQ ID NO: 449088 - DNA, 120 bp, Homo sapiens; identical to SEQ ID NO: 219271
  chr19:17255382-17255502
  hypo

SEQ ID NO: 449089 - DNA, 160 bp, Homo sapiens; identical to SEQ ID NO: 273594
  chr19:17283464-17283624
  hypo

SEQ ID NO: 449090 - DNA, 147 bp, Homo sapiens; identical to SEQ ID NO: 273595
  chr19:17303675-17303822
  hypo

SEQ ID NO: 449091 - DNA, 138 bp, Homo sapiens; identical to SEQ ID NO: 273596
  chr19:17311458-17311596
  hypo

SEQ ID NO: 449092 - DNA, 222 bp, Homo sapiens; identical to SEQ ID NO: 273597
  chr19:17312745-17312967
  hypo

SEQ ID NO: 449093 - DNA, 611 bp, Homo sapiens; identical to SEQ ID NO: 293676
  chr19:17355714-17356325
  hypo

SEQ ID NO: 449094 - DNA, 265 bp, Homo sapiens; identical to SEQ ID NO: 225844
  chr19:17357470-17357735
  hypo

SEQ ID NO: 449095 - DNA, 56 bp, Homo sapiens; identical to SEQ ID NO: 273599
  chr19:17369111-17369167
  hypo

SEQ ID NO: 449096 - DNA, 120 bp, Homo sapiens; identical to SEQ ID NO: 273600
  chr19:17376563-17376683
  hypo

SEQ ID NO: 449097 - DNA, 54 bp, Homo sapiens; identical to SEQ ID NO: 273601
  chr19:17376962-17377016
  hypo

SEQ ID NO: 449098 - DNA, 44 bp, Homo sapiens; identical to SEQ ID NO: 273603
  chr19:17397664-17397708
  hypo

SEQ ID NO: 449099 - DNA, 95 bp, Homo sapiens; identical to SEQ ID NO: 273604
  chr19:17404192-17404287
  hypo

SEQ ID NO: 449100 - DNA, 306 bp, Homo sapiens; identical to SEQ ID NO: 325882
  chr19:17405411-17405717
  hypo

SEQ ID NO: 449101 - DNA, 507 bp, Homo sapiens; identical to SEQ ID NO: 273607
  chr19:17411813-17412320
  hypo

SEQ ID NO: 449102 - DNA, 140 bp, Homo sapiens; identical to SEQ ID NO: 219276
  chr19:17415104-17415244
  hypo

SEQ ID NO: 449103 - DNA, 797 bp, Homo sapiens; identical to SEQ ID NO: 273609
  chr19:17422760-17423557
  hypo

SEQ ID NO: 449104 - DNA, 119 bp, Homo sapiens; identical to SEQ ID NO: 219278
  chr19:17435942-17436061
  hypo

SEQ ID NO: 449105 - DNA, 62 bp, Homo sapiens; identical to SEQ ID NO: 219279
  chr19:17436203-17436265
  hypo

SEQ ID NO: 449106 - DNA, 866 bp, Homo sapiens; identical to SEQ ID NO: 273612
  chr19:17443706-17444572
  hypo

SEQ ID NO: 449107 - DNA, 98 bp, Homo sapiens; identical to SEQ ID NO: 325889
  chr19:17449458-17449556
  hypo

SEQ ID NO: 449108 - DNA, 42 bp, Homo sapiens; identical to SEQ ID NO: 273614
  chr19:17536626-17536668
  hypo

SEQ ID NO: 449109 - DNA, 372 bp, Homo sapiens; identical to SEQ ID NO: 273615
  chr19:17597312-17597684
  hypo

SEQ ID NO: 449110 - DNA, 62 bp, Homo sapiens; identical to SEQ ID NO: 273616
  chr19:17631822-17631884
  hypo

SEQ ID NO: 449111 - DNA, 392 bp, Homo sapiens; identical to SEQ ID NO: 225848
  chr19:17649952-17650344
  hypo

SEQ ID NO: 449112 - DNA, 258 bp, Homo sapiens; identical to SEQ ID NO: 273617
  chr19:17657447-17657705
  hypo

SEQ ID NO: 449113 - DNA, 59 bp, Homo sapiens; identical to SEQ ID NO: 325895
  chr19:17687902-17687961
  hypo

SEQ ID NO: 449114 - DNA, 338 bp, Homo sapiens; identical to SEQ ID NO: 219282
  chr19:17688091-17688429
  hypo

SEQ ID NO: 449115 - DNA, 432 bp, Homo sapiens; identical to SEQ ID NO: 96847
  chr19:17691243-17691675
  hypo

SEQ ID NO: 449116 - DNA, 330 bp, Homo sapiens; identical to SEQ ID NO: 293692
  chr19:17799069-17799399
  hypo

SEQ ID NO: 449117 - DNA, 38 bp, Homo sapiens; identical to SEQ ID NO: 273623
  chr19:17848807-17848845
  hypo

SEQ ID NO: 449118 - DNA, 392 bp, Homo sapiens; identical to SEQ ID NO: 273624
  chr19:17881296-17881688
  hypo

SEQ ID NO: 449119 - DNA, 120 bp, Homo sapiens; identical to SEQ ID NO: 273625
  chr19:17882045-17882165
  hypo

SEQ ID NO: 449120 - DNA, 60 bp, Homo sapiens; identical to SEQ ID NO: 219288
  chr19:17994750-17994810
  hypo

SEQ ID NO: 449121 - DNA, 41 bp, Homo sapiens; identical to SEQ ID NO: 219290
  chr19:18054174-18054215
  hypo

SEQ ID NO: 449122 - DNA, 84 bp, Homo sapiens; identical to SEQ ID NO: 273631
  chr19:18080377-18080461
  hypo

SEQ ID NO: 449123 - DNA, 429 bp, Homo sapiens; identical to SEQ ID NO: 219291
  chr19:18084483-18084912
  hypo

SEQ ID NO: 449124 - DNA, 108 bp, Homo sapiens; identical to SEQ ID NO: 219292
  chr19:18085018-18085126
  hypo

SEQ ID NO: 449125 - DNA, 47 bp, Homo sapiens; identical to SEQ ID NO: 273635
  chr19:18120713-18120760
  hypo

SEQ ID NO: 449126 - DNA, 189 bp, Homo sapiens; identical to SEQ ID NO: 273636
  chr19:18121351-18121540
  hypo

SEQ ID NO: 449127 - DNA, 83 bp, Homo sapiens; identical to SEQ ID NO: 273639
  chr19:18159860-18159943
  hypo

SEQ ID NO: 449128 - DNA, 54 bp, Homo sapiens; identical to SEQ ID NO: 273642
  chr19:18242605-18242659
  hypo

SEQ ID NO: 449129 - DNA, 135 bp, Homo sapiens; identical to SEQ ID NO: 273643
  chr19:18242689-18242824
  hypo

SEQ ID NO: 449130 - DNA, 124 bp, Homo sapiens; identical to SEQ ID NO: 293705
  chr19:18271975-18272099
  hypo

SEQ ID NO: 449131 - DNA, 172 bp, Homo sapiens; identical to SEQ ID NO: 325931
  chr19:18272536-18272708
  hypo

SEQ ID NO: 449132 - DNA, 36 bp, Homo sapiens; identical to SEQ ID NO: 325932
  chr19:18272907-18272943
  hypo

SEQ ID NO: 449133 - DNA, 64 bp, Homo sapiens; identical to SEQ ID NO: 219300
  chr19:18273254-18273318
  hypo

SEQ ID NO: 449134 - DNA, 145 bp, Homo sapiens; identical to SEQ ID NO: 273647
  chr19:18277902-18278047
  hypo

SEQ ID NO: 449135 - DNA, 136 bp, Homo sapiens; identical to SEQ ID NO: 205278
  chr19:18343303-18343439
  hypo

SEQ ID NO: 449136 - DNA, 199 bp, Homo sapiens; identical to SEQ ID NO: 293713
  chr19:18344017-18344216
  hypo

SEQ ID NO: 449137 - DNA, 157 bp, Homo sapiens; identical to SEQ ID NO: 273650
  chr19:18416995-18417152
  hypo

SEQ ID NO: 449138 - DNA, 330 bp, Homo sapiens; identical to SEQ ID NO: 205279
  chr19:18420497-18420827
  hypo

SEQ ID NO: 449139 - DNA, 101 bp, Homo sapiens; identical to SEQ ID NO: 273651
  chr19:18435014-18435115
  hypo

SEQ ID NO: 449140 - DNA, 76 bp, Homo sapiens; identical to SEQ ID NO: 273652
  chr19:18441765-18441841
  hypo

SEQ ID NO: 449141 - DNA, 98 bp, Homo sapiens; identical to SEQ ID NO: 325942
  chr19:18459066-18459164
  hypo

SEQ ID NO: 449142 - DNA, 66 bp, Homo sapiens; identical to SEQ ID NO: 325943
  chr19:18459219-18459285
  hypo

SEQ ID NO: 449143 - DNA, 79 bp, Homo sapiens; identical to SEQ ID NO: 219304
  chr19:18496195-18496274
  hypo

SEQ ID NO: 449144 - DNA, 251 bp, Homo sapiens; identical to SEQ ID NO: 273655
  chr19:18546489-18546740
  hypo

SEQ ID NO: 449145 - DNA, 91 bp, Homo sapiens; identical to SEQ ID NO: 273656
  chr19:18547000-18547091
  hypo

SEQ ID NO: 449146 - DNA, 49 bp, Homo sapiens; identical to SEQ ID NO: 273657
  chr19:18556529-18556578
  hypo

SEQ ID NO: 449147 - DNA, 67 bp, Homo sapiens; identical to SEQ ID NO: 219306
  chr19:18557168-18557235
  hypo

SEQ ID NO: 449148 - DNA, 142 bp, Homo sapiens; identical to SEQ ID NO: 273659
  chr19:18591739-18591881
  hypo

SEQ ID NO: 449149 - DNA, 84 bp, Homo sapiens; identical to SEQ ID NO: 219307
  chr19:18600813-18600897
  hypo

SEQ ID NO: 449150 - DNA, 407 bp, Homo sapiens; identical to SEQ ID NO: 273661
  chr19:18637199-18637606
  hypo

SEQ ID NO: 449151 - DNA, 81 bp, Homo sapiens; identical to SEQ ID NO: 219308
  chr19:18675984-18676065
  hypo

SEQ ID NO: 449152 - DNA, 87 bp, Homo sapiens; identical to SEQ ID NO: 273663
  chr19:18688221-18688308
  hypo

SEQ ID NO: 449153 - DNA, 446 bp, Homo sapiens; identical to SEQ ID NO: 273664
  chr19:18688368-18688814
  hypo

SEQ ID NO: 449154 - DNA, 31 bp, Homo sapiens; identical to SEQ ID NO: 293734
  chr19:18723960-18723991
  hypo

SEQ ID NO: 449155 - DNA, 36 bp, Homo sapiens; identical to SEQ ID NO: 219310
  chr19:18757684-18757720
  hypo

SEQ ID NO: 449156 - DNA, 76 bp, Homo sapiens; identical to SEQ ID NO: 219312
  chr19:18771033-18771109
  hypo

SEQ ID NO: 449157 - DNA, 148 bp, Homo sapiens; identical to SEQ ID NO: 219313
  chr19:18798371-18798519
  hypo

SEQ ID NO: 449158 - DNA, 196 bp, Homo sapiens; identical to SEQ ID NO: 273672
  chr19:18809609-18809805
  hypo

SEQ ID NO: 449159 - DNA, 226 bp, Homo sapiens; identical to SEQ ID NO: 273673
  chr19:18830681-18830907
  hypo

SEQ ID NO: 449160 - DNA, 65 bp, Homo sapiens; identical to SEQ ID NO: 219317
  chr19:18871011-18871076
  hypo

SEQ ID NO: 449161 - DNA, 457 bp, Homo sapiens; identical to SEQ ID NO: 273679
  chr19:18874215-18874672
  hypo

SEQ ID NO: 449162 - DNA, 35 bp, Homo sapiens; identical to SEQ ID NO: 219320
  chr19:18957753-18957788
  hypo

SEQ ID NO: 449163 - DNA, 151 bp, Homo sapiens; identical to SEQ ID NO: 219321
  chr19:18963997-18964148
  hypo

SEQ ID NO: 449164 - DNA, 153 bp, Homo sapiens; identical to SEQ ID NO: 273689
  chr19:18996626-18996779
  hypo

SEQ ID NO: 449165 - DNA, 220 bp, Homo sapiens; identical to SEQ ID NO: 273690
  chr19:19040159-19040379
  hypo

SEQ ID NO: 449166 - DNA, 34 bp, Homo sapiens; identical to SEQ ID NO: 273692
  chr19:19087049-19087083
  hypo

SEQ ID NO: 449167 - DNA, 64 bp, Homo sapiens; identical to SEQ ID NO: 273693
  chr19:19100287-19100351
  hypo

SEQ ID NO: 449168 - DNA, 136 bp, Homo sapiens; identical to SEQ ID NO: 273694
  chr19:19104043-19104179
  hypo

SEQ ID NO: 449169 - DNA, 266 bp, Homo sapiens; identical to SEQ ID NO: 219323
  chr19:19109239-19109505
  hypo

SEQ ID NO: 449170 - DNA, 281 bp, Homo sapiens; identical to SEQ ID NO: 219324
  chr19:19114950-19115231
  hypo

SEQ ID NO: 449171 - DNA, 272 bp, Homo sapiens; identical to SEQ ID NO: 273697
  chr19:19135284-19135556
  hypo

SEQ ID NO: 449172 - DNA, 198 bp, Homo sapiens; identical to SEQ ID NO: 273698
  chr19:19136747-19136945
  hypo

SEQ ID NO: 449173 - DNA, 98 bp, Homo sapiens; identical to SEQ ID NO: 273699
  chr19:19147972-19148070
  hypo

SEQ ID NO: 449174 - DNA, 135 bp, Homo sapiens; identical to SEQ ID NO: 273701
  chr19:19165034-19165169
  hypo

SEQ ID NO: 449175 - DNA, 36 bp, Homo sapiens; identical to SEQ ID NO: 325996
  chr19:19218819-19218855
  hypo

SEQ ID NO: 449176 - DNA, 44 bp, Homo sapiens; identical to SEQ ID NO: 273703
  chr19:19226768-19226812
  hypo

SEQ ID NO: 449177 - DNA, 216 bp, Homo sapiens; identical to SEQ ID NO: 273704
  chr19:19230753-19230969
  hypo

SEQ ID NO: 449178 - DNA, 275 bp, Homo sapiens; identical to SEQ ID NO: 273705
  chr19:19231766-19232041
  hypo

SEQ ID NO: 449179 - DNA, 328 bp, Homo sapiens; identical to SEQ ID NO: 273707
  chr19:19389261-19389589
  hypo

SEQ ID NO: 449180 - DNA, 194 bp, Homo sapiens; identical to SEQ ID NO: 219326
  chr19:19416790-19416984
  hypo

SEQ ID NO: 449181 - DNA, 690 bp, Homo sapiens; identical to SEQ ID NO: 219327
  chr19:19446448-19447138
  hypo

SEQ ID NO: 449182 - DNA, 90 bp, Homo sapiens; identical to SEQ ID NO: 273711
  chr19:19447258-19447348
  hypo

SEQ ID NO: 449183 - DNA, 180 bp, Homo sapiens; identical to SEQ ID NO: 219328
  chr19:19494668-19494848
  hypo

SEQ ID NO: 449184 - DNA, 40 bp, Homo sapiens; identical to SEQ ID NO: 326008
  chr19:19540205-19540245
  hypo

SEQ ID NO: 449185 - DNA, 70 bp, Homo sapiens; identical to SEQ ID NO: 326009
  chr19:19540302-19540372
  hypo

SEQ ID NO: 449186 - DNA, 513 bp, Homo sapiens; identical to SEQ ID NO: 273716
  chr19:19604056-19604569
  hypo

SEQ ID NO: 449187 - DNA, 194 bp, Homo sapiens; identical to SEQ ID NO: 273717
  chr19:19611820-19612014
  hypo

SEQ ID NO: 449188 - DNA, 150 bp, Homo sapiens; identical to SEQ ID NO: 273720
  chr19:19623134-19623284
  hypo

SEQ ID NO: 449189 - DNA, 98 bp, Homo sapiens; identical to SEQ ID NO: 273721
  chr19:19624553-19624651
  hypo

SEQ ID NO: 449190 - DNA, 595 bp, Homo sapiens; identical to SEQ ID NO: 273722
  chr19:19625551-19626146
  hypo

SEQ ID NO: 449191 - DNA, 65 bp, Homo sapiens; identical to SEQ ID NO: 273724
  chr19:19674354-19674419
  hypo

SEQ ID NO: 449192 - DNA, 38 bp, Homo sapiens; identical to SEQ ID NO: 273726
  chr19:19710043-19710081
  hypo

SEQ ID NO: 449193 - DNA, 50 bp, Homo sapiens; identical to SEQ ID NO: 273728
  chr19:19735078-19735128
  hypo

SEQ ID NO: 449194 - DNA, 54 bp, Homo sapiens; identical to SEQ ID NO: 273730
  chr19:19766967-19767021
  hypo

SEQ ID NO: 449195 - DNA, 120 bp, Homo sapiens; identical to SEQ ID NO: 273732
  chr19:19775583-19775703
  hypo

SEQ ID NO: 449196 - DNA, 84 bp, Homo sapiens; identical to SEQ ID NO: 273733
  chr19:19819260-19819344
  hypo

SEQ ID NO: 449197 - DNA, 225 bp, Homo sapiens; identical to SEQ ID NO: 273734
  chr19:19822261-19822486
  hypo

SEQ ID NO: 449198 - DNA, 783 bp, Homo sapiens; identical to SEQ ID NO: 273735
  chr19:19861401-19862184
  hypo

SEQ ID NO: 449199 - DNA, 76 bp, Homo sapiens; identical to SEQ ID NO: 273737
  chr19:20013812-20013888
  hypo

SEQ ID NO: 449200 - DNA, 37 bp, Homo sapiens; identical to SEQ ID NO: 273738
  chr19:20095094-20095131
  hypo

SEQ ID NO: 449201 - DNA, 86 bp, Homo sapiens; identical to SEQ ID NO: 273739
  chr19:20103785-20103871
  hypo

SEQ ID NO: 449202 - DNA, 41 bp, Homo sapiens; identical to SEQ ID NO: 273740
  chr19:20115867-20115908
  hypo

SEQ ID NO: 449203 - DNA, 120 bp, Homo sapiens; identical to SEQ ID NO: 273741
  chr19:20187137-20187257
  hypo

SEQ ID NO: 449204 - DNA, 90 bp, Homo sapiens; identical to SEQ ID NO: 273742
  chr19:21235804-21235894
  hypo

SEQ ID NO: 449205 - DNA, 32 bp, Homo sapiens; identical to SEQ ID NO: 273743
  chr19:21254339-21254371
  hypo

SEQ ID NO: 449206 - DNA, 120 bp, Homo sapiens; identical to SEQ ID NO: 219343
  chr19:21261376-21261496
  hypo

SEQ ID NO: 449207 - DNA, 89 bp, Homo sapiens; identical to SEQ ID NO: 219344
  chr19:21305621-21305710
  hypo

SEQ ID NO: 449208 - DNA, 257 bp, Homo sapiens; identical to SEQ ID NO: 273746
  chr19:21513407-21513664
  hypo

SEQ ID NO: 449209 - DNA, 349 bp, Homo sapiens; identical to SEQ ID NO: 219346
  chr19:21623090-21623439
  hypo

SEQ ID NO: 449210 - DNA, 92 bp, Homo sapiens; identical to SEQ ID NO: 219347
  chr19:21627223-21627315
  hypo

SEQ ID NO: 449211 - DNA, 35 bp, Homo sapiens; identical to SEQ ID NO: 273749
  chr19:21642233-21642268
  hypo

SEQ ID NO: 449212 - DNA, 105 bp, Homo sapiens; identical to SEQ ID NO: 219348
  chr19:21645410-21645515
  hypo

SEQ ID NO: 449213 - DNA, 180 bp, Homo sapiens; identical to SEQ ID NO: 273751
  chr19:21648186-21648366
  hypo

SEQ ID NO: 449214 - DNA, 96 bp, Homo sapiens; identical to SEQ ID NO: 219349
  chr19:21654951-21655047
  hypo

SEQ ID NO: 449215 - DNA, 40 bp, Homo sapiens; identical to SEQ ID NO: 273753
  chr19:21717590-21717630
  hypo

SEQ ID NO: 449216 - DNA, 139 bp, Homo sapiens; identical to SEQ ID NO: 219350
  chr19:21760988-21761127
  hypo

SEQ ID NO: 449217 - DNA, 90 bp, Homo sapiens; identical to SEQ ID NO: 273755
  chr19:21767646-21767736
  hypo

SEQ ID NO: 449218 - DNA, 33 bp, Homo sapiens; identical to SEQ ID NO: 219351
  chr19:21792703-21792736
  hypo

SEQ ID NO: 449219 - DNA, 180 bp, Homo sapiens; identical to SEQ ID NO: 273757
  chr19:21798902-21799082
  hypo

SEQ ID NO: 449220 - DNA, 42 bp, Homo sapiens; identical to SEQ ID NO: 273758
  chr19:21799322-21799364
  hypo

SEQ ID NO: 449221 - DNA, 43 bp, Homo sapiens; identical to SEQ ID NO: 273759
  chr19:22239550-22239593
  hypo

SEQ ID NO: 449222 - DNA, 42 bp, Homo sapiens; identical to SEQ ID NO: 273761
  chr19:22768073-22768115
  hypo

SEQ ID NO: 449223 - DNA, 180 bp, Homo sapiens; identical to SEQ ID NO: 219352
  chr19:22815034-22815214
  hypo

SEQ ID NO: 449224 - DNA, 39 bp, Homo sapiens; identical to SEQ ID NO: 219353
  chr19:22815454-22815493
  hypo

SEQ ID NO: 449225 - DNA, 31 bp, Homo sapiens; identical to SEQ ID NO: 219354
  chr19:22815523-22815554
  hypo

SEQ ID NO: 449226 - DNA, 36 bp, Homo sapiens; identical to SEQ ID NO: 219355
  chr19:22824862-22824898
  hypo

SEQ ID NO: 449227 - DNA, 32 bp, Homo sapiens; identical to SEQ ID NO: 219356
  chr19:22825458-22825490
  hypo

SEQ ID NO: 449228 - DNA, 89 bp, Homo sapiens; identical to SEQ ID NO: 273767
  chr19:23083835-23083924
  hypo

SEQ ID NO: 449229 - DNA, 688 bp, Homo sapiens; identical to SEQ ID NO: 273768
  chr19:23084164-23084852
  hypo

SEQ ID NO: 449230 - DNA, 120 bp, Homo sapiens; identical to SEQ ID NO: 273769
  chr19:23271955-23272075
  hypo

SEQ ID NO: 449231 - DNA, 39 bp, Homo sapiens; identical to SEQ ID NO: 273770
  chr19:23297430-23297469
  hypo

SEQ ID NO: 449232 - DNA, 42 bp, Homo sapiens; identical to SEQ ID NO: 273771
  chr19:23378285-23378327
  hypo

SEQ ID NO: 449233 - DNA, 180 bp, Homo sapiens; identical to SEQ ID NO: 273772
  chr19:23435643-23435823
  hypo

SEQ ID NO: 449234 - DNA, 37 bp, Homo sapiens; identical to SEQ ID NO: 273773
  chr19:23453188-23453225
  hypo

SEQ ID NO: 449235 - DNA, 39 bp, Homo sapiens; identical to SEQ ID NO: 273774
  chr19:23917853-23917892
  hypo

SEQ ID NO: 449236 - DNA, 296 bp, Homo sapiens; identical to SEQ ID NO: 273775
  chr19:24140474-24140770
  hypo

SEQ ID NO: 449237 - DNA, 46 bp, Homo sapiens; identical to SEQ ID NO: 273776
  chr19:24178252-24178298
  hypo

SEQ ID NO: 449238 - DNA, 120 bp, Homo sapiens; identical to SEQ ID NO: 273777
  chr19:24269010-24269130
  hypo

SEQ ID NO: 449239 - DNA, 42 bp, Homo sapiens; identical to SEQ ID NO: 273780
  chr19:28663020-28663062
  hypo

SEQ ID NO: 449240 - DNA, 37 bp, Homo sapiens; identical to SEQ ID NO: 273781
  chr19:29208561-29208598
  hypo

SEQ ID NO: 449241 - DNA, 35 bp, Homo sapiens; identical to SEQ ID NO: 219359
  chr19:29930745-29930780
  hypo

SEQ ID NO: 449242 - DNA, 79 bp, Homo sapiens; identical to SEQ ID NO: 219360
  chr19:30102075-30102154
  hypo

SEQ ID NO: 449243 - DNA, 305 bp, Homo sapiens; identical to SEQ ID NO: 273786
  chr19:30129854-30130159
  hypo

SEQ ID NO: 449244 - DNA, 39 bp, Homo sapiens; identical to SEQ ID NO: 293813
  chr19:30215474-30215513
  hypo

SEQ ID NO: 449245 - DNA, 37 bp, Homo sapiens; identical to SEQ ID NO: 273790
  chr19:30298274-30298311
  hypo

SEQ ID NO: 449246 - DNA, 196 bp, Homo sapiens; identical to SEQ ID NO: 219363
  chr19:30314899-30315095
  hypo

SEQ ID NO: 449247 - DNA, 89 bp, Homo sapiens; identical to SEQ ID NO: 273792
  chr19:30324369-30324458
  hypo

SEQ ID NO: 449248 - DNA, 240 bp, Homo sapiens; identical to SEQ ID NO: 273793
  chr19:30495018-30495258
  hypo

SEQ ID NO: 449249 - DNA, 162 bp, Homo sapiens; identical to SEQ ID NO: 219364
  chr19:30535945-30536107
  hypo

SEQ ID NO: 449250 - DNA, 129 bp, Homo sapiens; identical to SEQ ID NO: 273796
  chr19:30561933-30562062
  hypo

SEQ ID NO: 449251 - DNA, 279 bp, Homo sapiens; identical to SEQ ID NO: 326103
  chr19:30562447-30562726
  hypo

SEQ ID NO: 449252 - DNA, 42 bp, Homo sapiens; identical to SEQ ID NO: 273798
  chr19:30583764-30583806
  hypo

SEQ ID NO: 449253 - DNA, 292 bp, Homo sapiens; identical to SEQ ID NO: 273799
  chr19:30602305-30602597
  hypo

SEQ ID NO: 449254 - DNA, 132 bp, Homo sapiens; identical to SEQ ID NO: 273800
  chr19:30635829-30635961
  hypo

SEQ ID NO: 449255 - DNA, 31 bp, Homo sapiens; identical to SEQ ID NO: 219365
  chr19:30637463-30637494
  hypo

SEQ ID NO: 449256 - DNA, 395 bp, Homo sapiens; identical to SEQ ID NO: 219367
  chr19:30935128-30935523
  hypo

SEQ ID NO: 449257 - DNA, 164 bp, Homo sapiens; identical to SEQ ID NO: 219368
  chr19:30935877-30936041
  hypo

SEQ ID NO: 449258 - DNA, 42 bp, Homo sapiens; identical to SEQ ID NO: 273804
  chr19:31126107-31126149
  hypo

SEQ ID NO: 449259 - DNA, 95 bp, Homo sapiens; identical to SEQ ID NO: 273805
  chr19:31197039-31197134
  hypo

SEQ ID NO: 449260 - DNA, 33 bp, Homo sapiens; identical to SEQ ID NO: 293816
  chr19:31210819-31210852
  hypo

SEQ ID NO: 449261 - DNA, 51 bp, Homo sapiens; identical to SEQ ID NO: 273807
  chr19:31275152-31275203
  hypo

SEQ ID NO: 449262 - DNA, 42 bp, Homo sapiens; identical to SEQ ID NO: 273808
  chr19:31388754-31388796
  hypo

SEQ ID NO: 449263 - DNA, 56 bp, Homo sapiens; identical to SEQ ID NO: 273809
  chr19:31493091-31493147
  hypo

SEQ ID NO: 449264 - DNA, 98 bp, Homo sapiens; identical to SEQ ID NO: 273813
  chr19:31790090-31790188
  hypo

SEQ ID NO: 449265 - DNA, 107 bp, Homo sapiens; identical to SEQ ID NO: 273814
  chr19:31792447-31792554
  hypo

SEQ ID NO: 449266 - DNA, 239 bp, Homo sapiens; identical to SEQ ID NO: 219376
  chr19:31794098-31794337
  hypo

SEQ ID NO: 449267 - DNA, 128 bp, Homo sapiens; identical to SEQ ID NO: 273816
  chr19:31827455-31827583
  hypo

SEQ ID NO: 449268 - DNA, 42 bp, Homo sapiens; identical to SEQ ID NO: 273817
  chr19:32063825-32063867
  hypo

SEQ ID NO: 449269 - DNA, 42 bp, Homo sapiens; identical to SEQ ID NO: 273818
  chr19:32064208-32064250
  hypo

SEQ ID NO: 449270 - DNA, 42 bp, Homo sapiens; identical to SEQ ID NO: 273821
  chr19:32087789-32087831
  hypo

SEQ ID NO: 449271 - DNA, 189 bp, Homo sapiens; identical to SEQ ID NO: 273822
  chr19:32088784-32088973
  hypo

SEQ ID NO: 449272 - DNA, 113 bp, Homo sapiens; identical to SEQ ID NO: 326139
  chr19:32366624-32366737
  hypo

SEQ ID NO: 449273 - DNA, 137 bp, Homo sapiens; identical to SEQ ID NO: 273827
  chr19:32438836-32438973
  hypo

SEQ ID NO: 449274 - DNA, 249 bp, Homo sapiens; identical to SEQ ID NO: 273828
  chr19:32521093-32521342
  hypo

SEQ ID NO: 449275 - DNA, 118 bp, Homo sapiens; identical to SEQ ID NO: 273829
  chr19:32537990-32538108
  hypo

SEQ ID NO: 449276 - DNA, 74 bp, Homo sapiens; identical to SEQ ID NO: 219380
  chr19:32672523-32672597
  hypo

SEQ ID NO: 449277 - DNA, 345 bp, Homo sapiens; identical to SEQ ID NO: 273831
  chr19:32718520-32718865
  hypo

SEQ ID NO: 449278 - DNA, 39 bp, Homo sapiens
  chr19:32898709-32898748
  hypo
gagggcaggctgggcacaatggctcattcatgtaatcct

SEQ ID NO: 449279 - DNA, 124 bp, Homo sapiens; identical to SEQ ID NO: 205346
  chr19:33166794-33166918
  hypo

SEQ ID NO: 449280 - DNA, 320 bp, Homo sapiens; identical to SEQ ID NO: 205347
  chr19:33167523-33167843
  hypo

SEQ ID NO: 449281 - DNA, 107 bp, Homo sapiens; identical to SEQ ID NO: 205348
  chr19:33167907-33168014
  hypo

SEQ ID NO: 449282 - DNA, 213 bp, Homo sapiens; identical to SEQ ID NO: 273839
  chr19:33211877-33212090
  hypo

SEQ ID NO: 449283 - DNA, 189 bp, Homo sapiens; identical to SEQ ID NO: 273840
  chr19:33304762-33304951
  hypo

SEQ ID NO: 449284 - DNA, 507 bp, Homo sapiens; identical to SEQ ID NO: 273841
  chr19:33355051-33355558
  hypo

SEQ ID NO: 449285 - DNA, 150 bp, Homo sapiens; identical to SEQ ID NO: 273842
  chr19:33365575-33365725
  hypo

SEQ ID NO: 449286 - DNA, 145 bp, Homo sapiens; identical to SEQ ID NO: 273843
  chr19:33367850-33367995
  hypo

SEQ ID NO: 449287 - DNA, 47 bp, Homo sapiens; identical to SEQ ID NO: 219388
  chr19:33415226-33415273
  hypo

SEQ ID NO: 449288 - DNA, 59 bp, Homo sapiens; identical to SEQ ID NO: 326161
  chr19:33467959-33468018
  hypo

SEQ ID NO: 449289 - DNA, 120 bp, Homo sapiens; identical to SEQ ID NO: 273846
  chr19:33539243-33539363
  hypo

SEQ ID NO: 449290 - DNA, 111 bp, Homo sapiens; identical to SEQ ID NO: 273847
  chr19:33540577-33540688
  hypo

SEQ ID NO: 449291 - DNA, 138 bp, Homo sapiens; identical to SEQ ID NO: 273848
  chr19:33549077-33549215
  hypo

SEQ ID NO: 449292 - DNA, 584 bp, Homo sapiens; identical to SEQ ID NO: 293829
  chr19:33555491-33556075
  hypo

SEQ ID NO: 449293 - DNA, 180 bp, Homo sapiens; identical to SEQ ID NO: 273849
  chr19:33556899-33557079
  hypo

SEQ ID NO: 449294 - DNA, 119 bp, Homo sapiens; identical to SEQ ID NO: 219391
  chr19:33693687-33693806
  hypo

SEQ ID NO: 449295 - DNA, 94 bp, Homo sapiens; identical to SEQ ID NO: 273854
  chr19:33696620-33696714
  hypo

SEQ ID NO: 449296 - DNA, 37 bp, Homo sapiens; identical to SEQ ID NO: 273855
  chr19:33697260-33697297
  hypo

SEQ ID NO: 449297 - DNA, 217 bp, Homo sapiens; identical to SEQ ID NO: 273856
  chr19:33697590-33697807
  hypo

SEQ ID NO: 449298 - DNA, 94 bp, Homo sapiens; identical to SEQ ID NO: 219392
  chr19:33698374-33698468
  hypo

SEQ ID NO: 449299 - DNA, 383 bp, Homo sapiens; identical to SEQ ID NO: 219393
  chr19:33701377-33701760
  hypo

SEQ ID NO: 449300 - DNA, 165 bp, Homo sapiens; identical to SEQ ID NO: 273859
  chr19:33702314-33702479
  hypo

SEQ ID NO: 449301 - DNA, 130 bp, Homo sapiens; identical to SEQ ID NO: 273860
  chr19:33703396-33703526
  hypo

SEQ ID NO: 449302 - DNA, 152 bp, Homo sapiens; identical to SEQ ID NO: 273861
  chr19:33710896-33711048
  hypo

SEQ ID NO: 449303 - DNA, 339 bp, Homo sapiens; identical to SEQ ID NO: 273862
  chr19:33726762-33727101
  hypo

SEQ ID NO: 449304 - DNA, 656 bp, Homo sapiens; identical to SEQ ID NO: 273863
  chr19:33772442-33773098
  hypo

SEQ ID NO: 449305 - DNA, 1022 bp, Homo sapiens; identical to SEQ ID NO: 384772
  chr19:33790839-33791861
  hypo

SEQ ID NO: 449306 - DNA, 51 bp, Homo sapiens; identical to SEQ ID NO: 273864
  chr19:33869570-33869621
  hypo

SEQ ID NO: 449307 - DNA, 81 bp, Homo sapiens; identical to SEQ ID NO: 219396
  chr19:33882202-33882283
  hypo

SEQ ID NO: 449308 - DNA, 52 bp, Homo sapiens; identical to SEQ ID NO: 273867
  chr19:33917859-33917911
  hypo

SEQ ID NO: 449309 - DNA, 178 bp, Homo sapiens; identical to SEQ ID NO: 219397
  chr19:33926621-33926799
  hypo

SEQ ID NO: 449310 - DNA, 183 bp, Homo sapiens; identical to SEQ ID NO: 219398
  chr19:33939089-33939272
  hypo

SEQ ID NO: 449311 - DNA, 32 bp, Homo sapiens; identical to SEQ ID NO: 273870
  chr19:33953394-33953426
  hypo

SEQ ID NO: 449312 - DNA, 118 bp, Homo sapiens; identical to SEQ ID NO: 273871
  chr19:33953632-33953750
  hypo

SEQ ID NO: 449313 - DNA, 116 bp, Homo sapiens; identical to SEQ ID NO: 273873
  chr19:33997989-33998105
  hypo

SEQ ID NO: 449314 - DNA, 450 bp, Homo sapiens; identical to SEQ ID NO: 273874
  chr19:34000696-34001146
  hypo

SEQ ID NO: 449315 - DNA, 63 bp, Homo sapiens; identical to SEQ ID NO: 273875
  chr19:34158695-34158758
  hypo

SEQ ID NO: 449316 - DNA, 89 bp, Homo sapiens; identical to SEQ ID NO: 293839
  chr19:34262994-34263083
  hypo

SEQ ID NO: 449317 - DNA, 566 bp, Homo sapiens; identical to SEQ ID NO: 293840
  chr19:34263272-34263838
  hypo

SEQ ID NO: 449318 - DNA, 217 bp, Homo sapiens; identical to SEQ ID NO: 225894
  chr19:34269016-34269233
  hypo

SEQ ID NO: 449319 - DNA, 40 bp, Homo sapiens; identical to SEQ ID NO: 326199
  chr19:34272708-34272748
  hypo

SEQ ID NO: 449320 - DNA, 997 bp, Homo sapiens; identical to SEQ ID NO: 225895
  chr19:34286493-34287490
  hypo

SEQ ID NO: 449321 - DNA, 279 bp, Homo sapiens; identical to SEQ ID NO: 293843
  chr19:34287808-34288087
  hypo

SEQ ID NO: 449322 - DNA, 169 bp, Homo sapiens; identical to SEQ ID NO: 273879
  chr19:34302228-34302397
  hypo

SEQ ID NO: 449323 - DNA, 88 bp, Homo sapiens; identical to SEQ ID NO: 219403
  chr19:34421531-34421619
  hypo

SEQ ID NO: 449324 - DNA, 32 bp, Homo sapiens; identical to SEQ ID NO: 273882
  chr19:34537937-34537969
  hypo

SEQ ID NO: 449325 - DNA, 31 bp, Homo sapiens; identical to SEQ ID NO: 67308
  chr19:34538209-34538240
  hypo

SEQ ID NO: 449326 - DNA, 34 bp, Homo sapiens; identical to SEQ ID NO: 273884
  chr19:34538665-34538699
  hypo

SEQ ID NO: 449327 - DNA, 34 bp, Homo sapiens; identical to SEQ ID NO: 273885
  chr19:34538939-34538973
  hypo

SEQ ID NO: 449328 - DNA, 34 bp, Homo sapiens; identical to SEQ ID NO: 273886
  chr19:34603234-34603268
  hypo

SEQ ID NO: 449329 - DNA, 37 bp, Homo sapiens; identical to SEQ ID NO: 273887
  chr19:34630392-34630429
  hypo

SEQ ID NO: 449330 - DNA, 190 bp, Homo sapiens; identical to SEQ ID NO: 273888
  chr19:34846160-34846350
  hypo

SEQ ID NO: 449331 - DNA, 49 bp, Homo sapiens; identical to SEQ ID NO: 273891
  chr19:34988798-34988847
  hypo

SEQ ID NO: 449332 - DNA, 42 bp, Homo sapiens; identical to SEQ ID NO: 273892
  chr19:34989429-34989471
  hypo

SEQ ID NO: 449333 - DNA, 309 bp, Homo sapiens; identical to SEQ ID NO: 273893
  chr19:35050089-35050398
  hypo

SEQ ID NO: 449334 - DNA, 61 bp, Homo sapiens; identical to SEQ ID NO: 273894
  chr19:35082486-35082547
  hypo

SEQ ID NO: 449335 - DNA, 38 bp, Homo sapiens; identical to SEQ ID NO: 273895
  chr19:35178755-35178793
  hypo

SEQ ID NO: 449336 - DNA, 207 bp, Homo sapiens; identical to SEQ ID NO: 273896
  chr19:35298169-35298376
  hypo

SEQ ID NO: 449337 - DNA, 45 bp, Homo sapiens; identical to SEQ ID NO: 273898
  chr19:35324046-35324091
  hypo

SEQ ID NO: 449338 - DNA, 46 bp, Homo sapiens; identical to SEQ ID NO: 326224
  chr19:35367988-35368034
  hypo

SEQ ID NO: 449339 - DNA, 120 bp, Homo sapiens; identical to SEQ ID NO: 273900
  chr19:35416319-35416439
  hypo

SEQ ID NO: 449340 - DNA, 139 bp, Homo sapiens; identical to SEQ ID NO: 219409
  chr19:35497760-35497899
  hypo

SEQ ID NO: 449341 - DNA, 35 bp, Homo sapiens; identical to SEQ ID NO: 273903
  chr19:35512756-35512791
  hypo

SEQ ID NO: 449342 - DNA, 88 bp, Homo sapiens; identical to SEQ ID NO: 273904
  chr19:35523454-35523542
  hypo

SEQ ID NO: 449343 - DNA, 32 bp, Homo sapiens; identical to SEQ ID NO: 219412
  chr19:35591100-35591132
  hypo

SEQ ID NO: 449344 - DNA, 250 bp, Homo sapiens; identical to SEQ ID NO: 273908
  chr19:35597196-35597446
  hypo

SEQ ID NO: 449345 - DNA, 35 bp, Homo sapiens; identical to SEQ ID NO: 273909
  chr19:35599309-35599344
  hypo

SEQ ID NO: 449346 - DNA, 97 bp, Homo sapiens; identical to SEQ ID NO: 273910
  chr19:35599789-35599886
  hypo

SEQ ID NO: 449347 - DNA, 60 bp, Homo sapiens; identical to SEQ ID NO: 326236
  chr19:35608882-35608942
  hypo

SEQ ID NO: 449348 - DNA, 115 bp, Homo sapiens; identical to SEQ ID NO: 273916
  chr19:35619189-35619304
  hypo

SEQ ID NO: 449349 - DNA, 61 bp, Homo sapiens; identical to SEQ ID NO: 273917
  chr19:35621941-35622002
  hypo

SEQ ID NO: 449350 - DNA, 41 bp, Homo sapiens; identical to SEQ ID NO: 273918
  chr19:35677474-35677515
  hypo

SEQ ID NO: 449351 - DNA, 137 bp, Homo sapiens; identical to SEQ ID NO: 273919
  chr19:35793376-35793513
  hypo

SEQ ID NO: 449352 - DNA, 36 bp, Homo sapiens; identical to SEQ ID NO: 273921
  chr19:35835485-35835521
  hypo

SEQ ID NO: 449353 - DNA, 58 bp, Homo sapiens; identical to SEQ ID NO: 273922
  chr19:35835740-35835798
  hypo

SEQ ID NO: 449354 - DNA, 184 bp, Homo sapiens; identical to SEQ ID NO: 219415
  chr19:35842417-35842601
  hypo

SEQ ID NO: 449355 - DNA, 71 bp, Homo sapiens; identical to SEQ ID NO: 273924
  chr19:35843099-35843170
  hypo

SEQ ID NO: 449356 - DNA, 253 bp, Homo sapiens; identical to SEQ ID NO: 273925
  chr19:35843200-35843453
  hypo

SEQ ID NO: 449357 - DNA, 217 bp, Homo sapiens; identical to SEQ ID NO: 326249
  chr19:35941137-35941354
  hypo

SEQ ID NO: 449358 - DNA, 96 bp, Homo sapiens; identical to SEQ ID NO: 219416
  chr19:35983448-35983544
  hypo

SEQ ID NO: 449359 - DNA, 80 bp, Homo sapiens; identical to SEQ ID NO: 273928
  chr19:35991456-35991536
  hypo

SEQ ID NO: 449360 - DNA, 185 bp, Homo sapiens; identical to SEQ ID NO: 219417
  chr19:36041161-36041346
  hypo

SEQ ID NO: 449361 - DNA, 34 bp, Homo sapiens; identical to SEQ ID NO: 273931
  chr19:36115285-36115319
  hypo

SEQ ID NO: 449362 - DNA, 116 bp, Homo sapiens; identical to SEQ ID NO: 205371
  chr19:36123862-36123978
  hypo

SEQ ID NO: 449363 - DNA, 193 bp, Homo sapiens; identical to SEQ ID NO: 273932
  chr19:36156235-36156428
  hypo

SEQ ID NO: 449364 - DNA, 76 bp, Homo sapiens; identical to SEQ ID NO: 273933
  chr19:36157074-36157150
  hypo

SEQ ID NO: 449365 - DNA, 229 bp, Homo sapiens; identical to SEQ ID NO: 273934
  chr19:36157519-36157748
  hypo

SEQ ID NO: 449366 - DNA, 120 bp, Homo sapiens; identical to SEQ ID NO: 219420
  chr19:36167374-36167494
  hypo

SEQ ID NO: 449367 - DNA, 78 bp, Homo sapiens; identical to SEQ ID NO: 273936
  chr19:36172746-36172824
  hypo

SEQ ID NO: 449368 - DNA, 88 bp, Homo sapiens; identical to SEQ ID NO: 273937
  chr19:36199997-36200085
  hypo

SEQ ID NO: 449369 - DNA, 131 bp, Homo sapiens; identical to SEQ ID NO: 273938
  chr19:36210797-36210928
  hypo

SEQ ID NO: 449370 - DNA, 46 bp, Homo sapiens; identical to SEQ ID NO: 326263
  chr19:36220151-36220197
  hypo

SEQ ID NO: 449371 - DNA, 139 bp, Homo sapiens; identical to SEQ ID NO: 273942
  chr19:36229127-36229266
  hypo

SEQ ID NO: 449372 - DNA, 33 bp, Homo sapiens; identical to SEQ ID NO: 273943
  chr19:36260605-36260638
  hypo

SEQ ID NO: 449373 - DNA, 77 bp, Homo sapiens; identical to SEQ ID NO: 273944
  chr19:36262374-36262451
  hypo

SEQ ID NO: 449374 - DNA, 40 bp, Homo sapiens; identical to SEQ ID NO: 273945
  chr19:36275619-36275659
  hypo

SEQ ID NO: 449375 - DNA, 220 bp, Homo sapiens; identical to SEQ ID NO: 293871
  chr19:36336769-36336989
  hypo

SEQ ID NO: 449376 - DNA, 79 bp, Homo sapiens; identical to SEQ ID NO: 219423
  chr19:36388611-36388690
  hypo

SEQ ID NO: 449377 - DNA, 215 bp, Homo sapiens; identical to SEQ ID NO: 219424
  chr19:36435529-36435744
  hypo

SEQ ID NO: 449378 - DNA, 82 bp, Homo sapiens; identical to SEQ ID NO: 273948
  chr19:36500940-36501022
  hypo

SEQ ID NO: 449379 - DNA, 320 bp, Homo sapiens; identical to SEQ ID NO: 273949
  chr19:36510004-36510324
  hypo

SEQ ID NO: 449380 - DNA, 36 bp, Homo sapiens; identical to SEQ ID NO: 273950
  chr19:36562069-36562105
  hypo

SEQ ID NO: 449381 - DNA, 50 bp, Homo sapiens; identical to SEQ ID NO: 387179
  chr19:36593115-36593165
  hypo

SEQ ID NO: 449382 - DNA, 80 bp, Homo sapiens; identical to SEQ ID NO: 219425
  chr19:36632702-36632782
  hypo

SEQ ID NO: 449383 - DNA, 246 bp, Homo sapiens; identical to SEQ ID NO: 219426
  chr19:36641157-36641403
  hypo

SEQ ID NO: 449384 - DNA, 35 bp, Homo sapiens; identical to SEQ ID NO: 273955
  chr19:36645415-36645450
  hypo

SEQ ID NO: 449385 - DNA, 32 bp, Homo sapiens; identical to SEQ ID NO: 273956
  chr19:36707255-36707287
  hypo

SEQ ID NO: 449386 - DNA, 31 bp, Homo sapiens; identical to SEQ ID NO: 273957
  chr19:36707527-36707558
  hypo

SEQ ID NO: 449387 - DNA, 175 bp, Homo sapiens; identical to SEQ ID NO: 273958
  chr19:36746788-36746963
  hypo

SEQ ID NO: 449388 - DNA, 44 bp, Homo sapiens; identical to SEQ ID NO: 273959
  chr19:36750231-36750275
  hypo

SEQ ID NO: 449389 - DNA, 186 bp, Homo sapiens; identical to SEQ ID NO: 273960
  chr19:36853754-36853940
  hypo

SEQ ID NO: 449390 - DNA, 32 bp, Homo sapiens; identical to SEQ ID NO: 219427
  chr19:36870583-36870615
  hypo

SEQ ID NO: 449391 - DNA, 93 bp, Homo sapiens; identical to SEQ ID NO: 273962
  chr19:36928986-36929079
  hypo

SEQ ID NO: 449392 - DNA, 77 bp, Homo sapiens; identical to SEQ ID NO: 273963
  chr19:37103348-37103425
  hypo

SEQ ID NO: 449393 - DNA, 146 bp, Homo sapiens; identical to SEQ ID NO: 273964
  chr19:37114162-37114308
  hypo

SEQ ID NO: 449394 - DNA, 285 bp, Homo sapiens; identical to SEQ ID NO: 219428
  chr19:37159168-37159453
  hypo

SEQ ID NO: 449395 - DNA, 162 bp, Homo sapiens; identical to SEQ ID NO: 293896
  chr19:37262838-37263000
  hypo

SEQ ID NO: 449396 - DNA, 155 bp, Homo sapiens; identical to SEQ ID NO: 225914
  chr19:37266863-37267018
  hypo

SEQ ID NO: 449397 - DNA, 38 bp, Homo sapiens; identical to SEQ ID NO: 273967
  chr19:37272529-37272567
  hypo

SEQ ID NO: 449398 - DNA, 99 bp, Homo sapiens; identical to SEQ ID NO: 273968
  chr19:37293601-37293700
  hypo

SEQ ID NO: 449399 - DNA, 621 bp, Homo sapiens; identical to SEQ ID NO: 273969
  chr19:37501127-37501748
  hypo

SEQ ID NO: 449400 - DNA, 120 bp, Homo sapiens; identical to SEQ ID NO: 273970
  chr19:37503359-37503479
  hypo

SEQ ID NO: 449401 - DNA, 190 bp, Homo sapiens; identical to SEQ ID NO: 219429
  chr19:37504006-37504196
  hypo

SEQ ID NO: 449402 - DNA, 284 bp, Homo sapiens; identical to SEQ ID NO: 219430
  chr19:37504226-37504510
  hypo

SEQ ID NO: 449403 - DNA, 327 bp, Homo sapiens; identical to SEQ ID NO: 219431
  chr19:37505284-37505611
  hypo

SEQ ID NO: 449404 - DNA, 682 bp, Homo sapiens; identical to SEQ ID NO: 273973
  chr19:37546262-37546944
  hypo

SEQ ID NO: 449405 - DNA, 340 bp, Homo sapiens; identical to SEQ ID NO: 273974
  chr19:37547634-37547974
  hypo

SEQ ID NO: 449406 - DNA, 160 bp, Homo sapiens; identical to SEQ ID NO: 273975
  chr19:37548034-37548194
  hypo

SEQ ID NO: 449407 - DNA, 216 bp, Homo sapiens; identical to SEQ ID NO: 273976
  chr19:37550817-37551033
  hypo

SEQ ID NO: 449408 - DNA, 214 bp, Homo sapiens; identical to SEQ ID NO: 273978
  chr19:37551901-37552115
  hypo

SEQ ID NO: 449409 - DNA, 40 bp, Homo sapiens; identical to SEQ ID NO: 273979
  chr19:37633553-37633593
  hypo

SEQ ID NO: 449410 - DNA, 97 bp, Homo sapiens; identical to SEQ ID NO: 273980
  chr19:37666951-37667048
  hypo

SEQ ID NO: 449411 - DNA, 36 bp, Homo sapiens; identical to SEQ ID NO: 273981
  chr19:37674960-37674996
  hypo

SEQ ID NO: 449412 - DNA, 36 bp, Homo sapiens; identical to SEQ ID NO: 273982
  chr19:37682220-37682256
  hypo

SEQ ID NO: 449413 - DNA, 43 bp, Homo sapiens; identical to SEQ ID NO: 219432
  chr19:37702591-37702634
  hypo

SEQ ID NO: 449414 - DNA, 42 bp, Homo sapiens; identical to SEQ ID NO: 273985
  chr19:37741708-37741750
  hypo

SEQ ID NO: 449415 - DNA, 37 bp, Homo sapiens; identical to SEQ ID NO: 273986
  chr19:37831817-37831854
  hypo

SEQ ID NO: 449416 - DNA, 241 bp, Homo sapiens; identical to SEQ ID NO: 273987
  chr19:37853603-37853844
  hypo

SEQ ID NO: 449417 - DNA, 35 bp, Homo sapiens; identical to SEQ ID NO: 326317
  chr19:37995775-37995810
  hypo

SEQ ID NO: 449418 - DNA, 141 bp, Homo sapiens; identical to SEQ ID NO: 273989
  chr19:38069705-38069846
  hypo

SEQ ID NO: 449419 - DNA, 32 bp, Homo sapiens; identical to SEQ ID NO: 273990
  chr19:38172706-38172738
  hypo

SEQ ID NO: 449420 - DNA, 35 bp, Homo sapiens; identical to SEQ ID NO: 273991
  chr19:38185144-38185179
  hypo

SEQ ID NO: 449421 - DNA, 508 bp, Homo sapiens; identical to SEQ ID NO: 273992
  chr19:38187527-38188035
  hypo

SEQ ID NO: 449422 - DNA, 382 bp, Homo sapiens; identical to SEQ ID NO: 273993
  chr19:38221768-38222150
  hypo

SEQ ID NO: 449423 - DNA, 82 bp, Homo sapiens; identical to SEQ ID NO: 273994
  chr19:38273674-38273756
  hypo

SEQ ID NO: 449424 - DNA, 39 bp, Homo sapiens; identical to SEQ ID NO: 219433
  chr19:38287060-38287099
  hypo

SEQ ID NO: 449425 - DNA, 95 bp, Homo sapiens; identical to SEQ ID NO: 273996
  chr19:38299439-38299534
  hypo

SEQ ID NO: 449426 - DNA, 74 bp, Homo sapiens; identical to SEQ ID NO: 219434
  chr19:38309039-38309113
  hypo

SEQ ID NO: 449427 - DNA, 276 bp, Homo sapiens; identical to SEQ ID NO: 273998
  chr19:38345148-38345424
  hypo

SEQ ID NO: 449428 - DNA, 114 bp, Homo sapiens; identical to SEQ ID NO: 219435
  chr19:38347218-38347332
  hypo

SEQ ID NO: 449429 - DNA, 34 bp, Homo sapiens; identical to SEQ ID NO: 274000
  chr19:38348720-38348754
  hypo

SEQ ID NO: 449430 - DNA, 97 bp, Homo sapiens; identical to SEQ ID NO: 274001
  chr19:38383008-38383105
  hypo

SEQ ID NO: 449431 - DNA, 57 bp, Homo sapiens; identical to SEQ ID NO: 225920
  chr19:38398221-38398278
  hypo

SEQ ID NO: 449432 - DNA, 194 bp, Homo sapiens; identical to SEQ ID NO: 219436
  chr19:38446271-38446465
  hypo

SEQ ID NO: 449433 - DNA, 79 bp, Homo sapiens; identical to SEQ ID NO: 274003
  chr19:38472268-38472347
  hypo

SEQ ID NO: 449434 - DNA, 78 bp, Homo sapiens; identical to SEQ ID NO: 274004
  chr19:38480528-38480606
  hypo

SEQ ID NO: 449435 - DNA, 196 bp, Homo sapiens; identical to SEQ ID NO: 219438
  chr19:38500327-38500523
  hypo

SEQ ID NO: 449436 - DNA, 431 bp, Homo sapiens; identical to SEQ ID NO: 219439
  chr19:38564442-38564873
  hypo

SEQ ID NO: 449437 - DNA, 42 bp, Homo sapiens; identical to SEQ ID NO: 274008
  chr19:38568581-38568623
  hypo

SEQ ID NO: 449438 - DNA, 42 bp, Homo sapiens; identical to SEQ ID NO: 219440
  chr19:38572016-38572058
  hypo

SEQ ID NO: 449439 - DNA, 142 bp, Homo sapiens; identical to SEQ ID NO: 219441
  chr19:38572720-38572862
  hypo

SEQ ID NO: 449440 - DNA, 140 bp, Homo sapiens; identical to SEQ ID NO: 274011
  chr19:38582275-38582415
  hypo

SEQ ID NO: 449441 - DNA, 51 bp, Homo sapiens; identical to SEQ ID NO: 219442
  chr19:38625643-38625694
  hypo

SEQ ID NO: 449442 - DNA, 221 bp, Homo sapiens; identical to SEQ ID NO: 274013
  chr19:38625953-38626174
  hypo

SEQ ID NO: 449443 - DNA, 127 bp, Homo sapiens; identical to SEQ ID NO: 274014
  chr19:38626519-38626646
  hypo

SEQ ID NO: 449444 - DNA, 198 bp, Homo sapiens; identical to SEQ ID NO: 274015
  chr19:38636781-38636979
  hypo

SEQ ID NO: 449445 - DNA, 92 bp, Homo sapiens; identical to SEQ ID NO: 219444
  chr19:38639131-38639223
  hypo

SEQ ID NO: 449446 - DNA, 180 bp, Homo sapiens; identical to SEQ ID NO: 219445
  chr19:38679125-38679305
  hypo

SEQ ID NO: 449447 - DNA, 31 bp, Homo sapiens; identical to SEQ ID NO: 219446
  chr19:38679545-38679576
  hypo

SEQ ID NO: 449448 - DNA, 179 bp, Homo sapiens; identical to SEQ ID NO: 326349
  chr19:38684215-38684394
  hypo

SEQ ID NO: 449449 - DNA, 38 bp, Homo sapiens; identical to SEQ ID NO: 326350
  chr19:38684424-38684462
  hypo

SEQ ID NO: 449450 - DNA, 48 bp, Homo sapiens; identical to SEQ ID NO: 219447
  chr19:38689956-38690004
  hypo

SEQ ID NO: 449451 - DNA, 91 bp, Homo sapiens; identical to SEQ ID NO: 219448
  chr19:38691720-38691811
  hypo

SEQ ID NO: 449452 - DNA, 275 bp, Homo sapiens; identical to SEQ ID NO: 274022
  chr19:38704117-38704392
  hypo

SEQ ID NO: 449453 - DNA, 430 bp, Homo sapiens; identical to SEQ ID NO: 274023
  chr19:38706579-38707009
  hypo

SEQ ID NO: 449454 - DNA, 440 bp, Homo sapiens; identical to SEQ ID NO: 274024
  chr19:38711296-38711736
  hypo

SEQ ID NO: 449455 - DNA, 42 bp, Homo sapiens; identical to SEQ ID NO: 274025
  chr19:38747775-38747817
  hypo

SEQ ID NO: 449456 - DNA, 36 bp, Homo sapiens; identical to SEQ ID NO: 274026
  chr19:38756647-38756683
  hypo

SEQ ID NO: 449457 - DNA, 87 bp, Homo sapiens; identical to SEQ ID NO: 274027
  chr19:38764530-38764617
  hypo

SEQ ID NO: 449458 - DNA, 211 bp, Homo sapiens; identical to SEQ ID NO: 274028
  chr19:38774186-38774397
  hypo

SEQ ID NO: 449459 - DNA, 183 bp, Homo sapiens; identical to SEQ ID NO: 274029
  chr19:38780287-38780470
  hypo

SEQ ID NO: 449460 - DNA, 75 bp, Homo sapiens; identical to SEQ ID NO: 274030
  chr19:38781556-38781631
  hypo

SEQ ID NO: 449461 - DNA, 58 bp, Homo sapiens; identical to SEQ ID NO: 326367
  chr19:38782477-38782535
  hypo

SEQ ID NO: 449462 - DNA, 73 bp, Homo sapiens; identical to SEQ ID NO: 326368
  chr19:38782670-38782743
  hypo

SEQ ID NO: 449463 - DNA, 235 bp, Homo sapiens; identical to SEQ ID NO: 274033
  chr19:38784873-38785108
  hypo

SEQ ID NO: 449464 - DNA, 74 bp, Homo sapiens; identical to SEQ ID NO: 274034
  chr19:38786544-38786618
  hypo

SEQ ID NO: 449465 - DNA, 45 bp, Homo sapiens; identical to SEQ ID NO: 274035
  chr19:38817274-38817319
  hypo

SEQ ID NO: 449466 - DNA, 44 bp, Homo sapiens; identical to SEQ ID NO: 219453
  chr19:38828333-38828377
  hypo

SEQ ID NO: 449467 - DNA, 152 bp, Homo sapiens; identical to SEQ ID NO: 274038
  chr19:38838188-38838340
  hypo

SEQ ID NO: 449468 - DNA, 79 bp, Homo sapiens; identical to SEQ ID NO: 274039
  chr19:38841908-38841987
  hypo

SEQ ID NO: 449469 - DNA, 138 bp, Homo sapiens; identical to SEQ ID NO: 219454
  chr19:38851300-38851438
  hypo

SEQ ID NO: 449470 - DNA, 232 bp, Homo sapiens; identical to SEQ ID NO: 293932
  chr19:38852095-38852327
  hypo

SEQ ID NO: 449471 - DNA, 141 bp, Homo sapiens; identical to SEQ ID NO: 293933
  chr19:38852387-38852528
  hypo

SEQ ID NO: 449472 - DNA, 92 bp, Homo sapiens; identical to SEQ ID NO: 274041
  chr19:38855368-38855460
  hypo

SEQ ID NO: 449473 - DNA, 120 bp, Homo sapiens; identical to SEQ ID NO: 274042
  chr19:38868585-38868705
  hypo

SEQ ID NO: 449474 - DNA, 453 bp, Homo sapiens; identical to SEQ ID NO: 274044
  chr19:38875946-38876399
  hypo

SEQ ID NO: 449475 - DNA, 33 bp, Homo sapiens; identical to SEQ ID NO: 274045
  chr19:38900084-38900117
  hypo

SEQ ID NO: 449476 - DNA, 42 bp, Homo sapiens; identical to SEQ ID NO: 274048
  chr19:38921075-38921117
  hypo

SEQ ID NO: 449477 - DNA, 170 bp, Homo sapiens; identical to SEQ ID NO: 274049
  chr19:38934252-38934422
  hypo

SEQ ID NO: 449478 - DNA, 38 bp, Homo sapiens; identical to SEQ ID NO: 274050
  chr19:38951826-38951864
  hypo

SEQ ID NO: 449479 - DNA, 219 bp, Homo sapiens; identical to SEQ ID NO: 326391
  chr19:38974013-38974232
  hypo

SEQ ID NO: 449480 - DNA, 164 bp, Homo sapiens; identical to SEQ ID NO: 274055
  chr19:38985044-38985208
  hypo

SEQ ID NO: 449481 - DNA, 42 bp, Homo sapiens; identical to SEQ ID NO: 274056
  chr19:38991673-38991715
  hypo

SEQ ID NO: 449482 - DNA, 59 bp, Homo sapiens; identical to SEQ ID NO: 219460
  chr19:38993225-38993284
  hypo

SEQ ID NO: 449483 - DNA, 595 bp, Homo sapiens; identical to SEQ ID NO: 219462
  chr19:39051723-39052318
  hypo

SEQ ID NO: 449484 - DNA, 416 bp, Homo sapiens; identical to SEQ ID NO: 274063
  chr19:39087585-39088001
  hypo

SEQ ID NO: 449485 - DNA, 125 bp, Homo sapiens; identical to SEQ ID NO: 274064
  chr19:39092089-39092214
  hypo

SEQ ID NO: 449486 - DNA, 94 bp, Homo sapiens; identical to SEQ ID NO: 274066
  chr19:39097473-39097567
  hypo

SEQ ID NO: 449487 - DNA, 232 bp, Homo sapiens; identical to SEQ ID NO: 274067
  chr19:39125643-39125875
  hypo

SEQ ID NO: 449488 - DNA, 31 bp, Homo sapiens; identical to SEQ ID NO: 274068
  chr19:39128243-39128274
  hypo

SEQ ID NO: 449489 - DNA, 79 bp, Homo sapiens; identical to SEQ ID NO: 219465
  chr19:39144877-39144956
  hypo

SEQ ID NO: 449490 - DNA, 40 bp, Homo sapiens; identical to SEQ ID NO: 274070
  chr19:39149969-39150009
  hypo

SEQ ID NO: 449491 - DNA, 34 bp, Homo sapiens; identical to SEQ ID NO: 219466
  chr19:39159904-39159938
  hypo

SEQ ID NO: 449492 - DNA, 154 bp, Homo sapiens; identical to SEQ ID NO: 274074
  chr19:39189493-39189647
  hypo

SEQ ID NO: 449493 - DNA, 196 bp, Homo sapiens; identical to SEQ ID NO: 274075
  chr19:39190982-39191178
  hypo

SEQ ID NO: 449494 - DNA, 165 bp, Homo sapiens; identical to SEQ ID NO: 274076
  chr19:39201702-39201867
  hypo

SEQ ID NO: 449495 - DNA, 86 bp, Homo sapiens; identical to SEQ ID NO: 274078
  chr19:39211068-39211154
  hypo

SEQ ID NO: 449496 - DNA, 299 bp, Homo sapiens; identical to SEQ ID NO: 274079
  chr19:39211597-39211896
  hypo

SEQ ID NO: 449497 - DNA, 32 bp, Homo sapiens; identical to SEQ ID NO: 219469
  chr19:39238369-39238401
  hypo

SEQ ID NO: 449498 - DNA, 143 bp, Homo sapiens; identical to SEQ ID NO: 274083
  chr19:39259868-39260011
  hypo

SEQ ID NO: 449499 - DNA, 137 bp, Homo sapiens; identical to SEQ ID NO: 274084
  chr19:39270478-39270615
  hypo

SEQ ID NO: 449500 - DNA, 178 bp, Homo sapiens; identical to SEQ ID NO: 219471
  chr19:39279303-39279481
  hypo

SEQ ID NO: 449501 - DNA, 77 bp, Homo sapiens; identical to SEQ ID NO: 274088
  chr19:39302318-39302395
  hypo

SEQ ID NO: 449502 - DNA, 36 bp, Homo sapiens; identical to SEQ ID NO: 219476
  chr19:39310980-39311016
  hypo

SEQ ID NO: 449503 - DNA, 233 bp, Homo sapiens; identical to SEQ ID NO: 274092
  chr19:39327431-39327664
  hypo

SEQ ID NO: 449504 - DNA, 33 bp, Homo sapiens; identical to SEQ ID NO: 274095
  chr19:39330892-39330925
  hypo

SEQ ID NO: 449505 - DNA, 433 bp, Homo sapiens; identical to SEQ ID NO: 274096
  chr19:39332929-39333362
  hypo

SEQ ID NO: 449506 - DNA, 783 bp, Homo sapiens; identical to SEQ ID NO: 274097
  chr19:39406262-39407045
  hypo

SEQ ID NO: 449507 - DNA, 90 bp, Homo sapiens; identical to SEQ ID NO: 274098
  chr19:39408601-39408691
  hypo

SEQ ID NO: 449508 - DNA, 176 bp, Homo sapiens; identical to SEQ ID NO: 274099
  chr19:39415993-39416169
  hypo

SEQ ID NO: 449509 - DNA, 147 bp, Homo sapiens; identical to SEQ ID NO: 274101
  chr19:39439160-39439307
  hypo

SEQ ID NO: 449510 - DNA, 62 bp, Homo sapiens; identical to SEQ ID NO: 274102
  chr19:39544160-39544222
  hypo

SEQ ID NO: 449511 - DNA, 98 bp, Homo sapiens; identical to SEQ ID NO: 274103
  chr19:39553665-39553763
  hypo

SEQ ID NO: 449512 - DNA, 42 bp, Homo sapiens; identical to SEQ ID NO: 274104
  chr19:39568094-39568136
  hypo

SEQ ID NO: 449513 - DNA, 90 bp, Homo sapiens; identical to SEQ ID NO: 219479
  chr19:39595965-39596055
  hypo

SEQ ID NO: 449514 - DNA, 124 bp, Homo sapiens; identical to SEQ ID NO: 219480
  chr19:39597518-39597642
  hypo

SEQ ID NO: 449515 - DNA, 220 bp, Homo sapiens; identical to SEQ ID NO: 274108
  chr19:39644535-39644755
  hypo

SEQ ID NO: 449516 - DNA, 155 bp, Homo sapiens; identical to SEQ ID NO: 326449
  chr19:39645707-39645862
  hypo

SEQ ID NO: 449517 - DNA, 59 bp, Homo sapiens; identical to SEQ ID NO: 219482
  chr19:39653250-39653309
  hypo

SEQ ID NO: 449518 - DNA, 270 bp, Homo sapiens; identical to SEQ ID NO: 219484
  chr19:39664416-39664686
  hypo

SEQ ID NO: 449519 - DNA, 85 bp, Homo sapiens; identical to SEQ ID NO: 219485
  chr19:39670670-39670755
  hypo

SEQ ID NO: 449520 - DNA, 196 bp, Homo sapiens; identical to SEQ ID NO: 219486
  chr19:39671859-39672055
  hypo

SEQ ID NO: 449521 - DNA, 133 bp, Homo sapiens; identical to SEQ ID NO: 326457
  chr19:39672255-39672388
  hypo

SEQ ID NO: 449522 - DNA, 429 bp, Homo sapiens; identical to SEQ ID NO: 219487
  chr19:39672463-39672892
  hypo

SEQ ID NO: 449523 - DNA, 201 bp, Homo sapiens; identical to SEQ ID NO: 326459
  chr19:39691027-39691228
  hypo

SEQ ID NO: 449524 - DNA, 923 bp, Homo sapiens; identical to SEQ ID NO: 274119
  chr19:39804541-39805464
  hypo

SEQ ID NO: 449525 - DNA, 90 bp, Homo sapiens; identical to SEQ ID NO: 274120
  chr19:39816484-39816574
  hypo

SEQ ID NO: 449526 - DNA, 247 bp, Homo sapiens; identical to SEQ ID NO: 274122
  chr19:39818151-39818398
  hypo

SEQ ID NO: 449527 - DNA, 300 bp, Homo sapiens; identical to SEQ ID NO: 274123
  chr19:39913957-39914257
  hypo

SEQ ID NO: 449528 - DNA, 174 bp, Homo sapiens; identical to SEQ ID NO: 274124
  chr19:39924224-39924398
  hypo

SEQ ID NO: 449529 - DNA, 40 bp, Homo sapiens; identical to SEQ ID NO: 219488
  chr19:39934201-39934241
  hypo

SEQ ID NO: 449530 - DNA, 53 bp, Homo sapiens; identical to SEQ ID NO: 219489
  chr19:39964614-39964667
  hypo

SEQ ID NO: 449531 - DNA, 98 bp, Homo sapiens; identical to SEQ ID NO: 293965
  chr19:39992838-39992936
  hypo

SEQ ID NO: 449532 - DNA, 165 bp, Homo sapiens; identical to SEQ ID NO: 219490
  chr19:40015704-40015869
  hypo

SEQ ID NO: 449533 - DNA, 34 bp, Homo sapiens; identical to SEQ ID NO: 274130
  chr19:40016713-40016747
  hypo

SEQ ID NO: 449534 - DNA, 120 bp, Homo sapiens; identical to SEQ ID NO: 219491
  chr19:40019820-40019940
  hypo

SEQ ID NO: 449535 - DNA, 420 bp, Homo sapiens; identical to SEQ ID NO: 219492
  chr19:40020180-40020600
  hypo

SEQ ID NO: 449536 - DNA, 31 bp, Homo sapiens; identical to SEQ ID NO: 274133
  chr19:40026202-40026233
  hypo

SEQ ID NO: 449537 - DNA, 148 bp, Homo sapiens; identical to SEQ ID NO: 274134
  chr19:40038357-40038505
  hypo

SEQ ID NO: 449538 - DNA, 105 bp, Homo sapiens; identical to SEQ ID NO: 274135
  chr19:40269170-40269275
  hypo

SEQ ID NO: 449539 - DNA, 175 bp, Homo sapiens; identical to SEQ ID NO: 219493
  chr19:40316373-40316548
  hypo

SEQ ID NO: 449540 - DNA, 136 bp, Homo sapiens; identical to SEQ ID NO: 274137
  chr19:40318907-40319043
  hypo

SEQ ID NO: 449541 - DNA, 76 bp, Homo sapiens; identical to SEQ ID NO: 219494
  chr19:40322485-40322561
  hypo

SEQ ID NO: 449542 - DNA, 151 bp, Homo sapiens; identical to SEQ ID NO: 274139
  chr19:40329690-40329841
  hypo

SEQ ID NO: 449543 - DNA, 95 bp, Homo sapiens; identical to SEQ ID NO: 274140
  chr19:40343350-40343445
  hypo

SEQ ID NO: 449544 - DNA, 41 bp, Homo sapiens; identical to SEQ ID NO: 274142
  chr19:40386023-40386064
  hypo

SEQ ID NO: 449545 - DNA, 103 bp, Homo sapiens; identical to SEQ ID NO: 274143
  chr19:40405622-40405725
  hypo

SEQ ID NO: 449546 - DNA, 119 bp, Homo sapiens; identical to SEQ ID NO: 274144
  chr19:40408775-40408894
  hypo

SEQ ID NO: 449547 - DNA, 65 bp, Homo sapiens; identical to SEQ ID NO: 219496
  chr19:40441597-40441662
  hypo

SEQ ID NO: 449548 - DNA, 70 bp, Homo sapiens; identical to SEQ ID NO: 274146
  chr19:40449596-40449666
  hypo

SEQ ID NO: 449549 - DNA, 86 bp, Homo sapiens; identical to SEQ ID NO: 274148
  chr19:40660160-40660246
  hypo

SEQ ID NO: 449550 - DNA, 77 bp, Homo sapiens; identical to SEQ ID NO: 219498
  chr19:40660698-40660775
  hypo

SEQ ID NO: 449551 - DNA, 42 bp, Homo sapiens; identical to SEQ ID NO: 274150
  chr19:40706865-40706907
  hypo

SEQ ID NO: 449552 - DNA, 175 bp, Homo sapiens; identical to SEQ ID NO: 219499
  chr19:40711781-40711956
  hypo

SEQ ID NO: 449553 - DNA, 42 bp, Homo sapiens; identical to SEQ ID NO: 274152
  chr19:40720419-40720461
  hypo

SEQ ID NO: 449554 - DNA, 34 bp, Homo sapiens; identical to SEQ ID NO: 274153
  chr19:40727176-40727210
  hypo

SEQ ID NO: 449555 - DNA, 135 bp, Homo sapiens; identical to SEQ ID NO: 274154
  chr19:40738249-40738384
  hypo

SEQ ID NO: 449556 - DNA, 150 bp, Homo sapiens; identical to SEQ ID NO: 274155
  chr19:40739501-40739651
  hypo

SEQ ID NO: 449557 - DNA, 125 bp, Homo sapiens; identical to SEQ ID NO: 274156
  chr19:40741217-40741342
  hypo

SEQ ID NO: 449558 - DNA, 367 bp, Homo sapiens; identical to SEQ ID NO: 274157
  chr19:40741640-40742007
  hypo

SEQ ID NO: 449559 - DNA, 137 bp, Homo sapiens; identical to SEQ ID NO: 274158
  chr19:40743496-40743633
  hypo

SEQ ID NO: 449560 - DNA, 233 bp, Homo sapiens; identical to SEQ ID NO: 274159
  chr19:40744255-40744488
  hypo

SEQ ID NO: 449561 - DNA, 165 bp, Homo sapiens; identical to SEQ ID NO: 274160
  chr19:40744734-40744899
  hypo

SEQ ID NO: 449562 - DNA, 161 bp, Homo sapiens; identical to SEQ ID NO: 219502
  chr19:40745940-40746101
  hypo

SEQ ID NO: 449563 - DNA, 260 bp, Homo sapiens; identical to SEQ ID NO: 274162
  chr19:40748512-40748772
  hypo

SEQ ID NO: 449564 - DNA, 105 bp, Homo sapiens; identical to SEQ ID NO: 274163
  chr19:40752791-40752896
  hypo

SEQ ID NO: 449565 - DNA, 72 bp, Homo sapiens; identical to SEQ ID NO: 274165
  chr19:40757959-40758031
  hypo

SEQ ID NO: 449566 - DNA, 196 bp, Homo sapiens; identical to SEQ ID NO: 274166
  chr19:40771905-40772101
  hypo

SEQ ID NO: 449567 - DNA, 229 bp, Homo sapiens; identical to SEQ ID NO: 274167
  chr19:40773001-40773230
  hypo

SEQ ID NO: 449568 - DNA, 207 bp, Homo sapiens; identical to SEQ ID NO: 274168
  chr19:40778365-40778572
  hypo

SEQ ID NO: 449569 - DNA, 169 bp, Homo sapiens; identical to SEQ ID NO: 219504
  chr19:40828672-40828841
  hypo

SEQ ID NO: 449570 - DNA, 109 bp, Homo sapiens; identical to SEQ ID NO: 219507
  chr19:40873917-40874026
  hypo

SEQ ID NO: 449571 - DNA, 207 bp, Homo sapiens; identical to SEQ ID NO: 274174
  chr19:40895455-40895662
  hypo

SEQ ID NO: 449572 - DNA, 43 bp, Homo sapiens; identical to SEQ ID NO: 274175
  chr19:40900557-40900600
  hypo

SEQ ID NO: 449573 - DNA, 51 bp, Homo sapiens; identical to SEQ ID NO: 219508
  chr19:40900951-40901002
  hypo

SEQ ID NO: 449574 - DNA, 314 bp, Homo sapiens; identical to SEQ ID NO: 326517
  chr19:40901949-40902263
  hypo

SEQ ID NO: 449575 - DNA, 113 bp, Homo sapiens; identical to SEQ ID NO: 219509
  chr19:40928722-40928835
  hypo

SEQ ID NO: 449576 - DNA, 150 bp, Homo sapiens; identical to SEQ ID NO: 205417
  chr19:40939939-40940089
  hypo

SEQ ID NO: 449577 - DNA, 115 bp, Homo sapiens; identical to SEQ ID NO: 326520
  chr19:40951499-40951614
  hypo

SEQ ID NO: 449578 - DNA, 170 bp, Homo sapiens; identical to SEQ ID NO: 274180
  chr19:40952304-40952474
  hypo

SEQ ID NO: 449579 - DNA, 31 bp, Homo sapiens; identical to SEQ ID NO: 274181
  chr19:40955776-40955807
  hypo

SEQ ID NO: 449580 - DNA, 66 bp, Homo sapiens; identical to SEQ ID NO: 274182
  chr19:41008064-41008130
  hypo

SEQ ID NO: 449581 - DNA, 85 bp, Homo sapiens; identical to SEQ ID NO: 205419
  chr19:41025294-41025379
  hypo

SEQ ID NO: 449582 - DNA, 247 bp, Homo sapiens; identical to SEQ ID NO: 274183
  chr19:41133575-41133822
  hypo

SEQ ID NO: 449583 - DNA, 93 bp, Homo sapiens; identical to SEQ ID NO: 274184
  chr19:41168076-41168169
  hypo

SEQ ID NO: 449584 - DNA, 266 bp, Homo sapiens; identical to SEQ ID NO: 274185
  chr19:41168199-41168465
  hypo

SEQ ID NO: 449585 - DNA, 566 bp, Homo sapiens; identical to SEQ ID NO: 274186
  chr19:41281362-41281928
  hypo

SEQ ID NO: 449586 - DNA, 230 bp, Homo sapiens; identical to SEQ ID NO: 219514
  chr19:41292578-41292808
  hypo

SEQ ID NO: 449587 - DNA, 33 bp, Homo sapiens; identical to SEQ ID NO: 225936
  chr19:41304119-41304152
  hypo

SEQ ID NO: 449588 - DNA, 61 bp, Homo sapiens; identical to SEQ ID NO: 274188
  chr19:41602157-41602218
  hypo

SEQ ID NO: 449589 - DNA, 41 bp, Homo sapiens; identical to SEQ ID NO: 219515
  chr19:41616326-41616367
  hypo

SEQ ID NO: 449590 - DNA, 98 bp, Homo sapiens; identical to SEQ ID NO: 219516
  chr19:41665355-41665453
  hypo

SEQ ID NO: 449591 - DNA, 223 bp, Homo sapiens; identical to SEQ ID NO: 326537
  chr19:41673657-41673880
  hypo

SEQ ID NO: 449592 - DNA, 342 bp, Homo sapiens; identical to SEQ ID NO: 219517
  chr19:41675691-41676033
  hypo

SEQ ID NO: 449593 - DNA, 350 bp, Homo sapiens; identical to SEQ ID NO: 274194
  chr19:41680150-41680500
  hypo

SEQ ID NO: 449594 - DNA, 446 bp, Homo sapiens; identical to SEQ ID NO: 274195
  chr19:41809773-41810219
  hypo

SEQ ID NO: 449595 - DNA, 52 bp, Homo sapiens; identical to SEQ ID NO: 326541
  chr19:41854263-41854315
  hypo

SEQ ID NO: 449596 - DNA, 458 bp, Homo sapiens; identical to SEQ ID NO: 294013
  chr19:41859852-41860310
  hypo

SEQ ID NO: 449597 - DNA, 124 bp, Homo sapiens; identical to SEQ ID NO: 326543
  chr19:41919971-41920095
  hypo

SEQ ID NO: 449598 - DNA, 91 bp, Homo sapiens; identical to SEQ ID NO: 326545
  chr19:41932289-41932380
  hypo

SEQ ID NO: 449599 - DNA, 136 bp, Homo sapiens; identical to SEQ ID NO: 97636
  chr19:41932387-41932523
  hypo

SEQ ID NO: 449600 - DNA, 134 bp, Homo sapiens; identical to SEQ ID NO: 274202
  chr19:42373112-42373246
  hypo

SEQ ID NO: 449601 - DNA, 161 bp, Homo sapiens; identical to SEQ ID NO: 274203
  chr19:42383169-42383330
  hypo

SEQ ID NO: 449602 - DNA, 241 bp, Homo sapiens; identical to SEQ ID NO: 219519
  chr19:42398490-42398731
  hypo

SEQ ID NO: 449603 - DNA, 308 bp, Homo sapiens; identical to SEQ ID NO: 219520
  chr19:42400292-42400600
  hypo

SEQ ID NO: 449604 - DNA, 48 bp, Homo sapiens; identical to SEQ ID NO: 326553
  chr19:42409333-42409381
  hypo

SEQ ID NO: 449605 - DNA, 55 bp, Homo sapiens; identical to SEQ ID NO: 274211
  chr19:42638977-42639032
  hypo

SEQ ID NO: 449606 - DNA, 56 bp, Homo sapiens; identical to SEQ ID NO: 274212
  chr19:42657375-42657431
  hypo

SEQ ID NO: 449607 - DNA, 185 bp, Homo sapiens; identical to SEQ ID NO: 274213
  chr19:42700691-42700876
  hypo

SEQ ID NO: 449608 - DNA, 88 bp, Homo sapiens; identical to SEQ ID NO: 274214
  chr19:42712732-42712820
  hypo

SEQ ID NO: 449609 - DNA, 130 bp, Homo sapiens; identical to SEQ ID NO: 219524
  chr19:42722466-42722596
  hypo

SEQ ID NO: 449610 - DNA, 159 bp, Homo sapiens; identical to SEQ ID NO: 219525
  chr19:42722739-42722898
  hypo

SEQ ID NO: 449611 - DNA, 31 bp, Homo sapiens; identical to SEQ ID NO: 219526
  chr19:42723738-42723769
  hypo

SEQ ID NO: 449612 - DNA, 46 bp, Homo sapiens; identical to SEQ ID NO: 274217
  chr19:42729404-42729450
  hypo

SEQ ID NO: 449613 - DNA, 111 bp, Homo sapiens; identical to SEQ ID NO: 225940
  chr19:42749161-42749272
  hypo

SEQ ID NO: 449614 - DNA, 375 bp, Homo sapiens; identical to SEQ ID NO: 219527
  chr19:42791226-42791601
  hypo

SEQ ID NO: 449615 - DNA, 94 bp, Homo sapiens; identical to SEQ ID NO: 274219
  chr19:42796467-42796561
  hypo

SEQ ID NO: 449616 - DNA, 99 bp, Homo sapiens; identical to SEQ ID NO: 326569
  chr19:42856483-42856582
  hypo

SEQ ID NO: 449617 - DNA, 236 bp, Homo sapiens; identical to SEQ ID NO: 219528
  chr19:42873732-42873968
  hypo

SEQ ID NO: 449618 - DNA, 70 bp, Homo sapiens; identical to SEQ ID NO: 274224
  chr19:42914487-42914557
  hypo

SEQ ID NO: 449619 - DNA, 84 bp, Homo sapiens; identical to SEQ ID NO: 274225
  chr19:43181320-43181404
  hypo

SEQ ID NO: 449620 - DNA, 150 bp, Homo sapiens; identical to SEQ ID NO: 274226
  chr19:43918868-43919018
  hypo

SEQ ID NO: 449621 - DNA, 327 bp, Homo sapiens; identical to SEQ ID NO: 274227
  chr19:43919347-43919674
  hypo

SEQ ID NO: 449622 - DNA, 36 bp, Homo sapiens; identical to SEQ ID NO: 274228
  chr19:43975086-43975122
  hypo

SEQ ID NO: 449623 - DNA, 127 bp, Homo sapiens; identical to SEQ ID NO: 219531
  chr19:44005794-44005921
  hypo

SEQ ID NO: 449624 - DNA, 122 bp, Homo sapiens; identical to SEQ ID NO: 274230
  chr19:44096724-44096846
  hypo

SEQ ID NO: 449625 - DNA, 93 bp, Homo sapiens; identical to SEQ ID NO: 274231
  chr19:44128766-44128859
  hypo

SEQ ID NO: 449626 - DNA, 778 bp, Homo sapiens; identical to SEQ ID NO: 294049
  chr19:44143630-44144408
  hypo

SEQ ID NO: 449627 - DNA, 90 bp, Homo sapiens; identical to SEQ ID NO: 274232
  chr19:44207878-44207968
  hypo

SEQ ID NO: 449628 - DNA, 167 bp, Homo sapiens; identical to SEQ ID NO: 274234
  chr19:44243554-44243721
  hypo

SEQ ID NO: 449629 - DNA, 39 bp, Homo sapiens; identical to SEQ ID NO: 274236
  chr19:44502274-44502313
  hypo

SEQ ID NO: 449630 - DNA, 34 bp, Homo sapiens; identical to SEQ ID NO: 274237
  chr19:44530714-44530748
  hypo

SEQ ID NO: 449631 - DNA, 44 bp, Homo sapiens; identical to SEQ ID NO: 219535
  chr19:44564104-44564148
  hypo

SEQ ID NO: 449632 - DNA, 37 bp, Homo sapiens; identical to SEQ ID NO: 219536
  chr19:44575624-44575661
  hypo

SEQ ID NO: 449633 - DNA, 56 bp, Homo sapiens; identical to SEQ ID NO: 219537
  chr19:44578499-44578555
  hypo

SEQ ID NO: 449634 - DNA, 322 bp, Homo sapiens; identical to SEQ ID NO: 274242
  chr19:44932984-44933306
  hypo

SEQ ID NO: 449635 - DNA, 31 bp, Homo sapiens; identical to SEQ ID NO: 219538
  chr19:44988475-44988506
  hypo

SEQ ID NO: 449636 - DNA, 93 bp, Homo sapiens; identical to SEQ ID NO: 219540
  chr19:45108543-45108636
  hypo

SEQ ID NO: 449637 - DNA, 150 bp, Homo sapiens; identical to SEQ ID NO: 219541
  chr19:45149597-45149747
  hypo

SEQ ID NO: 449638 - DNA, 41 bp, Homo sapiens; identical to SEQ ID NO: 219542
  chr19:45150351-45150392
  hypo

SEQ ID NO: 449639 - DNA, 432 bp, Homo sapiens; identical to SEQ ID NO: 219543
  chr19:45150422-45150854
  hypo

SEQ ID NO: 449640 - DNA, 35 bp, Homo sapiens; identical to SEQ ID NO: 274248
  chr19:45162026-45162061
  hypo

SEQ ID NO: 449641 - DNA, 206 bp, Homo sapiens; identical to SEQ ID NO: 219544
  chr19:45164648-45164854
  hypo

SEQ ID NO: 449642 - DNA, 147 bp, Homo sapiens; identical to SEQ ID NO: 219545
  chr19:45186851-45186998
  hypo

SEQ ID NO: 449643 - DNA, 104 bp, Homo sapiens; identical to SEQ ID NO: 274251
  chr19:45193693-45193797
  hypo

SEQ ID NO: 449644 - DNA, 204 bp, Homo sapiens; identical to SEQ ID NO: 274252
  chr19:45206658-45206862
  hypo

SEQ ID NO: 449645 - DNA, 175 bp, Homo sapiens; identical to SEQ ID NO: 294080
  chr19:45207399-45207574
  hypo

SEQ ID NO: 449646 - DNA, 122 bp, Homo sapiens; identical to SEQ ID NO: 219547
  chr19:45211220-45211342
  hypo

SEQ ID NO: 449647 - DNA, 90 bp, Homo sapiens; identical to SEQ ID NO: 274255
  chr19:45268259-45268349
  hypo

SEQ ID NO: 449648 - DNA, 162 bp, Homo sapiens; identical to SEQ ID NO: 326612
  chr19:45279714-45279876
  hypo

SEQ ID NO: 449649 - DNA, 81 bp, Homo sapiens; identical to SEQ ID NO: 274257
  chr19:45280161-45280242
  hypo

SEQ ID NO: 449650 - DNA, 198 bp, Homo sapiens; identical to SEQ ID NO: 205472
  chr19:45312126-45312324
  hypo

SEQ ID NO: 449651 - DNA, 38 bp, Homo sapiens; identical to SEQ ID NO: 274261
  chr19:45328104-45328142
  hypo

SEQ ID NO: 449652 - DNA, 368 bp, Homo sapiens; identical to SEQ ID NO: 294084
  chr19:45347906-45348274
  hypo

SEQ ID NO: 449653 - DNA, 264 bp, Homo sapiens; identical to SEQ ID NO: 294085
  chr19:45348808-45349072
  hypo

SEQ ID NO: 449654 - DNA, 295 bp, Homo sapiens; identical to SEQ ID NO: 274262
  chr19:45368653-45368948
  hypo

SEQ ID NO: 449655 - DNA, 272 bp, Homo sapiens; identical to SEQ ID NO: 274263
  chr19:45377062-45377334
  hypo

SEQ ID NO: 449656 - DNA, 78 bp, Homo sapiens; identical to SEQ ID NO: 387208
  chr19:45377394-45377472
  hypo

SEQ ID NO: 449657 - DNA, 44 bp, Homo sapiens; identical to SEQ ID NO: 274265
  chr19:45382930-45382974
  hypo

SEQ ID NO: 449658 - DNA, 40 bp, Homo sapiens; identical to SEQ ID NO: 274266
  chr19:45385981-45386021
  hypo

SEQ ID NO: 449659 - DNA, 72 bp, Homo sapiens; identical to SEQ ID NO: 219555
  chr19:45390079-45390151
  hypo

SEQ ID NO: 449660 - DNA, 353 bp, Homo sapiens; identical to SEQ ID NO: 274268
  chr19:45465023-45465376
  hypo

SEQ ID NO: 449661 - DNA, 65 bp, Homo sapiens; identical to SEQ ID NO: 274269
  chr19:45493681-45493746
  hypo

SEQ ID NO: 449662 - DNA, 261 bp, Homo sapiens; identical to SEQ ID NO: 274270
  chr19:45515279-45515540
  hypo

SEQ ID NO: 449663 - DNA, 101 bp, Homo sapiens; identical to SEQ ID NO: 219557
  chr19:45546675-45546776
  hypo

SEQ ID NO: 449664 - DNA, 212 bp, Homo sapiens; identical to SEQ ID NO: 219558
  chr19:45567707-45567919
  hypo

SEQ ID NO: 449665 - DNA, 39 bp, Homo sapiens; identical to SEQ ID NO: 219559
  chr19:45569129-45569168
  hypo

SEQ ID NO: 449666 - DNA, 92 bp, Homo sapiens; identical to SEQ ID NO: 274276
  chr19:45572264-45572356
  hypo

SEQ ID NO: 449667 - DNA, 54 bp, Homo sapiens; identical to SEQ ID NO: 274278
  chr19:45601008-45601062
  hypo

SEQ ID NO: 449668 - DNA, 41 bp, Homo sapiens; identical to SEQ ID NO: 219563
  chr19:45603142-45603183
  hypo

SEQ ID NO: 449669 - DNA, 220 bp, Homo sapiens; identical to SEQ ID NO: 219564
  chr19:45603213-45603433
  hypo

SEQ ID NO: 449670 - DNA, 259 bp, Homo sapiens; identical to SEQ ID NO: 274282
  chr19:45627566-45627825
  hypo

SEQ ID NO: 449671 - DNA, 198 bp, Homo sapiens; identical to SEQ ID NO: 274283
  chr19:45629665-45629863
  hypo

SEQ ID NO: 449672 - DNA, 145 bp, Homo sapiens; identical to SEQ ID NO: 274284
  chr19:45631784-45631929
  hypo

SEQ ID NO: 449673 - DNA, 56 bp, Homo sapiens; identical to SEQ ID NO: 294090
  chr19:45655081-45655137
  hypo

SEQ ID NO: 449674 - DNA, 157 bp, Homo sapiens; identical to SEQ ID NO: 274286
  chr19:45660340-45660497
  hypo

SEQ ID NO: 449675 - DNA, 136 bp, Homo sapiens; identical to SEQ ID NO: 219567
  chr19:45678712-45678848
  hypo

SEQ ID NO: 449676 - DNA, 35 bp, Homo sapiens; identical to SEQ ID NO: 274288
  chr19:45694664-45694699
  hypo

SEQ ID NO: 449677 - DNA, 119 bp, Homo sapiens; identical to SEQ ID NO: 274289
  chr19:45737164-45737283
  hypo

SEQ ID NO: 449678 - DNA, 63 bp, Homo sapiens; identical to SEQ ID NO: 326656
  chr19:45753597-45753660
  hypo

SEQ ID NO: 449679 - DNA, 166 bp, Homo sapiens; identical to SEQ ID NO: 274291
  chr19:45767999-45768165
  hypo

SEQ ID NO: 449680 - DNA, 100 bp, Homo sapiens; identical to SEQ ID NO: 274292
  chr19:45768393-45768493
  hypo

SEQ ID NO: 449681 - DNA, 134 bp, Homo sapiens; identical to SEQ ID NO: 274293
  chr19:45769021-45769155
  hypo

SEQ ID NO: 449682 - DNA, 109 bp, Homo sapiens; identical to SEQ ID NO: 274294
  chr19:45805727-45805836
  hypo

SEQ ID NO: 449683 - DNA, 31 bp, Homo sapiens; identical to SEQ ID NO: 274296
  chr19:45813962-45813993
  hypo

SEQ ID NO: 449684 - DNA, 118 bp, Homo sapiens; identical to SEQ ID NO: 274298
  chr19:45856038-45856156
  hypo

SEQ ID NO: 449685 - DNA, 86 bp, Homo sapiens; identical to SEQ ID NO: 219569
  chr19:45866860-45866946
  hypo

SEQ ID NO: 449686 - DNA, 186 bp, Homo sapiens; identical to SEQ ID NO: 274300
  chr19:45867290-45867476
  hypo

SEQ ID NO: 449687 - DNA, 207 bp, Homo sapiens; identical to SEQ ID NO: 274301
  chr19:45895251-45895458
  hypo

SEQ ID NO: 449688 - DNA, 46 bp, Homo sapiens; identical to SEQ ID NO: 225953
  chr19:45908810-45908856
  hypo

SEQ ID NO: 449689 - DNA, 230 bp, Homo sapiens; identical to SEQ ID NO: 225954
  chr19:45947821-45948051
  hypo

SEQ ID NO: 449690 - DNA, 82 bp, Homo sapiens; identical to SEQ ID NO: 274303
  chr19:45949940-45950022
  hypo

SEQ ID NO: 449691 - DNA, 262 bp, Homo sapiens; identical to SEQ ID NO: 205479
  chr19:45959073-45959335
  hypo

SEQ ID NO: 449692 - DNA, 596 bp, Homo sapiens; identical to SEQ ID NO: 326672
  chr19:45997680-45998276
  hypo

SEQ ID NO: 449693 - DNA, 90 bp, Homo sapiens; identical to SEQ ID NO: 274305
  chr19:46021493-46021583
  hypo

SEQ ID NO: 449694 - DNA, 307 bp, Homo sapiens; identical to SEQ ID NO: 274306
  chr19:46056763-46057070
  hypo

SEQ ID NO: 449695 - DNA, 44 bp, Homo sapiens; identical to SEQ ID NO: 274307
  chr19:46136077-46136121
  hypo

SEQ ID NO: 449696 - DNA, 41 bp, Homo sapiens; identical to SEQ ID NO: 274308
  chr19:46208926-46208967
  hypo

SEQ ID NO: 449697 - DNA, 161 bp, Homo sapiens; identical to SEQ ID NO: 274309
  chr19:46211661-46211822
  hypo

SEQ ID NO: 449698 - DNA, 348 bp, Homo sapiens; identical to SEQ ID NO: 294118
  chr19:46271267-46271615
  hypo

SEQ ID NO: 449699 - DNA, 33 bp, Homo sapiens; identical to SEQ ID NO: 225958
  chr19:46273813-46273846
  hypo

SEQ ID NO: 449700 - DNA, 243 bp, Homo sapiens; identical to SEQ ID NO: 326681
  chr19:46286504-46286747
  hypo

SEQ ID NO: 449701 - DNA, 108 bp, Homo sapiens; identical to SEQ ID NO: 190577
  chr19:46286876-46286984
  hypo

SEQ ID NO: 449702 - DNA, 316 bp, Homo sapiens; identical to SEQ ID NO: 274315
  chr19:46326464-46326780
  hypo

SEQ ID NO: 449703 - DNA, 153 bp, Homo sapiens; identical to SEQ ID NO: 274318
  chr19:46338327-46338480
  hypo

SEQ ID NO: 449704 - DNA, 105 bp, Homo sapiens; identical to SEQ ID NO: 274319
  chr19:46345643-46345748
  hypo

SEQ ID NO: 449705 - DNA, 93 bp, Homo sapiens; identical to SEQ ID NO: 219580
  chr19:46356447-46356540
  hypo

SEQ ID NO: 449706 - DNA, 345 bp, Homo sapiens; identical to SEQ ID NO: 205489
  chr19:46404950-46405295
  hypo

SEQ ID NO: 449707 - DNA, 32 bp, Homo sapiens; identical to SEQ ID NO: 274323
  chr19:46835962-46835994
  hypo

SEQ ID NO: 449708 - DNA, 38 bp, Homo sapiens; identical to SEQ ID NO: 274324
  chr19:46851845-46851883
  hypo

SEQ ID NO: 449709 - DNA, 147 bp, Homo sapiens; identical to SEQ ID NO: 274325
  chr19:46875776-46875923
  hypo

SEQ ID NO: 449710 - DNA, 475 bp, Homo sapiens; identical to SEQ ID NO: 274327
  chr19:47113154-47113629
  hypo

SEQ ID NO: 449711 - DNA, 241 bp, Homo sapiens; identical to SEQ ID NO: 274329
  chr19:47127006-47127247
  hypo

SEQ ID NO: 449712 - DNA, 751 bp, Homo sapiens; identical to SEQ ID NO: 294146
  chr19:47258852-47259603
  hypo

SEQ ID NO: 449713 - DNA, 42 bp, Homo sapiens; identical to SEQ ID NO: 274333
  chr19:47261178-47261220
  hypo

SEQ ID NO: 449714 - DNA, 50 bp, Homo sapiens; identical to SEQ ID NO: 274336
  chr19:47305320-47305370
  hypo

SEQ ID NO: 449715 - DNA, 99 bp, Homo sapiens; identical to SEQ ID NO: 274337
  chr19:47334737-47334836
  hypo

SEQ ID NO: 449716 - DNA, 52 bp, Homo sapiens
  chr19:47335874-47335926
  hypo
gggagacagagcaagactctctctctcaaaaaaaaaaattcttgtgcatttt

SEQ ID NO: 449717 - DNA, 270 bp, Homo sapiens; identical to SEQ ID NO: 225965
  chr19:47359761-47360031
  hypo

SEQ ID NO: 449718 - DNA, 117 bp, Homo sapiens; identical to SEQ ID NO: 205503
  chr19:47363286-47363403
  hypo

SEQ ID NO: 449719 - DNA, 193 bp, Homo sapiens; identical to SEQ ID NO: 274339
  chr19:47368883-47369076
  hypo

SEQ ID NO: 449720 - DNA, 49 bp, Homo sapiens; identical to SEQ ID NO: 274340
  chr19:47406253-47406302
  hypo

SEQ ID NO: 449721 - DNA, 169 bp, Homo sapiens; identical to SEQ ID NO: 274341
  chr19:47429562-47429731
  hypo

SEQ ID NO: 449722 - DNA, 38 bp, Homo sapiens; identical to SEQ ID NO: 274343
  chr19:47498024-47498062
  hypo

SEQ ID NO: 449723 - DNA, 38 bp, Homo sapiens; identical to SEQ ID NO: 274344
  chr19:47500121-47500159
  hypo

SEQ ID NO: 449724 - DNA, 105 bp, Homo sapiens; identical to SEQ ID NO: 274345
  chr19:47501403-47501508
  hypo

SEQ ID NO: 449725 - DNA, 69 bp, Homo sapiens; identical to SEQ ID NO: 294152
  chr19:47522920-47522989
  hypo

SEQ ID NO: 449726 - DNA, 56 bp, Homo sapiens; identical to SEQ ID NO: 326722
  chr19:47540628-47540684
  hypo

SEQ ID NO: 449727 - DNA, 79 bp, Homo sapiens; identical to SEQ ID NO: 326723
  chr19:47540719-47540798
  hypo

SEQ ID NO: 449728 - DNA, 33 bp, Homo sapiens; identical to SEQ ID NO: 326728
  chr19:47633342-47633375
  hypo

SEQ ID NO: 449729 - DNA, 76 bp, Homo sapiens
  chr19:47646678-47646754
  hypo
tattttttgttcttctgtgattctgcaagctcactgttctgtatcatcaggttaacaatgtttgtcttacaggctg

SEQ ID NO: 449730 - DNA, 48 bp, Homo sapiens; identical to SEQ ID NO: 425145
  chr19:47675972-47676020
  hypo

SEQ ID NO: 449731 - DNA, 152 bp, Homo sapiens; identical to SEQ ID NO: 225972
  chr19:47730760-47730912
  hypo

SEQ ID NO: 449732 - DNA, 42 bp, Homo sapiens; identical to SEQ ID NO: 274353
  chr19:47779445-47779487
  hypo

SEQ ID NO: 449733 - DNA, 52 bp, Homo sapiens; identical to SEQ ID NO: 274354
  chr19:47817584-47817636
  hypo

SEQ ID NO: 449734 - DNA, 137 bp, Homo sapiens; identical to SEQ ID NO: 219593
  chr19:47868801-47868938
  hypo

SEQ ID NO: 449735 - DNA, 58 bp, Homo sapiens; identical to SEQ ID NO: 56409
  chr19:47910679-47910737
  hypo

SEQ ID NO: 449736 - DNA, 165 bp, Homo sapiens; identical to SEQ ID NO: 294172
  chr19:47951123-47951288
  hypo

SEQ ID NO: 449737 - DNA, 175 bp, Homo sapiens; identical to SEQ ID NO: 294173
  chr19:47951318-47951493
  hypo

SEQ ID NO: 449738 - DNA, 224 bp, Homo sapiens; identical to SEQ ID NO: 219595
  chr19:47976135-47976359
  hypo

SEQ ID NO: 449739 - DNA, 193 bp, Homo sapiens; identical to SEQ ID NO: 274359
  chr19:47989043-47989236
  hypo

SEQ ID NO: 449740 - DNA, 102 bp, Homo sapiens; identical to SEQ ID NO: 219596
  chr19:47995719-47995821
  hypo

SEQ ID NO: 449741 - DNA, 44 bp, Homo sapiens; identical to SEQ ID NO: 274363
  chr19:48052287-48052331
  hypo

SEQ ID NO: 449742 - DNA, 99 bp, Homo sapiens; identical to SEQ ID NO: 294177
  chr19:48076347-48076446
  hypo

SEQ ID NO: 449743 - DNA, 88 bp, Homo sapiens; identical to SEQ ID NO: 274364
  chr19:48077258-48077346
  hypo

SEQ ID NO: 449744 - DNA, 94 bp, Homo sapiens; identical to SEQ ID NO: 274365
  chr19:48082925-48083019
  hypo

SEQ ID NO: 449745 - DNA, 134 bp, Homo sapiens; identical to SEQ ID NO: 326751
  chr19:48137351-48137485
  hypo

SEQ ID NO: 449746 - DNA, 39 bp, Homo sapiens; identical to SEQ ID NO: 219600
  chr19:48145667-48145706
  hypo

SEQ ID NO: 449747 - DNA, 210 bp, Homo sapiens; identical to SEQ ID NO: 274369
  chr19:48161876-48162086
  hypo

SEQ ID NO: 449748 - DNA, 43 bp, Homo sapiens; identical to SEQ ID NO: 274370
  chr19:48166308-48166351
  hypo

SEQ ID NO: 449749 - DNA, 399 bp, Homo sapiens; identical to SEQ ID NO: 274371
  chr19:48202212-48202611
  hypo

SEQ ID NO: 449750 - DNA, 87 bp, Homo sapiens; identical to SEQ ID NO: 274372
  chr19:48244447-48244534
  hypo

SEQ ID NO: 449751 - DNA, 45 bp, Homo sapiens; identical to SEQ ID NO: 274373
  chr19:48251493-48251538
  hypo

SEQ ID NO: 449752 - DNA, 39 bp, Homo sapiens; identical to SEQ ID NO: 274374
  chr19:48259084-48259123
  hypo

SEQ ID NO: 449753 - DNA, 42 bp, Homo sapiens; identical to SEQ ID NO: 274375
  chr19:48305538-48305580
  hypo

SEQ ID NO: 449754 - DNA, 141 bp, Homo sapiens; identical to SEQ ID NO: 274376
  chr19:48375656-48375797
  hypo

SEQ ID NO: 449755 - DNA, 38 bp, Homo sapiens; identical to SEQ ID NO: 219603
  chr19:48393224-48393262
  hypo

SEQ ID NO: 449756 - DNA, 44 bp, Homo sapiens; identical to SEQ ID NO: 274378
  chr19:48479211-48479255
  hypo

SEQ ID NO: 449757 - DNA, 193 bp, Homo sapiens; identical to SEQ ID NO: 274379
  chr19:48640705-48640898
  hypo

SEQ ID NO: 449758 - DNA, 39 bp, Homo sapiens; identical to SEQ ID NO: 274380
  chr19:48668228-48668267
  hypo

SEQ ID NO: 449759 - DNA, 181 bp, Homo sapiens; identical to SEQ ID NO: 219604
  chr19:48675139-48675320
  hypo

SEQ ID NO: 449760 - DNA, 330 bp, Homo sapiens; identical to SEQ ID NO: 219605
  chr19:48685675-48686005
  hypo

SEQ ID NO: 449761 - DNA, 42 bp, Homo sapiens; identical to SEQ ID NO: 274383
  chr19:48704700-48704742
  hypo

SEQ ID NO: 449762 - DNA, 228 bp, Homo sapiens; identical to SEQ ID NO: 274384
  chr19:48798924-48799152
  hypo

SEQ ID NO: 449763 - DNA, 110 bp, Homo sapiens; identical to SEQ ID NO: 205512
  chr19:48823626-48823736
  hypo

SEQ ID NO: 449764 - DNA, 112 bp, Homo sapiens; identical to SEQ ID NO: 219607
  chr19:48844372-48844484
  hypo

SEQ ID NO: 449765 - DNA, 53 bp, Homo sapiens; identical to SEQ ID NO: 274387
  chr19:48846609-48846662
  hypo

SEQ ID NO: 449766 - DNA, 144 bp, Homo sapiens; identical to SEQ ID NO: 219609
  chr19:48889258-48889402
  hypo

SEQ ID NO: 449767 - DNA, 287 bp, Homo sapiens; identical to SEQ ID NO: 219611
  chr19:48908063-48908350
  hypo

SEQ ID NO: 449768 - DNA, 180 bp, Homo sapiens; identical to SEQ ID NO: 274392
  chr19:48925877-48926057
  hypo

SEQ ID NO: 449769 - DNA, 93 bp, Homo sapiens; identical to SEQ ID NO: 274393
  chr19:48926477-48926570
  hypo

SEQ ID NO: 449770 - DNA, 34 bp, Homo sapiens; identical to SEQ ID NO: 219612
  chr19:48953831-48953865
  hypo

SEQ ID NO: 449771 - DNA, 124 bp, Homo sapiens; identical to SEQ ID NO: 274395
  chr19:48964897-48965021
  hypo

SEQ ID NO: 449772 - DNA, 153 bp, Homo sapiens; identical to SEQ ID NO: 274396
  chr19:48979074-48979227
  hypo

SEQ ID NO: 449773 - DNA, 183 bp, Homo sapiens; identical to SEQ ID NO: 294193
  chr19:48994398-48994581
  hypo

SEQ ID NO: 449774 - DNA, 51 bp, Homo sapiens; identical to SEQ ID NO: 326786
  chr19:49043366-49043417
  hypo

SEQ ID NO: 449775 - DNA, 40 bp, Homo sapiens; identical to SEQ ID NO: 274400
  chr19:49068459-49068499
  hypo

SEQ ID NO: 449776 - DNA, 174 bp, Homo sapiens; identical to SEQ ID NO: 274401
  chr19:49076590-49076764
  hypo

SEQ ID NO: 449777 - DNA, 269 bp, Homo sapiens; identical to SEQ ID NO: 274402
  chr19:49102442-49102711
  hypo

SEQ ID NO: 449778 - DNA, 78 bp, Homo sapiens; identical to SEQ ID NO: 274404
  chr19:49130357-49130435
  hypo

SEQ ID NO: 449779 - DNA, 389 bp, Homo sapiens; identical to SEQ ID NO: 274405
  chr19:49132563-49132952
  hypo

SEQ ID NO: 449780 - DNA, 112 bp, Homo sapiens; identical to SEQ ID NO: 219615
  chr19:49173707-49173819
  hypo

SEQ ID NO: 449781 - DNA, 33 bp, Homo sapiens; identical to SEQ ID NO: 326794
  chr19:49180429-49180462
  hypo

SEQ ID NO: 449782 - DNA, 558 bp, Homo sapiens; identical to SEQ ID NO: 274410
  chr19:49183432-49183990
  hypo

SEQ ID NO: 449783 - DNA, 45 bp, Homo sapiens; identical to SEQ ID NO: 219618
  chr19:49207344-49207389
  hypo

SEQ ID NO: 449784 - DNA, 273 bp, Homo sapiens; identical to SEQ ID NO: 274412
  chr19:49218942-49219215
  hypo

SEQ ID NO: 449785 - DNA, 138 bp, Homo sapiens; identical to SEQ ID NO: 219619
  chr19:49221485-49221623
  hypo

SEQ ID NO: 449786 - DNA, 127 bp, Homo sapiens; identical to SEQ ID NO: 274414
  chr19:49227955-49228082
  hypo

SEQ ID NO: 449787 - DNA, 225 bp, Homo sapiens; identical to SEQ ID NO: 274415
  chr19:49232014-49232239
  hypo

SEQ ID NO: 449788 - DNA, 98 bp, Homo sapiens; identical to SEQ ID NO: 274416
  chr19:49237047-49237145
  hypo

SEQ ID NO: 449789 - DNA, 76 bp, Homo sapiens; identical to SEQ ID NO: 219621
  chr19:49246879-49246955
  hypo

SEQ ID NO: 449790 - DNA, 136 bp, Homo sapiens; identical to SEQ ID NO: 274418
  chr19:49274076-49274212
  hypo

SEQ ID NO: 449791 - DNA, 90 bp, Homo sapiens; identical to SEQ ID NO: 274419
  chr19:49280159-49280249
  hypo

SEQ ID NO: 449792 - DNA, 88 bp, Homo sapiens; identical to SEQ ID NO: 219622
  chr19:49281057-49281145
  hypo

SEQ ID NO: 449793 - DNA, 78 bp, Homo sapiens; identical to SEQ ID NO: 219623
  chr19:49287699-49287777
  hypo

SEQ ID NO: 449794 - DNA, 99 bp, Homo sapiens; identical to SEQ ID NO: 274422
  chr19:49305614-49305713
  hypo

SEQ ID NO: 449795 - DNA, 182 bp, Homo sapiens; identical to SEQ ID NO: 274423
  chr19:49348663-49348845
  hypo

SEQ ID NO: 449796 - DNA, 93 bp, Homo sapiens; identical to SEQ ID NO: 219624
  chr19:49419216-49419309
  hypo

SEQ ID NO: 449797 - DNA, 41 bp, Homo sapiens; identical to SEQ ID NO: 274427
  chr19:49464192-49464233
  hypo

SEQ ID NO: 449798 - DNA, 64 bp, Homo sapiens; identical to SEQ ID NO: 326815
  chr19:49482062-49482126
  hypo

SEQ ID NO: 449799 - DNA, 152 bp, Homo sapiens; identical to SEQ ID NO: 274429
  chr19:49490480-49490632
  hypo

SEQ ID NO: 449800 - DNA, 48 bp, Homo sapiens; identical to SEQ ID NO: 274430
  chr19:49509361-49509409
  hypo

SEQ ID NO: 449801 - DNA, 33 bp, Homo sapiens; identical to SEQ ID NO: 219626
  chr19:49525578-49525611
  hypo

SEQ ID NO: 449802 - DNA, 96 bp, Homo sapiens; identical to SEQ ID NO: 274432
  chr19:49540857-49540953
  hypo

SEQ ID NO: 449803 - DNA, 59 bp, Homo sapiens; identical to SEQ ID NO: 326820
  chr19:49545493-49545552
  hypo

SEQ ID NO: 449804 - DNA, 55 bp, Homo sapiens; identical to SEQ ID NO: 394650
  chr19:49600408-49600463
  hypo

SEQ ID NO: 449805 - DNA, 140 bp, Homo sapiens; identical to SEQ ID NO: 274435
  chr19:49600768-49600908
  hypo

SEQ ID NO: 449806 - DNA, 163 bp, Homo sapiens; identical to SEQ ID NO: 219627
  chr19:49606743-49606906
  hypo

SEQ ID NO: 449807 - DNA, 87 bp, Homo sapiens; identical to SEQ ID NO: 274438
  chr19:49703773-49703860
  hypo

SEQ ID NO: 449808 - DNA, 205 bp, Homo sapiens; identical to SEQ ID NO: 274440
  chr19:49705148-49705353
  hypo

SEQ ID NO: 449809 - DNA, 34 bp, Homo sapiens; identical to SEQ ID NO: 205529
  chr19:49925606-49925640
  hypo

SEQ ID NO: 449810 - DNA, 131 bp, Homo sapiens; identical to SEQ ID NO: 219631
  chr19:49978920-49979051
  hypo

SEQ ID NO: 449811 - DNA, 490 bp, Homo sapiens; identical to SEQ ID NO: 274444
  chr19:49993764-49994254
  hypo

SEQ ID NO: 449812 - DNA, 34 bp, Homo sapiens; identical to SEQ ID NO: 274446
  chr19:50001236-50001270
  hypo

SEQ ID NO: 449813 - DNA, 44 bp, Homo sapiens; identical to SEQ ID NO: 274450
  chr19:50056051-50056095
  hypo

SEQ ID NO: 449814 - DNA, 273 bp, Homo sapiens; identical to SEQ ID NO: 225987
  chr19:50058957-50059230
  hypo

SEQ ID NO: 449815 - DNA, 879 bp, Homo sapiens; identical to SEQ ID NO: 274451
  chr19:50059648-50060527
  hypo

SEQ ID NO: 449816 - DNA, 172 bp, Homo sapiens; identical to SEQ ID NO: 219633
  chr19:50060912-50061084
  hypo

SEQ ID NO: 449817 - DNA, 163 bp, Homo sapiens; identical to SEQ ID NO: 219634
  chr19:50061336-50061499
  hypo

SEQ ID NO: 449818 - DNA, 190 bp, Homo sapiens; identical to SEQ ID NO: 219635
  chr19:50063175-50063365
  hypo

SEQ ID NO: 449819 - DNA, 38 bp, Homo sapiens; identical to SEQ ID NO: 219638
  chr19:50130457-50130495
  hypo

SEQ ID NO: 449820 - DNA, 35 bp, Homo sapiens; identical to SEQ ID NO: 274458
  chr19:50203510-50203545
  hypo

SEQ ID NO: 449821 - DNA, 199 bp, Homo sapiens; identical to SEQ ID NO: 219640
  chr19:50208442-50208641
  hypo

SEQ ID NO: 449822 - DNA, 43 bp, Homo sapiens; identical to SEQ ID NO: 274460
  chr19:50215612-50215655
  hypo

SEQ ID NO: 449823 - DNA, 101 bp, Homo sapiens; identical to SEQ ID NO: 274461
  chr19:50218146-50218247
  hypo

SEQ ID NO: 449824 - DNA, 120 bp, Homo sapiens; identical to SEQ ID NO: 274462
  chr19:50240192-50240312
  hypo

SEQ ID NO: 449825 - DNA, 98 bp, Homo sapiens; identical to SEQ ID NO: 274463
  chr19:50249077-50249175
  hypo

SEQ ID NO: 449826 - DNA, 87 bp, Homo sapiens; identical to SEQ ID NO: 219641
  chr19:50274628-50274715
  hypo

SEQ ID NO: 449827 - DNA, 135 bp, Homo sapiens; identical to SEQ ID NO: 274465
  chr19:50289573-50289708
  hypo

SEQ ID NO: 449828 - DNA, 203 bp, Homo sapiens; identical to SEQ ID NO: 274466
  chr19:50291871-50292074
  hypo

SEQ ID NO: 449829 - DNA, 39 bp, Homo sapiens; identical to SEQ ID NO: 219642
  chr19:50303027-50303066
  hypo

SEQ ID NO: 449830 - DNA, 278 bp, Homo sapiens; identical to SEQ ID NO: 219643
  chr19:50303126-50303404
  hypo

SEQ ID NO: 449831 - DNA, 101 bp, Homo sapiens; identical to SEQ ID NO: 274471
  chr19:50304785-50304886
  hypo

SEQ ID NO: 449832 - DNA, 34 bp, Homo sapiens; identical to SEQ ID NO: 219644
  chr19:50305176-50305210
  hypo

SEQ ID NO: 449833 - DNA, 162 bp, Homo sapiens; identical to SEQ ID NO: 219645
  chr19:50305240-50305402
  hypo

SEQ ID NO: 449834 - DNA, 220 bp, Homo sapiens; identical to SEQ ID NO: 326861
  chr19:50308635-50308855
  hypo

SEQ ID NO: 449835 - DNA, 218 bp, Homo sapiens; identical to SEQ ID NO: 326862
  chr19:50308885-50309103
  hypo

SEQ ID NO: 449836 - DNA, 111 bp, Homo sapiens; identical to SEQ ID NO: 326863
  chr19:50309133-50309244
  hypo

SEQ ID NO: 449837 - DNA, 302 bp, Homo sapiens; identical to SEQ ID NO: 294233
  chr19:50312465-50312767
  hypo

SEQ ID NO: 449838 - DNA, 89 bp, Homo sapiens; identical to SEQ ID NO: 274479
  chr19:50326703-50326792
  hypo

SEQ ID NO: 449839 - DNA, 57 bp, Homo sapiens; identical to SEQ ID NO: 219647
  chr19:50331699-50331756
  hypo

SEQ ID NO: 449840 - DNA, 216 bp, Homo sapiens; identical to SEQ ID NO: 274481
  chr19:50341934-50342150
  hypo

SEQ ID NO: 449841 - DNA, 48 bp, Homo sapiens; identical to SEQ ID NO: 274484
  chr19:50361410-50361458
  hypo

SEQ ID NO: 449842 - DNA, 204 bp, Homo sapiens; identical to SEQ ID NO: 219648
  chr19:50406382-50406586
  hypo

SEQ ID NO: 449843 - DNA, 173 bp, Homo sapiens; identical to SEQ ID NO: 274487
  chr19:50412838-50413011
  hypo

SEQ ID NO: 449844 - DNA, 39 bp, Homo sapiens; identical to SEQ ID NO: 274488
  chr19:50422097-50422136
  hypo

SEQ ID NO: 449845 - DNA, 347 bp, Homo sapiens; identical to SEQ ID NO: 219649
  chr19:50423833-50424180
  hypo

SEQ ID NO: 449846 - DNA, 325 bp, Homo sapiens; identical to SEQ ID NO: 274490
  chr19:50424485-50424810
  hypo

SEQ ID NO: 449847 - DNA, 166 bp, Homo sapiens; identical to SEQ ID NO: 326878
  chr19:50477639-50477805
  hypo

SEQ ID NO: 449848 - DNA, 148 bp, Homo sapiens; identical to SEQ ID NO: 274492
  chr19:50654426-50654574
  hypo

SEQ ID NO: 449849 - DNA, 37 bp, Homo sapiens; identical to SEQ ID NO: 219651
  chr19:50705041-50705078
  hypo

SEQ ID NO: 449850 - DNA, 53 bp, Homo sapiens; identical to SEQ ID NO: 274494
  chr19:50756058-50756111
  hypo

SEQ ID NO: 449851 - DNA, 592 bp, Homo sapiens; identical to SEQ ID NO: 274495
  chr19:50764723-50765315
  hypo

SEQ ID NO: 449852 - DNA, 323 bp, Homo sapiens; identical to SEQ ID NO: 274497
  chr19:50782874-50783197
  hypo

SEQ ID NO: 449853 - DNA, 946 bp, Homo sapiens; identical to SEQ ID NO: 274500
  chr19:50826194-50827140
  hypo

SEQ ID NO: 449854 - DNA, 90 bp, Homo sapiens; identical to SEQ ID NO: 219654
  chr19:50871401-50871491
  hypo

SEQ ID NO: 449855 - DNA, 76 bp, Homo sapiens; identical to SEQ ID NO: 219655
  chr19:50898815-50898891
  hypo

SEQ ID NO: 449856 - DNA, 43 bp, Homo sapiens; identical to SEQ ID NO: 326897
  chr19:50938504-50938547
  hypo

SEQ ID NO: 449857 - DNA, 83 bp, Homo sapiens; identical to SEQ ID NO: 274505
  chr19:50983972-50984055
  hypo

SEQ ID NO: 449858 - DNA, 295 bp, Homo sapiens
  chr19:51022018-51022313
  hypo
gcagttgcaatgccaggggttgtggttgaggtgcacgcgctcgaggcggtgcaggggcgtgaagaggtcgtggggcagcgacatcaggttgttgtgggacaggttgagctcctccagcgacttgaggtcgtcgaaggcgttgcgctcgatggtggctacctgggcgtgcatgagccacagcttgcgcaggctggtgagaccctggaaggagcccgggcggatcaggtccagccggttgcccgacagctccagctcctccaggcgcaccagggccgtcaggttggggatgtccttg

SEQ ID NO: 449859 - DNA, 44 bp, Homo sapiens; identical to SEQ ID NO: 219657
  chr19:51098421-51098465
  hypo

SEQ ID NO: 449860 - DNA, 204 bp, Homo sapiens; identical to SEQ ID NO: 326903
  chr19:51128562-51128766
  hypo

SEQ ID NO: 449861 - DNA, 35 bp, Homo sapiens; identical to SEQ ID NO: 326904
  chr19:51128799-51128834
  hypo

SEQ ID NO: 449862 - DNA, 118 bp, Homo sapiens; identical to SEQ ID NO: 294268
  chr19:51170581-51170699
  hypo

SEQ ID NO: 449863 - DNA, 136 bp, Homo sapiens; identical to SEQ ID NO: 219659
  chr19:51293556-51293692
  hypo

SEQ ID NO: 449864 - DNA, 215 bp, Homo sapiens; identical to SEQ ID NO: 326908
  chr19:51295158-51295373
  hypo

SEQ ID NO: 449865 - DNA, 105 bp, Homo sapiens; identical to SEQ ID NO: 219660
  chr19:51302699-51302804
  hypo

SEQ ID NO: 449866 - DNA, 117 bp, Homo sapiens; identical to SEQ ID NO: 205552
  chr19:51527588-51527705
  hypo

SEQ ID NO: 449867 - DNA, 106 bp, Homo sapiens; identical to SEQ ID NO: 274516
  chr19:51589548-51589654
  hypo

SEQ ID NO: 449868 - DNA, 253 bp, Homo sapiens; identical to SEQ ID NO: 274518
  chr19:51607194-51607447
  hypo

SEQ ID NO: 449869 - DNA, 178 bp, Homo sapiens; identical to SEQ ID NO: 219665
  chr19:51607825-51608003
  hypo

SEQ ID NO: 449870 - DNA, 54 bp, Homo sapiens; identical to SEQ ID NO: 274521
  chr19:51753980-51754034
  hypo

SEQ ID NO: 449871 - DNA, 251 bp, Homo sapiens; identical to SEQ ID NO: 219666
  chr19:51754291-51754542
  hypo

SEQ ID NO: 449872 - DNA, 192 bp, Homo sapiens; identical to SEQ ID NO: 274523
  chr19:51840539-51840731
  hypo

SEQ ID NO: 449873 - DNA, 165 bp, Homo sapiens; identical to SEQ ID NO: 274524
  chr19:51893083-51893248
  hypo

SEQ ID NO: 449874 - DNA, 205 bp, Homo sapiens; identical to SEQ ID NO: 274525
  chr19:51906688-51906893
  hypo

SEQ ID NO: 449875 - DNA, 41 bp, Homo sapiens; identical to SEQ ID NO: 219667
  chr19:52026931-52026972
  hypo

SEQ ID NO: 449876 - DNA, 406 bp, Homo sapiens; identical to SEQ ID NO: 326924
  chr19:52101647-52102053
  hypo

SEQ ID NO: 449877 - DNA, 42 bp, Homo sapiens; identical to SEQ ID NO: 326925
  chr19:52102087-52102129
  hypo

SEQ ID NO: 449878 - DNA, 38 bp, Homo sapiens; identical to SEQ ID NO: 219670
  chr19:52289294-52289332
  hypo

SEQ ID NO: 449879 - DNA, 82 bp, Homo sapiens; identical to SEQ ID NO: 274531
  chr19:52350892-52350974
  hypo

SEQ ID NO: 449880 - DNA, 41 bp, Homo sapiens; identical to SEQ ID NO: 274532
  chr19:52368627-52368668
  hypo

SEQ ID NO: 449881 - DNA, 47 bp, Homo sapiens; identical to SEQ ID NO: 219672
  chr19:52405665-52405712
  hypo

SEQ ID NO: 449882 - DNA, 93 bp, Homo sapiens; identical to SEQ ID NO: 219673
  chr19:52405954-52406047
  hypo

SEQ ID NO: 449883 - DNA, 82 bp, Homo sapiens; identical to SEQ ID NO: 219676
  chr19:52479588-52479670
  hypo

SEQ ID NO: 449884 - DNA, 77 bp, Homo sapiens; identical to SEQ ID NO: 274538
  chr19:52484729-52484806
  hypo

SEQ ID NO: 449885 - DNA, 320 bp, Homo sapiens; identical to SEQ ID NO: 274539
  chr19:52488648-52488968
  hypo

SEQ ID NO: 449886 - DNA, 65 bp, Homo sapiens; identical to SEQ ID NO: 219677
  chr19:52530500-52530565
  hypo

SEQ ID NO: 449887 - DNA, 218 bp, Homo sapiens; identical to SEQ ID NO: 219680
  chr19:52569174-52569392
  hypo

SEQ ID NO: 449888 - DNA, 114 bp, Homo sapiens; identical to SEQ ID NO: 205561
  chr19:52643387-52643501
  hypo

SEQ ID NO: 449889 - DNA, 35 bp, Homo sapiens; identical to SEQ ID NO: 226008
  chr19:52674677-52674712
  hypo

SEQ ID NO: 449890 - DNA, 36 bp, Homo sapiens; identical to SEQ ID NO: 219683
  chr19:52718578-52718614
  hypo

SEQ ID NO: 449891 - DNA, 120 bp, Homo sapiens; identical to SEQ ID NO: 219684
  chr19:52780745-52780865
  hypo

SEQ ID NO: 449892 - DNA, 35 bp, Homo sapiens; identical to SEQ ID NO: 219685
  chr19:52801591-52801626
  hypo

SEQ ID NO: 449893 - DNA, 34 bp, Homo sapiens; identical to SEQ ID NO: 274546
  chr19:52801866-52801900
  hypo

SEQ ID NO: 449894 - DNA, 110 bp, Homo sapiens; identical to SEQ ID NO: 274547
  chr19:52838576-52838686
  hypo

SEQ ID NO: 449895 - DNA, 96 bp, Homo sapiens; identical to SEQ ID NO: 274548
  chr19:52843261-52843357
  hypo

SEQ ID NO: 449896 - DNA, 42 bp, Homo sapiens; identical to SEQ ID NO: 274549
  chr19:52851166-52851208
  hypo

SEQ ID NO: 449897 - DNA, 41 bp, Homo sapiens; identical to SEQ ID NO: 219686
  chr19:52860523-52860564
  hypo

SEQ ID NO: 449898 - DNA, 31 bp, Homo sapiens; identical to SEQ ID NO: 219687
  chr19:52861439-52861470
  hypo

SEQ ID NO: 449899 - DNA, 182 bp, Homo sapiens; identical to SEQ ID NO: 219688
  chr19:52917256-52917438
  hypo

SEQ ID NO: 449900 - DNA, 101 bp, Homo sapiens; identical to SEQ ID NO: 219689
  chr19:52927832-52927933
  hypo

SEQ ID NO: 449901 - DNA, 180 bp, Homo sapiens; identical to SEQ ID NO: 274555
  chr19:52931619-52931799
  hypo

SEQ ID NO: 449902 - DNA, 41 bp, Homo sapiens; identical to SEQ ID NO: 274556
  chr19:52978881-52978922
  hypo

SEQ ID NO: 449903 - DNA, 76 bp, Homo sapiens; identical to SEQ ID NO: 219690
  chr19:53027352-53027428
  hypo

SEQ ID NO: 449904 - DNA, 201 bp, Homo sapiens; identical to SEQ ID NO: 274558
  chr19:53029365-53029566
  hypo

SEQ ID NO: 449905 - DNA, 36 bp, Homo sapiens; identical to SEQ ID NO: 274559
  chr19:53045476-53045512
  hypo

SEQ ID NO: 449906 - DNA, 38 bp, Homo sapiens; identical to SEQ ID NO: 274560
  chr19:53055548-53055586
  hypo

SEQ ID NO: 449907 - DNA, 79 bp, Homo sapiens; identical to SEQ ID NO: 274561
  chr19:53058376-53058455
  hypo

SEQ ID NO: 449908 - DNA, 46 bp, Homo sapiens; identical to SEQ ID NO: 326964
  chr19:53071335-53071381
  hypo

SEQ ID NO: 449909 - DNA, 103 bp, Homo sapiens; identical to SEQ ID NO: 274563
  chr19:53074698-53074801
  hypo

SEQ ID NO: 449910 - DNA, 331 bp, Homo sapiens; identical to SEQ ID NO: 274564
  chr19:53077051-53077382
  hypo

SEQ ID NO: 449911 - DNA, 33 bp, Homo sapiens; identical to SEQ ID NO: 274565
  chr19:53078219-53078252
  hypo

SEQ ID NO: 449912 - DNA, 158 bp, Homo sapiens; identical to SEQ ID NO: 219692
  chr19:53089793-53089951
  hypo

SEQ ID NO: 449913 - DNA, 47 bp, Homo sapiens; identical to SEQ ID NO: 274567
  chr19:53090167-53090214
  hypo

SEQ ID NO: 449914 - DNA, 64 bp, Homo sapiens; identical to SEQ ID NO: 274568
  chr19:53090869-53090933
  hypo

SEQ ID NO: 449915 - DNA, 257 bp, Homo sapiens; identical to SEQ ID NO: 274569
  chr19:53100993-53101250
  hypo

SEQ ID NO: 449916 - DNA, 257 bp, Homo sapiens; identical to SEQ ID NO: 274570
  chr19:53101490-53101747
  hypo

SEQ ID NO: 449917 - DNA, 40 bp, Homo sapiens; identical to SEQ ID NO: 274571
  chr19:53102422-53102462
  hypo

SEQ ID NO: 449918 - DNA, 44 bp, Homo sapiens; identical to SEQ ID NO: 274572
  chr19:53108414-53108458
  hypo

SEQ ID NO: 449919 - DNA, 45 bp, Homo sapiens; identical to SEQ ID NO: 274573
  chr19:53114551-53114596
  hypo

SEQ ID NO: 449920 - DNA, 31 bp, Homo sapiens; identical to SEQ ID NO: 274574
  chr19:53163140-53163171
  hypo

SEQ ID NO: 449921 - DNA, 43 bp, Homo sapiens; identical to SEQ ID NO: 274575
  chr19:53213086-53213129
  hypo

SEQ ID NO: 449922 - DNA, 515 bp, Homo sapiens; identical to SEQ ID NO: 274576
  chr19:53228720-53229235
  hypo

SEQ ID NO: 449923 - DNA, 136 bp, Homo sapiens; identical to SEQ ID NO: 274577
  chr19:53233231-53233367
  hypo

SEQ ID NO: 449924 - DNA, 78 bp, Homo sapiens; identical to SEQ ID NO: 219694
  chr19:53241622-53241700
  hypo

SEQ ID NO: 449925 - DNA, 148 bp, Homo sapiens; identical to SEQ ID NO: 274579
  chr19:53242766-53242914
  hypo

SEQ ID NO: 449926 - DNA, 42 bp, Homo sapiens; identical to SEQ ID NO: 274580
  chr19:53247899-53247941
  hypo

SEQ ID NO: 449927 - DNA, 99 bp, Homo sapiens; identical to SEQ ID NO: 274581
  chr19:53297749-53297848
  hypo

SEQ ID NO: 449928 - DNA, 153 bp, Homo sapiens; identical to SEQ ID NO: 274582
  chr19:53316598-53316751
  hypo

SEQ ID NO: 449929 - DNA, 41 bp, Homo sapiens; identical to SEQ ID NO: 274583
  chr19:53317558-53317599
  hypo

SEQ ID NO: 449930 - DNA, 35 bp, Homo sapiens; identical to SEQ ID NO: 274584
  chr19:53398428-53398463
  hypo

SEQ ID NO: 449931 - DNA, 150 bp, Homo sapiens; identical to SEQ ID NO: 274585
  chr19:53401587-53401737
  hypo

SEQ ID NO: 449932 - DNA, 94 bp, Homo sapiens; identical to SEQ ID NO: 219695
  chr19:53412364-53412458
  hypo

SEQ ID NO: 449933 - DNA, 37 bp, Homo sapiens; identical to SEQ ID NO: 219696
  chr19:53438070-53438107
  hypo

SEQ ID NO: 449934 - DNA, 104 bp, Homo sapiens; identical to SEQ ID NO: 294333
  chr19:53446326-53446430
  hypo

SEQ ID NO: 449935 - DNA, 98 bp, Homo sapiens; identical to SEQ ID NO: 274589
  chr19:53460885-53460983
  hypo

SEQ ID NO: 449936 - DNA, 153 bp, Homo sapiens; identical to SEQ ID NO: 219700
  chr19:53477544-53477697
  hypo

SEQ ID NO: 449937 - DNA, 78 bp, Homo sapiens; identical to SEQ ID NO: 274592
  chr19:53490184-53490262
  hypo

SEQ ID NO: 449938 - DNA, 31 bp, Homo sapiens; identical to SEQ ID NO: 274593
  chr19:53506512-53506543
  hypo

SEQ ID NO: 449939 - DNA, 232 bp, Homo sapiens; identical to SEQ ID NO: 274595
  chr19:53507956-53508188
  hypo

SEQ ID NO: 449940 - DNA, 120 bp, Homo sapiens; identical to SEQ ID NO: 274596
  chr19:53509014-53509134
  hypo

SEQ ID NO: 449941 - DNA, 160 bp, Homo sapiens; identical to SEQ ID NO: 274597
  chr19:53589028-53589188
  hypo

SEQ ID NO: 449942 - DNA, 99 bp, Homo sapiens; identical to SEQ ID NO: 274598
  chr19:53589308-53589407
  hypo

SEQ ID NO: 449943 - DNA, 142 bp, Homo sapiens; identical to SEQ ID NO: 274599
  chr19:53601968-53602110
  hypo

SEQ ID NO: 449944 - DNA, 31 bp, Homo sapiens; identical to SEQ ID NO: 274600
  chr19:53627570-53627601
  hypo

SEQ ID NO: 449945 - DNA, 87 bp, Homo sapiens; identical to SEQ ID NO: 274601
  chr19:53653017-53653104
  hypo

SEQ ID NO: 449946 - DNA, 93 bp, Homo sapiens; identical to SEQ ID NO: 219703
  chr19:53667653-53667746
  hypo

SEQ ID NO: 449947 - DNA, 159 bp, Homo sapiens; identical to SEQ ID NO: 274603
  chr19:53668465-53668624
  hypo

SEQ ID NO: 449948 - DNA, 100 bp, Homo sapiens; identical to SEQ ID NO: 219704
  chr19:53685270-53685370
  hypo

SEQ ID NO: 449949 - DNA, 159 bp, Homo sapiens; identical to SEQ ID NO: 219705
  chr19:53685610-53685769
  hypo

SEQ ID NO: 449950 - DNA, 38 bp, Homo sapiens; identical to SEQ ID NO: 274606
  chr19:53693899-53693937
  hypo

SEQ ID NO: 449951 - DNA, 103 bp, Homo sapiens; identical to SEQ ID NO: 327014
  chr19:53701715-53701818
  hypo

SEQ ID NO: 449952 - DNA, 152 bp, Homo sapiens; identical to SEQ ID NO: 274609
  chr19:53703492-53703644
  hypo

SEQ ID NO: 449953 - DNA, 34 bp, Homo sapiens; identical to SEQ ID NO: 274611
  chr19:53728772-53728806
  hypo

SEQ ID NO: 449954 - DNA, 40 bp, Homo sapiens; identical to SEQ ID NO: 219706
  chr19:53756649-53756689
  hypo

SEQ ID NO: 449955 - DNA, 64 bp, Homo sapiens; identical to SEQ ID NO: 205588
  chr19:53758247-53758311
  hypo

SEQ ID NO: 449956 - DNA, 88 bp, Homo sapiens; identical to SEQ ID NO: 274613
  chr19:53764646-53764734
  hypo

SEQ ID NO: 449957 - DNA, 38 bp, Homo sapiens; identical to SEQ ID NO: 274614
  chr19:53786610-53786648
  hypo

SEQ ID NO: 449958 - DNA, 73 bp, Homo sapiens; identical to SEQ ID NO: 274615
  chr19:53793746-53793819
  hypo

SEQ ID NO: 449959 - DNA, 192 bp, Homo sapiens; identical to SEQ ID NO: 274616
  chr19:53794081-53794273
  hypo

SEQ ID NO: 449960 - DNA, 372 bp, Homo sapiens; identical to SEQ ID NO: 327023
  chr19:53794380-53794752
  hypo

SEQ ID NO: 449961 - DNA, 97 bp, Homo sapiens; identical to SEQ ID NO: 274619
  chr19:53807087-53807184
  hypo

SEQ ID NO: 449962 - DNA, 240 bp, Homo sapiens; identical to SEQ ID NO: 274620
  chr19:53813501-53813741
  hypo

SEQ ID NO: 449963 - DNA, 34 bp, Homo sapiens; identical to SEQ ID NO: 219708
  chr19:53821074-53821108
  hypo

SEQ ID NO: 449964 - DNA, 31 bp, Homo sapiens; identical to SEQ ID NO: 274622
  chr19:53827529-53827560
  hypo

SEQ ID NO: 449965 - DNA, 33 bp, Homo sapiens; identical to SEQ ID NO: 274623
  chr19:53854271-53854304
  hypo

SEQ ID NO: 449966 - DNA, 93 bp, Homo sapiens; identical to SEQ ID NO: 274624
  chr19:53854364-53854457
  hypo

SEQ ID NO: 449967 - DNA, 58 bp, Homo sapiens; identical to SEQ ID NO: 274625
  chr19:53859528-53859586
  hypo

SEQ ID NO: 449968 - DNA, 36 bp, Homo sapiens; identical to SEQ ID NO: 219709
  chr19:53859893-53859929
  hypo

SEQ ID NO: 449969 - DNA, 120 bp, Homo sapiens; identical to SEQ ID NO: 274627
  chr19:53873291-53873411
  hypo

SEQ ID NO: 449970 - DNA, 290 bp, Homo sapiens; identical to SEQ ID NO: 219710
  chr19:53886631-53886921
  hypo

SEQ ID NO: 449971 - DNA, 172 bp, Homo sapiens; identical to SEQ ID NO: 274629
  chr19:53936945-53937117
  hypo

SEQ ID NO: 449972 - DNA, 197 bp, Homo sapiens; identical to SEQ ID NO: 274630
  chr19:53977470-53977667
  hypo

SEQ ID NO: 449973 - DNA, 198 bp, Homo sapiens; identical to SEQ ID NO: 327037
  chr19:53982539-53982737
  hypo

SEQ ID NO: 449974 - DNA, 162 bp, Homo sapiens; identical to SEQ ID NO: 274632
  chr19:54017723-54017885
  hypo

SEQ ID NO: 449975 - DNA, 42 bp, Homo sapiens; identical to SEQ ID NO: 274633
  chr19:54048834-54048876
  hypo

SEQ ID NO: 449976 - DNA, 42 bp, Homo sapiens; identical to SEQ ID NO: 274634
  chr19:54074926-54074968
  hypo

SEQ ID NO: 449977 - DNA, 397 bp, Homo sapiens; identical to SEQ ID NO: 274635
  chr19:54080852-54081249
  hypo

SEQ ID NO: 449978 - DNA, 97 bp, Homo sapiens; identical to SEQ ID NO: 274636
  chr19:54081309-54081406
  hypo

SEQ ID NO: 449979 - DNA, 42 bp, Homo sapiens; identical to SEQ ID NO: 274637
  chr19:54087417-54087459
  hypo

SEQ ID NO: 449980 - DNA, 39 bp, Homo sapiens; identical to SEQ ID NO: 274639
  chr19:54115655-54115694
  hypo

SEQ ID NO: 449981 - DNA, 140 bp, Homo sapiens; identical to SEQ ID NO: 219714
  chr19:54120021-54120161
  hypo

SEQ ID NO: 449982 - DNA, 108 bp, Homo sapiens; identical to SEQ ID NO: 274641
  chr19:54120403-54120511
  hypo

SEQ ID NO: 449983 - DNA, 446 bp, Homo sapiens; identical to SEQ ID NO: 274642
  chr19:54135108-54135554
  hypo

SEQ ID NO: 449984 - DNA, 37 bp, Homo sapiens; identical to SEQ ID NO: 274643
  chr19:54136228-54136265
  hypo

SEQ ID NO: 449985 - DNA, 36 bp, Homo sapiens; identical to SEQ ID NO: 274644
  chr19:54137676-54137712
  hypo

SEQ ID NO: 449986 - DNA, 42 bp, Homo sapiens; identical to SEQ ID NO: 274645
  chr19:54140111-54140153
  hypo

SEQ ID NO: 449987 - DNA, 86 bp, Homo sapiens; identical to SEQ ID NO: 274646
  chr19:54140568-54140654
  hypo

SEQ ID NO: 449988 - DNA, 34 bp, Homo sapiens; identical to SEQ ID NO: 274647
  chr19:54141502-54141536
  hypo

SEQ ID NO: 449989 - DNA, 303 bp, Homo sapiens; identical to SEQ ID NO: 274648
  chr19:54150800-54151103
  hypo

SEQ ID NO: 449990 - DNA, 225 bp, Homo sapiens; identical to SEQ ID NO: 274649
  chr19:54152258-54152483
  hypo

SEQ ID NO: 449991 - DNA, 45 bp, Homo sapiens; identical to SEQ ID NO: 219716
  chr19:54153203-54153248
  hypo

SEQ ID NO: 449992 - DNA, 33 bp, Homo sapiens; identical to SEQ ID NO: 219717
  chr19:54161842-54161875
  hypo

SEQ ID NO: 449993 - DNA, 161 bp, Homo sapiens; identical to SEQ ID NO: 274652
  chr19:54170239-54170400
  hypo

SEQ ID NO: 449994 - DNA, 40 bp, Homo sapiens; identical to SEQ ID NO: 274653
  chr19:54171164-54171204
  hypo

SEQ ID NO: 449995 - DNA, 240 bp, Homo sapiens; identical to SEQ ID NO: 274654
  chr19:54196084-54196324
  hypo

SEQ ID NO: 449996 - DNA, 80 bp, Homo sapiens; identical to SEQ ID NO: 205591
  chr19:54206968-54207048
  hypo

SEQ ID NO: 449997 - DNA, 33 bp, Homo sapiens; identical to SEQ ID NO: 274656
  chr19:54212284-54212317
  hypo

SEQ ID NO: 449998 - DNA, 76 bp, Homo sapiens; identical to SEQ ID NO: 327064
  chr19:54224684-54224760
  hypo

SEQ ID NO: 449999 - DNA, 64 bp, Homo sapiens; identical to SEQ ID NO: 274658
  chr19:54254582-54254646
  hypo

SEQ ID NO: 450000 - DNA, 77 bp, Homo sapiens; identical to SEQ ID NO: 274659
  chr19:54256494-54256571
  hypo

SEQ ID NO: 450001 - DNA, 109 bp, Homo sapiens; identical to SEQ ID NO: 274660
  chr19:54268118-54268227
  hypo

SEQ ID NO: 450002 - DNA, 82 bp, Homo sapiens; identical to SEQ ID NO: 219719
  chr19:54271336-54271418
  hypo

SEQ ID NO: 450003 - DNA, 240 bp, Homo sapiens; identical to SEQ ID NO: 219720
  chr19:54271718-54271958
  hypo

SEQ ID NO: 450004 - DNA, 211 bp, Homo sapiens; identical to SEQ ID NO: 274664
  chr19:54317868-54318079
  hypo

SEQ ID NO: 450005 - DNA, 367 bp, Homo sapiens; identical to SEQ ID NO: 294363
  chr19:54371622-54371989
  hypo

SEQ ID NO: 450006 - DNA, 277 bp, Homo sapiens; identical to SEQ ID NO: 294364
  chr19:54372055-54372332
  hypo

SEQ ID NO: 450007 - DNA, 224 bp, Homo sapiens; identical to SEQ ID NO: 294365
  chr19:54372400-54372624
  hypo

SEQ ID NO: 450008 - DNA, 281 bp, Homo sapiens; identical to SEQ ID NO: 294366
  chr19:54372682-54372963
  hypo

SEQ ID NO: 450009 - DNA, 325 bp, Homo sapiens; identical to SEQ ID NO: 294367
  chr19:54382389-54382714
  hypo

SEQ ID NO: 450010 - DNA, 194 bp, Homo sapiens; identical to SEQ ID NO: 294368
  chr19:54382804-54382998
  hypo

SEQ ID NO: 450011 - DNA, 132 bp, Homo sapiens; identical to SEQ ID NO: 274665
  chr19:54487090-54487222
  hypo

SEQ ID NO: 450012 - DNA, 39 bp, Homo sapiens; identical to SEQ ID NO: 274666
  chr19:54498879-54498918
  hypo

SEQ ID NO: 450013 - DNA, 40 bp, Homo sapiens; identical to SEQ ID NO: 219727
  chr19:55609523-55609563
  hypo

SEQ ID NO: 450014 - DNA, 76 bp, Homo sapiens; identical to SEQ ID NO: 274668
  chr19:55631056-55631132
  hypo

SEQ ID NO: 450015 - DNA, 119 bp, Homo sapiens; identical to SEQ ID NO: 327084
  chr19:55721105-55721224
  hypo

SEQ ID NO: 450016 - DNA, 35 bp, Homo sapiens; identical to SEQ ID NO: 327085
  chr19:55721254-55721289
  hypo

SEQ ID NO: 450017 - DNA, 147 bp, Homo sapiens; identical to SEQ ID NO: 274670
  chr19:55732005-55732152
  hypo

SEQ ID NO: 450018 - DNA, 104 bp, Homo sapiens; identical to SEQ ID NO: 219728
  chr19:55740668-55740772
  hypo

SEQ ID NO: 450019 - DNA, 147 bp, Homo sapiens; identical to SEQ ID NO: 274672
  chr19:55750624-55750771
  hypo

SEQ ID NO: 450020 - DNA, 92 bp, Homo sapiens; identical to SEQ ID NO: 219729
  chr19:55775276-55775368
  hypo

SEQ ID NO: 450021 - DNA, 460 bp, Homo sapiens; identical to SEQ ID NO: 274674
  chr19:55785505-55785965
  hypo

SEQ ID NO: 450022 - DNA, 37 bp, Homo sapiens; identical to SEQ ID NO: 327091
  chr19:55798403-55798440
  hypo

SEQ ID NO: 450023 - DNA, 79 bp, Homo sapiens; identical to SEQ ID NO: 219730
  chr19:55799281-55799360
  hypo

SEQ ID NO: 450024 - DNA, 176 bp, Homo sapiens; identical to SEQ ID NO: 219731
  chr19:55824302-55824478
  hypo

SEQ ID NO: 450025 - DNA, 63 bp, Homo sapiens; identical to SEQ ID NO: 219732
  chr19:55838911-55838974
  hypo

SEQ ID NO: 450026 - DNA, 202 bp, Homo sapiens; identical to SEQ ID NO: 274679
  chr19:55842494-55842696
  hypo

SEQ ID NO: 450027 - DNA, 93 bp, Homo sapiens; identical to SEQ ID NO: 219733
  chr19:55848034-55848127
  hypo

SEQ ID NO: 450028 - DNA, 120 bp, Homo sapiens; identical to SEQ ID NO: 274681
  chr19:55849159-55849279
  hypo

SEQ ID NO: 450029 - DNA, 377 bp, Homo sapiens; identical to SEQ ID NO: 274682
  chr19:55856150-55856527
  hypo

SEQ ID NO: 450030 - DNA, 209 bp, Homo sapiens; identical to SEQ ID NO: 274683
  chr19:55857843-55858052
  hypo

SEQ ID NO: 450031 - DNA, 36 bp, Homo sapiens; identical to SEQ ID NO: 219734
  chr19:55858739-55858775
  hypo

SEQ ID NO: 450032 - DNA, 404 bp, Homo sapiens; identical to SEQ ID NO: 219736
  chr19:55872208-55872612
  hypo

SEQ ID NO: 450033 - DNA, 36 bp, Homo sapiens; identical to SEQ ID NO: 219737
  chr19:55912229-55912265
  hypo

SEQ ID NO: 450034 - DNA, 78 bp, Homo sapiens; identical to SEQ ID NO: 219738
  chr19:55912363-55912441
  hypo

SEQ ID NO: 450035 - DNA, 161 bp, Homo sapiens; identical to SEQ ID NO: 274687
  chr19:55944091-55944252
  hypo

SEQ ID NO: 450036 - DNA, 181 bp, Homo sapiens; identical to SEQ ID NO: 294390
  chr19:55953358-55953539
  hypo

SEQ ID NO: 450037 - DNA, 256 bp, Homo sapiens; identical to SEQ ID NO: 294391
  chr19:55962684-55962940
  hypo

SEQ ID NO: 450038 - DNA, 63 bp, Homo sapiens; identical to SEQ ID NO: 294392
  chr19:55963044-55963107
  hypo

SEQ ID NO: 450039 - DNA, 133 bp, Homo sapiens; identical to SEQ ID NO: 219741
  chr19:55993945-55994078
  hypo

SEQ ID NO: 450040 - DNA, 96 bp, Homo sapiens; identical to SEQ ID NO: 274693
  chr19:55995221-55995317
  hypo

SEQ ID NO: 450041 - DNA, 43 bp, Homo sapiens; identical to SEQ ID NO: 219742
  chr19:55998067-55998110
  hypo

SEQ ID NO: 450042 - DNA, 118 bp, Homo sapiens; identical to SEQ ID NO: 274695
  chr19:56047529-56047647
  hypo

SEQ ID NO: 450043 - DNA, 108 bp, Homo sapiens; identical to SEQ ID NO: 274696
  chr19:56089714-56089822
  hypo

SEQ ID NO: 450044 - DNA, 260 bp, Homo sapiens; identical to SEQ ID NO: 274699
  chr19:56108941-56109201
  hypo

SEQ ID NO: 450045 - DNA, 303 bp, Homo sapiens; identical to SEQ ID NO: 274700
  chr19:56113855-56114158
  hypo

SEQ ID NO: 450046 - DNA, 38 bp, Homo sapiens; identical to SEQ ID NO: 219743
  chr19:56115323-56115361
  hypo

SEQ ID NO: 450047 - DNA, 205 bp, Homo sapiens; identical to SEQ ID NO: 274702
  chr19:56125726-56125931
  hypo

SEQ ID NO: 450048 - DNA, 91 bp, Homo sapiens; identical to SEQ ID NO: 274703
  chr19:56126761-56126852
  hypo

SEQ ID NO: 450049 - DNA, 604 bp, Homo sapiens; identical to SEQ ID NO: 327127
  chr19:56163306-56163910
  hypo

SEQ ID NO: 450050 - DNA, 241 bp, Homo sapiens; identical to SEQ ID NO: 219745
  chr19:56163943-56164184
  hypo

SEQ ID NO: 450051 - DNA, 87 bp, Homo sapiens; identical to SEQ ID NO: 274705
  chr19:56164403-56164490
  hypo

SEQ ID NO: 450052 - DNA, 139 bp, Homo sapiens; identical to SEQ ID NO: 219746
  chr19:56170493-56170632
  hypo

SEQ ID NO: 450053 - DNA, 54 bp, Homo sapiens; identical to SEQ ID NO: 219747
  chr19:56176622-56176676
  hypo

SEQ ID NO: 450054 - DNA, 78 bp, Homo sapiens; identical to SEQ ID NO: 219748
  chr19:56176926-56177004
  hypo

SEQ ID NO: 450055 - DNA, 213 bp, Homo sapiens; identical to SEQ ID NO: 219749
  chr19:56178938-56179151
  hypo

SEQ ID NO: 450056 - DNA, 197 bp, Homo sapiens; identical to SEQ ID NO: 219750
  chr19:56179451-56179648
  hypo

SEQ ID NO: 450057 - DNA, 577 bp, Homo sapiens; identical to SEQ ID NO: 327135
  chr19:56179687-56180264
  hypo

SEQ ID NO: 450058 - DNA, 94 bp, Homo sapiens; identical to SEQ ID NO: 274711
  chr19:56190515-56190609
  hypo

SEQ ID NO: 450059 - DNA, 50 bp, Homo sapiens; identical to SEQ ID NO: 274716
  chr19:56223263-56223313
  hypo

SEQ ID NO: 450060 - DNA, 162 bp, Homo sapiens; identical to SEQ ID NO: 219755
  chr19:56227938-56228100
  hypo

SEQ ID NO: 450061 - DNA, 55 bp, Homo sapiens; identical to SEQ ID NO: 274718
  chr19:56320360-56320415
  hypo

SEQ ID NO: 450062 - DNA, 219 bp, Homo sapiens; identical to SEQ ID NO: 274719
  chr19:56369328-56369547
  hypo

SEQ ID NO: 450063 - DNA, 130 bp, Homo sapiens; identical to SEQ ID NO: 274720
  chr19:56372690-56372820
  hypo

SEQ ID NO: 450064 - DNA, 322 bp, Homo sapiens; identical to SEQ ID NO: 274721
  chr19:56461801-56462123
  hypo

SEQ ID NO: 450065 - DNA, 334 bp, Homo sapiens; identical to SEQ ID NO: 274722
  chr19:56465555-56465889
  hypo

SEQ ID NO: 450066 - DNA, 86 bp, Homo sapiens; identical to SEQ ID NO: 274723
  chr19:56467208-56467294
  hypo

SEQ ID NO: 450067 - DNA, 35 bp, Homo sapiens; identical to SEQ ID NO: 274724
  chr19:56475820-56475855
  hypo

SEQ ID NO: 450068 - DNA, 146 bp, Homo sapiens; identical to SEQ ID NO: 274726
  chr19:56543708-56543854
  hypo

SEQ ID NO: 450069 - DNA, 270 bp, Homo sapiens; identical to SEQ ID NO: 219758
  chr19:56564933-56565203
  hypo

SEQ ID NO: 450070 - DNA, 155 bp, Homo sapiens; identical to SEQ ID NO: 219759
  chr19:56615755-56615910
  hypo

SEQ ID NO: 450071 - DNA, 481 bp, Homo sapiens; identical to SEQ ID NO: 219760
  chr19:56617360-56617841
  hypo

SEQ ID NO: 450072 - DNA, 388 bp, Homo sapiens; identical to SEQ ID NO: 274731
  chr19:56642159-56642547
  hypo

SEQ ID NO: 450073 - DNA, 228 bp, Homo sapiens; identical to SEQ ID NO: 219761
  chr19:56658488-56658716
  hypo

SEQ ID NO: 450074 - DNA, 271 bp, Homo sapiens; identical to SEQ ID NO: 274733
  chr19:56663680-56663951
  hypo

SEQ ID NO: 450075 - DNA, 462 bp, Homo sapiens; identical to SEQ ID NO: 274734
  chr19:56671132-56671594
  hypo

SEQ ID NO: 450076 - DNA, 405 bp, Homo sapiens; identical to SEQ ID NO: 274737
  chr19:56707986-56708391
  hypo

SEQ ID NO: 450077 - DNA, 36 bp, Homo sapiens; identical to SEQ ID NO: 413339
  chr19:56727933-56727969
  hypo

SEQ ID NO: 450078 - DNA, 64 bp, Homo sapiens; identical to SEQ ID NO: 274739
  chr19:56761106-56761170
  hypo

SEQ ID NO: 450079 - DNA, 79 bp, Homo sapiens; identical to SEQ ID NO: 274740
  chr19:56805613-56805692
  hypo

SEQ ID NO: 450080 - DNA, 61 bp, Homo sapiens; identical to SEQ ID NO: 327167
  chr19:56806261-56806322
  hypo

SEQ ID NO: 450081 - DNA, 107 bp, Homo sapiens; identical to SEQ ID NO: 219765
  chr19:56807587-56807694
  hypo

SEQ ID NO: 450082 - DNA, 42 bp, Homo sapiens; identical to SEQ ID NO: 274744
  chr19:56829441-56829483
  hypo

SEQ ID NO: 450083 - DNA, 79 bp, Homo sapiens; identical to SEQ ID NO: 274745
  chr19:56863413-56863492
  hypo

SEQ ID NO: 450084 - DNA, 31 bp, Homo sapiens; identical to SEQ ID NO: 274746
  chr19:56877557-56877588
  hypo

SEQ ID NO: 450085 - DNA, 33 bp, Homo sapiens; identical to SEQ ID NO: 274747
  chr19:56936856-56936889
  hypo

SEQ ID NO: 450086 - DNA, 120 bp, Homo sapiens; identical to SEQ ID NO: 205608
  chr19:56987582-56987702
  hypo

SEQ ID NO: 450087 - DNA, 663 bp, Homo sapiens; identical to SEQ ID NO: 274750
  chr19:57133006-57133669
  hypo

SEQ ID NO: 450088 - DNA, 170 bp, Homo sapiens; identical to SEQ ID NO: 219770
  chr19:57134013-57134183
  hypo

SEQ ID NO: 450089 - DNA, 1448 bp, Homo sapiens; identical to SEQ ID NO: 219771
  chr19:57175022-57176470
  hypo

SEQ ID NO: 450090 - DNA, 32 bp, Homo sapiens; identical to SEQ ID NO: 274754
  chr19:57189204-57189236
  hypo

SEQ ID NO: 450091 - DNA, 39 bp, Homo sapiens; identical to SEQ ID NO: 274755
  chr19:57190503-57190542
  hypo

SEQ ID NO: 450092 - DNA, 91 bp, Homo sapiens; identical to SEQ ID NO: 274756
  chr19:57254044-57254135
  hypo

SEQ ID NO: 450093 - DNA, 311 bp, Homo sapiens; identical to SEQ ID NO: 274757
  chr19:57328579-57328890
  hypo

SEQ ID NO: 450094 - DNA, 50 bp, Homo sapiens; identical to SEQ ID NO: 274758
  chr19:57349850-57349900
  hypo

SEQ ID NO: 450095 - DNA, 34 bp, Homo sapiens; identical to SEQ ID NO: 274759
  chr19:57349930-57349964
  hypo

SEQ ID NO: 450096 - DNA, 412 bp, Homo sapiens; identical to SEQ ID NO: 274760
  chr19:57350029-57350441
  hypo

SEQ ID NO: 450097 - DNA, 115 bp, Homo sapiens; identical to SEQ ID NO: 274761
  chr19:57388569-57388684
  hypo

SEQ ID NO: 450098 - DNA, 92 bp, Homo sapiens; identical to SEQ ID NO: 274762
  chr19:57425614-57425706
  hypo

SEQ ID NO: 450099 - DNA, 45 bp, Homo sapiens; identical to SEQ ID NO: 327191
  chr19:57477086-57477131
  hypo

SEQ ID NO: 450100 - DNA, 78 bp, Homo sapiens; identical to SEQ ID NO: 327192
  chr19:57477171-57477249
  hypo

SEQ ID NO: 450101 - DNA, 105 bp, Homo sapiens; identical to SEQ ID NO: 219772
  chr19:57491412-57491517
  hypo

SEQ ID NO: 450102 - DNA, 32 bp, Homo sapiens; identical to SEQ ID NO: 274765
  chr19:57501950-57501982
  hypo

SEQ ID NO: 450103 - DNA, 87 bp, Homo sapiens; identical to SEQ ID NO: 274766
  chr19:57543653-57543740
  hypo

SEQ ID NO: 450104 - DNA, 42 bp, Homo sapiens; identical to SEQ ID NO: 274767
  chr19:57579643-57579685
  hypo

SEQ ID NO: 450105 - DNA, 42 bp, Homo sapiens; identical to SEQ ID NO: 274768
  chr19:57583563-57583605
  hypo

SEQ ID NO: 450106 - DNA, 76 bp, Homo sapiens; identical to SEQ ID NO: 219773
  chr19:57604471-57604547
  hypo

SEQ ID NO: 450107 - DNA, 75 bp, Homo sapiens; identical to SEQ ID NO: 219774
  chr19:57604847-57604922
  hypo

SEQ ID NO: 450108 - DNA, 35 bp, Homo sapiens; identical to SEQ ID NO: 274771
  chr19:57627883-57627918
  hypo

SEQ ID NO: 450109 - DNA, 86 bp, Homo sapiens; identical to SEQ ID NO: 274773
  chr19:57630721-57630807
  hypo

SEQ ID NO: 450110 - DNA, 386 bp, Homo sapiens; identical to SEQ ID NO: 274774
  chr19:57631107-57631493
  hypo

SEQ ID NO: 450111 - DNA, 32 bp, Homo sapiens; identical to SEQ ID NO: 274775
  chr19:57631762-57631794
  hypo

SEQ ID NO: 450112 - DNA, 90 bp, Homo sapiens; identical to SEQ ID NO: 219775
  chr19:57689867-57689957
  hypo

SEQ ID NO: 450113 - DNA, 41 bp, Homo sapiens; identical to SEQ ID NO: 274777
  chr19:58177292-58177333
  hypo

SEQ ID NO: 450114 - DNA, 42 bp, Homo sapiens; identical to SEQ ID NO: 274778
  chr19:58180749-58180791
  hypo

SEQ ID NO: 450115 - DNA, 42 bp, Homo sapiens; identical to SEQ ID NO: 274779
  chr19:58184721-58184763
  hypo

SEQ ID NO: 450116 - DNA, 32 bp, Homo sapiens; identical to SEQ ID NO: 274780
  chr19:58200878-58200910
  hypo

SEQ ID NO: 450117 - DNA, 32 bp, Homo sapiens; identical to SEQ ID NO: 274781
  chr19:58201150-58201182
  hypo

SEQ ID NO: 450118 - DNA, 81 bp, Homo sapiens; identical to SEQ ID NO: 274782
  chr19:58298051-58298132
  hypo

SEQ ID NO: 450119 - DNA, 266 bp, Homo sapiens; identical to SEQ ID NO: 274783
  chr19:58304691-58304957
  hypo

SEQ ID NO: 450120 - DNA, 38 bp, Homo sapiens; identical to SEQ ID NO: 219780
  chr19:58317135-58317173
  hypo

SEQ ID NO: 450121 - DNA, 58 bp, Homo sapiens; identical to SEQ ID NO: 274786
  chr19:58465096-58465154
  hypo

SEQ ID NO: 450122 - DNA, 33 bp, Homo sapiens; identical to SEQ ID NO: 219781
  chr19:58472252-58472285
  hypo

SEQ ID NO: 450123 - DNA, 44 bp, Homo sapiens; identical to SEQ ID NO: 274788
  chr19:58484262-58484306
  hypo

SEQ ID NO: 450124 - DNA, 54 bp, Homo sapiens; identical to SEQ ID NO: 327219
  chr19:58524545-58524599
  hypo

SEQ ID NO: 450125 - DNA, 120 bp, Homo sapiens; identical to SEQ ID NO: 274790
  chr19:58544602-58544722
  hypo

SEQ ID NO: 450126 - DNA, 250 bp, Homo sapiens; identical to SEQ ID NO: 219782
  chr19:58551437-58551687
  hypo

SEQ ID NO: 450127 - DNA, 289 bp, Homo sapiens; identical to SEQ ID NO: 327222
  chr19:58551717-58552006
  hypo

SEQ ID NO: 450128 - DNA, 69 bp, Homo sapiens; identical to SEQ ID NO: 327223
  chr19:58552051-58552120
  hypo

SEQ ID NO: 450129 - DNA, 31 bp, Homo sapiens; identical to SEQ ID NO: 274792
  chr19:58555625-58555656
  hypo

SEQ ID NO: 450130 - DNA, 38 bp, Homo sapiens; identical to SEQ ID NO: 274795
  chr19:58557381-58557419
  hypo

SEQ ID NO: 450131 - DNA, 318 bp, Homo sapiens; identical to SEQ ID NO: 219785
  chr19:58557757-58558075
  hypo

SEQ ID NO: 450132 - DNA, 184 bp, Homo sapiens; identical to SEQ ID NO: 274797
  chr19:58563696-58563880
  hypo

SEQ ID NO: 450133 - DNA, 736 bp, Homo sapiens; identical to SEQ ID NO: 274798
  chr19:58564632-58565368
  hypo

SEQ ID NO: 450134 - DNA, 35 bp, Homo sapiens; identical to SEQ ID NO: 219787
  chr19:58593733-58593768
  hypo

SEQ ID NO: 450135 - DNA, 481 bp, Homo sapiens; identical to SEQ ID NO: 274800
  chr19:58595753-58596234
  hypo

SEQ ID NO: 450136 - DNA, 199 bp, Homo sapiens; identical to SEQ ID NO: 274801
  chr19:58596709-58596908
  hypo

SEQ ID NO: 450137 - DNA, 286 bp, Homo sapiens; identical to SEQ ID NO: 327234
  chr19:58598368-58598654
  hypo

SEQ ID NO: 450138 - DNA, 49 bp, Homo sapiens; identical to SEQ ID NO: 327235
  chr19:58598684-58598733
  hypo

SEQ ID NO: 450139 - DNA, 42 bp, Homo sapiens; identical to SEQ ID NO: 274803
  chr19:58605134-58605176
  hypo

SEQ ID NO: 450140 - DNA, 156 bp, Homo sapiens; identical to SEQ ID NO: 274804
  chr19:58711831-58711987
  hypo

SEQ ID NO: 450141 - DNA, 197 bp, Homo sapiens; identical to SEQ ID NO: 205648
  chr19:58858560-58858757
  hypo

SEQ ID NO: 450142 - DNA, 157 bp, Homo sapiens; identical to SEQ ID NO: 219793
  chr19:58872591-58872748
  hypo

SEQ ID NO: 450143 - DNA, 332 bp, Homo sapiens; identical to SEQ ID NO: 294464
  chr19:58874184-58874516
  hypo

SEQ ID NO: 450144 - DNA, 32 bp, Homo sapiens; identical to SEQ ID NO: 219796
  chr19:58915038-58915070
  hypo

SEQ ID NO: 450145 - DNA, 71 bp, Homo sapiens; identical to SEQ ID NO: 226057
  chr19:58920316-58920387
  hypo

SEQ ID NO: 450146 - DNA, 99 bp, Homo sapiens; identical to SEQ ID NO: 274812
  chr19:58990990-58991089
  hypo

SEQ ID NO: 450147 - DNA, 105 bp, Homo sapiens; identical to SEQ ID NO: 219798
  chr20:276872-276977
  hypo

SEQ ID NO: 450148 - DNA, 61 bp, Homo sapiens; identical to SEQ ID NO: 274816
  chr20:309115-309176
  hypo

SEQ ID NO: 450149 - DNA, 116 bp, Homo sapiens; identical to SEQ ID NO: 219801
  chr20:413054-413170
  hypo

SEQ ID NO: 450150 - DNA, 43 bp, Homo sapiens; identical to SEQ ID NO: 219802
  chr20:417445-417488
  hypo

SEQ ID NO: 450151 - DNA, 149 bp, Homo sapiens; identical to SEQ ID NO: 219803
  chr20:488507-488656
  hypo

SEQ ID NO: 450152 - DNA, 34 bp, Homo sapiens; identical to SEQ ID NO: 274825
  chr20:540395-540429
  hypo

SEQ ID NO: 450153 - DNA, 91 bp, Homo sapiens; identical to SEQ ID NO: 274826
  chr20:631995-632086
  hypo

SEQ ID NO: 450154 - DNA, 361 bp, Homo sapiens; identical to SEQ ID NO: 274828
  chr20:745878-746239
  hypo

SEQ ID NO: 450155 - DNA, 137 bp, Homo sapiens; identical to SEQ ID NO: 274829
  chr20:773017-773154
  hypo

SEQ ID NO: 450156 - DNA, 38 bp, Homo sapiens; identical to SEQ ID NO: 274830
  chr20:923177-923215
  hypo

SEQ ID NO: 450157 - DNA, 40 bp, Homo sapiens; identical to SEQ ID NO: 274832
  chr20:1094603-1094643
  hypo

SEQ ID NO: 450158 - DNA, 36 bp, Homo sapiens; identical to SEQ ID NO: 219809
  chr20:1276610-1276646
  hypo

SEQ ID NO: 450159 - DNA, 154 bp, Homo sapiens; identical to SEQ ID NO: 274834
  chr20:1277696-1277850
  hypo

SEQ ID NO: 450160 - DNA, 192 bp, Homo sapiens; identical to SEQ ID NO: 219810
  chr20:1435437-1435629
  hypo

SEQ ID NO: 450161 - DNA, 248 bp, Homo sapiens; identical to SEQ ID NO: 274837
  chr20:2104364-2104612
  hypo

SEQ ID NO: 450162 - DNA, 487 bp, Homo sapiens; identical to SEQ ID NO: 205664
  chr20:2188036-2188523
  hypo

SEQ ID NO: 450163 - DNA, 304 bp, Homo sapiens; identical to SEQ ID NO: 219812
  chr20:2308758-2309062
  hypo

SEQ ID NO: 450164 - DNA, 124 bp, Homo sapiens; identical to SEQ ID NO: 274840
  chr20:2321102-2321226
  hypo

SEQ ID NO: 450165 - DNA, 255 bp, Homo sapiens; identical to SEQ ID NO: 274841
  chr20:2397896-2398151
  hypo

SEQ ID NO: 450166 - DNA, 236 bp, Homo sapiens; identical to SEQ ID NO: 294500
  chr20:2444432-2444668
  hypo

SEQ ID NO: 450167 - DNA, 33 bp, Homo sapiens; identical to SEQ ID NO: 274843
  chr20:2489142-2489175
  hypo

SEQ ID NO: 450168 - DNA, 106 bp, Homo sapiens; identical to SEQ ID NO: 274844
  chr20:2636506-2636612
  hypo

SEQ ID NO: 450169 - DNA, 68 bp, Homo sapiens; identical to SEQ ID NO: 294507
  chr20:2674067-2674135
  hypo

SEQ ID NO: 450170 - DNA, 207 bp, Homo sapiens; identical to SEQ ID NO: 274845
  chr20:2739580-2739787
  hypo

SEQ ID NO: 450171 - DNA, 219 bp, Homo sapiens; identical to SEQ ID NO: 274846
  chr20:2797288-2797507
  hypo

SEQ ID NO: 450172 - DNA, 178 bp, Homo sapiens; identical to SEQ ID NO: 219815
  chr20:2939675-2939853
  hypo

SEQ ID NO: 450173 - DNA, 129 bp, Homo sapiens; identical to SEQ ID NO: 274850
  chr20:3003332-3003461
  hypo

SEQ ID NO: 450174 - DNA, 68 bp, Homo sapiens; identical to SEQ ID NO: 274851
  chr20:3017788-3017856
  hypo

SEQ ID NO: 450175 - DNA, 66 bp, Homo sapiens; identical to SEQ ID NO: 294519
  chr20:3063059-3063125
  hypo

SEQ ID NO: 450176 - DNA, 94 bp, Homo sapiens; identical to SEQ ID NO: 294520
  chr20:3063391-3063485
  hypo

SEQ ID NO: 450177 - DNA, 45 bp, Homo sapiens; identical to SEQ ID NO: 274852
  chr20:3109208-3109253
  hypo

SEQ ID NO: 450178 - DNA, 260 bp, Homo sapiens; identical to SEQ ID NO: 205673
  chr20:3154656-3154916
  hypo

SEQ ID NO: 450179 - DNA, 70 bp, Homo sapiens
  chr20:3199943-3200013
  hypo
cagggttcaagcatagaatgttaattcttggccaggtttggtgatttacacctgtaatcctagcactttg

SEQ ID NO: 450180 - DNA, 32 bp, Homo sapiens; identical to SEQ ID NO: 274855
  chr20:3203126-3203158
  hypo

SEQ ID NO: 450181 - DNA, 135 bp, Homo sapiens; identical to SEQ ID NO: 274856
  chr20:3208371-3208506
  hypo

SEQ ID NO: 450182 - DNA, 41 bp, Homo sapiens; identical to SEQ ID NO: 219818
  chr20:3208779-3208820
  hypo

SEQ ID NO: 450183 - DNA, 116 bp, Homo sapiens; identical to SEQ ID NO: 274858
  chr20:3209206-3209322
  hypo

SEQ ID NO: 450184 - DNA, 75 bp, Homo sapiens; identical to SEQ ID NO: 274859
  chr20:3211428-3211503
  hypo

SEQ ID NO: 450185 - DNA, 34 bp, Homo sapiens; identical to SEQ ID NO: 274860
  chr20:3211814-3211848
  hypo

SEQ ID NO: 450186 - DNA, 154 bp, Homo sapiens; identical to SEQ ID NO: 274861
  chr20:3214742-3214896
  hypo

SEQ ID NO: 450187 - DNA, 256 bp, Homo sapiens; identical to SEQ ID NO: 425337
  chr20:3220010-3220266
  hypo

SEQ ID NO: 450188 - DNA, 436 bp, Homo sapiens; identical to SEQ ID NO: 205679
  chr20:3451349-3451785
  hypo

SEQ ID NO: 450189 - DNA, 41 bp, Homo sapiens; identical to SEQ ID NO: 274862
  chr20:3635386-3635427
  hypo

SEQ ID NO: 450190 - DNA, 221 bp, Homo sapiens; identical to SEQ ID NO: 274863
  chr20:3635666-3635887
  hypo

SEQ ID NO: 450191 - DNA, 209 bp, Homo sapiens; identical to SEQ ID NO: 274864
  chr20:3637823-3638032
  hypo

SEQ ID NO: 450192 - DNA, 300 bp, Homo sapiens; identical to SEQ ID NO: 327314
  chr20:3763166-3763466
  hypo

SEQ ID NO: 450193 - DNA, 377 bp, Homo sapiens; identical to SEQ ID NO: 274866
  chr20:3781113-3781490
  hypo

SEQ ID NO: 450194 - DNA, 36 bp, Homo sapiens; identical to SEQ ID NO: 274867
  chr20:3797904-3797940
  hypo

SEQ ID NO: 450195 - DNA, 441 bp, Homo sapiens; identical to SEQ ID NO: 274869
  chr20:3838303-3838744
  hypo

SEQ ID NO: 450196 - DNA, 120 bp, Homo sapiens; identical to SEQ ID NO: 274870
  chr20:3857969-3858089
  hypo

SEQ ID NO: 450197 - DNA, 149 bp, Homo sapiens; identical to SEQ ID NO: 274871
  chr20:3909805-3909954
  hypo

SEQ ID NO: 450198 - DNA, 979 bp, Homo sapiens; identical to SEQ ID NO: 294543
  chr20:4129265-4130244
  hypo

SEQ ID NO: 450199 - DNA, 218 bp, Homo sapiens; identical to SEQ ID NO: 274873
  chr20:4270513-4270731
  hypo

SEQ ID NO: 450200 - DNA, 42 bp, Homo sapiens; identical to SEQ ID NO: 274874
  chr20:4786435-4786477
  hypo

SEQ ID NO: 450201 - DNA, 34 bp, Homo sapiens; identical to SEQ ID NO: 274875
  chr20:4786507-4786541
  hypo

SEQ ID NO: 450202 - DNA, 146 bp, Homo sapiens; identical to SEQ ID NO: 274876
  chr20:4869816-4869962
  hypo

SEQ ID NO: 450203 - DNA, 217 bp, Homo sapiens; identical to SEQ ID NO: 274877
  chr20:4951348-4951565
  hypo

SEQ ID NO: 450204 - DNA, 105 bp, Homo sapiens; identical to SEQ ID NO: 219827
  chr20:4966924-4967029
  hypo

SEQ ID NO: 450205 - DNA, 35 bp, Homo sapiens; identical to SEQ ID NO: 274879
  chr20:4968207-4968242
  hypo

SEQ ID NO: 450206 - DNA, 53 bp, Homo sapiens; identical to SEQ ID NO: 219828
  chr20:5072894-5072947
  hypo

SEQ ID NO: 450207 - DNA, 46 bp, Homo sapiens; identical to SEQ ID NO: 219829
  chr20:5178251-5178297
  hypo

SEQ ID NO: 450208 - DNA, 37 bp, Homo sapiens; identical to SEQ ID NO: 274882
  chr20:5593413-5593450
  hypo

SEQ ID NO: 450209 - DNA, 37 bp, Homo sapiens; identical to SEQ ID NO: 219831
  chr20:5610249-5610286
  hypo

SEQ ID NO: 450210 - DNA, 174 bp, Homo sapiens; identical to SEQ ID NO: 219832
  chr20:5610576-5610750
  hypo

SEQ ID NO: 450211 - DNA, 35 bp, Homo sapiens; identical to SEQ ID NO: 274885
  chr20:5649290-5649325
  hypo

SEQ ID NO: 450212 - DNA, 180 bp, Homo sapiens; identical to SEQ ID NO: 219833
  chr20:5734498-5734678
  hypo

SEQ ID NO: 450213 - DNA, 148 bp, Homo sapiens; identical to SEQ ID NO: 219834
  chr20:5762408-5762556
  hypo

SEQ ID NO: 450214 - DNA, 92 bp, Homo sapiens; identical to SEQ ID NO: 219835
  chr20:5765408-5765500
  hypo

SEQ ID NO: 450215 - DNA, 137 bp, Homo sapiens; identical to SEQ ID NO: 274890
  chr20:5812853-5812990
  hypo

SEQ ID NO: 450216 - DNA, 90 bp, Homo sapiens; identical to SEQ ID NO: 274891
  chr20:5934379-5934469
  hypo

SEQ ID NO: 450217 - DNA, 154 bp, Homo sapiens; identical to SEQ ID NO: 219839
  chr20:6021570-6021724
  hypo

SEQ ID NO: 450218 - DNA, 120 bp, Homo sapiens; identical to SEQ ID NO: 219841
  chr20:6302507-6302627
  hypo

SEQ ID NO: 450219 - DNA, 143 bp, Homo sapiens; identical to SEQ ID NO: 274895
  chr20:6663946-6664089
  hypo

SEQ ID NO: 450220 - DNA, 34 bp, Homo sapiens; identical to SEQ ID NO: 274896
  chr20:6732281-6732315
  hypo

SEQ ID NO: 450221 - DNA, 34 bp, Homo sapiens; identical to SEQ ID NO: 274897
  chr20:6732555-6732589
  hypo

SEQ ID NO: 450222 - DNA, 169 bp, Homo sapiens; identical to SEQ ID NO: 274898
  chr20:6759075-6759244
  hypo

SEQ ID NO: 450223 - DNA, 161 bp, Homo sapiens; identical to SEQ ID NO: 274899
  chr20:6837485-6837646
  hypo

SEQ ID NO: 450224 - DNA, 35 bp, Homo sapiens; identical to SEQ ID NO: 219844
  chr20:6861141-6861176
  hypo

SEQ ID NO: 450225 - DNA, 117 bp, Homo sapiens; identical to SEQ ID NO: 327355
  chr20:7958448-7958565
  hypo

SEQ ID NO: 450226 - DNA, 33 bp, Homo sapiens; identical to SEQ ID NO: 274902
  chr20:8731861-8731894
  hypo

SEQ ID NO: 450227 - DNA, 435 bp, Homo sapiens; identical to SEQ ID NO: 425361
  chr20:9049781-9050216
  hypo

SEQ ID NO: 450228 - DNA, 149 bp, Homo sapiens; identical to SEQ ID NO: 274903
  chr20:9546626-9546775
  hypo

SEQ ID NO: 450229 - DNA, 167 bp, Homo sapiens; identical to SEQ ID NO: 219845
  chr20:10515152-10515319
  hypo

SEQ ID NO: 450230 - DNA, 42 bp, Homo sapiens; identical to SEQ ID NO: 219846
  chr20:10571270-10571312
  hypo

SEQ ID NO: 450231 - DNA, 400 bp, Homo sapiens; identical to SEQ ID NO: 294582
  chr20:10653624-10654024
  hypo

SEQ ID NO: 450232 - DNA, 1019 bp, Homo sapiens; identical to SEQ ID NO: 205705
  chr20:10654669-10655688
  hypo

SEQ ID NO: 450233 - DNA, 32 bp, Homo sapiens; identical to SEQ ID NO: 274906
  chr20:10686677-10686709
  hypo

SEQ ID NO: 450234 - DNA, 209 bp, Homo sapiens; identical to SEQ ID NO: 327368
  chr20:10774348-10774557
  hypo

SEQ ID NO: 450235 - DNA, 122 bp, Homo sapiens; identical to SEQ ID NO: 327369
  chr20:10774587-10774709
  hypo

SEQ ID NO: 450236 - DNA, 42 bp, Homo sapiens; identical to SEQ ID NO: 274909
  chr20:11209700-11209742
  hypo

SEQ ID NO: 450237 - DNA, 181 bp, Homo sapiens; identical to SEQ ID NO: 219849
  chr20:11589406-11589587
  hypo

SEQ ID NO: 450238 - DNA, 67 bp, Homo sapiens; identical to SEQ ID NO: 219850
  chr20:11589753-11589820
  hypo

SEQ ID NO: 450239 - DNA, 1239 bp, Homo sapiens; identical to SEQ ID NO: 205706
  chr20:11871115-11872354
  hypo

SEQ ID NO: 450240 - DNA, 185 bp, Homo sapiens; identical to SEQ ID NO: 274911
  chr20:11903619-11903804
  hypo

SEQ ID NO: 450241 - DNA, 128 bp, Homo sapiens; identical to SEQ ID NO: 274912
  chr20:13279833-13279961
  hypo

SEQ ID NO: 450242 - DNA, 252 bp, Homo sapiens; identical to SEQ ID NO: 274914
  chr20:13881180-13881432
  hypo

SEQ ID NO: 450243 - DNA, 58 bp, Homo sapiens; identical to SEQ ID NO: 219853
  chr20:14812474-14812532
  hypo

SEQ ID NO: 450244 - DNA, 180 bp, Homo sapiens; identical to SEQ ID NO: 274916
  chr20:15011645-15011825
  hypo

SEQ ID NO: 450245 - DNA, 66 bp, Homo sapiens; identical to SEQ ID NO: 274917
  chr20:16431607-16431673
  hypo

SEQ ID NO: 450246 - DNA, 409 bp, Homo sapiens; identical to SEQ ID NO: 274918
  chr20:16510876-16511285
  hypo

SEQ ID NO: 450247 - DNA, 208 bp, Homo sapiens; identical to SEQ ID NO: 219855
  chr20:16543130-16543338
  hypo

SEQ ID NO: 450248 - DNA, 130 bp, Homo sapiens; identical to SEQ ID NO: 327383
  chr20:16555178-16555308
  hypo

SEQ ID NO: 450249 - DNA, 207 bp, Homo sapiens; identical to SEQ ID NO: 274922
  chr20:16955527-16955734
  hypo

SEQ ID NO: 450250 - DNA, 38 bp, Homo sapiens; identical to SEQ ID NO: 274923
  chr20:17460141-17460179
  hypo

SEQ ID NO: 450251 - DNA, 266 bp, Homo sapiens; identical to SEQ ID NO: 219857
  chr20:17481118-17481384
  hypo

SEQ ID NO: 450252 - DNA, 384 bp, Homo sapiens; identical to SEQ ID NO: 274925
  chr20:17489362-17489746
  hypo

SEQ ID NO: 450253 - DNA, 42 bp, Homo sapiens; identical to SEQ ID NO: 274926
  chr20:17512774-17512816
  hypo

SEQ ID NO: 450254 - DNA, 478 bp, Homo sapiens; identical to SEQ ID NO: 294597
  chr20:17549573-17550051
  hypo

SEQ ID NO: 450255 - DNA, 64 bp, Homo sapiens; identical to SEQ ID NO: 274927
  chr20:17625935-17625999
  hypo

SEQ ID NO: 450256 - DNA, 187 bp, Homo sapiens; identical to SEQ ID NO: 205715
  chr20:17661564-17661751
  hypo

SEQ ID NO: 450257 - DNA, 383 bp, Homo sapiens; identical to SEQ ID NO: 274928
  chr20:17674235-17674618
  hypo

SEQ ID NO: 450258 - DNA, 36 bp, Homo sapiens; identical to SEQ ID NO: 274930
  chr20:17987479-17987515
  hypo

SEQ ID NO: 450259 - DNA, 36 bp, Homo sapiens; identical to SEQ ID NO: 274931
  chr20:18041677-18041713
  hypo

SEQ ID NO: 450260 - DNA, 107 bp, Homo sapiens; identical to SEQ ID NO: 274932
  chr20:18122802-18122909
  hypo

SEQ ID NO: 450261 - DNA, 71 bp, Homo sapiens; identical to SEQ ID NO: 327399
  chr20:18233558-18233629
  hypo

SEQ ID NO: 450262 - DNA, 72 bp, Homo sapiens; identical to SEQ ID NO: 219863
  chr20:18724827-18724899
  hypo

SEQ ID NO: 450263 - DNA, 33 bp, Homo sapiens; identical to SEQ ID NO: 274936
  chr20:19182182-19182215
  hypo

SEQ ID NO: 450264 - DNA, 44 bp, Homo sapiens; identical to SEQ ID NO: 274937
  chr20:19207656-19207700
  hypo

SEQ ID NO: 450265 - DNA, 90 bp, Homo sapiens; identical to SEQ ID NO: 274938
  chr20:19264552-19264642
  hypo

SEQ ID NO: 450266 - DNA, 199 bp, Homo sapiens; identical to SEQ ID NO: 274940
  chr20:19565476-19565675
  hypo

SEQ ID NO: 450267 - DNA, 131 bp, Homo sapiens; identical to SEQ ID NO: 327407
  chr20:19673882-19674013
  hypo

SEQ ID NO: 450268 - DNA, 49 bp, Homo sapiens; identical to SEQ ID NO: 327408
  chr20:19674053-19674102
  hypo

SEQ ID NO: 450269 - DNA, 180 bp, Homo sapiens; identical to SEQ ID NO: 205724
  chr20:19738432-19738612
  hypo

SEQ ID NO: 450270 - DNA, 188 bp, Homo sapiens; identical to SEQ ID NO: 294625
  chr20:19997708-19997896
  hypo

SEQ ID NO: 450271 - DNA, 245 bp, Homo sapiens; identical to SEQ ID NO: 274942
  chr20:19999397-19999642
  hypo

SEQ ID NO: 450272 - DNA, 33 bp, Homo sapiens; identical to SEQ ID NO: 274943
  chr20:20367698-20367731
  hypo

SEQ ID NO: 450273 - DNA, 172 bp, Homo sapiens; identical to SEQ ID NO: 219865
  chr20:20372436-20372608
  hypo

SEQ ID NO: 450274 - DNA, 168 bp, Homo sapiens; identical to SEQ ID NO: 274946
  chr20:20378095-20378263
  hypo

SEQ ID NO: 450275 - DNA, 222 bp, Homo sapiens; identical to SEQ ID NO: 219868
  chr20:20392201-20392423
  hypo

SEQ ID NO: 450276 - DNA, 119 bp, Homo sapiens; identical to SEQ ID NO: 219869
  chr20:20392662-20392781
  hypo

SEQ ID NO: 450277 - DNA, 220 bp, Homo sapiens; identical to SEQ ID NO: 274949
  chr20:20394640-20394860
  hypo

SEQ ID NO: 450278 - DNA, 269 bp, Homo sapiens; identical to SEQ ID NO: 219870
  chr20:20421239-20421508
  hypo

SEQ ID NO: 450279 - DNA, 283 bp, Homo sapiens; identical to SEQ ID NO: 219871
  chr20:20435758-20436041
  hypo

SEQ ID NO: 450280 - DNA, 32 bp, Homo sapiens; identical to SEQ ID NO: 219872
  chr20:21115585-21115617
  hypo

SEQ ID NO: 450281 - DNA, 164 bp, Homo sapiens; identical to SEQ ID NO: 274953
  chr20:21213373-21213537
  hypo

SEQ ID NO: 450282 - DNA, 154 bp, Homo sapiens; identical to SEQ ID NO: 219873
  chr20:21371533-21371687
  hypo

SEQ ID NO: 450283 - DNA, 407 bp, Homo sapiens; identical to SEQ ID NO: 294638
  chr20:21495255-21495662
  hypo

SEQ ID NO: 450284 - DNA, 192 bp, Homo sapiens; identical to SEQ ID NO: 219874
  chr20:21555354-21555546
  hypo

SEQ ID NO: 450285 - DNA, 35 bp, Homo sapiens; identical to SEQ ID NO: 274956
  chr20:22324533-22324568
  hypo

SEQ ID NO: 450286 - DNA, 125 bp, Homo sapiens; identical to SEQ ID NO: 425425
  chr20:22563238-22563363
  hypo

SEQ ID NO: 450287 - DNA, 46 bp, Homo sapiens; identical to SEQ ID NO: 425426
  chr20:22565247-22565293
  hypo

SEQ ID NO: 450288 - DNA, 31 bp, Homo sapiens; identical to SEQ ID NO: 274957
  chr20:22876830-22876861
  hypo

SEQ ID NO: 450289 - DNA, 31 bp, Homo sapiens; identical to SEQ ID NO: 274958
  chr20:22877101-22877132
  hypo

SEQ ID NO: 450290 - DNA, 301 bp, Homo sapiens; identical to SEQ ID NO: 274960
  chr20:23016426-23016727
  hypo

SEQ ID NO: 450291 - DNA, 123 bp, Homo sapiens; identical to SEQ ID NO: 274961
  chr20:23016803-23016926
  hypo

SEQ ID NO: 450292 - DNA, 215 bp, Homo sapiens; identical to SEQ ID NO: 327441
  chr20:23117579-23117794
  hypo

SEQ ID NO: 450293 - DNA, 166 bp, Homo sapiens; identical to SEQ ID NO: 274964
  chr20:23137428-23137594
  hypo

SEQ ID NO: 450294 - DNA, 79 bp, Homo sapiens; identical to SEQ ID NO: 219883
  chr20:23138537-23138616
  hypo

SEQ ID NO: 450295 - DNA, 42 bp, Homo sapiens; identical to SEQ ID NO: 274966
  chr20:23283473-23283515
  hypo

SEQ ID NO: 450296 - DNA, 91 bp, Homo sapiens; identical to SEQ ID NO: 274967
  chr20:23336930-23337021
  hypo

SEQ ID NO: 450297 - DNA, 155 bp, Homo sapiens; identical to SEQ ID NO: 274968
  chr20:23337306-23337461
  hypo

SEQ ID NO: 450298 - DNA, 383 bp, Homo sapiens; identical to SEQ ID NO: 274969
  chr20:23346218-23346601
  hypo

SEQ ID NO: 450299 - DNA, 157 bp, Homo sapiens; identical to SEQ ID NO: 274970
  chr20:23380018-23380175
  hypo

SEQ ID NO: 450300 - DNA, 42 bp, Homo sapiens; identical to SEQ ID NO: 274971
  chr20:23426501-23426543
  hypo

SEQ ID NO: 450301 - DNA, 89 bp, Homo sapiens; identical to SEQ ID NO: 274972
  chr20:23669395-23669484
  hypo

SEQ ID NO: 450302 - DNA, 240 bp, Homo sapiens; identical to SEQ ID NO: 274974
  chr20:24188722-24188962
  hypo

SEQ ID NO: 450303 - DNA, 258 bp, Homo sapiens; identical to SEQ ID NO: 274975
  chr20:24189022-24189280
  hypo

SEQ ID NO: 450304 - DNA, 76 bp, Homo sapiens; identical to SEQ ID NO: 274976
  chr20:24236950-24237026
  hypo

SEQ ID NO: 450305 - DNA, 43 bp, Homo sapiens; identical to SEQ ID NO: 274978
  chr20:24484894-24484937
  hypo

SEQ ID NO: 450306 - DNA, 137 bp, Homo sapiens; identical to SEQ ID NO: 327459
  chr20:24646805-24646942
  hypo

SEQ ID NO: 450307 - DNA, 406 bp, Homo sapiens; identical to SEQ ID NO: 274982
  chr20:24944573-24944979
  hypo

SEQ ID NO: 450308 - DNA, 173 bp, Homo sapiens; identical to SEQ ID NO: 219888
  chr20:24947029-24947202
  hypo

SEQ ID NO: 450309 - DNA, 37 bp, Homo sapiens; identical to SEQ ID NO: 219889
  chr20:24950217-24950254
  hypo

SEQ ID NO: 450310 - DNA, 109 bp, Homo sapiens; identical to SEQ ID NO: 274985
  chr20:24997316-24997425
  hypo

SEQ ID NO: 450311 - DNA, 239 bp, Homo sapiens; identical to SEQ ID NO: 274986
  chr20:25000500-25000739
  hypo

SEQ ID NO: 450312 - DNA, 281 bp, Homo sapiens; identical to SEQ ID NO: 274988
  chr20:25028526-25028807
  hypo

SEQ ID NO: 450313 - DNA, 55 bp, Homo sapiens; identical to SEQ ID NO: 274989
  chr20:25030308-25030363
  hypo

SEQ ID NO: 450314 - DNA, 51 bp, Homo sapiens; identical to SEQ ID NO: 274990
  chr20:25039530-25039581
  hypo

SEQ ID NO: 450315 - DNA, 212 bp, Homo sapiens; identical to SEQ ID NO: 274991
  chr20:25040600-25040812
  hypo

SEQ ID NO: 450316 - DNA, 488 bp, Homo sapiens; identical to SEQ ID NO: 274992
  chr20:25187625-25188113
  hypo

SEQ ID NO: 450317 - DNA, 127 bp, Homo sapiens; identical to SEQ ID NO: 274993
  chr20:25202580-25202707
  hypo

SEQ ID NO: 450318 - DNA, 79 bp, Homo sapiens; identical to SEQ ID NO: 274997
  chr20:25236291-25236370
  hypo

SEQ ID NO: 450319 - DNA, 103 bp, Homo sapiens; identical to SEQ ID NO: 274998
  chr20:25240119-25240222
  hypo

SEQ ID NO: 450320 - DNA, 148 bp, Homo sapiens; identical to SEQ ID NO: 327476
  chr20:25251560-25251708
  hypo

SEQ ID NO: 450321 - DNA, 224 bp, Homo sapiens; identical to SEQ ID NO: 275000
  chr20:25254265-25254489
  hypo

SEQ ID NO: 450322 - DNA, 43 bp, Homo sapiens; identical to SEQ ID NO: 275001
  chr20:25254609-25254652
  hypo

SEQ ID NO: 450323 - DNA, 196 bp, Homo sapiens; identical to SEQ ID NO: 275002
  chr20:25255135-25255331
  hypo

SEQ ID NO: 450324 - DNA, 33 bp, Homo sapiens; identical to SEQ ID NO: 219893
  chr20:25278858-25278891
  hypo

SEQ ID NO: 450325 - DNA, 33 bp, Homo sapiens; identical to SEQ ID NO: 219894
  chr20:25284746-25284779
  hypo

SEQ ID NO: 450326 - DNA, 163 bp, Homo sapiens; identical to SEQ ID NO: 275005
  chr20:25290092-25290255
  hypo

SEQ ID NO: 450327 - DNA, 170 bp, Homo sapiens; identical to SEQ ID NO: 275006
  chr20:25300608-25300778
  hypo

SEQ ID NO: 450328 - DNA, 189 bp, Homo sapiens; identical to SEQ ID NO: 275007
  chr20:25310088-25310277
  hypo

SEQ ID NO: 450329 - DNA, 47 bp, Homo sapiens; identical to SEQ ID NO: 275009
  chr20:25322420-25322467
  hypo

SEQ ID NO: 450330 - DNA, 88 bp, Homo sapiens; identical to SEQ ID NO: 219896
  chr20:25344156-25344244
  hypo

SEQ ID NO: 450331 - DNA, 199 bp, Homo sapiens; identical to SEQ ID NO: 275011
  chr20:25377963-25378162
  hypo

SEQ ID NO: 450332 - DNA, 131 bp, Homo sapiens; identical to SEQ ID NO: 275012
  chr20:25434107-25434238
  hypo

SEQ ID NO: 450333 - DNA, 172 bp, Homo sapiens; identical to SEQ ID NO: 275013
  chr20:25459745-25459917
  hypo

SEQ ID NO: 450334 - DNA, 166 bp, Homo sapiens; identical to SEQ ID NO: 275014
  chr20:25470595-25470761
  hypo

SEQ ID NO: 450335 - DNA, 38 bp, Homo sapiens; identical to SEQ ID NO: 219897
  chr20:25605596-25605634
  hypo

SEQ ID NO: 450336 - DNA, 38 bp, Homo sapiens; identical to SEQ ID NO: 275016
  chr20:25605874-25605912
  hypo

SEQ ID NO: 450337 - DNA, 196 bp, Homo sapiens; identical to SEQ ID NO: 219898
  chr20:25971830-25972026
  hypo

SEQ ID NO: 450338 - DNA, 218 bp, Homo sapiens; identical to SEQ ID NO: 275018
  chr20:25972702-25972920
  hypo

SEQ ID NO: 450339 - DNA, 35 bp, Homo sapiens; identical to SEQ ID NO: 275019
  chr20:26062267-26062302
  hypo

SEQ ID NO: 450340 - DNA, 126 bp, Homo sapiens; identical to SEQ ID NO: 294682
  chr20:26190361-26190487
  hypo

SEQ ID NO: 450341 - DNA, 180 bp, Homo sapiens; identical to SEQ ID NO: 219899
  chr20:30134131-30134311
  hypo

SEQ ID NO: 450342 - DNA, 35 bp, Homo sapiens; identical to SEQ ID NO: 275024
  chr20:30174477-30174512
  hypo

SEQ ID NO: 450343 - DNA, 77 bp, Homo sapiens; identical to SEQ ID NO: 275025
  chr20:30181219-30181296
  hypo

SEQ ID NO: 450344 - DNA, 39 bp, Homo sapiens; identical to SEQ ID NO: 275027
  chr20:30306171-30306210
  hypo

SEQ ID NO: 450345 - DNA, 35 bp, Homo sapiens; identical to SEQ ID NO: 219903
  chr20:30334935-30334970
  hypo

SEQ ID NO: 450346 - DNA, 41 bp, Homo sapiens; identical to SEQ ID NO: 219904
  chr20:30468561-30468602
  hypo

SEQ ID NO: 450347 - DNA, 35 bp, Homo sapiens; identical to SEQ ID NO: 275030
  chr20:30521657-30521692
  hypo

SEQ ID NO: 450348 - DNA, 43 bp, Homo sapiens; identical to SEQ ID NO: 294694
  chr20:30583025-30583068
  hypo

SEQ ID NO: 450349 - DNA, 188 bp, Homo sapiens; identical to SEQ ID NO: 219908
  chr20:30720874-30721062
  hypo

SEQ ID NO: 450350 - DNA, 100 bp, Homo sapiens; identical to SEQ ID NO: 275034
  chr20:30753240-30753340
  hypo

SEQ ID NO: 450351 - DNA, 289 bp, Homo sapiens; identical to SEQ ID NO: 275037
  chr20:30810304-30810593
  hypo

SEQ ID NO: 450352 - DNA, 171 bp, Homo sapiens; identical to SEQ ID NO: 275039
  chr20:30915287-30915458
  hypo

SEQ ID NO: 450353 - DNA, 37 bp, Homo sapiens; identical to SEQ ID NO: 219909
  chr20:30935781-30935818
  hypo

SEQ ID NO: 450354 - DNA, 83 bp, Homo sapiens; identical to SEQ ID NO: 205766
  chr20:30954186-30954269
  hypo

SEQ ID NO: 450355 - DNA, 109 bp, Homo sapiens; identical to SEQ ID NO: 205767
  chr20:30956817-30956926
  hypo

SEQ ID NO: 450356 - DNA, 386 bp, Homo sapiens; identical to SEQ ID NO: 205768
  chr20:30959966-30960352
  hypo

SEQ ID NO: 450357 - DNA, 295 bp, Homo sapiens; identical to SEQ ID NO: 205769
  chr20:31015930-31016225
  hypo

SEQ ID NO: 450358 - DNA, 104 bp, Homo sapiens; identical to SEQ ID NO: 205770
  chr20:31017140-31017244
  hypo

SEQ ID NO: 450359 - DNA, 153 bp, Homo sapiens; identical to SEQ ID NO: 205771
  chr20:31017703-31017856
  hypo

SEQ ID NO: 450360 - DNA, 359 bp, Homo sapiens; identical to SEQ ID NO: 205772
  chr20:31019123-31019482
  hypo

SEQ ID NO: 450361 - DNA, 106 bp, Homo sapiens; identical to SEQ ID NO: 205773
  chr20:31020682-31020788
  hypo

SEQ ID NO: 450362 - DNA, 634 bp, Homo sapiens; identical to SEQ ID NO: 205774
  chr20:31021086-31021720
  hypo

SEQ ID NO: 450363 - DNA, 4888 bp, Homo sapiens; identical to SEQ ID NO: 205775
  chr20:31022234-31027122
  hypo

SEQ ID NO: 450364 - DNA, 357 bp, Homo sapiens; identical to SEQ ID NO: 275042
  chr20:31051294-31051651
  hypo

SEQ ID NO: 450365 - DNA, 64 bp, Homo sapiens; identical to SEQ ID NO: 275043
  chr20:31081013-31081077
  hypo

SEQ ID NO: 450366 - DNA, 146 bp, Homo sapiens; identical to SEQ ID NO: 327541
  chr20:31108613-31108759
  hypo

SEQ ID NO: 450367 - DNA, 88 bp, Homo sapiens; identical to SEQ ID NO: 219923
  chr20:31115869-31115957
  hypo

SEQ ID NO: 450368 - DNA, 159 bp, Homo sapiens; identical to SEQ ID NO: 327543
  chr20:31144446-31144605
  hypo

SEQ ID NO: 450369 - DNA, 102 bp, Homo sapiens; identical to SEQ ID NO: 98847
  chr20:31144702-31144804
  hypo

SEQ ID NO: 450370 - DNA, 56 bp, Homo sapiens; identical to SEQ ID NO: 219924
  chr20:31146689-31146745
  hypo

SEQ ID NO: 450371 - DNA, 111 bp, Homo sapiens; identical to SEQ ID NO: 327546
  chr20:31152007-31152118
  hypo

SEQ ID NO: 450372 - DNA, 106 bp, Homo sapiens; identical to SEQ ID NO: 275050
  chr20:31196057-31196163
  hypo

SEQ ID NO: 450373 - DNA, 347 bp, Homo sapiens; identical to SEQ ID NO: 275051
  chr20:31213874-31214221
  hypo

SEQ ID NO: 450374 - DNA, 31 bp, Homo sapiens; identical to SEQ ID NO: 275052
  chr20:31279910-31279941
  hypo

SEQ ID NO: 450375 - DNA, 35 bp, Homo sapiens; identical to SEQ ID NO: 219925
  chr20:31332339-31332374
  hypo

SEQ ID NO: 450376 - DNA, 34 bp, Homo sapiens; identical to SEQ ID NO: 275054
  chr20:31332614-31332648
  hypo

SEQ ID NO: 450377 - DNA, 588 bp, Homo sapiens; identical to SEQ ID NO: 294717
  chr20:31350975-31351563
  hypo

SEQ ID NO: 450378 - DNA, 68 bp, Homo sapiens; identical to SEQ ID NO: 219927
  chr20:31367769-31367837
  hypo

SEQ ID NO: 450379 - DNA, 59 bp, Homo sapiens; identical to SEQ ID NO: 275057
  chr20:31392269-31392328
  hypo

SEQ ID NO: 450380 - DNA, 88 bp, Homo sapiens; identical to SEQ ID NO: 275058
  chr20:31556103-31556191
  hypo

SEQ ID NO: 450381 - DNA, 305 bp, Homo sapiens; identical to SEQ ID NO: 275059
  chr20:31647792-31648097
  hypo

SEQ ID NO: 450382 - DNA, 81 bp, Homo sapiens; identical to SEQ ID NO: 219928
  chr20:31900463-31900544
  hypo

SEQ ID NO: 450383 - DNA, 253 bp, Homo sapiens; identical to SEQ ID NO: 275061
  chr20:31936115-31936368
  hypo

SEQ ID NO: 450384 - DNA, 37 bp, Homo sapiens; identical to SEQ ID NO: 219929
  chr20:32151830-32151867
  hypo

SEQ ID NO: 450385 - DNA, 258 bp, Homo sapiens; identical to SEQ ID NO: 275064
  chr20:32266840-32267098
  hypo

SEQ ID NO: 450386 - DNA, 42 bp, Homo sapiens; identical to SEQ ID NO: 275065
  chr20:32270661-32270703
  hypo

SEQ ID NO: 450387 - DNA, 210 bp, Homo sapiens; identical to SEQ ID NO: 275066
  chr20:32284902-32285112
  hypo

SEQ ID NO: 450388 - DNA, 100 bp, Homo sapiens; identical to SEQ ID NO: 219932
  chr20:32311064-32311164
  hypo

SEQ ID NO: 450389 - DNA, 164 bp, Homo sapiens; identical to SEQ ID NO: 219933
  chr20:32370539-32370703
  hypo

SEQ ID NO: 450390 - DNA, 200 bp, Homo sapiens; identical to SEQ ID NO: 219934
  chr20:32376690-32376890
  hypo

SEQ ID NO: 450391 - DNA, 35 bp, Homo sapiens; identical to SEQ ID NO: 219937
  chr20:32381768-32381803
  hypo

SEQ ID NO: 450392 - DNA, 214 bp, Homo sapiens; identical to SEQ ID NO: 219938
  chr20:32413015-32413229
  hypo

SEQ ID NO: 450393 - DNA, 223 bp, Homo sapiens; identical to SEQ ID NO: 219940
  chr20:32441362-32441585
  hypo

SEQ ID NO: 450394 - DNA, 31 bp, Homo sapiens; identical to SEQ ID NO: 219941
  chr20:32584928-32584959
  hypo

SEQ ID NO: 450395 - DNA, 35 bp, Homo sapiens; identical to SEQ ID NO: 275079
  chr20:32630021-32630056
  hypo

SEQ ID NO: 450396 - DNA, 42 bp, Homo sapiens; identical to SEQ ID NO: 275083
  chr20:32772602-32772644
  hypo

SEQ ID NO: 450397 - DNA, 60 bp, Homo sapiens; identical to SEQ ID NO: 275084
  chr20:32772952-32773012
  hypo

SEQ ID NO: 450398 - DNA, 100 bp, Homo sapiens; identical to SEQ ID NO: 219944
  chr20:33085651-33085751
  hypo

SEQ ID NO: 450399 - DNA, 139 bp, Homo sapiens; identical to SEQ ID NO: 219945
  chr20:33112448-33112587
  hypo

SEQ ID NO: 450400 - DNA, 89 bp, Homo sapiens; identical to SEQ ID NO: 275091
  chr20:33265773-33265862
  hypo

SEQ ID NO: 450401 - DNA, 121 bp, Homo sapiens; identical to SEQ ID NO: 275092
  chr20:33265892-33266013
  hypo

SEQ ID NO: 450402 - DNA, 42 bp, Homo sapiens; identical to SEQ ID NO: 275093
  chr20:33410314-33410356
  hypo

SEQ ID NO: 450403 - DNA, 134 bp, Homo sapiens; identical to SEQ ID NO: 275094
  chr20:33447337-33447471
  hypo

SEQ ID NO: 450404 - DNA, 483 bp, Homo sapiens; identical to SEQ ID NO: 205787
  chr20:33464343-33464826
  hypo

SEQ ID NO: 450405 - DNA, 76 bp, Homo sapiens; identical to SEQ ID NO: 275096
  chr20:33544843-33544919
  hypo

SEQ ID NO: 450406 - DNA, 194 bp, Homo sapiens; identical to SEQ ID NO: 275098
  chr20:33572633-33572827
  hypo

SEQ ID NO: 450407 - DNA, 80 bp, Homo sapiens; identical to SEQ ID NO: 275099
  chr20:33579658-33579738
  hypo

SEQ ID NO: 450408 - DNA, 34 bp, Homo sapiens; identical to SEQ ID NO: 275100
  chr20:33696514-33696548
  hypo

SEQ ID NO: 450409 - DNA, 81 bp, Homo sapiens; identical to SEQ ID NO: 275101
  chr20:33803020-33803101
  hypo

SEQ ID NO: 450410 - DNA, 118 bp, Homo sapiens; identical to SEQ ID NO: 327598
  chr20:33834616-33834734
  hypo

SEQ ID NO: 450411 - DNA, 102 bp, Homo sapiens; identical to SEQ ID NO: 327599
  chr20:33854997-33855099
  hypo

SEQ ID NO: 450412 - DNA, 85 bp, Homo sapiens; identical to SEQ ID NO: 327600
  chr20:33855140-33855225
  hypo

SEQ ID NO: 450413 - DNA, 117 bp, Homo sapiens; identical to SEQ ID NO: 275104
  chr20:33864189-33864306
  hypo

SEQ ID NO: 450414 - DNA, 191 bp, Homo sapiens; identical to SEQ ID NO: 219950
  chr20:34055202-34055393
  hypo

SEQ ID NO: 450415 - DNA, 49 bp, Homo sapiens; identical to SEQ ID NO: 275109
  chr20:34092136-34092185
  hypo

SEQ ID NO: 450416 - DNA, 43 bp, Homo sapiens; identical to SEQ ID NO: 275110
  chr20:34110881-34110924
  hypo

SEQ ID NO: 450417 - DNA, 38 bp, Homo sapiens; identical to SEQ ID NO: 327610
  chr20:34147940-34147978
  hypo

SEQ ID NO: 450418 - DNA, 96 bp, Homo sapiens; identical to SEQ ID NO: 275113
  chr20:34166313-34166409
  hypo

SEQ ID NO: 450419 - DNA, 171 bp, Homo sapiens; identical to SEQ ID NO: 275114
  chr20:34171852-34172023
  hypo

SEQ ID NO: 450420 - DNA, 36 bp, Homo sapiens; identical to SEQ ID NO: 219951
  chr20:34176526-34176562
  hypo

SEQ ID NO: 450421 - DNA, 73 bp, Homo sapiens; identical to SEQ ID NO: 275116
  chr20:34195358-34195431
  hypo

SEQ ID NO: 450422 - DNA, 44 bp, Homo sapiens; identical to SEQ ID NO: 275117
  chr20:34195461-34195505
  hypo

SEQ ID NO: 450423 - DNA, 83 bp, Homo sapiens; identical to SEQ ID NO: 219952
  chr20:34200333-34200416
  hypo

SEQ ID NO: 450424 - DNA, 469 bp, Homo sapiens; identical to SEQ ID NO: 205791
  chr20:34359742-34360211
  hypo

SEQ ID NO: 450425 - DNA, 40 bp, Homo sapiens; identical to SEQ ID NO: 275120
  chr20:34472079-34472119
  hypo

SEQ ID NO: 450426 - DNA, 94 bp, Homo sapiens; identical to SEQ ID NO: 275121
  chr20:34655043-34655137
  hypo

SEQ ID NO: 450427 - DNA, 86 bp, Homo sapiens; identical to SEQ ID NO: 219954
  chr20:34670678-34670764
  hypo

SEQ ID NO: 450428 - DNA, 237 bp, Homo sapiens; identical to SEQ ID NO: 205792
  chr20:34680127-34680364
  hypo

SEQ ID NO: 450429 - DNA, 987 bp, Homo sapiens; identical to SEQ ID NO: 294742
  chr20:34680573-34681560
  hypo

SEQ ID NO: 450430 - DNA, 82 bp, Homo sapiens; identical to SEQ ID NO: 219957
  chr20:35088673-35088755
  hypo

SEQ ID NO: 450431 - DNA, 36 bp, Homo sapiens; identical to SEQ ID NO: 275125
  chr20:35145389-35145425
  hypo

SEQ ID NO: 450432 - DNA, 66 bp, Homo sapiens; identical to SEQ ID NO: 327627
  chr20:35169055-35169121
  hypo

SEQ ID NO: 450433 - DNA, 83 bp, Homo sapiens; identical to SEQ ID NO: 219959
  chr20:35442203-35442286
  hypo

SEQ ID NO: 450434 - DNA, 84 bp, Homo sapiens; identical to SEQ ID NO: 275131
  chr20:35467712-35467796
  hypo

SEQ ID NO: 450435 - DNA, 42 bp, Homo sapiens; identical to SEQ ID NO: 275132
  chr20:35470832-35470874
  hypo

SEQ ID NO: 450436 - DNA, 215 bp, Homo sapiens; identical to SEQ ID NO: 294750
  chr20:35491515-35491730
  hypo

SEQ ID NO: 450437 - DNA, 145 bp, Homo sapiens; identical to SEQ ID NO: 275133
  chr20:35506571-35506716
  hypo

SEQ ID NO: 450438 - DNA, 97 bp, Homo sapiens; identical to SEQ ID NO: 219962
  chr20:35615275-35615372
  hypo

SEQ ID NO: 450439 - DNA, 163 bp, Homo sapiens; identical to SEQ ID NO: 275135
  chr20:35753148-35753311
  hypo

SEQ ID NO: 450440 - DNA, 136 bp, Homo sapiens; identical to SEQ ID NO: 219964
  chr20:35812619-35812755
  hypo

SEQ ID NO: 450441 - DNA, 87 bp, Homo sapiens; identical to SEQ ID NO: 219965
  chr20:35833168-35833255
  hypo

SEQ ID NO: 450442 - DNA, 93 bp, Homo sapiens; identical to SEQ ID NO: 275139
  chr20:35860693-35860786
  hypo

SEQ ID NO: 450443 - DNA, 67 bp, Homo sapiens; identical to SEQ ID NO: 219966
  chr20:35874023-35874090
  hypo

SEQ ID NO: 450444 - DNA, 303 bp, Homo sapiens; identical to SEQ ID NO: 327643
  chr20:35874236-35874539
  hypo

SEQ ID NO: 450445 - DNA, 321 bp, Homo sapiens; identical to SEQ ID NO: 275141
  chr20:35907656-35907977
  hypo

SEQ ID NO: 450446 - DNA, 137 bp, Homo sapiens; identical to SEQ ID NO: 275143
  chr20:35925946-35926083
  hypo

SEQ ID NO: 450447 - DNA, 102 bp, Homo sapiens; identical to SEQ ID NO: 275145
  chr20:35940186-35940288
  hypo

SEQ ID NO: 450448 - DNA, 282 bp, Homo sapiens; identical to SEQ ID NO: 275146
  chr20:35956277-35956559
  hypo

SEQ ID NO: 450449 - DNA, 123 bp, Homo sapiens; identical to SEQ ID NO: 219969
  chr20:35987182-35987305
  hypo

SEQ ID NO: 450450 - DNA, 34 bp, Homo sapiens; identical to SEQ ID NO: 219970
  chr20:36151088-36151122
  hypo

SEQ ID NO: 450451 - DNA, 346 bp, Homo sapiens; identical to SEQ ID NO: 327651
  chr20:36151161-36151507
  hypo

SEQ ID NO: 450452 - DNA, 50 bp, Homo sapiens; identical to SEQ ID NO: 275153
  chr20:36532325-36532375
  hypo

SEQ ID NO: 450453 - DNA, 208 bp, Homo sapiens; identical to SEQ ID NO: 275154
  chr20:36572548-36572756
  hypo

SEQ ID NO: 450454 - DNA, 205 bp, Homo sapiens; identical to SEQ ID NO: 275156
  chr20:36753455-36753660
  hypo

SEQ ID NO: 450455 - DNA, 279 bp, Homo sapiens; identical to SEQ ID NO: 219976
  chr20:36770537-36770816
  hypo

SEQ ID NO: 450456 - DNA, 293 bp, Homo sapiens; identical to SEQ ID NO: 294758
  chr20:36774950-36775243
  hypo

SEQ ID NO: 450457 - DNA, 160 bp, Homo sapiens; identical to SEQ ID NO: 275164
  chr20:36779359-36779519
  hypo

SEQ ID NO: 450458 - DNA, 120 bp, Homo sapiens; identical to SEQ ID NO: 219977
  chr20:37036241-37036361
  hypo

SEQ ID NO: 450459 - DNA, 49 bp, Homo sapiens; identical to SEQ ID NO: 219978
  chr20:37054866-37054915
  hypo

SEQ ID NO: 450460 - DNA, 43 bp, Homo sapiens; identical to SEQ ID NO: 219979
  chr20:37114343-37114386
  hypo

SEQ ID NO: 450461 - DNA, 232 bp, Homo sapiens; identical to SEQ ID NO: 275171
  chr20:37536535-37536767
  hypo

SEQ ID NO: 450462 - DNA, 120 bp, Homo sapiens; identical to SEQ ID NO: 219984
  chr20:37540091-37540211
  hypo

SEQ ID NO: 450463 - DNA, 90 bp, Homo sapiens; identical to SEQ ID NO: 327676
  chr20:37549578-37549668
  hypo

SEQ ID NO: 450464 - DNA, 120 bp, Homo sapiens; identical to SEQ ID NO: 275174
  chr20:37588339-37588459
  hypo

SEQ ID NO: 450465 - DNA, 85 bp, Homo sapiens; identical to SEQ ID NO: 275176
  chr20:37622329-37622414
  hypo

SEQ ID NO: 450466 - DNA, 198 bp, Homo sapiens; identical to SEQ ID NO: 275177
  chr20:37632409-37632607
  hypo

SEQ ID NO: 450467 - DNA, 43 bp, Homo sapiens; identical to SEQ ID NO: 219986
  chr20:37632981-37633024
  hypo

SEQ ID NO: 450468 - DNA, 282 bp, Homo sapiens; identical to SEQ ID NO: 275179
  chr20:37646803-37647085
  hypo

SEQ ID NO: 450469 - DNA, 44 bp, Homo sapiens; identical to SEQ ID NO: 219988
  chr20:37659950-37659994
  hypo

SEQ ID NO: 450470 - DNA, 75 bp, Homo sapiens; identical to SEQ ID NO: 275182
  chr20:37671509-37671584
  hypo

SEQ ID NO: 450471 - DNA, 34 bp, Homo sapiens; identical to SEQ ID NO: 275184
  chr20:38483396-38483430
  hypo

SEQ ID NO: 450472 - DNA, 46 bp, Homo sapiens; identical to SEQ ID NO: 327688
  chr20:38809079-38809125
  hypo

SEQ ID NO: 450473 - DNA, 103 bp, Homo sapiens; identical to SEQ ID NO: 275186
  chr20:38888178-38888281
  hypo

SEQ ID NO: 450474 - DNA, 44 bp, Homo sapiens; identical to SEQ ID NO: 275187
  chr20:39054744-39054788
  hypo

SEQ ID NO: 450475 - DNA, 38 bp, Homo sapiens; identical to SEQ ID NO: 275188
  chr20:39076958-39076996
  hypo

SEQ ID NO: 450476 - DNA, 90 bp, Homo sapiens; identical to SEQ ID NO: 275189
  chr20:39436088-39436178
  hypo

SEQ ID NO: 450477 - DNA, 97 bp, Homo sapiens; identical to SEQ ID NO: 275190
  chr20:39632546-39632643
  hypo

SEQ ID NO: 450478 - DNA, 42 bp, Homo sapiens; identical to SEQ ID NO: 219990
  chr20:39672622-39672664
  hypo

SEQ ID NO: 450479 - DNA, 220 bp, Homo sapiens; identical to SEQ ID NO: 275193
  chr20:39791147-39791367
  hypo

SEQ ID NO: 450480 - DNA, 42 bp, Homo sapiens; identical to SEQ ID NO: 219991
  chr20:39831202-39831244
  hypo

SEQ ID NO: 450481 - DNA, 128 bp, Homo sapiens; identical to SEQ ID NO: 219992
  chr20:39989813-39989941
  hypo

SEQ ID NO: 450482 - DNA, 59 bp, Homo sapiens; identical to SEQ ID NO: 413531
  chr20:40020281-40020340
  hypo

SEQ ID NO: 450483 - DNA, 64 bp, Homo sapiens; identical to SEQ ID NO: 275198
  chr20:40161663-40161727
  hypo

SEQ ID NO: 450484 - DNA, 41 bp, Homo sapiens; identical to SEQ ID NO: 275199
  chr20:40352413-40352454
  hypo

SEQ ID NO: 450485 - DNA, 36 bp, Homo sapiens; identical to SEQ ID NO: 275200
  chr20:41967667-41967703
  hypo

SEQ ID NO: 450486 - DNA, 130 bp, Homo sapiens; identical to SEQ ID NO: 275202
  chr20:42142557-42142687
  hypo

SEQ ID NO: 450487 - DNA, 143 bp, Homo sapiens; identical to SEQ ID NO: 219995
  chr20:42192721-42192864
  hypo

SEQ ID NO: 450488 - DNA, 91 bp, Homo sapiens; identical to SEQ ID NO: 219996
  chr20:42193732-42193823
  hypo

SEQ ID NO: 450489 - DNA, 120 bp, Homo sapiens; identical to SEQ ID NO: 275206
  chr20:42215917-42216037
  hypo

SEQ ID NO: 450490 - DNA, 169 bp, Homo sapiens; identical to SEQ ID NO: 219997
  chr20:42314843-42315012
  hypo

SEQ ID NO: 450491 - DNA, 109 bp, Homo sapiens; identical to SEQ ID NO: 327711
  chr20:42345995-42346104
  hypo

SEQ ID NO: 450492 - DNA, 122 bp, Homo sapiens; identical to SEQ ID NO: 327712
  chr20:42346134-42346256
  hypo

SEQ ID NO: 450493 - DNA, 54 bp, Homo sapiens; identical to SEQ ID NO: 275210
  chr20:42712323-42712377
  hypo

SEQ ID NO: 450494 - DNA, 42 bp, Homo sapiens; identical to SEQ ID NO: 275211
  chr20:42774216-42774258
  hypo

SEQ ID NO: 450495 - DNA, 96 bp, Homo sapiens; identical to SEQ ID NO: 275213
  chr20:42826253-42826349
  hypo

SEQ ID NO: 450496 - DNA, 158 bp, Homo sapiens; identical to SEQ ID NO: 394791
  chr20:42833336-42833494
  hypo

SEQ ID NO: 450497 - DNA, 113 bp, Homo sapiens; identical to SEQ ID NO: 275215
  chr20:42885825-42885938
  hypo

SEQ ID NO: 450498 - DNA, 156 bp, Homo sapiens; identical to SEQ ID NO: 219999
  chr20:42924601-42924757
  hypo

SEQ ID NO: 450499 - DNA, 238 bp, Homo sapiens; identical to SEQ ID NO: 220000
  chr20:42965898-42966136
  hypo

SEQ ID NO: 450500 - DNA, 37 bp, Homo sapiens; identical to SEQ ID NO: 275219
  chr20:42980255-42980292
  hypo

SEQ ID NO: 450501 - DNA, 195 bp, Homo sapiens; identical to SEQ ID NO: 275220
  chr20:43019103-43019298
  hypo

SEQ ID NO: 450502 - DNA, 85 bp, Homo sapiens; identical to SEQ ID NO: 327724
  chr20:43052653-43052738
  hypo

SEQ ID NO: 450503 - DNA, 40 bp, Homo sapiens; identical to SEQ ID NO: 275222
  chr20:43154801-43154841
  hypo

SEQ ID NO: 450504 - DNA, 154 bp, Homo sapiens; identical to SEQ ID NO: 275223
  chr20:43219720-43219874
  hypo

SEQ ID NO: 450505 - DNA, 165 bp, Homo sapiens; identical to SEQ ID NO: 275224
  chr20:43243175-43243340
  hypo

SEQ ID NO: 450506 - DNA, 83 bp, Homo sapiens; identical to SEQ ID NO: 275225
  chr20:43329106-43329189
  hypo

SEQ ID NO: 450507 - DNA, 199 bp, Homo sapiens; identical to SEQ ID NO: 275226
  chr20:43356086-43356285
  hypo

SEQ ID NO: 450508 - DNA, 222 bp, Homo sapiens; identical to SEQ ID NO: 275227
  chr20:43465519-43465741
  hypo

SEQ ID NO: 450509 - DNA, 135 bp, Homo sapiens; identical to SEQ ID NO: 275228
  chr20:43530111-43530246
  hypo

SEQ ID NO: 450510 - DNA, 199 bp, Homo sapiens; identical to SEQ ID NO: 275229
  chr20:43568748-43568947
  hypo

SEQ ID NO: 450511 - DNA, 52 bp, Homo sapiens; identical to SEQ ID NO: 275230
  chr20:43587085-43587137
  hypo

SEQ ID NO: 450512 - DNA, 101 bp, Homo sapiens; identical to SEQ ID NO: 275231
  chr20:43660156-43660257
  hypo

SEQ ID NO: 450513 - DNA, 31 bp, Homo sapiens; identical to SEQ ID NO: 220001
  chr20:43717047-43717078
  hypo

SEQ ID NO: 450514 - DNA, 227 bp, Homo sapiens; identical to SEQ ID NO: 294798
  chr20:43726868-43727095
  hypo

SEQ ID NO: 450515 - DNA, 138 bp, Homo sapiens; identical to SEQ ID NO: 275234
  chr20:43977555-43977693
  hypo

SEQ ID NO: 450516 - DNA, 261 bp, Homo sapiens; identical to SEQ ID NO: 327740
  chr20:44005912-44006173
  hypo

SEQ ID NO: 450517 - DNA, 46 bp, Homo sapiens; identical to SEQ ID NO: 327741
  chr20:44006209-44006255
  hypo

SEQ ID NO: 450518 - DNA, 73 bp, Homo sapiens; identical to SEQ ID NO: 226157
  chr20:44462767-44462840
  hypo

SEQ ID NO: 450519 - DNA, 188 bp, Homo sapiens; identical to SEQ ID NO: 275236
  chr20:44463585-44463773
  hypo

SEQ ID NO: 450520 - DNA, 77 bp, Homo sapiens; identical to SEQ ID NO: 220004
  chr20:44469456-44469533
  hypo

SEQ ID NO: 450521 - DNA, 41 bp, Homo sapiens; identical to SEQ ID NO: 220005
  chr20:44502012-44502053
  hypo

SEQ ID NO: 450522 - DNA, 77 bp, Homo sapiens; identical to SEQ ID NO: 294810
  chr20:44519218-44519295
  hypo

SEQ ID NO: 450523 - DNA, 71 bp, Homo sapiens; identical to SEQ ID NO: 294811
  chr20:44540034-44540105
  hypo

SEQ ID NO: 450524 - DNA, 52 bp, Homo sapiens; identical to SEQ ID NO: 294812
  chr20:44540153-44540205
  hypo

SEQ ID NO: 450525 - DNA, 32 bp, Homo sapiens; identical to SEQ ID NO: 275239
  chr20:44560012-44560044
  hypo

SEQ ID NO: 450526 - DNA, 34 bp, Homo sapiens; identical to SEQ ID NO: 220006
  chr20:44560415-44560449
  hypo

SEQ ID NO: 450527 - DNA, 100 bp, Homo sapiens; identical to SEQ ID NO: 275241
  chr20:44573535-44573635
  hypo

SEQ ID NO: 450528 - DNA, 111 bp, Homo sapiens; identical to SEQ ID NO: 275242
  chr20:44574035-44574146
  hypo

SEQ ID NO: 450529 - DNA, 132 bp, Homo sapiens; identical to SEQ ID NO: 275243
  chr20:44578453-44578585
  hypo

SEQ ID NO: 450530 - DNA, 46 bp, Homo sapiens; identical to SEQ ID NO: 220007
  chr20:44601783-44601829
  hypo

SEQ ID NO: 450531 - DNA, 169 bp, Homo sapiens; identical to SEQ ID NO: 275246
  chr20:44707476-44707645
  hypo

SEQ ID NO: 450532 - DNA, 98 bp, Homo sapiens; identical to SEQ ID NO: 275247
  chr20:44707992-44708090
  hypo

SEQ ID NO: 450533 - DNA, 120 bp, Homo sapiens; identical to SEQ ID NO: 275248
  chr20:44720742-44720862
  hypo

SEQ ID NO: 450534 - DNA, 80 bp, Homo sapiens; identical to SEQ ID NO: 327760
  chr20:44893696-44893776
  hypo

SEQ ID NO: 450535 - DNA, 166 bp, Homo sapiens; identical to SEQ ID NO: 205826
  chr20:44935840-44936006
  hypo

SEQ ID NO: 450536 - DNA, 76 bp, Homo sapiens; identical to SEQ ID NO: 220011
  chr20:44978787-44978863
  hypo

SEQ ID NO: 450537 - DNA, 157 bp, Homo sapiens; identical to SEQ ID NO: 275251
  chr20:44982233-44982390
  hypo

SEQ ID NO: 450538 - DNA, 109 bp, Homo sapiens; identical to SEQ ID NO: 275252
  chr20:45242089-45242198
  hypo

SEQ ID NO: 450539 - DNA, 128 bp, Homo sapiens; identical to SEQ ID NO: 275254
  chr20:45343199-45343327
  hypo

SEQ ID NO: 450540 - DNA, 121 bp, Homo sapiens; identical to SEQ ID NO: 275255
  chr20:45380533-45380654
  hypo

SEQ ID NO: 450541 - DNA, 51 bp, Homo sapiens; identical to SEQ ID NO: 294830
  chr20:45523120-45523171
  hypo

SEQ ID NO: 450542 - DNA, 66 bp, Homo sapiens; identical to SEQ ID NO: 275256
  chr20:45628462-45628528
  hypo

SEQ ID NO: 450543 - DNA, 112 bp, Homo sapiens; identical to SEQ ID NO: 275257
  chr20:45803228-45803340
  hypo

SEQ ID NO: 450544 - DNA, 32 bp, Homo sapiens; identical to SEQ ID NO: 275258
  chr20:45829044-45829076
  hypo

SEQ ID NO: 450545 - DNA, 196 bp, Homo sapiens; identical to SEQ ID NO: 220014
  chr20:45837756-45837952
  hypo

SEQ ID NO: 450546 - DNA, 69 bp, Homo sapiens; identical to SEQ ID NO: 275261
  chr20:45878125-45878194
  hypo

SEQ ID NO: 450547 - DNA, 40 bp, Homo sapiens; identical to SEQ ID NO: 220015
  chr20:45880361-45880401
  hypo

SEQ ID NO: 450548 - DNA, 107 bp, Homo sapiens; identical to SEQ ID NO: 275263
  chr20:45885508-45885615
  hypo

SEQ ID NO: 450549 - DNA, 33 bp, Homo sapiens; identical to SEQ ID NO: 275264
  chr20:45908164-45908197
  hypo

SEQ ID NO: 450550 - DNA, 100 bp, Homo sapiens; identical to SEQ ID NO: 275265
  chr20:45938702-45938802
  hypo

SEQ ID NO: 450551 - DNA, 47 bp, Homo sapiens; identical to SEQ ID NO: 220016
  chr20:45949054-45949101
  hypo

SEQ ID NO: 450552 - DNA, 36 bp, Homo sapiens; identical to SEQ ID NO: 220017
  chr20:45968504-45968540
  hypo

SEQ ID NO: 450553 - DNA, 120 bp, Homo sapiens; identical to SEQ ID NO: 220018
  chr20:46011002-46011122
  hypo

SEQ ID NO: 450554 - DNA, 102 bp, Homo sapiens; identical to SEQ ID NO: 327783
  chr20:46013661-46013763
  hypo

SEQ ID NO: 450555 - DNA, 31 bp, Homo sapiens; identical to SEQ ID NO: 275270
  chr20:46175277-46175308
  hypo

SEQ ID NO: 450556 - DNA, 252 bp, Homo sapiens; identical to SEQ ID NO: 275272
  chr20:46305160-46305412
  hypo

SEQ ID NO: 450557 - DNA, 140 bp, Homo sapiens; identical to SEQ ID NO: 327787
  chr20:46315385-46315525
  hypo

SEQ ID NO: 450558 - DNA, 121 bp, Homo sapiens; identical to SEQ ID NO: 275275
  chr20:46390913-46391034
  hypo

SEQ ID NO: 450559 - DNA, 140 bp, Homo sapiens; identical to SEQ ID NO: 275276
  chr20:46429634-46429774
  hypo

SEQ ID NO: 450560 - DNA, 59 bp, Homo sapiens; identical to SEQ ID NO: 275277
  chr20:46489240-46489299
  hypo

SEQ ID NO: 450561 - DNA, 74 bp, Homo sapiens; identical to SEQ ID NO: 327793
  chr20:46798550-46798624
  hypo

SEQ ID NO: 450562 - DNA, 207 bp, Homo sapiens; identical to SEQ ID NO: 275280
  chr20:46846106-46846313
  hypo

SEQ ID NO: 450563 - DNA, 105 bp, Homo sapiens; identical to SEQ ID NO: 275281
  chr20:46888889-46888994
  hypo

SEQ ID NO: 450564 - DNA, 143 bp, Homo sapiens; identical to SEQ ID NO: 327797
  chr20:46972101-46972244
  hypo

SEQ ID NO: 450565 - DNA, 84 bp, Homo sapiens; identical to SEQ ID NO: 275283
  chr20:47027449-47027533
  hypo

SEQ ID NO: 450566 - DNA, 260 bp, Homo sapiens; identical to SEQ ID NO: 275284
  chr20:47117551-47117811
  hypo

SEQ ID NO: 450567 - DNA, 46 bp, Homo sapiens; identical to SEQ ID NO: 275286
  chr20:47268239-47268285
  hypo

SEQ ID NO: 450568 - DNA, 36 bp, Homo sapiens; identical to SEQ ID NO: 327801
  chr20:47273537-47273573
  hypo

SEQ ID NO: 450569 - DNA, 76 bp, Homo sapiens; identical to SEQ ID NO: 327802
  chr20:47273603-47273679
  hypo

SEQ ID NO: 450570 - DNA, 155 bp, Homo sapiens; identical to SEQ ID NO: 275290
  chr20:47490312-47490467
  hypo

SEQ ID NO: 450571 - DNA, 43 bp, Homo sapiens; identical to SEQ ID NO: 275291
  chr20:47563131-47563174
  hypo

SEQ ID NO: 450572 - DNA, 219 bp, Homo sapiens; identical to SEQ ID NO: 275292
  chr20:47659758-47659977
  hypo

SEQ ID NO: 450573 - DNA, 120 bp, Homo sapiens; identical to SEQ ID NO: 275294
  chr20:47698961-47699081
  hypo

SEQ ID NO: 450574 - DNA, 157 bp, Homo sapiens; identical to SEQ ID NO: 275296
  chr20:47713759-47713916
  hypo

SEQ ID NO: 450575 - DNA, 38 bp, Homo sapiens; identical to SEQ ID NO: 220023
  chr20:47799076-47799114
  hypo

SEQ ID NO: 450576 - DNA, 31 bp, Homo sapiens; identical to SEQ ID NO: 275300
  chr20:47805438-47805469
  hypo

SEQ ID NO: 450577 - DNA, 67 bp, Homo sapiens; identical to SEQ ID NO: 275303
  chr20:47845272-47845339
  hypo

SEQ ID NO: 450578 - DNA, 272 bp, Homo sapiens; identical to SEQ ID NO: 275304
  chr20:47865551-47865823
  hypo

SEQ ID NO: 450579 - DNA, 105 bp, Homo sapiens; identical to SEQ ID NO: 275306
  chr20:48124419-48124524
  hypo

SEQ ID NO: 450580 - DNA, 97 bp, Homo sapiens; identical to SEQ ID NO: 226172
  chr20:48194980-48195077
  hypo

SEQ ID NO: 450581 - DNA, 229 bp, Homo sapiens; identical to SEQ ID NO: 275307
  chr20:48209645-48209874
  hypo

SEQ ID NO: 450582 - DNA, 99 bp, Homo sapiens; identical to SEQ ID NO: 327824
  chr20:48252796-48252895
  hypo

SEQ ID NO: 450583 - DNA, 122 bp, Homo sapiens; identical to SEQ ID NO: 220026
  chr20:48259015-48259137
  hypo

SEQ ID NO: 450584 - DNA, 76 bp, Homo sapiens; identical to SEQ ID NO: 220027
  chr20:48300266-48300342
  hypo

SEQ ID NO: 450585 - DNA, 120 bp, Homo sapiens; identical to SEQ ID NO: 275312
  chr20:48395183-48395303
  hypo

SEQ ID NO: 450586 - DNA, 211 bp, Homo sapiens; identical to SEQ ID NO: 275313
  chr20:48477265-48477476
  hypo

SEQ ID NO: 450587 - DNA, 114 bp, Homo sapiens; identical to SEQ ID NO: 275317
  chr20:48520118-48520232
  hypo

SEQ ID NO: 450588 - DNA, 39 bp, Homo sapiens; identical to SEQ ID NO: 275319
  chr20:48549957-48549996
  hypo

SEQ ID NO: 450589 - DNA, 42 bp, Homo sapiens; identical to SEQ ID NO: 220030
  chr20:48673854-48673896
  hypo

SEQ ID NO: 450590 - DNA, 120 bp, Homo sapiens; identical to SEQ ID NO: 220031
  chr20:48707851-48707971
  hypo

SEQ ID NO: 450591 - DNA, 93 bp, Homo sapiens; identical to SEQ ID NO: 220032
  chr20:48720826-48720919
  hypo

SEQ ID NO: 450592 - DNA, 141 bp, Homo sapiens; identical to SEQ ID NO: 275324
  chr20:48744175-48744316
  hypo

SEQ ID NO: 450593 - DNA, 231 bp, Homo sapiens; identical to SEQ ID NO: 275325
  chr20:48755328-48755559
  hypo

SEQ ID NO: 450594 - DNA, 50 bp, Homo sapiens; identical to SEQ ID NO: 327843
  chr20:48767181-48767231
  hypo

SEQ ID NO: 450595 - DNA, 42 bp, Homo sapiens; identical to SEQ ID NO: 275328
  chr20:48791873-48791915
  hypo

SEQ ID NO: 450596 - DNA, 39 bp, Homo sapiens; identical to SEQ ID NO: 275329
  chr20:48853284-48853323
  hypo

SEQ ID NO: 450597 - DNA, 49 bp, Homo sapiens; identical to SEQ ID NO: 275330
  chr20:48860989-48861038
  hypo

SEQ ID NO: 450598 - DNA, 47 bp, Homo sapiens; identical to SEQ ID NO: 327848
  chr20:48863409-48863456
  hypo

SEQ ID NO: 450599 - DNA, 79 bp, Homo sapiens; identical to SEQ ID NO: 275332
  chr20:48868294-48868373
  hypo

SEQ ID NO: 450600 - DNA, 42 bp, Homo sapiens; identical to SEQ ID NO: 275333
  chr20:48936571-48936613
  hypo

SEQ ID NO: 450601 - DNA, 140 bp, Homo sapiens; identical to SEQ ID NO: 275334
  chr20:48968284-48968424
  hypo

SEQ ID NO: 450602 - DNA, 87 bp, Homo sapiens; identical to SEQ ID NO: 275335
  chr20:48974138-48974225
  hypo

SEQ ID NO: 450603 - DNA, 54 bp, Homo sapiens; identical to SEQ ID NO: 275336
  chr20:49008038-49008092
  hypo

SEQ ID NO: 450604 - DNA, 98 bp, Homo sapiens; identical to SEQ ID NO: 275337
  chr20:49046546-49046644
  hypo

SEQ ID NO: 450605 - DNA, 65 bp, Homo sapiens; identical to SEQ ID NO: 220034
  chr20:49046944-49047009
  hypo

SEQ ID NO: 450606 - DNA, 141 bp, Homo sapiens; identical to SEQ ID NO: 275339
  chr20:49150322-49150463
  hypo

SEQ ID NO: 450607 - DNA, 144 bp, Homo sapiens; identical to SEQ ID NO: 220035
  chr20:49197043-49197187
  hypo

SEQ ID NO: 450608 - DNA, 204 bp, Homo sapiens; identical to SEQ ID NO: 220036
  chr20:49203141-49203345
  hypo

SEQ ID NO: 450609 - DNA, 125 bp, Homo sapiens; identical to SEQ ID NO: 220037
  chr20:49204054-49204179
  hypo

SEQ ID NO: 450610 - DNA, 313 bp, Homo sapiens; identical to SEQ ID NO: 220038
  chr20:49204449-49204762
  hypo

SEQ ID NO: 450611 - DNA, 81 bp, Homo sapiens; identical to SEQ ID NO: 327864
  chr20:49210377-49210458
  hypo

SEQ ID NO: 450612 - DNA, 50 bp, Homo sapiens; identical to SEQ ID NO: 327865
  chr20:49210488-49210538
  hypo

SEQ ID NO: 450613 - DNA, 42 bp, Homo sapiens; identical to SEQ ID NO: 275347
  chr20:49214096-49214138
  hypo

SEQ ID NO: 450614 - DNA, 108 bp, Homo sapiens
  chr20:49223638-49223746
  hypo
gttcaagtctttgttcaaaatgccagggacttggacaactcattgtcaagaccctccaccagtaacaactggacacccccagttagaggcccctttgagaagctcagc

SEQ ID NO: 450615 - DNA, 99 bp, Homo sapiens; identical to SEQ ID NO: 220043
  chr20:49230488-49230587
  hypo

SEQ ID NO: 450616 - DNA, 101 bp, Homo sapiens; identical to SEQ ID NO: 220046
  chr20:49244321-49244422
  hypo

SEQ ID NO: 450617 - DNA, 150 bp, Homo sapiens; identical to SEQ ID NO: 220048
  chr20:49264294-49264444
  hypo

SEQ ID NO: 450618 - DNA, 203 bp, Homo sapiens; identical to SEQ ID NO: 220049
  chr20:49282236-49282439
  hypo

SEQ ID NO: 450619 - DNA, 180 bp, Homo sapiens; identical to SEQ ID NO: 275362
  chr20:49289683-49289863
  hypo

SEQ ID NO: 450620 - DNA, 378 bp, Homo sapiens; identical to SEQ ID NO: 275363
  chr20:49290277-49290655
  hypo

SEQ ID NO: 450621 - DNA, 217 bp, Homo sapiens; identical to SEQ ID NO: 275364
  chr20:49294480-49294697
  hypo

SEQ ID NO: 450622 - DNA, 76 bp, Homo sapiens; identical to SEQ ID NO: 275365
  chr20:49302564-49302640
  hypo

SEQ ID NO: 450623 - DNA, 90 bp, Homo sapiens; identical to SEQ ID NO: 275366
  chr20:49318873-49318963
  hypo

SEQ ID NO: 450624 - DNA, 31 bp, Homo sapiens; identical to SEQ ID NO: 220051
  chr20:49323815-49323846
  hypo

SEQ ID NO: 450625 - DNA, 76 bp, Homo sapiens; identical to SEQ ID NO: 220052
  chr20:49331494-49331570
  hypo

SEQ ID NO: 450626 - DNA, 120 bp, Homo sapiens; identical to SEQ ID NO: 327886
  chr20:49345551-49345671
  hypo

SEQ ID NO: 450627 - DNA, 43 bp, Homo sapiens; identical to SEQ ID NO: 275371
  chr20:49355686-49355729
  hypo

SEQ ID NO: 450628 - DNA, 69 bp, Homo sapiens; identical to SEQ ID NO: 220053
  chr20:49406843-49406912
  hypo

SEQ ID NO: 450629 - DNA, 193 bp, Homo sapiens; identical to SEQ ID NO: 275377
  chr20:49467237-49467430
  hypo

SEQ ID NO: 450630 - DNA, 77 bp, Homo sapiens; identical to SEQ ID NO: 275378
  chr20:49468873-49468950
  hypo

SEQ ID NO: 450631 - DNA, 480 bp, Homo sapiens; identical to SEQ ID NO: 275379
  chr20:49487403-49487883
  hypo

SEQ ID NO: 450632 - DNA, 33 bp, Homo sapiens; identical to SEQ ID NO: 220054
  chr20:49556446-49556479
  hypo

SEQ ID NO: 450633 - DNA, 105 bp, Homo sapiens; identical to SEQ ID NO: 275381
  chr20:49620547-49620652
  hypo

SEQ ID NO: 450634 - DNA, 459 bp, Homo sapiens; identical to SEQ ID NO: 275382
  chr20:49620878-49621337
  hypo

SEQ ID NO: 450635 - DNA, 93 bp, Homo sapiens; identical to SEQ ID NO: 327895
  chr20:49948210-49948303
  hypo

SEQ ID NO: 450636 - DNA, 59 bp, Homo sapiens; identical to SEQ ID NO: 327896
  chr20:49948333-49948392
  hypo

SEQ ID NO: 450637 - DNA, 117 bp, Homo sapiens; identical to SEQ ID NO: 220055
  chr20:50084694-50084811
  hypo

SEQ ID NO: 450638 - DNA, 60 bp, Homo sapiens; identical to SEQ ID NO: 275386
  chr20:50104487-50104547
  hypo

SEQ ID NO: 450639 - DNA, 413 bp, Homo sapiens; identical to SEQ ID NO: 275387
  chr20:50150222-50150635
  hypo

SEQ ID NO: 450640 - DNA, 367 bp, Homo sapiens; identical to SEQ ID NO: 275388
  chr20:50199790-50200157
  hypo

SEQ ID NO: 450641 - DNA, 79 bp, Homo sapiens; identical to SEQ ID NO: 275390
  chr20:50213712-50213791
  hypo

SEQ ID NO: 450642 - DNA, 200 bp, Homo sapiens; identical to SEQ ID NO: 275391
  chr20:50293891-50294091
  hypo

SEQ ID NO: 450643 - DNA, 31 bp, Homo sapiens; identical to SEQ ID NO: 220056
  chr20:50326111-50326142
  hypo

SEQ ID NO: 450644 - DNA, 102 bp, Homo sapiens; identical to SEQ ID NO: 220057
  chr20:50337348-50337450
  hypo

SEQ ID NO: 450645 - DNA, 41 bp, Homo sapiens; identical to SEQ ID NO: 220058
  chr20:50346533-50346574
  hypo

SEQ ID NO: 450646 - DNA, 135 bp, Homo sapiens; identical to SEQ ID NO: 220059
  chr20:50378297-50378432
  hypo

SEQ ID NO: 450647 - DNA, 47 bp, Homo sapiens; identical to SEQ ID NO: 327908
  chr20:50378462-50378509
  hypo

SEQ ID NO: 450648 - DNA, 93 bp, Homo sapiens; identical to SEQ ID NO: 220062
  chr20:50390636-50390729
  hypo

SEQ ID NO: 450649 - DNA, 79 bp, Homo sapiens; identical to SEQ ID NO: 220063
  chr20:50405412-50405491
  hypo

SEQ ID NO: 450650 - DNA, 208 bp, Homo sapiens; identical to SEQ ID NO: 275398
  chr20:50406978-50407186
  hypo

SEQ ID NO: 450651 - DNA, 193 bp, Homo sapiens; identical to SEQ ID NO: 220064
  chr20:50407493-50407686
  hypo

SEQ ID NO: 450652 - DNA, 155 bp, Homo sapiens; identical to SEQ ID NO: 220065
  chr20:50407905-50408060
  hypo

SEQ ID NO: 450653 - DNA, 149 bp, Homo sapiens; identical to SEQ ID NO: 220066
  chr20:50408300-50408449
  hypo

SEQ ID NO: 450654 - DNA, 178 bp, Homo sapiens; identical to SEQ ID NO: 275402
  chr20:50408658-50408836
  hypo

SEQ ID NO: 450655 - DNA, 38 bp, Homo sapiens; identical to SEQ ID NO: 275403
  chr20:50411955-50411993
  hypo

SEQ ID NO: 450656 - DNA, 83 bp, Homo sapiens; identical to SEQ ID NO: 327919
  chr20:50419388-50419471
  hypo

SEQ ID NO: 450657 - DNA, 31 bp, Homo sapiens; identical to SEQ ID NO: 220067
  chr20:50430800-50430831
  hypo

SEQ ID NO: 450658 - DNA, 38 bp, Homo sapiens; identical to SEQ ID NO: 220068
  chr20:50441826-50441864
  hypo

SEQ ID NO: 450659 - DNA, 157 bp, Homo sapiens; identical to SEQ ID NO: 275407
  chr20:50451581-50451738
  hypo

SEQ ID NO: 450660 - DNA, 42 bp, Homo sapiens; identical to SEQ ID NO: 275408
  chr20:50591574-50591616
  hypo

SEQ ID NO: 450661 - DNA, 300 bp, Homo sapiens; identical to SEQ ID NO: 275409
  chr20:50602381-50602681
  hypo

SEQ ID NO: 450662 - DNA, 200 bp, Homo sapiens; identical to SEQ ID NO: 275410
  chr20:50633365-50633565
  hypo

SEQ ID NO: 450663 - DNA, 34 bp, Homo sapiens; identical to SEQ ID NO: 220070
  chr20:50805266-50805300
  hypo

SEQ ID NO: 450664 - DNA, 120 bp, Homo sapiens; identical to SEQ ID NO: 220071
  chr20:50805540-50805660
  hypo

SEQ ID NO: 450665 - DNA, 33 bp, Homo sapiens; identical to SEQ ID NO: 220072
  chr20:50805900-50805933
  hypo

SEQ ID NO: 450666 - DNA, 42 bp, Homo sapiens; identical to SEQ ID NO: 275414
  chr20:51794668-51794710
  hypo

SEQ ID NO: 450667 - DNA, 139 bp, Homo sapiens; identical to SEQ ID NO: 275415
  chr20:51870537-51870676
  hypo

SEQ ID NO: 450668 - DNA, 43 bp, Homo sapiens; identical to SEQ ID NO: 220073
  chr20:52179947-52179990
  hypo

SEQ ID NO: 450669 - DNA, 338 bp, Homo sapiens; identical to SEQ ID NO: 275417
  chr20:52198075-52198413
  hypo

SEQ ID NO: 450670 - DNA, 166 bp, Homo sapiens; identical to SEQ ID NO: 205855
  chr20:52209197-52209363
  hypo

SEQ ID NO: 450671 - DNA, 32 bp, Homo sapiens; identical to SEQ ID NO: 220075
  chr20:52281658-52281690
  hypo

SEQ ID NO: 450672 - DNA, 39 bp, Homo sapiens; identical to SEQ ID NO: 275421
  chr20:52305003-52305042
  hypo

SEQ ID NO: 450673 - DNA, 77 bp, Homo sapiens; identical to SEQ ID NO: 220076
  chr20:52311776-52311853
  hypo

SEQ ID NO: 450674 - DNA, 182 bp, Homo sapiens; identical to SEQ ID NO: 275425
  chr20:52481243-52481425
  hypo

SEQ ID NO: 450675 - DNA, 259 bp, Homo sapiens; identical to SEQ ID NO: 275426
  chr20:52538411-52538670
  hypo

SEQ ID NO: 450676 - DNA, 216 bp, Homo sapiens; identical to SEQ ID NO: 275427
  chr20:52685953-52686169
  hypo

SEQ ID NO: 450677 - DNA, 161 bp, Homo sapiens; identical to SEQ ID NO: 275428
  chr20:52758814-52758975
  hypo

SEQ ID NO: 450678 - DNA, 145 bp, Homo sapiens; identical to SEQ ID NO: 327944
  chr20:52773806-52773951
  hypo

SEQ ID NO: 450679 - DNA, 70 bp, Homo sapiens; identical to SEQ ID NO: 275431
  chr20:54681487-54681557
  hypo

SEQ ID NO: 450680 - DNA, 38 bp, Homo sapiens; identical to SEQ ID NO: 275432
  chr20:54747158-54747196
  hypo

SEQ ID NO: 450681 - DNA, 112 bp, Homo sapiens; identical to SEQ ID NO: 327947
  chr20:54880344-54880456
  hypo

SEQ ID NO: 450682 - DNA, 42 bp, Homo sapiens; identical to SEQ ID NO: 275434
  chr20:54931802-54931844
  hypo

SEQ ID NO: 450683 - DNA, 393 bp, Homo sapiens; identical to SEQ ID NO: 205861
  chr20:54934126-54934519
  hypo

SEQ ID NO: 450684 - DNA, 128 bp, Homo sapiens; identical to SEQ ID NO: 220079
  chr20:54944844-54944972
  hypo

SEQ ID NO: 450685 - DNA, 34 bp, Homo sapiens; identical to SEQ ID NO: 327952
  chr20:55071606-55071640
  hypo

SEQ ID NO: 450686 - DNA, 50 bp, Homo sapiens; identical to SEQ ID NO: 275438
  chr20:55091876-55091926
  hypo

SEQ ID NO: 450687 - DNA, 113 bp, Homo sapiens; identical to SEQ ID NO: 275439
  chr20:55667945-55668058
  hypo

SEQ ID NO: 450688 - DNA, 32 bp, Homo sapiens; identical to SEQ ID NO: 275440
  chr20:55668445-55668477
  hypo

SEQ ID NO: 450689 - DNA, 140 bp, Homo sapiens; identical to SEQ ID NO: 327958
  chr20:55685233-55685373
  hypo

SEQ ID NO: 450690 - DNA, 49 bp, Homo sapiens; identical to SEQ ID NO: 327959
  chr20:55685803-55685852
  hypo

SEQ ID NO: 450691 - DNA, 152 bp, Homo sapiens; identical to SEQ ID NO: 275442
  chr20:55692780-55692932
  hypo

SEQ ID NO: 450692 - DNA, 240 bp, Homo sapiens; identical to SEQ ID NO: 275443
  chr20:55740618-55740858
  hypo

SEQ ID NO: 450693 - DNA, 171 bp, Homo sapiens; identical to SEQ ID NO: 275444
  chr20:55742062-55742233
  hypo

SEQ ID NO: 450694 - DNA, 122 bp, Homo sapiens; identical to SEQ ID NO: 275445
  chr20:55748184-55748306
  hypo

SEQ ID NO: 450695 - DNA, 39 bp, Homo sapiens; identical to SEQ ID NO: 275446
  chr20:55797062-55797101
  hypo

SEQ ID NO: 450696 - DNA, 229 bp, Homo sapiens; identical to SEQ ID NO: 275447
  chr20:55904350-55904579
  hypo

SEQ ID NO: 450697 - DNA, 45 bp, Homo sapiens; identical to SEQ ID NO: 220082
  chr20:55925556-55925601
  hypo

SEQ ID NO: 450698 - DNA, 37 bp, Homo sapiens; identical to SEQ ID NO: 220083
  chr20:55959339-55959376
  hypo

SEQ ID NO: 450699 - DNA, 145 bp, Homo sapiens; identical to SEQ ID NO: 205870
  chr20:55966824-55966969
  hypo

SEQ ID NO: 450700 - DNA, 71 bp, Homo sapiens; identical to SEQ ID NO: 275452
  chr20:55969232-55969303
  hypo

SEQ ID NO: 450701 - DNA, 218 bp, Homo sapiens; identical to SEQ ID NO: 220085
  chr20:55969522-55969740
  hypo

SEQ ID NO: 450702 - DNA, 165 bp, Homo sapiens; identical to SEQ ID NO: 275454
  chr20:55981561-55981726
  hypo

SEQ ID NO: 450703 - DNA, 62 bp, Homo sapiens; identical to SEQ ID NO: 275455
  chr20:55996755-55996817
  hypo

SEQ ID NO: 450704 - DNA, 104 bp, Homo sapiens; identical to SEQ ID NO: 327975
  chr20:56031298-56031402
  hypo

SEQ ID NO: 450705 - DNA, 274 bp, Homo sapiens; identical to SEQ ID NO: 275458
  chr20:56076054-56076328
  hypo

SEQ ID NO: 450706 - DNA, 205 bp, Homo sapiens; identical to SEQ ID NO: 220087
  chr20:56099534-56099739
  hypo

SEQ ID NO: 450707 - DNA, 119 bp, Homo sapiens; identical to SEQ ID NO: 275460
  chr20:56115074-56115193
  hypo

SEQ ID NO: 450708 - DNA, 155 bp, Homo sapiens; identical to SEQ ID NO: 275462
  chr20:56167908-56168063
  hypo

SEQ ID NO: 450709 - DNA, 148 bp, Homo sapiens; identical to SEQ ID NO: 275463
  chr20:56186966-56187114
  hypo

SEQ ID NO: 450710 - DNA, 103 bp, Homo sapiens; identical to SEQ ID NO: 275464
  chr20:56227531-56227634
  hypo

SEQ ID NO: 450711 - DNA, 649 bp, Homo sapiens; identical to SEQ ID NO: 275465
  chr20:56239140-56239789
  hypo

SEQ ID NO: 450712 - DNA, 102 bp, Homo sapiens; identical to SEQ ID NO: 275466
  chr20:56262196-56262298
  hypo

SEQ ID NO: 450713 - DNA, 145 bp, Homo sapiens; identical to SEQ ID NO: 220089
  chr20:56264917-56265062
  hypo

SEQ ID NO: 450714 - DNA, 38 bp, Homo sapiens; identical to SEQ ID NO: 220090
  chr20:56265326-56265364
  hypo

SEQ ID NO: 450715 - DNA, 89 bp, Homo sapiens; identical to SEQ ID NO: 327987
  chr20:56266027-56266116
  hypo

SEQ ID NO: 450716 - DNA, 140 bp, Homo sapiens; identical to SEQ ID NO: 275470
  chr20:56270430-56270570
  hypo

SEQ ID NO: 450717 - DNA, 95 bp, Homo sapiens; identical to SEQ ID NO: 275472
  chr20:56299650-56299745
  hypo

SEQ ID NO: 450718 - DNA, 77 bp, Homo sapiens; identical to SEQ ID NO: 275473
  chr20:56323232-56323309
  hypo

SEQ ID NO: 450719 - DNA, 67 bp, Homo sapiens; identical to SEQ ID NO: 275474
  chr20:56717706-56717773
  hypo

SEQ ID NO: 450720 - DNA, 224 bp, Homo sapiens; identical to SEQ ID NO: 226188
  chr20:56811736-56811960
  hypo

SEQ ID NO: 450721 - DNA, 35 bp, Homo sapiens; identical to SEQ ID NO: 220095
  chr20:56941012-56941047
  hypo

SEQ ID NO: 450722 - DNA, 154 bp, Homo sapiens; identical to SEQ ID NO: 220097
  chr20:56977720-56977874
  hypo

SEQ ID NO: 450723 - DNA, 33 bp, Homo sapiens; identical to SEQ ID NO: 275482
  chr20:57036551-57036584
  hypo

SEQ ID NO: 450724 - DNA, 185 bp, Homo sapiens; identical to SEQ ID NO: 275483
  chr20:57037020-57037205
  hypo

SEQ ID NO: 450725 - DNA, 162 bp, Homo sapiens; identical to SEQ ID NO: 220099
  chr20:57041475-57041637
  hypo

SEQ ID NO: 450726 - DNA, 183 bp, Homo sapiens; identical to SEQ ID NO: 275485
  chr20:57070698-57070881
  hypo

SEQ ID NO: 450727 - DNA, 88 bp, Homo sapiens; identical to SEQ ID NO: 275487
  chr20:57213159-57213247
  hypo

SEQ ID NO: 450728 - DNA, 234 bp, Homo sapiens; identical to SEQ ID NO: 220102
  chr20:57244309-57244543
  hypo

SEQ ID NO: 450729 - DNA, 308 bp, Homo sapiens; identical to SEQ ID NO: 275492
  chr20:57375851-57376159
  hypo

SEQ ID NO: 450730 - DNA, 264 bp, Homo sapiens; identical to SEQ ID NO: 275493
  chr20:57386554-57386818
  hypo

SEQ ID NO: 450731 - DNA, 107 bp, Homo sapiens; identical to SEQ ID NO: 328016
  chr20:57392407-57392514
  hypo

SEQ ID NO: 450732 - DNA, 208 bp, Homo sapiens; identical to SEQ ID NO: 226190
  chr20:57414593-57414801
  hypo

SEQ ID NO: 450733 - DNA, 158 bp, Homo sapiens; identical to SEQ ID NO: 205875
  chr20:57415180-57415338
  hypo

SEQ ID NO: 450734 - DNA, 2076 bp, Homo sapiens; identical to SEQ ID NO: 205877
  chr20:57428311-57430387
  hypo

SEQ ID NO: 450735 - DNA, 33 bp, Homo sapiens; identical to SEQ ID NO: 205879
  chr20:57470653-57470686
  hypo

SEQ ID NO: 450736 - DNA, 251 bp, Homo sapiens; identical to SEQ ID NO: 205880
  chr20:57478608-57478859
  hypo

SEQ ID NO: 450737 - DNA, 397 bp, Homo sapiens; identical to SEQ ID NO: 205881
  chr20:57484445-57484842
  hypo

SEQ ID NO: 450738 - DNA, 204 bp, Homo sapiens; identical to SEQ ID NO: 205882
  chr20:57485751-57485955
  hypo

SEQ ID NO: 450739 - DNA, 37 bp, Homo sapiens; identical to SEQ ID NO: 275496
  chr20:57547947-57547984
  hypo

SEQ ID NO: 450740 - DNA, 113 bp, Homo sapiens; identical to SEQ ID NO: 328026
  chr20:57554935-57555048
  hypo

SEQ ID NO: 450741 - DNA, 59 bp, Homo sapiens; identical to SEQ ID NO: 328027
  chr20:57555078-57555137
  hypo

SEQ ID NO: 450742 - DNA, 230 bp, Homo sapiens; identical to SEQ ID NO: 220111
  chr20:57577637-57577867
  hypo

SEQ ID NO: 450743 - DNA, 269 bp, Homo sapiens; identical to SEQ ID NO: 220112
  chr20:57578208-57578477
  hypo

SEQ ID NO: 450744 - DNA, 202 bp, Homo sapiens; identical to SEQ ID NO: 220113
  chr20:57578998-57579200
  hypo

SEQ ID NO: 450745 - DNA, 183 bp, Homo sapiens; identical to SEQ ID NO: 328032
  chr20:57699822-57700005
  hypo

SEQ ID NO: 450746 - DNA, 57 bp, Homo sapiens; identical to SEQ ID NO: 205883
  chr20:57797335-57797392
  hypo

SEQ ID NO: 450747 - DNA, 87 bp, Homo sapiens; identical to SEQ ID NO: 275505
  chr20:58045741-58045828
  hypo

SEQ ID NO: 450748 - DNA, 122 bp, Homo sapiens; identical to SEQ ID NO: 275506
  chr20:58166170-58166292
  hypo

SEQ ID NO: 450749 - DNA, 110 bp, Homo sapiens; identical to SEQ ID NO: 220120
  chr20:58397113-58397223
  hypo

SEQ ID NO: 450750 - DNA, 78 bp, Homo sapiens; identical to SEQ ID NO: 275508
  chr20:58407607-58407685
  hypo

SEQ ID NO: 450751 - DNA, 285 bp, Homo sapiens; identical to SEQ ID NO: 294939
  chr20:58514845-58515130
  hypo

SEQ ID NO: 450752 - DNA, 142 bp, Homo sapiens; identical to SEQ ID NO: 275512
  chr20:59225186-59225328
  hypo

SEQ ID NO: 450753 - DNA, 316 bp, Homo sapiens; identical to SEQ ID NO: 328052
  chr20:59598905-59599221
  hypo

SEQ ID NO: 450754 - DNA, 38 bp, Homo sapiens; identical to SEQ ID NO: 294941
  chr20:59804278-59804316
  hypo

SEQ ID NO: 450755 - DNA, 103 bp, Homo sapiens; identical to SEQ ID NO: 275515
  chr20:59832949-59833052
  hypo

SEQ ID NO: 450756 - DNA, 82 bp, Homo sapiens; identical to SEQ ID NO: 275516
  chr20:59871230-59871312
  hypo

SEQ ID NO: 450757 - DNA, 519 bp, Homo sapiens; identical to SEQ ID NO: 275518
  chr20:59965387-59965906
  hypo

SEQ ID NO: 450758 - DNA, 195 bp, Homo sapiens; identical to SEQ ID NO: 275520
  chr20:60098286-60098481
  hypo

SEQ ID NO: 450759 - DNA, 287 bp, Homo sapiens; identical to SEQ ID NO: 328060
  chr20:60119294-60119581
  hypo

SEQ ID NO: 450760 - DNA, 44 bp, Homo sapiens; identical to SEQ ID NO: 275524
  chr20:60176907-60176951
  hypo

SEQ ID NO: 450761 - DNA, 42 bp, Homo sapiens; identical to SEQ ID NO: 275525
  chr20:60194626-60194668
  hypo

SEQ ID NO: 450762 - DNA, 329 bp, Homo sapiens; identical to SEQ ID NO: 275526
  chr20:60198708-60199037
  hypo

SEQ ID NO: 450763 - DNA, 175 bp, Homo sapiens; identical to SEQ ID NO: 275529
  chr20:60236697-60236872
  hypo

SEQ ID NO: 450764 - DNA, 51 bp, Homo sapiens; identical to SEQ ID NO: 220129
  chr20:60261583-60261634
  hypo

SEQ ID NO: 450765 - DNA, 31 bp, Homo sapiens; identical to SEQ ID NO: 220130
  chr20:60261672-60261703
  hypo

SEQ ID NO: 450766 - DNA, 51 bp, Homo sapiens; identical to SEQ ID NO: 328072
  chr20:60304094-60304145
  hypo

SEQ ID NO: 450767 - DNA, 89 bp, Homo sapiens; identical to SEQ ID NO: 328073
  chr20:60304328-60304417
  hypo

SEQ ID NO: 450768 - DNA, 183 bp, Homo sapiens; identical to SEQ ID NO: 275538
  chr20:60329680-60329863
  hypo

SEQ ID NO: 450769 - DNA, 68 bp, Homo sapiens; identical to SEQ ID NO: 220133
  chr20:60334003-60334071
  hypo

SEQ ID NO: 450770 - DNA, 190 bp, Homo sapiens; identical to SEQ ID NO: 220136
  chr20:60361300-60361490
  hypo

SEQ ID NO: 450771 - DNA, 159 bp, Homo sapiens; identical to SEQ ID NO: 275543
  chr20:60445701-60445860
  hypo

SEQ ID NO: 450772 - DNA, 213 bp, Homo sapiens; identical to SEQ ID NO: 275547
  chr20:60482670-60482883
  hypo

SEQ ID NO: 450773 - DNA, 557 bp, Homo sapiens; identical to SEQ ID NO: 275553
  chr20:60495766-60496323
  hypo

SEQ ID NO: 450774 - DNA, 469 bp, Homo sapiens; identical to SEQ ID NO: 275554
  chr20:60500127-60500596
  hypo

SEQ ID NO: 450775 - DNA, 69 bp, Homo sapiens; identical to SEQ ID NO: 275555
  chr20:60502077-60502146
  hypo

SEQ ID NO: 450776 - DNA, 171 bp, Homo sapiens; identical to SEQ ID NO: 220143
  chr20:60503295-60503466
  hypo

SEQ ID NO: 450777 - DNA, 406 bp, Homo sapiens; identical to SEQ ID NO: 328097
  chr20:60507697-60508103
  hypo

SEQ ID NO: 450778 - DNA, 418 bp, Homo sapiens; identical to SEQ ID NO: 275561
  chr20:60549275-60549693
  hypo

SEQ ID NO: 450779 - DNA, 203 bp, Homo sapiens; identical to SEQ ID NO: 275562
  chr20:60551197-60551400
  hypo

SEQ ID NO: 450780 - DNA, 141 bp, Homo sapiens; identical to SEQ ID NO: 220149
  chr20:60551924-60552065
  hypo

SEQ ID NO: 450781 - DNA, 164 bp, Homo sapiens; identical to SEQ ID NO: 205891
  chr20:60552337-60552501
  hypo

SEQ ID NO: 450782 - DNA, 150 bp, Homo sapiens; identical to SEQ ID NO: 220152
  chr20:60563782-60563932
  hypo

SEQ ID NO: 450783 - DNA, 71 bp, Homo sapiens; identical to SEQ ID NO: 275567
  chr20:60580209-60580280
  hypo

SEQ ID NO: 450784 - DNA, 70 bp, Homo sapiens; identical to SEQ ID NO: 220153
  chr20:60581687-60581757
  hypo

SEQ ID NO: 450785 - DNA, 783 bp, Homo sapiens; identical to SEQ ID NO: 328110
  chr20:60615350-60616133
  hypo

SEQ ID NO: 450786 - DNA, 34 bp, Homo sapiens; identical to SEQ ID NO: 328111
  chr20:60635123-60635157
  hypo

SEQ ID NO: 450787 - DNA, 203 bp, Homo sapiens; identical to SEQ ID NO: 275573
  chr20:60687903-60688106
  hypo

SEQ ID NO: 450788 - DNA, 414 bp, Homo sapiens; identical to SEQ ID NO: 275574
  chr20:60691753-60692167
  hypo

SEQ ID NO: 450789 - DNA, 224 bp, Homo sapiens; identical to SEQ ID NO: 275576
  chr20:60735522-60735746
  hypo

SEQ ID NO: 450790 - DNA, 113 bp, Homo sapiens; identical to SEQ ID NO: 275577
  chr20:60740452-60740565
  hypo

SEQ ID NO: 450791 - DNA, 240 bp, Homo sapiens; identical to SEQ ID NO: 220159
  chr20:60791330-60791570
  hypo

SEQ ID NO: 450792 - DNA, 90 bp, Homo sapiens; identical to SEQ ID NO: 275582
  chr20:60805901-60805991
  hypo

SEQ ID NO: 450793 - DNA, 200 bp, Homo sapiens; identical to SEQ ID NO: 220160
  chr20:60816041-60816241
  hypo

SEQ ID NO: 450794 - DNA, 223 bp, Homo sapiens; identical to SEQ ID NO: 220161
  chr20:60816433-60816656
  hypo

SEQ ID NO: 450795 - DNA, 79 bp, Homo sapiens; identical to SEQ ID NO: 220162
  chr20:60816686-60816765
  hypo

SEQ ID NO: 450796 - DNA, 75 bp, Homo sapiens; identical to SEQ ID NO: 394839
  chr20:60842845-60842920
  hypo

SEQ ID NO: 450797 - DNA, 38 bp, Homo sapiens; identical to SEQ ID NO: 275587
  chr20:60843220-60843258
  hypo

SEQ ID NO: 450798 - DNA, 34 bp, Homo sapiens; identical to SEQ ID NO: 220165
  chr20:60845091-60845125
  hypo

SEQ ID NO: 450799 - DNA, 97 bp, Homo sapiens; identical to SEQ ID NO: 275590
  chr20:60866831-60866928
  hypo

SEQ ID NO: 450800 - DNA, 440 bp, Homo sapiens; identical to SEQ ID NO: 275592
  chr20:60868773-60869213
  hypo

SEQ ID NO: 450801 - DNA, 151 bp, Homo sapiens; identical to SEQ ID NO: 275593
  chr20:60875561-60875712
  hypo

SEQ ID NO: 450802 - DNA, 451 bp, Homo sapiens; identical to SEQ ID NO: 275594
  chr20:60880675-60881126
  hypo

SEQ ID NO: 450803 - DNA, 148 bp, Homo sapiens; identical to SEQ ID NO: 220168
  chr20:60891780-60891928
  hypo

SEQ ID NO: 450804 - DNA, 206 bp, Homo sapiens; identical to SEQ ID NO: 220169
  chr20:60891958-60892164
  hypo

SEQ ID NO: 450805 - DNA, 273 bp, Homo sapiens; identical to SEQ ID NO: 328141
  chr20:60892222-60892495
  hypo

SEQ ID NO: 450806 - DNA, 222 bp, Homo sapiens; identical to SEQ ID NO: 328142
  chr20:60905729-60905951
  hypo

SEQ ID NO: 450807 - DNA, 236 bp, Homo sapiens; identical to SEQ ID NO: 220172
  chr20:60906010-60906246
  hypo

SEQ ID NO: 450808 - DNA, 234 bp, Homo sapiens; identical to SEQ ID NO: 220174
  chr20:60913381-60913615
  hypo

SEQ ID NO: 450809 - DNA, 86 bp, Homo sapiens; identical to SEQ ID NO: 220175
  chr20:60925165-60925251
  hypo

SEQ ID NO: 450810 - DNA, 562 bp, Homo sapiens; identical to SEQ ID NO: 275603
  chr20:60936962-60937524
  hypo

SEQ ID NO: 450811 - DNA, 243 bp, Homo sapiens; identical to SEQ ID NO: 205894
  chr20:60941671-60941914
  hypo

SEQ ID NO: 450812 - DNA, 201 bp, Homo sapiens; identical to SEQ ID NO: 275606
  chr20:60963092-60963293
  hypo

SEQ ID NO: 450813 - DNA, 267 bp, Homo sapiens; identical to SEQ ID NO: 328157
  chr20:60982952-60983219
  hypo

SEQ ID NO: 450814 - DNA, 277 bp, Homo sapiens; identical to SEQ ID NO: 275610
  chr20:60988929-60989206
  hypo

SEQ ID NO: 450815 - DNA, 349 bp, Homo sapiens; identical to SEQ ID NO: 275612
  chr20:60996144-60996493
  hypo

SEQ ID NO: 450816 - DNA, 201 bp, Homo sapiens; identical to SEQ ID NO: 220183
  chr20:60997210-60997411
  hypo

SEQ ID NO: 450817 - DNA, 133 bp, Homo sapiens; identical to SEQ ID NO: 275615
  chr20:61009827-61009960
  hypo

SEQ ID NO: 450818 - DNA, 37 bp, Homo sapiens; identical to SEQ ID NO: 275616
  chr20:61010380-61010417
  hypo

SEQ ID NO: 450819 - DNA, 222 bp, Homo sapiens; identical to SEQ ID NO: 275618
  chr20:61022050-61022272
  hypo

SEQ ID NO: 450820 - DNA, 105 bp, Homo sapiens; identical to SEQ ID NO: 275619
  chr20:61275877-61275982
  hypo

SEQ ID NO: 450821 - DNA, 201 bp, Homo sapiens; identical to SEQ ID NO: 220185
  chr20:61285585-61285786
  hypo

SEQ ID NO: 450822 - DNA, 324 bp, Homo sapiens; identical to SEQ ID NO: 275621
  chr20:61287386-61287710
  hypo

SEQ ID NO: 450823 - DNA, 206 bp, Homo sapiens; identical to SEQ ID NO: 275623
  chr20:61289971-61290177
  hypo

SEQ ID NO: 450824 - DNA, 113 bp, Homo sapiens; identical to SEQ ID NO: 328177
  chr20:61291018-61291131
  hypo

SEQ ID NO: 450825 - DNA, 72 bp, Homo sapiens; identical to SEQ ID NO: 328178
  chr20:61291793-61291865
  hypo

SEQ ID NO: 450826 - DNA, 306 bp, Homo sapiens; identical to SEQ ID NO: 275626
  chr20:61297760-61298066
  hypo

SEQ ID NO: 450827 - DNA, 313 bp, Homo sapiens; identical to SEQ ID NO: 275627
  chr20:61298975-61299288
  hypo

SEQ ID NO: 450828 - DNA, 128 bp, Homo sapiens; identical to SEQ ID NO: 328181
  chr20:61312775-61312903
  hypo

SEQ ID NO: 450829 - DNA, 102 bp, Homo sapiens; identical to SEQ ID NO: 275631
  chr20:61323378-61323480
  hypo

SEQ ID NO: 450830 - DNA, 118 bp, Homo sapiens; identical to SEQ ID NO: 275632
  chr20:61327484-61327602
  hypo

SEQ ID NO: 450831 - DNA, 203 bp, Homo sapiens; identical to SEQ ID NO: 275634
  chr20:61333200-61333403
  hypo

SEQ ID NO: 450832 - DNA, 147 bp, Homo sapiens; identical to SEQ ID NO: 275635
  chr20:61349792-61349939
  hypo

SEQ ID NO: 450833 - DNA, 115 bp, Homo sapiens; identical to SEQ ID NO: 328189
  chr20:61364297-61364412
  hypo

SEQ ID NO: 450834 - DNA, 54 bp, Homo sapiens; identical to SEQ ID NO: 328190
  chr20:61364476-61364530
  hypo

SEQ ID NO: 450835 - DNA, 154 bp, Homo sapiens; identical to SEQ ID NO: 275637
  chr20:61370412-61370566
  hypo

SEQ ID NO: 450836 - DNA, 426 bp, Homo sapiens; identical to SEQ ID NO: 275638
  chr20:61385884-61386310
  hypo

SEQ ID NO: 450837 - DNA, 99 bp, Homo sapiens; identical to SEQ ID NO: 328193
  chr20:61393666-61393765
  hypo

SEQ ID NO: 450838 - DNA, 54 bp, Homo sapiens; identical to SEQ ID NO: 275641
  chr20:61398117-61398171
  hypo

SEQ ID NO: 450839 - DNA, 36 bp, Homo sapiens; identical to SEQ ID NO: 275642
  chr20:61398433-61398469
  hypo

SEQ ID NO: 450840 - DNA, 124 bp, Homo sapiens; identical to SEQ ID NO: 275643
  chr20:61401677-61401801
  hypo

SEQ ID NO: 450841 - DNA, 145 bp, Homo sapiens; identical to SEQ ID NO: 275644
  chr20:61405559-61405704
  hypo

SEQ ID NO: 450842 - DNA, 62 bp, Homo sapiens; identical to SEQ ID NO: 328198
  chr20:61411118-61411180
  hypo

SEQ ID NO: 450843 - DNA, 118 bp, Homo sapiens; identical to SEQ ID NO: 275648
  chr20:61442868-61442986
  hypo

SEQ ID NO: 450844 - DNA, 61 bp, Homo sapiens; identical to SEQ ID NO: 205895
  chr20:61447609-61447670
  hypo

SEQ ID NO: 450845 - DNA, 346 bp, Homo sapiens; identical to SEQ ID NO: 294956
  chr20:61447763-61448109
  hypo

SEQ ID NO: 450846 - DNA, 421 bp, Homo sapiens; identical to SEQ ID NO: 220191
  chr20:61458920-61459341
  hypo

SEQ ID NO: 450847 - DNA, 350 bp, Homo sapiens; identical to SEQ ID NO: 328203
  chr20:61459926-61460276
  hypo

SEQ ID NO: 450848 - DNA, 205 bp, Homo sapiens; identical to SEQ ID NO: 275651
  chr20:61460570-61460775
  hypo

SEQ ID NO: 450849 - DNA, 38 bp, Homo sapiens; identical to SEQ ID NO: 220192
  chr20:61470101-61470139
  hypo

SEQ ID NO: 450850 - DNA, 43 bp, Homo sapiens; identical to SEQ ID NO: 275653
  chr20:61471674-61471717
  hypo

SEQ ID NO: 450851 - DNA, 180 bp, Homo sapiens; identical to SEQ ID NO: 275655
  chr20:61473183-61473363
  hypo

SEQ ID NO: 450852 - DNA, 98 bp, Homo sapiens; identical to SEQ ID NO: 275656
  chr20:61473725-61473823
  hypo

SEQ ID NO: 450853 - DNA, 97 bp, Homo sapiens; identical to SEQ ID NO: 275657
  chr20:61480530-61480627
  hypo

SEQ ID NO: 450854 - DNA, 57 bp, Homo sapiens; identical to SEQ ID NO: 275658
  chr20:61482263-61482320
  hypo

SEQ ID NO: 450855 - DNA, 639 bp, Homo sapiens; identical to SEQ ID NO: 294957
  chr20:61492377-61493016
  hypo

SEQ ID NO: 450856 - DNA, 93 bp, Homo sapiens; identical to SEQ ID NO: 220197
  chr20:61518345-61518438
  hypo

SEQ ID NO: 450857 - DNA, 130 bp, Homo sapiens; identical to SEQ ID NO: 275664
  chr20:61528807-61528937
  hypo

SEQ ID NO: 450858 - DNA, 206 bp, Homo sapiens; identical to SEQ ID NO: 275665
  chr20:61529148-61529354
  hypo

SEQ ID NO: 450859 - DNA, 92 bp, Homo sapiens; identical to SEQ ID NO: 275666
  chr20:61538594-61538686
  hypo

SEQ ID NO: 450860 - DNA, 92 bp, Homo sapiens; identical to SEQ ID NO: 275667
  chr20:61540950-61541042
  hypo

SEQ ID NO: 450861 - DNA, 135 bp, Homo sapiens; identical to SEQ ID NO: 220200
  chr20:61576504-61576639
  hypo

SEQ ID NO: 450862 - DNA, 103 bp, Homo sapiens; identical to SEQ ID NO: 294961
  chr20:61583882-61583985
  hypo

SEQ ID NO: 450863 - DNA, 316 bp, Homo sapiens; identical to SEQ ID NO: 294962
  chr20:61584015-61584331
  hypo

SEQ ID NO: 450864 - DNA, 130 bp, Homo sapiens; identical to SEQ ID NO: 220201
  chr20:61619034-61619164
  hypo

SEQ ID NO: 450865 - DNA, 210 bp, Homo sapiens; identical to SEQ ID NO: 275674
  chr20:61666077-61666287
  hypo

SEQ ID NO: 450866 - DNA, 44 bp, Homo sapiens; identical to SEQ ID NO: 328233
  chr20:61681328-61681372
  hypo

SEQ ID NO: 450867 - DNA, 31 bp, Homo sapiens; identical to SEQ ID NO: 328234
  chr20:61681422-61681453
  hypo

SEQ ID NO: 450868 - DNA, 511 bp, Homo sapiens; identical to SEQ ID NO: 275677
  chr20:61692615-61693126
  hypo

SEQ ID NO: 450869 - DNA, 253 bp, Homo sapiens; identical to SEQ ID NO: 220205
  chr20:61693186-61693439
  hypo

SEQ ID NO: 450870 - DNA, 153 bp, Homo sapiens; identical to SEQ ID NO: 275680
  chr20:61715256-61715409
  hypo

SEQ ID NO: 450871 - DNA, 74 bp, Homo sapiens; identical to SEQ ID NO: 205901
  chr20:61734534-61734608
  hypo

SEQ ID NO: 450872 - DNA, 165 bp, Homo sapiens; identical to SEQ ID NO: 220207
  chr20:61748971-61749136
  hypo

SEQ ID NO: 450873 - DNA, 66 bp, Homo sapiens; identical to SEQ ID NO: 220208
  chr20:61749166-61749232
  hypo

SEQ ID NO: 450874 - DNA, 96 bp, Homo sapiens; identical to SEQ ID NO: 275685
  chr20:61756482-61756578
  hypo

SEQ ID NO: 450875 - DNA, 249 bp, Homo sapiens; identical to SEQ ID NO: 294967
  chr20:61759828-61760077
  hypo

SEQ ID NO: 450876 - DNA, 183 bp, Homo sapiens; identical to SEQ ID NO: 328245
  chr20:61765425-61765608
  hypo

SEQ ID NO: 450877 - DNA, 60 bp, Homo sapiens; identical to SEQ ID NO: 220209
  chr20:61771324-61771384
  hypo

SEQ ID NO: 450878 - DNA, 53 bp, Homo sapiens; identical to SEQ ID NO: 220210
  chr20:61771414-61771467
  hypo

SEQ ID NO: 450879 - DNA, 168 bp, Homo sapiens; identical to SEQ ID NO: 328248
  chr20:61772545-61772713
  hypo

SEQ ID NO: 450880 - DNA, 37 bp, Homo sapiens; identical to SEQ ID NO: 328249
  chr20:61772743-61772780
  hypo

SEQ ID NO: 450881 - DNA, 525 bp, Homo sapiens; identical to SEQ ID NO: 275690
  chr20:61817151-61817676
  hypo

SEQ ID NO: 450882 - DNA, 154 bp, Homo sapiens; identical to SEQ ID NO: 275691
  chr20:61819884-61820038
  hypo

SEQ ID NO: 450883 - DNA, 131 bp, Homo sapiens; identical to SEQ ID NO: 275693
  chr20:61827956-61828087
  hypo

SEQ ID NO: 450884 - DNA, 383 bp, Homo sapiens; identical to SEQ ID NO: 275695
  chr20:61870767-61871150
  hypo

SEQ ID NO: 450885 - DNA, 165 bp, Homo sapiens; identical to SEQ ID NO: 275696
  chr20:61880358-61880523
  hypo

SEQ ID NO: 450886 - DNA, 36 bp, Homo sapiens; identical to SEQ ID NO: 205905
  chr20:61886327-61886363
  hypo

SEQ ID NO: 450887 - DNA, 55 bp, Homo sapiens; identical to SEQ ID NO: 220216
  chr20:61895763-61895818
  hypo

SEQ ID NO: 450888 - DNA, 37 bp, Homo sapiens; identical to SEQ ID NO: 220217
  chr20:61909562-61909599
  hypo

SEQ ID NO: 450889 - DNA, 58 bp, Homo sapiens; identical to SEQ ID NO: 220218
  chr20:61913595-61913653
  hypo

SEQ ID NO: 450890 - DNA, 79 bp, Homo sapiens; identical to SEQ ID NO: 328263
  chr20:61942752-61942831
  hypo

SEQ ID NO: 450891 - DNA, 195 bp, Homo sapiens; identical to SEQ ID NO: 275701
  chr20:61947782-61947977
  hypo

SEQ ID NO: 450892 - DNA, 73 bp, Homo sapiens; identical to SEQ ID NO: 275702
  chr20:61951425-61951498
  hypo

SEQ ID NO: 450893 - DNA, 96 bp, Homo sapiens; identical to SEQ ID NO: 220219
  chr20:61967699-61967795
  hypo

SEQ ID NO: 450894 - DNA, 95 bp, Homo sapiens; identical to SEQ ID NO: 220220
  chr20:61967915-61968010
  hypo

SEQ ID NO: 450895 - DNA, 77 bp, Homo sapiens; identical to SEQ ID NO: 275705
  chr20:61973525-61973602
  hypo

SEQ ID NO: 450896 - DNA, 72 bp, Homo sapiens; identical to SEQ ID NO: 413729
  chr20:61974493-61974565
  hypo

SEQ ID NO: 450897 - DNA, 244 bp, Homo sapiens; identical to SEQ ID NO: 275708
  chr20:61979331-61979575
  hypo

SEQ ID NO: 450898 - DNA, 247 bp, Homo sapiens; identical to SEQ ID NO: 220221
  chr20:61981498-61981745
  hypo

SEQ ID NO: 450899 - DNA, 187 bp, Homo sapiens; identical to SEQ ID NO: 220222
  chr20:61982647-61982834
  hypo

SEQ ID NO: 450900 - DNA, 33 bp, Homo sapiens
  chr20:61991100-61991133
  hypo
gggagctgtccaggagctctccaggctgcccca

SEQ ID NO: 450901 - DNA, 55 bp, Homo sapiens; identical to SEQ ID NO: 220224
  chr20:61991163-61991218
  hypo

SEQ ID NO: 450902 - DNA, 143 bp, Homo sapiens; identical to SEQ ID NO: 275714
  chr20:62005349-62005492
  hypo

SEQ ID NO: 450903 - DNA, 35 bp, Homo sapiens; identical to SEQ ID NO: 220225
  chr20:62018865-62018900
  hypo

SEQ ID NO: 450904 - DNA, 84 bp, Homo sapiens; identical to SEQ ID NO: 220226
  chr20:62019257-62019341
  hypo

SEQ ID NO: 450905 - DNA, 84 bp, Homo sapiens; identical to SEQ ID NO: 275717
  chr20:62019401-62019485
  hypo

SEQ ID NO: 450906 - DNA, 47 bp, Homo sapiens; identical to SEQ ID NO: 328281
  chr20:62037978-62038025
  hypo

SEQ ID NO: 450907 - DNA, 43 bp, Homo sapiens; identical to SEQ ID NO: 275722
  chr20:62045905-62045948
  hypo

SEQ ID NO: 450908 - DNA, 39 bp, Homo sapiens; identical to SEQ ID NO: 328283
  chr20:62048274-62048313
  hypo

SEQ ID NO: 450909 - DNA, 881 bp, Homo sapiens; identical to SEQ ID NO: 328284
  chr20:62050045-62050926
  hypo

SEQ ID NO: 450910 - DNA, 113 bp, Homo sapiens; identical to SEQ ID NO: 328285
  chr20:62051966-62052079
  hypo

SEQ ID NO: 450911 - DNA, 227 bp, Homo sapiens; identical to SEQ ID NO: 328286
  chr20:62052955-62053182
  hypo

SEQ ID NO: 450912 - DNA, 227 bp, Homo sapiens; identical to SEQ ID NO: 328287
  chr20:62053339-62053566
  hypo

SEQ ID NO: 450913 - DNA, 276 bp, Homo sapiens; identical to SEQ ID NO: 220228
  chr20:62056056-62056332
  hypo

SEQ ID NO: 450914 - DNA, 32 bp, Homo sapiens; identical to SEQ ID NO: 220229
  chr20:62083855-62083887
  hypo

SEQ ID NO: 450915 - DNA, 88 bp, Homo sapiens; identical to SEQ ID NO: 275733
  chr20:62097173-62097261
  hypo

SEQ ID NO: 450916 - DNA, 385 bp, Homo sapiens; identical to SEQ ID NO: 275734
  chr20:62098053-62098438
  hypo

SEQ ID NO: 450917 - DNA, 251 bp, Homo sapiens; identical to SEQ ID NO: 220230
  chr20:62110513-62110764
  hypo

SEQ ID NO: 450918 - DNA, 59 bp, Homo sapiens; identical to SEQ ID NO: 328294
  chr20:62117853-62117912
  hypo

SEQ ID NO: 450919 - DNA, 118 bp, Homo sapiens; identical to SEQ ID NO: 328295
  chr20:62117956-62118074
  hypo

SEQ ID NO: 450920 - DNA, 151 bp, Homo sapiens; identical to SEQ ID NO: 275739
  chr20:62149573-62149724
  hypo

SEQ ID NO: 450921 - DNA, 42 bp, Homo sapiens; identical to SEQ ID NO: 226226
  chr20:62152087-62152129
  hypo

SEQ ID NO: 450922 - DNA, 576 bp, Homo sapiens; identical to SEQ ID NO: 275744
  chr20:62174493-62175069
  hypo

SEQ ID NO: 450923 - DNA, 75 bp, Homo sapiens; identical to SEQ ID NO: 275745
  chr20:62175657-62175732
  hypo

SEQ ID NO: 450924 - DNA, 68 bp, Homo sapiens; identical to SEQ ID NO: 275746
  chr20:62178216-62178284
  hypo

SEQ ID NO: 450925 - DNA, 143 bp, Homo sapiens; identical to SEQ ID NO: 275747
  chr20:62179512-62179655
  hypo

SEQ ID NO: 450926 - DNA, 77 bp, Homo sapiens; identical to SEQ ID NO: 220234
  chr20:62190624-62190701
  hypo

SEQ ID NO: 450927 - DNA, 184 bp, Homo sapiens; identical to SEQ ID NO: 275751
  chr20:62209403-62209587
  hypo

SEQ ID NO: 450928 - DNA, 38 bp, Homo sapiens; identical to SEQ ID NO: 220235
  chr20:62214176-62214214
  hypo

SEQ ID NO: 450929 - DNA, 278 bp, Homo sapiens; identical to SEQ ID NO: 275753
  chr20:62218275-62218553
  hypo

SEQ ID NO: 450930 - DNA, 828 bp, Homo sapiens; identical to SEQ ID NO: 394875
  chr20:62220463-62221291
  hypo

SEQ ID NO: 450931 - DNA, 76 bp, Homo sapiens; identical to SEQ ID NO: 220240
  chr20:62231698-62231774
  hypo

SEQ ID NO: 450932 - DNA, 263 bp, Homo sapiens; identical to SEQ ID NO: 328318
  chr20:62250723-62250986
  hypo

SEQ ID NO: 450933 - DNA, 128 bp, Homo sapiens; identical to SEQ ID NO: 328319
  chr20:62251016-62251144
  hypo

SEQ ID NO: 450934 - DNA, 120 bp, Homo sapiens; identical to SEQ ID NO: 275760
  chr20:62252635-62252755
  hypo

SEQ ID NO: 450935 - DNA, 189 bp, Homo sapiens; identical to SEQ ID NO: 328323
  chr20:62275082-62275271
  hypo

SEQ ID NO: 450936 - DNA, 43 bp, Homo sapiens; identical to SEQ ID NO: 328324
  chr20:62281489-62281532
  hypo

SEQ ID NO: 450937 - DNA, 307 bp, Homo sapiens; identical to SEQ ID NO: 328325
  chr20:62281695-62282002
  hypo

SEQ ID NO: 450938 - DNA, 651 bp, Homo sapiens; identical to SEQ ID NO: 294982
  chr20:62283836-62284487
  hypo

SEQ ID NO: 450939 - DNA, 69 bp, Homo sapiens; identical to SEQ ID NO: 294983
  chr20:62284615-62284684
  hypo

SEQ ID NO: 450940 - DNA, 162 bp, Homo sapiens; identical to SEQ ID NO: 275766
  chr20:62313528-62313690
  hypo

SEQ ID NO: 450941 - DNA, 211 bp, Homo sapiens; identical to SEQ ID NO: 220244
  chr20:62317398-62317609
  hypo

SEQ ID NO: 450942 - DNA, 230 bp, Homo sapiens; identical to SEQ ID NO: 328336
  chr20:62329296-62329526
  hypo

SEQ ID NO: 450943 - DNA, 126 bp, Homo sapiens; identical to SEQ ID NO: 328337
  chr20:62329556-62329682
  hypo

SEQ ID NO: 450944 - DNA, 76 bp, Homo sapiens; identical to SEQ ID NO: 275774
  chr20:62333477-62333553
  hypo

SEQ ID NO: 450945 - DNA, 143 bp, Homo sapiens; identical to SEQ ID NO: 275777
  chr20:62388763-62388906
  hypo

SEQ ID NO: 450946 - DNA, 120 bp, Homo sapiens; identical to SEQ ID NO: 275778
  chr20:62392097-62392217
  hypo

SEQ ID NO: 450947 - DNA, 55 bp, Homo sapiens; identical to SEQ ID NO: 220248
  chr20:62398949-62399004
  hypo

SEQ ID NO: 450948 - DNA, 107 bp, Homo sapiens; identical to SEQ ID NO: 220249
  chr20:62401273-62401380
  hypo

SEQ ID NO: 450949 - DNA, 211 bp, Homo sapiens; identical to SEQ ID NO: 328344
  chr20:62406867-62407078
  hypo

SEQ ID NO: 450950 - DNA, 229 bp, Homo sapiens; identical to SEQ ID NO: 328345
  chr20:62407155-62407384
  hypo

SEQ ID NO: 450951 - DNA, 73 bp, Homo sapiens; identical to SEQ ID NO: 328346
  chr20:62407704-62407777
  hypo

SEQ ID NO: 450952 - DNA, 95 bp, Homo sapiens; identical to SEQ ID NO: 275784
  chr20:62412805-62412900
  hypo

SEQ ID NO: 450953 - DNA, 394 bp, Homo sapiens; identical to SEQ ID NO: 275785
  chr20:62413440-62413834
  hypo

SEQ ID NO: 450954 - DNA, 76 bp, Homo sapiens; identical to SEQ ID NO: 328349
  chr20:62422171-62422247
  hypo

SEQ ID NO: 450955 - DNA, 225 bp, Homo sapiens; identical to SEQ ID NO: 328350
  chr20:62422321-62422546
  hypo

SEQ ID NO: 450956 - DNA, 165 bp, Homo sapiens; identical to SEQ ID NO: 328351
  chr20:62426999-62427164
  hypo

SEQ ID NO: 450957 - DNA, 96 bp, Homo sapiens; identical to SEQ ID NO: 275788
  chr20:62432147-62432243
  hypo

SEQ ID NO: 450958 - DNA, 45 bp, Homo sapiens; identical to SEQ ID NO: 328353
  chr20:62440399-62440444
  hypo

SEQ ID NO: 450959 - DNA, 66 bp, Homo sapiens; identical to SEQ ID NO: 328354
  chr20:62440540-62440606
  hypo

SEQ ID NO: 450960 - DNA, 97 bp, Homo sapiens; identical to SEQ ID NO: 275790
  chr20:62480661-62480758
  hypo

SEQ ID NO: 450961 - DNA, 45 bp, Homo sapiens; identical to SEQ ID NO: 220252
  chr20:62481642-62481687
  hypo

SEQ ID NO: 450962 - DNA, 217 bp, Homo sapiens; identical to SEQ ID NO: 275793
  chr20:62493115-62493332
  hypo

SEQ ID NO: 450963 - DNA, 117 bp, Homo sapiens; identical to SEQ ID NO: 275794
  chr20:62494226-62494343
  hypo

SEQ ID NO: 450964 - DNA, 312 bp, Homo sapiens; identical to SEQ ID NO: 275796
  chr20:62518965-62519277
  hypo

SEQ ID NO: 450965 - DNA, 251 bp, Homo sapiens; identical to SEQ ID NO: 275797
  chr20:62520344-62520595
  hypo

SEQ ID NO: 450966 - DNA, 361 bp, Homo sapiens; identical to SEQ ID NO: 226233
  chr20:62525784-62526145
  hypo

SEQ ID NO: 450967 - DNA, 42 bp, Homo sapiens; identical to SEQ ID NO: 220254
  chr20:62544237-62544279
  hypo

SEQ ID NO: 450968 - DNA, 43 bp, Homo sapiens; identical to SEQ ID NO: 275799
  chr20:62550220-62550263
  hypo

SEQ ID NO: 450969 - DNA, 94 bp, Homo sapiens; identical to SEQ ID NO: 275802
  chr20:62556213-62556307
  hypo

SEQ ID NO: 450970 - DNA, 244 bp, Homo sapiens; identical to SEQ ID NO: 275804
  chr20:62571650-62571894
  hypo

SEQ ID NO: 450971 - DNA, 45 bp, Homo sapiens; identical to SEQ ID NO: 220260
  chr20:62572479-62572524
  hypo

SEQ ID NO: 450972 - DNA, 125 bp, Homo sapiens; identical to SEQ ID NO: 275806
  chr20:62576162-62576287
  hypo

SEQ ID NO: 450973 - DNA, 386 bp, Homo sapiens; identical to SEQ ID NO: 220263
  chr20:62583701-62584087
  hypo

SEQ ID NO: 450974 - DNA, 207 bp, Homo sapiens; identical to SEQ ID NO: 275810
  chr20:62598913-62599120
  hypo

SEQ ID NO: 450975 - DNA, 238 bp, Homo sapiens; identical to SEQ ID NO: 226235
  chr20:62605238-62605476
  hypo

SEQ ID NO: 450976 - DNA, 125 bp, Homo sapiens; identical to SEQ ID NO: 220266
  chr20:62608161-62608286
  hypo

SEQ ID NO: 450977 - DNA, 120 bp, Homo sapiens; identical to SEQ ID NO: 220268
  chr20:62631831-62631951
  hypo

SEQ ID NO: 450978 - DNA, 86 bp, Homo sapiens; identical to SEQ ID NO: 275817
  chr20:62651736-62651822
  hypo

SEQ ID NO: 450979 - DNA, 205 bp, Homo sapiens; identical to SEQ ID NO: 294999
  chr20:62673632-62673837
  hypo

SEQ ID NO: 450980 - DNA, 322 bp, Homo sapiens; identical to SEQ ID NO: 295000
  chr20:62679894-62680216
  hypo

SEQ ID NO: 450981 - DNA, 34 bp, Homo sapiens; identical to SEQ ID NO: 275819
  chr20:62705149-62705183
  hypo

SEQ ID NO: 450982 - DNA, 148 bp, Homo sapiens; identical to SEQ ID NO: 205920
  chr20:62714866-62715014
  hypo

SEQ ID NO: 450983 - DNA, 102 bp, Homo sapiens; identical to SEQ ID NO: 205921
  chr20:62715069-62715171
  hypo

SEQ ID NO: 450984 - DNA, 175 bp, Homo sapiens; identical to SEQ ID NO: 205922
  chr20:62715621-62715796
  hypo

SEQ ID NO: 450985 - DNA, 81 bp, Homo sapiens; identical to SEQ ID NO: 328399
  chr20:62722947-62723028
  hypo

SEQ ID NO: 450986 - DNA, 575 bp, Homo sapiens; identical to SEQ ID NO: 220279
  chr20:62737169-62737744
  hypo

SEQ ID NO: 450987 - DNA, 301 bp, Homo sapiens; identical to SEQ ID NO: 220280
  chr20:62737790-62738091
  hypo

SEQ ID NO: 450988 - DNA, 91 bp, Homo sapiens; identical to SEQ ID NO: 275822
  chr20:62766352-62766443
  hypo

SEQ ID NO: 450989 - DNA, 120 bp, Homo sapiens; identical to SEQ ID NO: 275823
  chr20:62766923-62767043
  hypo

SEQ ID NO: 450990 - DNA, 51 bp, Homo sapiens; identical to SEQ ID NO: 275825
  chr20:62796671-62796722
  hypo

SEQ ID NO: 450991 - DNA, 71 bp, Homo sapiens; identical to SEQ ID NO: 275826
  chr20:62797053-62797124
  hypo

SEQ ID NO: 450992 - DNA, 388 bp, Homo sapiens; identical to SEQ ID NO: 275827
  chr20:62818172-62818560
  hypo

SEQ ID NO: 450993 - DNA, 182 bp, Homo sapiens; identical to SEQ ID NO: 275829
  chr20:62851114-62851296
  hypo

SEQ ID NO: 450994 - DNA, 263 bp, Homo sapiens; identical to SEQ ID NO: 275830
  chr20:62859283-62859546
  hypo

SEQ ID NO: 450995 - DNA, 142 bp, Homo sapiens; identical to SEQ ID NO: 328413
  chr20:62871681-62871823
  hypo

SEQ ID NO: 450996 - DNA, 131 bp, Homo sapiens; identical to SEQ ID NO: 275834
  chr20:62873338-62873469
  hypo

SEQ ID NO: 450997 - DNA, 334 bp, Homo sapiens; identical to SEQ ID NO: 275835
  chr20:62899595-62899929
  hypo

SEQ ID NO: 450998 - DNA, 38 bp, Homo sapiens; identical to SEQ ID NO: 275836
  chr20:62912885-62912923
  hypo

SEQ ID NO: 450999 - DNA, 37 bp, Homo sapiens; identical to SEQ ID NO: 275837
  chr20:62914531-62914568
  hypo

SEQ ID NO: 451000 - DNA, 246 bp, Homo sapiens; identical to SEQ ID NO: 328418
  chr21:15443742-15443988
  hypo

SEQ ID NO: 451001 - DNA, 104 bp, Homo sapiens; identical to SEQ ID NO: 328419
  chr21:15444050-15444154
  hypo

SEQ ID NO: 451002 - DNA, 360 bp, Homo sapiens; identical to SEQ ID NO: 275839
  chr21:15445158-15445518
  hypo

SEQ ID NO: 451003 - DNA, 144 bp, Homo sapiens; identical to SEQ ID NO: 220283
  chr21:15448689-15448833
  hypo

SEQ ID NO: 451004 - DNA, 300 bp, Homo sapiens; identical to SEQ ID NO: 275841
  chr21:15449805-15450105
  hypo

SEQ ID NO: 451005 - DNA, 165 bp, Homo sapiens; identical to SEQ ID NO: 220285
  chr21:15455717-15455882
  hypo

SEQ ID NO: 451006 - DNA, 57 bp, Homo sapiens; identical to SEQ ID NO: 220286
  chr21:15455989-15456046
  hypo

SEQ ID NO: 451007 - DNA, 208 bp, Homo sapiens; identical to SEQ ID NO: 295013
  chr21:16130747-16130955
  hypo

SEQ ID NO: 451008 - DNA, 38 bp, Homo sapiens; identical to SEQ ID NO: 275844
  chr21:16383777-16383815
  hypo

SEQ ID NO: 451009 - DNA, 153 bp, Homo sapiens; identical to SEQ ID NO: 220290
  chr21:16408140-16408293
  hypo

SEQ ID NO: 451010 - DNA, 268 bp, Homo sapiens; identical to SEQ ID NO: 295016
  chr21:16438267-16438535
  hypo

SEQ ID NO: 451011 - DNA, 160 bp, Homo sapiens; identical to SEQ ID NO: 275846
  chr21:16580450-16580610
  hypo

SEQ ID NO: 451012 - DNA, 202 bp, Homo sapiens; identical to SEQ ID NO: 275847
  chr21:16747503-16747705
  hypo

SEQ ID NO: 451013 - DNA, 83 bp, Homo sapiens; identical to SEQ ID NO: 226247
  chr21:17102748-17102831
  hypo

SEQ ID NO: 451014 - DNA, 1361 bp, Homo sapiens; identical to SEQ ID NO: 295019
  chr21:18885047-18886408
  hypo

SEQ ID NO: 451015 - DNA, 35 bp, Homo sapiens; identical to SEQ ID NO: 275848
  chr21:18887830-18887865
  hypo

SEQ ID NO: 451016 - DNA, 34 bp, Homo sapiens; identical to SEQ ID NO: 275849
  chr21:18888105-18888139
  hypo

SEQ ID NO: 451017 - DNA, 36 bp, Homo sapiens; identical to SEQ ID NO: 275850
  chr21:18913418-18913454
  hypo

SEQ ID NO: 451018 - DNA, 98 bp, Homo sapiens; identical to SEQ ID NO: 295021
  chr21:18985373-18985471
  hypo

SEQ ID NO: 451019 - DNA, 60 bp, Homo sapiens; identical to SEQ ID NO: 275851
  chr21:19190791-19190851
  hypo

SEQ ID NO: 451020 - DNA, 214 bp, Homo sapiens; identical to SEQ ID NO: 275854
  chr21:20618217-20618431
  hypo

SEQ ID NO: 451021 - DNA, 120 bp, Homo sapiens; identical to SEQ ID NO: 275855
  chr21:20865924-20866044
  hypo

SEQ ID NO: 451022 - DNA, 66 bp, Homo sapiens; identical to SEQ ID NO: 275856
  chr21:21132337-21132403
  hypo

SEQ ID NO: 451023 - DNA, 37 bp, Homo sapiens; identical to SEQ ID NO: 275857
  chr21:22495685-22495722
  hypo

SEQ ID NO: 451024 - DNA, 32 bp, Homo sapiens; identical to SEQ ID NO: 275858
  chr21:27456835-27456867
  hypo

SEQ ID NO: 451025 - DNA, 97 bp, Homo sapiens; identical to SEQ ID NO: 275859
  chr21:30037461-30037558
  hypo

SEQ ID NO: 451026 - DNA, 213 bp, Homo sapiens; identical to SEQ ID NO: 275861
  chr21:30352359-30352572
  hypo

SEQ ID NO: 451027 - DNA, 35 bp, Homo sapiens; identical to SEQ ID NO: 275862
  chr21:30353854-30353889
  hypo

SEQ ID NO: 451028 - DNA, 42 bp, Homo sapiens; identical to SEQ ID NO: 220297
  chr21:30406901-30406943
  hypo

SEQ ID NO: 451029 - DNA, 99 bp, Homo sapiens; identical to SEQ ID NO: 220298
  chr21:30407636-30407735
  hypo

SEQ ID NO: 451030 - DNA, 42 bp, Homo sapiens; identical to SEQ ID NO: 275866
  chr21:30488430-30488472
  hypo

SEQ ID NO: 451031 - DNA, 146 bp, Homo sapiens; identical to SEQ ID NO: 275867
  chr21:30722368-30722514
  hypo

SEQ ID NO: 451032 - DNA, 97 bp, Homo sapiens; identical to SEQ ID NO: 220300
  chr21:30722544-30722641
  hypo

SEQ ID NO: 451033 - DNA, 112 bp, Homo sapiens; identical to SEQ ID NO: 275869
  chr21:31023452-31023564
  hypo

SEQ ID NO: 451034 - DNA, 85 bp, Homo sapiens; identical to SEQ ID NO: 275870
  chr21:32558510-32558595
  hypo

SEQ ID NO: 451035 - DNA, 89 bp, Homo sapiens; identical to SEQ ID NO: 13211
  chr21:32931770-32931859
  hypo

SEQ ID NO: 451036 - DNA, 154 bp, Homo sapiens; identical to SEQ ID NO: 205952
  chr21:32932326-32932480
  hypo

SEQ ID NO: 451037 - DNA, 150 bp, Homo sapiens; identical to SEQ ID NO: 220304
  chr21:33057409-33057559
  hypo

SEQ ID NO: 451038 - DNA, 45 bp, Homo sapiens; identical to SEQ ID NO: 205953
  chr21:33058221-33058266
  hypo

SEQ ID NO: 451039 - DNA, 32 bp, Homo sapiens; identical to SEQ ID NO: 220306
  chr21:33058553-33058585
  hypo

SEQ ID NO: 451040 - DNA, 111 bp, Homo sapiens; identical to SEQ ID NO: 275873
  chr21:33058885-33058996
  hypo

SEQ ID NO: 451041 - DNA, 101 bp, Homo sapiens; identical to SEQ ID NO: 220307
  chr21:33175427-33175528
  hypo

SEQ ID NO: 451042 - DNA, 139 bp, Homo sapiens; identical to SEQ ID NO: 275875
  chr21:33340684-33340823
  hypo

SEQ ID NO: 451043 - DNA, 202 bp, Homo sapiens; identical to SEQ ID NO: 275877
  chr21:33416034-33416236
  hypo

SEQ ID NO: 451044 - DNA, 120 bp, Homo sapiens; identical to SEQ ID NO: 275878
  chr21:33627820-33627940
  hypo

SEQ ID NO: 451045 - DNA, 78 bp, Homo sapiens; identical to SEQ ID NO: 328473
  chr21:33628733-33628811
  hypo

SEQ ID NO: 451046 - DNA, 33 bp, Homo sapiens; identical to SEQ ID NO: 220308
  chr21:33641298-33641331
  hypo

SEQ ID NO: 451047 - DNA, 33 bp, Homo sapiens; identical to SEQ ID NO: 275882
  chr21:33698086-33698119
  hypo

SEQ ID NO: 451048 - DNA, 616 bp, Homo sapiens; identical to SEQ ID NO: 220309
  chr21:33707628-33708244
  hypo

SEQ ID NO: 451049 - DNA, 165 bp, Homo sapiens; identical to SEQ ID NO: 275884
  chr21:33708274-33708439
  hypo

SEQ ID NO: 451050 - DNA, 137 bp, Homo sapiens; identical to SEQ ID NO: 328479
  chr21:33721619-33721756
  hypo

SEQ ID NO: 451051 - DNA, 42 bp, Homo sapiens; identical to SEQ ID NO: 275888
  chr21:33754389-33754431
  hypo

SEQ ID NO: 451052 - DNA, 102 bp, Homo sapiens; identical to SEQ ID NO: 275889
  chr21:33759538-33759640
  hypo

SEQ ID NO: 451053 - DNA, 583 bp, Homo sapiens; identical to SEQ ID NO: 275890
  chr21:33760391-33760974
  hypo

SEQ ID NO: 451054 - DNA, 32 bp, Homo sapiens; identical to SEQ ID NO: 413820
  chr21:33782206-33782238
  hypo

SEQ ID NO: 451055 - DNA, 158 bp, Homo sapiens; identical to SEQ ID NO: 275892
  chr21:33791606-33791764
  hypo

SEQ ID NO: 451056 - DNA, 163 bp, Homo sapiens; identical to SEQ ID NO: 220313
  chr21:33812566-33812729
  hypo

SEQ ID NO: 451057 - DNA, 80 bp, Homo sapiens; identical to SEQ ID NO: 275894
  chr21:33824927-33825007
  hypo

SEQ ID NO: 451058 - DNA, 240 bp, Homo sapiens; identical to SEQ ID NO: 220314
  chr21:33844219-33844459
  hypo

SEQ ID NO: 451059 - DNA, 208 bp, Homo sapiens; identical to SEQ ID NO: 220315
  chr21:33845782-33845990
  hypo

SEQ ID NO: 451060 - DNA, 65 bp, Homo sapiens; identical to SEQ ID NO: 220316
  chr21:33849056-33849121
  hypo

SEQ ID NO: 451061 - DNA, 36 bp, Homo sapiens; identical to SEQ ID NO: 275898
  chr21:33857747-33857783
  hypo

SEQ ID NO: 451062 - DNA, 85 bp, Homo sapiens; identical to SEQ ID NO: 275899
  chr21:33870148-33870233
  hypo

SEQ ID NO: 451063 - DNA, 89 bp, Homo sapiens; identical to SEQ ID NO: 220317
  chr21:33875251-33875340
  hypo

SEQ ID NO: 451064 - DNA, 148 bp, Homo sapiens; identical to SEQ ID NO: 220318
  chr21:33876126-33876274
  hypo

SEQ ID NO: 451065 - DNA, 120 bp, Homo sapiens; identical to SEQ ID NO: 275902
  chr21:33879876-33879996
  hypo

SEQ ID NO: 451066 - DNA, 117 bp, Homo sapiens; identical to SEQ ID NO: 275903
  chr21:33905871-33905988
  hypo

SEQ ID NO: 451067 - DNA, 219 bp, Homo sapiens; identical to SEQ ID NO: 220319
  chr21:33924144-33924363
  hypo

SEQ ID NO: 451068 - DNA, 109 bp, Homo sapiens; identical to SEQ ID NO: 275906
  chr21:33976772-33976881
  hypo

SEQ ID NO: 451069 - DNA, 54 bp, Homo sapiens; identical to SEQ ID NO: 413828
  chr21:34033543-34033597
  hypo

SEQ ID NO: 451070 - DNA, 149 bp, Homo sapiens; identical to SEQ ID NO: 275910
  chr21:34493986-34494135
  hypo

SEQ ID NO: 451071 - DNA, 176 bp, Homo sapiens; identical to SEQ ID NO: 275911
  chr21:34498741-34498917
  hypo

SEQ ID NO: 451072 - DNA, 34 bp, Homo sapiens; identical to SEQ ID NO: 328503
  chr21:34508599-34508633
  hypo

SEQ ID NO: 451073 - DNA, 75 bp, Homo sapiens; identical to SEQ ID NO: 275913
  chr21:34630963-34631038
  hypo

SEQ ID NO: 451074 - DNA, 92 bp, Homo sapiens; identical to SEQ ID NO: 220321
  chr21:34710940-34711032
  hypo

SEQ ID NO: 451075 - DNA, 32 bp, Homo sapiens; identical to SEQ ID NO: 220322
  chr21:34711332-34711364
  hypo

SEQ ID NO: 451076 - DNA, 40 bp, Homo sapiens; identical to SEQ ID NO: 220323
  chr21:34745739-34745779
  hypo

SEQ ID NO: 451077 - DNA, 254 bp, Homo sapiens; identical to SEQ ID NO: 275917
  chr21:34757192-34757446
  hypo

SEQ ID NO: 451078 - DNA, 686 bp, Homo sapiens; identical to SEQ ID NO: 295068
  chr21:34776086-34776772
  hypo

SEQ ID NO: 451079 - DNA, 41 bp, Homo sapiens; identical to SEQ ID NO: 295069
  chr21:34776997-34777038
  hypo

SEQ ID NO: 451080 - DNA, 36 bp, Homo sapiens; identical to SEQ ID NO: 275918
  chr21:34921350-34921386
  hypo

SEQ ID NO: 451081 - DNA, 251 bp, Homo sapiens; identical to SEQ ID NO: 328512
  chr21:34927031-34927282
  hypo

SEQ ID NO: 451082 - DNA, 180 bp, Homo sapiens; identical to SEQ ID NO: 328513
  chr21:34927363-34927543
  hypo

SEQ ID NO: 451083 - DNA, 36 bp, Homo sapiens; identical to SEQ ID NO: 275920
  chr21:35045297-35045333
  hypo

SEQ ID NO: 451084 - DNA, 308 bp, Homo sapiens; identical to SEQ ID NO: 275921
  chr21:35204298-35204606
  hypo

SEQ ID NO: 451085 - DNA, 154 bp, Homo sapiens; identical to SEQ ID NO: 275924
  chr21:35453130-35453284
  hypo

SEQ ID NO: 451086 - DNA, 100 bp, Homo sapiens; identical to SEQ ID NO: 275925
  chr21:35954876-35954976
  hypo

SEQ ID NO: 451087 - DNA, 247 bp, Homo sapiens; identical to SEQ ID NO: 205971
  chr21:35986732-35986979
  hypo

SEQ ID NO: 451088 - DNA, 44 bp, Homo sapiens; identical to SEQ ID NO: 275926
  chr21:36072874-36072918
  hypo

SEQ ID NO: 451089 - DNA, 77 bp, Homo sapiens; identical to SEQ ID NO: 275927
  chr21:36073649-36073726
  hypo

SEQ ID NO: 451090 - DNA, 74 bp, Homo sapiens; identical to SEQ ID NO: 275928
  chr21:36074666-36074740
  hypo

SEQ ID NO: 451091 - DNA, 1781 bp, Homo sapiens; identical to SEQ ID NO: 205972
  chr21:36160097-36161878
  hypo

SEQ ID NO: 451092 - DNA, 1943 bp, Homo sapiens; identical to SEQ ID NO: 425693
  chr21:36161932-36163875
  hypo

SEQ ID NO: 451093 - DNA, 342 bp, Homo sapiens; identical to SEQ ID NO: 425694
  chr21:36164756-36165098
  hypo

SEQ ID NO: 451094 - DNA, 162 bp, Homo sapiens; identical to SEQ ID NO: 205974
  chr21:36171597-36171759
  hypo

SEQ ID NO: 451095 - DNA, 67 bp, Homo sapiens; identical to SEQ ID NO: 401019
  chr21:36206695-36206762
  hypo

SEQ ID NO: 451096 - DNA, 77 bp, Homo sapiens; identical to SEQ ID NO: 275930
  chr21:36221023-36221100
  hypo

SEQ ID NO: 451097 - DNA, 105 bp, Homo sapiens; identical to SEQ ID NO: 205976
  chr21:36231770-36231875
  hypo

SEQ ID NO: 451098 - DNA, 53 bp, Homo sapiens; identical to SEQ ID NO: 275931
  chr21:36236602-36236655
  hypo

SEQ ID NO: 451099 - DNA, 42 bp, Homo sapiens; identical to SEQ ID NO: 275932
  chr21:36242109-36242151
  hypo

SEQ ID NO: 451100 - DNA, 179 bp, Homo sapiens; identical to SEQ ID NO: 205977
  chr21:36252845-36253024
  hypo

SEQ ID NO: 451101 - DNA, 266 bp, Homo sapiens; identical to SEQ ID NO: 205978
  chr21:36259127-36259393
  hypo

SEQ ID NO: 451102 - DNA, 39 bp, Homo sapiens; identical to SEQ ID NO: 205980
  chr21:36265221-36265260
  hypo

SEQ ID NO: 451103 - DNA, 122 bp, Homo sapiens; identical to SEQ ID NO: 275933
  chr21:36394526-36394648
  hypo

SEQ ID NO: 451104 - DNA, 117 bp, Homo sapiens; identical to SEQ ID NO: 205981
  chr21:36421138-36421255
  hypo

SEQ ID NO: 451105 - DNA, 131 bp, Homo sapiens; identical to SEQ ID NO: 205982
  chr21:36421464-36421595
  hypo

SEQ ID NO: 451106 - DNA, 143 bp, Homo sapiens; identical to SEQ ID NO: 275935
  chr21:36696253-36696396
  hypo

SEQ ID NO: 451107 - DNA, 134 bp, Homo sapiens; identical to SEQ ID NO: 220337
  chr21:37259305-37259439
  hypo

SEQ ID NO: 451108 - DNA, 183 bp, Homo sapiens; identical to SEQ ID NO: 275938
  chr21:37411502-37411685
  hypo

SEQ ID NO: 451109 - DNA, 32 bp, Homo sapiens; identical to SEQ ID NO: 275939
  chr21:37413159-37413191
  hypo

SEQ ID NO: 451110 - DNA, 177 bp, Homo sapiens; identical to SEQ ID NO: 275940
  chr21:37417895-37418072
  hypo

SEQ ID NO: 451111 - DNA, 138 bp, Homo sapiens; identical to SEQ ID NO: 275941
  chr21:37431011-37431149
  hypo

SEQ ID NO: 451112 - DNA, 42 bp, Homo sapiens; identical to SEQ ID NO: 275942
  chr21:37514437-37514479
  hypo

SEQ ID NO: 451113 - DNA, 62 bp, Homo sapiens; identical to SEQ ID NO: 275943
  chr21:37527866-37527928
  hypo

SEQ ID NO: 451114 - DNA, 47 bp, Homo sapiens; identical to SEQ ID NO: 275944
  chr21:37571105-37571152
  hypo

SEQ ID NO: 451115 - DNA, 177 bp, Homo sapiens; identical to SEQ ID NO: 275945
  chr21:37571538-37571715
  hypo

SEQ ID NO: 451116 - DNA, 57 bp, Homo sapiens; identical to SEQ ID NO: 275947
  chr21:37612232-37612289
  hypo

SEQ ID NO: 451117 - DNA, 177 bp, Homo sapiens; identical to SEQ ID NO: 275949
  chr21:37618034-37618211
  hypo

SEQ ID NO: 451118 - DNA, 153 bp, Homo sapiens; identical to SEQ ID NO: 275950
  chr21:37650248-37650401
  hypo

SEQ ID NO: 451119 - DNA, 45 bp, Homo sapiens; identical to SEQ ID NO: 275952
  chr21:37727417-37727462
  hypo

SEQ ID NO: 451120 - DNA, 46 bp, Homo sapiens; identical to SEQ ID NO: 275953
  chr21:37747436-37747482
  hypo

SEQ ID NO: 451121 - DNA, 280 bp, Homo sapiens; identical to SEQ ID NO: 328559
  chr21:37750164-37750444
  hypo

SEQ ID NO: 451122 - DNA, 101 bp, Homo sapiens; identical to SEQ ID NO: 328561
  chr21:37780744-37780845
  hypo

SEQ ID NO: 451123 - DNA, 40 bp, Homo sapiens; identical to SEQ ID NO: 220342
  chr21:37781692-37781732
  hypo

SEQ ID NO: 451124 - DNA, 35 bp, Homo sapiens; identical to SEQ ID NO: 275959
  chr21:37795935-37795970
  hypo

SEQ ID NO: 451125 - DNA, 431 bp, Homo sapiens; identical to SEQ ID NO: 275960
  chr21:37833298-37833729
  hypo

SEQ ID NO: 451126 - DNA, 206 bp, Homo sapiens; identical to SEQ ID NO: 220343
  chr21:37847275-37847481
  hypo

SEQ ID NO: 451127 - DNA, 79 bp, Homo sapiens; identical to SEQ ID NO: 275962
  chr21:37855513-37855592
  hypo

SEQ ID NO: 451128 - DNA, 64 bp, Homo sapiens; identical to SEQ ID NO: 275963
  chr21:38103483-38103547
  hypo

SEQ ID NO: 451129 - DNA, 94 bp, Homo sapiens; identical to SEQ ID NO: 275964
  chr21:38163560-38163654
  hypo

SEQ ID NO: 451130 - DNA, 87 bp, Homo sapiens; identical to SEQ ID NO: 275967
  chr21:38179973-38180060
  hypo

SEQ ID NO: 451131 - DNA, 73 bp, Homo sapiens; identical to SEQ ID NO: 275968
  chr21:38248311-38248384
  hypo

SEQ ID NO: 451132 - DNA, 200 bp, Homo sapiens; identical to SEQ ID NO: 275969
  chr21:38282807-38283007
  hypo

SEQ ID NO: 451133 - DNA, 244 bp, Homo sapiens; identical to SEQ ID NO: 275970
  chr21:38299536-38299780
  hypo

SEQ ID NO: 451134 - DNA, 40 bp, Homo sapiens; identical to SEQ ID NO: 275971
  chr21:38355344-38355384
  hypo

SEQ ID NO: 451135 - DNA, 199 bp, Homo sapiens; identical to SEQ ID NO: 295105
  chr21:38362192-38362391
  hypo

SEQ ID NO: 451136 - DNA, 122 bp, Homo sapiens; identical to SEQ ID NO: 328578
  chr21:38383188-38383310
  hypo

SEQ ID NO: 451137 - DNA, 120 bp, Homo sapiens; identical to SEQ ID NO: 220344
  chr21:38419197-38419317
  hypo

SEQ ID NO: 451138 - DNA, 415 bp, Homo sapiens; identical to SEQ ID NO: 295110
  chr21:38446375-38446790
  hypo

SEQ ID NO: 451139 - DNA, 73 bp, Homo sapiens; identical to SEQ ID NO: 220345
  chr21:38566696-38566769
  hypo

SEQ ID NO: 451140 - DNA, 182 bp, Homo sapiens; identical to SEQ ID NO: 275976
  chr21:38567963-38568145
  hypo

SEQ ID NO: 451141 - DNA, 115 bp, Homo sapiens; identical to SEQ ID NO: 275977
  chr21:38574613-38574728
  hypo

SEQ ID NO: 451142 - DNA, 180 bp, Homo sapiens; identical to SEQ ID NO: 275979
  chr21:38603576-38603756
  hypo

SEQ ID NO: 451143 - DNA, 269 bp, Homo sapiens; identical to SEQ ID NO: 275980
  chr21:38605419-38605688
  hypo

SEQ ID NO: 451144 - DNA, 35 bp, Homo sapiens; identical to SEQ ID NO: 220346
  chr21:38605997-38606032
  hypo

SEQ ID NO: 451145 - DNA, 44 bp, Homo sapiens; identical to SEQ ID NO: 220347
  chr21:38606095-38606139
  hypo

SEQ ID NO: 451146 - DNA, 120 bp, Homo sapiens; identical to SEQ ID NO: 220348
  chr21:38673107-38673227
  hypo

SEQ ID NO: 451147 - DNA, 50 bp, Homo sapiens; identical to SEQ ID NO: 328590
  chr21:38823585-38823635
  hypo

SEQ ID NO: 451148 - DNA, 397 bp, Homo sapiens; identical to SEQ ID NO: 220349
  chr21:38823665-38824062
  hypo

SEQ ID NO: 451149 - DNA, 154 bp, Homo sapiens; identical to SEQ ID NO: 275985
  chr21:38832660-38832814
  hypo

SEQ ID NO: 451150 - DNA, 214 bp, Homo sapiens; identical to SEQ ID NO: 275988
  chr21:39021859-39022073
  hypo

SEQ ID NO: 451151 - DNA, 142 bp, Homo sapiens; identical to SEQ ID NO: 220352
  chr21:39726165-39726307
  hypo

SEQ ID NO: 451152 - DNA, 61 bp, Homo sapiens; identical to SEQ ID NO: 275990
  chr21:39800302-39800363
  hypo

SEQ ID NO: 451153 - DNA, 69 bp, Homo sapiens; identical to SEQ ID NO: 275991
  chr21:40047614-40047683
  hypo

SEQ ID NO: 451154 - DNA, 164 bp, Homo sapiens; identical to SEQ ID NO: 275992
  chr21:40049306-40049470
  hypo

SEQ ID NO: 451155 - DNA, 181 bp, Homo sapiens; identical to SEQ ID NO: 275993
  chr21:40056140-40056321
  hypo

SEQ ID NO: 451156 - DNA, 34 bp, Homo sapiens; identical to SEQ ID NO: 275994
  chr21:40082800-40082834
  hypo

SEQ ID NO: 451157 - DNA, 86 bp, Homo sapiens; identical to SEQ ID NO: 220357
  chr21:40117700-40117786
  hypo

SEQ ID NO: 451158 - DNA, 181 bp, Homo sapiens; identical to SEQ ID NO: 275996
  chr21:40146604-40146785
  hypo

SEQ ID NO: 451159 - DNA, 196 bp, Homo sapiens; identical to SEQ ID NO: 275997
  chr21:40168980-40169176
  hypo

SEQ ID NO: 451160 - DNA, 1243 bp, Homo sapiens; identical to SEQ ID NO: 295130
  chr21:40177485-40178728
  hypo

SEQ ID NO: 451161 - DNA, 329 bp, Homo sapiens; identical to SEQ ID NO: 275998
  chr21:40189392-40189721
  hypo

SEQ ID NO: 451162 - DNA, 243 bp, Homo sapiens; identical to SEQ ID NO: 275999
  chr21:40190268-40190511
  hypo

SEQ ID NO: 451163 - DNA, 183 bp, Homo sapiens; identical to SEQ ID NO: 220359
  chr21:40191659-40191842
  hypo

SEQ ID NO: 451164 - DNA, 43 bp, Homo sapiens; identical to SEQ ID NO: 220360
  chr21:40208390-40208433
  hypo

SEQ ID NO: 451165 - DNA, 36 bp, Homo sapiens; identical to SEQ ID NO: 276002
  chr21:40212524-40212560
  hypo

SEQ ID NO: 451166 - DNA, 44 bp, Homo sapiens; identical to SEQ ID NO: 220361
  chr21:40278582-40278626
  hypo

SEQ ID NO: 451167 - DNA, 74 bp, Homo sapiens; identical to SEQ ID NO: 276005
  chr21:40328293-40328367
  hypo

SEQ ID NO: 451168 - DNA, 33 bp, Homo sapiens; identical to SEQ ID NO: 276007
  chr21:40333255-40333288
  hypo

SEQ ID NO: 451169 - DNA, 152 bp, Homo sapiens; identical to SEQ ID NO: 276008
  chr21:40333528-40333680
  hypo

SEQ ID NO: 451170 - DNA, 284 bp, Homo sapiens; identical to SEQ ID NO: 276009
  chr21:40340040-40340324
  hypo

SEQ ID NO: 451171 - DNA, 144 bp, Homo sapiens; identical to SEQ ID NO: 276011
  chr21:40354427-40354571
  hypo

SEQ ID NO: 451172 - DNA, 427 bp, Homo sapiens; identical to SEQ ID NO: 276012
  chr21:40365999-40366426
  hypo

SEQ ID NO: 451173 - DNA, 40 bp, Homo sapiens; identical to SEQ ID NO: 276013
  chr21:40425340-40425380
  hypo

SEQ ID NO: 451174 - DNA, 145 bp, Homo sapiens; identical to SEQ ID NO: 276014
  chr21:40431056-40431201
  hypo

SEQ ID NO: 451175 - DNA, 54 bp, Homo sapiens; identical to SEQ ID NO: 276015
  chr21:40433691-40433745
  hypo

SEQ ID NO: 451176 - DNA, 201 bp, Homo sapiens; identical to SEQ ID NO: 220364
  chr21:40434519-40434720
  hypo

SEQ ID NO: 451177 - DNA, 42 bp, Homo sapiens; identical to SEQ ID NO: 276017
  chr21:40453322-40453364
  hypo

SEQ ID NO: 451178 - DNA, 46 bp, Homo sapiens; identical to SEQ ID NO: 276018
  chr21:40463109-40463155
  hypo

SEQ ID NO: 451179 - DNA, 229 bp, Homo sapiens; identical to SEQ ID NO: 276019
  chr21:40465400-40465629
  hypo

SEQ ID NO: 451180 - DNA, 136 bp, Homo sapiens; identical to SEQ ID NO: 276020
  chr21:40479891-40480027
  hypo

SEQ ID NO: 451181 - DNA, 148 bp, Homo sapiens; identical to SEQ ID NO: 220365
  chr21:40480501-40480649
  hypo

SEQ ID NO: 451182 - DNA, 62 bp, Homo sapiens; identical to SEQ ID NO: 220366
  chr21:40488784-40488846
  hypo

SEQ ID NO: 451183 - DNA, 83 bp, Homo sapiens; identical to SEQ ID NO: 276023
  chr21:40490344-40490427
  hypo

SEQ ID NO: 451184 - DNA, 41 bp, Homo sapiens; identical to SEQ ID NO: 276026
  chr21:40510983-40511024
  hypo

SEQ ID NO: 451185 - DNA, 112 bp, Homo sapiens; identical to SEQ ID NO: 276027
  chr21:40525158-40525270
  hypo

SEQ ID NO: 451186 - DNA, 59 bp, Homo sapiens; identical to SEQ ID NO: 276028
  chr21:40525300-40525359
  hypo

SEQ ID NO: 451187 - DNA, 216 bp, Homo sapiens; identical to SEQ ID NO: 276030
  chr21:40693346-40693562
  hypo

SEQ ID NO: 451188 - DNA, 34 bp, Homo sapiens; identical to SEQ ID NO: 220368
  chr21:40697450-40697484
  hypo

SEQ ID NO: 451189 - DNA, 36 bp, Homo sapiens; identical to SEQ ID NO: 276032
  chr21:40705587-40705623
  hypo

SEQ ID NO: 451190 - DNA, 101 bp, Homo sapiens; identical to SEQ ID NO: 295131
  chr21:40751585-40751686
  hypo

SEQ ID NO: 451191 - DNA, 245 bp, Homo sapiens; identical to SEQ ID NO: 276034
  chr21:40764919-40765164
  hypo

SEQ ID NO: 451192 - DNA, 193 bp, Homo sapiens; identical to SEQ ID NO: 276035
  chr21:40820653-40820846
  hypo

SEQ ID NO: 451193 - DNA, 89 bp, Homo sapiens; identical to SEQ ID NO: 220370
  chr21:40904967-40905056
  hypo

SEQ ID NO: 451194 - DNA, 70 bp, Homo sapiens; identical to SEQ ID NO: 206012
  chr21:40941233-40941303
  hypo

SEQ ID NO: 451195 - DNA, 86 bp, Homo sapiens; identical to SEQ ID NO: 276038
  chr21:40952126-40952212
  hypo

SEQ ID NO: 451196 - DNA, 36 bp, Homo sapiens; identical to SEQ ID NO: 276039
  chr21:41281950-41281986
  hypo

SEQ ID NO: 451197 - DNA, 35 bp, Homo sapiens; identical to SEQ ID NO: 276040
  chr21:41711102-41711137
  hypo

SEQ ID NO: 451198 - DNA, 61 bp, Homo sapiens; identical to SEQ ID NO: 328656
  chr21:42447732-42447793
  hypo

SEQ ID NO: 451199 - DNA, 293 bp, Homo sapiens; identical to SEQ ID NO: 328657
  chr21:42447823-42448116
  hypo

SEQ ID NO: 451200 - DNA, 81 bp, Homo sapiens; identical to SEQ ID NO: 328658
  chr21:42448155-42448236
  hypo

SEQ ID NO: 451201 - DNA, 123 bp, Homo sapiens; identical to SEQ ID NO: 295136
  chr21:42539420-42539543
  hypo

SEQ ID NO: 451202 - DNA, 1593 bp, Homo sapiens; identical to SEQ ID NO: 133598
  chr21:42539583-42541176
  hypo

SEQ ID NO: 451203 - DNA, 172 bp, Homo sapiens; identical to SEQ ID NO: 276043
  chr21:42582372-42582544
  hypo

SEQ ID NO: 451204 - DNA, 39 bp, Homo sapiens; identical to SEQ ID NO: 220376
  chr21:42585677-42585716
  hypo

SEQ ID NO: 451205 - DNA, 57 bp, Homo sapiens; identical to SEQ ID NO: 276045
  chr21:42591778-42591835
  hypo

SEQ ID NO: 451206 - DNA, 94 bp, Homo sapiens; identical to SEQ ID NO: 220377
  chr21:42593386-42593480
  hypo

SEQ ID NO: 451207 - DNA, 41 bp, Homo sapiens
  chr21:42593780-42593821
  hypo
gtcagtgtctactgtgtgcctggccctgttacaggcatgca

SEQ ID NO: 451208 - DNA, 43 bp, Homo sapiens; identical to SEQ ID NO: 220379
  chr21:42596858-42596901
  hypo

SEQ ID NO: 451209 - DNA, 180 bp, Homo sapiens; identical to SEQ ID NO: 220380
  chr21:42608632-42608812
  hypo

SEQ ID NO: 451210 - DNA, 85 bp, Homo sapiens; identical to SEQ ID NO: 220381
  chr21:42609014-42609099
  hypo

SEQ ID NO: 451211 - DNA, 85 bp, Homo sapiens; identical to SEQ ID NO: 276051
  chr21:42609399-42609484
  hypo

SEQ ID NO: 451212 - DNA, 307 bp, Homo sapiens; identical to SEQ ID NO: 276056
  chr21:42676099-42676406
  hypo

SEQ ID NO: 451213 - DNA, 42 bp, Homo sapiens; identical to SEQ ID NO: 276057
  chr21:42700241-42700283
  hypo

SEQ ID NO: 451214 - DNA, 183 bp, Homo sapiens; identical to SEQ ID NO: 276058
  chr21:42710365-42710548
  hypo

SEQ ID NO: 451215 - DNA, 152 bp, Homo sapiens; identical to SEQ ID NO: 276060
  chr21:42838262-42838414
  hypo

SEQ ID NO: 451216 - DNA, 56 bp, Homo sapiens; identical to SEQ ID NO: 276061
  chr21:42860318-42860374
  hypo

SEQ ID NO: 451217 - DNA, 120 bp, Homo sapiens; identical to SEQ ID NO: 220388
  chr21:42896357-42896477
  hypo

SEQ ID NO: 451218 - DNA, 158 bp, Homo sapiens; identical to SEQ ID NO: 328684
  chr21:42953485-42953643
  hypo

SEQ ID NO: 451219 - DNA, 54 bp, Homo sapiens; identical to SEQ ID NO: 220390
  chr21:42953673-42953727
  hypo

SEQ ID NO: 451220 - DNA, 164 bp, Homo sapiens; identical to SEQ ID NO: 220391
  chr21:43021070-43021234
  hypo

SEQ ID NO: 451221 - DNA, 140 bp, Homo sapiens; identical to SEQ ID NO: 220392
  chr21:43026399-43026539
  hypo

SEQ ID NO: 451222 - DNA, 38 bp, Homo sapiens; identical to SEQ ID NO: 328688
  chr21:43033366-43033404
  hypo

SEQ ID NO: 451223 - DNA, 398 bp, Homo sapiens; identical to SEQ ID NO: 328689
  chr21:43033434-43033832
  hypo

SEQ ID NO: 451224 - DNA, 338 bp, Homo sapiens; identical to SEQ ID NO: 276067
  chr21:43050298-43050636
  hypo

SEQ ID NO: 451225 - DNA, 87 bp, Homo sapiens; identical to SEQ ID NO: 226286
  chr21:43067058-43067145
  hypo

SEQ ID NO: 451226 - DNA, 94 bp, Homo sapiens; identical to SEQ ID NO: 276068
  chr21:43069862-43069956
  hypo

SEQ ID NO: 451227 - DNA, 56 bp, Homo sapiens; identical to SEQ ID NO: 276069
  chr21:43083100-43083156
  hypo

SEQ ID NO: 451228 - DNA, 243 bp, Homo sapiens; identical to SEQ ID NO: 220393
  chr21:43088944-43089187
  hypo

SEQ ID NO: 451229 - DNA, 62 bp, Homo sapiens; identical to SEQ ID NO: 220394
  chr21:43090566-43090628
  hypo

SEQ ID NO: 451230 - DNA, 193 bp, Homo sapiens; identical to SEQ ID NO: 276072
  chr21:43102605-43102798
  hypo

SEQ ID NO: 451231 - DNA, 39 bp, Homo sapiens; identical to SEQ ID NO: 276073
  chr21:43108231-43108270
  hypo

SEQ ID NO: 451232 - DNA, 254 bp, Homo sapiens; identical to SEQ ID NO: 220395
  chr21:43109376-43109630
  hypo

SEQ ID NO: 451233 - DNA, 39 bp, Homo sapiens
  chr21:43161818-43161857
  hypo
ctgcaaagtggagggctgtccactggtcctcatccttgg

SEQ ID NO: 451234 - DNA, 644 bp, Homo sapiens; identical to SEQ ID NO: 220399
  chr21:43164044-43164688
  hypo

SEQ ID NO: 451235 - DNA, 162 bp, Homo sapiens; identical to SEQ ID NO: 276082
  chr21:43171157-43171319
  hypo

SEQ ID NO: 451236 - DNA, 161 bp, Homo sapiens; identical to SEQ ID NO: 276083
  chr21:43176654-43176815
  hypo

SEQ ID NO: 451237 - DNA, 111 bp, Homo sapiens; identical to SEQ ID NO: 220405
  chr21:43245253-43245364
  hypo

SEQ ID NO: 451238 - DNA, 263 bp, Homo sapiens; identical to SEQ ID NO: 276086
  chr21:43245662-43245925
  hypo

SEQ ID NO: 451239 - DNA, 104 bp, Homo sapiens; identical to SEQ ID NO: 276088
  chr21:43251938-43252042
  hypo

SEQ ID NO: 451240 - DNA, 153 bp, Homo sapiens; identical to SEQ ID NO: 276090
  chr21:43269265-43269418
  hypo

SEQ ID NO: 451241 - DNA, 564 bp, Homo sapiens; identical to SEQ ID NO: 276091
  chr21:43271129-43271693
  hypo

SEQ ID NO: 451242 - DNA, 39 bp, Homo sapiens; identical to SEQ ID NO: 276094
  chr21:43340738-43340777
  hypo

SEQ ID NO: 451243 - DNA, 89 bp, Homo sapiens; identical to SEQ ID NO: 220409
  chr21:43347890-43347979
  hypo

SEQ ID NO: 451244 - DNA, 33 bp, Homo sapiens; identical to SEQ ID NO: 220410
  chr21:43348009-43348042
  hypo

SEQ ID NO: 451245 - DNA, 149 bp, Homo sapiens; identical to SEQ ID NO: 276097
  chr21:43364211-43364360
  hypo

SEQ ID NO: 451246 - DNA, 979 bp, Homo sapiens; identical to SEQ ID NO: 295149
  chr21:43373386-43374365
  hypo

SEQ ID NO: 451247 - DNA, 60 bp, Homo sapiens; identical to SEQ ID NO: 328723
  chr21:43376434-43376494
  hypo

SEQ ID NO: 451248 - DNA, 60 bp, Homo sapiens; identical to SEQ ID NO: 220412
  chr21:43386123-43386183
  hypo

SEQ ID NO: 451249 - DNA, 278 bp, Homo sapiens; identical to SEQ ID NO: 276100
  chr21:43392888-43393166
  hypo

SEQ ID NO: 451250 - DNA, 65 bp, Homo sapiens; identical to SEQ ID NO: 220413
  chr21:43481098-43481163
  hypo

SEQ ID NO: 451251 - DNA, 100 bp, Homo sapiens; identical to SEQ ID NO: 276103
  chr21:43506200-43506300
  hypo

SEQ ID NO: 451252 - DNA, 63 bp, Homo sapiens; identical to SEQ ID NO: 328728
  chr21:43526203-43526266
  hypo

SEQ ID NO: 451253 - DNA, 103 bp, Homo sapiens; identical to SEQ ID NO: 328729
  chr21:43526309-43526412
  hypo

SEQ ID NO: 451254 - DNA, 96 bp, Homo sapiens; identical to SEQ ID NO: 276105
  chr21:43544448-43544544
  hypo

SEQ ID NO: 451255 - DNA, 148 bp, Homo sapiens; identical to SEQ ID NO: 276108
  chr21:43570325-43570473
  hypo

SEQ ID NO: 451256 - DNA, 233 bp, Homo sapiens; identical to SEQ ID NO: 276109
  chr21:43573759-43573992
  hypo

SEQ ID NO: 451257 - DNA, 71 bp, Homo sapiens; identical to SEQ ID NO: 276110
  chr21:43638119-43638190
  hypo

SEQ ID NO: 451258 - DNA, 44 bp, Homo sapiens; identical to SEQ ID NO: 276111
  chr21:43675552-43675596
  hypo

SEQ ID NO: 451259 - DNA, 193 bp, Homo sapiens; identical to SEQ ID NO: 276112
  chr21:43699162-43699355
  hypo

SEQ ID NO: 451260 - DNA, 114 bp, Homo sapiens; identical to SEQ ID NO: 276113
  chr21:43699804-43699918
  hypo

SEQ ID NO: 451261 - DNA, 237 bp, Homo sapiens; identical to SEQ ID NO: 220416
  chr21:43736993-43737230
  hypo

SEQ ID NO: 451262 - DNA, 32 bp, Homo sapiens; identical to SEQ ID NO: 276116
  chr21:43767096-43767128
  hypo

SEQ ID NO: 451263 - DNA, 424 bp, Homo sapiens; identical to SEQ ID NO: 276117
  chr21:43767524-43767948
  hypo

SEQ ID NO: 451264 - DNA, 197 bp, Homo sapiens; identical to SEQ ID NO: 276118
  chr21:43772764-43772961
  hypo

SEQ ID NO: 451265 - DNA, 50 bp, Homo sapiens; identical to SEQ ID NO: 276119
  chr21:43785262-43785312
  hypo

SEQ ID NO: 451266 - DNA, 227 bp, Homo sapiens; identical to SEQ ID NO: 276122
  chr21:43815455-43815682
  hypo

SEQ ID NO: 451267 - DNA, 460 bp, Homo sapiens; identical to SEQ ID NO: 276123
  chr21:43825720-43826180
  hypo

SEQ ID NO: 451268 - DNA, 49 bp, Homo sapiens; identical to SEQ ID NO: 328748
  chr21:43864679-43864728
  hypo

SEQ ID NO: 451269 - DNA, 36 bp, Homo sapiens; identical to SEQ ID NO: 276125
  chr21:43867444-43867480
  hypo

SEQ ID NO: 451270 - DNA, 42 bp, Homo sapiens; identical to SEQ ID NO: 276126
  chr21:43968301-43968343
  hypo

SEQ ID NO: 451271 - DNA, 93 bp, Homo sapiens; identical to SEQ ID NO: 276127
  chr21:43969268-43969361
  hypo

SEQ ID NO: 451272 - DNA, 122 bp, Homo sapiens; identical to SEQ ID NO: 220417
  chr21:43981535-43981657
  hypo

SEQ ID NO: 451273 - DNA, 61 bp, Homo sapiens; identical to SEQ ID NO: 220418
  chr21:43981687-43981748
  hypo

SEQ ID NO: 451274 - DNA, 214 bp, Homo sapiens; identical to SEQ ID NO: 276129
  chr21:43983784-43983998
  hypo

SEQ ID NO: 451275 - DNA, 48 bp, Homo sapiens; identical to SEQ ID NO: 276130
  chr21:43986296-43986344
  hypo

SEQ ID NO: 451276 - DNA, 183 bp, Homo sapiens; identical to SEQ ID NO: 276131
  chr21:43988059-43988242
  hypo

SEQ ID NO: 451277 - DNA, 133 bp, Homo sapiens; identical to SEQ ID NO: 276133
  chr21:44003047-44003180
  hypo

SEQ ID NO: 451278 - DNA, 171 bp, Homo sapiens; identical to SEQ ID NO: 276134
  chr21:44042062-44042233
  hypo

SEQ ID NO: 451279 - DNA, 160 bp, Homo sapiens; identical to SEQ ID NO: 276135
  chr21:44042441-44042601
  hypo

SEQ ID NO: 451280 - DNA, 223 bp, Homo sapiens; identical to SEQ ID NO: 276136
  chr21:44046313-44046536
  hypo

SEQ ID NO: 451281 - DNA, 134 bp, Homo sapiens; identical to SEQ ID NO: 276137
  chr21:44053075-44053209
  hypo

SEQ ID NO: 451282 - DNA, 147 bp, Homo sapiens; identical to SEQ ID NO: 220421
  chr21:44057645-44057792
  hypo

SEQ ID NO: 451283 - DNA, 109 bp, Homo sapiens; identical to SEQ ID NO: 220422
  chr21:44065364-44065473
  hypo

SEQ ID NO: 451284 - DNA, 82 bp, Homo sapiens; identical to SEQ ID NO: 220423
  chr21:44065918-44066000
  hypo

SEQ ID NO: 451285 - DNA, 274 bp, Homo sapiens; identical to SEQ ID NO: 276141
  chr21:44069369-44069643
  hypo

SEQ ID NO: 451286 - DNA, 298 bp, Homo sapiens; identical to SEQ ID NO: 276142
  chr21:44077994-44078292
  hypo

SEQ ID NO: 451287 - DNA, 205 bp, Homo sapiens; identical to SEQ ID NO: 220424
  chr21:44082373-44082578
  hypo

SEQ ID NO: 451288 - DNA, 308 bp, Homo sapiens; identical to SEQ ID NO: 276144
  chr21:44088802-44089110
  hypo

SEQ ID NO: 451289 - DNA, 373 bp, Homo sapiens; identical to SEQ ID NO: 276145
  chr21:44099305-44099678
  hypo

SEQ ID NO: 451290 - DNA, 94 bp, Homo sapiens; identical to SEQ ID NO: 276146
  chr21:44102122-44102216
  hypo

SEQ ID NO: 451291 - DNA, 128 bp, Homo sapiens; identical to SEQ ID NO: 276148
  chr21:44110392-44110520
  hypo

SEQ ID NO: 451292 - DNA, 34 bp, Homo sapiens; identical to SEQ ID NO: 276150
  chr21:44129779-44129813
  hypo

SEQ ID NO: 451293 - DNA, 42 bp, Homo sapiens; identical to SEQ ID NO: 276151
  chr21:44156220-44156262
  hypo

SEQ ID NO: 451294 - DNA, 155 bp, Homo sapiens; identical to SEQ ID NO: 276152
  chr21:44159325-44159480
  hypo

SEQ ID NO: 451295 - DNA, 150 bp, Homo sapiens; identical to SEQ ID NO: 276153
  chr21:44164005-44164155
  hypo

SEQ ID NO: 451296 - DNA, 136 bp, Homo sapiens; identical to SEQ ID NO: 276154
  chr21:44176666-44176802
  hypo

SEQ ID NO: 451297 - DNA, 153 bp, Homo sapiens; identical to SEQ ID NO: 276156
  chr21:44188342-44188495
  hypo

SEQ ID NO: 451298 - DNA, 145 bp, Homo sapiens; identical to SEQ ID NO: 276158
  chr21:44191718-44191863
  hypo

SEQ ID NO: 451299 - DNA, 445 bp, Homo sapiens; identical to SEQ ID NO: 276160
  chr21:44275677-44276122
  hypo

SEQ ID NO: 451300 - DNA, 225 bp, Homo sapiens; identical to SEQ ID NO: 328787
  chr21:44283356-44283581
  hypo

SEQ ID NO: 451301 - DNA, 44 bp, Homo sapiens; identical to SEQ ID NO: 276163
  chr21:44390976-44391020
  hypo

SEQ ID NO: 451302 - DNA, 120 bp, Homo sapiens; identical to SEQ ID NO: 276164
  chr21:44439927-44440047
  hypo

SEQ ID NO: 451303 - DNA, 246 bp, Homo sapiens; identical to SEQ ID NO: 220427
  chr21:44440492-44440738
  hypo

SEQ ID NO: 451304 - DNA, 39 bp, Homo sapiens; identical to SEQ ID NO: 413942
  chr21:44448042-44448081
  hypo

SEQ ID NO: 451305 - DNA, 46 bp, Homo sapiens; identical to SEQ ID NO: 220430
  chr21:44448696-44448742
  hypo

SEQ ID NO: 451306 - DNA, 203 bp, Homo sapiens; identical to SEQ ID NO: 276170
  chr21:44448964-44449167
  hypo

SEQ ID NO: 451307 - DNA, 662 bp, Homo sapiens; identical to SEQ ID NO: 276172
  chr21:44479014-44479676
  hypo

SEQ ID NO: 451308 - DNA, 46 bp, Homo sapiens; identical to SEQ ID NO: 328799
  chr21:44480610-44480656
  hypo

SEQ ID NO: 451309 - DNA, 456 bp, Homo sapiens; identical to SEQ ID NO: 276175
  chr21:44483490-44483946
  hypo

SEQ ID NO: 451310 - DNA, 65 bp, Homo sapiens; identical to SEQ ID NO: 295154
  chr21:44496297-44496362
  hypo

SEQ ID NO: 451311 - DNA, 110 bp, Homo sapiens; identical to SEQ ID NO: 206026
  chr21:44513219-44513329
  hypo

SEQ ID NO: 451312 - DNA, 176 bp, Homo sapiens; identical to SEQ ID NO: 206027
  chr21:44514586-44514762
  hypo

SEQ ID NO: 451313 - DNA, 80 bp, Homo sapiens; identical to SEQ ID NO: 276176
  chr21:44562056-44562136
  hypo

SEQ ID NO: 451314 - DNA, 78 bp, Homo sapiens; identical to SEQ ID NO: 276177
  chr21:44578931-44579009
  hypo

SEQ ID NO: 451315 - DNA, 73 bp, Homo sapiens; identical to SEQ ID NO: 276178
  chr21:44579210-44579283
  hypo

SEQ ID NO: 451316 - DNA, 229 bp, Homo sapiens; identical to SEQ ID NO: 220435
  chr21:44601206-44601435
  hypo

SEQ ID NO: 451317 - DNA, 34 bp, Homo sapiens; identical to SEQ ID NO: 276180
  chr21:44617829-44617863
  hypo

SEQ ID NO: 451318 - DNA, 34 bp, Homo sapiens; identical to SEQ ID NO: 276181
  chr21:44618103-44618137
  hypo

SEQ ID NO: 451319 - DNA, 535 bp, Homo sapiens; identical to SEQ ID NO: 276182
  chr21:44630080-44630615
  hypo

SEQ ID NO: 451320 - DNA, 233 bp, Homo sapiens; identical to SEQ ID NO: 276183
  chr21:44725369-44725602
  hypo

SEQ ID NO: 451321 - DNA, 111 bp, Homo sapiens; identical to SEQ ID NO: 276184
  chr21:44764101-44764212
  hypo

SEQ ID NO: 451322 - DNA, 82 bp, Homo sapiens; identical to SEQ ID NO: 276185
  chr21:44792954-44793036
  hypo

SEQ ID NO: 451323 - DNA, 201 bp, Homo sapiens; identical to SEQ ID NO: 220437
  chr21:44799064-44799265
  hypo

SEQ ID NO: 451324 - DNA, 322 bp, Homo sapiens; identical to SEQ ID NO: 276187
  chr21:44806801-44807123
  hypo

SEQ ID NO: 451325 - DNA, 826 bp, Homo sapiens; identical to SEQ ID NO: 276188
  chr21:44816265-44817091
  hypo

SEQ ID NO: 451326 - DNA, 49 bp, Homo sapiens; identical to SEQ ID NO: 220438
  chr21:44830890-44830939
  hypo

SEQ ID NO: 451327 - DNA, 350 bp, Homo sapiens; identical to SEQ ID NO: 328823
  chr21:44837631-44837981
  hypo

SEQ ID NO: 451328 - DNA, 392 bp, Homo sapiens; identical to SEQ ID NO: 276193
  chr21:44839042-44839434
  hypo

SEQ ID NO: 451329 - DNA, 48 bp, Homo sapiens; identical to SEQ ID NO: 276194
  chr21:44839755-44839803
  hypo

SEQ ID NO: 451330 - DNA, 228 bp, Homo sapiens; identical to SEQ ID NO: 220443
  chr21:44856274-44856502
  hypo

SEQ ID NO: 451331 - DNA, 372 bp, Homo sapiens; identical to SEQ ID NO: 276198
  chr21:44865715-44866087
  hypo

SEQ ID NO: 451332 - DNA, 193 bp, Homo sapiens; identical to SEQ ID NO: 276200
  chr21:44871136-44871329
  hypo

SEQ ID NO: 451333 - DNA, 198 bp, Homo sapiens; identical to SEQ ID NO: 328833
  chr21:44871641-44871839
  hypo

SEQ ID NO: 451334 - DNA, 466 bp, Homo sapiens; identical to SEQ ID NO: 328834
  chr21:44871869-44872335
  hypo

SEQ ID NO: 451335 - DNA, 111 bp, Homo sapiens; identical to SEQ ID NO: 276203
  chr21:44888677-44888788
  hypo

SEQ ID NO: 451336 - DNA, 80 bp, Homo sapiens; identical to SEQ ID NO: 276204
  chr21:44920331-44920411
  hypo

SEQ ID NO: 451337 - DNA, 369 bp, Homo sapiens; identical to SEQ ID NO: 328837
  chr21:45078407-45078776
  hypo

SEQ ID NO: 451338 - DNA, 213 bp, Homo sapiens; identical to SEQ ID NO: 328839
  chr21:45140276-45140489
  hypo

SEQ ID NO: 451339 - DNA, 144 bp, Homo sapiens; identical to SEQ ID NO: 328843
  chr21:45170075-45170219
  hypo

SEQ ID NO: 451340 - DNA, 232 bp, Homo sapiens; identical to SEQ ID NO: 328844
  chr21:45170408-45170640
  hypo

SEQ ID NO: 451341 - DNA, 500 bp, Homo sapiens; identical to SEQ ID NO: 387360
  chr21:45176320-45176820
  hypo

SEQ ID NO: 451342 - DNA, 179 bp, Homo sapiens; identical to SEQ ID NO: 226295
  chr21:45182012-45182191
  hypo

SEQ ID NO: 451343 - DNA, 156 bp, Homo sapiens; identical to SEQ ID NO: 295162
  chr21:45182669-45182825
  hypo

SEQ ID NO: 451344 - DNA, 100 bp, Homo sapiens; identical to SEQ ID NO: 276213
  chr21:45184714-45184814
  hypo

SEQ ID NO: 451345 - DNA, 32 bp, Homo sapiens; identical to SEQ ID NO: 328849
  chr21:45187154-45187186
  hypo

SEQ ID NO: 451346 - DNA, 545 bp, Homo sapiens; identical to SEQ ID NO: 276215
  chr21:45187450-45187995
  hypo

SEQ ID NO: 451347 - DNA, 421 bp, Homo sapiens; identical to SEQ ID NO: 276216
  chr21:45188555-45188976
  hypo

SEQ ID NO: 451348 - DNA, 33 bp, Homo sapiens; identical to SEQ ID NO: 220447
  chr21:45194488-45194521
  hypo

SEQ ID NO: 451349 - DNA, 40 bp, Homo sapiens; identical to SEQ ID NO: 276219
  chr21:45208439-45208479
  hypo

SEQ ID NO: 451350 - DNA, 469 bp, Homo sapiens; identical to SEQ ID NO: 276220
  chr21:45223510-45223979
  hypo

SEQ ID NO: 451351 - DNA, 598 bp, Homo sapiens; identical to SEQ ID NO: 220449
  chr21:45224195-45224793
  hypo

SEQ ID NO: 451352 - DNA, 106 bp, Homo sapiens; identical to SEQ ID NO: 220450
  chr21:45233494-45233600
  hypo

SEQ ID NO: 451353 - DNA, 137 bp, Homo sapiens; identical to SEQ ID NO: 276224
  chr21:45245440-45245577
  hypo

SEQ ID NO: 451354 - DNA, 282 bp, Homo sapiens; identical to SEQ ID NO: 276226
  chr21:45252134-45252416
  hypo

SEQ ID NO: 451355 - DNA, 238 bp, Homo sapiens; identical to SEQ ID NO: 276228
  chr21:45271700-45271938
  hypo

SEQ ID NO: 451356 - DNA, 42 bp, Homo sapiens; identical to SEQ ID NO: 276229
  chr21:45276200-45276242
  hypo

SEQ ID NO: 451357 - DNA, 42 bp, Homo sapiens; identical to SEQ ID NO: 220451
  chr21:45281601-45281643
  hypo

SEQ ID NO: 451358 - DNA, 50 bp, Homo sapiens; identical to SEQ ID NO: 220452
  chr21:45299401-45299451
  hypo

SEQ ID NO: 451359 - DNA, 186 bp, Homo sapiens; identical to SEQ ID NO: 276234
  chr21:45299787-45299973
  hypo

SEQ ID NO: 451360 - DNA, 317 bp, Homo sapiens; identical to SEQ ID NO: 276235
  chr21:45318873-45319190
  hypo

SEQ ID NO: 451361 - DNA, 307 bp, Homo sapiens; identical to SEQ ID NO: 328870
  chr21:45349836-45350143
  hypo

SEQ ID NO: 451362 - DNA, 273 bp, Homo sapiens; identical to SEQ ID NO: 413974
  chr21:45353649-45353922
  hypo

SEQ ID NO: 451363 - DNA, 78 bp, Homo sapiens; identical to SEQ ID NO: 220457
  chr21:45354855-45354933
  hypo

SEQ ID NO: 451364 - DNA, 113 bp, Homo sapiens; identical to SEQ ID NO: 276240
  chr21:45355818-45355931
  hypo

SEQ ID NO: 451365 - DNA, 99 bp, Homo sapiens; identical to SEQ ID NO: 276241
  chr21:45358107-45358206
  hypo

SEQ ID NO: 451366 - DNA, 256 bp, Homo sapiens; identical to SEQ ID NO: 220458
  chr21:45360447-45360703
  hypo

SEQ ID NO: 451367 - DNA, 186 bp, Homo sapiens; identical to SEQ ID NO: 276243
  chr21:45364365-45364551
  hypo

SEQ ID NO: 451368 - DNA, 246 bp, Homo sapiens; identical to SEQ ID NO: 276244
  chr21:45364876-45365122
  hypo

SEQ ID NO: 451369 - DNA, 369 bp, Homo sapiens; identical to SEQ ID NO: 276246
  chr21:45379437-45379806
  hypo

SEQ ID NO: 451370 - DNA, 429 bp, Homo sapiens; identical to SEQ ID NO: 295164
  chr21:45381212-45381641
  hypo

SEQ ID NO: 451371 - DNA, 205 bp, Homo sapiens; identical to SEQ ID NO: 276248
  chr21:45393402-45393607
  hypo

SEQ ID NO: 451372 - DNA, 221 bp, Homo sapiens; identical to SEQ ID NO: 220461
  chr21:45396665-45396886
  hypo

SEQ ID NO: 451373 - DNA, 219 bp, Homo sapiens; identical to SEQ ID NO: 220462
  chr21:45399689-45399908
  hypo

SEQ ID NO: 451374 - DNA, 34 bp, Homo sapiens
  chr21:45400148-45400182
  hypo
tccatctcaaaaaaaaaaaaaaaacaaaaaaaaa

SEQ ID NO: 451375 - DNA, 71 bp, Homo sapiens; identical to SEQ ID NO: 276252
  chr21:45402471-45402542
  hypo

SEQ ID NO: 451376 - DNA, 810 bp, Homo sapiens; identical to SEQ ID NO: 220465
  chr21:45403410-45404220
  hypo

SEQ ID NO: 451377 - DNA, 156 bp, Homo sapiens; identical to SEQ ID NO: 328890
  chr21:45411685-45411841
  hypo

SEQ ID NO: 451378 - DNA, 135 bp, Homo sapiens; identical to SEQ ID NO: 220466
  chr21:45446230-45446365
  hypo

SEQ ID NO: 451379 - DNA, 281 bp, Homo sapiens; identical to SEQ ID NO: 276256
  chr21:45478824-45479105
  hypo

SEQ ID NO: 451380 - DNA, 256 bp, Homo sapiens; identical to SEQ ID NO: 276257
  chr21:45479408-45479664
  hypo

SEQ ID NO: 451381 - DNA, 64 bp, Homo sapiens; identical to SEQ ID NO: 276258
  chr21:45483497-45483561
  hypo

SEQ ID NO: 451382 - DNA, 239 bp, Homo sapiens; identical to SEQ ID NO: 276259
  chr21:45494378-45494617
  hypo

SEQ ID NO: 451383 - DNA, 162 bp, Homo sapiens; identical to SEQ ID NO: 276262
  chr21:45511963-45512125
  hypo

SEQ ID NO: 451384 - DNA, 142 bp, Homo sapiens
  chr21:45513669-45513811
  hypo
tgatctcatatgatataaaacttatggtatcataaaaagttaaagatttaccaattttgtacaatcttctgctgggacaaggccaggcaaagggagtcagggcagggacaggtgctgtggggcctaaagcagcatgcatagg

SEQ ID NO: 451385 - DNA, 165 bp, Homo sapiens; identical to SEQ ID NO: 220469
  chr21:45546680-45546845
  hypo

SEQ ID NO: 451386 - DNA, 63 bp, Homo sapiens; identical to SEQ ID NO: 206032
  chr21:45553436-45553499
  hypo

SEQ ID NO: 451387 - DNA, 192 bp, Homo sapiens; identical to SEQ ID NO: 220471
  chr21:45558785-45558977
  hypo

SEQ ID NO: 451388 - DNA, 76 bp, Homo sapiens; identical to SEQ ID NO: 276269
  chr21:45586573-45586649
  hypo

SEQ ID NO: 451389 - DNA, 164 bp, Homo sapiens; identical to SEQ ID NO: 276270
  chr21:45605771-45605935
  hypo

SEQ ID NO: 451390 - DNA, 229 bp, Homo sapiens; identical to SEQ ID NO: 328910
  chr21:45626013-45626242
  hypo

SEQ ID NO: 451391 - DNA, 83 bp, Homo sapiens; identical to SEQ ID NO: 328911
  chr21:45626286-45626369
  hypo

SEQ ID NO: 451392 - DNA, 283 bp, Homo sapiens; identical to SEQ ID NO: 276275
  chr21:45653663-45653946
  hypo

SEQ ID NO: 451393 - DNA, 164 bp, Homo sapiens; identical to SEQ ID NO: 206033
  chr21:45660235-45660399
  hypo

SEQ ID NO: 451394 - DNA, 540 bp, Homo sapiens; identical to SEQ ID NO: 295171
  chr21:45662515-45663055
  hypo

SEQ ID NO: 451395 - DNA, 100 bp, Homo sapiens; identical to SEQ ID NO: 276277
  chr21:45676496-45676596
  hypo

SEQ ID NO: 451396 - DNA, 132 bp, Homo sapiens; identical to SEQ ID NO: 220475
  chr21:45678289-45678421
  hypo

SEQ ID NO: 451397 - DNA, 110 bp, Homo sapiens; identical to SEQ ID NO: 220476
  chr21:45709581-45709691
  hypo

SEQ ID NO: 451398 - DNA, 277 bp, Homo sapiens; identical to SEQ ID NO: 206034
  chr21:45713496-45713773
  hypo

SEQ ID NO: 451399 - DNA, 41 bp, Homo sapiens; identical to SEQ ID NO: 276281
  chr21:45730210-45730251
  hypo

SEQ ID NO: 451400 - DNA, 218 bp, Homo sapiens; identical to SEQ ID NO: 276283
  chr21:45744630-45744848
  hypo

SEQ ID NO: 451401 - DNA, 210 bp, Homo sapiens; identical to SEQ ID NO: 276285
  chr21:45751583-45751793
  hypo

SEQ ID NO: 451402 - DNA, 331 bp, Homo sapiens; identical to SEQ ID NO: 328927
  chr21:45753905-45754236
  hypo

SEQ ID NO: 451403 - DNA, 192 bp, Homo sapiens; identical to SEQ ID NO: 276287
  chr21:45754286-45754478
  hypo

SEQ ID NO: 451404 - DNA, 241 bp, Homo sapiens; identical to SEQ ID NO: 276288
  chr21:45768305-45768546
  hypo

SEQ ID NO: 451405 - DNA, 299 bp, Homo sapiens; identical to SEQ ID NO: 276289
  chr21:45768770-45769069
  hypo

SEQ ID NO: 451406 - DNA, 223 bp, Homo sapiens; identical to SEQ ID NO: 328933
  chr21:45819156-45819379
  hypo

SEQ ID NO: 451407 - DNA, 339 bp, Homo sapiens; identical to SEQ ID NO: 220483
  chr21:45819409-45819748
  hypo

SEQ ID NO: 451408 - DNA, 160 bp, Homo sapiens; identical to SEQ ID NO: 328936
  chr21:45847672-45847832
  hypo

SEQ ID NO: 451409 - DNA, 60 bp, Homo sapiens; identical to SEQ ID NO: 220485
  chr21:45847973-45848033
  hypo

SEQ ID NO: 451410 - DNA, 142 bp, Homo sapiens; identical to SEQ ID NO: 276294
  chr21:45871121-45871263
  hypo

SEQ ID NO: 451411 - DNA, 153 bp, Homo sapiens; identical to SEQ ID NO: 276295
  chr21:45895239-45895392
  hypo

SEQ ID NO: 451412 - DNA, 38 bp, Homo sapiens; identical to SEQ ID NO: 276296
  chr21:45895655-45895693
  hypo

SEQ ID NO: 451413 - DNA, 105 bp, Homo sapiens; identical to SEQ ID NO: 328941
  chr21:45919228-45919333
  hypo

SEQ ID NO: 451414 - DNA, 218 bp, Homo sapiens; identical to SEQ ID NO: 276298
  chr21:45922476-45922694
  hypo

SEQ ID NO: 451415 - DNA, 336 bp, Homo sapiens; identical to SEQ ID NO: 328943
  chr21:45939229-45939565
  hypo

SEQ ID NO: 451416 - DNA, 176 bp, Homo sapiens; identical to SEQ ID NO: 328944
  chr21:45939814-45939990
  hypo

SEQ ID NO: 451417 - DNA, 180 bp, Homo sapiens; identical to SEQ ID NO: 328945
  chr21:45940260-45940440
  hypo

SEQ ID NO: 451418 - DNA, 56 bp, Homo sapiens; identical to SEQ ID NO: 328946
  chr21:45940470-45940526
  hypo

SEQ ID NO: 451419 - DNA, 91 bp, Homo sapiens; identical to SEQ ID NO: 276303
  chr21:45951200-45951291
  hypo

SEQ ID NO: 451420 - DNA, 88 bp, Homo sapiens; identical to SEQ ID NO: 276304
  chr21:45951689-45951777
  hypo

SEQ ID NO: 451421 - DNA, 44 bp, Homo sapiens; identical to SEQ ID NO: 328952
  chr21:46068601-46068645
  hypo

SEQ ID NO: 451422 - DNA, 120 bp, Homo sapiens; identical to SEQ ID NO: 328953
  chr21:46068703-46068823
  hypo

SEQ ID NO: 451423 - DNA, 196 bp, Homo sapiens; identical to SEQ ID NO: 276309
  chr21:46144852-46145048
  hypo

SEQ ID NO: 451424 - DNA, 238 bp, Homo sapiens; identical to SEQ ID NO: 328956
  chr21:46173353-46173591
  hypo

SEQ ID NO: 451425 - DNA, 192 bp, Homo sapiens; identical to SEQ ID NO: 328957
  chr21:46183769-46183961
  hypo

SEQ ID NO: 451426 - DNA, 150 bp, Homo sapiens; identical to SEQ ID NO: 328958
  chr21:46184287-46184437
  hypo

SEQ ID NO: 451427 - DNA, 38 bp, Homo sapiens; identical to SEQ ID NO: 276314
  chr21:46186208-46186246
  hypo

SEQ ID NO: 451428 - DNA, 190 bp, Homo sapiens; identical to SEQ ID NO: 276315
  chr21:46187770-46187960
  hypo

SEQ ID NO: 451429 - DNA, 41 bp, Homo sapiens; identical to SEQ ID NO: 220487
  chr21:46193373-46193414
  hypo

SEQ ID NO: 451430 - DNA, 43 bp, Homo sapiens; identical to SEQ ID NO: 220488
  chr21:46193542-46193585
  hypo

SEQ ID NO: 451431 - DNA, 167 bp, Homo sapiens; identical to SEQ ID NO: 276317
  chr21:46199322-46199489
  hypo

SEQ ID NO: 451432 - DNA, 110 bp, Homo sapiens; identical to SEQ ID NO: 276318
  chr21:46200862-46200972
  hypo

SEQ ID NO: 451433 - DNA, 78 bp, Homo sapiens; identical to SEQ ID NO: 414005
  chr21:46277397-46277475
  hypo

SEQ ID NO: 451434 - DNA, 42 bp, Homo sapiens; identical to SEQ ID NO: 276325
  chr21:46278609-46278651
  hypo

SEQ ID NO: 451435 - DNA, 403 bp, Homo sapiens; identical to SEQ ID NO: 276326
  chr21:46306497-46306900
  hypo

SEQ ID NO: 451436 - DNA, 502 bp, Homo sapiens; identical to SEQ ID NO: 328972
  chr21:46309404-46309906
  hypo

SEQ ID NO: 451437 - DNA, 36 bp, Homo sapiens; identical to SEQ ID NO: 328973
  chr21:46309961-46309997
  hypo

SEQ ID NO: 451438 - DNA, 279 bp, Homo sapiens
  chr21:46319565-46319844
  hypo
gcactacggccagcgaggacaagccccttgtgaccagtggttgcctctcggcccacggctgatcccagccagaagtcctggcccctctgagccattgagatgcctccgcagagaggctcatcctaacccgtgcatcctgggctccttctcgcctctgtccctccctgcatgttcctcatggtccccgcagccgctcacccagctcaggcaatgggggcagggaggggccacactggaggaggcggactcaggggcagcagggaacgtacagtggaggcc

SEQ ID NO: 451439 - DNA, 130 bp, Homo sapiens; identical to SEQ ID NO: 328980
  chr21:46321383-46321513
  hypo

SEQ ID NO: 451440 - DNA, 88 bp, Homo sapiens; identical to SEQ ID NO: 276336
  chr21:46324432-46324520
  hypo

SEQ ID NO: 451441 - DNA, 37 bp, Homo sapiens; identical to SEQ ID NO: 276338
  chr21:46325576-46325613
  hypo

SEQ ID NO: 451442 - DNA, 178 bp, Homo sapiens; identical to SEQ ID NO: 220497
  chr21:46328823-46329001
  hypo

SEQ ID NO: 451443 - DNA, 417 bp, Homo sapiens; identical to SEQ ID NO: 328987
  chr21:46329031-46329448
  hypo

SEQ ID NO: 451444 - DNA, 468 bp, Homo sapiens; identical to SEQ ID NO: 276341
  chr21:46330230-46330698
  hypo

SEQ ID NO: 451445 - DNA, 170 bp, Homo sapiens; identical to SEQ ID NO: 220500
  chr21:46353949-46354119
  hypo

SEQ ID NO: 451446 - DNA, 96 bp, Homo sapiens; identical to SEQ ID NO: 220501
  chr21:46368232-46368328
  hypo

SEQ ID NO: 451447 - DNA, 511 bp, Homo sapiens; identical to SEQ ID NO: 276345
  chr21:46373000-46373511
  hypo

SEQ ID NO: 451448 - DNA, 36 bp, Homo sapiens; identical to SEQ ID NO: 276346
  chr21:46383298-46383334
  hypo

SEQ ID NO: 451449 - DNA, 200 bp, Homo sapiens; identical to SEQ ID NO: 220503
  chr21:46392162-46392362
  hypo

SEQ ID NO: 451450 - DNA, 334 bp, Homo sapiens; identical to SEQ ID NO: 276349
  chr21:46411918-46412252
  hypo

SEQ ID NO: 451451 - DNA, 186 bp, Homo sapiens; identical to SEQ ID NO: 329000
  chr21:46452572-46452758
  hypo

SEQ ID NO: 451452 - DNA, 57 bp, Homo sapiens; identical to SEQ ID NO: 329001
  chr21:46462853-46462910
  hypo

SEQ ID NO: 451453 - DNA, 77 bp, Homo sapiens; identical to SEQ ID NO: 329002
  chr21:46462940-46463017
  hypo

SEQ ID NO: 451454 - DNA, 234 bp, Homo sapiens; identical to SEQ ID NO: 329003
  chr21:46492081-46492315
  hypo

SEQ ID NO: 451455 - DNA, 49 bp, Homo sapiens; identical to SEQ ID NO: 329005
  chr21:46549426-46549475
  hypo

SEQ ID NO: 451456 - DNA, 51 bp, Homo sapiens; identical to SEQ ID NO: 100440
  chr21:46549556-46549607
  hypo

SEQ ID NO: 451457 - DNA, 246 bp, Homo sapiens; identical to SEQ ID NO: 276356
  chr21:46673896-46674142
  hypo

SEQ ID NO: 451458 - DNA, 120 bp, Homo sapiens; identical to SEQ ID NO: 329010
  chr21:46723184-46723304
  hypo

SEQ ID NO: 451459 - DNA, 91 bp, Homo sapiens; identical to SEQ ID NO: 329011
  chr21:46723334-46723425
  hypo

SEQ ID NO: 451460 - DNA, 171 bp, Homo sapiens; identical to SEQ ID NO: 276359
  chr21:46726342-46726513
  hypo

SEQ ID NO: 451461 - DNA, 354 bp, Homo sapiens; identical to SEQ ID NO: 276360
  chr21:46727437-46727791
  hypo

SEQ ID NO: 451462 - DNA, 70 bp, Homo sapiens; identical to SEQ ID NO: 276362
  chr21:46756061-46756131
  hypo

SEQ ID NO: 451463 - DNA, 255 bp, Homo sapiens; identical to SEQ ID NO: 220506
  chr21:46763204-46763459
  hypo

SEQ ID NO: 451464 - DNA, 82 bp, Homo sapiens; identical to SEQ ID NO: 276364
  chr21:46763922-46764004
  hypo

SEQ ID NO: 451465 - DNA, 500 bp, Homo sapiens; identical to SEQ ID NO: 276365
  chr21:46771045-46771545
  hypo

SEQ ID NO: 451466 - DNA, 411 bp, Homo sapiens; identical to SEQ ID NO: 220507
  chr21:46772699-46773110
  hypo

SEQ ID NO: 451467 - DNA, 164 bp, Homo sapiens; identical to SEQ ID NO: 276368
  chr21:46785896-46786060
  hypo

SEQ ID NO: 451468 - DNA, 87 bp, Homo sapiens; identical to SEQ ID NO: 220513
  chr21:46804103-46804190
  hypo

SEQ ID NO: 451469 - DNA, 288 bp, Homo sapiens; identical to SEQ ID NO: 220514
  chr21:46804430-46804718
  hypo

SEQ ID NO: 451470 - DNA, 142 bp, Homo sapiens; identical to SEQ ID NO: 276378
  chr21:46808897-46809039
  hypo

SEQ ID NO: 451471 - DNA, 105 bp, Homo sapiens; identical to SEQ ID NO: 276379
  chr21:46810057-46810162
  hypo

SEQ ID NO: 451472 - DNA, 163 bp, Homo sapiens; identical to SEQ ID NO: 276381
  chr21:46811415-46811578
  hypo

SEQ ID NO: 451473 - DNA, 138 bp, Homo sapiens; identical to SEQ ID NO: 220518
  chr21:46827462-46827600
  hypo

SEQ ID NO: 451474 - DNA, 45 bp, Homo sapiens; identical to SEQ ID NO: 220519
  chr21:46835035-46835080
  hypo

SEQ ID NO: 451475 - DNA, 113 bp, Homo sapiens; identical to SEQ ID NO: 220521
  chr21:46835910-46836023
  hypo

SEQ ID NO: 451476 - DNA, 275 bp, Homo sapiens; identical to SEQ ID NO: 276391
  chr21:46837961-46838236
  hypo

SEQ ID NO: 451477 - DNA, 51 bp, Homo sapiens; identical to SEQ ID NO: 276393
  chr21:46838714-46838765
  hypo

SEQ ID NO: 451478 - DNA, 56 bp, Homo sapiens; identical to SEQ ID NO: 276396
  chr21:46841890-46841946
  hypo

SEQ ID NO: 451479 - DNA, 38 bp, Homo sapiens; identical to SEQ ID NO: 276398
  chr21:46844058-46844096
  hypo

SEQ ID NO: 451480 - DNA, 322 bp, Homo sapiens; identical to SEQ ID NO: 276400
  chr21:46846292-46846614
  hypo

SEQ ID NO: 451481 - DNA, 32 bp, Homo sapiens; identical to SEQ ID NO: 276406
  chr21:46855682-46855714
  hypo

SEQ ID NO: 451482 - DNA, 172 bp, Homo sapiens; identical to SEQ ID NO: 276411
  chr21:46866054-46866226
  hypo

SEQ ID NO: 451483 - DNA, 65 bp, Homo sapiens; identical to SEQ ID NO: 276413
  chr21:46885376-46885441
  hypo

SEQ ID NO: 451484 - DNA, 324 bp, Homo sapiens; identical to SEQ ID NO: 276416
  chr21:46888080-46888404
  hypo

SEQ ID NO: 451485 - DNA, 182 bp, Homo sapiens; identical to SEQ ID NO: 276421
  chr21:46905927-46906109
  hypo

SEQ ID NO: 451486 - DNA, 138 bp, Homo sapiens; identical to SEQ ID NO: 276428
  chr21:46915151-46915289
  hypo

SEQ ID NO: 451487 - DNA, 132 bp, Homo sapiens; identical to SEQ ID NO: 276429
  chr21:46915604-46915736
  hypo

SEQ ID NO: 451488 - DNA, 48 bp, Homo sapiens; identical to SEQ ID NO: 276430
  chr21:46916179-46916227
  hypo

SEQ ID NO: 451489 - DNA, 101 bp, Homo sapiens; identical to SEQ ID NO: 276431
  chr21:46917527-46917628
  hypo

SEQ ID NO: 451490 - DNA, 255 bp, Homo sapiens; identical to SEQ ID NO: 329094
  chr21:46926184-46926439
  hypo

SEQ ID NO: 451491 - DNA, 247 bp, Homo sapiens; identical to SEQ ID NO: 220550
  chr21:46929727-46929974
  hypo

SEQ ID NO: 451492 - DNA, 33 bp, Homo sapiens; identical to SEQ ID NO: 276438
  chr21:46933738-46933771
  hypo

SEQ ID NO: 451493 - DNA, 50 bp, Homo sapiens; identical to SEQ ID NO: 220552
  chr21:46937010-46937060
  hypo

SEQ ID NO: 451494 - DNA, 78 bp, Homo sapiens; identical to SEQ ID NO: 276442
  chr21:46942255-46942333
  hypo

SEQ ID NO: 451495 - DNA, 104 bp, Homo sapiens; identical to SEQ ID NO: 206041
  chr21:46950778-46950882
  hypo

SEQ ID NO: 451496 - DNA, 88 bp, Homo sapiens; identical to SEQ ID NO: 220554
  chr21:46998316-46998404
  hypo

SEQ ID NO: 451497 - DNA, 163 bp, Homo sapiens; identical to SEQ ID NO: 329104
  chr21:47026083-47026246
  hypo

SEQ ID NO: 451498 - DNA, 173 bp, Homo sapiens; identical to SEQ ID NO: 226309
  chr21:47050917-47051090
  hypo

SEQ ID NO: 451499 - DNA, 46 bp, Homo sapiens; identical to SEQ ID NO: 220557
  chr21:47167569-47167615
  hypo

SEQ ID NO: 451500 - DNA, 170 bp, Homo sapiens; identical to SEQ ID NO: 276450
  chr21:47209072-47209242
  hypo

SEQ ID NO: 451501 - DNA, 63 bp, Homo sapiens; identical to SEQ ID NO: 329110
  chr21:47254672-47254735
  hypo

SEQ ID NO: 451502 - DNA, 227 bp, Homo sapiens; identical to SEQ ID NO: 329111
  chr21:47254765-47254992
  hypo

SEQ ID NO: 451503 - DNA, 85 bp, Homo sapiens; identical to SEQ ID NO: 220558
  chr21:47286941-47287026
  hypo

SEQ ID NO: 451504 - DNA, 112 bp, Homo sapiens; identical to SEQ ID NO: 220559
  chr21:47287439-47287551
  hypo

SEQ ID NO: 451505 - DNA, 206 bp, Homo sapiens; identical to SEQ ID NO: 276454
  chr21:47287811-47288017
  hypo

SEQ ID NO: 451506 - DNA, 118 bp, Homo sapiens; identical to SEQ ID NO: 276455
  chr21:47316477-47316595
  hypo

SEQ ID NO: 451507 - DNA, 209 bp, Homo sapiens; identical to SEQ ID NO: 220560
  chr21:47330900-47331109
  hypo

SEQ ID NO: 451508 - DNA, 306 bp, Homo sapiens; identical to SEQ ID NO: 276458
  chr21:47367321-47367627
  hypo

SEQ ID NO: 451509 - DNA, 127 bp, Homo sapiens; identical to SEQ ID NO: 276460
  chr21:47403601-47403728
  hypo

SEQ ID NO: 451510 - DNA, 293 bp, Homo sapiens; identical to SEQ ID NO: 276462
  chr21:47407169-47407462
  hypo

SEQ ID NO: 451511 - DNA, 87 bp, Homo sapiens; identical to SEQ ID NO: 276463
  chr21:47412237-47412324
  hypo

SEQ ID NO: 451512 - DNA, 75 bp, Homo sapiens; identical to SEQ ID NO: 276464
  chr21:47412919-47412994
  hypo

SEQ ID NO: 451513 - DNA, 139 bp, Homo sapiens; identical to SEQ ID NO: 276465
  chr21:47413400-47413539
  hypo

SEQ ID NO: 451514 - DNA, 141 bp, Homo sapiens; identical to SEQ ID NO: 220563
  chr21:47417619-47417760
  hypo

SEQ ID NO: 451515 - DNA, 318 bp, Homo sapiens; identical to SEQ ID NO: 220564
  chr21:47418109-47418427
  hypo

SEQ ID NO: 451516 - DNA, 226 bp, Homo sapiens; identical to SEQ ID NO: 276470
  chr21:47421947-47422173
  hypo

SEQ ID NO: 451517 - DNA, 139 bp, Homo sapiens; identical to SEQ ID NO: 220565
  chr21:47422523-47422662
  hypo

SEQ ID NO: 451518 - DNA, 219 bp, Homo sapiens; identical to SEQ ID NO: 329132
  chr21:47423177-47423396
  hypo

SEQ ID NO: 451519 - DNA, 338 bp, Homo sapiens; identical to SEQ ID NO: 329133
  chr21:47423426-47423764
  hypo

SEQ ID NO: 451520 - DNA, 137 bp, Homo sapiens; identical to SEQ ID NO: 329134
  chr21:47426310-47426447
  hypo

SEQ ID NO: 451521 - DNA, 188 bp, Homo sapiens; identical to SEQ ID NO: 329135
  chr21:47453063-47453251
  hypo

SEQ ID NO: 451522 - DNA, 202 bp, Homo sapiens; identical to SEQ ID NO: 329136
  chr21:47457188-47457390
  hypo

SEQ ID NO: 451523 - DNA, 114 bp, Homo sapiens; identical to SEQ ID NO: 220567
  chr21:47459901-47460015
  hypo

SEQ ID NO: 451524 - DNA, 99 bp, Homo sapiens; identical to SEQ ID NO: 276480
  chr21:47489507-47489606
  hypo

SEQ ID NO: 451525 - DNA, 84 bp, Homo sapiens; identical to SEQ ID NO: 276483
  chr21:47501022-47501106
  hypo

SEQ ID NO: 451526 - DNA, 483 bp, Homo sapiens; identical to SEQ ID NO: 276484
  chr21:47503500-47503983
  hypo

SEQ ID NO: 451527 - DNA, 157 bp, Homo sapiens; identical to SEQ ID NO: 220568
  chr21:47538429-47538586
  hypo

SEQ ID NO: 451528 - DNA, 65 bp, Homo sapiens; identical to SEQ ID NO: 276487
  chr21:47545574-47545639
  hypo

SEQ ID NO: 451529 - DNA, 171 bp, Homo sapiens; identical to SEQ ID NO: 220569
  chr21:47627575-47627746
  hypo

SEQ ID NO: 451530 - DNA, 107 bp, Homo sapiens; identical to SEQ ID NO: 276491
  chr21:47634460-47634567
  hypo

SEQ ID NO: 451531 - DNA, 81 bp, Homo sapiens; identical to SEQ ID NO: 276494
  chr21:47710424-47710505
  hypo

SEQ ID NO: 451532 - DNA, 110 bp, Homo sapiens; identical to SEQ ID NO: 206045
  chr21:47717450-47717560
  hypo

SEQ ID NO: 451533 - DNA, 84 bp, Homo sapiens; identical to SEQ ID NO: 206046
  chr21:47717589-47717673
  hypo

SEQ ID NO: 451534 - DNA, 116 bp, Homo sapiens; identical to SEQ ID NO: 206047
  chr21:47717748-47717864
  hypo

SEQ ID NO: 451535 - DNA, 45 bp, Homo sapiens; identical to SEQ ID NO: 295203
  chr21:47717865-47717910
  hypo

SEQ ID NO: 451536 - DNA, 58 bp, Homo sapiens; identical to SEQ ID NO: 329162
  chr21:47737837-47737895
  hypo

SEQ ID NO: 451537 - DNA, 103 bp, Homo sapiens; identical to SEQ ID NO: 329163
  chr21:47771657-47771760
  hypo

SEQ ID NO: 451538 - DNA, 98 bp, Homo sapiens; identical to SEQ ID NO: 220575
  chr21:47773781-47773879
  hypo

SEQ ID NO: 451539 - DNA, 1238 bp, Homo sapiens; identical to SEQ ID NO: 276499
  chr21:47774497-47775735
  hypo

SEQ ID NO: 451540 - DNA, 266 bp, Homo sapiens; identical to SEQ ID NO: 276501
  chr21:47798303-47798569
  hypo

SEQ ID NO: 451541 - DNA, 44 bp, Homo sapiens; identical to SEQ ID NO: 206048
  chr21:47799137-47799181
  hypo

SEQ ID NO: 451542 - DNA, 52 bp, Homo sapiens; identical to SEQ ID NO: 206049
  chr21:47799225-47799277
  hypo

SEQ ID NO: 451543 - DNA, 130 bp, Homo sapiens; identical to SEQ ID NO: 276503
  chr21:47805829-47805959
  hypo

SEQ ID NO: 451544 - DNA, 264 bp, Homo sapiens; identical to SEQ ID NO: 220581
  chr21:47811198-47811462
  hypo

SEQ ID NO: 451545 - DNA, 224 bp, Homo sapiens; identical to SEQ ID NO: 276505
  chr21:47819671-47819895
  hypo

SEQ ID NO: 451546 - DNA, 301 bp, Homo sapiens; identical to SEQ ID NO: 276507
  chr21:47851456-47851757
  hypo

SEQ ID NO: 451547 - DNA, 114 bp, Homo sapiens; identical to SEQ ID NO: 276510
  chr21:47897027-47897141
  hypo

SEQ ID NO: 451548 - DNA, 336 bp, Homo sapiens; identical to SEQ ID NO: 220583
  chr21:47965680-47966016
  hypo

SEQ ID NO: 451549 - DNA, 93 bp, Homo sapiens; identical to SEQ ID NO: 276513
  chr21:47979412-47979505
  hypo

SEQ ID NO: 451550 - DNA, 72 bp, Homo sapiens; identical to SEQ ID NO: 276514
  chr21:48083839-48083911
  hypo

SEQ ID NO: 451551 - DNA, 133 bp, Homo sapiens; identical to SEQ ID NO: 276515
  chr21:48084396-48084529
  hypo

SEQ ID NO: 451552 - DNA, 78 bp, Homo sapiens; identical to SEQ ID NO: 276516
  chr22:16216478-16216556
  hypo

SEQ ID NO: 451553 - DNA, 285 bp, Homo sapiens; identical to SEQ ID NO: 295209
  chr22:17601506-17601791
  hypo

SEQ ID NO: 451554 - DNA, 32 bp, Homo sapiens; identical to SEQ ID NO: 276517
  chr22:17674261-17674293
  hypo

SEQ ID NO: 451555 - DNA, 41 bp, Homo sapiens; identical to SEQ ID NO: 276518
  chr22:17735250-17735291
  hypo

SEQ ID NO: 451556 - DNA, 267 bp, Homo sapiens; identical to SEQ ID NO: 276519
  chr22:17828553-17828820
  hypo

SEQ ID NO: 451557 - DNA, 82 bp, Homo sapiens; identical to SEQ ID NO: 276520
  chr22:17882962-17883044
  hypo

SEQ ID NO: 451558 - DNA, 81 bp, Homo sapiens; identical to SEQ ID NO: 276521
  chr22:17891760-17891841
  hypo

SEQ ID NO: 451559 - DNA, 461 bp, Homo sapiens; identical to SEQ ID NO: 276522
  chr22:17897911-17898372
  hypo

SEQ ID NO: 451560 - DNA, 78 bp, Homo sapiens; identical to SEQ ID NO: 276523
  chr22:17932151-17932229
  hypo

SEQ ID NO: 451561 - DNA, 33 bp, Homo sapiens; identical to SEQ ID NO: 276524
  chr22:18038127-18038160
  hypo

SEQ ID NO: 451562 - DNA, 91 bp, Homo sapiens; identical to SEQ ID NO: 276525
  chr22:18070745-18070836
  hypo

SEQ ID NO: 451563 - DNA, 35 bp, Homo sapiens; identical to SEQ ID NO: 220586
  chr22:18074668-18074703
  hypo

SEQ ID NO: 451564 - DNA, 161 bp, Homo sapiens; identical to SEQ ID NO: 220587
  chr22:18081585-18081746
  hypo

SEQ ID NO: 451565 - DNA, 85 bp, Homo sapiens; identical to SEQ ID NO: 276530
  chr22:18220796-18220881
  hypo

SEQ ID NO: 451566 - DNA, 293 bp, Homo sapiens; identical to SEQ ID NO: 276531
  chr22:18232881-18233174
  hypo

SEQ ID NO: 451567 - DNA, 329 bp, Homo sapiens; identical to SEQ ID NO: 220590
  chr22:18286547-18286876
  hypo

SEQ ID NO: 451568 - DNA, 91 bp, Homo sapiens; identical to SEQ ID NO: 276535
  chr22:18287771-18287862
  hypo

SEQ ID NO: 451569 - DNA, 96 bp, Homo sapiens; identical to SEQ ID NO: 220591
  chr22:18291185-18291281
  hypo

SEQ ID NO: 451570 - DNA, 315 bp, Homo sapiens; identical to SEQ ID NO: 220592
  chr22:18291533-18291848
  hypo

SEQ ID NO: 451571 - DNA, 163 bp, Homo sapiens; identical to SEQ ID NO: 276538
  chr22:18295061-18295224
  hypo

SEQ ID NO: 451572 - DNA, 263 bp, Homo sapiens; identical to SEQ ID NO: 276539
  chr22:18295543-18295806
  hypo

SEQ ID NO: 451573 - DNA, 98 bp, Homo sapiens; identical to SEQ ID NO: 220595
  chr22:18329915-18330013
  hypo

SEQ ID NO: 451574 - DNA, 44 bp, Homo sapiens; identical to SEQ ID NO: 276543
  chr22:18345292-18345336
  hypo

SEQ ID NO: 451575 - DNA, 54 bp, Homo sapiens; identical to SEQ ID NO: 276545
  chr22:18349167-18349221
  hypo

SEQ ID NO: 451576 - DNA, 151 bp, Homo sapiens; identical to SEQ ID NO: 276546
  chr22:18349528-18349679
  hypo

SEQ ID NO: 451577 - DNA, 751 bp, Homo sapiens; identical to SEQ ID NO: 276547
  chr22:18352969-18353720
  hypo

SEQ ID NO: 451578 - DNA, 410 bp, Homo sapiens; identical to SEQ ID NO: 276548
  chr22:18354732-18355142
  hypo

SEQ ID NO: 451579 - DNA, 154 bp, Homo sapiens; identical to SEQ ID NO: 220600
  chr22:18355710-18355864
  hypo

SEQ ID NO: 451580 - DNA, 82 bp, Homo sapiens; identical to SEQ ID NO: 220601
  chr22:18358159-18358241
  hypo

SEQ ID NO: 451581 - DNA, 146 bp, Homo sapiens; identical to SEQ ID NO: 220602
  chr22:18363713-18363859
  hypo

SEQ ID NO: 451582 - DNA, 348 bp, Homo sapiens; identical to SEQ ID NO: 276552
  chr22:18367813-18368161
  hypo

SEQ ID NO: 451583 - DNA, 62 bp, Homo sapiens; identical to SEQ ID NO: 220603
  chr22:18371272-18371334
  hypo

SEQ ID NO: 451584 - DNA, 265 bp, Homo sapiens; identical to SEQ ID NO: 276554
  chr22:18376242-18376507
  hypo

SEQ ID NO: 451585 - DNA, 105 bp, Homo sapiens; identical to SEQ ID NO: 220604
  chr22:18400898-18401003
  hypo

SEQ ID NO: 451586 - DNA, 180 bp, Homo sapiens; identical to SEQ ID NO: 220605
  chr22:18427241-18427421
  hypo

SEQ ID NO: 451587 - DNA, 134 bp, Homo sapiens; identical to SEQ ID NO: 276557
  chr22:18442886-18443020
  hypo

SEQ ID NO: 451588 - DNA, 262 bp, Homo sapiens; identical to SEQ ID NO: 276559
  chr22:18451007-18451269
  hypo

SEQ ID NO: 451589 - DNA, 206 bp, Homo sapiens; identical to SEQ ID NO: 329230
  chr22:18553623-18553829
  hypo

SEQ ID NO: 451590 - DNA, 135 bp, Homo sapiens; identical to SEQ ID NO: 276561
  chr22:18616597-18616732
  hypo

SEQ ID NO: 451591 - DNA, 38 bp, Homo sapiens; identical to SEQ ID NO: 276563
  chr22:18641801-18641839
  hypo

SEQ ID NO: 451592 - DNA, 97 bp, Homo sapiens; identical to SEQ ID NO: 276564
  chr22:18951683-18951780
  hypo

SEQ ID NO: 451593 - DNA, 271 bp, Homo sapiens; identical to SEQ ID NO: 276565
  chr22:18973383-18973654
  hypo

SEQ ID NO: 451594 - DNA, 36 bp, Homo sapiens; identical to SEQ ID NO: 276568
  chr22:19048114-19048150
  hypo

SEQ ID NO: 451595 - DNA, 40 bp, Homo sapiens; identical to SEQ ID NO: 329238
  chr22:19048389-19048429
  hypo

SEQ ID NO: 451596 - DNA, 193 bp, Homo sapiens; identical to SEQ ID NO: 220610
  chr22:19053069-19053262
  hypo

SEQ ID NO: 451597 - DNA, 61 bp, Homo sapiens; identical to SEQ ID NO: 276571
  chr22:19120094-19120155
  hypo

SEQ ID NO: 451598 - DNA, 33 bp, Homo sapiens; identical to SEQ ID NO: 220611
  chr22:19130728-19130761
  hypo

SEQ ID NO: 451599 - DNA, 36 bp, Homo sapiens; identical to SEQ ID NO: 276573
  chr22:19584223-19584259
  hypo

SEQ ID NO: 451600 - DNA, 108 bp, Homo sapiens; identical to SEQ ID NO: 276574
  chr22:19605268-19605376
  hypo

SEQ ID NO: 451601 - DNA, 219 bp, Homo sapiens; identical to SEQ ID NO: 220612
  chr22:19620238-19620457
  hypo

SEQ ID NO: 451602 - DNA, 67 bp, Homo sapiens; identical to SEQ ID NO: 220613
  chr22:19621109-19621176
  hypo

SEQ ID NO: 451603 - DNA, 231 bp, Homo sapiens; identical to SEQ ID NO: 276577
  chr22:19644023-19644254
  hypo

SEQ ID NO: 451604 - DNA, 120 bp, Homo sapiens; identical to SEQ ID NO: 276578
  chr22:19713942-19714062
  hypo

SEQ ID NO: 451605 - DNA, 120 bp, Homo sapiens; identical to SEQ ID NO: 276579
  chr22:19714362-19714482
  hypo

SEQ ID NO: 451606 - DNA, 36 bp, Homo sapiens; identical to SEQ ID NO: 276580
  chr22:19725676-19725712
  hypo

SEQ ID NO: 451607 - DNA, 288 bp, Homo sapiens; identical to SEQ ID NO: 295228
  chr22:19748301-19748589
  hypo

SEQ ID NO: 451608 - DNA, 40 bp, Homo sapiens; identical to SEQ ID NO: 133782
  chr22:19749084-19749124
  hypo

SEQ ID NO: 451609 - DNA, 169 bp, Homo sapiens; identical to SEQ ID NO: 295230
  chr22:19753518-19753687
  hypo

SEQ ID NO: 451610 - DNA, 105 bp, Homo sapiens; identical to SEQ ID NO: 133785
  chr22:19753869-19753974
  hypo

SEQ ID NO: 451611 - DNA, 355 bp, Homo sapiens; identical to SEQ ID NO: 276582
  chr22:19787001-19787356
  hypo

SEQ ID NO: 451612 - DNA, 160 bp, Homo sapiens; identical to SEQ ID NO: 276583
  chr22:19789604-19789764
  hypo

SEQ ID NO: 451613 - DNA, 170 bp, Homo sapiens; identical to SEQ ID NO: 220617
  chr22:19798779-19798949
  hypo

SEQ ID NO: 451614 - DNA, 92 bp, Homo sapiens; identical to SEQ ID NO: 276586
  chr22:19827948-19828040
  hypo

SEQ ID NO: 451615 - DNA, 75 bp, Homo sapiens; identical to SEQ ID NO: 276588
  chr22:19839318-19839393
  hypo

SEQ ID NO: 451616 - DNA, 84 bp, Homo sapiens; identical to SEQ ID NO: 220618
  chr22:19856498-19856582
  hypo

SEQ ID NO: 451617 - DNA, 123 bp, Homo sapiens; identical to SEQ ID NO: 276591
  chr22:19866816-19866939
  hypo

SEQ ID NO: 451618 - DNA, 132 bp, Homo sapiens; identical to SEQ ID NO: 276592
  chr22:19870367-19870499
  hypo

SEQ ID NO: 451619 - DNA, 55 bp, Homo sapiens; identical to SEQ ID NO: 276593
  chr22:19870815-19870870
  hypo

SEQ ID NO: 451620 - DNA, 419 bp, Homo sapiens; identical to SEQ ID NO: 220619
  chr22:19872851-19873270
  hypo

SEQ ID NO: 451621 - DNA, 159 bp, Homo sapiens; identical to SEQ ID NO: 220620
  chr22:19882774-19882933
  hypo

SEQ ID NO: 451622 - DNA, 114 bp, Homo sapiens; identical to SEQ ID NO: 220621
  chr22:19891185-19891299
  hypo

SEQ ID NO: 451623 - DNA, 496 bp, Homo sapiens; identical to SEQ ID NO: 276597
  chr22:19892195-19892691
  hypo

SEQ ID NO: 451624 - DNA, 177 bp, Homo sapiens; identical to SEQ ID NO: 276598
  chr22:19892921-19893098
  hypo

SEQ ID NO: 451625 - DNA, 74 bp, Homo sapiens; identical to SEQ ID NO: 276600
  chr22:19903251-19903325
  hypo

SEQ ID NO: 451626 - DNA, 157 bp, Homo sapiens; identical to SEQ ID NO: 276602
  chr22:19938443-19938600
  hypo

SEQ ID NO: 451627 - DNA, 142 bp, Homo sapiens; identical to SEQ ID NO: 276603
  chr22:19945258-19945400
  hypo

SEQ ID NO: 451628 - DNA, 257 bp, Homo sapiens; identical to SEQ ID NO: 276604
  chr22:19960818-19961075
  hypo

SEQ ID NO: 451629 - DNA, 213 bp, Homo sapiens; identical to SEQ ID NO: 329280
  chr22:19961470-19961683
  hypo

SEQ ID NO: 451630 - DNA, 81 bp, Homo sapiens; identical to SEQ ID NO: 329281
  chr22:19961721-19961802
  hypo

SEQ ID NO: 451631 - DNA, 57 bp, Homo sapiens; identical to SEQ ID NO: 220624
  chr22:19965520-19965577
  hypo

SEQ ID NO: 451632 - DNA, 300 bp, Homo sapiens; identical to SEQ ID NO: 220625
  chr22:19966359-19966659
  hypo

SEQ ID NO: 451633 - DNA, 310 bp, Homo sapiens; identical to SEQ ID NO: 276609
  chr22:19967264-19967574
  hypo

SEQ ID NO: 451634 - DNA, 38 bp, Homo sapiens; identical to SEQ ID NO: 220627
  chr22:19971874-19971912
  hypo

SEQ ID NO: 451635 - DNA, 156 bp, Homo sapiens; identical to SEQ ID NO: 220628
  chr22:19972131-19972287
  hypo

SEQ ID NO: 451636 - DNA, 75 bp, Homo sapiens; identical to SEQ ID NO: 276613
  chr22:19978174-19978249
  hypo

SEQ ID NO: 451637 - DNA, 81 bp, Homo sapiens; identical to SEQ ID NO: 276614
  chr22:20050530-20050611
  hypo

SEQ ID NO: 451638 - DNA, 83 bp, Homo sapiens
  chr22:20050671-20050754
  hypo
tcctcctcaaaaaaagaaaataagagaaaagagaagagaagaggaaaaagaaaagaagaaaagaaacaacccttgcagttccc

SEQ ID NO: 451639 - DNA, 272 bp, Homo sapiens; identical to SEQ ID NO: 220629
  chr22:20073379-20073651
  hypo

SEQ ID NO: 451640 - DNA, 202 bp, Homo sapiens; identical to SEQ ID NO: 276617
  chr22:20079436-20079638
  hypo

SEQ ID NO: 451641 - DNA, 42 bp, Homo sapiens; identical to SEQ ID NO: 276618
  chr22:20120590-20120632
  hypo

SEQ ID NO: 451642 - DNA, 174 bp, Homo sapiens; identical to SEQ ID NO: 220630
  chr22:20123202-20123376
  hypo

SEQ ID NO: 451643 - DNA, 344 bp, Homo sapiens; identical to SEQ ID NO: 276620
  chr22:20123633-20123977
  hypo

SEQ ID NO: 451644 - DNA, 190 bp, Homo sapiens; identical to SEQ ID NO: 220632
  chr22:20126324-20126514
  hypo

SEQ ID NO: 451645 - DNA, 248 bp, Homo sapiens; identical to SEQ ID NO: 276622
  chr22:20130992-20131240
  hypo

SEQ ID NO: 451646 - DNA, 161 bp, Homo sapiens; identical to SEQ ID NO: 220634
  chr22:20248011-20248172
  hypo

SEQ ID NO: 451647 - DNA, 433 bp, Homo sapiens; identical to SEQ ID NO: 206059
  chr22:20255237-20255670
  hypo

SEQ ID NO: 451648 - DNA, 146 bp, Homo sapiens; identical to SEQ ID NO: 276625
  chr22:20302965-20303111
  hypo

SEQ ID NO: 451649 - DNA, 50 bp, Homo sapiens; identical to SEQ ID NO: 329303
  chr22:20308710-20308760
  hypo

SEQ ID NO: 451650 - DNA, 208 bp, Homo sapiens; identical to SEQ ID NO: 220636
  chr22:20760013-20760221
  hypo

SEQ ID NO: 451651 - DNA, 45 bp, Homo sapiens; identical to SEQ ID NO: 329305
  chr22:20765421-20765466
  hypo

SEQ ID NO: 451652 - DNA, 120 bp, Homo sapiens; identical to SEQ ID NO: 276629
  chr22:20857254-20857374
  hypo

SEQ ID NO: 451653 - DNA, 131 bp, Homo sapiens; identical to SEQ ID NO: 220637
  chr22:20908750-20908881
  hypo

SEQ ID NO: 451654 - DNA, 111 bp, Homo sapiens; identical to SEQ ID NO: 276632
  chr22:20921973-20922084
  hypo

SEQ ID NO: 451655 - DNA, 614 bp, Homo sapiens; identical to SEQ ID NO: 276634
  chr22:20945800-20946414
  hypo

SEQ ID NO: 451656 - DNA, 112 bp, Homo sapiens; identical to SEQ ID NO: 276635
  chr22:20958608-20958720
  hypo

SEQ ID NO: 451657 - DNA, 77 bp, Homo sapiens; identical to SEQ ID NO: 329313
  chr22:21024825-21024902
  hypo

SEQ ID NO: 451658 - DNA, 53 bp, Homo sapiens; identical to SEQ ID NO: 329314
  chr22:21024948-21025001
  hypo

SEQ ID NO: 451659 - DNA, 60 bp, Homo sapiens; identical to SEQ ID NO: 276638
  chr22:21099331-21099391
  hypo

SEQ ID NO: 451660 - DNA, 344 bp, Homo sapiens; identical to SEQ ID NO: 276639
  chr22:21101701-21102045
  hypo

SEQ ID NO: 451661 - DNA, 174 bp, Homo sapiens; identical to SEQ ID NO: 276640
  chr22:21102482-21102656
  hypo

SEQ ID NO: 451662 - DNA, 246 bp, Homo sapiens; identical to SEQ ID NO: 329318
  chr22:21105393-21105639
  hypo

SEQ ID NO: 451663 - DNA, 117 bp, Homo sapiens; identical to SEQ ID NO: 329319
  chr22:21150558-21150675
  hypo

SEQ ID NO: 451664 - DNA, 164 bp, Homo sapiens; identical to SEQ ID NO: 220639
  chr22:21354050-21354214
  hypo

SEQ ID NO: 451665 - DNA, 43 bp, Homo sapiens; identical to SEQ ID NO: 329321
  chr22:21354474-21354517
  hypo

SEQ ID NO: 451666 - DNA, 149 bp, Homo sapiens; identical to SEQ ID NO: 220640
  chr22:21380146-21380295
  hypo

SEQ ID NO: 451667 - DNA, 102 bp, Homo sapiens; identical to SEQ ID NO: 220641
  chr22:21380358-21380460
  hypo

SEQ ID NO: 451668 - DNA, 179 bp, Homo sapiens; identical to SEQ ID NO: 276647
  chr22:21385183-21385362
  hypo

SEQ ID NO: 451669 - DNA, 251 bp, Homo sapiens; identical to SEQ ID NO: 295243
  chr22:21385764-21386015
  hypo

SEQ ID NO: 451670 - DNA, 296 bp, Homo sapiens; identical to SEQ ID NO: 220643
  chr22:21803347-21803643
  hypo

SEQ ID NO: 451671 - DNA, 31 bp, Homo sapiens; identical to SEQ ID NO: 220644
  chr22:21970644-21970675
  hypo

SEQ ID NO: 451672 - DNA, 33 bp, Homo sapiens; identical to SEQ ID NO: 276653
  chr22:21993228-21993261
  hypo

SEQ ID NO: 451673 - DNA, 147 bp, Homo sapiens; identical to SEQ ID NO: 220647
  chr22:22007501-22007648
  hypo

SEQ ID NO: 451674 - DNA, 41 bp, Homo sapiens; identical to SEQ ID NO: 220648
  chr22:22044381-22044422
  hypo

SEQ ID NO: 451675 - DNA, 147 bp, Homo sapiens; identical to SEQ ID NO: 276660
  chr22:22062353-22062500
  hypo

SEQ ID NO: 451676 - DNA, 42 bp, Homo sapiens; identical to SEQ ID NO: 295252
  chr22:22090486-22090528
  hypo

SEQ ID NO: 451677 - DNA, 42 bp, Homo sapiens; identical to SEQ ID NO: 276662
  chr22:22108627-22108669
  hypo

SEQ ID NO: 451678 - DNA, 35 bp, Homo sapiens; identical to SEQ ID NO: 220650
  chr22:22201294-22201329
  hypo

SEQ ID NO: 451679 - DNA, 331 bp, Homo sapiens; identical to SEQ ID NO: 295253
  chr22:22220990-22221321
  hypo

SEQ ID NO: 451680 - DNA, 216 bp, Homo sapiens; identical to SEQ ID NO: 226333
  chr22:22306476-22306692
  hypo

SEQ ID NO: 451681 - DNA, 311 bp, Homo sapiens; identical to SEQ ID NO: 295256
  chr22:22307056-22307367
  hypo

SEQ ID NO: 451682 - DNA, 33 bp, Homo sapiens; identical to SEQ ID NO: 220654
  chr22:22899308-22899341
  hypo

SEQ ID NO: 451683 - DNA, 49 bp, Homo sapiens; identical to SEQ ID NO: 220657
  chr22:22901056-22901105
  hypo

SEQ ID NO: 451684 - DNA, 56 bp, Homo sapiens; identical to SEQ ID NO: 220658
  chr22:22901455-22901511
  hypo

SEQ ID NO: 451685 - DNA, 36 bp, Homo sapiens; identical to SEQ ID NO: 276669
  chr22:22939290-22939326
  hypo

SEQ ID NO: 451686 - DNA, 165 bp, Homo sapiens; identical to SEQ ID NO: 276670
  chr22:23230279-23230444
  hypo

SEQ ID NO: 451687 - DNA, 215 bp, Homo sapiens; identical to SEQ ID NO: 276672
  chr22:23437916-23438131
  hypo

SEQ ID NO: 451688 - DNA, 106 bp, Homo sapiens; identical to SEQ ID NO: 220662
  chr22:23438416-23438522
  hypo

SEQ ID NO: 451689 - DNA, 103 bp, Homo sapiens; identical to SEQ ID NO: 276674
  chr22:23449790-23449893
  hypo

SEQ ID NO: 451690 - DNA, 208 bp, Homo sapiens; identical to SEQ ID NO: 276676
  chr22:23456377-23456585
  hypo

SEQ ID NO: 451691 - DNA, 441 bp, Homo sapiens; identical to SEQ ID NO: 295262
  chr22:23523110-23523551
  hypo

SEQ ID NO: 451692 - DNA, 42 bp, Homo sapiens; identical to SEQ ID NO: 276677
  chr22:23593618-23593660
  hypo

SEQ ID NO: 451693 - DNA, 295 bp, Homo sapiens; identical to SEQ ID NO: 276678
  chr22:23607403-23607698
  hypo

SEQ ID NO: 451694 - DNA, 113 bp, Homo sapiens; identical to SEQ ID NO: 276679
  chr22:23610355-23610468
  hypo

SEQ ID NO: 451695 - DNA, 85 bp, Homo sapiens; identical to SEQ ID NO: 276680
  chr22:23624725-23624810
  hypo

SEQ ID NO: 451696 - DNA, 364 bp, Homo sapiens; identical to SEQ ID NO: 276681
  chr22:23626214-23626578
  hypo

SEQ ID NO: 451697 - DNA, 99 bp, Homo sapiens; identical to SEQ ID NO: 220664
  chr22:23737249-23737348
  hypo

SEQ ID NO: 451698 - DNA, 126 bp, Homo sapiens; identical to SEQ ID NO: 276683
  chr22:23779039-23779165
  hypo

SEQ ID NO: 451699 - DNA, 92 bp, Homo sapiens; identical to SEQ ID NO: 276685
  chr22:23877156-23877248
  hypo

SEQ ID NO: 451700 - DNA, 141 bp, Homo sapiens; identical to SEQ ID NO: 276686
  chr22:24016561-24016702
  hypo

SEQ ID NO: 451701 - DNA, 153 bp, Homo sapiens; identical to SEQ ID NO: 220667
  chr22:24054816-24054969
  hypo

SEQ ID NO: 451702 - DNA, 35 bp, Homo sapiens; identical to SEQ ID NO: 220668
  chr22:24061196-24061231
  hypo

SEQ ID NO: 451703 - DNA, 35 bp, Homo sapiens; identical to SEQ ID NO: 276689
  chr22:24061531-24061566
  hypo

SEQ ID NO: 451704 - DNA, 718 bp, Homo sapiens; identical to SEQ ID NO: 295264
  chr22:24110159-24110877
  hypo

SEQ ID NO: 451705 - DNA, 218 bp, Homo sapiens; identical to SEQ ID NO: 276690
  chr22:24159810-24160028
  hypo

SEQ ID NO: 451706 - DNA, 51 bp, Homo sapiens; identical to SEQ ID NO: 329384
  chr22:24224724-24224775
  hypo

SEQ ID NO: 451707 - DNA, 31 bp, Homo sapiens; identical to SEQ ID NO: 329385
  chr22:24224805-24224836
  hypo

SEQ ID NO: 451708 - DNA, 44 bp, Homo sapiens; identical to SEQ ID NO: 276694
  chr22:24409920-24409964
  hypo

SEQ ID NO: 451709 - DNA, 108 bp, Homo sapiens; identical to SEQ ID NO: 220670
  chr22:24459508-24459616
  hypo

SEQ ID NO: 451710 - DNA, 142 bp, Homo sapiens; identical to SEQ ID NO: 276696
  chr22:24530396-24530538
  hypo

SEQ ID NO: 451711 - DNA, 131 bp, Homo sapiens; identical to SEQ ID NO: 276698
  chr22:24574386-24574517
  hypo

SEQ ID NO: 451712 - DNA, 35 bp, Homo sapiens; identical to SEQ ID NO: 276699
  chr22:24697722-24697757
  hypo

SEQ ID NO: 451713 - DNA, 38 bp, Homo sapiens; identical to SEQ ID NO: 220672
  chr22:24763169-24763207
  hypo

SEQ ID NO: 451714 - DNA, 91 bp, Homo sapiens; identical to SEQ ID NO: 206073
  chr22:24989196-24989287
  hypo

SEQ ID NO: 451715 - DNA, 139 bp, Homo sapiens; identical to SEQ ID NO: 276701
  chr22:24995693-24995832
  hypo

SEQ ID NO: 451716 - DNA, 130 bp, Homo sapiens; identical to SEQ ID NO: 220674
  chr22:25016920-25017050
  hypo

SEQ ID NO: 451717 - DNA, 36 bp, Homo sapiens; identical to SEQ ID NO: 276703
  chr22:25091139-25091175
  hypo

SEQ ID NO: 451718 - DNA, 254 bp, Homo sapiens; identical to SEQ ID NO: 276704
  chr22:25102501-25102755
  hypo

SEQ ID NO: 451719 - DNA, 103 bp, Homo sapiens; identical to SEQ ID NO: 276705
  chr22:25119952-25120055
  hypo

SEQ ID NO: 451720 - DNA, 326 bp, Homo sapiens; identical to SEQ ID NO: 276706
  chr22:25294115-25294441
  hypo

SEQ ID NO: 451721 - DNA, 120 bp, Homo sapiens; identical to SEQ ID NO: 220675
  chr22:25336184-25336304
  hypo

SEQ ID NO: 451722 - DNA, 331 bp, Homo sapiens; identical to SEQ ID NO: 220679
  chr22:25461275-25461606
  hypo

SEQ ID NO: 451723 - DNA, 187 bp, Homo sapiens; identical to SEQ ID NO: 220680
  chr22:25462990-25463177
  hypo

SEQ ID NO: 451724 - DNA, 40 bp, Homo sapiens; identical to SEQ ID NO: 276710
  chr22:25464946-25464986
  hypo

SEQ ID NO: 451725 - DNA, 91 bp, Homo sapiens; identical to SEQ ID NO: 276711
  chr22:25483556-25483647
  hypo

SEQ ID NO: 451726 - DNA, 101 bp, Homo sapiens; identical to SEQ ID NO: 220681
  chr22:25484763-25484864
  hypo

SEQ ID NO: 451727 - DNA, 41 bp, Homo sapiens; identical to SEQ ID NO: 220682
  chr22:25484924-25484965
  hypo

SEQ ID NO: 451728 - DNA, 85 bp, Homo sapiens; identical to SEQ ID NO: 220683
  chr22:25505390-25505475
  hypo

SEQ ID NO: 451729 - DNA, 44 bp, Homo sapiens; identical to SEQ ID NO: 276715
  chr22:25513768-25513812
  hypo

SEQ ID NO: 451730 - DNA, 184 bp, Homo sapiens; identical to SEQ ID NO: 220685
  chr22:25573211-25573395
  hypo

SEQ ID NO: 451731 - DNA, 195 bp, Homo sapiens; identical to SEQ ID NO: 276720
  chr22:25615344-25615539
  hypo

SEQ ID NO: 451732 - DNA, 155 bp, Homo sapiens; identical to SEQ ID NO: 220687
  chr22:25753158-25753313
  hypo

SEQ ID NO: 451733 - DNA, 42 bp, Homo sapiens; identical to SEQ ID NO: 220688
  chr22:25756562-25756604
  hypo

SEQ ID NO: 451734 - DNA, 33 bp, Homo sapiens; identical to SEQ ID NO: 276723
  chr22:26069299-26069332
  hypo

SEQ ID NO: 451735 - DNA, 155 bp, Homo sapiens; identical to SEQ ID NO: 276724
  chr22:26069540-26069695
  hypo

SEQ ID NO: 451736 - DNA, 37 bp, Homo sapiens; identical to SEQ ID NO: 276725
  chr22:26081888-26081925
  hypo

SEQ ID NO: 451737 - DNA, 79 bp, Homo sapiens; identical to SEQ ID NO: 329425
  chr22:26150543-26150622
  hypo

SEQ ID NO: 451738 - DNA, 152 bp, Homo sapiens; identical to SEQ ID NO: 276727
  chr22:26371252-26371404
  hypo

SEQ ID NO: 451739 - DNA, 125 bp, Homo sapiens; identical to SEQ ID NO: 276728
  chr22:26422520-26422645
  hypo

SEQ ID NO: 451740 - DNA, 761 bp, Homo sapiens; identical to SEQ ID NO: 276729
  chr22:26422873-26423634
  hypo

SEQ ID NO: 451741 - DNA, 112 bp, Homo sapiens; identical to SEQ ID NO: 206082
  chr22:26825000-26825112
  hypo

SEQ ID NO: 451742 - DNA, 312 bp, Homo sapiens; identical to SEQ ID NO: 276730
  chr22:26829744-26830056
  hypo

SEQ ID NO: 451743 - DNA, 34 bp, Homo sapiens; identical to SEQ ID NO: 276731
  chr22:26867803-26867837
  hypo

SEQ ID NO: 451744 - DNA, 201 bp, Homo sapiens; identical to SEQ ID NO: 276732
  chr22:26888176-26888377
  hypo

SEQ ID NO: 451745 - DNA, 146 bp, Homo sapiens; identical to SEQ ID NO: 329435
  chr22:26930530-26930676
  hypo

SEQ ID NO: 451746 - DNA, 219 bp, Homo sapiens; identical to SEQ ID NO: 220692
  chr22:26961223-26961442
  hypo

SEQ ID NO: 451747 - DNA, 80 bp, Homo sapiens; identical to SEQ ID NO: 220693
  chr22:26965205-26965285
  hypo

SEQ ID NO: 451748 - DNA, 73 bp, Homo sapiens; identical to SEQ ID NO: 220694
  chr22:27007746-27007819
  hypo

SEQ ID NO: 451749 - DNA, 232 bp, Homo sapiens; identical to SEQ ID NO: 276741
  chr22:27486749-27486981
  hypo

SEQ ID NO: 451750 - DNA, 215 bp, Homo sapiens; identical to SEQ ID NO: 276742
  chr22:28187361-28187576
  hypo

SEQ ID NO: 451751 - DNA, 175 bp, Homo sapiens; identical to SEQ ID NO: 329446
  chr22:28191122-28191297
  hypo

SEQ ID NO: 451752 - DNA, 210 bp, Homo sapiens; identical to SEQ ID NO: 295301
  chr22:28197049-28197259
  hypo

SEQ ID NO: 451753 - DNA, 32 bp, Homo sapiens; identical to SEQ ID NO: 276744
  chr22:28361345-28361377
  hypo

SEQ ID NO: 451754 - DNA, 189 bp, Homo sapiens; identical to SEQ ID NO: 276747
  chr22:29435189-29435378
  hypo

SEQ ID NO: 451755 - DNA, 425 bp, Homo sapiens; identical to SEQ ID NO: 206095
  chr22:29468748-29469173
  hypo

SEQ ID NO: 451756 - DNA, 202 bp, Homo sapiens; identical to SEQ ID NO: 206096
  chr22:29469213-29469415
  hypo

SEQ ID NO: 451757 - DNA, 46 bp, Homo sapiens; identical to SEQ ID NO: 276749
  chr22:29482738-29482784
  hypo

SEQ ID NO: 451758 - DNA, 80 bp, Homo sapiens; identical to SEQ ID NO: 276750
  chr22:29525175-29525255
  hypo

SEQ ID NO: 451759 - DNA, 330 bp, Homo sapiens; identical to SEQ ID NO: 276751
  chr22:29580364-29580694
  hypo

SEQ ID NO: 451760 - DNA, 31 bp, Homo sapiens
  chr22:29587096-29587127
  hypo
atgctgtcaagcatgttgcagcatgtgtcag

SEQ ID NO: 451761 - DNA, 90 bp, Homo sapiens; identical to SEQ ID NO: 276753
  chr22:29594544-29594634
  hypo

SEQ ID NO: 451762 - DNA, 580 bp, Homo sapiens; identical to SEQ ID NO: 276754
  chr22:29607421-29608001
  hypo

SEQ ID NO: 451763 - DNA, 41 bp, Homo sapiens; identical to SEQ ID NO: 276755
  chr22:29627464-29627505
  hypo

SEQ ID NO: 451764 - DNA, 34 bp, Homo sapiens; identical to SEQ ID NO: 220702
  chr22:29678067-29678101
  hypo

SEQ ID NO: 451765 - DNA, 968 bp, Homo sapiens; identical to SEQ ID NO: 295326
  chr22:29702352-29703320
  hypo

SEQ ID NO: 451766 - DNA, 150 bp, Homo sapiens; identical to SEQ ID NO: 220706
  chr22:29714174-29714324
  hypo

SEQ ID NO: 451767 - DNA, 109 bp, Homo sapiens; identical to SEQ ID NO: 276760
  chr22:29735487-29735596
  hypo

SEQ ID NO: 451768 - DNA, 354 bp, Homo sapiens; identical to SEQ ID NO: 276761
  chr22:29744977-29745331
  hypo

SEQ ID NO: 451769 - DNA, 149 bp, Homo sapiens; identical to SEQ ID NO: 276763
  chr22:29845784-29845933
  hypo

SEQ ID NO: 451770 - DNA, 180 bp, Homo sapiens; identical to SEQ ID NO: 220708
  chr22:29846233-29846413
  hypo

SEQ ID NO: 451771 - DNA, 33 bp, Homo sapiens; identical to SEQ ID NO: 276765
  chr22:29900365-29900398
  hypo

SEQ ID NO: 451772 - DNA, 120 bp, Homo sapiens; identical to SEQ ID NO: 220709
  chr22:30004164-30004284
  hypo

SEQ ID NO: 451773 - DNA, 80 bp, Homo sapiens; identical to SEQ ID NO: 276770
  chr22:30032865-30032945
  hypo

SEQ ID NO: 451774 - DNA, 39 bp, Homo sapiens; identical to SEQ ID NO: 276771
  chr22:30051627-30051666
  hypo

SEQ ID NO: 451775 - DNA, 179 bp, Homo sapiens; identical to SEQ ID NO: 276772
  chr22:30073518-30073697
  hypo

SEQ ID NO: 451776 - DNA, 161 bp, Homo sapiens; identical to SEQ ID NO: 276773
  chr22:30074060-30074221
  hypo

SEQ ID NO: 451777 - DNA, 209 bp, Homo sapiens; identical to SEQ ID NO: 276775
  chr22:30086757-30086966
  hypo

SEQ ID NO: 451778 - DNA, 40 bp, Homo sapiens; identical to SEQ ID NO: 276781
  chr22:30192061-30192101
  hypo

SEQ ID NO: 451779 - DNA, 94 bp, Homo sapiens; identical to SEQ ID NO: 276782
  chr22:30215045-30215139
  hypo

SEQ ID NO: 451780 - DNA, 257 bp, Homo sapiens; identical to SEQ ID NO: 276783
  chr22:30221027-30221284
  hypo

SEQ ID NO: 451781 - DNA, 31 bp, Homo sapiens; identical to SEQ ID NO: 220715
  chr22:30309742-30309773
  hypo

SEQ ID NO: 451782 - DNA, 31 bp, Homo sapiens; identical to SEQ ID NO: 220716
  chr22:30310013-30310044
  hypo

SEQ ID NO: 451783 - DNA, 80 bp, Homo sapiens; identical to SEQ ID NO: 220717
  chr22:30352153-30352233
  hypo

SEQ ID NO: 451784 - DNA, 174 bp, Homo sapiens; identical to SEQ ID NO: 220718
  chr22:30422074-30422248
  hypo

SEQ ID NO: 451785 - DNA, 34 bp, Homo sapiens; identical to SEQ ID NO: 276788
  chr22:30431160-30431194
  hypo

SEQ ID NO: 451786 - DNA, 185 bp, Homo sapiens; identical to SEQ ID NO: 220719
  chr22:30624613-30624798
  hypo

SEQ ID NO: 451787 - DNA, 143 bp, Homo sapiens; identical to SEQ ID NO: 329496
  chr22:30634183-30634326
  hypo

SEQ ID NO: 451788 - DNA, 32 bp, Homo sapiens; identical to SEQ ID NO: 329497
  chr22:30634356-30634388
  hypo

SEQ ID NO: 451789 - DNA, 90 bp, Homo sapiens; identical to SEQ ID NO: 276791
  chr22:30647190-30647280
  hypo

SEQ ID NO: 451790 - DNA, 245 bp, Homo sapiens; identical to SEQ ID NO: 276792
  chr22:30653608-30653853
  hypo

SEQ ID NO: 451791 - DNA, 197 bp, Homo sapiens; identical to SEQ ID NO: 220720
  chr22:30656576-30656773
  hypo

SEQ ID NO: 451792 - DNA, 72 bp, Homo sapiens; identical to SEQ ID NO: 276794
  chr22:30681973-30682045
  hypo

SEQ ID NO: 451793 - DNA, 43 bp, Homo sapiens; identical to SEQ ID NO: 276795
  chr22:30708028-30708071
  hypo

SEQ ID NO: 451794 - DNA, 192 bp, Homo sapiens; identical to SEQ ID NO: 226359
  chr22:30723111-30723303
  hypo

SEQ ID NO: 451795 - DNA, 42 bp, Homo sapiens; identical to SEQ ID NO: 276796
  chr22:30734441-30734483
  hypo

SEQ ID NO: 451796 - DNA, 181 bp, Homo sapiens; identical to SEQ ID NO: 276797
  chr22:30768084-30768265
  hypo

SEQ ID NO: 451797 - DNA, 264 bp, Homo sapiens; identical to SEQ ID NO: 206101
  chr22:30792874-30793138
  hypo

SEQ ID NO: 451798 - DNA, 64 bp, Homo sapiens; identical to SEQ ID NO: 276798
  chr22:30843508-30843572
  hypo

SEQ ID NO: 451799 - DNA, 120 bp, Homo sapiens; identical to SEQ ID NO: 276800
  chr22:30873893-30874013
  hypo

SEQ ID NO: 451800 - DNA, 155 bp, Homo sapiens; identical to SEQ ID NO: 276801
  chr22:30888310-30888465
  hypo

SEQ ID NO: 451801 - DNA, 213 bp, Homo sapiens; identical to SEQ ID NO: 276802
  chr22:30939013-30939226
  hypo

SEQ ID NO: 451802 - DNA, 352 bp, Homo sapiens; identical to SEQ ID NO: 395053
  chr22:30951743-30952095
  hypo

SEQ ID NO: 451803 - DNA, 353 bp, Homo sapiens; identical to SEQ ID NO: 276806
  chr22:30977857-30978210
  hypo

SEQ ID NO: 451804 - DNA, 328 bp, Homo sapiens; identical to SEQ ID NO: 295344
  chr22:31002803-31003131
  hypo

SEQ ID NO: 451805 - DNA, 50 bp, Homo sapiens; identical to SEQ ID NO: 276807
  chr22:31059626-31059676
  hypo

SEQ ID NO: 451806 - DNA, 33 bp, Homo sapiens; identical to SEQ ID NO: 220725
  chr22:31062272-31062305
  hypo

SEQ ID NO: 451807 - DNA, 165 bp, Homo sapiens; identical to SEQ ID NO: 276809
  chr22:31078361-31078526
  hypo

SEQ ID NO: 451808 - DNA, 44 bp, Homo sapiens; identical to SEQ ID NO: 276810
  chr22:31126862-31126906
  hypo

SEQ ID NO: 451809 - DNA, 85 bp, Homo sapiens; identical to SEQ ID NO: 220726
  chr22:31169318-31169403
  hypo

SEQ ID NO: 451810 - DNA, 119 bp, Homo sapiens; identical to SEQ ID NO: 276812
  chr22:31220230-31220349
  hypo

SEQ ID NO: 451811 - DNA, 188 bp, Homo sapiens; identical to SEQ ID NO: 276813
  chr22:31220642-31220830
  hypo

SEQ ID NO: 451812 - DNA, 45 bp, Homo sapiens; identical to SEQ ID NO: 276814
  chr22:31250071-31250116
  hypo

SEQ ID NO: 451813 - DNA, 36 bp, Homo sapiens; identical to SEQ ID NO: 276816
  chr22:31261979-31262015
  hypo

SEQ ID NO: 451814 - DNA, 237 bp, Homo sapiens; identical to SEQ ID NO: 220729
  chr22:31264325-31264562
  hypo

SEQ ID NO: 451815 - DNA, 200 bp, Homo sapiens; identical to SEQ ID NO: 276819
  chr22:31279750-31279950
  hypo

SEQ ID NO: 451816 - DNA, 221 bp, Homo sapiens; identical to SEQ ID NO: 276820
  chr22:31301689-31301910
  hypo

SEQ ID NO: 451817 - DNA, 38 bp, Homo sapiens; identical to SEQ ID NO: 414209
  chr22:31475729-31475767
  hypo

SEQ ID NO: 451818 - DNA, 266 bp, Homo sapiens; identical to SEQ ID NO: 220735
  chr22:31644627-31644893
  hypo

SEQ ID NO: 451819 - DNA, 118 bp, Homo sapiens; identical to SEQ ID NO: 276830
  chr22:31655943-31656061
  hypo

SEQ ID NO: 451820 - DNA, 139 bp, Homo sapiens; identical to SEQ ID NO: 276831
  chr22:31685462-31685601
  hypo

SEQ ID NO: 451821 - DNA, 44 bp, Homo sapiens; identical to SEQ ID NO: 220736
  chr22:31744073-31744117
  hypo

SEQ ID NO: 451822 - DNA, 143 bp, Homo sapiens; identical to SEQ ID NO: 220737
  chr22:31942754-31942897
  hypo

SEQ ID NO: 451823 - DNA, 34 bp, Homo sapiens; identical to SEQ ID NO: 276834
  chr22:31976811-31976845
  hypo

SEQ ID NO: 451824 - DNA, 154 bp, Homo sapiens; identical to SEQ ID NO: 276835
  chr22:31998583-31998737
  hypo

SEQ ID NO: 451825 - DNA, 302 bp, Homo sapiens; identical to SEQ ID NO: 329547
  chr22:32009418-32009720
  hypo

SEQ ID NO: 451826 - DNA, 140 bp, Homo sapiens; identical to SEQ ID NO: 329548
  chr22:32014093-32014233
  hypo

SEQ ID NO: 451827 - DNA, 87 bp, Homo sapiens; identical to SEQ ID NO: 220738
  chr22:32014373-32014460
  hypo

SEQ ID NO: 451828 - DNA, 304 bp, Homo sapiens; identical to SEQ ID NO: 276839
  chr22:32025196-32025500
  hypo

SEQ ID NO: 451829 - DNA, 120 bp, Homo sapiens; identical to SEQ ID NO: 276841
  chr22:32101966-32102086
  hypo

SEQ ID NO: 451830 - DNA, 38 bp, Homo sapiens; identical to SEQ ID NO: 276842
  chr22:32275827-32275865
  hypo

SEQ ID NO: 451831 - DNA, 31 bp, Homo sapiens; identical to SEQ ID NO: 276843
  chr22:32276566-32276597
  hypo

SEQ ID NO: 451832 - DNA, 220 bp, Homo sapiens; identical to SEQ ID NO: 276844
  chr22:32352537-32352757
  hypo

SEQ ID NO: 451833 - DNA, 213 bp, Homo sapiens; identical to SEQ ID NO: 276845
  chr22:32354707-32354920
  hypo

SEQ ID NO: 451834 - DNA, 95 bp, Homo sapiens; identical to SEQ ID NO: 276847
  chr22:32384071-32384166
  hypo

SEQ ID NO: 451835 - DNA, 45 bp, Homo sapiens; identical to SEQ ID NO: 329560
  chr22:32667491-32667536
  hypo

SEQ ID NO: 451836 - DNA, 89 bp, Homo sapiens; identical to SEQ ID NO: 329561
  chr22:32667663-32667752
  hypo

SEQ ID NO: 451837 - DNA, 56 bp, Homo sapiens; identical to SEQ ID NO: 276850
  chr22:32668363-32668419
  hypo

SEQ ID NO: 451838 - DNA, 175 bp, Homo sapiens; identical to SEQ ID NO: 276851
  chr22:32668773-32668948
  hypo

SEQ ID NO: 451839 - DNA, 198 bp, Homo sapiens; identical to SEQ ID NO: 276852
  chr22:32792002-32792200
  hypo

SEQ ID NO: 451840 - DNA, 212 bp, Homo sapiens; identical to SEQ ID NO: 276854
  chr22:32914022-32914234
  hypo

SEQ ID NO: 451841 - DNA, 259 bp, Homo sapiens; identical to SEQ ID NO: 276855
  chr22:32960689-32960948
  hypo

SEQ ID NO: 451842 - DNA, 189 bp, Homo sapiens; identical to SEQ ID NO: 276856
  chr22:32997561-32997750
  hypo

SEQ ID NO: 451843 - DNA, 107 bp, Homo sapiens; identical to SEQ ID NO: 276857
  chr22:33250662-33250769
  hypo

SEQ ID NO: 451844 - DNA, 38 bp, Homo sapiens; identical to SEQ ID NO: 276858
  chr22:33305903-33305941
  hypo

SEQ ID NO: 451845 - DNA, 43 bp, Homo sapiens; identical to SEQ ID NO: 276859
  chr22:33361654-33361697
  hypo

SEQ ID NO: 451846 - DNA, 42 bp, Homo sapiens; identical to SEQ ID NO: 276860
  chr22:33361997-33362039
  hypo

SEQ ID NO: 451847 - DNA, 75 bp, Homo sapiens; identical to SEQ ID NO: 276861
  chr22:34144333-34144408
  hypo

SEQ ID NO: 451848 - DNA, 151 bp, Homo sapiens; identical to SEQ ID NO: 276862
  chr22:34242012-34242163
  hypo

SEQ ID NO: 451849 - DNA, 50 bp, Homo sapiens; identical to SEQ ID NO: 276863
  chr22:34257537-34257587
  hypo

SEQ ID NO: 451850 - DNA, 313 bp, Homo sapiens; identical to SEQ ID NO: 425882
  chr22:34315937-34316250
  hypo

SEQ ID NO: 451851 - DNA, 44 bp, Homo sapiens; identical to SEQ ID NO: 276864
  chr22:35526200-35526244
  hypo

SEQ ID NO: 451852 - DNA, 243 bp, Homo sapiens; identical to SEQ ID NO: 276865
  chr22:35719273-35719516
  hypo

SEQ ID NO: 451853 - DNA, 183 bp, Homo sapiens; identical to SEQ ID NO: 220745
  chr22:35730462-35730645
  hypo

SEQ ID NO: 451854 - DNA, 317 bp, Homo sapiens; identical to SEQ ID NO: 220746
  chr22:35742069-35742386
  hypo

SEQ ID NO: 451855 - DNA, 57 bp, Homo sapiens; identical to SEQ ID NO: 220747
  chr22:35758435-35758492
  hypo

SEQ ID NO: 451856 - DNA, 262 bp, Homo sapiens; identical to SEQ ID NO: 295372
  chr22:35767972-35768234
  hypo

SEQ ID NO: 451857 - DNA, 273 bp, Homo sapiens; identical to SEQ ID NO: 295373
  chr22:35776987-35777260
  hypo

SEQ ID NO: 451858 - DNA, 42 bp, Homo sapiens; identical to SEQ ID NO: 276869
  chr22:35806956-35806998
  hypo

SEQ ID NO: 451859 - DNA, 217 bp, Homo sapiens; identical to SEQ ID NO: 276870
  chr22:35820082-35820299
  hypo

SEQ ID NO: 451860 - DNA, 654 bp, Homo sapiens; identical to SEQ ID NO: 276872
  chr22:35842433-35843087
  hypo

SEQ ID NO: 451861 - DNA, 74 bp, Homo sapiens; identical to SEQ ID NO: 276873
  chr22:35843123-35843197
  hypo

SEQ ID NO: 451862 - DNA, 38 bp, Homo sapiens; identical to SEQ ID NO: 276875
  chr22:35875348-35875386
  hypo

SEQ ID NO: 451863 - DNA, 431 bp, Homo sapiens; identical to SEQ ID NO: 276876
  chr22:35947750-35948181
  hypo

SEQ ID NO: 451864 - DNA, 140 bp, Homo sapiens; identical to SEQ ID NO: 276877
  chr22:35951597-35951737
  hypo

SEQ ID NO: 451865 - DNA, 240 bp, Homo sapiens; identical to SEQ ID NO: 276878
  chr22:36089709-36089949
  hypo

SEQ ID NO: 451866 - DNA, 153 bp, Homo sapiens; identical to SEQ ID NO: 276879
  chr22:36123184-36123337
  hypo

SEQ ID NO: 451867 - DNA, 102 bp, Homo sapiens; identical to SEQ ID NO: 220752
  chr22:36246094-36246196
  hypo

SEQ ID NO: 451868 - DNA, 58 bp, Homo sapiens; identical to SEQ ID NO: 206117
  chr22:36424337-36424395
  hypo

SEQ ID NO: 451869 - DNA, 78 bp, Homo sapiens; identical to SEQ ID NO: 57980
  chr22:36424418-36424496
  hypo

SEQ ID NO: 451870 - DNA, 186 bp, Homo sapiens; identical to SEQ ID NO: 206119
  chr22:36425195-36425381
  hypo

SEQ ID NO: 451871 - DNA, 315 bp, Homo sapiens; identical to SEQ ID NO: 295380
  chr22:36462014-36462329
  hypo

SEQ ID NO: 451872 - DNA, 89 bp, Homo sapiens; identical to SEQ ID NO: 276881
  chr22:36462715-36462804
  hypo

SEQ ID NO: 451873 - DNA, 33 bp, Homo sapiens; identical to SEQ ID NO: 276884
  chr22:36646818-36646851
  hypo

SEQ ID NO: 451874 - DNA, 174 bp, Homo sapiens; identical to SEQ ID NO: 220757
  chr22:36677171-36677345
  hypo

SEQ ID NO: 451875 - DNA, 150 bp, Homo sapiens; identical to SEQ ID NO: 276886
  chr22:36683790-36683940
  hypo

SEQ ID NO: 451876 - DNA, 278 bp, Homo sapiens; identical to SEQ ID NO: 276888
  chr22:36688047-36688325
  hypo

SEQ ID NO: 451877 - DNA, 171 bp, Homo sapiens; identical to SEQ ID NO: 220759
  chr22:36692853-36693024
  hypo

SEQ ID NO: 451878 - DNA, 129 bp, Homo sapiens; identical to SEQ ID NO: 220760
  chr22:36695463-36695592
  hypo

SEQ ID NO: 451879 - DNA, 71 bp, Homo sapiens; identical to SEQ ID NO: 220761
  chr22:36696999-36697070
  hypo

SEQ ID NO: 451880 - DNA, 260 bp, Homo sapiens; identical to SEQ ID NO: 276892
  chr22:36707808-36708068
  hypo

SEQ ID NO: 451881 - DNA, 238 bp, Homo sapiens; identical to SEQ ID NO: 220762
  chr22:36713506-36713744
  hypo

SEQ ID NO: 451882 - DNA, 71 bp, Homo sapiens; identical to SEQ ID NO: 276894
  chr22:36721696-36721767
  hypo

SEQ ID NO: 451883 - DNA, 194 bp, Homo sapiens; identical to SEQ ID NO: 276895
  chr22:36722630-36722824
  hypo

SEQ ID NO: 451884 - DNA, 203 bp, Homo sapiens; identical to SEQ ID NO: 220763
  chr22:36732742-36732945
  hypo

SEQ ID NO: 451885 - DNA, 403 bp, Homo sapiens; identical to SEQ ID NO: 276897
  chr22:36740160-36740563
  hypo

SEQ ID NO: 451886 - DNA, 78 bp, Homo sapiens; identical to SEQ ID NO: 276898
  chr22:36741013-36741091
  hypo

SEQ ID NO: 451887 - DNA, 92 bp, Homo sapiens; identical to SEQ ID NO: 276899
  chr22:36838769-36838861
  hypo

SEQ ID NO: 451888 - DNA, 135 bp, Homo sapiens; identical to SEQ ID NO: 329618
  chr22:36855433-36855568
  hypo

SEQ ID NO: 451889 - DNA, 32 bp, Homo sapiens; identical to SEQ ID NO: 329619
  chr22:36855598-36855630
  hypo

SEQ ID NO: 451890 - DNA, 112 bp, Homo sapiens; identical to SEQ ID NO: 329620
  chr22:36860797-36860909
  hypo

SEQ ID NO: 451891 - DNA, 36 bp, Homo sapiens; identical to SEQ ID NO: 276902
  chr22:36867728-36867764
  hypo

SEQ ID NO: 451892 - DNA, 117 bp, Homo sapiens; identical to SEQ ID NO: 276903
  chr22:36868766-36868883
  hypo

SEQ ID NO: 451893 - DNA, 97 bp, Homo sapiens; identical to SEQ ID NO: 276904
  chr22:36871884-36871981
  hypo

SEQ ID NO: 451894 - DNA, 85 bp, Homo sapiens; identical to SEQ ID NO: 276905
  chr22:36880506-36880591
  hypo

SEQ ID NO: 451895 - DNA, 171 bp, Homo sapiens; identical to SEQ ID NO: 276906
  chr22:36885622-36885793
  hypo

SEQ ID NO: 451896 - DNA, 50 bp, Homo sapiens; identical to SEQ ID NO: 276909
  chr22:36906969-36907019
  hypo

SEQ ID NO: 451897 - DNA, 262 bp, Homo sapiens; identical to SEQ ID NO: 276911
  chr22:37159744-37160006
  hypo

SEQ ID NO: 451898 - DNA, 110 bp, Homo sapiens; identical to SEQ ID NO: 276912
  chr22:37160269-37160379
  hypo

SEQ ID NO: 451899 - DNA, 177 bp, Homo sapiens; identical to SEQ ID NO: 220765
  chr22:37168633-37168810
  hypo

SEQ ID NO: 451900 - DNA, 103 bp, Homo sapiens; identical to SEQ ID NO: 276914
  chr22:37234764-37234867
  hypo

SEQ ID NO: 451901 - DNA, 208 bp, Homo sapiens; identical to SEQ ID NO: 329633
  chr22:37329775-37329983
  hypo

SEQ ID NO: 451902 - DNA, 104 bp, Homo sapiens; identical to SEQ ID NO: 329634
  chr22:37330029-37330133
  hypo

SEQ ID NO: 451903 - DNA, 147 bp, Homo sapiens; identical to SEQ ID NO: 276916
  chr22:37332531-37332678
  hypo

SEQ ID NO: 451904 - DNA, 39 bp, Homo sapiens; identical to SEQ ID NO: 329636
  chr22:37348992-37349031
  hypo

SEQ ID NO: 451905 - DNA, 238 bp, Homo sapiens; identical to SEQ ID NO: 329637
  chr22:37367561-37367799
  hypo

SEQ ID NO: 451906 - DNA, 256 bp, Homo sapiens; identical to SEQ ID NO: 329638
  chr22:37367829-37368085
  hypo

SEQ ID NO: 451907 - DNA, 479 bp, Homo sapiens; identical to SEQ ID NO: 206124
  chr22:37414885-37415364
  hypo

SEQ ID NO: 451908 - DNA, 185 bp, Homo sapiens; identical to SEQ ID NO: 276919
  chr22:37507694-37507879
  hypo

SEQ ID NO: 451909 - DNA, 142 bp, Homo sapiens; identical to SEQ ID NO: 276920
  chr22:37509140-37509282
  hypo

SEQ ID NO: 451910 - DNA, 200 bp, Homo sapiens; identical to SEQ ID NO: 276921
  chr22:37527573-37527773
  hypo

SEQ ID NO: 451911 - DNA, 110 bp, Homo sapiens; identical to SEQ ID NO: 276922
  chr22:37562423-37562533
  hypo

SEQ ID NO: 451912 - DNA, 208 bp, Homo sapiens; identical to SEQ ID NO: 276923
  chr22:37622731-37622939
  hypo

SEQ ID NO: 451913 - DNA, 52 bp, Homo sapiens; identical to SEQ ID NO: 276924
  chr22:37683793-37683845
  hypo

SEQ ID NO: 451914 - DNA, 131 bp, Homo sapiens; identical to SEQ ID NO: 329646
  chr22:37769150-37769281
  hypo

SEQ ID NO: 451915 - DNA, 86 bp, Homo sapiens; identical to SEQ ID NO: 276926
  chr22:37770930-37771016
  hypo

SEQ ID NO: 451916 - DNA, 136 bp, Homo sapiens; identical to SEQ ID NO: 276927
  chr22:37875332-37875468
  hypo

SEQ ID NO: 451917 - DNA, 206 bp, Homo sapiens; identical to SEQ ID NO: 276928
  chr22:37893389-37893595
  hypo

SEQ ID NO: 451918 - DNA, 215 bp, Homo sapiens; identical to SEQ ID NO: 276929
  chr22:37902176-37902391
  hypo

SEQ ID NO: 451919 - DNA, 35 bp, Homo sapiens; identical to SEQ ID NO: 295402
  chr22:37914844-37914879
  hypo

SEQ ID NO: 451920 - DNA, 500 bp, Homo sapiens; identical to SEQ ID NO: 206127
  chr22:37914933-37915433
  hypo

SEQ ID NO: 451921 - DNA, 123 bp, Homo sapiens; identical to SEQ ID NO: 226374
  chr22:37915687-37915810
  hypo

SEQ ID NO: 451922 - DNA, 767 bp, Homo sapiens; identical to SEQ ID NO: 295405
  chr22:37956436-37957203
  hypo

SEQ ID NO: 451923 - DNA, 193 bp, Homo sapiens; identical to SEQ ID NO: 276930
  chr22:37964558-37964751
  hypo

SEQ ID NO: 451924 - DNA, 118 bp, Homo sapiens; identical to SEQ ID NO: 276932
  chr22:38014384-38014502
  hypo

SEQ ID NO: 451925 - DNA, 109 bp, Homo sapiens; identical to SEQ ID NO: 276933
  chr22:38017617-38017726
  hypo

SEQ ID NO: 451926 - DNA, 99 bp, Homo sapiens; identical to SEQ ID NO: 276934
  chr22:38019344-38019443
  hypo

SEQ ID NO: 451927 - DNA, 79 bp, Homo sapiens; identical to SEQ ID NO: 276935
  chr22:38019473-38019552
  hypo

SEQ ID NO: 451928 - DNA, 259 bp, Homo sapiens; identical to SEQ ID NO: 276936
  chr22:38037235-38037494
  hypo

SEQ ID NO: 451929 - DNA, 180 bp, Homo sapiens; identical to SEQ ID NO: 276938
  chr22:38061511-38061691
  hypo

SEQ ID NO: 451930 - DNA, 79 bp, Homo sapiens; identical to SEQ ID NO: 329663
  chr22:38064611-38064690
  hypo

SEQ ID NO: 451931 - DNA, 90 bp, Homo sapiens; identical to SEQ ID NO: 329664
  chr22:38081627-38081717
  hypo

SEQ ID NO: 451932 - DNA, 716 bp, Homo sapiens; identical to SEQ ID NO: 329665
  chr22:38086594-38087310
  hypo

SEQ ID NO: 451933 - DNA, 97 bp, Homo sapiens; identical to SEQ ID NO: 276942
  chr22:38095179-38095276
  hypo

SEQ ID NO: 451934 - DNA, 44 bp, Homo sapiens; identical to SEQ ID NO: 276944
  chr22:38149210-38149254
  hypo

SEQ ID NO: 451935 - DNA, 44 bp, Homo sapiens; identical to SEQ ID NO: 220770
  chr22:38149554-38149598
  hypo

SEQ ID NO: 451936 - DNA, 90 bp, Homo sapiens; identical to SEQ ID NO: 276946
  chr22:38150056-38150146
  hypo

SEQ ID NO: 451937 - DNA, 77 bp, Homo sapiens; identical to SEQ ID NO: 276947
  chr22:38182164-38182241
  hypo

SEQ ID NO: 451938 - DNA, 86 bp, Homo sapiens; identical to SEQ ID NO: 276949
  chr22:38208855-38208941
  hypo

SEQ ID NO: 451939 - DNA, 388 bp, Homo sapiens; identical to SEQ ID NO: 220771
  chr22:38209275-38209663
  hypo

SEQ ID NO: 451940 - DNA, 65 bp, Homo sapiens; identical to SEQ ID NO: 276951
  chr22:38211829-38211894
  hypo

SEQ ID NO: 451941 - DNA, 38 bp, Homo sapiens; identical to SEQ ID NO: 276952
  chr22:38238232-38238270
  hypo

SEQ ID NO: 451942 - DNA, 49 bp, Homo sapiens; identical to SEQ ID NO: 276953
  chr22:38266335-38266384
  hypo

SEQ ID NO: 451943 - DNA, 32 bp, Homo sapiens; identical to SEQ ID NO: 220772
  chr22:38285336-38285368
  hypo

SEQ ID NO: 451944 - DNA, 323 bp, Homo sapiens; identical to SEQ ID NO: 276955
  chr22:38328789-38329112
  hypo

SEQ ID NO: 451945 - DNA, 130 bp, Homo sapiens; identical to SEQ ID NO: 276959
  chr22:38375998-38376128
  hypo

SEQ ID NO: 451946 - DNA, 79 bp, Homo sapiens; identical to SEQ ID NO: 220777
  chr22:38379969-38380048
  hypo

SEQ ID NO: 451947 - DNA, 109 bp, Homo sapiens; identical to SEQ ID NO: 276965
  chr22:38415281-38415390
  hypo

SEQ ID NO: 451948 - DNA, 196 bp, Homo sapiens; identical to SEQ ID NO: 276966
  chr22:38424123-38424319
  hypo

SEQ ID NO: 451949 - DNA, 114 bp, Homo sapiens; identical to SEQ ID NO: 220783
  chr22:38470384-38470498
  hypo

SEQ ID NO: 451950 - DNA, 142 bp, Homo sapiens; identical to SEQ ID NO: 276969
  chr22:38474475-38474617
  hypo

SEQ ID NO: 451951 - DNA, 34 bp, Homo sapiens; identical to SEQ ID NO: 276970
  chr22:38486388-38486422
  hypo

SEQ ID NO: 451952 - DNA, 388 bp, Homo sapiens; identical to SEQ ID NO: 220785
  chr22:38506928-38507316
  hypo

SEQ ID NO: 451953 - DNA, 126 bp, Homo sapiens; identical to SEQ ID NO: 220786
  chr22:38507346-38507472
  hypo

SEQ ID NO: 451954 - DNA, 321 bp, Homo sapiens; identical to SEQ ID NO: 276973
  chr22:38508432-38508753
  hypo

SEQ ID NO: 451955 - DNA, 121 bp, Homo sapiens; identical to SEQ ID NO: 276974
  chr22:38512227-38512348
  hypo

SEQ ID NO: 451956 - DNA, 255 bp, Homo sapiens; identical to SEQ ID NO: 276977
  chr22:38520660-38520915
  hypo

SEQ ID NO: 451957 - DNA, 126 bp, Homo sapiens; identical to SEQ ID NO: 220788
  chr22:38525495-38525621
  hypo

SEQ ID NO: 451958 - DNA, 31 bp, Homo sapiens; identical to SEQ ID NO: 276980
  chr22:38531761-38531792
  hypo

SEQ ID NO: 451959 - DNA, 123 bp, Homo sapiens; identical to SEQ ID NO: 276981
  chr22:38541364-38541487
  hypo

SEQ ID NO: 451960 - DNA, 398 bp, Homo sapiens; identical to SEQ ID NO: 295422
  chr22:38577754-38578152
  hypo

SEQ ID NO: 451961 - DNA, 37 bp, Homo sapiens; identical to SEQ ID NO: 220791
  chr22:38578432-38578469
  hypo

SEQ ID NO: 451962 - DNA, 364 bp, Homo sapiens; identical to SEQ ID NO: 276985
  chr22:38618369-38618733
  hypo

SEQ ID NO: 451963 - DNA, 386 bp, Homo sapiens; identical to SEQ ID NO: 276986
  chr22:38633207-38633593
  hypo

SEQ ID NO: 451964 - DNA, 114 bp, Homo sapiens; identical to SEQ ID NO: 276987
  chr22:38634943-38635057
  hypo

SEQ ID NO: 451965 - DNA, 89 bp, Homo sapiens; identical to SEQ ID NO: 276988
  chr22:38639963-38640052
  hypo

SEQ ID NO: 451966 - DNA, 38 bp, Homo sapiens; identical to SEQ ID NO: 220794
  chr22:38695215-38695253
  hypo

SEQ ID NO: 451967 - DNA, 127 bp, Homo sapiens; identical to SEQ ID NO: 276992
  chr22:38742147-38742274
  hypo

SEQ ID NO: 451968 - DNA, 54 bp, Homo sapiens; identical to SEQ ID NO: 276993
  chr22:38795422-38795476
  hypo

SEQ ID NO: 451969 - DNA, 53 bp, Homo sapiens; identical to SEQ ID NO: 276994
  chr22:38795506-38795559
  hypo

SEQ ID NO: 451970 - DNA, 93 bp, Homo sapiens; identical to SEQ ID NO: 276995
  chr22:38818418-38818511
  hypo

SEQ ID NO: 451971 - DNA, 158 bp, Homo sapiens; identical to SEQ ID NO: 276996
  chr22:38827317-38827475
  hypo

SEQ ID NO: 451972 - DNA, 69 bp, Homo sapiens; identical to SEQ ID NO: 276997
  chr22:38845518-38845587
  hypo

SEQ ID NO: 451973 - DNA, 139 bp, Homo sapiens; identical to SEQ ID NO: 276999
  chr22:38884002-38884141
  hypo

SEQ ID NO: 451974 - DNA, 81 bp, Homo sapiens; identical to SEQ ID NO: 277000
  chr22:38885334-38885415
  hypo

SEQ ID NO: 451975 - DNA, 148 bp, Homo sapiens; identical to SEQ ID NO: 277001
  chr22:38904742-38904890
  hypo

SEQ ID NO: 451976 - DNA, 84 bp, Homo sapiens; identical to SEQ ID NO: 220797
  chr22:38995555-38995639
  hypo

SEQ ID NO: 451977 - DNA, 154 bp, Homo sapiens; identical to SEQ ID NO: 277003
  chr22:39122031-39122185
  hypo

SEQ ID NO: 451978 - DNA, 229 bp, Homo sapiens; identical to SEQ ID NO: 220798
  chr22:39132169-39132398
  hypo

SEQ ID NO: 451979 - DNA, 341 bp, Homo sapiens; identical to SEQ ID NO: 277006
  chr22:39148552-39148893
  hypo

SEQ ID NO: 451980 - DNA, 97 bp, Homo sapiens; identical to SEQ ID NO: 277007
  chr22:39149136-39149233
  hypo

SEQ ID NO: 451981 - DNA, 42 bp, Homo sapiens; identical to SEQ ID NO: 277008
  chr22:39175179-39175221
  hypo

SEQ ID NO: 451982 - DNA, 253 bp, Homo sapiens; identical to SEQ ID NO: 295439
  chr22:39239093-39239346
  hypo

SEQ ID NO: 451983 - DNA, 32 bp, Homo sapiens; identical to SEQ ID NO: 206137
  chr22:39239412-39239444
  hypo

SEQ ID NO: 451984 - DNA, 189 bp, Homo sapiens; identical to SEQ ID NO: 295441
  chr22:39239935-39240124
  hypo

SEQ ID NO: 451985 - DNA, 248 bp, Homo sapiens; identical to SEQ ID NO: 226380
  chr22:39268982-39269230
  hypo

SEQ ID NO: 451986 - DNA, 286 bp, Homo sapiens; identical to SEQ ID NO: 277009
  chr22:39411545-39411831
  hypo

SEQ ID NO: 451987 - DNA, 89 bp, Homo sapiens; identical to SEQ ID NO: 220801
  chr22:39424923-39425012
  hypo

SEQ ID NO: 451988 - DNA, 83 bp, Homo sapiens; identical to SEQ ID NO: 220802
  chr22:39425582-39425665
  hypo

SEQ ID NO: 451989 - DNA, 95 bp, Homo sapiens; identical to SEQ ID NO: 277012
  chr22:39444961-39445056
  hypo

SEQ ID NO: 451990 - DNA, 120 bp, Homo sapiens; identical to SEQ ID NO: 277013
  chr22:39449270-39449390
  hypo

SEQ ID NO: 451991 - DNA, 204 bp, Homo sapiens; identical to SEQ ID NO: 277014
  chr22:39474506-39474710
  hypo

SEQ ID NO: 451992 - DNA, 120 bp, Homo sapiens; identical to SEQ ID NO: 277015
  chr22:39475634-39475754
  hypo

SEQ ID NO: 451993 - DNA, 123 bp, Homo sapiens; identical to SEQ ID NO: 220803
  chr22:39529109-39529232
  hypo

SEQ ID NO: 451994 - DNA, 100 bp, Homo sapiens; identical to SEQ ID NO: 220804
  chr22:39530873-39530973
  hypo

SEQ ID NO: 451995 - DNA, 39 bp, Homo sapiens; identical to SEQ ID NO: 220805
  chr22:39571321-39571360
  hypo

SEQ ID NO: 451996 - DNA, 47 bp, Homo sapiens; identical to SEQ ID NO: 206139
  chr22:39638593-39638640
  hypo

SEQ ID NO: 451997 - DNA, 133 bp, Homo sapiens; identical to SEQ ID NO: 277019
  chr22:39686245-39686378
  hypo

SEQ ID NO: 451998 - DNA, 311 bp, Homo sapiens; identical to SEQ ID NO: 277020
  chr22:39687860-39688171
  hypo

SEQ ID NO: 451999 - DNA, 356 bp, Homo sapiens; identical to SEQ ID NO: 277021
  chr22:39690525-39690881
  hypo

SEQ ID NO: 452000 - DNA, 41 bp, Homo sapiens; identical to SEQ ID NO: 277022
  chr22:39744066-39744107
  hypo

SEQ ID NO: 452001 - DNA, 154 bp, Homo sapiens; identical to SEQ ID NO: 220808
  chr22:39755185-39755339
  hypo

SEQ ID NO: 452002 - DNA, 130 bp, Homo sapiens; identical to SEQ ID NO: 220810
  chr22:39770342-39770472
  hypo

SEQ ID NO: 452003 - DNA, 149 bp, Homo sapiens; identical to SEQ ID NO: 277026
  chr22:39772140-39772289
  hypo

SEQ ID NO: 452004 - DNA, 136 bp, Homo sapiens; identical to SEQ ID NO: 220811
  chr22:39773595-39773731
  hypo

SEQ ID NO: 452005 - DNA, 230 bp, Homo sapiens; identical to SEQ ID NO: 277028
  chr22:39777671-39777901
  hypo

SEQ ID NO: 452006 - DNA, 98 bp, Homo sapiens; identical to SEQ ID NO: 277029
  chr22:39778980-39779078
  hypo

SEQ ID NO: 452007 - DNA, 36 bp, Homo sapiens; identical to SEQ ID NO: 277030
  chr22:39785123-39785159
  hypo

SEQ ID NO: 452008 - DNA, 49 bp, Homo sapiens; identical to SEQ ID NO: 220812
  chr22:39872956-39873005
  hypo

SEQ ID NO: 452009 - DNA, 363 bp, Homo sapiens; identical to SEQ ID NO: 277033
  chr22:39907959-39908322
  hypo

SEQ ID NO: 452010 - DNA, 37 bp, Homo sapiens; identical to SEQ ID NO: 277034
  chr22:39930313-39930350
  hypo

SEQ ID NO: 452011 - DNA, 141 bp, Homo sapiens; identical to SEQ ID NO: 277036
  chr22:40025211-40025352
  hypo

SEQ ID NO: 452012 - DNA, 135 bp, Homo sapiens; identical to SEQ ID NO: 277037
  chr22:40025722-40025857
  hypo

SEQ ID NO: 452013 - DNA, 220 bp, Homo sapiens; identical to SEQ ID NO: 220814
  chr22:40026479-40026699
  hypo

SEQ ID NO: 452014 - DNA, 204 bp, Homo sapiens; identical to SEQ ID NO: 277039
  chr22:40033278-40033482
  hypo

SEQ ID NO: 452015 - DNA, 149 bp, Homo sapiens; identical to SEQ ID NO: 134172
  chr22:40060841-40060990
  hypo

SEQ ID NO: 452016 - DNA, 181 bp, Homo sapiens; identical to SEQ ID NO: 295466
  chr22:40081595-40081776
  hypo

SEQ ID NO: 452017 - DNA, 77 bp, Homo sapiens; identical to SEQ ID NO: 295467
  chr22:40082052-40082129
  hypo

SEQ ID NO: 452018 - DNA, 104 bp, Homo sapiens; identical to SEQ ID NO: 295468
  chr22:40082159-40082263
  hypo

SEQ ID NO: 452019 - DNA, 166 bp, Homo sapiens; identical to SEQ ID NO: 277044
  chr22:40083965-40084131
  hypo

SEQ ID NO: 452020 - DNA, 313 bp, Homo sapiens; identical to SEQ ID NO: 220819
  chr22:40089236-40089549
  hypo

SEQ ID NO: 452021 - DNA, 39 bp, Homo sapiens; identical to SEQ ID NO: 220820
  chr22:40262908-40262947
  hypo

SEQ ID NO: 452022 - DNA, 98 bp, Homo sapiens; identical to SEQ ID NO: 277048
  chr22:40320324-40320422
  hypo

SEQ ID NO: 452023 - DNA, 200 bp, Homo sapiens; identical to SEQ ID NO: 277049
  chr22:40348320-40348520
  hypo

SEQ ID NO: 452024 - DNA, 180 bp, Homo sapiens; identical to SEQ ID NO: 277050
  chr22:40360353-40360533
  hypo

SEQ ID NO: 452025 - DNA, 84 bp, Homo sapiens; identical to SEQ ID NO: 277051
  chr22:40380593-40380677
  hypo

SEQ ID NO: 452026 - DNA, 241 bp, Homo sapiens; identical to SEQ ID NO: 329791
  chr22:40417215-40417456
  hypo

SEQ ID NO: 452027 - DNA, 236 bp, Homo sapiens; identical to SEQ ID NO: 329792
  chr22:40417628-40417864
  hypo

SEQ ID NO: 452028 - DNA, 108 bp, Homo sapiens; identical to SEQ ID NO: 220821
  chr22:40444189-40444297
  hypo

SEQ ID NO: 452029 - DNA, 79 bp, Homo sapiens; identical to SEQ ID NO: 220822
  chr22:40593308-40593387
  hypo

SEQ ID NO: 452030 - DNA, 55 bp, Homo sapiens; identical to SEQ ID NO: 277055
  chr22:40620809-40620864
  hypo

SEQ ID NO: 452031 - DNA, 39 bp, Homo sapiens; identical to SEQ ID NO: 220823
  chr22:40621438-40621477
  hypo

SEQ ID NO: 452032 - DNA, 40 bp, Homo sapiens; identical to SEQ ID NO: 220824
  chr22:40624792-40624832
  hypo

SEQ ID NO: 452033 - DNA, 198 bp, Homo sapiens; identical to SEQ ID NO: 277058
  chr22:40642784-40642982
  hypo

SEQ ID NO: 452034 - DNA, 282 bp, Homo sapiens; identical to SEQ ID NO: 277059
  chr22:40693256-40693538
  hypo

SEQ ID NO: 452035 - DNA, 37 bp, Homo sapiens; identical to SEQ ID NO: 277060
  chr22:40764628-40764665
  hypo

SEQ ID NO: 452036 - DNA, 117 bp, Homo sapiens; identical to SEQ ID NO: 220825
  chr22:40815004-40815121
  hypo

SEQ ID NO: 452037 - DNA, 35 bp, Homo sapiens; identical to SEQ ID NO: 277064
  chr22:40896203-40896238
  hypo

SEQ ID NO: 452038 - DNA, 41 bp, Homo sapiens; identical to SEQ ID NO: 277065
  chr22:40911584-40911625
  hypo

SEQ ID NO: 452039 - DNA, 34 bp, Homo sapiens; identical to SEQ ID NO: 220826
  chr22:40912133-40912167
  hypo

SEQ ID NO: 452040 - DNA, 242 bp, Homo sapiens; identical to SEQ ID NO: 329807
  chr22:41034283-41034525
  hypo

SEQ ID NO: 452041 - DNA, 203 bp, Homo sapiens; identical to SEQ ID NO: 277068
  chr22:41044524-41044727
  hypo

SEQ ID NO: 452042 - DNA, 149 bp, Homo sapiens; identical to SEQ ID NO: 277070
  chr22:41087989-41088138
  hypo

SEQ ID NO: 452043 - DNA, 96 bp, Homo sapiens; identical to SEQ ID NO: 220827
  chr22:41156760-41156856
  hypo

SEQ ID NO: 452044 - DNA, 35 bp, Homo sapiens; identical to SEQ ID NO: 277072
  chr22:41157096-41157131
  hypo

SEQ ID NO: 452045 - DNA, 35 bp, Homo sapiens; identical to SEQ ID NO: 277073
  chr22:41177928-41177963
  hypo

SEQ ID NO: 452046 - DNA, 103 bp, Homo sapiens; identical to SEQ ID NO: 329813
  chr22:41398426-41398529
  hypo

SEQ ID NO: 452047 - DNA, 139 bp, Homo sapiens; identical to SEQ ID NO: 220828
  chr22:41486563-41486702
  hypo

SEQ ID NO: 452048 - DNA, 159 bp, Homo sapiens; identical to SEQ ID NO: 277077
  chr22:41573032-41573191
  hypo

SEQ ID NO: 452049 - DNA, 33 bp, Homo sapiens; identical to SEQ ID NO: 387429
  chr22:41639669-41639702
  hypo

SEQ ID NO: 452050 - DNA, 135 bp, Homo sapiens; identical to SEQ ID NO: 220832
  chr22:41641907-41642042
  hypo

SEQ ID NO: 452051 - DNA, 87 bp, Homo sapiens; identical to SEQ ID NO: 220836
  chr22:41664703-41664790
  hypo

SEQ ID NO: 452052 - DNA, 224 bp, Homo sapiens; identical to SEQ ID NO: 277084
  chr22:41666686-41666910
  hypo

SEQ ID NO: 452053 - DNA, 61 bp, Homo sapiens
  chr22:41667721-41667782
  hypo
ctgacacctggactccacctcagcctactcctagttgtgtgactctgggctacacttctct

SEQ ID NO: 452054 - DNA, 44 bp, Homo sapiens; identical to SEQ ID NO: 220839
  chr22:41669065-41669109
  hypo

SEQ ID NO: 452055 - DNA, 103 bp, Homo sapiens; identical to SEQ ID NO: 220841
  chr22:41676091-41676194
  hypo

SEQ ID NO: 452056 - DNA, 88 bp, Homo sapiens; identical to SEQ ID NO: 277089
  chr22:41768561-41768649
  hypo

SEQ ID NO: 452057 - DNA, 160 bp, Homo sapiens; identical to SEQ ID NO: 220842
  chr22:41779337-41779497
  hypo

SEQ ID NO: 452058 - DNA, 265 bp, Homo sapiens; identical to SEQ ID NO: 277091
  chr22:41790057-41790322
  hypo

SEQ ID NO: 452059 - DNA, 180 bp, Homo sapiens; identical to SEQ ID NO: 277094
  chr22:41871436-41871616
  hypo

SEQ ID NO: 452060 - DNA, 172 bp, Homo sapiens; identical to SEQ ID NO: 277095
  chr22:41877561-41877733
  hypo

SEQ ID NO: 452061 - DNA, 31 bp, Homo sapiens; identical to SEQ ID NO: 220846
  chr22:42034495-42034526
  hypo

SEQ ID NO: 452062 - DNA, 233 bp, Homo sapiens; identical to SEQ ID NO: 226386
  chr22:42229858-42230091
  hypo

SEQ ID NO: 452063 - DNA, 36 bp, Homo sapiens; identical to SEQ ID NO: 277103
  chr22:42256093-42256129
  hypo

SEQ ID NO: 452064 - DNA, 98 bp, Homo sapiens; identical to SEQ ID NO: 206152
  chr22:42310966-42311064
  hypo

SEQ ID NO: 452065 - DNA, 36 bp, Homo sapiens; identical to SEQ ID NO: 277104
  chr22:42329321-42329357
  hypo

SEQ ID NO: 452066 - DNA, 400 bp, Homo sapiens; identical to SEQ ID NO: 206156
  chr22:42669780-42670180
  hypo

SEQ ID NO: 452067 - DNA, 58 bp, Homo sapiens; identical to SEQ ID NO: 277108
  chr22:42706987-42707045
  hypo

SEQ ID NO: 452068 - DNA, 93 bp, Homo sapiens; identical to SEQ ID NO: 277109
  chr22:42713566-42713659
  hypo

SEQ ID NO: 452069 - DNA, 190 bp, Homo sapiens; identical to SEQ ID NO: 277110
  chr22:42733979-42734169
  hypo

SEQ ID NO: 452070 - DNA, 192 bp, Homo sapiens; identical to SEQ ID NO: 277111
  chr22:42744709-42744901
  hypo

SEQ ID NO: 452071 - DNA, 327 bp, Homo sapiens; identical to SEQ ID NO: 226390
  chr22:42765054-42765381
  hypo

SEQ ID NO: 452072 - DNA, 42 bp, Homo sapiens; identical to SEQ ID NO: 277112
  chr22:42796231-42796273
  hypo

SEQ ID NO: 452073 - DNA, 200 bp, Homo sapiens; identical to SEQ ID NO: 277113
  chr22:42822800-42823000
  hypo

SEQ ID NO: 452074 - DNA, 207 bp, Homo sapiens; identical to SEQ ID NO: 329855
  chr22:42829718-42829925
  hypo

SEQ ID NO: 452075 - DNA, 40 bp, Homo sapiens; identical to SEQ ID NO: 220851
  chr22:42916315-42916355
  hypo

SEQ ID NO: 452076 - DNA, 66 bp, Homo sapiens; identical to SEQ ID NO: 329857
  chr22:42944667-42944733
  hypo

SEQ ID NO: 452077 - DNA, 164 bp, Homo sapiens; identical to SEQ ID NO: 277117
  chr22:42956595-42956759
  hypo

SEQ ID NO: 452078 - DNA, 50 bp, Homo sapiens; identical to SEQ ID NO: 220852
  chr22:42972462-42972512
  hypo

SEQ ID NO: 452079 - DNA, 350 bp, Homo sapiens; identical to SEQ ID NO: 220855
  chr22:42998893-42999243
  hypo

SEQ ID NO: 452080 - DNA, 189 bp, Homo sapiens; identical to SEQ ID NO: 277123
  chr22:43005280-43005469
  hypo

SEQ ID NO: 452081 - DNA, 248 bp, Homo sapiens; identical to SEQ ID NO: 226391
  chr22:43015553-43015801
  hypo

SEQ ID NO: 452082 - DNA, 34 bp, Homo sapiens; identical to SEQ ID NO: 277124
  chr22:43089901-43089935
  hypo

SEQ ID NO: 452083 - DNA, 34 bp, Homo sapiens; identical to SEQ ID NO: 220856
  chr22:43137119-43137153
  hypo

SEQ ID NO: 452084 - DNA, 34 bp, Homo sapiens; identical to SEQ ID NO: 277126
  chr22:43138068-43138102
  hypo

SEQ ID NO: 452085 - DNA, 83 bp, Homo sapiens; identical to SEQ ID NO: 277127
  chr22:43140873-43140956
  hypo

SEQ ID NO: 452086 - DNA, 256 bp, Homo sapiens; identical to SEQ ID NO: 277128
  chr22:43149956-43150212
  hypo

SEQ ID NO: 452087 - DNA, 742 bp, Homo sapiens; identical to SEQ ID NO: 277129
  chr22:43164501-43165243
  hypo

SEQ ID NO: 452088 - DNA, 272 bp, Homo sapiens; identical to SEQ ID NO: 277130
  chr22:43166965-43167237
  hypo

SEQ ID NO: 452089 - DNA, 109 bp, Homo sapiens; identical to SEQ ID NO: 277131
  chr22:43191428-43191537
  hypo

SEQ ID NO: 452090 - DNA, 171 bp, Homo sapiens; identical to SEQ ID NO: 277132
  chr22:43238823-43238994
  hypo

SEQ ID NO: 452091 - DNA, 137 bp, Homo sapiens; identical to SEQ ID NO: 220859
  chr22:43253987-43254124
  hypo

SEQ ID NO: 452092 - DNA, 149 bp, Homo sapiens; identical to SEQ ID NO: 220860
  chr22:43266094-43266243
  hypo

SEQ ID NO: 452093 - DNA, 51 bp, Homo sapiens; identical to SEQ ID NO: 220861
  chr22:43273690-43273741
  hypo

SEQ ID NO: 452094 - DNA, 141 bp, Homo sapiens; identical to SEQ ID NO: 277136
  chr22:43298921-43299062
  hypo

SEQ ID NO: 452095 - DNA, 69 bp, Homo sapiens; identical to SEQ ID NO: 277138
  chr22:43363016-43363085
  hypo

SEQ ID NO: 452096 - DNA, 93 bp, Homo sapiens; identical to SEQ ID NO: 277139
  chr22:43365553-43365646
  hypo

SEQ ID NO: 452097 - DNA, 163 bp, Homo sapiens; identical to SEQ ID NO: 277140
  chr22:43390391-43390554
  hypo

SEQ ID NO: 452098 - DNA, 92 bp, Homo sapiens; identical to SEQ ID NO: 277141
  chr22:43402810-43402902
  hypo

SEQ ID NO: 452099 - DNA, 34 bp, Homo sapiens; identical to SEQ ID NO: 277143
  chr22:43437050-43437084
  hypo

SEQ ID NO: 452100 - DNA, 267 bp, Homo sapiens; identical to SEQ ID NO: 220863
  chr22:43465387-43465654
  hypo

SEQ ID NO: 452101 - DNA, 294 bp, Homo sapiens; identical to SEQ ID NO: 329887
  chr22:43524629-43524923
  hypo

SEQ ID NO: 452102 - DNA, 226 bp, Homo sapiens; identical to SEQ ID NO: 277147
  chr22:43555231-43555457
  hypo

SEQ ID NO: 452103 - DNA, 143 bp, Homo sapiens; identical to SEQ ID NO: 277148
  chr22:43559030-43559173
  hypo

SEQ ID NO: 452104 - DNA, 202 bp, Homo sapiens; identical to SEQ ID NO: 220865
  chr22:43566412-43566614
  hypo

SEQ ID NO: 452105 - DNA, 328 bp, Homo sapiens; identical to SEQ ID NO: 277150
  chr22:43567652-43567980
  hypo

SEQ ID NO: 452106 - DNA, 182 bp, Homo sapiens; identical to SEQ ID NO: 220869
  chr22:43581409-43581591
  hypo

SEQ ID NO: 452107 - DNA, 130 bp, Homo sapiens; identical to SEQ ID NO: 329896
  chr22:43581627-43581757
  hypo

SEQ ID NO: 452108 - DNA, 313 bp, Homo sapiens; identical to SEQ ID NO: 329897
  chr22:43608344-43608657
  hypo

SEQ ID NO: 452109 - DNA, 75 bp, Homo sapiens; identical to SEQ ID NO: 329898
  chr22:43608687-43608762
  hypo

SEQ ID NO: 452110 - DNA, 201 bp, Homo sapiens; identical to SEQ ID NO: 277154
  chr22:43609924-43610125
  hypo

SEQ ID NO: 452111 - DNA, 135 bp, Homo sapiens; identical to SEQ ID NO: 220870
  chr22:43689261-43689396
  hypo

SEQ ID NO: 452112 - DNA, 50 bp, Homo sapiens; identical to SEQ ID NO: 277156
  chr22:43861119-43861169
  hypo

SEQ ID NO: 452113 - DNA, 301 bp, Homo sapiens; identical to SEQ ID NO: 220871
  chr22:43926571-43926872
  hypo

SEQ ID NO: 452114 - DNA, 78 bp, Homo sapiens; identical to SEQ ID NO: 220872
  chr22:43926902-43926980
  hypo

SEQ ID NO: 452115 - DNA, 48 bp, Homo sapiens; identical to SEQ ID NO: 277159
  chr22:44026051-44026099
  hypo

SEQ ID NO: 452116 - DNA, 132 bp, Homo sapiens; identical to SEQ ID NO: 206161
  chr22:44287922-44288054
  hypo

SEQ ID NO: 452117 - DNA, 42 bp, Homo sapiens; identical to SEQ ID NO: 277160
  chr22:44317774-44317816
  hypo

SEQ ID NO: 452118 - DNA, 207 bp, Homo sapiens; identical to SEQ ID NO: 220874
  chr22:44322831-44323038
  hypo

SEQ ID NO: 452119 - DNA, 81 bp, Homo sapiens; identical to SEQ ID NO: 277162
  chr22:44449271-44449352
  hypo

SEQ ID NO: 452120 - DNA, 37 bp, Homo sapiens; identical to SEQ ID NO: 329910
  chr22:44487741-44487778
  hypo

SEQ ID NO: 452121 - DNA, 442 bp, Homo sapiens; identical to SEQ ID NO: 329911
  chr22:44493264-44493706
  hypo

SEQ ID NO: 452122 - DNA, 365 bp, Homo sapiens; identical to SEQ ID NO: 329912
  chr22:44493741-44494106
  hypo

SEQ ID NO: 452123 - DNA, 146 bp, Homo sapiens; identical to SEQ ID NO: 277165
  chr22:44495150-44495296
  hypo

SEQ ID NO: 452124 - DNA, 131 bp, Homo sapiens; identical to SEQ ID NO: 277166
  chr22:44495597-44495728
  hypo

SEQ ID NO: 452125 - DNA, 336 bp, Homo sapiens; identical to SEQ ID NO: 277167
  chr22:44496284-44496620
  hypo

SEQ ID NO: 452126 - DNA, 40 bp, Homo sapiens; identical to SEQ ID NO: 277170
  chr22:44545748-44545788
  hypo

SEQ ID NO: 452127 - DNA, 463 bp, Homo sapiens; identical to SEQ ID NO: 277171
  chr22:44559545-44560008
  hypo

SEQ ID NO: 452128 - DNA, 89 bp, Homo sapiens; identical to SEQ ID NO: 277173
  chr22:44612660-44612749
  hypo

SEQ ID NO: 452129 - DNA, 43 bp, Homo sapiens; identical to SEQ ID NO: 329921
  chr22:44681502-44681545
  hypo

SEQ ID NO: 452130 - DNA, 121 bp, Homo sapiens; identical to SEQ ID NO: 277175
  chr22:44745294-44745415
  hypo

SEQ ID NO: 452131 - DNA, 199 bp, Homo sapiens; identical to SEQ ID NO: 277176
  chr22:44790443-44790642
  hypo

SEQ ID NO: 452132 - DNA, 240 bp, Homo sapiens; identical to SEQ ID NO: 277177
  chr22:44808388-44808628
  hypo

SEQ ID NO: 452133 - DNA, 136 bp, Homo sapiens; identical to SEQ ID NO: 329925
  chr22:44892380-44892516
  hypo

SEQ ID NO: 452134 - DNA, 136 bp, Homo sapiens; identical to SEQ ID NO: 329926
  chr22:45004116-45004252
  hypo

SEQ ID NO: 452135 - DNA, 215 bp, Homo sapiens; identical to SEQ ID NO: 295526
  chr22:45015983-45016198
  hypo

SEQ ID NO: 452136 - DNA, 52 bp, Homo sapiens; identical to SEQ ID NO: 277182
  chr22:45085115-45085167
  hypo

SEQ ID NO: 452137 - DNA, 32 bp, Homo sapiens; identical to SEQ ID NO: 220880
  chr22:45113077-45113109
  hypo

SEQ ID NO: 452138 - DNA, 32 bp, Homo sapiens; identical to SEQ ID NO: 220881
  chr22:45113349-45113381
  hypo

SEQ ID NO: 452139 - DNA, 37 bp, Homo sapiens; identical to SEQ ID NO: 277187
  chr22:45121861-45121898
  hypo

SEQ ID NO: 452140 - DNA, 163 bp, Homo sapiens; identical to SEQ ID NO: 220882
  chr22:45122235-45122398
  hypo

SEQ ID NO: 452141 - DNA, 280 bp, Homo sapiens; identical to SEQ ID NO: 220883
  chr22:45123031-45123311
  hypo

SEQ ID NO: 452142 - DNA, 33 bp, Homo sapiens; identical to SEQ ID NO: 329944
  chr22:45135979-45136012
  hypo

SEQ ID NO: 452143 - DNA, 191 bp, Homo sapiens; identical to SEQ ID NO: 277192
  chr22:45136242-45136433
  hypo

SEQ ID NO: 452144 - DNA, 73 bp, Homo sapiens; identical to SEQ ID NO: 329946
  chr22:45137750-45137823
  hypo

SEQ ID NO: 452145 - DNA, 42 bp, Homo sapiens; identical to SEQ ID NO: 277194
  chr22:45175293-45175335
  hypo

SEQ ID NO: 452146 - DNA, 199 bp, Homo sapiens; identical to SEQ ID NO: 277195
  chr22:45181176-45181375
  hypo

SEQ ID NO: 452147 - DNA, 85 bp, Homo sapiens; identical to SEQ ID NO: 277196
  chr22:45220426-45220511
  hypo

SEQ ID NO: 452148 - DNA, 183 bp, Homo sapiens; identical to SEQ ID NO: 220885
  chr22:45242866-45243049
  hypo

SEQ ID NO: 452149 - DNA, 123 bp, Homo sapiens; identical to SEQ ID NO: 277199
  chr22:45288210-45288333
  hypo

SEQ ID NO: 452150 - DNA, 268 bp, Homo sapiens; identical to SEQ ID NO: 277200
  chr22:45312207-45312475
  hypo

SEQ ID NO: 452151 - DNA, 213 bp, Homo sapiens; identical to SEQ ID NO: 277201
  chr22:45312785-45312998
  hypo

SEQ ID NO: 452152 - DNA, 48 bp, Homo sapiens; identical to SEQ ID NO: 277202
  chr22:45322691-45322739
  hypo

SEQ ID NO: 452153 - DNA, 163 bp, Homo sapiens; identical to SEQ ID NO: 277203
  chr22:45389286-45389449
  hypo

SEQ ID NO: 452154 - DNA, 77 bp, Homo sapiens; identical to SEQ ID NO: 277204
  chr22:45392668-45392745
  hypo

SEQ ID NO: 452155 - DNA, 137 bp, Homo sapiens; identical to SEQ ID NO: 277205
  chr22:45392805-45392942
  hypo

SEQ ID NO: 452156 - DNA, 103 bp, Homo sapiens; identical to SEQ ID NO: 277206
  chr22:45474745-45474848
  hypo

SEQ ID NO: 452157 - DNA, 144 bp, Homo sapiens; identical to SEQ ID NO: 277208
  chr22:45584841-45584985
  hypo

SEQ ID NO: 452158 - DNA, 147 bp, Homo sapiens; identical to SEQ ID NO: 220887
  chr22:45591073-45591220
  hypo

SEQ ID NO: 452159 - DNA, 386 bp, Homo sapiens; identical to SEQ ID NO: 220890
  chr22:45594190-45594576
  hypo

SEQ ID NO: 452160 - DNA, 85 bp, Homo sapiens; identical to SEQ ID NO: 220891
  chr22:45594816-45594901
  hypo

SEQ ID NO: 452161 - DNA, 159 bp, Homo sapiens; identical to SEQ ID NO: 277213
  chr22:45595258-45595417
  hypo

SEQ ID NO: 452162 - DNA, 323 bp, Homo sapiens; identical to SEQ ID NO: 220894
  chr22:45607125-45607448
  hypo

SEQ ID NO: 452163 - DNA, 120 bp, Homo sapiens; identical to SEQ ID NO: 220896
  chr22:45653545-45653665
  hypo

SEQ ID NO: 452164 - DNA, 168 bp, Homo sapiens; identical to SEQ ID NO: 277220
  chr22:45717844-45718012
  hypo

SEQ ID NO: 452165 - DNA, 36 bp, Homo sapiens
  chr22:45808543-45808579
  hypo
cacccagctaattttggtattattagtagagacctc

SEQ ID NO: 452166 - DNA, 184 bp, Homo sapiens; identical to SEQ ID NO: 277223
  chr22:45814422-45814606
  hypo

SEQ ID NO: 452167 - DNA, 437 bp, Homo sapiens; identical to SEQ ID NO: 277224
  chr22:45821511-45821948
  hypo

SEQ ID NO: 452168 - DNA, 149 bp, Homo sapiens; identical to SEQ ID NO: 220899
  chr22:45822398-45822547
  hypo

SEQ ID NO: 452169 - DNA, 72 bp, Homo sapiens; identical to SEQ ID NO: 220900
  chr22:45826806-45826878
  hypo

SEQ ID NO: 452170 - DNA, 209 bp, Homo sapiens; identical to SEQ ID NO: 277227
  chr22:45897738-45897947
  hypo

SEQ ID NO: 452171 - DNA, 46 bp, Homo sapiens; identical to SEQ ID NO: 277228
  chr22:45914455-45914501
  hypo

SEQ ID NO: 452172 - DNA, 269 bp, Homo sapiens; identical to SEQ ID NO: 220901
  chr22:45929578-45929847
  hypo

SEQ ID NO: 452173 - DNA, 154 bp, Homo sapiens; identical to SEQ ID NO: 277230
  chr22:45932767-45932921
  hypo

SEQ ID NO: 452174 - DNA, 78 bp, Homo sapiens; identical to SEQ ID NO: 277231
  chr22:45938766-45938844
  hypo

SEQ ID NO: 452175 - DNA, 88 bp, Homo sapiens; identical to SEQ ID NO: 277232
  chr22:45940276-45940364
  hypo

SEQ ID NO: 452176 - DNA, 34 bp, Homo sapiens; identical to SEQ ID NO: 277233
  chr22:45949260-45949294
  hypo

SEQ ID NO: 452177 - DNA, 42 bp, Homo sapiens; identical to SEQ ID NO: 277234
  chr22:45958411-45958453
  hypo

SEQ ID NO: 452178 - DNA, 125 bp, Homo sapiens; identical to SEQ ID NO: 220903
  chr22:45976304-45976429
  hypo

SEQ ID NO: 452179 - DNA, 407 bp, Homo sapiens; identical to SEQ ID NO: 277238
  chr22:45982090-45982497
  hypo

SEQ ID NO: 452180 - DNA, 70 bp, Homo sapiens; identical to SEQ ID NO: 220904
  chr22:45982908-45982978
  hypo

SEQ ID NO: 452181 - DNA, 259 bp, Homo sapiens; identical to SEQ ID NO: 220905
  chr22:45983008-45983267
  hypo

SEQ ID NO: 452182 - DNA, 392 bp, Homo sapiens; identical to SEQ ID NO: 277241
  chr22:46009356-46009748
  hypo

SEQ ID NO: 452183 - DNA, 87 bp, Homo sapiens; identical to SEQ ID NO: 277242
  chr22:46040672-46040759
  hypo

SEQ ID NO: 452184 - DNA, 209 bp, Homo sapiens; identical to SEQ ID NO: 277243
  chr22:46042935-46043144
  hypo

SEQ ID NO: 452185 - DNA, 159 bp, Homo sapiens; identical to SEQ ID NO: 277244
  chr22:46051559-46051718
  hypo

SEQ ID NO: 452186 - DNA, 119 bp, Homo sapiens; identical to SEQ ID NO: 277245
  chr22:46082801-46082920
  hypo

SEQ ID NO: 452187 - DNA, 214 bp, Homo sapiens; identical to SEQ ID NO: 277246
  chr22:46145006-46145220
  hypo

SEQ ID NO: 452188 - DNA, 34 bp, Homo sapiens; identical to SEQ ID NO: 277247
  chr22:46153006-46153040
  hypo

SEQ ID NO: 452189 - DNA, 56 bp, Homo sapiens; identical to SEQ ID NO: 277248
  chr22:46158114-46158170
  hypo

SEQ ID NO: 452190 - DNA, 50 bp, Homo sapiens; identical to SEQ ID NO: 277249
  chr22:46229653-46229703
  hypo

SEQ ID NO: 452191 - DNA, 116 bp, Homo sapiens; identical to SEQ ID NO: 277250
  chr22:46229733-46229849
  hypo

SEQ ID NO: 452192 - DNA, 161 bp, Homo sapiens; identical to SEQ ID NO: 277253
  chr22:46278023-46278184
  hypo

SEQ ID NO: 452193 - DNA, 116 bp, Homo sapiens; identical to SEQ ID NO: 330010
  chr22:46278408-46278524
  hypo

SEQ ID NO: 452194 - DNA, 56 bp, Homo sapiens; identical to SEQ ID NO: 330011
  chr22:46278554-46278610
  hypo

SEQ ID NO: 452195 - DNA, 181 bp, Homo sapiens; identical to SEQ ID NO: 220908
  chr22:46312229-46312410
  hypo

SEQ ID NO: 452196 - DNA, 115 bp, Homo sapiens; identical to SEQ ID NO: 330013
  chr22:46318779-46318894
  hypo

SEQ ID NO: 452197 - DNA, 58 bp, Homo sapiens; identical to SEQ ID NO: 277257
  chr22:46329875-46329933
  hypo

SEQ ID NO: 452198 - DNA, 269 bp, Homo sapiens; identical to SEQ ID NO: 277259
  chr22:46407789-46408058
  hypo

SEQ ID NO: 452199 - DNA, 147 bp, Homo sapiens; identical to SEQ ID NO: 330017
  chr22:46410634-46410781
  hypo

SEQ ID NO: 452200 - DNA, 52 bp, Homo sapiens; identical to SEQ ID NO: 277261
  chr22:46437045-46437097
  hypo

SEQ ID NO: 452201 - DNA, 102 bp, Homo sapiens; identical to SEQ ID NO: 220909
  chr22:46437983-46438085
  hypo

SEQ ID NO: 452202 - DNA, 36 bp, Homo sapiens; identical to SEQ ID NO: 220910
  chr22:46455649-46455685
  hypo

SEQ ID NO: 452203 - DNA, 95 bp, Homo sapiens; identical to SEQ ID NO: 220911
  chr22:46455925-46456020
  hypo

SEQ ID NO: 452204 - DNA, 368 bp, Homo sapiens; identical to SEQ ID NO: 226399
  chr22:46465893-46466261
  hypo

SEQ ID NO: 452205 - DNA, 359 bp, Homo sapiens; identical to SEQ ID NO: 226400
  chr22:46468170-46468529
  hypo

SEQ ID NO: 452206 - DNA, 270 bp, Homo sapiens; identical to SEQ ID NO: 330024
  chr22:46498385-46498655
  hypo

SEQ ID NO: 452207 - DNA, 171 bp, Homo sapiens; identical to SEQ ID NO: 330025
  chr22:46498685-46498856
  hypo

SEQ ID NO: 452208 - DNA, 58 bp, Homo sapiens; identical to SEQ ID NO: 277266
  chr22:46499693-46499751
  hypo

SEQ ID NO: 452209 - DNA, 171 bp, Homo sapiens; identical to SEQ ID NO: 277267
  chr22:46505610-46505781
  hypo

SEQ ID NO: 452210 - DNA, 107 bp, Homo sapiens; identical to SEQ ID NO: 330028
  chr22:46521745-46521852
  hypo

SEQ ID NO: 452211 - DNA, 39 bp, Homo sapiens; identical to SEQ ID NO: 220914
  chr22:46522039-46522078
  hypo

SEQ ID NO: 452212 - DNA, 132 bp, Homo sapiens; identical to SEQ ID NO: 277269
  chr22:46555874-46556006
  hypo

SEQ ID NO: 452213 - DNA, 159 bp, Homo sapiens; identical to SEQ ID NO: 277270
  chr22:46582357-46582516
  hypo

SEQ ID NO: 452214 - DNA, 181 bp, Homo sapiens; identical to SEQ ID NO: 277272
  chr22:46594236-46594417
  hypo

SEQ ID NO: 452215 - DNA, 120 bp, Homo sapiens; identical to SEQ ID NO: 220916
  chr22:46598479-46598599
  hypo

SEQ ID NO: 452216 - DNA, 111 bp, Homo sapiens; identical to SEQ ID NO: 226401
  chr22:46658172-46658283
  hypo

SEQ ID NO: 452217 - DNA, 94 bp, Homo sapiens; identical to SEQ ID NO: 220917
  chr22:46678247-46678341
  hypo

SEQ ID NO: 452218 - DNA, 317 bp, Homo sapiens; identical to SEQ ID NO: 277278
  chr22:46745023-46745340
  hypo

SEQ ID NO: 452219 - DNA, 321 bp, Homo sapiens; identical to SEQ ID NO: 330041
  chr22:46748629-46748950
  hypo

SEQ ID NO: 452220 - DNA, 249 bp, Homo sapiens; identical to SEQ ID NO: 277280
  chr22:46750300-46750549
  hypo

SEQ ID NO: 452221 - DNA, 94 bp, Homo sapiens; identical to SEQ ID NO: 277281
  chr22:46751900-46751994
  hypo

SEQ ID NO: 452222 - DNA, 42 bp, Homo sapiens; identical to SEQ ID NO: 277282
  chr22:46755416-46755458
  hypo

SEQ ID NO: 452223 - DNA, 115 bp, Homo sapiens; identical to SEQ ID NO: 330045
  chr22:46770692-46770807
  hypo

SEQ ID NO: 452224 - DNA, 252 bp, Homo sapiens; identical to SEQ ID NO: 330046
  chr22:46770884-46771136
  hypo

SEQ ID NO: 452225 - DNA, 110 bp, Homo sapiens; identical to SEQ ID NO: 220918
  chr22:46785285-46785395
  hypo

SEQ ID NO: 452226 - DNA, 141 bp, Homo sapiens; identical to SEQ ID NO: 277285
  chr22:46786062-46786203
  hypo

SEQ ID NO: 452227 - DNA, 402 bp, Homo sapiens; identical to SEQ ID NO: 277286
  chr22:46787966-46788368
  hypo

SEQ ID NO: 452228 - DNA, 98 bp, Homo sapiens; identical to SEQ ID NO: 277287
  chr22:46790967-46791065
  hypo

SEQ ID NO: 452229 - DNA, 245 bp, Homo sapiens; identical to SEQ ID NO: 277288
  chr22:46804736-46804981
  hypo

SEQ ID NO: 452230 - DNA, 407 bp, Homo sapiens; identical to SEQ ID NO: 277289
  chr22:46805659-46806066
  hypo

SEQ ID NO: 452231 - DNA, 604 bp, Homo sapiens; identical to SEQ ID NO: 277290
  chr22:46812243-46812847
  hypo

SEQ ID NO: 452232 - DNA, 222 bp, Homo sapiens; identical to SEQ ID NO: 277291
  chr22:46813168-46813390
  hypo

SEQ ID NO: 452233 - DNA, 270 bp, Homo sapiens; identical to SEQ ID NO: 220922
  chr22:46816771-46817041
  hypo

SEQ ID NO: 452234 - DNA, 196 bp, Homo sapiens; identical to SEQ ID NO: 220923
  chr22:46828035-46828231
  hypo

SEQ ID NO: 452235 - DNA, 86 bp, Homo sapiens; identical to SEQ ID NO: 277295
  chr22:46835121-46835207
  hypo

SEQ ID NO: 452236 - DNA, 191 bp, Homo sapiens; identical to SEQ ID NO: 277296
  chr22:46838112-46838303
  hypo

SEQ ID NO: 452237 - DNA, 203 bp, Homo sapiens; identical to SEQ ID NO: 220924
  chr22:46838991-46839194
  hypo

SEQ ID NO: 452238 - DNA, 175 bp, Homo sapiens; identical to SEQ ID NO: 277298
  chr22:46847860-46848035
  hypo

SEQ ID NO: 452239 - DNA, 283 bp, Homo sapiens; identical to SEQ ID NO: 277299
  chr22:46850525-46850808
  hypo

SEQ ID NO: 452240 - DNA, 235 bp, Homo sapiens; identical to SEQ ID NO: 220925
  chr22:46859885-46860120
  hypo

SEQ ID NO: 452241 - DNA, 102 bp, Homo sapiens; identical to SEQ ID NO: 277301
  chr22:46867879-46867981
  hypo

SEQ ID NO: 452242 - DNA, 167 bp, Homo sapiens; identical to SEQ ID NO: 277303
  chr22:46905651-46905818
  hypo

SEQ ID NO: 452243 - DNA, 82 bp, Homo sapiens; identical to SEQ ID NO: 277305
  chr22:46922073-46922155
  hypo

SEQ ID NO: 452244 - DNA, 31 bp, Homo sapiens; identical to SEQ ID NO: 277307
  chr22:46931122-46931153
  hypo

SEQ ID NO: 452245 - DNA, 59 bp, Homo sapiens; identical to SEQ ID NO: 277310
  chr22:46992940-46992999
  hypo

SEQ ID NO: 452246 - DNA, 87 bp, Homo sapiens; identical to SEQ ID NO: 277311
  chr22:47004839-47004926
  hypo

SEQ ID NO: 452247 - DNA, 87 bp, Homo sapiens; identical to SEQ ID NO: 220932
  chr22:47004986-47005073
  hypo

SEQ ID NO: 452248 - DNA, 323 bp, Homo sapiens; identical to SEQ ID NO: 330078
  chr22:47005562-47005885
  hypo

SEQ ID NO: 452249 - DNA, 153 bp, Homo sapiens; identical to SEQ ID NO: 277314
  chr22:47014558-47014711
  hypo

SEQ ID NO: 452250 - DNA, 490 bp, Homo sapiens; identical to SEQ ID NO: 277316
  chr22:47023708-47024198
  hypo

SEQ ID NO: 452251 - DNA, 197 bp, Homo sapiens; identical to SEQ ID NO: 277317
  chr22:47037419-47037616
  hypo

SEQ ID NO: 452252 - DNA, 232 bp, Homo sapiens; identical to SEQ ID NO: 330086
  chr22:47054716-47054948
  hypo

SEQ ID NO: 452253 - DNA, 33 bp, Homo sapiens; identical to SEQ ID NO: 220937
  chr22:47056194-47056227
  hypo

SEQ ID NO: 452254 - DNA, 94 bp, Homo sapiens; identical to SEQ ID NO: 277321
  chr22:47059000-47059094
  hypo

SEQ ID NO: 452255 - DNA, 165 bp, Homo sapiens; identical to SEQ ID NO: 277322
  chr22:47064650-47064815
  hypo

SEQ ID NO: 452256 - DNA, 89 bp, Homo sapiens; identical to SEQ ID NO: 277323
  chr22:47069564-47069653
  hypo

SEQ ID NO: 452257 - DNA, 61 bp, Homo sapiens; identical to SEQ ID NO: 277324
  chr22:47074764-47074825
  hypo

SEQ ID NO: 452258 - DNA, 264 bp, Homo sapiens; identical to SEQ ID NO: 277326
  chr22:47107084-47107348
  hypo

SEQ ID NO: 452259 - DNA, 212 bp, Homo sapiens; identical to SEQ ID NO: 277327
  chr22:47113342-47113554
  hypo

SEQ ID NO: 452260 - DNA, 95 bp, Homo sapiens; identical to SEQ ID NO: 277328
  chr22:47139211-47139306
  hypo

SEQ ID NO: 452261 - DNA, 160 bp, Homo sapiens; identical to SEQ ID NO: 220938
  chr22:47163644-47163804
  hypo

SEQ ID NO: 452262 - DNA, 284 bp, Homo sapiens; identical to SEQ ID NO: 220939
  chr22:47172072-47172356
  hypo

SEQ ID NO: 452263 - DNA, 203 bp, Homo sapiens; identical to SEQ ID NO: 277331
  chr22:47187931-47188134
  hypo

SEQ ID NO: 452264 - DNA, 115 bp, Homo sapiens; identical to SEQ ID NO: 277332
  chr22:47189586-47189701
  hypo

SEQ ID NO: 452265 - DNA, 119 bp, Homo sapiens; identical to SEQ ID NO: 220940
  chr22:47192836-47192955
  hypo

SEQ ID NO: 452266 - DNA, 46 bp, Homo sapiens; identical to SEQ ID NO: 220941
  chr22:47193289-47193335
  hypo

SEQ ID NO: 452267 - DNA, 89 bp, Homo sapiens; identical to SEQ ID NO: 220942
  chr22:47193371-47193460
  hypo

SEQ ID NO: 452268 - DNA, 145 bp, Homo sapiens; identical to SEQ ID NO: 277337
  chr22:47307379-47307524
  hypo

SEQ ID NO: 452269 - DNA, 198 bp, Homo sapiens; identical to SEQ ID NO: 277339
  chr22:47354378-47354576
  hypo

SEQ ID NO: 452270 - DNA, 110 bp, Homo sapiens; identical to SEQ ID NO: 220945
  chr22:47370212-47370322
  hypo

SEQ ID NO: 452271 - DNA, 305 bp, Homo sapiens; identical to SEQ ID NO: 277341
  chr22:47372443-47372748
  hypo

SEQ ID NO: 452272 - DNA, 187 bp, Homo sapiens; identical to SEQ ID NO: 277342
  chr22:47380645-47380832
  hypo

SEQ ID NO: 452273 - DNA, 154 bp, Homo sapiens; identical to SEQ ID NO: 277343
  chr22:47381551-47381705
  hypo

SEQ ID NO: 452274 - DNA, 235 bp, Homo sapiens; identical to SEQ ID NO: 277344
  chr22:47393097-47393332
  hypo

SEQ ID NO: 452275 - DNA, 63 bp, Homo sapiens; identical to SEQ ID NO: 277345
  chr22:47405907-47405970
  hypo

SEQ ID NO: 452276 - DNA, 181 bp, Homo sapiens; identical to SEQ ID NO: 277346
  chr22:47406193-47406374
  hypo

SEQ ID NO: 452277 - DNA, 364 bp, Homo sapiens; identical to SEQ ID NO: 277347
  chr22:47411015-47411379
  hypo

SEQ ID NO: 452278 - DNA, 229 bp, Homo sapiens; identical to SEQ ID NO: 330116
  chr22:47428637-47428866
  hypo

SEQ ID NO: 452279 - DNA, 214 bp, Homo sapiens; identical to SEQ ID NO: 220949
  chr22:47455004-47455218
  hypo

SEQ ID NO: 452280 - DNA, 120 bp, Homo sapiens; identical to SEQ ID NO: 220953
  chr22:47466259-47466379
  hypo

SEQ ID NO: 452281 - DNA, 59 bp, Homo sapiens; identical to SEQ ID NO: 277357
  chr22:47486206-47486265
  hypo

SEQ ID NO: 452282 - DNA, 137 bp, Homo sapiens; identical to SEQ ID NO: 277358
  chr22:47489047-47489184
  hypo

SEQ ID NO: 452283 - DNA, 49 bp, Homo sapiens; identical to SEQ ID NO: 277359
  chr22:47511004-47511053
  hypo

SEQ ID NO: 452284 - DNA, 227 bp, Homo sapiens; identical to SEQ ID NO: 277361
  chr22:47532466-47532693
  hypo

SEQ ID NO: 452285 - DNA, 747 bp, Homo sapiens; identical to SEQ ID NO: 277363
  chr22:47540105-47540852
  hypo

SEQ ID NO: 452286 - DNA, 546 bp, Homo sapiens; identical to SEQ ID NO: 277364
  chr22:47542709-47543255
  hypo

SEQ ID NO: 452287 - DNA, 89 bp, Homo sapiens; identical to SEQ ID NO: 277365
  chr22:47614609-47614698
  hypo

SEQ ID NO: 452288 - DNA, 199 bp, Homo sapiens; identical to SEQ ID NO: 330134
  chr22:47666573-47666772
  hypo

SEQ ID NO: 452289 - DNA, 36 bp, Homo sapiens; identical to SEQ ID NO: 277369
  chr22:48528663-48528699
  hypo

SEQ ID NO: 452290 - DNA, 217 bp, Homo sapiens; identical to SEQ ID NO: 277370
  chr22:48723482-48723699
  hypo

SEQ ID NO: 452291 - DNA, 60 bp, Homo sapiens; identical to SEQ ID NO: 277371
  chr22:48727541-48727601
  hypo

SEQ ID NO: 452292 - DNA, 266 bp, Homo sapiens; identical to SEQ ID NO: 330141
  chr22:48728451-48728717
  hypo

SEQ ID NO: 452293 - DNA, 218 bp, Homo sapiens; identical to SEQ ID NO: 220957
  chr22:48793077-48793295
  hypo

SEQ ID NO: 452294 - DNA, 43 bp, Homo sapiens; identical to SEQ ID NO: 277374
  chr22:48809224-48809267
  hypo

SEQ ID NO: 452295 - DNA, 341 bp, Homo sapiens; identical to SEQ ID NO: 277376
  chr22:48918775-48919116
  hypo

SEQ ID NO: 452296 - DNA, 570 bp, Homo sapiens; identical to SEQ ID NO: 277377
  chr22:48921050-48921620
  hypo

SEQ ID NO: 452297 - DNA, 377 bp, Homo sapiens; identical to SEQ ID NO: 277378
  chr22:48923829-48924206
  hypo

SEQ ID NO: 452298 - DNA, 159 bp, Homo sapiens; identical to SEQ ID NO: 277379
  chr22:48946285-48946444
  hypo

SEQ ID NO: 452299 - DNA, 153 bp, Homo sapiens; identical to SEQ ID NO: 277380
  chr22:48955833-48955986
  hypo

SEQ ID NO: 452300 - DNA, 110 bp, Homo sapiens; identical to SEQ ID NO: 277381
  chr22:48956016-48956126
  hypo

SEQ ID NO: 452301 - DNA, 88 bp, Homo sapiens; identical to SEQ ID NO: 277382
  chr22:48959486-48959574
  hypo

SEQ ID NO: 452302 - DNA, 306 bp, Homo sapiens; identical to SEQ ID NO: 277383
  chr22:48965019-48965325
  hypo

SEQ ID NO: 452303 - DNA, 105 bp, Homo sapiens; identical to SEQ ID NO: 134357
  chr22:48972766-48972871
  hypo

SEQ ID NO: 452304 - DNA, 314 bp, Homo sapiens; identical to SEQ ID NO: 277384
  chr22:48977759-48978073
  hypo

SEQ ID NO: 452305 - DNA, 107 bp, Homo sapiens; identical to SEQ ID NO: 277386
  chr22:48998395-48998502
  hypo

SEQ ID NO: 452306 - DNA, 414 bp, Homo sapiens; identical to SEQ ID NO: 277387
  chr22:49008040-49008454
  hypo

SEQ ID NO: 452307 - DNA, 256 bp, Homo sapiens; identical to SEQ ID NO: 277388
  chr22:49010565-49010821
  hypo

SEQ ID NO: 452308 - DNA, 92 bp, Homo sapiens; identical to SEQ ID NO: 330158
  chr22:49013241-49013333
  hypo

SEQ ID NO: 452309 - DNA, 48 bp, Homo sapiens; identical to SEQ ID NO: 330159
  chr22:49013485-49013533
  hypo

SEQ ID NO: 452310 - DNA, 137 bp, Homo sapiens; identical to SEQ ID NO: 277390
  chr22:49014306-49014443
  hypo

SEQ ID NO: 452311 - DNA, 772 bp, Homo sapiens; identical to SEQ ID NO: 220959
  chr22:49026210-49026982
  hypo

SEQ ID NO: 452312 - DNA, 133 bp, Homo sapiens; identical to SEQ ID NO: 330162
  chr22:49038918-49039051
  hypo

SEQ ID NO: 452313 - DNA, 158 bp, Homo sapiens; identical to SEQ ID NO: 277394
  chr22:49045921-49046079
  hypo

SEQ ID NO: 452314 - DNA, 240 bp, Homo sapiens; identical to SEQ ID NO: 277395
  chr22:49046594-49046834
  hypo

SEQ ID NO: 452315 - DNA, 120 bp, Homo sapiens; identical to SEQ ID NO: 330166
  chr22:49047904-49048024
  hypo

SEQ ID NO: 452316 - DNA, 42 bp, Homo sapiens; identical to SEQ ID NO: 277397
  chr22:49053747-49053789
  hypo

SEQ ID NO: 452317 - DNA, 337 bp, Homo sapiens; identical to SEQ ID NO: 277398
  chr22:49054731-49055068
  hypo

SEQ ID NO: 452318 - DNA, 168 bp, Homo sapiens; identical to SEQ ID NO: 277399
  chr22:49057067-49057235
  hypo

SEQ ID NO: 452319 - DNA, 202 bp, Homo sapiens; identical to SEQ ID NO: 277400
  chr22:49063357-49063559
  hypo

SEQ ID NO: 452320 - DNA, 86 bp, Homo sapiens; identical to SEQ ID NO: 277401
  chr22:49070489-49070575
  hypo

SEQ ID NO: 452321 - DNA, 91 bp, Homo sapiens; identical to SEQ ID NO: 277402
  chr22:49087333-49087424
  hypo

SEQ ID NO: 452322 - DNA, 257 bp, Homo sapiens; identical to SEQ ID NO: 277403
  chr22:49104033-49104290
  hypo

SEQ ID NO: 452323 - DNA, 115 bp, Homo sapiens; identical to SEQ ID NO: 277405
  chr22:49140371-49140486
  hypo

SEQ ID NO: 452324 - DNA, 177 bp, Homo sapiens; identical to SEQ ID NO: 330177
  chr22:49145662-49145839
  hypo

SEQ ID NO: 452325 - DNA, 397 bp, Homo sapiens; identical to SEQ ID NO: 330178
  chr22:49146049-49146446
  hypo

SEQ ID NO: 452326 - DNA, 42 bp, Homo sapiens; identical to SEQ ID NO: 277408
  chr22:49175463-49175505
  hypo

SEQ ID NO: 452327 - DNA, 201 bp, Homo sapiens; identical to SEQ ID NO: 277409
  chr22:49203055-49203256
  hypo

SEQ ID NO: 452328 - DNA, 115 bp, Homo sapiens; identical to SEQ ID NO: 277410
  chr22:49216176-49216291
  hypo

SEQ ID NO: 452329 - DNA, 197 bp, Homo sapiens; identical to SEQ ID NO: 277411
  chr22:49231767-49231964
  hypo

SEQ ID NO: 452330 - DNA, 189 bp, Homo sapiens; identical to SEQ ID NO: 277412
  chr22:49233007-49233196
  hypo

SEQ ID NO: 452331 - DNA, 61 bp, Homo sapiens; identical to SEQ ID NO: 330185
  chr22:49233434-49233495
  hypo

SEQ ID NO: 452332 - DNA, 281 bp, Homo sapiens; identical to SEQ ID NO: 220962
  chr22:49277152-49277433
  hypo

SEQ ID NO: 452333 - DNA, 84 bp, Homo sapiens; identical to SEQ ID NO: 277415
  chr22:49294317-49294401
  hypo

SEQ ID NO: 452334 - DNA, 266 bp, Homo sapiens; identical to SEQ ID NO: 277416
  chr22:49295890-49296156
  hypo

SEQ ID NO: 452335 - DNA, 282 bp, Homo sapiens; identical to SEQ ID NO: 277417
  chr22:49333182-49333464
  hypo

SEQ ID NO: 452336 - DNA, 43 bp, Homo sapiens; identical to SEQ ID NO: 277418
  chr22:49380597-49380640
  hypo

SEQ ID NO: 452337 - DNA, 88 bp, Homo sapiens; identical to SEQ ID NO: 277419
  chr22:49380670-49380758
  hypo

SEQ ID NO: 452338 - DNA, 140 bp, Homo sapiens; identical to SEQ ID NO: 277421
  chr22:49389207-49389347
  hypo

SEQ ID NO: 452339 - DNA, 142 bp, Homo sapiens; identical to SEQ ID NO: 277422
  chr22:49404568-49404710
  hypo

SEQ ID NO: 452340 - DNA, 31 bp, Homo sapiens; identical to SEQ ID NO: 277423
  chr22:49424884-49424915
  hypo

SEQ ID NO: 452341 - DNA, 94 bp, Homo sapiens; identical to SEQ ID NO: 277424
  chr22:49430807-49430901
  hypo

SEQ ID NO: 452342 - DNA, 275 bp, Homo sapiens; identical to SEQ ID NO: 277425
  chr22:49498249-49498524
  hypo

SEQ ID NO: 452343 - DNA, 125 bp, Homo sapiens; identical to SEQ ID NO: 277426
  chr22:49504662-49504787
  hypo

SEQ ID NO: 452344 - DNA, 51 bp, Homo sapiens; identical to SEQ ID NO: 277428
  chr22:49512003-49512054
  hypo

SEQ ID NO: 452345 - DNA, 108 bp, Homo sapiens; identical to SEQ ID NO: 277429
  chr22:49535540-49535648
  hypo

SEQ ID NO: 452346 - DNA, 216 bp, Homo sapiens; identical to SEQ ID NO: 277430
  chr22:49538065-49538281
  hypo

SEQ ID NO: 452347 - DNA, 226 bp, Homo sapiens; identical to SEQ ID NO: 277431
  chr22:49546643-49546869
  hypo

SEQ ID NO: 452348 - DNA, 71 bp, Homo sapiens; identical to SEQ ID NO: 277432
  chr22:49558735-49558806
  hypo

SEQ ID NO: 452349 - DNA, 212 bp, Homo sapiens; identical to SEQ ID NO: 277433
  chr22:49559994-49560206
  hypo

SEQ ID NO: 452350 - DNA, 142 bp, Homo sapiens; identical to SEQ ID NO: 277434
  chr22:49579810-49579952
  hypo

SEQ ID NO: 452351 - DNA, 244 bp, Homo sapiens; identical to SEQ ID NO: 277435
  chr22:49580738-49580982
  hypo

SEQ ID NO: 452352 - DNA, 193 bp, Homo sapiens; identical to SEQ ID NO: 277436
  chr22:49582855-49583048
  hypo

SEQ ID NO: 452353 - DNA, 179 bp, Homo sapiens; identical to SEQ ID NO: 277437
  chr22:49610931-49611110
  hypo

SEQ ID NO: 452354 - DNA, 77 bp, Homo sapiens; identical to SEQ ID NO: 277438
  chr22:49629162-49629239
  hypo

SEQ ID NO: 452355 - DNA, 85 bp, Homo sapiens; identical to SEQ ID NO: 277440
  chr22:49678542-49678627
  hypo

SEQ ID NO: 452356 - DNA, 147 bp, Homo sapiens; identical to SEQ ID NO: 277444
  chr22:49699808-49699955
  hypo

SEQ ID NO: 452357 - DNA, 42 bp, Homo sapiens; identical to SEQ ID NO: 277445
  chr22:49721831-49721873
  hypo

SEQ ID NO: 452358 - DNA, 222 bp, Homo sapiens; identical to SEQ ID NO: 220963
  chr22:49729772-49729994
  hypo

SEQ ID NO: 452359 - DNA, 41 bp, Homo sapiens; identical to SEQ ID NO: 220964
  chr22:49730114-49730155
  hypo

SEQ ID NO: 452360 - DNA, 166 bp, Homo sapiens; identical to SEQ ID NO: 277449
  chr22:49751421-49751587
  hypo

SEQ ID NO: 452361 - DNA, 211 bp, Homo sapiens; identical to SEQ ID NO: 277450
  chr22:49773232-49773443
  hypo

SEQ ID NO: 452362 - DNA, 140 bp, Homo sapiens; identical to SEQ ID NO: 330222
  chr22:49785182-49785322
  hypo

SEQ ID NO: 452363 - DNA, 131 bp, Homo sapiens; identical to SEQ ID NO: 330223
  chr22:49785379-49785510
  hypo

SEQ ID NO: 452364 - DNA, 89 bp, Homo sapiens; identical to SEQ ID NO: 330224
  chr22:49831760-49831849
  hypo

SEQ ID NO: 452365 - DNA, 79 bp, Homo sapiens; identical to SEQ ID NO: 277453
  chr22:49833907-49833986
  hypo

SEQ ID NO: 452366 - DNA, 120 bp, Homo sapiens; identical to SEQ ID NO: 277454
  chr22:49834662-49834782
  hypo

SEQ ID NO: 452367 - DNA, 97 bp, Homo sapiens; identical to SEQ ID NO: 277455
  chr22:49835737-49835834
  hypo

SEQ ID NO: 452368 - DNA, 254 bp, Homo sapiens; identical to SEQ ID NO: 277457
  chr22:49855321-49855575
  hypo

SEQ ID NO: 452369 - DNA, 42 bp, Homo sapiens; identical to SEQ ID NO: 277459
  chr22:49858316-49858358
  hypo

SEQ ID NO: 452370 - DNA, 242 bp, Homo sapiens; identical to SEQ ID NO: 330231
  chr22:49864171-49864413
  hypo

SEQ ID NO: 452371 - DNA, 34 bp, Homo sapiens; identical to SEQ ID NO: 330232
  chr22:49864470-49864504
  hypo

SEQ ID NO: 452372 - DNA, 120 bp, Homo sapiens; identical to SEQ ID NO: 277461
  chr22:49880500-49880620
  hypo

SEQ ID NO: 452373 - DNA, 227 bp, Homo sapiens; identical to SEQ ID NO: 277462
  chr22:49901386-49901613
  hypo

SEQ ID NO: 452374 - DNA, 124 bp, Homo sapiens; identical to SEQ ID NO: 277465
  chr22:49945296-49945420
  hypo

SEQ ID NO: 452375 - DNA, 252 bp, Homo sapiens; identical to SEQ ID NO: 277466
  chr22:49945706-49945958
  hypo

SEQ ID NO: 452376 - DNA, 407 bp, Homo sapiens; identical to SEQ ID NO: 330241
  chr22:49948171-49948578
  hypo

SEQ ID NO: 452377 - DNA, 85 bp, Homo sapiens; identical to SEQ ID NO: 330242
  chr22:49948620-49948705
  hypo

SEQ ID NO: 452378 - DNA, 202 bp, Homo sapiens; identical to SEQ ID NO: 277468
  chr22:49958407-49958609
  hypo

SEQ ID NO: 452379 - DNA, 200 bp, Homo sapiens; identical to SEQ ID NO: 277469
  chr22:49964997-49965197
  hypo

SEQ ID NO: 452380 - DNA, 150 bp, Homo sapiens; identical to SEQ ID NO: 277472
  chr22:49971212-49971362
  hypo

SEQ ID NO: 452381 - DNA, 84 bp, Homo sapiens; identical to SEQ ID NO: 277473
  chr22:49971682-49971766
  hypo

SEQ ID NO: 452382 - DNA, 53 bp, Homo sapiens; identical to SEQ ID NO: 220968
  chr22:49983615-49983668
  hypo

SEQ ID NO: 452383 - DNA, 42 bp, Homo sapiens; identical to SEQ ID NO: 220969
  chr22:50000856-50000898
  hypo

SEQ ID NO: 452384 - DNA, 46 bp, Homo sapiens; identical to SEQ ID NO: 330255
  chr22:50025072-50025118
  hypo

SEQ ID NO: 452385 - DNA, 173 bp, Homo sapiens; identical to SEQ ID NO: 220973
  chr22:50025148-50025321
  hypo

SEQ ID NO: 452386 - DNA, 33 bp, Homo sapiens; identical to SEQ ID NO: 277485
  chr22:50047562-50047595
  hypo

SEQ ID NO: 452387 - DNA, 222 bp, Homo sapiens; identical to SEQ ID NO: 330258
  chr22:50054165-50054387
  hypo

SEQ ID NO: 452388 - DNA, 207 bp, Homo sapiens; identical to SEQ ID NO: 220975
  chr22:50054635-50054842
  hypo

SEQ ID NO: 452389 - DNA, 195 bp, Homo sapiens; identical to SEQ ID NO: 277488
  chr22:50085872-50086067
  hypo

SEQ ID NO: 452390 - DNA, 79 bp, Homo sapiens; identical to SEQ ID NO: 277489
  chr22:50092133-50092212
  hypo

SEQ ID NO: 452391 - DNA, 353 bp, Homo sapiens; identical to SEQ ID NO: 277490
  chr22:50107838-50108191
  hypo

SEQ ID NO: 452392 - DNA, 95 bp, Homo sapiens; identical to SEQ ID NO: 277491
  chr22:50113602-50113697
  hypo

SEQ ID NO: 452393 - DNA, 50 bp, Homo sapiens; identical to SEQ ID NO: 277492
  chr22:50114361-50114411
  hypo

SEQ ID NO: 452394 - DNA, 198 bp, Homo sapiens; identical to SEQ ID NO: 295570
  chr22:50118499-50118697
  hypo

SEQ ID NO: 452395 - DNA, 66 bp, Homo sapiens; identical to SEQ ID NO: 134360
  chr22:50118722-50118788
  hypo

SEQ ID NO: 452396 - DNA, 154 bp, Homo sapiens; identical to SEQ ID NO: 330267
  chr22:50119262-50119416
  hypo

SEQ ID NO: 452397 - DNA, 80 bp, Homo sapiens; identical to SEQ ID NO: 330268
  chr22:50119476-50119556
  hypo

SEQ ID NO: 452398 - DNA, 42 bp, Homo sapiens; identical to SEQ ID NO: 277494
  chr22:50131653-50131695
  hypo

SEQ ID NO: 452399 - DNA, 131 bp, Homo sapiens; identical to SEQ ID NO: 277495
  chr22:50156812-50156943
  hypo

SEQ ID NO: 452400 - DNA, 128 bp, Homo sapiens; identical to SEQ ID NO: 220976
  chr22:50169707-50169835
  hypo

SEQ ID NO: 452401 - DNA, 772 bp, Homo sapiens; identical to SEQ ID NO: 277498
  chr22:50171291-50172063
  hypo

SEQ ID NO: 452402 - DNA, 71 bp, Homo sapiens; identical to SEQ ID NO: 277499
  chr22:50176846-50176917
  hypo

SEQ ID NO: 452403 - DNA, 249 bp, Homo sapiens; identical to SEQ ID NO: 277501
  chr22:50177707-50177956
  hypo

SEQ ID NO: 452404 - DNA, 162 bp, Homo sapiens; identical to SEQ ID NO: 277502
  chr22:50187009-50187171
  hypo

SEQ ID NO: 452405 - DNA, 157 bp, Homo sapiens; identical to SEQ ID NO: 277505
  chr22:50209203-50209360
  hypo

SEQ ID NO: 452406 - DNA, 533 bp, Homo sapiens; identical to SEQ ID NO: 277506
  chr22:50209390-50209923
  hypo

SEQ ID NO: 452407 - DNA, 162 bp, Homo sapiens; identical to SEQ ID NO: 277507
  chr22:50223386-50223548
  hypo

SEQ ID NO: 452408 - DNA, 157 bp, Homo sapiens; identical to SEQ ID NO: 277508
  chr22:50234239-50234396
  hypo

SEQ ID NO: 452409 - DNA, 441 bp, Homo sapiens; identical to SEQ ID NO: 295576
  chr22:50246433-50246874
  hypo

SEQ ID NO: 452410 - DNA, 174 bp, Homo sapiens; identical to SEQ ID NO: 277509
  chr22:50250093-50250267
  hypo

SEQ ID NO: 452411 - DNA, 229 bp, Homo sapiens; identical to SEQ ID NO: 220988
  chr22:50250297-50250526
  hypo

SEQ ID NO: 452412 - DNA, 68 bp, Homo sapiens; identical to SEQ ID NO: 277511
  chr22:50282333-50282401
  hypo

SEQ ID NO: 452413 - DNA, 121 bp, Homo sapiens; identical to SEQ ID NO: 220989
  chr22:50296995-50297116
  hypo

SEQ ID NO: 452414 - DNA, 86 bp, Homo sapiens; identical to SEQ ID NO: 220990
  chr22:50297146-50297232
  hypo

SEQ ID NO: 452415 - DNA, 78 bp, Homo sapiens; identical to SEQ ID NO: 277513
  chr22:50305618-50305696
  hypo

SEQ ID NO: 452416 - DNA, 42 bp, Homo sapiens; identical to SEQ ID NO: 277515
  chr22:50340691-50340733
  hypo

SEQ ID NO: 452417 - DNA, 121 bp, Homo sapiens; identical to SEQ ID NO: 277516
  chr22:50341662-50341783
  hypo

SEQ ID NO: 452418 - DNA, 403 bp, Homo sapiens; identical to SEQ ID NO: 277517
  chr22:50343413-50343816
  hypo

SEQ ID NO: 452419 - DNA, 184 bp, Homo sapiens; identical to SEQ ID NO: 277518
  chr22:50344327-50344511
  hypo

SEQ ID NO: 452420 - DNA, 326 bp, Homo sapiens; identical to SEQ ID NO: 277519
  chr22:50345917-50346243
  hypo

SEQ ID NO: 452421 - DNA, 445 bp, Homo sapiens; identical to SEQ ID NO: 277520
  chr22:50346303-50346748
  hypo

SEQ ID NO: 452422 - DNA, 185 bp, Homo sapiens; identical to SEQ ID NO: 295578
  chr22:50422041-50422226
  hypo

SEQ ID NO: 452423 - DNA, 189 bp, Homo sapiens; identical to SEQ ID NO: 220992
  chr22:50433174-50433363
  hypo

SEQ ID NO: 452424 - DNA, 48 bp, Homo sapiens; identical to SEQ ID NO: 277524
  chr22:50506925-50506973
  hypo

SEQ ID NO: 452425 - DNA, 31 bp, Homo sapiens; identical to SEQ ID NO: 277525
  chr22:50509793-50509824
  hypo

SEQ ID NO: 452426 - DNA, 144 bp, Homo sapiens; identical to SEQ ID NO: 277526
  chr22:50511772-50511916
  hypo

SEQ ID NO: 452427 - DNA, 64 bp, Homo sapiens; identical to SEQ ID NO: 277527
  chr22:50515962-50516026
  hypo

SEQ ID NO: 452428 - DNA, 395 bp, Homo sapiens; identical to SEQ ID NO: 277528
  chr22:50520368-50520763
  hypo

SEQ ID NO: 452429 - DNA, 197 bp, Homo sapiens; identical to SEQ ID NO: 277529
  chr22:50521454-50521651
  hypo

SEQ ID NO: 452430 - DNA, 66 bp, Homo sapiens; identical to SEQ ID NO: 277530
  chr22:50529039-50529105
  hypo

SEQ ID NO: 452431 - DNA, 198 bp, Homo sapiens; identical to SEQ ID NO: 277532
  chr22:50601380-50601578
  hypo

SEQ ID NO: 452432 - DNA, 131 bp, Homo sapiens; identical to SEQ ID NO: 277533
  chr22:50626942-50627073
  hypo

SEQ ID NO: 452433 - DNA, 59 bp, Homo sapiens; identical to SEQ ID NO: 220994
  chr22:50656965-50657024
  hypo

SEQ ID NO: 452434 - DNA, 39 bp, Homo sapiens; identical to SEQ ID NO: 277536
  chr22:50695754-50695793
  hypo

SEQ ID NO: 452435 - DNA, 196 bp, Homo sapiens; identical to SEQ ID NO: 277537
  chr22:50714229-50714425
  hypo

SEQ ID NO: 452436 - DNA, 801 bp, Homo sapiens
  chr22:50719990-50720791
  hypo
gcacaatgaactcgggcaggttgtgtgtggtgtctcgtttctgccgccgcttgggcgggggctgcacctccgggggctcacagtacaggtcggtctccgtcagcgtcttcatggtgcagcgctcggcacccacgaaggcctcggcctcctgcagcgtcatcgccttgttcagattggtgccctggggaggcggcagtggtcggggtgaggaggagggaaccagggacaggtggaccagctctcagcccagacccgagcaggacccagacacccggggctgcaccgtcctcacccgggcgtggatgagcttgttgacctgcttcttgacgccacctgtgaagttctcaaaggtggggtcaggcacgtactcgaaggccccggcctctgttctgagcagggcacggtgcccgtccatctcgatcagcaccgtgaggttgtaggcctctggctcctcaggcacagccggggacaggaagacgaccttggtgtcattgtggaacacgtagtctgtacccaccacctgcaggcaagtcccagctgtcagcccccgggcgcagaccccgcccttcctgggcacgatcccatgggccggtgccagagctgagcccacgccaggactgaccgtcatgggctgcagggattcagcctcccgcggcggctgccaggactgcaggggctccgcgatgaccaccatggcaaacctctggatcaggctgaagccctgacccgtgacgttgatgctgcggccaccactgcggagggcagtgccttcgtgggctcggctggcaggggtggtccctg

SEQ ID NO: 452437 - DNA, 463 bp, Homo sapiens; identical to SEQ ID NO: 220996
  chr22:50721365-50721828
  hypo

SEQ ID NO: 452438 - DNA, 616 bp, Homo sapiens; identical to SEQ ID NO: 330323
  chr22:50721872-50722488
  hypo

SEQ ID NO: 452439 - DNA, 621 bp, Homo sapiens; identical to SEQ ID NO: 277540
  chr22:50724162-50724783
  hypo

SEQ ID NO: 452440 - DNA, 84 bp, Homo sapiens; identical to SEQ ID NO: 206187
  chr22:50745645-50745729
  hypo

SEQ ID NO: 452441 - DNA, 183 bp, Homo sapiens; identical to SEQ ID NO: 206188
  chr22:50765110-50765293
  hypo

SEQ ID NO: 452442 - DNA, 44 bp, Homo sapiens; identical to SEQ ID NO: 226414
  chr22:50766078-50766122
  hypo

SEQ ID NO: 452443 - DNA, 76 bp, Homo sapiens; identical to SEQ ID NO: 221000
  chr22:50853285-50853361
  hypo

SEQ ID NO: 452444 - DNA, 221 bp, Homo sapiens; identical to SEQ ID NO: 277542
  chr22:50858128-50858349
  hypo

SEQ ID NO: 452445 - DNA, 219 bp, Homo sapiens; identical to SEQ ID NO: 295589
  chr22:50873755-50873974
  hypo

SEQ ID NO: 452446 - DNA, 385 bp, Homo sapiens; identical to SEQ ID NO: 295590
  chr22:50874004-50874389
  hypo

SEQ ID NO: 452447 - DNA, 72 bp, Homo sapiens; identical to SEQ ID NO: 221004
  chr22:50874675-50874747
  hypo

SEQ ID NO: 452448 - DNA, 465 bp, Homo sapiens; identical to SEQ ID NO: 277548
  chr22:50877969-50878434
  hypo

SEQ ID NO: 452449 - DNA, 115 bp, Homo sapiens; identical to SEQ ID NO: 277549
  chr22:50882626-50882741
  hypo

SEQ ID NO: 452450 - DNA, 197 bp, Homo sapiens; identical to SEQ ID NO: 221005
  chr22:50884059-50884256
  hypo

SEQ ID NO: 452451 - DNA, 158 bp, Homo sapiens; identical to SEQ ID NO: 277553
  chr22:50897897-50898055
  hypo

SEQ ID NO: 452452 - DNA, 137 bp, Homo sapiens; identical to SEQ ID NO: 277555
  chr22:50918772-50918909
  hypo

SEQ ID NO: 452453 - DNA, 80 bp, Homo sapiens; identical to SEQ ID NO: 226417
  chr22:50920028-50920108
  hypo

SEQ ID NO: 452454 - DNA, 494 bp, Homo sapiens; identical to SEQ ID NO: 277556
  chr22:50921117-50921611
  hypo

SEQ ID NO: 452455 - DNA, 302 bp, Homo sapiens; identical to SEQ ID NO: 330346
  chr22:50922303-50922605
  hypo

SEQ ID NO: 452456 - DNA, 116 bp, Homo sapiens; identical to SEQ ID NO: 221013
  chr22:50922663-50922779
  hypo

SEQ ID NO: 452457 - DNA, 95 bp, Homo sapiens; identical to SEQ ID NO: 277558
  chr22:50925263-50925358
  hypo

SEQ ID NO: 452458 - DNA, 139 bp, Homo sapiens; identical to SEQ ID NO: 330349
  chr22:50938934-50939073
  hypo

SEQ ID NO: 452459 - DNA, 33 bp, Homo sapiens; identical to SEQ ID NO: 330350
  chr22:50939111-50939144
  hypo

SEQ ID NO: 452460 - DNA, 251 bp, Homo sapiens; identical to SEQ ID NO: 277564
  chr22:50961988-50962239
  hypo

SEQ ID NO: 452461 - DNA, 639 bp, Homo sapiens; identical to SEQ ID NO: 206191
  chr22:50970392-50971031
  hypo

SEQ ID NO: 452462 - DNA, 95 bp, Homo sapiens; identical to SEQ ID NO: 277565
  chr22:51010439-51010534
  hypo

SEQ ID NO: 452463 - DNA, 78 bp, Homo sapiens; identical to SEQ ID NO: 221019
  chr22:51023316-51023394
  hypo

SEQ ID NO: 452464 - DNA, 131 bp, Homo sapiens; identical to SEQ ID NO: 330361
  chr22:51144194-51144325
  hypo

SEQ ID NO: 452465 - DNA, 149 bp, Homo sapiens; identical to SEQ ID NO: 330362
  chr22:51144435-51144584
  hypo

SEQ ID NO: 452466 - DNA, 269 bp, Homo sapiens; identical to SEQ ID NO: 221021
  chr22:51149171-51149440
  hypo

SEQ ID NO: 452467 - DNA, 256 bp, Homo sapiens; identical to SEQ ID NO: 277569
  chr22:51160332-51160588
  hypo

SEQ ID NO: 452468 - DNA, 198 bp, Homo sapiens; identical to SEQ ID NO: 221023
  chr22:51171376-51171574
  hypo

SEQ ID NO: 452469 - DNA, 80 bp, Homo sapiens; identical to SEQ ID NO: 330369
  chrX:2931093-2931173
  hypo

SEQ ID NO: 452470 - DNA, 148 bp, Homo sapiens; identical to SEQ ID NO: 277572
  chrX:3609054-3609202
  hypo

SEQ ID NO: 452471 - DNA, 60 bp, Homo sapiens; identical to SEQ ID NO: 277573
  chrX:3609232-3609292
  hypo

SEQ ID NO: 452472 - DNA, 42 bp, Homo sapiens; identical to SEQ ID NO: 277577
  chrX:4637572-4637614
  hypo

SEQ ID NO: 452473 - DNA, 120 bp, Homo sapiens; identical to SEQ ID NO: 277578
  chrX:4643432-4643552
  hypo

SEQ ID NO: 452474 - DNA, 139 bp, Homo sapiens; identical to SEQ ID NO: 277579
  chrX:6105440-6105579
  hypo

SEQ ID NO: 452475 - DNA, 36 bp, Homo sapiens; identical to SEQ ID NO: 277580
  chrX:6617024-6617060
  hypo

SEQ ID NO: 452476 - DNA, 259 bp, Homo sapiens; identical to SEQ ID NO: 277581
  chrX:8769255-8769514
  hypo

SEQ ID NO: 452477 - DNA, 156 bp, Homo sapiens; identical to SEQ ID NO: 277582
  chrX:9214925-9215081
  hypo

SEQ ID NO: 452478 - DNA, 33 bp, Homo sapiens; identical to SEQ ID NO: 277583
  chrX:9289523-9289556
  hypo

SEQ ID NO: 452479 - DNA, 42 bp, Homo sapiens; identical to SEQ ID NO: 277584
  chrX:9656568-9656610
  hypo

SEQ ID NO: 452480 - DNA, 458 bp, Homo sapiens; identical to SEQ ID NO: 277585
  chrX:9863402-9863860
  hypo

SEQ ID NO: 452481 - DNA, 42 bp, Homo sapiens; identical to SEQ ID NO: 277586
  chrX:9874884-9874926
  hypo

SEQ ID NO: 452482 - DNA, 44 bp, Homo sapiens; identical to SEQ ID NO: 206208
  chrX:10023769-10023813
  hypo

SEQ ID NO: 452483 - DNA, 715 bp, Homo sapiens; identical to SEQ ID NO: 221028
  chrX:10085163-10085878
  hypo

SEQ ID NO: 452484 - DNA, 180 bp, Homo sapiens; identical to SEQ ID NO: 277588
  chrX:10092559-10092739
  hypo

SEQ ID NO: 452485 - DNA, 71 bp, Homo sapiens; identical to SEQ ID NO: 277589
  chrX:10102566-10102637
  hypo

SEQ ID NO: 452486 - DNA, 161 bp, Homo sapiens; identical to SEQ ID NO: 226428
  chrX:11776190-11776351
  hypo

SEQ ID NO: 452487 - DNA, 115 bp, Homo sapiens; identical to SEQ ID NO: 221029
  chrX:11783710-11783825
  hypo

SEQ ID NO: 452488 - DNA, 42 bp, Homo sapiens; identical to SEQ ID NO: 221030
  chrX:13062333-13062375
  hypo

SEQ ID NO: 452489 - DNA, 92 bp, Homo sapiens; identical to SEQ ID NO: 277592
  chrX:15766033-15766125
  hypo

SEQ ID NO: 452490 - DNA, 32 bp, Homo sapiens; identical to SEQ ID NO: 277593
  chrX:15806008-15806040
  hypo

SEQ ID NO: 452491 - DNA, 134 bp, Homo sapiens; identical to SEQ ID NO: 206213
  chrX:15808573-15808707
  hypo

SEQ ID NO: 452492 - DNA, 99 bp, Homo sapiens; identical to SEQ ID NO: 206214
  chrX:15809046-15809145
  hypo

SEQ ID NO: 452493 - DNA, 82 bp, Homo sapiens; identical to SEQ ID NO: 206215
  chrX:15817994-15818076
  hypo

SEQ ID NO: 452494 - DNA, 122 bp, Homo sapiens; identical to SEQ ID NO: 206216
  chrX:15821797-15821919
  hypo

SEQ ID NO: 452495 - DNA, 87 bp, Homo sapiens; identical to SEQ ID NO: 206217
  chrX:15822233-15822320
  hypo

SEQ ID NO: 452496 - DNA, 39 bp, Homo sapiens; identical to SEQ ID NO: 206218
  chrX:15826355-15826394
  hypo

SEQ ID NO: 452497 - DNA, 122 bp, Homo sapiens; identical to SEQ ID NO: 206219
  chrX:15827322-15827444
  hypo

SEQ ID NO: 452498 - DNA, 214 bp, Homo sapiens; identical to SEQ ID NO: 206220
  chrX:15833799-15834013
  hypo

SEQ ID NO: 452499 - DNA, 56 bp, Homo sapiens; identical to SEQ ID NO: 206221
  chrX:15836709-15836765
  hypo

SEQ ID NO: 452500 - DNA, 110 bp, Homo sapiens; identical to SEQ ID NO: 206222
  chrX:15838329-15838439
  hypo

SEQ ID NO: 452501 - DNA, 535 bp, Homo sapiens; identical to SEQ ID NO: 206223
  chrX:15840848-15841383
  hypo

SEQ ID NO: 452502 - DNA, 36 bp, Homo sapiens; identical to SEQ ID NO: 221044
  chrX:16736864-16736900
  hypo

SEQ ID NO: 452503 - DNA, 92 bp, Homo sapiens; identical to SEQ ID NO: 221045
  chrX:18239018-18239110
  hypo

SEQ ID NO: 452504 - DNA, 37 bp, Homo sapiens; identical to SEQ ID NO: 277596
  chrX:18516222-18516259
  hypo

SEQ ID NO: 452505 - DNA, 31 bp, Homo sapiens; identical to SEQ ID NO: 221046
  chrX:19530839-19530870
  hypo

SEQ ID NO: 452506 - DNA, 221 bp, Homo sapiens; identical to SEQ ID NO: 221047
  chrX:20135284-20135505
  hypo

SEQ ID NO: 452507 - DNA, 52 bp, Homo sapiens; identical to SEQ ID NO: 221048
  chrX:20160884-20160936
  hypo

SEQ ID NO: 452508 - DNA, 32 bp, Homo sapiens; identical to SEQ ID NO: 277600
  chrX:24062614-24062646
  hypo

SEQ ID NO: 452509 - DNA, 33 bp, Homo sapiens; identical to SEQ ID NO: 277601
  chrX:24069674-24069707
  hypo

SEQ ID NO: 452510 - DNA, 33 bp, Homo sapiens; identical to SEQ ID NO: 277602
  chrX:24128931-24128964
  hypo

SEQ ID NO: 452511 - DNA, 70 bp, Homo sapiens; identical to SEQ ID NO: 206227
  chrX:27999798-27999868
  hypo

SEQ ID NO: 452512 - DNA, 42 bp, Homo sapiens; identical to SEQ ID NO: 277603
  chrX:33133914-33133956
  hypo

SEQ ID NO: 452513 - DNA, 218 bp, Homo sapiens; identical to SEQ ID NO: 277605
  chrX:39699844-39700062
  hypo

SEQ ID NO: 452514 - DNA, 1155 bp, Homo sapiens; identical to SEQ ID NO: 206230
  chrX:39910498-39911653
  hypo

SEQ ID NO: 452515 - DNA, 157 bp, Homo sapiens; identical to SEQ ID NO: 206231
  chrX:39913138-39913295
  hypo

SEQ ID NO: 452516 - DNA, 78 bp, Homo sapiens; identical to SEQ ID NO: 206232
  chrX:39913508-39913586
  hypo

SEQ ID NO: 452517 - DNA, 146 bp, Homo sapiens; identical to SEQ ID NO: 206233
  chrX:39914620-39914766
  hypo

SEQ ID NO: 452518 - DNA, 167 bp, Homo sapiens; identical to SEQ ID NO: 206234
  chrX:39916407-39916574
  hypo

SEQ ID NO: 452519 - DNA, 31 bp, Homo sapiens; identical to SEQ ID NO: 426097
  chrX:39921382-39921413
  hypo

SEQ ID NO: 452520 - DNA, 345 bp, Homo sapiens; identical to SEQ ID NO: 206237
  chrX:39922860-39923205
  hypo

SEQ ID NO: 452521 - DNA, 264 bp, Homo sapiens; identical to SEQ ID NO: 206238
  chrX:39923588-39923852
  hypo

SEQ ID NO: 452522 - DNA, 187 bp, Homo sapiens; identical to SEQ ID NO: 206239
  chrX:39930225-39930412
  hypo

SEQ ID NO: 452523 - DNA, 54 bp, Homo sapiens; identical to SEQ ID NO: 206240
  chrX:39930889-39930943
  hypo

SEQ ID NO: 452524 - DNA, 1059 bp, Homo sapiens; identical to SEQ ID NO: 384879
  chrX:39932474-39933533
  hypo

SEQ ID NO: 452525 - DNA, 79 bp, Homo sapiens; identical to SEQ ID NO: 206242
  chrX:39935706-39935785
  hypo

SEQ ID NO: 452526 - DNA, 126 bp, Homo sapiens; identical to SEQ ID NO: 206243
  chrX:39937096-39937222
  hypo

SEQ ID NO: 452527 - DNA, 184 bp, Homo sapiens; identical to SEQ ID NO: 277606
  chrX:40247665-40247849
  hypo

SEQ ID NO: 452528 - DNA, 44 bp, Homo sapiens; identical to SEQ ID NO: 277607
  chrX:40631233-40631277
  hypo

SEQ ID NO: 452529 - DNA, 43 bp, Homo sapiens; identical to SEQ ID NO: 221067
  chrX:40631517-40631560
  hypo

SEQ ID NO: 452530 - DNA, 104 bp, Homo sapiens; identical to SEQ ID NO: 277610
  chrX:44224968-44225072
  hypo

SEQ ID NO: 452531 - DNA, 38 bp, Homo sapiens; identical to SEQ ID NO: 277613
  chrX:44754637-44754675
  hypo

SEQ ID NO: 452532 - DNA, 36 bp, Homo sapiens; identical to SEQ ID NO: 221070
  chrX:44760627-44760663
  hypo

SEQ ID NO: 452533 - DNA, 99 bp, Homo sapiens; identical to SEQ ID NO: 277616
  chrX:44865332-44865431
  hypo

SEQ ID NO: 452534 - DNA, 36 bp, Homo sapiens; identical to SEQ ID NO: 277617
  chrX:44909558-44909594
  hypo

SEQ ID NO: 452535 - DNA, 36 bp, Homo sapiens; identical to SEQ ID NO: 277619
  chrX:47181621-47181657
  hypo

SEQ ID NO: 452536 - DNA, 147 bp, Homo sapiens; identical to SEQ ID NO: 277620
  chrX:55115418-55115565
  hypo

SEQ ID NO: 452537 - DNA, 82 bp, Homo sapiens; identical to SEQ ID NO: 277622
  chrX:57705240-57705322
  hypo

SEQ ID NO: 452538 - DNA, 698 bp, Homo sapiens; identical to SEQ ID NO: 277623
  chrX:64771578-64772276
  hypo

SEQ ID NO: 452539 - DNA, 197 bp, Homo sapiens; identical to SEQ ID NO: 277624
  chrX:65007842-65008039
  hypo

SEQ ID NO: 452540 - DNA, 33 bp, Homo sapiens; identical to SEQ ID NO: 277625
  chrX:70442913-70442946
  hypo

SEQ ID NO: 452541 - DNA, 39 bp, Homo sapiens; identical to SEQ ID NO: 277626
  chrX:70532323-70532362
  hypo

SEQ ID NO: 452542 - DNA, 317 bp, Homo sapiens; identical to SEQ ID NO: 277627
  chrX:70797825-70798142
  hypo

SEQ ID NO: 452543 - DNA, 76 bp, Homo sapiens; identical to SEQ ID NO: 221074
  chrX:71485135-71485211
  hypo

SEQ ID NO: 452544 - DNA, 562 bp, Homo sapiens; identical to SEQ ID NO: 206269
  chrX:73163983-73164545
  hypo

SEQ ID NO: 452545 - DNA, 38 bp, Homo sapiens; identical to SEQ ID NO: 277629
  chrX:102232746-102232784
  hypo

SEQ ID NO: 452546 - DNA, 124 bp, Homo sapiens; identical to SEQ ID NO: 206277
  chrX:123095161-123095285
  hypo

SEQ ID NO: 452547 - DNA, 151 bp, Homo sapiens; identical to SEQ ID NO: 206278
  chrX:123095555-123095706
  hypo

SEQ ID NO: 452548 - DNA, 65 bp, Homo sapiens; identical to SEQ ID NO: 206279
  chrX:123155216-123155281
  hypo

SEQ ID NO: 452549 - DNA, 141 bp, Homo sapiens; identical to SEQ ID NO: 206280
  chrX:123156380-123156521
  hypo

SEQ ID NO: 452550 - DNA, 79 bp, Homo sapiens; identical to SEQ ID NO: 206281
  chrX:123159689-123159768
  hypo

SEQ ID NO: 452551 - DNA, 165 bp, Homo sapiens; identical to SEQ ID NO: 206282
  chrX:123164810-123164975
  hypo

SEQ ID NO: 452552 - DNA, 97 bp, Homo sapiens; identical to SEQ ID NO: 206283
  chrX:123171376-123171473
  hypo

SEQ ID NO: 452553 - DNA, 77 bp, Homo sapiens; identical to SEQ ID NO: 206284
  chrX:123176418-123176495
  hypo

SEQ ID NO: 452554 - DNA, 205 bp, Homo sapiens; identical to SEQ ID NO: 206285
  chrX:123179013-123179218
  hypo

SEQ ID NO: 452555 - DNA, 152 bp, Homo sapiens; identical to SEQ ID NO: 206286
  chrX:123181203-123181355
  hypo

SEQ ID NO: 452556 - DNA, 74 bp, Homo sapiens; identical to SEQ ID NO: 206287
  chrX:123182854-123182928
  hypo

SEQ ID NO: 452557 - DNA, 135 bp, Homo sapiens; identical to SEQ ID NO: 206288
  chrX:123184024-123184159
  hypo

SEQ ID NO: 452558 - DNA, 278 bp, Homo sapiens; identical to SEQ ID NO: 206289
  chrX:123184966-123185244
  hypo

SEQ ID NO: 452559 - DNA, 108 bp, Homo sapiens; identical to SEQ ID NO: 206290
  chrX:123189977-123190085
  hypo

SEQ ID NO: 452560 - DNA, 112 bp, Homo sapiens; identical to SEQ ID NO: 206291
  chrX:123191715-123191827
  hypo

SEQ ID NO: 452561 - DNA, 131 bp, Homo sapiens; identical to SEQ ID NO: 206292
  chrX:123195073-123195204
  hypo

SEQ ID NO: 452562 - DNA, 104 bp, Homo sapiens; identical to SEQ ID NO: 206293
  chrX:123195620-123195724
  hypo

SEQ ID NO: 452563 - DNA, 306 bp, Homo sapiens; identical to SEQ ID NO: 206294
  chrX:123196749-123197055
  hypo

SEQ ID NO: 452564 - DNA, 213 bp, Homo sapiens; identical to SEQ ID NO: 206295
  chrX:123197688-123197901
  hypo

SEQ ID NO: 452565 - DNA, 71 bp, Homo sapiens; identical to SEQ ID NO: 206296
  chrX:123199725-123199796
  hypo

SEQ ID NO: 452566 - DNA, 262 bp, Homo sapiens; identical to SEQ ID NO: 206297
  chrX:123200024-123200286
  hypo

SEQ ID NO: 452567 - DNA, 93 bp, Homo sapiens; identical to SEQ ID NO: 206298
  chrX:123202413-123202506
  hypo

SEQ ID NO: 452568 - DNA, 175 bp, Homo sapiens; identical to SEQ ID NO: 206299
  chrX:123204998-123205173
  hypo

SEQ ID NO: 452569 - DNA, 140 bp, Homo sapiens; identical to SEQ ID NO: 206300
  chrX:123210181-123210321
  hypo

SEQ ID NO: 452570 - DNA, 102 bp, Homo sapiens; identical to SEQ ID NO: 206301
  chrX:123211806-123211908
  hypo

SEQ ID NO: 452571 - DNA, 150 bp, Homo sapiens; identical to SEQ ID NO: 206302
  chrX:123215228-123215378
  hypo

SEQ ID NO: 452572 - DNA, 133 bp, Homo sapiens; identical to SEQ ID NO: 206303
  chrX:123217270-123217403
  hypo

SEQ ID NO: 452573 - DNA, 224 bp, Homo sapiens; identical to SEQ ID NO: 206304
  chrX:123220396-123220620
  hypo

SEQ ID NO: 452574 - DNA, 390 bp, Homo sapiens; identical to SEQ ID NO: 206305
  chrX:123224424-123224814
  hypo

SEQ ID NO: 452575 - DNA, 127 bp, Homo sapiens; identical to SEQ ID NO: 206306
  chrX:123227867-123227994
  hypo

SEQ ID NO: 452576 - DNA, 78 bp, Homo sapiens; identical to SEQ ID NO: 206307
  chrX:123229221-123229299
  hypo

SEQ ID NO: 452577 - DNA, 2083 bp, Homo sapiens; identical to SEQ ID NO: 206308
  chrX:123234423-123236506
  hypo

SEQ ID NO: 452578 - DNA, 136 bp, Homo sapiens; identical to SEQ ID NO: 206309
  chrX:129139163-129139299
  hypo

SEQ ID NO: 452579 - DNA, 91 bp, Homo sapiens; identical to SEQ ID NO: 206310
  chrX:129146553-129146644
  hypo

SEQ ID NO: 452580 - DNA, 2398 bp, Homo sapiens; identical to SEQ ID NO: 384886
  chrX:129147791-129150189
  hypo

SEQ ID NO: 452581 - DNA, 177 bp, Homo sapiens; identical to SEQ ID NO: 206312
  chrX:129154948-129155125
  hypo

SEQ ID NO: 452582 - DNA, 81 bp, Homo sapiens; identical to SEQ ID NO: 206313
  chrX:129156871-129156952
  hypo

SEQ ID NO: 452583 - DNA, 392 bp, Homo sapiens; identical to SEQ ID NO: 206314
  chrX:129158962-129159354
  hypo

SEQ ID NO: 452584 - DNA, 227 bp, Homo sapiens; identical to SEQ ID NO: 206315
  chrX:129162609-129162836
  hypo

SEQ ID NO: 452585 - DNA, 222 bp, Homo sapiens; identical to SEQ ID NO: 206316
  chrX:129168429-129168651
  hypo

SEQ ID NO: 452586 - DNA, 48 bp, Homo sapiens; identical to SEQ ID NO: 401276
  chrX:129171341-129171389
  hypo

SEQ ID NO: 452587 - DNA, 148 bp, Homo sapiens; identical to SEQ ID NO: 206318
  chrX:129173111-129173259
  hypo

SEQ ID NO: 452588 - DNA, 78 bp, Homo sapiens; identical to SEQ ID NO: 206319
  chrX:129184691-129184769
  hypo

SEQ ID NO: 452589 - DNA, 157 bp, Homo sapiens; identical to SEQ ID NO: 206320
  chrX:129185834-129185991
  hypo

SEQ ID NO: 452590 - DNA, 2230 bp, Homo sapiens; identical to SEQ ID NO: 206321
  chrX:129189828-129192058
  hypo

SEQ ID NO: 452591 - DNA, 184 bp, Homo sapiens; identical to SEQ ID NO: 206324
  chrX:133511601-133511785
  hypo

SEQ ID NO: 452592 - DNA, 102 bp, Homo sapiens; identical to SEQ ID NO: 206325
  chrX:133512034-133512136
  hypo

SEQ ID NO: 452593 - DNA, 134 bp, Homo sapiens; identical to SEQ ID NO: 206326
  chrX:133527530-133527664
  hypo

SEQ ID NO: 452594 - DNA, 44 bp, Homo sapiens; identical to SEQ ID NO: 206327
  chrX:133527938-133527982
  hypo

SEQ ID NO: 452595 - DNA, 479 bp, Homo sapiens; identical to SEQ ID NO: 206328
  chrX:133547517-133547996
  hypo

SEQ ID NO: 452596 - DNA, 277 bp, Homo sapiens; identical to SEQ ID NO: 206329
  chrX:133549045-133549322
  hypo

SEQ ID NO: 452597 - DNA, 134 bp, Homo sapiens; identical to SEQ ID NO: 206330
  chrX:133551198-133551332
  hypo

SEQ ID NO: 452598 - DNA, 130 bp, Homo sapiens; identical to SEQ ID NO: 206331
  chrX:133559230-133559360
  hypo

SEQ ID NO: 452599 - DNA, 3132 bp, Homo sapiens; identical to SEQ ID NO: 206332
  chrX:133559690-133562822
  hypo

SEQ ID NO: 452600 - DNA, 43 bp, Homo sapiens; identical to SEQ ID NO: 277630
  chrX:134059956-134059999
  hypo

SEQ ID NO: 452601 - DNA, 48 bp, Homo sapiens; identical to SEQ ID NO: 277632
  chrX:150560734-150560782
  hypo

SEQ ID NO: 452602 - DNA, 183 bp, Homo sapiens; identical to SEQ ID NO: 277633
  chrX:150571593-150571776
  hypo

SEQ ID NO: 452603 - DNA, 393 bp, Homo sapiens; identical to SEQ ID NO: 277634
  chrX:151306512-151306905
  hypo

SEQ ID NO: 452604 - DNA, 153 bp, Homo sapiens; identical to SEQ ID NO: 277635
  chrX:151306965-151307118
  hypo

SEQ ID NO: 452605 - DNA, 40 bp, Homo sapiens; identical to SEQ ID NO: 221133
  chrY:5077817-5077857
  hypo

SEQ ID NO: 452606 - DNA, 61 bp, Homo sapiens; identical to SEQ ID NO: 277637
  chrY:6790937-6790998
  hypo

SEQ ID NO: 452607 - DNA, 79 bp, Homo sapiens; identical to SEQ ID NO: 221134
  chrY:7525418-7525497
  hypo

SEQ ID NO: 452608 - DNA, 168 bp, Homo sapiens; identical to SEQ ID NO: 277639
  chrY:8147742-8147910
  hypo

SEQ ID NO: 452609 - DNA, 103 bp, Homo sapiens; identical to SEQ ID NO: 277640
  chrY:14488010-14488113
  hypo

SEQ ID NO: 452610 - DNA, 92 bp, Homo sapiens; identical to SEQ ID NO: 277641
  chrY:14513075-14513167
  hypo

SEQ ID NO: 452611 - DNA, 92 bp, Homo sapiens; identical to SEQ ID NO: 277642
  chrY:14513347-14513439
  hypo

SEQ ID NO: 452612 - DNA, 148 bp, Homo sapiens; identical to SEQ ID NO: 221135
  chrY:14777103-14777251
  hypo

SEQ ID NO: 452613 - DNA, 135 bp, Homo sapiens; identical to SEQ ID NO: 221136
  chrY:15015981-15016116
  hypo

SEQ ID NO: 452614 - DNA, 180 bp, Homo sapiens; identical to SEQ ID NO: 221137
  chrY:15446038-15446218
  hypo

SEQ ID NO: 452615 - DNA, 45 bp, Homo sapiens; identical to SEQ ID NO: 277648
  chrY:16001309-16001354
  hypo

SEQ ID NO: 452616 - DNA, 45 bp, Homo sapiens; identical to SEQ ID NO: 277649
  chrY:16001474-16001519
  hypo

SEQ ID NO: 452617 - DNA, 152 bp, Homo sapiens; identical to SEQ ID NO: 221140
  chrY:21226202-21226354
  hypo

SEQ ID NO: 452618 - DNA, 82 bp, Homo sapiens; identical to SEQ ID NO: 277653
  chrY:21713517-21713599
  hypo

SEQ ID NO: 452619 - DNA, 218 bp, Homo sapiens; identical to SEQ ID NO: 277654
  chrY:22914872-22915090
  hypo

SEQ ID NO: 452620 - DNA, 55 bp, Homo sapiens; identical to SEQ ID NO: 221141
  chrY:23568831-23568886
  hypo

SEQ ID NO: 452621 - DNA, 103 bp, Homo sapiens; identical to SEQ ID NO: 277657
  AC133920.2_81912-122260:1986-2089
  hypo

SEQ ID NO: 452622 - DNA, 166 bp, Homo sapiens; identical to SEQ ID NO: 277658
  AC153808.1_1-20788:1301-1467
  hypo

SEQ ID NO: 452623 - DNA, 258 bp, Homo sapiens; identical to SEQ ID NO: 221142
  AC153808.1_1-20788:20324-20582
  hypo

SEQ ID NO: 452624 - DNA, 120 bp, Homo sapiens; identical to SEQ ID NO: 277660
  AC240459.2_22426-31906:3389-3509
  hypo

SEQ ID NO: 452625 - DNA, 180 bp, Homo sapiens; identical to SEQ ID NO: 277661
  AEKP01114215.1_1-7461:1444-1624
  hypo

SEQ ID NO: 452626 - DNA, 31 bp, Homo sapiens; identical to SEQ ID NO: 277662
  AEKP01114218.1_1-13684:9403-9434
  hypo

SEQ ID NO: 452627 - DNA, 42 bp, Homo sapiens; identical to SEQ ID NO: 277663
  AEKP01114218.1_1-13684:9682-9724
  hypo

SEQ ID NO: 452628 - DNA, 33 bp, Homo sapiens; identical to SEQ ID NO: 277664
  AEKP01114218.1_1-13684:12132-12165
  hypo

SEQ ID NO: 452629 - DNA, 74 bp, Homo sapiens; identical to SEQ ID NO: 277667
  AEKP01160137.1_1408-4031:1582-1656
  hypo

SEQ ID NO: 452630 - DNA, 116 bp, Homo sapiens; identical to SEQ ID NO: 221144
  AEKP01166227.1_44013-111583:41310-41426
  hypo

SEQ ID NO: 452631 - DNA, 166 bp, Homo sapiens; identical to SEQ ID NO: 277669
  AEKP01166227.1_44013-111583:53194-53360
  hypo

SEQ ID NO: 452632 - DNA, 82 bp, Homo sapiens; identical to SEQ ID NO: 221145
  AEKP01172922.1_98-3151:2030-2112
  hypo

SEQ ID NO: 452633 - DNA, 58 bp, Homo sapiens; identical to SEQ ID NO: 277672
  AEKP01188815.1_1-4777:3487-3545
  hypo

SEQ ID NO: 452634 - DNA, 35 bp, Homo sapiens; identical to SEQ ID NO: 277673
  AEKP01209288.1_3835-9918:5050-5085
  hypo

SEQ ID NO: 452635 - DNA, 120 bp, Homo sapiens; identical to SEQ ID NO: 277674
  AEKP01212943.1_1-3701:1910-2030
  hypo

SEQ ID NO: 452636 - DNA, 93 bp, Homo sapiens; identical to SEQ ID NO: 277675
  AEKP01213516.1_1-2586:271-364
  hypo

SEQ ID NO: 452637 - DNA, 80 bp, Homo sapiens; identical to SEQ ID NO: 221146
  AEKP01221093.1_87-1602:655-735
  hypo

SEQ ID NO: 452638 - DNA, 120 bp, Homo sapiens; identical to SEQ ID NO: 221147
  AEKP01221093.1_87-1602:855-975
  hypo

SEQ ID NO: 452639 - DNA, 74 bp, Homo sapiens; identical to SEQ ID NO: 277679
  AL162252.17_162460-176678:8567-8641
  hypo

SEQ ID NO: 452640 - DNA, 112 bp, Homo sapiens; identical to SEQ ID NO: 277680
  FP565324.3_2001-29640:15327-15439
  hypo

SEQ ID NO: 452641 - DNA, 253 bp, Homo sapiens; identical to SEQ ID NO: 277681
  GL000194.1:58620-58873
  hypo

SEQ ID NO: 452642 - DNA, 32 bp, Homo sapiens; identical to SEQ ID NO: 221148
  GL000195.1:80192-80224
  hypo

SEQ ID NO: 452643 - DNA, 120 bp, Homo sapiens; identical to SEQ ID NO: 277683
  GL000225.1:79485-79605
  hypo

SEQ ID NO: 452644 - DNA, 62 bp, Homo sapiens; identical to SEQ ID NO: 277684
  GL383535.1:198019-198081
  hypo

SEQ ID NO: 452645 - DNA, 7860 bp, Homo sapiens; identical to SEQ ID NO: 58444
  HPV16:0-7860
  hypo

SEQ ID NO: 452646 - DNA, 7800 bp, Homo sapiens; identical to SEQ ID NO: 58445
  HPV18:0-7800
  hypo

SEQ ID NO: 452647 - DNA, 54 bp, Homo sapiens; identical to SEQ ID NO: 221150
  NW_001838014.1_249000-295694:7052-7106
  hypo

SEQ ID NO: 452648 - DNA, 158 bp, Homo sapiens; identical to SEQ ID NO: 221151
  NW_001838056.1_145425-224902:38581-38739
  hypo

SEQ ID NO: 452649 - DNA, 112 bp, Homo sapiens; identical to SEQ ID NO: 206354
  NW_001838402.2_289580-297926:6069-6181
  hypo

SEQ ID NO: 452650 - DNA, 97 bp, Homo sapiens; identical to SEQ ID NO: 221155
  NW_001838987.1_19978397-19979692:120-217
  hypo

SEQ ID NO: 452651 - DNA, 142 bp, Homo sapiens; identical to SEQ ID NO: 221156
  NW_001838993.2_42143-59442:15877-16019
  hypo

SEQ ID NO: 452652 - DNA, 113 bp, Homo sapiens; identical to SEQ ID NO: 277692
  NW_001838998.1_673882-674972:67-180
  hypo

SEQ ID NO: 452653 - DNA, 198 bp, Homo sapiens; identical to SEQ ID NO: 277693
  NW_001839317.1_1572-22707:16430-16628
  hypo

SEQ ID NO: 452654 - DNA, 207 bp, Homo sapiens; identical to SEQ ID NO: 277695
  NW_001839407.1_18933-24809:5028-5235
  hypo

SEQ ID NO: 452655 - DNA, 256 bp, Homo sapiens; identical to SEQ ID NO: 277696
  NW_001839407.1_42766-49957:1426-1682
  hypo

SEQ ID NO: 452656 - DNA, 180 bp, Homo sapiens; identical to SEQ ID NO: 277697
  NW_001839407.1_50257-55859:1427-1607
  hypo

SEQ ID NO: 452657 - DNA, 120 bp, Homo sapiens; identical to SEQ ID NO: 277698
  NW_001839407.1_50257-55859:1667-1787
  hypo

SEQ ID NO: 452658 - DNA, 120 bp, Homo sapiens; identical to SEQ ID NO: 277699
  NW_001839407.1_56047-63507:6752-6872
  hypo

SEQ ID NO: 452659 - DNA, 47 bp, Homo sapiens; identical to SEQ ID NO: 330594
  NW_001839407.1_56047-63507:6992-7039
  hypo

SEQ ID NO: 452660 - DNA, 34 bp, Homo sapiens; identical to SEQ ID NO: 330595
  NW_001839407.1_56047-63507:7078-7112
  hypo

SEQ ID NO: 452661 - DNA, 44 bp, Homo sapiens; identical to SEQ ID NO: 277701
  NW_001839407.1_56047-63507:7172-7216
  hypo

SEQ ID NO: 452662 - DNA, 120 bp, Homo sapiens; identical to SEQ ID NO: 277702
  NW_001839595.1_33916-36793:2251-2371
  hypo

SEQ ID NO: 452663 - DNA, 120 bp, Homo sapiens; identical to SEQ ID NO: 277703
  NW_001839595.1_74059-77718:791-911
  hypo

SEQ ID NO: 452664 - DNA, 269 bp, Homo sapiens; identical to SEQ ID NO: 330599
  NW_001839603.1_36678-41438:2711-2980
  hypo

SEQ ID NO: 452665 - DNA, 33 bp, Homo sapiens; identical to SEQ ID NO: 277706
  NW_001839613.1_2341-3640:87-120
  hypo

SEQ ID NO: 452666 - DNA, 300 bp, Homo sapiens; identical to SEQ ID NO: 221158
  NW_001839646.1_1-5206:2128-2428
  hypo

SEQ ID NO: 452667 - DNA, 120 bp, Homo sapiens; identical to SEQ ID NO: 277709
  NW_001839647.1_1-2990:356-476
  hypo

SEQ ID NO: 452668 - DNA, 120 bp, Homo sapiens; identical to SEQ ID NO: 277710
  NW_001839651.1_32960-37353:877-997
  hypo

SEQ ID NO: 452669 - DNA, 95 bp, Homo sapiens; identical to SEQ ID NO: 277711
  NW_001839668.1_21493-58548:14916-15011
  hypo

SEQ ID NO: 452670 - DNA, 312 bp, Homo sapiens; identical to SEQ ID NO: 277712
  NW_001839668.1_21493-58548:15041-15353
  hypo

SEQ ID NO: 452671 - DNA, 106 bp, Homo sapiens; identical to SEQ ID NO: 330607
  NW_001839668.1_21493-58548:15413-15519
  hypo

SEQ ID NO: 452672 - DNA, 195 bp, Homo sapiens; identical to SEQ ID NO: 330608
  NW_001839668.1_21493-58548:15594-15789
  hypo

SEQ ID NO: 452673 - DNA, 144 bp, Homo sapiens; identical to SEQ ID NO: 221159
  NW_001839689.1_34352-41752:1478-1622
  hypo

SEQ ID NO: 452674 - DNA, 120 bp, Homo sapiens; identical to SEQ ID NO: 221160
  NW_001839689.1_34352-41752:1982-2102
  hypo

SEQ ID NO: 452675 - DNA, 120 bp, Homo sapiens; identical to SEQ ID NO: 277716
  NW_001839689.1_69962-76288:4519-4639
  hypo

SEQ ID NO: 452676 - DNA, 224 bp, Homo sapiens; identical to SEQ ID NO: 277717
  NW_001839792.1_1-3553:1228-1452
  hypo

SEQ ID NO: 452677 - DNA, 120 bp, Homo sapiens; identical to SEQ ID NO: 277718
  NW_001839859.1_35699-41775:4706-4826
  hypo

SEQ ID NO: 452678 - DNA, 120 bp, Homo sapiens; identical to SEQ ID NO: 221161
  NW_001839864.1_130-4387:2039-2159
  hypo

SEQ ID NO: 452679 - DNA, 33 bp, Homo sapiens; identical to SEQ ID NO: 277720
  NW_001840146.1_14915-50612:25838-25871
  hypo

SEQ ID NO: 452680 - DNA, 78 bp, Homo sapiens; identical to SEQ ID NO: 277721
  NW_001840273.1_1-3087:648-726
  hypo

SEQ ID NO: 452681 - DNA, 229 bp, Homo sapiens; identical to SEQ ID NO: 277722
  NW_001840273.1_1-3087:786-1015
  hypo

SEQ ID NO: 452682 - DNA, 98 bp, Homo sapiens; identical to SEQ ID NO: 277724
  NW_001840669.1_1-3203:1830-1928
  hypo

SEQ ID NO: 452683 - DNA, 87 bp, Homo sapiens; identical to SEQ ID NO: 221162
  NW_001840841.1_1-4205:1699-1786
  hypo

SEQ ID NO: 452684 - DNA, 103 bp, Homo sapiens; identical to SEQ ID NO: 221163
  NW_001840841.1_1-4205:2206-2309
  hypo

SEQ ID NO: 452685 - DNA, 105 bp, Homo sapiens; identical to SEQ ID NO: 277728
  NW_001840841.1_32027-40624:2466-2571
  hypo

SEQ ID NO: 452686 - DNA, 61 bp, Homo sapiens; identical to SEQ ID NO: 221164
  NW_001840859.1_1-2890:1537-1598
  hypo

SEQ ID NO: 452687 - DNA, 137 bp, Homo sapiens; identical to SEQ ID NO: 277730
  NW_001840859.1_78656-82292:1905-2042
  hypo

SEQ ID NO: 452688 - DNA, 406 bp, Homo sapiens; identical to SEQ ID NO: 277731
  NW_001840867.1_34087-92528:38237-38643
  hypo

SEQ ID NO: 452689 - DNA, 120 bp, Homo sapiens; identical to SEQ ID NO: 221165
  NW_001841051.1_73730-82666:506-626
  hypo

SEQ ID NO: 452690 - DNA, 120 bp, Homo sapiens; identical to SEQ ID NO: 221166
  NW_001841051.1_73730-82666:746-866
  hypo

SEQ ID NO: 452691 - DNA, 120 bp, Homo sapiens; identical to SEQ ID NO: 277734
  NW_001841109.1_139-6923:1788-1908
  hypo

SEQ ID NO: 452692 - DNA, 58 bp, Homo sapiens; identical to SEQ ID NO: 277735
  NW_001841138.1_67124-102688:28426-28484
  hypo

SEQ ID NO: 452693 - DNA, 120 bp, Homo sapiens; identical to SEQ ID NO: 221167
  NW_001841145.1_129149-174453:6133-6253
  hypo

SEQ ID NO: 452694 - DNA, 84 bp, Homo sapiens; identical to SEQ ID NO: 277737
  NW_001841145.1_177495-186900:958-1042
  hypo

SEQ ID NO: 452695 - DNA, 164 bp, Homo sapiens; identical to SEQ ID NO: 330632
  NW_001841145.1_177495-186900:6349-6513
  hypo

SEQ ID NO: 452696 - DNA, 180 bp, Homo sapiens; identical to SEQ ID NO: 277739
  NW_001841145.1_40791-55171:240-420
  hypo

SEQ ID NO: 452697 - DNA, 120 bp, Homo sapiens; identical to SEQ ID NO: 221168
  NW_001841145.1_63352-67863:4022-4142
  hypo

SEQ ID NO: 452698 - DNA, 120 bp, Homo sapiens; identical to SEQ ID NO: 221169
  NW_001841145.1_63352-67863:4202-4322
  hypo

SEQ ID NO: 452699 - DNA, 120 bp, Homo sapiens; identical to SEQ ID NO: 277742
  NW_001841145.1_82-8803:5706-5826
  hypo

SEQ ID NO: 452700 - DNA, 141 bp, Homo sapiens; identical to SEQ ID NO: 221170
  NW_001841145.1_90215-97412:6817-6958
  hypo

SEQ ID NO: 452701 - DNA, 153 bp, Homo sapiens; identical to SEQ ID NO: 330638
  NW_001841157.1_1611084-1612812:898-1051
  hypo

SEQ ID NO: 452702 - DNA, 363 bp, Homo sapiens; identical to SEQ ID NO: 330639
  NW_001841157.1_1611084-1612812:1090-1453
  hypo

SEQ ID NO: 452703 - DNA, 265 bp, Homo sapiens; identical to SEQ ID NO: 277745
  NW_001841507.1_62-5931:3856-4121
  hypo

SEQ ID NO: 452704 - DNA, 165 bp, Homo sapiens; identical to SEQ ID NO: 277746
  NW_001841533.1_1-11450:7730-7895
  hypo

SEQ ID NO: 452705 - DNA, 120 bp, Homo sapiens; identical to SEQ ID NO: 221171
  NW_001842224.1_80-3146:1734-1854
  hypo

SEQ ID NO: 452706 - DNA, 178 bp, Homo sapiens; identical to SEQ ID NO: 277748
  NW_001842432.1_1-179261:39824-40002
  hypo

SEQ ID NO: 452707 - DNA, 60 bp, Homo sapiens
  AC241851.2_88-34049:15074-15134
  hyper
  anorectal vs. bladder_and_urothelial,prostate,sarcoma
cggcgccgcggctttttgcggctttttgccgccgcgggtttttcctgccgcggcttcttg

SEQ ID NO: 452708 - DNA, 43 bp, Homo sapiens; identical to SEQ ID NO: 362192
  AC241851.2_88-34049:15553-15596
  hyper
  anorectal vs. bladder_and_urothelial,prostate,sarcoma

SEQ ID NO: 452709 - DNA, 14 bp, Homo sapiens
  chr1:2375641-2375655
  hyper
  anorectal vs. ovary,breast,renal,melanoma
gggggccgcccctc

SEQ ID NO: 452710 - DNA, 64 bp, Homo sapiens; identical to SEQ ID NO: 346318
  chr1:12123950-12124014
  hyper
  anorectal vs. lymphoid_neoplasm,non_cancer,ovary, multiple_myeloma,thyroid

SEQ ID NO: 452711 - DNA, 201 bp, Homo sapiens; identical to SEQ ID NO: 344942
  chr1:20512799-20513000
  hyper
  anorectal vs. liver_bileduct,upper_gi

SEQ ID NO: 452712 - DNA, 262 bp, Homo sapiens
  chr1:32180427-32180689
  hyper
  anorectal vs. upper_gi,colorectal,pancreas_gallbladder, bladder_and_urothelial,melanoma
gccggctctgggcctgagcgcagactgaagggaaggggggcctcgtggggggcgcaggcgcctgaccagctcctccagctcggggctcaagccccaggccctccagctgtctacttggaaaagggtggaagcacatggagggtgggtgtcagggtgtgcggcgcaggcccagagaatgcgccccccttccccacaaggcctggcagttccagagaactgggcgcggcctcccaaataacgacctctgttaagtgggaccagg

SEQ ID NO: 452713 - DNA, 23 bp, Homo sapiens
  chr1:32181494-32181517
  hyper
  anorectal vs. upper_gi,melanoma,pancreas_gallbladder, colorectal,cervical
ttctccttggaggtcccactggc

SEQ ID NO: 452714 - DNA, 913 bp, Homo sapiens; identical to SEQ ID NO: 349225
  chr1:43389625-43390538
  hyper
  anorectal vs. head_and_neck

SEQ ID NO: 452715 - DNA, 114 bp, Homo sapiens; identical to SEQ ID NO: 344955
  chr1:50893877-50893991
  hyper
  anorectal vs. myeloid_neoplasm,renal,non_cancer,prostate, breast,thyroid,multiple_myeloma,uterine,cervical,sarcoma

SEQ ID NO: 452716 - DNA, 137 bp, Homo sapiens
  chr1:53168691-53168828
  hyper
  anorectal vs. upper_gi
cgttggtaaaggagccgccccgtgagagagaccggaccaatcacgtttgctgtgaggtcactttggaggcctgagattggtgctcgtgtctaaacggacccgatctttctgagtggctggtgcagctgagggaggtt

SEQ ID NO: 452717 - DNA, 260 bp, Homo sapiens
  chr1:63793072-63793332
  hyper
  anorectal vs. non_cancer,renal,colorectal,thyroid, myeloid_neoplasm,prostate,uterine,cervical,upper_gi
tcaacactactgatatccactttttattccacttaagaaaaaaaaactaaaggaaggggggcagatttatttgcaataaaagaagaaagcgggttgatttttatggggaagattttagctttcggctacacacgcatttagacgtttctactttctctagcactcattcctagaaaaatcaatccagccctgaggcctgtggcccctagagcgttctcaggaccaaggtctgagttgggaccgcccgtatctagttcctc

SEQ ID NO: 452718 - DNA, 613 bp, Homo sapiens
  chr1:72749029-72749642
  hyper
  anorectal vs. lung,melanoma
ggcaccgtaagtttgaagtcctccaagttgtggtcggcgccatcatgacgccggcgactgtgagttgtttttttgtttattttcttctaatcttgcctgggtggctacgctgcagttagcgagcagccaactagttctctctgcgttttctcgggaataggtagggacggtggcggggcgctgcttttttgcggggacacgaggaggtgcaaggccttgcggcagagcagcttgcgtgtttgtggcggtcggcccgtatggattgcaggacgcccctcttttatctgtgggtgttgacactaagttgtgtgtgtgagtaggggattgtttatggtcaacatggagtgtgtgtgtgatagagagcgtgtcgtgcgcgcgggggcctgtgcacgcgcggcacgcaggcgcgctgggagggacggggcgggtcatgctgggatgtagagtcgggaaaagactgcaatcaagtgttttaattgtgtagagcccaggcggtccagttatgtaagaggcagtttaacccatttgagcctatcaggccgaataatcggcgcatccgagtcaaggcagggcagagttaaggggtttaacgagtcgcagggttgtatttctt

SEQ ID NO: 452719 - DNA, 394 bp, Homo sapiens
  chr1:72749248-72749642
  hyper
  anorectal vs. lung,bladder_and_urothelial,breast
cggcagagcagcttgcgtgtttgtggcggtcggcccgtatggattgcaggacgcccctcttttatctgtgggtgttgacactaagttgtgtgtgtgagtaggggattgtttatggtcaacatggagtgtgtgtgtgatagagagcgtgtcgtgcgcgcgggggcctgtgcacgcgcggcacgcaggcgcgctgggagggacggggcgggtcatgctgggatgtagagtcgggaaaagactgcaatcaagtgttttaattgtgtagagcccaggcggtccagttatgtaagaggcagtttaacccatttgagcctatcaggccgaataatcggcgcatccgagtcaaggcagggcagagttaaggggtttaacgagtcgcagggttgtatttctt

SEQ ID NO: 452720 - DNA, 100 bp, Homo sapiens; identical to SEQ ID NO: 349263
  chr1:72750578-72750678
  hyper
  anorectal vs. lung,bladder_and_urothelial,liver_bileduct, melanoma,breast,ovary,uterine,multiple_myeloma,sarcoma,prostate

SEQ ID NO: 452721 - DNA, 127 bp, Homo sapiens
  chr1:76080152-76080279
  hyper
  anorectal vs. lung,ovary,sarcoma,bladder_and_urothelial, breast,uterine,liver_bileduct,prostate,cervical, multiple_myeloma,myeloid_neoplasm,renal,thyroid
cgctttccagtaagtgctttgagtactccggagcaattaaaaagcaagctgacgcgccaagataaagttgtgtccccctagtgacctctagagcggagctaagctcccacaagccagacttgggagg

SEQ ID NO: 452722 - DNA, 212 bp, Homo sapiens
  chr1:76081826-76082038
  hyper
  anorectal vs. uterine
cggcggcggctgctgtgctgctcctgctgctggagggggcagcgctgggtcccctgagcgcccgcccagcgctgacctcccccttctccacaccctccctcccccacgcccccacccccggtgtcccgtctgagccgccagcccccatccaaccggctaccgcgccgtcatccagcagcctctactggaaagacaacggtggcggcggcggg

SEQ ID NO: 452723 - DNA, 120 bp, Homo sapiens
  chr1:77333644-77333764
  hyper
  anorectal vs. ovary
cgatggaggagtgggcagattgctcaagggatgggggtgcccaaaagcaacagcctgccaaaaactaagagggacggggaggggggacctttgcagactttcttcgttttcttagatttc

SEQ ID NO: 452724 - DNA, 224 bp, Homo sapiens
  chr1:78956569-78956793
  hyper
  anorectal vs. breast,sarcoma,ovary,renal,cervical,lung, liver_bileduct,myeloid_neoplasm,bladder_and_urothelial
cgagcacggtgccctcttctctcccagtactgctctgtgcccatggaaaagggggcggaggcgagagagaagaggaagaggcggaggtcactcgcgcgccccatccctcccaggctgccagcgcagctaggtgcagagggatcccaggagccgcgcgcgccccgcagtttccgcgctaagggaacgagtgcgcggaggggacgagcggctggaccacagccggc

SEQ ID NO: 452725 - DNA, 16 bp, Homo sapiens
  chr1:91316222-91316238
  hyper
  anorectal vs. head_and_neck
cgtgacagagactaaa

SEQ ID NO: 452726 - DNA, 27 bp, Homo sapiens
  chr1:91317362-91317389
  hyper
  anorectal vs. head_and_neck
ctctccgggagacgaacgcgaagcgac

SEQ ID NO: 452727 - DNA, 226 bp, Homo sapiens
  chr1:92949466-92949692
  hyper
  anorectal vs. head_and_neck
ctggagagctgtagttcccatcgggtgggttaccccaactcagctactcatcgcctgcctggctgtgctttacggctggcgagggagggcggggacacgcggatcggtttaggggccggggatgcccagtggtcgaggacccggaaggggcaaggagccaagacctccaagagccagctaccaactggagtgaaaggaccggggggaggggggaacagaacacaag

SEQ ID NO: 452728 - DNA, 27 bp, Homo sapiens
  chr1:92949665-92949692
  hyper
  anorectal vs. head_and_neck,cervical
cggggggaggggggaacagaacacaag

SEQ ID NO: 452729 - DNA, 228 bp, Homo sapiens
  chr1:92950207-92950435
  hyper
  anorectal vs. head_and_neck,cervical
ccaatcagttcacctaataccaggtcgaaatctgagcgcagcgggagggcgtggctgcgcctgccgctaggctccagccggctccgggggcggtaccccacagtcgaggtggtctggagtaaacgaatctgccttcctcccggggtgaaggcgatggtgaccgggttcacacgtgagctgcagtacagcagttctccgtggcctcggctggttcagaaacgagggtgc

SEQ ID NO: 452730 - DNA, 228 bp, Homo sapiens; identical to SEQ ID NO: 452729
  chr1:92950207-92950435
  hyper
  anorectal vs. head_and_neck,cervical,lymphoid_neoplasm, colorectal,multiple_myeloma,myeloid_neoplasm,non_cancer,uterine, bladder_and_urothelial,ovary,prostate,pancreas_gallbladder, thyroid,breast,sarcoma

SEQ ID NO: 452731 - DNA, 289 bp, Homo sapiens
  chr1:101702081-101702370
  hyper
  anorectal vs. sarcoma
cagacttttcgagagaaaagttttcaaagtctctccaccttttttttttttcaggggctcgggagaatcctctccacagccagggatcagcgtctatctgggcgagggcagtgatttatacagtagaatccaggggttaccgggctccgccccttctctctctctctttttttctttcatttgttgtttggggaggaggggttcttttttttttttttttttttttttttgcttctgccccagatctttcctggacagtgcgtctcagcagttcagatccgggggcccc

SEQ ID NO: 452732 - DNA, 152 bp, Homo sapiens
  chr1:101702796-101702948
  hyper
  anorectal vs. sarcoma
tctctgggctactaaggagcccatctcgatcagattgttcttgggcacttgtgatttatggagttcagaaaaaaggttaattcccaactgtggaacctacgggtgtaggggcagtgaaaattgcagttggtcggaggaataggagggaaggc

SEQ ID NO: 452733 - DNA, 393 bp, Homo sapiens
  chr1:101702796-101703189
  hyper
  anorectal vs. sarcoma,uterine
tctctgggctactaaggagcccatctcgatcagattgttcttgggcacttgtgatttatggagttcagaaaaaaggttaattcccaactgtggaacctacgggtgtaggggcagtgaaaattgcagttggtcggaggaataggagggaaggcgttaaattttggaaatcctatagacaaagaatatggtgggtggtgtggagcgtgggtaatggcttaaattagtactgcccaggagcagggtataaaattagttgggggaaaatgcggagcttcttggcttgagcagcctctgctgttcgcggagttgctgggattgttctcatctctattacctcattttattgcattgctgcattaccttgaaatatttaagcaacttagaagtagactt

SEQ ID NO: 452734 - DNA, 244 bp, Homo sapiens; identical to SEQ ID NO: 346359
  chr1:103574168-103574412
  hyper
  anorectal vs. multiple_myeloma,myeloid_neoplasm

SEQ ID NO: 452735 - DNA, 306 bp, Homo sapiens
  chr1:108506290-108506596
  hyper
  anorectal vs. multiple_myeloma,lymphoid_neoplasm, myeloid_neoplasm,non_cancer,thyroid
cgtcatagaggattagtgctgaaatgtgtcagggagagggctctgtcctctcccttttaagttgaaagcagtttggttttttgttttgttttaacattctgaaagagaaagaggctctgaaccgagtttaacatccttctgtacaaaaattttccgacaggacaaataaactactcttccactgaactgtgacttttgagctgactctagggtgcacccaaccttccagaggtgtctggcttaaccctcaaagaggcagctccagccccaggagccgaccggcaccacagcacctgagcagggcac

SEQ ID NO: 452736 - DNA, 69 bp, Homo sapiens
  chr1:111506646-111506715
  hyper
  anorectal vs. melanoma,cervical,lymphoid_neoplasm, head_and_neck,breast,prostate,ovary,bladder_and_urothelial, myeloid_neoplasm,sarcoma
cttggtggcaccacccccaacagagcctggtcagtgctgaagactgcgtcagtctggctctgccgcccc

SEQ ID NO: 452737 - DNA, 360 bp, Homo sapiens; identical to SEQ ID NO: 344970
  chr1:111506646-111507006
  hyper
  anorectal vs. melanoma,head_and_neck,prostate,ovary, cervical,lymphoid_neoplasm,breast,bladder_and_urothelial, myeloid_neoplasm,thyroid,liver_bileduct,lung,non_cancer, multiple_myeloma,renal

SEQ ID NO: 452738 - DNA, 65 bp, Homo sapiens
  chr1:161368929-161368994
  hyper
  anorectal vs. cervical,upper_gi,liver_bileduct, pancreas_gallbladder,colorectal
cggcaatcagcgcaaagcgagataatcaccagcgcactcttggatctgtatacaggtttgtaaac

SEQ ID NO: 452739 - DNA, 95 bp, Homo sapiens; identical to SEQ ID NO: 344977
  chr1:161369405-161369500
  hyper
  anorectal vs. cervical,upper_gi,liver_bileduct, pancreas_gallbladder,colorectal

SEQ ID NO: 452740 - DNA, 139 bp, Homo sapiens
  chr1:165414053-165414192
  hyper
  anorectal vs. ovary,bladder_and_urothelial,uterine, breast,sarcoma,prostate
cgcagtgaagcccaagggagatacttacctccatagcctgcgggaaacttcatgaagtgagaataatttccatacatgtttactcgtcagttcatgttcctctcctgtgcagcttctaaatattaccgcctctctcggc

SEQ ID NO: 452741 - DNA, 25 bp, Homo sapiens
  chr1:165414558-165414583
  hyper
  anorectal vs. ovary,bladder_and_urothelial,uterine, breast,sarcoma,prostate
gaagccaatcgatgtatgaccgccc

SEQ ID NO: 452742 - DNA, 5 bp, Homo sapiens
  chr1:214155737-214155742
  hyper
  anorectal vs. liver_bileduct
cgtcc

SEQ ID NO: 452743 - DNA, 155 bp, Homo sapiens; identical to SEQ ID NO: 349390
  chr1:214161233-214161388
  hyper
  anorectal vs. head_and_neck

SEQ ID NO: 452744 - DNA, 70 bp, Homo sapiens; identical to SEQ ID NO: 349391
  chr1:214387777-214387847
  hyper
  anorectal vs. pancreas_gallbladder,breast

SEQ ID NO: 452745 - DNA, 91 bp, Homo sapiens; identical to SEQ ID NO: 357010
  chr1:220102055-220102146
  hyper
  anorectal vs. liver_bileduct

SEQ ID NO: 452746 - DNA, 84 bp, Homo sapiens
  chr1:221051890-221051974
  hyper
  anorectal vs. uterine
cgaaccccacgtgatccggagatgtggtggaggggtgaggctaacatttcctacaacctcctgcaaaggatggaagcgcgtgcc

SEQ ID NO: 452747 - DNA, 38 bp, Homo sapiens
  chr1:223936543-223936581
  hyper
  anorectal vs. prostate,non_cancer,multiple_myeloma, myeloid_neoplasm,thyroid,renal
cggcgttcaagcatttgaacggggtaggaaaggttctc

SEQ ID NO: 452748 - DNA, 62 bp, Homo sapiens
  chr1:231297736-231297798
  hyper
  anorectal vs. head_and_neck,lung,renal, bladder_and_urothelial
cgagcccttattcgctgagctgaagcctcctcccccctcctccccattactctctgctctgg

SEQ ID NO: 452749 - DNA, 162 bp, Homo sapiens; identical to SEQ ID NO: 331158
  chr1:234812061-234812223
  hyper
  anorectal vs. upper_gi,pancreas_gallbladder,colorectal

SEQ ID NO: 452750 - DNA, 13 bp, Homo sapiens
  chr1:240775455-240775468
  hyper
  anorectal vs. bladder_and_urothelial,lung,uterine
gaatcctctcggc

SEQ ID NO: 452751 - DNA, 421 bp, Homo sapiens
  chr1:241519651-241520072
  hyper
  anorectal vs. uterine,ovary,pancreas_gallbladder, colorectal,multiple_myeloma,thyroid,bladder_and_urothelial
cgggtctcccacacagagccggagtatatgcttcgcctactttcacctgcctgcgctgccagccaccggctgctctcctttctccccacttcgcttcggaagtccggaggtaatcctgcctaatttttgcaagaagacaccagaatatgtcccggcaacaagaactagtgggaggtcaagccttcaggccattttacccgggtcaccgtgggtaaaagcctaactgcagaagcctccagagcaaccagccaaagaggagaaaacaggcaagcccctgctccccttgctcgctctcacggcagcagcaaatggcaggcgagcctgtgccccgcgccgcggcggccgccggagccgggcagcagtttcagcaccgtggaccgcggggtgcgcgcggcgcccgtagcccagccccggcgcgggg

SEQ ID NO: 452752 - DNA, 50 bp, Homo sapiens
  chr1:241520022-241520072
  hyper
  anorectal vs. uterine,ovary,pancreas_gallbladder, colorectal,sarcoma,thyroid
cgtggaccgcggggtgcgcgcggcgcccgtagcccagccccggcgcgggg

SEQ ID NO: 452753 - DNA, 51 bp, Homo sapiens
  chr1:241520533-241520584
  hyper
  anorectal vs. uterine,ovary,pancreas_gallbladder, colorectal,sarcoma,thyroid
gaggagggaggaggggacagtcacgtgggacaggggcgtccgaaggtgccg

SEQ ID NO: 452754 - DNA, 148 bp, Homo sapiens
  chr1:241520612-241520760
  hyper
  anorectal vs. uterine,ovary,pancreas_gallbladder, colorectal,sarcoma,thyroid
cacaccgcccgggcctcccgggcctccccggcctcccgccctcgcgcccctcgggaggctgtagtcctgcccccggcgcggccagcccgcgctcccgcacaccccgcccgctcgcccgcgcgtgtgtacgtgcgccggaggcctggag

SEQ ID NO: 452755 - DNA, 91 bp, Homo sapiens; identical to SEQ ID NO: 349442
  chr1:241520789-241520880
  hyper
  anorectal vs. uterine,ovary,pancreas_gallbladder, colorectal,sarcoma,thyroid

SEQ ID NO: 452756 - DNA, 138 bp, Homo sapiens
  chr1:247170868-247171006
  hyper
  anorectal vs. cervical,breast,colorectal,upper_gi, uterine,ovary
cgggagtcgggactctcccgacaacccctccgtcatcacagcacaatccagggaagacgcggcgctgcgggcgcggggctgccccgggagggctctgggccgtgccgaagtcaccaggcagagaccggacagtcaccc

SEQ ID NO: 452757 - DNA, 819 bp, Homo sapiens; identical to SEQ ID NO: 331179
  chr1:247267064-247267883
  hyper
  anorectal vs. upper_gi,pancreas_gallbladder, bladder_and_urothelial,colorectal,lung

SEQ ID NO: 452758 - DNA, 209 bp, Homo sapiens
  chr10:17270445-17270654
  hyper
  anorectal vs. melanoma,sarcoma,ovary,uterine,renal, non_cancer
ctgagacttgaatcaatctggtctaacggtttcccctaaaccgctaggagccctcaatcggcgggacagcagggcgcggtgagtcaccgccggtgactaagcgaccccacccctctccctcgggctttcctctgccaccgccgtctcgcaactcccgccgtccgaagctggactgagcccgttaggtccctcgacagaacctcccctcc

SEQ ID NO: 452759 - DNA, 116 bp, Homo sapiens; identical to SEQ ID NO: 345346
  chr10:17272233-17272349
  hyper
  anorectal vs. sarcoma,uterine

SEQ ID NO: 452760 - DNA, 117 bp, Homo sapiens
  chr10:18429033-18429150
  hyper
  anorectal vs. colorectal
cgtcgtccttcccctccaaagttaagagatctgctctaagggttcctgaggggtggtctggggccatgggaacaggatcaaggccccctgagcgccgggcctggcttctgtggcttc

SEQ ID NO: 452761 - DNA, 49 bp, Homo sapiens; identical to SEQ ID NO: 351003
  chr10:18430247-18430296
  hyper

SEQ ID NO: 452762 - DNA, 217 bp, Homo sapiens
  chr10:44185124-44185341
  hyper
  anorectal vs. melanoma,breast,pancreas_gallbladder, prostate,cervical,bladder_and_urothelial,renal,lung,ovary, multiple_myeloma,myeloid_neoplasm,thyroid,upper_gi,non_cancer, colorectal,uterine,liver_bileduct,sarcoma
cggcgaggtccactgggccagaccctggcccgaggtggccccggagctgtgagcgggaggaagagggaagggcggagtctggagccctcacgccttccgccttgtgcgcggtgcaggctgccgagagcccggccgggcaagcctttccgccgtggtcagtgactcgtttgcacaaggactttttagggaagagagaagccaggccttcgctgtgggc

SEQ ID NO: 452763 - DNA, 78 bp, Homo sapiens; identical to SEQ ID NO: 347090
  chr10:44186043-44186121
  hyper
  anorectal vs. melanoma,breast,pancreas_gallbladder, prostate,cervical,bladder_and_urothelial,renal,lung,ovary, multiple_myeloma,myeloid_neoplasm,thyroid,upper_gi,non_cancer, colorectal,uterine,liver_bileduct,sarcoma

SEQ ID NO: 452764 - DNA, 4 bp, Homo sapiens
  chr10:44806356-44806360
  hyper
  anorectal vs. pancreas_gallbladder,multiple_myeloma, prostate,breast,myeloid_neoplasm,thyroid,ovary,non_cancer,renal, lung,upper_gi,colorectal,bladder_and_urothelial,cervical, melanoma
cggg

SEQ ID NO: 452765 - DNA, 107 bp, Homo sapiens; identical to SEQ ID NO: 345354
  chr10:44806674-44806781
  hyper
  anorectal vs. pancreas_gallbladder,multiple_myeloma, prostate,breast,myeloid_neoplasm,thyroid,ovary,non_cancer,renal, lung,upper_gi,colorectal,bladder_and_urothelial,cervical, melanoma

SEQ ID NO: 452766 - DNA, 198 bp, Homo sapiens
  chr10:44882100-44882298
  hyper
  anorectal vs. upper_gi,liver_bileduct, pancreas_gallbladder,bladder_and_urothelial,colorectal,cervical, melanoma,head_and_neck,breast,lung,prostate,renal,ovary, multiple_myeloma,non_cancer,myeloid_neoplasm,thyroid,uterine,
  CONT. FROM ABOVE: sarcoma,lymphoid_neoplasm
cgtcgggcgtccccaggcctttgctgggctgggccggggagcctggccgctcaccggccgcagcgctggggctccggcgccctctggtggcggcgcctccctccccgctcccagagctctggccagctccattcctgcgcagctgatgaaacccgggagggcgaaggggtccgcgggaaatctacacccgggtggagg

SEQ ID NO: 452767 - DNA, 28 bp, Homo sapiens
  chr10:44882362-44882390
  hyper
  anorectal vs. upper_gi,liver_bileduct, pancreas_gallbladder,bladder_and_urothelial,colorectal,cervical, melanoma,head_and_neck,breast,lung,prostate,renal,ovary, multiple_myeloma,non_cancer,myeloid_neoplasm,thyroid,uterine,
  CONT. FROM ABOVE: sarcoma,lymphoid_neoplasm
ctggccaaagcaaacgccatcgcctctc

SEQ ID NO: 452768 - DNA, 216 bp, Homo sapiens
  chr10:50969681-50969897
  hyper
  anorectal vs. head_and_neck
cggttcggcgaatgcgtactgcagcctgctgtggcctcgggattaccccgtccccctcccacatctcccggggggcggaagaagcgcatcccatgcaagcagcgacctcaggccatgccgccctctctcaggcctcagttttctcatctgtaatcggagaccgcggttaaaaccgtctattaggctccttggtagtccgaagctgcctatgggtcc

SEQ ID NO: 452769 - DNA, 192 bp, Homo sapiens; identical to SEQ ID NO: 359569
  chr10:50970412-50970604
  hyper
  anorectal vs. head_and_neck

SEQ ID NO: 452770 - DNA, 194 bp, Homo sapiens
  chr10:60272362-60272556
  hyper
  anorectal vs. head_and_neck
cgtggatactccatgtgcgttcaggagtgtgtgtgtttgaggagctatgaaagtgcatgtatggaaaggatttatacgtgtaagtgcagaaagtggcagtgtgtacgtggtgtgtgtgtgcgcgcgcgagtgtgtgagcgccaggggccgcccgcccgccgcggctccccgtgggctggccgggccaatgagcg

SEQ ID NO: 452771 - DNA, 212 bp, Homo sapiens
  chr10:60273346-60273558
  hyper
  anorectal vs. head_and_neck
cgagtttgtactggcgcgcccaagttgcgttctggactttggagatgccaactttagcccggacacctgggctgtgccatccggaccactcgggccgcacagagtatgcgtgaccctccccattccctggcagcctcgagttctgtctctctccgtctgtttcactctctccccttgtcagtatccacttcctccagctgaggggccttgtc

SEQ ID NO: 452772 - DNA, 22 bp, Homo sapiens
  chr10:60273587-60273609
  hyper
  anorectal vs. head_and_neck
aaggcttaagacaggagctccc

SEQ ID NO: 452773 - DNA, 42 bp, Homo sapiens; identical to SEQ ID NO: 333957
  chr10:68685841-68685883
  hyper
  anorectal vs. liver_bileduct,pancreas_gallbladder, upper_gi,head_and_neck,colorectal,bladder_and_urothelial, lymphoid_neoplasm,ovary,melanoma,lung

SEQ ID NO: 452774 - DNA, 103 bp, Homo sapiens
  chr10:83634159-83634262
  hyper
  anorectal vs. head_and_neck,pancreas_gallbladder
ccgggacccccgacgcagtctcccgcttccgtcccccacgctcaaccgggcagggcgccggggcgtgatttccgatcctctgcctgcttgttgggtccctcgg

SEQ ID NO: 452775 - DNA, 47 bp, Homo sapiens; identical to SEQ ID NO: 359614
  chr10:83634499-83634546
  hyper
  anorectal vs. head_and_neck,pancreas_gallbladder

SEQ ID NO: 452776 - DNA, 79 bp, Homo sapiens; identical to SEQ ID NO: 287325
  chr10:94449318-94449397
  hyper
  anorectal vs. cervical

SEQ ID NO: 452777 - DNA, 231 bp, Homo sapiens
  chr10:94831380-94831611
  hyper
  anorectal vs. liver_bileduct
cgaaagcttggcgagattcctagatcaaagttcctattggcctggtaatttattgaccccccaccccccgccctgcccccctacaagatgttctttaatgatcgttcactctcacatttaatcctttcctgccggacgcccccgccggcctcgatgtacagatagattaaaacgtttttttccctgcggcaatttccagcgtgcaggccccgctcatcttgtgacccggct

SEQ ID NO: 452778 - DNA, 852 bp, Homo sapiens; identical to SEQ ID NO: 359637
  chr10:97802911-97803763
  hyper
  anorectal vs. head_and_neck

SEQ ID NO: 452779 - DNA, 20 bp, Homo sapiens
  chr10:100993468-100993488
  hyper
  anorectal vs. thyroid,myeloid_neoplasm,non_cancer, multiple_myeloma,cervical,breast,bladder_and_urothelial, prostate,renal
cgtggctaccccagggtctt

SEQ ID NO: 452780 - DNA, 124 bp, Homo sapiens; identical to SEQ ID NO: 345364
  chr10:100994695-100994819
  hyper
  anorectal vs. non_cancer

SEQ ID NO: 452781 - DNA, 3 bp, Homo sapiens
  chr10:101293972-101293975
  hyper
  anorectal vs. bladder_and_urothelial,multiple_myeloma, sarcoma
tcc

SEQ ID NO: 452782 - DNA, 293 bp, Homo sapiens; identical to SEQ ID NO: 359672
  chr10:106398982-106399275
  hyper
  anorectal vs. myeloid_neoplasm,thyroid,melanoma, multiple_myeloma

SEQ ID NO: 452783 - DNA, 38 bp, Homo sapiens
  chr10:112431835-112431873
  hyper
  anorectal vs. renal,liver_bileduct,lymphoid_neoplasm, sarcoma,prostate,myeloid_neoplasm,bladder_and_urothelial, multiple_myeloma,thyroid,non_cancer,uterine,cervical,breast, ovary
cgatgacggctctcggaggctcctggttttgatgtctg

SEQ ID NO: 452784 - DNA, 236 bp, Homo sapiens
  chr10:112432125-112432361
  hyper
  anorectal vs. renal,liver_bileduct,lymphoid_neoplasm, sarcoma,prostate,myeloid_neoplasm,bladder_and_urothelial, multiple_myeloma,thyroid,non_cancer,uterine,cervical,breast, ovary
gaagcctgagaggtctcagcgagacagtcaaaggggaggctcccctcgccgagtgtcacccgggaccctgcgtccccgctctgcagagaccttctctccgggctgctgccgtcctccctcgcccggcggagcttccgtgatcgtcagccaaagcccccggggcggtgcgccgcaggcggtcttcccgggtgttcgcggaagctgcgcgctcgcgcccccacggttctccagcgacc

SEQ ID NO: 452785 - DNA, 296 bp, Homo sapiens
  chr10:118927594-118927890
  hyper
  anorectal vs. lung
ctagagccgttcctgagctcgtcagccagcacgtatttaatgaatggccactgggtgctaggccttgcacgcaaccctttcgtcctcccccggggctgagccgagggtgacccaacactagtcggaacgagcctggagacatggcgccggggctgcgctctgcaggcctggcctggtcgctctccacgcacccctctctctgtagctgccgccccgcccggctctgcctgtgggcgccccctggcggcaggaagccgagcgcgcaccacgccctcggggctccatccccactcacc

SEQ ID NO: 452786 - DNA, 129 bp, Homo sapiens; identical to SEQ ID NO: 351149
  chr11:8615887-8616016
  hyper
  anorectal vs. ovary

SEQ ID NO: 452787 - DNA, 255 bp, Homo sapiens
  chr11:16635541-16635796
  hyper
  anorectal vs. upper_gi
cgggctgacaggagtgagagctaaaacttccaactagctgaaaccaatagccgggaatcgagcgaaggcgaactctcccagcaaagtataaagcttcgggccaaagagtctgcagctccaagtcaggggctgcggctccgaaactccaaacactaactcccagggcagtggcagagggtgggggcagcttcgaagaggcataccaactgctccggtcctggccgaagaccgagctcccttctgcggtgacctcgg

SEQ ID NO: 452788 - DNA, 71 bp, Homo sapiens; identical to SEQ ID NO: 372660
  chr11:16635927-16635998
  hyper
  anorectal vs. upper_gi

SEQ ID NO: 452789 - DNA, 100 bp, Homo sapiens; identical to SEQ ID NO: 334203
  chr11:22647396-22647496
  hyper
  anorectal vs. head_and_neck

SEQ ID NO: 452790 - DNA, 56 bp, Homo sapiens
  chr11:43599961-43600017
  hyper
  anorectal vs. melanoma,bladder_and_urothelial,cervical, lung,sarcoma,ovary,prostate,uterine,multiple_myeloma,non_cancer, breast,myeloid_neoplasm,thyroid,renal,colorectal
cgtccctctctcggaaggttccctgactgagactgaatattcaactcataatagta

SEQ ID NO: 452791 - DNA, 239 bp, Homo sapiens
  chr11:43600215-43600454
  hyper
  anorectal vs. melanoma,bladder_and_urothelial,cervical, lung,sarcoma,ovary,prostate,uterine,multiple_myeloma,non_cancer, breast,myeloid_neoplasm,thyroid,renal,colorectal
aaattctgccacaattgcaaaggaaataggggtggggggagcggtcggggcgggagtggtggtagcgccaataaagcacttgcaacacgtggagcggtggttggggggaggtgtccaagagtcaagaagggggcggagggacaccccatggcctcatttccacctccccattcttccccaccccttctcattgcttggcacaatgcacaagtttaccccccgaactggatcctattaaa

SEQ ID NO: 452792 - DNA, 174 bp, Homo sapiens
  chr11:43600280-43600454
  hyper
  anorectal vs. melanoma,sarcoma,lung,uterine,ovary, prostate,myeloid_neoplasm,thyroid,cervical, bladder_and_urothelial,non_cancer,breast,renal,multiple_myeloma
cgccaataaagcacttgcaacacgtggagcggtggttggggggaggtgtccaagagtcaagaagggggcggagggacaccccatggcctcatttccacctccccattcttccccaccccttctcattgcttggcacaatgcacaagtttaccccccgaactggatcctattaaa

SEQ ID NO: 452793 - DNA, 28 bp, Homo sapiens
  chr11:45377196-45377224
  hyper
  anorectal vs. multiple_myeloma,sarcoma,ovary,non_cancer
ctgaaggcgaccaacgagagggagggcc

SEQ ID NO: 452794 - DNA, 5 bp, Homo sapiens
  chr11:59333339-59333344
  hyper
  anorectal vs. lymphoid_neoplasm,cervical,upper_gi, melanoma,lung,renal,thyroid,multiple_myeloma,myeloid_neoplasm, non_cancer,sarcoma
cggtc

SEQ ID NO: 452795 - DNA, 190 bp, Homo sapiens; identical to SEQ ID NO: 347158
  chr11:59333673-59333863
  hyper
  anorectal vs. lymphoid_neoplasm,cervical,upper_gi, melanoma,lung,renal,thyroid,multiple_myeloma,myeloid_neoplasm, non_cancer,sarcoma

SEQ ID NO: 452796 - DNA, 33 bp, Homo sapiens; identical to SEQ ID NO: 359870
  chr11:65307510-65307543
  hyper
  anorectal vs. head_and_neck

SEQ ID NO: 452797 - DNA, 510 bp, Homo sapiens
  chr11:76381512-76382022
  hyper
  anorectal vs. lymphoid_neoplasm,bladder_and_urothelial
cggctccacgcgcgcagtggggatggcgggaggggagtgtttggggggcgtcccttgggaccagcccccgccttgcgctcgctagaggcgcgcgacagtgcgccccccgagggccggccagcctcgcctgcccggcggctcctacctggctcagcgcggccgcagctcctctcccgggcagtctcggcacattttgcgcaaacccgcccccgggtcccaccccgcgccagaccccggggtcacggcccgaggaggagcaggccgctcagctgccccaccggagcccccgcgctccggctgcaatttaaatacctctcccgccggcccgccccgccacgcccccctctggcgaggccgtggggtcctagcgcctggccccgtgcctcggtttatccggagccggcgggggcggagtggggtggggcggcgaagcatcttcaccaccctgggacctcggccgggaaggggcgggggcccagtgtggggggatgagagggcgggagggagagg

SEQ ID NO: 452798 - DNA, 30 bp, Homo sapiens
  chr11:76382264-76382294
  hyper
  anorectal vs. lymphoid_neoplasm,bladder_and_urothelial
ggccgcggagggggttccccgcaccaagcc

SEQ ID NO: 452799 - DNA, 38 bp, Homo sapiens
  chr11:84431917-84431955
  hyper
  anorectal vs. melanoma
cgatttggtaaaaagccagtggcttgctgcaatccaga

SEQ ID NO: 452800 - DNA, 55 bp, Homo sapiens; identical to SEQ ID NO: 359909
  chr11:84432270-84432325
  hyper
  anorectal vs. melanoma

SEQ ID NO: 452801 - DNA, 172 bp, Homo sapiens
  chr11:94501274-94501446
  hyper
  anorectal vs. head_and_neck
cggcaggggacaaaggaagggatgctgtcgccctcctaagtctcagggagacacgtcagcttgagctctgggcaatttcagcctggcagtctcgcggcccggggaggggcggcgggtgtctgcagacgggctctagggcccagcggccgggcgccacggcgggggtggagtg

SEQ ID NO: 452802 - DNA, 163 bp, Homo sapiens
  chr11:94502100-94502263
  hyper
  anorectal vs. head_and_neck
cggaagggggtgtccggtgcagctttccccggcgcgagacaaaggcgcgcgcaccggcccgcccgacgggctctggcgctgtggactggaccctttctgcccgccggccagacccggctctggcgggtgggggcgacgaaagggtcgcaccccagccccagac

SEQ ID NO: 452803 - DNA, 117 bp, Homo sapiens
  chr11:101452974-101453091
  hyper
  anorectal vs. cervical
cgaaagggcaccgcagcagggcttgaggctgggcagccctgacacagcacccatctatcaggagggtctgccaggcgcctatggggtggaatcctccctccaactaaagctgtttat

SEQ ID NO: 452804 - DNA, 133 bp, Homo sapiens; identical to SEQ ID NO: 372827
  chr11:101453715-101453848
  hyper
  anorectal vs. cervical

SEQ ID NO: 452805 - DNA, 399 bp, Homo sapiens
  chr11:115375434-115375833
  hyper
  anorectal vs. liver_bileduct
gctccagggggcgggtctagcttcttgtacacctttattaggaatgtttatagcaatcgctgtatcagaccgacgactggagaatctcccttaagagggtcctctgtcccgcacaccgagtgcatctggcctagcgaaccagacgttgcaaatttccgtcactcaccttgcaccgaaggaatagatctttgggaacgggggctgtgcgggagtggagagtaagaaggcaggtccccggattgacaaaacaatctgggagaagtgcatgcgtgctttgcacgtccggcggagcgggagagcccgctcaacagcctagcggtagactcggggatagttggagaaggcagccgtagagtcgggttctgagattttccagtcggtctttttgcggcagaatct

SEQ ID NO: 452806 - DNA, 301 bp, Homo sapiens; identical to SEQ ID NO: 347181
  chr11:115375894-115376195
  hyper
  anorectal vs. liver_bileduct

SEQ ID NO: 452807 - DNA, 5 bp, Homo sapiens
  chr11:131558034-131558039
  hyper
  anorectal vs. bladder_and_urothelial,melanoma
cgcct

SEQ ID NO: 452808 - DNA, 1 bp, Homo sapiens
  chr11:131558102-131558103
  hyper
  anorectal vs. bladder_and_urothelial,melanoma
c

SEQ ID NO: 452809 - DNA, 17 bp, Homo sapiens
  chr11:133938756-133938773
  hyper
  anorectal vs. melanoma,sarcoma
cgccaagttcattgaaa

SEQ ID NO: 452810 - DNA, 161 bp, Homo sapiens; identical to SEQ ID NO: 345407
  chr11:133939437-133939598
  hyper
  anorectal vs. melanoma,sarcoma

SEQ ID NO: 452811 - DNA, 397 bp, Homo sapiens
  chr12:3601625-3602022
  hyper
  anorectal vs. melanoma,sarcoma,myeloid_neoplasm,breast
atgggtctgcagccacccgtcccgcaagggcttttgaggaggtcgctctagctccgcaaattgtgttctcggcccccgccttcggcagcctttttctctactctccagctggccctgagccgcagagagccctgctgggctttgcgtcccgagactcgaggctgtgatccctcgcctccctctgaccccgctgtcattacaacaaccggactattccgtaggctctgggcacctgtagtcacgaaggggatcagcgtgggcagcccccttaccttcctggagaaacggtgcgccgagatgggggcggagtggggcatgtgtgtgaagatcatcccttactcagtggcaggaaaaagacacagagagcaaactcccaggctctattaatagctgggtg

SEQ ID NO: 452812 - DNA, 41 bp, Homo sapiens; identical to SEQ ID NO: 351298
  chr12:3602961-3603002
  hyper
  anorectal vs. sarcoma,melanoma,breast,multiple_myeloma, thyroid,prostate,ovary,non_cancer

SEQ ID NO: 452813 - DNA, 86 bp, Homo sapiens
  chr12:4377809-4377895
  hyper
  anorectal vs. lymphoid_neoplasm
cgtgggctcactctgcagctgcagttttcagcccttgcagtttagaagattctgcatgagcacggatgccacgagggtatccagcg

SEQ ID NO: 452814 - DNA, 142 bp, Homo sapiens
  chr12:4378558-4378700
  hyper
  anorectal vs. lymphoid_neoplasm
tcccagccccttcccccacgtgtggatgacgtcaaaattccgcgaaaaagccgcgtggtggctccccgagcggaggcgcgattccgccgcccagcggccccctcccgggggcgcctggagggggagaagggcggaggcggcc

SEQ ID NO: 452815 - DNA, 245 bp, Homo sapiens
  chr12:4378558-4378803
  hyper
  anorectal vs. lymphoid_neoplasm,colorectal,head_and_neck
tcccagccccttcccccacgtgtggatgacgtcaaaattccgcgaaaaagccgcgtggtggctccccgagcggaggcgcgattccgccgcccagcggccccctcccgggggcgcctggagggggagaagggcggaggcggccggttccttctcctcccgggaggcaggaccccccgacgccgaccgccggacgccccccgccccaaagcttattggaaaattcacttttgtaaagcaaatgtatt

SEQ ID NO: 452816 - DNA, 107 bp, Homo sapiens; identical to SEQ ID NO: 345417
  chr12:14928211-14928318
  hyper
  anorectal vs. cervical,liver_bileduct, pancreas_gallbladder

SEQ ID NO: 452817 - DNA, 117 bp, Homo sapiens; identical to SEQ ID NO: 347220
  chr12:21681020-21681137
  hyper
  anorectal vs. head_and_neck,ovary,breast

SEQ ID NO: 452818 - DNA, 23 bp, Homo sapiens
  chr12:25102288-25102311
  hyper
  anorectal vs. lymphoid_neoplasm
ccgtgtaacatttatatggagac

SEQ ID NO: 452819 - DNA, 77 bp, Homo sapiens
  chr12:40618264-40618341
  hyper
  anorectal vs. liver_bileduct,lung,sarcoma,renal,breast, ovary,myeloid_neoplasm
cggtgtcctcttttcccagcgccctgatttctattcttagatctggagataggcggctttcatttttcctgctccca

SEQ ID NO: 452820 - DNA, 35 bp, Homo sapiens; identical to SEQ ID NO: 351336
  chr12:40619048-40619083
  hyper
  anorectal vs. liver_bileduct,lung,sarcoma,renal,breast, ovary,myeloid_neoplasm

SEQ ID NO: 452821 - DNA, 293 bp, Homo sapiens
  chr12:45270086-45270379
  hyper
  anorectal vs. head_and_neck
ggcagagacaatggagaaagctccgggagacgcgcggagagactgctcctccggggagggaggggcgggccgggggaggcggggtaaggaggagggaggggccgccgagggcgaggccggcgctcagcgtcggtctcccgcacggtctcctggatgccaaacccggtctagggagcccaggagccgttgcagcctcagctcttctccctccctctctcgatgacccgggcaatgccaacctcctttcgggattgaaagctctaaatccaaggtgctaagttgatgggcggtct

SEQ ID NO: 452822 - DNA, 184 bp, Homo sapiens; identical to SEQ ID NO: 345428
  chr12:63026256-63026440
  hyper
  anorectal vs. pancreas_gallbladder

SEQ ID NO: 452823 - DNA, 118 bp, Homo sapiens
  chr12:63545150-63545268
  hyper
  anorectal vs. myeloid_neoplasm
cgagtcatgccttttctgggctcgtagccgtttccacaagcttccctcactagccttcctcgctagcctccttaaccatgcatttgacttcaacaggcacgctaagcgcggtacctgg

SEQ ID NO: 452824 - DNA, 435 bp, Homo sapiens; identical to SEQ ID NO: 373085
  chr12:63545586-63546021
  hyper
  anorectal vs. myeloid_neoplasm

SEQ ID NO: 452825 - DNA, 31 bp, Homo sapiens
  chr12:94543992-94544023
  hyper
  anorectal vs. sarcoma
ggagcacggcctgaggtccccaaagggagag

SEQ ID NO: 452826 - DNA, 86 bp, Homo sapiens; identical to SEQ ID NO: 345430
  chr12:94544052-94544138
  hyper
  anorectal vs. sarcoma

SEQ ID NO: 452827 - DNA, 4 bp, Homo sapiens
  chr12:101110836-101110840
  hyper
  anorectal vs. head_and_neck
cgtc

SEQ ID NO: 452828 - DNA, 268 bp, Homo sapiens
  chr12:103351149-103351417
  hyper
  anorectal vs. multiple_myeloma,prostate,thyroid, non_cancer,breast,ovary,lung,melanoma,myeloid_neoplasm,uterine, renal,bladder_and_urothelial
cgccccgagcgcgccgcctgtttattcagccgggagtccggcacgcgccaggcgcacgcactgcaacaacaaacccagctgaatggagagtttgcaaggagcgggagaaaggaacgggagggggggagaggagaggaggagggggagtttagggagtgggtgggaggaagaggtaagaggaggggggggagtgggggctgcagccgctcgctgcagcagcggggagtggggggcgaggcggggccagggctgcgcgtggggctgggtg

SEQ ID NO: 452829 - DNA, 97 bp, Homo sapiens
  chr12:111284508-111284605
  hyper
  anorectal vs. cervical,ovary,uterine,prostate
cgattgcatggcgttggccgagggaggggctaagactgttgattgactcaagaagtcacttagcgtcatgagggtccgggtagtctggtaaggggtc

SEQ ID NO: 452830 - DNA, 8 bp, Homo sapiens
  chr12:111285034-111285042
  hyper
  anorectal vs. cervical,ovary,uterine,prostate
ggtctccc

SEQ ID NO: 452831 - DNA, 752 bp, Homo sapiens
  chr12:117536636-117537388
  hyper
  anorectal vs. pancreas_gallbladder
cgctctcgcgctcacgaatgcaaacgactctcaggtgtggggcgcgcgcgccagcgggggtgcctgagggacttgcccgcccggcctgaggcacctgccctgcgcttgggaagcctgggccccgctccctccccggtccgcagtcccccggccagggagttcccgggccagtccgaagctgagcggctgcggcactgagcatcgccgcggagctcctcgccgcagcccgcgaggtggccagcggggacccatttgaaagaggaggagactgaggcgcagagagggcccgccactggcccaaggtcacacagcgcggcggcgggccggggtccccaacagtggccgttcggaggtcccgccccggtccccgcgccgccccccgcgggtactcacagccggtcttgccctcgagctcccgcacctcctcagacgcggagtgggcagcgcccatggtgcccgcggcgggggccccggggcgcgcgtccctctcaggccccgcactggcttcggctgcgcagcggcgggactggcctcgggtccggcctcgggtcgggacgccggcgaaggctcggagccgcgggttccgcgtggggccggagcggggcctcatataacggcggagggcggcgcgccgcggtcctagcgcacgccggtttcgcgcactgcgcggctaggggagcgccccgccccgccccggcccggaaaccgccgggaaggggaccccggagcccaccgctctggagtccccgttc

SEQ ID NO: 452832 - DNA, 3 bp, Homo sapiens
  chr12:127865668-127865671
  hyper
  anorectal vs. lung,liver_bileduct
cgg

SEQ ID NO: 452833 - DNA, 81 bp, Homo sapiens; identical to SEQ ID NO: 360238
  chr12:127865862-127865943
  hyper
  anorectal vs. lung,liver_bileduct

SEQ ID NO: 452834 - DNA, 152 bp, Homo sapiens
  chr12:130498574-130498726
  hyper
  anorectal vs. lung,bladder_and_urothelial,cervical
cggaaagagggcaaggagagtggcggggtgcgagcggggcgctgcggaggaggctgcagcggcagcggtgcgggcaggagctctgatgcgatgcgatgcgatgcgatgctgcccccctgtgtccttcgacgatattgctgcgggaagctttc

SEQ ID NO: 452835 - DNA, 107 bp, Homo sapiens; identical to SEQ ID NO: 373207
  chr12:130498755-130498862
  hyper
  anorectal vs. lung,bladder_and_urothelial,cervical

SEQ ID NO: 452836 - DNA, 31 bp, Homo sapiens
  chr12:131400786-131400817
  hyper
  anorectal vs. lung,cervical,thyroid,breast
cgcctgactgtctaatgcacctccgcatccc

SEQ ID NO: 452837 - DNA, 54 bp, Homo sapiens; identical to SEQ ID NO: 351436
  chr12:131400919-131400973
  hyper
  anorectal vs. lung,cervical,thyroid,breast

SEQ ID NO: 452838 - DNA, 127 bp, Homo sapiens; identical to SEQ ID NO: 351453
  chr13:28491488-28491615
  hyper
  anorectal vs. upper_gi,colorectal,pancreas_gallbladder, multiple_myeloma

SEQ ID NO: 452839 - DNA, 177 bp, Homo sapiens
  chr13:28491617-28491794
  hyper
  anorectal vs. upper_gi,colorectal,pancreas_gallbladder, multiple_myeloma
ttttacgataccaggagctagatccacggggaagtacaacacacgaccttactaagcggagggttccgcttgatgcgttttttatacggctgtacgtgataaaattccagataactttgtttcatctaataataataataacaataataaatggttgtttgacctttgctccctggg

SEQ ID NO: 452840 - DNA, 4 bp, Homo sapiens
  chr13:29067770-29067774
  hyper
  anorectal vs. head_and_neck
cgat

SEQ ID NO: 452841 - DNA, 37 bp, Homo sapiens; identical to SEQ ID NO: 345440
  chr13:29069851-29069888
  hyper
  anorectal vs. head_and_neck,cervical,lung,breast,uterine

SEQ ID NO: 452842 - DNA, 201 bp, Homo sapiens
  chr13:29292491-29292692
  hyper
  anorectal vs. lung,colorectal,uterine,multiple_myeloma, renal,ovary,breast,lymphoid_neoplasm,non_cancer,thyroid, pancreas_gallbladder,sarcoma,upper_gi,prostate,myeloid_neoplasm, bladder_and_urothelial,liver_bileduct,cervical,melanoma
cgtaagttcaacaatgaggttccttttgggaagcgacagttgcacaattgttattgttattttgctgcgtattaaaaacggacagggagggggcgttttaaaaagcagctcccaatcgaaagggccttatttttaactcaccccacgattacagtcttcctgccaggctgggtacaggtcgggccgtgccaggggctgtcg

SEQ ID NO: 452843 - DNA, 242 bp, Homo sapiens; identical to SEQ ID NO: 345442
  chr13:29293342-29293584
  hyper
  anorectal vs. lung,breast,colorectal,renal, lymphoid_neoplasm,uterine,multiple_myeloma,ovary,non_cancer, thyroid,pancreas_gallbladder,sarcoma,upper_gi,prostate, myeloid_neoplasm,bladder_and_urothelial,cervical,melanoma,
  CONT. FROM ABOVE: liver_bileduct

SEQ ID NO: 452844 - DNA, 98 bp, Homo sapiens
  chr13:29393559-29393657
  hyper
  anorectal vs. lung,breast,melanoma,ovary,head_and_neck, myeloid_neoplasm,thyroid,bladder_and_urothelial,uterine, prostate,non_cancer,cervical,multiple_myeloma
cgcctgccttttgcgcaaatcttttcagagactggctttgggctcctatgaatcaggcaccctagcgtcctccaaagttcttcccgatgctgaacccc

SEQ ID NO: 452845 - DNA, 23 bp, Homo sapiens
  chr13:37005451-37005474
  hyper
  anorectal vs. cervical
cgattatttcacctggcttgtca

SEQ ID NO: 452846 - DNA, 133 bp, Homo sapiens
  chr13:46960952-46961085
  hyper
  anorectal vs. head_and_neck,colorectal,lymphoid_neoplasm, bladder_and_urothelial,uterine,prostate,breast
cgccctgcgtaaaagtgtcctgaggtcccgcttctgcgcccttcccggcccaagccgaacacagggtcaacctcactctacaaagtcaaccggatagaaatccgccaccccgcgaggagccccttcctactgt

SEQ ID NO: 452847 - DNA, 135 bp, Homo sapiens; identical to SEQ ID NO: 345444
  chr13:46961683-46961818
  hyper
  anorectal vs. head_and_neck,colorectal,lymphoid_neoplasm, bladder_and_urothelial,uterine,prostate,breast

SEQ ID NO: 452848 - DNA, 155 bp, Homo sapiens
  chr13:67804074-67804229
  hyper
  anorectal vs. head_and_neck
gcaactccagagaacaaattcacggatttgtcgttagtcattctctccacatttcgtctctcttacccactgggtctgggttcttctgggcatttagcacacacaacacatagttgcacttcttcagctcagggatattttccacagcagcatgc

SEQ ID NO: 452849 - DNA, 196 bp, Homo sapiens; identical to SEQ ID NO: 351482
  chr13:67805438-67805634
  hyper
  anorectal vs. head_and_neck,lung

SEQ ID NO: 452850 - DNA, 139 bp, Homo sapiens
  chr13:74707123-74707262
  hyper
  anorectal vs. lymphoid_neoplasm
cggctctgcgggttcccggcccgggtggacgtacaaagttgccccttgtcaactccggccaggtcccccgtaattgaaaataacagccaccggccagcccctggctacttgcatggaccaggcactgtagcaagtgaca

SEQ ID NO: 452851 - DNA, 212 bp, Homo sapiens
  chr13:74707414-74707626
  hyper
  anorectal vs. lymphoid_neoplasm
accccgctcgaggccggggggccaactacttccacgagccccccctcccccccaagttcagccctggggttttatttcacatccttggcaactgtcaggcaaacactgcaaccaacaattccactaggggtagaaaaacacttgcttaattcacgttacttgataacttcttctggaaaaaaaaaattaggggaggtggggaagaaacctcc

SEQ ID NO: 452852 - DNA, 410 bp, Homo sapiens
  chr13:74707668-74708078
  hyper
  anorectal vs. lymphoid_neoplasm
aacagcatcgcccttccccggccccctcccgcttcccagcactttccccctttaagaacacagaccaaccaaaatgatttaacttgagcagatgacagaaggaaaataaaacacgttaagagaatacggtctgatttgggatggcaaaaaaaaaaaaaaaagaggagggggttgtttattttgataagaaacggaatcggcacagacctgaacagaagctgcagagcaggagaaattgttttctttccctcacacagagtccccctctctctctccctttctctctctcacacgcgcgcgcgcacacacacacacacactcgcacacacacggcgtcacccgcgcacacgcacacgcagagcctctcagcggctctctgcagttctcaggaaatgaatggggggcaaccc

SEQ ID NO: 452853 - DNA, 6 bp, Homo sapiens
  chr13:92050674-92050680
  hyper
  anorectal vs. sarcoma,uterine,myeloid_neoplasm,prostate, thyroid,bladder_and_urothelial,multiple_myeloma,lung,non_cancer, ovary,cervical,head_and_neck,breast,melanoma,renal, liver_bileduct
cggact

SEQ ID NO: 452854 - DNA, 162 bp, Homo sapiens
  chr13:92050814-92050976
  hyper
  anorectal vs. sarcoma,uterine,myeloid_neoplasm,prostate, thyroid,bladder_and_urothelial,multiple_myeloma,lung,non_cancer, ovary,cervical,head_and_neck,breast,melanoma,renal, liver_bileduct
gcctgtccgcggggcggggagtgcggggcggggcttccgcggagcgcagcgagcgggcacatcccaggttagctgctgcgagccgagccgggcggcggaggcggcggcggcggcggcagtggcggcagtggcggcagtggcggcagcggcagcagttgcagc

SEQ ID NO: 452855 - DNA, 166 bp, Homo sapiens
  chr13:108519932-108520098
  hyper
  anorectal vs. lung
gagaaggcgcgcgggggcgggcggcggcggggccgcggggcccgggggcccccgcccggctccccgggctcaggcgcctgctctttcctttctgtccccctgtccacgatattttgttttaatcactgaagagaaaaataaaagtcagactgcggacggcatggcc

SEQ ID NO: 452856 - DNA, 68 bp, Homo sapiens
  chr13:108520309-108520377
  hyper
  anorectal vs. lung
cgtctcggatcccggaccgcgagatccatcgctcccagtgcgtgcagttattccgtcctgctgtgtga

SEQ ID NO: 452857 - DNA, 247 bp, Homo sapiens
  chr14:21098618-21098865
  hyper
  anorectal vs. upper_gi,ovary,pancreas_gallbladder, bladder_and_urothelial
cgtagttggaaattcttagagtcctccgctctaccaggtgagctatcggaaagtgtctgtgacattcgttagcgtagatttttgtgcattgagtagcggctggtgagactcctgacttctttgcatttgggctcagattactgttcaagaagttccagagagccaggtctatagttaactgagtcccgggagcagccttgaggcagtaggaagtgagatctgagtcggaggtagtgagaatggaaac

SEQ ID NO: 452858 - DNA, 196 bp, Homo sapiens; identical to SEQ ID NO: 351514
  chr14:21099147-21099343
  hyper
  anorectal vs. upper_gi,ovary,pancreas_gallbladder, bladder_and_urothelial

SEQ ID NO: 452859 - DNA, 686 bp, Homo sapiens; identical to SEQ ID NO: 334837
  chr14:21099793-21100479
  hyper
  anorectal vs. upper_gi,colorectal

SEQ ID NO: 452860 - DNA, 113 bp, Homo sapiens; identical to SEQ ID NO: 345453
  chr14:21101056-21101169
  hyper
  anorectal vs. upper_gi,melanoma,multiple_myeloma,uterine, colorectal,prostate,non_cancer,myeloid_neoplasm,thyroid,ovary, breast,renal,pancreas_gallbladder,bladder_and_urothelial, cervical,lymphoid_neoplasm,sarcoma,lung

SEQ ID NO: 452861 - DNA, 16 bp, Homo sapiens
  chr14:21769015-21769031
  hyper
  anorectal vs. cervical,head_and_neck,upper_gi, multiple_myeloma,uterine,lymphoid_neoplasm,ovary,colorectal
cggtagatgaatacat

SEQ ID NO: 452862 - DNA, 39 bp, Homo sapiens
  chr14:23355352-23355391
  hyper
  anorectal vs. lymphoid_neoplasm,bladder_and_urothelial, melanoma,renal,multiple_myeloma,pancreas_gallbladder, liver_bileduct
cgggctgggaggccgcaccacgacctacccgttatcctc

SEQ ID NO: 452863 - DNA, 53 bp, Homo sapiens; identical to SEQ ID NO: 351522
  chr14:23355484-23355537
  hyper
  anorectal vs. lymphoid_neoplasm,bladder_and_urothelial, melanoma,renal,multiple_myeloma,pancreas_gallbladder, liver_bileduct

SEQ ID NO: 452864 - DNA, 79 bp, Homo sapiens
  chr14:27067019-27067098
  hyper
  anorectal vs. head_and_neck
cgcgagggctggcggggcgcggggagaagccgaggaggaggggagagtgagggaaagagtgaatgagcaggaggagggg

SEQ ID NO: 452865 - DNA, 219 bp, Homo sapiens
  chr14:27067386-27067605
  hyper
  anorectal vs. head_and_neck
acttcgcgctcgggtccctgcctctcagcagcgccgccgcctcccagcgccgatgcttcagccggcggggcggctgaggggtgagggggaactccgcgggcgggggcgagggagcgtgtgtgcgcgagcgtgtgcgcgcgcgaggggagcgcgtgcgcggtgaggacgcgcgccggcggttggggcgggggcgggggccggggcgctcctgtgggaagg

SEQ ID NO: 452866 - DNA, 205 bp, Homo sapiens; identical to SEQ ID NO: 360381
  chr14:27067699-27067904
  hyper
  anorectal vs. head_and_neck

SEQ ID NO: 452867 - DNA, 88 bp, Homo sapiens
  chr14:30739859-30739947
  hyper
  anorectal vs. head_and_neck,cervical
cggaacacaagcgttttgcttggtcactaagcctagacaaatgtaagtttccccgccccagctcccctcagcctgtcacacaaaagcg

SEQ ID NO: 452868 - DNA, 69 bp, Homo sapiens; identical to SEQ ID NO: 351531
  chr14:30740003-30740072
  hyper
  anorectal vs. head_and_neck,cervical

SEQ ID NO: 452869 - DNA, 97 bp, Homo sapiens
  chr14:32671357-32671454
  hyper
  anorectal vs. cervical
cgcggttcaacgaaggtcgttgggcaagatacggtggtgttcctagaggttgttcaagatctctcggggcctgcattttcctgctcgcgagcttggc

SEQ ID NO: 452870 - DNA, 17 bp, Homo sapiens
  chr14:32671535-32671552
  hyper
  anorectal vs. cervical
tcgaggcgcctagttac

SEQ ID NO: 452871 - DNA, 138 bp, Homo sapiens
  chr14:42076491-42076629
  hyper
  anorectal vs. melanoma
cggtccgttatatcagaaaaaaaaagcgcaactggacgggggtggggcagaccaacgaaacctagacagacacacacacactcagaggagagaggaagaattgaaagacttgagaagactttgataacctccctgctg

SEQ ID NO: 452872 - DNA, 315 bp, Homo sapiens
  chr14:52781114-52781429
  hyper
  anorectal vs. upper_gi,pancreas_gallbladder, bladder_and_urothelial,cervical
cgccgtcggcgcgctgggtgcgggaagggggctctggatttcggtccctcccctttttcctctgagtctcggaacgctccggctctcagaccctcttcctcccaggtaaaggccgggagaggagggcgcatctcttttccaggcaccccaccatgggcaatgcctccaatgactcccagtctgaggactgcgagacgcgacagtggcttcccccaggcgaaagcccagccatcagctccgtcatgttctcggccggggtgctggggaacctcatagcactggcgctgctggcgcgccgctggcggggggacgtgg

SEQ ID NO: 452873 - DNA, 24 bp, Homo sapiens
  chr14:52781405-52781429
  hyper
  anorectal vs. upper_gi
cgcgccgctggcggggggacgtgg

SEQ ID NO: 452874 - DNA, 27 bp, Homo sapiens
  chr14:52781982-52782009
  hyper
  anorectal vs. upper_gi
cagtggccggggcggccccggggcccg

SEQ ID NO: 452875 - DNA, 80 bp, Homo sapiens
  chr14:52782046-52782126
  hyper
  anorectal vs. upper_gi
gaccacctcattctcctggctatcatgaccatcaccttcgccgtctgctccttgcctttcacggtaagtcactccctacg

SEQ ID NO: 452876 - DNA, 17 bp, Homo sapiens
  chr14:52782173-52782190
  hyper
  anorectal vs. upper_gi
cctccaccctttccacc

SEQ ID NO: 452877 - DNA, 80 bp, Homo sapiens
  chr14:60097114-60097194
  hyper
  anorectal vs. multiple_myeloma,melanoma,breast, myeloid_neoplasm,prostate
cgggtttcccgtgcgcctcaggcatgcactactgaaataaagagaataccctgacttttccagttgctccacacacagtc

SEQ ID NO: 452878 - DNA, 45 bp, Homo sapiens
  chr14:60385935-60385980
  hyper
  anorectal vs. myeloid_neoplasm
cgtaccttacagcacatgtcaatttggacaagccacatttcaagc

SEQ ID NO: 452879 - DNA, 7 bp, Homo sapiens
  chr14:60386737-60386744
  hyper
  anorectal vs. myeloid_neoplasm
caaaccc

SEQ ID NO: 452880 - DNA, 45 bp, Homo sapiens
  chr14:60798413-60798458
  hyper
  anorectal vs. upper_gi
cgctttgtcacccgtgccggaagctcacaggccccggagatcccg

SEQ ID NO: 452881 - DNA, 1 bp, Homo sapiens
  chr14:65006715-65006716
  hyper
  anorectal vs. head_and_neck
c

SEQ ID NO: 452882 - DNA, 536 bp, Homo sapiens
  chr14:65006776-65007312
  hyper
  anorectal vs. head_and_neck
cgccggttcagactttttcttttctttaatccccgtccaagggatccgccctcaccccccaccccagccaccccaattccctattccctccccttggacggcgccggggaaaacaagctgctcgagctttatttcttcggtgcaaccaactcagaatgaattcctccgcccctgcgtgctcagtgagtcggcaccctagcagtgaactgcatttaaaacctcaggaattgagcgaactctcccagtggctctcctcaccgggatccccttccacgcctcctccccgtgccgcgcctcagtccgcactgctcattggccgcgtgccctgccaatccgatgcacgtcggctagggcaaagaccgcgaaaaagcgcgtacacctggctctgggagcgcgcgcctaacgccagccagcagcaggaggcgcgcgaggcaccacggcctggcggccgagagtcagggaggaacctcatttacataacggccgcccctctgtctcctggcgggggccggagtcccgcccctcgtccaacttga

SEQ ID NO: 452883 - DNA, 38 bp, Homo sapiens
  chr14:76819100-76819138
  hyper
  anorectal vs. ovary,multiple_myeloma,prostate,melanoma, renal,head_and_neck,myeloid_neoplasm,cervical,lung, lymphoid_neoplasm,bladder_and_urothelial,uterine,non_cancer, breast
cggccccggttgctctgagctagctgattggaaagccc

SEQ ID NO: 452884 - DNA, 67 bp, Homo sapiens; identical to SEQ ID NO: 351600
  chr14:89818034-89818101
  hyper
  anorectal vs. prostate,lymphoid_neoplasm

SEQ ID NO: 452885 - DNA, 4 bp, Homo sapiens
  chr14:92414008-92414012
  hyper
  anorectal vs. head_and_neck
cgct

SEQ ID NO: 452886 - DNA, 102 bp, Homo sapiens; identical to SEQ ID NO: 347317
  chr14:94889915-94890017
  hyper
  anorectal vs. upper_gi,pancreas_gallbladder

SEQ ID NO: 452887 - DNA, 578 bp, Homo sapiens; identical to SEQ ID NO: 335055
  chr15:26095523-26096101
  hyper
  anorectal vs. bladder_and_urothelial

SEQ ID NO: 452888 - DNA, 409 bp, Homo sapiens; identical to SEQ ID NO: 335057
  chr15:26178877-26179286
  hyper
  anorectal vs. bladder_and_urothelial

SEQ ID NO: 452889 - DNA, 145 bp, Homo sapiens; identical to SEQ ID NO: 335062
  chr15:29432142-29432287
  hyper
  anorectal vs. liver_bileduct,upper_gi

SEQ ID NO: 452890 - DNA, 61 bp, Homo sapiens
  chr15:29561185-29561246
  hyper
  anorectal vs. bladder_and_urothelial,lung
cggtgtggggtatccgccggtattccaggtaacgctgtcgcacaaagtcctcagtaatgag

SEQ ID NO: 452891 - DNA, 700 bp, Homo sapiens; identical to SEQ ID NO: 347323
  chr15:29561316-29562016
  hyper
  anorectal vs. bladder_and_urothelial,lung

SEQ ID NO: 452892 - DNA, 507 bp, Homo sapiens; identical to SEQ ID NO: 351653
  chr15:31774606-31775113
  hyper
  anorectal vs. pancreas_gallbladder

SEQ ID NO: 452893 - DNA, 119 bp, Homo sapiens
  chr15:48469946-48470065
  hyper
  anorectal vs. lung,breast,melanoma,ovary,prostate,renal, sarcoma,uterine,myeloid_neoplasm,multiple_myeloma, bladder_and_urothelial,non_cancer,lymphoid_neoplasm,thyroid, cervical
cgtggcggtcgctgagctttgctcaaagattctttaaccaaagtcagggaagaggggtgttcgctgtctcgggctagaaatcagggaagagcgctggtccccgggcccccagccccggc

SEQ ID NO: 452894 - DNA, 53 bp, Homo sapiens
  chr15:48470094-48470147
  hyper
  anorectal vs. lung,breast,melanoma,ovary,prostate,renal, sarcoma,uterine,myeloid_neoplasm,multiple_myeloma, bladder_and_urothelial,non_cancer,lymphoid_neoplasm,thyroid, cervical
cgggcggggaagggcctgggagcggcccagctgcacctgctcctcaggaagcc

SEQ ID NO: 452895 - DNA, 159 bp, Homo sapiens
  chr15:48470215-48470374
  hyper
  anorectal vs. lung,breast,melanoma,ovary,prostate,renal, sarcoma,uterine,myeloid_neoplasm,multiple_myeloma, bladder_and_urothelial,non_cancer,lymphoid_neoplasm,thyroid, cervical
cgcccggtagactccccgccccccacctcgccccggttcccggaggaaaagacaatacattttaacgccattggagctgctgctgtgctgcggctgctgcttctccgcctccgcggggtgcggctctcgccgcggctcgcccggcggctctgcgggctg

SEQ ID NO: 452896 - DNA, 1 bp, Homo sapiens
  chr15:48470626-48470627
  hyper
  anorectal vs. lung,breast,melanoma,ovary,prostate,renal, sarcoma,uterine,myeloid_neoplasm,multiple_myeloma, bladder_and_urothelial,non_cancer,lymphoid_neoplasm,thyroid, cervical
c

SEQ ID NO: 452897 - DNA, 78 bp, Homo sapiens
  chr15:48936649-48936727
  hyper
  anorectal vs. head_and_neck
cgaacggggtggggactaaacaaccctagcacctctaaggtgcccccaggaggtcttgccaaggagtcttccacaggg

SEQ ID NO: 452898 - DNA, 28 bp, Homo sapiens
  chr15:53075376-53075404
  hyper
  anorectal vs. sarcoma
cgttttagcttaatgatccaacccctgt

SEQ ID NO: 452899 - DNA, 99 bp, Homo sapiens
  chr15:53080201-53080300
  hyper
  anorectal vs. liver_bileduct
cgaaaatcgcgaagaggaataataaaacaaaatgcaaagtcctcagggagtcggcagcggagtcggtcccaggacatggctattgctttgcagctctca

SEQ ID NO: 452900 - DNA, 76 bp, Homo sapiens
  chr15:60289235-60289311
  hyper
  anorectal vs. head_and_neck
cgtcggtaagtccttggggcaacctggttttcccctgctgacaagctgtgtcagttaactgcaacccaccaagagt

SEQ ID NO: 452901 - DNA, 15 bp, Homo sapiens
  chr15:60289626-60289641
  hyper
  anorectal vs. head_and_neck
aactcagcgggggac

SEQ ID NO: 452902 - DNA, 72 bp, Homo sapiens
  chr15:63795400-63795472
  hyper
  anorectal vs. upper_gi,liver_bileduct
cggtgggtggataccattaggcagaggtctatgcggaagaggccgacttgtggcgtgggaggtagggaggag

SEQ ID NO: 452903 - DNA, 351 bp, Homo sapiens
  chr15:63795501-63795852
  hyper
  anorectal vs. upper_gi,liver_bileduct
tgctctaggactgcattgcggggaggtgcccggctctaaccactgcccggcccggttaatcatttcctgaccttccttcctcctctcgctctggccgcaggattgccacatcagtcttccccctcctcctgctcgccttctggccccgaggctccttcgccgggttttacaaggagccccaacttggaagcaatatttgtaatagccccggacgtcctcaagtgccccagtgagatcgcaggctcgatccagggtatgccggcccaagcggccccttgaggcttgccctcttctctaatccctcactaaaaagaggtcagagggtcagggatccaatctccatacagatca

SEQ ID NO: 452904 - DNA, 338 bp, Homo sapiens; identical to SEQ ID NO: 347348
  chr15:63795894-63796232
  hyper
  anorectal vs. upper_gi,liver_bileduct

SEQ ID NO: 452905 - DNA, 97 bp, Homo sapiens; identical to SEQ ID NO: 373698
  chr15:65714323-65714420
  hyper
  anorectal vs. head_and_neck

SEQ ID NO: 452906 - DNA, 225 bp, Homo sapiens
  chr15:68126244-68126469
  hyper
  anorectal vs. cervical
cctgagcgaggaacaagccattcggacccgaccgatgtaaatacagccgcccgtccgcccgccttcctcccgggctccccggccttgcccgccccctcccgggcgtccctgtccagggccccggcttggtttccaagtgtaaataccgcctcgcgcctcaaatccccctaccccgtgtgaactctagggcatcggacctcaaggggttaactggacagacggggg

SEQ ID NO: 452907 - DNA, 773 bp, Homo sapiens; identical to SEQ ID NO: 360696
  chr15:72523255-72524028
  hyper
  anorectal vs. head_and_neck

SEQ ID NO: 452908 - DNA, 40 bp, Homo sapiens; identical to SEQ ID NO: 335222
  chr15:90016187-90016227
  hyper
  anorectal vs. upper_gi

SEQ ID NO: 452909 - DNA, 305 bp, Homo sapiens
  chr16:3208795-3209100
  hyper
  anorectal vs. lymphoid_neoplasm,upper_gi,cervical
cgggacccgggcggggaggggtaggggtggagtgaaggcggggtctgggggggtgcgcgtggacggggagagtggaaccgcgggtgtggacctccaagtacagacgtcagagaacgtttgtcgtcctggctcgttggtctaggggtatgattctcgctttgggtgcgagaggtcccgggttcaaatcccggacgagcccgcttttttttttttttctgaacaccatcattttctcgcggtgaagattgaggagcttcacggagtctcggccgcagggaacttggtctctccgtggcagctgcagg

SEQ ID NO: 452910 - DNA, 24 bp, Homo sapiens
  chr16:3209411-3209435
  hyper
  anorectal vs. lymphoid_neoplasm,upper_gi,cervical
cgaacttccttccttttttccttc

SEQ ID NO: 452911 - DNA, 5 bp, Homo sapiens
  chr16:3220283-3220288
  hyper
  anorectal vs. thyroid,non_cancer,renal,prostate,ovary, sarcoma,multiple_myeloma,myeloid_neoplasm, bladder_and_urothelial
cggcc

SEQ ID NO: 452912 - DNA, 212 bp, Homo sapiens; identical to SEQ ID NO: 345485
  chr16:3222239-3222451
  hyper
  anorectal vs. multiple_myeloma,non_cancer, lymphoid_neoplasm,thyroid,renal,myeloid_neoplasm, bladder_and_urothelial

SEQ ID NO: 452913 - DNA, 18 bp, Homo sapiens
  chr16:3234164-3234182
  hyper
  anorectal vs. thyroid,multiple_myeloma,non_cancer
cgcacccaaagcgagaat

SEQ ID NO: 452914 - DNA, 50 bp, Homo sapiens
  chr16:3238043-3238093
  hyper
  anorectal vs. non_cancer,thyroid,cervical, multiple_myeloma,melanoma,uterine,renal,myeloid_neoplasm, prostate,breast
gaaaaaggaaaaaaaaaaaaaaaaaaagaaaaaagaaaaaaggaagcggc

SEQ ID NO: 452915 - DNA, 49 bp, Homo sapiens
  chr16:4363872-4363921
  hyper
  anorectal vs. liver_bileduct,upper_gi, pancreas_gallbladder,colorectal,uterine,renal,multiple_myeloma, cervical,prostate,bladder_and_urothelial,non_cancer, myeloid_neoplasm,thyroid,lymphoid_neoplasm,lung,ovary
cgtctcctgtaccttttttctacacacctcgaccccagggctgcagttc

SEQ ID NO: 452916 - DNA, 158 bp, Homo sapiens; identical to SEQ ID NO: 345488
  chr16:4364080-4364238
  hyper
  anorectal vs. liver_bileduct,upper_gi, pancreas_gallbladder,colorectal,uterine,renal,multiple_myeloma, cervical,prostate,bladder_and_urothelial,non_cancer, myeloid_neoplasm,thyroid,lymphoid_neoplasm,lung,ovary

SEQ ID NO: 452917 - DNA, 37 bp, Homo sapiens
  chr16:10274229-10274266
  hyper
  anorectal vs. bladder_and_urothelial
cggcagcaccagcagggtccaatagcccactctgccc

SEQ ID NO: 452918 - DNA, 430 bp, Homo sapiens
  chr16:12897365-12897795
  hyper
  anorectal vs. head_and_neck,cervical,liver_bileduct,lung, melanoma,renal,colorectal,ovary,multiple_myeloma, pancreas_gallbladder,bladder_and_urothelial,breast,prostate, uterine,non_cancer
cgctctctcggcctcgcctctcaactgcgcccctggaatccctaagagcaggctttgatgcagctatggcggctcccaggccccggtgcagccccggatggtgtccgactggcggagcgcacacctgaacaaaaggttcccccggcggaaggttccgcagccccagagtcccctccccgggtgaggggcgggcagtacctgcgggaaacgcggccagggtcctgcccctggctctgtggaaaacaccccccgcctctgcagccgacatggcgagcgagtttctggccttcacttagaacactgcgtgggtggaagccgcgcgacttcacacagaacaaccgctggacctgtcccgctttgggcgacgccctttgatctcggggcgggactggggcgggacggggaggggcccggtggctcggggcgccac

SEQ ID NO: 452919 - DNA, 10 bp, Homo sapiens
  chr16:23846783-23846793
  hyper
  anorectal vs. non_cancer,thyroid,myeloid_neoplasm, melanoma,cervical
cgctcctccc

SEQ ID NO: 452920 - DNA, 49 bp, Homo sapiens
  chr16:77822069-77822118
  hyper
  anorectal vs. sarcoma,melanoma,lung,multiple_myeloma
cgacccaatttcccgactatcccgcccagcctcgaagatgggagggaga

SEQ ID NO: 452921 - DNA, 61 bp, Homo sapiens
  chr16:81779788-81779849
  hyper
  anorectal vs. lymphoid_neoplasm
cggcctgctggataaagggaggtagaaacgctttcagccctccccggtgcttcccggttta

SEQ ID NO: 452922 - DNA, 123 bp, Homo sapiens; identical to SEQ ID NO: 351847
  chr16:81780013-81780136
  hyper
  anorectal vs. lymphoid_neoplasm

SEQ ID NO: 452923 - DNA, 178 bp, Homo sapiens
  chr16:85932121-85932299
  hyper
  anorectal vs. upper_gi
cgcctagcaccttcgatgctcctgtttcagtcgcggtctcagcgggcagtggcctcctttgaagctgggattctcctgcccctcccgggcagcgcaggccaccggtgacccgggacggtctgtaaacgaccttcgcgtccccgtccccgtggaataacgcgcggcgggcatcactgcc

SEQ ID NO: 452924 - DNA, 80 bp, Homo sapiens
  chr17:7554512-7554592
  hyper
  anorectal vs. head_and_neck
cgttttgtttctagacggtttggtggggggtgaagctgcattcataccccttcctcttgttattctcccctgctctgaca

SEQ ID NO: 452925 - DNA, 34 bp, Homo sapiens; identical to SEQ ID NO: 374029
  chr17:7554793-7554827
  hyper
  anorectal vs. head_and_neck

SEQ ID NO: 452926 - DNA, 107 bp, Homo sapiens; identical to SEQ ID NO: 335458
  chr17:8901441-8901548
  hyper
  anorectal vs. upper_gi,pancreas_gallbladder

SEQ ID NO: 452927 - DNA, 200 bp, Homo sapiens
  chr17:12568526-12568726
  hyper
  anorectal vs. liver_bileduct,lung,pancreas_gallbladder, melanoma,ovary,upper_gi,breast
cgccgtgtcacatttgtccccccaaaaagcatatcctagaaaatgaaagcctttccatttccccgtggaaatgcatctaagtccagtattggagctgcgagatacagaatcgtctctgccagtgccctgagcccctcaaaccgaggggaatgcgtgggcttcggtccgtcggaagcttttcttctcaggggtccagctta

SEQ ID NO: 452928 - DNA, 382 bp, Homo sapiens
  chr17:12568791-12569173
  hyper
  anorectal vs. liver_bileduct,lung,pancreas_gallbladder, melanoma,ovary,upper_gi,breast
cggctggcgggagatcccggccgcttccctttcgccggcagaagcccggccggggaagccccggctgcgcacgcccatccccaggacctcggagctcccagcggctgccgcagccccgcgaaccacctgcaagccccgcggcgtcgcagcccttccttctttcctccgggcatccgctctttagctcgcgcccctctcccagattcccgacccctggccctgctcccgccctctgtgcctcggcggctgcggggcccgccgcaaagagttaagagccggttcccgagacggcttcggcggctccgggtccccagaccccgctcgccgctcctgattggctgagcgcctgtcagtagtaaagggtatcagatggcaaagttgg

SEQ ID NO: 452929 - DNA, 35 bp, Homo sapiens; identical to SEQ ID NO: 351894
  chr17:12569402-12569437
  hyper
  anorectal vs. liver_bileduct,lung,pancreas_gallbladder, melanoma,ovary,upper_gi,breast

SEQ ID NO: 452930 - DNA, 532 bp, Homo sapiens
  chr17:12692672-12693204
  hyper
  anorectal vs. cervical,upper_gi,pancreas_gallbladder, colorectal,ovary,sarcoma,lung,breast,prostate,uterine,melanoma, bladder_and_urothelial,lymphoid_neoplasm,myeloid_neoplasm, thyroid,non_cancer,renal,liver_bileduct
cgctgccttctcccacctccgcactccactgtccttgcaaactttggacagaggaaaggtgggcacggggcgcgaaactacaagtcccggcatgcacggcgttctccgcacaggcgcacggggaccgccgggccagccggccagccagcctgcggagactcccgggtccccgcgccggactgggactgggagcaggcagcccgggcggagcgggccggtgccgaggacggccccaggcattgctctgccccgggcattgcgcggcgcgcgtgagggggatgcggcaggaggcggcgcggcgggaggagtaggcggcggcgccctcgggagggagctgcgcgcgggccagacggcgcccggaggctccgcagtgccgccgccgtcgcccgggaggctccgcgcgggagccatgtaaccctgcggcgggctccgggctgctccgtccttccccagctcccgggctagcgcggcagcggggccacgatgaagaagcagttcaatcgcatgcgccagctggccaaccagacggtgg

SEQ ID NO: 452931 - DNA, 126 bp, Homo sapiens; identical to SEQ ID NO: 345507
  chr17:12693500-12693626
  hyper
  anorectal vs. cervical,upper_gi,pancreas_gallbladder, colorectal,ovary,sarcoma,lung,breast,prostate,uterine,melanoma, bladder_and_urothelial,lymphoid_neoplasm,myeloid_neoplasm, thyroid,non_cancer,renal,liver_bileduct

SEQ ID NO: 452932 - DNA, 362 bp, Homo sapiens
  chr17:16290077-16290439
  hyper
  anorectal vs. cervical,pancreas_gallbladder,upper_gi, liver_bileduct,colorectal
cgcgcgattttttgagatgtgagagggaattgtgcttcacggtcaccaccaggtgtcgcgacatcaggtgccgcgccgtcccgcttctgaggcgcggtggcctgagaaactggttgcagagcccgctcttcctagcctactgcccgaaaacgcagaatttggggaattggaactttggaggcgggagcgaaagacctctccttctcccgccggaaatacccctcttttgggaagcgcgcccctgccttccggaaaggaagaaacgtgatcacgccgctgcactcaagcctctgggtgatagagcgagaagaccctgtctccaaaacacaaacacacaaacaaacaaaaaggtaatgggggcc

SEQ ID NO: 452933 - DNA, 2 bp, Homo sapiens
  chr17:36105728-36105730
  hyper
  anorectal vs. pancreas_gallbladder,colorectal, liver_bileduct,upper_gi
cc

SEQ ID NO: 452934 - DNA, 93 bp, Homo sapiens
  chr17:46713841-46713934
  hyper
  anorectal vs. colorectal
cggagaattcagaggtgccagaagccgagttcctagaccccagctggattttttttttttttttttttttttttccaatttctggcggcgggc

SEQ ID NO: 452935 - DNA, 528 bp, Homo sapiens; identical to SEQ ID NO: 351984
  chr17:49021815-49022343
  hyper
  anorectal vs. liver_bileduct,pancreas_gallbladder, colorectal,upper_gi

SEQ ID NO: 452936 - DNA, 4 bp, Homo sapiens
  chr17:58216260-58216264
  hyper
  anorectal vs. head_and_neck
cgaa

SEQ ID NO: 452937 - DNA, 48 bp, Homo sapiens; identical to SEQ ID NO: 351995
  chr17:59539943-59539991
  hyper
  anorectal vs. pancreas_gallbladder

SEQ ID NO: 452938 - DNA, 160 bp, Homo sapiens; identical to SEQ ID NO: 352050
  chr18:3012406-3012566
  hyper
  anorectal vs. pancreas_gallbladder,upper_gi

SEQ ID NO: 452939 - DNA, 94 bp, Homo sapiens
  chr18:13823932-13824026
  hyper
  anorectal vs. pancreas_gallbladder,colorectal
cgaccgacccaccgacccgaccgaccaaccaaccaaccaagcaaccatccaaccattcaagagtgtgttcggggggattttcgctcggggctga

SEQ ID NO: 452940 - DNA, 113 bp, Homo sapiens
  chr18:13824102-13824215
  hyper
  anorectal vs. pancreas_gallbladder,colorectal
cggaggcgggcccggcgcgggcaggcaggaggcttaaagccccgcagagccgcagccgcctagctgggggagaggcccgtccggggctggctctgagcgccgcacggccgtcg

SEQ ID NO: 452941 - DNA, 15 bp, Homo sapiens
  chr18:13868532-13868547
  hyper
  anorectal vs. melanoma
cgggcaaccgcacaa

SEQ ID NO: 452942 - DNA, 378 bp, Homo sapiens
  chr18:25756118-25756496
  hyper
  anorectal vs. head_and_neck,liver_bileduct
cgagggtatgaaaagtacggaaggctccaggcaaaggcgcccccggggcgcatatagggcacaggcagccggacagagaaaggagcagccgcgtaacggaacttctcgcccgggggagatactaggcgtgagaggccagactcgttctacaggcaggcgctgaccggcagagactcctccgggcaagagggccagattttctttccaggtgggacgaacacagaatattgtgagggcaagagaagaagaaaaggaggcaactccagactgggataaagacaataggacagtagagcccttgagcaccgggaggcgcacgggtgcagggtggggtaaggtggaggcaagtcccgtaactaagacaccagagtgagaatt

SEQ ID NO: 452943 - DNA, 105 bp, Homo sapiens; identical to SEQ ID NO: 352078
  chr18:25756986-25757091
  hyper
  anorectal vs. head_and_neck,liver_bileduct

SEQ ID NO: 452944 - DNA, 202 bp, Homo sapiens
  chr18:25756986-25757188
  hyper
  anorectal vs. head_and_neck,liver_bileduct
ggaggcggagaggggccgagcgaagagccggaggaggcggcggcggcggcggcggcggcggaggaggaggaggcagcggcagcaccaacagcggcgcggagaaacggctccaggcagtttccacccccttcccttcccctcccctccccacccccttcttcgctgctctccgctccccgccaatggagagcgagctgatgac

SEQ ID NO: 452945 - DNA, 42 bp, Homo sapiens
  chr18:25757146-25757188
  hyper
  anorectal vs. head_and_neck,liver_bileduct
cgctgctctccgctccccgccaatggagagcgagctgatgac

SEQ ID NO: 452946 - DNA, 282 bp, Homo sapiens
  chr18:30349781-30350063
  hyper
  anorectal vs. cervical,breast,ovary,uterine, multiple_myeloma,prostate,bladder_and_urothelial,thyroid, lymphoid_neoplasm,non_cancer,lung
ggcgcatactgcatgcgggtctcgcggtcgtgctccagccacagcacggacatctggaagagcgccagctccgactccacggggggcggcagcgagtccagcagggcgcgcatctcctcgaagttgagcagcagcacatcctccaccaggtacttgttggccagcttcttggtctcctccaggccgtgcagcgcggcgatcttgcacacctgcttgtagttctgcaccgagatctggtcgttgaggaactgcacgcagagcttggtgacctgggggatgtgc

SEQ ID NO: 452947 - DNA, 122 bp, Homo sapiens
  chr18:30351074-30351196
  hyper
  anorectal vs. cervical,ovary
aacttgtgcccgaagctttgcttttcgcagttggcccagtttgggggagggggtaggaacaggggcccgaccagcgtgcggggtgtgcgaatcttagctctccaaaagctgggacccccttc

SEQ ID NO: 452948 - DNA, 295 bp, Homo sapiens
  chr18:31802381-31802676
  hyper
atcgaggcattcgggctgccccgtgcctcccgggcagcgatctaacgataaaacctgacagtgtcctggggaaaaccccacatccaccgctagcgctacattcgggctttatgccaataaggagacactgtagactatcgatcagactcgtctgctctcagagcgtgcggccgggcttccagcctggcctttaggcgcggtggcggcggtgggacacgcgccaggcgcccagagaaggacatgggacaatggcccagcccgaggacgccagacgccgccgcccgacccggggaag

SEQ ID NO: 452949 - DNA, 288 bp, Homo sapiens
  chr18:31804522-31804810
  hyper
  anorectal vs. lung
cgaggcccgcgcccgtcccggggagcggctctgccaggaaaacggcccgaccagtgcccggcgcctgggctgcgtccgagcccaccttcttccctcgtcgtcgtctcccagactaaatcccggaaagggaaagcgggatgtttgcgcccaccgcgctgtagctggtcctgacacttgcaaaatggtcagtggctcctgctcggccaggctgagtgtgtgcgtgtgtgtgagcaagggagcgagggtgtgcggtgtgcagggggtgcgctgtgtgtgcgcgcgtctccg

SEQ ID NO: 452950 - DNA, 7 bp, Homo sapiens
  chr18:31805144-31805151
  hyper
  anorectal vs. lung
gggggac

SEQ ID NO: 452951 - DNA, 891 bp, Homo sapiens
  chr18:32556625-32557516
  hyper
  anorectal vs. upper_gi,lung,colorectal, pancreas_gallbladder,ovary,liver_bileduct,breast,uterine
cgtttgcaggtaattaattcacagtgtggcggcgccttttcaagccccctctgcaagccgcgccggcctcctccctctcgagcggggtcaaaccacttagtttatttcacccgctggcactttcttccctgtcacgaattcagcctggcttcctttggcctgagacagcgtcttcaggcgggtcggctcggacctgcccagtggggcgcccacctgcacccgcacccgcacccgcacccgcgggaaggggcggcgctggccggactctctcgggtggactcccggagcggcggcggcggcggcggtggcagactgcgagtcacgtgcgacagaggaggcggagcacggcggccgggtgggtggagaaaacaaagcccccagctgtcagcagaggaaggaggcgacagcgccggagcaggtgagtcaagtgcatttaaagcggtaccgccctggcgcaccccgacaccccctgcactgaagcagtccctcccaggccaggggctggctgcgcctcctcctgccgctgaggtctgcagcccgcggggctcggagcaaccggaaccgggggtccagagtctagcaagaagttgtgcaagggtcggctaggcggtctccgggtgtgcaccccgccgctctcccgcgggccacatctctggttcggtgccccagctctgtgcaccccaggaaagtggagggagggagttggggctgccacgctggcagaagcgaagtggactggttctgaggggtgaggctggggctgtccagggtaggaacacggcgttggtgaaggaggggggctcgcgactgcgcgaccgcggcgcacgaccctccaggctctagctggggcgccggcactgagagagctgggggctctggcaggggctgcgc

SEQ ID NO: 452952 - DNA, 769 bp, Homo sapiens
  chr18:32557064-32557833
  hyper
  anorectal vs. upper_gi,liver_bileduct, pancreas_gallbladder,colorectal,lung
cggtaccgccctggcgcaccccgacaccccctgcactgaagcagtccctcccaggccaggggctggctgcgcctcctcctgccgctgaggtctgcagcccgcggggctcggagcaaccggaaccgggggtccagagtctagcaagaagttgtgcaagggtcggctaggcggtctccgggtgtgcaccccgccgctctcccgcgggccacatctctggttcggtgccccagctctgtgcaccccaggaaagtggagggagggagttggggctgccacgctggcagaagcgaagtggactggttctgaggggtgaggctggggctgtccagggtaggaacacggcgttggtgaaggaggggggctcgcgactgcgcgaccgcggcgcacgaccctccaggctctagctggggcgccggcactgagagagctgggggctctggcaggggctgcgcgcttgggggcagatcaggaagtgcagcgcgctggcgctcgcgcgcttgggagcatcccctggaccccgggcacttccccttcggcagccaccactctcccactccgacgccggccaccatccgcgctcccgggactcaggagccgggtgggtgcaaaaggaagcgggttgttattctgcgcccaagcatctcttctgcagggagccccgggagcgcagggcgagggctactcagcgacttcgcactcggcttagtgggaaattcttcggtctacccttagaagggctatgcggaagccagaaatcccacaaagagcc

SEQ ID NO: 452953 - DNA, 18 bp, Homo sapiens
  chr18:32557864-32557882
  hyper
  anorectal vs. upper_gi,liver_bileduct, pancreas_gallbladder,colorectal,lung
tctgaacctggggcgctc

SEQ ID NO: 452954 - DNA, 45 bp, Homo sapiens
  chr18:32557884-32557929
  hyper
  anorectal vs. upper_gi,liver_bileduct, pancreas_gallbladder,colorectal,lung
taaagctgattttcagaccccaaaagggctagtgggtttggtcac

SEQ ID NO: 452955 - DNA, 291 bp, Homo sapiens
  chr18:32557542-32557833
  hyper
  anorectal vs. upper_gi,pancreas_gallbladder,colorectal, lung,liver_bileduct,renal,breast,multiple_myeloma,non_cancer, prostate,myeloid_neoplasm
cgcgctggcgctcgcgcgcttgggagcatcccctggaccccgggcacttccccttcggcagccaccactctcccactccgacgccggccaccatccgcgctcccgggactcaggagccgggtgggtgcaaaaggaagcgggttgttattctgcgcccaagcatctcttctgcagggagccccgggagcgcagggcgagggctactcagcgacttcgcactcggcttagtgggaaattcttcggtctacccttagaagggctatgcggaagccagaaatcccacaaagagcc

SEQ ID NO: 452956 - DNA, 18 bp, Homo sapiens
  chr18:32557864-32557882
  hyper
  anorectal vs. upper_gi,pancreas_gallbladder,colorectal, lung,liver_bileduct,renal,breast,multiple_myeloma,non_cancer, prostate,myeloid_neoplasm
tctgaacctggggcgctc

SEQ ID NO: 452957 - DNA, 45 bp, Homo sapiens; identical to SEQ ID NO: 452954
  chr18:32557884-32557929
  hyper
  anorectal vs. upper_gi,pancreas_gallbladder,colorectal, lung,liver_bileduct,renal,breast,multiple_myeloma,non_cancer, prostate,myeloid_neoplasm

SEQ ID NO: 452958 - DNA, 445 bp, Homo sapiens; identical to SEQ ID NO: 345550
  chr18:32558003-32558448
  hyper
  anorectal vs. upper_gi,pancreas_gallbladder,colorectal, lung,liver_bileduct,renal,breast,multiple_myeloma,non_cancer, prostate,myeloid_neoplasm

SEQ ID NO: 452959 - DNA, 80 bp, Homo sapiens
  chr18:44335955-44336035
  hyper
  anorectal vs. sarcoma,myeloid_neoplasm
cgatacgattttgagccctccgaccccggagtccaaacaaatggccatagaactgtgggtctggaggacaccgctccgat

SEQ ID NO: 452960 - DNA, 14 bp, Homo sapiens
  chr18:44337138-44337152
  hyper
  anorectal vs. thyroid,myeloid_neoplasm,sarcoma, non_cancer,breast,prostate,renal,melanoma, bladder_and_urothelial,multiple_myeloma,ovary
caggggctgggcgc

SEQ ID NO: 452961 - DNA, 2 bp, Homo sapiens
  chr18:44781241-44781243
  hyper
  anorectal vs. sarcoma
tc

SEQ ID NO: 452962 - DNA, 23 bp, Homo sapiens
  chr18:45275529-45275552
  hyper
  anorectal vs. cervical,colorectal
cggtgtaattgctctaaattacc

SEQ ID NO: 452963 - DNA, 78 bp, Homo sapiens; identical to SEQ ID NO: 361261
  chr18:45275733-45275811
  hyper
  anorectal vs. cervical,colorectal

SEQ ID NO: 452964 - DNA, 196 bp, Homo sapiens
  chr18:47339411-47339607
  hyper
  anorectal vs. liver_bileduct,upper_gi, pancreas_gallbladder,colorectal,cervical,renal, lymphoid_neoplasm,multiple_myeloma,non_cancer, bladder_and_urothelial,melanoma,lung,breast
cgattcacccggggagccctgaccaccgaggccgagcggcgggctcctgtgcgcagctgccccgcagcaggcgcccgcggcctatggcgccgccccattttttctaatacttggactcgaactagtggggtcactgttaggcgaagaaaggaatgacctccaaggtcacatgcaagcaaactttggtctcaactaa

SEQ ID NO: 452965 - DNA, 401 bp, Homo sapiens
  chr18:47339758-47340159
  hyper
  anorectal vs. liver_bileduct,upper_gi, pancreas_gallbladder,colorectal,cervical,renal, lymphoid_neoplasm,multiple_myeloma,non_cancer, bladder_and_urothelial,melanoma,lung,breast
gcggcggccggaagcggaggcctggcctggggagggcaggaccccgaggggcgaggagaggaggagggggctgcgctcacctcggagcagagccatggcggctgctgggtcgtcggcggcgcgggtctgtggtgtgggggacgctgagcggccgctcgcaatcacccagatttcaagagcgtgggtggcgccccgagagccacgcccctgccctttcacctacttcctggggctccttggcggggtcccagcgtaagatggtcctaccccacgcgtagcgctgcccgcctcaccccagcccgagggagcccaggggacggggctcggatagaccacaacgcgccttgagagcggactctttcctcacatcctcatttttagattttctccgtttccaaacc

SEQ ID NO: 452966 - DNA, 50 bp, Homo sapiens
  chr18:55104759-55104809
  hyper
  anorectal vs. liver_bileduct,upper_gi, pancreas_gallbladder,ovary,sarcoma
cgcggggaaccggcggccaggatacaacagcgctcctggagcccatctct

SEQ ID NO: 452967 - DNA, 280 bp, Homo sapiens
  chr18:55105185-55105465
  hyper
  anorectal vs. liver_bileduct,upper_gi, pancreas_gallbladder,ovary,sarcoma
gcccgcgggaggggacgggtagaggcgcgggttacattgttctggagccggctcggctctttgtgcctcctctagcggccaagctgcgaggtacagccctctattgttctaggagcacagaaacctcctgtgtgggcggcgggtgcgcgagctagagggaaagatgcagtagttactgcgactggcacgcagttgcgcgcttttgtgcgcacggaccccgcgcggtgtgcgtggcgactgcgctgcccctaggagcaagccacgggcccagaggggcaaa

SEQ ID NO: 452968 - DNA, 255 bp, Homo sapiens
  chr18:55105210-55105465
  hyper
  anorectal vs. pancreas_gallbladder,upper_gi,ovary, sarcoma,liver_bileduct,myeloid_neoplasm,prostate, bladder_and_urothelial,uterine,non_cancer,cervical,colorectal
cgcgggttacattgttctggagccggctcggctctttgtgcctcctctagcggccaagctgcgaggtacagccctctattgttctaggagcacagaaacctcctgtgtgggcggcgggtgcgcgagctagagggaaagatgcagtagttactgcgactggcacgcagttgcgcgcttttgtgcgcacggaccccgcgcggtgtgcgtggcgactgcgctgcccctaggagcaagccacgggcccagaggggcaaa

SEQ ID NO: 452969 - DNA, 57 bp, Homo sapiens; identical to SEQ ID NO: 347514
  chr18:55106090-55106147
  hyper
  anorectal vs. pancreas_gallbladder,upper_gi,ovary, sarcoma,liver_bileduct,myeloid_neoplasm,prostate, bladder_and_urothelial,uterine,non_cancer,cervical,colorectal

SEQ ID NO: 452970 - DNA, 3 bp, Homo sapiens
  chr18:56932419-56932422
  hyper
  anorectal vs. myeloid_neoplasm,sarcoma,thyroid,prostate
ttc

SEQ ID NO: 452971 - DNA, 138 bp, Homo sapiens
  chr18:70210281-70210419
  hyper
  anorectal vs. head_and_neck,melanoma
cgaaggaccgattccaacgacggaatcccaggcttgggttattctccagctctggtttccagaccacggggattctctctttctcagcggggcggcagcccctgcaggtttctgcgaacttacgcgcccgtctgcact

SEQ ID NO: 452972 - DNA, 53 bp, Homo sapiens
  chr18:70210508-70210561
  hyper
  anorectal vs. head_and_neck,melanoma
cacagcctcccattaactcttccagtattctttctaagaacagagaagttggc

SEQ ID NO: 452973 - DNA, 65 bp, Homo sapiens; identical to SEQ ID NO: 352116
  chr18:70211724-70211789
  hyper
  anorectal vs. head_and_neck,breast, bladder_and_urothelial,melanoma,prostate

SEQ ID NO: 452974 - DNA, 116 bp, Homo sapiens; identical to SEQ ID NO: 345560
  chr19:1979018-1979134
  hyper
  anorectal vs. liver_bileduct,lymphoid_neoplasm,melanoma, renal

SEQ ID NO: 452975 - DNA, 601 bp, Homo sapiens; identical to SEQ ID NO: 335900
  chr19:2461998-2462599
  hyper
  anorectal vs. pancreas_gallbladder,upper_gi

SEQ ID NO: 452976 - DNA, 73 bp, Homo sapiens
  chr19:2702445-2702518
  hyper
  anorectal vs. melanoma,ovary,bladder_and_urothelial, breast,multiple_myeloma,uterine,prostate,lung,non_cancer, myeloid_neoplasm,sarcoma,thyroid,liver_bileduct,renal
cgaccccctaagcgcagccccgtccccaattccaaccccagcctccagttgcagcccgggtccccagacccag

SEQ ID NO: 452977 - DNA, 453 bp, Homo sapiens; identical to SEQ ID NO: 347529
  chr19:2702553-2703006
  hyper
  anorectal vs. melanoma,ovary,bladder_and_urothelial, breast,multiple_myeloma,uterine,prostate,lung,non_cancer, myeloid_neoplasm,sarcoma,thyroid,liver_bileduct,renal

SEQ ID NO: 452978 - DNA, 183 bp, Homo sapiens; identical to SEQ ID NO: 374590
  chr19:10443523-10443706
  hyper
  anorectal vs. head_and_neck

SEQ ID NO: 452979 - DNA, 39 bp, Homo sapiens
  chr19:10616220-10616259
  hyper
  anorectal vs. cervical,upper_gi,pancreas_gallbladder
cgcgagactacgtctcgaaaggaaaagaaaaaaaaaaaa

SEQ ID NO: 452980 - DNA, 116 bp, Homo sapiens
  chr19:10691764-10691880
  hyper
  anorectal vs. lymphoid_neoplasm
cgctcaatcatgaaacagcctttgcagtcagccaatggctgcaatactggccgtgatcagcagatggtgagcgagcgcttatttcaaaacgggctgcgattctcttaagtccccac

SEQ ID NO: 452981 - DNA, 166 bp, Homo sapiens
  chr19:11805261-11805427
  hyper
  anorectal vs. lung
cggaccgtagctccttccacgcatgaaccccgcacacgagtcgggattccccccatgaccctcccgtggcccccgcacaatctggagagacgcggggctgcgggcgcggagctgcccagagaggactcctgcccgggcccgcagtcgccgcgaagggacgggacag

SEQ ID NO: 452982 - DNA, 369 bp, Homo sapiens; identical to SEQ ID NO: 347539
  chr19:11805597-11805966
  hyper
  anorectal vs. lung

SEQ ID NO: 452983 - DNA, 161 bp, Homo sapiens
  chr19:11909173-11909334
  hyper
  anorectal vs. colorectal,pancreas_gallbladder,breast, upper_gi,renal,prostate,myeloid_neoplasm,uterine,ovary,lung, thyroid,sarcoma,bladder_and_urothelial,non_cancer, multiple_myeloma,cervical
cgaccagggcgcagggagtgagcttagccttagaaaggctgtagctaggattaatcagccgggctctgcagggctccgttacccagggcttaccctgtcactcagggctgaggggcggagcctggaaccccatccaatcaggggccctgggacggggccct

SEQ ID NO: 452984 - DNA, 61 bp, Homo sapiens
  chr19:11909732-11909793
  hyper
  anorectal vs. colorectal,pancreas_gallbladder,breast, upper_gi,renal,prostate,myeloid_neoplasm,uterine,ovary,lung, thyroid,sarcoma,bladder_and_urothelial,non_cancer, multiple_myeloma,cervical
ggcgtcctgtcccgtccctacgcggcgactgcggccccggccccggagtcctctctgggca

SEQ ID NO: 452985 - DNA, 7 bp, Homo sapiens
  chr19:11909951-11909958
  hyper
  anorectal vs. colorectal,pancreas_gallbladder,breast, upper_gi,renal,prostate,myeloid_neoplasm,uterine,ovary,lung, thyroid,sarcoma,bladder_and_urothelial,non_cancer, multiple_myeloma,cervical
aacaccc

SEQ ID NO: 452986 - DNA, 50 bp, Homo sapiens
  chr19:11959378-11959428
  hyper
  anorectal vs. ovary,uterine,bladder_and_urothelial, myeloid_neoplasm,non_cancer,renal,breast,prostate, lymphoid_neoplasm
cgagtgcaggaagcagctcgtgtaagcttagagaagctgttgctagaatc

SEQ ID NO: 452987 - DNA, 255 bp, Homo sapiens
  chr19:12075818-12076073
  hyper
  anorectal vs. colorectal,ovary,bladder_and_urothelial, upper_gi,prostate,myeloid_neoplasm,multiple_myeloma,thyroid, pancreas_gallbladder,uterine,breast,non_cancer, lymphoid_neoplasm,renal,lung,sarcoma
cccattgtttatccaggcacagagtgggtcgcattcctgtcctcacctttgtccttgcgcagccggtggttgatatccgctgtatccatccccgagagggacctggtacctctacccaggtttctatcgctctgtctcctgcgctgtgcccttctgtagtcacaggagctgtagagaggaccccaggacatctgaaagccaggaaatggtgcgtgtgcatagccggttgtcccgagacggggtagaggctgcctg

SEQ ID NO: 452988 - DNA, 31 bp, Homo sapiens
  chr19:12163025-12163056
  hyper
  anorectal vs. breast,sarcoma,bladder_and_urothelial, multiple_myeloma,ovary
cgggattgcttactccagacttcgcggggtt

SEQ ID NO: 452989 - DNA, 118 bp, Homo sapiens
  chr19:12163331-12163449
  hyper
  anorectal vs. breast,sarcoma,bladder_and_urothelial, multiple_myeloma,ovary
aatctggggagacgcggggctgcgggcgcggagctgctcagagagggagccggggccggggccgcagtcgccgcgcagggaccggacaggacgcccggggtcccggctgccggcccag

SEQ ID NO: 452990 - DNA, 16 bp, Homo sapiens
  chr19:12203656-12203672
  hyper
  anorectal vs. multiple_myeloma,breast,prostate,sarcoma, renal,myeloid_neoplasm,non_cancer,thyroid,uterine, bladder_and_urothelial
ctgaggtcaggagttc

SEQ ID NO: 452991 - DNA, 227 bp, Homo sapiens
  chr19:12551198-12551425
  hyper
  anorectal vs. liver_bileduct
cgccaaccaggttgaagaccccacgagggagccctctcagcagaatgcggtttcttcacctcctgtcccaggattcacccctcacttccccaccaaccaaggacgctacacccagccgcccccgtccagaccccaaatccctcagggaggcggatctggggtgtcctcccctctcctcctgttaaaccgtttctgctgcagccctcggcgtctcggtgcagtgagtc

SEQ ID NO: 452992 - DNA, 391 bp, Homo sapiens; identical to SEQ ID NO: 352209
  chr19:12551485-12551876
  hyper
  anorectal vs. liver_bileduct

SEQ ID NO: 452993 - DNA, 262 bp, Homo sapiens
  chr19:19843330-19843592
  hyper
  anorectal vs. melanoma,uterine,breast, bladder_and_urothelial,ovary,sarcoma,prostate,lung, lymphoid_neoplasm
aggaacctgaccccggcagcaaggacctagccaggcttcggttctcacaagtgaggaaacgcacccgtggattcatcgtaaggtttccaaccaagtggtttcttaaacgcacaaaccccacagaccgagatgggatctccccaggaccctcccgctgtcaccgaacaatccggggagacgcggggctgcgggcgcagagctgcccatagagggctccaggaccgggggccgaggtcgccccgcggggacgggacaggacgct

SEQ ID NO: 452994 - DNA, 47 bp, Homo sapiens; identical to SEQ ID NO: 352250
  chr19:19844044-19844091
  hyper
  anorectal vs. melanoma,uterine,breast, bladder_and_urothelial,ovary,sarcoma,prostate,lung, lymphoid_neoplasm

SEQ ID NO: 452995 - DNA, 694 bp, Homo sapiens
  chr19:19976556-19977250
  hyper
  anorectal vs. liver_bileduct,bladder_and_urothelial,lung, breast,colorectal,pancreas_gallbladder,sarcoma,prostate,renal, ovary,upper_gi,non_cancer,multiple_myeloma
cggctggggaggcggggccttaggcattatccaatgagggacgctgggccggaaaccgtccaatcaggcacgcagctggagcgaaccacatggtttctgggggcctttgtttctcgctgcagcgggagctccaggtttatcctcagtgttctgtgtcctgtgcttatagaggcccgtcctctgtggccgtgtgacctgcaagtattgggagagccacagctaaaccccgggacccctggaagcctagaaatggtgagtgccgggtccaacgtcccgagagaggggagaggctgtttggaacggtgggaagtggctctggcgggactctgcttcctcacagtcagctccacaatctgccgccggagttctccctgcccagctcggcctcagtccccttcagccataagatggcggctgcggtgacatccggggcccggcacagtgattgtgccctggcctggagccctctttcagcagctctgcacccgcagcaccgcgtctctcccagatcatgcaaggaccacgggagggtcgtcaggggagaatcctgactcggttccctgcgggttcatgaatgggaagagctttggtccgtgaggttgttagaaacaagcgcttggtgccgcaaaacaacacaaaacaaaaaactacccagcacttagaaaatttcacaggaaggcatatttacttctga

SEQ ID NO: 452996 - DNA, 35 bp, Homo sapiens; identical to SEQ ID NO: 345584
  chr19:19977294-19977329
  hyper
  anorectal vs. liver_bileduct,bladder_and_urothelial,lung, breast,colorectal,pancreas_gallbladder,sarcoma,prostate,renal, ovary,upper_gi,non_cancer,multiple_myeloma

SEQ ID NO: 452997 - DNA, 69 bp, Homo sapiens; identical to SEQ ID NO: 347569
  chr19:20011652-20011721
  hyper
  anorectal vs. bladder_and_urothelial,melanoma,breast, pancreas_gallbladder,sarcoma,lung,renal,ovary

SEQ ID NO: 452998 - DNA, 47 bp, Homo sapiens
  chr19:20011723-20011770
  hyper
  anorectal vs. bladder_and_urothelial,melanoma,breast, pancreas_gallbladder,sarcoma,lung,renal,ovary
acagggcggcttctggtttggcgggtcctttgtctctcggtgcagcc

SEQ ID NO: 452999 - DNA, 18 bp, Homo sapiens
  chr19:22018891-22018909
  hyper
  anorectal vs. bladder_and_urothelial,melanoma,prostate, breast,multiple_myeloma,uterine
cgcaggtcacagagccac

SEQ ID NO: 453000 - DNA, 61 bp, Homo sapiens
  chr19:22019028-22019089
  hyper
  anorectal vs. bladder_and_urothelial,melanoma,prostate, breast,multiple_myeloma,uterine
ccgtgcctgattggacggtttccagcccagcgtccctgattggataacttctaaggtcctg

SEQ ID NO: 453001 - DNA, 130 bp, Homo sapiens
  chr19:23432833-23432963
  hyper
  anorectal vs. bladder_and_urothelial,colorectal, liver_bileduct,lung,breast,uterine
cggggaagagacaagacgcccgggggccggctgtcagcgaagccgccatcttatggctgaaggggactgaggcccagctgggcaaggagaactcagggcgcagtttgtggagatgactgcggggaggccc

SEQ ID NO: 453002 - DNA, 121 bp, Homo sapiens
  chr19:23433023-23433144
  hyper
  anorectal vs. bladder_and_urothelial,colorectal, liver_bileduct,lung,breast,uterine
cggagccgccactctcaccatttctaggcttccaggggaggccctggcgtcttagctgtggatctcccaatgcttgcaggtcagagggccacagaggctgggcctctaagagcaggggaca

SEQ ID NO: 453003 - DNA, 118 bp, Homo sapiens; identical to SEQ ID NO: 347577
  chr19:23433296-23433414
  hyper
  anorectal vs. bladder_and_urothelial,colorectal, liver_bileduct,lung,breast,uterine

SEQ ID NO: 453004 - DNA, 106 bp, Homo sapiens
  chr19:23456510-23456616
  hyper
  anorectal vs. liver_bileduct,bladder_and_urothelial, breast,colorectal,lung
cgtctcaaacaaacaaacatgtttaacaagagactgggagtctcacctgccacagctccttctacgcacacacgagtcggaattctgccctaatgacccgcctggc

SEQ ID NO: 453005 - DNA, 216 bp, Homo sapiens; identical to SEQ ID NO: 347579
  chr19:23456881-23457097
  hyper
  anorectal vs. liver_bileduct,bladder_and_urothelial, breast,colorectal,lung

SEQ ID NO: 453006 - DNA, 39 bp, Homo sapiens
  chr19:23577711-23577750
  hyper
  anorectal vs. liver_bileduct,pancreas_gallbladder, colorectal,upper_gi,lung
cgcggtgacgcccataaatttttaatagaaaaaaagagg

SEQ ID NO: 453007 - DNA, 68 bp, Homo sapiens; identical to SEQ ID NO: 336059
  chr19:23578240-23578308
  hyper
  anorectal vs. liver_bileduct

SEQ ID NO: 453008 - DNA, 702 bp, Homo sapiens
  chr19:24216103-24216805
  hyper
  anorectal vs. liver_bileduct,bladder_and_urothelial, breast,lung,sarcoma,ovary,colorectal,prostate, pancreas_gallbladder,uterine,renal,non_cancer,multiple_myeloma, lymphoid_neoplasm,thyroid,cervical,myeloid_neoplasm
cgcactaatgctgaacggggcgggggcagggggtgggggtgggagtggtatggggagagtgccggtccttatccaatccttggcgctggagcggcaaccgcccaatcaagcgcgcagttgaagaggagtgcatggtttccggcatttggctgggcctttgtctctcgctcccaccagagcttggaatccgtctctgctcttctgcattctccacctcgggagcccctggggactctgtgacggcctctgttgccctgtgatctgcaggtccggagagacgcacagctaagatgtcaggacatcctggaagctgggaaagggtgagtgtgcggggttgggcatcccgaaaggagagagcgggctgtgaaaccggcgggactgccttcgtcaccgctcccgggtttccgacctgaggtccctgctggcgcagttcagccccaggcccctctggccgcaagatggcggctgggcccgcagccgggatccccgcgttcagccccgtccctgcggcgcccagtctggagctccctgggcagctctgcatgcagccccgagtatttcccagattgttcagggatgccaggcggatcatcagggcggaatcctgacttggtgtgtgcgtggcaggagctgcggcaggtggggctcccgagtctcttttcttaaacattttgtttgtttgagacggagtcttgccctgtc

SEQ ID NO: 453009 - DNA, 770 bp, Homo sapiens; identical to SEQ ID NO: 336063
  chr19:28284358-28285128
  hyper
  anorectal vs. liver_bileduct,lymphoid_neoplasm, pancreas_gallbladder,colorectal,lung

SEQ ID NO: 453010 - DNA, 13 bp, Homo sapiens
  chr19:30019101-30019114
  hyper
  anorectal vs. bladder_and_urothelial
cggcaggtgtgca

SEQ ID NO: 453011 - DNA, 4 bp, Homo sapiens
  chr19:36909065-36909069
  hyper
  anorectal vs. sarcoma,bladder_and_urothelial,prostate, breast,cervical,myeloid_neoplasm,lymphoid_neoplasm,ovary,renal, melanoma,multiple_myeloma,non_cancer,thyroid,lung,uterine
cgcc

SEQ ID NO: 453012 - DNA, 105 bp, Homo sapiens; identical to SEQ ID NO: 347589
  chr19:37096594-37096699
  hyper
  anorectal vs. breast,uterine

SEQ ID NO: 453013 - DNA, 4 bp, Homo sapiens
  chr19:37288206-37288210
  hyper
  anorectal vs. sarcoma
cgtg

SEQ ID NO: 453014 - DNA, 3 bp, Homo sapiens
  chr19:37288807-37288810
  hyper
  anorectal vs. sarcoma
acc

SEQ ID NO: 453015 - DNA, 156 bp, Homo sapiens; identical to SEQ ID NO: 352290
  chr19:37329462-37329618
  hyper
  anorectal vs. breast,bladder_and_urothelial,lung

SEQ ID NO: 453016 - DNA, 3 bp, Homo sapiens
  chr19:37341258-37341261
  hyper
  anorectal vs. breast,lung,liver_bileduct,uterine, melanoma,bladder_and_urothelial,prostate,ovary,multiple_myeloma, cervical,head_and_neck,myeloid_neoplasm,non_cancer, pancreas_gallbladder
ggc

SEQ ID NO: 453017 - DNA, 142 bp, Homo sapiens; identical to SEQ ID NO: 347590
  chr19:37342189-37342331
  hyper
  anorectal vs. breast,lung

SEQ ID NO: 453018 - DNA, 42 bp, Homo sapiens
  chr19:37463952-37463994
  hyper
  anorectal vs. bladder_and_urothelial,breast, myeloid_neoplasm,ovary,prostate,renal,thyroid
cggcttcactggaggcggggaactggacatgactgtgagcgc

SEQ ID NO: 453019 - DNA, 296 bp, Homo sapiens
  chr19:37568994-37569290
  hyper
  anorectal vs. liver_bileduct,bladder_and_urothelial, breast,lung,uterine,sarcoma,colorectal,prostate, pancreas_gallbladder,ovary
cgcacctgcctggccggcgggtcccaccctctctcctgccaggggtagaccctgggaccactcagctcgctctcgcaggccctgagcgtctgacgcctgcgcactgagcgcgggcgggcgggcactcccagaaacctccggggcgctgcaggcgggacaagcaggttccacaggccgagcccacgagcccctcgaggggtgagcggcccgggcctcctggcgttctggccggctagccaagcgctggactacatttcccagaggcacggcgtccggagcgctggactacatttccc

SEQ ID NO: 453020 - DNA, 182 bp, Homo sapiens; identical to SEQ ID NO: 345591
  chr19:37569554-37569736
  hyper
  anorectal vs. liver_bileduct,bladder_and_urothelial, breast,lung,uterine,sarcoma,colorectal,prostate, pancreas_gallbladder,ovary

SEQ ID NO: 453021 - DNA, 101 bp, Homo sapiens
  chr19:37663394-37663495
  hyper
  anorectal vs. pancreas_gallbladder, bladder_and_urothelial,breast
cgtcacaatcaacaacggacgccacagaaccccatcaccgaagcctgaaaccgcaatcactaactccacaggcaacctcgacaccccctattactggctcc

SEQ ID NO: 453022 - DNA, 52 bp, Homo sapiens; identical to SEQ ID NO: 361567
  chr19:37663804-37663856
  hyper
  anorectal vs. pancreas_gallbladder, bladder_and_urothelial,breast

SEQ ID NO: 453023 - DNA, 7 bp, Homo sapiens
  chr19:37959780-37959787
  hyper
  anorectal vs. prostate,breast,melanoma,uterine
cgctccc

SEQ ID NO: 453024 - DNA, 38 bp, Homo sapiens
  chr19:38182720-38182758
  hyper
  anorectal vs. sarcoma,breast,prostate,myeloid_neoplasm, ovary,multiple_myeloma,uterine,non_cancer, bladder_and_urothelial,thyroid,melanoma,cervical,renal
cgagtaaactgacgtcctggaagaagcacccttatttt

SEQ ID NO: 453025 - DNA, 188 bp, Homo sapiens; identical to SEQ ID NO: 352300
  chr19:38210751-38210939
  hyper
  anorectal vs. bladder_and_urothelial,ovary,colorectal, sarcoma,breast,uterine,lung,prostate

SEQ ID NO: 453026 - DNA, 989 bp, Homo sapiens; identical to SEQ ID NO: 336133
  chr19:40561486-40562475
  hyper
  anorectal vs. pancreas_gallbladder,upper_gi

SEQ ID NO: 453027 - DNA, 359 bp, Homo sapiens; identical to SEQ ID NO: 336145
  chr19:41190162-41190521
  hyper
  anorectal vs. liver_bileduct

SEQ ID NO: 453028 - DNA, 76 bp, Homo sapiens
  chr19:42927302-42927378
  hyper
  anorectal vs. head_and_neck
cgggaaccctggtccacgaagctcgcattccggactctgctcccaagccgatccgggcgtcagctagtccctgtgc

SEQ ID NO: 453029 - DNA, 248 bp, Homo sapiens
  chr19:42927478-42927726
  hyper
  anorectal vs. head_and_neck
ccctgtggcagtgggccagtccacgctgtccccactgccccgtaggatgtacgaggttccttccgggctgctgccggtctccgcgcgctcacctttggccttgtcttttcgccaccgccggcgaccgtggctccttgagccctctttggcattcttcgaggccggggccatagcggcctcggcgggctccgttcccccggccaactccatcaattccccgcggtcctcccgcgggggccaattccagc

SEQ ID NO: 453030 - DNA, 13 bp, Homo sapiens
  chr19:44488115-44488128
  hyper
  anorectal vs. pancreas_gallbladder,head_and_neck, liver_bileduct,lung,breast,upper_gi
cgaaacgcctgcg

SEQ ID NO: 453031 - DNA, 270 bp, Homo sapiens
  chr19:44529438-44529708
  hyper
  anorectal vs. liver_bileduct,upper_gi
agtggagtccacacgctctgtggaggctcgagcacttccggtccccaactgtgacgttgctatttcatttaccacagtagtttgagtcatttccacatcttgcgagtccttccgaacgagtctcctttccttggggctcgcaaccacccaatgatcgattcaggagaaaagaagcctgggcggagagcagaggtttggaggggcgcgggcggggattgccgttccagtcagctgagccttctggcgtcggggggctctgctagggtctca

SEQ ID NO: 453032 - DNA, 48 bp, Homo sapiens; identical to SEQ ID NO: 347605
  chr19:44529774-44529822
  hyper
  anorectal vs. liver_bileduct,upper_gi

SEQ ID NO: 453033 - DNA, 68 bp, Homo sapiens; identical to SEQ ID NO: 345595
  chr19:44711963-44712031
  hyper
  anorectal vs. liver_bileduct,pancreas_gallbladder, colorectal,upper_gi,prostate,myeloid_neoplasm,multiple_myeloma, renal,melanoma,non_cancer,thyroid,cervical,sarcoma,lung, bladder_and_urothelial,uterine

SEQ ID NO: 453034 - DNA, 57 bp, Homo sapiens
  chr19:46929939-46929996
  hyper
  anorectal vs. ovary,multiple_myeloma,uterine
cgttcctcctgggtctgcgtgagttttcttcaactccagtaagagatctgcaaaacc

SEQ ID NO: 453035 - DNA, 219 bp, Homo sapiens
  chr19:50553779-50553998
  hyper
  anorectal vs. bladder_and_urothelial
cggctcctggccacgccctaaccccacccccgctgcctctaaacccgtccccacccctgcagcctcacaggctgccgtcagattctcaagcccctattcctctcggtggcctaaatccccaactgctcggggccacttttcaggccaaaatgggcccaaaatggggagggcaagtgatgaatgtcactagacagtggggccctcaaggacctggcaaat

SEQ ID NO: 453036 - DNA, 78 bp, Homo sapiens
  chr19:52531282-52531360
  hyper
  anorectal vs. bladder_and_urothelial,lymphoid_neoplasm, breast,uterine
cgtaaagggtgactcacaagggccccagacccagacagagtcggactcgtcgctgatttcctcagactcttcatccct

SEQ ID NO: 453037 - DNA, 208 bp, Homo sapiens; identical to SEQ ID NO: 345609
  chr19:52531884-52532092
  hyper
  anorectal vs. bladder_and_urothelial,lymphoid_neoplasm, breast,uterine

SEQ ID NO: 453038 - DNA, 316 bp, Homo sapiens
  chr19:52800378-52800694
  hyper
  anorectal vs. cervical,lung,breast,head_and_neck,sarcoma, prostate,ovary,uterine,bladder_and_urothelial,renal, pancreas_gallbladder
cgcccccgcccccgccccgctcggacccctccgctgcgcgcgcagtttcccacaaacccggaagcggatcgcgtggagtgaaggtcacgccgcggcgcgtgagtttccctttgtgtaaattaatctgcgcttcccaactcccccgcgcttctgtacccgggatctgaggggccacacagaccttgaaatcctcgcaccgctccctctaccccgaccaaattcaggcgtctccgtgagagtcaggcggtcgcttccctgtgtgtttaaatcgctcggcggcgggtcctgtcccccgtccttctgccacagggccatg

SEQ ID NO: 453039 - DNA, 89 bp, Homo sapiens; identical to SEQ ID NO: 352391
  chr19:52800915-52801004
  hyper
  anorectal vs. cervical,lung,breast,head_and_neck,sarcoma, prostate,ovary,uterine,bladder_and_urothelial,renal, pancreas_gallbladder

SEQ ID NO: 453040 - DNA, 8 bp, Homo sapiens
  chr19:52839404-52839412
  hyper
  anorectal vs. bladder_and_urothelial,sarcoma,ovary, breast,prostate,renal,thyroid,uterine,myeloid_neoplasm
cggaaaac

SEQ ID NO: 453041 - DNA, 1 bp, Homo sapiens
  chr19:53073241-53073242
  hyper
  anorectal vs. bladder_and_urothelial,sarcoma
c

SEQ ID NO: 453042 - DNA, 264 bp, Homo sapiens
  chr19:53104083-53104347
  hyper
  anorectal vs. colorectal,pancreas_gallbladder,ovary, breast,bladder_and_urothelial
cgctcctccctggcctgagcactccgtcccgcatcccaggcggtggccctagggaagtctctgaagctgagcacagggtggactctgcccccaccgccgacccgccctccccgaccccgagtgaatggagaatagaaagggagaggatttctgttctgtcctgtgggccctcagtatgaaatcgtagttctgcccaggcaggactttgcatttcacattctagtttgcatccccgttccagacaattccagggcttttgactca

SEQ ID NO: 453043 - DNA, 62 bp, Homo sapiens; identical to SEQ ID NO: 352393
  chr19:53105086-53105148
  hyper
  anorectal vs. pancreas_gallbladder

SEQ ID NO: 453044 - DNA, 61 bp, Homo sapiens
  chr19:53141353-53141414
  hyper
  anorectal vs. bladder_and_urothelial,ovary,breast, pancreas_gallbladder,prostate,renal,uterine,lung,non_cancer, myeloid_neoplasm,thyroid,sarcoma,cervical,colorectal,melanoma, upper_gi,multiple_myeloma,lymphoid_neoplasm
gccctacagcagaaagaccggggacagcccagcctcagggcgactttaaacccaaaaggaa

SEQ ID NO: 453045 - DNA, 819 bp, Homo sapiens
  chr19:53237625-53238444
  hyper
  anorectal vs. pancreas_gallbladder,colorectal,lung,ovary, bladder_and_urothelial,breast,upper_gi,uterine,melanoma, prostate,sarcoma
cggaggagcgcattttccacgccctggagctccgcaggcaagaataccccgtgccgcaggacaggcccctgggacctccccagtgcaggttcaatgaaagcggtgactgcggaggggagacctggggagcagcaggccccggcatgaggaggaaggtgcggggcggggggggggggcgcgacggcgccttaggaccaggatggggtctgcaggatcccaggacctggcagaggactcggcctccccgggactggggctgcggcgcggcgctcccggggctgaggagggggaggctgggaggcgccctgggcaagaatccacatcgcgggtgaagactttaaaaagcgcggggcgcgaggagtcagaacaaggttttcagcaggaaaactacgcaacagaaagtgtatacattgacctatagcagaaagaccggggacgagaccagcctcaggacgactttaaacccaaaaggaagcgaccctcgggctctcacggggatgtctcaatttgctctgggcaaaggaagacgccggagaatttccaggtctgtggggaccccacgtcccagggacagaagccctgggaacctagttagcgcagacttaatacaacacagagcaaaactcaccgcggcgatatgacctacactccacccgatccgcttccgggtttgcgttaatctgcgcgcgcaggacaaaagccaggcctgggcgggaagtgggaggtaggcggggcctgggcgaggtaggggcggggcgcgaggcggagagaccttgccttttagaaccggcagagggcagggccggggcgggatctgcg

SEQ ID NO: 453046 - DNA, 273 bp, Homo sapiens; identical to SEQ ID NO: 352397
  chr19:53400792-53401065
  hyper
  anorectal vs. upper_gi,pancreas_gallbladder,colorectal, breast,renal,bladder_and_urothelial,lung,myeloid_neoplasm, sarcoma,uterine

SEQ ID NO: 453047 - DNA, 352 bp, Homo sapiens
  chr19:53445359-53445711
  hyper
  anorectal vs. upper_gi,colorectal,lung,ovary,breast, bladder_and_urothelial,prostate
cgcgggctcaggagaaacggtgattacggagggaagacctggggagcataagggcccggcacgaggagggaggtggggggcgacggcgccttaagacaagactgggaggcgcccagggcgggaatccgcctcgcggtaaggactttaaaaagtgcgggttgggaggagtcagaaaaaagttttgagcaggaaaactacgcgatgggaagtgtatacgttaccctatagcagaaagattcgggacgggaccggtctatggtgactttaaacccaaaaggaagcgacccccagactctcacggggacttctcaatttgctctgggtaaagaaagacggaggagaacttccaggt

SEQ ID NO: 453048 - DNA, 231 bp, Homo sapiens; identical to SEQ ID NO: 352399
  chr19:53445822-53446053
  hyper
  anorectal vs. upper_gi,colorectal,lung,ovary,breast, bladder_and_urothelial,prostate

SEQ ID NO: 453049 - DNA, 149 bp, Homo sapiens
  chr19:53465713-53465862
  hyper
  anorectal vs. lung,bladder_and_urothelial, pancreas_gallbladder,upper_gi,breast,colorectal,ovary,prostate, uterine
cggccaccctggggctgcggggctgcaacgctgcgctccaggggccgactagagcgaggctgggaagcgctcttgcccagggcaagaatccagctccgggtgaggacttgaaacagcgcgaggcgggaggacgcgtcagaaagggtttt

SEQ ID NO: 453050 - DNA, 263 bp, Homo sapiens; identical to SEQ ID NO: 352401
  chr19:53466513-53466776
  hyper
  anorectal vs. breast,lung

SEQ ID NO: 453051 - DNA, 140 bp, Homo sapiens
  chr19:53606073-53606213
  hyper
  anorectal vs. bladder_and_urothelial,melanoma,colorectal, lung,breast,uterine,sarcoma,ovary,prostate,renal, pancreas_gallbladder,myeloid_neoplasm,non_cancer
cgggccccgggcacctccccaacgagggctcaagggaagcggtgactgcgaaggggaggcctggggagcagcagggcccggcacgaggaggagggaggtggggggcgacggcgccttaggacaggggtgggatgtgcagg

SEQ ID NO: 453052 - DNA, 222 bp, Homo sapiens
  chr19:53606354-53606576
  hyper
  anorectal vs. bladder_and_urothelial,melanoma,colorectal, lung,breast,uterine,sarcoma,ovary,prostate,renal, pancreas_gallbladder,myeloid_neoplasm,non_cancer
gtaaaggattttaagcaggaaaatcctgcttaaacgtttaaaaaaccgggaaaggccgtgtttacttggcccaaggcagaaagaccgggggcagggaccagcctcagggcgactttaacccaaaaggaagcgtctccgggcccacacagcaaggcctatttacctgaggtggagggtgcggtgcggagattttaagtccgtagcgacccccgggcatcgggt

SEQ ID NO: 453053 - DNA, 289 bp, Homo sapiens
  chr19:53606605-53606894
  hyper
  anorectal vs. bladder_and_urothelial,melanoma,colorectal, lung,breast,uterine,sarcoma,ovary,prostate,renal, pancreas_gallbladder,myeloid_neoplasm,non_cancer
tgagtctacacagaggaacactcatacgccatggtgtgatgcttgctccgcacgatccacttccgggtctgtgggcaactgcgcgaaggaaagcgaccgagcggcccggggcggggtccgagatgggcggaaccggaaaagggcggggcgttgagagagccgggctgaagcaggggccgccaggcagggaccccagggaaggaacggggaggagccaccggggaggggtggggagtgaccaagtggagggacccgggggcgggccggggaggagccgccggggaagggc

SEQ ID NO: 453054 - DNA, 176 bp, Homo sapiens
  chr19:53606400-53606576
  hyper
  anorectal vs. bladder_and_urothelial,colorectal,lung, melanoma,breast,ovary,uterine,prostate,sarcoma, pancreas_gallbladder
cgggaaaggccgtgtttacttggcccaaggcagaaagaccgggggcagggaccagcctcagggcgactttaacccaaaaggaagcgtctccgggcccacacagcaaggcctatttacctgaggtggagggtgcggtgcggagattttaagtccgtagcgacccccgggcatcgggt

SEQ ID NO: 453055 - DNA, 428 bp, Homo sapiens
  chr19:53606605-53607033
  hyper
  anorectal vs. bladder_and_urothelial,colorectal,lung, melanoma,breast,ovary,uterine,prostate,sarcoma, pancreas_gallbladder
tgagtctacacagaggaacactcatacgccatggtgtgatgcttgctccgcacgatccacttccgggtctgtgggcaactgcgcgaaggaaagcgaccgagcggcccggggcggggtccgagatgggcggaaccggaaaagggcggggcgttgagagagccgggctgaagcaggggccgccaggcagggaccccagggaaggaacggggaggagccaccggggaggggtggggagtgaccaagtggagggacccgggggcgggccggggaggagccgccggggaagggcggggaggaaccgcgggaagggaccgcgggggaggaaggcgaagggaccgcgggggagggaggcagagggaccgccaggaagggacccgggggagaggcggggctggacgggacacgttagggtctgcgatttcgtgtga

SEQ ID NO: 453056 - DNA, 111 bp, Homo sapiens; identical to SEQ ID NO: 347634
  chr19:53607111-53607222
  hyper
  anorectal vs. bladder_and_urothelial,colorectal,lung, melanoma,breast,ovary,uterine,prostate,sarcoma, pancreas_gallbladder

SEQ ID NO: 453057 - DNA, 1 bp, Homo sapiens
  chr19:53661430-53661431
  hyper
  anorectal vs. bladder_and_urothelial
c

SEQ ID NO: 453058 - DNA, 6 bp, Homo sapiens
  chr19:53661882-53661888
  hyper
  anorectal vs. bladder_and_urothelial
gctcac

SEQ ID NO: 453059 - DNA, 93 bp, Homo sapiens
  chr19:53934941-53935034
  hyper
  anorectal vs. head_and_neck
cgcccaggcagggccttgcattttacattctagtttgtatcccgttccagacaattccagggcttttgagtccatgcgtcagccttcctgggc

SEQ ID NO: 453060 - DNA, 134 bp, Homo sapiens; identical to SEQ ID NO: 336290
  chr19:56112791-56112925
  hyper
  anorectal vs. lymphoid_neoplasm

SEQ ID NO: 453061 - DNA, 1 bp, Homo sapiens
  chr19:56879394-56879395
  hyper
  anorectal vs. thyroid,breast,myeloid_neoplasm,prostate, uterine,ovary,melanoma,non_cancer,renal
c

SEQ ID NO: 453062 - DNA, 18 bp, Homo sapiens
  chr19:56915935-56915953
  hyper
  anorectal vs. prostate,sarcoma,myeloid_neoplasm,uterine, non_cancer,bladder_and_urothelial,breast,thyroid,ovary, lymphoid_neoplasm,lung,liver_bileduct,multiple_myeloma,renal, melanoma,colorectal
gtttgacagtgtggaatc

SEQ ID NO: 453063 - DNA, 57 bp, Homo sapiens
  chr19:57702696-57702753
  hyper
  anorectal vs. head_and_neck
cgccgtgaagcgttcctcccgttgttgaacacatgaggaaaactacactacttagaa

SEQ ID NO: 453064 - DNA, 39 bp, Homo sapiens; identical to SEQ ID NO: 352421
  chr19:57703385-57703424
  hyper
  anorectal vs. head_and_neck

SEQ ID NO: 453065 - DNA, 71 bp, Homo sapiens
  chr19:57831543-57831614
  hyper
  anorectal vs. upper_gi,head_and_neck,lymphoid_neoplasm, bladder_and_urothelial,melanoma,lung
cggggcgaatatccccgcctcctgacctcaattttcctaagctagaaaggacctttcgaccctccgacttg

SEQ ID NO: 453066 - DNA, 12 bp, Homo sapiens
  chr19:57832400-57832412
  hyper
  anorectal vs. upper_gi,head_and_neck,lymphoid_neoplasm, bladder_and_urothelial,melanoma,lung
gtgttggcctcc

SEQ ID NO: 453067 - DNA, 14 bp, Homo sapiens
  chr19:57863221-57863235
  hyper
  anorectal vs. lung,breast,liver_bileduct,ovary, bladder_and_urothelial,prostate,renal,uterine,melanoma,sarcoma, thyroid,upper_gi,pancreas_gallbladder,non_cancer,cervical, multiple_myeloma
cgcaggggcagttc

SEQ ID NO: 453068 - DNA, 461 bp, Homo sapiens
  chr19:57874412-57874873
  hyper
  anorectal vs. upper_gi,bladder_and_urothelial, pancreas_gallbladder,head_and_neck,lung,melanoma,breast,ovary, uterine,multiple_myeloma,sarcoma,liver_bileduct,prostate
cggtgtagccgttgagaacttgctgtgcttcacaatccgatatcataggtccctcacatttctgtgagtatcctagaccttacttcaagaaaatctggttatgtcgcctttaagagcaacccaagccccgtcctgtccgtggagtccggcactctgtttaccagctcccctgacggtgccactgagcctctatccgccatataaggactgaccaacgctctaaggcaagtccagaagcggtgtcgaaacttcataacccagaagacactgcggttctcggcagcgcgactgacccaatgaatgtgcaggaaggaacctttgcgtgcgtgcgtgcgtgcgtgcgtccgtcctcgtgctcgcgcatcgtaggagggcgggacttccggcgtcctcttgccgtggttgatttgattttctctggtgttttcactagttccggcctttggcgctctatgacgtca

SEQ ID NO: 453069 - DNA, 218 bp, Homo sapiens
  chr19:57875005-57875223
  hyper
  anorectal vs. upper_gi,bladder_and_urothelial, pancreas_gallbladder,head_and_neck,lung,melanoma,breast,ovary, uterine,multiple_myeloma,sarcoma,liver_bileduct,prostate
gcctttgtcgcccccgcccctctcttccctggctggacttgcggagtccccgccgaagaacccgaggtgggtgccccgtcccaggcccccccccacctccgcccgacccctccttccagtgctgaagcccatagaaggggccctgcaggtcaggccccttgtctcgaagagaggggcgttcctgtgtggggtccccgtatcagctggtttgatgcagc

SEQ ID NO: 453070 - DNA, 43 bp, Homo sapiens; identical to SEQ ID NO: 345616
  chr19:57875252-57875295
  hyper
  anorectal vs. upper_gi,bladder_and_urothelial, pancreas_gallbladder,head_and_neck,lung,melanoma,breast,ovary, uterine,multiple_myeloma,sarcoma,liver_bileduct,prostate

SEQ ID NO: 453071 - DNA, 63 bp, Homo sapiens
  chr19:57998890-57998953
  hyper
  anorectal vs. lung,pancreas_gallbladder, bladder_and_urothelial,upper_gi,breast,uterine,prostate,ovary
cgttatctccatctccatcatcatctccatctccgtctccatctccatcatcatctatcatct

SEQ ID NO: 453072 - DNA, 3 bp, Homo sapiens
  chr19:57999359-57999362
  hyper
  anorectal vs. lung,pancreas_gallbladder, bladder_and_urothelial,upper_gi,breast,uterine,prostate,ovary
cgc

SEQ ID NO: 453073 - DNA, 2 bp, Homo sapiens
  chr19:58011548-58011550
  hyper
  anorectal vs. prostate,sarcoma,multiple_myeloma,ovary, pancreas_gallbladder,non_cancer,myeloid_neoplasm, bladder_and_urothelial,thyroid,breast,lymphoid_neoplasm,lung, melanoma,uterine
cc

SEQ ID NO: 453074 - DNA, 11 bp, Homo sapiens
  chr19:58039267-58039278
  hyper
  anorectal vs. sarcoma,melanoma,myeloid_neoplasm,thyroid, prostate,bladder_and_urothelial,uterine,breast,non_cancer,renal, ovary,lung,multiple_myeloma
cctgagcaacc

SEQ ID NO: 453075 - DNA, 20 bp, Homo sapiens
  chr19:58111093-58111113
  hyper
  anorectal vs. melanoma,bladder_and_urothelial,breast, lung
cggggtcattcctccctgag

SEQ ID NO: 453076 - DNA, 31 bp, Homo sapiens
  chr19:58125385-58125416
  hyper
  anorectal vs. bladder_and_urothelial,lung,sarcoma,breast, prostate,ovary,myeloid_neoplasm,uterine,pancreas_gallbladder, melanoma,non_cancer,renal,thyroid
cgaagccacgccctgacctcagagtctcagg

SEQ ID NO: 453077 - DNA, 170 bp, Homo sapiens
  chr19:58144201-58144371
  hyper
  anorectal vs. bladder_and_urothelial,melanoma,upper_gi, breast,colorectal,lung,pancreas_gallbladder,prostate,ovary, non_cancer,myeloid_neoplasm,uterine,sarcoma,thyroid, lymphoid_neoplasm,liver_bileduct,multiple_myeloma,renal,
  CONT. FROM ABOVE: head_and_neck,cervical
cggggagctggaagaggcaggaaaaggagcacactcgaagtaacgtttattggggaaaaaaaacgcctacgtgtaaatggacccgcacagctcaaacctgtgttgttcaagtgtcaacctacttaagacctcaaacaccgaagcccctcagtcgccctggaaggcagcag

SEQ ID NO: 453078 - DNA, 210 bp, Homo sapiens
  chr19:58144745-58144955
  hyper
  anorectal vs. bladder_and_urothelial,melanoma,upper_gi, breast,colorectal,lung,pancreas_gallbladder,prostate,ovary, non_cancer,myeloid_neoplasm,uterine,sarcoma,thyroid, lymphoid_neoplasm,liver_bileduct,multiple_myeloma,renal,
  CONT. FROM ABOVE: head_and_neck,cervical
tcccggtccagctccgcccacagactcggatggcgaccgcactgagggacccggcttcggtgagcgctgcgatctccgggcctcccccggccgagattcttaagtcccaagtgagaggcaccagctcacgtctctgtagcacagggtcggggacactgaggctcgtgggtggggcccctatttctgacatccgatgtggtgggcaggggg

SEQ ID NO: 453079 - DNA, 11 bp, Homo sapiens
  chr19:58144987-58144998
  hyper
  anorectal vs. bladder_and_urothelial,melanoma,upper_gi, breast,colorectal,lung,pancreas_gallbladder,prostate,ovary, non_cancer,myeloid_neoplasm,uterine,sarcoma,thyroid, lymphoid_neoplasm,liver_bileduct,multiple_myeloma,renal,
  CONT. FROM ABOVE: head_and_neck,cervical
gacgggcaacc

SEQ ID NO: 453080 - DNA, 29 bp, Homo sapiens
  chr19:58239193-58239222
  hyper
  anorectal vs. melanoma,lymphoid_neoplasm, multiple_myeloma,myeloid_neoplasm,thyroid,prostate,non_cancer, sarcoma,renal,uterine
ccgagtttcaaagggctgacaggacttcc

SEQ ID NO: 453081 - DNA, 627 bp, Homo sapiens; identical to SEQ ID NO: 336321
  chr19:58258088-58258715
  hyper
  anorectal vs. liver_bileduct,lung,bladder_and_urothelial, pancreas_gallbladder,upper_gi,melanoma,colorectal,breast, lymphoid_neoplasm,prostate,multiple_myeloma,sarcoma,uterine, ovary,renal,non_cancer,myeloid_neoplasm,thyroid,head_and_neck

SEQ ID NO: 453082 - DNA, 146 bp, Homo sapiens
  chr19:58280766-58280912
  hyper
  anorectal vs. upper_gi,multiple_myeloma, pancreas_gallbladder,melanoma,breast,bladder_and_urothelial, liver_bileduct,prostate,lymphoid_neoplasm,lung,non_cancer, thyroid
cgtatggcctcttctaagatgggagaccctcctccgcatctggacctggagtcgccatttcctagcgcccctcgcagtggagcttgcccctttcttcggaaagtcggaagaaagccaccttaagcgctgcccatgtctgggaacta

SEQ ID NO: 453083 - DNA, 176 bp, Homo sapiens; identical to SEQ ID NO: 352434
  chr19:58281371-58281547
  hyper
  anorectal vs. upper_gi,multiple_myeloma, pancreas_gallbladder,melanoma,breast,bladder_and_urothelial, liver_bileduct,prostate,lymphoid_neoplasm,lung,non_cancer, thyroid

SEQ ID NO: 453084 - DNA, 405 bp, Homo sapiens
  chr19:59010484-59010889
  hyper
  anorectal vs. head_and_neck
cgcacctggcacgcacacgccatacacgttaacctgttgcaagaagtccacctgcgacaacacgccctccacctcgtgcgtggacacgttctcgcccttccatctgcaaggagggagccggcgcttgtgaccacgcccccgggaaggagaggccccgcctcttgcccccgccccgccccttttggggatcaggaggcccagtcagccccgccccctcgaaaatcgagaagccccgccttcgcgtgagaagtcctgactccaagttccgccctcttacgacaggaaagtcccgcctcttcagcctgactccctctaggatctgaaagcgtccgtggccccgcgccagccccgccccgagaaaccctgcctcggaccggaaggtgtccccgaggcggtcgcggaagt

SEQ ID NO: 453085 - DNA, 48 bp, Homo sapiens; identical to SEQ ID NO: 361783
  chr19:59010962-59011010
  hyper
  anorectal vs. head_and_neck

SEQ ID NO: 453086 - DNA, 10 bp, Homo sapiens
  chr2:18011874-18011884
  hyper
cgttcagtca

SEQ ID NO: 453087 - DNA, 8 bp, Homo sapiens
  chr2:18012167-18012175
  hyper
tgagcctc

SEQ ID NO: 453088 - DNA, 17 bp, Homo sapiens
  chr2:19550023-19550040
  hyper
  anorectal vs. cervical,pancreas_gallbladder
cgcccctccagggctgg

SEQ ID NO: 453089 - DNA, 138 bp, Homo sapiens
  chr2:19550409-19550547
  hyper
  anorectal vs. cervical,pancreas_gallbladder
ctggagctggggggagccccgccttgccccaaggagaagagccccggcggcctggcttctaactgtgggaaaactagacaccccagggaaggttcagcttatggaaggcggactcgaatttttcctcctaagcgtccc

SEQ ID NO: 453090 - DNA, 274 bp, Homo sapiens; identical to SEQ ID NO: 346421
  chr2:19550611-19550885
  hyper
  anorectal vs. cervical,pancreas_gallbladder

SEQ ID NO: 453091 - DNA, 175 bp, Homo sapiens
  chr2:20865462-20865637
  hyper
  anorectal vs. head_and_neck
cgccgcgtctccgcggtggccgagagggcaatggctgaggagttcgtttgggacgaagcagtggagcaggggaactggggagcctgggccgggcctctctgtgggtcccagcgcagcgcagccaggcaggcgtcgggacctaggcggctttggattcggcgggcgacctcgcttt

SEQ ID NO: 453092 - DNA, 38 bp, Homo sapiens
  chr2:20866660-20866698
  hyper
  anorectal vs. head_and_neck
gatggagggggtgtcgcactgccgcggggaggcgtgtc

SEQ ID NO: 453093 - DNA, 450 bp, Homo sapiens
  chr2:20866660-20867110
  hyper
  anorectal vs. head_and_neck
gatggagggggtgtcgcactgccgcggggaggcgtgtcgggaggctggggccagtggcagtcgcttggcgagggtgggggcgtagcgctgcggtgggaggaggcggctccggccctggtctccactctaggccggggtggggggcgcatagcggccgccggagctttcagcagggggcgctgctccgggcgttgggcgggggtggggtgggccaggagggggggccgcgggctggccgcgcacacttcccccattattaaacactatgttcaaaaggcgccgggggacttcccggagccacggagcccgcgccgcccgcccgcccggcccacggagcccatggacctgagcgccgccgccgcgctgtgcctttggctgctgagcgcctgccgcccccgcgacgggctggaagcggccgccgtgctgcgagcggcgggggctgggccggtc

SEQ ID NO: 453094 - DNA, 511 bp, Homo sapiens
  chr2:21022197-21022708
  hyper
  anorectal vs. pancreas_gallbladder,liver_bileduct, bladder_and_urothelial,colorectal,renal,sarcoma,upper_gi, lymphoid_neoplasm,lung,head_and_neck,myeloid_neoplasm, multiple_myeloma,non_cancer,thyroid,melanoma,breast,cervical
cggccaggactatcaactcttgtgtttggtacacaggacacaaagcaggtgtccggtaactacttgcgagggaagatacgaattaaccaaggaataaagtgttccaatctgcattctgtcttgcgtggggaacaaaaccaaactaagacccaaggatgagggtttacggttaaggtcttcagcgtgaataaaaggcggcgtgagcactaaacgccgggggcaaagaacactcccggcccagagtttgacccctcctagcgagttcttcccggccagctgcccaactttttggcctctactcctccgcgggggcaccataagactccctacaggtgggctacacttaggggttcaaatgctgcattaccgcgctcgggtgagcgactgcccggcctgcaactcaagggactcccaggccaagtggctccgaactcgcgagctgtcggaacagtattatttttgctgctacgggccatctggcccagggcaacaggggctctgcgaggaacca

SEQ ID NO: 453095 - DNA, 9 bp, Homo sapiens
  chr2:40679688-40679697
  hyper
  anorectal vs. head_and_neck,bladder_and_urothelial, sarcoma,multiple_myeloma,ovary,thyroid,prostate,non_cancer, cervical,breast,renal,myeloid_neoplasm,uterine
cgcctaccc

SEQ ID NO: 453096 - DNA, 395 bp, Homo sapiens; identical to SEQ ID NO: 345010
  chr2:43452443-43452838
  hyper
  anorectal vs. pancreas_gallbladder

SEQ ID NO: 453097 - DNA, 462 bp, Homo sapiens; identical to SEQ ID NO: 345011
  chr2:47499350-47499812
  hyper
  anorectal vs. cervical

SEQ ID NO: 453098 - DNA, 542 bp, Homo sapiens
  chr2:60783811-60784353
  hyper
  anorectal vs. upper_gi
cgacgattccccgacatatatttaatttcaccatcataatatgcccagggtgaaatgggaagtgccctccgctcccgcccctcccccagccagatttcacccagtccagaaaaccacggctgtgtgtcggcatttgatccctcctggtcgtcgacccccctccccggcccctggtgccctcccctagggcgacaacccctccctcagcactgctggatgctcgctaaagagcccgaaagtgggggaggggagggtttgtatgtgtgtttaaagaaagatgtgtcgttttaagagattttaaaatattacgtaagtattgattaatgatgcaggtggttttgtagagggggtgaaaggtcactttaaatgcgcacacttggatacacaataagtatatttacctttccagaagtggcttttagaaagtaataaattatgacaacgttaaaattattttctggccgttcagttaacttcgtttggggctgtagagctgttgctgctcccattgaaagggtaattacgttccgtgggctctttcc

SEQ ID NO: 453099 - DNA, 77 bp, Homo sapiens; identical to SEQ ID NO: 346438
  chr2:60784505-60784582
  hyper
  anorectal vs. upper_gi

SEQ ID NO: 453100 - DNA, 234 bp, Homo sapiens
  chr2:60784119-60784353
  hyper
  anorectal vs. upper_gi,colorectal
cgtaagtattgattaatgatgcaggtggttttgtagagggggtgaaaggtcactttaaatgcgcacacttggatacacaataagtatatttacctttccagaagtggcttttagaaagtaataaattatgacaacgttaaaattattttctggccgttcagttaacttcgtttggggctgtagagctgttgctgctcccattgaaagggtaattacgttccgtgggctctttcc

SEQ ID NO: 453101 - DNA, 373 bp, Homo sapiens; identical to SEQ ID NO: 349503
  chr2:60784505-60784878
  hyper
  anorectal vs. upper_gi,colorectal

SEQ ID NO: 453102 - DNA, 5 bp, Homo sapiens
  chr2:63275188-63275193
  hyper
  anorectal vs. head_and_neck
ggctc

SEQ ID NO: 453103 - DNA, 236 bp, Homo sapiens
  chr2:74781700-74781936
  hyper
  anorectal vs. upper_gi,colorectal,lymphoid_neoplasm, pancreas_gallbladder,uterine,cervical,renal,myeloid_neoplasm, thyroid,non_cancer,ovary,multiple_myeloma,sarcoma
cggctaatccgggggtctccaccattccttctcgctcctctccctcaccccaccgcgacccccccagcggctgccggcgggggccggggaggggcggaaactcctccagggaacccggccccgcctcccgccccgcctcccgccgcagggccaggaagcgcggaaggaaccgccgggggccatggacggagcagtgatggaagggccgctttttttgcagagtcagcgctttggga

SEQ ID NO: 453104 - DNA, 123 bp, Homo sapiens
  chr2:74782349-74782472
  hyper
  anorectal vs. upper_gi,colorectal,lymphoid_neoplasm, pancreas_gallbladder,uterine,cervical,renal,myeloid_neoplasm, thyroid,non_cancer,ovary,multiple_myeloma,sarcoma
gaccataaggggtcgagctctgggggtggccgagggagctcgcgccgcctggactgcaaagtgatccgtctggctgagtgtgtgagtgtggcccccgtcaccgtggagaccccccctgagccc

SEQ ID NO: 453105 - DNA, 48 bp, Homo sapiens
  chr2:75147056-75147104
  hyper
gtggcgctcgccgctcggagaagcagggagtcggtgcgccgcagctcc

SEQ ID NO: 453106 - DNA, 97 bp, Homo sapiens
  chr2:105468467-105468564
  hyper
  anorectal vs. melanoma
cggcaggaaaggaaaacacggggtgctggcaccgactattcaaacgtctgcacctggagatctcagattgattcaatgaaatctgtgttccatcttt

SEQ ID NO: 453107 - DNA, 144 bp, Homo sapiens; identical to SEQ ID NO: 345031
  chr2:105471069-105471213
  hyper
  anorectal vs. melanoma

SEQ ID NO: 453108 - DNA, 338 bp, Homo sapiens
  chr2:105489278-105489616
  hyper
  anorectal vs. ovary,multiple_myeloma,uterine,breast,lung, prostate,bladder_and_urothelial,cervical,renal,myeloid_neoplasm, non_cancer,thyroid,sarcoma
attaaggagaggactagggaatgggatcacctatcgtcaagtcacttattttagaggggtttggagaagaggtgaacttggtggtggagagaaagcgcgctccctaatcacctgttaaacagttattttaaaattagctgtcgcatctgacgccctagggtccccaagggccttttcataagggagtctgtttaacttcactggctttgggagcgagaaagtttgccctttgtttctggaaacacgcccacgcagtacgcttaggtaaccttacactgaacaatttccttggagcggctaaaaccgcaacaaccaaacttgcacctgcgccattctct

SEQ ID NO: 453109 - DNA, 338 bp, Homo sapiens; identical to SEQ ID NO: 453108
  chr2:105489278-105489616
  hyper
  anorectal vs. bladder_and_urothelial,lung,colorectal, pancreas_gallbladder,cervical,breast,ovary,renal,prostate, sarcoma,uterine,multiple_myeloma,thyroid,upper_gi,non_cancer, liver_bileduct,myeloid_neoplasm,lymphoid_neoplasm,melanoma

SEQ ID NO: 453110 - DNA, 112 bp, Homo sapiens; identical to SEQ ID NO: 345033
  chr2:105490035-105490147
  hyper
  anorectal vs. bladder_and_urothelial,lung,colorectal, pancreas_gallbladder,cervical,breast,ovary,renal,prostate, sarcoma,uterine,multiple_myeloma,thyroid,upper_gi,non_cancer, liver_bileduct,myeloid_neoplasm,lymphoid_neoplasm,melanoma

SEQ ID NO: 453111 - DNA, 205 bp, Homo sapiens
  chr2:111874987-111875192
  hyper
  anorectal vs. head_and_neck
gctaggtgtcagagttgggaatgtctaaaacaaaaaaggcttccgagggttattcatggccaacagtttccacaggagaatccaaagggaaactagtttccggggccgctgtgtgtgcgggtgcttggtgggctgaaagctgctgtcactagatggctgtaagtgtgccaacatctgacctgtcccattgtgttgtgttttgcag

SEQ ID NO: 453112 - DNA, 138 bp, Homo sapiens; identical to SEQ ID NO: 345036
  chr2:111875611-111875749
  hyper
  anorectal vs. head_and_neck

SEQ ID NO: 453113 - DNA, 31 bp, Homo sapiens
  chr2:118981062-118981093
  hyper
  anorectal vs. multiple_myeloma,non_cancer,thyroid, myeloid_neoplasm,prostate,colorectal,cervical,renal, lymphoid_neoplasm,uterine
cgcctggcgtgaaaagaaccaagaacactga

SEQ ID NO: 453114 - DNA, 49 bp, Homo sapiens
  chr2:127782995-127783044
  hyper
  anorectal vs. renal,thyroid,melanoma,non_cancer,lung, sarcoma,ovary,prostate,bladder_and_urothelial,myeloid_neoplasm, multiple_myeloma
cgaactccacgacatgggaggcaggggcgggccttttgcaggggaagga

SEQ ID NO: 453115 - DNA, 32 bp, Homo sapiens
  chr2:131484816-131484848
  hyper
  anorectal vs. uterine,ovary,colorectal,thyroid, bladder_and_urothelial,non_cancer,myeloid_neoplasm,sarcoma,lung
cgagtttccctctcccagggaatctgcattct

SEQ ID NO: 453116 - DNA, 184 bp, Homo sapiens; identical to SEQ ID NO: 346478
  chr2:135476396-135476580
  hyper
  anorectal vs. pancreas_gallbladder,myeloid_neoplasm,lung, bladder_and_urothelial,upper_gi,non_cancer

SEQ ID NO: 453117 - DNA, 354 bp, Homo sapiens
  chr2:135476396-135476750
  hyper
  anorectal vs. lung,pancreas_gallbladder,upper_gi,ovary, head_and_neck,myeloid_neoplasm,breast,uterine,thyroid,renal, cervical,bladder_and_urothelial,non_cancer
tcagcggggccgggccgggggcggcagccggtggcgcgtggccccggggcggcggcgggacggtgggcccctgggagctgcggcgctggatgcccgcggccggctccatggcgcggggctgcggatcccggcggcggcgacgacaagcgcggcggggactcgagtcagaagtgcgaggcgccgcggctctggcgggggcaggagcggacggactggccgcgtggacagggagggagggcgggcgggcgccgcggagtggaggtgcacgggcgggggcggggacgagcggagagccgctcggctccgcggccggtggcggaggctggggccgcgttgttgccgccgcgctccgcc

SEQ ID NO: 453118 - DNA, 483 bp, Homo sapiens
  chr2:136875399-136875882
  hyper
  anorectal vs. head_and_neck
tttctcctcgactcacagagaaaaagattccaatcctgctccccccccacccacccgcactatataggcatggtcaagaaaactcctttcggtgacccttttttggagtacgggtacctccaatgtcctggccgcttctgcccgctcggagaggggctgcgctctaagttcaaacgtttgtacatttatgacaaagcaggttgaaactggacttacactgatcccctccatggtaaccgctggttctccagatgcggtggctactggagcactcaggccctcggcgtcactttgctacctgctgccgcagccaacaaactgaagtttctggccgcggccggacttttataaaaacacgctccgagcgcggcgcatgcgccgctggggcggggagggagaaggcggggtgggggagaggggcagacgcgaggaaggagggcgcaggggcggggcggagaggtgcgcggcttgggaagcccaggg

SEQ ID NO: 453119 - DNA, 85 bp, Homo sapiens
  chr2:136876145-136876230
  hyper
  anorectal vs. head_and_neck
tagggccaagcttccaacgccattccccgcgctttcagcagacgcagcccattcaggaggtaaaaggagtaaagatccttccttc

SEQ ID NO: 453120 - DNA, 44 bp, Homo sapiens
  chr2:136875838-136875882
  hyper
  anorectal vs. lymphoid_neoplasm
cgcaggggcggggcggagaggtgcgcggcttgggaagcccaggg

SEQ ID NO: 453121 - DNA, 218 bp, Homo sapiens
  chr2:136876145-136876363
  hyper
  anorectal vs. lymphoid_neoplasm
tagggccaagcttccaacgccattccccgcgctttcagcagacgcagcccattcaggaggtaaaaggagtaaagatccttccttcggaggatgtagctatacttgcacattcacagcatcactagggtcaggtgcagataattaggagatactttcagaagaaggtaggatttggcataattctggagactgatcagatgtagatatgtattgctcag

SEQ ID NO: 453122 - DNA, 69 bp, Homo sapiens; identical to SEQ ID NO: 357317
  chr2:139538166-139538235
  hyper
  anorectal vs. head_and_neck

SEQ ID NO: 453123 - DNA, 35 bp, Homo sapiens; identical to SEQ ID NO: 349594
  chr2:145275891-145275926
  hyper
  anorectal vs. head_and_neck

SEQ ID NO: 453124 - DNA, 51 bp, Homo sapiens
  chr2:149632592-149632643
  hyper
  anorectal vs. sarcoma,ovary,prostate
cggttccggcttgggcagccagaccggacttgcaggctcttggaggtcgca

SEQ ID NO: 453125 - DNA, 115 bp, Homo sapiens
  chr2:149645382-149645497
  hyper
  anorectal vs. multiple_myeloma,lung
cgccctccccacgctagtagtacgcttcggttactttgcacttctccgtagctgctttacatgtttgcgttttgaatgttgttgaggaaagatgcgaaaaagaatgtgtgctgga

SEQ ID NO: 453126 - DNA, 64 bp, Homo sapiens; identical to SEQ ID NO: 349598
  chr2:149645987-149646051
  hyper
  anorectal vs. multiple_myeloma,lung

SEQ ID NO: 453127 - DNA, 109 bp, Homo sapiens; identical to SEQ ID NO: 357334
  chr2:154335663-154335772
  hyper
  anorectal vs. lung,breast

SEQ ID NO: 453128 - DNA, 61 bp, Homo sapiens
  chr2:155553956-155554017
  hyper
  anorectal vs. upper_gi,liver_bileduct
cggaggtgcaattcaggctggtggagcagcgggggaaggcagggacaggcggggctagcgc

SEQ ID NO: 453129 - DNA, 612 bp, Homo sapiens; identical to SEQ ID NO: 198483
  chr2:155554076-155554688
  hyper
  anorectal vs. upper_gi,liver_bileduct

SEQ ID NO: 453130 - DNA, 17 bp, Homo sapiens
  chr2:155554690-155554707
  hyper
  anorectal vs. upper_gi,liver_bileduct
cagacatgcctttgggc

SEQ ID NO: 453131 - DNA, 205 bp, Homo sapiens; identical to SEQ ID NO: 331488
  chr2:165873413-165873618
  hyper
  anorectal vs. lymphoid_neoplasm

SEQ ID NO: 453132 - DNA, 101 bp, Homo sapiens
  chr2:168148871-168148972
  hyper
  anorectal vs. pancreas_gallbladder,lung,head_and_neck, colorectal,ovary,melanoma,breast,cervical,sarcoma,uterine
cgtttatttggagggaagacggggaaggtccactctgcctacaactccgacatttctccgtgtgcctctttgctagctggggacacttcgtggctgattac

SEQ ID NO: 453133 - DNA, 240 bp, Homo sapiens
  chr2:168149264-168149504
  hyper
  anorectal vs. pancreas_gallbladder,lung,head_and_neck, colorectal,ovary,melanoma,breast,cervical,sarcoma,uterine
ccaggcccacccctgcgggcccggctttccctcctcacctaaggctccggggccacgagtcccccatcctgcgcccctcccgcgcctcccccatcccaaaccccagcagcgtcgctgcctctcccggaaacaagcccgctgagcaaaggcggaggaaaaccttgggccttccgctctgattggtctccccccgccgagcggggcgaggcagcgattggctgccgggcgttgtcagtcgcc

SEQ ID NO: 453134 - DNA, 152 bp, Homo sapiens
  chr2:168149556-168149708
  hyper
  anorectal vs. pancreas_gallbladder,lung,head_and_neck, colorectal,ovary,melanoma,breast,cervical,sarcoma,uterine
ccgccgcggctgctcggctagtgcagctgggcgagctcgcgcgggcgccgccgccgcctctgctgctgcccaccccgccgcgccgccggcgctgccggtcttgcaggcggccgccggggaggggcggccgagagagcggagcacgaggaggc

SEQ ID NO: 453135 - DNA, 240 bp, Homo sapiens; identical to SEQ ID NO: 453133
  chr2:168149264-168149504
  hyper
  anorectal vs. pancreas_gallbladder,lung,head_and_neck, colorectal,melanoma,renal,ovary,prostate

SEQ ID NO: 453136 - DNA, 221 bp, Homo sapiens
  chr2:168149556-168149777
  hyper
  anorectal vs. pancreas_gallbladder,lung,head_and_neck, colorectal,melanoma,renal,ovary,prostate
ccgccgcggctgctcggctagtgcagctgggcgagctcgcgcgggcgccgccgccgcctctgctgctgcccaccccgccgcgccgccggcgctgccggtcttgcaggcggccgccggggaggggcggccgagagagcggagcacgaggaggcgggggcggcagagaagtgatgctggcgccggggatcggggcagcggcagcggagcagcagcatcttcgg

SEQ ID NO: 453137 - DNA, 89 bp, Homo sapiens; identical to SEQ ID NO: 357355
  chr2:168150962-168151051
  hyper
  anorectal vs. sarcoma

SEQ ID NO: 453138 - DNA, 86 bp, Homo sapiens
  chr2:173099596-173099682
  hyper
  anorectal vs. colorectal,upper_gi,pancreas_gallbladder
cgggggacactggggggagcagcggcgggcatctggaggcatcgggggacagcgggggacattgaggggcagtgagggcggccgag

SEQ ID NO: 453139 - DNA, 85 bp, Homo sapiens
  chr2:176975945-176976030
  hyper
  anorectal vs. renal,colorectal,multiple_myeloma, myeloid_neoplasm,thyroid,uterine,breast,prostate,non_cancer
cggttaaaatgtcagtgccctaatagtgtgatcgttccatgagcttaaaactgttttttttctttctgtttccatctatttttta

SEQ ID NO: 453140 - DNA, 5 bp, Homo sapiens
  chr2:182321353-182321358
  hyper
  anorectal vs. lymphoid_neoplasm,myeloid_neoplasm, multiple_myeloma,non_cancer,sarcoma,uterine,ovary,thyroid, cervical,prostate,renal
cgtgg

SEQ ID NO: 453141 - DNA, 34 bp, Homo sapiens; identical to SEQ ID NO: 345053
  chr2:182323095-182323129
  hyper
  anorectal vs. thyroid,lymphoid_neoplasm,non_cancer, myeloid_neoplasm,multiple_myeloma,uterine,cervical,renal,ovary

SEQ ID NO: 453142 - DNA, 72 bp, Homo sapiens
  chr2:182818959-182819031
  hyper
  anorectal vs. lymphoid_neoplasm,renal,liver_bileduct, multiple_myeloma,pancreas_gallbladder,prostate,myeloid_neoplasm, non_cancer,thyroid
cgcgccccactacccgctaaccgcctcccgccacacacacacacacacacacacacacacacaccccgcgcg

SEQ ID NO: 453143 - DNA, 353 bp, Homo sapiens
  chr2:185462268-185462621
  hyper
  anorectal vs. ovary,myeloid_neoplasm,lung
cgggctgatggctgccttggacccttgaaaaccaaccagaaagtctgtctccagggaatgctgcagacccggttccctactttccgtgacaaacccattagttcgtgtgcagatttttccattcaggtcgcttctagggcgaacgcttttgttcgctaccactctgtagtgcgagaggaactagagaggcatgtaaagcaagcttgaggcagcagcgcctttgccgcaaagcatccctttcccctcagctttagcaatttaggaagaactgaggttctcaggggaggtggggtgagaggattgccaggaggagggacatataaatcaggagtccctgcttttaccctctactc

SEQ ID NO: 453144 - DNA, 325 bp, Homo sapiens
  chr2:219232221-219232546
  hyper
  anorectal vs. cervical
cgaagttcctggaccggaaggtgaggggaggctccaccagcctggggttcccattcccccatgggccttaaattcattactgatctctgcacctgattgaaatgcacacccgtaggggctagaaggctccagcgccccttagctctccttggagcgagcggctgggggctcctggggcgcgggggtcccgtccggctgaggctcgggctctgtcccctgccaggaggagctccggctcggccacgccagctatctgcggcagcaccccgaagcccacgcgctcatctccgacttcctgctcttcctgctgctgcgccagccggag

SEQ ID NO: 453145 - DNA, 32 bp, Homo sapiens; identical to SEQ ID NO: 357453
  chr2:219232859-219232891
  hyper
  anorectal vs. cervical

SEQ ID NO: 453146 - DNA, 342 bp, Homo sapiens
  chr2:232790312-232790654
  hyper
  anorectal vs. head_and_neck
cggtcgcccttgagattggcgcccccgcccccgggagccttgtcgcccttcttctgaccgccgcccgcagcctgcggctcggccagctcctctgccggcggggttcgcgggacctgtccgaggaaagagcgggcaggtgaagggacacgcggctgcagcacgggggactctgatgctccagccccacgcgcccgccggcgcggggtgtccctcccaagcccagagccgcccccaccgatgccggccagcttggccccgcatccacctgccacgcggccgccttcgccgctccctccggaagccccctgccctccctttgctgctcgccgggcaggccacact

SEQ ID NO: 453147 - DNA, 264 bp, Homo sapiens
  chr2:232790784-232791048
  hyper
  anorectal vs. head_and_neck
tctcctgggtcctgcgcgccgcattctccaagcccccagcctcccacgcctctcccaggctcggcgtccccacgacagcacccaccttcggcggcgccccgggcttggcttcggagggccggagggagagcagcgtgagcagcagggcgcaggccagcagctgggagagatgcatggtgccgctggggtcgaggggcgcacacgggcggcagcgagggcgcgcaggtcggcgggcagaccagcagggggatgcggagcaggctg

SEQ ID NO: 453148 - DNA, 145 bp, Homo sapiens
  chr2:232791140-232791285
  hyper
  anorectal vs. head_and_neck
acctgccgctgatgtcatcctcccgcccaccgggccgcccgggccaatgacaccacgcacgcggccgcgccgagggccgggagggggccgcgggggctcccctcccttatcccaccccggagggatcccgcggctcggcgggctc

SEQ ID NO: 453149 - DNA, 360 bp, Homo sapiens
  chr2:234474820-234475180
  hyper
  anorectal vs. upper_gi,liver_bileduct,colorectal, pancreas_gallbladder
cggagggcggggaagactgccactaaaattatcaagcctaaaggccttccagtatgtatccactaatcccatcgttagccctgggggcctaggtgacttccccaaggtttcacatcgagtgtggcggagggtcacttggagatgagaaacgtaaagcgcctagcataggtaccaaatgacaggaagcgctgaaatgcaattatttttcttttcctcagaagaaaactaaaaaaacacaactcgagagtctagcctcgagctcgttgtctgcattcctgaattcccaactcctacggccggccgaggccctccaagccaccacaggcccaggggcgcaaaaaggcagaggtccccgtggcc

SEQ ID NO: 453150 - DNA, 102 bp, Homo sapiens; identical to SEQ ID NO: 349707
  chr2:234475503-234475605
  hyper
  anorectal vs. upper_gi,liver_bileduct,colorectal, pancreas_gallbladder

SEQ ID NO: 453151 - DNA, 7 bp, Homo sapiens
  chr20:291046-291053
  hyper
  anorectal vs. sarcoma,ovary,renal,uterine,non_cancer, melanoma,myeloid_neoplasm,cervical
cgccggc

SEQ ID NO: 453152 - DNA, 121 bp, Homo sapiens
  chr20:2731109-2731230
  hyper
  anorectal vs. upper_gi
cgagcagtgaacacacgtggagaggcagtgtagaaccccccagcctggctctatttggccgctggccgagtcttctccatttccatcctcccgccccgccccagctgagccacccacttct

SEQ ID NO: 453153 - DNA, 226 bp, Homo sapiens
  chr20:2731391-2731617
  hyper
  anorectal vs. upper_gi
cgcggtcaaggggctgacaatcaaggaaaacctttggtagggagtgcctgctgagcccggctcaaccgaaacccgagggctgagtggggaggttgacctggggaaggaagggtggttgcagaaggaatgataaggaccgatccccagaagtgagtgctttctctttgccgggaaactaaaggaaatccactaagtcaggatcagaggtgaaggtagggctctgaga

SEQ ID NO: 453154 - DNA, 331 bp, Homo sapiens
  chr20:2731675-2732006
  hyper
  anorectal vs. upper_gi
ggggaaggaggaggagaagggcgtggggagctgggtcagacgcgcatacacacacacaccccttgcacaacgccagggtaagcagtgaacacaacacacgtggagatgcaatgtagaatctggccgctggccggatcttctctacttccatcctcccgccccagcccaagccacccacttctccagttgcttccctggggtgcatgcaaacctctagccttcagatgctgcagagagtccacttgagccgtgataaatggagattgttaagttttttcttttttataataaactcctgatttgaccagatgaaaagagaaaactctccatc

SEQ ID NO: 453155 - DNA, 143 bp, Homo sapiens; identical to SEQ ID NO: 294514
  chr20:2820861-2821004
  hyper
  anorectal vs. lung,colorectal,liver_bileduct,renal, pancreas_gallbladder,uterine,lymphoid_neoplasm,breast,cervical, upper_gi,prostate,bladder_and_urothelial,sarcoma,non_cancer, thyroid,multiple_myeloma,melanoma

SEQ ID NO: 453156 - DNA, 54 bp, Homo sapiens
  chr20:9496982-9497036
  hyper
  anorectal vs. melanoma
aacccacttcaaagacgcagtcagtggtgagtggaggctggcatggctggggag

SEQ ID NO: 453157 - DNA, 240 bp, Homo sapiens
  chr20:9497109-9497349
  hyper
  anorectal vs. melanoma
ggtcccaggccaagtcttccctcggcttgctctttagggcggaagaggcgggagcgcccatgagtcttctgggtctcaggccttgtagatccgccaggaaccgcaggcgtggggacccaaacgtcacccgtggcctgatcctagataagaagtcccttgaaggcctgtcgttccctggtgcttcaaaacgacctcttatgatttggcctttgaaggaccacggagaagggcaaagctgca

SEQ ID NO: 453158 - DNA, 118 bp, Homo sapiens; identical to SEQ ID NO: 361818
  chr20:9497378-9497496
  hyper
  anorectal vs. melanoma

SEQ ID NO: 453159 - DNA, 88 bp, Homo sapiens
  chr20:9819102-9819190
  hyper
  anorectal vs. melanoma,liver_bileduct,sarcoma
cggggttctcctccacgccctcccgcccagcaaaatggaaccatcctttatttggttggtagagagcccaggctggatagtagcgcat

SEQ ID NO: 453160 - DNA, 28 bp, Homo sapiens
  chr20:10198955-10198983
  hyper
  anorectal vs. melanoma,head_and_neck,renal,ovary
ggaccctcttcggagaaaacaaatcgcc

SEQ ID NO: 453161 - DNA, 206 bp, Homo sapiens
  chr20:21080357-21080563
  hyper
  anorectal vs. colorectal
cgttgtcgtctgctgatgtttaaaagataagaagacatttgtcagggcgggtgcttgaggctctcagaggactccgggagacactgccaaaacgtttccaaactgaatagtcattgggctgccagataattcagaaactatctgtatgagctgtttatcaaattattaaccgcacagatgttgtttggctgaagagcagctgaatc

SEQ ID NO: 453162 - DNA, 222 bp, Homo sapiens
  chr20:21686742-21686964
  hyper
  anorectal vs. head_and_neck
tcctggagaagctgcattctcctctgatccccagccttcagggggcagttgagcaagtctgggaagggagtgttccaagtagacgcgctaaaagtcgcgaaagggcacggagggctacaatgcgccgcgctccactccgcggctcctctgcgcccttgcccactccaagccagacccaggcggtttgcccttggactccgagctgtctggggacccacaggt

SEQ ID NO: 453163 - DNA, 222 bp, Homo sapiens; identical to SEQ ID NO: 453162
  chr20:21686742-21686964
  hyper
  anorectal vs. sarcoma,myeloid_neoplasm,head_and_neck, melanoma,renal

SEQ ID NO: 453164 - DNA, 259 bp, Homo sapiens
  chr20:22558283-22558542
  hyper
  anorectal vs. pancreas_gallbladder
ggtcctacaaactcgcgtcctccggaattcccgagggcaagcccggcacgcgcgagcgtgctcctgcccgtggaaggggggaaatcggcgactgggttgcagggagaatgcgatgataaatggccctgcgtctgctttctgactttctctcctggacccagctcgtaaccccagaggctccccaacctgcctgccgccaagcacggctgtgcgcaaaaggccaccagccgcttcctgcagccagagctaaggttcactc

SEQ ID NO: 453165 - DNA, 227 bp, Homo sapiens; identical to SEQ ID NO: 375061
  chr20:22558696-22558923
  hyper
  anorectal vs. pancreas_gallbladder

SEQ ID NO: 453166 - DNA, 1 bp, Homo sapiens
  chr20:22567354-22567355
  hyper
  anorectal vs. upper_gi,pancreas_gallbladder, liver_bileduct,colorectal,melanoma,uterine,multiple_myeloma, sarcoma,renal
c

SEQ ID NO: 453167 - DNA, 67 bp, Homo sapiens
  chr20:22567768-22567835
  hyper
  anorectal vs. upper_gi,pancreas_gallbladder, liver_bileduct,colorectal,melanoma,uterine,multiple_myeloma, sarcoma,renal
cgcctgcccatgggaatgcgagcggggtctacggttagctttaggtagctgggagcgggacaccaac

SEQ ID NO: 453168 - DNA, 62 bp, Homo sapiens
  chr20:30639044-30639106
  hyper
  anorectal vs. multiple_myeloma,non_cancer,thyroid
cgactcctcccctcccccgaccacctcccccagcttgggagtcctctgagctgccaggaagc

SEQ ID NO: 453169 - DNA, 139 bp, Homo sapiens
  chr20:30639494-30639633
  hyper
  anorectal vs. multiple_myeloma,non_cancer,thyroid
ggtattggaaccctggggtttgtgttctaaatcttagggcagggttagaatccactgaagtgagagttcggatccttccactgggcagattagaatctttgggggcaagttgagtttaaaaatccttcagaggtgggat

SEQ ID NO: 453170 - DNA, 233 bp, Homo sapiens; identical to SEQ ID NO: 347690
  chr20:57978841-57979074
  hyper
  anorectal vs. bladder_and_urothelial, pancreas_gallbladder,colorectal,upper_gi,melanoma,head_and_neck, ovary,lymphoid_neoplasm,renal,sarcoma,prostate,myeloid_neoplasm, uterine,non_cancer,lung,multiple_myeloma,thyroid,liver_bileduct

SEQ ID NO: 453171 - DNA, 115 bp, Homo sapiens; identical to SEQ ID NO: 345644
  chr20:58514400-58514515
  hyper
  anorectal vs. colorectal,pancreas_gallbladder, lymphoid_neoplasm,sarcoma,renal,uterine,upper_gi,prostate, non_cancer,melanoma,bladder_and_urothelial

SEQ ID NO: 453172 - DNA, 109 bp, Homo sapiens; identical to SEQ ID NO: 361933
  chr20:58515463-58515572
  hyper
  anorectal vs. head_and_neck

SEQ ID NO: 453173 - DNA, 55 bp, Homo sapiens; identical to SEQ ID NO: 352575
  chr21:47062898-47062953
  hyper
  anorectal vs. head_and_neck,cervical

SEQ ID NO: 453174 - DNA, 143 bp, Homo sapiens
  chr21:47063290-47063433
  hyper
  anorectal vs. lung
cgcccactactagtgaccggcccgcccgttcgaggccccgcctcctccccgcccaatgctcggccccgccccgcgcgtcattgggccaggtccccgccccgcccccagccccacccccgcccctttgactggagttggctttt

SEQ ID NO: 453175 - DNA, 102 bp, Homo sapiens
  chr22:21399942-21400044
  hyper
  anorectal vs. head_and_neck
cgatgctggaaccgcctaggggaggcagggggataaacgcagcaaggcgcccaatccggtgcatggtctgtggcgcatgcagtgtatcagcccgggcgagga

SEQ ID NO: 453176 - DNA, 126 bp, Homo sapiens; identical to SEQ ID NO: 375276
  chr22:21400283-21400409
  hyper
  anorectal vs. head_and_neck

SEQ ID NO: 453177 - DNA, 137 bp, Homo sapiens
  chr22:22862472-22862609
  hyper
  anorectal vs. prostate,uterine,multiple_myeloma, myeloid_neoplasm,lymphoid_neoplasm,non_cancer,melanoma, colorectal,ovary,renal,thyroid,lung
cgacagcgacgcagtaaatgagacaagacgctgcggtaggggagagagacccatacattcaaatgccttaaggggtctgggcctacaggtctccagaactggggagggcctggggttacaaagcagttttcagattt

SEQ ID NO: 453178 - DNA, 61 bp, Homo sapiens
  chr22:25678186-25678247
  hyper
  anorectal vs. breast,melanoma
cgaggttgggggcccggcccgctgggcgctgttcacaggtagcttggaccagagcaggggc

SEQ ID NO: 453179 - DNA, 124 bp, Homo sapiens
  chr22:28838056-28838180
  hyper
  anorectal vs. upper_gi,pancreas_gallbladder,cervical, uterine,colorectal,sarcoma,bladder_and_urothelial,thyroid
cgttatttctgggaccaatagcaatttattttgatagaaccgctggatttttttttttcttgagttctcaacaaaggagccatattaggaaataatctcgcaaaaagcaaagtgccccctcccc

SEQ ID NO: 453180 - DNA, 61 bp, Homo sapiens
  chr22:28838449-28838510
  hyper
  anorectal vs. upper_gi,pancreas_gallbladder,cervical, uterine,colorectal,sarcoma,bladder_and_urothelial,thyroid
taaccccttggggaaataggtgttataacaccacctgcggggcctgtgtcaggggtgcagc

SEQ ID NO: 453181 - DNA, 244 bp, Homo sapiens
  chr22:28838551-28838795
  hyper
  anorectal vs. upper_gi,pancreas_gallbladder,cervical, uterine,colorectal,sarcoma,bladder_and_urothelial,thyroid
cctagtaggtcttggctggctcctgcaaagctaatcgtgtcgctgtctgcacaggacttctaaagcaaacgggtgcttccgagctgtcacccctggggctccaggcatatcatgaaggaaaaacttaaagggcagtggatgcagaccagatttggtaactcgtccctaagggactgatgcaagtcccaaaggaaccagggctgtttggaccagctggcccagcaaactacggaaggggtggaga

SEQ ID NO: 453182 - DNA, 125 bp, Homo sapiens
  chr22:28838844-28838969
  hyper
  anorectal vs. upper_gi,pancreas_gallbladder,cervical, uterine,colorectal,sarcoma,bladder_and_urothelial,thyroid
ggccccattcccctctccaggacacttaccttcttccggggctgccatttcatcatatttgtaaagccgatacgtggaacatcaagatgttggctgggggctgggggcagatgcagggcagcgac

SEQ ID NO: 453183 - DNA, 24 bp, Homo sapiens
  chr22:28838486-28838510
  hyper
  anorectal vs. upper_gi
cggggcctgtgtcaggggtgcagc

SEQ ID NO: 453184 - DNA, 244 bp, Homo sapiens; identical to SEQ ID NO: 453181
  chr22:28838551-28838795
  hyper
  anorectal vs. upper_gi

SEQ ID NO: 453185 - DNA, 279 bp, Homo sapiens
  chr22:28838844-28839123
  hyper
  anorectal vs. upper_gi
ggccccattcccctctccaggacacttaccttcttccggggctgccatttcatcatatttgtaaagccgatacgtggaacatcaagatgttggctgggggctgggggcagatgcagggcagcgacgactgcaagtcatgctgcctccctcccaccccctaattctttcccatattcactgcgaagggaaaagccccaggagagtccagtcttttcgccttcagttcaatgaaaagtatccccaaaccacgaacacacttcccaccaggctaggaagtcc

SEQ ID NO: 453186 - DNA, 129 bp, Homo sapiens; identical to SEQ ID NO: 347720
  chr22:28839263-28839392
  hyper
  anorectal vs. upper_gi

SEQ ID NO: 453187 - DNA, 171 bp, Homo sapiens
  chr22:29550509-29550680
  hyper
  anorectal vs. liver_bileduct,upper_gi, pancreas_gallbladder,colorectal,melanoma,lymphoid_neoplasm, multiple_myeloma,breast,lung,uterine,renal,prostate,cervical, myeloid_neoplasm,non_cancer,bladder_and_urothelial,thyroid
cgcccgcccagctcccgctgcggcagagcccccagccgccgcctcctgccgccctcgcctttcctgcaggagccgtcccagcgcaggcttgctcaccagcgccgccccgtggtaagactgcagatctgcggaagaaggccagccctgaaccgcaactgctctcaagccctt

SEQ ID NO: 453188 - DNA, 14 bp, Homo sapiens
  chr22:29550707-29550721
  hyper
  anorectal vs. liver_bileduct,upper_gi, pancreas_gallbladder,colorectal,melanoma,lymphoid_neoplasm, multiple_myeloma,breast,lung,uterine,renal,prostate,cervical, myeloid_neoplasm,non_cancer,bladder_and_urothelial,thyroid
cagcgcggtgatgc

SEQ ID NO: 453189 - DNA, 104 bp, Homo sapiens; identical to SEQ ID NO: 336641
  chr22:37252563-37252667
  hyper
  anorectal vs. upper_gi

SEQ ID NO: 453190 - DNA, 14 bp, Homo sapiens
  chr22:42354024-42354038
  hyper
  anorectal vs. lymphoid_neoplasm,pancreas_gallbladder, multiple_myeloma,upper_gi,colorectal
gcctgggccctccc

SEQ ID NO: 453191 - DNA, 1 bp, Homo sapiens
  chr22:42679388-42679389
  hyper
  anorectal vs. colorectal
c

SEQ ID NO: 453192 - DNA, 59 bp, Homo sapiens
  chr22:50170525-50170584
  hyper
  anorectal vs. melanoma,liver_bileduct
cggtgtgtgatgaacccttccccgggaggttggccagggtggggctccacacagggcac

SEQ ID NO: 453193 - DNA, 151 bp, Homo sapiens
  chr3:29322332-29322483
  hyper
  anorectal vs. head_and_neck,cervical
cggcagcagcgttgctgcaaaaatcgcttgctattcgagatagccagcagagggaatcggaactttgcttgcagcaggggttgaagcagcctttttttttttttttcttggaggaaatactgcagccttctggactgcgtacgctgctccc

SEQ ID NO: 453194 - DNA, 559 bp, Homo sapiens
  chr3:32433054-32433613
  hyper
  anorectal vs. pancreas_gallbladder, bladder_and_urothelial
cgcagccgcacccacacaaaatcccaggaggctcagtaccagctgtggtccgggccttgcccacctcggagaggccacgacccaaggcatccggtttcctctcgctccagtctaacttccgcgcatctacgagggccgggactgccgctacctttctggaaggcgccggccggccagtcaccggagggatcccgccagaggcggctccgcgtctccagcagcggggcagggacccgggcgccccgccctcgccagcgcccgcccccgcccgcccccggcccgccctctgtatctggcccctgggcagctgcccggggaggcggccagcgagctggggccgcgcaatgtcgcacggagccgggctcgtccgcaccacgtgcagcagcggcagcgcgctcggacccggggccggcgcggcccagcccagcgcgagccccttggaggggctgctggacctcagctacccccgcacccacgcggccctgctgaaagtggcgcaaatggtaagtgagcgcggggcgcgaggccgaggttctacagggcgtcccgggaaagcagg

SEQ ID NO: 453195 - DNA, 180 bp, Homo sapiens
  chr3:32433665-32433845
  hyper
  anorectal vs. pancreas_gallbladder, bladder_and_urothelial
atcgcgcagcgggcggggcaccgcgtcgctaaagttcgcggcaggcttcctccgggaaagttgctgccgcagcccccgcgctggagctcagtccccagagccgccccggcccttgctcccgcggacccaggtcgccagggtcgcaagtttctccggccacccccctgcgaagcctgaccc

SEQ ID NO: 453196 - DNA, 247 bp, Homo sapiens
  chr3:32433366-32433613
  hyper
  anorectal vs. pancreas_gallbladder
cggggaggcggccagcgagctggggccgcgcaatgtcgcacggagccgggctcgtccgcaccacgtgcagcagcggcagcgcgctcggacccggggccggcgcggcccagcccagcgcgagccccttggaggggctgctggacctcagctacccccgcacccacgcggccctgctgaaagtggcgcaaatggtaagtgagcgcggggcgcgaggccgaggttctacagggcgtcccgggaaagcagg

SEQ ID NO: 453197 - DNA, 201 bp, Homo sapiens
  chr3:32433665-32433866
  hyper
  anorectal vs. pancreas_gallbladder
atcgcgcagcgggcggggcaccgcgtcgctaaagttcgcggcaggcttcctccgggaaagttgctgccgcagcccccgcgctggagctcagtccccagagccgccccggcccttgctcccgcggacccaggtcgccagggtcgcaagtttctccggccacccccctgcgaagcctgacccgcctactgactgaaaccacgg

SEQ ID NO: 453198 - DNA, 81 bp, Homo sapiens; identical to SEQ ID NO: 345086
  chr3:32434068-32434149
  hyper
  anorectal vs. pancreas_gallbladder

SEQ ID NO: 453199 - DNA, 14 bp, Homo sapiens
  chr3:35680722-35680736
  hyper
  anorectal vs. breast
cgcgggcgcccggc

SEQ ID NO: 453200 - DNA, 64 bp, Homo sapiens; identical to SEQ ID NO: 349753
  chr3:35681641-35681705
  hyper
  anorectal vs. breast

SEQ ID NO: 453201 - DNA, 50 bp, Homo sapiens; identical to SEQ ID NO: 331738
  chr3:39250115-39250165
  hyper
  anorectal vs. upper_gi,pancreas_gallbladder

SEQ ID NO: 453202 - DNA, 196 bp, Homo sapiens
  chr3:44038922-44039118
  hyper
  anorectal vs. lung
tattacaaaggtcgtttgttgttgttgtttttttaaaacaccaagtaaccccccccccccccccccacggacttatactttgtttatgagatttctccaaccttggtggtttggagaaatgaggtgggggaggggaggaccaagggcagcaagacgtccactacgaaaataagatacttactaatttaatagggcc

SEQ ID NO: 453203 - DNA, 234 bp, Homo sapiens
  chr3:49906737-49906971
  hyper
  anorectal vs. head_and_neck
cgcggcagccccgcccagccccctccgggttgtcgcccataaagaactctccgttgtcatggaaattagtgactgctaagcgggagggaaggggcccggggacagttgggaggggctggaggcggctctgggaacggggagggacggctcagctctcggcccctatcctcacgggggaccacgaatcttcgagggttaatcttttcacaattccgagccgcagaagcttccccc

SEQ ID NO: 453204 - DNA, 49 bp, Homo sapiens; identical to SEQ ID NO: 349768
  chr3:49907379-49907428
  hyper
  anorectal vs. head_and_neck

SEQ ID NO: 453205 - DNA, 447 bp, Homo sapiens
  chr3:62859445-62859892
  hyper
  anorectal vs. upper_gi,colorectal,pancreas_gallbladder, lung,head_and_neck,sarcoma,ovary
cgagccagaaggtggcggcgaagtcaccttgggaagaggagaatagggtcaaagacaggacggcggaggggctgacccggacggaaggaccagagggcgtgcccctgctctggggtcagtgaggaagggtcagggggactggtgagaactccagccataaggaagcagtgcccgaggacactttggcgacgctagtcggtgatcagctgacccgggcagggagaggagggtgcccttcgcagagtcacgggaagcttcgccttctgggcttgctttctcccgcctgcccctgcggttgctctctgccccagcgagcggagcgctgctccaagacgctcttctccctccacctcggcgcccccacctgccgttgcccccgcccgccgaacgcacgcccaggagggcgggcccggagttgagcgcagccgcccgccgctggagagcgct

SEQ ID NO: 453206 - DNA, 206 bp, Homo sapiens
  chr3:62859964-62860170
  hyper
  anorectal vs. upper_gi,colorectal,pancreas_gallbladder, lung,head_and_neck,sarcoma,ovary
acaaagcgggacctgcctgcctcgctcaccaacgctcccgggctgggggggctcgagcaagcggcgctgcgctccgcggccctcgccggtcccagtcagctccaggagcgctccaggctgggttgggctgggcctgggcgagcccggccgctgggagggggcctcgtagccctttccccagggcgcggtctccacctctcctgctc

SEQ ID NO: 453207 - DNA, 311 bp, Homo sapiens; identical to SEQ ID NO: 357643
  chr3:73674224-73674535
  hyper
  anorectal vs. head_and_neck

SEQ ID NO: 453208 - DNA, 174 bp, Homo sapiens; identical to SEQ ID NO: 357644
  chr3:85008817-85008991
  hyper
  anorectal vs. lung

SEQ ID NO: 453209 - DNA, 49 bp, Homo sapiens
  chr3:115231437-115231486
  hyper
  anorectal vs. bladder_and_urothelial,ovary,prostate, multiple_myeloma,lung,breast,non_cancer,uterine,sarcoma,thyroid, renal,head_and_neck,myeloid_neoplasm
cgcagctcctctggaccgagccacacctctgcctgggaatcctgggctg

SEQ ID NO: 453210 - DNA, 28 bp, Homo sapiens
  chr3:116163681-116163709
  hyper
  anorectal vs. liver_bileduct,sarcoma,melanoma,upper_gi, lung,multiple_myeloma,breast,cervical,renal,non_cancer, bladder_and_urothelial,thyroid,prostate,pancreas_gallbladder
cgtgtagacgcgcgcagcagaaaagttg

SEQ ID NO: 453211 - DNA, 302 bp, Homo sapiens; identical to SEQ ID NO: 349804
  chr3:116163989-116164291
  hyper
  anorectal vs. liver_bileduct,sarcoma,melanoma,upper_gi, lung,multiple_myeloma,breast,cervical,renal,non_cancer, bladder_and_urothelial,thyroid,prostate,pancreas_gallbladder

SEQ ID NO: 453212 - DNA, 154 bp, Homo sapiens; identical to SEQ ID NO: 357668
  chr3:123168102-123168256
  hyper
  anorectal vs. head_and_neck

SEQ ID NO: 453213 - DNA, 49 bp, Homo sapiens
  chr3:129694299-129694348
  hyper
  anorectal vs. multiple_myeloma
ggttgcactcccggcgaggcagtcccagcgttggcttccccagttccgc

SEQ ID NO: 453214 - DNA, 30 bp, Homo sapiens
  chr3:130064848-130064878
  hyper
  anorectal vs. sarcoma,multiple_myeloma,myeloid_neoplasm, ovary,non_cancer,prostate,renal,breast,thyroid
gggcctgaggcaggcgggggaggaaacctc

SEQ ID NO: 453215 - DNA, 65 bp, Homo sapiens; identical to SEQ ID NO: 357691
  chr3:132757908-132757973
  hyper
  anorectal vs. lung

SEQ ID NO: 453216 - DNA, 36 bp, Homo sapiens
  chr3:136751341-136751377
  hyper
  anorectal vs. upper_gi,ovary,bladder_and_urothelial, multiple_myeloma,lymphoid_neoplasm
cgtcctcttcccggatacttggagacagcagcgtca

SEQ ID NO: 453217 - DNA, 269 bp, Homo sapiens; identical to SEQ ID NO: 331913
  chr3:150481645-150481914
  hyper
  anorectal vs. liver_bileduct,cervical

SEQ ID NO: 453218 - DNA, 3 bp, Homo sapiens
  chr3:150505770-150505773
  hyper
  anorectal vs. pancreas_gallbladder,upper_gi,cervical, colorectal,lymphoid_neoplasm,lung,multiple_myeloma, bladder_and_urothelial
agc

SEQ ID NO: 453219 - DNA, 64 bp, Homo sapiens
  chr3:154797121-154797185
  hyper
  anorectal vs. melanoma,ovary
cggtccacaggggagagatggagccccctcaggactagagaatcccgaagagcccgtgtattgt

SEQ ID NO: 453220 - DNA, 121 bp, Homo sapiens
  chr3:154797214-154797335
  hyper
  anorectal vs. melanoma,ovary
ctaaaaatgtttagcaaagcccttttgggaatggtgagatggggggtggggaggatgggacattttcattgccaccgcccgccccccgtctccccggccccctcacatgaagtgactggat

SEQ ID NO: 453221 - DNA, 33 bp, Homo sapiens
  chr3:157824101-157824134
  hyper
  anorectal vs. head_and_neck,cervical
cgggggctgccggagggaaatgggaactgatgc

SEQ ID NO: 453222 - DNA, 140 bp, Homo sapiens; identical to SEQ ID NO: 349857
  chr3:157825408-157825548
  hyper
  anorectal vs. colorectal,myeloid_neoplasm,cervical, thyroid,bladder_and_urothelial,uterine,non_cancer

SEQ ID NO: 453223 - DNA, 96 bp, Homo sapiens; identical to SEQ ID NO: 370271
  chr3:164912568-164912664
  hyper
  anorectal vs. multiple_myeloma

SEQ ID NO: 453224 - DNA, 283 bp, Homo sapiens
  chr3:170626174-170626457
  hyper
  anorectal vs. head_and_neck,colorectal,upper_gi, pancreas_gallbladder,cervical
ctgagccccggcgggtcccgcgctcgcctctgttcccccatccattctccttctttctctcggtcagcgctcagttctgggcgccttccccggccctgcctcactctggccccatccccaccagcttttccccaccagcttttccccaggtcttcacctttcagctggcaaagagcgcctttcgtctgcgcacccgcgctggtcccctacagcagcggcgccggcagcggcggtggcggccgcggcagttccaagagacggggcggggccgccacactttcca

SEQ ID NO: 453225 - DNA, 26 bp, Homo sapiens
  chr3:170626710-170626736
  hyper
  anorectal vs. head_and_neck,colorectal,upper_gi, pancreas_gallbladder,cervical
aggtttgttgcgttcgggtcgcagtc

SEQ ID NO: 453226 - DNA, 108 bp, Homo sapiens
  chr3:170626349-170626457
  hyper
  anorectal vs. head_and_neck,colorectal,upper_gi
cgcctttcgtctgcgcacccgcgctggtcccctacagcagcggcgccggcagcggcggtggcggccgcggcagttccaagagacggggcggggccgccacactttcca

SEQ ID NO: 453227 - DNA, 508 bp, Homo sapiens; identical to SEQ ID NO: 357752
  chr3:170626710-170627218
  hyper
  anorectal vs. head_and_neck,colorectal,upper_gi

SEQ ID NO: 453228 - DNA, 80 bp, Homo sapiens; identical to SEQ ID NO: 357756
  chr3:173115694-173115774
  hyper

SEQ ID NO: 453229 - DNA, 87 bp, Homo sapiens
  chr3:179754092-179754179
  hyper
  anorectal vs. prostate,breast,sarcoma,melanoma, non_cancer,cervical,lung,uterine,bladder_and_urothelial,thyroid, ovary,multiple_myeloma
cgattccttgatcctgtttaaagaaacaggctcagggaatgcacagaaaacaaacttccccaatcgaagttctgaggtcttccctcc

SEQ ID NO: 453230 - DNA, 207 bp, Homo sapiens
  chr3:180397104-180397311
  hyper
  anorectal vs. lung,sarcoma,breast
cgttcgccaccgggatggcgaacccatcctcccagtgcagctcagccaggaattcgctactcatgactgcaaacggatagagaagatacagagcaaagatccgccttcttgtacagcgggtgagcagcacccgcgtcaagcccaggcacctgcacagtgccgcggcaattgccgggggagccctagcaaccttcccgcgtccttagt

SEQ ID NO: 453231 - DNA, 98 bp, Homo sapiens
  chr3:181421152-181421250
  hyper
  anorectal vs. myeloid_neoplasm,thyroid
cggaaatcggcttaatttttcataaaagaatggctttttaaaatattgaatactatggctatgcaaggtttatgatacctttatgtttattcttccca

SEQ ID NO: 453232 - DNA, 809 bp, Homo sapiens; identical to SEQ ID NO: 345120
  chr3:183165024-183165833
  hyper
  anorectal vs. liver_bileduct,bladder_and_urothelial,lung, melanoma,pancreas_gallbladder,ovary,lymphoid_neoplasm,renal, colorectal,multiple_myeloma,uterine,prostate,upper_gi

SEQ ID NO: 453233 - DNA, 3 bp, Homo sapiens
  chr3:186078710-186078713
  hyper
  anorectal vs. thyroid,non_cancer,lymphoid_neoplasm, sarcoma,multiple_myeloma,prostate,bladder_and_urothelial, myeloid_neoplasm,renal,cervical,breast,uterine,ovary
cgt

SEQ ID NO: 453234 - DNA, 133 bp, Homo sapiens
  chr3:186079331-186079464
  hyper
  anorectal vs. thyroid,non_cancer,lymphoid_neoplasm, sarcoma,multiple_myeloma,prostate,bladder_and_urothelial, myeloid_neoplasm,renal,cervical,breast,uterine,ovary
aaaagcatctcctgcttctcggactgcctggagcgcgaactggatatcaaggagccaaggttaagtccagaagaagaaggaaatccgaccagttgctttagcaaactgcctggagcaaggccgcctcccaccc

SEQ ID NO: 453235 - DNA, 291 bp, Homo sapiens
  chr3:186079331-186079622
  hyper
  anorectal vs. prostate,myeloid_neoplasm,non_cancer, thyroid,multiple_myeloma,lymphoid_neoplasm,ovary,breast,sarcoma, uterine,renal,lung,bladder_and_urothelial,cervical,melanoma
aaaagcatctcctgcttctcggactgcctggagcgcgaactggatatcaaggagccaaggttaagtccagaagaagaaggaaatccgaccagttgctttagcaaactgcctggagcaaggccgcctcccacccgcacagctttgaggcttgagggggcctctcagtcgcagagagagccgagccccaccctgtgcgttccccaagcctgcacccctcgagcggggcatcccttcctgcagggctttgtggcaggtggaactgtcggggtgggcgccgtggctttggctgca

SEQ ID NO: 453236 - DNA, 125 bp, Homo sapiens
  chr3:186079497-186079622
  hyper
  anorectal vs. prostate,sarcoma,ovary,non_cancer, myeloid_neoplasm,thyroid,uterine,multiple_myeloma,breast, lymphoid_neoplasm,renal,melanoma,lung,pancreas_gallbladder, bladder_and_urothelial,cervical
cgcagagagagccgagccccaccctgtgcgttccccaagcctgcacccctcgagcggggcatcccttcctgcagggctttgtggcaggtggaactgtcggggtgggcgccgtggctttggctgca

SEQ ID NO: 453237 - DNA, 56 bp, Homo sapiens; identical to SEQ ID NO: 349888
  chr3:192128140-192128196
  hyper
  anorectal vs. head_and_neck,renal,sarcoma,ovary, myeloid_neoplasm,thyroid,prostate,bladder_and_urothelial, multiple_myeloma,non_cancer,breast,lung

SEQ ID NO: 453238 - DNA, 708 bp, Homo sapiens; identical to SEQ ID NO: 370338
  chr3:197807545-197808253
  hyper
  anorectal vs. head_and_neck

SEQ ID NO: 453239 - DNA, 80 bp, Homo sapiens
  chr4:6201800-6201880
  hyper
  anorectal vs. lung,ovary,renal,breast,uterine,sarcoma, bladder_and_urothelial,prostate,non_cancer,cervical
cgagagtggaagggggacccagagggggcgcgatggccggaggagggggagatggacgatggggcggggcggcaccggtc

SEQ ID NO: 453240 - DNA, 65 bp, Homo sapiens; identical to SEQ ID NO: 346630
  chr4:6202658-6202723
  hyper
  anorectal vs. lung,ovary,renal,breast,uterine,sarcoma, bladder_and_urothelial,prostate,non_cancer,cervical

SEQ ID NO: 453241 - DNA, 29 bp, Homo sapiens
  chr4:13549864-13549893
  hyper
  anorectal vs. head_and_neck
gcgatccaaaccgcctaagcatcccaagc

SEQ ID NO: 453242 - DNA, 353 bp, Homo sapiens; identical to SEQ ID NO: 349919
  chr4:15780742-15781095
  hyper

SEQ ID NO: 453243 - DNA, 708 bp, Homo sapiens
  chr4:46391710-46392418
  hyper
  anorectal vs. cervical,sarcoma
caggaaagtgtctctatcgggaccaacgtgtgcgaccctacctgaaacggcaagcagaattcggtgttttcttccttttgccctgatcttgacgagataggaaacttgggagagagagagagagagagagagagagagagagagagagagagagagagagagagagagaccgagactgcagcagccaagagagcgtggagcgatgggctggtggaagccggagaggagcgctaggagccgcggcggcggcgcgaggtgtagaaggaggcgaaggcgttcgtagtggcggtgatgggcggaggaggaggaagaggaggaggaggaagaggaggagggggaaaacgatgacaggagctggggccggggggggaaattggggggacgcgggcggaggcgcggtgcgcgccggcggtggcgggcacgagccccgcgcctggaggaggaggagtcaggccgggtaggagggctaaggaggttcccgggaaggcagggccccccctcccccccctcccccccccccacacacacacactcccctgcctcgatccctcgatccctggtaactgaccgtcgcccgcctggcactagcagcggcgcagacccgggcggcgtcgggcgcctgggtgcgctcggagcgccgctcccctcgcccacacctcgccggaggagcggagcccacgcgcagcctcgggctgctccccgaggccg

SEQ ID NO: 453244 - DNA, 142 bp, Homo sapiens; identical to SEQ ID NO: 357871
  chr4:46392515-46392657
  hyper
  anorectal vs. cervical,sarcoma

SEQ ID NO: 453245 - DNA, 194 bp, Homo sapiens
  chr4:55094321-55094515
  hyper
cgatgaaggtgaacgcgctcccctcccccgctgtcgctgggaagccccactctgcccaggtctggttcctggagcatcagcgccccctttccctcgccggcaggatcgtttcctcccgacactggcctctcgccttgggcgcagggtttggggctcagctgtcaattccaaggaattcgtagggttcgacccac

SEQ ID NO: 453246 - DNA, 70 bp, Homo sapiens; identical to SEQ ID NO: 357882
  chr4:55094684-55094754
  hyper

SEQ ID NO: 453247 - DNA, 133 bp, Homo sapiens; identical to SEQ ID NO: 199452
  chr4:76555905-76556038
  hyper
  anorectal vs. lung,colorectal,pancreas_gallbladder, upper_gi

SEQ ID NO: 453248 - DNA, 12 bp, Homo sapiens
  chr4:85503845-85503857
  hyper
  anorectal vs. head_and_neck
cgctcacttcca

SEQ ID NO: 453249 - DNA, 20 bp, Homo sapiens
  chr4:85503892-85503912
  hyper
  anorectal vs. head_and_neck
cagcctcctcccgccccacc

SEQ ID NO: 453250 - DNA, 251 bp, Homo sapiens
  chr4:85503985-85504236
  hyper
  anorectal vs. head_and_neck
cgtcacctcacggggaggcggggctgtgggaaccgcagtgcagcgcagaggggcggggcctgcggcgcgagacctggtgcgggaggcccgggcagggagaagtgtgcggggccgggacaagccggctccgagtccggctccggggggcggggcgggaggggcctgcgcggcggcgggagcccagagccgcgctaaagcgggtcaagcgtcctccttttctccccgccccttctcctcctcctacctgggcc

SEQ ID NO: 453251 - DNA, 616 bp, Homo sapiens; identical to SEQ ID NO: 332148
  chr4:90228673-90229289
  hyper
  anorectal vs. pancreas_gallbladder,upper_gi,colorectal, bladder_and_urothelial,ovary,uterine,lung

SEQ ID NO: 453252 - DNA, 317 bp, Homo sapiens
  chr4:96470377-96470694
  hyper
  anorectal vs. lung
cgcctgtgaggaacacacacagacaccgggggtgggggtgggggtgggggttgaagtggggggagttggaggaggagggaacggagggaggaagcttgggcaccgtcaggcgctctggtctccaatctcagtgttctcacgccggcggagagatgtcccggctgtcgctgctgggtggccaaggaggttcacatcctagagtagggcgcacgggtgcgcgaaggcgctcgccaaggaggcgtagagggcgcagcacaactcctctggggggtaaccgggggcgggagcacgcccgcccgccttatgtaagcaaggat

SEQ ID NO: 453253 - DNA, 25 bp, Homo sapiens
  chr4:96471192-96471217
  hyper
  anorectal vs. lung
ctgacaagggtggtgatgcgatacc

SEQ ID NO: 453254 - DNA, 92 bp, Homo sapiens
  chr4:102711787-102711879
  hyper
  anorectal vs. cervical
ggatgtaagagcaggcccctgagcagtttcacttcctctgggcgcccagcagagcggagccctggccttgcgggcatgagccccggggctgc

SEQ ID NO: 453255 - DNA, 157 bp, Homo sapiens; identical to SEQ ID NO: 349965
  chr4:113442552-113442709
  hyper
  anorectal vs. ovary,thyroid,non_cancer,cervical,prostate, multiple_myeloma

SEQ ID NO: 453256 - DNA, 11 bp, Homo sapiens
  chr4:113443992-113444003
  hyper
  anorectal vs. non_cancer,thyroid,myeloid_neoplasm, multiple_myeloma
cgtgtctacag

SEQ ID NO: 453257 - DNA, 235 bp, Homo sapiens
  chr4:121992978-121993213
  hyper
  anorectal vs. lung
cggatagggcgcccttgagaagcttcttgggccttgaagatttgggggcgcgtgcctcgagcccccatctcggatgacccttcgggcgtgaacgctccttgtgctaggtctcagggtggcgggctaaggcgtcgggtctctggggcattgctttcctctccccacttaccttaaaaagatctgtttttcgtagggaaaatagaaaaaaatccctccccgtggtgtggtgtgcgaa

SEQ ID NO: 453258 - DNA, 114 bp, Homo sapiens; identical to SEQ ID NO: 349974
  chr4:121993736-121993850
  hyper
  anorectal vs. lung

SEQ ID NO: 453259 - DNA, 20 bp, Homo sapiens
  chr4:155665017-155665037
  hyper
  anorectal vs. head_and_neck
cgggatcccgcgtcctcccc

SEQ ID NO: 453260 - DNA, 247 bp, Homo sapiens
  chr4:155665475-155665722
  hyper
  anorectal vs. head_and_neck
aggatgaagaaccccatgctggaggtggtgtctttactactggagaagctgctcctcatctccaacttcacgctctttagttcgggcgccgcgggcgaagacaaagggaggaacagtttttatgaaaccagctctttccaccgaggcgacgtgctggaggtgccccggacccacctgacccactatggcatctacctaggagacaaccgtgttgcccacatgatgcccgacatcctgttggccctga

SEQ ID NO: 453261 - DNA, 54 bp, Homo sapiens; identical to SEQ ID NO: 370589
  chr4:155665778-155665832
  hyper
  anorectal vs. head_and_neck

SEQ ID NO: 453262 - DNA, 40 bp, Homo sapiens; identical to SEQ ID NO: 350004
  chr4:156298073-156298113
  hyper
  anorectal vs. lung,breast,uterine,lymphoid_neoplasm, ovary

SEQ ID NO: 453263 - DNA, 54 bp, Homo sapiens
  chr4:158142705-158142759
  hyper
  anorectal vs. bladder_and_urothelial
cggcctattcgcgtgaataagagactcttggatttttgggcgctagcgcgcgcc

SEQ ID NO: 453264 - DNA, 269 bp, Homo sapiens
  chr4:158143023-158143292
  hyper
  anorectal vs. bladder_and_urothelial
gtgtgcgtttctggggtggtgtgtgtgcgtttctgtgtgtcagtgtgtgggtgtgagtgactgcacacacgcgtgcgtgtgaccgtgtagagagaaggtggctgtaatctcagggacccccgctggctggagagggctgaagagagagggaaaggacgtcaagagtgtgcgcattagggagccggggtgagggttggagccagggagggcggctttcttgggttcaaggggttttcgctcatcttgagtgcttcaggagaagccctccc

SEQ ID NO: 453265 - DNA, 169 bp, Homo sapiens
  chr4:163085074-163085243
  hyper
  anorectal vs. lung,bladder_and_urothelial,cervical
cgctcgcgtctcaggttcagcaccgacagcacagtggacagtaccagctcctttcacctccagtttgtctcagtcactgaaccaggctgattctcgctcctcctccctaggcaggagctgctgccactcaacccgggggtgccccgcccccaccatctgacgtaactat

SEQ ID NO: 453266 - DNA, 244 bp, Homo sapiens; identical to SEQ ID NO: 358006
  chr4:163085479-163085723
  hyper
  anorectal vs. lung,bladder_and_urothelial,cervical

SEQ ID NO: 453267 - DNA, 359 bp, Homo sapiens; identical to SEQ ID NO: 358007
  chr4:164253781-164254140
  hyper

SEQ ID NO: 453268 - DNA, 4 bp, Homo sapiens
  chr4:166793770-166793774
  hyper
  anorectal vs. bladder_and_urothelial
cgcc

SEQ ID NO: 453269 - DNA, 537 bp, Homo sapiens
  chr4:166794038-166794575
  hyper
  anorectal vs. bladder_and_urothelial
gggaggggaaatatggatttgcagctaagttatcacgatccttcgctccacccccggtctggcactctcaactgacacgtacatcatctattaattgctgtttgcgtacacagatacataatatattcatttttatctttggtaaaatataaatggaattgtcagcgcgctcctgtctgtttgtttgtctaaggctatcaaaagaagtcaagagaggaggctgtggtccggatcctgaccctgattgtatgaataagtaagcaggatgcaagtgattgggttagatggtgcgaatatttttttttttcaagttaggaagagggtaaaaagacaggctggcggggggaaggcaaacagtgcatccccaaatcctcacacttttgctctcttgcagtcagttgctttgctggcttctgcaggcttttaaggtctcgcggcgtagaaatgcctggcccccacccccttcctcggtctcccctttcaattcagatgtgctgatgtgcagaccggattcatcttctcggagctgcggcggcg

SEQ ID NO: 453270 - DNA, 69 bp, Homo sapiens
  chr4:176922585-176922654
  hyper
  anorectal vs. lung,breast,ovary,bladder_and_urothelial, myeloid_neoplasm,multiple_myeloma,prostate,renal,non_cancer, cervical
cgctcttcgaggtgactcgtgggaccctgcgtcctagtgctgggtgtgaatcggctatttcacacccag

SEQ ID NO: 453271 - DNA, 43 bp, Homo sapiens
  chr4:176986744-176986787
  hyper
  anorectal vs. melanoma,ovary,sarcoma,renal,lung, lymphoid_neoplasm,myeloid_neoplasm,prostate, bladder_and_urothelial,non_cancer,breast,thyroid, multiple_myeloma
cgctataaaatgtgttaggtggtgagaacgctgatggttcacc

SEQ ID NO: 453272 - DNA, 504 bp, Homo sapiens; identical to SEQ ID NO: 332261
  chr4:177116437-177116941
  hyper
  anorectal vs. head_and_neck

SEQ ID NO: 453273 - DNA, 356 bp, Homo sapiens
  chr4:180979649-180980005
  hyper
  anorectal vs. head_and_neck
ccgggtcccggcgcgccgagccagccgcccctcgcgcagttcctcggccgcggcgcggggttcgccccgcttctccccggcagcagccggctgggtgcccccggcacagcacagtgcggcaggcggcagcgtcctcccctcgcctcccccacattccctcacctcagccaaggcggcagccccggcgtccccgcccgcccggccccgcgcccccgcccggagcgcccccacccgttgcgcccccgccgggtcccgccgcgcagccccgccacgctgcagctggagcgaccgccgcggccggccccgcagaccggggaggaggaggaggaggggaagccggagagggaggcgcgggg

SEQ ID NO: 453274 - DNA, 158 bp, Homo sapiens
  chr4:183727549-183727707
  hyper
  anorectal vs. pancreas_gallbladder
cggcttctgcggacatggaaaagccgtcccaacatccggcggccccgtgggcaggggtcctgggacgccccctcctgcatccccgggcgggccctgcaggggatggcggcgatttcaggaagggctccggcgccccctagtgacgcgcggctgtggta

SEQ ID NO: 453275 - DNA, 42 bp, Homo sapiens
  chr5:14142657-14142699
  hyper
  anorectal vs. head_and_neck
cgtagccggggcataggcgttttgaactagaatattcgtcca

SEQ ID NO: 453276 - DNA, 717 bp, Homo sapiens; identical to SEQ ID NO: 370674
  chr5:14142816-14143533
  hyper
  anorectal vs. head_and_neck

SEQ ID NO: 453277 - DNA, 188 bp, Homo sapiens
  chr5:22853256-22853444
  hyper
  anorectal vs. bladder_and_urothelial,multiple_myeloma
ttctcttctgtttcccctttccaaatcactgtgccaacacactgctttgcattttgtccgttttcattcaaagaaggttctccaggccgggcagccagtagacaccactttcttcctggaagaggctgcctctcttctcagaaaagcctggacccctctctgtggctccctccacatttacccttcag

SEQ ID NO: 453278 - DNA, 11 bp, Homo sapiens
  chr5:22853508-22853519
  hyper
  anorectal vs. bladder_and_urothelial,multiple_myeloma
ccaggattccc

SEQ ID NO: 453279 - DNA, 100 bp, Homo sapiens; identical to SEQ ID NO: 350052
  chr5:22853569-22853669
  hyper
  anorectal vs. bladder_and_urothelial,multiple_myeloma

SEQ ID NO: 453280 - DNA, 19 bp, Homo sapiens
  chr5:33936135-33936154
  hyper
  anorectal vs. melanoma
cgggtgggctttgcctgca

SEQ ID NO: 453281 - DNA, 99 bp, Homo sapiens
  chr5:42950747-42950846
  hyper
  anorectal vs. sarcoma,multiple_myeloma,non_cancer, myeloid_neoplasm,thyroid,lymphoid_neoplasm,renal
cgcattcgctggtacccagatttctacaggagttaaacgtctcctgagcagctaaagcagagcttactagtaagaaacttgcaatgactaaggaacttg

SEQ ID NO: 453282 - DNA, 2 bp, Homo sapiens
  chr5:57877796-57877798
  hyper
  anorectal vs. sarcoma,breast,renal, bladder_and_urothelial,myeloid_neoplasm,prostate,lung,ovary, thyroid,upper_gi,melanoma,non_cancer,uterine, pancreas_gallbladder,colorectal,multiple_myeloma,cervical
cg

SEQ ID NO: 453283 - DNA, 38 bp, Homo sapiens
  chr5:57878673-57878711
  hyper
  anorectal vs. melanoma,breast,renal,lung,sarcoma, bladder_and_urothelial,ovary,liver_bileduct, pancreas_gallbladder,multiple_myeloma,upper_gi,non_cancer, thyroid,myeloid_neoplasm,uterine,prostate,colorectal
gggagactgggagaggtaacccaggagcgtttggaaag

SEQ ID NO: 453284 - DNA, 159 bp, Homo sapiens
  chr5:57878752-57878911
  hyper
  anorectal vs. melanoma,breast,renal,lung,sarcoma, bladder_and_urothelial,ovary,liver_bileduct, pancreas_gallbladder,multiple_myeloma,upper_gi,non_cancer, thyroid,myeloid_neoplasm,uterine,prostate,colorectal
gcctgtttaatggtttgcttgcttgccgggagttgtagttcaccgctcgcccgtttgccgggaacacccggagggcgagactacagctcccaggagtgcacggggctcctcggcagtacgcgtgtgcggcgccaggagaggacagctccagtgctgatg

SEQ ID NO: 453285 - DNA, 38 bp, Homo sapiens; identical to SEQ ID NO: 453283
  chr5:57878673-57878711
  hyper
  anorectal vs. renal,ovary,breast,sarcoma,melanoma,lung, pancreas_gallbladder,non_cancer,upper_gi,thyroid, myeloid_neoplasm,prostate,multiple_myeloma,uterine, bladder_and_urothelial,colorectal,liver_bileduct

SEQ ID NO: 453286 - DNA, 159 bp, Homo sapiens; identical to SEQ ID NO: 453284
  chr5:57878752-57878911
  hyper
  anorectal vs. renal,ovary,breast,sarcoma,melanoma,lung, pancreas_gallbladder,non_cancer,upper_gi,thyroid, myeloid_neoplasm,prostate,multiple_myeloma,uterine, bladder_and_urothelial,colorectal,liver_bileduct

SEQ ID NO: 453287 - DNA, 227 bp, Homo sapiens; identical to SEQ ID NO: 345168
  chr5:57879190-57879417
  hyper
  anorectal vs. renal,ovary,breast,sarcoma,melanoma,lung, pancreas_gallbladder,non_cancer,upper_gi,thyroid, myeloid_neoplasm,prostate,multiple_myeloma,uterine, bladder_and_urothelial,colorectal,liver_bileduct

SEQ ID NO: 453288 - DNA, 292 bp, Homo sapiens
  chr5:75378714-75379006
  hyper
  anorectal vs. pancreas_gallbladder,cervical,ovary,lung, breast,uterine,bladder_and_urothelial
agtcccaggcccggaaatagaatacaaaccctctttttgtccggtgctaacagagtccagcagtcagaactccctcgcgtctcacgctggacctgacccggggcgccgccaagtgcgcaacgcacagtcacagttggtgactaattaaggactgccgcccctctccttcacctgctacaaactcagagccctgacttctccagaagtacctaccacttggaggtggctctccttccccgccccctgccccagtcccacaccgcagcagcgcctcagcaccgcgacttgccgg

SEQ ID NO: 453289 - DNA, 327 bp, Homo sapiens
  chr5:75379694-75380021
  hyper
  anorectal vs. bladder_and_urothelial,breast,ovary, pancreas_gallbladder,lung,prostate
gtgtggtttgaccggcagggataggcagattcaaatctagcagcctagagccccgggctgggtacctggacctataccttcatagctgccttaggctcaacttttcggcggggatccctctgcagacgtgcaggtggcgggagagcagaggtagccgcagtaagtgctgagagagcctgaaagaaacaccatgaattttcaaactctcccacatacattcccgaagcgcctgtctggcgtctaagagagagcaagagagggctggagagcaggggagcccgcggggctgaggctctttgtcagcgcctgcacttcctacgttacaac

SEQ ID NO: 453290 - DNA, 374 bp, Homo sapiens
  chr5:75379694-75380068
  hyper
  anorectal vs. ovary,cervical,breast
gtgtggtttgaccggcagggataggcagattcaaatctagcagcctagagccccgggctgggtacctggacctataccttcatagctgccttaggctcaacttttcggcggggatccctctgcagacgtgcaggtggcgggagagcagaggtagccgcagtaagtgctgagagagcctgaaagaaacaccatgaattttcaaactctcccacatacattcccgaagcgcctgtctggcgtctaagagagagcaagagagggctggagagcaggggagcccgcggggctgaggctctttgtcagcgcctgcacttcctacgttacaacgccttcattcagcaaaaaccttttgggcgcctgctgtgcgccaggcc

SEQ ID NO: 453291 - DNA, 53 bp, Homo sapiens
  chr5:75698192-75698245
  hyper
  anorectal vs. cervical,upper_gi,colorectal, pancreas_gallbladder,uterine,breast,liver_bileduct, multiple_myeloma,prostate,ovary
cgtgagccgccgcgcccggctctaaataatttcttatcgccctccctcagttt

SEQ ID NO: 453292 - DNA, 916 bp, Homo sapiens
  chr5:75698274-75699190
  hyper
  anorectal vs. cervical,upper_gi,colorectal, pancreas_gallbladder,uterine,breast,liver_bileduct, multiple_myeloma,prostate,ovary
ttccacaattgtcaaataggtgagggcacaggtacggaagcgtcccgcattccctccagattttatcacgctgagacacaaagagaaaaatagctcctggcgaccgcatgaaaaccccgatttcaaaacagccacatgcagtttaatttccttaaaagcttagccggaaaaggtttctgtggcttgcgaccccagctgggcttgagagaaggctctgcacactggggcgggggcgggcacaaggtgatcggagggagggggatgactcgcagttgtgttttgagtggttgccttgggttatcttgttcctccagcacacacacactcagtttcttgtcataaggggaaccctgttattttgtagacaaaaagtgacagaagcaactttcgaagcaaaaaaaaaaaaaaaacaaaaaaaaacaaaaccaaaaagacgaagaagaagaacaaaagtcaacgtgaaatctccccagaggaaaaggaaccgcgctgtttgtccctcagtaactgagcaacaccccggacacgaagggctccctgtgacttctgcggtttttcttgcacttctccgcgttggttcacttccaccctcgaaactctccagaagcgagaaataaggcggggtggccgccacccccaggccaccagctgtgcgggggccccagctgcagggggtcccggcccagcgtccctctcggccccttccctctcccccgggggagaaggggcgggtccacgcggcctgggcgctgcgcccgacacgcggtaggggtcgctgcgtctcggcgcgcgctcccaccgcggtgaataacggggcctggctggaggagaaaggaaacctgctgcgggaggcggcggcgaccggccagggagcgagggaggagagttcacttttacttcagtgtcagcgcgcggc

SEQ ID NO: 453293 - DNA, 752 bp, Homo sapiens
  chr5:75698708-75699460
  hyper
  anorectal vs. cervical,upper_gi,pancreas_gallbladder, colorectal,liver_bileduct,breast,uterine,prostate,renal, myeloid_neoplasm,non_cancer,thyroid,lung,melanoma,ovary, multiple_myeloma
cgaagaagaagaacaaaagtcaacgtgaaatctccccagaggaaaaggaaccgcgctgtttgtccctcagtaactgagcaacaccccggacacgaagggctccctgtgacttctgcggtttttcttgcacttctccgcgttggttcacttccaccctcgaaactctccagaagcgagaaataaggcggggtggccgccacccccaggccaccagctgtgcgggggccccagctgcagggggtcccggcccagcgtccctctcggccccttccctctcccccgggggagaaggggcgggtccacgcggcctgggcgctgcgcccgacacgcggtaggggtcgctgcgtctcggcgcgcgctcccaccgcggtgaataacggggcctggctggaggagaaaggaaacctgctgcgggaggcggcggcgaccggccagggagcgagggaggagagttcacttttacttcagtgtcagcgcgcggcggccgtggctggctctggcgagagagcaccgagggagtgggtcgcagatcttcgggcggctaggggaaatcggcgagaggcgggatccgagcgcgccggcggggcgcagagcccgcgagcctggccagcgagggtagccgcggggggcgcgccccgggcgggcccccggagacgcgcaggatgccacacgaagagctgccgtcgctgcagagaccccgctatggctgtaagtgcgccgggcgcgcggggttcctgctggccttggggagc

SEQ ID NO: 453294 - DNA, 267 bp, Homo sapiens
  chr5:75699193-75699460
  hyper
  anorectal vs. cervical,liver_bileduct, pancreas_gallbladder,upper_gi,colorectal,melanoma,breast, uterine,lung,prostate,renal,non_cancer,myeloid_neoplasm, multiple_myeloma,ovary,thyroid,sarcoma,head_and_neck
cgtggctggctctggcgagagagcaccgagggagtgggtcgcagatcttcgggcggctaggggaaatcggcgagaggcgggatccgagcgcgccggcggggcgcagagcccgcgagcctggccagcgagggtagccgcggggggcgcgccccgggcgggcccccggagacgcgcaggatgccacacgaagagctgccgtcgctgcagagaccccgctatggctgtaagtgcgccgggcgcgcggggttcctgctggccttggggagc

SEQ ID NO: 453295 - DNA, 19 bp, Homo sapiens
  chr5:75700173-75700192
  hyper
  anorectal vs. cervical,liver_bileduct, pancreas_gallbladder,upper_gi,colorectal,melanoma,breast, uterine,lung,prostate,renal,non_cancer,myeloid_neoplasm, multiple_myeloma,ovary,thyroid,sarcoma,head_and_neck
ccagattaacaccaaccac

SEQ ID NO: 453296 - DNA, 345 bp, Homo sapiens; identical to SEQ ID NO: 345175
  chr5:76926856-76927201
  hyper
  anorectal vs. cervical,head_and_neck,ovary,sarcoma, breast,uterine,renal,bladder_and_urothelial,prostate, myeloid_neoplasm,non_cancer,thyroid

SEQ ID NO: 453297 - DNA, 192 bp, Homo sapiens
  chr5:77148195-77148387
  hyper
  anorectal vs. sarcoma
gtttctgcaattatggcttaaacgggtgaatttgggactgtggaggaccctaattggcctaaatttgatattttgcatatttgcataatgaggaaattggtagaaaattgtgttcattcatttgtgaaaaatcctatgaattttatgaatttgaaagctctgtttgtgcagactgtgactttgcctgctgat

SEQ ID NO: 453298 - DNA, 46 bp, Homo sapiens
  chr5:87436549-87436595
  hyper
  anorectal vs. lung,bladder_and_urothelial,colorectal, ovary,uterine,breast,upper_gi,sarcoma,renal,liver_bileduct, prostate,myeloid_neoplasm,non_cancer,cervical,thyroid, head_and_neck,pancreas_gallbladder
cggatcttgttttttcttttcttttcatgggtccccgtttgcgctc

SEQ ID NO: 453299 - DNA, 735 bp, Homo sapiens; identical to SEQ ID NO: 345179
  chr5:87436769-87437504
  hyper
  anorectal vs. lung,bladder_and_urothelial,colorectal, ovary,uterine,breast,upper_gi,sarcoma,renal,liver_bileduct, prostate,myeloid_neoplasm,non_cancer,cervical,thyroid, head_and_neck,pancreas_gallbladder

SEQ ID NO: 453300 - DNA, 80 bp, Homo sapiens; identical to SEQ ID NO: 345180
  chr5:87957200-87957280
  hyper
  anorectal vs. prostate,myeloid_neoplasm,melanoma,uterine, non_cancer,thyroid,breast,lung,ovary,renal

SEQ ID NO: 453301 - DNA, 157 bp, Homo sapiens
  chr5:87969885-87970042
  hyper
  anorectal vs. uterine,sarcoma,thyroid,non_cancer,ovary, myeloid_neoplasm,multiple_myeloma,prostate,breast,melanoma, renal
cgcgccataggggtcatctatttgaggaggaagaaaaagcgggtgtgtgtgtgtgtgtgtgtgtgtgtgtgtgtgcgcgcgcgcgcgcgcgtctgccttccacggaaagagagacggagagatgtgggagggtgggggtggaagtatgcagacagag

SEQ ID NO: 453302 - DNA, 317 bp, Homo sapiens
  chr5:87970918-87971235
  hyper
  anorectal vs. uterine,sarcoma,myeloid_neoplasm,thyroid, non_cancer,melanoma,multiple_myeloma,ovary,breast,prostate, renal,lymphoid_neoplasm
tcacacttcaagcctccttcctcaaacaatccgatgggaaggacctggctgttcaggggaagcctttgctggcctctctttttacatggggtgaagtcgaaccccaatctaggagccctggcctagatggctccgcagatgagtcccagacgtggccatggaaagactgatctctctctgctcagagcgcctgcctcggtgctcactagcgcaagcacctcccaacacacatacatacatacacacacacacacaacacagcactcccatcacattaaaacgcgcgctcatgatcctgccgttaatgaagccgaggc

SEQ ID NO: 453303 - DNA, 600 bp, Homo sapiens
  chr5:87970918-87971518
  hyper
  anorectal vs. uterine,myeloid_neoplasm,thyroid, multiple_myeloma,non_cancer,melanoma,sarcoma,breast
tcacacttcaagcctccttcctcaaacaatccgatgggaaggacctggctgttcaggggaagcctttgctggcctctctttttacatggggtgaagtcgaaccccaatctaggagccctggcctagatggctccgcagatgagtcccagacgtggccatggaaagactgatctctctctgctcagagcgcctgcctcggtgctcactagcgcaagcacctcccaacacacatacatacatacacacacacacacaacacagcactcccatcacattaaaacgcgcgctcatgatcctgccgttaatgaagccgaggcgcataatgagtgcacaggtaaataggtaccgaaaccagaagacttcaccagtcggctgggcgatttacctctccctacagggagcacttgtagttatcgtgttttaggagtgatttgctgttgtctgtggtctctcgctcctcttcttgtggagagaagccaaaaaatatatatgttccgtggtcagagtcttctttctgataagctacccgagcattggtctaaaacatctgttttatctgttgattttggtttgttgttttggggagtgttgcttttctga

SEQ ID NO: 453304 - DNA, 254 bp, Homo sapiens
  chr5:87971264-87971518
  hyper
  anorectal vs. uterine,melanoma,myeloid_neoplasm,ovary, thyroid,multiple_myeloma,non_cancer,breast, bladder_and_urothelial,renal,lung,sarcoma,lymphoid_neoplasm, colorectal,prostate
cgaaaccagaagacttcaccagtcggctgggcgatttacctctccctacagggagcacttgtagttatcgtgttttaggagtgatttgctgttgtctgtggtctctcgctcctcttcttgtggagagaagccaaaaaatatatatgttccgtggtcagagtcttctttctgataagctacccgagcattggtctaaaacatctgttttatctgttgattttggtttgttgttttggggagtgttgcttttctga

SEQ ID NO: 453305 - DNA, 38 bp, Homo sapiens
  chr5:87975991-87976029
  hyper
  anorectal vs. melanoma,breast,renal,colorectal,sarcoma, lung,prostate,ovary,uterine,multiple_myeloma,non_cancer,thyroid, liver_bileduct,bladder_and_urothelial,myeloid_neoplasm, pancreas_gallbladder,upper_gi,lymphoid_neoplasm,cervical
cgaagctgggattttcaacctcttgtttattcgtaaag

SEQ ID NO: 453306 - DNA, 243 bp, Homo sapiens; identical to SEQ ID NO: 345184
  chr5:87976663-87976906
  hyper
  anorectal vs. melanoma,breast,renal,colorectal,sarcoma, lung,prostate,ovary,uterine,multiple_myeloma,non_cancer,thyroid, liver_bileduct,bladder_and_urothelial,myeloid_neoplasm, pancreas_gallbladder,upper_gi,lymphoid_neoplasm,cervical

SEQ ID NO: 453307 - DNA, 263 bp, Homo sapiens
  chr5:87986873-87987136
  hyper
  anorectal vs. pancreas_gallbladder,lung, bladder_and_urothelial,colorectal,melanoma,ovary,breast, cervical,liver_bileduct,upper_gi,sarcoma,renal,uterine
cgggtgttaattaacgcgctaatttgagcttcaggagcgggaggcggccggtagcaccgcgagccgcgaggggccagtgacctctagtggacatgaggagatatgcagcgcgagtgagcgtgtagcagagaaaactctttcctgagcagctgctcgcgtgtctcctctgaatccaatgcaagggagggacacaagtccccaatttaagggagaaagagccgtcagcaagtggtgtcgaccaaagaccttagctcttctgatgt

SEQ ID NO: 453308 - DNA, 139 bp, Homo sapiens; identical to SEQ ID NO: 346715
  chr5:87987165-87987304
  hyper
  anorectal vs. pancreas_gallbladder,lung, bladder_and_urothelial,colorectal,melanoma,ovary,breast, cervical,liver_bileduct,upper_gi,sarcoma,renal,uterine

SEQ ID NO: 453309 - DNA, 423 bp, Homo sapiens
  chr5:88179429-88179852
  hyper
  anorectal vs. melanoma,lung,bladder_and_urothelial, lymphoid_neoplasm,sarcoma
tgcctccttttttccccctttatttaattttgtccttgcctttgcttcgcgctgcctttttctctccgtctctctctcccccacaatcccaaaccgttgactctttcctcgcgagctggagaaatcatcagtttcactcttgcaaaaggggggcgggactagacctcggagcattttaataaaacaaacatacagcagctccctcctcacccctccagtctcaactagattgataaattactccactacactactttaattatgtatatggtatgcagaataaatcactgaacatcagtacctcaatcaagcacttttaaatgataattgcatcttggtgaatcaatctttccattcctgacattttgctaattttagttttacggtggggtaatagcacatgccatacgcaaacctaatgac

SEQ ID NO: 453310 - DNA, 312 bp, Homo sapiens
  chr5:88179540-88179852
  hyper
  anorectal vs. melanoma,sarcoma,lung, bladder_and_urothelial,lymphoid_neoplasm
cgagctggagaaatcatcagtttcactcttgcaaaaggggggcgggactagacctcggagcattttaataaaacaaacatacagcagctccctcctcacccctccagtctcaactagattgataaattactccactacactactttaattatgtatatggtatgcagaataaatcactgaacatcagtacctcaatcaagcacttttaaatgataattgcatcttggtgaatcaatctttccattcctgacattttgctaattttagttttacggtggggtaatagcacatgccatacgcaaacctaatgac

SEQ ID NO: 453311 - DNA, 42 bp, Homo sapiens; identical to SEQ ID NO: 345186
  chr5:88180346-88180388
  hyper
  anorectal vs. melanoma,sarcoma,lung, bladder_and_urothelial,lymphoid_neoplasm

SEQ ID NO: 453312 - DNA, 287 bp, Homo sapiens
  chr5:89854237-89854524
  hyper
  anorectal vs. breast,ovary,myeloid_neoplasm,prostate, thyroid,renal,lung,uterine,colorectal,non_cancer
cgaagggggcaactagaaagtttagccaaaggagacgattagaaagcactgaccgcgcacttacattgggacgcccaggcagaggcaagactcgcgcgctcctaagccgaggcaggtcagcctaggcgcctggctgctggaagagtccattagggatggccaaggcagggtgttcccgacgccagagcgcggacctggctgcccgctgcggagagcagagtgcgcagcccggggcggccacccccgctccgctggtcaggtgagcgctgccccgggagccatgggtc

SEQ ID NO: 453313 - DNA, 10 bp, Homo sapiens
  chr5:89854969-89854979
  hyper
  anorectal vs. breast,ovary,myeloid_neoplasm,prostate, thyroid,renal,lung,uterine,colorectal,non_cancer
ccccctaccc

SEQ ID NO: 453314 - DNA, 115 bp, Homo sapiens
  chr5:100236036-100236151
  hyper
  anorectal vs. lymphoid_neoplasm,lung,sarcoma, bladder_and_urothelial,ovary
cgggatctggagccgaacctccattccagtttactcaaaactcaaaactggcctctccacgtggcttgggtagaaagacagtcaatgagatgatttgatggttttatgagtcaac

SEQ ID NO: 453315 - DNA, 87 bp, Homo sapiens
  chr5:100238197-100238284
  hyper
  anorectal vs. lymphoid_neoplasm,lung,multiple_myeloma, bladder_and_urothelial,thyroid,prostate,renal,sarcoma, non_cancer
cgtttggtgaataaagacatttctcttgagttctgcccacagattaaaaggacaaggacacacgttctttgttgacacttctgcagt

SEQ ID NO: 453316 - DNA, 345 bp, Homo sapiens
  chr5:100239724-100240069
  hyper
  anorectal vs. lymphoid_neoplasm
ctgaaaaaaaagcagctaccatggacctctcttttaaacgcaagtacacccacacacattcggataccaaggaaggaaggaaagaaagaaaggaaagaaaagggaggggaggaaggaagagcaaagtcctctctaaaagtctcaattatatatatagcctctgattgtcacctctcctccgtcccaccatttttcgtacttgtattgggtggcagggacacttttcaagagttctgtgttcgattgttcactctgagtacctctccaccatcctccagtcgttgccctcattgggagagatgcttgctactctgctagtaccacgccttggttccggtctttact

SEQ ID NO: 453317 - DNA, 313 bp, Homo sapiens
  chr5:101631722-101632035
  hyper
  anorectal vs. lung
cggacagcgacagtgaccggagcttctcttcggagacattgggaggggctgaaggcagagatggctctggtgacttctggggctcctggggcttctgaagctcctgtggctgagaattctctctttgggggtcagaggacaaggcagagacttcgatttgggagggcgacgcagacaagcggcgcaggatgtctgggctggaggggacaaaagccaagttctcaatacctttggcgctcttcatgtctggatgggttctcccgactccggtgcttcagagcagcagagccaggtccctctctggctcctccca

SEQ ID NO: 453318 - DNA, 222 bp, Homo sapiens
  chr5:101632074-101632296
  hyper
  anorectal vs. lung
ctcctggccctccagcctccagcgcactctccgccaccgcctgaaccttcctactccagctcgcagctgtctggagcgcagagcgctgagcgggggcgttagcgccccagcctgtggctttggcgctcagctgtgcctcacccgtcgcctcaaggaccaaccggaaggcgcggcgtgggcgtgccacccggcggcggccgagtagagggggcgagagttctc

SEQ ID NO: 453319 - DNA, 219 bp, Homo sapiens
  chr5:113696733-113696952
  hyper
  anorectal vs. uterine,prostate,breast,ovary,lung, melanoma,thyroid,colorectal,renal,multiple_myeloma,non_cancer, myeloid_neoplasm
cggcaaggaagccctgggacctccggattcgggctgccggagggcctgagcgccagagcccaggacccggcggccgggggcgccatcccctcatgttctggagaaggcgcaaatgtgagctggcggtagcggggaaagccctccgcccccgccaggggggacccgggaagcccggccggctctgtcggcagactgcggggatcccctcctccggccccg

SEQ ID NO: 453320 - DNA, 58 bp, Homo sapiens
  chr5:114515671-114515729
  hyper
  anorectal vs. cervical,colorectal,prostate,ovary
cttgcctttagctatcaattccatgatgtagccaaattcactcatctccccagactcc

SEQ ID NO: 453321 - DNA, 132 bp, Homo sapiens
  chr5:114515769-114515901
  hyper
  anorectal vs. cervical,colorectal,prostate,ovary
cgggtgtatcgaatttgtcctttcttttctctttttctgtttttagtctgagttttgccgagctccccgcccataagctgttaaccaggaaaagaggggaagcgccggggaaagcaagaagcgggcttgggt

SEQ ID NO: 453322 - DNA, 44 bp, Homo sapiens; identical to SEQ ID NO: 346728
  chr5:114516274-114516318
  hyper
  anorectal vs. cervical,colorectal,prostate,ovary

SEQ ID NO: 453323 - DNA, 51 bp, Homo sapiens; identical to SEQ ID NO: 350147
  chr5:115911175-115911226
  hyper
  anorectal vs. pancreas_gallbladder,melanoma,colorectal, uterine,cervical,breast,bladder_and_urothelial,multiple_myeloma, prostate,liver_bileduct,upper_gi,non_cancer

SEQ ID NO: 453324 - DNA, 105 bp, Homo sapiens; identical to SEQ ID NO: 346729
  chr5:115911590-115911695
  hyper
  anorectal vs. pancreas_gallbladder,cervical, liver_bileduct

SEQ ID NO: 453325 - DNA, 2 bp, Homo sapiens
  chr5:115912114-115912116
  hyper
  anorectal vs. pancreas_gallbladder
cc

SEQ ID NO: 453326 - DNA, 36 bp, Homo sapiens
  chr5:119799821-119799857
  hyper
  anorectal vs. head_and_neck,lung,cervical,breast,ovary, prostate,uterine,myeloid_neoplasm,bladder_and_urothelial,renal, thyroid,non_cancer,multiple_myeloma
cgaagggcaacgtcgaggggactgcaagcgtcaacc

SEQ ID NO: 453327 - DNA, 28 bp, Homo sapiens
  chr5:119801506-119801534
  hyper
  anorectal vs. head_and_neck,cervical,breast,prostate, uterine,lung,myeloid_neoplasm,ovary,multiple_myeloma,thyroid, bladder_and_urothelial,non_cancer
aaattgtaatcctgtttctgaagccaac

SEQ ID NO: 453328 - DNA, 95 bp, Homo sapiens
  chr5:124082318-124082413
  hyper
  anorectal vs. upper_gi,pancreas_gallbladder
cgtccgctagtaacgagacagaatgtgctaacatcgggataaattagtgaaagggaagaaagaataagaagaaaggactgaaaatctgggctgga

SEQ ID NO: 453329 - DNA, 642 bp, Homo sapiens
  chr5:124082442-124083084
  hyper
  anorectal vs. upper_gi,pancreas_gallbladder
ttccgcccgtcctgacagatttgatttcttgaactaacttaagagaaaaggagggggggagtagagggaggaggaggagaagaaagggtgggatgagaaactgggcaagaggagaaaaagaaaggtgtggaggaggagacagcagatgattcagtgagctgataaaccagttataacagcattcgctcggggcggggggcggggggcttggggcggtggggtggggaaaataacggcgtttaaaatgggctcagtcttcgaaacctaaaggatgtgatgttttcctgtcttatgttgttttaagaaaaaggaactgagttcctagtatagctcccgaggggagtggaatcctctgtcgctcaggtcagccagtcatgtggtaattcgataattagagtcaaaataaggtttttgttttctttttttttttttttaaggcgacccttttcgggagtttttccctcttatactcgcagcaaacggtgtgtctcccttttatttattttttctctcctctcccttcgcccagcccctcctgtgtttagtcagatggccccggagcttggcttagtatttttaattagctggcgtttggaagctaaaagcagtaatgaattgttgatggattggaagtggagagtc

SEQ ID NO: 453330 - DNA, 742 bp, Homo sapiens
  chr5:124082625-124083367
  hyper
  anorectal vs. liver_bileduct,pancreas_gallbladder, upper_gi,lymphoid_neoplasm,colorectal,lung,uterine,renal,ovary, breast,bladder_and_urothelial,prostate,non_cancer, multiple_myeloma
cgctcggggcggggggcggggggcttggggcggtggggtggggaaaataacggcgtttaaaatgggctcagtcttcgaaacctaaaggatgtgatgttttcctgtcttatgttgttttaagaaaaaggaactgagttcctagtatagctcccgaggggagtggaatcctctgtcgctcaggtcagccagtcatgtggtaattcgataattagagtcaaaataaggtttttgttttctttttttttttttttaaggcgacccttttcgggagtttttccctcttatactcgcagcaaacggtgtgtctcccttttatttattttttctctcctctcccttcgcccagcccctcctgtgtttagtcagatggccccggagcttggcttagtatttttaattagctggcgtttggaagctaaaagcagtaatgaattgttgatggattggaagtggagagtcgctttgctggaaatgtcggggctgggagagggggatgggcgagttagtaacaaccaaccatctaaaaggagcgattttgttacagtgcaagcctttcacatcacgtgaggatcaagggctcaattggttgtcgtgagaacaaaaatggtgacaagcgtatcaagaaaatactgatctggtctttaaaaaaaaaaaagctgaaagtctctcccctccccctgcacacactcccccaacctcctccccccgcccccccgcagtgggcgaagctacaagttatgaa

SEQ ID NO: 453331 - DNA, 267 bp, Homo sapiens
  chr5:124083100-124083367
  hyper
  anorectal vs. liver_bileduct,pancreas_gallbladder, upper_gi,lymphoid_neoplasm,colorectal,lung,uterine, bladder_and_urothelial,ovary,renal
cggggctgggagagggggatgggcgagttagtaacaaccaaccatctaaaaggagcgattttgttacagtgcaagcctttcacatcacgtgaggatcaagggctcaattggttgtcgtgagaacaaaaatggtgacaagcgtatcaagaaaatactgatctggtctttaaaaaaaaaaaagctgaaagtctctcccctccccctgcacacactcccccaacctcctccccccgcccccccgcagtgggcgaagctacaagttatgaa

SEQ ID NO: 453332 - DNA, 38 bp, Homo sapiens
  chr5:124084158-124084196
  hyper
  anorectal vs. liver_bileduct,upper_gi, pancreas_gallbladder,lymphoid_neoplasm,colorectal
cgcacattcccctgcatgaagtccccgctaagtgctat

SEQ ID NO: 453333 - DNA, 60 bp, Homo sapiens; identical to SEQ ID NO: 346734
  chr5:124084302-124084362
  hyper
  anorectal vs. liver_bileduct,upper_gi, pancreas_gallbladder,lymphoid_neoplasm,colorectal

SEQ ID NO: 453334 - DNA, 112 bp, Homo sapiens
  chr5:124084660-124084772
  hyper
  anorectal vs. liver_bileduct,upper_gi, pancreas_gallbladder,colorectal,lymphoid_neoplasm,renal,uterine, lung,ovary,bladder_and_urothelial,prostate,myeloid_neoplasm, non_cancer,breast,thyroid
cgtataaaacacacactgagagcgggtgggggtgctgtggggggtggttgtggagacaaagcgttttattttccaaccagattggggttgaggaacctcccgcagtaagaag

SEQ ID NO: 453335 - DNA, 64 bp, Homo sapiens; identical to SEQ ID NO: 345193
  chr5:124084977-124085041
  hyper
  anorectal vs. liver_bileduct,upper_gi, pancreas_gallbladder,colorectal,lymphoid_neoplasm,renal,uterine, lung,ovary,bladder_and_urothelial,prostate,myeloid_neoplasm, non_cancer,breast,thyroid

SEQ ID NO: 453336 - DNA, 95 bp, Homo sapiens
  chr5:125930492-125930587
  hyper
  anorectal vs. liver_bileduct,pancreas_gallbladder, colorectal
cgtcgattctgcatagcacacaaggacctaaaatctaagtttttgttttaaaggcaccctacacgagaaaacttttactgtggagcttcaaaatc

SEQ ID NO: 453337 - DNA, 170 bp, Homo sapiens; identical to SEQ ID NO: 350157
  chr5:125931062-125931232
  hyper
  anorectal vs. liver_bileduct,pancreas_gallbladder, colorectal

SEQ ID NO: 453338 - DNA, 45 bp, Homo sapiens
  chr5:126626239-126626284
  hyper
  anorectal vs. head_and_neck
cgcgaccaggcctttggcggggtcacccaccaggcggtggaagcc

SEQ ID NO: 453339 - DNA, 63 bp, Homo sapiens; identical to SEQ ID NO: 358227
  chr5:126626738-126626801
  hyper
  anorectal vs. head_and_neck

SEQ ID NO: 453340 - DNA, 5 bp, Homo sapiens
  chr5:134368716-134368721
  hyper
  anorectal vs. head_and_neck
cggac

SEQ ID NO: 453341 - DNA, 213 bp, Homo sapiens
  chr5:140855386-140855599
  hyper
  anorectal vs. renal,myeloid_neoplasm, bladder_and_urothelial,breast,thyroid
cgctagcgcgtgtcctgctcagagagcccggcgctagctcattcttcgtgcagttattggctgggactctgtgtgccgctgtcggccaatgaagacgctggagatcgggcccctgcccgtcccctttctgcgccccgggatgaggcagagactgaacagccggcgagcaaatcaacggcatccagaaagccatgtcggactcggcgcccagcg

SEQ ID NO: 453342 - DNA, 1 bp, Homo sapiens
  chr5:160973379-160973380
  hyper
  anorectal vs. cervical,bladder_and_urothelial,upper_gi, ovary,colorectal
c

SEQ ID NO: 453343 - DNA, 335 bp, Homo sapiens; identical to SEQ ID NO: 350212
  chr5:160973804-160974139
  hyper
  anorectal vs. cervical,bladder_and_urothelial,upper_gi, ovary,colorectal

SEQ ID NO: 453344 - DNA, 13 bp, Homo sapiens
  chr5:169063996-169064009
  hyper
  anorectal vs. lymphoid_neoplasm,bladder_and_urothelial
cggcaatcaggaa

SEQ ID NO: 453345 - DNA, 61 bp, Homo sapiens
  chr6:391113-391174
  hyper
  anorectal vs. lymphoid_neoplasm
cgcagagacagtatttgaatcaagcttaatagctcaagggagctgggccatttcctatttt

SEQ ID NO: 453346 - DNA, 55 bp, Homo sapiens; identical to SEQ ID NO: 346767
  chr6:393764-393819
  hyper
  anorectal vs. lymphoid_neoplasm

SEQ ID NO: 453347 - DNA, 18 bp, Homo sapiens
  chr6:2903030-2903048
  hyper
  anorectal vs. cervical,pancreas_gallbladder
cgtgagccactgcgcccg

SEQ ID NO: 453348 - DNA, 156 bp, Homo sapiens; identical to SEQ ID NO: 200240
  chr6:2903557-2903713
  hyper
  anorectal vs. cervical,pancreas_gallbladder

SEQ ID NO: 453349 - DNA, 465 bp, Homo sapiens; identical to SEQ ID NO: 332643
  chr6:4948996-4949461
  hyper
  anorectal vs. upper_gi

SEQ ID NO: 453350 - DNA, 10 bp, Homo sapiens
  chr6:5997274-5997284
  hyper
  anorectal vs. cervical,uterine
aattcaatcc

SEQ ID NO: 453351 - DNA, 116 bp, Homo sapiens
  chr6:5997274-5997390
  hyper
  anorectal vs. cervical,uterine,head_and_neck,ovary
aattcaatccgtggggggaatgcagattgggctgcgactcactgggtttgatttatgaactgttacactagcaattgtttacacattgcatttcagagcccgggcccaccctcccc

SEQ ID NO: 453352 - DNA, 113 bp, Homo sapiens
  chr6:5997401-5997514
  hyper
  anorectal vs. cervical,uterine,head_and_neck,ovary
cgggcttcgtgcgggaacctgctgcagcccccttggtctctctccatcctcctcccttcccccgtcccccccccccggggcccccgcagcttcctcccacagccaccttctcc

SEQ ID NO: 453353 - DNA, 80 bp, Homo sapiens; identical to SEQ ID NO: 350268
  chr6:6009552-6009632
  hyper
  anorectal vs. head_and_neck,colorectal

SEQ ID NO: 453354 - DNA, 6 bp, Homo sapiens
  chr6:26216805-26216811
  hyper
  anorectal vs. head_and_neck
cgcctt

SEQ ID NO: 453355 - DNA, 224 bp, Homo sapiens
  chr6:26216853-26217077
  hyper
  anorectal vs. head_and_neck
cttagctggttcaggcatgctgtcagaaaacaataacagcagtgagaatgaacgcacttaaataaaagctcgtgtctagagtctctccttttataggcctttcatgcaaataaagaattcaaaatatccagctctgattgggcaatgtgttagtgacgcatacatgtaaaatagccttcaccttatttcctttctaattggttggctcgtcaaagaacaatttt

SEQ ID NO: 453356 - DNA, 210 bp, Homo sapiens
  chr6:26217156-26217366
  hyper
  anorectal vs. head_and_neck
tctttattcagtggattgttagttcttctgctgttaggaagccactatgtctggacgtggaaagcaaggcggcaaagctcgggcaaaagctaaaacgcgttcttccagggccggtcttcagtttccagttggccgtgtgcaccgcctcctccgcaaaggcaactactccgaacgagtcggggccggcgctccagtgtacctggcagcggt

SEQ ID NO: 453357 - DNA, 210 bp, Homo sapiens; identical to SEQ ID NO: 453356
  chr6:26217156-26217366
  hyper
  anorectal vs. cervical,head_and_neck

SEQ ID NO: 453358 - DNA, 312 bp, Homo sapiens; identical to SEQ ID NO: 345216
  chr6:26217578-26217890
  hyper
  anorectal vs. cervical,head_and_neck

SEQ ID NO: 453359 - DNA, 353 bp, Homo sapiens
  chr6:26313163-26313516
  hyper
cgaaactggctgaaagctctccacacctaattagtaggattacagatattgaagcctacaaatgcgcatttccaccaggataccttgtggattcttacacgggtcaggtccgctgacgtttagcacgcctactttaaaacctcttttctgtagggtcctagtcttcaagtaaaatatatgcggccatatagcagaggatggtttcgatccatcgacctctgggttatgggcccagcacgcttccgctgcgccactctgctgtctcgacagtccgctccgccactctgctgtttcaacattactcttgtcaagtatgtattagaggctacaattttcggcatcttcctaatttt

SEQ ID NO: 453360 - DNA, 345 bp, Homo sapiens; identical to SEQ ID NO: 350312
  chr6:26313545-26313890
  hyper

SEQ ID NO: 453361 - DNA, 210 bp, Homo sapiens
  chr6:26322359-26322569
  hyper
  anorectal vs. upper_gi
cggagtgccacagtaccaggcctgtaacgatgaggtttcttcacccctccagtagtgggagcactcttgcgagaggcttttgtagccagttgcttcccgggtgctttgccaccggtcgatttgccggtcgatttgcgggcagtcggctttctacgagccgtggtatagagacctccttacttaccccgcttctcctttggctggagctcg

SEQ ID NO: 453362 - DNA, 71 bp, Homo sapiens
  chr6:26331633-26331704
  hyper
  anorectal vs. upper_gi,colorectal,uterine, bladder_and_urothelial,lymphoid_neoplasm,non_cancer, myeloid_neoplasm,thyroid,breast,multiple_myeloma,prostate,renal, pancreas_gallbladder,ovary
cgccatacagttatctgagccagcgagctaaaaactgttgaccccgacgtgatttgaacacgcaaccttct

SEQ ID NO: 453363 - DNA, 324 bp, Homo sapiens
  chr6:26331811-26332135
  hyper
  anorectal vs. upper_gi,colorectal,uterine, bladder_and_urothelial,lymphoid_neoplasm,non_cancer, myeloid_neoplasm,thyroid,breast,multiple_myeloma,prostate,renal, pancreas_gallbladder,ovary
ccaggcagctattaacagatacaaaatagtgcctagctgcttccctctcggtaaaattgctgtccgcccaatcactgattttctctgcctctgaattgcttcattttcacctgttcttgtttatatttcattccgtttcttacctagttttccctgtatattccaaatatagacgtcttgggagtttcgttgtttttatctttatagaaatacattctgttgaaggtcagtcgctttggaatggggttgtagagaggaggtagcgaagagggaataatgaggatccttcctctcccaactcctcattaaggaactctgatcaag

SEQ ID NO: 453364 - DNA, 243 bp, Homo sapiens; identical to SEQ ID NO: 345222
  chr6:26332283-26332526
  hyper
  anorectal vs. upper_gi,colorectal,uterine, bladder_and_urothelial,lymphoid_neoplasm,non_cancer, myeloid_neoplasm,thyroid,breast,multiple_myeloma,prostate,renal, pancreas_gallbladder,ovary

SEQ ID NO: 453365 - DNA, 248 bp, Homo sapiens
  chr6:26577475-26577723
  hyper
  anorectal vs. multiple_myeloma,thyroid,non_cancer, myeloid_neoplasm
ataaggatccaggcaaaaaaaatgtattagatagctctttatgctcaaacatgcacaagtaaaccatttttggttacatgagtaaaaaattttaggaataaactagaaatgtggtagcttcaccgaagggcacctgcgtagatgaaaagcagcgtttccaggaagtctgaggcttcactttttccttgtgaaatttgtacctcgcaacactcttcacctccactccctccctgagtctcctgctggct

SEQ ID NO: 453366 - DNA, 140 bp, Homo sapiens
  chr6:27059547-27059687
  hyper
  anorectal vs. cervical
cgcttcgggtgtgagaggtcccgggttcaaatcccggacgagcccacttcattttcgcccaataaggtttaaggatatttaaagtatttccccaaatagtcatacccaaaaatatgtactttcaccacatcaacagtaga

SEQ ID NO: 453367 - DNA, 43 bp, Homo sapiens; identical to SEQ ID NO: 350322
  chr6:27059899-27059942
  hyper
  anorectal vs. cervical

SEQ ID NO: 453368 - DNA, 141 bp, Homo sapiens
  chr6:27356293-27356434
  hyper
  anorectal vs. head_and_neck,lung,sarcoma
cgctatttaaaactctgtgaaccaccggtctaggctatactttgcagtgtattaaggtggtcttcggcacctctcgcagacccccttcctcttgcctctagcgccaacctctcagcctctcgcataccaggggaggggctt

SEQ ID NO: 453369 - DNA, 223 bp, Homo sapiens
  chr6:27356463-27356686
  hyper
  anorectal vs. head_and_neck,lung,sarcoma
gcacagccctgctgtagctggctctcaggcgcaagcgcagagctgcgaccgctgctgatacgttgctcagtctcagtgtggtctctgttttgcaactggtcgtccgcgtcaggagacttaggtccaggcgactgcccagacaatgactggtcccgcataccgagcagagcatgatcagcagcagtctgagtggaagagtgcctgtgatcttagggaacctgat

SEQ ID NO: 453370 - DNA, 541 bp, Homo sapiens
  chr6:27470822-27471363
  hyper
  anorectal vs. lymphoid_neoplasm,upper_gi, pancreas_gallbladder,uterine,colorectal
cgtggccgagtggttaaggcgatggactagaaatccattggggtctccccgcgcaggttcgaatcctgccgactacgagttcgaggttttagataattaacaacagaaaatttagaagaaagaaatttaagccaactcacgtgttgcgaactgaatttgtttggtacttccccgatcctgaaaccccacaacaatggagggtggaagttactgaatacctactattttcataagattatgggtaccttaattagcagatacctagtcattttcccgttagcggtacctttgtacggttcttggggacgcctctcgtttccctgccttccaaaccctcctgaagcctatacctgttacaagtcttgatagtgctttcctcttcatggaaatttagtcctagtcagaggtccaagtctttggtcaattatcagtttctgtggaatcaatggttcaactgctttggtcacccggtctcgctggttgcaaatgactagaaacactgtcagagatctcgacaccaccacaatcgaaagaccaggct

SEQ ID NO: 453371 - DNA, 205 bp, Homo sapiens
  chr6:27560506-27560711
  hyper
  anorectal vs. upper_gi,bladder_and_urothelial,renal, colorectal,multiple_myeloma,sarcoma,prostate,lymphoid_neoplasm, breast,uterine,non_cancer,thyroid,cervical
cggtcactgtaggtcttcagtcattcatgagaggtgttaaagcacctctaacaagtgcaagatgcagtgttttggaggaaaaaaacaggcacctagcagaggatggtttcgatccatcgacctctgggttatgggcccagcacgcttccgctgcgccactctgctgtccccttcagctgttgtgccttatctccaagtaacttaa

SEQ ID NO: 453372 - DNA, 19 bp, Homo sapiens
  chr6:27636317-27636336
  hyper
  anorectal vs. upper_gi,uterine,colorectal, bladder_and_urothelial,breast,renal,ovary,non_cancer,thyroid
cgaatttatatatggtttc

SEQ ID NO: 453373 - DNA, 93 bp, Homo sapiens
  chr6:27636531-27636624
  hyper
  anorectal vs. upper_gi,uterine,colorectal, bladder_and_urothelial,breast,renal,ovary,non_cancer,thyroid
ctgaatccgaaattaagacgccctcttattcgtcaagcgagaaggctatttacgttcgtttccctttattgtgaaaaatgaaaagaacaggcc

SEQ ID NO: 453374 - DNA, 9 bp, Homo sapiens
  chr6:27640042-27640051
  hyper
  anorectal vs. upper_gi,multiple_myeloma,prostate,uterine, bladder_and_urothelial,breast
cggggattg

SEQ ID NO: 453375 - DNA, 87 bp, Homo sapiens; identical to SEQ ID NO: 358470
  chr6:27640312-27640399
  hyper
  anorectal vs. upper_gi,multiple_myeloma,prostate,uterine, bladder_and_urothelial,breast

SEQ ID NO: 453376 - DNA, 305 bp, Homo sapiens
  chr6:28249105-28249410
  hyper
  anorectal vs. cervical,head_and_neck,colorectal
cgaagacagacatttaccactgtgttggttttcaatcgaaatgatgtacataaatttggggcgtgcttgcaccgtccgaatgggcctggggtccggcggcggagagtgacctgggcggggcaggaggtggcagcgggggtcctcccggctcaccagagagacgagcggccgtgctcctagagaggcagggaacccgccagactccgccactccgctgcgggcgcggcgcagggagaagcttttgtacccgcccagctgctggaggcgccggcagcgcccgccagacccgccagcccagcggcccg

SEQ ID NO: 453377 - DNA, 125 bp, Homo sapiens; identical to SEQ ID NO: 346804
  chr6:28249579-28249704
  hyper
  anorectal vs. cervical,head_and_neck,colorectal

SEQ ID NO: 453378 - DNA, 315 bp, Homo sapiens
  chr6:28456978-28457293
  hyper
  anorectal vs. thyroid,multiple_myeloma,non_cancer, myeloid_neoplasm,melanoma,breast,cervical,renal
cgaatacacggggaaacgtattcggcagtctacagtgtcaaaggatttttctattaatccaagaaagagcattacagaaagctatacaatacgtgaagacgattaaaaggaatatatctatacataattttaaaaaacctttgaatcttgaaagtcactcacttagggtacgtgaagctgccaaatttatcagagaaggaacaggcatctctcgcatggagccgtgggcctcggcgttaaggcactcttcagctacaggtggcagcccgtttagctcttcttaaggtcttgtgatgtcattttcaagaggccagt

SEQ ID NO: 453379 - DNA, 209 bp, Homo sapiens
  chr6:28457345-28457554
  hyper
  anorectal vs. thyroid,multiple_myeloma,non_cancer, myeloid_neoplasm,melanoma,breast,cervical,renal
ggcggggagcaggactccactgctttggcctcaaggagtttggtcgacacttgaagactgaccaagaaaaagtaatttgtcccagttttctcccaccctttgttttcttctgctcctcttgggcttgttttttttttgggggggggggttctttcttttttcttttcttttttttttttttttcccgcagtaagttctgaaaatcgcct

SEQ ID NO: 453380 - DNA, 373 bp, Homo sapiens
  chr6:46097250-46097623
  hyper
  anorectal vs. pancreas_gallbladder,lymphoid_neoplasm, colorectal,liver_bileduct,renal,ovary,uterine,lung,upper_gi, breast,prostate
cggtaaaggtgctcgcttatccagtaagacggacagacgtctatggtagatccacgtttcatttatcccaactcactggaactggctgaagcttctccagacttgtgccggaccttggtgcagccaaagttgctttctccgcggccacctaagctgccaggtgcacattaactaagtggcagaaggccatcggcttggcaattgcctgaggcctttccgggactcgctggtttttaggttccatgaagggcatccagatctaggatgatacgaaaagtgcgtggtgggagagtggaatcaacctctactcttaggtccgatacaacccctccaagcacctgtctaaccaatcggaaagaaagttacattcaac

SEQ ID NO: 453381 - DNA, 521 bp, Homo sapiens; identical to SEQ ID NO: 345237
  chr6:46097694-46098215
  hyper
  anorectal vs. pancreas_gallbladder,lymphoid_neoplasm, colorectal,liver_bileduct,renal,ovary,uterine,lung,upper_gi, breast,prostate

SEQ ID NO: 453382 - DNA, 334 bp, Homo sapiens
  chr6:46138265-46138599
  hyper
  anorectal vs. head_and_neck,cervical
cggggcaccgattaaacggaagagggaaagtgcagaaggagtaggtttgtgtagctcgggtagacgtcaagggcgggggtgtccatcttctccaccaggattccatcctagccacccagaatggtcgcggcgtaggttatgttcccaattcccagtcatcccgcccaccgaggcctgggcttcttagatgtgcagtggcaaggaggggacgttgctttagggacccagaggagcagtgtgggttcccgggagggaagccacccacgcccctggactcaccctcgcagcgatccgttcagtccgtattagtttggagcaacgggagggagggtct

SEQ ID NO: 453383 - DNA, 162 bp, Homo sapiens; identical to SEQ ID NO: 350376
  chr6:46138801-46138963
  hyper
  anorectal vs. head_and_neck,cervical

SEQ ID NO: 453384 - DNA, 208 bp, Homo sapiens
  chr6:69344116-69344324
  hyper
  anorectal vs. head_and_neck,lung,bladder_and_urothelial
cgtcagccaactgtccaggaggcaaaatgactatctatgatgatagatagacagacagatagatagttagattaaaaggtggggaaacatcccttttccctttttcctttctatataatctggttttttctcttcaccccttttctcgcttcttcccaccccgtccccaaacctgttactagggaaacttgaaaaagaatcagataca

SEQ ID NO: 453385 - DNA, 295 bp, Homo sapiens
  chr6:69344649-69344944
  hyper
  anorectal vs. head_and_neck,lung,bladder_and_urothelial
ttcacttcccacccttcagagtcgccttcccatcctccgcacccccctgcctcgcctcccagtgagtttctcttacagttggtcgccgccagccccagcggtgggaactgaggatgcaaaaacctcccagacgcagaaaataccgctttcgggacgtgcttgggtttgagtagccgtgacgtgcaggcgaaccgcggccctggctggagctccgtggagcccccctcccgccagcctctcccccgccctcccgccgggactccctcctctcccaccccgcggctcccttcgcctt

SEQ ID NO: 453386 - DNA, 295 bp, Homo sapiens; identical to SEQ ID NO: 453385
  chr6:69344649-69344944
  hyper
  anorectal vs. head_and_neck,lung,melanoma,sarcoma

SEQ ID NO: 453387 - DNA, 72 bp, Homo sapiens; identical to SEQ ID NO: 350392
  chr6:69346042-69346114
  hyper
  anorectal vs. head_and_neck,lung

SEQ ID NO: 453388 - DNA, 116 bp, Homo sapiens
  chr6:69942728-69942844
  hyper
  anorectal vs. melanoma,cervical,breast,liver_bileduct, bladder_and_urothelial,uterine,head_and_neck,prostate,ovary, lung,renal,thyroid,colorectal
cgcattttaaaagccagcatttatggtccaaaatatgggacgggaatcagagctggtagaaaaatatgaaaagcctctttacaccctgagtatttgaaacaatccgatgagcatag

SEQ ID NO: 453389 - DNA, 227 bp, Homo sapiens
  chr6:72596315-72596542
  hyper
  anorectal vs. lung,sarcoma,head_and_neck,uterine,thyroid, breast,prostate,renal,non_cancer,cervical,myeloid_neoplasm, melanoma
cccagccccagccccagccccgcccccgccccgcgccccgccggagacgcccggatcggcggagcctggcgcgagccctcgccccctcgcctctcccgccgcgcctccgcctgcccgcccccgccggccgaggctgggctgcgggaggcggccgggcggccccgagcttcgctagggcgaccaaaacaaaggcagcatccggggctgggtggatgcaaacaaccatg

SEQ ID NO: 453390 - DNA, 207 bp, Homo sapiens
  chr6:72596335-72596542
  hyper
  anorectal vs. lung,prostate,uterine,thyroid,sarcoma
cgcccccgccccgcgccccgccggagacgcccggatcggcggagcctggcgcgagccctcgccccctcgcctctcccgccgcgcctccgcctgcccgcccccgccggccgaggctgggctgcgggaggcggccgggcggccccgagcttcgctagggcgaccaaaacaaaggcagcatccggggctgggtggatgcaaacaaccatg

SEQ ID NO: 453391 - DNA, 124 bp, Homo sapiens
  chr6:87646737-87646861
  hyper
  anorectal vs. melanoma,ovary,bladder_and_urothelial
cgcgtagagaaagcgtgcaaacccgtcaactgctcccgccgttcctctccctcctcaacccaggctcgctacagaagaagggagtagggtctgcccccttgttgtatctattttccccttctcc

SEQ ID NO: 453392 - DNA, 171 bp, Homo sapiens
  chr6:87646944-87647115
  hyper
  anorectal vs. melanoma,ovary,bladder_and_urothelial
acagccctgccctctagtgtctgcaaccgggagccctaaggcgccatcagctccagaatttctcttttataacctaagcaagacctggagtacctcggagctgcgacctccagttcacaataccacctgcctcacacccgggctcatcttttcatcccacacccaccaccc

SEQ ID NO: 453393 - DNA, 75 bp, Homo sapiens
  chr6:87647143-87647218
  hyper
  anorectal vs. melanoma,ovary,bladder_and_urothelial
ctgcgacctgcgtagatgatttagcagactgcccctgcccatgctcctgctcctgctcctcctcctcctcttccc

SEQ ID NO: 453394 - DNA, 198 bp, Homo sapiens
  chr6:108478324-108478522
  hyper
  anorectal vs. cervical
cgccccatactgaccgcggtccctcacctgctgactgattgacttataaatctgccccccacccacttgtctgtccattgaaggcaaattcgccatcgggaacacagtagtttctcaataactatctaatgcatggccacccttcccaggatttagaatatcaaagggacgtgttctttcctcccaaatcacctgcct

SEQ ID NO: 453395 - DNA, 256 bp, Homo sapiens
  chr6:108478551-108478807
  hyper
  anorectal vs. cervical
tcacctcggtccggccaccacctcatcccgcttcttcgcggcttccaggcctcgggctgggatctcagcccctgcctgtaggtgcggcccagagggtgcgacacgcgtcggagcggggcagcggaggaggggacagggacgcggcagccacacccgcatctctttcccctctcgggcatccccgagggcccttctgcctccagttccttgagcccccgaagccccccatgcggcaagagcgagtcgcaggaacaag

SEQ ID NO: 453396 - DNA, 40 bp, Homo sapiens
  chr6:108478767-108478807
  hyper
  anorectal vs. cervical
cgaagccccccatgcggcaagagcgagtcgcaggaacaag

SEQ ID NO: 453397 - DNA, 440 bp, Homo sapiens
  chr6:127836226-127836666
  hyper
  anorectal vs. head_and_neck,lung
ctcgcttccagcccttccgacacacaccgtacacaccccattccaattccaaattctcagctttaattgccctctctctccacgagacaggagtgacaaggagctgagtacagaagaggaaactgggggaaaaaggcccactttaggccctctctcgttctcttactctacctctctccaggaagaagtgtgacaaaccattataattagagaaacggaggcccagatttgaatttaaatgaaaacctcgcgttactgagagcagattcaaattccggcaaggcctaggaaaccccctccctcctttcttgttctcctccctcttcaaggctccctaacaggttagcagcctctgatccctgccggtacacgccctaatcctcccaggcccactcttcccatcccccagccgggtccccccaccctcctcaccttgagag

SEQ ID NO: 453398 - DNA, 225 bp, Homo sapiens
  chr6:127836441-127836666
  hyper
  anorectal vs. lung,head_and_neck,sarcoma,cervical, bladder_and_urothelial
cggaggcccagatttgaatttaaatgaaaacctcgcgttactgagagcagattcaaattccggcaaggcctaggaaaccccctccctcctttcttgttctcctccctcttcaaggctccctaacaggttagcagcctctgatccctgccggtacacgccctaatcctcccaggcccactcttcccatcccccagccgggtccccccaccctcctcaccttgagag

SEQ ID NO: 453399 - DNA, 31 bp, Homo sapiens; identical to SEQ ID NO: 350458
  chr6:127837749-127837780
  hyper
  anorectal vs. head_and_neck,lung

SEQ ID NO: 453400 - DNA, 369 bp, Homo sapiens
  chr6:143247975-143248344
  hyper
  anorectal vs. pancreas_gallbladder,upper_gi, liver_bileduct
cgccgggcgcggcgagccccactttctcccggcaggaaggggggaggccgagagcatttcctgttgtgcagctgagccctgcggagacgtcattgcattcatgctccctcgggtgtcagcggacggggggccaaagttcaagccgcgtccagggcaggcagcgcgcggcggcgcggcggcgcggggcgggcggccagggctcccctctcccgctggcgctcccggcgcctccgtccccggccggcccagcgctgctaccggaggccagccctggggctccgcggggaagagctgctcttcctcccggaggaaaccgagctcgcaagcccagcgctcccagccgcagactgcaggctgccctcctccacc

SEQ ID NO: 453401 - DNA, 41 bp, Homo sapiens; identical to SEQ ID NO: 346866
  chr6:159591277-159591318
  hyper
  anorectal vs. head_and_neck,sarcoma,cervical,lung, thyroid,prostate,ovary,myeloid_neoplasm,breast,melanoma, non_cancer

SEQ ID NO: 453402 - DNA, 140 bp, Homo sapiens; identical to SEQ ID NO: 350494
  chr6:166298522-166298662
  hyper
  anorectal vs. upper_gi,colorectal,lymphoid_neoplasm, multiple_myeloma,head_and_neck,bladder_and_urothelial

SEQ ID NO: 453403 - DNA, 290 bp, Homo sapiens; identical to SEQ ID NO: 333006
  chr7:2517249-2517539
  hyper
  anorectal vs. liver_bileduct

SEQ ID NO: 453404 - DNA, 396 bp, Homo sapiens
  chr7:3082731-3083127
  hyper
  anorectal vs. pancreas_gallbladder
cgcggggggctgtcctctcccatctcccagctccacacccacttttggtgcggctgcccttcctccctgagccaggccccaccttcccaggagcctctgagtcaggctgggctgtggtctgcaaacttccgggcctttcaggtgtcagaaaagtttctcttcctccctctggggcaggtgcaccaaggggctgcagcctcctgacccccgattttttcctgtccagtaggaggaggtgggggctttgctgggcggtgatactcagagacgctcaaagagacacggaggagaggcacacgaggtggaaagtgagggagaaaaagggttggaagggaaaaaggggagaggagagtgagagagagaaggggggcagggggacagagatggagagggaag

SEQ ID NO: 453405 - DNA, 84 bp, Homo sapiens; identical to SEQ ID NO: 350505
  chr7:3083602-3083686
  hyper
  anorectal vs. pancreas_gallbladder

SEQ ID NO: 453406 - DNA, 281 bp, Homo sapiens; identical to SEQ ID NO: 371425
  chr7:5603124-5603405
  hyper
  anorectal vs. head_and_neck

SEQ ID NO: 453407 - DNA, 322 bp, Homo sapiens; identical to SEQ ID NO: 345260
  chr7:8476750-8477072
  hyper
  anorectal vs. upper_gi,colorectal,renal,prostate,uterine, ovary,lymphoid_neoplasm,liver_bileduct,pancreas_gallbladder, multiple_myeloma,bladder_and_urothelial,myeloid_neoplasm, thyroid,lung,non_cancer,breast,melanoma,sarcoma

SEQ ID NO: 453408 - DNA, 151 bp, Homo sapiens
  chr7:15725486-15725637
  hyper
  anorectal vs. myeloid_neoplasm
cgagggtgcctggcgcgcccttacctgagctgtcgcttttcctcttgccgccgcttcgcttctccgcctccgcaggtgacagtgcctggcggccgtagtcccccggcgcgcacgcggccccagtcggggtgctggagcccaagctggaaga

SEQ ID NO: 453409 - DNA, 48 bp, Homo sapiens
  chr7:15726410-15726458
  hyper
  anorectal vs. cervical
cgctcagcctgcgccacgcgctcccagttccacttcctatctcctgct

SEQ ID NO: 453410 - DNA, 89 bp, Homo sapiens; identical to SEQ ID NO: 371444
  chr7:15727077-15727166
  hyper
  anorectal vs. cervical

SEQ ID NO: 453411 - DNA, 374 bp, Homo sapiens
  chr7:16460517-16460891
  hyper
  anorectal vs. upper_gi,cervical
aaggccagaacttcccatctctgaaatgcgggagggaacagagctcaagcttgaataactgagcgcggcccggcagtcccccaagtgaaggtgctagcgctagagcagcggcagggcggggagcgggaggccgggccccagggaaccgcggggcgcgcccggcgccgcattacctctccagggcctgtagggtgtagctgatgagcggcctctccaggatggggcagaattgcttcggggtggggacccccatcctctccccgcaccccccggcaggcaacacagctgccacggcttgcgggtggcgcccgggctcggtcccggccacgctctgcagggaggcggaagccgtgtggtccgcgccgcgctgacca

SEQ ID NO: 453412 - DNA, 61 bp, Homo sapiens
  chr7:20827463-20827524
  hyper
  anorectal vs. colorectal
ttgtttctttgatgccgtggctttttttttttttttttttttttttttccctgaggtggaa

SEQ ID NO: 453413 - DNA, 79 bp, Homo sapiens; identical to SEQ ID NO: 371463
  chr7:20827557-20827636
  hyper
  anorectal vs. colorectal

SEQ ID NO: 453414 - DNA, 136 bp, Homo sapiens; identical to SEQ ID NO: 358770
  chr7:22589952-22590088
  hyper
  anorectal vs. cervical

SEQ ID NO: 453415 - DNA, 7 bp, Homo sapiens
  chr7:37487365-37487372
  hyper
  anorectal vs. lymphoid_neoplasm,myeloid_neoplasm,thyroid, uterine,non_cancer,ovary,multiple_myeloma,breast,prostate,renal, sarcoma,lung,liver_bileduct,melanoma
cgctcgc

SEQ ID NO: 453416 - DNA, 168 bp, Homo sapiens; identical to SEQ ID NO: 345273
  chr7:37960958-37961126
  hyper
  anorectal vs. liver_bileduct,lung,pancreas_gallbladder, renal,ovary,sarcoma,myeloid_neoplasm,prostate, bladder_and_urothelial,thyroid,melanoma,uterine,cervical, non_cancer,multiple_myeloma,breast

SEQ ID NO: 453417 - DNA, 52 bp, Homo sapiens
  chr7:42927739-42927791
  hyper
  anorectal vs. pancreas_gallbladder,colorectal,upper_gi
cgcttaaactttcacactgcggttgtgtcactgaagcagtgcctgaaatcta

SEQ ID NO: 453418 - DNA, 412 bp, Homo sapiens; identical to SEQ ID NO: 346903
  chr7:42928175-42928587
  hyper
  anorectal vs. pancreas_gallbladder,colorectal,upper_gi

SEQ ID NO: 453419 - DNA, 65 bp, Homo sapiens; identical to SEQ ID NO: 333144
  chr7:63767198-63767263
  hyper
  anorectal vs. bladder_and_urothelial

SEQ ID NO: 453420 - DNA, 57 bp, Homo sapiens
  chr7:64734140-64734197
  hyper
  anorectal vs. uterine,ovary,sarcoma,multiple_myeloma, lung,myeloid_neoplasm
cgcactaatgctggggacggtgggtgtgggggagggtcctggagccttattcaatct

SEQ ID NO: 453421 - DNA, 6 bp, Homo sapiens
  chr7:71802405-71802411
  hyper
  anorectal vs. melanoma
cgcaca

SEQ ID NO: 453422 - DNA, 195 bp, Homo sapiens
  chr7:79082826-79083021
  hyper
  anorectal vs. sarcoma
cggctgggcagaggtaggagagcttggatgaggttgtgctgtcccttgaatgacactcaaggctgtggccccgcagcagaggaagcagtggtggtggcgtcggcggcggcggcggcggcagccggagcgagcagtagccgagctggtgagcgggtgtggtgggggtggggaaggagggtagggatgccgggggcc

SEQ ID NO: 453423 - DNA, 116 bp, Homo sapiens; identical to SEQ ID NO: 358874
  chr7:79084011-79084127
  hyper
  anorectal vs. sarcoma,prostate

SEQ ID NO: 453424 - DNA, 1 bp, Homo sapiens
  chr7:87257895-87257896
  hyper
  anorectal vs. liver_bileduct,colorectal, bladder_and_urothelial,breast,lung
c

SEQ ID NO: 453425 - DNA, 139 bp, Homo sapiens; identical to SEQ ID NO: 350613
  chr7:94285147-94285286
  hyper
  anorectal vs. sarcoma

SEQ ID NO: 453426 - DNA, 565 bp, Homo sapiens
  chr7:119912404-119912969
  hyper
  anorectal vs. lung,head_and_neck
cgccatccacgccatctagtggcttgtatgtgttacgtttggttttaaggatgattcctaatgactcgggggcggggtacgcgaaaaacaaaaaggttggtagcgacaattttcctgtgtctctctacctcagtaacccctcatacgaacacctttaactcttttaactattttaaatatgcgcagtgatgcgcagagaggatgaaggggacgcaaactttcagagacgcacgccccttgacgatgacatttagaaaagggctccacatccctgttattcgtaaaggacgggaaaaggagttgtgtcaagacctcgatcgaggagagtctctgattttttggcaagttggacagatggcatatcaatccctgcaacgttaacaatctggttttgaaaataaataaaaacagaaagaggaaatgcacttaaaaattccgcgtcggagctttgcgggtcttgccttccagtcgcccccagaagacaaccaattcctgcgcattccgctccgctcaccctccttcccagcttctctcgctctctttccccccattttcccacgctcgc

SEQ ID NO: 453427 - DNA, 107 bp, Homo sapiens; identical to SEQ ID NO: 350665
  chr7:145814199-145814306
  hyper
  anorectal vs. lung,prostate,breast,multiple_myeloma, myeloid_neoplasm

SEQ ID NO: 453428 - DNA, 154 bp, Homo sapiens; identical to SEQ ID NO: 358999
  chr7:152591569-152591723
  hyper
  anorectal vs. melanoma

SEQ ID NO: 453429 - DNA, 336 bp, Homo sapiens
  chr8:4851007-4851343
  hyper
  anorectal vs. head_and_neck
cgcagcctgtaggctacttagaagaaaacattccccaactcattcagggagaaaaccaagctcacagagccccaagcccaggagccacccagagaaactccttcccctgaccagcgtagaaggaggatacccgtgcgcccacagtgaatgtatctgacttggaagccggtccagaactcctagcctgtttcacgcaccttgccaacaccttacaacttgcaaggagcgaagtccgggggagaggaaagcgggggcgaccttctagaggcagctactcctcgccggctgaggacgttggagagggaaggaggagaggaggaatggggtgtatgggtg

SEQ ID NO: 453430 - DNA, 118 bp, Homo sapiens
  chr8:4851375-4851493
  hyper
  anorectal vs. head_and_neck
attggtaccaaaacccccgtagagagcccgaactttccaggccggcttcacccgggacgctttcccaggcgcgtcgggtccggggagaaagtcctgggaactgcccctcagccacccc

SEQ ID NO: 453431 - DNA, 74 bp, Homo sapiens
  chr8:4851508-4851582
  hyper
  anorectal vs. head_and_neck
cgtctcggaggaggcaacaccgccccggcggagcacagttccagcccaactcgtattgggttcctttctccttg

SEQ ID NO: 453432 - DNA, 126 bp, Homo sapiens
  chr8:4851611-4851737
  hyper
  anorectal vs. head_and_neck
tctcctgtgagcccaagagagggggaaggaatggcggggtggggcgggggcccaggagggctggggagagcgcgatggaagctccctcccgtgcatcgcgttccccgagcttcggcgatggagcag

SEQ ID NO: 453433 - DNA, 35 bp, Homo sapiens
  chr8:4851780-4851815
  hyper
  anorectal vs. head_and_neck
cgcacactcgcgtccgcacacggggcctccgaggg

SEQ ID NO: 453434 - DNA, 118 bp, Homo sapiens; identical to SEQ ID NO: 453430
  chr8:4851375-4851493
  hyper
  anorectal vs. head_and_neck

SEQ ID NO: 453435 - DNA, 74 bp, Homo sapiens; identical to SEQ ID NO: 453431
  chr8:4851508-4851582
  hyper
  anorectal vs. head_and_neck

SEQ ID NO: 453436 - DNA, 126 bp, Homo sapiens; identical to SEQ ID NO: 453432
  chr8:4851611-4851737
  hyper
  anorectal vs. head_and_neck

SEQ ID NO: 453437 - DNA, 35 bp, Homo sapiens; identical to SEQ ID NO: 453433
  chr8:4851780-4851815
  hyper
  anorectal vs. head_and_neck

SEQ ID NO: 453438 - DNA, 66 bp, Homo sapiens; identical to SEQ ID NO: 350700
  chr8:4852588-4852654
  hyper
  anorectal vs. head_and_neck

SEQ ID NO: 453439 - DNA, 4 bp, Homo sapiens
  chr8:11550022-11550026
  hyper
cgtg

SEQ ID NO: 453440 - DNA, 252 bp, Homo sapiens
  chr8:11550368-11550620
  hyper
agcgccgccgagtttgcgccgcccgccgccccgcgctcgcctccagccgcctggggttccgcggcggccgtcagcgcgcacctcatcaataaggcctgccaggcgccggccccgcggccatccatcacccgggctgcacccccggccgcgcaccgaggcttctgccagcgcctgcggggcctctgcgtggagtgggccggcagcgtttttctacccggcaacaaatacatggctttattccacttcttaatc

SEQ ID NO: 453441 - DNA, 7 bp, Homo sapiens
  chr8:11550701-11550708
  hyper
cggtggc

SEQ ID NO: 453442 - DNA, 110 bp, Homo sapiens
  chr8:11561282-11561392
  hyper
  anorectal vs. liver_bileduct,pancreas_gallbladder
cgggcaccccgggtgacccagtgccccacacaagatcgagagttgagcccaagaggtcaccttcttctctactggccccgcccctcgcccgccgctgcgggatgaggacc

SEQ ID NO: 453443 - DNA, 231 bp, Homo sapiens; identical to SEQ ID NO: 359092
  chr8:33372206-33372437
  hyper
  anorectal vs. pancreas_gallbladder,colorectal

SEQ ID NO: 453444 - DNA, 25 bp, Homo sapiens
  chr8:38323132-38323157
  hyper
cggcaaagacggccggcaatagcag

SEQ ID NO: 453445 - DNA, 6 bp, Homo sapiens
  chr8:55372563-55372569
  hyper
  anorectal vs. ovary
tgatcc

SEQ ID NO: 453446 - DNA, 117 bp, Homo sapiens
  chr8:56014011-56014128
  hyper
  anorectal vs. head_and_neck,cervical
cggacccgcccgccctcagctgccggcgcggcaccaggctccgcgctccgagccccgtacgcctttctctcccctgcactctctggcaaggccgggcacgcccactgccgctgctgg

SEQ ID NO: 453447 - DNA, 117 bp, Homo sapiens; identical to SEQ ID NO: 453446
  chr8:56014011-56014128
  hyper
  anorectal vs. head_and_neck

SEQ ID NO: 453448 - DNA, 239 bp, Homo sapiens
  chr8:60030908-60031147
  hyper
  anorectal vs. myeloid_neoplasm
aaagagttgtggggcagttttccctgtggggggcaggggcgcctcccaggtccctgcaccccgactcccggctgctcccctggcaactaatccggagaagggaagtggtgccacgagcccccactgcccggggagggagggagagagaagggggaactgggaaataaactgaattctcttactctgcctccgttcctggaccccagacacacccccaaagtattccacggttttctctt

SEQ ID NO: 453449 - DNA, 200 bp, Homo sapiens
  chr8:60030947-60031147
  hyper
  anorectal vs. ovary,lung
cgcctcccaggtccctgcaccccgactcccggctgctcccctggcaactaatccggagaagggaagtggtgccacgagcccccactgcccggggagggagggagagagaagggggaactgggaaataaactgaattctcttactctgcctccgttcctggaccccagacacacccccaaagtattccacggttttctctt

SEQ ID NO: 453450 - DNA, 115 bp, Homo sapiens; identical to SEQ ID NO: 346983
  chr8:60031791-60031906
  hyper
  anorectal vs. ovary,lung

SEQ ID NO: 453451 - DNA, 350 bp, Homo sapiens
  chr8:60031791-60032141
  hyper
  anorectal vs. ovary,uterine
ctccaccgccgcctcttggtcccgccgccgccgctgccgccgccgccgggcaggtaacttcatgcgctcattgtcccccccgcccgcccccccatccccgcctcccgcgcccctcgcagcccggcacacgcgctcgggctctaggtactgggcgttttattggagattctgagttgttctgcttgtagtttattttctccaccttggaggcccgggatgtggggggtgggggggtggggcggggatccagaagggacagggcgggaggggggcgagcgtcccgggccgggcggggtagggagcgcggccggacgcgggctcgtcaaggcccaatggctgctgttcggaac

SEQ ID NO: 453452 - DNA, 103 bp, Homo sapiens
  chr8:60032288-60032391
  hyper
  anorectal vs. ovary,uterine
tgccgagccagagccaccagcggcctcagggcaccgtggggagcgcgcagctagggggcgctgtggcgcaccccgccccgcagccccgcccccggccctcccc

SEQ ID NO: 453453 - DNA, 229 bp, Homo sapiens
  chr8:60031912-60032141
  hyper
  anorectal vs. melanoma,non_cancer,myeloid_neoplasm, uterine,multiple_myeloma,thyroid,renal
cggcacacgcgctcgggctctaggtactgggcgttttattggagattctgagttgttctgcttgtagtttattttctccaccttggaggcccgggatgtggggggtgggggggtggggcggggatccagaagggacagggcgggaggggggcgagcgtcccgggccgggcggggtagggagcgcggccggacgcgggctcgtcaaggcccaatggctgctgttcggaac

SEQ ID NO: 453454 - DNA, 203 bp, Homo sapiens
  chr8:60032288-60032491
  hyper
  anorectal vs. melanoma,non_cancer,myeloid_neoplasm, uterine,multiple_myeloma,thyroid,renal
tgccgagccagagccaccagcggcctcagggcaccgtggggagcgcgcagctagggggcgctgtggcgcaccccgccccgcagccccgcccccggccctccccggccccaccccactcccaccgccctctccgcggccgtccccacccctatctccgcgacccccactcctcctcggctgttccccaaccctgtcactgtgct

SEQ ID NO: 453455 - DNA, 212 bp, Homo sapiens; identical to SEQ ID NO: 345302
  chr8:61193765-61193977
  hyper
  anorectal vs. ovary

SEQ ID NO: 453456 - DNA, 293 bp, Homo sapiens
  chr8:61193765-61194058
  hyper
  anorectal vs. upper_gi
cggggctggagccggagcggagcgcgcgtgggggagtgtgagcacgcgtgagcggcagtgtgagtgcgagagcgcctccgggtgtgaaccgcagtgtgagtgcaagcaggcgtgcgttcggaccgagtgttccagagacccgcgtgggaagcgcgtccggaggccccagcagagcgagggagcggctgtggcctggggagcgagcgcctggcgaattttatacccgaccggggcgtgtctggtacgcgaggatccgcccccttctctctctggccgttggggccaggggagcc

SEQ ID NO: 453457 - DNA, 29 bp, Homo sapiens
  chr8:67025640-67025669
  hyper
  anorectal vs. cervical,upper_gi,pancreas_gallbladder, colorectal
acttcctcagcaggagacatccttaggtc

SEQ ID NO: 453458 - DNA, 281 bp, Homo sapiens
  chr8:67025640-67025921
  hyper
  anorectal vs. pancreas_gallbladder,upper_gi
acttcctcagcaggagacatccttaggtcgctggttcgattccggctcgaaggagacaagtgcggtttttttctccagctcccgatgacttatggcactttccttgggtgccttcagtgacacattgcattccaacgagcagtttgaaagtctagcgctttctccccattttgggcctcccagcctgcacggtaattctttttagccattcgccctgcgggaacgtgtccgggcaggttcccagcgcagctgtgggtctgcgcttggccgagcgactgccg

SEQ ID NO: 453459 - DNA, 245 bp, Homo sapiens
  chr8:67025676-67025921
  hyper
  anorectal vs. upper_gi,pancreas_gallbladder
cgattccggctcgaaggagacaagtgcggtttttttctccagctcccgatgacttatggcactttccttgggtgccttcagtgacacattgcattccaacgagcagtttgaaagtctagcgctttctccccattttgggcctcccagcctgcacggtaattctttttagccattcgccctgcgggaacgtgtccgggcaggttcccagcgcagctgtgggtctgcgcttggccgagcgactgccg

SEQ ID NO: 453460 - DNA, 5 bp, Homo sapiens
  chr8:67026485-67026490
  hyper
  anorectal vs. pancreas_gallbladder,upper_gi
cgcat

SEQ ID NO: 453461 - DNA, 235 bp, Homo sapiens
  chr8:67026578-67026813
  hyper
  anorectal vs. pancreas_gallbladder,upper_gi
agtagggcgagctccagcttaccactctaaaacttcccagacaatgagtggtgggcgctagcagtttatccttctagctttaaatttttagacccatttaattggggggaaattcacgaaactggttatttttgcttcaaaaatggcgacagattgccgtcacatgtattatcactcagaatcctttatgatttgtgataagatgtctgcatttccagggactcatctgaggcta

SEQ ID NO: 453462 - DNA, 43 bp, Homo sapiens
  chr8:69242761-69242804
  hyper
  anorectal vs. lung
cgctagagtaggcagggcagaaggtgctgaggagaggctcaga

SEQ ID NO: 453463 - DNA, 57 bp, Homo sapiens
  chr8:69243011-69243068
  hyper
  anorectal vs. lung
acagtcgcgcgcgcacggacacacacacacacgcacgcacgcacacacaccggtggc

SEQ ID NO: 453464 - DNA, 436 bp, Homo sapiens
  chr8:70745324-70745760
  hyper
  anorectal vs. uterine,ovary
agcatcccacctcgctgcgccaggggtaccgggtgttcgccgcctgggctcgcggcaccctcgggagtgaagctgccgacctgcaaagcagaaagagggcggtcagcgaagagcggctgcggcttggggctagcgtcccagcgccccggggaccagggttaggtgaccccgaaccgtccctagagggacggaggagctagtcaggagcggagccccggaggactaggcagcagccggctgcagtctccagtcccggaacaataagcagcaggcggtcggcggagactctccctcattgtctgccgcggacctgcccccgtcccgccccttctgccttaaacattgcgtttgcttttatatgttaataattatcaacctggcagctctgactcagaggcagtgtcttttaatcgagtgaactaactgcagcctttcc

SEQ ID NO: 453465 - DNA, 959 bp, Homo sapiens
  chr8:70745324-70746283
  hyper
  anorectal vs. head_and_neck,colorectal,uterine,sarcoma, lung,ovary
agcatcccacctcgctgcgccaggggtaccgggtgttcgccgcctgggctcgcggcaccctcgggagtgaagctgccgacctgcaaagcagaaagagggcggtcagcgaagagcggctgcggcttggggctagcgtcccagcgccccggggaccagggttaggtgaccccgaaccgtccctagagggacggaggagctagtcaggagcggagccccggaggactaggcagcagccggctgcagtctccagtcccggaacaataagcagcaggcggtcggcggagactctccctcattgtctgccgcggacctgcccccgtcccgccccttctgccttaaacattgcgtttgcttttatatgttaataattatcaacctggcagctctgactcagaggcagtgtcttttaatcgagtgaactaactgcagcctttccgtactcctactccattactcaaaatagaaaatgcccaaaagaacaaaggaaactttttcacagacacacaatgtattccctgtcccaatttttctaaaaggaaaaaagaaggtgggggtaaactacgtgtgtagaaatgtgtgtgcacactggtgtgcgttggcacgtgtgcgcgactagatttgaatctgtctgctccaccagagacacacattcaaagccgaaggcagcagcaaaaaggtcaacatgcttgcctctttattcccaacaccaaaaataaccccctgaccgaaagaactcttcaattacaaataccaggggcattcgaggctgtggcccgcactaagtcccagagcgcggtatcaaacgaaaccgaaaatccgtctgctttgccgagagctagggaagccacaaccaaacaaagagatcccggcacgctgtcagagagcgcgcgaggagcccacggagccggctgggcgcacgcgggccggcggggaggtgtgctattgactgagcgcacccc

SEQ ID NO: 453466 - DNA, 8 bp, Homo sapiens
  chr8:72459564-72459572
  hyper
  anorectal vs. head_and_neck,cervical
cgtccccc

SEQ ID NO: 453467 - DNA, 55 bp, Homo sapiens; identical to SEQ ID NO: 346990
  chr8:72756949-72757004
  hyper
  anorectal vs. sarcoma,renal,melanoma,head_and_neck, non_cancer

SEQ ID NO: 453468 - DNA, 4 bp, Homo sapiens
  chr8:73164244-73164248
  hyper
  anorectal vs. multiple_myeloma,sarcoma
aacc

SEQ ID NO: 453469 - DNA, 27 bp, Homo sapiens
  chr8:75896528-75896555
  hyper
  anorectal vs. lung,sarcoma
cgggcttgggtctcgggagcccaaagc

SEQ ID NO: 453470 - DNA, 77 bp, Homo sapiens; identical to SEQ ID NO: 346991
  chr8:75897394-75897471
  hyper
  anorectal vs. lung,sarcoma

SEQ ID NO: 453471 - DNA, 195 bp, Homo sapiens
  chr8:77589904-77590099
  hyper
  anorectal vs. head_and_neck,melanoma
cgccgaagaaaaagtctagaagtggaaattaccttttgtctcaatgttaattactccttgcctccaacactcaacacctaaccacctggtagtcctttttggttctcccctaactcggtgctcaatgtcagggtccgagtgctctgcagtggatgtggctgggctggggttgccctgtaaagtgttgaagaggat

SEQ ID NO: 453472 - DNA, 5 bp, Homo sapiens
  chr8:80695898-80695903
  hyper
  anorectal vs. pancreas_gallbladder,liver_bileduct, upper_gi,colorectal,cervical
cgccc

SEQ ID NO: 453473 - DNA, 113 bp, Homo sapiens
  chr8:80695946-80696059
  hyper
  anorectal vs. pancreas_gallbladder,liver_bileduct, upper_gi,colorectal,cervical
tgtcgccgctctttggcgcccccgcaacagctccctctcagcaggacgcggaaaggtcagggtccctctctctcgtatataccacaaagaaagcgcgttccccgcggcgcccc

SEQ ID NO: 453474 - DNA, 133 bp, Homo sapiens
  chr8:80696101-80696234
  hyper
  anorectal vs. pancreas_gallbladder,liver_bileduct, upper_gi,colorectal,cervical
cggtgggcccgcgggctcctgatctgtccaggcccctaaactatcacaaggaggatatttgatgaccgtctttcttccctcgctctctcccaacaaagggtaactgacctctcgcgtgacctggccagcgctg

SEQ ID NO: 453475 - DNA, 307 bp, Homo sapiens; identical to SEQ ID NO: 350774
  chr8:80696263-80696570
  hyper
  anorectal vs. pancreas_gallbladder,liver_bileduct, upper_gi,colorectal,cervical

SEQ ID NO: 453476 - DNA, 3 bp, Homo sapiens
  chr8:89339983-89339986
  hyper
  anorectal vs. cervical,sarcoma,uterine,renal,ovary,lung, breast,bladder_and_urothelial
cgc

SEQ ID NO: 453477 - DNA, 261 bp, Homo sapiens; identical to SEQ ID NO: 333507
  chr8:95003763-95004024
  hyper
  anorectal vs. pancreas_gallbladder,cervical,upper_gi

SEQ ID NO: 453478 - DNA, 48 bp, Homo sapiens; identical to SEQ ID NO: 347002
  chr8:105236123-105236171
  hyper
  anorectal vs. cervical,head_and_neck

SEQ ID NO: 453479 - DNA, 100 bp, Homo sapiens
  chr8:110986113-110986213
  hyper
  anorectal vs. colorectal,renal,lung,prostate
cgcgcccgcctccccgcccagccgccgcgtgcctccggggtacctgtccctgcagcaggaatcgatgctgagctcatcgatgccccagtactggatctcc

SEQ ID NO: 453480 - DNA, 174 bp, Homo sapiens; identical to SEQ ID NO: 350818
  chr8:110987222-110987396
  hyper
  anorectal vs. colorectal,lung,ovary,sarcoma,renal, thyroid,multiple_myeloma,breast,prostate

SEQ ID NO: 453481 - DNA, 66 bp, Homo sapiens
  chr8:110987616-110987682
  hyper
  anorectal vs. colorectal,cervical,lung,breast,thyroid, ovary,renal
cggagctctcattttagaaggaaaggcaaaaagacaaggaatagaacaagcgtgggctggggcagg

SEQ ID NO: 453482 - DNA, 300 bp, Homo sapiens; identical to SEQ ID NO: 350820
  chr8:110987956-110988256
  hyper
  anorectal vs. colorectal,cervical,lung,breast,thyroid, ovary,renal

SEQ ID NO: 453483 - DNA, 342 bp, Homo sapiens
  chr8:114447448-114447790
  hyper
  anorectal vs. melanoma,sarcoma,prostate,thyroid,breast, lung,uterine,ovary,non_cancer
ctgaggccccagagagaaaagaaaaatcaagcttcaaggagcaggttgggattacaaggcagttgctgccacagagaccggggcgactgacttcctggcattttgggatgtaaattaaaattctagacatgccacccatcattggttatagtagagggaaaggtaacctctccagctccctcctcccaaaacatgaattatcatttccactgaatgcaaatgagctgccttccgtggggggacagccagctgcaagctggacaataaactgtttcatagagacgcggcccgattgcagttcagagaggcactcctttacaaaggaagaagcgtccagtttgt

SEQ ID NO: 453484 - DNA, 19 bp, Homo sapiens
  chr8:114447852-114447871
  hyper
  anorectal vs. melanoma,sarcoma,prostate,thyroid,breast, lung,uterine,ovary,non_cancer
ccgcgacacacagacaccc

SEQ ID NO: 453485 - DNA, 414 bp, Homo sapiens
  chr8:114449602-114450016
  hyper
  anorectal vs. cervical,melanoma,lung,upper_gi,ovary, bladder_and_urothelial,head_and_neck,sarcoma,breast,prostate, liver_bileduct,pancreas_gallbladder,multiple_myeloma,colorectal, non_cancer,renal,uterine,myeloid_neoplasm,thyroid
tgtgttactactgtagttgcagtatatttcaggcaggcttctcccatttattatcctgtgatttaattgaaaaaggaaatcacagagaattttctcaataaattctgccttcacacggaaaagaatgtatttgaacacatgtatttacatactcaaataactacgtgtaaacccttcaccgggtttttatgattcgggaaacggatttcatccgtggcctgggcgggggtggggtggggagggaagtcaatgtcgtttcctcaaatagttctccctttcatcctcccaacccccttttcagtttgtgtgtgccgcagttaaactactttatctgtggtagttatctagaacaaacccatttgtcttaattctgaatcggtaccaaatatgtaaataggaggtttctttcaaaac

SEQ ID NO: 453486 - DNA, 818 bp, Homo sapiens; identical to SEQ ID NO: 345315
  chr8:114449602-114450420
  hyper
  anorectal vs. liver_bileduct,lung,melanoma,upper_gi, breast,bladder_and_urothelial,ovary,colorectal, pancreas_gallbladder,renal

SEQ ID NO: 453487 - DNA, 151 bp, Homo sapiens
  chr8:140643192-140643343
  hyper
  anorectal vs. lymphoid_neoplasm,bladder_and_urothelial, upper_gi,melanoma,colorectal,renal,multiple_myeloma
cgaatggtccgctaggacggagagcctgtgcctcaggggctccgctccctgcaagaggggctctgcgcagcgccggccaccggagaggcaacggcgccctctggcgggcactcgggcgactgcagggacacggccccgggtgcggggtcgg

SEQ ID NO: 453488 - DNA, 210 bp, Homo sapiens
  chr8:145747534-145747744
  hyper
  anorectal vs. head_and_neck
cgtcggcactgccggccagtccttgctcttcccacctttcggaggcccaagatcctactgtggccggccagggccagcgagggaccccccccatgcagagctggaggttggggtgatgtcttttcggaagagcttcaagggaggtgttggggcctccccggccaccttccattgctaccccaggattcccgagtgcaacgttcccggctc

SEQ ID NO: 453489 - DNA, 316 bp, Homo sapiens
  chr9:6644554-6644870
  hyper
  anorectal vs. cervical,renal
cacaaaagacaaataggccagaataatctaagtccaagggagccctcccggccacttacaaacagggtcttccattttcaagggtcttttcaaacggatgttggcagggaccgtcttctcgatcaattcatcaatgctctaaaattaaaacgcaaggcagaggaaagtgcctctgagttaaaagagtcacctctgtgttttgcgactacaaagccttgtgggaacctcattgaaatcgcctaattagggttctttttaaaagaaaaggaaaactctgagcaagccagaatgatttggaggaaagaaaatcgtgaag

SEQ ID NO: 453490 - DNA, 114 bp, Homo sapiens
  chr9:6644756-6644870
  hyper
  anorectal vs. cervical,renal,ovary,uterine,sarcoma, breast,myeloid_neoplasm,prostate,non_cancer,thyroid, multiple_myeloma,liver_bileduct
cgactacaaagccttgtgggaacctcattgaaatcgcctaattagggttctttttaaaagaaaaggaaaactctgagcaagccagaatgatttggaggaaagaaaatcgtgaag

SEQ ID NO: 453491 - DNA, 50 bp, Homo sapiens
  chr9:10612635-10612685
  hyper
  anorectal vs. head_and_neck
cgcgctcggaaagccggcttgggtcctgctaattattctgaaggcaaagt

SEQ ID NO: 453492 - DNA, 143 bp, Homo sapiens; identical to SEQ ID NO: 350851
  chr9:10613299-10613442
  hyper
  anorectal vs. head_and_neck

SEQ ID NO: 453493 - DNA, 224 bp, Homo sapiens; identical to SEQ ID NO: 333625
  chr9:16133902-16134126
  hyper
  anorectal vs. upper_gi

SEQ ID NO: 453494 - DNA, 97 bp, Homo sapiens
  chr9:19127135-19127232
  hyper
  anorectal vs. bladder_and_urothelial,cervical,renal, upper_gi,multiple_myeloma,melanoma,uterine,liver_bileduct, non_cancer,breast,pancreas_gallbladder,colorectal, myeloid_neoplasm,lung,lymphoid_neoplasm,thyroid,prostate
cgatagcaatcgccctaaatctgttggcaggaaagaagcctcaacgcacaaaggcaagggtcgaaagcgcgggttcagcagaccgcccctacccagc

SEQ ID NO: 453495 - DNA, 16 bp, Homo sapiens
  chr9:19127549-19127565
  hyper
  anorectal vs. bladder_and_urothelial,cervical,renal, upper_gi,multiple_myeloma,melanoma,uterine,liver_bileduct, non_cancer,breast,pancreas_gallbladder,colorectal, myeloid_neoplasm,lung,lymphoid_neoplasm,thyroid,prostate
gcagcacgtgacccgc

SEQ ID NO: 453496 - DNA, 72 bp, Homo sapiens
  chr9:21395928-21396000
  hyper
  anorectal vs. pancreas_gallbladder,melanoma, liver_bileduct,ovary,renal,multiple_myeloma,uterine,prostate, upper_gi,colorectal,non_cancer,bladder_and_urothelial,lung, thyroid,breast,sarcoma,cervical,myeloid_neoplasm,head_and_neck
cgcttcctgattgttcatgattttcccctttctccgaattcgggtctttctccgcagaaatggccctgaatc

SEQ ID NO: 453497 - DNA, 36 bp, Homo sapiens; identical to SEQ ID NO: 345322
  chr9:21396327-21396363
  hyper
  anorectal vs. pancreas_gallbladder,melanoma, liver_bileduct,ovary,renal,multiple_myeloma,uterine,prostate, upper_gi,colorectal,non_cancer,bladder_and_urothelial,lung, thyroid,breast,sarcoma,cervical,myeloid_neoplasm,head_and_neck

SEQ ID NO: 453498 - DNA, 543 bp, Homo sapiens
  chr9:34701753-34702296
  hyper
cacccaggcccccgagcctcgggggtcctctgcggggccggcccagcccggtggccgggggaaggcccgtgtttgtcggcgaatatgaagcatttatctttccctcccacgccccaaatagtcccgatttacccagagcccaaggtgcccaatgttgaagtcttgaaataattactgtttggcttaaaggctgaaggagggttcacatcacctctggcacttcgctcgcacccgatagatatcttacaccactcattacggggccaacgctaagaaaggtttccttattccaaggaaatatattaggcgcgaggctggggctggaggatgaagggctatagcctgacatgggcggaaaaggaacttgtcttgcccataagtggacacagggaaacgcgcaacctttggcctagaatgagacacatgtgagaacaaatcgtgaaaataattgaaaacaaattggtcctagaaagatgaaggaaatgagaatggaaaattcaacccccactcctgttttcctgtagcagacagaggactgctgcc

SEQ ID NO: 453499 - DNA, 894 bp, Homo sapiens; identical to SEQ ID NO: 333655
  chr9:35756575-35757469
  hyper
  anorectal vs. pancreas_gallbladder,upper_gi,colorectal, liver_bileduct

SEQ ID NO: 453500 - DNA, 22 bp, Homo sapiens
  chr9:36036762-36036784
  hyper
  anorectal vs. lung,melanoma,renal,sarcoma,prostate,ovary, uterine,multiple_myeloma,non_cancer,bladder_and_urothelial, myeloid_neoplasm,lymphoid_neoplasm,thyroid
cgacacacagttgggccataac

SEQ ID NO: 453501 - DNA, 15 bp, Homo sapiens
  chr9:71788936-71788951
  hyper
  anorectal vs. head_and_neck
cgccgcctcccgccc

SEQ ID NO: 453502 - DNA, 45 bp, Homo sapiens; identical to SEQ ID NO: 350872
  chr9:71789757-71789802
  hyper
  anorectal vs. head_and_neck

SEQ ID NO: 453503 - DNA, 386 bp, Homo sapiens
  chr9:90113280-90113666
  hyper
cgcctcggtgggccgctcccttccctcccttgctcccccgggcggccgcacgccgggtcggccgggtaacggagagggagtcgccaggaatgtggctctggggactgcctcgctcggggaaggggagagggtggccacggtgttaggagaggcgcgggagccgagaggtggcgcgggggtgccaccgttgccgcaggctggagagagattgctcccagtgaggcgcgtaccgtctgggcgagggcttcattcttccgcggcgtccctggaggtgggaaagctgggtgggcatgtgtgcagagaaaggggaggcggggaggccagtcacttccggagccggttctgatcccaacagaccgcccagcgtttggggacgccgacctcgg

SEQ ID NO: 453504 - DNA, 156 bp, Homo sapiens
  chr9:93955774-93955930
  hyper
  anorectal vs. pancreas_gallbladder
cggcacggggctcgggcactcggggacacacggtggtcgtcgctgtgtctcagcaggaccctgtgcgctggagagcttggggccgcgagtcgcgcagcaaggaggcttctggcttctctatttttagcctctgaacgttttccaaaataattacca

SEQ ID NO: 453505 - DNA, 268 bp, Homo sapiens
  chr9:93956177-93956445
  hyper
  anorectal vs. pancreas_gallbladder
gacccgcaggaatgcgaggggcaagacagatcgccggaggagcaggggtcagaagtcagtgtttaaccactcactggctttcggtgaagccagaatgttagcagcgagtcgcggtcgggggccttggggttgcacacgcttgctccaagcaccgaggctcagctgagcacatgcacaaccctctcgatgcagcggaaagtcgtgtggcttagggccgcaccccgaatttcgccgcacccgccgctgtgccatttacaaccccccaccc

SEQ ID NO: 453506 - DNA, 202 bp, Homo sapiens
  chr9:100610480-100610682
  hyper
  anorectal vs. myeloid_neoplasm,melanoma,multiple_myeloma, non_cancer,thyroid,breast,sarcoma,prostate, bladder_and_urothelial,renal
acagagactggcctgggtaaggggaaaaaatcactgcctcttcctgtgcctctagtggttgaactagaatcctggctagctcatctcgcttttgaagggggaaggggagtaatcatcggctcttttgagattgtcttgcaaaccatggactctctccccagaaatgaacacccacaatctagtgtgtaaatttcaggtttcc

SEQ ID NO: 453507 - DNA, 202 bp, Homo sapiens; identical to SEQ ID NO: 453506
  chr9:100610480-100610682
  hyper
  anorectal vs. sarcoma,myeloid_neoplasm,melanoma,thyroid

SEQ ID NO: 453508 - DNA, 274 bp, Homo sapiens
  chr9:103790689-103790963
  hyper
  anorectal vs. liver_bileduct,lung
gggagaggacagccccacgttaccgaggactcgaggcagaagcggtctccaaggatgggtggggatcccaccactggcttccagctctgcatgcgccgcggagtccccgcgcagggcgcacctttgcggcggggtttccccgctgccttctgggaaccccgcggagcgactgccgctggacgcaatctggctggcttgcctctaccccgagctcactctctctgctctgtctgggctctggagccagagctgagtctctcttgagcatgcgcag

SEQ ID NO: 453509 - DNA, 204 bp, Homo sapiens
  chr9:103791017-103791221
  hyper
  anorectal vs. liver_bileduct,lung
ctctttcctttcattaaacaaacaggagatcctgaaacctggaccctgtgcaagctgcagcgccaggaggaggcagcggaggaagcagagcgcgggatgggcgcccagcggcatctgtgatcccgcgcacctccgccccacgggcgcgcgcacaaacacggacacacacatacacacactcgcgcacacactcgcacaaacaca

SEQ ID NO: 453510 - DNA, 392 bp, Homo sapiens; identical to SEQ ID NO: 350932
  chr9:122318421-122318813
  hyper
  anorectal vs. lung,colorectal,melanoma,breast,prostate

SEQ ID NO: 453511 - DNA, 5 bp, Homo sapiens
  chrX:7895407-7895412
  hyper
  anorectal vs. head_and_neck
cgcca

SEQ ID NO: 453512 - DNA, 18 bp, Homo sapiens
  chrX:7895589-7895607
  hyper
  anorectal vs. head_and_neck
cgcaggcaaggattcctc

SEQ ID NO: 453513 - DNA, 80 bp, Homo sapiens
  chrX:9433633-9433713
  hyper
  anorectal vs. head_and_neck
cgccaactgtccccgcggcgctcggactggggtgcggcgcgctcccaggagcctgaacaataccccgaggtggccgctcc

SEQ ID NO: 453514 - DNA, 583 bp, Homo sapiens; identical to SEQ ID NO: 206207
  chrX:9433838-9434421
  hyper
  anorectal vs. head_and_neck

SEQ ID NO: 453515 - DNA, 305 bp, Homo sapiens
  chrX:13706949-13707254
  hyper
  anorectal vs. head_and_neck
cgtttgactagtcgtttttatcattgtaatcacgacatcctgtgactgtgctcatgaggtctgtttatttccactttacgtaaacttttcaaaatgacagttatttcgtactcgctgtcgcccgaacgcagacgggaggacacttcaggagcaatcgacccgaaggaaaagcacgatccaggccccgcctgcctcggctccaccttccccgcgcccgtcccccagggtctcggccgcgggaccccgccttccaggccccgccccgctttttccctggccccgccccggcccgtcgccatgttgtt

SEQ ID NO: 453516 - DNA, 274 bp, Homo sapiens
  chrX:13707434-13707708
  hyper
  anorectal vs. head_and_neck
accgggcggagtgcgcgggtgtcggggtctgagggggcggctcgggcctcgggcagctggggcggggtgcggtgcgcgcggggctagcgcgggtcacaaggccgccccgggagagaggacggctggttgtctccctgcctcctctctgacgcaggaggaaagacggtccccacacccttggggagagggactcacagaaacacacacaaacactggagaaagggagatacaaaagcccggacacccgtgcacatacacacggagaaatacaccc

SEQ ID NO: 453517 - DNA, 25 bp, Homo sapiens
  chrX:13707229-13707254
  hyper
  anorectal vs. head_and_neck
cgccccggcccgtcgccatgttgtt

SEQ ID NO: 453518 - DNA, 562 bp, Homo sapiens; identical to SEQ ID NO: 347739
  chrX:13707434-13707996
  hyper
  anorectal vs. head_and_neck

SEQ ID NO: 453519 - DNA, 132 bp, Homo sapiens
  chrX:15511311-15511443
  hyper
  anorectal vs. head_and_neck,upper_gi
cgctgcggtagcggcacctggagccttagcggcgggggtgacgcgaagagccgccgggagcgagtgcagggagggcaggttaagagagtgtgggtccagtagcctcaccgtgactcagcgcttcgcggccgg

SEQ ID NO: 453520 - DNA, 140 bp, Homo sapiens; identical to SEQ ID NO: 347741
  chrX:15511544-15511684
  hyper
  anorectal vs. head_and_neck,upper_gi

SEQ ID NO: 453521 - DNA, 52 bp, Homo sapiens
  chrX:16730628-16730680
  hyper
  anorectal vs. head_and_neck
cctcctcgcccaccttcccctctcctccctgctgctggcccagctcactcac

SEQ ID NO: 453522 - DNA, 225 bp, Homo sapiens
  chrX:16730628-16730853
  hyper
  anorectal vs. head_and_neck
cctcctcgcccaccttcccctctcctccctgctgctggcccagctcactcacgctggtgagcttggggtttgcacccgggtttgtgcaatggtccaaaacaagcgcctaaaaagtgattcctccagcacaggcagctcccgtcaccctccgctctggacgcactgggccccaggcctcgcccagcccggggaccgctcctccctcccgtggctcactttgcaaag

SEQ ID NO: 453523 - DNA, 35 bp, Homo sapiens; identical to SEQ ID NO: 345669
  chrX:16730902-16730937
  hyper
  anorectal vs. head_and_neck

SEQ ID NO: 453524 - DNA, 219 bp, Homo sapiens; identical to SEQ ID NO: 375396
  chrX:16805209-16805428
  hyper
  anorectal vs. head_and_neck

SEQ ID NO: 453525 - DNA, 4 bp, Homo sapiens
  chrX:16887827-16887831
  hyper
  anorectal vs. head_and_neck
cgcg

SEQ ID NO: 453526 - DNA, 328 bp, Homo sapiens
  chrX:16888225-16888553
  hyper
  anorectal vs. head_and_neck
agccaagagcagcccgaccgctggcgctcctgcctttcccaagcgcgtcacactccccactgtcgaaagcccgggccccgtcttgctgcctgggtgctccccagacgccgcgtccttctttcctgcctcctccccgctcgcgggtaccgaggtctgaggcgctcttctctctctctccaaacttggaacgagacttttcaacccgcgcctcccagcccgcccaggcagctgagcgcaggcgcatccgccctgggaaaagtgagaggaggcggagaggcgggtctgggagccaacggctccggcgccgagaccaatgacgcgcggcggg

SEQ ID NO: 453527 - DNA, 2 bp, Homo sapiens
  chrX:16888664-16888666
  hyper
  anorectal vs. head_and_neck
cc

SEQ ID NO: 453528 - DNA, 811 bp, Homo sapiens
  chrX:40012149-40012960
  hyper
  anorectal vs. head_and_neck
cgagagggcgggaggagacagggagacttccgcgggaggccgatggtcaaagtggggggtgaaaccgctcagggtgaccgggctggagacccaggaacccgattcggcgcgaaggtgccgcgcgagttccagcgagcagcctgcccggccaagtggcgcctgcccagccgtcggccgtgccagcttcctgccctgcccaggaccgcggagcagtcggggacgccgccgcaggctggcccggaatcgcaggacagcggcggggggagggggtagccaggccgcaagtaaactcgcactagagctttctgcacacctccgccctagagagggggcccggacccccggtctgtgaggcgtcggctttggccttccaaccttggggtgcgcgaggaagcaaagacccagggggcacccccaccctcgcccaaggcccgagggtgggggacagctgaaatgtctttggtcttgtttgatgaccgcttggcggatctgctcccatccgggttctgccgttccgagagtgccgggtcagtgatacccaggccggtctgagcaggcatgtggatgagcaaaagcaaatctgtcgctcctccgaccgccacccctcacttaacctttcctgcatccaaggaaggggagggcacccagactctgccccaccccccgcggggcgctccctctgcctcggaagctgagactaagagcgagggttttccccctttcccctgggctcgctgggtttctaacttcctctaaacctccctcctcgctccgaaaagccccgaggagaggagctgagaggaagcacgcc

SEQ ID NO: 453529 - DNA, 61 bp, Homo sapiens
  chrX:40126403-40126464
  hyper
  anorectal vs. head_and_neck
cgggacgcgcagccgcccggcgcagaggaagcccgggacgctggggacaccgcctggagcc

SEQ ID NO: 453530 - DNA, 205 bp, Homo sapiens; identical to SEQ ID NO: 336720
  chrX:40506434-40506639
  hyper
  anorectal vs. head_and_neck

SEQ ID NO: 453531 - DNA, 203 bp, Homo sapiens; identical to SEQ ID NO: 336721
  chrX:40595088-40595291
  hyper
  anorectal vs. head_and_neck,upper_gi

SEQ ID NO: 453532 - DNA, 264 bp, Homo sapiens; identical to SEQ ID NO: 336722
  chrX:41112874-41113138
  hyper
  anorectal vs. head_and_neck

SEQ ID NO: 453533 - DNA, 563 bp, Homo sapiens
  chrX:71525281-71525844
  hyper
  anorectal vs. head_and_neck
cgttgtttgcggacagctcggctgccctcctcgccgcatcccagatggagccgcggaaccgggggcggccgggagcatcccttgcacggcgggcgcgtgcacccaggccaccggggccctgagcgtccgttcccgcaagtgctgtatcaggaactgatcttagagacaggatggacaggcaggaaggggcacggggtgtcggcctccgcggcgagtccgcactccggcgccggctgctgccactctcgcgcctgatcaacacttactgagcgcccgctgagcatccgacgcggcagcaggctgagcctaccccctagccaagccgcctgcggtcagtgctaaaaccccgctaggagaagagtgagagaggctcggagaggtgcggtaacttgcccaaggtcacagcgctagaaagtggcggagccgggattcgcagccaggtctctctgactccaagtccggtgctctgcgaagcagggactcggcgcgcggctcgccagcccgcgtttatagggagaggggtgtgcgcgtgggtgtgtgtgtgtgggcgtgtgtcgggggag

SEQ ID NO: 453534 - DNA, 181 bp, Homo sapiens
  chrX:71525998-71526179
  hyper
  anorectal vs. head_and_neck
cagatgcggtccgggagattagcaaagtcggtggaagccaagctggagaaagcgcgggcgcagggagaaaaggtgctgccgtctccccgggagaagcgggcacccggccccgctggccggcaggggggcgcgctggcaagcgaacccgagcgctggcgggcgggcgggcgggcggcccctc

SEQ ID NO: 453535 - DNA, 410 bp, Homo sapiens
  chr1:898245-898655
  hypo
  anorectal vs. lymphoid_neoplasm,liver_bileduct,breast, renal,prostate,lung,uterine
cgcacacgtccccggcgctgcgagggggccgggcctgtgctttttgctgtgggtatggccccccgcccgtttccctcttgccctgtgccttctactccccaccagcacaagcccaccccacctgtgccggtcaggtcctgacctgcccctccgcccctccattcaggggcctctccaggagcctggggtgtggcccagcagtgggatccactcacgagtcccgtctccacctgccctccccaggcggcgggagcctgtttgccatccacggagactgtgaggcctacgacacgcgcaccgaccgctggcacgtggtggcctccatgtccacgcgccgggcccgggtgggagtggctgcggtggggaaccggctctatgctgtgggcgggtaagcctggaggctggacttg

SEQ ID NO: 453536 - DNA, 39 bp, Homo sapiens
  chr1:898690-898729
  hypo
  anorectal vs. lymphoid_neoplasm,liver_bileduct,breast, renal,prostate,lung,uterine
gacctgcagtggcttaattccgctagctatgatgggacc

SEQ ID NO: 453537 - DNA, 88 bp, Homo sapiens; identical to SEQ ID NO: 352707
  chr1:898776-898864
  hypo
  anorectal vs. lymphoid_neoplasm,liver_bileduct,breast, renal,prostate,lung,uterine

SEQ ID NO: 453538 - DNA, 76 bp, Homo sapiens
  chr1:1168275-1168351
  hypo
  anorectal vs. bladder_and_urothelial,melanoma,renal,lung, lymphoid_neoplasm,pancreas_gallbladder,colorectal, liver_bileduct,breast,non_cancer,thyroid,multiple_myeloma, sarcoma,uterine,upper_gi
cgactactacctgccctacgcgctgggcggcggctacgtgctctcggccgacctggtgcactacctgcgcctcagc

SEQ ID NO: 453539 - DNA, 114 bp, Homo sapiens
  chr1:1168984-1169098
  hypo
  anorectal vs. bladder_and_urothelial,melanoma,renal,lung, lymphoid_neoplasm,pancreas_gallbladder,colorectal, liver_bileduct,breast,non_cancer,thyroid,multiple_myeloma, sarcoma,uterine,upper_gi
gtggtttcacatcaatccgctttcatgggattttggtctctgtccagtgacttcgtggtaaatgtaactcagtgtttgcttgcgacttatttataaatattgtaagtttgtgtc

SEQ ID NO: 453540 - DNA, 462 bp, Homo sapiens; identical to SEQ ID NO: 345682
  chr1:1168984-1169446
  hypo
  anorectal vs. lung,melanoma,renal,lymphoid_neoplasm, bladder_and_urothelial,liver_bileduct,pancreas_gallbladder, colorectal,breast,non_cancer,thyroid,uterine,multiple_myeloma, sarcoma,upper_gi,cervical

SEQ ID NO: 453541 - DNA, 367 bp, Homo sapiens; identical to SEQ ID NO: 336762
  chr1:1194390-1194757
  hypo
  anorectal vs. upper_gi,liver_bileduct, pancreas_gallbladder

SEQ ID NO: 453542 - DNA, 575 bp, Homo sapiens; identical to SEQ ID NO: 345683
  chr1:1562211-1562786
  hypo
  anorectal vs. liver_bileduct

SEQ ID NO: 453543 - DNA, 39 bp, Homo sapiens; identical to SEQ ID NO: 336900
  chr1:9654089-9654128
  hypo
  anorectal vs. upper_gi,lymphoid_neoplasm, pancreas_gallbladder,colorectal,liver_bileduct,breast

SEQ ID NO: 453544 - DNA, 145 bp, Homo sapiens; identical to SEQ ID NO: 375674
  chr1:12030713-12030858
  hypo
  anorectal vs. lymphoid_neoplasm

SEQ ID NO: 453545 - DNA, 64 bp, Homo sapiens; identical to SEQ ID NO: 346318
  chr1:12123950-12124014
  hypo
  anorectal vs. lymphoid_neoplasm,non_cancer,ovary, multiple_myeloma,thyroid

SEQ ID NO: 453546 - DNA, 241 bp, Homo sapiens
  chr1:12304451-12304692
  hypo
  anorectal vs. upper_gi,pancreas_gallbladder,colorectal
cgtaagaaagcactacttcaagccctggaggagaaatggaaggcaaggcagagatcttctgggccataagagcagttgtggtgacacgtgtaagatgagcaagaacactagattgagctaatgctgactcttgtctttgtagaatgaccgccagcagaaaggggagtcctattggtattcagttaccgcctccgtagttacaaggattgtggagaatattgaagtaagtcctgctgacttt

SEQ ID NO: 453547 - DNA, 15 bp, Homo sapiens
  chr1:12304747-12304762
  hypo
  anorectal vs. upper_gi,pancreas_gallbladder,colorectal
agtttctcatttctc

SEQ ID NO: 453548 - DNA, 334 bp, Homo sapiens
  chr1:19676386-19676720
  hypo
  anorectal vs. pancreas_gallbladder,upper_gi, liver_bileduct,colorectal,cervical,renal,lymphoid_neoplasm
cggctcggtggcaataccaacccaccaaaaacagaaccatttgtgcactgcatatattattacatccttataaaagtggctgccggaaggaaaacattttcatgtgttgtggctgcagatgttccacgaggtggttccaatggcgtctgaagccggagcctggcccgtgtgtccccagcaggcgcctctcctcctccccatggccctaacacaggcaagtgtttggaagctggcagcctttcccccagaggggatgtattacacctcccactgccacgtggcatcttctagcgcgacccgcagggcgtggccctaaggcatgggccccactcac

SEQ ID NO: 453549 - DNA, 51 bp, Homo sapiens; identical to SEQ ID NO: 347798
  chr1:19676822-19676873
  hypo
  anorectal vs. pancreas_gallbladder,upper_gi, liver_bileduct,colorectal,cervical,renal,lymphoid_neoplasm

SEQ ID NO: 453550 - DNA, 179 bp, Homo sapiens; identical to SEQ ID NO: 336969
  chr1:21610561-21610740
  hypo
  anorectal vs. liver_bileduct,upper_gi

SEQ ID NO: 453551 - DNA, 158 bp, Homo sapiens; identical to SEQ ID NO: 362397
  chr1:23693515-23693673
  hypo
  anorectal vs. lymphoid_neoplasm

SEQ ID NO: 453552 - DNA, 247 bp, Homo sapiens; identical to SEQ ID NO: 336991
  chr1:27183370-27183617
  hypo
  anorectal vs. liver_bileduct,colorectal, lymphoid_neoplasm,melanoma

SEQ ID NO: 453553 - DNA, 317 bp, Homo sapiens; identical to SEQ ID NO: 352840
  chr1:32826720-32827037
  hypo
  anorectal vs. lymphoid_neoplasm,liver_bileduct, colorectal,pancreas_gallbladder

SEQ ID NO: 453554 - DNA, 148 bp, Homo sapiens; identical to SEQ ID NO: 337042
  chr1:44132677-44132825
  hypo
  anorectal vs. upper_gi,lymphoid_neoplasm,liver_bileduct, pancreas_gallbladder

SEQ ID NO: 453555 - DNA, 60 bp, Homo sapiens
  chr1:44351032-44351092
  hypo
  anorectal vs. liver_bileduct
cgtctcctccttccccgggtccttctcacgcactcacacacaccctgctgaaacctgatc

SEQ ID NO: 453556 - DNA, 71 bp, Homo sapiens; identical to SEQ ID NO: 337063
  chr1:47033326-47033397
  hypo
  anorectal vs. upper_gi

SEQ ID NO: 453557 - DNA, 211 bp, Homo sapiens; identical to SEQ ID NO: 337094
  chr1:61601555-61601766
  hypo
  anorectal vs. liver_bileduct

SEQ ID NO: 453558 - DNA, 79 bp, Homo sapiens
  chr1:100928315-100928394
  hypo
cgctggcttcgagcactatgacctcttcttcatagatggcagcacacccagtgacaacatcgtgcgaaggttcctgaac

SEQ ID NO: 453559 - DNA, 60 bp, Homo sapiens; identical to SEQ ID NO: 362506
  chr1:100928423-100928483
  hypo

SEQ ID NO: 453560 - DNA, 289 bp, Homo sapiens; identical to SEQ ID NO: 452731
  chr1:101702081-101702370
  hypo
  anorectal vs. sarcoma

SEQ ID NO: 453561 - DNA, 152 bp, Homo sapiens; identical to SEQ ID NO: 452732
  chr1:101702796-101702948
  hypo
  anorectal vs. sarcoma

SEQ ID NO: 453562 - DNA, 393 bp, Homo sapiens; identical to SEQ ID NO: 452733
  chr1:101702796-101703189
  hypo
  anorectal vs. sarcoma,uterine

SEQ ID NO: 453563 - DNA, 59 bp, Homo sapiens
  chr1:159931971-159932030
  hypo
  anorectal vs. cervical
cggcaaggggaacagaggatgggaggcaaagggaaaacatggggtagagggataatttt

SEQ ID NO: 453564 - DNA, 59 bp, Homo sapiens
  chr1:159932101-159932160
  hypo
  anorectal vs. cervical
atatagacctactgagtttataagttatgcactcaagaagtttacctttggcccggggc

SEQ ID NO: 453565 - DNA, 295 bp, Homo sapiens; identical to SEQ ID NO: 337216
  chr1:164761703-164761998
  hypo
  anorectal vs. pancreas_gallbladder,upper_gi,colorectal

SEQ ID NO: 453566 - DNA, 32 bp, Homo sapiens
  chr1:167393552-167393584
  hypo
  anorectal vs. upper_gi
cggggaaagaaagacttccagcttcttacctc

SEQ ID NO: 453567 - DNA, 187 bp, Homo sapiens; identical to SEQ ID NO: 352930
  chr1:167393613-167393800
  hypo
  anorectal vs. upper_gi

SEQ ID NO: 453568 - DNA, 70 bp, Homo sapiens
  chr1:171554936-171555006
  hypo
  anorectal vs. liver_bileduct,lymphoid_neoplasm,upper_gi, colorectal,sarcoma,renal,pancreas_gallbladder,breast,melanoma, ovary
cggttgagggttgagtgtctcttaccgaaatgcttgggaccagaaatgtctcggatttcagattggtttt

SEQ ID NO: 453569 - DNA, 122 bp, Homo sapiens; identical to SEQ ID NO: 347839
  chr1:171555061-171555183
  hypo
  anorectal vs. liver_bileduct,lymphoid_neoplasm,upper_gi, colorectal,sarcoma,renal,pancreas_gallbladder,breast,melanoma, ovary

SEQ ID NO: 453570 - DNA, 91 bp, Homo sapiens; identical to SEQ ID NO: 357010
  chr1:220102055-220102146
  hypo
  anorectal vs. liver_bileduct

SEQ ID NO: 453571 - DNA, 62 bp, Homo sapiens; identical to SEQ ID NO: 452748
  chr1:231297736-231297798
  hypo
  anorectal vs. head_and_neck,lung,renal, bladder_and_urothelial

SEQ ID NO: 453572 - DNA, 216 bp, Homo sapiens
  chr1:234724591-234724807
  hypo
  anorectal vs. upper_gi
cggttatgaggattaaatgacccgacagaggcaaaacagctttgtaaaccataaatcattttgttcggagtcaacaggatgactttttcccctcacacaatttagaattatgtacctgttgaggtagcaacgccctcgtttaatcccagccatgtttggtccccaaatgcctctctcactcgcccagagtgatactgaggccacaaaaagctctgc

SEQ ID NO: 453573 - DNA, 209 bp, Homo sapiens; identical to SEQ ID NO: 353003
  chr1:234724836-234725045
  hypo
  anorectal vs. upper_gi

SEQ ID NO: 453574 - DNA, 51 bp, Homo sapiens; identical to SEQ ID NO: 452753
  chr1:241520533-241520584
  hypo
  anorectal vs. uterine,ovary,pancreas_gallbladder, colorectal,sarcoma,thyroid

SEQ ID NO: 453575 - DNA, 148 bp, Homo sapiens; identical to SEQ ID NO: 452754
  chr1:241520612-241520760
  hypo
  anorectal vs. uterine,ovary,pancreas_gallbladder, colorectal,sarcoma,thyroid

SEQ ID NO: 453576 - DNA, 91 bp, Homo sapiens; identical to SEQ ID NO: 349442
  chr1:241520789-241520880
  hypo
  anorectal vs. uterine,ovary,pancreas_gallbladder, colorectal,sarcoma,thyroid

SEQ ID NO: 453577 - DNA, 186 bp, Homo sapiens; identical to SEQ ID NO: 337434
  chr1:246324319-246324505
  hypo
  anorectal vs. liver_bileduct

SEQ ID NO: 453578 - DNA, 95 bp, Homo sapiens; identical to SEQ ID NO: 337435
  chr1:246324810-246324905
  hypo
  anorectal vs. upper_gi,lymphoid_neoplasm

SEQ ID NO: 453579 - DNA, 97 bp, Homo sapiens
  chr1:246330213-246330310
  hypo
  anorectal vs. liver_bileduct
cgatacccactgaaggcagctgctctcgggtgccccttcccacaagccctagcgaccatcaatctgcactccgtctctatggattcatctactttga

SEQ ID NO: 453580 - DNA, 138 bp, Homo sapiens; identical to SEQ ID NO: 452756
  chr1:247170868-247171006
  hypo
  anorectal vs. cervical,breast,colorectal,upper_gi, uterine,ovary

SEQ ID NO: 453581 - DNA, 102 bp, Homo sapiens
  chr10:524407-524509
  hypo
  anorectal vs. upper_gi,pancreas_gallbladder,melanoma, colorectal,lymphoid_neoplasm,liver_bileduct,renal,breast, prostate,uterine,ovary,sarcoma,bladder_and_urothelial, non_cancer,cervical
cgggcatgccgggggtgcagatgcacccaaattcccatcttattctcactcatccagtgtccaggcatgctgggggtgtagacacatccaaattcctgtctt

SEQ ID NO: 453582 - DNA, 84 bp, Homo sapiens
  chr10:524671-524755
  hypo
  anorectal vs. upper_gi,pancreas_gallbladder,melanoma, colorectal,lymphoid_neoplasm,liver_bileduct,renal,breast, prostate,uterine,ovary,sarcoma,bladder_and_urothelial, non_cancer,cervical
gacacatccaaattcccgtcttattctcactcatcgcgtgtccaggcgtgcagatacatccaaattcccatcttattctcactc

SEQ ID NO: 453583 - DNA, 9 bp, Homo sapiens
  chr10:524784-524793
  hypo
  anorectal vs. upper_gi,pancreas_gallbladder,melanoma, colorectal,lymphoid_neoplasm,liver_bileduct,renal,breast, prostate,uterine,ovary,sarcoma,bladder_and_urothelial, non_cancer,cervical
gatagcaac

SEQ ID NO: 453584 - DNA, 142 bp, Homo sapiens
  chr10:851108-851250
  hypo
  anorectal vs. liver_bileduct,lymphoid_neoplasm
cggctggaggtcgagggcgcgtggggggcctggagggtgcaggggacgccgagggcgcggggcccaacctccggccagccgcctggattctggtctctgctctgagcgaggtgcgtgggtgcctccctgcttttgagcgggg

SEQ ID NO: 453585 - DNA, 175 bp, Homo sapiens; identical to SEQ ID NO: 354474
  chr10:851504-851679
  hypo
  anorectal vs. liver_bileduct,lymphoid_neoplasm

SEQ ID NO: 453586 - DNA, 55 bp, Homo sapiens
  chr10:5523206-5523261
  hypo
  anorectal vs. colorectal,liver_bileduct,upper_gi, lymphoid_neoplasm
cgggaggagacctgggcagcggcggactcattgcaggtcgctctgcggtgaggac

SEQ ID NO: 453587 - DNA, 70 bp, Homo sapiens
  chr10:5538706-5538776
  hypo
  anorectal vs. prostate
cgggcaagaaggaacaggtcgcaatgagtgaccgcaagagatcatggtgactcctgaaaacgcccaggcc

SEQ ID NO: 453588 - DNA, 192 bp, Homo sapiens; identical to SEQ ID NO: 348414
  chr10:5538938-5539130
  hypo
  anorectal vs. prostate

SEQ ID NO: 453589 - DNA, 381 bp, Homo sapiens
  chr10:5540271-5540652
  hypo
  anorectal vs. colorectal,liver_bileduct, pancreas_gallbladder,renal,upper_gi,melanoma,prostate,uterine, bladder_and_urothelial,sarcoma,lymphoid_neoplasm,non_cancer, ovary,lung
cgcatacagacacacagacacacacacagatgcacacacagacgtacacgtatattatttgcagccgaagagaggcaggctgcgtgcagaggctggcagctgggctccgtctgtccatgcgaggcgcccgctcctgtttgtgcgggacacgtgcccaggtcctcaccagcagctcaggcagaacctggagccacagacaccgcccagcaccatcctcacacatcctctgcccacctgccctctgctccgcgtcaggggaggcaggagctgcccctggggcctgctccaggcagttctgccaccgcaggtgagaggggtgggctggaaggaaccctggaagcaggtgggggccctcggaggcagccgccccacaaacaccaa

SEQ ID NO: 453590 - DNA, 198 bp, Homo sapiens; identical to SEQ ID NO: 348416
  chr10:5541528-5541726
  hypo
  anorectal vs. colorectal,melanoma,pancreas_gallbladder, liver_bileduct,sarcoma,upper_gi,lymphoid_neoplasm,renal, prostate,uterine,bladder_and_urothelial,lung,non_cancer

SEQ ID NO: 453591 - DNA, 209 bp, Homo sapiens; identical to SEQ ID NO: 452758
  chr10:17270445-17270654
  hypo
  anorectal vs. melanoma,sarcoma,ovary,uterine,renal, non_cancer

SEQ ID NO: 453592 - DNA, 6 bp, Homo sapiens
  chr10:46009817-46009823
  hypo
  anorectal vs. lymphoid_neoplasm
cgctca

SEQ ID NO: 453593 - DNA, 45 bp, Homo sapiens; identical to SEQ ID NO: 379304
  chr10:46009889-46009934
  hypo
  anorectal vs. lymphoid_neoplasm

SEQ ID NO: 453594 - DNA, 216 bp, Homo sapiens; identical to SEQ ID NO: 452768
  chr10:50969681-50969897
  hypo
  anorectal vs. head_and_neck

SEQ ID NO: 453595 - DNA, 192 bp, Homo sapiens; identical to SEQ ID NO: 359569
  chr10:50970412-50970604
  hypo
  anorectal vs. head_and_neck

SEQ ID NO: 453596 - DNA, 634 bp, Homo sapiens; identical to SEQ ID NO: 340649
  chr10:71133924-71134558
  hypo
  anorectal vs. lymphoid_neoplasm,upper_gi,cervical, pancreas_gallbladder

SEQ ID NO: 453597 - DNA, 79 bp, Homo sapiens; identical to SEQ ID NO: 287325
  chr10:94449318-94449397
  hypo
  anorectal vs. cervical

SEQ ID NO: 453598 - DNA, 51 bp, Homo sapiens; identical to SEQ ID NO: 365397
  chr10:98292796-98292847
  hypo
  anorectal vs. lymphoid_neoplasm

SEQ ID NO: 453599 - DNA, 38 bp, Homo sapiens; identical to SEQ ID NO: 452783
  chr10:112431835-112431873
  hypo
  anorectal vs. renal,liver_bileduct,lymphoid_neoplasm, sarcoma,prostate,myeloid_neoplasm,bladder_and_urothelial, multiple_myeloma,thyroid,non_cancer,uterine,cervical,breast, ovary

SEQ ID NO: 453600 - DNA, 236 bp, Homo sapiens; identical to SEQ ID NO: 452784
  chr10:112432125-112432361
  hypo
  anorectal vs. renal,liver_bileduct,lymphoid_neoplasm, sarcoma,prostate,myeloid_neoplasm,bladder_and_urothelial, multiple_myeloma,thyroid,non_cancer,uterine,cervical,breast, ovary

SEQ ID NO: 453601 - DNA, 203 bp, Homo sapiens
  chr10:134794144-134794347
  hypo
  anorectal vs. head_and_neck
cgagtgcccggcgaatgcccagtgagtgcccagtgagtgcccagcaagtgcccggcgaatgcccagcgagtgcccagcgagtgcccggtgaatgcccagcgagtgcccagcgagtgcccggtgagtgcctgcaagtgcccagcgagtgcctggtgaatgcccagtgagtgcccagcgagtgcccggtgaatgcccagcgagtg

SEQ ID NO: 453602 - DNA, 513 bp, Homo sapiens; identical to SEQ ID NO: 340902
  chr11:993208-993721
  hypo
  anorectal vs. liver_bileduct,upper_gi,colorectal,breast

SEQ ID NO: 453603 - DNA, 227 bp, Homo sapiens; identical to SEQ ID NO: 354668
  chr11:1521171-1521398
  hypo
  anorectal vs. liver_bileduct,upper_gi,lymphoid_neoplasm, colorectal,melanoma,pancreas_gallbladder

SEQ ID NO: 453604 - DNA, 129 bp, Homo sapiens; identical to SEQ ID NO: 351149
  chr11:8615887-8616016
  hypo
  anorectal vs. ovary

SEQ ID NO: 453605 - DNA, 17 bp, Homo sapiens
  chr11:47358910-47358927
  hypo
  anorectal vs. lymphoid_neoplasm,melanoma
cggggggcaggaccagg

SEQ ID NO: 453606 - DNA, 106 bp, Homo sapiens; identical to SEQ ID NO: 348490
  chr11:47359237-47359343
  hypo
  anorectal vs. lymphoid_neoplasm,melanoma

SEQ ID NO: 453607 - DNA, 390 bp, Homo sapiens
  chr11:64951346-64951736
  hypo
  anorectal vs. lymphoid_neoplasm
cggaggtcggtctcagttgccccatctgagaaaggagtgttcgctggggaaaacagatcagcacgtgtggccttctccacgtgtcaagcctcctatcccccaactcctcctgcgctttggcaaggtctgactgagcccagcagaaaagaaagactcgggattaagtctacgtaaaccagcttttcctgacggtgtgcccagggcccatttttcaagtcacaccaatcaattctcaatgagctgcctttgggagggacatgcccagcaaccctggatgagactctccagccttggaggccccagccctgcccgaaggactcttgggtgttccctccttctgcctggttagagagccccttaccctactctgtccttgcccgccttgcgcgg

SEQ ID NO: 453608 - DNA, 190 bp, Homo sapiens; identical to SEQ ID NO: 354751
  chr11:64951894-64952084
  hypo
  anorectal vs. lymphoid_neoplasm

SEQ ID NO: 453609 - DNA, 33 bp, Homo sapiens; identical to SEQ ID NO: 359870
  chr11:65307510-65307543
  hypo
  anorectal vs. head_and_neck

SEQ ID NO: 453610 - DNA, 192 bp, Homo sapiens
  chr11:71507748-71507940
  hypo
  anorectal vs. colorectal,upper_gi
cgacaaagacactaggacacacagaggacaagcaacccccgagctcccacagactgctgcccggccacctggctcttgtgcctccactctacacccaagccccccattgccaccagcctttgccccagctccccctgagcacagcccctcctggcagccatgtgcacagatgtacccgcagcagcctctgcc

SEQ ID NO: 453611 - DNA, 6 bp, Homo sapiens
  chr11:71508037-71508043
  hypo
  anorectal vs. colorectal,upper_gi
ttccac

SEQ ID NO: 453612 - DNA, 510 bp, Homo sapiens; identical to SEQ ID NO: 452797
  chr11:76381512-76382022
  hypo
  anorectal vs. lymphoid_neoplasm,bladder_and_urothelial

SEQ ID NO: 453613 - DNA, 30 bp, Homo sapiens; identical to SEQ ID NO: 452798
  chr11:76382264-76382294
  hypo
  anorectal vs. lymphoid_neoplasm,bladder_and_urothelial

SEQ ID NO: 453614 - DNA, 399 bp, Homo sapiens; identical to SEQ ID NO: 452805
  chr11:115375434-115375833
  hypo
  anorectal vs. liver_bileduct

SEQ ID NO: 453615 - DNA, 17 bp, Homo sapiens
  chr11:133938756-133938773
  hypo
  anorectal vs. melanoma,sarcoma
cgccaagttcattgaaa

SEQ ID NO: 453616 - DNA, 161 bp, Homo sapiens; identical to SEQ ID NO: 345407
  chr11:133939437-133939598
  hypo
  anorectal vs. melanoma,sarcoma

SEQ ID NO: 453617 - DNA, 397 bp, Homo sapiens; identical to SEQ ID NO: 452811
  chr12:3601625-3602022
  hypo
  anorectal vs. melanoma,sarcoma,myeloid_neoplasm,breast

SEQ ID NO: 453618 - DNA, 86 bp, Homo sapiens; identical to SEQ ID NO: 452813
  chr12:4377809-4377895
  hypo
  anorectal vs. lymphoid_neoplasm

SEQ ID NO: 453619 - DNA, 142 bp, Homo sapiens; identical to SEQ ID NO: 452814
  chr12:4378558-4378700
  hypo
  anorectal vs. lymphoid_neoplasm

SEQ ID NO: 453620 - DNA, 245 bp, Homo sapiens; identical to SEQ ID NO: 452815
  chr12:4378558-4378803
  hypo
  anorectal vs. lymphoid_neoplasm,colorectal,head_and_neck

SEQ ID NO: 453621 - DNA, 117 bp, Homo sapiens; identical to SEQ ID NO: 347220
  chr12:21681020-21681137
  hypo
  anorectal vs. head_and_neck,ovary,breast

SEQ ID NO: 453622 - DNA, 77 bp, Homo sapiens; identical to SEQ ID NO: 452819
  chr12:40618264-40618341
  hypo
  anorectal vs. liver_bileduct,lung,sarcoma,renal,breast, ovary,myeloid_neoplasm

SEQ ID NO: 453623 - DNA, 35 bp, Homo sapiens; identical to SEQ ID NO: 351336
  chr12:40619048-40619083
  hypo
  anorectal vs. liver_bileduct,lung,sarcoma,renal,breast, ovary,myeloid_neoplasm

SEQ ID NO: 453624 - DNA, 97 bp, Homo sapiens; identical to SEQ ID NO: 341398
  chr12:49065604-49065701
  hypo
  anorectal vs. lymphoid_neoplasm,upper_gi,liver_bileduct, pancreas_gallbladder

SEQ ID NO: 453625 - DNA, 31 bp, Homo sapiens; identical to SEQ ID NO: 452825
  chr12:94543992-94544023
  hypo
  anorectal vs. sarcoma

SEQ ID NO: 453626 - DNA, 86 bp, Homo sapiens; identical to SEQ ID NO: 345430
  chr12:94544052-94544138
  hypo
  anorectal vs. sarcoma

SEQ ID NO: 453627 - DNA, 635 bp, Homo sapiens
  chr12:110352780-110353415
  hypo
  anorectal vs. liver_bileduct,cervical
cgaggtacacgccacgcatatgtatagcctctccagctttccatgaggtacacgccacgcatacagcctctccagctttctacgaggtacatgccatgcatacagcctctccagctttctaccaggtacacacaatgcatacagcctctccagctttccacgaggtacacgccacgcatacagcctctccagctttccacgaggtaagcgccacgcatacagcctctccagctttctatgaggtacacaccatgcatacagcctttcaagtcccgcatgctcccttccgttccttggcacgtgcattgctgttgctcagctggattctccagtctgggtagggccgcaggcttaccttcctcatcagaggcagggctctgccctgtgggccttgtcttggggtggtgactttgctcttggcactcaggttgcagagcgccggctgcaggcatgggaagcagaccagcaggaggaggaggaagaggaggaggcccggcgggtcgagcagctctcagatgccctgctgcagcaggaggcggagactatggctgagcagggctaccggcctaaggtaggaagtctgccaggatataggccaacaccggcaagacagactctgcccggcccctgctccc

SEQ ID NO: 453628 - DNA, 61 bp, Homo sapiens
  chr12:110983646-110983707
  hypo
  anorectal vs. liver_bileduct,colorectal
cgtcctgctcacacttaatggctgagaggggagattacctgtcgctcaagacgactccctc

SEQ ID NO: 453629 - DNA, 136 bp, Homo sapiens; identical to SEQ ID NO: 354932
  chr12:110983736-110983872
  hypo
  anorectal vs. liver_bileduct,colorectal

SEQ ID NO: 453630 - DNA, 97 bp, Homo sapiens; identical to SEQ ID NO: 452829
  chr12:111284508-111284605
  hypo
  anorectal vs. cervical,ovary,uterine,prostate

SEQ ID NO: 453631 - DNA, 8 bp, Homo sapiens
  chr12:111285034-111285042
  hypo
  anorectal vs. cervical,ovary,uterine,prostate
ggtctccc

SEQ ID NO: 453632 - DNA, 292 bp, Homo sapiens
  chr12:113725566-113725858
  hypo
  anorectal vs. liver_bileduct
cgcctccgtcccgccccctgccacccttcttcactggtgagctccattgcccccgctccccggggcacatgggcttctccccgctctttcccaggagcaaggccttgctcctgtctgagcctgcagctctactgcaaggagatgtggcctggccctgctcctcttcgtggaaggaccccgcccagccggtgtcctggggctgccaccatcccttccctcatgcatgaatcacctgagcccagctcagggttggtggcgcccaagggagtggacgcaggtggaggagaggccc

SEQ ID NO: 453633 - DNA, 397 bp, Homo sapiens
  chr12:120147746-120148143
  hypo
  anorectal vs. liver_bileduct,lymphoid_neoplasm,melanoma
cggtggtttcgttgcaatcaggacaaagggtttggctttagatagtcttcgaggcttagcactcttcacttggcctaacagtgggatgttctttgggaatgtcagactgtgctaaactggatactggaagggaactgaatctggacagagggggtccattagctgaggcttgggcatctatggggacacagagataagagctacaacggctcctctctactattttgtgttttacgagcatgaaacgtggcttcaacatattggctcccttgaaagtaaagaaaaaacaccatgtccttggcctcacacctgctatcatgagtagcttctccaggtccttgataatataaatttggaagactgctccaattcctgggacatgggttagggagttttt

SEQ ID NO: 453634 - DNA, 208 bp, Homo sapiens; identical to SEQ ID NO: 348569
  chr12:120148396-120148604
  hypo
  anorectal vs. liver_bileduct,lymphoid_neoplasm,melanoma

SEQ ID NO: 453635 - DNA, 704 bp, Homo sapiens
  chr12:121687598-121688302
  hypo
cggcaccacgatcctcgactcggggttcttgtccagcatacgggtgatcaggtccttcaagtcctcagctatgtcgggcctggggatggagaggcgtcagggtggcagacacgggaccgccaagaactcggacaggagagatgcgggacggcgggagatactcactggtctggaaattccagggcctgactcttgatcttactgtgtaaacacatgatccgctcgtccatgaatgggcactgcaaagaggccagggacagagtggcagtcaatggcggccacatctgcccttcgagggccacctgtgctgtgccactccacataggatacagcagagaaatcaacaattgcggcccaggctagggggcaagcagttcccattctccccgagaatggccaagacacaggggtgtggggcctggccgacgcagggcagagccaggaatggccctctcgaagggctagagcctttcccaagcacactgcaggctccctctgtagctgggcctcagtttacctacttacaccaaagcaaacactgctcgtcacctacttgccaggtgaacaacaggaacaacaagaataacacaaaagactttgtgttatttgtggcagcagcagtgattttcaagggcttagcctggatcgcgccacgccctgccctgaggttttcattcactgttccccgtccctggaatgttctt

SEQ ID NO: 453636 - DNA, 239 bp, Homo sapiens; identical to SEQ ID NO: 348574
  chr12:121688331-121688570
  hypo

SEQ ID NO: 453637 - DNA, 210 bp, Homo sapiens
  chr12:122622385-122622595
  hypo
ctgctcaggctgcccgcatcagttgcaggaggggtgtggccaccaccagagctgtgctgtggggaggaggcagggctgggtggggaaggcggagcttgcagcacctgggatgcaccggttcagccctgccgttcccagccccagctgtgcaccattctgcagagcgggttttctgtggttcccagtcttgtccctccggctcctcattgg

SEQ ID NO: 453638 - DNA, 261 bp, Homo sapiens; identical to SEQ ID NO: 366105
  chr12:122622642-122622903
  hypo

SEQ ID NO: 453639 - DNA, 623 bp, Homo sapiens; identical to SEQ ID NO: 366167
  chr12:132218722-132219345
  hypo
  anorectal vs. liver_bileduct,colorectal,upper_gi

SEQ ID NO: 453640 - DNA, 3 bp, Homo sapiens
  chr12:132333476-132333479
  hypo
  anorectal vs. colorectal,upper_gi,melanoma
cgg

SEQ ID NO: 453641 - DNA, 506 bp, Homo sapiens; identical to SEQ ID NO: 341686
  chr13:20979799-20980305
  hypo
  anorectal vs. colorectal,liver_bileduct,upper_gi

SEQ ID NO: 453642 - DNA, 201 bp, Homo sapiens; identical to SEQ ID NO: 452842
  chr13:29292491-29292692
  hypo
  anorectal vs. lung,colorectal,uterine,multiple_myeloma, renal,ovary,breast,lymphoid_neoplasm,non_cancer,thyroid, pancreas_gallbladder,sarcoma,upper_gi,prostate,myeloid_neoplasm, bladder_and_urothelial,liver_bileduct,cervical,melanoma

SEQ ID NO: 453643 - DNA, 242 bp, Homo sapiens; identical to SEQ ID NO: 345442
  chr13:29293342-29293584
  hypo
  anorectal vs. lung,breast,colorectal,renal, lymphoid_neoplasm,uterine,multiple_myeloma,ovary,non_cancer, thyroid,pancreas_gallbladder,sarcoma,upper_gi,prostate, myeloid_neoplasm,bladder_and_urothelial,cervical,melanoma,
  CONT. FROM ABOVE: liver_bileduct

SEQ ID NO: 453644 - DNA, 23 bp, Homo sapiens
  chr13:37005451-37005474
  hypo
  anorectal vs. cervical
cgattatttcacctggcttgtca

SEQ ID NO: 453645 - DNA, 166 bp, Homo sapiens; identical to SEQ ID NO: 452855
  chr13:108519932-108520098
  hypo
  anorectal vs. lung

SEQ ID NO: 453646 - DNA, 68 bp, Homo sapiens; identical to SEQ ID NO: 452856
  chr13:108520309-108520377
  hypo
  anorectal vs. lung

SEQ ID NO: 453647 - DNA, 18 bp, Homo sapiens
  chr13:114497796-114497814
  hypo
  anorectal vs. lymphoid_neoplasm
cgtgtgatgagcacacat

SEQ ID NO: 453648 - DNA, 3 bp, Homo sapiens
  chr13:114807499-114807502
  hypo
  anorectal vs. melanoma,lymphoid_neoplasm,colorectal
cgc

SEQ ID NO: 453649 - DNA, 92 bp, Homo sapiens; identical to SEQ ID NO: 346082
  chr13:114807847-114807939
  hypo
  anorectal vs. melanoma,lymphoid_neoplasm,colorectal

SEQ ID NO: 453650 - DNA, 39 bp, Homo sapiens; identical to SEQ ID NO: 452862
  chr14:23355352-23355391
  hypo
  anorectal vs. lymphoid_neoplasm,bladder_and_urothelial, melanoma,renal,multiple_myeloma,pancreas_gallbladder, liver_bileduct

SEQ ID NO: 453651 - DNA, 53 bp, Homo sapiens; identical to SEQ ID NO: 351522
  chr14:23355484-23355537
  hypo
  anorectal vs. lymphoid_neoplasm,bladder_and_urothelial, melanoma,renal,multiple_myeloma,pancreas_gallbladder, liver_bileduct

SEQ ID NO: 453652 - DNA, 20 bp, Homo sapiens
  chr14:23777239-23777259
  hypo
  anorectal vs. lymphoid_neoplasm
agggggccccaactggggcc

SEQ ID NO: 453653 - DNA, 80 bp, Homo sapiens; identical to SEQ ID NO: 452877
  chr14:60097114-60097194
  hypo
  anorectal vs. multiple_myeloma,melanoma,breast, myeloid_neoplasm,prostate

SEQ ID NO: 453654 - DNA, 45 bp, Homo sapiens; identical to SEQ ID NO: 452878
  chr14:60385935-60385980
  hypo
  anorectal vs. myeloid_neoplasm

SEQ ID NO: 453655 - DNA, 7 bp, Homo sapiens
  chr14:60386737-60386744
  hypo
  anorectal vs. myeloid_neoplasm
caaaccc

SEQ ID NO: 453656 - DNA, 176 bp, Homo sapiens; identical to SEQ ID NO: 341948
  chr14:69470456-69470632
  hypo
  anorectal vs. head_and_neck

SEQ ID NO: 453657 - DNA, 111 bp, Homo sapiens; identical to SEQ ID NO: 341982
  chr14:89875711-89875822
  hypo
  anorectal vs. liver_bileduct

SEQ ID NO: 453658 - DNA, 599 bp, Homo sapiens
  chr14:104048314-104048913
  hypo
  anorectal vs. liver_bileduct,melanoma
cggagcatcagcattagctgtgccacagggtggtatgcgctctgctgaaggtggcaccttcagggaaaggcagtctgccggggaggctagcgagcaccctgggtaggagctgagcgtggcctccgcgcctcctcatgggaagtgctggagatgcaggagcccctgagccagagcccagcgctcttacaagagacctcacttcctgttcggggactggggctgctaagtcagagtgcgcctcctgcacccgccaccctggatgtggttccattccctggtccctgagccatagctggggggcatgagactgtcccctgggctgctttggggaccctacttcagggcagccctgccactccctgtaacgggctgtgggtcctgccctgtggccttcctacctctcttgcgtgtgggtgagcctgagcgtggccaccgccctgggagtgccacagaggcaagcggcactggtcctcatgtgtaaacagccccaccagcacgcggggctggagtagtcaggccgggacctgtcccaggaatgggcaggctgttaacctaggatgcattcaagttaggacacatttcattcccgtgtagcggtg

SEQ ID NO: 453659 - DNA, 127 bp, Homo sapiens; identical to SEQ ID NO: 346089
  chr14:104048982-104049109
  hypo
  anorectal vs. liver_bileduct,melanoma

SEQ ID NO: 453660 - DNA, 351 bp, Homo sapiens; identical to SEQ ID NO: 342081
  chr14:104395215-104395566
  hypo
  anorectal vs. upper_gi,colorectal,lung

SEQ ID NO: 453661 - DNA, 507 bp, Homo sapiens; identical to SEQ ID NO: 351653
  chr15:31774606-31775113
  hypo
  anorectal vs. pancreas_gallbladder

SEQ ID NO: 453662 - DNA, 90 bp, Homo sapiens; identical to SEQ ID NO: 355244
  chr15:40532821-40532911
  hypo
  anorectal vs. upper_gi,colorectal,lymphoid_neoplasm, pancreas_gallbladder,melanoma,prostate

SEQ ID NO: 453663 - DNA, 78 bp, Homo sapiens; identical to SEQ ID NO: 452897
  chr15:48936649-48936727
  hypo
  anorectal vs. head_and_neck

SEQ ID NO: 453664 - DNA, 76 bp, Homo sapiens; identical to SEQ ID NO: 452900
  chr15:60289235-60289311
  hypo
  anorectal vs. head_and_neck

SEQ ID NO: 453665 - DNA, 351 bp, Homo sapiens; identical to SEQ ID NO: 452903
  chr15:63795501-63795852
  hypo
  anorectal vs. upper_gi,liver_bileduct

SEQ ID NO: 453666 - DNA, 338 bp, Homo sapiens; identical to SEQ ID NO: 347348
  chr15:63795894-63796232
  hypo
  anorectal vs. upper_gi,liver_bileduct

SEQ ID NO: 453667 - DNA, 107 bp, Homo sapiens; identical to SEQ ID NO: 342273
  chr15:90378787-90378894
  hypo
  anorectal vs. liver_bileduct

SEQ ID NO: 453668 - DNA, 184 bp, Homo sapiens
  chr15:90755573-90755757
  hypo
  anorectal vs. sarcoma
cggggtggagggagagggttcaccctgaatgggaaaaccggccgcagcctcggcgtgccctgctttcttcatactggactaacccactggatagatggatttagaggatgtccgagcagcacaggcagcccaggagagcgagcgagacactctttgacacaagggagagcataaaagcttaaga

SEQ ID NO: 453669 - DNA, 42 bp, Homo sapiens; identical to SEQ ID NO: 366658
  chr15:90756079-90756121
  hypo
  anorectal vs. sarcoma

SEQ ID NO: 453670 - DNA, 86 bp, Homo sapiens; identical to SEQ ID NO: 342281
  chr15:91423329-91423415
  hypo

SEQ ID NO: 453671 - DNA, 49 bp, Homo sapiens
  chr16:468053-468102
  hypo
  anorectal vs. head_and_neck
cgcactcttttttgtccggcttctctcactgaacctgattgctcccaga

SEQ ID NO: 453672 - DNA, 36 bp, Homo sapiens; identical to SEQ ID NO: 380960
  chr16:468131-468167
  hypo
  anorectal vs. head_and_neck

SEQ ID NO: 453673 - DNA, 125 bp, Homo sapiens
  chr16:571590-571715
  hypo
  anorectal vs. lymphoid_neoplasm
cgggcaggagcctctggggcctccactccgacatcaggacctgagatgaccgctgtgtggcgctctctccctgggcagggtggatgccacaggcccctctggctcccaggtgctgcttctccaca

SEQ ID NO: 453674 - DNA, 133 bp, Homo sapiens; identical to SEQ ID NO: 366708
  chr16:571959-572092
  hypo
  anorectal vs. lymphoid_neoplasm

SEQ ID NO: 453675 - DNA, 133 bp, Homo sapiens
  chr16:1424307-1424440
  hypo
  anorectal vs. lymphoid_neoplasm,pancreas_gallbladder, melanoma,upper_gi
cgtccctgctggctgcaagttcttggaccctcactgatgcctggtactggacagtgtgctgctgaggcctgctctgagacaggcaaagccacccctgcctgtccctgaagggccctagacccccttcctcctg

SEQ ID NO: 453676 - DNA, 177 bp, Homo sapiens; identical to SEQ ID NO: 355350
  chr16:1424469-1424646
  hypo
  anorectal vs. lymphoid_neoplasm,pancreas_gallbladder, melanoma,upper_gi

SEQ ID NO: 453677 - DNA, 473 bp, Homo sapiens
  chr16:1424928-1425401
  hypo
  anorectal vs. cervical,bladder_and_urothelial,melanoma, upper_gi,uterine,prostate,renal,lung,breast,lymphoid_neoplasm, sarcoma
cgctgccctagccgcacatgagatttgtcgggaacacagctgtggggcacgtggcctgcacctcacccctctgcccaggcctccgcttctcctccctggaagcagctggcaccagtcagcgccacggggaccatgggagcaaccacagggtggcgggtggcccctcgcccgaggcctggcgctcggcggtcacaccccccgagccccccagggcagccggagtatcctcgtgccgcggtggtggccccagcggagcacaggcagaggctggcgtggacgtggcgcagctggcaggtccgggcctctgaacttcaccccgaatctggccgcgctcagcagccacactgtgtggagaccgtgctccaccacccagagcggcaggcgggagagaagcctggctcgggagtggacggtggactccagaggccgcaaggcagaggccacccccaccccactccaccgcacagcacgac

SEQ ID NO: 453678 - DNA, 71 bp, Homo sapiens
  chr16:1425684-1425755
  hypo
  anorectal vs. cervical,bladder_and_urothelial,melanoma, upper_gi,uterine,prostate,renal,lung,breast,lymphoid_neoplasm, sarcoma
aagaccccctggggaccaggaacccacagtagcatccgaaaatgcctcagccctcaaggatgctcatcggc

SEQ ID NO: 453679 - DNA, 117 bp, Homo sapiens
  chr16:1425284-1425401
  hypo
  anorectal vs. bladder_and_urothelial,cervical,melanoma, uterine,upper_gi,breast,ovary,colorectal,lung,lymphoid_neoplasm
cgtgctccaccacccagagcggcaggcgggagagaagcctggctcgggagtggacggtggactccagaggccgcaaggcagaggccacccccaccccactccaccgcacagcacgac

SEQ ID NO: 453680 - DNA, 407 bp, Homo sapiens; identical to SEQ ID NO: 346114
  chr16:1425684-1426091
  hypo
  anorectal vs. bladder_and_urothelial,cervical,melanoma, uterine,upper_gi,breast,ovary,colorectal,lung,lymphoid_neoplasm

SEQ ID NO: 453681 - DNA, 131 bp, Homo sapiens; identical to SEQ ID NO: 355361
  chr16:1753650-1753781
  hypo
  anorectal vs. lymphoid_neoplasm

SEQ ID NO: 453682 - DNA, 228 bp, Homo sapiens; identical to SEQ ID NO: 348700
  chr16:2042997-2043225
  hypo
  anorectal vs. liver_bileduct,pancreas_gallbladder

SEQ ID NO: 453683 - DNA, 183 bp, Homo sapiens; identical to SEQ ID NO: 355374
  chr16:2129581-2129764
  hypo
  anorectal vs. liver_bileduct,upper_gi

SEQ ID NO: 453684 - DNA, 2 bp, Homo sapiens
  chr16:2213312-2213314
  hypo
  anorectal vs. lymphoid_neoplasm
gt

SEQ ID NO: 453685 - DNA, 303 bp, Homo sapiens
  chr16:2213343-2213646
  hypo
  anorectal vs. lymphoid_neoplasm
caggttctttctctggggtgtggctggtgtctccccgctgcagcctggtgctggctgggtcctgaccgcacctgtcgtggcaggaaacacattcgtcgtgccttggctggtccctgtgtgactgcgtcccgccacgtgggccacaccctgggcctacccaccaaggcccagccttggccccagggacattcagcctggaggtgactggctgtgactcaggacccagaggagtagagggagccaggcaggggtccctccacctcggggaagagctggatgggctcttcgggagctcagaaaggc

SEQ ID NO: 453686 - DNA, 267 bp, Homo sapiens; identical to SEQ ID NO: 366786
  chr16:2213723-2213990
  hypo
  anorectal vs. lymphoid_neoplasm

SEQ ID NO: 453687 - DNA, 266 bp, Homo sapiens
  chr16:2230223-2230489
  hypo
  anorectal vs. pancreas_gallbladder
gtttcactgaggccagcacggtggccacccggcccggctctgggctggcagggcggggagtggggtggccctcaggaggcctgcgggcagcccggcccccacccccaatggaggacagctccagcatggccgcgatgctcttcacactgccggcactacccgtgtccacgctgccggccaggtcactggcccgccggcactgtgcccggacccccagcaggccatcctcaggctcggcgtcaggcaccggctcatccgccaggttg

SEQ ID NO: 453688 - DNA, 182 bp, Homo sapiens; identical to SEQ ID NO: 355382
  chr16:2231183-2231365
  hypo
  anorectal vs. lymphoid_neoplasm

SEQ ID NO: 453689 - DNA, 389 bp, Homo sapiens
  chr16:2280815-2281204
  hypo
  anorectal vs. liver_bileduct,colorectal,upper_gi, pancreas_gallbladder,lymphoid_neoplasm,renal,breast,melanoma, prostate
cgggctctggccttgacctggcgtttggtttctgggatggtggcgtcacctgggagcatgaactccttaggttctggcggggtctctgggctgggtctctggccagccaggcccctttccacccacctaaactctagcagcctccagccctaggctcagcacccctccctgtgcttcagcagcccctcttggcacccctgccactctggcacccctgggattttcccctttgcgggcatcctgggtactctgtgtgtgcccttggccagtcagcaggcccggtgggcttagtccagggctgctagctctcctgttggcctctagtggagatggcagagggtcctgcctgctggtggccaagggctggggcgtgccaggtcctgtctttg

SEQ ID NO: 453690 - DNA, 238 bp, Homo sapiens
  chr16:2281402-2281640
  hypo
  anorectal vs. liver_bileduct,colorectal,upper_gi, pancreas_gallbladder,lymphoid_neoplasm,renal,breast,melanoma, prostate
cttaattgtttctgagtcaccacgcttttgtcgtgtttcaagagaacagcttgtcaaaacaagacgccagccggactgaggtggtttctaagcagtggcttcacagctgtttcccacttgtcatctttatgagcagaaaacctgaactgtgtttacaacctagctttgcacattgtcagatttttcccagcatcctccagaagtgcaaaagcccagcttcctcgcctcaggctgtccc

SEQ ID NO: 453691 - DNA, 61 bp, Homo sapiens; identical to SEQ ID NO: 346128
  chr16:2281702-2281763
  hypo
  anorectal vs. liver_bileduct,colorectal,upper_gi, pancreas_gallbladder,lymphoid_neoplasm,renal,breast,melanoma, prostate

SEQ ID NO: 453692 - DNA, 482 bp, Homo sapiens; identical to SEQ ID NO: 342427
  chr16:2485948-2486430
  hypo
  anorectal vs. upper_gi

SEQ ID NO: 453693 - DNA, 305 bp, Homo sapiens; identical to SEQ ID NO: 452909
  chr16:3208795-3209100
  hypo
  anorectal vs. lymphoid_neoplasm,upper_gi,cervical

SEQ ID NO: 453694 - DNA, 164 bp, Homo sapiens
  chr16:3772855-3773019
  hypo
  anorectal vs. melanoma,liver_bileduct
cggcaaagcactgtcatctactcatcaaagctcctcagaatctactttgctagtctgggcattacactcacttaaatttcttcagtatcttataagggacctatgttttcccacctctgcctatttattatgaagtgtatacaagtaattcatgtggaattaac

SEQ ID NO: 453695 - DNA, 2 bp, Homo sapiens
  chr16:3773136-3773138
  hypo
  anorectal vs. melanoma,liver_bileduct
cc

SEQ ID NO: 453696 - DNA, 321 bp, Homo sapiens; identical to SEQ ID NO: 342485
  chr16:11151051-11151372
  hypo

SEQ ID NO: 453697 - DNA, 145 bp, Homo sapiens; identical to SEQ ID NO: 342489
  chr16:11770890-11771035
  hypo
  anorectal vs. liver_bileduct

SEQ ID NO: 453698 - DNA, 430 bp, Homo sapiens; identical to SEQ ID NO: 452918
  chr16:12897365-12897795
  hypo
  anorectal vs. head_and_neck,cervical,liver_bileduct,lung, melanoma,renal,colorectal,ovary,multiple_myeloma, pancreas_gallbladder,bladder_and_urothelial,breast,prostate, uterine,non_cancer

SEQ ID NO: 453699 - DNA, 395 bp, Homo sapiens
  chr16:22326003-22326398
  hypo
  anorectal vs. liver_bileduct,upper_gi, pancreas_gallbladder
cggggaacacgggcgtaatggacatggaggtggcgcagggagctcatcctgttctctccgtagcttattaggaccttagaaactcccttccgctctggggaacttagaaaaggcatcctgggcctgtctgctttaaggactctgctggctctggcgcctgggactctaatccccctcaagcctctgggctgggcaggcacgagcaagtataagccgttccctggcgtgtgcaggcagctctgggagggacacggttggaacggaatttaaacgacctgtgctaggaaaggaagggagagtggaaaacccctatacggagttctctggtcttctggcaggggctgagacggcagtccagcaagggtcacaggcctgacggtatgacctcttcccct

SEQ ID NO: 453700 - DNA, 304 bp, Homo sapiens; identical to SEQ ID NO: 366880
  chr16:22326427-22326731
  hypo
  anorectal vs. liver_bileduct,upper_gi, pancreas_gallbladder

SEQ ID NO: 453701 - DNA, 10 bp, Homo sapiens
  chr16:23846783-23846793
  hypo
  anorectal vs. non_cancer,thyroid,myeloid_neoplasm, melanoma,cervical
cgctcctccc

SEQ ID NO: 453702 - DNA, 713 bp, Homo sapiens; identical to SEQ ID NO: 342529
  chr16:24837143-24837856
  hypo
  anorectal vs. liver_bileduct,lymphoid_neoplasm, colorectal,upper_gi,pancreas_gallbladder,melanoma,renal,sarcoma

SEQ ID NO: 453703 - DNA, 267 bp, Homo sapiens
  chr16:31500256-31500523
  hypo
  anorectal vs. lymphoid_neoplasm
cggcacagggcgggcagctcttcgattacatccaggcagtctctagctacctggcaccgcccgtgtccgccgtcttcgtgctggcgctcttcgtgccgcgcgttaatgagcaggtgagcggcacgcgcgtggtgacggcagggctgggcttgcacatcctcagcaggctgacctgtttccttcgcagggcgccttctggggactcatcgggggcctgctgatgggcctggcacgcctgattcccgagttctccttcggctcgggcag

SEQ ID NO: 453704 - DNA, 78 bp, Homo sapiens; identical to SEQ ID NO: 355454
  chr16:31500673-31500751
  hypo
  anorectal vs. lymphoid_neoplasm

SEQ ID NO: 453705 - DNA, 41 bp, Homo sapiens; identical to SEQ ID NO: 342587
  chr16:56368405-56368446
  hypo
  anorectal vs. head_and_neck

SEQ ID NO: 453706 - DNA, 94 bp, Homo sapiens
  chr16:67313759-67313853
  hypo
  anorectal vs. lymphoid_neoplasm,pancreas_gallbladder, renal,prostate,multiple_myeloma,uterine,bladder_and_urothelial, liver_bileduct,sarcoma,non_cancer,breast,cervical,thyroid
cgttattccctcttcccaggcctgaattgcagttcctgtgccctggcactaagactggcacctcctgcggcccatgcccttcgcctgcattgcc

SEQ ID NO: 453707 - DNA, 115 bp, Homo sapiens; identical to SEQ ID NO: 348747
  chr16:67313958-67314073
  hypo
  anorectal vs. lymphoid_neoplasm,pancreas_gallbladder, renal,prostate,multiple_myeloma,uterine,bladder_and_urothelial, liver_bileduct,sarcoma,non_cancer,breast,cervical,thyroid

SEQ ID NO: 453708 - DNA, 94 bp, Homo sapiens
  chr16:67578540-67578634
  hypo
  anorectal vs. colorectal
cgatcctcccgagccctaccctgaggcctgagctacttggccacccatgttctccagaaactgggcacatttgggcccctgcgctgccaggagg

SEQ ID NO: 453709 - DNA, 61 bp, Homo sapiens
  chr16:75148493-75148554
  hypo
  anorectal vs. liver_bileduct
cgttgtcccgcatggtgccgtagcggaccgcgttggtccccgacgccccggtggccgccat

SEQ ID NO: 453710 - DNA, 136 bp, Homo sapiens; identical to SEQ ID NO: 348759
  chr16:75149151-75149287
  hypo
  anorectal vs. liver_bileduct

SEQ ID NO: 453711 - DNA, 49 bp, Homo sapiens; identical to SEQ ID NO: 452920
  chr16:77822069-77822118
  hypo
  anorectal vs. sarcoma,melanoma,lung,multiple_myeloma

SEQ ID NO: 453712 - DNA, 261 bp, Homo sapiens
  chr16:81563939-81564200
  hypo
  anorectal vs. lymphoid_neoplasm,colorectal,upper_gi
cggatccctcagggacctaggtgcagttcctgttcctcccgtctcgcctctgttgcgctgcaaggtggggtgtgtagtgagtatcactgtaacctgtacttttctaaagtcaaacagatttctcttggtgggaggacgtgtcttttgtgggatcggtgtagcccgtctgagtcagtgactcacctggcacccctggcagctgactttcctggcagttcactcgagtctcttgcctctgctcacaaaagcctgcgcctttat

SEQ ID NO: 453713 - DNA, 163 bp, Homo sapiens
  chr16:81564229-81564392
  hypo
  anorectal vs. lymphoid_neoplasm,colorectal,upper_gi
agcagagcctctcccgcccgcctcccacatctctcccttagctgggtgcccgcgtggctgctacctccgaggcttctgtgtcaccgggtagtggaaatgtcaccgagtgtcagagcttcgagcctcctccagatccatccaaggtggcatcactaagtggcat

SEQ ID NO: 453714 - DNA, 240 bp, Homo sapiens; identical to SEQ ID NO: 355499
  chr16:81564541-81564781
  hypo
  anorectal vs. lymphoid_neoplasm,colorectal,upper_gi

SEQ ID NO: 453715 - DNA, 178 bp, Homo sapiens; identical to SEQ ID NO: 452923
  chr16:85932121-85932299
  hypo
  anorectal vs. upper_gi

SEQ ID NO: 453716 - DNA, 232 bp, Homo sapiens
  chr16:87356538-87356770
  hypo
cggggcagccccaagagcacgtatcccgggacatgatgtgttgtggtctgtgtggggtcagagccgtcagtgttcactgccgcgtgcccagtgcttagcactgtttgccgcatgggagatgcaggtcacaacccggtagcgcctagtggcccgggggacacctggcttgtctgggcctgttggctgacaggtaggagggactgccatccattgttggggcaaaggatgctgc

SEQ ID NO: 453717 - DNA, 76 bp, Homo sapiens
  chr16:89216581-89216657
  hypo
  anorectal vs. upper_gi,colorectal,pancreas_gallbladder
cgcaccctcctgcctccaccctgacttgccgtctcctgagcactgaagatatttttggcttgtccgatgtgactcc

SEQ ID NO: 453718 - DNA, 354 bp, Homo sapiens; identical to SEQ ID NO: 367086
  chr16:89216686-89217040
  hypo
  anorectal vs. upper_gi,colorectal,pancreas_gallbladder

SEQ ID NO: 453719 - DNA, 179 bp, Homo sapiens; identical to SEQ ID NO: 342809
  chr16:89947451-89947630
  hypo
  anorectal vs. liver_bileduct

SEQ ID NO: 453720 - DNA, 65 bp, Homo sapiens
  chr16:90066554-90066619
  hypo
  anorectal vs. liver_bileduct,melanoma
cgacttttcccgacacggcaagaccctggtggagaagctgtacggcgaggcaagcgcccagctcc

SEQ ID NO: 453721 - DNA, 43 bp, Homo sapiens; identical to SEQ ID NO: 381460
  chr16:90066981-90067024
  hypo
  anorectal vs. liver_bileduct,melanoma

SEQ ID NO: 453722 - DNA, 65 bp, Homo sapiens
  chr17:692558-692623
  hypo
  anorectal vs. liver_bileduct,colorectal,upper_gi, lymphoid_neoplasm,pancreas_gallbladder,renal,multiple_myeloma
cgtcagcagctctgaatcctaatgtcattgtgatccgtttcccttagattcccttagcctcagcg

SEQ ID NO: 453723 - DNA, 306 bp, Homo sapiens; identical to SEQ ID NO: 355562
  chr17:692652-692958
  hypo
  anorectal vs. liver_bileduct,colorectal,upper_gi, lymphoid_neoplasm,pancreas_gallbladder,renal,multiple_myeloma

SEQ ID NO: 453724 - DNA, 299 bp, Homo sapiens; identical to SEQ ID NO: 342824
  chr17:1454071-1454370
  hypo
  anorectal vs. liver_bileduct

SEQ ID NO: 453725 - DNA, 115 bp, Homo sapiens; identical to SEQ ID NO: 342837
  chr17:2326357-2326472
  hypo
  anorectal vs. upper_gi,colorectal,lymphoid_neoplasm, pancreas_gallbladder

SEQ ID NO: 453726 - DNA, 170 bp, Homo sapiens; identical to SEQ ID NO: 342839
  chr17:2805383-2805553
  hypo
  anorectal vs. pancreas_gallbladder

SEQ ID NO: 453727 - DNA, 213 bp, Homo sapiens; identical to SEQ ID NO: 342859
  chr17:5269074-5269287
  hypo
  anorectal vs. liver_bileduct

SEQ ID NO: 453728 - DNA, 73 bp, Homo sapiens; identical to SEQ ID NO: 342868
  chr17:7493149-7493222
  hypo
  anorectal vs. liver_bileduct

SEQ ID NO: 453729 - DNA, 232 bp, Homo sapiens; identical to SEQ ID NO: 355615
  chr17:21104115-21104347
  hypo
  anorectal vs. liver_bileduct,melanoma,upper_gi

SEQ ID NO: 453730 - DNA, 126 bp, Homo sapiens
  chr17:27909050-27909176
  hypo
  anorectal vs. liver_bileduct
cgtgcagaggtgtggtgcccttctctgggtggaagaagttggcctgggcacccagggagagcaggcgcagacatgtctccaggttgcctgtccgcacgctcgagtgtagttgctaagaggagcaga

SEQ ID NO: 453731 - DNA, 157 bp, Homo sapiens; identical to SEQ ID NO: 355624
  chr17:27909205-27909362
  hypo
  anorectal vs. liver_bileduct

SEQ ID NO: 453732 - DNA, 38 bp, Homo sapiens; identical to SEQ ID NO: 342957
  chr17:33351154-33351192
  hypo
  anorectal vs. upper_gi,colorectal,pancreas_gallbladder

SEQ ID NO: 453733 - DNA, 125 bp, Homo sapiens
  chr17:38179119-38179244
  hypo
  anorectal vs. lymphoid_neoplasm
cgggatctggggctcctacaccctgccaccccagcatggctgtccagtaaggcccgcagagggggccccagatgttgctccgcccctcaggctgaatcccagtctctggccagagctccccaagg

SEQ ID NO: 453734 - DNA, 125 bp, Homo sapiens
  chr17:38179273-38179398
  hypo
  anorectal vs. lymphoid_neoplasm
aggccacctggctcacggcagcctctcagggaagcctggcagaccaggccaggtgtggggagccaggggacaggacccatgtcggcccacagccactccagcccaagtaccttaatcaggttgtt

SEQ ID NO: 453735 - DNA, 133 bp, Homo sapiens; identical to SEQ ID NO: 367237
  chr17:38179430-38179563
  hypo
  anorectal vs. lymphoid_neoplasm

SEQ ID NO: 453736 - DNA, 132 bp, Homo sapiens; identical to SEQ ID NO: 343033
  chr17:55664904-55665036
  hypo
  anorectal vs. upper_gi

SEQ ID NO: 453737 - DNA, 348 bp, Homo sapiens; identical to SEQ ID NO: 343034
  chr17:55753412-55753760
  hypo
  anorectal vs. upper_gi,pancreas_gallbladder

SEQ ID NO: 453738 - DNA, 425 bp, Homo sapiens; identical to SEQ ID NO: 343072
  chr17:66440125-66440550
  hypo

SEQ ID NO: 453739 - DNA, 60 bp, Homo sapiens
  chr17:73124823-73124883
  hypo
  anorectal vs. cervical
cgcaggaggtgtcccactcatcatcaactgcctatccagccccaatgaggagacggtgct

SEQ ID NO: 453740 - DNA, 166 bp, Homo sapiens; identical to SEQ ID NO: 367342
  chr17:73124912-73125078
  hypo
  anorectal vs. cervical

SEQ ID NO: 453741 - DNA, 153 bp, Homo sapiens; identical to SEQ ID NO: 355708
  chr17:73808671-73808824
  hypo
  anorectal vs. liver_bileduct,pancreas_gallbladder, lymphoid_neoplasm

SEQ ID NO: 453742 - DNA, 185 bp, Homo sapiens; identical to SEQ ID NO: 343121
  chr17:74042063-74042248
  hypo
  anorectal vs. lymphoid_neoplasm,melanoma,colorectal

SEQ ID NO: 453743 - DNA, 124 bp, Homo sapiens
  chr17:75132773-75132897
  hypo
  anorectal vs. melanoma
cgtcgttcggggagcaggtttgctcttcttcaccctttcctccgacttgctggctggagggggaagacacactgtggtaatggcaaagtagcaacacagaaggggcccgtgttaggccattctc

SEQ ID NO: 453744 - DNA, 148 bp, Homo sapiens; identical to SEQ ID NO: 343148
  chr17:76034983-76035131
  hypo
  anorectal vs. colorectal,lymphoid_neoplasm,breast, liver_bileduct,prostate,uterine,upper_gi,pancreas_gallbladder, melanoma,renal

SEQ ID NO: 453745 - DNA, 478 bp, Homo sapiens; identical to SEQ ID NO: 343153
  chr17:76215753-76216231
  hypo
  anorectal vs. pancreas_gallbladder,colorectal, lymphoid_neoplasm

SEQ ID NO: 453746 - DNA, 106 bp, Homo sapiens
  chr17:80491467-80491573
  hypo
  anorectal vs. pancreas_gallbladder
cggctgttcgcgtagtaggttcgttgacaccagcatcaccccagactcatgagtaattcattgcactatgacatcacaatggctaggaataggaatttttcagctc

SEQ ID NO: 453747 - DNA, 86 bp, Homo sapiens; identical to SEQ ID NO: 381909
  chr17:80491602-80491688
  hypo
  anorectal vs. pancreas_gallbladder

SEQ ID NO: 453748 - DNA, 58 bp, Homo sapiens; identical to SEQ ID NO: 355781
  chr17:80747254-80747312
  hypo
  anorectal vs. liver_bileduct

SEQ ID NO: 453749 - DNA, 63 bp, Homo sapiens
  chr17:80747754-80747817
  hypo
  anorectal vs. colorectal,pancreas_gallbladder, lymphoid_neoplasm,upper_gi,liver_bileduct
cgggagcccagcaacaaatgggagcttctgtgctgctgtccgtgcatacggcccaggagccgg

SEQ ID NO: 453750 - DNA, 95 bp, Homo sapiens; identical to SEQ ID NO: 355783
  chr17:80747890-80747985
  hypo
  anorectal vs. colorectal,pancreas_gallbladder, lymphoid_neoplasm,upper_gi,liver_bileduct

SEQ ID NO: 453751 - DNA, 138 bp, Homo sapiens
  chr17:80772735-80772873
  hypo
  anorectal vs. liver_bileduct
cgtggcatgggggatgtctggcgctggcagagctgggcaggagaggcctgttgctgccgtctcgactcgtggatggtgagtagctgaggcacggtcaggggggatgtctggcgctggcggagctgggcaggagaggcc

SEQ ID NO: 453752 - DNA, 513 bp, Homo sapiens; identical to SEQ ID NO: 355786
  chr17:80772941-80773454
  hypo
  anorectal vs. liver_bileduct

SEQ ID NO: 453753 - DNA, 33 bp, Homo sapiens
  chr17:80797632-80797665
  hypo
  anorectal vs. lymphoid_neoplasm,liver_bileduct, colorectal,melanoma
cgtggtctgcatcccagccatgcacctgctggg

SEQ ID NO: 453754 - DNA, 166 bp, Homo sapiens; identical to SEQ ID NO: 343309
  chr18:3986877-3987043
  hypo
  anorectal vs. head_and_neck

SEQ ID NO: 453755 - DNA, 131 bp, Homo sapiens; identical to SEQ ID NO: 343329
  chr18:9688396-9688527
  hypo
  anorectal vs. melanoma

SEQ ID NO: 453756 - DNA, 498 bp, Homo sapiens; identical to SEQ ID NO: 343336
  chr18:10725385-10725883
  hypo
  anorectal vs. upper_gi

SEQ ID NO: 453757 - DNA, 94 bp, Homo sapiens; identical to SEQ ID NO: 452939
  chr18:13823932-13824026
  hypo
  anorectal vs. pancreas_gallbladder,colorectal

SEQ ID NO: 453758 - DNA, 113 bp, Homo sapiens; identical to SEQ ID NO: 452940
  chr18:13824102-13824215
  hypo
  anorectal vs. pancreas_gallbladder,colorectal

SEQ ID NO: 453759 - DNA, 105 bp, Homo sapiens; identical to SEQ ID NO: 352078
  chr18:25756986-25757091
  hypo
  anorectal vs. head_and_neck,liver_bileduct

SEQ ID NO: 453760 - DNA, 202 bp, Homo sapiens; identical to SEQ ID NO: 452944
  chr18:25756986-25757188
  hypo
  anorectal vs. head_and_neck,liver_bileduct

SEQ ID NO: 453761 - DNA, 42 bp, Homo sapiens; identical to SEQ ID NO: 452945
  chr18:25757146-25757188
  hypo
  anorectal vs. head_and_neck,liver_bileduct

SEQ ID NO: 453762 - DNA, 282 bp, Homo sapiens; identical to SEQ ID NO: 452946
  chr18:30349781-30350063
  hypo
  anorectal vs. cervical,breast,ovary,uterine, multiple_myeloma,prostate,bladder_and_urothelial,thyroid, lymphoid_neoplasm,non_cancer,lung

SEQ ID NO: 453763 - DNA, 891 bp, Homo sapiens; identical to SEQ ID NO: 452951
  chr18:32556625-32557516
  hypo
  anorectal vs. upper_gi,lung,colorectal, pancreas_gallbladder,ovary,liver_bileduct,breast,uterine

SEQ ID NO: 453764 - DNA, 769 bp, Homo sapiens; identical to SEQ ID NO: 452952
  chr18:32557064-32557833
  hypo
  anorectal vs. upper_gi,liver_bileduct, pancreas_gallbladder,colorectal,lung

SEQ ID NO: 453765 - DNA, 18 bp, Homo sapiens
  chr18:32557864-32557882
  hypo
  anorectal vs. upper_gi,liver_bileduct, pancreas_gallbladder,colorectal,lung
tctgaacctggggcgctc

SEQ ID NO: 453766 - DNA, 45 bp, Homo sapiens; identical to SEQ ID NO: 452954
  chr18:32557884-32557929
  hypo
  anorectal vs. upper_gi,liver_bileduct, pancreas_gallbladder,colorectal,lung

SEQ ID NO: 453767 - DNA, 291 bp, Homo sapiens; identical to SEQ ID NO: 452955
  chr18:32557542-32557833
  hypo
  anorectal vs. upper_gi,pancreas_gallbladder,colorectal, lung,liver_bileduct,renal,breast,multiple_myeloma,non_cancer, prostate,myeloid_neoplasm

SEQ ID NO: 453768 - DNA, 18 bp, Homo sapiens
  chr18:32557864-32557882
  hypo
  anorectal vs. upper_gi,pancreas_gallbladder,colorectal, lung,liver_bileduct,renal,breast,multiple_myeloma,non_cancer, prostate,myeloid_neoplasm
tctgaacctggggcgctc

SEQ ID NO: 453769 - DNA, 45 bp, Homo sapiens; identical to SEQ ID NO: 452954
  chr18:32557884-32557929
  hypo
  anorectal vs. upper_gi,pancreas_gallbladder,colorectal, lung,liver_bileduct,renal,breast,multiple_myeloma,non_cancer, prostate,myeloid_neoplasm

SEQ ID NO: 453770 - DNA, 14 bp, Homo sapiens
  chr18:44337138-44337152
  hypo
  anorectal vs. thyroid,myeloid_neoplasm,sarcoma, non_cancer,breast,prostate,renal,melanoma, bladder_and_urothelial,multiple_myeloma,ovary
caggggctgggcgc

SEQ ID NO: 453771 - DNA, 284 bp, Homo sapiens; identical to SEQ ID NO: 343386
  chr18:46418923-46419207
  hypo
  anorectal vs. upper_gi

SEQ ID NO: 453772 - DNA, 710 bp, Homo sapiens; identical to SEQ ID NO: 343492
  chr18:77474501-77475211
  hypo
  anorectal vs. head_and_neck

SEQ ID NO: 453773 - DNA, 266 bp, Homo sapiens
  chr18:77542640-77542906
  hypo
  anorectal vs. lymphoid_neoplasm
cgccgactctgcagcccggcgactgcttcccaggtgactgtttccagagtcaggtgttggccgtggtcaggttgacctgcctgtttgttttctataagctgtgtgtgttgtgcccgggtgtagatgccctgaggtttcacggccccccagcaagcagccccaggcccggcaccggatgggcccttcatacccattcactgtaacagacaagcagacggatgaggccatcgtggtccctctgaataaacgatgcttcacagaagtct

SEQ ID NO: 453774 - DNA, 271 bp, Homo sapiens
  chr18:77542951-77543222
  hypo
  anorectal vs. lymphoid_neoplasm
ccctggggtgccgtcggctggtgggtgatggagcggctctgcctggctcctctcggctctggcgcggcaggtcttcctgctttccaagcccgtgtccctggtgccagcacagaactgaactccgcccttgagtcgtgcgggacgagaccccgtgctgcgggcgcagtgccctctgtgggcggcgcgtggtggctgtcctccgtttcccacccggcgtctactgggccttgtccagtatcactgggagctgcaggctcggctagcaggtggc

SEQ ID NO: 453775 - DNA, 2 bp, Homo sapiens
  chr18:77543376-77543378
  hypo
  anorectal vs. lymphoid_neoplasm
ac

SEQ ID NO: 453776 - DNA, 159 bp, Homo sapiens
  chr19:883424-883583
  hypo
  anorectal vs. melanoma
cgtggggcggtgcgtgaagagctgggcatggcggggaccaaagcctggcatggtgggcacgtggggcggtagggggagagatgggggagagatgggtgcggtggggactgtcccagtgacccccagctgccagggatgtgagacctgagaaaggctgtg

SEQ ID NO: 453777 - DNA, 45 bp, Homo sapiens
  chr19:884311-884356
  hypo
  anorectal vs. melanoma
attttgtgccggaggtggggatgacgggcttggctccgtgggtgc

SEQ ID NO: 453778 - DNA, 140 bp, Homo sapiens; identical to SEQ ID NO: 343550
  chr19:1048876-1049016
  hypo
  anorectal vs. head_and_neck

SEQ ID NO: 453779 - DNA, 198 bp, Homo sapiens
  chr19:1226490-1226688
  hypo
  anorectal vs. lymphoid_neoplasm,liver_bileduct,cervical, renal,multiple_myeloma,breast
cgccggggcctccccaaggccgtgtgtatgaacggcacagaggcggcgcagctgagcaccaaatccagggcggagggccgggcccccaaccctgcccgcaaggcctgctccgccagcagcaagatccgccggctgtcggcctgcaagcagcagtgaggctggccgcctgcaggtggggcgcggcggggcccgggtggg

SEQ ID NO: 453780 - DNA, 317 bp, Homo sapiens; identical to SEQ ID NO: 355935
  chr19:1226828-1227145
  hypo
  anorectal vs. lymphoid_neoplasm,liver_bileduct,cervical, renal,multiple_myeloma,breast

SEQ ID NO: 453781 - DNA, 243 bp, Homo sapiens
  chr19:1911845-1912088
  hypo
  anorectal vs. liver_bileduct,cervical,lymphoid_neoplasm
cgtttttaaaaaccaatggctgtttaaactctgtgcacaccaggggttagcaggacatgagggagtgtagctctgatgcggtgacctgggccggagccctcggactagcctcagctttggtggcagcacgccctgccttgtggagccacggcctcccgggacggactccccggctctcccccagccgcccgcagccgccggatgatcctctgctcccgtctctgtctcccacagtcggcctcg

SEQ ID NO: 453782 - DNA, 161 bp, Homo sapiens; identical to SEQ ID NO: 348918
  chr19:1912446-1912607
  hypo
  anorectal vs. liver_bileduct,cervical,lymphoid_neoplasm

SEQ ID NO: 453783 - DNA, 659 bp, Homo sapiens; identical to SEQ ID NO: 355950
  chr19:1912446-1913105
  hypo
  anorectal vs. liver_bileduct,lymphoid_neoplasm

SEQ ID NO: 453784 - DNA, 306 bp, Homo sapiens
  chr19:1977026-1977332
  hypo
  anorectal vs. liver_bileduct,lymphoid_neoplasm
cgtgcccggccacagaggcctcattctgcagcgtatgctactcgggcaaaggcagctgactgcagacccaacacggtgacccagctggatggtgcctgagagacggggctgccccacatggtgccctgtcatgccgcgggacaggtcgcccagcagatggtagctatggccccagtgccatcctgggctggagacacatgggtgccagacacgttcatgcctgtcgtctggcccagctgccgtggggagccctccagggccgtgtgcctgcagggaccggcctgttcacctctaggctcacccctc

SEQ ID NO: 453785 - DNA, 233 bp, Homo sapiens
  chr19:1978023-1978256
  hypo
  anorectal vs. liver_bileduct,lymphoid_neoplasm,renal, melanoma
cgcttctgtcctgggctagggaggtgggggggcgggggaggaggagtggcagacactgaggcggtgaccacacgggcagggtgcaggtgtcgggatgacttggcaggccatggtgcagtgctctggcaggctgggcccaggccctgctgctgggcagtggtgtcatttggagggtggtccttcagggaccccctcctgcctcctgcctcgggggtgggctggggaggtcgggg

SEQ ID NO: 453786 - DNA, 116 bp, Homo sapiens; identical to SEQ ID NO: 345560
  chr19:1979018-1979134
  hypo
  anorectal vs. liver_bileduct,lymphoid_neoplasm,melanoma, renal

SEQ ID NO: 453787 - DNA, 89 bp, Homo sapiens; identical to SEQ ID NO: 343596
  chr19:2204172-2204261
  hypo
  anorectal vs. liver_bileduct,pancreas_gallbladder, colorectal,upper_gi,cervical

SEQ ID NO: 453788 - DNA, 95 bp, Homo sapiens; identical to SEQ ID NO: 343597
  chr19:2224728-2224823
  hypo

SEQ ID NO: 453789 - DNA, 73 bp, Homo sapiens; identical to SEQ ID NO: 452976
  chr19:2702445-2702518
  hypo
  anorectal vs. melanoma,ovary,bladder_and_urothelial, breast,multiple_myeloma,uterine,prostate,lung,non_cancer, myeloid_neoplasm,sarcoma,thyroid,liver_bileduct,renal

SEQ ID NO: 453790 - DNA, 453 bp, Homo sapiens; identical to SEQ ID NO: 347529
  chr19:2702553-2703006
  hypo
  anorectal vs. melanoma,ovary,bladder_and_urothelial, breast,multiple_myeloma,uterine,prostate,lung,non_cancer, myeloid_neoplasm,sarcoma,thyroid,liver_bileduct,renal

SEQ ID NO: 453791 - DNA, 751 bp, Homo sapiens
  chr19:3491120-3491871
  hypo
  anorectal vs. upper_gi,lymphoid_neoplasm
cgcgatcctcccctggcttccctcgcgatcctcccctggcttccctcgcgatcctcccctggcttccctcgcaatcctcccctgtcctgagccgggcatcccagagcctcccgcagagtcccaccccaagcctggaaacttccacgctacagccctgcgccaggccccgaggagcagtcaggggactcagggagtcacagcacaacggcagctcctcggtcccagacggaggagggggacagcaaccatgcgcccagcaagacacaagcgatgacaccgatttacacacacccggtttagacgccaaagctctgcgggggaggagcggccctcaagagtcctccgggagctccgggtgagggtggggccctaggagggggccccgcgcagctgctccaggccgtccgcgtactggaaggcccgcccggtctcgtgctcatacatgtccagagccacctcgcagctctcacgcaccacgcgctctgggtcgtccgcgtgagcctgcagcgcggccaggcaggcgggccgggcaatggcgcccagggcctccgcgcactcgtgccgcaccatggggttctcggtgcatcgggccagggcggccgccagctggggcaccgccgcctcgtgctgcagctgtcccaggacgtagccgacctcgtggcggaagagggcgctcccacagtgcagacctgcaggggagagggacactcgctggggccaggaggggtgggaaggggagctctgtcttttc

SEQ ID NO: 453792 - DNA, 125 bp, Homo sapiens; identical to SEQ ID NO: 343696
  chr19:6425753-6425878
  hypo
  anorectal vs. pancreas_gallbladder,colorectal

SEQ ID NO: 453793 - DNA, 252 bp, Homo sapiens; identical to SEQ ID NO: 343718
  chr19:8554998-8555250
  hypo
  anorectal vs. pancreas_gallbladder,melanoma,colorectal, lymphoid_neoplasm,upper_gi,liver_bileduct,uterine,sarcoma, breast,ovary,cervical,multiple_myeloma

SEQ ID NO: 453794 - DNA, 39 bp, Homo sapiens; identical to SEQ ID NO: 452979
  chr19:10616220-10616259
  hypo
  anorectal vs. cervical,upper_gi,pancreas_gallbladder

SEQ ID NO: 453795 - DNA, 144 bp, Homo sapiens
  chr19:10665634-10665778
  hypo
  anorectal vs. lymphoid_neoplasm
cgaacccaggtctcagagcggggggcgctgcattcccaaagtcatgcaacaagaggttgacggagccaagactcaagcctgggcctgacaggctccccacccacgcttccccagccagcactgcttactcttctcggcagagtg

SEQ ID NO: 453796 - DNA, 143 bp, Homo sapiens; identical to SEQ ID NO: 356020
  chr19:10665807-10665950
  hypo
  anorectal vs. lymphoid_neoplasm

SEQ ID NO: 453797 - DNA, 116 bp, Homo sapiens; identical to SEQ ID NO: 452980
  chr19:10691764-10691880
  hypo
  anorectal vs. lymphoid_neoplasm

SEQ ID NO: 453798 - DNA, 177 bp, Homo sapiens; identical to SEQ ID NO: 356025
  chr19:11003087-11003264
  hypo
  anorectal vs. liver_bileduct,lymphoid_neoplasm

SEQ ID NO: 453799 - DNA, 207 bp, Homo sapiens
  chr19:12977267-12977474
  hypo
  anorectal vs. liver_bileduct
cggggctagacggtgccactgagaatggggcaaggaccttgcctgggagcggagcctaaattaaatacactaatgaggcaggggcgtggcctgacctgaagacttgtaaacccgtcttgaaccaggactgggctcctgtggggatgtgatatgaggaggaaccccgtaccctcagtcacagcccatacccgctccccagcccgctca

SEQ ID NO: 453800 - DNA, 263 bp, Homo sapiens; identical to SEQ ID NO: 343792
  chr19:14000130-14000393
  hypo
  anorectal vs. head_and_neck

SEQ ID NO: 453801 - DNA, 131 bp, Homo sapiens
  chr19:15421594-15421725
  hypo
cgtgcctggccttaaacagtcctttaggcagtcctgaaagacacctggctgcaccactgtttgaaccatctcccgtacctttgtgcctactcttcaccgatgcccaatatccatccccaaaatcagtttcc

SEQ ID NO: 453802 - DNA, 846 bp, Homo sapiens; identical to SEQ ID NO: 367979
  chr19:16232495-16233341
  hypo
  anorectal vs. pancreas_gallbladder

SEQ ID NO: 453803 - DNA, 577 bp, Homo sapiens; identical to SEQ ID NO: 343817
  chr19:16238432-16239009
  hypo
  anorectal vs. pancreas_gallbladder,upper_gi, liver_bileduct

SEQ ID NO: 453804 - DNA, 165 bp, Homo sapiens; identical to SEQ ID NO: 343859
  chr19:18963604-18963769
  hypo
  anorectal vs. upper_gi,colorectal

SEQ ID NO: 453805 - DNA, 118 bp, Homo sapiens; identical to SEQ ID NO: 343868
  chr19:19612766-19612884
  hypo
  anorectal vs. head_and_neck

SEQ ID NO: 453806 - DNA, 262 bp, Homo sapiens; identical to SEQ ID NO: 452993
  chr19:19843330-19843592
  hypo
  anorectal vs. melanoma,uterine,breast, bladder_and_urothelial,ovary,sarcoma,prostate,lung, lymphoid_neoplasm

SEQ ID NO: 453807 - DNA, 47 bp, Homo sapiens; identical to SEQ ID NO: 352250
  chr19:19844044-19844091
  hypo
  anorectal vs. melanoma,uterine,breast, bladder_and_urothelial,ovary,sarcoma,prostate,lung, lymphoid_neoplasm

SEQ ID NO: 453808 - DNA, 296 bp, Homo sapiens; identical to SEQ ID NO: 453019
  chr19:37568994-37569290
  hypo
  anorectal vs. liver_bileduct,bladder_and_urothelial, breast,lung,uterine,sarcoma,colorectal,prostate, pancreas_gallbladder,ovary

SEQ ID NO: 453809 - DNA, 182 bp, Homo sapiens; identical to SEQ ID NO: 345591
  chr19:37569554-37569736
  hypo
  anorectal vs. liver_bileduct,bladder_and_urothelial, breast,lung,uterine,sarcoma,colorectal,prostate, pancreas_gallbladder,ovary

SEQ ID NO: 453810 - DNA, 246 bp, Homo sapiens; identical to SEQ ID NO: 343959
  chr19:39277459-39277705
  hypo
  anorectal vs. upper_gi

SEQ ID NO: 453811 - DNA, 57 bp, Homo sapiens
  chr19:39329516-39329573
  hypo
  anorectal vs. lymphoid_neoplasm,melanoma, multiple_myeloma
cgagcctgagcacctaccagacattcagcttctgcccaaacatgaagttgttgttga

SEQ ID NO: 453812 - DNA, 359 bp, Homo sapiens; identical to SEQ ID NO: 336145
  chr19:41190162-41190521
  hypo
  anorectal vs. liver_bileduct

SEQ ID NO: 453813 - DNA, 76 bp, Homo sapiens; identical to SEQ ID NO: 453028
  chr19:42927302-42927378
  hypo
  anorectal vs. head_and_neck

SEQ ID NO: 453814 - DNA, 248 bp, Homo sapiens; identical to SEQ ID NO: 453029
  chr19:42927478-42927726
  hypo
  anorectal vs. head_and_neck

SEQ ID NO: 453815 - DNA, 168 bp, Homo sapiens; identical to SEQ ID NO: 344026
  chr19:47482472-47482640
  hypo
  anorectal vs. liver_bileduct

SEQ ID NO: 453816 - DNA, 41 bp, Homo sapiens; identical to SEQ ID NO: 344029
  chr19:47592724-47592765
  hypo
  anorectal vs. head_and_neck

SEQ ID NO: 453817 - DNA, 457 bp, Homo sapiens
  chr19:49971410-49971867
  hypo
  anorectal vs. liver_bileduct,lymphoid_neoplasm,sarcoma, renal,melanoma
cgtctcaaaaaaaaaaaaaaagaaaggcggttatgcaggatgtttctcaccgcccgaacccccgtggaatgattcactttgaccagcgtctgcgaaatggcaggggcttccacaatggtgcggtttgggccaacaccaagtgttggggagaatgtagaggaactggatctctcatttactgcgggcggggctcccctgccccacacgtgacccacctgtccctgcaggtagccgggctgagaggccctgtgctgcgcctgcgggagccgctgggtgtgctggctgtggtgtgtccggacgagtggcccctgcttgccttcgtgtccctgctggctcccgccctggcctacggcaacactgtggtcatggtgcccagtgcggcctgtcctctgctggccctggaggtctgccaggtatagccccctgccttcctgcctctcctccccgtagcctcagg

SEQ ID NO: 453818 - DNA, 219 bp, Homo sapiens; identical to SEQ ID NO: 453035
  chr19:50553779-50553998
  hypo
  anorectal vs. bladder_and_urothelial

SEQ ID NO: 453819 - DNA, 78 bp, Homo sapiens; identical to SEQ ID NO: 453036
  chr19:52531282-52531360
  hypo
  anorectal vs. bladder_and_urothelial,lymphoid_neoplasm, breast,uterine

SEQ ID NO: 453820 - DNA, 208 bp, Homo sapiens; identical to SEQ ID NO: 345609
  chr19:52531884-52532092
  hypo
  anorectal vs. bladder_and_urothelial,lymphoid_neoplasm, breast,uterine

SEQ ID NO: 453821 - DNA, 819 bp, Homo sapiens; identical to SEQ ID NO: 453045
  chr19:53237625-53238444
  hypo
  anorectal vs. pancreas_gallbladder,colorectal,lung,ovary, bladder_and_urothelial,breast,upper_gi,uterine,melanoma, prostate,sarcoma

SEQ ID NO: 453822 - DNA, 352 bp, Homo sapiens; identical to SEQ ID NO: 453047
  chr19:53445359-53445711
  hypo
  anorectal vs. upper_gi,colorectal,lung,ovary,breast, bladder_and_urothelial,prostate

SEQ ID NO: 453823 - DNA, 231 bp, Homo sapiens; identical to SEQ ID NO: 352399
  chr19:53445822-53446053
  hypo
  anorectal vs. upper_gi,colorectal,lung,ovary,breast, bladder_and_urothelial,prostate

SEQ ID NO: 453824 - DNA, 140 bp, Homo sapiens; identical to SEQ ID NO: 453051
  chr19:53606073-53606213
  hypo
  anorectal vs. bladder_and_urothelial,melanoma,colorectal, lung,breast,uterine,sarcoma,ovary,prostate,renal, pancreas_gallbladder,myeloid_neoplasm,non_cancer

SEQ ID NO: 453825 - DNA, 222 bp, Homo sapiens; identical to SEQ ID NO: 453052
  chr19:53606354-53606576
  hypo
  anorectal vs. bladder_and_urothelial,melanoma,colorectal, lung,breast,uterine,sarcoma,ovary,prostate,renal, pancreas_gallbladder,myeloid_neoplasm,non_cancer

SEQ ID NO: 453826 - DNA, 176 bp, Homo sapiens; identical to SEQ ID NO: 453054
  chr19:53606400-53606576
  hypo
  anorectal vs. bladder_and_urothelial,colorectal,lung, melanoma,breast,ovary,uterine,prostate,sarcoma, pancreas_gallbladder

SEQ ID NO: 453827 - DNA, 134 bp, Homo sapiens; identical to SEQ ID NO: 336290
  chr19:56112791-56112925
  hypo
  anorectal vs. lymphoid_neoplasm

SEQ ID NO: 453828 - DNA, 171 bp, Homo sapiens; identical to SEQ ID NO: 344121
  chr19:56807013-56807184
  hypo
  anorectal vs. liver_bileduct

SEQ ID NO: 453829 - DNA, 18 bp, Homo sapiens
  chr19:56915935-56915953
  hypo
  anorectal vs. prostate,sarcoma,myeloid_neoplasm,uterine, non_cancer,bladder_and_urothelial,breast,thyroid,ovary, lymphoid_neoplasm,lung,liver_bileduct,multiple_myeloma,renal, melanoma,colorectal
gtttgacagtgtggaatc

SEQ ID NO: 453830 - DNA, 11 bp, Homo sapiens
  chr19:58039267-58039278
  hypo
  anorectal vs. sarcoma,melanoma,myeloid_neoplasm,thyroid, prostate,bladder_and_urothelial,uterine,breast,non_cancer,renal, ovary,lung,multiple_myeloma
cctgagcaacc

SEQ ID NO: 453831 - DNA, 31 bp, Homo sapiens; identical to SEQ ID NO: 453076
  chr19:58125385-58125416
  hypo
  anorectal vs. bladder_and_urothelial,lung,sarcoma,breast, prostate,ovary,myeloid_neoplasm,uterine,pancreas_gallbladder, melanoma,non_cancer,renal,thyroid

SEQ ID NO: 453832 - DNA, 405 bp, Homo sapiens; identical to SEQ ID NO: 453084
  chr19:59010484-59010889
  hypo
  anorectal vs. head_and_neck

SEQ ID NO: 453833 - DNA, 48 bp, Homo sapiens; identical to SEQ ID NO: 361783
  chr19:59010962-59011010
  hypo
  anorectal vs. head_and_neck

SEQ ID NO: 453834 - DNA, 46 bp, Homo sapiens; identical to SEQ ID NO: 337512
  chr2:8868792-8868838
  hypo
  anorectal vs. upper_gi,pancreas_gallbladder,colorectal, melanoma,liver_bileduct

SEQ ID NO: 453835 - DNA, 9 bp, Homo sapiens
  chr2:40679688-40679697
  hypo
  anorectal vs. head_and_neck,bladder_and_urothelial, sarcoma,multiple_myeloma,ovary,thyroid,prostate,non_cancer, cervical,breast,renal,myeloid_neoplasm,uterine
cgcctaccc

SEQ ID NO: 453836 - DNA, 395 bp, Homo sapiens; identical to SEQ ID NO: 345010
  chr2:43452443-43452838
  hypo
  anorectal vs. pancreas_gallbladder

SEQ ID NO: 453837 - DNA, 77 bp, Homo sapiens; identical to SEQ ID NO: 346438
  chr2:60784505-60784582
  hypo
  anorectal vs. upper_gi

SEQ ID NO: 453838 - DNA, 373 bp, Homo sapiens; identical to SEQ ID NO: 349503
  chr2:60784505-60784878
  hypo
  anorectal vs. upper_gi,colorectal

SEQ ID NO: 453839 - DNA, 99 bp, Homo sapiens; identical to SEQ ID NO: 337633
  chr2:65251127-65251226
  hypo
  anorectal vs. liver_bileduct

SEQ ID NO: 453840 - DNA, 236 bp, Homo sapiens; identical to SEQ ID NO: 453103
  chr2:74781700-74781936
  hypo
  anorectal vs. upper_gi,colorectal,lymphoid_neoplasm, pancreas_gallbladder,uterine,cervical,renal,myeloid_neoplasm, thyroid,non_cancer,ovary,multiple_myeloma,sarcoma

SEQ ID NO: 453841 - DNA, 58 bp, Homo sapiens; identical to SEQ ID NO: 353131
  chr2:95941852-95941910
  hypo
  anorectal vs. lymphoid_neoplasm,colorectal,sarcoma,renal

SEQ ID NO: 453842 - DNA, 97 bp, Homo sapiens; identical to SEQ ID NO: 453106
  chr2:105468467-105468564
  hypo
  anorectal vs. melanoma

SEQ ID NO: 453843 - DNA, 144 bp, Homo sapiens; identical to SEQ ID NO: 345031
  chr2:105471069-105471213
  hypo
  anorectal vs. melanoma

SEQ ID NO: 453844 - DNA, 35 bp, Homo sapiens; identical to SEQ ID NO: 337709
  chr2:106742088-106742123
  hypo
  anorectal vs. liver_bileduct

SEQ ID NO: 453845 - DNA, 144 bp, Homo sapiens
  chr2:120005222-120005366
  hypo
  anorectal vs. liver_bileduct,lymphoid_neoplasm,upper_gi, colorectal,melanoma,pancreas_gallbladder,sarcoma,renal,breast, uterine,prostate
cgccgtctgactgccccacttttctcccgcaggtgcccatctgcggtgaccagccagaagccaagcgtgctgtctcggagatggcgctcgccatgggcttcatgcccgtggacatgggatccctggcgtcagcctgggaggtgg

SEQ ID NO: 453846 - DNA, 184 bp, Homo sapiens; identical to SEQ ID NO: 346478
  chr2:135476396-135476580
  hypo
  anorectal vs. pancreas_gallbladder,myeloid_neoplasm,lung, bladder_and_urothelial,upper_gi,non_cancer

SEQ ID NO: 453847 - DNA, 354 bp, Homo sapiens; identical to SEQ ID NO: 453117
  chr2:135476396-135476750
  hypo
  anorectal vs. lung,pancreas_gallbladder,upper_gi,ovary, head_and_neck,myeloid_neoplasm,breast,uterine,thyroid,renal, cervical,bladder_and_urothelial,non_cancer

SEQ ID NO: 453848 - DNA, 483 bp, Homo sapiens; identical to SEQ ID NO: 453118
  chr2:136875399-136875882
  hypo
  anorectal vs. head_and_neck

SEQ ID NO: 453849 - DNA, 44 bp, Homo sapiens; identical to SEQ ID NO: 453120
  chr2:136875838-136875882
  hypo
  anorectal vs. lymphoid_neoplasm

SEQ ID NO: 453850 - DNA, 69 bp, Homo sapiens; identical to SEQ ID NO: 357317
  chr2:139538166-139538235
  hypo
  anorectal vs. head_and_neck

SEQ ID NO: 453851 - DNA, 51 bp, Homo sapiens; identical to SEQ ID NO: 453124
  chr2:149632592-149632643
  hypo
  anorectal vs. sarcoma,ovary,prostate

SEQ ID NO: 453852 - DNA, 61 bp, Homo sapiens; identical to SEQ ID NO: 453128
  chr2:155553956-155554017
  hypo
  anorectal vs. upper_gi,liver_bileduct

SEQ ID NO: 453853 - DNA, 612 bp, Homo sapiens; identical to SEQ ID NO: 198483
  chr2:155554076-155554688
  hypo
  anorectal vs. upper_gi,liver_bileduct

SEQ ID NO: 453854 - DNA, 17 bp, Homo sapiens
  chr2:155554690-155554707
  hypo
  anorectal vs. upper_gi,liver_bileduct
cagacatgcctttgggc

SEQ ID NO: 453855 - DNA, 101 bp, Homo sapiens; identical to SEQ ID NO: 453132
  chr2:168148871-168148972
  hypo
  anorectal vs. pancreas_gallbladder,lung,head_and_neck, colorectal,ovary,melanoma,breast,cervical,sarcoma,uterine

SEQ ID NO: 453856 - DNA, 240 bp, Homo sapiens; identical to SEQ ID NO: 453133
  chr2:168149264-168149504
  hypo
  anorectal vs. pancreas_gallbladder,lung,head_and_neck, colorectal,ovary,melanoma,breast,cervical,sarcoma,uterine

SEQ ID NO: 453857 - DNA, 152 bp, Homo sapiens; identical to SEQ ID NO: 453134
  chr2:168149556-168149708
  hypo
  anorectal vs. pancreas_gallbladder,lung,head_and_neck, colorectal,ovary,melanoma,breast,cervical,sarcoma,uterine

SEQ ID NO: 453858 - DNA, 240 bp, Homo sapiens; identical to SEQ ID NO: 453133
  chr2:168149264-168149504
  hypo
  anorectal vs. pancreas_gallbladder,lung,head_and_neck, colorectal,melanoma,renal,ovary,prostate

SEQ ID NO: 453859 - DNA, 221 bp, Homo sapiens; identical to SEQ ID NO: 453136
  chr2:168149556-168149777
  hypo
  anorectal vs. pancreas_gallbladder,lung,head_and_neck, colorectal,melanoma,renal,ovary,prostate

SEQ ID NO: 453860 - DNA, 98 bp, Homo sapiens; identical to SEQ ID NO: 337807
  chr2:171815760-171815858
  hypo
  anorectal vs. colorectal,liver_bileduct, pancreas_gallbladder,lymphoid_neoplasm,upper_gi

SEQ ID NO: 453861 - DNA, 325 bp, Homo sapiens; identical to SEQ ID NO: 453144
  chr2:219232221-219232546
  hypo
  anorectal vs. cervical

SEQ ID NO: 453862 - DNA, 32 bp, Homo sapiens; identical to SEQ ID NO: 357453
  chr2:219232859-219232891
  hypo
  anorectal vs. cervical

SEQ ID NO: 453863 - DNA, 178 bp, Homo sapiens
  chr2:220150664-220150842
  hypo
  anorectal vs. colorectal,lymphoid_neoplasm
cgctgacgctctctcctgtcaccccgcccctgctctctccccagatgtgttctgagctggatgccgggttccagaatcgctgcacagttccaacaggacagcgccttcccccatgcgctgggaggggaccctccatttctccccctcacccatgctgagtgtagagccggggcctggg

SEQ ID NO: 453864 - DNA, 336 bp, Homo sapiens; identical to SEQ ID NO: 363080
  chr2:220150871-220151207
  hypo
  anorectal vs. colorectal,lymphoid_neoplasm

SEQ ID NO: 453865 - DNA, 342 bp, Homo sapiens; identical to SEQ ID NO: 453146
  chr2:232790312-232790654
  hypo
  anorectal vs. head_and_neck

SEQ ID NO: 453866 - DNA, 264 bp, Homo sapiens; identical to SEQ ID NO: 453147
  chr2:232790784-232791048
  hypo
  anorectal vs. head_and_neck

SEQ ID NO: 453867 - DNA, 360 bp, Homo sapiens; identical to SEQ ID NO: 347959
  chr2:241542357-241542717
  hypo

SEQ ID NO: 453868 - DNA, 131 bp, Homo sapiens; identical to SEQ ID NO: 337989
  chr2:242277184-242277315
  hypo
  anorectal vs. liver_bileduct

SEQ ID NO: 453869 - DNA, 140 bp, Homo sapiens
  chr20:2820587-2820727
  hypo
  anorectal vs. lung,colorectal,liver_bileduct,renal, pancreas_gallbladder,uterine,lymphoid_neoplasm,breast,cervical, upper_gi,prostate,bladder_and_urothelial,sarcoma,non_cancer, thyroid,multiple_myeloma,melanoma
agaggccactaagcagcgcgatggtggggactctgggcaggtcagcctcagggctagcccctccggggctgctcaatgctaaagggaggaggtgacggcagcagagccatggtggcgccagccttggtcacacttggtac

SEQ ID NO: 453870 - DNA, 143 bp, Homo sapiens; identical to SEQ ID NO: 294514
  chr20:2820861-2821004
  hypo
  anorectal vs. lung,colorectal,liver_bileduct,renal, pancreas_gallbladder,uterine,lymphoid_neoplasm,breast,cervical, upper_gi,prostate,bladder_and_urothelial,sarcoma,non_cancer, thyroid,multiple_myeloma,melanoma

SEQ ID NO: 453871 - DNA, 226 bp, Homo sapiens
  chr20:20376606-20376832
  hypo
  anorectal vs. pancreas_gallbladder,colorectal
cgccttccgcctgtgagcctgggaggtggtgcagcccaggccacacgggacagggttttcagacagccttgccaaggcggctgccatccatcagagcgctctgggcagggcctggaccccagacccaggacagaaaggcaggctggggaggtcacacctgccatggccagcctatcctctgggtcctagaccgcagcccattcctaggtctccaccctctgcgctc

SEQ ID NO: 453872 - DNA, 219 bp, Homo sapiens
  chr20:20376973-20377192
  hypo
  anorectal vs. pancreas_gallbladder,colorectal
cggcccatctcaagaccctgctccttcaggcctgggcaacaaaaaagggggcggccccagcgcccgctggctccctgcagccccacacacaaaagggcaggcgacaaagacattttccgggatggcaggtgttggtgtcggattcctccccgagtgcacgggcagaagaaaggcaaggctgggcttccccgggcagcgcagacatgcaggggcaggagt

SEQ ID NO: 453873 - DNA, 222 bp, Homo sapiens; identical to SEQ ID NO: 453162
  chr20:21686742-21686964
  hypo
  anorectal vs. head_and_neck

SEQ ID NO: 453874 - DNA, 222 bp, Homo sapiens; identical to SEQ ID NO: 453162
  chr20:21686742-21686964
  hypo
  anorectal vs. sarcoma,myeloid_neoplasm,head_and_neck, melanoma,renal

SEQ ID NO: 453875 - DNA, 78 bp, Homo sapiens; identical to SEQ ID NO: 368296
  chr20:30153987-30154065
  hypo
  anorectal vs. melanoma

SEQ ID NO: 453876 - DNA, 110 bp, Homo sapiens; identical to SEQ ID NO: 344239
  chr20:37657005-37657115
  hypo
  anorectal vs. pancreas_gallbladder,colorectal,upper_gi, liver_bileduct,lymphoid_neoplasm

SEQ ID NO: 453877 - DNA, 164 bp, Homo sapiens; identical to SEQ ID NO: 346239
  chr20:57268976-57269140
  hypo
  anorectal vs. liver_bileduct,pancreas_gallbladder, colorectal,lymphoid_neoplasm,sarcoma

SEQ ID NO: 453878 - DNA, 233 bp, Homo sapiens; identical to SEQ ID NO: 347690
  chr20:57978841-57979074
  hypo
  anorectal vs. bladder_and_urothelial, pancreas_gallbladder,colorectal,upper_gi,melanoma,head_and_neck, ovary,lymphoid_neoplasm,renal,sarcoma,prostate,myeloid_neoplasm, uterine,non_cancer,lung,multiple_myeloma,thyroid,liver_bileduct

SEQ ID NO: 453879 - DNA, 57 bp, Homo sapiens
  chr20:58514041-58514098
  hypo
  anorectal vs. colorectal,pancreas_gallbladder, lymphoid_neoplasm,sarcoma,renal,uterine,upper_gi,prostate, non_cancer,melanoma,bladder_and_urothelial
cgcagcttaggtgtggaggctccaggtggccggtccccgcgcggctcagatgaagtg

SEQ ID NO: 453880 - DNA, 115 bp, Homo sapiens; identical to SEQ ID NO: 345644
  chr20:58514400-58514515
  hypo
  anorectal vs. colorectal,pancreas_gallbladder, lymphoid_neoplasm,sarcoma,renal,uterine,upper_gi,prostate, non_cancer,melanoma,bladder_and_urothelial

SEQ ID NO: 453881 - DNA, 109 bp, Homo sapiens; identical to SEQ ID NO: 361933
  chr20:58515463-58515572
  hypo
  anorectal vs. head_and_neck

SEQ ID NO: 453882 - DNA, 409 bp, Homo sapiens; identical to SEQ ID NO: 344359
  chr20:60725146-60725555
  hypo
  anorectal vs. liver_bileduct

SEQ ID NO: 453883 - DNA, 716 bp, Homo sapiens; identical to SEQ ID NO: 368493
  chr20:62326157-62326873
  hypo
  anorectal vs. upper_gi,pancreas_gallbladder,colorectal, liver_bileduct

SEQ ID NO: 453884 - DNA, 307 bp, Homo sapiens; identical to SEQ ID NO: 383235
  chr21:44830965-44831272
  hypo
  anorectal vs. pancreas_gallbladder

SEQ ID NO: 453885 - DNA, 57 bp, Homo sapiens
  chr21:45289958-45290015
  hypo
  anorectal vs. liver_bileduct
cggcacgggcgggcgggattttggattagttttaggaagcgaaccacagccgtcctc

SEQ ID NO: 453886 - DNA, 69 bp, Homo sapiens; identical to SEQ ID NO: 368585
  chr21:45290044-45290113
  hypo
  anorectal vs. liver_bileduct

SEQ ID NO: 453887 - DNA, 294 bp, Homo sapiens
  chr21:46912528-46912822
  hypo
  anorectal vs. cervical
aaggctgggtggggtccgggcaggcgcgagggtgcgtgatgaccccagctgacgccgtccctctttccccagggccggccgggtttcgcaggctttcccgtgagtaacctggtgccagagctgcatgctgcccggctggggaggggtctccacctggtagcacagagcagcccggtcgagctggggtgggccttgtcaggcccgagggatagcgacagtcactgcccccaaggaaatgatgggagtgggatgtgggcgagagccgctggcaggccctgtgctgggtgggcaccc

SEQ ID NO: 453888 - DNA, 55 bp, Homo sapiens; identical to SEQ ID NO: 352575
  chr21:47062898-47062953
  hypo
  anorectal vs. head_and_neck,cervical

SEQ ID NO: 453889 - DNA, 143 bp, Homo sapiens; identical to SEQ ID NO: 453174
  chr21:47063290-47063433
  hypo
  anorectal vs. lung

SEQ ID NO: 453890 - DNA, 731 bp, Homo sapiens; identical to SEQ ID NO: 344649
  chr21:47832850-47833581
  hypo
  anorectal vs. colorectal

SEQ ID NO: 453891 - DNA, 145 bp, Homo sapiens; identical to SEQ ID NO: 368698
  chr22:18287371-18287516
  hypo
  anorectal vs. colorectal

SEQ ID NO: 453892 - DNA, 537 bp, Homo sapiens; identical to SEQ ID NO: 356478
  chr22:18340868-18341405
  hypo
  anorectal vs. lymphoid_neoplasm,melanoma

SEQ ID NO: 453893 - DNA, 192 bp, Homo sapiens; identical to SEQ ID NO: 344688
  chr22:22324565-22324757
  hypo
  anorectal vs. liver_bileduct

SEQ ID NO: 453894 - DNA, 137 bp, Homo sapiens; identical to SEQ ID NO: 453177
  chr22:22862472-22862609
  hypo
  anorectal vs. prostate,uterine,multiple_myeloma, myeloid_neoplasm,lymphoid_neoplasm,non_cancer,melanoma, colorectal,ovary,renal,thyroid,lung

SEQ ID NO: 453895 - DNA, 61 bp, Homo sapiens; identical to SEQ ID NO: 453178
  chr22:25678186-25678247
  hypo
  anorectal vs. breast,melanoma

SEQ ID NO: 453896 - DNA, 8 bp, Homo sapiens
  chr22:29446643-29446651
  hypo
  anorectal vs. liver_bileduct
gagccagc

SEQ ID NO: 453897 - DNA, 86 bp, Homo sapiens; identical to SEQ ID NO: 344714
  chr22:29587127-29587213
  hypo
  anorectal vs. colorectal,pancreas_gallbladder,upper_gi, ovary,lymphoid_neoplasm,breast

SEQ ID NO: 453898 - DNA, 96 bp, Homo sapiens; identical to SEQ ID NO: 346280
  chr22:36902565-36902661
  hypo
  anorectal vs. pancreas_gallbladder,lymphoid_neoplasm, renal,colorectal,bladder_and_urothelial,uterine,lung,thyroid, multiple_myeloma,prostate,non_cancer,sarcoma

SEQ ID NO: 453899 - DNA, 112 bp, Homo sapiens; identical to SEQ ID NO: 368779
  chr22:36907702-36907814
  hypo
  anorectal vs. liver_bileduct

SEQ ID NO: 453900 - DNA, 55 bp, Homo sapiens; identical to SEQ ID NO: 344772
  chr22:39144766-39144821
  hypo
  anorectal vs. upper_gi,melanoma

SEQ ID NO: 453901 - DNA, 208 bp, Homo sapiens
  chr22:42095795-42096003
  hypo
  anorectal vs. upper_gi
cgctccggtgaacccgacgcgaaaccgggcccccgcgctgtgttcactctcctccctgtcagcccgtcccggacccggccgcagcggcctctcgggcccctcagccccaggccggcctgcgggcctccgtggagcccggtccactggctctgcgcctgaaaggacggaaatccggatcccccgggacctcacccagtctcagggacac

SEQ ID NO: 453902 - DNA, 70 bp, Homo sapiens; identical to SEQ ID NO: 368818
  chr22:42096253-42096323
  hypo
  anorectal vs. upper_gi

SEQ ID NO: 453903 - DNA, 8 bp, Homo sapiens
  chr22:42395143-42395151
  hypo
  anorectal vs. lymphoid_neoplasm
cgcatgtc

SEQ ID NO: 453904 - DNA, 50 bp, Homo sapiens; identical to SEQ ID NO: 368819
  chr22:42395290-42395340
  hypo
  anorectal vs. lymphoid_neoplasm

SEQ ID NO: 453905 - DNA, 33 bp, Homo sapiens
  chr22:42667137-42667170
  hypo
  anorectal vs. lymphoid_neoplasm,melanoma, multiple_myeloma,renal,liver_bileduct
cgccaagagccctctgggccgggggcagcccaa

SEQ ID NO: 453906 - DNA, 187 bp, Homo sapiens
  chr22:43570061-43570248
  hypo
  anorectal vs. liver_bileduct
cggtccgtgaagacggccgtgacgttcggggcccacagctcggctcctgcaccacggtttccacagtgggtgctcatggaggagcaggcggacacagacgctgggccggggaaaagggccatggagcacaccgatgccgtgtctgggacttaccacctttcccgctgctggaagtagctgacaaact

SEQ ID NO: 453907 - DNA, 298 bp, Homo sapiens; identical to SEQ ID NO: 368828
  chr22:43570314-43570612
  hypo
  anorectal vs. liver_bileduct

SEQ ID NO: 453908 - DNA, 404 bp, Homo sapiens
  chr22:45593240-45593644
  hypo
  anorectal vs. liver_bileduct
cgtgtctccaccatcctcaccctgcagactgggaaatgggctcgcagcaacggcacaccctgcagggcctcaggtgcaagctggtgtgggggccagagccactgcctgtcacagctgctgcaggcctgggtcagcgaggtggcctgagagcctcccctcgcccgtgagtaacacacacctgggcatctgtggccactcaagaggggacagcaggtgcgccagaaaggtgaacaaagggaggacttcagctctgggaaagctacggctccacccaaagtctgagacaaagaggccaagagccctgcaaagaaacccaaccaaccgacaggacagggcgggatgactccgggtggctcacaagtaccaaggccctggaggcagagctggctgtgagaaggtgcggc

SEQ ID NO: 453909 - DNA, 258 bp, Homo sapiens; identical to SEQ ID NO: 346288
  chr22:45593715-45593973
  hypo
  anorectal vs. liver_bileduct

SEQ ID NO: 453910 - DNA, 567 bp, Homo sapiens; identical to SEQ ID NO: 344821
  chr22:45808579-45809146
  hypo
  anorectal vs. bladder_and_urothelial,colorectal,upper_gi, pancreas_gallbladder,lung,prostate,renal,lymphoid_neoplasm, uterine,sarcoma,thyroid,non_cancer,breast

SEQ ID NO: 453911 - DNA, 359 bp, Homo sapiens; identical to SEQ ID NO: 356572
  chr22:46979972-46980331
  hypo
  anorectal vs. upper_gi,liver_bileduct,lymphoid_neoplasm, pancreas_gallbladder

SEQ ID NO: 453912 - DNA, 135 bp, Homo sapiens
  chr22:47022417-47022552
  hypo
  anorectal vs. liver_bileduct
cgggggtctctgggtcggggttttctttggaaagctggaccggccgtgccctgcgtgtgggagctggctcgtggggcttggaggtgtgtgtgggagggacggtggcagggcggggtctctgggtcggggttttct

SEQ ID NO: 453913 - DNA, 413 bp, Homo sapiens
  chr22:47022632-47023045
  hypo
  anorectal vs. liver_bileduct
gcccctctcttgcagggaacccgagcgtcatgttagggtgaagcagaggacctcagtgctgaacatgctaaggaggttggacaaaatcaggttcagaggtcacaagagagatgacttcctcgatctagcggagtctccaaatgcctcggacaccgaatgcagcgacgaaatccccctgaaggtaccgcggacctcgccccgggacagcgaggagctgagggaccctgtgagtacctgtcctcgtcccccggtgtgggctggggtgtcgtccccgtcctctgtggccgggccaagcgtggactcaggcagattcgtgtcctgcccatgctggtcagagatggactgggcctgactctctgtctcacctgctcccgacccctgcagaccttgtggggccggggtgctgccacgcc

SEQ ID NO: 453914 - DNA, 58 bp, Homo sapiens; identical to SEQ ID NO: 356575
  chr22:47023191-47023249
  hypo
  anorectal vs. liver_bileduct

SEQ ID NO: 453915 - DNA, 263 bp, Homo sapiens; identical to SEQ ID NO: 344836
  chr22:47054031-47054294
  hypo
  anorectal vs. liver_bileduct,colorectal,upper_gi, lymphoid_neoplasm

SEQ ID NO: 453916 - DNA, 59 bp, Homo sapiens; identical to SEQ ID NO: 453192
  chr22:50170525-50170584
  hypo
  anorectal vs. melanoma,liver_bileduct

SEQ ID NO: 453917 - DNA, 160 bp, Homo sapiens; identical to SEQ ID NO: 356591
  chr22:50170790-50170950
  hypo
  anorectal vs. melanoma,liver_bileduct

SEQ ID NO: 453918 - DNA, 110 bp, Homo sapiens
  chr22:50177139-50177249
  hypo
  anorectal vs. liver_bileduct,upper_gi,colorectal
cgcgcctgggcatggccgtcacacccaaaccaccagtcactatgggacggctccgcacatgctcaggacagcctcagaatgctgtccactgtgtcgtcagctgcagcagg

SEQ ID NO: 453919 - DNA, 50 bp, Homo sapiens; identical to SEQ ID NO: 368896
  chr22:50177299-50177349
  hypo
  anorectal vs. liver_bileduct,upper_gi,colorectal

SEQ ID NO: 453920 - DNA, 153 bp, Homo sapiens; identical to SEQ ID NO: 356600
  chr22:50899708-50899861
  hypo
  anorectal vs. lymphoid_neoplasm,liver_bileduct,sarcoma

SEQ ID NO: 453921 - DNA, 495 bp, Homo sapiens
  chr22:50899708-50900203
  hypo
  anorectal vs. liver_bileduct,cervical
tccccaacttaggacaggccaggcagagtcagaagcaaggaaggtaagggggggggggtcccagaatctcagggtaccacagttatggggaatcccaagtgggtggggaaggagcagacaaaggcccgtttcccacgggcacccagaacccccgagaaaagggagagggaggcagggaaagcccatccatcccaaagacctgggggagagggggcgacagggccagagagtctgcaggctcacccagggggtccgtgggcatccccgtgaagatgacccggtacgtggtgaggaagacggcgccctcagctgggagcaatgctggtcccccagcactgccccccgcgccctcctcacgcccatccggcagcaggtagacgcgcaggccgtccagcacacactcctcacccggcagcaggcgcggccgcagcagcttgggctgctcgaaaacaagagcaggagctcaggatgcagcccgggccttgggcccccgca

SEQ ID NO: 453922 - DNA, 46 bp, Homo sapiens; identical to SEQ ID NO: 383628
  chr22:50900232-50900278
  hypo
  anorectal vs. liver_bileduct,cervical

SEQ ID NO: 453923 - DNA, 379 bp, Homo sapiens
  chr22:50942715-50943094
  hypo
  anorectal vs. liver_bileduct,upper_gi, pancreas_gallbladder,colorectal
cggccttacccctgcaccccgggctccacaccccacccggtgcccagccttacccctgctccccaggctgggagaaccagtacttgtagcgctgggctcggacgtaggtgggcggctgcttgtggaagggatacctggccacttggctctggacaaggcggatcactgcagcgagaggcatcagcgtggcccccacagtacccgccctgcccctcccctccccaccccgctccaccccagcccactccacaccccccaagcccgctccgcacctggctccttgccctgcagcaggcgcaagaccaggcttgtgaaccacgggctgtgcgtgtgtgggcccagggctgcaaaccacatctgccagtccaggcgtggctgg

SEQ ID NO: 453924 - DNA, 117 bp, Homo sapiens
  chr22:50942977-50943094
  hypo
  anorectal vs. liver_bileduct,upper_gi, pancreas_gallbladder,colorectal
cgctccgcacctggctccttgccctgcagcaggcgcaagaccaggcttgtgaaccacgggctgtgcgtgtgtgggcccagggctgcaaaccacatctgccagtccaggcgtggctgg

SEQ ID NO: 453925 - DNA, 308 bp, Homo sapiens; identical to SEQ ID NO: 356602
  chr22:50943412-50943720
  hypo
  anorectal vs. liver_bileduct,upper_gi, pancreas_gallbladder,colorectal

SEQ ID NO: 453926 - DNA, 559 bp, Homo sapiens; identical to SEQ ID NO: 453194
  chr3:32433054-32433613
  hypo
  anorectal vs. pancreas_gallbladder, bladder_and_urothelial

SEQ ID NO: 453927 - DNA, 180 bp, Homo sapiens; identical to SEQ ID NO: 453195
  chr3:32433665-32433845
  hypo
  anorectal vs. pancreas_gallbladder, bladder_and_urothelial

SEQ ID NO: 453928 - DNA, 247 bp, Homo sapiens; identical to SEQ ID NO: 453196
  chr3:32433366-32433613
  hypo
  anorectal vs. pancreas_gallbladder

SEQ ID NO: 453929 - DNA, 201 bp, Homo sapiens; identical to SEQ ID NO: 453197
  chr3:32433665-32433866
  hypo
  anorectal vs. pancreas_gallbladder

SEQ ID NO: 453930 - DNA, 81 bp, Homo sapiens; identical to SEQ ID NO: 345086
  chr3:32434068-32434149
  hypo
  anorectal vs. pancreas_gallbladder

SEQ ID NO: 453931 - DNA, 38 bp, Homo sapiens
  chr3:49755498-49755536
  hypo
  anorectal vs. liver_bileduct
cggccattgaggcccctccggcctggctccagaaagac

SEQ ID NO: 453932 - DNA, 233 bp, Homo sapiens; identical to SEQ ID NO: 363267
  chr3:49755593-49755826
  hypo
  anorectal vs. liver_bileduct

SEQ ID NO: 453933 - DNA, 234 bp, Homo sapiens; identical to SEQ ID NO: 453203
  chr3:49906737-49906971
  hypo
  anorectal vs. head_and_neck

SEQ ID NO: 453934 - DNA, 49 bp, Homo sapiens; identical to SEQ ID NO: 349768
  chr3:49907379-49907428
  hypo
  anorectal vs. head_and_neck

SEQ ID NO: 453935 - DNA, 154 bp, Homo sapiens; identical to SEQ ID NO: 357668
  chr3:123168102-123168256
  hypo
  anorectal vs. head_and_neck

SEQ ID NO: 453936 - DNA, 30 bp, Homo sapiens; identical to SEQ ID NO: 453214
  chr3:130064848-130064878
  hypo
  anorectal vs. sarcoma,multiple_myeloma,myeloid_neoplasm, ovary,non_cancer,prostate,renal,breast,thyroid

SEQ ID NO: 453937 - DNA, 216 bp, Homo sapiens; identical to SEQ ID NO: 338226
  chr3:148804777-148804993
  hypo
  anorectal vs. pancreas_gallbladder,colorectal, lymphoid_neoplasm,liver_bileduct,bladder_and_urothelial,lung, renal

SEQ ID NO: 453938 - DNA, 283 bp, Homo sapiens; identical to SEQ ID NO: 453224
  chr3:170626174-170626457
  hypo
  anorectal vs. head_and_neck,colorectal,upper_gi, pancreas_gallbladder,cervical

SEQ ID NO: 453939 - DNA, 26 bp, Homo sapiens
  chr3:170626710-170626736
  hypo
  anorectal vs. head_and_neck,colorectal,upper_gi, pancreas_gallbladder,cervical
aggtttgttgcgttcgggtcgcagtc

SEQ ID NO: 453940 - DNA, 108 bp, Homo sapiens; identical to SEQ ID NO: 453226
  chr3:170626349-170626457
  hypo
  anorectal vs. head_and_neck,colorectal,upper_gi

SEQ ID NO: 453941 - DNA, 508 bp, Homo sapiens; identical to SEQ ID NO: 357752
  chr3:170626710-170627218
  hypo
  anorectal vs. head_and_neck,colorectal,upper_gi

SEQ ID NO: 453942 - DNA, 191 bp, Homo sapiens; identical to SEQ ID NO: 338242
  chr3:171362739-171362930
  hypo
  anorectal vs. head_and_neck

SEQ ID NO: 453943 - DNA, 207 bp, Homo sapiens; identical to SEQ ID NO: 453230
  chr3:180397104-180397311
  hypo
  anorectal vs. lung,sarcoma,breast

SEQ ID NO: 453944 - DNA, 809 bp, Homo sapiens; identical to SEQ ID NO: 345120
  chr3:183165024-183165833
  hypo
  anorectal vs. liver_bileduct,bladder_and_urothelial,lung, melanoma,pancreas_gallbladder,ovary,lymphoid_neoplasm,renal, colorectal,multiple_myeloma,uterine,prostate,upper_gi

SEQ ID NO: 453945 - DNA, 133 bp, Homo sapiens; identical to SEQ ID NO: 453234
  chr3:186079331-186079464
  hypo
  anorectal vs. thyroid,non_cancer,lymphoid_neoplasm, sarcoma,multiple_myeloma,prostate,bladder_and_urothelial, myeloid_neoplasm,renal,cervical,breast,uterine,ovary

SEQ ID NO: 453946 - DNA, 291 bp, Homo sapiens; identical to SEQ ID NO: 453235
  chr3:186079331-186079622
  hypo
  anorectal vs. prostate,myeloid_neoplasm,non_cancer, thyroid,multiple_myeloma,lymphoid_neoplasm,ovary,breast,sarcoma, uterine,renal,lung,bladder_and_urothelial,cervical,melanoma

SEQ ID NO: 453947 - DNA, 125 bp, Homo sapiens; identical to SEQ ID NO: 453236
  chr3:186079497-186079622
  hypo
  anorectal vs. prostate,sarcoma,ovary,non_cancer, myeloid_neoplasm,thyroid,uterine,multiple_myeloma,breast, lymphoid_neoplasm,renal,melanoma,lung,pancreas_gallbladder, bladder_and_urothelial,cervical

SEQ ID NO: 453948 - DNA, 334 bp, Homo sapiens; identical to SEQ ID NO: 338292
  chr3:187443068-187443402
  hypo

SEQ ID NO: 453949 - DNA, 18 bp, Homo sapiens
  chr3:195834909-195834927
  hypo
  anorectal vs. lymphoid_neoplasm
cgcgcctgtcatcttttt

SEQ ID NO: 453950 - DNA, 76 bp, Homo sapiens; identical to SEQ ID NO: 338326
  chr3:195855364-195855440
  hypo
  anorectal vs. head_and_neck,upper_gi,cervical

SEQ ID NO: 453951 - DNA, 284 bp, Homo sapiens; identical to SEQ ID NO: 353430
  chr3:196728448-196728732
  hypo
  anorectal vs. melanoma,colorectal,cervical,uterine,renal, breast,prostate,non_cancer,upper_gi,thyroid

SEQ ID NO: 453952 - DNA, 635 bp, Homo sapiens
  chr4:513070-513705
  hypo
  anorectal vs. upper_gi,pancreas_gallbladder,colorectal, liver_bileduct
cgccatgctgtgtctcccctggcacagcgcctggcacagtgcctggcacgtcgtccacgctccatggatatttgtttcgatgcatgcacaggtgcacccccatagctttgtgactctctgataggcggtggggtgtggacacaggcgtccccccatccagggtggtaggtgtagcaatgaaggatgccagccctggaaccagactgcctgagtttcatttgcagcttttacccactggcactgtggcccaggtgcgtgactcaccctctgtgtctcagttgcctcctctggataacagttctgatgctcatccctgcctcatagggtcattagggaggtgaaacgagcgagccgcctagtgttgctggctactggcacttagtgcagagcacctggtgccggcagcagtggggtgggcctgcaggcgtgtgggttcatgcttagggacttggtgcctgcagcagtggggtgggcctgcaggcgtgtgggttcacgctcagggacctggtgccggcagcagtggggtgggcctgcaggcgtgtgggttcatgcttagggacttggtgcctgcagcagtggggtgggcctgcaggcgtgtgggttcacgctcagggacctggtgccggcagcagtgg

SEQ ID NO: 453953 - DNA, 221 bp, Homo sapiens; identical to SEQ ID NO: 353435
  chr4:513734-513955
  hypo
  anorectal vs. upper_gi,pancreas_gallbladder,colorectal, liver_bileduct

SEQ ID NO: 453954 - DNA, 308 bp, Homo sapiens
  chr4:955544-955852
  hypo
  anorectal vs. lymphoid_neoplasm,uterine
cggatctgcttgtgcaggctccgagagtgactgatcttctgcagccccacccgcacgtacacacccttgttgtgcagcctgcaggacggggcaggtcacccatcaccaggggaagccctaccccgccttaggcagcctccgggttccggcccctctgcctgttcctgctgggggacctgagggaggtatgccgttgacaggtggtagcccctgcggctccggtacctgcttgtgaacttgccaggctcctcttcccgtgcctggtggaagtccaggctcagctccgcgtcgatgccaatgccacagta

SEQ ID NO: 453955 - DNA, 464 bp, Homo sapiens; identical to SEQ ID NO: 338366
  chr4:1225310-1225774
  hypo
  anorectal vs. liver_bileduct,lymphoid_neoplasm,upper_gi, pancreas_gallbladder,colorectal

SEQ ID NO: 453956 - DNA, 29 bp, Homo sapiens
  chr4:1331705-1331734
  hypo
ttcatgtgacctgcctcaggcccagaggg

SEQ ID NO: 453957 - DNA, 373 bp, Homo sapiens
  chr4:1331896-1332269
  hypo
gctcttgtcctgcctggagaggttgcgtggccggggagagggcggcgggcgacggagccactctgtgcctgtggtcctggtgctggaggccggggtgagaaggcgcaggcttcttgtctccaccgaggcctcagtggggctgtttagctgtcgagtgcagcacttcctgtgcctcgaaagacagccccgtgtagtcagcatggcgcccacatagccagaagggcacgcagcccagggcagagtggccacagggggctgggctcaccccggctgccctgagtggcccccaacccttccttgacccgatgctcagacagtgctacaaggaggacggcagctccaagagccctgactgccctgtgtgcagccgctc

SEQ ID NO: 453958 - DNA, 41 bp, Homo sapiens
  chr4:1791229-1791270
  hypo
  anorectal vs. lymphoid_neoplasm,colorectal
cgcctgccctgggttccaggtctccaagcctcggcctccct

SEQ ID NO: 453959 - DNA, 107 bp, Homo sapiens; identical to SEQ ID NO: 363497
  chr4:1791344-1791451
  hypo
  anorectal vs. lymphoid_neoplasm,colorectal

SEQ ID NO: 453960 - DNA, 50 bp, Homo sapiens; identical to SEQ ID NO: 338406
  chr4:2622600-2622650
  hypo
  anorectal vs. liver_bileduct,pancreas_gallbladder

SEQ ID NO: 453961 - DNA, 20 bp, Homo sapiens
  chr4:85503892-85503912
  hypo
  anorectal vs. head_and_neck
cagcctcctcccgccccacc

SEQ ID NO: 453962 - DNA, 251 bp, Homo sapiens; identical to SEQ ID NO: 453250
  chr4:85503985-85504236
  hypo
  anorectal vs. head_and_neck

SEQ ID NO: 453963 - DNA, 116 bp, Homo sapiens; identical to SEQ ID NO: 338551
  chr4:152591291-152591407
  hypo
  anorectal vs. liver_bileduct

SEQ ID NO: 453964 - DNA, 40 bp, Homo sapiens; identical to SEQ ID NO: 350004
  chr4:156298073-156298113
  hypo
  anorectal vs. lung,breast,uterine,lymphoid_neoplasm, ovary

SEQ ID NO: 453965 - DNA, 331 bp, Homo sapiens; identical to SEQ ID NO: 338589
  chr5:453948-454279
  hypo
  anorectal vs. upper_gi,liver_bileduct

SEQ ID NO: 453966 - DNA, 432 bp, Homo sapiens; identical to SEQ ID NO: 338606
  chr5:883821-884253
  hypo
  anorectal vs. liver_bileduct,upper_gi, pancreas_gallbladder,colorectal

SEQ ID NO: 453967 - DNA, 187 bp, Homo sapiens; identical to SEQ ID NO: 338607
  chr5:913200-913387
  hypo
  anorectal vs. lymphoid_neoplasm,upper_gi,melanoma, colorectal,breast,uterine,sarcoma,myeloid_neoplasm,cervical, prostate

SEQ ID NO: 453968 - DNA, 236 bp, Homo sapiens; identical to SEQ ID NO: 338614
  chr5:1049758-1049994
  hypo
  anorectal vs. upper_gi

SEQ ID NO: 453969 - DNA, 12 bp, Homo sapiens
  chr5:1073469-1073481
  hypo
  anorectal vs. cervical
cggctctggacg

SEQ ID NO: 453970 - DNA, 431 bp, Homo sapiens
  chr5:1074389-1074820
  hypo
  anorectal vs. cervical,liver_bileduct
cagaggcttcccaaagatggcctttgcttcagcaggagccaccctctcccaccccaagcccagggctgtgctggcagaggggccggctccccacacccccaccctgcagcagggacacccccggcccccagctgcgccatccgctctgcaccaggcagtgttcacaccccagaccttgcctgagcggctgaaggtgagaggcccctgagactcaaaggtccccactcaaaggccgacctcagaaacagctcttctgtgcgtctgaggaccacggggcatgggcggtgctcacctccagttcttggtgtgggggggaccgtgctccacgcgcagcagggcgtagcgggcggcgttcagggataggccacggatgccatcgccccactccttctcggccctgtgggaaaggaagtcggggtttgtccagccgc

SEQ ID NO: 453971 - DNA, 717 bp, Homo sapiens; identical to SEQ ID NO: 370674
  chr5:14142816-14143533
  hypo
  anorectal vs. head_and_neck

SEQ ID NO: 453972 - DNA, 19 bp, Homo sapiens
  chr5:33936135-33936154
  hypo
  anorectal vs. melanoma
cgggtgggctttgcctgca

SEQ ID NO: 453973 - DNA, 327 bp, Homo sapiens; identical to SEQ ID NO: 453289
  chr5:75379694-75380021
  hypo
  anorectal vs. bladder_and_urothelial,breast,ovary, pancreas_gallbladder,lung,prostate

SEQ ID NO: 453974 - DNA, 374 bp, Homo sapiens; identical to SEQ ID NO: 453290
  chr5:75379694-75380068
  hypo
  anorectal vs. ovary,cervical,breast

SEQ ID NO: 453975 - DNA, 53 bp, Homo sapiens; identical to SEQ ID NO: 453291
  chr5:75698192-75698245
  hypo
  anorectal vs. cervical,upper_gi,colorectal, pancreas_gallbladder,uterine,breast,liver_bileduct, multiple_myeloma,prostate,ovary

SEQ ID NO: 453976 - DNA, 916 bp, Homo sapiens; identical to SEQ ID NO: 453292
  chr5:75698274-75699190
  hypo
  anorectal vs. cervical,upper_gi,colorectal, pancreas_gallbladder,uterine,breast,liver_bileduct, multiple_myeloma,prostate,ovary

SEQ ID NO: 453977 - DNA, 752 bp, Homo sapiens; identical to SEQ ID NO: 453293
  chr5:75698708-75699460
  hypo
  anorectal vs. cervical,upper_gi,pancreas_gallbladder, colorectal,liver_bileduct,breast,uterine,prostate,renal, myeloid_neoplasm,non_cancer,thyroid,lung,melanoma,ovary, multiple_myeloma

SEQ ID NO: 453978 - DNA, 267 bp, Homo sapiens; identical to SEQ ID NO: 453294
  chr5:75699193-75699460
  hypo
  anorectal vs. cervical,liver_bileduct, pancreas_gallbladder,upper_gi,colorectal,melanoma,breast, uterine,lung,prostate,renal,non_cancer,myeloid_neoplasm, multiple_myeloma,ovary,thyroid,sarcoma,head_and_neck

SEQ ID NO: 453979 - DNA, 19 bp, Homo sapiens
  chr5:75700173-75700192
  hypo
  anorectal vs. cervical,liver_bileduct, pancreas_gallbladder,upper_gi,colorectal,melanoma,breast, uterine,lung,prostate,renal,non_cancer,myeloid_neoplasm, multiple_myeloma,ovary,thyroid,sarcoma,head_and_neck
ccagattaacaccaaccac

SEQ ID NO: 453980 - DNA, 735 bp, Homo sapiens; identical to SEQ ID NO: 345179
  chr5:87436769-87437504
  hypo
  anorectal vs. lung,bladder_and_urothelial,colorectal, ovary,uterine,breast,upper_gi,sarcoma,renal,liver_bileduct, prostate,myeloid_neoplasm,non_cancer,cervical,thyroid, head_and_neck,pancreas_gallbladder

SEQ ID NO: 453981 - DNA, 38 bp, Homo sapiens; identical to SEQ ID NO: 453332
  chr5:124084158-124084196
  hypo
  anorectal vs. liver_bileduct,upper_gi, pancreas_gallbladder,lymphoid_neoplasm,colorectal

SEQ ID NO: 453982 - DNA, 60 bp, Homo sapiens; identical to SEQ ID NO: 346734
  chr5:124084302-124084362
  hypo
  anorectal vs. liver_bileduct,upper_gi, pancreas_gallbladder,lymphoid_neoplasm,colorectal

SEQ ID NO: 453983 - DNA, 112 bp, Homo sapiens; identical to SEQ ID NO: 453334
  chr5:124084660-124084772
  hypo
  anorectal vs. liver_bileduct,upper_gi, pancreas_gallbladder,colorectal,lymphoid_neoplasm,renal,uterine, lung,ovary,bladder_and_urothelial,prostate,myeloid_neoplasm, non_cancer,breast,thyroid

SEQ ID NO: 453984 - DNA, 64 bp, Homo sapiens; identical to SEQ ID NO: 345193
  chr5:124084977-124085041
  hypo
  anorectal vs. liver_bileduct,upper_gi, pancreas_gallbladder,colorectal,lymphoid_neoplasm,renal,uterine, lung,ovary,bladder_and_urothelial,prostate,myeloid_neoplasm, non_cancer,breast,thyroid

SEQ ID NO: 453985 - DNA, 65 bp, Homo sapiens; identical to SEQ ID NO: 338812
  chr5:141355864-141355929
  hypo
  anorectal vs. lymphoid_neoplasm,upper_gi

SEQ ID NO: 453986 - DNA, 195 bp, Homo sapiens
  chr5:176558657-176558852
  hypo
  anorectal vs. liver_bileduct,head_and_neck, pancreas_gallbladder,lung,melanoma
cgccaaaaatggcctttctcccaggtgggctcaaagttaacagaaggcagtgagtaaacagtccactggggcaataactatgcacatttactaagccatgggaagaatagtagtcacgtggccctcgagggcggtgccctcagcttgagatggagttaactccaaatctaatcacagaaggctttctggaggagg

SEQ ID NO: 453987 - DNA, 144 bp, Homo sapiens; identical to SEQ ID NO: 345871
  chr5:176558908-176559052
  hypo
  anorectal vs. liver_bileduct,head_and_neck, pancreas_gallbladder,lung,melanoma

SEQ ID NO: 453988 - DNA, 77 bp, Homo sapiens
  chr5:176795049-176795126
  hypo
  anorectal vs. bladder_and_urothelial,melanoma,lung, breast,lymphoid_neoplasm,uterine,cervical,colorectal, multiple_myeloma,upper_gi,pancreas_gallbladder,prostate,renal, myeloid_neoplasm,non_cancer,sarcoma
ggcccctgcaggatggctccaaacaaggcccaccagtggggaacaggcttccgcagaggatgggtgagggcgggggg

SEQ ID NO: 453989 - DNA, 238 bp, Homo sapiens; identical to SEQ ID NO: 348125
  chr5:176795288-176795526
  hypo
  anorectal vs. bladder_and_urothelial,melanoma,lung, breast,lymphoid_neoplasm,uterine,cervical,colorectal, multiple_myeloma,upper_gi,pancreas_gallbladder,prostate,renal, myeloid_neoplasm,non_cancer,sarcoma

SEQ ID NO: 453990 - DNA, 55 bp, Homo sapiens; identical to SEQ ID NO: 346767
  chr6:393764-393819
  hypo
  anorectal vs. lymphoid_neoplasm

SEQ ID NO: 453991 - DNA, 465 bp, Homo sapiens; identical to SEQ ID NO: 332643
  chr6:4948996-4949461
  hypo
  anorectal vs. upper_gi

SEQ ID NO: 453992 - DNA, 80 bp, Homo sapiens; identical to SEQ ID NO: 350268
  chr6:6009552-6009632
  hypo
  anorectal vs. head_and_neck,colorectal

SEQ ID NO: 453993 - DNA, 223 bp, Homo sapiens; identical to SEQ ID NO: 339024
  chr6:36198250-36198473
  hypo
  anorectal vs. upper_gi,lymphoid_neoplasm,liver_bileduct, pancreas_gallbladder,breast,ovary,melanoma,renal,colorectal, uterine,prostate,sarcoma,myeloid_neoplasm,lung,cervical,thyroid

SEQ ID NO: 453994 - DNA, 49 bp, Homo sapiens; identical to SEQ ID NO: 364014
  chr6:36214794-36214843
  hypo
  anorectal vs. upper_gi,colorectal,pancreas_gallbladder

SEQ ID NO: 453995 - DNA, 373 bp, Homo sapiens; identical to SEQ ID NO: 453380
  chr6:46097250-46097623
  hypo
  anorectal vs. pancreas_gallbladder,lymphoid_neoplasm, colorectal,liver_bileduct,renal,ovary,uterine,lung,upper_gi, breast,prostate

SEQ ID NO: 453996 - DNA, 521 bp, Homo sapiens; identical to SEQ ID NO: 345237
  chr6:46097694-46098215
  hypo
  anorectal vs. pancreas_gallbladder,lymphoid_neoplasm, colorectal,liver_bileduct,renal,ovary,uterine,lung,upper_gi, breast,prostate

SEQ ID NO: 453997 - DNA, 295 bp, Homo sapiens; identical to SEQ ID NO: 453385
  chr6:69344649-69344944
  hypo
  anorectal vs. head_and_neck,lung,bladder_and_urothelial

SEQ ID NO: 453998 - DNA, 295 bp, Homo sapiens; identical to SEQ ID NO: 453385
  chr6:69344649-69344944
  hypo
  anorectal vs. head_and_neck,lung,melanoma,sarcoma

SEQ ID NO: 453999 - DNA, 440 bp, Homo sapiens; identical to SEQ ID NO: 453397
  chr6:127836226-127836666
  hypo
  anorectal vs. head_and_neck,lung

SEQ ID NO: 454000 - DNA, 225 bp, Homo sapiens; identical to SEQ ID NO: 453398
  chr6:127836441-127836666
  hypo
  anorectal vs. lung,head_and_neck,sarcoma,cervical, bladder_and_urothelial

SEQ ID NO: 454001 - DNA, 31 bp, Homo sapiens; identical to SEQ ID NO: 350458
  chr6:127837749-127837780
  hypo
  anorectal vs. head_and_neck,lung

SEQ ID NO: 454002 - DNA, 41 bp, Homo sapiens; identical to SEQ ID NO: 346866
  chr6:159591277-159591318
  hypo
  anorectal vs. head_and_neck,sarcoma,cervical,lung, thyroid,prostate,ovary,myeloid_neoplasm,breast,melanoma, non_cancer

SEQ ID NO: 454003 - DNA, 316 bp, Homo sapiens; identical to SEQ ID NO: 377921
  chr7:667329-667645
  hypo
  anorectal vs. head_and_neck

SEQ ID NO: 454004 - DNA, 548 bp, Homo sapiens; identical to SEQ ID NO: 339319
  chr7:2041390-2041938
  hypo
  anorectal vs. upper_gi

SEQ ID NO: 454005 - DNA, 327 bp, Homo sapiens
  chr7:2208344-2208671
  hypo
  anorectal vs. cervical,liver_bileduct, pancreas_gallbladder,melanoma,colorectal
cgcgtggagggcgccacgaggtcaaggtcctgaggccggaacaccaaggagctctgggagggtggaggaagaacacaagcctggagcagggggcagacacacggggcgtggggcccagaggccaccgggaggactcaggttttattccgagtgtgctaaggagccagggattgtggctgaagcgggaggaacacgctaaggagccagggatggcggctgaagcgggaggaacacgcgctcggacttgctgatgggctcttacgtgggcttttccccagctgaagaatgagttactaaatgtgttttaaaatgcaaaaatgtgtaccc

SEQ ID NO: 454006 - DNA, 91 bp, Homo sapiens; identical to SEQ ID NO: 345892
  chr7:2208844-2208935
  hypo
  anorectal vs. cervical,liver_bileduct, pancreas_gallbladder,melanoma,colorectal

SEQ ID NO: 454007 - DNA, 84 bp, Homo sapiens; identical to SEQ ID NO: 350505
  chr7:3083602-3083686
  hypo
  anorectal vs. pancreas_gallbladder

SEQ ID NO: 454008 - DNA, 468 bp, Homo sapiens
  chr7:4802085-4802553
  hypo
  anorectal vs. liver_bileduct,upper_gi
cggggagtgaggtcacctgcaacgcgggggagtgggactcacccagcggcgaccccgaagctggacccggcagctcaggcggccgcacccacagacggaggagaacagcccgcggcggcctgtgggcatcggcggcacctggacacacccagccctttccatttgatcgcctgccttcccgtggtttaagacaaaaacacataaacaagttcagacaactgattgtatgattctgggaattctttgctttcctttccttctccctcggcaccacctcctctccccaggcctccctgtcgggcatggggaggaggttggagctcagcatcttgaggaatgtgtcaagacagcccctccgctccgcgctgcacggccagccgcctttgtccgggaggacagacagaaacgcagcaaggcacacaccaaggctgccggggaggcccgggcaccggacagatgcctgttggg

SEQ ID NO: 454009 - DNA, 430 bp, Homo sapiens; identical to SEQ ID NO: 364288
  chr7:4802589-4803019
  hypo
  anorectal vs. liver_bileduct,upper_gi

SEQ ID NO: 454010 - DNA, 190 bp, Homo sapiens; identical to SEQ ID NO: 339376
  chr7:5396687-5396877
  hypo
  anorectal vs. head_and_neck

SEQ ID NO: 454011 - DNA, 7 bp, Homo sapiens
  chr7:37487365-37487372
  hypo
  anorectal vs. lymphoid_neoplasm,myeloid_neoplasm,thyroid, uterine,non_cancer,ovary,multiple_myeloma,breast,prostate,renal, sarcoma,lung,liver_bileduct,melanoma
cgctcgc

SEQ ID NO: 454012 - DNA, 168 bp, Homo sapiens; identical to SEQ ID NO: 345273
  chr7:37960958-37961126
  hypo
  anorectal vs. liver_bileduct,lung,pancreas_gallbladder, renal,ovary,sarcoma,myeloid_neoplasm,prostate, bladder_and_urothelial,thyroid,melanoma,uterine,cervical, non_cancer,multiple_myeloma,breast

SEQ ID NO: 454013 - DNA, 247 bp, Homo sapiens; identical to SEQ ID NO: 339520
  chr7:57706651-57706898
  hypo
  anorectal vs. head_and_neck

SEQ ID NO: 454014 - DNA, 195 bp, Homo sapiens; identical to SEQ ID NO: 453422
  chr7:79082826-79083021
  hypo
  anorectal vs. sarcoma

SEQ ID NO: 454015 - DNA, 1 bp, Homo sapiens
  chr7:87257895-87257896
  hypo
  anorectal vs. liver_bileduct,colorectal, bladder_and_urothelial,breast,lung
c

SEQ ID NO: 454016 - DNA, 117 bp, Homo sapiens
  chr7:101475674-101475791
  hypo
  anorectal vs. liver_bileduct,lymphoid_neoplasm
cgacatggcacatccagcgagcccactgtgtccccagcacctgcggtgcagggggctggcaccttcaggggcgggcttcgtgcagacgtccacccagtcagtccccacaggtttatc

SEQ ID NO: 454017 - DNA, 236 bp, Homo sapiens; identical to SEQ ID NO: 354028
  chr7:101475858-101476094
  hypo
  anorectal vs. liver_bileduct,lymphoid_neoplasm

SEQ ID NO: 454018 - DNA, 177 bp, Homo sapiens; identical to SEQ ID NO: 348251
  chr7:129483449-129483626
  hypo
  anorectal vs. liver_bileduct

SEQ ID NO: 454019 - DNA, 503 bp, Homo sapiens; identical to SEQ ID NO: 339660
  chr7:148480954-148481457
  hypo

SEQ ID NO: 454020 - DNA, 1 bp, Homo sapiens
  chr7:155581242-155581243
  hypo
  anorectal vs. lymphoid_neoplasm
c

SEQ ID NO: 454021 - DNA, 39 bp, Homo sapiens; identical to SEQ ID NO: 345928
  chr7:155581980-155582019
  hypo
  anorectal vs. lymphoid_neoplasm

SEQ ID NO: 454022 - DNA, 426 bp, Homo sapiens
  chr7:157890859-157891285
  hypo
  anorectal vs. pancreas_gallbladder,lymphoid_neoplasm, cervical,colorectal
tcaagacccagcgtggggcagcctctgcctggccaggactggggacctcggagaagcgctggacgcagcaagaatcaggcttcagctccgcaatgtgggcaggggacccgcaaaggatcctgcgggtgaggccaccgggggggctccctggggaggaggtggagaggtccagattcccgaaggctccgagggacgggcggcgggactcaggtttgactctgtaggaaagagggggccgccagtgtcctaaggcgggagatgcccgagggtgacgcttacccaggactgagcctggcaaagcccagccctgctcccggaatgcggagaagccgtccgtgctcagaatccgtcttccgacagcgaaggcggtggccaggagggccaggggcagggagcaggcacgggcgaggcccagctgctctgtga

SEQ ID NO: 454023 - DNA, 98 bp, Homo sapiens; identical to SEQ ID NO: 364614
  chr7:157891519-157891617
  hypo
  anorectal vs. pancreas_gallbladder,lymphoid_neoplasm, cervical,colorectal

SEQ ID NO: 454024 - DNA, 4 bp, Homo sapiens
  chr8:11550022-11550026
  hypo
cgtg

SEQ ID NO: 454025 - DNA, 252 bp, Homo sapiens; identical to SEQ ID NO: 453440
  chr8:11550368-11550620
  hypo

SEQ ID NO: 454026 - DNA, 229 bp, Homo sapiens; identical to SEQ ID NO: 364682
  chr8:21959610-21959839
  hypo
  anorectal vs. upper_gi

SEQ ID NO: 454027 - DNA, 197 bp, Homo sapiens
  chr8:23423722-23423919
  hypo
  anorectal vs. liver_bileduct,melanoma,lymphoid_neoplasm, renal,upper_gi,colorectal
cgaggcgtcaacgtcatgatcatgggtgcagggccggcccatgccatgtattttgcctgctatgaaaacatgaaaaggactttaaatgacgttttccaccaccaaggaaacagccacctagccaacggtattttgaaagcgtttgtctggagttagaaagttctcttcttcaacacgtccctccccagggtgttcct

SEQ ID NO: 454028 - DNA, 231 bp, Homo sapiens; identical to SEQ ID NO: 359092
  chr8:33372206-33372437
  hypo
  anorectal vs. pancreas_gallbladder,colorectal

SEQ ID NO: 454029 - DNA, 188 bp, Homo sapiens
  chr8:49571728-49571916
  hypo
  anorectal vs. colorectal,lymphoid_neoplasm
cgtcgtcctatcacagttaagaaagaattatttcgtgagttttacctagcagtttacataaatcagtttacagcagatttggagaaaaagaacattaaaagcagaccaggtgaacgagtttgaaacggcacacggaattggaagggagaaaaggttgtgatcactgctcaaacaagttcttccttccc

SEQ ID NO: 454030 - DNA, 6 bp, Homo sapiens
  chr8:55372563-55372569
  hypo
  anorectal vs. ovary
tgatcc

SEQ ID NO: 454031 - DNA, 117 bp, Homo sapiens; identical to SEQ ID NO: 453446
  chr8:56014011-56014128
  hypo
  anorectal vs. head_and_neck,cervical

SEQ ID NO: 454032 - DNA, 117 bp, Homo sapiens; identical to SEQ ID NO: 453446
  chr8:56014011-56014128
  hypo
  anorectal vs. head_and_neck

SEQ ID NO: 454033 - DNA, 239 bp, Homo sapiens; identical to SEQ ID NO: 453448
  chr8:60030908-60031147
  hypo
  anorectal vs. myeloid_neoplasm

SEQ ID NO: 454034 - DNA, 200 bp, Homo sapiens; identical to SEQ ID NO: 453449
  chr8:60030947-60031147
  hypo
  anorectal vs. ovary,lung

SEQ ID NO: 454035 - DNA, 115 bp, Homo sapiens; identical to SEQ ID NO: 346983
  chr8:60031791-60031906
  hypo
  anorectal vs. ovary,lung

SEQ ID NO: 454036 - DNA, 350 bp, Homo sapiens; identical to SEQ ID NO: 453451
  chr8:60031791-60032141
  hypo
  anorectal vs. ovary,uterine

SEQ ID NO: 454037 - DNA, 212 bp, Homo sapiens; identical to SEQ ID NO: 345302
  chr8:61193765-61193977
  hypo
  anorectal vs. ovary

SEQ ID NO: 454038 - DNA, 293 bp, Homo sapiens; identical to SEQ ID NO: 453456
  chr8:61193765-61194058
  hypo
  anorectal vs. upper_gi

SEQ ID NO: 454039 - DNA, 43 bp, Homo sapiens; identical to SEQ ID NO: 453462
  chr8:69242761-69242804
  hypo
  anorectal vs. lung

SEQ ID NO: 454040 - DNA, 57 bp, Homo sapiens; identical to SEQ ID NO: 453463
  chr8:69243011-69243068
  hypo
  anorectal vs. lung

SEQ ID NO: 454041 - DNA, 436 bp, Homo sapiens; identical to SEQ ID NO: 453464
  chr8:70745324-70745760
  hypo
  anorectal vs. uterine,ovary

SEQ ID NO: 454042 - DNA, 959 bp, Homo sapiens; identical to SEQ ID NO: 453465
  chr8:70745324-70746283
  hypo
  anorectal vs. head_and_neck,colorectal,uterine,sarcoma, lung,ovary

SEQ ID NO: 454043 - DNA, 146 bp, Homo sapiens
  chr8:71447942-71448088
  hypo
  anorectal vs. lymphoid_neoplasm,sarcoma, pancreas_gallbladder,melanoma
cgtggtacaagagcttgggaactgccgaacgcgggtacaagagcttgggaaccgccgaacgtgggtacaagagcttgggaaccgccgaacgcggatagaagctataacacaggcgagctggggcatgccagcgtggctgagcaggg

SEQ ID NO: 454044 - DNA, 50 bp, Homo sapiens; identical to SEQ ID NO: 354202
  chr8:71448124-71448174
  hypo
  anorectal vs. lymphoid_neoplasm,sarcoma, pancreas_gallbladder,melanoma

SEQ ID NO: 454045 - DNA, 8 bp, Homo sapiens
  chr8:72459564-72459572
  hypo
  anorectal vs. head_and_neck,cervical
cgtccccc

SEQ ID NO: 454046 - DNA, 55 bp, Homo sapiens; identical to SEQ ID NO: 346990
  chr8:72756949-72757004
  hypo
  anorectal vs. sarcoma,renal,melanoma,head_and_neck, non_cancer

SEQ ID NO: 454047 - DNA, 27 bp, Homo sapiens
  chr8:75896528-75896555
  hypo
  anorectal vs. lung,sarcoma
cgggcttgggtctcgggagcccaaagc

SEQ ID NO: 454048 - DNA, 195 bp, Homo sapiens; identical to SEQ ID NO: 453471
  chr8:77589904-77590099
  hypo
  anorectal vs. head_and_neck,melanoma

SEQ ID NO: 454049 - DNA, 44 bp, Homo sapiens
  chr8:126044399-126044443
  hypo
  anorectal vs. melanoma,lymphoid_neoplasm,colorectal, prostate,sarcoma
cgataagaggaatttggtaatgtgaggtttaagttaggttttgt

SEQ ID NO: 454050 - DNA, 30 bp, Homo sapiens
  chr8:126044563-126044593
  hypo
  anorectal vs. melanoma,lymphoid_neoplasm,colorectal, prostate,sarcoma
ttcagcagagtgagcagtcccaggacaagt

SEQ ID NO: 454051 - DNA, 327 bp, Homo sapiens; identical to SEQ ID NO: 354261
  chr8:142227279-142227606
  hypo
  anorectal vs. upper_gi,lymphoid_neoplasm

SEQ ID NO: 454052 - DNA, 934 bp, Homo sapiens; identical to SEQ ID NO: 340073
  chr8:142235190-142236124
  hypo
  anorectal vs. pancreas_gallbladder,upper_gi,colorectal, lymphoid_neoplasm

SEQ ID NO: 454053 - DNA, 231 bp, Homo sapiens; identical to SEQ ID NO: 340121
  chr8:144351704-144351935
  hypo
  anorectal vs. liver_bileduct

SEQ ID NO: 454054 - DNA, 207 bp, Homo sapiens; identical to SEQ ID NO: 348337
  chr8:144414283-144414490
  hypo
  anorectal vs. colorectal,liver_bileduct,melanoma, upper_gi,renal,breast

SEQ ID NO: 454055 - DNA, 665 bp, Homo sapiens; identical to SEQ ID NO: 340190
  chr9:34318282-34318947
  hypo
  anorectal vs. pancreas_gallbladder

SEQ ID NO: 454056 - DNA, 156 bp, Homo sapiens; identical to SEQ ID NO: 453504
  chr9:93955774-93955930
  hypo
  anorectal vs. pancreas_gallbladder

SEQ ID NO: 454057 - DNA, 268 bp, Homo sapiens; identical to SEQ ID NO: 453505
  chr9:93956177-93956445
  hypo
  anorectal vs. pancreas_gallbladder

SEQ ID NO: 454058 - DNA, 3 bp, Homo sapiens
  chr9:95417480-95417483
  hypo
  anorectal vs. upper_gi,colorectal,sarcoma,ovary,melanoma
cgc

SEQ ID NO: 454059 - DNA, 221 bp, Homo sapiens; identical to SEQ ID NO: 364982
  chr9:95417651-95417872
  hypo
  anorectal vs. upper_gi,colorectal,sarcoma,ovary,melanoma

SEQ ID NO: 454060 - DNA, 47 bp, Homo sapiens
  chr9:95484997-95485044
  hypo
  anorectal vs. pancreas_gallbladder
cgagtagtcctgcagcagacgagcttcccggaatttgtactccttga

SEQ ID NO: 454061 - DNA, 126 bp, Homo sapiens; identical to SEQ ID NO: 340300
  chr9:123176142-123176268
  hypo
  anorectal vs. upper_gi

SEQ ID NO: 454062 - DNA, 138 bp, Homo sapiens
  chr9:126348901-126349039
  hypo
  anorectal vs. liver_bileduct,cervical,head_and_neck
cgtggactcaagggccttcctgaagctcactgttcccaaggaaagaattggagcccagctcgctggacagtgcccggtcccccaaaggatcaaggcaactaggggaatgaagaaaggcaagaaaaactcaaactgggg

SEQ ID NO: 454063 - DNA, 41 bp, Homo sapiens
  chr9:126349104-126349145
  hypo
  anorectal vs. liver_bileduct,cervical,head_and_neck
taaccatgccatcagtcagggacactagcatctctgcatgg

SEQ ID NO: 454064 - DNA, 203 bp, Homo sapiens; identical to SEQ ID NO: 340387
  chr9:135781263-135781466
  hypo
  anorectal vs. colorectal,upper_gi,pancreas_gallbladder, lymphoid_neoplasm,liver_bileduct,breast

SEQ ID NO: 454065 - DNA, 99 bp, Homo sapiens
  chr9:138743599-138743698
  hypo
  anorectal vs. liver_bileduct,melanoma
cggagagatttccgtcactcatcttgaccgctatatggtcctccacgatttctcacaattatgacaaatgctgccatcacaaagcttgcgtgtgctgtc

SEQ ID NO: 454066 - DNA, 265 bp, Homo sapiens
  chr9:139110897-139111162
  hypo
  anorectal vs. lymphoid_neoplasm,liver_bileduct,upper_gi
cgatttctgaattttcttctttgtgtggcttttcaggcaagggaagcgattttttcctcacatccggcaatgacttcaaataagacgaaaagaaggcccgcagaggcttcacgctgtgagagaggggagggcaaaggtgagaagagcctcctttataaaatcctaaagtaggagccgtggcattcaggacagctctgggccacccctttcatcctttgggcatttattggggcatgggagtcagtgggaacagctgacaccccgc

SEQ ID NO: 454067 - DNA, 81 bp, Homo sapiens; identical to SEQ ID NO: 345985
  chr9:139111384-139111465
  hypo
  anorectal vs. lymphoid_neoplasm,liver_bileduct,upper_gi

SEQ ID NO: 454068 - DNA, 206 bp, Homo sapiens
  chr9:139698453-139698659
  hypo
  anorectal vs. lymphoid_neoplasm
cggggtggagaaggggtggccaggagcaacggagctgagaactcctcaagaggcaaccccactaagcgctggcaacgagagtggcgagggtgagagcagtgtctggggtgcgtgagcaggggttagcagatgacggttttagctgcccaagggcacgctggaagaggccaggttttggggaagaggatgaatctgtcttcaggcag

SEQ ID NO: 454069 - DNA, 21 bp, Homo sapiens
  chr9:139699253-139699274
  hypo
  anorectal vs. lymphoid_neoplasm
cggagaccctgaaatgtaagc

SEQ ID NO: 454070 - DNA, 154 bp, Homo sapiens; identical to SEQ ID NO: 340459
  chr9:139833922-139834076
  hypo
  anorectal vs. cervical

SEQ ID NO: 454071 - DNA, 42 bp, Homo sapiens; identical to SEQ ID NO: 340475
  chr9:140166945-140166987
  hypo
  anorectal vs. liver_bileduct,upper_gi, pancreas_gallbladder,colorectal

SEQ ID NO: 454072 - DNA, 1 bp, Homo sapiens
  chr9:140167020-140167021
  hypo
  anorectal vs. cervical
c

SEQ ID NO: 454073 - DNA, 293 bp, Homo sapiens
  chr9:140167091-140167384
  hypo
  anorectal vs. cervical
tgaaggcacctggtccctaccagcccgtgtgtgcttgccaagctgcccttgtggtgcttgtgtgtggtcggtgggcacccacccctgtgccccctgggcctgcccatgcgcctcgcctgccccatggtgtggttccccgcagagcggagaggcagtgaaggagctttactcccagctcggcgagaagctggaacagctggatcaccggaagcccagcccggcacaggctgcggagacgccggccctggagctgcccctccccagcgtgcccgcccctgccccgctctgagggc

SEQ ID NO: 454074 - DNA, 322 bp, Homo sapiens; identical to SEQ ID NO: 354452
  chr9:140167413-140167735
  hypo
  anorectal vs. cervical

SEQ ID NO: 454075 - DNA, 480 bp, Homo sapiens
  chr9:140708213-140708693
  hypo
  anorectal vs. upper_gi,lymphoid_neoplasm, pancreas_gallbladder,liver_bileduct,colorectal
cgacccaaagcagtggcaggcatctttgtgccttttttgtaacctcacactcaggggccccggtgtggcttcgtgctgggggcacaggcgagaggagcccttgcgaggcctgcaggacgacctggatccctgcacctcccagcccccggagagatgggtccagcacatgccagctttcccagcctccgagtgcatgcagcctggtgccctcactgcttgcgccttctcgagcactttccttgtggctctgcttgtgggcagctccctcctcttcccaggccgggcactgcccaggcccccccccccccccgccccccgccccacaaggtgtgtcaggctctgtgttcttgcctttcccatcgagcatctggccacaaatgcagccgccgcccagcccttcacccaccccacgtcacccactgccgcgtcgctgccctgcctgccccctgtccctctgtcagggtcctcagccagagctcc

SEQ ID NO: 454076 - DNA, 216 bp, Homo sapiens
  chr9:140708771-140708987
  hypo
  anorectal vs. upper_gi,lymphoid_neoplasm, pancreas_gallbladder,liver_bileduct,colorectal
aagcacttaccagaatcagggttaacagaactggaagacgtagttgtgactgggaggggaaatggaaggcctgtgcctgcacgtctgaccccccggcgcctctcttctcagtactgcgtgtgcatcgacgactgctcctccagcaactgcatgtgcggccagctcagcatgcgctgctggtacgacaaggtgagggcggcctcgtgtgcgtgggct

SEQ ID NO: 454077 - DNA, 26 bp, Homo sapiens
  chr9:140727446-140727472
  hypo
  anorectal vs. upper_gi,bladder_and_urothelial, pancreas_gallbladder,cervical,breast
cgcgcctttggctttgggggctgtgg

SEQ ID NO: 454078 - DNA, 15 bp, Homo sapiens
  chr9:140727511-140727526
  hypo
  anorectal vs. upper_gi,bladder_and_urothelial, pancreas_gallbladder,cervical,breast
cttgtcactgcccgc

SEQ ID NO: 454079 - DNA, 13 bp, Homo sapiens
  chr9:140727930-140727943
  hypo
  anorectal vs. upper_gi,bladder_and_urothelial, pancreas_gallbladder,cervical,breast
ctagctgccggcc

SEQ ID NO: 454080 - DNA, 80 bp, Homo sapiens; identical to SEQ ID NO: 453513
  chrX:9433633-9433713
  hypo
  anorectal vs. head_and_neck

SEQ ID NO: 454081 - DNA, 225 bp, Homo sapiens; identical to SEQ ID NO: 453522
  chrX:16730628-16730853
  hypo
  anorectal vs. head_and_neck

SEQ ID NO: 454082 - DNA, 35 bp, Homo sapiens; identical to SEQ ID NO: 345669
  chrX:16730902-16730937
  hypo
  anorectal vs. head_and_neck

SEQ ID NO: 454083 - DNA, 264 bp, Homo sapiens; identical to SEQ ID NO: 336722
  chrX:41112874-41113138
  hypo
  anorectal vs. head_and_neck

SEQ ID NO: 454084 - DNA, 97 bp, Homo sapiens; identical to SEQ ID NO: 349142
  chr1:1566979-1567076
  hyper
  bladder_and_urothelial vs. anorectal

SEQ ID NO: 454085 - DNA, 14 bp, Homo sapiens
  chr1:2375641-2375655
  hyper
  bladder_and_urothelial vs. ovary,breast,melanoma,renal, uterine,thyroid,myeloid_neoplasm,prostate,multiple_myeloma, non_cancer,sarcoma
gggggccgcccctc

SEQ ID NO: 454086 - DNA, 43 bp, Homo sapiens
  chr1:3325196-3325239
  hyper
  bladder_and_urothelial vs. colorectal,upper_gi,breast
cgtgagctggtgcctgtgttggcatgtgtgagagtgtgtgagt

SEQ ID NO: 454087 - DNA, 179 bp, Homo sapiens
  chr1:3663338-3663517
  hyper
  bladder_and_urothelial vs. ovary
cgacccccgaccgagggacccgtgggatctgcgctcaccgccctgcgagcagaggcgttcgtgtcggagcccccacacctggggagcggggagctgcggtccctggttgtcccacaggagaagggggagggaacggggcaggcggggaggatgagcgcttccgcgtgcagcgggggctg

SEQ ID NO: 454088 - DNA, 101 bp, Homo sapiens; identical to SEQ ID NO: 346306
  chr1:3663983-3664084
  hyper
  bladder_and_urothelial vs. ovary

SEQ ID NO: 454089 - DNA, 33 bp, Homo sapiens
  chr1:25255579-25255612
  hyper
  bladder_and_urothelial vs. lymphoid_neoplasm,cervical, head_and_neck
cgatcccggcctagcgccgtccggtaaaatttc

SEQ ID NO: 454090 - DNA, 7 bp, Homo sapiens
  chr1:25255934-25255941
  hyper
  bladder_and_urothelial vs. lymphoid_neoplasm,cervical, head_and_neck
agccaga

SEQ ID NO: 454091 - DNA, 807 bp, Homo sapiens; identical to SEQ ID NO: 330733
  chr1:26662538-26663345
  hyper
  bladder_and_urothelial vs. head_and_neck,breast,cervical, lung,anorectal,ovary,prostate,upper_gi,pancreas_gallbladder, uterine,renal,non_cancer,colorectal,multiple_myeloma, lymphoid_neoplasm

SEQ ID NO: 454092 - DNA, 149 bp, Homo sapiens
  chr1:29585852-29586001
  hyper
  bladder_and_urothelial vs. breast,prostate, multiple_myeloma,myeloid_neoplasm,thyroid,non_cancer, head_and_neck,uterine,renal,colorectal,upper_gi,cervical
cggtgagtcccagcccactgggggcgcaggggtaaggggtgtgggcggccgcggctcctgcctgcagggggtgcaggcccagctcacgatgcagctctaaccccgcagcaaaggccccacacttctcccgcctgggcgacgtggaggtc

SEQ ID NO: 454093 - DNA, 130 bp, Homo sapiens
  chr1:32410105-32410235
  hyper
  bladder_and_urothelial vs. upper_gi,colorectal
cggagggggcagggcgctggctccagctgtttgcatgaatcccccgcccctggcctctctgcctgtgcaggaagccctggtgtcgtaccccgagccgctgcagttcgcactctgcggcctcctcaggcac

SEQ ID NO: 454094 - DNA, 462 bp, Homo sapiens; identical to SEQ ID NO: 330784
  chr1:41832027-41832489
  hyper
  bladder_and_urothelial vs. pancreas_gallbladder, head_and_neck,ovary,cervical,breast,colorectal,lung,upper_gi, uterine,anorectal,prostate

SEQ ID NO: 454095 - DNA, 296 bp, Homo sapiens
  chr1:41848318-41848614
  hyper
  bladder_and_urothelial vs. anorectal
ccccgccccccaaccagagctgggtgccgggctgagggccgcctcccgcctccgggcgccccgtcccgtccccagggggcctctgtcttcccatcctgattcccgggtccctgcccccgactctagctccccaggaggcggccccagcccagctagggacccctctcggaggccggccgccggggaaggggagggaggggccggggcaccccactgctcctgcccacactcctgagatccacccccttctcctgggcaggaagcctgggagaggaggctgaattccaggctggctg

SEQ ID NO: 454096 - DNA, 111 bp, Homo sapiens; identical to SEQ ID NO: 369100
  chr1:41848643-41848754
  hyper
  bladder_and_urothelial vs. anorectal

SEQ ID NO: 454097 - DNA, 818 bp, Homo sapiens; identical to SEQ ID NO: 330937
  chr1:113498720-113499538
  hyper
  bladder_and_urothelial vs. upper_gi,head_and_neck

SEQ ID NO: 454098 - DNA, 84 bp, Homo sapiens
  chr1:119548975-119549059
  hyper
  bladder_and_urothelial vs. thyroid
cgtcctagctctgtctagtgaagtagagagcagaaaaaaacatctagctctatcaagttgaaaacattttcacattcaccttaa

SEQ ID NO: 454099 - DNA, 797 bp, Homo sapiens; identical to SEQ ID NO: 330959
  chr1:151020083-151020880
  hyper
  bladder_and_urothelial vs. head_and_neck,lung, pancreas_gallbladder

SEQ ID NO: 454100 - DNA, 712 bp, Homo sapiens; identical to SEQ ID NO: 349339
  chr1:161409991-161410703
  hyper
  bladder_and_urothelial vs. colorectal,upper_gi,uterine

SEQ ID NO: 454101 - DNA, 55 bp, Homo sapiens; identical to SEQ ID NO: 331013
  chr1:163378364-163378419
  hyper
  bladder_and_urothelial vs. ovary,lung,upper_gi

SEQ ID NO: 454102 - DNA, 135 bp, Homo sapiens; identical to SEQ ID NO: 349354
  chr1:171811643-171811778
  hyper
  bladder_and_urothelial vs. lung,sarcoma,ovary

SEQ ID NO: 454103 - DNA, 250 bp, Homo sapiens
  chr1:182583799-182584049
  hyper
  bladder_and_urothelial vs. cervical,ovary
cgtctccaaaaaaaaaataaaataaaataaaaggaaagtgtttgaaaagtgcttaagtgctctgaaaagtctgagatgctgtgcaaatagtgcggcattatccttatttttgttattaaaatgagcgagacttgccctgaccagcgacgaattgactcactcagttttgggggagggggcggaggagtgggaggagcgggaggagaggggccacgcttgtcttctccgagggatgggaatttccacccag

SEQ ID NO: 454104 - DNA, 40 bp, Homo sapiens; identical to SEQ ID NO: 344983
  chr1:182584613-182584653
  hyper
  bladder_and_urothelial vs. cervical,ovary

SEQ ID NO: 454105 - DNA, 38 bp, Homo sapiens; identical to SEQ ID NO: 452747
  chr1:223936543-223936581
  hyper
  bladder_and_urothelial vs. prostate

SEQ ID NO: 454106 - DNA, 35 bp, Homo sapiens
  chr1:226924738-226924773
  hyper
  bladder_and_urothelial vs. multiple_myeloma,prostate, non_cancer,myeloid_neoplasm,ovary,lymphoid_neoplasm,uterine, anorectal,cervical,melanoma
cgttctgcaactcgcgctgcaagatccgcagcttc

SEQ ID NO: 454107 - DNA, 452 bp, Homo sapiens; identical to SEQ ID NO: 344993
  chr1:226925659-226926111
  hyper
  bladder_and_urothelial vs. multiple_myeloma,ovary, prostate,non_cancer,cervical,myeloid_neoplasm,lymphoid_neoplasm, melanoma,uterine,anorectal,lung,breast,renal

SEQ ID NO: 454108 - DNA, 96 bp, Homo sapiens; identical to SEQ ID NO: 345341
  chr10:1780056-1780152
  hyper
  bladder_and_urothelial vs. anorectal

SEQ ID NO: 454109 - DNA, 118 bp, Homo sapiens
  chr10:8075813-8075931
  hyper
  bladder_and_urothelial vs. myeloid_neoplasm
cgccggcttcctttccctcccaactcccctgctctaggccactgcctctggggtggggcgccgagaaggaggccctggggacctacccccggctcttctgagccaagtgagttcccag

SEQ ID NO: 454110 - DNA, 209 bp, Homo sapiens; identical to SEQ ID NO: 452758
  chr10:17270445-17270654
  hyper
  bladder_and_urothelial vs. melanoma,sarcoma,uterine, ovary,lung,myeloid_neoplasm,multiple_myeloma,non_cancer,renal, thyroid

SEQ ID NO: 454111 - DNA, 209 bp, Homo sapiens; identical to SEQ ID NO: 452758
  chr10:17270445-17270654
  hyper
  bladder_and_urothelial vs. melanoma,uterine,sarcoma, renal,ovary,myeloid_neoplasm,multiple_myeloma,thyroid, non_cancer,lung,breast,cervical,prostate

SEQ ID NO: 454112 - DNA, 116 bp, Homo sapiens; identical to SEQ ID NO: 345346
  chr10:17272233-17272349
  hyper
  bladder_and_urothelial vs. melanoma,sarcoma,uterine, myeloid_neoplasm,ovary,multiple_myeloma,thyroid,non_cancer, renal,prostate,lung,breast,cervical

SEQ ID NO: 454113 - DNA, 369 bp, Homo sapiens
  chr10:17272233-17272602
  hyper
  bladder_and_urothelial vs. melanoma,lung, myeloid_neoplasm,sarcoma
atttcttaaaactaccactttgtgtgcagttgaaggcccttgggcacaatgagagccagtcctccaaactttcagaaagtttcctgccccttctggcaggctgccaatcaccgggcgggagaaggaaggaggggaaggcggtggagggagcgagacaaagggatggtccctcgggggcggggatggcggggctgtcctgtaggtctgtgcggccaccgtgattgcccctctgcgcggtgcccgaagtcccgctgaaacctgccgagggcagcaggtctgaaagctgcaggcgctagttgcgcggaggtggcgcagctgctctggaggcgcagagcgaatacgtggtgtttgggtgtggccgccccgccc

SEQ ID NO: 454114 - DNA, 103 bp, Homo sapiens
  chr10:22517909-22518012
  hyper
  bladder_and_urothelial vs. lymphoid_neoplasm,sarcoma, colorectal,breast,lung,cervical,non_cancer,myeloid_neoplasm, renal,uterine,thyroid,ovary,head_and_neck,prostate,upper_gi, multiple_myeloma,anorectal
cgcaaacggagatgtttacgctgacagggaacagacaaaagggcggccatgcttcaacaaaatgtaggagttttcagtttgcagcttgaacttgacactgttg

SEQ ID NO: 454115 - DNA, 61 bp, Homo sapiens
  chr10:22518450-22518511
  hyper
  bladder_and_urothelial vs. lymphoid_neoplasm,sarcoma, colorectal,breast,lung,cervical,non_cancer,myeloid_neoplasm, renal,uterine,thyroid,ovary,head_and_neck,prostate,upper_gi, multiple_myeloma,anorectal
gctcgaaccaccaacctttcggttaacagccgaacgcgctaaccgattgcgccacagagac

SEQ ID NO: 454116 - DNA, 63 bp, Homo sapiens
  chr10:22540645-22540708
  hyper
  bladder_and_urothelial vs. anorectal,ovary,sarcoma, lymphoid_neoplasm,non_cancer,myeloid_neoplasm,thyroid
cgccacagcaacgaatcactgcaaaagcaaggttctaacttaaaacaaaaagagaaagtattc

SEQ ID NO: 454117 - DNA, 32 bp, Homo sapiens; identical to SEQ ID NO: 345349
  chr10:22626103-22626135
  hyper
  bladder_and_urothelial vs. myeloid_neoplasm,prostate, uterine,non_cancer

SEQ ID NO: 454118 - DNA, 398 bp, Homo sapiens
  chr10:43892377-43892775
  hyper
  bladder_and_urothelial vs. pancreas_gallbladder
cgggcttccggggccctgagggcgagagcgagggcgacggcaaggtggggtgggggctgctccccggcccgccaagctagcgctgcctaggcgggagctcggggacccgcgggccgagcgcggctgaagggagggaagggaagaggcgctcgtaggtctgcgtccgtctccgagcgaccggggcggcggaaagggacctggggggggcggccgggactggagtggcggggccggggcgcccgcgcggcggctcaccacgccagggactggcccgtcggccccgaggaggcgcggggtccggagtccgggaagcggaggcctcgtgatccaagaccggcagccggacgtgggtcacggggtgcagaggaggaagtgccattgccgggcccgccaagatg

SEQ ID NO: 454119 - DNA, 171 bp, Homo sapiens; identical to SEQ ID NO: 347088
  chr10:43892970-43893141
  hyper
  bladder_and_urothelial vs. pancreas_gallbladder

SEQ ID NO: 454120 - DNA, 85 bp, Homo sapiens
  chr10:79396547-79396632
  hyper
  bladder_and_urothelial vs. multiple_myeloma,breast, thyroid
cgaactcatctccccaacaggttcctaaagtatgggcggatgtgctccctctcgcccaccgccaggagccgagccccggcaggtg

SEQ ID NO: 454121 - DNA, 79 bp, Homo sapiens; identical to SEQ ID NO: 287325
  chr10:94449318-94449397
  hyper
  bladder_and_urothelial vs. cervical,pancreas_gallbladder, liver_bileduct

SEQ ID NO: 454122 - DNA, 240 bp, Homo sapiens
  chr10:118891774-118892014
  hyper
  bladder_and_urothelial vs. multiple_myeloma
gctggctctttcttccttttcttcttttgtttttttatccttcaaatataagacaaaaatacacctcatttatcatcatagatatatatatttcactctcaccacataaatacaaaacatccaaatatccaaaacattcagaacaaagttagtagcctggattcagtgacacctacccgcgtttgaatcgttcattattttcttcactatttgcctagaaaaaaaaaaaagatgaaaaag

SEQ ID NO: 454123 - DNA, 833 bp, Homo sapiens
  chr10:126106668-126107501
  hyper
  bladder_and_urothelial vs. upper_gi,head_and_neck,ovary, pancreas_gallbladder,lung,breast,uterine,cervical,renal, anorectal,sarcoma
cgggaggttttcatgctgaaagtcctgttgcccccccatcccccaccatctaattaacctgcacgttactgtaaggaaggttctgcttccgtaattttctttatttcgacagaggctggagaaaaaaaatcataggctggaagaggggagcgatgggcaggccgatctgcagggcgcaggagcaggccgggaggacccagccctccaaggctgcatcagcgcccccgccgcgtgaccagggccaccggtttactgcacagctcccccgtccccagaacgcagcctccccgccaaccccaggaaccaagggtgcccaaaggcctcctacccggaaccccggggcgcctcggggtctctgggccgggtgggccgagtcctggcctccacaggccgcgagcgcagggggcggcggctccgcccggtctggcaggcggggctgccacatcctcagcctctccctgccgcccgcccgtcggccgctctgggctggaaccaggactccggcctgcaagccgtgggtcgccacgcccctgccccctgaagctgcgcgccggccggagactccagggcgcccgggtccgagccgcccgcagagtaaacgggccgctgaagcggggctcgttccccggccgaggcccagcgcgccccctcagccagcatcccccgaacccgggccgcggccaccccgcgcccgcccgcctcccccgccgctgtcagggaaccccggccagggcccgaaccagagccccaggacagcggcgcccagacggtacctgacagcgcctgaggacaaccgggtacacgcggcgtctatgaagcgcaacagtgacgcc

SEQ ID NO: 454124 - DNA, 846 bp, Homo sapiens
  chr10:126107015-126107861
  hyper
  bladder_and_urothelial vs. lung,pancreas_gallbladder, head_and_neck,upper_gi,breast,ovary,anorectal,renal,uterine, cervical,sarcoma
cggggtctctgggccgggtgggccgagtcctggcctccacaggccgcgagcgcagggggcggcggctccgcccggtctggcaggcggggctgccacatcctcagcctctccctgccgcccgcccgtcggccgctctgggctggaaccaggactccggcctgcaagccgtgggtcgccacgcccctgccccctgaagctgcgcgccggccggagactccagggcgcccgggtccgagccgcccgcagagtaaacgggccgctgaagcggggctcgttccccggccgaggcccagcgcgccccctcagccagcatcccccgaacccgggccgcggccaccccgcgcccgcccgcctcccccgccgctgtcagggaaccccggccagggcccgaaccagagccccaggacagcggcgcccagacggtacctgacagcgcctgaggacaaccgggtacacgcggcgtctatgaagcgcaacagtgacgccggagagtcactgcaacttaaaggctgattctgccccgcccccaagacaccctcgccgctcattggctggggcggagggcaggataccaatcgcgtgggtcccgtcctccgccccgccctccggccgcgcatcaaggatctttgctcctcccgcggattcgatccgcgctcgcgcctcctgagcccgccggcctgtacctgagctcaggcccctcggtcgcctcctctggcgggacgagaagagtccttgtccgcccttgctgacgagaagactgaggcccgaaaaggaaaagtctgttgggccccccactgcgcgggccgggtgtggctggaggccgagagacgtgaggctggaccgccc

SEQ ID NO: 454125 - DNA, 96 bp, Homo sapiens
  chr10:129534419-129534515
  hyper
  bladder_and_urothelial vs. melanoma
cgcacaggtgcccgactcggagtccgggaggcgggccctctttccaggtacccagcccagcgtcagcctgggtccatcctccgccaccccacagcg

SEQ ID NO: 454126 - DNA, 46 bp, Homo sapiens
  chr10:129534541-129534587
  hyper
  bladder_and_urothelial vs. melanoma
ggcagcttggggggccgggataacccgggctgcagcaaccccgggc

SEQ ID NO: 454127 - DNA, 94 bp, Homo sapiens
  chr11:829438-829532
  hyper
  bladder_and_urothelial vs. anorectal,head_and_neck, cervical
cgacgtgcagggcacggcgggctctctggatgaggaggaggaagaggaggagcgattccacactgtgctggagcagctgggggtggccccggtc

SEQ ID NO: 454128 - DNA, 87 bp, Homo sapiens
  chr11:47208495-47208582
  hyper
  bladder_and_urothelial vs. myeloid_neoplasm,thyroid, uterine,multiple_myeloma,non_cancer,upper_gi,ovary,sarcoma, cervical,lung,pancreas_gallbladder,renal,anorectal
cgtgccctaccgttccacagctgccctgctaatctggggcgccttctaaggcctgagacgaacacgcggtgggggtgggacaaaaag

SEQ ID NO: 454129 - DNA, 5 bp, Homo sapiens
  chr11:59333339-59333344
  hyper
  bladder_and_urothelial vs. upper_gi,melanoma,lung, lymphoid_neoplasm,sarcoma,renal,non_cancer
cggtc

SEQ ID NO: 454130 - DNA, 190 bp, Homo sapiens; identical to SEQ ID NO: 347158
  chr11:59333673-59333863
  hyper
  bladder_and_urothelial vs. upper_gi,melanoma,lung, lymphoid_neoplasm,sarcoma,renal,non_cancer

SEQ ID NO: 454131 - DNA, 20 bp, Homo sapiens
  chr11:60718609-60718629
  hyper
  bladder_and_urothelial vs. cervical,thyroid
cggcgacgcgggcatctctc

SEQ ID NO: 454132 - DNA, 262 bp, Homo sapiens; identical to SEQ ID NO: 334296
  chr11:65582723-65582985
  hyper
  bladder_and_urothelial vs. liver_bileduct

SEQ ID NO: 454133 - DNA, 606 bp, Homo sapiens
  chr11:68606653-68607259
  hyper
  bladder_and_urothelial vs. colorectal,anorectal
cgatcaaagtgcagaagcagcccttggcccgcgcaggctccggtttccgcctcccgccgccgctgccaccgcccctgcgcctttagatttcgggcagcaagtttaattgctcgcttggaaagcgtcctcggaagggcaccgccagcaactgcggcttcgcgccccgccccttcccccaagccccgggcggcgtcacgtgacggctgagaaaagtaggggaaaggtcagcagcagccccgcccccaggctggcgcgtcccaggcgctcggatcctgttccacccgccgtgcccacagagaccttccggagcgagttggcgcgcgtccctgtggccaccccagcgacagcgggagaaatgcaacgcacctctccgtgggaaggtcgagccctgcggtgcccagctgtggggacagctcggtgctcagtgcttctgatgacagatgctgcatccaacgagccagaaacgcaggcaccgcgctcaagagcccagggcgcgtctaaaaggggctcactgtgaagcctcagtgaaaactgacggtgtttttatgaatgagcactcggggccagggttgggtaagggcaggccctcgttccagggctccccgg

SEQ ID NO: 454134 - DNA, 457 bp, Homo sapiens
  chr11:111169516-111169973
  hyper
  bladder_and_urothelial vs. liver_bileduct
cgagttggccgctccggacgtccgcgtaccccaggcccccgcccgccctcccacgtatccactgttgtgtcctgagacacgcggtgcggaccctgcgcgcccagaagctgctacggggggagctagaggctcacagtgagcctgggacgggggcagagcgcaccgactgcactgagccgagctgtggcggtccctgcgcggaccccgaggggcgcccgctgcccgcggagtccggagccgatcggggaacggggtggtggggctgcggtaggctggagcgcggagagggcgcggcgcctgggccctgcgggcggggcacgggattccctgggtccgggctaggaagagcgcaatctcctttcctggggagaccctaactcctggaacccggcttgagggggatccctgctgtccagctgcggtccccgcagtgaccaggcgaggcgctggcatcctg

SEQ ID NO: 454135 - DNA, 17 bp, Homo sapiens
  chr11:133938756-133938773
  hyper
  bladder_and_urothelial vs. sarcoma
cgccaagttcattgaaa

SEQ ID NO: 454136 - DNA, 161 bp, Homo sapiens; identical to SEQ ID NO: 345407
  chr11:133939437-133939598
  hyper
  bladder_and_urothelial vs. sarcoma

SEQ ID NO: 454137 - DNA, 542 bp, Homo sapiens
  chr12:1739048-1739590
  hyper
  bladder_and_urothelial vs. liver_bileduct
cgggctgggggccggctcacttccgagctggctctgcatgacaaaggggaaggagcaagtgtcttctttgatctgccccctgccggccccacacacctgcctgttggtgcccccgccccagccgaggcttcgagaaggaaaatcaaaagggggcttggggaagggctgtgtcccagctctcctggaccctgctcgggccactgtcctctcctggcggccccaggacaaaaatacttcccgggctgatgacccgaagcacccgccgccccctcccggggagcctggggacgccgacgcgcgagagtggcgcagtgagccggggcgcgcggggctgcgctcgtcaggtccggggccccggggaggccgctgggggcgcgggtcacgcccagacgggggccccggaggaccgcgggggagccgcaggggccgtgtgtcccgaggcgcaggctcgctctagcagcactgacctgctgcgggtcccagggcctggggacaggggctctcgggggcggatagaggaacaggcgtgggttacagcaggc

SEQ ID NO: 454138 - DNA, 57 bp, Homo sapiens; identical to SEQ ID NO: 372897
  chr12:1739775-1739832
  hyper
  bladder_and_urothelial vs. liver_bileduct

SEQ ID NO: 454139 - DNA, 86 bp, Homo sapiens; identical to SEQ ID NO: 452813
  chr12:4377809-4377895
  hyper
  bladder_and_urothelial vs. lymphoid_neoplasm

SEQ ID NO: 454140 - DNA, 142 bp, Homo sapiens; identical to SEQ ID NO: 452814
  chr12:4378558-4378700
  hyper
  bladder_and_urothelial vs. lymphoid_neoplasm

SEQ ID NO: 454141 - DNA, 245 bp, Homo sapiens; identical to SEQ ID NO: 452815
  chr12:4378558-4378803
  hyper
  bladder_and_urothelial vs. colorectal,lymphoid_neoplasm, non_cancer,myeloid_neoplasm,thyroid

SEQ ID NO: 454142 - DNA, 88 bp, Homo sapiens
  chr12:4378715-4378803
  hyper
  bladder_and_urothelial vs. colorectal
cgggaggcaggaccccccgacgccgaccgccggacgccccccgccccaaagcttattggaaaattcacttttgtaaagcaaatgtatt

SEQ ID NO: 454143 - DNA, 202 bp, Homo sapiens
  chr12:4381232-4381434
  hyper
  bladder_and_urothelial vs. colorectal
cggtaacaatcagcgcgcagtagcaggagccccagagctattggctatgcaaatagagggaggggagacggcgccccaaactcttcctcacccttttaaagcgatatcccctcctttcccccccaccaccccttccgccccaccctcgtttaaagaggctggctccggggcctgagttaatcgcttgcacctctagtttatt

SEQ ID NO: 454144 - DNA, 51 bp, Homo sapiens
  chr12:4382915-4382966
  hyper
  bladder_and_urothelial vs. colorectal,anorectal
cgtcaccgcttcagagcggagaagagcgagcaggggagagcgagaccagtt

SEQ ID NO: 454145 - DNA, 210 bp, Homo sapiens
  chr12:4382999-4383209
  hyper
  bladder_and_urothelial vs. colorectal,anorectal
cgaggctctgctcgcccaccacccaatcctcgcctcccttctgctccaccttctctctctgccctcacctctcccccgaaaaccccctatttagccaaaggaaggaggtcaggggaacgctctcccctccccttccaaaaaacaaaaacagaaaaacctttttccaggccggggaaagcaggagggagaggggccgccgggctggccatg

SEQ ID NO: 454146 - DNA, 155 bp, Homo sapiens; identical to SEQ ID NO: 345415
  chr12:4384059-4384214
  hyper
  bladder_and_urothelial vs. colorectal,anorectal

SEQ ID NO: 454147 - DNA, 3 bp, Homo sapiens
  chr12:52401537-52401540
  hyper
  bladder_and_urothelial vs. anorectal,head_and_neck, melanoma
tcc

SEQ ID NO: 454148 - DNA, 54 bp, Homo sapiens; identical to SEQ ID NO: 347231
  chr12:52401605-52401659
  hyper
  bladder_and_urothelial vs. anorectal,head_and_neck, melanoma

SEQ ID NO: 454149 - DNA, 270 bp, Homo sapiens; identical to SEQ ID NO: 373020
  chr12:53085061-53085331
  hyper
  bladder_and_urothelial vs. colorectal

SEQ ID NO: 454150 - DNA, 725 bp, Homo sapiens; identical to SEQ ID NO: 351360
  chr12:53613775-53614500
  hyper
  bladder_and_urothelial vs. colorectal

SEQ ID NO: 454151 - DNA, 156 bp, Homo sapiens
  chr12:54338511-54338667
  hyper
  bladder_and_urothelial vs. myeloid_neoplasm, multiple_myeloma,thyroid
cgttttgcttttttaaacattgcattaaaatatcgtcttgattactgagtttttggcgccccctcccttaaacttcgagcccagtggcctcatcatagttgtggtcttgctaaaataacagaaatgaaaagcattagggagcttcactatgcagtg

SEQ ID NO: 454152 - DNA, 184 bp, Homo sapiens; identical to SEQ ID NO: 345428
  chr12:63026256-63026440
  hyper
  bladder_and_urothelial vs. pancreas_gallbladder

SEQ ID NO: 454153 - DNA, 686 bp, Homo sapiens; identical to SEQ ID NO: 334637
  chr12:104682348-104683034
  hyper
  bladder_and_urothelial vs. head_and_neck, pancreas_gallbladder,upper_gi,ovary,colorectal,lung,cervical, uterine,lymphoid_neoplasm,anorectal,multiple_myeloma

SEQ ID NO: 454154 - DNA, 508 bp, Homo sapiens
  chr12:112204412-112204920
  hyper
  bladder_and_urothelial vs. anorectal,upper_gi
gagcatcagccgggaaggtcagggtcgccctggctcgggcctgttcacattggggtcaaaggcacacattgggggctcaaccaaggcgagctgcgttcgcggggccgggtctttccgcacaggcggagggcggtggcgggcgcggaggcgtcgcgcgagccagggggcagccacgggccgggggtacctagcgccacccgcttcgcttgcatcagctgcgcgccccatcccgaggaatggtagaggcagccccgcccccggcccgcccccgcctttccattggctgccgcgcggggcggggagcggggtcggctcagtggccctgagaccctagctctgctctcggtccgctcgctgtccgctagcccgctgcgatgttgcgcgctgccgcccgcttcgggccccgcctgggccgccgcctcttgtcagccgccgccacccaggccgtgcctgcccccaaccagcagcccgaggtcttctgcaaccaggtgagcccaccggccgggct

SEQ ID NO: 454155 - DNA, 186 bp, Homo sapiens; identical to SEQ ID NO: 345433
  chr12:112204992-112205178
  hyper
  bladder_and_urothelial vs. anorectal,upper_gi

SEQ ID NO: 454156 - DNA, 479 bp, Homo sapiens; identical to SEQ ID NO: 334707
  chr12:133286733-133287212
  hyper
  bladder_and_urothelial vs. pancreas_gallbladder,upper_gi

SEQ ID NO: 454157 - DNA, 14 bp, Homo sapiens
  chr13:22243231-22243245
  hyper
  bladder_and_urothelial vs. ovary,uterine,cervical, myeloid_neoplasm,thyroid
cgcttttttcccca

SEQ ID NO: 454158 - DNA, 142 bp, Homo sapiens; identical to SEQ ID NO: 351449
  chr13:22243864-22244006
  hyper
  bladder_and_urothelial vs. ovary,uterine,cervical, myeloid_neoplasm,thyroid

SEQ ID NO: 454159 - DNA, 127 bp, Homo sapiens; identical to SEQ ID NO: 351453
  chr13:28491488-28491615
  hyper
  bladder_and_urothelial vs. upper_gi,colorectal, myeloid_neoplasm

SEQ ID NO: 454160 - DNA, 177 bp, Homo sapiens; identical to SEQ ID NO: 452839
  chr13:28491617-28491794
  hyper
  bladder_and_urothelial vs. upper_gi,colorectal, myeloid_neoplasm

SEQ ID NO: 454161 - DNA, 38 bp, Homo sapiens
  chr13:28527202-28527240
  hyper
  bladder_and_urothelial vs. liver_bileduct
cgcggcttctgtgtggcagctactgagtgcacgctcga

SEQ ID NO: 454162 - DNA, 462 bp, Homo sapiens
  chr13:28527384-28527846
  hyper
  bladder_and_urothelial vs. liver_bileduct
gagtggagtgggtggaggtgagaggggaagatgaggtgttggagaagcccggcgcacggggcctctattaatattaacttttattaagagttggcctttccccggggcttcacaaagcaggaagtcaagggcagtggaacagggaagggaactggcaggaagagaagaccttgagtaaattatttagctgtgacacgagattaagagtgaccccaccctcctccctgccccacacaccataaagtgggcccaggttggggagcagcgctccagctgccactaatcatggaagcccagaggcgaaatcagcttcccggggacccagaaaattgctggagtctggcgaggggcaaatcaggaagtgtctttgtcggagatgggacggaacccggcttcggggcgcaaccgggctctgggggagaccgcgtttgtccaggtggcaggccgcgccttctgatggct

SEQ ID NO: 454163 - DNA, 197 bp, Homo sapiens
  chr13:28527649-28527846
  hyper
  bladder_and_urothelial vs. upper_gi,pancreas_gallbladder
cgctccagctgccactaatcatggaagcccagaggcgaaatcagcttcccggggacccagaaaattgctggagtctggcgaggggcaaatcaggaagtgtctttgtcggagatgggacggaacccggcttcggggcgcaaccgggctctgggggagaccgcgtttgtccaggtggcaggccgcgccttctgatggct

SEQ ID NO: 454164 - DNA, 148 bp, Homo sapiens
  chr13:95201113-95201261
  hyper
  bladder_and_urothelial vs. ovary
cgtctagacccgtggcttgtttaaacacccgctgctaggccccactgccagagctgcctatccagggccgagaatgtgcatttctaagtagttctcaggcggtgctgatgctgcggatctggggactgtactttgagaaccaccggtg

SEQ ID NO: 454165 - DNA, 288 bp, Homo sapiens
  chr13:95201339-95201627
  hyper
  bladder_and_urothelial vs. ovary
ctggtggcgccaccccagggccagacccagggccggcctcggtgcgcctctagccagaaataaccagcactgggttccgctcaccggcaacgccaggtgggggccatctgaccactcaacagttttgctttttcttcaaattcggatacttagaaggaatgcgatgaaattgggatgaaggtgttttgctggccccgtggacagaccagacctcctcccatcggagcctcgggtctcacaccagccccccaggcggcgcgcggccccgtctcgccaccgcggcccggg

SEQ ID NO: 454166 - DNA, 230 bp, Homo sapiens
  chr13:95201662-95201892
  hyper
  bladder_and_urothelial vs. ovary
gtcccagcaccaggctccgtggcgcgcacgcgcggcagcttcttctagccccgccaggagacggcccagaagggctatgcggcgcggcctcgctcctgggggtggttaggaacgactgtttcatttcctccttcacccttcaaatctcagtttttgcttgggcttgaaggaatgggccagggtatcgtggacggagagtcttacaaaatttgagtttttgaggtcagaat

SEQ ID NO: 454167 - DNA, 8 bp, Homo sapiens
  chr13:95201912-95201920
  hyper
  bladder_and_urothelial vs. ovary
ccgggatc

SEQ ID NO: 454168 - DNA, 38 bp, Homo sapiens; identical to SEQ ID NO: 360361
  chr13:114776448-114776486
  hyper
  bladder_and_urothelial vs. cervical

SEQ ID NO: 454169 - DNA, 223 bp, Homo sapiens
  chr13:114776788-114777011
  hyper
  bladder_and_urothelial vs. pancreas_gallbladder
cgaggggacgaaatgcaggagtcacctcagagctgctgtggcttgtgcatgagctacggagaaacaggggtagcgacgcagatgggactggagggggtgggcgtcccacagtctcaggagctgctgagaccatcccgcaggcaacatccgacggcaccgcggtgacccactctctcggcccagcgtgcagggtgcatctcaaagtcgaaagcatcaggtgggg

SEQ ID NO: 454170 - DNA, 113 bp, Homo sapiens; identical to SEQ ID NO: 345453
  chr14:21101056-21101169
  hyper
  bladder_and_urothelial vs. upper_gi,uterine,melanoma

SEQ ID NO: 454171 - DNA, 8 bp, Homo sapiens
  chr14:36789340-36789348
  hyper
  bladder_and_urothelial vs. lung
cgctaagc

SEQ ID NO: 454172 - DNA, 212 bp, Homo sapiens; identical to SEQ ID NO: 360390
  chr14:36789412-36789624
  hyper
  bladder_and_urothelial vs. lung

SEQ ID NO: 454173 - DNA, 203 bp, Homo sapiens
  chr14:37135434-37135637
  hyper
  bladder_and_urothelial vs. head_and_neck
cgtgggtcagagaatttggaaaggcctactctgaggggagtaaaacttcaccaggccctgggctggaagcacaggaggtcgcggctgggcccagcgccctcgggaggccaagggcagggagccgacccaaggtctaagccctccagctctccgtcgcgggtttgggtcccgtctcaagagtggggcgcgcgggctgggcctcc

SEQ ID NO: 454174 - DNA, 10 bp, Homo sapiens
  chr14:37135775-37135785
  hyper
  bladder_and_urothelial vs. head_and_neck
agccctggag

SEQ ID NO: 454175 - DNA, 167 bp, Homo sapiens; identical to SEQ ID NO: 345459
  chr14:61104864-61105031
  hyper
  bladder_and_urothelial vs. myeloid_neoplasm,non_cancer, uterine

SEQ ID NO: 454176 - DNA, 69 bp, Homo sapiens
  chr14:61109043-61109112
  hyper
  bladder_and_urothelial vs. myeloid_neoplasm
cgggcaggaggcgcaacgcgctgccagggcggctttatcctgccgccacagggcggggaccagcccggc

SEQ ID NO: 454177 - DNA, 9 bp, Homo sapiens
  chr14:70654358-70654367
  hyper
  bladder_and_urothelial vs. multiple_myeloma
cgcgcgcgc

SEQ ID NO: 454178 - DNA, 137 bp, Homo sapiens
  chr14:77591037-77591174
  hyper
  bladder_and_urothelial vs. ovary
cgggagctcaggaatggtcgctattgtgacaaatagaaaacccgccaggagacagagaggaggtgggtccctggaccgcggtggcacatgagggctaagaacctcccaggaggggctgggctcggagcgcgctctcg

SEQ ID NO: 454179 - DNA, 95 bp, Homo sapiens; identical to SEQ ID NO: 360499
  chr14:77591751-77591846
  hyper
  bladder_and_urothelial vs. ovary

SEQ ID NO: 454180 - DNA, 40 bp, Homo sapiens
  chr14:90849401-90849441
  hyper
  bladder_and_urothelial vs. anorectal,upper_gi, pancreas_gallbladder
cgacccgccgtagaggaaaaggaaaccccaaacaaaactc

SEQ ID NO: 454181 - DNA, 383 bp, Homo sapiens
  chr14:90849476-90849859
  hyper
  bladder_and_urothelial vs. anorectal,upper_gi, pancreas_gallbladder
cgccaagaccccttccgtccggggctgtccgcgctgccactagtaaagatggcggccataggcggagccgctcactccgaaggccgcaggctaccctgccggccacgaccattcacgcggagccctccacgcccttcgcggcttgacgcattgcaggtgcagcgcgaccaatcagacggcgcggctcttttcggccaaccactgcagggtcgcgccggcctatcagagcgtccttgtcaaactgaacgaggaaagaagcctcagcagcgccaactaagcaaccggctacagaccgcgttccggtgcgtgtgtgacgacaccgccgtgtgctcctccgctgggagatatagtgccctcgcccttgcctcgccccgcccgcgagc

SEQ ID NO: 454182 - DNA, 54 bp, Homo sapiens
  chr14:90849897-90849951
  hyper
  bladder_and_urothelial vs. anorectal,upper_gi, pancreas_gallbladder
cgcttgacgggcggtggttcccccgagacagaaacttgactgaaaaataatacc

SEQ ID NO: 454183 - DNA, 137 bp, Homo sapiens
  chr14:90849722-90849859
  hyper
  bladder_and_urothelial vs. anorectal,upper_gi, pancreas_gallbladder
cgaggaaagaagcctcagcagcgccaactaagcaaccggctacagaccgcgttccggtgcgtgtgtgacgacaccgccgtgtgctcctccgctgggagatatagtgccctcgcccttgcctcgccccgcccgcgagc

SEQ ID NO: 454184 - DNA, 54 bp, Homo sapiens; identical to SEQ ID NO: 454182
  chr14:90849897-90849951
  hyper
  bladder_and_urothelial vs. anorectal,upper_gi, pancreas_gallbladder

SEQ ID NO: 454185 - DNA, 67 bp, Homo sapiens; identical to SEQ ID NO: 351606
  chr14:90850476-90850543
  hyper
  bladder_and_urothelial vs. anorectal,upper_gi, pancreas_gallbladder

SEQ ID NO: 454186 - DNA, 7 bp, Homo sapiens
  chr14:103745232-103745239
  hyper
  bladder_and_urothelial vs. anorectal,myeloid_neoplasm, cervical,prostate,multiple_myeloma,thyroid
cggaccc

SEQ ID NO: 454187 - DNA, 8 bp, Homo sapiens
  chr14:103745292-103745300
  hyper
  bladder_and_urothelial vs. anorectal,myeloid_neoplasm, cervical,prostate,multiple_myeloma,thyroid
cgcgggtc

SEQ ID NO: 454188 - DNA, 86 bp, Homo sapiens
  chr14:103745819-103745905
  hyper
  bladder_and_urothelial vs. anorectal,myeloid_neoplasm, cervical,prostate,multiple_myeloma,thyroid
ggccgccgagcaagcgcctgcgccggccgtgggaacccggggccgtcccgcgggtgctggtgggcacccaggccgacccggacgac

SEQ ID NO: 454189 - DNA, 269 bp, Homo sapiens
  chr14:103988427-103988696
  hyper
  bladder_and_urothelial vs. head_and_neck,lung
cgatgatggggtcgaagagatccttgaacacttcgtaggactcctcgtcgcccgccacgcagcccacggtcatgatgtacgggtggcctgggggagggggcgcgggacggggacagtgacgtcactgccgggcccgagcgcgctgctgaggaccctgcggctgcgcggggggagggggggccgggaccccggccccgaggggtcgcgtacccgggttgtccacgcctgtctggatgacgtcgtccagcgtgaagccgctcggcgtgctc

SEQ ID NO: 454190 - DNA, 419 bp, Homo sapiens
  chr14:103988736-103989155
  hyper
  bladder_and_urothelial vs. head_and_neck,lung
tggccatgtggttgttgtgggcgctcaggtcggggaactcgtcctcggccgggaagcgcagcttcagtgcgttgtggctgttggagaagggcatggcggcggcgggctgcggggagacgcggggtcagaggggaccggcacgccggggttcccgggctcccgcgtaccactcaggcccccgccgccgggccccccggcgccccccgggacgcggccaaggtcagcggggtccgcagcgcgcgcggggagcgccatcatcgccggggacccccggccggtccggcgcgcgctccaggcgacgcgccccctttgcacgcagcgcccctagcccgggcgcggacgcccccggcccccgggcccactcaccgggcggccgggcgggggcgggggcgctccgtccgtcggcagctcccggagcg

SEQ ID NO: 454191 - DNA, 323 bp, Homo sapiens
  chr14:103988832-103989155
  hyper
  bladder_and_urothelial vs. head_and_neck
cggcggcgggctgcggggagacgcggggtcagaggggaccggcacgccggggttcccgggctcccgcgtaccactcaggcccccgccgccgggccccccggcgccccccgggacgcggccaaggtcagcggggtccgcagcgcgcgcggggagcgccatcatcgccggggacccccggccggtccggcgcgcgctccaggcgacgcgccccctttgcacgcagcgcccctagcccgggcgcggacgcccccggcccccgggcccactcaccgggcggccgggcgggggcgggggcgctccgtccgtcggcagctcccggagcg

SEQ ID NO: 454192 - DNA, 124 bp, Homo sapiens; identical to SEQ ID NO: 373565
  chr14:103989597-103989721
  hyper
  bladder_and_urothelial vs. head_and_neck

SEQ ID NO: 454193 - DNA, 78 bp, Homo sapiens; identical to SEQ ID NO: 345463
  chr14:105512395-105512473
  hyper
  bladder_and_urothelial vs. head_and_neck

SEQ ID NO: 454194 - DNA, 2 bp, Homo sapiens
  chr15:45427859-45427861
  hyper
  bladder_and_urothelial vs. multiple_myeloma,colorectal
cc

SEQ ID NO: 454195 - DNA, 205 bp, Homo sapiens; identical to SEQ ID NO: 360624
  chr15:45479833-45480038
  hyper
  bladder_and_urothelial vs. ovary

SEQ ID NO: 454196 - DNA, 76 bp, Homo sapiens; identical to SEQ ID NO: 452900
  chr15:60289235-60289311
  hyper
  bladder_and_urothelial vs. uterine,ovary

SEQ ID NO: 454197 - DNA, 15 bp, Homo sapiens
  chr15:60289626-60289641
  hyper
  bladder_and_urothelial vs. uterine,ovary
aactcagcgggggac

SEQ ID NO: 454198 - DNA, 115 bp, Homo sapiens
  chr15:76632803-76632918
  hyper
  bladder_and_urothelial vs. myeloid_neoplasm
ggtcatccgcgtctggttccagaacaagcgctgcaaggacaagaagaaatccattctcatgaagcagctgcagcagcagcagcacagcgacaagacggtgagcagccgctgggcc

SEQ ID NO: 454199 - DNA, 368 bp, Homo sapiens
  chr15:76632803-76633171
  hyper
  bladder_and_urothelial vs. uterine
ggtcatccgcgtctggttccagaacaagcgctgcaaggacaagaagaaatccattctcatgaagcagctgcagcagcagcagcacagcgacaagacggtgagcagccgctgggccggaggctcgagtcgggtgggggctgcgcttccgccgcggtatctgcgtgcccttttctgggcgagccctgggagatccagggagaactgggcgctccagatggtgtatgtctgtaccttcacagcaaggcttcccttggatttgaggcttcctattttgtctgggatcggggtttctccttgtcccagtggcagccccgcgttgcgggttccgggcgctgcgcggagcccaaggctgcatggcagtgtgcagc

SEQ ID NO: 454200 - DNA, 158 bp, Homo sapiens; identical to SEQ ID NO: 373744
  chr15:76633206-76633364
  hyper
  bladder_and_urothelial vs. uterine

SEQ ID NO: 454201 - DNA, 847 bp, Homo sapiens; identical to SEQ ID NO: 347352
  chr15:80215312-80216159
  hyper
  bladder_and_urothelial vs. lung,pancreas_gallbladder, upper_gi,liver_bileduct,head_and_neck,colorectal,breast, anorectal,ovary,lymphoid_neoplasm,prostate

SEQ ID NO: 454202 - DNA, 839 bp, Homo sapiens
  chr15:80215691-80216530
  hyper
  bladder_and_urothelial vs. lung,upper_gi, pancreas_gallbladder,liver_bileduct,head_and_neck,ovary,breast, cervical
cggcgaaccgcgatggagccggggcccagcacagcgcgagcggctcctcggctgttcgtgctgcttccccagcttcttcaccggcacctgcagcttccgcacctcctggtccgcgttcacgttagagttaacgtcctccatcccggccccgctgcctccgccgcccgcggccctctcgctctcgcagcaacaagggaagagccggaggaaagaggcgtccacgccgctcactccagccgaggcccccgcatatagcagggccaggccccgtcgccagggttcccccagcgcgggtcccgaagcaccgctggccacagatgaaccgcctcctcagcgcaggtccgggattcggggaggcagcgccaatatccggtctctgcagccatcttccctccgtccctccgcccaccgagggtcggccctgtaggtgacctcagagcgtcggggatgggcgtggccccgtcgggcgctaagaagacctagcgcagagaggaccgccgagctcccgacggggcggggccaggtgtgtgaggggcggggattggacccggaggggcgtgtctggactgccggcggaagtggaacgcggcctgacctgcgacggaaagccactgcaagcccggaggcgaacagaaggcattccgcgagccgggctgagttggtgaacacggtcctcgttcaccccgcctattggtctgggcgtgtggggtattctccacccacttatacggcgtgtgggaccgacgggcccgtcctgcccggctccggtccggatctcgagtaggcgctcaatgggattcggggagacgtagtttactttgttcagcaaatatttaacc

SEQ ID NO: 454203 - DNA, 273 bp, Homo sapiens
  chr15:90319583-90319856
  hyper
  bladder_and_urothelial vs. cervical
cggccatggcccagtcgcctcctccgcagagcctcctcggccacgaccactggatcttcgcccagggctggggctgggccggccactgggactccacgtccccggcctcctcctccgattcgtcgggttcgtgcccctgcgacggcgcccgcggactcccgcagccacagcctccgagctgcagctcccgagccgcagaggcagccgcgacgacgcccagacgagcgcgcaccggaccagcgggcggacagcggcagagcgccagcgagcggg

SEQ ID NO: 454204 - DNA, 4 bp, Homo sapiens
  chr15:90320114-90320118
  hyper
  bladder_and_urothelial vs. cervical
aggc

SEQ ID NO: 454205 - DNA, 10 bp, Homo sapiens
  chr15:96883789-96883799
  hyper
  bladder_and_urothelial vs. head_and_neck, pancreas_gallbladder
cgagcgcgtt

SEQ ID NO: 454206 - DNA, 598 bp, Homo sapiens
  chr15:96883828-96884426
  hyper
  bladder_and_urothelial vs. head_and_neck, pancreas_gallbladder
agctgctaaacatggcgactctttccctttaagtgtctctttttccttgctgggtttttttttttttttttttttcatctgatctgagctcgctttatttcttttcccaaccccgctccccctcctcctcgtggcgctcgggggtgtgagagaacccagttagacgcgaaatgcaacaatagtgcaaggagagagaggggcgctcgctgcttctcgccactttcaaacaaacctgggggaagattgagcccgggggggattccagcctgctcgctcggctcgcggtcgccctgcctcggcctttcaccattagctctccctgggccgcgaggagctggggctcaaagttagcgggcgacgtccgaggcttagcctctagccggctgcagggacgggggcctggagttggcagctgctacgggaaagtgcctgccccccagcccccgcccccacttacgtgcggcagaattccgccagcgccccgggaaagtccggggtgccgggcgcgcggagctgcactcctgggatgtgcattaagcggcgacaggcggggggggcgagggcgggggcggggggcggtcagggggagctcgagcgt

SEQ ID NO: 454207 - DNA, 157 bp, Homo sapiens; identical to SEQ ID NO: 360748
  chr15:96884499-96884656
  hyper
  bladder_and_urothelial vs. head_and_neck, pancreas_gallbladder

SEQ ID NO: 454208 - DNA, 18 bp, Homo sapiens
  chr16:3234164-3234182
  hyper
  bladder_and_urothelial vs. thyroid,multiple_myeloma
cgcacccaaagcgagaat

SEQ ID NO: 454209 - DNA, 50 bp, Homo sapiens; identical to SEQ ID NO: 452914
  chr16:3238043-3238093
  hyper
  bladder_and_urothelial vs. non_cancer,thyroid, multiple_myeloma,uterine

SEQ ID NO: 454210 - DNA, 107 bp, Homo sapiens
  chr16:54966659-54966766
  hyper
  bladder_and_urothelial vs. breast
cgcgccggcgcctcaagaaagagaataaaatgacgtggacgccgcggaaccgcagcgaggacgaggaagaggaggagaacattgacctggagaagaacgacgaggac

SEQ ID NO: 454211 - DNA, 107 bp, Homo sapiens; identical to SEQ ID NO: 454210
  chr16:54966659-54966766
  hyper
  bladder_and_urothelial vs. cervical

SEQ ID NO: 454212 - DNA, 8 bp, Homo sapiens
  chr16:54967414-54967422
  hyper
  bladder_and_urothelial vs. cervical
cgtgtccc

SEQ ID NO: 454213 - DNA, 131 bp, Homo sapiens
  chr16:67189038-67189169
  hyper
  bladder_and_urothelial vs. ovary,uterine,prostate,breast, renal,lung,thyroid,myeloid_neoplasm,non_cancer, pancreas_gallbladder,cervical,upper_gi,liver_bileduct,sarcoma
cggcggcggcggcggcttcacctccgacagagagggcaccgggggctgcaagggggccgaagcgacctccccgtcgccaccccgggcccccgagccgcacttcagatttcgcagcgcatcctccagctcag

SEQ ID NO: 454214 - DNA, 377 bp, Homo sapiens; identical to SEQ ID NO: 345494
  chr16:67189259-67189636
  hyper
  bladder_and_urothelial vs. ovary,uterine,prostate,breast, renal,lung,thyroid,myeloid_neoplasm,non_cancer, pancreas_gallbladder,cervical,upper_gi,liver_bileduct,sarcoma

SEQ ID NO: 454215 - DNA, 271 bp, Homo sapiens
  chr16:67198282-67198553
  hyper
  bladder_and_urothelial vs. anorectal
ccccttcctatctgcttgccctgcctggggcttcactgtgcctctggccattaccttctaggacttgcccagcccacaccaggtcgcgcaccggcgatttctcctgtagaacaaagaaggaaatagagggaccgagaggggtgggactcgaacccaagtctcccactcatctcaccccaccccaccccactccaccccaccccacccctccactccactccactccacacatcccatccagccagccttttctgcctgctggtgcctcggc

SEQ ID NO: 454216 - DNA, 49 bp, Homo sapiens; identical to SEQ ID NO: 452920
  chr16:77822069-77822118
  hyper
  bladder_and_urothelial vs. sarcoma

SEQ ID NO: 454217 - DNA, 178 bp, Homo sapiens; identical to SEQ ID NO: 452923
  chr16:85932121-85932299
  hyper
  bladder_and_urothelial vs. colorectal,upper_gi,thyroid, non_cancer,lymphoid_neoplasm,pancreas_gallbladder, multiple_myeloma

SEQ ID NO: 454218 - DNA, 71 bp, Homo sapiens
  chr17:3908060-3908131
  hyper
  bladder_and_urothelial vs. upper_gi
cgccgggacgcggcggctctggctcggcagcgccacccggtggccggagacagaggcggccgggccgagcc

SEQ ID NO: 454219 - DNA, 244 bp, Homo sapiens; identical to SEQ ID NO: 374016
  chr17:4545056-4545300
  hyper
  bladder_and_urothelial vs. anorectal

SEQ ID NO: 454220 - DNA, 657 bp, Homo sapiens
  chr17:7760506-7761163
  hyper
  bladder_and_urothelial vs. upper_gi,head_and_neck,lung, pancreas_gallbladder,liver_bileduct,colorectal,cervical
cgtccgaatcctgcgcggggtgtaacaagcgctcagaccgcgcagcccaggctgcccgcccgcggaaccacagctcccggcagcccgcggggcactcacacaaagcccagaggctgccgggagctgcagttccccaccccctccatcttgctgcttgactgcccctcagtcccagaaccagagcccgtgctaaccccagcactggagctgctctgacgccgactgcaacagccattctcttctcgtagcagcatggtcggtccagctccggccatttgcccggaggcctcctctgggcctttcaacttcctaagcacctttcaggttgggtggtccgagatctcgcgagcgctcccgacctctttcctttcgcgagatcccctctcctccccctcctagtctcctcggcaacggcacagatctcgcgagcttctcctacttctctagcgctgtggctcactgaagcgtactacgccggatgtcttaagatatcgcgagacctttacctctggtttcttacacatcctttagaaactggaatttagcgagaatacattctttcatactgcctcctcccttgtttttctgtctcagagagatagtctgtcctaaatatcccatgtagcccaggccactgaattaaaacggagcgtattc

SEQ ID NO: 454221 - DNA, 81 bp, Homo sapiens
  chr17:7761197-7761278
  hyper
  bladder_and_urothelial vs. upper_gi,head_and_neck,lung, pancreas_gallbladder,liver_bileduct,colorectal,cervical
cgcaactcaattacttgatccttatatgccccacgcgggactcatactacgtttcccgtgaacacgtgcagtccaaacccc

SEQ ID NO: 454222 - DNA, 322 bp, Homo sapiens
  chr17:7760841-7761163
  hyper
  bladder_and_urothelial vs. upper_gi,head_and_neck,lung, pancreas_gallbladder,colorectal
cgagatctcgcgagcgctcccgacctctttcctttcgcgagatcccctctcctccccctcctagtctcctcggcaacggcacagatctcgcgagcttctcctacttctctagcgctgtggctcactgaagcgtactacgccggatgtcttaagatatcgcgagacctttacctctggtttcttacacatcctttagaaactggaatttagcgagaatacattctttcatactgcctcctcccttgtttttctgtctcagagagatagtctgtcctaaatatcccatgtagcccaggccactgaattaaaacggagcgtattc

SEQ ID NO: 454223 - DNA, 392 bp, Homo sapiens; identical to SEQ ID NO: 351880
  chr17:7761197-7761589
  hyper
  bladder_and_urothelial vs. upper_gi,head_and_neck,lung, pancreas_gallbladder,colorectal

SEQ ID NO: 454224 - DNA, 23 bp, Homo sapiens
  chr17:8055144-8055167
  hyper
  bladder_and_urothelial vs. renal,cervical,melanoma, colorectal,non_cancer,lung,lymphoid_neoplasm,anorectal,sarcoma, multiple_myeloma,upper_gi,prostate,breast,ovary, myeloid_neoplasm,thyroid,uterine,pancreas_gallbladder
cgtccaaccacacccctactact

SEQ ID NO: 454225 - DNA, 69 bp, Homo sapiens; identical to SEQ ID NO: 345505
  chr17:8055823-8055892
  hyper
  bladder_and_urothelial vs. renal,cervical,melanoma, colorectal,non_cancer,lung,lymphoid_neoplasm,anorectal,sarcoma, multiple_myeloma,upper_gi,prostate,breast,ovary, myeloid_neoplasm,thyroid,uterine,pancreas_gallbladder

SEQ ID NO: 454226 - DNA, 174 bp, Homo sapiens
  chr17:10632714-10632888
  hyper
  bladder_and_urothelial vs. anorectal,cervical,ovary, sarcoma,uterine,melanoma,myeloid_neoplasm
cgactaaaaagtttaatgatgctataaagggttttggtcggcttcgtctcctaggccctgagatatgttcagtgtcgtccgcgggccggacgttaacgcaggagccagggccgcttcttctgaggtcccctgggaagttccacgcgcggaaccagccccttccagggtgtgagc

SEQ ID NO: 454227 - DNA, 245 bp, Homo sapiens; identical to SEQ ID NO: 351891
  chr17:10633350-10633595
  hyper
  bladder_and_urothelial vs. anorectal,cervical,ovary, sarcoma,uterine,melanoma,myeloid_neoplasm

SEQ ID NO: 454228 - DNA, 827 bp, Homo sapiens
  chr17:17685255-17686082
  hyper
  bladder_and_urothelial vs. head_and_neck,lung,ovary, breast,uterine,cervical,pancreas_gallbladder,multiple_myeloma, anorectal,liver_bileduct,colorectal,sarcoma,upper_gi,prostate, non_cancer,thyroid,myeloid_neoplasm,renal
cggggccccgggccggccgccccctttttgcggggggagagcaggagccgcctctcgcagccactctgcgcgcggggtgggagggagagagggaggcgaagggacgacagcgccgggctccccgcccccatcccacccggttccaatatttcgcagaaaggcacgcggctcctaatcggtcttttccaggctgagatttagccgtgcgatgcccgcgcaggggcgggggccgcgggccaggggaggcgctcagagtccggagccgccgagcgaggtgaggagcccgcgtcctcggctggtggagcgggcgggcgggcgcgcaaacccgagaggcagatatagaaaggggggcaggttaaaaataaccctctccggctgggaagctcgcgcgcgctctctcgcctcgttcggtgccagaggactccaggggaggtggcgttggggagggcagagcgggattccccctcctccgccgggcggggtgcccgcctgcgcgccgcggttgcacgtgtgcggggccgcgcgcccgggccccctctgcacccggtcggtgggtgccccctccccaggaccgggcgcatctggcagtggccccccgcccgcagccttgcgcggctggagggaagcgctccattattcattatttacgagcgttaataggtttgagccacgggggcggggggttgggggggcgacgaggacccagtggggaccgaagcattagaagaagggatagggagggagggggaagggcgggggcggggctgtgccgcggcctggaggaagaggtctcggcctggggcccggcgagccgggcgcacctctcc

SEQ ID NO: 454229 - DNA, 960 bp, Homo sapiens
  chr17:17685627-17686587
  hyper
  bladder_and_urothelial vs. lung,head_and_neck,breast, pancreas_gallbladder,ovary,uterine,liver_bileduct, multiple_myeloma,anorectal,prostate,cervical,upper_gi, non_cancer,myeloid_neoplasm,thyroid,colorectal,sarcoma,renal,
  CONT. FROM ABOVE: lymphoid_neoplasm
cggctgggaagctcgcgcgcgctctctcgcctcgttcggtgccagaggactccaggggaggtggcgttggggagggcagagcgggattccccctcctccgccgggcggggtgcccgcctgcgcgccgcggttgcacgtgtgcggggccgcgcgcccgggccccctctgcacccggtcggtgggtgccccctccccaggaccgggcgcatctggcagtggccccccgcccgcagccttgcgcggctggagggaagcgctccattattcattatttacgagcgttaataggtttgagccacgggggcggggggttgggggggcgacgaggacccagtggggaccgaagcattagaagaagggatagggagggagggggaagggcgggggcggggctgtgccgcggcctggaggaagaggtctcggcctggggcccggcgagccgggcgcacctctccgtcaggtttctccacaccgccggccgtcgaggctgctcagggcgccaagagggcagcacgggccttagattttgctctcggcctctgtccttcgcgtcctcgcccttaccgaggcgtggggagggagctgcggaggccgtacgccccgccctgcgcgccccttgccgccgccgcgtccccgcggcagccccggcctcatttatcatcatctttggtcaagtggagtgtgcaaggaacagctgcttcactcggctgacttcgagggcggctacgggagaatcagggagatgaatgatgggggctggtggcagccccccgcggtccccgcgcaggcgagagggaggcggggacgtccagggccgcctccgcctcatggcgagtgcagcgcccccttcctctctcctggcgcctgcagcgaccggggaccgggggaccggggcaccgaggaccgggcccgccccgggaggggactgggcgcggggacgggggggcgcccttcgccggc

SEQ ID NO: 454230 - DNA, 911 bp, Homo sapiens
  chr17:17686099-17687010
  hyper
  bladder_and_urothelial vs. ovary,anorectal, multiple_myeloma,uterine,lung,upper_gi,breast,prostate,cervical, head_and_neck,pancreas_gallbladder,non_cancer,myeloid_neoplasm, lymphoid_neoplasm,thyroid,colorectal,renal,liver_bileduct,
  CONT. FROM ABOVE: sarcoma
cgccggccgtcgaggctgctcagggcgccaagagggcagcacgggccttagattttgctctcggcctctgtccttcgcgtcctcgcccttaccgaggcgtggggagggagctgcggaggccgtacgccccgccctgcgcgccccttgccgccgccgcgtccccgcggcagccccggcctcatttatcatcatctttggtcaagtggagtgtgcaaggaacagctgcttcactcggctgacttcgagggcggctacgggagaatcagggagatgaatgatgggggctggtggcagccccccgcggtccccgcgcaggcgagagggaggcggggacgtccagggccgcctccgcctcatggcgagtgcagcgcccccttcctctctcctggcgcctgcagcgaccggggaccgggggaccggggcaccgaggaccgggcccgccccgggaggggactgggcgcggggacgggggggcgcccttcgccggcggagaactggcgggcgcgctgccggcagagcccgaggttgccgtgaccttgctggggtcagcgggctgggctgcggaggcggcggcgcggcgtctttggtgcgctttccggattggcgcagaggccgggaaacaaggcgggggcgggcgggggaacacaaatagaaggtgaaattttacctgcccctgagggagtcctgcggattttctccggcagcagcaggcgctctgcctttgtcttacacggctgaaacatctgttgcagaggggcggagaggccgcaacaacccccacacaccctgcgctgctccccgtccccctctgccccagccgggctgcaggactccaggcgccgcgttaaccctgctcgcgctggggcgcgcgcccgcactcgctgccgcagtccagcgcctcgcgtggggct

SEQ ID NO: 454231 - DNA, 14 bp, Homo sapiens
  chr17:17687055-17687069
  hyper
  bladder_and_urothelial vs. ovary,anorectal, multiple_myeloma,uterine,lung,upper_gi,breast,prostate,cervical, head_and_neck,pancreas_gallbladder,non_cancer,myeloid_neoplasm, lymphoid_neoplasm,thyroid,colorectal,renal,liver_bileduct,
  CONT. FROM ABOVE: sarcoma
cccccctccacctc

SEQ ID NO: 454232 - DNA, 413 bp, Homo sapiens
  chr17:17686597-17687010
  hyper
  bladder_and_urothelial vs. ovary,uterine,lung, multiple_myeloma,cervical,anorectal,head_and_neck,breast, pancreas_gallbladder,upper_gi,prostate,non_cancer, myeloid_neoplasm,lymphoid_neoplasm,thyroid,colorectal
cgggcgcgctgccggcagagcccgaggttgccgtgaccttgctggggtcagcgggctgggctgcggaggcggcggcgcggcgtctttggtgcgctttccggattggcgcagaggccgggaaacaaggcgggggcgggcgggggaacacaaatagaaggtgaaattttacctgcccctgagggagtcctgcggattttctccggcagcagcaggcgctctgcctttgtcttacacggctgaaacatctgttgcagaggggcggagaggccgcaacaacccccacacaccctgcgctgctccccgtccccctctgccccagccgggctgcaggactccaggcgccgcgttaaccctgctcgcgctggggcgcgcgcccgcactcgctgccgcagtccagcgcctcgcgtggggct

SEQ ID NO: 454233 - DNA, 367 bp, Homo sapiens; identical to SEQ ID NO: 345511
  chr17:17687055-17687422
  hyper
  bladder_and_urothelial vs. ovary,uterine,lung, multiple_myeloma,cervical,anorectal,head_and_neck,breast, pancreas_gallbladder,upper_gi,prostate,non_cancer, myeloid_neoplasm,lymphoid_neoplasm,thyroid,colorectal

SEQ ID NO: 454234 - DNA, 53 bp, Homo sapiens; identical to SEQ ID NO: 347416
  chr17:27940911-27940964
  hyper
  bladder_and_urothelial vs. cervical,anorectal, multiple_myeloma

SEQ ID NO: 454235 - DNA, 98 bp, Homo sapiens
  chr17:46670752-46670850
  hyper
  bladder_and_urothelial vs. breast,uterine,renal, myeloid_neoplasm,thyroid,non_cancer,multiple_myeloma, lymphoid_neoplasm,prostate,lung
cgggcgaggacagggagcagctcgaagccgcttgcctgaagcggggctcctgggcgggcgcggggaaggcgcgcgagctctcgcccaccgccccaaag

SEQ ID NO: 454236 - DNA, 197 bp, Homo sapiens; identical to SEQ ID NO: 345532
  chr17:48619736-48619933
  hyper
  bladder_and_urothelial vs. lymphoid_neoplasm,melanoma, multiple_myeloma,sarcoma,colorectal,myeloid_neoplasm,thyroid, liver_bileduct,upper_gi,renal,non_cancer,pancreas_gallbladder, uterine,prostate,lung,head_and_neck,cervical,breast

SEQ ID NO: 454237 - DNA, 112 bp, Homo sapiens
  chr17:61777761-61777873
  hyper
  bladder_and_urothelial vs. anorectal,cervical
cggcgtggggaagcaacggtggcagggacaggatggaagggccgcgctccgcatcctactgggaggggacgagttcaggctgcggcggctgcggtcgcgggacactgggcgc

SEQ ID NO: 454238 - DNA, 76 bp, Homo sapiens; identical to SEQ ID NO: 345537
  chr17:61778423-61778499
  hyper
  bladder_and_urothelial vs. anorectal,cervical

SEQ ID NO: 454239 - DNA, 205 bp, Homo sapiens
  chr17:68164928-68165133
  hyper
  bladder_and_urothelial vs. anorectal,head_and_neck, colorectal,cervical
tggagagactgagggcggacaaggcgagagggaacgagccgtccacccttcggagaagcctaggcgccttgtaagtaattcgcgaacagtcgggagaacaaacagccaagcggcgctgcagtggccgcacttgcgcgcgtctcaatcctgggggctctgcgcgcccgccccagtccctcgccccattgactcagtggcttctccg

SEQ ID NO: 454240 - DNA, 81 bp, Homo sapiens
  chr17:73584287-73584368
  hyper
  bladder_and_urothelial vs. cervical
ggcggccgagcctgccaccgccgggggccagggaacccctggtggccgcaggaagcccactgcagaggggaacggcggctg

SEQ ID NO: 454241 - DNA, 170 bp, Homo sapiens; identical to SEQ ID NO: 352021
  chr17:73584951-73585121
  hyper
  bladder_and_urothelial vs. cervical

SEQ ID NO: 454242 - DNA, 28 bp, Homo sapiens
  chr17:75368688-75368716
  hyper
  bladder_and_urothelial vs. ovary,uterine,breast,thyroid, myeloid_neoplasm,non_cancer,sarcoma,renal,prostate, multiple_myeloma,cervical,pancreas_gallbladder
cgtcgcccgtccctggcttctctgacag

SEQ ID NO: 454243 - DNA, 93 bp, Homo sapiens; identical to SEQ ID NO: 352024
  chr17:75447727-75447820
  hyper
  bladder_and_urothelial vs. anorectal,upper_gi,breast, head_and_neck,melanoma,cervical,prostate

SEQ ID NO: 454244 - DNA, 112 bp, Homo sapiens
  chr17:79988364-79988476
  hyper
  bladder_and_urothelial vs. anorectal,multiple_myeloma, cervical,prostate,lung,head_and_neck,breast
cgccgcccactggtgggacgtgaggccagccagagagcggggctggccaggtctcccgtgctgaggccgtgccacggtgcgctggggctgcgtccgctcactgcgctccttg

SEQ ID NO: 454245 - DNA, 142 bp, Homo sapiens
  chr17:79989097-79989239
  hyper
  bladder_and_urothelial vs. anorectal,multiple_myeloma, cervical,prostate,lung,head_and_neck,breast
ccagccctgcagggagggcctgccggggtgcggctgttcgcccctcctcgccgctgccttgaagggacgggagggccgcgggggctgtccgtctgggggttcgggcggctgcagaccccggagttcccagctggctcccggc

SEQ ID NO: 454246 - DNA, 522 bp, Homo sapiens; identical to SEQ ID NO: 352041
  chr17:79989097-79989619
  hyper
  bladder_and_urothelial vs. anorectal,prostate,lung, head_and_neck,cervical,breast,uterine,non_cancer, multiple_myeloma,thyroid

SEQ ID NO: 454247 - DNA, 995 bp, Homo sapiens; identical to SEQ ID NO: 335733
  chr18:3879130-3880125
  hyper
  bladder_and_urothelial vs. anorectal, pancreas_gallbladder,cervical,head_and_neck,lung,upper_gi, uterine,sarcoma

SEQ ID NO: 454248 - DNA, 585 bp, Homo sapiens
  chr18:5237294-5237879
  hyper
  bladder_and_urothelial vs. lung
cgggcctttcccgcctaccgagcctgcccaccacccgaagtttaagctcatcttggaggacctgacactcaggaagccgtctcccgttgttccaccggctttgtggccccaatgtctgtataagctgctgatttgccttgggaaaacaaaccagcatcgatttcagagaaattactggataatttgcgctgtgaggcgcctagatcgcaaggcgcactccgcaaatgacagccgctcccgtgcacttgtccagtcattcgggtggcatactgtccgggtggaagcccgccaaaataatccatttggaagggacggagggcttcgtcagaaattgccttcttgtagctatgagacattgagcaaaacagataagaactggggcaatggaggcataaacattaaggctaggatgtatttttggggagaaagcggcggctagcagggacgaagctcaacttcatgcgccgcgccccggaatgctttgcctttagccactagcggagccgcccgcctgagggagccctccgggagtgagcgcacgcaaccgtgcagtcagattcctccgccgaccgcggccctctctcc

SEQ ID NO: 454249 - DNA, 21 bp, Homo sapiens
  chr18:5238247-5238268
  hyper
  bladder_and_urothelial vs. lung
gctggcccgggagcgttcgcc

SEQ ID NO: 454250 - DNA, 87 bp, Homo sapiens
  chr18:5237792-5237879
  hyper
  bladder_and_urothelial vs. lung,pancreas_gallbladder, sarcoma,liver_bileduct
cggagccgcccgcctgagggagccctccgggagtgagcgcacgcaaccgtgcagtcagattcctccgccgaccgcggccctctctcc

SEQ ID NO: 454251 - DNA, 537 bp, Homo sapiens; identical to SEQ ID NO: 345540
  chr18:5238247-5238784
  hyper
  bladder_and_urothelial vs. lung,pancreas_gallbladder, sarcoma,liver_bileduct

SEQ ID NO: 454252 - DNA, 196 bp, Homo sapiens
  chr18:20512643-20512839
  hyper
  bladder_and_urothelial vs. upper_gi,lung, pancreas_gallbladder,colorectal,head_and_neck,anorectal,uterine, breast,melanoma,ovary,prostate,cervical,sarcoma, multiple_myeloma,lymphoid_neoplasm,renal,liver_bileduct,
  CONT. FROM ABOVE: non_cancer,myeloid_neoplasm,thyroid
cgattcttttacaaatcaggagaaataggaatacctactatcggtttgaatctcaaacgaacagccacaagaaaaatggactttttaaaaaaaattatctaacagcatgttgtcccaataaataatgctgaaggagattccttctcgtttcaaatttgccagaaacttcccgtttaacctcagcaaaatacagatc

SEQ ID NO: 454253 - DNA, 734 bp, Homo sapiens
  chr18:20512902-20513636
  hyper
  bladder_and_urothelial vs. upper_gi,lung, pancreas_gallbladder,colorectal,head_and_neck,anorectal,uterine, breast,melanoma,ovary,prostate,cervical,sarcoma, multiple_myeloma,lymphoid_neoplasm,renal,liver_bileduct,
  CONT. FROM ABOVE: non_cancer,myeloid_neoplasm,thyroid
cgacaaggccgaaaactatgttagacggatccgcgtccataccccccatcagttaattttaactcttcattcggtacaggtcactctacacatgcttccctgcaaaatgcttaagctagacacagtgtacagataactttcacagaaccgcaagggcttgatgctcccccaacagaacggcttgagctttccccagcgcaattcagaaatgctgtggcggtcgccagactcttcgggtagctcccggcagctccgaggtagcgctcccctccccaaccatcgccctccgggatgggccgcaccgaagagcccgctcctcagctagggcacgaagtgcgccgccgcgatgggcagctggaggaaggggcgtgacgcaagtggaactcccgcgtgacgtcgcgcgggctcccgggcggggcgggtccggccgcctccgagcccggccggcagcccccggccttaaagcgcgggctgtccggaggggtcggctttcccaccgaggatttggcactctggtgagggaaaagggcgaaagagaaaagcgagcagccgtcctttcacagcctcagaaagtgctcgcttcccttcgggggctttcgcgaatcccgaggcaatctcggaggcggtgagtaaaagcaatctctttaccccacccggagctctgggtcggagcgactgcttctggtctggagctgcgtgcttggcgaagggctcccggggtaggggtggctccc

SEQ ID NO: 454254 - DNA, 988 bp, Homo sapiens
  chr18:20513146-20514134
  hyper
  bladder_and_urothelial vs. upper_gi,lung,colorectal, pancreas_gallbladder,head_and_neck,cervical,breast,melanoma, anorectal,uterine,liver_bileduct,ovary,lymphoid_neoplasm, prostate,multiple_myeloma,sarcoma,renal,non_cancer,
  CONT. FROM ABOVE: myeloid_neoplasm,thyroid
cggcagctccgaggtagcgctcccctccccaaccatcgccctccgggatgggccgcaccgaagagcccgctcctcagctagggcacgaagtgcgccgccgcgatgggcagctggaggaaggggcgtgacgcaagtggaactcccgcgtgacgtcgcgcgggctcccgggcggggcgggtccggccgcctccgagcccggccggcagcccccggccttaaagcgcgggctgtccggaggggtcggctttcccaccgaggatttggcactctggtgagggaaaagggcgaaagagaaaagcgagcagccgtcctttcacagcctcagaaagtgctcgcttcccttcgggggctttcgcgaatcccgaggcaatctcggaggcggtgagtaaaagcaatctctttaccccacccggagctctgggtcggagcgactgcttctggtctggagctgcgtgcttggcgaagggctcccggggtaggggtggctcccggctctggggttgtgtctgatgaaataggccgggcccgggctacactcggtggtggtggaccggcgggaggacgagcgctacctcagtactacttctgggtctcccgcgcgggctgaggaagcgcctttcgccgccaagcccgccccgcgcatgcgccgactgcggctcgcgcgcgcgcttcggaggttttttggccagacccgcacgcggaaccggcgcgggcacctggggagaaatggatggagaagggacctggctggaaagcctttgccccgctgctctgctccgcccataagaggacccctgaaatgtcccgtgcagtttgttcaagtcccctgtgtgatgaaatgtgcctctcgccttacccgtgtgagaatacctgtggtgtggcagcgagtattttggtgagcacctgcagtgtagtggtttatactaaggaatacacacaaattacaggcctttgagcccagaatgcaacttgggaggtaagacgtgac

SEQ ID NO: 454255 - DNA, 9 bp, Homo sapiens
  chr18:24128185-24128194
  hyper
  bladder_and_urothelial vs. ovary
caggggctc

SEQ ID NO: 454256 - DNA, 891 bp, Homo sapiens; identical to SEQ ID NO: 452951
  chr18:32556625-32557516
  hyper
  bladder_and_urothelial vs. upper_gi

SEQ ID NO: 454257 - DNA, 769 bp, Homo sapiens; identical to SEQ ID NO: 452952
  chr18:32557064-32557833
  hyper
  bladder_and_urothelial vs. upper_gi,colorectal, pancreas_gallbladder

SEQ ID NO: 454258 - DNA, 18 bp, Homo sapiens
  chr18:32557864-32557882
  hyper
  bladder_and_urothelial vs. upper_gi,colorectal, pancreas_gallbladder
tctgaacctggggcgctc

SEQ ID NO: 454259 - DNA, 45 bp, Homo sapiens; identical to SEQ ID NO: 452954
  chr18:32557884-32557929
  hyper
  bladder_and_urothelial vs. upper_gi,colorectal, pancreas_gallbladder

SEQ ID NO: 454260 - DNA, 291 bp, Homo sapiens; identical to SEQ ID NO: 452955
  chr18:32557542-32557833
  hyper
  bladder_and_urothelial vs. upper_gi

SEQ ID NO: 454261 - DNA, 18 bp, Homo sapiens
  chr18:32557864-32557882
  hyper
  bladder_and_urothelial vs. upper_gi
tctgaacctggggcgctc

SEQ ID NO: 454262 - DNA, 45 bp, Homo sapiens; identical to SEQ ID NO: 452954
  chr18:32557884-32557929
  hyper
  bladder_and_urothelial vs. upper_gi

SEQ ID NO: 454263 - DNA, 445 bp, Homo sapiens; identical to SEQ ID NO: 345550
  chr18:32558003-32558448
  hyper
  bladder_and_urothelial vs. upper_gi

SEQ ID NO: 454264 - DNA, 196 bp, Homo sapiens; identical to SEQ ID NO: 452964
  chr18:47339411-47339607
  hyper
  bladder_and_urothelial vs. liver_bileduct

SEQ ID NO: 454265 - DNA, 401 bp, Homo sapiens; identical to SEQ ID NO: 452965
  chr18:47339758-47340159
  hyper
  bladder_and_urothelial vs. liver_bileduct

SEQ ID NO: 454266 - DNA, 101 bp, Homo sapiens
  chr18:60985398-60985499
  hyper
  bladder_and_urothelial vs. anorectal,melanoma,ovary
cgacatctcccggttgacgctctccacacacatgaccccaccgaactcaaagaaggccacaatcctcccccagttcaccccgtccctgaagagctcctcca

SEQ ID NO: 454267 - DNA, 75 bp, Homo sapiens; identical to SEQ ID NO: 347516
  chr18:60985973-60986048
  hyper
  bladder_and_urothelial vs. anorectal,melanoma,ovary

SEQ ID NO: 454268 - DNA, 406 bp, Homo sapiens
  chr19:603411-603817
  hyper
cgcaggctcctcggaggaggcactggctcgaggtgtgggcgcccctcgtcccccaaggaagagtgcccggggctggtcccgcaggtgccccggggaggcaccggcctgaggtgtgggcaccctcgcccccaggttctactgggacttcaccatgctgctgttcatggtgggaaacctcatcatcatcccagtgggcatcaccttcttcaaggatgagaccactgccccgtggatcgtgttcaacgtggtctcggacaccttcttcctcatggacctggtgttgaacttccgcaccggcattgtgatcgaggacaacacggagatcatcctggaccccgagaagatcaagaagaagtatctgcgcacgtggttcgtggtggacttcgtgtcctccatccccgtggac

SEQ ID NO: 454269 - DNA, 159 bp, Homo sapiens; identical to SEQ ID NO: 352129
  chr19:603846-604005
  hyper

SEQ ID NO: 454270 - DNA, 291 bp, Homo sapiens
  chr19:813406-813697
  hyper
  bladder_and_urothelial vs. pancreas_gallbladder,renal, lymphoid_neoplasm
cgccatgggttcggcgggcgcgcgcaggtgcccggggctggcgtcgtcgggcagccccaggccgcggccctccaggctcttctgcttccactcgctgatgagctgcttggagcgcgaggcgtccagcggcacgtggatggtcatgtggcggcgcgcggggtcgtccagcgagggcgcgctggccctgggcagcgtgtggctgaaggtcaccatgttctccttggccatggggctgcgcggggccagcaggtccacgtccacgctggcgcgcttcaggctgcccagcgaggt

SEQ ID NO: 454271 - DNA, 322 bp, Homo sapiens; identical to SEQ ID NO: 352133
  chr19:813830-814152
  hyper
  bladder_and_urothelial vs. pancreas_gallbladder,renal, lymphoid_neoplasm

SEQ ID NO: 454272 - DNA, 24 bp, Homo sapiens
  chr19:814406-814430
  hyper
  bladder_and_urothelial vs. multiple_myeloma,renal
cgacccccatcagaacctgccact

SEQ ID NO: 454273 - DNA, 15 bp, Homo sapiens
  chr19:1856948-1856963
  hyper
  bladder_and_urothelial vs. colorectal,upper_gi
cggggtggggggggc

SEQ ID NO: 454274 - DNA, 109 bp, Homo sapiens; identical to SEQ ID NO: 345559
  chr19:1857456-1857565
  hyper
  bladder_and_urothelial vs. colorectal,upper_gi

SEQ ID NO: 454275 - DNA, 116 bp, Homo sapiens; identical to SEQ ID NO: 345560
  chr19:1979018-1979134
  hyper
  bladder_and_urothelial vs. liver_bileduct,melanoma, lymphoid_neoplasm,renal,multiple_myeloma,myeloid_neoplasm, thyroid,non_cancer,sarcoma

SEQ ID NO: 454276 - DNA, 230 bp, Homo sapiens
  chr19:3360723-3360953
  hyper
  bladder_and_urothelial vs. anorectal,cervical
cgactgtgcgcgcgtccctgcgggacggtgttgtgaaactatggctgggctgcgtgtccgcggagccgcgtgtccctgggtgaccgtggggtgtccccgtgtgggtgtgtggcggttggggggggtcgccagggagtggagaactgtcgagtggccgcgttccaggggacagttgggtgccgcttgctgtgtgcgagtgactggcgctgagcctccccctagggaagggt

SEQ ID NO: 454277 - DNA, 689 bp, Homo sapiens; identical to SEQ ID NO: 335931
  chr19:8372877-8373566
  hyper
  bladder_and_urothelial vs. lung,upper_gi

SEQ ID NO: 454278 - DNA, 24 bp, Homo sapiens
  chr19:10397603-10397627
  hyper
  bladder_and_urothelial vs. myeloid_neoplasm,non_cancer, thyroid
cgaggaggcggggctgcgggcctc

SEQ ID NO: 454279 - DNA, 1 bp, Homo sapiens
  chr19:12995814-12995815
  hyper
  bladder_and_urothelial vs. cervical,head_and_neck,breast
c

SEQ ID NO: 454280 - DNA, 221 bp, Homo sapiens
  chr19:12995851-12996072
  hyper
  bladder_and_urothelial vs. cervical,head_and_neck,breast
cgtgcaggcgtatggcttctcccctaggggacaaggaagccataagcgccactgtctgcccagtcatgtccccgggtcccctgcatctggccacacccctttactcagcctgggctgggactaggatgaacaaagtgaggcccctagggcacaaaatttaaggaggcactcactctcagaggccagccaagtccaagtcccgccctctgcaacccttcttc

SEQ ID NO: 454281 - DNA, 106 bp, Homo sapiens; identical to SEQ ID NO: 352228
  chr19:15695669-15695775
  hyper
  bladder_and_urothelial vs. upper_gi,myeloid_neoplasm

SEQ ID NO: 454282 - DNA, 162 bp, Homo sapiens
  chr19:16186802-16186964
  hyper
  bladder_and_urothelial vs. lung
cggggacgtgaccccccccccaggctgacccgttcctcgctctgtcgtccccaggtggaggaggagctgacgcacctccagaagaaactaaaagggacagaggacgagctggataaatattccgaggacctgaaggacgcgcaggagaagctggagctcacg

SEQ ID NO: 454283 - DNA, 102 bp, Homo sapiens; identical to SEQ ID NO: 205249
  chr19:16187000-16187102
  hyper
  bladder_and_urothelial vs. lung

SEQ ID NO: 454284 - DNA, 517 bp, Homo sapiens
  chr19:16187104-16187621
  hyper
  bladder_and_urothelial vs. lung
tttctccaaataagtcccgaaaaggggcactttccagcagctgtggccagcggtgccgacgtcaggccctcccccagcggtgctgacgtcggcggtccggccgggtgacctcatcgccccgacggcagccggcccggggggcggggagaggcgggggcggcccccgcgcaggcaaaggcttggggggccggggcgcggctgtgcagctctcgccggagccgagcccagccgagcgtccgccgctgcccgtgcgcctctgcgcctccgcgccatggccggcctcaactccctggaggcggtgaaacgcaagatccaggccctgcagcagcaggcggacgaggcggaagaccgcgcgcagggcctgcagcgggagctggacggcgagcgcgagcggcgcgagaaagtgagcgccccggcctcgggccccgcacccgcagcctcctcccccgcgcgccctcctttcttcccggcttcccgcgctgcccgcccgcgcgcagtcctcgggccgcctttttac

SEQ ID NO: 454285 - DNA, 148 bp, Homo sapiens
  chr19:16187640-16187788
  hyper
  bladder_and_urothelial vs. lung
cgacccacatccctgcgcccgcagccaggaccccctacttcctccgccgtcctccttcctgggcctgggacaggggagggggcgccgcctccgggtcgggcggggccggccaagcgggaaatggggggatggggcggagggggtgagc

SEQ ID NO: 454286 - DNA, 329 bp, Homo sapiens
  chr19:16187292-16187621
  hyper
  bladder_and_urothelial vs. lung
cggggcgcggctgtgcagctctcgccggagccgagcccagccgagcgtccgccgctgcccgtgcgcctctgcgcctccgcgccatggccggcctcaactccctggaggcggtgaaacgcaagatccaggccctgcagcagcaggcggacgaggcggaagaccgcgcgcagggcctgcagcgggagctggacggcgagcgcgagcggcgcgagaaagtgagcgccccggcctcgggccccgcacccgcagcctcctcccccgcgcgccctcctttcttcccggcttcccgcgctgcccgcccgcgcgcagtcctcgggccgcctttttac

SEQ ID NO: 454287 - DNA, 634 bp, Homo sapiens; identical to SEQ ID NO: 345579
  chr19:16187640-16188274
  hyper
  bladder_and_urothelial vs. lung

SEQ ID NO: 454288 - DNA, 354 bp, Homo sapiens
  chr19:18117804-18118158
  hyper
  bladder_and_urothelial vs. liver_bileduct,breast, head_and_neck
cgatccccatcacgggctgagggtgaccgtgtttgtttatgaccgccccctccacccacacacctcactgaggtggtggaagtctcctgagccaggctcagaggcggacagtcacggcaggggatgggttcagcggcagcgcattacgctgccacgagagggcgccagcgtcccgcagacgacgcagaggcaactcccgctggagaaactccatgcgacttttctttggggaaactgaagcccagagagaggtcacgccgtcccgtggccacaccgcagctgtggacctgggggtgcccgagcgtcccctgcattcagctctgtggcgggacgggggctgaggatgactggagc

SEQ ID NO: 454289 - DNA, 37 bp, Homo sapiens
  chr19:18118537-18118574
  hyper
  bladder_and_urothelial vs. ovary
cgggggaaacaggcctggaacagtcataggctctctg

SEQ ID NO: 454290 - DNA, 99 bp, Homo sapiens; identical to SEQ ID NO: 205275
  chr19:18119043-18119142
  hyper
  bladder_and_urothelial vs. ovary

SEQ ID NO: 454291 - DNA, 359 bp, Homo sapiens; identical to SEQ ID NO: 336145
  chr19:41190162-41190521
  hyper
  bladder_and_urothelial vs. ovary,liver_bileduct,breast, melanoma,prostate,pancreas_gallbladder,uterine, lymphoid_neoplasm,renal,lung,thyroid,non_cancer,sarcoma, upper_gi

SEQ ID NO: 454292 - DNA, 387 bp, Homo sapiens; identical to SEQ ID NO: 336154
  chr19:44099002-44099389
  hyper
  bladder_and_urothelial vs. cervical,anorectal,lung, head_and_neck

SEQ ID NO: 454293 - DNA, 68 bp, Homo sapiens; identical to SEQ ID NO: 345595
  chr19:44711963-44712031
  hyper
  bladder_and_urothelial vs. pancreas_gallbladder

SEQ ID NO: 454294 - DNA, 3 bp, Homo sapiens
  chr19:45655296-45655299
  hyper
  bladder_and_urothelial vs. anorectal,cervical,sarcoma, myeloid_neoplasm,non_cancer
cgg

SEQ ID NO: 454295 - DNA, 118 bp, Homo sapiens
  chr19:45656461-45656579
  hyper
  bladder_and_urothelial vs. cervical,anorectal,sarcoma, non_cancer,thyroid
gatcttcttgcgctggcttacgaacaggtgcttgcccaccgagtacacggccatgagcagccccgagcccgacagtgtggtggccgcgccgccaaacaccttgagcaggctgccgctc

SEQ ID NO: 454296 - DNA, 201 bp, Homo sapiens
  chr19:45656461-45656662
  hyper
  bladder_and_urothelial vs. anorectal,cervical, myeloid_neoplasm,ovary,non_cancer,prostate,uterine,lung, head_and_neck,thyroid,breast,renal
gatcttcttgcgctggcttacgaacaggtgcttgcccaccgagtacacggccatgagcagccccgagcccgacagtgtggtggccgcgccgccaaacaccttgagcaggctgccgctcgggctgccgtggcccagcgcgtggccgcccagtgacaagtagagcagccccacacccaggcccagcgccgccagcagcgccag

SEQ ID NO: 454297 - DNA, 76 bp, Homo sapiens
  chr19:45656586-45656662
  hyper
  bladder_and_urothelial vs. anorectal,cervical,ovary, uterine,myeloid_neoplasm,prostate,non_cancer,lung, pancreas_gallbladder,head_and_neck,sarcoma,thyroid
cgtggcccagcgcgtggccgcccagtgacaagtagagcagccccacacccaggcccagcgccgccagcagcgccag

SEQ ID NO: 454298 - DNA, 1 bp, Homo sapiens
  chr19:45888782-45888783
  hyper
  bladder_and_urothelial vs. myeloid_neoplasm
c

SEQ ID NO: 454299 - DNA, 183 bp, Homo sapiens; identical to SEQ ID NO: 352334
  chr19:46002502-46002685
  hyper
  bladder_and_urothelial vs. anorectal,ovary, myeloid_neoplasm

SEQ ID NO: 454300 - DNA, 89 bp, Homo sapiens
  chr19:46519167-46519256
  hyper
  bladder_and_urothelial vs. anorectal,ovary,cervical,lung
cgagagggtcatgggcccaggagtgcacgtctaggagttgatggggtaggcctgagggttcggagaaggtgcggtcggggaggagtctc

SEQ ID NO: 454301 - DNA, 421 bp, Homo sapiens; identical to SEQ ID NO: 352340
  chr19:46519582-46520003
  hyper
  bladder_and_urothelial vs. anorectal,ovary,cervical,lung

SEQ ID NO: 454302 - DNA, 242 bp, Homo sapiens; identical to SEQ ID NO: 336199
  chr19:48229040-48229282
  hyper
  bladder_and_urothelial vs. upper_gi,pancreas_gallbladder

SEQ ID NO: 454303 - DNA, 119 bp, Homo sapiens; identical to SEQ ID NO: 336251
  chr19:52715152-52715271
  hyper
  bladder_and_urothelial vs. pancreas_gallbladder,lung, head_and_neck,upper_gi,ovary,anorectal

SEQ ID NO: 454304 - DNA, 182 bp, Homo sapiens; identical to SEQ ID NO: 347636
  chr19:55691158-55691340
  hyper
  bladder_and_urothelial vs. ovary

SEQ ID NO: 454305 - DNA, 134 bp, Homo sapiens; identical to SEQ ID NO: 336290
  chr19:56112791-56112925
  hyper
  bladder_and_urothelial vs. multiple_myeloma,uterine, ovary,myeloid_neoplasm

SEQ ID NO: 454306 - DNA, 29 bp, Homo sapiens
  chr19:58239193-58239222
  hyper
  bladder_and_urothelial vs. multiple_myeloma, myeloid_neoplasm,melanoma,thyroid,sarcoma,prostate,non_cancer, lymphoid_neoplasm
ccgagtttcaaagggctgacaggacttcc

SEQ ID NO: 454307 - DNA, 4 bp, Homo sapiens
  chr2:10151899-10151903
  hyper
cgta

SEQ ID NO: 454308 - DNA, 2 bp, Homo sapiens
  chr2:10152022-10152024
  hyper
gc

SEQ ID NO: 454309 - DNA, 166 bp, Homo sapiens; identical to SEQ ID NO: 331200
  chr2:10152421-10152587
  hyper
  bladder_and_urothelial vs. liver_bileduct,breast,uterine

SEQ ID NO: 454310 - DNA, 175 bp, Homo sapiens; identical to SEQ ID NO: 453091
  chr2:20865462-20865637
  hyper
  bladder_and_urothelial vs. thyroid,breast, myeloid_neoplasm,non_cancer,head_and_neck,renal,ovary, multiple_myeloma,cervical,uterine,prostate

SEQ ID NO: 454311 - DNA, 38 bp, Homo sapiens; identical to SEQ ID NO: 453092
  chr2:20866660-20866698
  hyper
  bladder_and_urothelial vs. non_cancer,myeloid_neoplasm, breast,thyroid,head_and_neck,ovary,multiple_myeloma,uterine, renal,prostate

SEQ ID NO: 454312 - DNA, 450 bp, Homo sapiens; identical to SEQ ID NO: 453093
  chr2:20866660-20867110
  hyper
  bladder_and_urothelial vs. thyroid,non_cancer

SEQ ID NO: 454313 - DNA, 514 bp, Homo sapiens
  chr2:24272450-24272964
  hyper
  bladder_and_urothelial vs. anorectal,ovary
cgtcaggcggggccaggctcgctaacagccgggcggggtcccttcccccgggccccgccccggccgaccccacctttccgcgcggctccgccccgccgcccccttgccagtggcccctccccgcgcaggtcccgactccagccgcacctcctccggctctgcagtggcggcgaggaggcgagccggagcgacggcggggctggggccggagccgagccggggtcgggcagcagcagggaccccccagaggcggggcctgtgggaccgctatgggcgtggagatcgagaccatctcccccggagacggtaccgggctccctccggagccaggggaggggaggggtcccggggcggagcccggagggcgggggtctgattcggaggtggcgtggagggtgctgaagggtcggggggctggatggggaaggcaggcggagacgccggacgggattcttgggggtctaggagaccatcctccgccatcctcttccgcgctcacctaggggaatgtagg

SEQ ID NO: 454314 - DNA, 38 bp, Homo sapiens
  chr2:30453530-30453568
  hyper
  bladder_and_urothelial vs. myeloid_neoplasm
cgttcggctaaagctctttgtttctgctgtcatgagcg

SEQ ID NO: 454315 - DNA, 135 bp, Homo sapiens; identical to SEQ ID NO: 357153
  chr2:38303709-38303844
  hyper
  bladder_and_urothelial vs. thyroid,breast

SEQ ID NO: 454316 - DNA, 77 bp, Homo sapiens
  chr2:42720186-42720263
  hyper
  bladder_and_urothelial vs. cervical
cgcctggagggagccgcctcggccccgccggggcgcgcctcgtcgcggcccagcacgcccggctcgtcggccgagta

SEQ ID NO: 454317 - DNA, 64 bp, Homo sapiens
  chr2:43019535-43019599
  hyper
  bladder_and_urothelial vs. anorectal
cgcagatggaggagggggaggaggcgagggcagggggcggccatgggggtgctggactcacatg

SEQ ID NO: 454318 - DNA, 126 bp, Homo sapiens
  chr2:45161096-45161222
  hyper
  bladder_and_urothelial vs. thyroid,prostate
cggggagcagcggcttttcaccctgctatagggaggtgcgtttggctgagctgtccccccaccaaataaagctaatgatgtagtaatttaggagggggagaggggctgggcaaaaggagagagggg

SEQ ID NO: 454319 - DNA, 428 bp, Homo sapiens; identical to SEQ ID NO: 357184
  chr2:61175657-61176085
  hyper
  bladder_and_urothelial vs. colorectal,liver_bileduct, upper_gi,breast

SEQ ID NO: 454320 - DNA, 5 bp, Homo sapiens
  chr2:63275188-63275193
  hyper
  bladder_and_urothelial vs. anorectal,head_and_neck
ggctc

SEQ ID NO: 454321 - DNA, 318 bp, Homo sapiens
  chr2:70351179-70351497
  hyper
  bladder_and_urothelial vs. cervical,pancreas_gallbladder, melanoma,multiple_myeloma,ovary,non_cancer,breast,upper_gi, myeloid_neoplasm,thyroid,renal
cggctctttttttcatcaggatgtggagagtgggcgccttgggaagacgaaattgagtatgtgcgggggaggggtcatatgaaacaaggtcgggaagggggcggggagagctggggctctggaggagcttggggctcgcgctgcgggggaggaagcgccttccgcggtcgctggggggaagtggttaggaggaagcacgggcagtggaggggactgctggagggtcccatctgggaaagcaggcacggatgcggggacatttccgcccgtcaccctggcaaagcgctcgcagggctggagggacagagttctcagatc

SEQ ID NO: 454322 - DNA, 236 bp, Homo sapiens; identical to SEQ ID NO: 346442
  chr2:70351563-70351799
  hyper
  bladder_and_urothelial vs. cervical,pancreas_gallbladder, melanoma,multiple_myeloma,ovary,non_cancer,breast,upper_gi, myeloid_neoplasm,thyroid,renal

SEQ ID NO: 454323 - DNA, 121 bp, Homo sapiens
  chr2:73147029-73147150
  hyper
  bladder_and_urothelial vs. thyroid
cgtgggctcgatccgaagcctgggtctcgaaacctggcgcccaggggccgagttgtagttggggcggtgtgtgagcccgcgggccgccgcggccgaggggctggcgggttggaggcttgtg

SEQ ID NO: 454324 - DNA, 16 bp, Homo sapiens
  chr2:73148243-73148259
  hyper
  bladder_and_urothelial vs. myeloid_neoplasm,thyroid
ggaccccgggtgcttc

SEQ ID NO: 454325 - DNA, 236 bp, Homo sapiens; identical to SEQ ID NO: 453103
  chr2:74781700-74781936
  hyper
  bladder_and_urothelial vs. colorectal,upper_gi, multiple_myeloma

SEQ ID NO: 454326 - DNA, 123 bp, Homo sapiens; identical to SEQ ID NO: 453104
  chr2:74782349-74782472
  hyper
  bladder_and_urothelial vs. colorectal,upper_gi, multiple_myeloma

SEQ ID NO: 454327 - DNA, 59 bp, Homo sapiens; identical to SEQ ID NO: 345026
  chr2:96991316-96991375
  hyper
  bladder_and_urothelial vs. multiple_myeloma

SEQ ID NO: 454328 - DNA, 265 bp, Homo sapiens
  chr2:111874622-111874887
  hyper
  bladder_and_urothelial vs. cervical,head_and_neck,breast, upper_gi,pancreas_gallbladder,colorectal,anorectal,uterine, sarcoma,thyroid,non_cancer,multiple_myeloma,myeloid_neoplasm, renal
cgccgtctcactgtactgaatttcaagaatcatggcctactgccagccaggtcaggaccgaaggcgctagtctggggagactggagcaggtctctagtggttcacctgttcggaggctcttcctgttcagttccctctgcgcgccagagggtggcaccccaggcactccagaggtggagaggaggggacgacaggggaggcaaagagagaggagcggagggaaggaccagggaggaaggaccaaggagggagctttaataaattc

SEQ ID NO: 454329 - DNA, 205 bp, Homo sapiens; identical to SEQ ID NO: 453111
  chr2:111874987-111875192
  hyper
  bladder_and_urothelial vs. cervical,head_and_neck,breast, upper_gi,pancreas_gallbladder,colorectal,anorectal,uterine, sarcoma,thyroid,non_cancer,multiple_myeloma,myeloid_neoplasm, renal

SEQ ID NO: 454330 - DNA, 205 bp, Homo sapiens; identical to SEQ ID NO: 453111
  chr2:111874987-111875192
  hyper
  bladder_and_urothelial vs. cervical,head_and_neck, upper_gi,anorectal,pancreas_gallbladder,breast,sarcoma, colorectal,myeloid_neoplasm,multiple_myeloma,uterine,thyroid, non_cancer,renal

SEQ ID NO: 454331 - DNA, 138 bp, Homo sapiens; identical to SEQ ID NO: 345036
  chr2:111875611-111875749
  hyper
  bladder_and_urothelial vs. cervical,head_and_neck, upper_gi,anorectal,pancreas_gallbladder,breast,sarcoma, colorectal,myeloid_neoplasm,multiple_myeloma,uterine,thyroid, non_cancer,renal

SEQ ID NO: 454332 - DNA, 31 bp, Homo sapiens; identical to SEQ ID NO: 453113
  chr2:118981062-118981093
  hyper
  bladder_and_urothelial vs. non_cancer,myeloid_neoplasm, thyroid,prostate,multiple_myeloma

SEQ ID NO: 454333 - DNA, 120 bp, Homo sapiens; identical to SEQ ID NO: 357277
  chr2:119615627-119615747
  hyper
  bladder_and_urothelial vs. multiple_myeloma

SEQ ID NO: 454334 - DNA, 240 bp, Homo sapiens; identical to SEQ ID NO: 453133
  chr2:168149264-168149504
  hyper
  bladder_and_urothelial vs. ovary

SEQ ID NO: 454335 - DNA, 221 bp, Homo sapiens; identical to SEQ ID NO: 453136
  chr2:168149556-168149777
  hyper
  bladder_and_urothelial vs. ovary

SEQ ID NO: 454336 - DNA, 64 bp, Homo sapiens
  chr2:168149713-168149777
  hyper
  bladder_and_urothelial vs. ovary
cggcagagaagtgatgctggcgccggggatcggggcagcggcagcggagcagcagcatcttcgg

SEQ ID NO: 454337 - DNA, 86 bp, Homo sapiens; identical to SEQ ID NO: 453138
  chr2:173099596-173099682
  hyper
  bladder_and_urothelial vs. colorectal

SEQ ID NO: 454338 - DNA, 42 bp, Homo sapiens
  chr2:175190730-175190772
  hyper
  bladder_and_urothelial vs. anorectal
cgtccgacttgtccgggaatggagcagagaaagaggaaccag

SEQ ID NO: 454339 - DNA, 351 bp, Homo sapiens
  chr2:175199018-175199369
  hyper
  bladder_and_urothelial vs. myeloid_neoplasm
gtacagagaggcctatttcgctcctctcggaggagctgtcccttcgcgccccctccccagtataactgtgagagtgaaattgaatctagtggaataaggaattgggtagaagacacacgaaaatgataaaaatcacaagcaagaatgatagatacaagctgaagttgtgttctgtaggcaaaagcctggacacacaaagtgagggctcacatttccgtctccacttgggccctgctggtgcgggctgtgtctgggtgtctcctcccctcctgcctcctttcctacaagtggggagtcgagtaggactgtcagccctaacttgcaacatctcggggtggtttgtgtgtgggg

SEQ ID NO: 454340 - DNA, 5 bp, Homo sapiens
  chr2:182321353-182321358
  hyper
  bladder_and_urothelial vs. myeloid_neoplasm, multiple_myeloma,non_cancer,uterine,lymphoid_neoplasm
cgtgg

SEQ ID NO: 454341 - DNA, 34 bp, Homo sapiens; identical to SEQ ID NO: 345053
  chr2:182323095-182323129
  hyper
  bladder_and_urothelial vs. thyroid,myeloid_neoplasm, non_cancer,lymphoid_neoplasm,multiple_myeloma

SEQ ID NO: 454342 - DNA, 11 bp, Homo sapiens
  chr2:207139040-207139051
  hyper
  bladder_and_urothelial vs. melanoma
cggaaacgact

SEQ ID NO: 454343 - DNA, 595 bp, Homo sapiens
  chr2:219757371-219757966
  hyper
  bladder_and_urothelial vs. anorectal, pancreas_gallbladder,lymphoid_neoplasm,prostate, multiple_myeloma,cervical,breast,non_cancer,renal,thyroid, uterine,colorectal,lung,upper_gi,myeloid_neoplasm
cgctcccggcctcagcgtttgcctctgtataatgggagtgggtttcagaagcaggccaggctaagcgctgggaggggagtggggctgcgcgccgtgtcacccctcacggtgcctccctccgcaggcagtgatggagaacatgcggcggaagtgcaagtgccacggcacgtcaggcagctgccagctcaagacgtgctggcaggtgacgcccgagttccgcaccgtgggggcgctgctgcgcagccgcttccaccgcgccacgctcatccggccgcacaaccgcaacggcggccagctggagccgggcccagcgggggcaccctcgccggctccgggcgctcccgggccgcgccgacgggccagccccgccgacctggtctacttcgaaaagtctcccgacttctgcgagcgcgagccgcgcctggactcggcgggcaccgtgggccgcctgtgcaacaagagcagcgccggctcggatggctgcggcagcatgtgctgcggccgcggccacaacatcctgcgccagacgcgcagcgagcgctgccactgccgcttccactggtgctgtttcgtggtctgcgaagagtgccgcatc

SEQ ID NO: 454344 - DNA, 64 bp, Homo sapiens; identical to SEQ ID NO: 346518
  chr2:219758014-219758078
  hyper
  bladder_and_urothelial vs. anorectal, pancreas_gallbladder,lymphoid_neoplasm,prostate, multiple_myeloma,cervical,breast,non_cancer,renal,thyroid, uterine,colorectal,lung,upper_gi,myeloid_neoplasm

SEQ ID NO: 454345 - DNA, 77 bp, Homo sapiens
  chr2:225906328-225906405
  hyper
  bladder_and_urothelial vs. lymphoid_neoplasm
cgctggagacctaatgacccacgtctcctccagcctgtgttcctcagccctttctggaggagtattaagtggtttgt

SEQ ID NO: 454346 - DNA, 115 bp, Homo sapiens; identical to SEQ ID NO: 357491
  chr2:232527239-232527354
  hyper
  bladder_and_urothelial vs. multiple_myeloma,cervical, pancreas_gallbladder

SEQ ID NO: 454347 - DNA, 768 bp, Homo sapiens
  chr20:4981401-4982169
  hyper
  bladder_and_urothelial vs. lung,cervical,uterine,ovary, melanoma,sarcoma,upper_gi,multiple_myeloma,liver_bileduct, anorectal
acactcgaaatgtcattttttccccccgaaaggtggcaaggagggggactcgcgaccccccagggaacaggccagaaaggccccggggtcggaggagctgcttctaaaattacttcgcgcagtctttgtagaagggaagaaagcaagaatgtaaaaggcaccctcttgccgcccctcctgatgcccctgaattccagggggcgagacgatgcccgtgcgcaccaccgggggaggggcgagggaagcgaccccaggacgcgcgggcgcagagcccgggaggaggcggcggcagccagtggggttctgggggcgccccatttgcctccccgctgcgcggcctgagggcccgagcgcgctgtggctcccgtggcgggaaggggtgggtaccccgggggcccggcccggccggcagaacggcaggagctgagggccgccgggcatcttgggccccggggccagggtggccggcgggcgcggggtcccgggagatgggtcggggtgggggcgcgcaggccgcgccgcggggccggtgggtgacagcgcgcgggggccgtgccaggccggcctcgtgggcgcggcgagcacctcgcggccccgccggcaggtgcggcccgcaggccgggcagggggcgcggcggccgggctctcacctggctgcagctcgcgtggttcccgtcctgccgccgcgcctcggcgccgcagtgcccgctgcagcctccgcctccggtccccgcgacagccgcctgcaaaatggcgccgcggaggggc

SEQ ID NO: 454348 - DNA, 843 bp, Homo sapiens; identical to SEQ ID NO: 345624
  chr20:4981674-4982517
  hyper
  bladder_and_urothelial vs. lung,pancreas_gallbladder, liver_bileduct,ovary,upper_gi,colorectal,head_and_neck,cervical, uterine,breast,anorectal,prostate,multiple_myeloma,sarcoma, lymphoid_neoplasm,renal

SEQ ID NO: 454349 - DNA, 79 bp, Homo sapiens; identical to SEQ ID NO: 345625
  chr20:20350750-20350829
  hyper
  bladder_and_urothelial vs. anorectal

SEQ ID NO: 454350 - DNA, 206 bp, Homo sapiens; identical to SEQ ID NO: 453161
  chr20:21080357-21080563
  hyper
  bladder_and_urothelial vs. colorectal,non_cancer

SEQ ID NO: 454351 - DNA, 5 bp, Homo sapiens
  chr20:34188561-34188566
  hyper
  bladder_and_urothelial vs. thyroid,anorectal,non_cancer, myeloid_neoplasm,head_and_neck,prostate,cervical
cgtcc

SEQ ID NO: 454352 - DNA, 60 bp, Homo sapiens
  chr20:34190072-34190132
  hyper
  bladder_and_urothelial vs. anorectal,head_and_neck, non_cancer,prostate,sarcoma,myeloid_neoplasm,thyroid,lung, cervical,ovary,breast,renal,uterine,multiple_myeloma
agggggcaggtccccgcgcgccctcacggacaaggtgaccttaatgaaacccttggtccc

SEQ ID NO: 454353 - DNA, 1 bp, Homo sapiens
  chr20:34190145-34190146
  hyper
  bladder_and_urothelial vs. anorectal,head_and_neck, non_cancer,prostate,sarcoma,myeloid_neoplasm,thyroid,lung, cervical,ovary,breast,renal,uterine,multiple_myeloma
c

SEQ ID NO: 454354 - DNA, 211 bp, Homo sapiens
  chr21:38592864-38593075
  hyper
  bladder_and_urothelial vs. cervical
cgctataacgaggtaacatacagcacttagaagacggcctgacccagaataacactaatgttcacatggctgcgagtctcagaccaaaatcaatagccggtatctactgaaactgcagcaaggcgaaaccacgggaatggcgctccgttgagtagagcaacgcacagcacatcacatcgcatcctccgtagcgggaggctctggcctcacc

SEQ ID NO: 454355 - DNA, 259 bp, Homo sapiens
  chr21:38593104-38593363
  hyper
  bladder_and_urothelial vs. cervical
tattcggggacccgcaccggacaggcggcccaggccccctggcgcccagctggccgccctgttgcagctctcatgccaagacctgcgcctaacggcagggattccggcggtcatcatttattcttggcgctaagctgccgcttctcttttttatcaccacagagtaacgcagaccccaccgtttccttccattctgagccaaccactccagcagccaccggggcgccaggttatgctggggctgcaccacccggcccga

SEQ ID NO: 454356 - DNA, 38 bp, Homo sapiens; identical to SEQ ID NO: 361982
  chr21:38593729-38593767
  hyper
  bladder_and_urothelial vs. cervical

SEQ ID NO: 454357 - DNA, 130 bp, Homo sapiens
  chr22:19706042-19706172
  hyper
  bladder_and_urothelial vs. myeloid_neoplasm,ovary
cgcccagtcagggggatggctcggtcggcctcgggggtcgacgatcccccgggtaggcgacgtgccctgtccaggcctcacttcccgcgtccgcaaaacggggtggacaacgcagcctaaggcagagccg

SEQ ID NO: 454358 - DNA, 391 bp, Homo sapiens
  chr22:21319195-21319586
  hyper
  bladder_and_urothelial vs. anorectal,colorectal,breast, prostate,uterine,multiple_myeloma,thyroid
tccctgggaggtcgcgaggatccccggagacccagactcgggcccggggcgcccccggccagagcggcccctggctgcctccctacgccccgcgactccggtccggacgccgagggcctcggcctgcccctgtcccccggccgccccccacctgctccggcccggcggggcggtgctgggcccgcgggctccccggccgcagtgcaaacgcagcgccagacacgccccgcccgcgcctccccgcccccccgcgcccgcggccccaagcggttcccgagcccaggcccgcgccgagcccaggtgagcgcccgccccggggaccctggtccccggaaccccggtccccgcccgccgccccgcctcttcgccccggcgccgggggccagcgctt

SEQ ID NO: 454359 - DNA, 20 bp, Homo sapiens
  chr22:21319891-21319911
  hyper
  bladder_and_urothelial vs. anorectal,colorectal,breast, prostate,uterine,multiple_myeloma,thyroid
agcgcggagcccccacactc

SEQ ID NO: 454360 - DNA, 137 bp, Homo sapiens; identical to SEQ ID NO: 453177
  chr22:22862472-22862609
  hyper
  bladder_and_urothelial vs. uterine,myeloid_neoplasm, prostate,non_cancer,multiple_myeloma,ovary,lymphoid_neoplasm, melanoma,colorectal

SEQ ID NO: 454361 - DNA, 402 bp, Homo sapiens
  chr22:44208017-44208419
  hyper
  bladder_and_urothelial vs. lung,sarcoma,ovary, head_and_neck
cgcgcgtggccaccccgaatacagccttaccgggaacccctcctcgattctccgcctagctgggccggcacccgcgtgcgcggaccccaagccgcggggtctcagaggggctgcccattcggcgtctctaggacgctgttgcccgagagacgacggcagtcgctgactggagaatgagcctacgcgcctggcaagaagctgagctgtgattggtcaattggagataaacgaggagggggcggggccaggtcagtcccgcgcctccgctcccggaagaaatttccgccggaagtcccgttctctggggagcgggaaccctggcgacccgtgtcatgggagcgggtttctgttacgtgggctttagcgcgagctgggcggtcggcccggtcccaccgaactgca

SEQ ID NO: 454362 - DNA, 72 bp, Homo sapiens
  chr22:44208448-44208520
  hyper
  bladder_and_urothelial vs. lung,sarcoma,ovary, head_and_neck
ccctgctctgagaagcagactctgcatctgtaaaaggctaagcgtgcccactggggcctgtggtcaggattg

SEQ ID NO: 454363 - DNA, 1 bp, Homo sapiens
  chr22:44208563-44208564
  hyper
  bladder_and_urothelial vs. lung,sarcoma,ovary, head_and_neck
c

SEQ ID NO: 454364 - DNA, 108 bp, Homo sapiens
  chr3:16925425-16925533
  hyper
  bladder_and_urothelial vs. pancreas_gallbladder
cgagatcctgagccccgggacccttgttccgggccccgaggcctacttggtagttgcccctcggggttccgggtgggtgactgacagttgcagcagctctggggaggc

SEQ ID NO: 454365 - DNA, 74 bp, Homo sapiens
  chr3:16925583-16925657
  hyper
  bladder_and_urothelial vs. pancreas_gallbladder
cgcggcccgatgacccggcctcggtgacagcagccgcgacggcggcaatctcgacagggagctaggcggctcat

SEQ ID NO: 454366 - DNA, 231 bp, Homo sapiens
  chr3:16925705-16925936
  hyper
  bladder_and_urothelial vs. pancreas_gallbladder
agcgccgagctcgggaggagacagcagccggcgggtggggtgggtctgggctgccccctccgggagctgccccggggccgcacggcgattgtcatacccggccgcccctgcccgccgtgggcttcctctcggcgccgcgggccttaacggggctctgaggggacgtgacagagctcggcacgcggcagcctctggggagttagggtccggagagacccacgcgtcgccccc

SEQ ID NO: 454367 - DNA, 256 bp, Homo sapiens
  chr3:16925965-16926221
  hyper
  bladder_and_urothelial vs. pancreas_gallbladder
agccgcctccgcgtgtccagagagtgtcggggcggccgccacttcccctcgcccttcgccggaggtgggcgccttttcctgcgtggcgggtgctccgaccccagttgctctgagccccggggaagcgcgccccgagcccctgacgtgggcgccccgttacctcggggtgggtgcctggggcccctgaggtgggcgcgggttgccccggggtgggcgcccggcccgcgcgggttatttttggcgcccgcagaggcgc

SEQ ID NO: 454368 - DNA, 93 bp, Homo sapiens; identical to SEQ ID NO: 357563
  chr3:16926261-16926354
  hyper
  bladder_and_urothelial vs. pancreas_gallbladder

SEQ ID NO: 454369 - DNA, 82 bp, Homo sapiens
  chr3:50377892-50377974
  hyper
  bladder_and_urothelial vs. anorectal
cgccgaccccctctgccgcgacttgacccgcggcgactgcgctgccccttggctgccccttccgctctcgtaggcgcgcggg

SEQ ID NO: 454370 - DNA, 167 bp, Homo sapiens; identical to SEQ ID NO: 346566
  chr3:50378002-50378169
  hyper
  bladder_and_urothelial vs. anorectal

SEQ ID NO: 454371 - DNA, 984 bp, Homo sapiens
  chr3:61546692-61547676
  hyper
  bladder_and_urothelial vs. colorectal,lung
cgctcggctttgtttcccggcgggggaatgcgctgtgttggaggcgcgaacaggagccgcagacggtgagcctcaccgctgcaaatgccagggcagtgaagccgaacagaaaaccccatcgctttaaaaaggcagctgtccgccctccccctttcccctcgccagggcgaggggcccctcaagtccgggatccgcgagctgcgcggaggatctcgccaaacccgagcaccgtgcggcgtcttttaagagctcgaacaacgggaatccagcaaaaaacaagccggccccagaaggcagcctccctcctctctccgcgcacgggctacaatcgcccccagtccccaaactgtcccagtagaggccgcgcggagagagcagagccgagggacccagcgcaaggcgggagccaagcgcggctgctttaagaacgcggagagcgcgcgcccgccgccagctggcccgggctgcgcgcccccgccgccaccgcgcgccccctgttcgctcgctccttcgctcgccggctttaaagtctctgccaggatccatgctcacatgttacttcctgtatggaggcatggccagtttccagccccgcgctcttcgttccttcccagcctgcgccggagccacaactttcaggagcatggactgaaggcgccctcgccccagcgcccctctgagatcctttgtgttttcctccgtttcctccggccgtttctattttggggggctctccgctccccctgcctctcccctccccttcccctctcgcaaacatgcctccttccttcccggggccctggaaggagctgcctgcctgaagcccggagacgccgcgccgcgctcagccccgccgccgcccgccggctctcgggctgtgctgcgctgccgactcaagttggggatcctcggctgctcgccgccgccgcccgcggtccctgcctgccccaggcccggggcatcgccgccggccgccgactccgc

SEQ ID NO: 454372 - DNA, 963 bp, Homo sapiens
  chr3:61547191-61548154
  hyper
  bladder_and_urothelial vs. lung,colorectal,cervical, ovary,breast,upper_gi,head_and_neck
cgctcgctccttcgctcgccggctttaaagtctctgccaggatccatgctcacatgttacttcctgtatggaggcatggccagtttccagccccgcgctcttcgttccttcccagcctgcgccggagccacaactttcaggagcatggactgaaggcgccctcgccccagcgcccctctgagatcctttgtgttttcctccgtttcctccggccgtttctattttggggggctctccgctccccctgcctctcccctccccttcccctctcgcaaacatgcctccttccttcccggggccctggaaggagctgcctgcctgaagcccggagacgccgcgccgcgctcagccccgccgccgcccgccggctctcgggctgtgctgcgctgccgactcaagttggggatcctcggctgctcgccgccgccgcccgcggtccctgcctgccccaggcccggggcatcgccgccggccgccgactccgcgccctgcccgatcggctctctcctttttaaacggaaagcagcctttctccgccgagaggatcgtccccagcgtggctctgcgttcccggtcactttttgagattttccggggggcgctcggcggcttcccggattccaaggggactcgggccgccgagcgcggggggcccgtggagcgggcgagccggggaagcgccccggcttagcggaggctcgcacggaggcaagaacttattcaacaagtttacctccctgctttcctcttttcgatgtgcgttttcggacatgcggaggttactggaaccgtgttggtggattttgttcctgaaaatcaccagttccgtgctccattatgtcgtgtgcttccccggtgagtgccggccgccgaggggatgcggccccggccggcgcgcgttggggatgcggagttgtcgcctgggcgcggagctccggcgcccgtccgggagaccctggagag

SEQ ID NO: 454373 - DNA, 783 bp, Homo sapiens
  chr3:66550318-66551101
  hyper
  bladder_and_urothelial vs. upper_gi,head_and_neck, anorectal,breast,cervical,ovary,lung,sarcoma,colorectal, prostate,pancreas_gallbladder
cgcacgacgcgtgctggctaacccccaaatctctacgacccacgctcgctcgtctccagaccccacgaggcacgctcttcttctccaggctctctcgcacgcctactcccccggacctccacgcagaatctcccttccgccactccaacctgacagtcttccaacacgcacaagcacgcacaactccacacacacaacccagtccgcaccccctccctgagtacgaacccccgccgctccatccccaagtgacagagccccggggcgcagagagggcggaaagggcggcactcacaggctccgcgtccaggagggcaggtccccgggcaacgcagccagcccgcgcccaccgcagtccagcgagtccccagcgcaagtgcaggcggccgcgcagggcgcccgcgggccggccgcggcggtcaccggctccagccgaagcaaaagcagccagagaaggagaaggcaaggcgagcggcgcggggccccgagccctccccggaccggccgcgccatcttgtctggagcgcgctgcgaactccgggcgcggggactgtgaggacccgaacggccgcagacgcgggcgggcccgcggggcgctccgctcggctctagactccgcaccggggcatggcccccgccccaagttctctctgcggccgcggctccggcactcagcgtgcccccggtgcccgggccgctccggagcacccggcgggggccgcaaaccccgcgcccatccgggccggccggcccgcccgcgctagctgcgaactccgccgattc

SEQ ID NO: 454374 - DNA, 990 bp, Homo sapiens
  chr3:66550603-66551593
  hyper
  bladder_and_urothelial vs. upper_gi,colorectal
cggcactcacaggctccgcgtccaggagggcaggtccccgggcaacgcagccagcccgcgcccaccgcagtccagcgagtccccagcgcaagtgcaggcggccgcgcagggcgcccgcgggccggccgcggcggtcaccggctccagccgaagcaaaagcagccagagaaggagaaggcaaggcgagcggcgcggggccccgagccctccccggaccggccgcgccatcttgtctggagcgcgctgcgaactccgggcgcggggactgtgaggacccgaacggccgcagacgcgggcgggcccgcggggcgctccgctcggctctagactccgcaccggggcatggcccccgccccaagttctctctgcggccgcggctccggcactcagcgtgcccccggtgcccgggccgctccggagcacccggcgggggccgcaaaccccgcgcccatccgggccggccggcccgcccgcgctagctgcgaactccgccgattcgggcaaggtgtacccagcctgcgctcttcgtccgcccggggcacgccgagtgccgctaccgacaccggccgagggcagtgctgccgctgcgcctggaagacaggcgttcagccccgcagcccgagctcggtgccggcaggcatcttcctctgggctcggagcgcaaagccgtagacctcgggctggacggcgcggccggccccgcgctgggaggccccagtgcgcctcgctgtccccacgccgcggccagagagcgcgcgcgcgcgcgcagcctcgggttccgcacggctcctccgcgcagcaagagtcccgccgacctcgcagccgaacaatcagccgcttgctgttcgcctccccgcggcccagccccggccggtcccccaagccccgcccccggccgctcgcccgcacacaccccctaggctccgcgctccgcggccgcctgctggcccacgttggatgctttgcaacagcgccccgccacgcctcccc

SEQ ID NO: 454375 - DNA, 766 bp, Homo sapiens
  chr3:66551122-66551888
  hyper
  bladder_and_urothelial vs. liver_bileduct,upper_gi, pancreas_gallbladder,head_and_neck
cgctcttcgtccgcccggggcacgccgagtgccgctaccgacaccggccgagggcagtgctgccgctgcgcctggaagacaggcgttcagccccgcagcccgagctcggtgccggcaggcatcttcctctgggctcggagcgcaaagccgtagacctcgggctggacggcgcggccggccccgcgctgggaggccccagtgcgcctcgctgtccccacgccgcggccagagagcgcgcgcgcgcgcgcagcctcgggttccgcacggctcctccgcgcagcaagagtcccgccgacctcgcagccgaacaatcagccgcttgctgttcgcctccccgcggcccagccccggccggtcccccaagccccgcccccggccgctcgcccgcacacaccccctaggctccgcgctccgcggccgcctgctggcccacgttggatgctttgcaacagcgccccgccacgcctccccgcctgctgctcattggctgccggagtccaccgtggccagcctcgagggccattggagcgctcgctgtgatcccgcccctcccgcttcaccggctaccccgcccccacactcttttcccacccaaggtgtgaagggcgggagactgggaggagaaagggagggacggcccccgcctcttaaaggagacacgcaggttgttgttggagaacgggaacgcgggctggggaaaggaggcgtgaagatacgccctctgcgtcaagaaggggagagaaagttaagagggtaaaacgccccc

SEQ ID NO: 454376 - DNA, 768 bp, Homo sapiens
  chr3:67048599-67049367
  hyper
  bladder_and_urothelial vs. colorectal
cgacacgcatgtgctcgcgtcgtggccaatcagcgccaggaattcggaggctaggggtggagccagatgcacaggacaccccattggccaggggaagcttagaagagccggaacccgggagctagagaagcgaaatgacatttcctttttaaatagctggagtcggggccccatcgagaaatggccgcgtcggcaggtgggtcgtgtggtggccagggcggcgtggagggaggtgagggggaaggtgggccggggccggccacaggcagtgggatgaggacgtagcggtgcggagctagagggaaggatgaagcggtggaggggaatgagaagagggaggatgaatggtgcggagggcggtgggcggtccggcgggaccgggatggggaggctgggtacccgccggcgctgcgccccaggaggcagcgggaggcggcttgagggggcaccggcggccgccgttgttcgagcttccctcgtgaggctctgccctcggctctcggcggagtccgcgcagacgcctctcctgggctgcgagcgcgtttcctccgcgagcacgggtgccgggctcgccgggctccgcaggagcaggctggcctttgaacttgttccgccgatcgcgctccgccctctgtctcccagatccttaactcgcggtcccacgaggtcgtgcgtatatccacagacatttgtatatatcttgtagggggaaaaagcctagcaagcagacacacaaacagaaaaatcccgcgatgccgtaactggctc

SEQ ID NO: 454377 - DNA, 762 bp, Homo sapiens; identical to SEQ ID NO: 331829
  chr3:111578054-111578816
  hyper
  bladder_and_urothelial vs. head_and_neck,lung

SEQ ID NO: 454378 - DNA, 334 bp, Homo sapiens
  chr3:128216313-128216647
  hyper
  bladder_and_urothelial vs. melanoma,lung,colorectal, head_and_neck,upper_gi,pancreas_gallbladder,anorectal,sarcoma, prostate,liver_bileduct,breast,multiple_myeloma, myeloid_neoplasm,thyroid,non_cancer,renal,cervical
cgtgtgccagcgtgggtggactccgggctggggaagcgacagggaatggtgtgtgccggtgtgacagacgccagagcggcggggtggaacgtgctgtgtcacgggagactttcttgaccaaaacggaatgtgcgagtgtggaaggaagaggggccgtccgcggagtttggggacacccgggcgtccgagccccagagcctctgcagctgggacaaggaagcccgagcccgccgcctgaggtccccgcgccgttagtgacacgcgccgccgacaaaggctgtatttttccaggctcgcgccccgcccgcgcgcgcgcgatggtccccatggcgac

SEQ ID NO: 454379 - DNA, 378 bp, Homo sapiens; identical to SEQ ID NO: 345104
  chr3:128216713-128217091
  hyper
  bladder_and_urothelial vs. melanoma,lung,colorectal, head_and_neck,upper_gi,pancreas_gallbladder,anorectal,sarcoma, prostate,liver_bileduct,breast,multiple_myeloma, myeloid_neoplasm,thyroid,non_cancer,renal,cervical

SEQ ID NO: 454380 - DNA, 4 bp, Homo sapiens
  chr3:157812151-157812155
  hyper
  bladder_and_urothelial vs. thyroid
cgca

SEQ ID NO: 454381 - DNA, 283 bp, Homo sapiens; identical to SEQ ID NO: 453224
  chr3:170626174-170626457
  hyper
  bladder_and_urothelial vs. colorectal

SEQ ID NO: 454382 - DNA, 26 bp, Homo sapiens
  chr3:170626710-170626736
  hyper
  bladder_and_urothelial vs. colorectal
aggtttgttgcgttcgggtcgcagtc

SEQ ID NO: 454383 - DNA, 108 bp, Homo sapiens; identical to SEQ ID NO: 453226
  chr3:170626349-170626457
  hyper
  bladder_and_urothelial vs. colorectal

SEQ ID NO: 454384 - DNA, 508 bp, Homo sapiens; identical to SEQ ID NO: 357752
  chr3:170626710-170627218
  hyper
  bladder_and_urothelial vs. colorectal

SEQ ID NO: 454385 - DNA, 48 bp, Homo sapiens
  chr3:181444767-181444815
  hyper
  bladder_and_urothelial vs. anorectal
tctagcgccctctttttttttttttttttttttttttttttgcctgac

SEQ ID NO: 454386 - DNA, 125 bp, Homo sapiens; identical to SEQ ID NO: 453236
  chr3:186079497-186079622
  hyper
  bladder_and_urothelial vs. ovary

SEQ ID NO: 454387 - DNA, 301 bp, Homo sapiens; identical to SEQ ID NO: 331976
  chr3:186648488-186648789
  hyper
  bladder_and_urothelial vs. ovary

SEQ ID NO: 454388 - DNA, 46 bp, Homo sapiens
  chr3:187455297-187455343
  hyper
  bladder_and_urothelial vs. renal,multiple_myeloma, colorectal,non_cancer,thyroid,upper_gi,lymphoid_neoplasm, myeloid_neoplasm,sarcoma,lung,liver_bileduct, pancreas_gallbladder,head_and_neck
cgctcacacataagagcacaaacaccagccctgcgcgccggggcaa

SEQ ID NO: 454389 - DNA, 447 bp, Homo sapiens
  chr3:187456666-187457113
  hyper
  bladder_and_urothelial vs. non_cancer,thyroid,renal, colorectal,multiple_myeloma,lymphoid_neoplasm,upper_gi,sarcoma, pancreas_gallbladder,liver_bileduct,lung,breast, myeloid_neoplasm,prostate,uterine,melanoma,cervical
aaggggtagggatgagaatctgggaagttaaaatgaagtaagtgcatttattggaaattaggagtcccgtggttccgggagctcaaaccgaatggtgtttttaccgctgcctaacgctagagagagccctccatcaaggtttgaaaccgtcaacccctttctcgcccctcccctccttcccattgacctagtttggccagagcctcccgatttggagaatgccttccgcccttcccccctcctctccagccagagaggctacagaggctgttggattattggtaatctaataactccaataacccgctgaaaaatccaaagggaaatctgaaagtgtaaagcactgtttagggacaaggacaaggaattttaataaggctgcaactgccgtagtgaaccccgcatcaggggccctgccgtggggctcccggtctcagcagtgtttca

SEQ ID NO: 454390 - DNA, 380 bp, Homo sapiens
  chr3:187456733-187457113
  hyper
  bladder_and_urothelial vs. upper_gi,renal, pancreas_gallbladder,sarcoma,colorectal,breast,prostate, multiple_myeloma,non_cancer,thyroid,uterine,lymphoid_neoplasm, liver_bileduct,lung,myeloid_neoplasm,melanoma,cervical
cgtggttccgggagctcaaaccgaatggtgtttttaccgctgcctaacgctagagagagccctccatcaaggtttgaaaccgtcaacccctttctcgcccctcccctccttcccattgacctagtttggccagagcctcccgatttggagaatgccttccgcccttcccccctcctctccagccagagaggctacagaggctgttggattattggtaatctaataactccaataacccgctgaaaaatccaaagggaaatctgaaagtgtaaagcactgtttagggacaaggacaaggaattttaataaggctgcaactgccgtagtgaaccccgcatcaggggccctgccgtggggctcccggtctcagcagtgtttca

SEQ ID NO: 454391 - DNA, 60 bp, Homo sapiens
  chr3:187457654-187457714
  hyper
  bladder_and_urothelial vs. upper_gi,renal, pancreas_gallbladder,sarcoma,colorectal,breast,prostate, multiple_myeloma,non_cancer,thyroid,uterine,lymphoid_neoplasm, liver_bileduct,lung,myeloid_neoplasm,melanoma,cervical
tcagccaaggtccttattcacgttaatgaagatggaaggcactaactgtccttggaaagc

SEQ ID NO: 454392 - DNA, 509 bp, Homo sapiens; identical to SEQ ID NO: 345125
  chr3:187457654-187458163
  hyper
  bladder_and_urothelial vs. prostate,renal,colorectal, sarcoma,upper_gi,pancreas_gallbladder,breast,multiple_myeloma, non_cancer,thyroid,uterine,lymphoid_neoplasm,lung, liver_bileduct,cervical,melanoma,myeloid_neoplasm

SEQ ID NO: 454393 - DNA, 777 bp, Homo sapiens; identical to SEQ ID NO: 349886
  chr3:187458583-187459360
  hyper
  bladder_and_urothelial vs. pancreas_gallbladder

SEQ ID NO: 454394 - DNA, 773 bp, Homo sapiens
  chr3:187458876-187459649
  hyper
  bladder_and_urothelial vs. pancreas_gallbladder, liver_bileduct
cgatccctacccgcccctctttattttctgtctggtgggggcgagggttgggggtgtgattgcctctaaaagcaaagctagaaaacatttaatttagtgtatgtaattccgttcctcccgatgctcccgcctctagcaaccacaacgcggtatctggagctggtttcatgtatcataagttgatttctcccccagcctccgaaaagctttatgtactgggaagggaaagaaggtgcacttgtcttcaaaaggcagaatggcactcgacagtattggcagagattcttgccaaacactggtcatccagcaaagaaagtcgggaataaactcctgatcttctcggaggaaaggggcgctgggggccgagtgctggatcccactcaggctcactgcgcctggcaaagcgggggagtggggagtcgggtatggtcttttggtgaagttgtgggtctcggagtggacatcgggagggttgggaggggccgttcctggtttccactggggcaaagagaaaccagccagttctgccaccacgctgcaccctcgctgtgctcgcggcggcagcggcggtcccacttgttgcgcagtgctggaaaccggcacgcgccattcgatgttgattcacagagggctacagaccagcctaccattgctccacgccatccacaaacctcctcaacacaccccctacacatacgtcctgccaccgccggcaaaactacagcatttccagccactatggtgttttacaccaaaacatccctcactatctc

SEQ ID NO: 454395 - DNA, 1 bp, Homo sapiens
  chr3:195621979-195621980
  hyper
  bladder_and_urothelial vs. lung,pancreas_gallbladder, head_and_neck,colorectal,ovary
c

SEQ ID NO: 454396 - DNA, 691 bp, Homo sapiens
  chr3:195622064-195622755
  hyper
  bladder_and_urothelial vs. lung,pancreas_gallbladder, head_and_neck,colorectal,ovary
cgaaggggtctggggcccaggtatctggctatcccctagccttccccattacctgcggtccctcctcgcccccagccaggcgctggtaagcagatctctcccccatggagccccaaatcccagcggctgcggtcagggagagaagcagcgcccgcagcccccgccccgcagcggcaccggcagcgtcactgccctgcgtcctggggggccgggcctcgagcatcctccagaagtgcagggccgctactgcgtctcagcccccatagcctcatccgccatcggccggcggccgggtggtcgcgcccctcctcctgccggcctgcggccattccctcctgcagcccgtcccagctccgttcctcctctccggggcgcggctcccaccctctcccagtgagccagctgtgccagccccgggctgacccccaccgagagccggggctctgccttcgccggccgcggaaccgggctccactcagccctcagcccgcctccagggccccagagccaccaactggggccttggggattcacgagtcccccgtattcacggtaaggggccatccgagaagcccacagcagaggggcctccgtccgactccatctgagaccccctcctccgaggcatcccggggctgcagcccaccccgcccccagcctgccccggcggccactctgctcccagaacgcc

SEQ ID NO: 454397 - DNA, 772 bp, Homo sapiens
  chr3:195622260-195623032
  hyper
  bladder_and_urothelial vs. lung,head_and_neck, pancreas_gallbladder,colorectal
cgtcctggggggccgggcctcgagcatcctccagaagtgcagggccgctactgcgtctcagcccccatagcctcatccgccatcggccggcggccgggtggtcgcgcccctcctcctgccggcctgcggccattccctcctgcagcccgtcccagctccgttcctcctctccggggcgcggctcccaccctctcccagtgagccagctgtgccagccccgggctgacccccaccgagagccggggctctgccttcgccggccgcggaaccgggctccactcagccctcagcccgcctccagggccccagagccaccaactggggccttggggattcacgagtcccccgtattcacggtaaggggccatccgagaagcccacagcagaggggcctccgtccgactccatctgagaccccctcctccgaggcatcccggggctgcagcccaccccgcccccagcctgccccggcggccactctgctcccagaacgccgggcgcccacctgccccgcagctcggccctgcgctcagccggctccgcgccgcctcccagcgcccgcctcccgcgcaggccacgcccccgccccgaggcccccgcggccggttccccgcgcgccactcccgcaacgccgcacgcgctgtgcgctgggcacgcactgacctccttgacttcagagcggtgacacgagggcccggactcctgctcaaaagccgcccaacacaggcccacgcgggggtgccgcgcccagcactggcgcgaggccatcgcc

SEQ ID NO: 454398 - DNA, 207 bp, Homo sapiens; identical to SEQ ID NO: 332046
  chr4:10090148-10090355
  hyper
  bladder_and_urothelial vs. ovary,upper_gi,colorectal, breast

SEQ ID NO: 454399 - DNA, 57 bp, Homo sapiens
  chr4:15780742-15780799
  hyper
  bladder_and_urothelial vs. multiple_myeloma,uterine, ovary
cttaagtggtttgcaaagcctgtggtaggggaggagggtgtagaagggccaaaccac

SEQ ID NO: 454400 - DNA, 353 bp, Homo sapiens; identical to SEQ ID NO: 349919
  chr4:15780742-15781095
  hyper
  bladder_and_urothelial vs. ovary

SEQ ID NO: 454401 - DNA, 25 bp, Homo sapiens
  chr4:42401057-42401082
  hyper
  bladder_and_urothelial vs. uterine,myeloid_neoplasm, prostate,ovary,multiple_myeloma
ctgacttcagagcggaataaatcac

SEQ ID NO: 454402 - DNA, 6 bp, Homo sapiens
  chr4:57521376-57521382
  hyper
  bladder_and_urothelial vs. sarcoma,multiple_myeloma, myeloid_neoplasm,non_cancer,ovary,anorectal,uterine,thyroid, prostate
cgggga

SEQ ID NO: 454403 - DNA, 11 bp, Homo sapiens
  chr4:113443992-113444003
  hyper
  bladder_and_urothelial vs. non_cancer,myeloid_neoplasm, thyroid,multiple_myeloma
cgtgtctacag

SEQ ID NO: 454404 - DNA, 81 bp, Homo sapiens
  chr4:113444864-113444945
  hyper
  bladder_and_urothelial vs. cervical,uterine
cgaggtgtcagcagtaatttaaagaaggtattcagtccgccagcgtctcttttctccgtttcccccttccacccctcccac

SEQ ID NO: 454405 - DNA, 115 bp, Homo sapiens; identical to SEQ ID NO: 349967
  chr4:113445444-113445559
  hyper
  bladder_and_urothelial vs. cervical,uterine

SEQ ID NO: 454406 - DNA, 99 bp, Homo sapiens; identical to SEQ ID NO: 453281
  chr5:42950747-42950846
  hyper
  bladder_and_urothelial vs. sarcoma,multiple_myeloma, myeloid_neoplasm,thyroid,non_cancer

SEQ ID NO: 454407 - DNA, 175 bp, Homo sapiens; identical to SEQ ID NO: 346682
  chr5:42995428-42995603
  hyper
  bladder_and_urothelial vs. lymphoid_neoplasm

SEQ ID NO: 454408 - DNA, 76 bp, Homo sapiens
  chr5:54518558-54518634
  hyper
  bladder_and_urothelial vs. myeloid_neoplasm, multiple_myeloma,non_cancer
cgatcccagataaagcgctatgtagatccagcggttcgacttctccacgggggagagaaatgtcctaaatatggaa

SEQ ID NO: 454409 - DNA, 80 bp, Homo sapiens; identical to SEQ ID NO: 345180
  chr5:87957200-87957280
  hyper
  bladder_and_urothelial vs. melanoma,uterine, myeloid_neoplasm

SEQ ID NO: 454410 - DNA, 157 bp, Homo sapiens; identical to SEQ ID NO: 453301
  chr5:87969885-87970042
  hyper
  bladder_and_urothelial vs. uterine,non_cancer,sarcoma

SEQ ID NO: 454411 - DNA, 317 bp, Homo sapiens; identical to SEQ ID NO: 453302
  chr5:87970918-87971235
  hyper
  bladder_and_urothelial vs. uterine,thyroid,sarcoma, non_cancer,myeloid_neoplasm

SEQ ID NO: 454412 - DNA, 600 bp, Homo sapiens; identical to SEQ ID NO: 453303
  chr5:87970918-87971518
  hyper
  bladder_and_urothelial vs. uterine,thyroid,non_cancer, myeloid_neoplasm

SEQ ID NO: 454413 - DNA, 58 bp, Homo sapiens; identical to SEQ ID NO: 453320
  chr5:114515671-114515729
  hyper
  bladder_and_urothelial vs. prostate,non_cancer

SEQ ID NO: 454414 - DNA, 68 bp, Homo sapiens
  chr5:114515769-114515837
  hyper
  bladder_and_urothelial vs. prostate,non_cancer
cgggtgtatcgaatttgtcctttcttttctctttttctgtttttagtctgagttttgccgagctcccc

SEQ ID NO: 454415 - DNA, 58 bp, Homo sapiens; identical to SEQ ID NO: 453320
  chr5:114515671-114515729
  hyper
  bladder_and_urothelial vs. ovary,prostate,colorectal, myeloid_neoplasm,thyroid,non_cancer,uterine,cervical

SEQ ID NO: 454416 - DNA, 132 bp, Homo sapiens; identical to SEQ ID NO: 453321
  chr5:114515769-114515901
  hyper
  bladder_and_urothelial vs. ovary,prostate,colorectal, myeloid_neoplasm,thyroid,non_cancer,uterine,cervical

SEQ ID NO: 454417 - DNA, 44 bp, Homo sapiens; identical to SEQ ID NO: 346728
  chr5:114516274-114516318
  hyper
  bladder_and_urothelial vs. ovary,prostate,colorectal, myeloid_neoplasm,thyroid,non_cancer,uterine,cervical

SEQ ID NO: 454418 - DNA, 95 bp, Homo sapiens; identical to SEQ ID NO: 453336
  chr5:125930492-125930587
  hyper
  bladder_and_urothelial vs. upper_gi,pancreas_gallbladder, liver_bileduct

SEQ ID NO: 454419 - DNA, 170 bp, Homo sapiens; identical to SEQ ID NO: 350157
  chr5:125931062-125931232
  hyper
  bladder_and_urothelial vs. upper_gi,pancreas_gallbladder, liver_bileduct

SEQ ID NO: 454420 - DNA, 218 bp, Homo sapiens
  chr5:132082800-132083018
  hyper
  bladder_and_urothelial vs. colorectal,upper_gi
cgggagtcctggcccaaggcgggcgcagtctccagccgccccacccctggctgggggctctgctcagggagcacggccggcaggggggaggaggcgtgcgctaggcagcagcggggatggagggaagggagggggtccgccacccgcctgtgcgcgcccagtcctgccgcatcctgggtgcgcgccgcccacccgcggggcgagtgcccaggaggcga

SEQ ID NO: 454421 - DNA, 73 bp, Homo sapiens; identical to SEQ ID NO: 345194
  chr5:134880614-134880687
  hyper
  bladder_and_urothelial vs. thyroid,myeloid_neoplasm, non_cancer

SEQ ID NO: 454422 - DNA, 15 bp, Homo sapiens
  chr5:139227513-139227528
  hyper
  bladder_and_urothelial vs. cervical,uterine, myeloid_neoplasm,multiple_myeloma,thyroid,breast,ovary,sarcoma, non_cancer,renal
cgagtcctgcttggc

SEQ ID NO: 454423 - DNA, 64 bp, Homo sapiens
  chr5:139227938-139228002
  hyper
  bladder_and_urothelial vs. cervical,uterine, myeloid_neoplasm,multiple_myeloma,thyroid,breast,ovary,sarcoma, non_cancer,renal
ggaaggggctggcaggcaggctgcccaggctgccgccgagcgcgcaggtcccgcgccgcggtcc

SEQ ID NO: 454424 - DNA, 15 bp, Homo sapiens
  chr5:139228242-139228257
  hyper
  bladder_and_urothelial vs. cervical,uterine, myeloid_neoplasm,multiple_myeloma,thyroid,breast,ovary,sarcoma, non_cancer,renal
gggcgagaggcgcgc

SEQ ID NO: 454425 - DNA, 156 bp, Homo sapiens
  chr5:141931151-141931307
  hyper
  bladder_and_urothelial vs. colorectal
cgcagctcattgcagccccgaggaaatcaccgggggagggctcgggagtgcggcgcggcagccccataatttccagggcccttctcctacactgacacgtaattgtcagattgttttatgagagcagcttcctgcccgcttcctgcctggcttcca

SEQ ID NO: 454426 - DNA, 11 bp, Homo sapiens
  chr5:141931539-141931550
  hyper
  bladder_and_urothelial vs. colorectal
ccctcccctcc

SEQ ID NO: 454427 - DNA, 718 bp, Homo sapiens
  chr5:142783958-142784676
  hyper
  bladder_and_urothelial vs. lung
cgcgtgccggcaggtcccccaccaccgcatcatctgggcggccgggtcttcagctgccgccgccgcgctctcgcactgggagagaagttgcaaagcagaacccaccctcccccgcgccccgaccgtcccccaccctcttccccgagtctgcgaggcggcggcggcggcagaaggaggcgccgcctgccaagttcaacccccacccctcccgcccaatgtgctcacactcgaaggaagttgcacgccaaatgcaaaacctccagcgagctggatttctttgcactttttttttattattatgattaaggaaagcagggggcggcaggcttaaaagcaagttgcaggcgaaatagtaagttgctggcgaaatatagccccccttccgaaactcctgacctcttcttccaccccggccagggcccgcgtccaagttcccggtgcaggccccacccccgaatcttgacatttgctgccctcgactctgtgcgttgctcaccctatcacgttcataggacccctgcccctacaaataaaacaaaatacaggcagctttaaaatgccagcgttcaactccctacagatgttcctgttaggagcttccccctcagtccaaggggaagggaactcgtggtccgtcctgagaaaggagagggccgtggggcgaggggtgcccgtgcgggaagcccccgccccagctcccttccccagctcgccgcgt

SEQ ID NO: 454428 - DNA, 215 bp, Homo sapiens
  chr5:142784461-142784676
  hyper
  bladder_and_urothelial vs. lung,liver_bileduct
cgttcataggacccctgcccctacaaataaaacaaaatacaggcagctttaaaatgccagcgttcaactccctacagatgttcctgttaggagcttccccctcagtccaaggggaagggaactcgtggtccgtcctgagaaaggagagggccgtggggcgaggggtgcccgtgcgggaagcccccgccccagctcccttccccagctcgccgcgt

SEQ ID NO: 454429 - DNA, 32 bp, Homo sapiens; identical to SEQ ID NO: 345199
  chr5:142785272-142785304
  hyper
  bladder_and_urothelial vs. lung,liver_bileduct

SEQ ID NO: 454430 - DNA, 25 bp, Homo sapiens
  chr5:151150204-151150229
  hyper
  bladder_and_urothelial vs. pancreas_gallbladder,cervical, anorectal,head_and_neck,ovary,lymphoid_neoplasm, multiple_myeloma
cggctccccagaggccgaggccggc

SEQ ID NO: 454431 - DNA, 294 bp, Homo sapiens
  chr5:151150270-151150564
  hyper
  bladder_and_urothelial vs. pancreas_gallbladder,cervical, anorectal,head_and_neck,ovary,lymphoid_neoplasm, multiple_myeloma
cgctccacatgcttcatttccaaaattctcagcaaaactccgcgggagaccctggtcacatgcctggaacgagaacaaaccggggcgtgtctgtgccggacggctgggaaccaaagctatttccatagaaatagggccggccagccttgagttgtagccccgccagtgcctgaaacgccaggaggaggggacgagttgccttttaaaggcgtagcgacgagaataagcccccacccgcggcaattcgaggctgaacaatagtggtgcagctcgggacgtggtgcgagggcccac

SEQ ID NO: 454432 - DNA, 229 bp, Homo sapiens; identical to SEQ ID NO: 346758
  chr5:151150681-151150910
  hyper
  bladder_and_urothelial vs. pancreas_gallbladder,cervical, anorectal,head_and_neck,ovary,lymphoid_neoplasm, multiple_myeloma

SEQ ID NO: 454433 - DNA, 173 bp, Homo sapiens
  chr5:159343215-159343388
  hyper
  bladder_and_urothelial vs. ovary,lung,anorectal,uterine
cggaagagtgactagcggggaaaataaccccagcgggccgcctaggggtgggtgacccgcgatctccacgcccaggtcccgccctcgcggcccctgcccccgccccgccccccgcagagggcgcgccctgggagcggcgggggacgcggctggcttcccggcttgcggggtgg

SEQ ID NO: 454434 - DNA, 152 bp, Homo sapiens; identical to SEQ ID NO: 350210
  chr5:159343648-159343800
  hyper
  bladder_and_urothelial vs. ovary,lung,anorectal,uterine

SEQ ID NO: 454435 - DNA, 61 bp, Homo sapiens; identical to SEQ ID NO: 453345
  chr6:391113-391174
  hyper
  bladder_and_urothelial vs. lymphoid_neoplasm,thyroid, non_cancer,multiple_myeloma,myeloid_neoplasm

SEQ ID NO: 454436 - DNA, 10 bp, Homo sapiens
  chr6:5997274-5997284
  hyper
  bladder_and_urothelial vs. uterine,ovary
aattcaatcc

SEQ ID NO: 454437 - DNA, 80 bp, Homo sapiens; identical to SEQ ID NO: 350268
  chr6:6009552-6009632
  hyper
  bladder_and_urothelial vs. colorectal,ovary

SEQ ID NO: 454438 - DNA, 2 bp, Homo sapiens
  chr6:10417835-10417837
  hyper
  bladder_and_urothelial vs. breast,cervical
cg

SEQ ID NO: 454439 - DNA, 227 bp, Homo sapiens; identical to SEQ ID NO: 345207
  chr6:10417842-10418069
  hyper
  bladder_and_urothelial vs. breast,cervical

SEQ ID NO: 454440 - DNA, 130 bp, Homo sapiens
  chr6:26271217-26271347
  hyper
  bladder_and_urothelial vs. anorectal,myeloid_neoplasm, thyroid
cgaatgcggcgagcgagctgaatgtccttgggcatgatagtcactcgcttagcatggatggcacacaggttggtatcctcaaagagccccaccaagtaggcctcgcaggcctcctgcagggccatcaccg

SEQ ID NO: 454441 - DNA, 327 bp, Homo sapiens
  chr6:26272105-26272432
  hyper
  bladder_and_urothelial vs. anorectal
agcaacaaatgttaactgaattctattttgtcccaaatggtgttttgcttcggttgagaatttttaaggcacaggctaattttaggttttccaacgactcttatcatttacttttcgttgggtcctattgatgatattccaggataccacccccactagcctcttctgcaggataacttgaacactgcagtggccctgtccatctaaactttacaaggttttgtaaacgttactgaacttgcttcttcccgactacattaaagcacttacttgagatattaaacattttctcattagtcctgtttgcctagtcagtcacttgtatag

SEQ ID NO: 454442 - DNA, 210 bp, Homo sapiens; identical to SEQ ID NO: 453361
  chr6:26322359-26322569
  hyper
  bladder_and_urothelial vs. upper_gi,ovary,colorectal, uterine,melanoma,sarcoma

SEQ ID NO: 454443 - DNA, 248 bp, Homo sapiens; identical to SEQ ID NO: 453365
  chr6:26577475-26577723
  hyper
  bladder_and_urothelial vs. multiple_myeloma

SEQ ID NO: 454444 - DNA, 752 bp, Homo sapiens
  chr6:27655169-27655921
  hyper
  bladder_and_urothelial vs. colorectal,ovary,upper_gi, breast,uterine,melanoma
cgaatccgggcctcgcctcctcctcccttttcagatcataggatttctctcccccgcaaataatggcccttacttcgtaaacacgctggctccgtaatccctattattgttttgggggtttggttctgtccagggaggaggtgagggcagatgctcaagagaggctgtccccaccgtccttttgtctcagcgaaccgcagtccgcgcccgagcgccactagctgtcctgggacgggaactgcagcggcaagtgtgtgactttcttgagcccggagccacaggcctgggaagcgccgctgagacttcagggtcgtagtgacagaggaaccacccgaggctaggcggggagagggtgcagtttccggatcccgaaggcttcgagaagagccgacctgtctggaagggtctccaagaacagagaggactctgcaaccatcactcgggagccgcgtcctttcatccttgagacagctccgtggtccaacggttccccgatccgctggccgagatctcaagcttggatgcaacttcggattcgccccaggcaggaggaaggaagccccgattggaaacgttgacttgaatcttctcggatcagaattagcaggttaagaaaaactgtttccccgtaagaagcagggttctttggtgttcaatgtggagctccgccactcccagcccgggtgaaggaaaactgggaaacagaatgaatgtgattatctattcgaagataaatttccacaaagcatgcc

SEQ ID NO: 454445 - DNA, 782 bp, Homo sapiens
  chr6:27655460-27656242
  hyper
  bladder_and_urothelial vs. upper_gi,colorectal,ovary
cgccgctgagacttcagggtcgtagtgacagaggaaccacccgaggctaggcggggagagggtgcagtttccggatcccgaaggcttcgagaagagccgacctgtctggaagggtctccaagaacagagaggactctgcaaccatcactcgggagccgcgtcctttcatccttgagacagctccgtggtccaacggttccccgatccgctggccgagatctcaagcttggatgcaacttcggattcgccccaggcaggaggaaggaagccccgattggaaacgttgacttgaatcttctcggatcagaattagcaggttaagaaaaactgtttccccgtaagaagcagggttctttggtgttcaatgtggagctccgccactcccagcccgggtgaaggaaaactgggaaacagaatgaatgtgattatctattcgaagataaatttccacaaagcatgccgtttgatagtagcttataatgtggaagtaaggcatcctgtcatccggccggttagctcagttggttagagcgtggtgctaataacgccaaggtcgcgggttcgatccccgtactggccaagtattctctgtggcttttatcaccagaatggatagtaacccagacatcgatctaaacgtgtacctgtgtgtttctccaggcttaactttgccccgagaaaacggatctgtgaatttggtgcgccctcgcttactcgacagcggttaatttgaacggggacgtttctttccgctgcctccaaggcatacccacatcctaccc

SEQ ID NO: 454446 - DNA, 68 bp, Homo sapiens
  chr6:27777648-27777716
  hyper
  bladder_and_urothelial vs. upper_gi,colorectal,anorectal
cgaaaatagaaaataaaatatggagaccatgaactgctaagtctgtcagaggaataggtgaacaacaa

SEQ ID NO: 454447 - DNA, 402 bp, Homo sapiens; identical to SEQ ID NO: 350335
  chr6:27778156-27778558
  hyper
  bladder_and_urothelial vs. upper_gi,colorectal,anorectal

SEQ ID NO: 454448 - DNA, 134 bp, Homo sapiens
  chr6:27805774-27805908
  hyper
  bladder_and_urothelial vs. upper_gi
cggcctggatattgggcaggacaccaccctgggcgatggtcactttaccaagcagcttgttgagctcctcgtcgttgcggatggccagctgcaagtggcgcgggatgatgcgggtcttcttgttgtcgcgggcc

SEQ ID NO: 454449 - DNA, 535 bp, Homo sapiens; identical to SEQ ID NO: 358479
  chr6:27805936-27806471
  hyper
  bladder_and_urothelial vs. upper_gi

SEQ ID NO: 454450 - DNA, 72 bp, Homo sapiens; identical to SEQ ID NO: 358480
  chr6:27833292-27833364
  hyper
  bladder_and_urothelial vs. cervical,upper_gi

SEQ ID NO: 454451 - DNA, 2 bp, Homo sapiens
  chr6:27858278-27858280
  hyper
  bladder_and_urothelial vs. thyroid
cg

SEQ ID NO: 454452 - DNA, 51 bp, Homo sapiens
  chr6:27858740-27858791
  hyper
  bladder_and_urothelial vs. thyroid
ttttacctgacggcttctaattctgtcgcctaggctggagtgtggtggcgc

SEQ ID NO: 454453 - DNA, 315 bp, Homo sapiens; identical to SEQ ID NO: 453378
  chr6:28456978-28457293
  hyper
  bladder_and_urothelial vs. multiple_myeloma,thyroid

SEQ ID NO: 454454 - DNA, 209 bp, Homo sapiens; identical to SEQ ID NO: 453379
  chr6:28457345-28457554
  hyper
  bladder_and_urothelial vs. multiple_myeloma,thyroid

SEQ ID NO: 454455 - DNA, 24 bp, Homo sapiens
  chr6:28457530-28457554
  hyper
  bladder_and_urothelial vs. thyroid
cgcagtaagttctgaaaatcgcct

SEQ ID NO: 454456 - DNA, 143 bp, Homo sapiens; identical to SEQ ID NO: 350345
  chr6:28458192-28458335
  hyper
  bladder_and_urothelial vs. thyroid

SEQ ID NO: 454457 - DNA, 868 bp, Homo sapiens
  chr6:35655519-35656387
  hyper
  bladder_and_urothelial vs. colorectal,head_and_neck, cervical,lung
cggcggccaaacgctgaacacactgtcctgaaccacactgaagggtatctacaattctgcatctccgcttacaacttgaaacttactacgctttcgccaccactgcagaacccgattttagagactacgatggtcctgccggttcgttaatcgaagaaagccactctgcaccctgacgctcgtagtgtctttttggtaatactggtttttgactcttatactgtgaccggtgcacctttttggacgaccaataaggcggaagacgttttcacgtcccagaacagaagagcataaggagccctggcacagcgttcagccgcttcggtatggcctgggagtgacgcggatcacctgttagacggcgctgcgcggactcctccacaagcggccgacagcggcgatgcggttccccaacgcttgtcccgaggcggcaggtgaaggcggggaccgcccgtccacacccggagcgcggccaccccgccaccatccccttcacagccccgccaggtgggcgaatccgccccgcgcccgcggcgtcccggcgctcggctcgccctggggtccggttgtcccggcgcccggacccgaaagcgaagtttggctcccgcccgcagcggtgccggctgagggtccggccgcctgtccggggagagccgggggccagagaccggaggcggagcgggacctgtcatcccgggcgggaaacaaaagcccagtgaggacgggcgggcgcgacccgcctcgcctctgccgggagaggccggcgggggcggagagcggcgcccgcggtcactagtctccgcgcctcccgcggggagcaccggccccgcggcccctggggcgcggcgaggggcgccgcagtggggcc

SEQ ID NO: 454458 - DNA, 863 bp, Homo sapiens
  chr6:35655904-35656767
  hyper
  bladder_and_urothelial vs. head_and_neck,colorectal, ovary
cggccgacagcggcgatgcggttccccaacgcttgtcccgaggcggcaggtgaaggcggggaccgcccgtccacacccggagcgcggccaccccgccaccatccccttcacagccccgccaggtgggcgaatccgccccgcgcccgcggcgtcccggcgctcggctcgccctggggtccggttgtcccggcgcccggacccgaaagcgaagtttggctcccgcccgcagcggtgccggctgagggtccggccgcctgtccggggagagccgggggccagagaccggaggcggagcgggacctgtcatcccgggcgggaaacaaaagcccagtgaggacgggcgggcgcgacccgcctcgcctctgccgggagaggccggcgggggcggagagcggcgcccgcggtcactagtctccgcgcctcccgcggggagcaccggccccgcggcccctggggcgcggcgaggggcgccgcagtggggccgaggcctcccgcgcgctcccctcgaggcttccggaccccgctcccccgcgacacgcggctcctgggctgcgaagccgcgtgggggtgggagctgaggcagcgagtgcgaccgcggcgggacctggaaggagggcgttcggctcccggggcgccgcggccggccgccccatctccgtggccatggcgccggtacctgtcgccgcgggggctcgccgactccgtcactctccgccttgcccgtgctccgctaacccttcagcccgcccagcaggccgcccgcgcgccggacaccgccgcccgagactggcagcgcccgcgagccggcccgaatccccggggcagcgcccggcgccgtcccgccccagccggccgcaggaccc

SEQ ID NO: 454459 - DNA, 975 bp, Homo sapiens; identical to SEQ ID NO: 358567
  chr6:71998106-71999081
  hyper
  bladder_and_urothelial vs. lung,head_and_neck

SEQ ID NO: 454460 - DNA, 9 bp, Homo sapiens
  chr6:73333099-73333108
  hyper
  bladder_and_urothelial vs. head_and_neck,anorectal, breast,lung,thyroid,multiple_myeloma
ttgtggcgc

SEQ ID NO: 454461 - DNA, 41 bp, Homo sapiens
  chr6:74019373-74019414
  hyper
  bladder_and_urothelial vs. anorectal
cgtattctgagactgtttcaatcacaaataagactcggaac

SEQ ID NO: 454462 - DNA, 102 bp, Homo sapiens; identical to SEQ ID NO: 346835
  chr6:74020094-74020196
  hyper
  bladder_and_urothelial vs. anorectal

SEQ ID NO: 454463 - DNA, 105 bp, Homo sapiens
  chr6:106958136-106958241
  hyper
  bladder_and_urothelial vs. upper_gi,pancreas_gallbladder, uterine,colorectal,prostate,breast,non_cancer,cervical, myeloid_neoplasm,ovary,thyroid,multiple_myeloma,lung, lymphoid_neoplasm,renal,anorectal,head_and_neck,sarcoma,
  CONT. FROM ABOVE: liver_bileduct
cgccgcccctgctcccccgctttcccaggctcgcctcctcctcttcctgcccacctctatgccccgcacctacccagtccccactctggcaaaccccggagcgcc

SEQ ID NO: 454464 - DNA, 404 bp, Homo sapiens; identical to SEQ ID NO: 345246
  chr6:106958337-106958741
  hyper
  bladder_and_urothelial vs. upper_gi,pancreas_gallbladder, uterine,colorectal,prostate,breast,non_cancer,cervical, myeloid_neoplasm,ovary,thyroid,multiple_myeloma,lung, lymphoid_neoplasm,renal,anorectal,head_and_neck,sarcoma,
  CONT. FROM ABOVE: liver_bileduct

SEQ ID NO: 454465 - DNA, 334 bp, Homo sapiens
  chr6:106959606-106959940
  hyper
  bladder_and_urothelial vs. liver_bileduct,head_and_neck, pancreas_gallbladder,cervical,anorectal,sarcoma,lung,prostate, multiple_myeloma,myeloid_neoplasm,colorectal,lymphoid_neoplasm, non_cancer,upper_gi,renal,thyroid,breast,uterine
cccccctgacgccgagctgtcacctcgctggagcagcagtgcagcggctgtggctgtgcagcagtgccatgaaaatgattcaccccaattagaacctctggaggcagagggagagcctttcccagatgccaccaccactgccaagcagctgcattcctcgccgggaaattcctccaggcaagagaacgcagagacgcccgcccgcagtccgggggaggacgcttcaccaggtgctggccacgaacaggaggctttcctgggtgtgaggggtgcgccagggtcgcccacccaggagcggcccgcgggaggactaggcgaggcccctaacggagcc

SEQ ID NO: 454466 - DNA, 263 bp, Homo sapiens
  chr6:106960046-106960309
  hyper
  bladder_and_urothelial vs. liver_bileduct,head_and_neck, pancreas_gallbladder,cervical,anorectal,sarcoma,lung,prostate, multiple_myeloma,myeloid_neoplasm,colorectal,lymphoid_neoplasm, non_cancer,upper_gi,renal,thyroid,breast,uterine
cgcacacggccagctccgcgcaggcagactgcacagcccgccccaagggtcacgcccaccctgctaaggtgctaactttggacatctacttgagtaagactgagggggcacaagtggacgagccggtcgtgattactcccagagcggaagattgcggtgactgggacgacatggagaagaggtccagcggccgtaggtcggggaggcggagggggtcgcagaaatccaccgactcccccggcgcggacgccgagctccctgag

SEQ ID NO: 454467 - DNA, 62 bp, Homo sapiens
  chr6:106959878-106959940
  hyper
  bladder_and_urothelial vs. cervical,anorectal, lymphoid_neoplasm,colorectal,myeloid_neoplasm, pancreas_gallbladder,prostate,head_and_neck,thyroid,upper_gi, renal,non_cancer,liver_bileduct,lung,sarcoma,multiple_myeloma,
  CONT. FROM ABOVE: breast
cgccagggtcgcccacccaggagcggcccgcgggaggactaggcgaggcccctaacggagcc

SEQ ID NO: 454468 - DNA, 263 bp, Homo sapiens; identical to SEQ ID NO: 454466
  chr6:106960046-106960309
  hyper
  bladder_and_urothelial vs. cervical,anorectal, lymphoid_neoplasm,colorectal,myeloid_neoplasm, pancreas_gallbladder,prostate,head_and_neck,thyroid,upper_gi, renal,non_cancer,liver_bileduct,lung,sarcoma,multiple_myeloma,
  CONT. FROM ABOVE: breast

SEQ ID NO: 454469 - DNA, 155 bp, Homo sapiens; identical to SEQ ID NO: 345249
  chr6:106961023-106961178
  hyper
  bladder_and_urothelial vs. head_and_neck,cervical, pancreas_gallbladder,colorectal,prostate,myeloid_neoplasm, thyroid,lymphoid_neoplasm,non_cancer,upper_gi,renal,anorectal, liver_bileduct,lung,breast

SEQ ID NO: 454470 - DNA, 40 bp, Homo sapiens; identical to SEQ ID NO: 453396
  chr6:108478767-108478807
  hyper
  bladder_and_urothelial vs. uterine,ovary,cervical

SEQ ID NO: 454471 - DNA, 87 bp, Homo sapiens
  chr7:149024-149111
  hyper
  bladder_and_urothelial vs. cervical,anorectal, liver_bileduct,head_and_neck,lung
cgggagaacacggtcaggcccgcaggagacgccgcggcacctgccagaaagagagccgcaggccaagaccaggagacgcgagagagg

SEQ ID NO: 454472 - DNA, 575 bp, Homo sapiens; identical to SEQ ID NO: 350498
  chr7:149220-149795
  hyper
  bladder_and_urothelial vs. cervical,anorectal, liver_bileduct,head_and_neck,lung

SEQ ID NO: 454473 - DNA, 396 bp, Homo sapiens; identical to SEQ ID NO: 333010
  chr7:3018114-3018510
  hyper
  bladder_and_urothelial vs. cervical

SEQ ID NO: 454474 - DNA, 60 bp, Homo sapiens
  chr7:19156644-19156704
  hyper
  bladder_and_urothelial vs. anorectal,uterine,melanoma, sarcoma
cggactcccgccgccgctgctgctgccgccgccgccgcccgcgccgccgccgccgccaca

SEQ ID NO: 454475 - DNA, 60 bp, Homo sapiens; identical to SEQ ID NO: 454474
  chr7:19156644-19156704
  hyper
  bladder_and_urothelial vs. anorectal,sarcoma,uterine

SEQ ID NO: 454476 - DNA, 801 bp, Homo sapiens
  chr7:21984770-21985571
  hyper
  bladder_and_urothelial vs. head_and_neck,cervical,lung, anorectal,colorectal,melanoma,multiple_myeloma,upper_gi,renal, pancreas_gallbladder,uterine,ovary
cgagttaggcccttaacgcgtaattggggtcgtgctgtgcatatgatttgggatcttgcagcttgtttaactcggcccaatgacgttaccatttcccccaaatggttactaattccttgaaaacgtttacaaaagttctagaataaacactaaagttattatttttaaactccattatccaagttggactggtctggcgatcgactgttaaaaaaaaaaaattacaactttcttaagcttcctgatctctgtgccaattcccggagaaagtgtggggagtgcacaaaaaaagcccctcccccgtctcacgagggctgcaaacgcaggcgctgcgccccgctagctccccgcctgcacccccggcggccacccgagactgagcagagcgccaggctgagcgcggttgtgtgctggggcgaccggcctctgtggtccgcgtagcacaaacgtgacccactgcgcacacctgcagggcgcgcccactccggcactcaaccggctgggcgcgccagatccccagtgccgcagccaagggccacgtttccagcccaaggccagcaggaccgggtggcaaagggaagtcaaactgtgggtgcgtccggacggcggcgggcggccggaccctcacctggtagcgagtcgccaactccattcttcctaaccgggctccagtctcctcccagcacgcggccacgggagcccggactcaccacggcccggcgcaccaagaacgccccgcgcccgagcagctagcgcgctccgcccggagcacaggcgggccccgggaggggcgcacttgac

SEQ ID NO: 454477 - DNA, 808 bp, Homo sapiens
  chr7:21985078-21985886
  hyper
  bladder_and_urothelial vs. head_and_neck,lung,anorectal, cervical,uterine,upper_gi,colorectal,renal
cgagggctgcaaacgcaggcgctgcgccccgctagctccccgcctgcacccccggcggccacccgagactgagcagagcgccaggctgagcgcggttgtgtgctggggcgaccggcctctgtggtccgcgtagcacaaacgtgacccactgcgcacacctgcagggcgcgcccactccggcactcaaccggctgggcgcgccagatccccagtgccgcagccaagggccacgtttccagcccaaggccagcaggaccgggtggcaaagggaagtcaaactgtgggtgcgtccggacggcggcgggcggccggaccctcacctggtagcgagtcgccaactccattcttcctaaccgggctccagtctcctcccagcacgcggccacgggagcccggactcaccacggcccggcgcaccaagaacgccccgcgcccgagcagctagcgcgctccgcccggagcacaggcgggccccgggaggggcgcacttgacgccctggacagggggagcgcgttgcgctgccccctcggtgccgcctcactgggcctcgtggctccgatcacgttccaacttcgcggccactgaccttgtcttcgcaggcggcgcgagagggggctgcagttgggcgcggcaagagcaattaccagtgttagggcgccgggctcccccctgcagcagagggagggagtggagccgtccggcggggtttagcgcgggagaaatgagggggctgtcccggcgcagcctccagctggcacgcgcgctggatacttggcagggtttattccaggtcatgccctggggcgc

SEQ ID NO: 454478 - DNA, 122 bp, Homo sapiens
  chr7:23507981-23508103
  hyper
  bladder_and_urothelial vs. ovary
cggaacaccacgccacacggcagggggtaagcaccagaggacaagaagttctcagctgagtctctccacccaataacggagtgagaacagaatcggggcaaacagaagcagcagctcacctt

SEQ ID NO: 454479 - DNA, 761 bp, Homo sapiens
  chr7:23510081-23510842
  hyper
  bladder_and_urothelial vs. colorectal,cervical,upper_gi, anorectal,head_and_neck,uterine
cggccagcggactgtgaaaatatcacactacgtgaggcaggcgccgcctccccataaaaaacccagaagggtgactggcaggagggaggggagaggaggaggaggaggagggaggaaggcgcaggaggcggaaaaaatccgctccgagtgtccggctttttgaatgagccacgtgttcaaactacaaatcaacgtctcacgtgaggaatcccagagcctcaattagagtgggtttcggagaaaaaagcgagcgagaggaagagggggaggggaaacgagattgggagagggactctgagaagggggaggaggaagaaggaaaatgctaaaggaaccgcagccggcaccaagcggggcgctgacggtcacaactcgagtttgtaaagggttatctggtctgggcggatcctgggagggagggctggaatattgatttttttttttttaatgaggaaatgggcagaggtactaacaggcagttcctcagcgctagttaccgtagttttaatcattcgatttttcaaaataggttattaacaacaaaaccagagtcacaatcccgaactcgcctggtggctttaatggcattagaagtgtaaccccagcaaagccgcaggcacgtttctaaggctggcatggacggaaatgctgcgaggaggggtgggggagtgggtgaggggggcagggggtgggggcaagacaggcgggcgacgcgccccaccccgtgcgcccttctcgggccctgggcaccgcgcgagtgg

SEQ ID NO: 454480 - DNA, 229 bp, Homo sapiens
  chr7:23513246-23513475
  hyper
  bladder_and_urothelial vs. cervical,anorectal,uterine, head_and_neck
cgcccggcttgggaccagcctggagtctcaagccgaaacccctcacgcgggtgggcacacaatgcccggcgtgtcgcctgggcctcctcggaggtgctttaacaggctcttgcgcttttgaacggccctcctggactctgatctgtttaaactagaggcgttaataagtgataacctggatctgccctccttggaagctgcctgcctatattttattgtttaaaataaa

SEQ ID NO: 454481 - DNA, 53 bp, Homo sapiens; identical to SEQ ID NO: 345264
  chr7:23514425-23514478
  hyper
  bladder_and_urothelial vs. anorectal,cervical,uterine, head_and_neck

SEQ ID NO: 454482 - DNA, 104 bp, Homo sapiens
  chr7:27204281-27204385
  hyper
  bladder_and_urothelial vs. thyroid
cgcctcctctcccgtagccctgcgggccgctcttcactgctctccagacttggggccctatctgaggcgtcccaaacaccaacttctggctcctggccccaact

SEQ ID NO: 454483 - DNA, 22 bp, Homo sapiens
  chr7:27206083-27206105
  hyper
  bladder_and_urothelial vs. anorectal,myeloid_neoplasm
gtccccggccctcgaccccacg

SEQ ID NO: 454484 - DNA, 59 bp, Homo sapiens; identical to SEQ ID NO: 350549
  chr7:27233098-27233157
  hyper
  bladder_and_urothelial vs. anorectal

SEQ ID NO: 454485 - DNA, 38 bp, Homo sapiens
  chr7:27278957-27278995
  hyper
  bladder_and_urothelial vs. ovary,multiple_myeloma, myeloid_neoplasm,thyroid,uterine
cgacaagccagctcctggcccccggctcaggactcctc

SEQ ID NO: 454486 - DNA, 136 bp, Homo sapiens; identical to SEQ ID NO: 350553
  chr7:27279659-27279795
  hyper
  bladder_and_urothelial vs. ovary,multiple_myeloma, myeloid_neoplasm,thyroid,uterine

SEQ ID NO: 454487 - DNA, 60 bp, Homo sapiens
  chr7:27285386-27285446
  hyper
  bladder_and_urothelial vs. ovary
ggtgtctgctttggctgttcctgccctgcgaacactgtccccggagcgggaccagactac

SEQ ID NO: 454488 - DNA, 19 bp, Homo sapiens
  chr7:27285427-27285446
  hyper
  bladder_and_urothelial vs. ovary,breast
cggagcgggaccagactac

SEQ ID NO: 454489 - DNA, 7 bp, Homo sapiens
  chr7:37487365-37487372
  hyper
  bladder_and_urothelial vs. lymphoid_neoplasm,uterine, ovary,myeloid_neoplasm,thyroid,non_cancer,multiple_myeloma
cgctcgc

SEQ ID NO: 454490 - DNA, 102 bp, Homo sapiens; identical to SEQ ID NO: 345274
  chr7:50344738-50344840
  hyper
  bladder_and_urothelial vs. anorectal,multiple_myeloma

SEQ ID NO: 454491 - DNA, 28 bp, Homo sapiens
  chr7:155580882-155580910
  hyper
  bladder_and_urothelial vs. melanoma,prostate,renal, lymphoid_neoplasm,thyroid,pancreas_gallbladder,non_cancer, colorectal,cervical,liver_bileduct,multiple_myeloma,breast
agctaaaaatccaaccaaggccgggcgc

SEQ ID NO: 454492 - DNA, 345 bp, Homo sapiens; identical to SEQ ID NO: 201261
  chr7:156433175-156433520
  hyper
  bladder_and_urothelial vs. head_and_neck,anorectal

SEQ ID NO: 454493 - DNA, 167 bp, Homo sapiens
  chr7:156433522-156433689
  hyper
  bladder_and_urothelial vs. head_and_neck,anorectal
gggagggacggaaagaagggtggcccgccaggcgggcggggtccatggattcggggtgagggccgtccgcggcctcgctttcgcctcctccgagccgggccggcgatggccgcagctgtgaggcgaggtcgggtcccgtagcggcgcgcagcctccttgggggactc

SEQ ID NO: 454494 - DNA, 312 bp, Homo sapiens; identical to SEQ ID NO: 345291
  chr7:156433208-156433520
  hyper
  bladder_and_urothelial vs. colorectal, pancreas_gallbladder,cervical,head_and_neck

SEQ ID NO: 454495 - DNA, 458 bp, Homo sapiens
  chr7:156433522-156433980
  hyper
  bladder_and_urothelial vs. colorectal, pancreas_gallbladder,cervical,head_and_neck
gggagggacggaaagaagggtggcccgccaggcgggcggggtccatggattcggggtgagggccgtccgcggcctcgctttcgcctcctccgagccgggccggcgatggccgcagctgtgaggcgaggtcgggtcccgtagcggcgcgcagcctccttgggggactcggggtcctggttagtttccacagctccttctatctgaggggtacgaatttacggctgcctaaagccttagaacagtgatcccacgtcggtaattttagaacccggtaggaccggctgccatcaggggccccaggtgcagggtggtgtcagctttgagaggaattggagcctcgtcaccgcgcgcttcctgcatgagtggaacctcagaaaacggtcagcggggttcagaaggcaggagataacaccaagaccctacgtaggattgcatctttacgtcgtaggcttggtctc

SEQ ID NO: 454496 - DNA, 96 bp, Homo sapiens; identical to SEQ ID NO: 346951
  chr7:156799510-156799606
  hyper
  bladder_and_urothelial vs. thyroid

SEQ ID NO: 454497 - DNA, 30 bp, Homo sapiens
  chr7:157129285-157129315
  hyper
  bladder_and_urothelial vs. cervical
gctccaccgcaggaccgcggagcgagaggc

SEQ ID NO: 454498 - DNA, 576 bp, Homo sapiens; identical to SEQ ID NO: 333408
  chr8:26436208-26436784
  hyper
  bladder_and_urothelial vs. ovary,anorectal

SEQ ID NO: 454499 - DNA, 25 bp, Homo sapiens
  chr8:38323132-38323157
  hyper
cggcaaagacggccggcaatagcag

SEQ ID NO: 454500 - DNA, 239 bp, Homo sapiens; identical to SEQ ID NO: 453448
  chr8:60030908-60031147
  hyper
  bladder_and_urothelial vs. non_cancer,myeloid_neoplasm

SEQ ID NO: 454501 - DNA, 200 bp, Homo sapiens; identical to SEQ ID NO: 453449
  chr8:60030947-60031147
  hyper
  bladder_and_urothelial vs. ovary

SEQ ID NO: 454502 - DNA, 115 bp, Homo sapiens; identical to SEQ ID NO: 346983
  chr8:60031791-60031906
  hyper
  bladder_and_urothelial vs. ovary

SEQ ID NO: 454503 - DNA, 229 bp, Homo sapiens; identical to SEQ ID NO: 453453
  chr8:60031912-60032141
  hyper
  bladder_and_urothelial vs. thyroid,non_cancer,uterine

SEQ ID NO: 454504 - DNA, 203 bp, Homo sapiens; identical to SEQ ID NO: 453454
  chr8:60032288-60032491
  hyper
  bladder_and_urothelial vs. thyroid,non_cancer,uterine

SEQ ID NO: 454505 - DNA, 29 bp, Homo sapiens
  chr8:67025640-67025669
  hyper
  bladder_and_urothelial vs. pancreas_gallbladder,upper_gi, colorectal,multiple_myeloma,cervical,uterine,non_cancer,breast, renal,lung,prostate,thyroid,lymphoid_neoplasm,myeloid_neoplasm, melanoma
acttcctcagcaggagacatccttaggtc

SEQ ID NO: 454506 - DNA, 281 bp, Homo sapiens; identical to SEQ ID NO: 453458
  chr8:67025640-67025921
  hyper
  bladder_and_urothelial vs. lung,melanoma, pancreas_gallbladder,upper_gi,colorectal,uterine,prostate,renal, breast,non_cancer,cervical,multiple_myeloma,lymphoid_neoplasm, myeloid_neoplasm,thyroid,sarcoma

SEQ ID NO: 454507 - DNA, 245 bp, Homo sapiens; identical to SEQ ID NO: 453459
  chr8:67025676-67025921
  hyper
  bladder_and_urothelial vs. lung,upper_gi, pancreas_gallbladder,colorectal,melanoma,breast, lymphoid_neoplasm,renal,uterine,prostate,multiple_myeloma, cervical,sarcoma,ovary,non_cancer,liver_bileduct,
  CONT. FROM ABOVE: myeloid_neoplasm,thyroid

SEQ ID NO: 454508 - DNA, 5 bp, Homo sapiens
  chr8:67026485-67026490
  hyper
  bladder_and_urothelial vs. upper_gi,pancreas_gallbladder, lung,colorectal,ovary,cervical
cgcat

SEQ ID NO: 454509 - DNA, 235 bp, Homo sapiens; identical to SEQ ID NO: 453461
  chr8:67026578-67026813
  hyper
  bladder_and_urothelial vs. upper_gi,pancreas_gallbladder, lung,colorectal,ovary,cervical

SEQ ID NO: 454510 - DNA, 436 bp, Homo sapiens; identical to SEQ ID NO: 453464
  chr8:70745324-70745760
  hyper
  bladder_and_urothelial vs. ovary,uterine, myeloid_neoplasm,thyroid,prostate,non_cancer

SEQ ID NO: 454511 - DNA, 959 bp, Homo sapiens; identical to SEQ ID NO: 453465
  chr8:70745324-70746283
  hyper
  bladder_and_urothelial vs. uterine

SEQ ID NO: 454512 - DNA, 55 bp, Homo sapiens; identical to SEQ ID NO: 346990
  chr8:72756949-72757004
  hyper
  bladder_and_urothelial vs. sarcoma,renal,melanoma, myeloid_neoplasm,non_cancer

SEQ ID NO: 454513 - DNA, 541 bp, Homo sapiens
  chr8:121823361-121823902
  hyper
  bladder_and_urothelial vs. liver_bileduct
cgccacccttcccccccccccaacacacacacacccggccccctggggtgtgtccgcatgtggccgagtgagtgtgagtgtgagcgtgcgggtgggaagccgagcaggtgtgtgcgcgcccggcgcggcccgcgcgctgttaaccccttaccttccagcagcacttccttgcccgcgcgcttcaacgcctgcaccgcctcgtcgtgggtggcgtcccgcaggtcggctccgttcacggacaggatggcgtcgcccacgtacagggcttgggtctggtccgccgccagccccttgaagatcttgctgatgaggatgggcatcttgttctccttgccccccttgatgctgatccccagcccgcccagctcctgcttcagcaccttcacgccacgcttctggttcgagatggactcgggcacctgctcgggcaggtcggtgaaagcggtgcggaccccggcgggcgagtccgggggctgcgcgccgcccgcgcccgggtgcccagccccggcgcccctgcagaacgagccattggtggcggtcc

SEQ ID NO: 454514 - DNA, 27 bp, Homo sapiens
  chr8:121823930-121823957
  hyper
  bladder_and_urothelial vs. liver_bileduct
ctcgctgctcagaaccagggcgtcctc

SEQ ID NO: 454515 - DNA, 121 bp, Homo sapiens
  chr8:144636569-144636690
  hyper
  bladder_and_urothelial vs. liver_bileduct
gcgcacacgtacgtgtatgcacacgcgcacaaacatgcacaaaacacggacgtgcatgcacacgcgcacatgtacacaacacgcacgtgcatacacatacgcacaatacgcacgtgtgtgc

SEQ ID NO: 454516 - DNA, 77 bp, Homo sapiens; identical to SEQ ID NO: 345318
  chr8:145698674-145698751
  hyper
  bladder_and_urothelial vs. cervical,ovary,anorectal, head_and_neck,lung

SEQ ID NO: 454517 - DNA, 93 bp, Homo sapiens
  chr9:34664955-34665048
  hyper
  bladder_and_urothelial vs. upper_gi,liver_bileduct,ovary, uterine
cgtgtggggaggggcgctcggctcgaatggcgacagcggcggcagagtcaggaggtcagtacggtgggcttcggtttaaatctttaatgcact

SEQ ID NO: 454518 - DNA, 82 bp, Homo sapiens; identical to SEQ ID NO: 359301
  chr9:34665215-34665297
  hyper
  bladder_and_urothelial vs. upper_gi,liver_bileduct,ovary, uterine

SEQ ID NO: 454519 - DNA, 381 bp, Homo sapiens
  chr9:71788570-71788951
  hyper
  bladder_and_urothelial vs. head_and_neck,renal
cgtgtatgtgttggttagccgggcaggcctctagacaggacctaaaactttgaggttttcccagttcgactcttcgtaggagaactgaagctgcctgtgtgaggccctgcgaacctcgccaaaaagtcttcctacaggatgcccccgcgacctcaccggggaaacaccgcggacagtcgggccagcagcgcccggagctcactccaggtctccaaacttgcagcacttcccagagcgcgcgcgctcggagcgggacctgcttgctccagtgcacgccgcggagcgaaccatcgggctggcgggggtggaggggtgcaggcgtgggggctgcgggccgctcgggccttgggcttctcctgccgccgccgccgcctcccgccc

SEQ ID NO: 454520 - DNA, 15 bp, Homo sapiens
  chr9:71788936-71788951
  hyper
  bladder_and_urothelial vs. head_and_neck,breast,renal, melanoma,sarcoma,non_cancer,cervical
cgccgcctcccgccc

SEQ ID NO: 454521 - DNA, 45 bp, Homo sapiens; identical to SEQ ID NO: 350872
  chr9:71789757-71789802
  hyper
  bladder_and_urothelial vs. head_and_neck,breast,renal, melanoma,sarcoma,non_cancer,cervical

SEQ ID NO: 454522 - DNA, 94 bp, Homo sapiens
  chr9:100503340-100503434
  hyper
  bladder_and_urothelial vs. anorectal,head_and_neck,ovary, sarcoma
cgtttccggttctgatgcgctggatcttgaagctcttctccaccactagcgccctgcttgtaaccttagcacacgcaactctgaacaggaatag

SEQ ID NO: 454523 - DNA, 28 bp, Homo sapiens
  chr9:100503960-100503988
  hyper
  bladder_and_urothelial vs. anorectal,head_and_neck,ovary, sarcoma
tgcctcccgggacaaggccagggtcatc

SEQ ID NO: 454524 - DNA, 208 bp, Homo sapiens
  chr9:135645005-135645213
  hyper
  bladder_and_urothelial vs. liver_bileduct
cggtcatgagcttgcctctaacccagcaaagcgtgtggaagaaacatcggcagtgagggctcccatctctcatttctcaaagagccgagactttcagcgaggccacttgccattcctggtaggtaatcagatcgctgttaattaataaagctgtcaggtggctcgtcctctctggtcattagtatcctttcagaaagagaatcctgcc

SEQ ID NO: 454525 - DNA, 452 bp, Homo sapiens; identical to SEQ ID NO: 359456
  chr9:135645250-135645702
  hyper
  bladder_and_urothelial vs. liver_bileduct

SEQ ID NO: 454526 - DNA, 90 bp, Homo sapiens
  chrY:2655227-2655317
  hyper
  bladder_and_urothelial vs. breast,ovary,cervical,uterine, anorectal,thyroid
cggcagcatcttcgccttccgacgaggtcgatacttataattcgggtatttctctctgtgcatggcctgtaatttctgtgcctcctggaa

SEQ ID NO: 454527 - DNA, 596 bp, Homo sapiens; identical to SEQ ID NO: 345675
  chrY:2655346-2655942
  hyper
  bladder_and_urothelial vs. breast,ovary,cervical,uterine, anorectal,thyroid

SEQ ID NO: 454528 - DNA, 74 bp, Homo sapiens
  chrY:16635744-16635818
  hyper
  bladder_and_urothelial vs. ovary,breast,cervical
cgcgctggaaaccccgcgtgaagatgaaatgactgtagctccgtgctgctcctccaaactcgggagcggtatcc

SEQ ID NO: 454529 - DNA, 624 bp, Homo sapiens
  chrY:16636060-16636684
  hyper
  bladder_and_urothelial vs. ovary,breast,cervical
ggtatcaggtgatccggagccctagtcggtgcccactaagaacaccccttctcccatcgggggttcggaggagtgttaagcctgcgggtctgccagtccctaaggtagggatgggggaggggtctgaggaatccgttccaataggcacaccatccccacagccctagaaaaggcaaccaccacccgctccttcctcccgcaccatcccatctcaaggctctctgctgacccgggccgatttcatctggtctcttctcccccgcttcccacctcccaattcccgcgcagctcggctccgttccctcccactcccctaggcggaactgaaagcgaagatcagccaagagcacagtcggaggcggcagagacggtggcgggtgagctaggggctgtgagacgaagcagggagagagtgaacttcagccccgtcccctccccactgccacggctggggcaacccaacccgcgcctgaagcggcttggcttgacctgcggaagcgcgggccgggatggcgtggggagagggaggtaggtgccactgggctgcagatgacgagtgggttgggggcttgctgtgggacaagaggttcaggttccggcctgcgccttccactccgcggtggc

SEQ ID NO: 454530 - DNA, 949 bp, Homo sapiens
  chrY:16636193-16637142
  hyper
  bladder_and_urothelial vs. ovary,breast,cervical
cgttccaataggcacaccatccccacagccctagaaaaggcaaccaccacccgctccttcctcccgcaccatcccatctcaaggctctctgctgacccgggccgatttcatctggtctcttctcccccgcttcccacctcccaattcccgcgcagctcggctccgttccctcccactcccctaggcggaactgaaagcgaagatcagccaagagcacagtcggaggcggcagagacggtggcgggtgagctaggggctgtgagacgaagcagggagagagtgaacttcagccccgtcccctccccactgccacggctggggcaacccaacccgcgcctgaagcggcttggcttgacctgcggaagcgcgggccgggatggcgtggggagagggaggtaggtgccactgggctgcagatgacgagtgggttgggggcttgctgtgggacaagaggttcaggttccggcctgcgccttccactccgcggtggcgctctctgcctgcggttttccaggaggccgatctaccccagggacactctcatccttcaggcggtctcctggacgccctttcctccccttgcctcccagcctgacctggctctttcgcccctcggagaaccggtaggttggggtccctcggcgggggtctagtgagccgagtcgcgagctttgcgcccccggtatctaggccccgtgccgcgcgcaaatccgggcccaggcgtacagttctggagcctagtcgccgccagacacagggccctttgtacccggaggagcgggagcgggagcgggggcgtcagggcaacccttgcaccccagaggcctgcctaggaccaccctgggaacaaatgtctcgctcggaaaacgaggtgaacccggaggatgtcctacgcatcatacccctccccttcttgagaaggctttttctttttttctttttttttccc

SEQ ID NO: 454531 - DNA, 4 bp, Homo sapiens
  JH636052.4:5118715-5118719
  hyper
  bladder_and_urothelial vs. multiple_myeloma,cervical, non_cancer,sarcoma,thyroid,myeloid_neoplasm
cgcc

SEQ ID NO: 454532 - DNA, 269 bp, Homo sapiens; identical to SEQ ID NO: 336767
  chr1:1246145-1246414
  hypo
  bladder_and_urothelial vs. anorectal,liver_bileduct, sarcoma

SEQ ID NO: 454533 - DNA, 18 bp, Homo sapiens
  chr1:2141579-2141597
  hypo
  bladder_and_urothelial vs. liver_bileduct
cggctcacctgcctgcct

SEQ ID NO: 454534 - DNA, 102 bp, Homo sapiens; identical to SEQ ID NO: 352724
  chr1:2141684-2141786
  hypo
  bladder_and_urothelial vs. liver_bileduct

SEQ ID NO: 454535 - DNA, 19 bp, Homo sapiens
  chr1:2267137-2267156
  hypo
  bladder_and_urothelial vs. renal
cgggtgggagcggggcggg

SEQ ID NO: 454536 - DNA, 226 bp, Homo sapiens; identical to SEQ ID NO: 362233
  chr1:2267752-2267978
  hypo
  bladder_and_urothelial vs. renal

SEQ ID NO: 454537 - DNA, 120 bp, Homo sapiens
  chr1:3111118-3111238
  hypo
  bladder_and_urothelial vs. upper_gi,anorectal
cggcaactggccactgtctccccaccacacgccaccgtctccccaccacacgccaccgtctccccaccacacgccaccgtctccccgccacacgccaccgtctccccgccacatgccacc

SEQ ID NO: 454538 - DNA, 326 bp, Homo sapiens; identical to SEQ ID NO: 347777
  chr1:3111463-3111789
  hypo
  bladder_and_urothelial vs. upper_gi,anorectal

SEQ ID NO: 454539 - DNA, 489 bp, Homo sapiens
  chr1:3321510-3321999
  hypo
  bladder_and_urothelial vs. upper_gi
cgcccccgtgctccctacaccccctggtccaaatgtagatggagtgcggcagagtgggtaggaggcccctgcggtggctcgggcccttccgtgtgactaggaaggaaaggaagtctcagggaagaccgtgtcccccaggtcagaaggatcagggccgagaccagaacccaggcccctccagagcgcggctcctgtcctcccgccggtgtggaaggaagaggctggcggggctgagccgagcctccaccccgagcccgccagggtctcagcaccacagctgaaaacgctttctgcagccctgtctcacgcagcctcagttcaggaattgttcttgaggaaagcagccggggaggctctgcggctcacttaaggccctgcagcgggtccttgctacacagagacctgtcccggcctgcttggtgcagactgcaacgtggcaagagagacaggcagggccctgccccccacagccggttggtccgccagcca

SEQ ID NO: 454540 - DNA, 121 bp, Homo sapiens; identical to SEQ ID NO: 362275
  chr1:3322260-3322381
  hypo
  bladder_and_urothelial vs. upper_gi

SEQ ID NO: 454541 - DNA, 43 bp, Homo sapiens; identical to SEQ ID NO: 454086
  chr1:3325196-3325239
  hypo
  bladder_and_urothelial vs. colorectal,upper_gi,breast

SEQ ID NO: 454542 - DNA, 5 bp, Homo sapiens
  chr1:3328265-3328270
  hypo
  bladder_and_urothelial vs. anorectal
cggcg

SEQ ID NO: 454543 - DNA, 215 bp, Homo sapiens
  chr1:3328319-3328534
  hypo
  bladder_and_urothelial vs. anorectal
catccttgtacccccggccgcctctgctacctcccacatcgctgctcaagagccccctgaaccacacccaggacgccaagctccccagtcccctggggaacccagccctgcccctggtctccgccgtcagcaacagcagccagggcacgacggcagctgcggggcccgaggagaagttcgagagccgcctggaggactcctgtgtggagaagctg

SEQ ID NO: 454544 - DNA, 371 bp, Homo sapiens; identical to SEQ ID NO: 352754
  chr1:3328625-3328996
  hypo
  bladder_and_urothelial vs. anorectal

SEQ ID NO: 454545 - DNA, 644 bp, Homo sapiens; identical to SEQ ID NO: 362278
  chr1:3328625-3329269
  hypo
  bladder_and_urothelial vs. anorectal

SEQ ID NO: 454546 - DNA, 68 bp, Homo sapiens; identical to SEQ ID NO: 362288
  chr1:3408704-3408772
  hypo
  bladder_and_urothelial vs. breast

SEQ ID NO: 454547 - DNA, 4 bp, Homo sapiens
  chr1:3606857-3606861
  hypo
cgga

SEQ ID NO: 454548 - DNA, 39 bp, Homo sapiens
  chr1:3659512-3659551
  hypo
  bladder_and_urothelial vs. ovary,anorectal,breast, cervical
cgagggaagctactggcgagaagcattggagggttctgg

SEQ ID NO: 454549 - DNA, 179 bp, Homo sapiens; identical to SEQ ID NO: 454087
  chr1:3663338-3663517
  hypo
  bladder_and_urothelial vs. ovary

SEQ ID NO: 454550 - DNA, 101 bp, Homo sapiens; identical to SEQ ID NO: 346306
  chr1:3663983-3664084
  hypo
  bladder_and_urothelial vs. ovary

SEQ ID NO: 454551 - DNA, 116 bp, Homo sapiens; identical to SEQ ID NO: 336887
  chr1:6623403-6623519
  hypo
  bladder_and_urothelial vs. uterine,ovary,breast

SEQ ID NO: 454552 - DNA, 155 bp, Homo sapiens; identical to SEQ ID NO: 336895
  chr1:7842602-7842757
  hypo
  bladder_and_urothelial vs. melanoma

SEQ ID NO: 454553 - DNA, 89 bp, Homo sapiens; identical to SEQ ID NO: 336902
  chr1:9725455-9725544
  hypo

SEQ ID NO: 454554 - DNA, 77 bp, Homo sapiens
  chr1:14125492-14125569
  hypo
  bladder_and_urothelial vs. lymphoid_neoplasm,sarcoma, prostate,myeloid_neoplasm,melanoma,non_cancer,multiple_myeloma, renal
cgtggtgagtcagagctgctgggtaatgtgacttagtcagctggatcaaagggtaacaaacacaagcactccaggca

SEQ ID NO: 454555 - DNA, 54 bp, Homo sapiens; identical to SEQ ID NO: 352807
  chr1:14125622-14125676
  hypo
  bladder_and_urothelial vs. lymphoid_neoplasm,sarcoma, prostate,myeloid_neoplasm,melanoma,non_cancer,multiple_myeloma, renal

SEQ ID NO: 454556 - DNA, 215 bp, Homo sapiens; identical to SEQ ID NO: 336959
  chr1:19659439-19659654
  hypo
  bladder_and_urothelial vs. liver_bileduct,ovary, pancreas_gallbladder,colorectal,lung,uterine,head_and_neck

SEQ ID NO: 454557 - DNA, 195 bp, Homo sapiens; identical to SEQ ID NO: 336972
  chr1:22003573-22003768
  hypo
  bladder_and_urothelial vs. head_and_neck

SEQ ID NO: 454558 - DNA, 158 bp, Homo sapiens; identical to SEQ ID NO: 362397
  chr1:23693515-23693673
  hypo
  bladder_and_urothelial vs. lymphoid_neoplasm,melanoma, thyroid

SEQ ID NO: 454559 - DNA, 247 bp, Homo sapiens; identical to SEQ ID NO: 336983
  chr1:25070663-25070910
  hypo
  bladder_and_urothelial vs. liver_bileduct

SEQ ID NO: 454560 - DNA, 33 bp, Homo sapiens; identical to SEQ ID NO: 454089
  chr1:25255579-25255612
  hypo
  bladder_and_urothelial vs. lymphoid_neoplasm,cervical, head_and_neck

SEQ ID NO: 454561 - DNA, 7 bp, Homo sapiens
  chr1:25255934-25255941
  hypo
  bladder_and_urothelial vs. lymphoid_neoplasm,cervical, head_and_neck
agccaga

SEQ ID NO: 454562 - DNA, 807 bp, Homo sapiens; identical to SEQ ID NO: 330733
  chr1:26662538-26663345
  hypo
  bladder_and_urothelial vs. head_and_neck,breast,cervical, lung,anorectal,ovary,prostate,upper_gi,pancreas_gallbladder, uterine,renal,non_cancer,colorectal,multiple_myeloma, lymphoid_neoplasm

SEQ ID NO: 454563 - DNA, 134 bp, Homo sapiens; identical to SEQ ID NO: 337002
  chr1:28887889-28888023
  hypo
  bladder_and_urothelial vs. colorectal

SEQ ID NO: 454564 - DNA, 20 bp, Homo sapiens
  chr1:29061394-29061414
  hypo
  bladder_and_urothelial vs. liver_bileduct, pancreas_gallbladder,ovary,lung,lymphoid_neoplasm
tttttaaagtttatcttcac

SEQ ID NO: 454565 - DNA, 86 bp, Homo sapiens; identical to SEQ ID NO: 337004
  chr1:31474705-31474791
  hypo
  bladder_and_urothelial vs. lung,head_and_neck

SEQ ID NO: 454566 - DNA, 80 bp, Homo sapiens; identical to SEQ ID NO: 347804
  chr1:31863055-31863135
  hypo
  bladder_and_urothelial vs. melanoma

SEQ ID NO: 454567 - DNA, 30 bp, Homo sapiens
  chr1:35664856-35664886
  hypo
  bladder_and_urothelial vs. liver_bileduct, lymphoid_neoplasm,renal,sarcoma,non_cancer,uterine
atatcttttcttaatctttttttttccttc

SEQ ID NO: 454568 - DNA, 130 bp, Homo sapiens; identical to SEQ ID NO: 337031
  chr1:40771005-40771135
  hypo
  bladder_and_urothelial vs. pancreas_gallbladder,upper_gi

SEQ ID NO: 454569 - DNA, 334 bp, Homo sapiens; identical to SEQ ID NO: 337032
  chr1:41281568-41281902
  hypo
  bladder_and_urothelial vs. breast

SEQ ID NO: 454570 - DNA, 462 bp, Homo sapiens; identical to SEQ ID NO: 330784
  chr1:41832027-41832489
  hypo
  bladder_and_urothelial vs. pancreas_gallbladder, head_and_neck,ovary,cervical,breast,colorectal,lung,upper_gi, uterine,anorectal,prostate

SEQ ID NO: 454571 - DNA, 133 bp, Homo sapiens
  chr1:42633144-42633277
  hypo
  bladder_and_urothelial vs. cervical,breast,ovary
cgtgtgtgtatacactgaggtgcgtgtgtgctgaagtgtgtgtatacactgaggtgtgcgtgagtgctgacgtgtgtgtatacactgaggtgtgtgtgagtgctgacgtgtgtgtgtgcactgacgtgtgtgt

SEQ ID NO: 454572 - DNA, 14 bp, Homo sapiens
  chr1:42633299-42633313
  hypo
  bladder_and_urothelial vs. cervical,breast,ovary
tgaggtgtgtgtgc

SEQ ID NO: 454573 - DNA, 60 bp, Homo sapiens; identical to SEQ ID NO: 453555
  chr1:44351032-44351092
  hypo
  bladder_and_urothelial vs. liver_bileduct

SEQ ID NO: 454574 - DNA, 108 bp, Homo sapiens; identical to SEQ ID NO: 337078
  chr1:52659468-52659576
  hypo
  bladder_and_urothelial vs. liver_bileduct, pancreas_gallbladder,lung,head_and_neck,upper_gi,cervical,ovary, breast

SEQ ID NO: 454575 - DNA, 238 bp, Homo sapiens; identical to SEQ ID NO: 337086
  chr1:54408693-54408931
  hypo
  bladder_and_urothelial vs. head_and_neck

SEQ ID NO: 454576 - DNA, 818 bp, Homo sapiens; identical to SEQ ID NO: 330937
  chr1:113498720-113499538
  hypo
  bladder_and_urothelial vs. upper_gi,head_and_neck

SEQ ID NO: 454577 - DNA, 1 bp, Homo sapiens
  chr1:120321389-120321390
  hypo
  bladder_and_urothelial vs. head_and_neck,cervical
c

SEQ ID NO: 454578 - DNA, 253 bp, Homo sapiens; identical to SEQ ID NO: 347831
  chr1:153540242-153540495
  hypo
  bladder_and_urothelial vs. breast,uterine,prostate,ovary, thyroid,lymphoid_neoplasm,non_cancer,renal,multiple_myeloma, sarcoma,melanoma

SEQ ID NO: 454579 - DNA, 63 bp, Homo sapiens
  chr1:159869545-159869608
  hypo
  bladder_and_urothelial vs. cervical,head_and_neck, sarcoma
cgcgcccggcccaccagtgctttttcccacaccacatccacaatctttggtccacagaggccc

SEQ ID NO: 454580 - DNA, 3 bp, Homo sapiens
  chr1:159869686-159869689
  hypo
  bladder_and_urothelial vs. cervical,head_and_neck, sarcoma
atc

SEQ ID NO: 454581 - DNA, 158 bp, Homo sapiens; identical to SEQ ID NO: 337206
  chr1:161367435-161367593
  hypo
  bladder_and_urothelial vs. melanoma,sarcoma,prostate

SEQ ID NO: 454582 - DNA, 712 bp, Homo sapiens; identical to SEQ ID NO: 349339
  chr1:161409991-161410703
  hypo
  bladder_and_urothelial vs. colorectal,upper_gi,uterine

SEQ ID NO: 454583 - DNA, 55 bp, Homo sapiens; identical to SEQ ID NO: 331013
  chr1:163378364-163378419
  hypo
  bladder_and_urothelial vs. ovary,lung,upper_gi

SEQ ID NO: 454584 - DNA, 81 bp, Homo sapiens; identical to SEQ ID NO: 337222
  chr1:167221039-167221120
  hypo
  bladder_and_urothelial vs. upper_gi,liver_bileduct, pancreas_gallbladder,head_and_neck,colorectal,lung,ovary

SEQ ID NO: 454585 - DNA, 70 bp, Homo sapiens; identical to SEQ ID NO: 453568
  chr1:171554936-171555006
  hypo
  bladder_and_urothelial vs. liver_bileduct,colorectal, sarcoma,ovary,breast,renal,upper_gi

SEQ ID NO: 454586 - DNA, 122 bp, Homo sapiens; identical to SEQ ID NO: 347839
  chr1:171555061-171555183
  hypo
  bladder_and_urothelial vs. liver_bileduct,colorectal, sarcoma,ovary,breast,renal,upper_gi

SEQ ID NO: 454587 - DNA, 181 bp, Homo sapiens
  chr1:175372314-175372495
  hypo
  bladder_and_urothelial vs. anorectal
cgcagagcccctcctcacattgtcctcgcccactgcaggcattcagacactgccgctggccgcagtcctcaccaacgtagccctcctcgcataaacaggtaccgttggcacatctccccttccccgaacagtccccagggcacctcagttccctgcagtcctcgccagtgtagggctcttc

SEQ ID NO: 454588 - DNA, 145 bp, Homo sapiens; identical to SEQ ID NO: 347841
  chr1:175372572-175372717
  hypo
  bladder_and_urothelial vs. anorectal

SEQ ID NO: 454589 - DNA, 153 bp, Homo sapiens
  chr1:175375048-175375201
  hypo
  bladder_and_urothelial vs. anorectal
cgatgaaccattacctgactcatccccccaaaatcaggttaatgtatttcaaactggctatgcagtgtagaaaatccctgaactgaatccctcggggaagaactgcatttagatcttagagacatattaaccggcagctacagactaggacac

SEQ ID NO: 454590 - DNA, 114 bp, Homo sapiens
  chr1:178531640-178531754
  hypo
  bladder_and_urothelial vs. upper_gi,colorectal,breast, melanoma
cgtcagccaccgcacccgacctctactttttagctataatgatttgcaagggcaaaaatttcacggtacaaggagctttcttttgaaacaatgagtaagctcttcacaagtacc

SEQ ID NO: 454591 - DNA, 51 bp, Homo sapiens; identical to SEQ ID NO: 362598
  chr1:178531798-178531849
  hypo
  bladder_and_urothelial vs. upper_gi,colorectal,breast, melanoma

SEQ ID NO: 454592 - DNA, 67 bp, Homo sapiens; identical to SEQ ID NO: 337250
  chr1:180478120-180478187
  hypo
  bladder_and_urothelial vs. liver_bileduct, pancreas_gallbladder,lung,upper_gi,ovary,uterine,colorectal, anorectal,lymphoid_neoplasm,renal,sarcoma

SEQ ID NO: 454593 - DNA, 250 bp, Homo sapiens; identical to SEQ ID NO: 454103
  chr1:182583799-182584049
  hypo
  bladder_and_urothelial vs. cervical,ovary

SEQ ID NO: 454594 - DNA, 40 bp, Homo sapiens; identical to SEQ ID NO: 344983
  chr1:182584613-182584653
  hypo
  bladder_and_urothelial vs. cervical,ovary

SEQ ID NO: 454595 - DNA, 225 bp, Homo sapiens; identical to SEQ ID NO: 337294
  chr1:205245793-205246018
  hypo
  bladder_and_urothelial vs. upper_gi

SEQ ID NO: 454596 - DNA, 112 bp, Homo sapiens; identical to SEQ ID NO: 362646
  chr1:207936524-207936636
  hypo
  bladder_and_urothelial vs. upper_gi,liver_bileduct

SEQ ID NO: 454597 - DNA, 135 bp, Homo sapiens; identical to SEQ ID NO: 352975
  chr1:226163215-226163350
  hypo
  bladder_and_urothelial vs. cervical

SEQ ID NO: 454598 - DNA, 331 bp, Homo sapiens
  chr1:228280981-228281312
  hypo
  bladder_and_urothelial vs. ovary
cgtaccaagaggccctggaattgagggtgggggttgctgtggactctttctccctcttaggaaactctattgggtctccatctgtcacagaagcagtaaatgatgtaggggctgccaggtatagggtcctgtggggatgctggaacatgccgaggcaggacgtgccagccaccctctgcccatatgtgcagcagggccacagatgtgcttgtcggtaggagagaccaagctgtctgtgtgccgatgtcttgacacctgagacttcaggttcacccatcctggttctgccattccattgcagggtggcttccctcctttggggactcttaac

SEQ ID NO: 454599 - DNA, 829 bp, Homo sapiens; identical to SEQ ID NO: 337353
  chr1:228461610-228462439
  hypo
  bladder_and_urothelial vs. head_and_neck,lung, pancreas_gallbladder

SEQ ID NO: 454600 - DNA, 69 bp, Homo sapiens; identical to SEQ ID NO: 352983
  chr1:228504692-228504761
  hypo
  bladder_and_urothelial vs. anorectal,cervical,breast, head_and_neck,lymphoid_neoplasm

SEQ ID NO: 454601 - DNA, 359 bp, Homo sapiens
  chr1:228528433-228528792
  hypo
  bladder_and_urothelial vs. renal,breast,anorectal, prostate,thyroid,myeloid_neoplasm,non_cancer,uterine,sarcoma, cervical
cgcaacaaggcgcggaacagacagaactgcgcgctgctggagcaggcctatgccgtggtgtctgccctgccacagcgcgctgagaacaagctgcacgtgtccctcatggagaactacccaggcaccctgcaggccctgggcgagcccatccgccaggttggggagggccaggggccggggccgggagatgcatgtgatgtgggtgggtattggggtgctgggggcttgtatctggggctgccaggaggtggcggtgtgtgcatgagttgggcagagcactgggtacctgggtggctgtggggcctgcaccgctgggcaatctggcccaccacaggctgaccgcagcccacaccctcccc

SEQ ID NO: 454602 - DNA, 50 bp, Homo sapiens; identical to SEQ ID NO: 347858
  chr1:228529382-228529432
  hypo
  bladder_and_urothelial vs. renal,breast,anorectal, prostate,thyroid,myeloid_neoplasm,non_cancer,uterine,sarcoma, cervical

SEQ ID NO: 454603 - DNA, 128 bp, Homo sapiens; identical to SEQ ID NO: 337363
  chr1:229038524-229038652
  hypo
  bladder_and_urothelial vs. lung,head_and_neck,melanoma

SEQ ID NO: 454604 - DNA, 253 bp, Homo sapiens; identical to SEQ ID NO: 353018
  chr1:245254446-245254699
  hypo
  bladder_and_urothelial vs. uterine,colorectal,ovary, breast,renal,upper_gi,prostate

SEQ ID NO: 454605 - DNA, 97 bp, Homo sapiens; identical to SEQ ID NO: 453579
  chr1:246330213-246330310
  hypo
  bladder_and_urothelial vs. liver_bileduct

SEQ ID NO: 454606 - DNA, 298 bp, Homo sapiens; identical to SEQ ID NO: 337438
  chr1:246930862-246931160
  hypo
  bladder_and_urothelial vs. pancreas_gallbladder,upper_gi, breast,colorectal,uterine,liver_bileduct,ovary, lymphoid_neoplasm

SEQ ID NO: 454607 - DNA, 142 bp, Homo sapiens; identical to SEQ ID NO: 453584
  chr10:851108-851250
  hypo
  bladder_and_urothelial vs. liver_bileduct

SEQ ID NO: 454608 - DNA, 175 bp, Homo sapiens; identical to SEQ ID NO: 354474
  chr10:851504-851679
  hypo
  bladder_and_urothelial vs. liver_bileduct

SEQ ID NO: 454609 - DNA, 309 bp, Homo sapiens
  chr10:3329809-3330118
  hypo
  bladder_and_urothelial vs. head_and_neck,thyroid, cervical,melanoma
cttctcaaaatcgctgcattcagggtttccgccgtcaccctgctggcagtgaactagaggacccgtcccaccggagctggtccatggagaggtgccacagcctgtgagccacggcagagcggagaagcctgggacccctgtcacctctcagagcagcgcctcacatggcagaaggagctgctttccgaagagctaaaggttgccataaatatttataagagacctggcattgctgcgctggagggcagtgtgttatgataaaagtcacaaatggagctgaaaaaacagtggcttctacatgacagctac

SEQ ID NO: 454610 - DNA, 55 bp, Homo sapiens; identical to SEQ ID NO: 453586
  chr10:5523206-5523261
  hypo
  bladder_and_urothelial vs. colorectal,uterine,breast, upper_gi,melanoma,liver_bileduct,prostate,sarcoma,ovary,thyroid, lymphoid_neoplasm

SEQ ID NO: 454611 - DNA, 70 bp, Homo sapiens; identical to SEQ ID NO: 453587
  chr10:5538706-5538776
  hypo
  bladder_and_urothelial vs. prostate,renal,uterine

SEQ ID NO: 454612 - DNA, 192 bp, Homo sapiens; identical to SEQ ID NO: 348414
  chr10:5538938-5539130
  hypo
  bladder_and_urothelial vs. prostate,renal,uterine

SEQ ID NO: 454613 - DNA, 130 bp, Homo sapiens; identical to SEQ ID NO: 340547
  chr10:6023448-6023578
  hypo
  bladder_and_urothelial vs. cervical,pancreas_gallbladder, colorectal,sarcoma,lymphoid_neoplasm

SEQ ID NO: 454614 - DNA, 184 bp, Homo sapiens
  chr10:8055498-8055682
  hypo
  bladder_and_urothelial vs. head_and_neck,lung,anorectal, cervical,colorectal,melanoma,breast
cgtttttctgtttcttgattctaaaacagtgatgacgctgatcatggcattaatgaagtgctgatctactatattttttagtttaatatgcctgtttattcggttaacagtataaagtaatcattctgatctggcctctttttgttttttttcccattccctccatttttgccgcttccgcttt

SEQ ID NO: 454615 - DNA, 86 bp, Homo sapiens; identical to SEQ ID NO: 354513
  chr10:8055764-8055850
  hypo
  bladder_and_urothelial vs. head_and_neck,lung,anorectal, cervical,colorectal,melanoma,breast

SEQ ID NO: 454616 - DNA, 118 bp, Homo sapiens; identical to SEQ ID NO: 454109
  chr10:8075813-8075931
  hypo
  bladder_and_urothelial vs. myeloid_neoplasm

SEQ ID NO: 454617 - DNA, 23 bp, Homo sapiens
  chr10:13405240-13405263
  hypo
  bladder_and_urothelial vs. head_and_neck
ggaagcacacctccatgcgatgc

SEQ ID NO: 454618 - DNA, 209 bp, Homo sapiens; identical to SEQ ID NO: 452758
  chr10:17270445-17270654
  hypo
  bladder_and_urothelial vs. melanoma,sarcoma,uterine, ovary,lung,myeloid_neoplasm,multiple_myeloma,non_cancer,renal, thyroid

SEQ ID NO: 454619 - DNA, 209 bp, Homo sapiens; identical to SEQ ID NO: 452758
  chr10:17270445-17270654
  hypo
  bladder_and_urothelial vs. melanoma,uterine,sarcoma, renal,ovary,myeloid_neoplasm,multiple_myeloma,thyroid, non_cancer,lung,breast,cervical,prostate

SEQ ID NO: 454620 - DNA, 63 bp, Homo sapiens; identical to SEQ ID NO: 454116
  chr10:22540645-22540708
  hypo
  bladder_and_urothelial vs. anorectal,ovary,sarcoma, lymphoid_neoplasm,non_cancer,myeloid_neoplasm,thyroid

SEQ ID NO: 454621 - DNA, 223 bp, Homo sapiens; identical to SEQ ID NO: 340607
  chr10:24863037-24863260
  hypo
  bladder_and_urothelial vs. melanoma

SEQ ID NO: 454622 - DNA, 398 bp, Homo sapiens; identical to SEQ ID NO: 340646
  chr10:70184294-70184692
  hypo
  bladder_and_urothelial vs. pancreas_gallbladder, multiple_myeloma,anorectal,ovary,head_and_neck,cervical, lymphoid_neoplasm,sarcoma,upper_gi,thyroid,melanoma,uterine

SEQ ID NO: 454623 - DNA, 96 bp, Homo sapiens
  chr10:72784980-72785076
  hypo
  bladder_and_urothelial vs. sarcoma
cgaactgcatgcagcaacttgtatgaatcgcaaaggcttatgctgagcagaagccactatcacaaggttaccttctgcatgattttatctatacta

SEQ ID NO: 454624 - DNA, 39 bp, Homo sapiens
  chr10:74451119-74451158
  hypo
  bladder_and_urothelial vs. lung,head_and_neck
cgtgagccaccgcgcccggccttacatgattttttatta

SEQ ID NO: 454625 - DNA, 102 bp, Homo sapiens; identical to SEQ ID NO: 340668
  chr10:76287784-76287886
  hypo
  bladder_and_urothelial vs. liver_bileduct,head_and_neck

SEQ ID NO: 454626 - DNA, 226 bp, Homo sapiens; identical to SEQ ID NO: 340681
  chr10:80855265-80855491
  hypo
  bladder_and_urothelial vs. liver_bileduct,upper_gi

SEQ ID NO: 454627 - DNA, 79 bp, Homo sapiens; identical to SEQ ID NO: 287325
  chr10:94449318-94449397
  hypo
  bladder_and_urothelial vs. cervical,pancreas_gallbladder, liver_bileduct

SEQ ID NO: 454628 - DNA, 82 bp, Homo sapiens; identical to SEQ ID NO: 354577
  chr10:98364552-98364634
  hypo
  bladder_and_urothelial vs. upper_gi

SEQ ID NO: 454629 - DNA, 99 bp, Homo sapiens
  chr10:116045880-116045979
  hypo
  bladder_and_urothelial vs. colorectal,breast,prostate, lung
cggtgcctgtgggggagtaccaggatgtgcctgacctggtctggagcctcgatggcattcccttccgtggtggccccaccctgacgggcagtgccttgc

SEQ ID NO: 454630 - DNA, 180 bp, Homo sapiens; identical to SEQ ID NO: 354592
  chr10:116046022-116046202
  hypo
  bladder_and_urothelial vs. colorectal,breast,prostate, lung

SEQ ID NO: 454631 - DNA, 833 bp, Homo sapiens; identical to SEQ ID NO: 454123
  chr10:126106668-126107501
  hypo
  bladder_and_urothelial vs. upper_gi,head_and_neck,ovary, pancreas_gallbladder,lung,breast,uterine,cervical,renal, anorectal,sarcoma

SEQ ID NO: 454632 - DNA, 846 bp, Homo sapiens; identical to SEQ ID NO: 454124
  chr10:126107015-126107861
  hypo
  bladder_and_urothelial vs. lung,pancreas_gallbladder, head_and_neck,upper_gi,breast,ovary,anorectal,renal,uterine, cervical,sarcoma

SEQ ID NO: 454633 - DNA, 231 bp, Homo sapiens
  chr10:134733835-134734066
  hypo
  bladder_and_urothelial vs. anorectal
gagctcctcacagagctgcagagtggcattgcctgtgtctcctgccggcgatgaggccgagccagtgctcctctgagtgggggaggctccaggaactttggagcagagtctgccaagaccctcctgctgctctgctggctgcgctgtccagctgccctccaagcagaggcacccggcctcagactcccgagctcccacccagcccctgcgtagcaccccaagtcccagcag

SEQ ID NO: 454634 - DNA, 4 bp, Homo sapiens
  chr11:862613-862617
  hypo
cgct

SEQ ID NO: 454635 - DNA, 683 bp, Homo sapiens
  chr11:1262498-1263181
  hypo
  bladder_and_urothelial vs. pancreas_gallbladder
cgaaaagaccaccctatgggtgaccccgagcatccggtcgacggcggccctcacctcgcagactgggtccagctcaggccccgtgacggtcaccccctcggccccaggtaccaccacctgccagccccggtgtcagtggacagagtggtttgatgaggactaccccaagtctgaacaacttggaggggacgttgagtcctacgataagatcagggccgctggagggcacttatgccagcagcctaaggacatagagtgccaggccgagagcttccccaactggaccctggcacaggtggggcagaaggtgcactgtgacgtccacttcggcctggtgtgcaggaactgggagcaggagggcgtcttcaagatgtgctacaactacaggatccgggtcctctgctgcagtgacgaccactgcaggggacgtgccacaaccccgccaccgaccacagagctggagacggccaccaccaccaccacccaggccctgttctcaacgccgcagcctacgagtagcccggggctgaccagggctcccccggccagcaccacagcagtccccaccctctcagaaggactgacatcccccagatacacaagcacccttggtacagccaccacgggaggccccacgacgcctgcaggctccacagaacccactgtcccaggggtggccacat

SEQ ID NO: 454636 - DNA, 183 bp, Homo sapiens
  chr11:1262998-1263181
  hypo
  bladder_and_urothelial vs. colorectal,renal,breast, pancreas_gallbladder,sarcoma,non_cancer,prostate
cgccgcagcctacgagtagcccggggctgaccagggctcccccggccagcaccacagcagtccccaccctctcagaaggactgacatcccccagatacacaagcacccttggtacagccaccacgggaggccccacgacgcctgcaggctccacagaacccactgtcccaggggtggccacat

SEQ ID NO: 454637 - DNA, 123 bp, Homo sapiens; identical to SEQ ID NO: 354664
  chr11:1263764-1263887
  hypo
  bladder_and_urothelial vs. colorectal,renal,breast, pancreas_gallbladder,sarcoma,non_cancer,prostate

SEQ ID NO: 454638 - DNA, 99 bp, Homo sapiens
  chr11:1275538-1275637
  hypo
  bladder_and_urothelial vs. colorectal,cervical, pancreas_gallbladder
cgtcctcactgtcaccatggtgcatgggaaggaggagggcctggtgagtccaggctgcgggtggcacagtgttggcccagtcccaaccgcacctgggca

SEQ ID NO: 454639 - DNA, 526 bp, Homo sapiens
  chr11:1275755-1276281
  hypo
  bladder_and_urothelial vs. colorectal,cervical, pancreas_gallbladder
aaatgcagccagctggagactccaggcccccagggaagatctgggctttggggtgggggatacacaggggggtctctgcacatggaggcagagccccaaagagaagccctgctccccgagcccacctggcactgcctcccagctcagggttcccctggattcccccagatcctgtttgaccaaattccggtgagcagcggtttcagcaagaacggcgtgcttgtgtctgtgctggggaccaccaccatgcgtgtggacattcctgccctgggcgtgagcgtcaccttcaatggccaagtcttccaggcccggctgccctacagcctcttccacaacaacaccgagggccagtgcggtgagtgggcggcgggtcctgccccggccagggctgctgctgggcctgacaacccagtgagcataggggaagcctggggaggggaatgagtgggggaggggggtgggggctgtgaaaggctccccagattccagccccgcggtgacgcccccactcccaggcacctgcacc

SEQ ID NO: 454640 - DNA, 122 bp, Homo sapiens
  chr11:9405271-9405393
  hypo
  bladder_and_urothelial vs. lymphoid_neoplasm,renal, multiple_myeloma,non_cancer,uterine,prostate
cgcgcctggcaggaaggtgtattttaatagggattatgcttttactctgcattaagaggtgatttatatgaagtcccaactaaaatttggatactcaataaaaagccatgatttcagtattt

SEQ ID NO: 454641 - DNA, 117 bp, Homo sapiens; identical to SEQ ID NO: 340979
  chr11:9552484-9552601
  hypo
  bladder_and_urothelial vs. head_and_neck

SEQ ID NO: 454642 - DNA, 311 bp, Homo sapiens
  chr11:9554670-9554981
  hypo
  bladder_and_urothelial vs. sarcoma,multiple_myeloma, pancreas_gallbladder
cgtgcccagccaccattctattttctgtctctataaatttgactgttgtaggcgcctcatattatatttgtctttttgtgtctggctttatgtgtacctttaaaagcaagtttttcctgtcttttgaccaagaggttgcgtattttcatttttgcacggagccgcacagattatgtagcctgtcctgctgaggcgtgcgcttctattagcccttctgtttttgctgcagatgtgtgacctgtgttttgggaatatattatctcttgttagattatgggctcctttaagacagctggggatttaaatttccc

SEQ ID NO: 454643 - DNA, 23 bp, Homo sapiens
  chr11:34535022-34535045
  hypo
  bladder_and_urothelial vs. cervical
cggcctgcggaggcaagcaggtc

SEQ ID NO: 454644 - DNA, 48 bp, Homo sapiens; identical to SEQ ID NO: 365647
  chr11:34535248-34535296
  hypo
  bladder_and_urothelial vs. cervical

SEQ ID NO: 454645 - DNA, 17 bp, Homo sapiens
  chr11:47358910-47358927
  hypo
  bladder_and_urothelial vs. prostate,breast,thyroid, lymphoid_neoplasm
cggggggcaggaccagg

SEQ ID NO: 454646 - DNA, 106 bp, Homo sapiens; identical to SEQ ID NO: 348490
  chr11:47359237-47359343
  hypo
  bladder_and_urothelial vs. prostate,breast,thyroid, lymphoid_neoplasm

SEQ ID NO: 454647 - DNA, 29 bp, Homo sapiens
  chr11:57500997-57501026
  hypo
  bladder_and_urothelial vs. head_and_neck,lung, lymphoid_neoplasm,prostate,sarcoma,multiple_myeloma,melanoma, renal,non_cancer,cervical,uterine,thyroid,myeloid_neoplasm, ovary,breast
cgattacaggcgtgagtcaccgcgcccag

SEQ ID NO: 454648 - DNA, 99 bp, Homo sapiens; identical to SEQ ID NO: 379749
  chr11:64310467-64310566
  hypo
  bladder_and_urothelial vs. colorectal

SEQ ID NO: 454649 - DNA, 262 bp, Homo sapiens; identical to SEQ ID NO: 334296
  chr11:65582723-65582985
  hypo
  bladder_and_urothelial vs. liver_bileduct

SEQ ID NO: 454650 - DNA, 329 bp, Homo sapiens; identical to SEQ ID NO: 341138
  chr11:67078663-67078992
  hypo
  bladder_and_urothelial vs. uterine,lung,upper_gi,breast, melanoma,ovary,prostate,colorectal,liver_bileduct

SEQ ID NO: 454651 - DNA, 606 bp, Homo sapiens; identical to SEQ ID NO: 454133
  chr11:68606653-68607259
  hypo
  bladder_and_urothelial vs. colorectal,anorectal

SEQ ID NO: 454652 - DNA, 302 bp, Homo sapiens; identical to SEQ ID NO: 341169
  chr11:71169280-71169582
  hypo
  bladder_and_urothelial vs. liver_bileduct

SEQ ID NO: 454653 - DNA, 522 bp, Homo sapiens
  chr11:71192127-71192649
  hypo
  bladder_and_urothelial vs. lymphoid_neoplasm,renal, sarcoma,anorectal,liver_bileduct,non_cancer,colorectal,prostate
cgtgctgtgaccttgggccccaaggtgctgtccgtccattctgtggttcagtgtccccattttaaaatgaggacgatgataatacccacgtcctgggtctgtcttcagaatcacatgtgtcccttctcacgaggtgcctaaagcagagacgggcgtcctgagagcccagcgttgactctggcactgcagcctcctggggcctgcttgggtgggttgttgggtgctgtgggcaggggccaccgcctccgggctccatgttctgattgccctgcagccttggacctgcctgctggctctgggattttttaagacgaagtcaacaggtaagacttccagtttctagtgagcccactttgcttgttctgctggttggtctggttttattctggggcagggtagggatttttttttttttttttagtgcaaacaacaaaaagcatttcatcactctgcctccatggggagcttagtctgtgctagccagaggcaaggtgggcacagtggctggtgggtcagctccac

SEQ ID NO: 454654 - DNA, 169 bp, Homo sapiens; identical to SEQ ID NO: 348516
  chr11:71192889-71193058
  hypo
  bladder_and_urothelial vs. lymphoid_neoplasm,renal, sarcoma,anorectal,liver_bileduct,non_cancer,colorectal,prostate

SEQ ID NO: 454655 - DNA, 835 bp, Homo sapiens; identical to SEQ ID NO: 341173
  chr11:71229615-71230450
  hypo
  bladder_and_urothelial vs. cervical,ovary,colorectal, upper_gi,pancreas_gallbladder,breast,uterine

SEQ ID NO: 454656 - DNA, 63 bp, Homo sapiens; identical to SEQ ID NO: 354789
  chr11:73073669-73073732
  hypo

SEQ ID NO: 454657 - DNA, 88 bp, Homo sapiens
  chr11:73491526-73491614
  hypo
  bladder_and_urothelial vs. pancreas_gallbladder,upper_gi, lung
cgagcgaaacaccatttcaaaaataaataaataaataaaaataaaaaataaactttgagtggatagcctcttggagatggggcaggtc

SEQ ID NO: 454658 - DNA, 218 bp, Homo sapiens
  chr11:75152263-75152481
  hypo
  bladder_and_urothelial vs. colorectal,upper_gi
cggatgggacccccgcacaccacagcagggagaagagccacggtgcgttgactgtgtagaggttcacactcaggttccaggacgcgtagtccctgtggggcaggggagaggcaggtcagcatgcggaccctggcagctccaggcccagtgtcggggctggtaaagcacgtcctgttcacgacctcacagccatgcccggggcaaggaacattggctcc

SEQ ID NO: 454659 - DNA, 359 bp, Homo sapiens; identical to SEQ ID NO: 365779
  chr11:75152536-75152895
  hypo
  bladder_and_urothelial vs. colorectal,upper_gi

SEQ ID NO: 454660 - DNA, 136 bp, Homo sapiens
  chr11:76371492-76371628
  hypo
  bladder_and_urothelial vs. colorectal
cgcccagttccagtgtctccagggcattgtggcttaagtcaaggagcatcaggcagggcagggagcctaagcgccgggcctcaaaggtccgcaagcagtttctgctgaggttcaggaagcacagggaggtcaggtg

SEQ ID NO: 454661 - DNA, 71 bp, Homo sapiens; identical to SEQ ID NO: 354796
  chr11:76372236-76372307
  hypo
  bladder_and_urothelial vs. colorectal

SEQ ID NO: 454662 - DNA, 250 bp, Homo sapiens; identical to SEQ ID NO: 341208
  chr11:85989397-85989647
  hypo
  bladder_and_urothelial vs. upper_gi

SEQ ID NO: 454663 - DNA, 341 bp, Homo sapiens
  chr11:114112625-114112966
  hypo
  bladder_and_urothelial vs. anorectal
ctacccttgctgctgcgatgtatttgatcaatgtctatcctttagctttagcttccagagctcgggaacgacgtcgattttgcccatcactggggccacatactgggtgctcagtgttgcatagcctgggcccactctggatttgcccctgagcatggggatttggaggtgtgagtcccgacactggctctcactccagatgggtaaagaatgcaccttgtattcccacctttctgaggcaccccctctcctgtctcccacaggcactgacatggccgtcttctgtctgctgtgtgggaagcgcttccaggcgcagagcgcactgcagcagcacatggagg

SEQ ID NO: 454664 - DNA, 199 bp, Homo sapiens; identical to SEQ ID NO: 365806
  chr11:114113052-114113251
  hypo
  bladder_and_urothelial vs. anorectal

SEQ ID NO: 454665 - DNA, 59 bp, Homo sapiens; identical to SEQ ID NO: 341240
  chr11:117188555-117188614
  hypo
  bladder_and_urothelial vs. lung,head_and_neck,anorectal, melanoma

SEQ ID NO: 454666 - DNA, 48 bp, Homo sapiens
  chr11:120008024-120008072
  hypo
  bladder_and_urothelial vs. sarcoma,lymphoid_neoplasm, prostate
cggtctggcagaagagctccatcgtcttgccatgcacgggacacttgc

SEQ ID NO: 454667 - DNA, 151 bp, Homo sapiens; identical to SEQ ID NO: 341260
  chr11:120338518-120338669
  hypo
  bladder_and_urothelial vs. head_and_neck

SEQ ID NO: 454668 - DNA, 3 bp, Homo sapiens
  chr11:120384147-120384150
  hypo
tcc

SEQ ID NO: 454669 - DNA, 152 bp, Homo sapiens
  chr11:121023460-121023612
  hypo
  bladder_and_urothelial vs. anorectal
cggcagacctcctggctcctgcctctccccgtgcctttcatctccctgagtaggtgagcaatggccatgagaaaaccctcctcggtgccttgtgatcgtgcgagtcttgacttgtctctcttgttccagctgtcacctgccctccaaacagc

SEQ ID NO: 454670 - DNA, 172 bp, Homo sapiens
  chr11:124071504-124071676
  hypo
  bladder_and_urothelial vs. sarcoma,upper_gi,thyroid, lymphoid_neoplasm,uterine,renal,colorectal,myeloid_neoplasm
cgtctagaaaaaaaaaaaaaatcactaagaccgtaccaggcagacacacaggcggctggacgtcgagaggcgcacaccgacaggcaccagcatgccagcaggccaccgaccggcagaagcagaacgacacagtttggcgggggcagttggaggaaagcccaggccactgagc

SEQ ID NO: 454671 - DNA, 17 bp, Homo sapiens
  chr11:133938756-133938773
  hypo
  bladder_and_urothelial vs. sarcoma
cgccaagttcattgaaa

SEQ ID NO: 454672 - DNA, 161 bp, Homo sapiens; identical to SEQ ID NO: 345407
  chr11:133939437-133939598
  hypo
  bladder_and_urothelial vs. sarcoma

SEQ ID NO: 454673 - DNA, 235 bp, Homo sapiens; identical to SEQ ID NO: 341306
  chr12:417402-417637
  hypo
  bladder_and_urothelial vs. liver_bileduct,uterine

SEQ ID NO: 454674 - DNA, 454 bp, Homo sapiens; identical to SEQ ID NO: 341312
  chr12:1943616-1944070
  hypo
  bladder_and_urothelial vs. anorectal,breast

SEQ ID NO: 454675 - DNA, 86 bp, Homo sapiens; identical to SEQ ID NO: 452813
  chr12:4377809-4377895
  hypo
  bladder_and_urothelial vs. lymphoid_neoplasm

SEQ ID NO: 454676 - DNA, 142 bp, Homo sapiens; identical to SEQ ID NO: 452814
  chr12:4378558-4378700
  hypo
  bladder_and_urothelial vs. lymphoid_neoplasm

SEQ ID NO: 454677 - DNA, 245 bp, Homo sapiens; identical to SEQ ID NO: 452815
  chr12:4378558-4378803
  hypo
  bladder_and_urothelial vs. colorectal,lymphoid_neoplasm, non_cancer,myeloid_neoplasm,thyroid

SEQ ID NO: 454678 - DNA, 88 bp, Homo sapiens; identical to SEQ ID NO: 454142
  chr12:4378715-4378803
  hypo
  bladder_and_urothelial vs. colorectal

SEQ ID NO: 454679 - DNA, 62 bp, Homo sapiens
  chr12:27742262-27742324
  hypo
  bladder_and_urothelial vs. colorectal,liver_bileduct, sarcoma,upper_gi
cgtgcatcctcttgagccgtgaattttctggtctcaaagtcccaggctcaagcgatccttgc

SEQ ID NO: 454680 - DNA, 84 bp, Homo sapiens
  chr12:29373882-29373966
  hypo
  bladder_and_urothelial vs. head_and_neck,anorectal, lymphoid_neoplasm,melanoma,breast,renal,sarcoma,non_cancer, prostate,cervical,thyroid,multiple_myeloma
cgattcttcccttggggcaggctgtccttatccacattgggctgccagcgcttgggaggggctactggcgcagtgtgtttactg

SEQ ID NO: 454681 - DNA, 18 bp, Homo sapiens
  chr12:29374085-29374103
  hypo
  bladder_and_urothelial vs. head_and_neck,anorectal, lymphoid_neoplasm,melanoma,breast,renal,sarcoma,non_cancer, prostate,cervical,thyroid,multiple_myeloma
cgctttacctcttagtgc

SEQ ID NO: 454682 - DNA, 37 bp, Homo sapiens
  chr12:32831540-32831577
  hypo
  bladder_and_urothelial vs. head_and_neck,uterine, colorectal,anorectal,lymphoid_neoplasm,lung,prostate,ovary, renal,cervical,multiple_myeloma,sarcoma,non_cancer
actgctcacgcctgtaatcccaacactttgggaggcc

SEQ ID NO: 454683 - DNA, 180 bp, Homo sapiens; identical to SEQ ID NO: 341405
  chr12:50037818-50037998
  hypo
  bladder_and_urothelial vs. colorectal

SEQ ID NO: 454684 - DNA, 37 bp, Homo sapiens; identical to SEQ ID NO: 348557
  chr12:51421646-51421683
  hypo
  bladder_and_urothelial vs. melanoma

SEQ ID NO: 454685 - DNA, 3 bp, Homo sapiens
  chr12:52401537-52401540
  hypo
  bladder_and_urothelial vs. anorectal,head_and_neck, melanoma
tcc

SEQ ID NO: 454686 - DNA, 112 bp, Homo sapiens
  chr12:69999239-69999351
  hypo
  bladder_and_urothelial vs. liver_bileduct, pancreas_gallbladder,colorectal,lymphoid_neoplasm, multiple_myeloma,prostate,melanoma
cgaataatagaagtcaacaaaatactctgtacaaaaccctttataaaagtctgctgtgtgccgtattagcatattagatcaatagaagatattaagagaacctttttaaaaa

SEQ ID NO: 454687 - DNA, 255 bp, Homo sapiens; identical to SEQ ID NO: 365997
  chr12:79842637-79842892
  hypo
  bladder_and_urothelial vs. lung,head_and_neck

SEQ ID NO: 454688 - DNA, 40 bp, Homo sapiens
  chr12:90313473-90313513
  hypo
  bladder_and_urothelial vs. head_and_neck,anorectal, sarcoma,cervical,lung,renal,uterine,thyroid,non_cancer
cggtgagaggtactgggcgatgaggaagtacagctccaac

SEQ ID NO: 454689 - DNA, 149 bp, Homo sapiens; identical to SEQ ID NO: 341488
  chr12:110019861-110020010
  hypo
  bladder_and_urothelial vs. colorectal,lymphoid_neoplasm, upper_gi

SEQ ID NO: 454690 - DNA, 114 bp, Homo sapiens; identical to SEQ ID NO: 341496
  chr12:110915439-110915553
  hypo
  bladder_and_urothelial vs. pancreas_gallbladder,ovary, colorectal,breast,upper_gi

SEQ ID NO: 454691 - DNA, 61 bp, Homo sapiens; identical to SEQ ID NO: 453628
  chr12:110983646-110983707
  hypo
  bladder_and_urothelial vs. colorectal,liver_bileduct

SEQ ID NO: 454692 - DNA, 136 bp, Homo sapiens; identical to SEQ ID NO: 354932
  chr12:110983736-110983872
  hypo
  bladder_and_urothelial vs. colorectal,liver_bileduct

SEQ ID NO: 454693 - DNA, 292 bp, Homo sapiens; identical to SEQ ID NO: 453632
  chr12:113725566-113725858
  hypo
  bladder_and_urothelial vs. liver_bileduct

SEQ ID NO: 454694 - DNA, 81 bp, Homo sapiens; identical to SEQ ID NO: 341559
  chr12:121328606-121328687
  hypo
  bladder_and_urothelial vs. liver_bileduct

SEQ ID NO: 454695 - DNA, 49 bp, Homo sapiens; identical to SEQ ID NO: 316435
  chr12:121622576-121622625
  hypo
  bladder_and_urothelial vs. liver_bileduct,sarcoma, melanoma,breast

SEQ ID NO: 454696 - DNA, 27 bp, Homo sapiens
  chr12:121667904-121667931
  hypo
  bladder_and_urothelial vs. prostate
ttaaaaaggaagcgctccaggccgggc

SEQ ID NO: 454697 - DNA, 60 bp, Homo sapiens; identical to SEQ ID NO: 366095
  chr12:122285108-122285168
  hypo
  bladder_and_urothelial vs. sarcoma,renal,melanoma, prostate,pancreas_gallbladder

SEQ ID NO: 454698 - DNA, 303 bp, Homo sapiens; identical to SEQ ID NO: 341587
  chr12:123325625-123325928
  hypo
  bladder_and_urothelial vs. ovary,upper_gi,colorectal, uterine

SEQ ID NO: 454699 - DNA, 124 bp, Homo sapiens
  chr12:125062713-125062837
  hypo
  bladder_and_urothelial vs. melanoma
cggggccgagacaagcctgggcagggagaagggaagggagcccgtctgtgcctgtagcctgggcagggagaagggaagggagcccgtctgtgcctggaaaccaatttgctctggcagcgctgtg

SEQ ID NO: 454700 - DNA, 79 bp, Homo sapiens; identical to SEQ ID NO: 380257
  chr12:125062887-125062966
  hypo
  bladder_and_urothelial vs. melanoma

SEQ ID NO: 454701 - DNA, 484 bp, Homo sapiens
  chr12:130184247-130184731
  hypo
  bladder_and_urothelial vs. anorectal
cggctctacttcggtgagcgataacacagcttttctggtcaaacagcttctggaaaacaccacctgatcgacgggcgggtacagacagacattgggaaacgacttacctcaacgtgaagcgatcttcagtggaatttctggagatggaaacaggaaaagtcagcacgtctcctttcctcacggtctttggtatatagtggatggccacgctgttgtccagacgcagttctctcagggagggtttcctgtgtgtctgataaaggaagatgctcccgatcctctgcaaggggggcccggactcatcgatgtcactgtggcctgtccggatcccattgcttctcctcgcgtcttccctgacgcagtcccctctctcaccccctgggtgcacggtgtagtagagctccacgggggtcccctccggctggtccacggacttcctcctcccggcaaccaccgtgggggggctgaaccagctggacaggag

SEQ ID NO: 454702 - DNA, 91 bp, Homo sapiens; identical to SEQ ID NO: 354996
  chr12:130184760-130184851
  hypo
  bladder_and_urothelial vs. anorectal

SEQ ID NO: 454703 - DNA, 73 bp, Homo sapiens
  chr12:130663582-130663655
  hypo
  bladder_and_urothelial vs. head_and_neck
cgaaagagcgaaactccacctcaaaaaaaaaaaatggtccagcgatgctgtcaagactggagtttttgtgtac

SEQ ID NO: 454704 - DNA, 394 bp, Homo sapiens; identical to SEQ ID NO: 355005
  chr12:131265535-131265929
  hypo
  bladder_and_urothelial vs. head_and_neck

SEQ ID NO: 454705 - DNA, 237 bp, Homo sapiens
  chr12:131271740-131271977
  hypo
  bladder_and_urothelial vs. liver_bileduct
cggccacccgcgcccagggcagggatctacacttgagtgtttccgcgtctgggtcctaattcctagtgggagcacggaaggacacagggaatgttgggagctgcatgggccatgtcttggtcccatgggacctggccctacttgacccgaggccacaccagcttgtagacatgagcttttgggggggctttgagtcctaagagacccagctgcccacgccacacagggggaaaggaa

SEQ ID NO: 454706 - DNA, 299 bp, Homo sapiens
  chr12:131272032-131272331
  hypo
  bladder_and_urothelial vs. liver_bileduct
gccgtcacagagctccagtctcccgccacttcagtgcaaccctcgctgtctgcccactcctccggacatgacgcttaggaccttaccttgctctccagctcagagcccggcccccatggccgggccagacctgccccggcctctcccctccgcctgagccacgccccggcttcctgctcaccaggcctgcgttagcatctgcagctgtgcttcttcaggccgccgcaacaccagccttcccgcactgctccaagacactgagcctggtgcatgctcaggaaattcaacaatttcaaaac

SEQ ID NO: 454707 - DNA, 212 bp, Homo sapiens
  chr12:131272367-131272579
  hypo
  bladder_and_urothelial vs. liver_bileduct
tctactcacagggcaacctgctttagcaaactcaacgacacattaaaaagtacaatttgcaaaggagagctaccacctggctgggtgttctgcgcctagagactgggccccgggagagcgctccacagtgaacttgcgaaggatggaatttacataaagaaggcaccgtctttagtcctggaaaggcaccctgggattctctacctccgtcc

SEQ ID NO: 454708 - DNA, 662 bp, Homo sapiens
  chr12:131272765-131273427
  hypo
  bladder_and_urothelial vs. liver_bileduct
cgccttgaatttctcttactgctcaaatggaaaacaatgaaacagggctgtccacatcacagcctgccacctgccagtcatttagagcctggcgcgcatttccatagctcctctgacgccaggacaatcagacccgtctccggagggctcctgcctctggatgtctaaatgttcttgccttaaacccggtgtgacgctccacccctcccacaccgcacacatacgaattttaacaaaatcttcaaagcagaacttaacaaaaggttgcgtggtaccaggtccatttggttccatgtgaaaccaactaggaagatccgcattaggctcttcctcagctgcgccgagggcctggtttctattcatttgagaagctgtgtgcgcccctgtatggtctgttctttcctttagggctcgcttttaacagtgagtgttgttgtggcaactaaaataaggagccggccagtgctcctagggaggaaaacctcggcaactccgcaggtgcaggcaccggccacagacccacgcctggggcactcgcgtttgcattagcagagcgcaggagtcagggagcgcgggcaggggcgggaggaggggtctgcgcactggccacggtgtgggggacccagccctaccccttcccggggctgagtgggactcgccac

SEQ ID NO: 454709 - DNA, 322 bp, Homo sapiens; identical to SEQ ID NO: 341637
  chr12:131288908-131289230
  hypo
  bladder_and_urothelial vs. head_and_neck

SEQ ID NO: 454710 - DNA, 129 bp, Homo sapiens; identical to SEQ ID NO: 348587
  chr12:132222124-132222253
  hypo
  bladder_and_urothelial vs. multiple_myeloma, myeloid_neoplasm,prostate,lymphoid_neoplasm,non_cancer, colorectal

SEQ ID NO: 454711 - DNA, 425 bp, Homo sapiens
  chr12:132665953-132666378
  hypo
  bladder_and_urothelial vs. colorectal, pancreas_gallbladder,prostate,breast
cgcacagtacacacacccaacacaactcaaaccacacacacactcagtacacacacccaacacaactcacacagcacacacacacacactcggtacacacacccagcacgcacacatagtacacacacccagcacaactcacactcagtacacacacccagcacatgtacccacccagcacacgttcactcgcaccctgcacagcccagcgcgcacacacccagcagacagcacatgctctcacatgctggcatcagccgtcagcctcagctgctggagggtgtggtggaggcgggcggtgagcgctgggtgctggggtccacgtccttccaagcccctgcatagcggccgccttggctggcgatgactggagggggtgaggggtgaggccaccagcacaggtgtgtcccttcactgtttccacc

SEQ ID NO: 454712 - DNA, 86 bp, Homo sapiens; identical to SEQ ID NO: 366185
  chr12:132666502-132666588
  hypo
  bladder_and_urothelial vs. colorectal, pancreas_gallbladder,prostate,breast

SEQ ID NO: 454713 - DNA, 479 bp, Homo sapiens; identical to SEQ ID NO: 334707
  chr12:133286733-133287212
  hypo
  bladder_and_urothelial vs. pancreas_gallbladder,upper_gi

SEQ ID NO: 454714 - DNA, 358 bp, Homo sapiens; identical to SEQ ID NO: 341680
  chr12:133435596-133435954
  hypo
  bladder_and_urothelial vs. ovary,lung, pancreas_gallbladder,lymphoid_neoplasm,uterine,breast, liver_bileduct,cervical,thyroid,sarcoma,renal

SEQ ID NO: 454715 - DNA, 19 bp, Homo sapiens
  chr13:20392340-20392359
  hypo
  bladder_and_urothelial vs. anorectal
cggtgggtgatttggggta

SEQ ID NO: 454716 - DNA, 261 bp, Homo sapiens; identical to SEQ ID NO: 355030
  chr13:20392445-20392706
  hypo
  bladder_and_urothelial vs. anorectal

SEQ ID NO: 454717 - DNA, 506 bp, Homo sapiens; identical to SEQ ID NO: 341686
  chr13:20979799-20980305
  hypo
  bladder_and_urothelial vs. colorectal

SEQ ID NO: 454718 - DNA, 142 bp, Homo sapiens; identical to SEQ ID NO: 351449
  chr13:22243864-22244006
  hypo
  bladder_and_urothelial vs. ovary,uterine,cervical, myeloid_neoplasm,thyroid

SEQ ID NO: 454719 - DNA, 52 bp, Homo sapiens; identical to SEQ ID NO: 341713
  chr13:30910073-30910125
  hypo
  bladder_and_urothelial vs. lung,head_and_neck,cervical, pancreas_gallbladder

SEQ ID NO: 454720 - DNA, 146 bp, Homo sapiens; identical to SEQ ID NO: 380381
  chr13:45926346-45926492
  hypo
  bladder_and_urothelial vs. melanoma

SEQ ID NO: 454721 - DNA, 23 bp, Homo sapiens
  chr13:46661423-46661446
  hypo
  bladder_and_urothelial vs. liver_bileduct
gcagcagccgctctagatgggcc

SEQ ID NO: 454722 - DNA, 82 bp, Homo sapiens; identical to SEQ ID NO: 341741
  chr13:52493838-52493920
  hypo
  bladder_and_urothelial vs. melanoma,renal

SEQ ID NO: 454723 - DNA, 216 bp, Homo sapiens; identical to SEQ ID NO: 341747
  chr13:74269514-74269730
  hypo
  bladder_and_urothelial vs. pancreas_gallbladder

SEQ ID NO: 454724 - DNA, 27 bp, Homo sapiens
  chr13:77553615-77553642
  hypo
  bladder_and_urothelial vs. cervical
cgttttttgtctgaagcccggctgggt

SEQ ID NO: 454725 - DNA, 17 bp, Homo sapiens
  chr13:77553746-77553763
  hypo
  bladder_and_urothelial vs. cervical
caaccctttgggaggcc

SEQ ID NO: 454726 - DNA, 288 bp, Homo sapiens; identical to SEQ ID NO: 454165
  chr13:95201339-95201627
  hypo
  bladder_and_urothelial vs. ovary

SEQ ID NO: 454727 - DNA, 230 bp, Homo sapiens; identical to SEQ ID NO: 454166
  chr13:95201662-95201892
  hypo
  bladder_and_urothelial vs. ovary

SEQ ID NO: 454728 - DNA, 9 bp, Homo sapiens
  chr13:95888846-95888855
  hypo
  bladder_and_urothelial vs. head_and_neck, pancreas_gallbladder,upper_gi
cgcgtgcgc

SEQ ID NO: 454729 - DNA, 73 bp, Homo sapiens; identical to SEQ ID NO: 355060
  chr13:96409644-96409717
  hypo
  bladder_and_urothelial vs. pancreas_gallbladder, liver_bileduct,sarcoma,upper_gi

SEQ ID NO: 454730 - DNA, 25 bp, Homo sapiens
  chr13:99851652-99851677
  hypo
  bladder_and_urothelial vs. head_and_neck, lymphoid_neoplasm,melanoma,multiple_myeloma,renal,sarcoma
aaacaaacgaacaaaacaagactgt

SEQ ID NO: 454731 - DNA, 97 bp, Homo sapiens; identical to SEQ ID NO: 355067
  chr13:99851706-99851803
  hypo
  bladder_and_urothelial vs. head_and_neck, lymphoid_neoplasm,melanoma,multiple_myeloma,renal,sarcoma

SEQ ID NO: 454732 - DNA, 219 bp, Homo sapiens; identical to SEQ ID NO: 341777
  chr13:101194483-101194702
  hypo
  bladder_and_urothelial vs. upper_gi,liver_bileduct,ovary, colorectal,breast

SEQ ID NO: 454733 - DNA, 442 bp, Homo sapiens
  chr13:113098840-113099282
  hypo
  bladder_and_urothelial vs. head_and_neck
cgggggtctgggaccgtgcctcaccacgggatctgtgtacacagcgatgcacccagcgtacgcgggcccttccctctgagccctcggcccctcatctgcaggatgggtgagccctggagaagcgggcagaagcagaggaggcagcgaacgcagagcatgtggcctgtgactgagcctagaaagtccgctcggcaacagaggctgcaatccagaaagccccctcggtgacagaggctacaatctagaaagctcgctcagcgacagaggctaccacctagaaagcctgctcggcgacagacactacaatctagacagcccatttggcgacagtggctacaacccagacagcccgctcagcaacagtgtctatgatctagaaagctccctcggcaacagcagctgtcatctagaaagcccgctcagcgacagaggccacaatcta

SEQ ID NO: 454734 - DNA, 110 bp, Homo sapiens; identical to SEQ ID NO: 380448
  chr13:113099323-113099433
  hypo
  bladder_and_urothelial vs. head_and_neck

SEQ ID NO: 454735 - DNA, 191 bp, Homo sapiens; identical to SEQ ID NO: 341807
  chr13:113255726-113255917
  hypo
  bladder_and_urothelial vs. sarcoma,pancreas_gallbladder

SEQ ID NO: 454736 - DNA, 258 bp, Homo sapiens; identical to SEQ ID NO: 341822
  chr13:113554079-113554337
  hypo
  bladder_and_urothelial vs. upper_gi

SEQ ID NO: 454737 - DNA, 52 bp, Homo sapiens
  chr13:113984308-113984360
  hypo
  bladder_and_urothelial vs. head_and_neck
cgggtgcgtgcatgggagcccaggtgcgtacatggaaacccaggtgcctgca

SEQ ID NO: 454738 - DNA, 86 bp, Homo sapiens; identical to SEQ ID NO: 366310
  chr13:113984409-113984495
  hypo
  bladder_and_urothelial vs. head_and_neck

SEQ ID NO: 454739 - DNA, 45 bp, Homo sapiens
  chr13:113985425-113985470
  hypo
  bladder_and_urothelial vs. melanoma,cervical,colorectal
cgggtgtgtgcacgaaagcctaggtgtgtgcatgggaacccgggt

SEQ ID NO: 454740 - DNA, 27 bp, Homo sapiens
  chr13:114059960-114059987
  hypo
  bladder_and_urothelial vs. cervical
cgggtggcgggcgagggtcgcaatgtc

SEQ ID NO: 454741 - DNA, 3 bp, Homo sapiens
  chr13:114060465-114060468
  hypo
  bladder_and_urothelial vs. cervical
gcc

SEQ ID NO: 454742 - DNA, 3 bp, Homo sapiens
  chr13:114075301-114075304
  hypo
  bladder_and_urothelial vs. renal,multiple_myeloma, lymphoid_neoplasm,myeloid_neoplasm,thyroid,melanoma,non_cancer, prostate
acc

SEQ ID NO: 454743 - DNA, 39 bp, Homo sapiens
  chr13:114188365-114188404
  hypo
  bladder_and_urothelial vs. liver_bileduct,uterine, sarcoma,renal,lymphoid_neoplasm,pancreas_gallbladder,breast, prostate
cgtggaagttctccgaatcctggttttgattggtcagat

SEQ ID NO: 454744 - DNA, 28 bp, Homo sapiens
  chr13:114305093-114305121
  hypo
  bladder_and_urothelial vs. melanoma
ctgggaggcggcttgcttgtctgtactc

SEQ ID NO: 454745 - DNA, 2 bp, Homo sapiens
  chr13:114312402-114312404
  hypo
  bladder_and_urothelial vs. anorectal
ac

SEQ ID NO: 454746 - DNA, 18 bp, Homo sapiens
  chr13:114497796-114497814
  hypo
  bladder_and_urothelial vs. renal,thyroid,prostate
cgtgtgatgagcacacat

SEQ ID NO: 454747 - DNA, 218 bp, Homo sapiens; identical to SEQ ID NO: 366331
  chr13:114537027-114537245
  hypo
  bladder_and_urothelial vs. cervical,upper_gi,colorectal, ovary

SEQ ID NO: 454748 - DNA, 139 bp, Homo sapiens
  chr13:114748186-114748325
  hypo
  bladder_and_urothelial vs. melanoma
cgaacctcgaaagtggaacagggaggccgcctcccatggctgcctggatggcaggcacagtgggagagtaatgctctgaacctcccaatgtgatgaagccgaaagccgaggcggggccagcaggcctcccgggcacaga

SEQ ID NO: 454749 - DNA, 46 bp, Homo sapiens
  chr13:114776257-114776303
  hypo
  bladder_and_urothelial vs. cervical
cgtggggaggagggggccgcgaggggagtagggggctgcgtgacga

SEQ ID NO: 454750 - DNA, 38 bp, Homo sapiens; identical to SEQ ID NO: 360361
  chr13:114776448-114776486
  hypo
  bladder_and_urothelial vs. cervical

SEQ ID NO: 454751 - DNA, 223 bp, Homo sapiens; identical to SEQ ID NO: 454169
  chr13:114776788-114777011
  hypo
  bladder_and_urothelial vs. pancreas_gallbladder

SEQ ID NO: 454752 - DNA, 39 bp, Homo sapiens
  chr14:31027396-31027435
  hypo
  bladder_and_urothelial vs. melanoma,lymphoid_neoplasm, renal,multiple_myeloma,anorectal
cgtgagccaccgcgcccggccctcaaactgtatttttga

SEQ ID NO: 454753 - DNA, 111 bp, Homo sapiens; identical to SEQ ID NO: 380562
  chr14:58599612-58599723
  hypo
  bladder_and_urothelial vs. ovary

SEQ ID NO: 454754 - DNA, 50 bp, Homo sapiens; identical to SEQ ID NO: 355132
  chr14:65239794-65239844
  hypo
  bladder_and_urothelial vs. colorectal,lymphoid_neoplasm, prostate,non_cancer,thyroid,renal,melanoma,myeloid_neoplasm, lung

SEQ ID NO: 454755 - DNA, 9 bp, Homo sapiens
  chr14:70654358-70654367
  hypo
  bladder_and_urothelial vs. multiple_myeloma
cgcgcgcgc

SEQ ID NO: 454756 - DNA, 148 bp, Homo sapiens; identical to SEQ ID NO: 355142
  chr14:73238412-73238560
  hypo

SEQ ID NO: 454757 - DNA, 62 bp, Homo sapiens; identical to SEQ ID NO: 341964
  chr14:73390972-73391034
  hypo
  bladder_and_urothelial vs. pancreas_gallbladder, head_and_neck,liver_bileduct,cervical,colorectal

SEQ ID NO: 454758 - DNA, 420 bp, Homo sapiens; identical to SEQ ID NO: 341965
  chr14:73391900-73392320
  hypo
  bladder_and_urothelial vs. cervical

SEQ ID NO: 454759 - DNA, 1 bp, Homo sapiens
  chr14:73602342-73602343
  hypo
  bladder_and_urothelial vs. melanoma,renal,sarcoma, prostate,myeloid_neoplasm,non_cancer,thyroid,multiple_myeloma
c

SEQ ID NO: 454760 - DNA, 146 bp, Homo sapiens
  chr14:75749334-75749480
  hypo
  bladder_and_urothelial vs. head_and_neck,breast,uterine, anorectal,cervical,lymphoid_neoplasm,ovary
cgtggagggttattctacttcaaagatgagcaaattgaagaatggttagaataaacaactttcttgatattccgttatcggcattagaatcttcctgctcgttatcgtatccagcaggctgaactgcctcttgatacttggttaaa

SEQ ID NO: 454761 - DNA, 3 bp, Homo sapiens
  chr14:75749498-75749501
  hypo
  bladder_and_urothelial vs. head_and_neck,breast,uterine, anorectal,cervical,lymphoid_neoplasm,ovary
cgc

SEQ ID NO: 454762 - DNA, 137 bp, Homo sapiens; identical to SEQ ID NO: 454178
  chr14:77591037-77591174
  hypo
  bladder_and_urothelial vs. ovary

SEQ ID NO: 454763 - DNA, 95 bp, Homo sapiens; identical to SEQ ID NO: 360499
  chr14:77591751-77591846
  hypo
  bladder_and_urothelial vs. ovary

SEQ ID NO: 454764 - DNA, 111 bp, Homo sapiens; identical to SEQ ID NO: 341982
  chr14:89875711-89875822
  hypo
  bladder_and_urothelial vs. liver_bileduct

SEQ ID NO: 454765 - DNA, 383 bp, Homo sapiens; identical to SEQ ID NO: 454181
  chr14:90849476-90849859
  hypo
  bladder_and_urothelial vs. anorectal,upper_gi, pancreas_gallbladder

SEQ ID NO: 454766 - DNA, 54 bp, Homo sapiens; identical to SEQ ID NO: 454182
  chr14:90849897-90849951
  hypo
  bladder_and_urothelial vs. anorectal,upper_gi, pancreas_gallbladder

SEQ ID NO: 454767 - DNA, 137 bp, Homo sapiens; identical to SEQ ID NO: 454183
  chr14:90849722-90849859
  hypo
  bladder_and_urothelial vs. anorectal,upper_gi, pancreas_gallbladder

SEQ ID NO: 454768 - DNA, 54 bp, Homo sapiens; identical to SEQ ID NO: 454182
  chr14:90849897-90849951
  hypo
  bladder_and_urothelial vs. anorectal,upper_gi, pancreas_gallbladder

SEQ ID NO: 454769 - DNA, 259 bp, Homo sapiens; identical to SEQ ID NO: 341995
  chr14:91757493-91757752
  hypo
  bladder_and_urothelial vs. cervical

SEQ ID NO: 454770 - DNA, 857 bp, Homo sapiens; identical to SEQ ID NO: 355160
  chr14:91805557-91806414
  hypo
  bladder_and_urothelial vs. head_and_neck

SEQ ID NO: 454771 - DNA, 160 bp, Homo sapiens
  chr14:93154728-93154888
  hypo
  bladder_and_urothelial vs. melanoma
caggacagttgtgaaaataacatgacgctcgtccaaggccacttcctgagggcaagtcctaatagccctgagacaccgagacggcatgttcttcattagacggaaagggaaactgaggctcaggagagaggcgctccaggccgctgcagccaacaaaccg

SEQ ID NO: 454772 - DNA, 237 bp, Homo sapiens
  chr14:93706483-93706720
  hypo
  bladder_and_urothelial vs. breast,prostate, myeloid_neoplasm,cervical,uterine,multiple_myeloma
cgaatgcgatgcacagccgacctgcagattagtgttaactctgggagctcgggagcgtgcaccaccaccagtgtcaccgagcgcacccgcacagcagctaaccagtcaggcagcagaacgagtggcggcagtttgccggggcgtgcagacacacgacatgtttcccatcttggagactatctactgttcggcttttctaaaatgtcagattattcctgagtgtatatccacagggta

SEQ ID NO: 454773 - DNA, 2 bp, Homo sapiens
  chr14:102418667-102418669
  hypo
  bladder_and_urothelial vs. lymphoid_neoplasm
cc

SEQ ID NO: 454774 - DNA, 117 bp, Homo sapiens
  chr14:102493497-102493614
  hypo
  bladder_and_urothelial vs. upper_gi,ovary,breast, prostate,renal,colorectal,thyroid,lung,uterine,liver_bileduct
cgtaatgtttcagaatattccgtcaacctcaaggccacttgcttctgattggtgttagtggagcaggaaaaactaccctgtctcgtttcgtcgcctggatgaacggtttgagtgtgt

SEQ ID NO: 454775 - DNA, 348 bp, Homo sapiens; identical to SEQ ID NO: 355184
  chr14:102493651-102493999
  hypo
  bladder_and_urothelial vs. upper_gi,ovary,breast, prostate,renal,colorectal,thyroid,lung,uterine,liver_bileduct

SEQ ID NO: 454776 - DNA, 269 bp, Homo sapiens; identical to SEQ ID NO: 454189
  chr14:103988427-103988696
  hypo
  bladder_and_urothelial vs. head_and_neck,lung

SEQ ID NO: 454777 - DNA, 419 bp, Homo sapiens; identical to SEQ ID NO: 454190
  chr14:103988736-103989155
  hypo
  bladder_and_urothelial vs. head_and_neck,lung

SEQ ID NO: 454778 - DNA, 323 bp, Homo sapiens; identical to SEQ ID NO: 454191
  chr14:103988832-103989155
  hypo
  bladder_and_urothelial vs. head_and_neck

SEQ ID NO: 454779 - DNA, 124 bp, Homo sapiens; identical to SEQ ID NO: 373565
  chr14:103989597-103989721
  hypo
  bladder_and_urothelial vs. head_and_neck

SEQ ID NO: 454780 - DNA, 138 bp, Homo sapiens
  chr14:104047694-104047832
  hypo
  bladder_and_urothelial vs. breast
cgacgacagtggatctgatcaccgagacggctgctgagtaactaacgagtggggcgcgtctacactgtggaggtgctggacagagggaggagtcgcctcctgggctggtcggagtaggaccttgggaggtttcatcac

SEQ ID NO: 454781 - DNA, 829 bp, Homo sapiens
  chr14:104047919-104048748
  hypo
  bladder_and_urothelial vs. breast,upper_gi,ovary,uterine
cgggtaactgaaaccatggaaagaaaaaccatggatggaggggacagctgtgctgccgccatctcccttacacagttgagtaaaccgaggcacagaagaaaatgaagtagccccagatgacgtaggaaatggcagaactgaagggaaaagcagagcagggggctgtagagttaaactgttcttcattccggtggcactagacctgcccgggcggccagaggacacgtggctcctgtcctgtctgccgtgtggctaggggacagccgtgcttgtgctgtgccgtctgagtgtttgtttctgtctgtgggaataaaggggttgccagacaccctccctgctctgtggagggagggtggaatcatgcctttggccactttgcccactcccccttgggccggagcatcagcattagctgtgccacagggtggtatgcgctctgctgaaggtggcaccttcagggaaaggcagtctgccggggaggctagcgagcaccctgggtaggagctgagcgtggcctccgcgcctcctcatgggaagtgctggagatgcaggagcccctgagccagagcccagcgctcttacaagagacctcacttcctgttcggggactggggctgctaagtcagagtgcgcctcctgcacccgccaccctggatgtggttccattccctggtccctgagccatagctggggggcatgagactgtcccctgggctgctttggggaccctacttcagggcagccctgccactccctgtaacgggctgtgggtcctgccctgtggccttcctacctctcttgcgtgtgggtgagcctgagcgtggccacc

SEQ ID NO: 454782 - DNA, 599 bp, Homo sapiens; identical to SEQ ID NO: 453658
  chr14:104048314-104048913
  hypo
  bladder_and_urothelial vs. liver_bileduct,breast,ovary, melanoma,prostate,uterine,renal,lymphoid_neoplasm, multiple_myeloma,sarcoma,upper_gi,non_cancer

SEQ ID NO: 454783 - DNA, 127 bp, Homo sapiens; identical to SEQ ID NO: 346089
  chr14:104048982-104049109
  hypo
  bladder_and_urothelial vs. liver_bileduct,breast,ovary, melanoma,prostate,uterine,renal,lymphoid_neoplasm, multiple_myeloma,sarcoma,upper_gi,non_cancer

SEQ ID NO: 454784 - DNA, 336 bp, Homo sapiens
  chr14:104202370-104202706
  hypo
  bladder_and_urothelial vs. liver_bileduct,melanoma
cggtctccaaggcgagcccaccaccactcagtctcgctttcgtccttgcgcctcaggatggtgagggcgtccccttcgtggaaggacagctcgtcactgttctgggcctcgtagtcccacagagcatacgccacacctttgttcatcacacccagcttttcctgcacccctggagccagagagcaatggtcaggcctcagcagagggtggcctgcagcaagggaccctgctcgaggaacaggacacagtcgtgctgctgccgaggctgctctcagcaggccccacagaggccagcgagggagatgagacactattgaagactagggcccccacccg

SEQ ID NO: 454785 - DNA, 7 bp, Homo sapiens
  chr14:104618440-104618447
  hypo
  bladder_and_urothelial vs. cervical,anorectal
cgtctgc

SEQ ID NO: 454786 - DNA, 237 bp, Homo sapiens
  chr14:104618440-104618677
  hypo
  bladder_and_urothelial vs. anorectal,cervical
cgtctgcgccacacacctgcagcagctcacacgggaggccatgcacctgctgcaggcccctgccagccatgaggaccttgacgccccccatggaggccccagcctcgcaccccccagcaccacgaccagctcgagggacacgccaggaccagcgggtcctgcagggaggcagccaggacgagctgggccagacaggaccaaggggctggcctggtcccccgggcccagtgtccaggt

SEQ ID NO: 454787 - DNA, 3 bp, Homo sapiens
  chr14:104639887-104639890
  hypo
  bladder_and_urothelial vs. lymphoid_neoplasm,renal
tgc

SEQ ID NO: 454788 - DNA, 138 bp, Homo sapiens
  chr14:104640046-104640184
  hypo
  bladder_and_urothelial vs. anorectal
cggaggccgcagccgcctgcacctcatcgacctgggcagctgtgaggcggcggctggcagggccggggaggctgctgggggtcccctgtgtctgtccctgtcggccctgggcagcgtcatcttggccctggtcaacgg

SEQ ID NO: 454789 - DNA, 101 bp, Homo sapiens; identical to SEQ ID NO: 355209
  chr14:104640582-104640683
  hypo
  bladder_and_urothelial vs. anorectal

SEQ ID NO: 454790 - DNA, 140 bp, Homo sapiens
  chr14:104641166-104641306
  hypo
  bladder_and_urothelial vs. cervical,colorectal, myeloid_neoplasm
cgctcccagcgtttggtgggacatggttggtggtgcctgctgtagttttcatcacagtgaccgcagcattggccctgtgctctggggagggtcggggaagcgggggcgtgtaggggagactgggctcggcagctccactt

SEQ ID NO: 454791 - DNA, 244 bp, Homo sapiens; identical to SEQ ID NO: 380731
  chr14:105103508-105103752
  hypo
  bladder_and_urothelial vs. thyroid

SEQ ID NO: 454792 - DNA, 39 bp, Homo sapiens
  chr14:105214099-105214138
  hypo
  bladder_and_urothelial vs. liver_bileduct
cgaagtgctgggattacaggtgggaggcaccgcgccagc

SEQ ID NO: 454793 - DNA, 85 bp, Homo sapiens; identical to SEQ ID NO: 355221
  chr14:105472075-105472160
  hypo
  bladder_and_urothelial vs. liver_bileduct

SEQ ID NO: 454794 - DNA, 319 bp, Homo sapiens
  chr14:105546630-105546949
  hypo
  bladder_and_urothelial vs. renal,colorectal
cgtgactgtgcgatgggatggcatcgtgctttcaatctgcactcgcctaatgagaaattatgttgagcgtcttctcatgtgcttatctgccatctgtataccttctgtggcgctctgtttgcgtggctgtgcaatgggatggcattgcgtttaatctacactcgcctaacgagaaattacgtggcgcgtcttttcatgttcgtatctgccgtctgtataccttctgtgactctgtttcttcagatctttagcctttttttttcctttccttttctcttcctctctttttcttttttgagacagtctcactctgtctccc

SEQ ID NO: 454795 - DNA, 4 bp, Homo sapiens
  chr15:34634211-34634215
  hypo
  bladder_and_urothelial vs. cervical,head_and_neck, sarcoma,prostate
cgtt

SEQ ID NO: 454796 - DNA, 375 bp, Homo sapiens; identical to SEQ ID NO: 348660
  chr15:34635788-34636163
  hypo
  bladder_and_urothelial vs. liver_bileduct,upper_gi, multiple_myeloma,uterine,pancreas_gallbladder,lung,melanoma, sarcoma,renal,prostate,non_cancer,lymphoid_neoplasm,cervical, breast,ovary

SEQ ID NO: 454797 - DNA, 90 bp, Homo sapiens; identical to SEQ ID NO: 355244
  chr15:40532821-40532911
  hypo
  bladder_and_urothelial vs. colorectal,upper_gi

SEQ ID NO: 454798 - DNA, 205 bp, Homo sapiens; identical to SEQ ID NO: 360624
  chr15:45479833-45480038
  hypo
  bladder_and_urothelial vs. ovary

SEQ ID NO: 454799 - DNA, 78 bp, Homo sapiens
  chr15:54191760-54191838
  hypo
cgcttagctgaaaaaccagtctctctactttttttttagacggagtttcactcttgttgcccaggatctcggctcacc

SEQ ID NO: 454800 - DNA, 27 bp, Homo sapiens
  chr15:55806859-55806886
  hypo
  bladder_and_urothelial vs. lymphoid_neoplasm,cervical
gcaagggctggcaagtgtagaagtacc

SEQ ID NO: 454801 - DNA, 85 bp, Homo sapiens; identical to SEQ ID NO: 342184
  chr15:56363533-56363618
  hypo
  bladder_and_urothelial vs. lung

SEQ ID NO: 454802 - DNA, 76 bp, Homo sapiens; identical to SEQ ID NO: 452900
  chr15:60289235-60289311
  hypo
  bladder_and_urothelial vs. uterine,ovary

SEQ ID NO: 454803 - DNA, 66 bp, Homo sapiens; identical to SEQ ID NO: 342196
  chr15:62832519-62832585
  hypo
  bladder_and_urothelial vs. liver_bileduct,lung, head_and_neck

SEQ ID NO: 454804 - DNA, 1 bp, Homo sapiens
  chr15:67545486-67545487
  hypo
  bladder_and_urothelial vs. lymphoid_neoplasm, multiple_myeloma,prostate,sarcoma,uterine,melanoma, myeloid_neoplasm,non_cancer,breast,renal
c

SEQ ID NO: 454805 - DNA, 181 bp, Homo sapiens; identical to SEQ ID NO: 342239
  chr15:72992573-72992754
  hypo
  bladder_and_urothelial vs. pancreas_gallbladder, colorectal

SEQ ID NO: 454806 - DNA, 60 bp, Homo sapiens
  chr15:79208280-79208340
  hypo
  bladder_and_urothelial vs. upper_gi,colorectal,lung, breast,lymphoid_neoplasm
cgctgagtatttccataaatcatctcaattctgtccacaaaatcgtgaaggcggccaagc

SEQ ID NO: 454807 - DNA, 847 bp, Homo sapiens; identical to SEQ ID NO: 347352
  chr15:80215312-80216159
  hypo
  bladder_and_urothelial vs. lung,pancreas_gallbladder, upper_gi,liver_bileduct,head_and_neck,colorectal,breast, anorectal,ovary,lymphoid_neoplasm,prostate

SEQ ID NO: 454808 - DNA, 839 bp, Homo sapiens; identical to SEQ ID NO: 454202
  chr15:80215691-80216530
  hypo
  bladder_and_urothelial vs. lung,upper_gi, pancreas_gallbladder,liver_bileduct,head_and_neck,ovary,breast, cervical

SEQ ID NO: 454809 - DNA, 152 bp, Homo sapiens; identical to SEQ ID NO: 342257
  chr15:80295619-80295771
  hypo
  bladder_and_urothelial vs. liver_bileduct,breast,uterine, prostate,colorectal,upper_gi,lymphoid_neoplasm

SEQ ID NO: 454810 - DNA, 48 bp, Homo sapiens
  chr15:90501233-90501281
  hypo
  bladder_and_urothelial vs. lymphoid_neoplasm,melanoma
cgactgagcgacgtgcagtaatttgaaggaacgcattactggtgcaca

SEQ ID NO: 454811 - DNA, 106 bp, Homo sapiens; identical to SEQ ID NO: 342275
  chr15:90501638-90501744
  hypo
  bladder_and_urothelial vs. renal,sarcoma, lymphoid_neoplasm,melanoma,pancreas_gallbladder,upper_gi, uterine

SEQ ID NO: 454812 - DNA, 184 bp, Homo sapiens; identical to SEQ ID NO: 453668
  chr15:90755573-90755757
  hypo
  bladder_and_urothelial vs. ovary,breast,multiple_myeloma, uterine,myeloid_neoplasm,sarcoma,prostate

SEQ ID NO: 454813 - DNA, 42 bp, Homo sapiens; identical to SEQ ID NO: 366658
  chr15:90756079-90756121
  hypo
  bladder_and_urothelial vs. ovary,breast,multiple_myeloma, uterine,myeloid_neoplasm,sarcoma,prostate

SEQ ID NO: 454814 - DNA, 148 bp, Homo sapiens
  chr15:93433730-93433878
  hypo
  bladder_and_urothelial vs. pancreas_gallbladder, head_and_neck,liver_bileduct
cggcctgctatatttcttgattatgatctgtccgaatgactaaaggaatttagatttgggaagataaacagggacttgctctataatttgaaaattagtcctaaagaagcatttgggtagcatagttttaactaaaatcctaaacttc

SEQ ID NO: 454815 - DNA, 247 bp, Homo sapiens; identical to SEQ ID NO: 342318
  chr15:101938625-101938872
  hypo
  bladder_and_urothelial vs. liver_bileduct,anorectal, upper_gi,head_and_neck,pancreas_gallbladder,cervical,uterine, colorectal,breast,lymphoid_neoplasm,renal

SEQ ID NO: 454816 - DNA, 121 bp, Homo sapiens
  chr16:189550-189671
  hypo
  bladder_and_urothelial vs. lymphoid_neoplasm,renal, multiple_myeloma,melanoma,sarcoma
cgacaggagatctttgagaccttgggcgaggcagtgacactaaaggcaggagcgactacagaagaataaattaaacttcatcagattaaaaactttactgcggccgggcgcggtggctcac

SEQ ID NO: 454817 - DNA, 9 bp, Homo sapiens
  chr16:323599-323608
  hypo
  bladder_and_urothelial vs. melanoma
agcccctcc

SEQ ID NO: 454818 - DNA, 282 bp, Homo sapiens
  chr16:410714-410996
  hypo
  bladder_and_urothelial vs. prostate
ggtggccgcgtcggcgacgtatgggccccgtggtgctgcggtgcacgacctctgtgctgtcaccccacagtgtccgctcctgcacgtacacgcgtgcacgcgcacacacgtgcacacgcacacacacacaagcacgccccgctttgatctctaaaggagagtccattgacaagctcttaatcgcagctgcccttgcagggcctgtccctgaagtcccgagtaatgggatttggcgcttctgatccatcgggctggccgcttcccgtgtcataggtggacatt

SEQ ID NO: 454819 - DNA, 101 bp, Homo sapiens
  chr16:410895-410996
  hypo
  bladder_and_urothelial vs. prostate,renal, lymphoid_neoplasm,thyroid,non_cancer
cgcagctgcccttgcagggcctgtccctgaagtcccgagtaatgggatttggcgcttctgatccatcgggctggccgcttcccgtgtcataggtggacatt

SEQ ID NO: 454820 - DNA, 111 bp, Homo sapiens; identical to SEQ ID NO: 346109
  chr16:411606-411717
  hypo
  bladder_and_urothelial vs. prostate,renal, lymphoid_neoplasm,thyroid,non_cancer

SEQ ID NO: 454821 - DNA, 151 bp, Homo sapiens
  chr16:611800-611951
  hypo
  bladder_and_urothelial vs. prostate,myeloid_neoplasm, thyroid,lymphoid_neoplasm,non_cancer,renal,breast
cgtgtgtcctggggagtcggtgtgtagggcctgtgtgagcatgtgagtgccgtgttggagtggtttggaaagcccccccacacctggatgggtggtgagtgtgttatcacggacaagcagccgtgttcaccgtgatggagtgtgaggtgtg

SEQ ID NO: 454822 - DNA, 83 bp, Homo sapiens; identical to SEQ ID NO: 355329
  chr16:612320-612403
  hypo
  bladder_and_urothelial vs. prostate,myeloid_neoplasm, thyroid,lymphoid_neoplasm,non_cancer,renal,breast

SEQ ID NO: 454823 - DNA, 189 bp, Homo sapiens; identical to SEQ ID NO: 366737
  chr16:1250534-1250723
  hypo
  bladder_and_urothelial vs. pancreas_gallbladder

SEQ ID NO: 454824 - DNA, 53 bp, Homo sapiens; identical to SEQ ID NO: 342385
  chr16:1472227-1472280
  hypo
  bladder_and_urothelial vs. lymphoid_neoplasm,melanoma, sarcoma,renal,multiple_myeloma

SEQ ID NO: 454825 - DNA, 131 bp, Homo sapiens; identical to SEQ ID NO: 355361
  chr16:1753650-1753781
  hypo
  bladder_and_urothelial vs. melanoma,renal,uterine, sarcoma,lymphoid_neoplasm,breast

SEQ ID NO: 454826 - DNA, 73 bp, Homo sapiens
  chr16:2278311-2278384
  hypo
  bladder_and_urothelial vs. renal,sarcoma
cggagccctggctgcccagcctccgccttcccaggccctgctgacagcaggctcgttgcagatgaggacgatg

SEQ ID NO: 454827 - DNA, 50 bp, Homo sapiens
  chr16:2770043-2770093
  hypo
  bladder_and_urothelial vs. melanoma,renal,uterine, non_cancer,sarcoma,thyroid,colorectal,multiple_myeloma,prostate
cggagccccaggcagtgcagcggagcctggtgggggactgcaccaccagg

SEQ ID NO: 454828 - DNA, 48 bp, Homo sapiens
  chr16:2849309-2849357
  hypo
  bladder_and_urothelial vs. head_and_neck,cervical
cggtccagctgggcgagctgacttccaggccaactccttggaacctgc

SEQ ID NO: 454829 - DNA, 17 bp, Homo sapiens
  chr16:2849623-2849640
  hypo
  bladder_and_urothelial vs. head_and_neck,cervical
cctctacccctgttccc

SEQ ID NO: 454830 - DNA, 97 bp, Homo sapiens; identical to SEQ ID NO: 366815
  chr16:3537877-3537974
  hypo
  bladder_and_urothelial vs. cervical

SEQ ID NO: 454831 - DNA, 176 bp, Homo sapiens; identical to SEQ ID NO: 342463
  chr16:4478626-4478802
  hypo
  bladder_and_urothelial vs. ovary

SEQ ID NO: 454832 - DNA, 10 bp, Homo sapiens
  chr16:15738995-15739005
  hypo
  bladder_and_urothelial vs. renal
cgaactccta

SEQ ID NO: 454833 - DNA, 64 bp, Homo sapiens; identical to SEQ ID NO: 342518
  chr16:21567027-21567091
  hypo
  bladder_and_urothelial vs. melanoma,colorectal, pancreas_gallbladder

SEQ ID NO: 454834 - DNA, 170 bp, Homo sapiens
  chr16:21569179-21569349
  hypo
  bladder_and_urothelial vs. renal,prostate,melanoma
cgtcatcatctcactacagcagagatccgcagttccccgaaacaaataccacgagtctcaaggtaagacctgcacgtaaggatgtcgaaagataaatatgtcttaagaacatgtccatgagaaggggctttgccagccatgcaagcataaaagaagaaaagtccctcatt

SEQ ID NO: 454835 - DNA, 370 bp, Homo sapiens; identical to SEQ ID NO: 366878
  chr16:21569399-21569769
  hypo
  bladder_and_urothelial vs. renal,prostate,melanoma

SEQ ID NO: 454836 - DNA, 150 bp, Homo sapiens
  chr16:24739345-24739495
  hypo
  bladder_and_urothelial vs. melanoma
cgttttggtgcatatgtttcatgactttctgtgcattcattcactagcttaacctatcggagaggacaggaacccaacatgtctagggaagttttgtttgtttttaacgggagagattcaagcatgttgtaaagccagttgaagctgggc

SEQ ID NO: 454837 - DNA, 713 bp, Homo sapiens; identical to SEQ ID NO: 342529
  chr16:24837143-24837856
  hypo
  bladder_and_urothelial vs. liver_bileduct

SEQ ID NO: 454838 - DNA, 276 bp, Homo sapiens; identical to SEQ ID NO: 355443
  chr16:29170096-29170372
  hypo
  bladder_and_urothelial vs. upper_gi,colorectal,melanoma, liver_bileduct

SEQ ID NO: 454839 - DNA, 19 bp, Homo sapiens
  chr16:30124861-30124880
  hypo
  bladder_and_urothelial vs. melanoma
tgcctagccagtgtgggcc

SEQ ID NO: 454840 - DNA, 54 bp, Homo sapiens; identical to SEQ ID NO: 381194
  chr16:30826509-30826563
  hypo
  bladder_and_urothelial vs. myeloid_neoplasm

SEQ ID NO: 454841 - DNA, 48 bp, Homo sapiens
  chr16:30907062-30907110
  hypo
  bladder_and_urothelial vs. multiple_myeloma, lymphoid_neoplasm,renal,melanoma,myeloid_neoplasm,non_cancer, colorectal,prostate,thyroid,breast
acgcgcacacctgcacactcacacgcacacaaatccactcgcacacac

SEQ ID NO: 454842 - DNA, 11 bp, Homo sapiens
  chr16:48642138-48642149
  hypo
  bladder_and_urothelial vs. sarcoma,melanoma,renal, uterine,prostate
ctcctgatctc

SEQ ID NO: 454843 - DNA, 131 bp, Homo sapiens; identical to SEQ ID NO: 454213
  chr16:67189038-67189169
  hypo
  bladder_and_urothelial vs. ovary,uterine,prostate,breast, renal,lung,thyroid,myeloid_neoplasm,non_cancer, pancreas_gallbladder,cervical,upper_gi,liver_bileduct,sarcoma

SEQ ID NO: 454844 - DNA, 377 bp, Homo sapiens; identical to SEQ ID NO: 345494
  chr16:67189259-67189636
  hypo
  bladder_and_urothelial vs. ovary,uterine,prostate,breast, renal,lung,thyroid,myeloid_neoplasm,non_cancer, pancreas_gallbladder,cervical,upper_gi,liver_bileduct,sarcoma

SEQ ID NO: 454845 - DNA, 784 bp, Homo sapiens
  chr16:69143292-69144076
  hypo
  bladder_and_urothelial vs. pancreas_gallbladder, liver_bileduct,ovary,breast
cgccagatgccggtgcagctgacgacagccctgcgtgtggtgggcaccagcctgtttgccctggcagtgctgggtggcatcctggcagcctatgtgacgggctaccagttcatccacacggaaaagcactacctgtccttcggcctgtacggcgccatcctgggcctgcacctgctcattcagagcctttttgccttcctggagcaccggcgcatgcgacgtgccggccaggccctgaagctgccctccccgcggcggggctcggtggcactgtgcattgccgcataccaggaggaccctgactacttgcgcaagtgcctgcgctcggcccagcgcatctccttccctgacctcaaggtggtcatggtggtggatggcaaccgccaggaggacgcctacatgctggacatcttccacgaggtgctgggcggcaccgagcaggccggcttctttgtgtggcgcagcaacttccatgaggcaggcgagggtgagacggaggccagcctgcaggagggcatggaccgtgtgcgggatgtggtgcgggccagcaccttctcgtgcatcatgcagaagtggggaggcaagcgcgaggtcatgtacacggccttcaaggccctcggcgattcggtggactacatccaggtaagggcgcctccctaggagcgtgtgtacatggggataagtctggacagcctggcaaactctccgccaagaatctgaggtctggtctaggtcccttgggttgtgcacacacctgtgcacttaagaaggcaacaaggtggcc

SEQ ID NO: 454846 - DNA, 262 bp, Homo sapiens; identical to SEQ ID NO: 342656
  chr16:77752668-77752930
  hypo
  bladder_and_urothelial vs. head_and_neck,lung,cervical, anorectal

SEQ ID NO: 454847 - DNA, 554 bp, Homo sapiens
  chr16:77753318-77753872
  hypo
  bladder_and_urothelial vs. sarcoma,liver_bileduct, lymphoid_neoplasm,renal,anorectal,head_and_neck,ovary,cervical, melanoma,lung
cgatatttccttaatatcatgatgtgtaaacactagatattataaatattgcatcgatatttcattaatatcatggcgtgtaaacactatgtgtgaacactggatattagaaatatcacaacatttcattaatatcacggtgtgcaaacactgtgtgtaaacaatggatattatgaaaatcacagcgatatttcattaatgtcacagtgtgtaagcactgtgtgcaaacactggatattatgaatatcatagcgatattttattaatatcgcagtgtgtaagcactgtgtggaaacactggatattatgaatatcacagcgatatttcgttaatgtcacagtgcgtaagcactgtgtgtaaatactggatattatgaatatcacagtgatatttcattaacgtaacagcgtgtaagcactgtgtaaacactggatattatgagtgtcacagtgatatttcattaatttcacacgggatattataaaaatcacaacgatatttaacatcatagtgtgtaaacactttgtgtaaacatcgggtattataaatatca

SEQ ID NO: 454848 - DNA, 49 bp, Homo sapiens; identical to SEQ ID NO: 452920
  chr16:77822069-77822118
  hypo
  bladder_and_urothelial vs. sarcoma

SEQ ID NO: 454849 - DNA, 261 bp, Homo sapiens; identical to SEQ ID NO: 453712
  chr16:81563939-81564200
  hypo
  bladder_and_urothelial vs. colorectal,uterine

SEQ ID NO: 454850 - DNA, 163 bp, Homo sapiens; identical to SEQ ID NO: 453713
  chr16:81564229-81564392
  hypo
  bladder_and_urothelial vs. colorectal,uterine

SEQ ID NO: 454851 - DNA, 240 bp, Homo sapiens; identical to SEQ ID NO: 355499
  chr16:81564541-81564781
  hypo
  bladder_and_urothelial vs. colorectal,uterine

SEQ ID NO: 454852 - DNA, 92 bp, Homo sapiens; identical to SEQ ID NO: 355506
  chr16:85033902-85033994
  hypo
  bladder_and_urothelial vs. melanoma,multiple_myeloma, lymphoid_neoplasm,uterine

SEQ ID NO: 454853 - DNA, 357 bp, Homo sapiens
  chr16:85673482-85673839
  hypo
  bladder_and_urothelial vs. renal
cggccgggggcggaggtacggggagccttgcgtgtcctcagctgctccaggaggcacaggcagcacctgggaccaggcaccccctccctgggaaacagttgggggcgatcgtgctgcgggcctttgctctgggaggccggcgctttgggaacagggtggctccagagccttcccaggtgggctggagagccgccgtctggaggacagttctgagcaggtgctcctggctggcgaggaagccccacctcaccccagcaccacccatggtgcagggagctggggttgggcgcacaagagtctgagcccgttcccaccccgcctccttgtcaccagcccggtggccgggactcatggctt

SEQ ID NO: 454854 - DNA, 238 bp, Homo sapiens
  chr16:85673886-85674124
  hypo
  bladder_and_urothelial vs. renal
cctgccctggaagctgccagaggcctctccaagcaggtgttggccgctgtgttacctgcggcaggggtggcccagccacccatagcccggcttgggccacagggacggggccgacaggtggtggcagtggggctggaactgctctcttgtcatcgaggcccgcggggccctgtgccgccttcccctggtggtgtctgctggctgcctgcctcgtcttgtcactggctttgcaggcaag

SEQ ID NO: 454855 - DNA, 140 bp, Homo sapiens; identical to SEQ ID NO: 355517
  chr16:85674334-85674474
  hypo
  bladder_and_urothelial vs. renal

SEQ ID NO: 454856 - DNA, 114 bp, Homo sapiens; identical to SEQ ID NO: 367027
  chr16:85679455-85679569
  hypo
  bladder_and_urothelial vs. melanoma

SEQ ID NO: 454857 - DNA, 178 bp, Homo sapiens; identical to SEQ ID NO: 452923
  chr16:85932121-85932299
  hypo
  bladder_and_urothelial vs. colorectal,upper_gi,thyroid, non_cancer,lymphoid_neoplasm,pancreas_gallbladder, multiple_myeloma

SEQ ID NO: 454858 - DNA, 169 bp, Homo sapiens; identical to SEQ ID NO: 367035
  chr16:87311888-87312057
  hypo
  bladder_and_urothelial vs. breast,renal

SEQ ID NO: 454859 - DNA, 184 bp, Homo sapiens; identical to SEQ ID NO: 367056
  chr16:88512691-88512875
  hypo
  bladder_and_urothelial vs. prostate,thyroid,non_cancer

SEQ ID NO: 454860 - DNA, 26 bp, Homo sapiens
  chr16:88805817-88805843
  hypo
  bladder_and_urothelial vs. colorectal
cggctgtcgtcagatgccctggctct

SEQ ID NO: 454861 - DNA, 729 bp, Homo sapiens; identical to SEQ ID NO: 381403
  chr16:88805932-88806661
  hypo
  bladder_and_urothelial vs. colorectal

SEQ ID NO: 454862 - DNA, 211 bp, Homo sapiens
  chr16:88943232-88943443
  hypo
  bladder_and_urothelial vs. anorectal
gcagcagtgactaattggtcggctcccccaggtcaggcggggcgcagtgtctggcaggccaggcatcggaggccaggcacagcatccggtgggcctggagctgggtggggttggcacggtgctgtgtccggcaggccaggggccagtggggtcagcggggcacggtgtccagtgggccaggtgggctgggggagccggggcgagaaggccc

SEQ ID NO: 454863 - DNA, 279 bp, Homo sapiens; identical to SEQ ID NO: 348772
  chr16:88946079-88946358
  hypo
  bladder_and_urothelial vs. cervical,thyroid,breast, prostate,renal,non_cancer,pancreas_gallbladder, lymphoid_neoplasm,colorectal,sarcoma

SEQ ID NO: 454864 - DNA, 274 bp, Homo sapiens; identical to SEQ ID NO: 342767
  chr16:88959987-88960261
  hypo
  bladder_and_urothelial vs. renal

SEQ ID NO: 454865 - DNA, 79 bp, Homo sapiens
  chr16:89254530-89254609
  hypo
  bladder_and_urothelial vs. renal,thyroid,non_cancer
cgtcagcggagtggatgtgggacgcctggaagtggaggacagggacctgccaggctccccaaactgggtggccaggttc

SEQ ID NO: 454866 - DNA, 144 bp, Homo sapiens; identical to SEQ ID NO: 355552
  chr16:89254764-89254908
  hypo
  bladder_and_urothelial vs. renal,thyroid,non_cancer

SEQ ID NO: 454867 - DNA, 375 bp, Homo sapiens
  chr16:89650291-89650666
  hypo
  bladder_and_urothelial vs. colorectal,cervical,uterine
cggcagctacacagccccgggggtacacagacacctcctctcaggccccgctgggtggggtcagccagcctggggcctctggtcccccacggtggggtcaggccccacctggccaagcctggagcccgggcgtccccctgccaggtgatcgccgaggacatctcggggaacaacggctacgtggagctctccttccgggccaggaagctggacgacaaggtgagtgcaggtgccgggcacgcctggctcaggctgaggtccgggaaccggttcgaaaacccggtccctgcccagcgctgacctcgcgtggctatgtcccgtgtgagacgtgtgcggagtgtgcctggggctgggcgtgctgccgtcacggtcgcc

SEQ ID NO: 454868 - DNA, 141 bp, Homo sapiens; identical to SEQ ID NO: 367100
  chr16:89650710-89650851
  hypo
  bladder_and_urothelial vs. colorectal,cervical,uterine

SEQ ID NO: 454869 - DNA, 25 bp, Homo sapiens
  chr16:89899939-89899964
  hypo
  bladder_and_urothelial vs. melanoma,lymphoid_neoplasm
cgccctgctgggctcaggggcaggt

SEQ ID NO: 454870 - DNA, 489 bp, Homo sapiens
  chr16:89900815-89901304
  hypo
  bladder_and_urothelial vs. melanoma,ovary,prostate, sarcoma,uterine,renal,lymphoid_neoplasm
acctgcccgcactcgcggttggccatcgtagaagcctggataagcatagcccgtgtgaatctgtgaacctgcccgcactcgcggttggccatcgtagaagtgtggataagcatagcccatgtgaatctgtgaacctgcccgcattcgcggttggccgtcgtagaaggccccataagcatagcccgtgtgaatctgtgaacctgcccgcactcgcggttggccgttgtagaagcctggataagcatagcccgtgtgaatctgtgaacctgcccgcactcgcggttggccgtcgtagaagcctggataagcatagcccgtgtgaatctgtgaacctgcccgcactcgcggttggccatcgtagaagtgtggataagcatagcccatgtgaatctgtgaacctgcccgcattcgcggttggccgtcgtagaaggccccataagcatagcccgtgtgaatctgtgaacctgcccgcactcgcagctggccgtc

SEQ ID NO: 454871 - DNA, 731 bp, Homo sapiens
  chr16:89900822-89901553
  hypo
  bladder_and_urothelial vs. melanoma,renal,sarcoma,ovary, uterine,prostate,thyroid,lymphoid_neoplasm,non_cancer
cgcactcgcggttggccatcgtagaagcctggataagcatagcccgtgtgaatctgtgaacctgcccgcactcgcggttggccatcgtagaagtgtggataagcatagcccatgtgaatctgtgaacctgcccgcattcgcggttggccgtcgtagaaggccccataagcatagcccgtgtgaatctgtgaacctgcccgcactcgcggttggccgttgtagaagcctggataagcatagcccgtgtgaatctgtgaacctgcccgcactcgcggttggccgtcgtagaagcctggataagcatagcccgtgtgaatctgtgaacctgcccgcactcgcggttggccatcgtagaagtgtggataagcatagcccatgtgaatctgtgaacctgcccgcattcgcggttggccgtcgtagaaggccccataagcatagcccgtgtgaatctgtgaacctgcccgcactcgcagctggccgtcgtagaaggccccacaagcatagcccgtgtgaatctgtgaacctgcccgcactcgcggctggccgtcgtagaaggccccataagcatagcccgggtgaatctgtgaacctgcccgcactcgcggttggccgtcgtagaagcgtggataagcatagcccgtgtgaatctgtgaacctgcccgcactcgcagttggccgtcgtagaagcctagataagcatagcccgtgtgaatctgtgaacctgcccgcac

SEQ ID NO: 454872 - DNA, 81 bp, Homo sapiens; identical to SEQ ID NO: 348779
  chr16:89901590-89901671
  hypo
  bladder_and_urothelial vs. melanoma,renal,sarcoma,ovary, uterine,prostate,thyroid,lymphoid_neoplasm,non_cancer

SEQ ID NO: 454873 - DNA, 139 bp, Homo sapiens; identical to SEQ ID NO: 367113
  chr17:597508-597647
  hypo
  bladder_and_urothelial vs. upper_gi

SEQ ID NO: 454874 - DNA, 299 bp, Homo sapiens; identical to SEQ ID NO: 342824
  chr17:1454071-1454370
  hypo
  bladder_and_urothelial vs. ovary,upper_gi,breast,uterine, pancreas_gallbladder,liver_bileduct

SEQ ID NO: 454875 - DNA, 115 bp, Homo sapiens; identical to SEQ ID NO: 342837
  chr17:2326357-2326472
  hypo
  bladder_and_urothelial vs. upper_gi,colorectal, liver_bileduct,uterine

SEQ ID NO: 454876 - DNA, 174 bp, Homo sapiens; identical to SEQ ID NO: 454226
  chr17:10632714-10632888
  hypo
  bladder_and_urothelial vs. anorectal,cervical,ovary, sarcoma,uterine,melanoma,myeloid_neoplasm

SEQ ID NO: 454877 - DNA, 245 bp, Homo sapiens; identical to SEQ ID NO: 351891
  chr17:10633350-10633595
  hypo
  bladder_and_urothelial vs. anorectal,cervical,ovary, sarcoma,uterine,melanoma,myeloid_neoplasm

SEQ ID NO: 454878 - DNA, 104 bp, Homo sapiens; identical to SEQ ID NO: 355601
  chr17:16282523-16282627
  hypo
  bladder_and_urothelial vs. melanoma

SEQ ID NO: 454879 - DNA, 209 bp, Homo sapiens; identical to SEQ ID NO: 342899
  chr17:16923475-16923684
  hypo
  bladder_and_urothelial vs. colorectal,anorectal

SEQ ID NO: 454880 - DNA, 112 bp, Homo sapiens; identical to SEQ ID NO: 342918
  chr17:19513145-19513257
  hypo
  bladder_and_urothelial vs. liver_bileduct, pancreas_gallbladder,ovary,lung,upper_gi,breast, lymphoid_neoplasm,sarcoma,melanoma,uterine

SEQ ID NO: 454881 - DNA, 119 bp, Homo sapiens
  chr17:25619839-25619958
  hypo
  bladder_and_urothelial vs. lung,ovary,upper_gi, colorectal,pancreas_gallbladder,lymphoid_neoplasm
cgatgttttattaaacatttcgctatttgaagaattaatacactcatgcaaagaaaagatgaagtaaacatgccctacagtgttatcatttgagatctcttaaaagcggctatgcagcc

SEQ ID NO: 454882 - DNA, 310 bp, Homo sapiens
  chr17:25620264-25620574
  hypo
  bladder_and_urothelial vs. renal,sarcoma,melanoma
cggctatgcaacactctactctgtcccatgaatatctgccacatatttgaattcccagtcttatacgccccaggcctttgcaatgtttagggtccacacgagaagccattaaaatgcaaatacgtcatctgtgaccgggaaccaagctggcatctagcagatactgacacatttatcagtctgatgtgtggacaactaggtgcctcccagaggccttcaggtaaggtggaggaagggccaattctgagctgacacagtgggatccatcttggccaggacagtgggatccatcttggccaggacaaaggca

SEQ ID NO: 454883 - DNA, 4 bp, Homo sapiens
  chr17:25676867-25676871
  hypo
  bladder_and_urothelial vs. sarcoma
cgag

SEQ ID NO: 454884 - DNA, 62 bp, Homo sapiens; identical to SEQ ID NO: 348797
  chr17:25931759-25931821
  hypo
  bladder_and_urothelial vs. anorectal,cervical, head_and_neck,uterine,breast,myeloid_neoplasm

SEQ ID NO: 454885 - DNA, 181 bp, Homo sapiens; identical to SEQ ID NO: 342936
  chr17:27207684-27207865
  hypo
  bladder_and_urothelial vs. upper_gi,breast, liver_bileduct

SEQ ID NO: 454886 - DNA, 6 bp, Homo sapiens
  chr17:27716189-27716195
  hypo
  bladder_and_urothelial vs. sarcoma,melanoma
cgtgag

SEQ ID NO: 454887 - DNA, 126 bp, Homo sapiens; identical to SEQ ID NO: 453730
  chr17:27909050-27909176
  hypo
  bladder_and_urothelial vs. upper_gi,liver_bileduct

SEQ ID NO: 454888 - DNA, 157 bp, Homo sapiens; identical to SEQ ID NO: 355624
  chr17:27909205-27909362
  hypo
  bladder_and_urothelial vs. upper_gi,liver_bileduct

SEQ ID NO: 454889 - DNA, 168 bp, Homo sapiens
  chr17:29232077-29232245
  hypo
  bladder_and_urothelial vs. sarcoma
cgagagatgtctcccgatatttatggatcagtccgaagttttactacctagaaaattgtattttatacccatcaggaagcaagtagttgaaataattattccaactgcttaaagtttctgatatttttaatttagaggaatctttttgtaactaatatttcctgttaa

SEQ ID NO: 454890 - DNA, 61 bp, Homo sapiens
  chr17:30333052-30333113
  hypo
  bladder_and_urothelial vs. head_and_neck,colorectal
cgcgcccggccaagtatttttgtttaaattactttttggttgtcacttatctcaataaata

SEQ ID NO: 454891 - DNA, 123 bp, Homo sapiens; identical to SEQ ID NO: 342967
  chr17:37583075-37583198
  hypo
  bladder_and_urothelial vs. lung,head_and_neck,upper_gi, pancreas_gallbladder

SEQ ID NO: 454892 - DNA, 111 bp, Homo sapiens; identical to SEQ ID NO: 343000
  chr17:43121686-43121797
  hypo
  bladder_and_urothelial vs. ovary,upper_gi,colorectal, uterine,lymphoid_neoplasm,renal,pancreas_gallbladder,melanoma, prostate,breast,multiple_myeloma,non_cancer,liver_bileduct

SEQ ID NO: 454893 - DNA, 25 bp, Homo sapiens
  chr17:49229457-49229482
  hypo
  bladder_and_urothelial vs. melanoma,renal, lymphoid_neoplasm,multiple_myeloma,prostate,non_cancer,uterine, thyroid,myeloid_neoplasm
cgcgggaagctgagtcacgagaatc

SEQ ID NO: 454894 - DNA, 48 bp, Homo sapiens; identical to SEQ ID NO: 348820
  chr17:57297129-57297177
  hypo
  bladder_and_urothelial vs. lymphoid_neoplasm,renal, melanoma,breast,multiple_myeloma,myeloid_neoplasm,prostate, non_cancer

SEQ ID NO: 454895 - DNA, 112 bp, Homo sapiens; identical to SEQ ID NO: 454237
  chr17:61777761-61777873
  hypo
  bladder_and_urothelial vs. anorectal,cervical

SEQ ID NO: 454896 - DNA, 76 bp, Homo sapiens; identical to SEQ ID NO: 345537
  chr17:61778423-61778499
  hypo
  bladder_and_urothelial vs. anorectal,cervical

SEQ ID NO: 454897 - DNA, 57 bp, Homo sapiens; identical to SEQ ID NO: 343073
  chr17:66913081-66913138
  hypo
  bladder_and_urothelial vs. liver_bileduct, pancreas_gallbladder,upper_gi,lung

SEQ ID NO: 454898 - DNA, 205 bp, Homo sapiens; identical to SEQ ID NO: 454239
  chr17:68164928-68165133
  hypo
  bladder_and_urothelial vs. anorectal,head_and_neck, colorectal,cervical

SEQ ID NO: 454899 - DNA, 81 bp, Homo sapiens; identical to SEQ ID NO: 454240
  chr17:73584287-73584368
  hypo
  bladder_and_urothelial vs. cervical

SEQ ID NO: 454900 - DNA, 170 bp, Homo sapiens; identical to SEQ ID NO: 352021
  chr17:73584951-73585121
  hypo
  bladder_and_urothelial vs. cervical

SEQ ID NO: 454901 - DNA, 193 bp, Homo sapiens
  chr17:73615737-73615930
  hypo
  bladder_and_urothelial vs. cervical,renal,prostate, thyroid,melanoma,non_cancer,breast,anorectal,colorectal
cgagacccaccaccttcctgtagggcgagagtggcagcgacgtgcagctgttagccgtgtcccaccgtgggctgcgactgctcaaggtgacccaaggccccggcctccgccccgaccagctgaagattctctgctcatacaggtgcgctagcccacgaccctgggctagaggtgggggcaggtggcaaggtga

SEQ ID NO: 454902 - DNA, 109 bp, Homo sapiens; identical to SEQ ID NO: 348835
  chr17:73616587-73616696
  hypo
  bladder_and_urothelial vs. cervical,renal,prostate, thyroid,melanoma,non_cancer,breast,anorectal,colorectal

SEQ ID NO: 454903 - DNA, 2 bp, Homo sapiens
  chr17:73635994-73635996
  hypo
  bladder_and_urothelial vs. sarcoma,multiple_myeloma
cg

SEQ ID NO: 454904 - DNA, 185 bp, Homo sapiens; identical to SEQ ID NO: 343121
  chr17:74042063-74042248
  hypo
  bladder_and_urothelial vs. melanoma,colorectal,prostate, lymphoid_neoplasm,uterine,breast,upper_gi,multiple_myeloma

SEQ ID NO: 454905 - DNA, 124 bp, Homo sapiens; identical to SEQ ID NO: 453743
  chr17:75132773-75132897
  hypo
  bladder_and_urothelial vs. uterine

SEQ ID NO: 454906 - DNA, 148 bp, Homo sapiens; identical to SEQ ID NO: 343148
  chr17:76034983-76035131
  hypo
  bladder_and_urothelial vs. colorectal,breast,uterine, prostate,ovary,melanoma,myeloid_neoplasm,renal,upper_gi, non_cancer,liver_bileduct,lymphoid_neoplasm, pancreas_gallbladder

SEQ ID NO: 454907 - DNA, 489 bp, Homo sapiens
  chr17:76395100-76395589
  hypo
  bladder_and_urothelial vs. cervical,breast,renal, prostate,uterine,anorectal,sarcoma,melanoma,multiple_myeloma, upper_gi,colorectal,lymphoid_neoplasm
cgtcttcacccagagcagaaatgctgcgagtgggtggggtagtgccccaggagaaggttgggtgcagttaccaggagaagggtgaatgggtgctgtgtggcaagaagagcaggcgtctgccacgctgaggacttcaggcctgagacatggccagcatgcaggacagaggttggcctggaagtcctctggctaggagtagccccagctggtgtgactgattcaggtggacggcacaggtgaaggcgaggccacgtggaggtggctcctcattgggggcaggacgccttcctgttgtgagtcaggtgccgttttctctgtccgtgttcaggccggaagaactcccgcacaatgctgctcccactcctgcggaggttcccagagcaggtccgagtctccctctttcacacgccgcacctccgtgggctgcttcggctcctcatccctgagcgcttcaacgagaccatcggcctccagcacattaaggtgtac

SEQ ID NO: 454908 - DNA, 50 bp, Homo sapiens; identical to SEQ ID NO: 355733
  chr17:76395713-76395763
  hypo
  bladder_and_urothelial vs. cervical,breast,renal, prostate,uterine,anorectal,sarcoma,melanoma,multiple_myeloma, upper_gi,colorectal,lymphoid_neoplasm

SEQ ID NO: 454909 - DNA, 188 bp, Homo sapiens; identical to SEQ ID NO: 367411
  chr17:77825812-77826000
  hypo
  bladder_and_urothelial vs. melanoma

SEQ ID NO: 454910 - DNA, 4 bp, Homo sapiens
  chr17:77827276-77827280
  hypo
  bladder_and_urothelial vs. liver_bileduct,lung,breast, lymphoid_neoplasm,prostate,anorectal,non_cancer, pancreas_gallbladder,sarcoma,renal
cgtg

SEQ ID NO: 454911 - DNA, 1 bp, Homo sapiens
  chr17:78667873-78667874
  hypo
  bladder_and_urothelial vs. renal,uterine,melanoma
c

SEQ ID NO: 454912 - DNA, 273 bp, Homo sapiens; identical to SEQ ID NO: 367428
  chr17:78668243-78668516
  hypo
  bladder_and_urothelial vs. renal,uterine,melanoma

SEQ ID NO: 454913 - DNA, 212 bp, Homo sapiens; identical to SEQ ID NO: 343206
  chr17:78791780-78791992
  hypo
  bladder_and_urothelial vs. head_and_neck

SEQ ID NO: 454914 - DNA, 3 bp, Homo sapiens
  chr17:79775055-79775058
  hypo
  bladder_and_urothelial vs. lung,cervical
ggc

SEQ ID NO: 454915 - DNA, 279 bp, Homo sapiens
  chr17:79913166-79913445
  hypo
  bladder_and_urothelial vs. prostate,melanoma,breast
ctatttttttttgttctggtttttcttcttttgttttctcaggacctctatttttaaataaggagggagctacccggcgtggggctcccggggcccacacactcacggcacgtccttgagtgtgtggcgcagctcgcggccgaggttctggatgtacagccgcaggccctcctgcaccggctgccccgtcaggtgcacgttgtccaccgtcagctgtgcctcgtcaaacagccactgcaccacgaacacagggcctgcgggcggcggggctcagttcgg

SEQ ID NO: 454916 - DNA, 142 bp, Homo sapiens; identical to SEQ ID NO: 454245
  chr17:79989097-79989239
  hypo
  bladder_and_urothelial vs. anorectal,multiple_myeloma, cervical,prostate,lung,head_and_neck,breast

SEQ ID NO: 454917 - DNA, 522 bp, Homo sapiens; identical to SEQ ID NO: 352041
  chr17:79989097-79989619
  hypo
  bladder_and_urothelial vs. anorectal,prostate,lung, head_and_neck,cervical,breast,uterine,non_cancer, multiple_myeloma,thyroid

SEQ ID NO: 454918 - DNA, 106 bp, Homo sapiens; identical to SEQ ID NO: 453746
  chr17:80491467-80491573
  hypo
  bladder_and_urothelial vs. ovary

SEQ ID NO: 454919 - DNA, 86 bp, Homo sapiens; identical to SEQ ID NO: 381909
  chr17:80491602-80491688
  hypo
  bladder_and_urothelial vs. ovary

SEQ ID NO: 454920 - DNA, 58 bp, Homo sapiens; identical to SEQ ID NO: 355781
  chr17:80747254-80747312
  hypo
  bladder_and_urothelial vs. colorectal,liver_bileduct, melanoma,multiple_myeloma,renal,pancreas_gallbladder,upper_gi, prostate,myeloid_neoplasm,uterine

SEQ ID NO: 454921 - DNA, 52 bp, Homo sapiens; identical to SEQ ID NO: 343275
  chr17:80794418-80794470
  hypo
  bladder_and_urothelial vs. colorectal, pancreas_gallbladder,upper_gi,ovary

SEQ ID NO: 454922 - DNA, 33 bp, Homo sapiens; identical to SEQ ID NO: 453753
  chr17:80797632-80797665
  hypo
  bladder_and_urothelial vs. melanoma,colorectal,sarcoma, lymphoid_neoplasm,myeloid_neoplasm,renal,non_cancer, multiple_myeloma,upper_gi,liver_bileduct,pancreas_gallbladder, prostate

SEQ ID NO: 454923 - DNA, 70 bp, Homo sapiens
  chr17:80832134-80832204
  hypo
  bladder_and_urothelial vs. liver_bileduct,melanoma, lymphoid_neoplasm
cgcactgtgggctgcaggcttgaagaaggatgtgagtttctggagtagcctggactgcacagccagggcc

SEQ ID NO: 454924 - DNA, 86 bp, Homo sapiens; identical to SEQ ID NO: 367494
  chr17:80832796-80832882
  hypo
  bladder_and_urothelial vs. liver_bileduct,melanoma, lymphoid_neoplasm

SEQ ID NO: 454925 - DNA, 188 bp, Homo sapiens; identical to SEQ ID NO: 323753
  chr17:81062393-81062581
  hypo
  bladder_and_urothelial vs. cervical

SEQ ID NO: 454926 - DNA, 94 bp, Homo sapiens; identical to SEQ ID NO: 343300
  chr18:3119830-3119924
  hypo

SEQ ID NO: 454927 - DNA, 126 bp, Homo sapiens
  chr18:3330588-3330714
  hypo
  bladder_and_urothelial vs. sarcoma
cggcagctgtgccaatagaaaaggaaaaggactacctgggggcggccatgtccaacatggaggctccatcttctctttttttgttatcacgtgtacagtaataaagaaatgggcaacatggtgcac

SEQ ID NO: 454928 - DNA, 995 bp, Homo sapiens; identical to SEQ ID NO: 335733
  chr18:3879130-3880125
  hypo
  bladder_and_urothelial vs. anorectal, pancreas_gallbladder,cervical,head_and_neck,lung,upper_gi, uterine,sarcoma

SEQ ID NO: 454929 - DNA, 467 bp, Homo sapiens; identical to SEQ ID NO: 343324
  chr18:9478452-9478919
  hypo
  bladder_and_urothelial vs. head_and_neck,lung, pancreas_gallbladder,upper_gi,cervical,colorectal,breast,ovary, anorectal,uterine

SEQ ID NO: 454930 - DNA, 81 bp, Homo sapiens; identical to SEQ ID NO: 343325
  chr18:9514129-9514210
  hypo
  bladder_and_urothelial vs. lymphoid_neoplasm,colorectal, sarcoma,prostate,uterine,melanoma,renal,non_cancer, myeloid_neoplasm,thyroid,multiple_myeloma

SEQ ID NO: 454931 - DNA, 5 bp, Homo sapiens
  chr18:13195815-13195820
  hypo
  bladder_and_urothelial vs. head_and_neck
cgcga

SEQ ID NO: 454932 - DNA, 130 bp, Homo sapiens; identical to SEQ ID NO: 367556
  chr18:13195846-13195976
  hypo
  bladder_and_urothelial vs. head_and_neck

SEQ ID NO: 454933 - DNA, 196 bp, Homo sapiens; identical to SEQ ID NO: 454252
  chr18:20512643-20512839
  hypo
  bladder_and_urothelial vs. upper_gi,lung, pancreas_gallbladder,colorectal,head_and_neck,anorectal,uterine, breast,melanoma,ovary,prostate,cervical,sarcoma, multiple_myeloma,lymphoid_neoplasm,renal,liver_bileduct,
  CONT. FROM ABOVE: non_cancer,myeloid_neoplasm,thyroid

SEQ ID NO: 454934 - DNA, 734 bp, Homo sapiens; identical to SEQ ID NO: 454253
  chr18:20512902-20513636
  hypo
  bladder_and_urothelial vs. upper_gi,lung, pancreas_gallbladder,colorectal,head_and_neck,anorectal,uterine, breast,melanoma,ovary,prostate,cervical,sarcoma, multiple_myeloma,lymphoid_neoplasm,renal,liver_bileduct,
  CONT. FROM ABOVE: non_cancer,myeloid_neoplasm,thyroid

SEQ ID NO: 454935 - DNA, 9 bp, Homo sapiens
  chr18:24128185-24128194
  hypo
  bladder_and_urothelial vs. ovary
caggggctc

SEQ ID NO: 454936 - DNA, 891 bp, Homo sapiens; identical to SEQ ID NO: 452951
  chr18:32556625-32557516
  hypo
  bladder_and_urothelial vs. upper_gi

SEQ ID NO: 454937 - DNA, 769 bp, Homo sapiens; identical to SEQ ID NO: 452952
  chr18:32557064-32557833
  hypo
  bladder_and_urothelial vs. upper_gi,colorectal, pancreas_gallbladder

SEQ ID NO: 454938 - DNA, 18 bp, Homo sapiens
  chr18:32557864-32557882
  hypo
  bladder_and_urothelial vs. upper_gi,colorectal, pancreas_gallbladder
tctgaacctggggcgctc

SEQ ID NO: 454939 - DNA, 45 bp, Homo sapiens; identical to SEQ ID NO: 452954
  chr18:32557884-32557929
  hypo
  bladder_and_urothelial vs. upper_gi,colorectal, pancreas_gallbladder

SEQ ID NO: 454940 - DNA, 291 bp, Homo sapiens; identical to SEQ ID NO: 452955
  chr18:32557542-32557833
  hypo
  bladder_and_urothelial vs. upper_gi

SEQ ID NO: 454941 - DNA, 18 bp, Homo sapiens
  chr18:32557864-32557882
  hypo
  bladder_and_urothelial vs. upper_gi
tctgaacctggggcgctc

SEQ ID NO: 454942 - DNA, 45 bp, Homo sapiens; identical to SEQ ID NO: 452954
  chr18:32557884-32557929
  hypo
  bladder_and_urothelial vs. upper_gi

SEQ ID NO: 454943 - DNA, 84 bp, Homo sapiens; identical to SEQ ID NO: 367600
  chr18:54483312-54483396
  hypo
  bladder_and_urothelial vs. anorectal,ovary

SEQ ID NO: 454944 - DNA, 128 bp, Homo sapiens; identical to SEQ ID NO: 343407
  chr18:60609821-60609949
  hypo
  bladder_and_urothelial vs. colorectal

SEQ ID NO: 454945 - DNA, 133 bp, Homo sapiens
  chr18:74113780-74113913
  hypo
  bladder_and_urothelial vs. liver_bileduct
cgcgctccatctctccaccaaccacacccccgcgccgcacccctccactactgtttataggctctcaagagggacagggaaaaccagtattgtttgagtgccaactctgcataaacaatttccacagaatgac

SEQ ID NO: 454946 - DNA, 61 bp, Homo sapiens
  chr18:74113942-74114003
  hypo
  bladder_and_urothelial vs. liver_bileduct
gtgtgtacgcgcgtgtgtacacgtttgtgtgtacacgtgcgcgcatgtgtgcacgtgaacg

SEQ ID NO: 454947 - DNA, 79 bp, Homo sapiens; identical to SEQ ID NO: 343444
  chr18:74518710-74518789
  hypo
  bladder_and_urothelial vs. uterine,colorectal,breast, upper_gi,ovary,pancreas_gallbladder,lymphoid_neoplasm,melanoma, sarcoma

SEQ ID NO: 454948 - DNA, 99 bp, Homo sapiens
  chr19:549193-549292
  hypo
  bladder_and_urothelial vs. renal,cervical,non_cancer
cgcccgggtggggctgggggaatgaggctggcgggagggccggggccagggcagccgccgggcaggttcctggctctcccgttctctggggagtcctgt

SEQ ID NO: 454949 - DNA, 2 bp, Homo sapiens
  chr19:550028-550030
  hypo
  bladder_and_urothelial vs. renal,cervical,non_cancer
ac

SEQ ID NO: 454950 - DNA, 406 bp, Homo sapiens; identical to SEQ ID NO: 454268
  chr19:603411-603817
  hypo

SEQ ID NO: 454951 - DNA, 159 bp, Homo sapiens; identical to SEQ ID NO: 352129
  chr19:603846-604005
  hypo

SEQ ID NO: 454952 - DNA, 125 bp, Homo sapiens
  chr19:640789-640914
  hypo
  bladder_and_urothelial vs. lymphoid_neoplasm,renal, multiple_myeloma
cggtgtccccgccgggcggggggcactgggaagggggcccgggcccgctggctgccgcctgaatcaccaccatcagggcaggtaatcaccccctgtccttcccaccgctttcatctgggcgccaa

SEQ ID NO: 454953 - DNA, 79 bp, Homo sapiens; identical to SEQ ID NO: 367716
  chr19:641007-641086
  hypo
  bladder_and_urothelial vs. lymphoid_neoplasm,renal, multiple_myeloma

SEQ ID NO: 454954 - DNA, 291 bp, Homo sapiens; identical to SEQ ID NO: 454270
  chr19:813406-813697
  hypo
  bladder_and_urothelial vs. pancreas_gallbladder,renal, lymphoid_neoplasm

SEQ ID NO: 454955 - DNA, 322 bp, Homo sapiens; identical to SEQ ID NO: 352133
  chr19:813830-814152
  hypo
  bladder_and_urothelial vs. pancreas_gallbladder,renal, lymphoid_neoplasm

SEQ ID NO: 454956 - DNA, 24 bp, Homo sapiens
  chr19:814406-814430
  hypo
  bladder_and_urothelial vs. multiple_myeloma,renal
cgacccccatcagaacctgccact

SEQ ID NO: 454957 - DNA, 102 bp, Homo sapiens; identical to SEQ ID NO: 355922
  chr19:814741-814843
  hypo
  bladder_and_urothelial vs. multiple_myeloma,renal

SEQ ID NO: 454958 - DNA, 159 bp, Homo sapiens; identical to SEQ ID NO: 453776
  chr19:883424-883583
  hypo
  bladder_and_urothelial vs. melanoma,sarcoma,prostate, multiple_myeloma,non_cancer,myeloid_neoplasm,lymphoid_neoplasm

SEQ ID NO: 454959 - DNA, 45 bp, Homo sapiens; identical to SEQ ID NO: 453777
  chr19:884311-884356
  hypo
  bladder_and_urothelial vs. melanoma,sarcoma,prostate, multiple_myeloma,non_cancer,myeloid_neoplasm,lymphoid_neoplasm

SEQ ID NO: 454960 - DNA, 544 bp, Homo sapiens; identical to SEQ ID NO: 346191
  chr19:884311-884855
  hypo
  bladder_and_urothelial vs. sarcoma,melanoma,prostate, lymphoid_neoplasm,myeloid_neoplasm

SEQ ID NO: 454961 - DNA, 255 bp, Homo sapiens
  chr19:945745-946000
  hypo
  bladder_and_urothelial vs. melanoma
cggcgtcgacatggccggggcaggcgtgttctggccccttgcactgcccggctcctgctgctggtgctgggctgcgtttctgttcagagaacctgggctgggagtgatgggaccgcagtctcccaccaggtgcctctttccaaatggacactcctgctgggcatgacacttctgaggctttctgggaccgtccaggtcccgtctgcagggaaccccaggacggagttaattgctgagtgcccagctctgggcaaa

SEQ ID NO: 454962 - DNA, 63 bp, Homo sapiens; identical to SEQ ID NO: 382214
  chr19:946112-946175
  hypo
  bladder_and_urothelial vs. melanoma

SEQ ID NO: 454963 - DNA, 68 bp, Homo sapiens; identical to SEQ ID NO: 348912
  chr19:956638-956706
  hypo
  bladder_and_urothelial vs. prostate,melanoma,thyroid, sarcoma,non_cancer,anorectal,renal

SEQ ID NO: 454964 - DNA, 279 bp, Homo sapiens; identical to SEQ ID NO: 218770
  chr19:1005441-1005720
  hypo
  bladder_and_urothelial vs. renal,thyroid

SEQ ID NO: 454965 - DNA, 678 bp, Homo sapiens
  chr19:1080033-1080711
  hypo
  bladder_and_urothelial vs. pancreas_gallbladder
cgcctcccacgtgcgccagctgcagcgggaccaggagcccgatgtgcactacgactttgagccccacgtctccgccaacgcctggtaccgccacccagctgccctgtccccggcgcacaaggccctgcctgggagccgggcttccctctgtcgggggcatgaagatgaagctgtcttgccccccatcacctcccctccttttcccggtttcttccactaggtcccccgtcatgcgtgcccggaagagcagcttcaacgtgagtgatgtggcgcggccggaggctgccgggagccccccagaagaaggcgggtgcactgagggcacacctgccaaggaccacaggggtgagtgtccggcggggcccaggggcggacgctggctccctgcgacccaccctggcccttcaccagagacgcctctttctccagccgggcgaggacaccaggttcacaagtcatggccgctctcgatctcagactcggacagtgggctggaccccggccctggcgcaggtgagggaggctctctggcgggctggggtgtggagctgcctcctctcctgagcctcagggtttcatcacccaccggggtgatggagggggcccccctggctgggggagtctgaacagtcctgattcccgcccaggggactttaagaagttcgagcggacgtcatc

SEQ ID NO: 454966 - DNA, 17 bp, Homo sapiens
  chr19:1080746-1080763
  hypo
  bladder_and_urothelial vs. pancreas_gallbladder
acccagacggtggagcc

SEQ ID NO: 454967 - DNA, 576 bp, Homo sapiens; identical to SEQ ID NO: 343565
  chr19:1333769-1334345
  hypo
  bladder_and_urothelial vs. breast,anorectal,prostate, sarcoma

SEQ ID NO: 454968 - DNA, 88 bp, Homo sapiens
  chr19:1807818-1807906
  hypo
  bladder_and_urothelial vs. sarcoma,thyroid,renal, non_cancer
cgggaagtggctccacaggtcctgagaacatgctctgggctcctccttccccctcgcctctgaggtcagctgggagggcgggggccag

SEQ ID NO: 454969 - DNA, 306 bp, Homo sapiens; identical to SEQ ID NO: 453784
  chr19:1977026-1977332
  hypo
  bladder_and_urothelial vs. liver_bileduct,melanoma, colorectal

SEQ ID NO: 454970 - DNA, 233 bp, Homo sapiens; identical to SEQ ID NO: 453785
  chr19:1978023-1978256
  hypo
  bladder_and_urothelial vs. liver_bileduct,melanoma,renal, lymphoid_neoplasm,multiple_myeloma,myeloid_neoplasm,thyroid, non_cancer,sarcoma

SEQ ID NO: 454971 - DNA, 116 bp, Homo sapiens; identical to SEQ ID NO: 345560
  chr19:1979018-1979134
  hypo
  bladder_and_urothelial vs. liver_bileduct,melanoma, lymphoid_neoplasm,renal,multiple_myeloma,myeloid_neoplasm, thyroid,non_cancer,sarcoma

SEQ ID NO: 454972 - DNA, 89 bp, Homo sapiens; identical to SEQ ID NO: 343596
  chr19:2204172-2204261
  hypo
  bladder_and_urothelial vs. liver_bileduct,ovary, pancreas_gallbladder,colorectal,breast

SEQ ID NO: 454973 - DNA, 92 bp, Homo sapiens
  chr19:2524648-2524740
  hypo
  bladder_and_urothelial vs. uterine,upper_gi,colorectal, prostate,breast,pancreas_gallbladder,thyroid
cgtgtgtgcgtctgcatatgagtgtgtgcataggtgcatttgcatacgtgcatgtgtgtggacatgcatgccagtgtgcacgtgtgtatgtg

SEQ ID NO: 454974 - DNA, 13 bp, Homo sapiens
  chr19:3219527-3219540
  hypo
  bladder_and_urothelial vs. anorectal,melanoma
cgccgcgccctgc

SEQ ID NO: 454975 - DNA, 72 bp, Homo sapiens; identical to SEQ ID NO: 355964
  chr19:3219654-3219726
  hypo
  bladder_and_urothelial vs. anorectal,melanoma

SEQ ID NO: 454976 - DNA, 137 bp, Homo sapiens; identical to SEQ ID NO: 382315
  chr19:3978022-3978159
  hypo

SEQ ID NO: 454977 - DNA, 37 bp, Homo sapiens
  chr19:5825278-5825315
  hypo
  bladder_and_urothelial vs. breast
cgcaggtgctgtggggtgagggtggtgcgtgggccct

SEQ ID NO: 454978 - DNA, 521 bp, Homo sapiens; identical to SEQ ID NO: 382365
  chr19:5825362-5825883
  hypo
  bladder_and_urothelial vs. breast

SEQ ID NO: 454979 - DNA, 385 bp, Homo sapiens
  chr19:7267319-7267704
  hypo
  bladder_and_urothelial vs. upper_gi,head_and_neck
cgagacactgcttagaaccctgtatccccggcgtacctttctggcagtgactatgagtccaacatcgttcgacaaactgcccgttgatgacggtggcggggcagttggtcttgcccttcgcggtacccggacagatgtctccacactcctcgttgtcatctttgttcaacacgatgtaattatcctccacggaatccaggatacgggaccagtcgatagtggccaagtaacagagctcattgttcttctcgatgcggacagaaccccgggtgatgttcatcaggttgtagaggccgagttccttgaggtgaaccatctcgaagatgaccagcgcgtagttaaagaacagtcgtgatccccggatgaccgtgaggttggggaacag

SEQ ID NO: 454980 - DNA, 206 bp, Homo sapiens; identical to SEQ ID NO: 367879
  chr19:7267747-7267953
  hypo
  bladder_and_urothelial vs. upper_gi,head_and_neck

SEQ ID NO: 454981 - DNA, 86 bp, Homo sapiens; identical to SEQ ID NO: 343706
  chr19:7838387-7838473
  hypo
  bladder_and_urothelial vs. breast,pancreas_gallbladder

SEQ ID NO: 454982 - DNA, 337 bp, Homo sapiens; identical to SEQ ID NO: 343707
  chr19:7972050-7972387
  hypo
  bladder_and_urothelial vs. ovary,upper_gi,breast

SEQ ID NO: 454983 - DNA, 107 bp, Homo sapiens
  chr19:9129007-9129114
  hypo
  bladder_and_urothelial vs. cervical
cgcccgcccagccaacagagtgacctttcaaaaatgcaacaccggccatgccccgccccggtccgaattcttcagtgccttctcaccgccctcgggaccaagtccaa

SEQ ID NO: 454984 - DNA, 92 bp, Homo sapiens; identical to SEQ ID NO: 356010
  chr19:9129229-9129321
  hypo
  bladder_and_urothelial vs. cervical

SEQ ID NO: 454985 - DNA, 221 bp, Homo sapiens; identical to SEQ ID NO: 454280
  chr19:12995851-12996072
  hypo
  bladder_and_urothelial vs. cervical,head_and_neck,breast

SEQ ID NO: 454986 - DNA, 106 bp, Homo sapiens; identical to SEQ ID NO: 352228
  chr19:15695669-15695775
  hypo
  bladder_and_urothelial vs. upper_gi,myeloid_neoplasm

SEQ ID NO: 454987 - DNA, 102 bp, Homo sapiens; identical to SEQ ID NO: 205249
  chr19:16187000-16187102
  hypo
  bladder_and_urothelial vs. lung

SEQ ID NO: 454988 - DNA, 517 bp, Homo sapiens; identical to SEQ ID NO: 454284
  chr19:16187104-16187621
  hypo
  bladder_and_urothelial vs. lung

SEQ ID NO: 454989 - DNA, 148 bp, Homo sapiens; identical to SEQ ID NO: 454285
  chr19:16187640-16187788
  hypo
  bladder_and_urothelial vs. lung

SEQ ID NO: 454990 - DNA, 329 bp, Homo sapiens; identical to SEQ ID NO: 454286
  chr19:16187292-16187621
  hypo
  bladder_and_urothelial vs. lung

SEQ ID NO: 454991 - DNA, 634 bp, Homo sapiens; identical to SEQ ID NO: 345579
  chr19:16187640-16188274
  hypo
  bladder_and_urothelial vs. lung

SEQ ID NO: 454992 - DNA, 376 bp, Homo sapiens; identical to SEQ ID NO: 343826
  chr19:17172577-17172953
  hypo
  bladder_and_urothelial vs. lung,liver_bileduct, head_and_neck,cervical,uterine

SEQ ID NO: 454993 - DNA, 90 bp, Homo sapiens
  chr19:18092401-18092491
  hypo
cgagcctgtggggtttcaggccaggctgacgtcactctctgggggcgcggtggggctgggcagggagcgcggcgcgtgtctgacacccat

SEQ ID NO: 454994 - DNA, 62 bp, Homo sapiens; identical to SEQ ID NO: 367998
  chr19:18092885-18092947
  hypo

SEQ ID NO: 454995 - DNA, 354 bp, Homo sapiens; identical to SEQ ID NO: 454288
  chr19:18117804-18118158
  hypo
  bladder_and_urothelial vs. liver_bileduct,breast, head_and_neck

SEQ ID NO: 454996 - DNA, 37 bp, Homo sapiens; identical to SEQ ID NO: 454289
  chr19:18118537-18118574
  hypo
  bladder_and_urothelial vs. ovary

SEQ ID NO: 454997 - DNA, 99 bp, Homo sapiens; identical to SEQ ID NO: 205275
  chr19:18119043-18119142
  hypo
  bladder_and_urothelial vs. ovary

SEQ ID NO: 454998 - DNA, 41 bp, Homo sapiens
  chr19:18241264-18241305
  hypo
  bladder_and_urothelial vs. anorectal,colorectal,sarcoma
cgatctccggtcccagcaagcctggccctctgtccccaggg

SEQ ID NO: 454999 - DNA, 124 bp, Homo sapiens; identical to SEQ ID NO: 356073
  chr19:18241355-18241479
  hypo
  bladder_and_urothelial vs. anorectal,colorectal,sarcoma

SEQ ID NO: 455000 - DNA, 276 bp, Homo sapiens; identical to SEQ ID NO: 343855
  chr19:18867553-18867829
  hypo
  bladder_and_urothelial vs. sarcoma

SEQ ID NO: 455001 - DNA, 165 bp, Homo sapiens; identical to SEQ ID NO: 343859
  chr19:18963604-18963769
  hypo
  bladder_and_urothelial vs. upper_gi,colorectal,ovary

SEQ ID NO: 455002 - DNA, 267 bp, Homo sapiens; identical to SEQ ID NO: 343903
  chr19:32845502-32845769
  hypo
  bladder_and_urothelial vs. liver_bileduct,upper_gi, colorectal,ovary,pancreas_gallbladder,sarcoma,uterine, multiple_myeloma

SEQ ID NO: 455003 - DNA, 158 bp, Homo sapiens; identical to SEQ ID NO: 343905
  chr19:32850587-32850745
  hypo
  bladder_and_urothelial vs. liver_bileduct,upper_gi, pancreas_gallbladder,anorectal,ovary,lymphoid_neoplasm,melanoma, cervical,uterine,colorectal,lung,sarcoma,thyroid,non_cancer

SEQ ID NO: 455004 - DNA, 78 bp, Homo sapiens
  chr19:33209597-33209675
  hypo
  bladder_and_urothelial vs. liver_bileduct, pancreas_gallbladder,upper_gi
cgtaactttacttcaccgtcttcatttacatcgggcgtaccccaagcagaaggtatttaaattcacagaaattctgcc

SEQ ID NO: 455005 - DNA, 88 bp, Homo sapiens
  chr19:33557659-33557747
  hypo
  bladder_and_urothelial vs. liver_bileduct
cgccctcagcggtcgcgatagatgccacaggtggaacagaatgcaatgtgctgcaaaaccagcccagcgttaacatatctttaaaaaa

SEQ ID NO: 455006 - DNA, 8 bp, Homo sapiens
  chr19:37702078-37702086
  hypo
  bladder_and_urothelial vs. anorectal,cervical
cgtgagcc

SEQ ID NO: 455007 - DNA, 169 bp, Homo sapiens
  chr19:38873767-38873936
  hypo
  bladder_and_urothelial vs. renal
cgttgggcagagtacgattggtgagaaaagagagcataggacacgtgggcaagtgctggccccatagggtggggatggagcctttgtgatcactctactcgtctctaatccctcctttcctgcagcgagggtgggtcctgggccccaacaactactacagttttgccag

SEQ ID NO: 455008 - DNA, 72 bp, Homo sapiens; identical to SEQ ID NO: 343954
  chr19:39094650-39094722
  hypo
  bladder_and_urothelial vs. pancreas_gallbladder,lung, liver_bileduct,head_and_neck,upper_gi,colorectal, lymphoid_neoplasm,multiple_myeloma,prostate,breast,non_cancer

SEQ ID NO: 455009 - DNA, 86 bp, Homo sapiens
  chr19:39289891-39289977
  hypo
  bladder_and_urothelial vs. colorectal,lymphoid_neoplasm, sarcoma,thyroid,prostate,non_cancer
cggaaagattctttgtttatattggtgaaatgcacaaatctaaaatgtacagttggctgggcacagcgactcacgccggtaatccc

SEQ ID NO: 455010 - DNA, 57 bp, Homo sapiens; identical to SEQ ID NO: 453811
  chr19:39329516-39329573
  hypo
  bladder_and_urothelial vs. lymphoid_neoplasm, multiple_myeloma

SEQ ID NO: 455011 - DNA, 359 bp, Homo sapiens; identical to SEQ ID NO: 336145
  chr19:41190162-41190521
  hypo
  bladder_and_urothelial vs. ovary,liver_bileduct,breast, melanoma,prostate,pancreas_gallbladder,uterine, lymphoid_neoplasm,renal,lung,thyroid,non_cancer,sarcoma, upper_gi

SEQ ID NO: 455012 - DNA, 3 bp, Homo sapiens
  chr19:41881461-41881464
  hypo
  bladder_and_urothelial vs. melanoma
cgt

SEQ ID NO: 455013 - DNA, 3 bp, Homo sapiens
  chr19:41881583-41881586
  hypo
  bladder_and_urothelial vs. melanoma
cgc

SEQ ID NO: 455014 - DNA, 575 bp, Homo sapiens; identical to SEQ ID NO: 343990
  chr19:42424093-42424668
  hypo
  bladder_and_urothelial vs. upper_gi,breast,ovary

SEQ ID NO: 455015 - DNA, 133 bp, Homo sapiens
  chr19:45603745-45603878
  hypo
  bladder_and_urothelial vs. head_and_neck,breast,cervical, anorectal,melanoma
cgtttgccccaatttgtagatgaggaaatggagcccatagaggtaaagtaattttcctgaggtcacacagtgggtaagtggtggagctgggattcaaatccaggcagccagcctggcgccgaagcctgcgcag

SEQ ID NO: 455016 - DNA, 334 bp, Homo sapiens; identical to SEQ ID NO: 346213
  chr19:45603910-45604244
  hypo
  bladder_and_urothelial vs. head_and_neck,breast,cervical, anorectal,melanoma

SEQ ID NO: 455017 - DNA, 89 bp, Homo sapiens; identical to SEQ ID NO: 454300
  chr19:46519167-46519256
  hypo
  bladder_and_urothelial vs. anorectal,ovary,cervical,lung

SEQ ID NO: 455018 - DNA, 421 bp, Homo sapiens; identical to SEQ ID NO: 352340
  chr19:46519582-46520003
  hypo
  bladder_and_urothelial vs. anorectal,ovary,cervical,lung

SEQ ID NO: 455019 - DNA, 32 bp, Homo sapiens
  chr19:47116867-47116899
  hypo
  bladder_and_urothelial vs. pancreas_gallbladder,renal, lymphoid_neoplasm,melanoma,prostate,multiple_myeloma,breast, non_cancer
cgtgagccaccgcgcccggccgtgccaaactt

SEQ ID NO: 455020 - DNA, 126 bp, Homo sapiens; identical to SEQ ID NO: 344025
  chr19:47335926-47336052
  hypo
  bladder_and_urothelial vs. pancreas_gallbladder

SEQ ID NO: 455021 - DNA, 168 bp, Homo sapiens; identical to SEQ ID NO: 344026
  chr19:47482472-47482640
  hypo
  bladder_and_urothelial vs. liver_bileduct

SEQ ID NO: 455022 - DNA, 345 bp, Homo sapiens
  chr19:48150921-48151266
  hypo
  bladder_and_urothelial vs. head_and_neck
cgggtgaggattggaagccatgatcgcctgcctctgttgctggttttagtctttaacccttgctctgtggacttgagaaatgtgcttttccatggtgcctgtgaccaagatgtccgcatcgttagtgaagaccctgctatgtccttgaccacactgcacggggatcctgtccacgatggggggtgtcctgttgggcttgagtgtctagatatggagaccgtagttcgcggggggagtggggggccgtttggcatatttgccctggcatttggggttgtttattgggggtgggagtgctcctggcatttcctgggcgggaactactggtgtagacctactggatta

SEQ ID NO: 455023 - DNA, 242 bp, Homo sapiens; identical to SEQ ID NO: 336199
  chr19:48229040-48229282
  hypo
  bladder_and_urothelial vs. upper_gi,pancreas_gallbladder

SEQ ID NO: 455024 - DNA, 457 bp, Homo sapiens; identical to SEQ ID NO: 453817
  chr19:49971410-49971867
  hypo
  bladder_and_urothelial vs. sarcoma,liver_bileduct,renal, multiple_myeloma,melanoma,lymphoid_neoplasm,myeloid_neoplasm, prostate,uterine

SEQ ID NO: 455025 - DNA, 78 bp, Homo sapiens; identical to SEQ ID NO: 356193
  chr19:50320125-50320203
  hypo
  bladder_and_urothelial vs. melanoma

SEQ ID NO: 455026 - DNA, 100 bp, Homo sapiens
  chr19:52479250-52479350
  hypo
  bladder_and_urothelial vs. head_and_neck,anorectal
cggctgatgaaggtttgctggaggcaatcactccctggcgccgttatctactgcgacatctagagaatgcagtcttgcaagactactctggacccctggc

SEQ ID NO: 455027 - DNA, 119 bp, Homo sapiens; identical to SEQ ID NO: 336251
  chr19:52715152-52715271
  hypo
  bladder_and_urothelial vs. pancreas_gallbladder,lung, head_and_neck,upper_gi,ovary,anorectal

SEQ ID NO: 455028 - DNA, 74 bp, Homo sapiens; identical to SEQ ID NO: 344094
  chr19:53463668-53463742
  hypo
  bladder_and_urothelial vs. upper_gi

SEQ ID NO: 455029 - DNA, 340 bp, Homo sapiens
  chr19:54313999-54314339
  hypo
  bladder_and_urothelial vs. upper_gi,pancreas_gallbladder, anorectal,colorectal
cgtggaaagaaggcttgagctcatcgaagccgtcgatgatgaaaaggaggcgctcgggaactcggatgagctcctggagaggcgcgctgggctcaggccagcagctgaagatgaggtcttgcatgctgcattccgtggcactctggttcatctccctgcagttgatgtagaagagataatcaaatctgccttggaagagcttcccgtccgcccagtccagcatcaccttgtgtgccagcatggacttgcctatccctgccgcgccttgcatgaccacggtgcgcggtggctcggggcgctcctcgtctggctcaaagagggtctctatcttgatggggct

SEQ ID NO: 455030 - DNA, 134 bp, Homo sapiens; identical to SEQ ID NO: 336290
  chr19:56112791-56112925
  hypo
  bladder_and_urothelial vs. multiple_myeloma,uterine, ovary,myeloid_neoplasm

SEQ ID NO: 455031 - DNA, 146 bp, Homo sapiens
  chr19:56688223-56688369
  hypo
  bladder_and_urothelial vs. head_and_neck
cgctgggggaccaggtcggcctgatccgatgatgggggaaggagaggcttaattgcttgcacacgtccaaactcctcaagatgtgtacattaaatgtgcgccatttttgtatctcgatgatgcctccataaagctaaaaaataaat

SEQ ID NO: 455032 - DNA, 13 bp, Homo sapiens
  chr19:56688479-56688492
  hypo
  bladder_and_urothelial vs. head_and_neck
ggctcctccctcc

SEQ ID NO: 455033 - DNA, 171 bp, Homo sapiens; identical to SEQ ID NO: 344121
  chr19:56807013-56807184
  hypo
  bladder_and_urothelial vs. liver_bileduct,colorectal, upper_gi,ovary,uterine,sarcoma,breast,multiple_myeloma, lymphoid_neoplasm,prostate

SEQ ID NO: 455034 - DNA, 248 bp, Homo sapiens; identical to SEQ ID NO: 337455
  chr2:318873-319121
  hypo
  bladder_and_urothelial vs. pancreas_gallbladder

SEQ ID NO: 455035 - DNA, 425 bp, Homo sapiens; identical to SEQ ID NO: 337456
  chr2:319186-319611
  hypo
  bladder_and_urothelial vs. pancreas_gallbladder,uterine, renal,breast

SEQ ID NO: 455036 - DNA, 84 bp, Homo sapiens; identical to SEQ ID NO: 337504
  chr2:8647920-8648004
  hypo
  bladder_and_urothelial vs. lung,head_and_neck

SEQ ID NO: 455037 - DNA, 255 bp, Homo sapiens
  chr2:8834468-8834723
  hypo
  bladder_and_urothelial vs. breast,anorectal
cggagcaaggcagccaggggcccagtgcgaggagaggagaacggacaggatgggggaggcccatcacacccagcctcacaggccgcgctaagagctttggcctttactttgtgtaaactgggaccttggagagctttgcgcaggagagtgatggaaccaaactatttagcagccacatttcttttaatgtttctcgtttataggttacacatttgttgttattattattgatttaataatactgtgtcaagataa

SEQ ID NO: 455038 - DNA, 121 bp, Homo sapiens; identical to SEQ ID NO: 362803
  chr2:8834896-8835017
  hypo
  bladder_and_urothelial vs. breast,anorectal

SEQ ID NO: 455039 - DNA, 210 bp, Homo sapiens; identical to SEQ ID NO: 337511
  chr2:8860527-8860737
  hypo
  bladder_and_urothelial vs. head_and_neck,ovary,lung, cervical,melanoma

SEQ ID NO: 455040 - DNA, 123 bp, Homo sapiens; identical to SEQ ID NO: 337524
  chr2:10047588-10047711
  hypo
  bladder_and_urothelial vs. liver_bileduct,colorectal, ovary,breast,pancreas_gallbladder

SEQ ID NO: 455041 - DNA, 4 bp, Homo sapiens
  chr2:10151899-10151903
  hypo
cgta

SEQ ID NO: 455042 - DNA, 2 bp, Homo sapiens
  chr2:10152022-10152024
  hypo
gc

SEQ ID NO: 455043 - DNA, 166 bp, Homo sapiens; identical to SEQ ID NO: 331200
  chr2:10152421-10152587
  hypo
  bladder_and_urothelial vs. liver_bileduct,breast,uterine

SEQ ID NO: 455044 - DNA, 91 bp, Homo sapiens
  chr2:10152958-10153049
  hypo
  bladder_and_urothelial vs. breast,lymphoid_neoplasm, prostate,melanoma,renal,thyroid,uterine,non_cancer, multiple_myeloma
cgtgtgtatgggcaggtcaggtggacaggactgaatatgggggggtcaggtgggcaggcgtgcgtatggtcgggtcatgtgggcaggcgtg

SEQ ID NO: 455045 - DNA, 20 bp, Homo sapiens
  chr2:10153468-10153488
  hypo
  bladder_and_urothelial vs. breast,lymphoid_neoplasm, prostate,melanoma,renal,thyroid,uterine,non_cancer, multiple_myeloma
atatgggtatgtgtatgggc

SEQ ID NO: 455046 - DNA, 327 bp, Homo sapiens
  chr2:10153562-10153889
  hypo
  bladder_and_urothelial vs. prostate,breast
cgtttgtatgggcgggtcaggtgggcaggagttcttatggtcgggtcaggtgggcaggcgtgcatatggtcggtttaggtggacaggcgtgtgtatgggtgtgcgtatggacgagtcaggtgggcaggcatcctacaggcgggtcaggtgggcaggcgtttgtatgggtgggtcaggtgggcaggtgttcttatggtcgggtcaggtgggcagacgtgcatatggtcgggtcaggtggacaggcatgtgtatgggtgtgcgtatggacgagtcaggtggacaggcgtgcgtatgggagagtcaggtggacaggcatgtgtatgggcg

SEQ ID NO: 455047 - DNA, 19 bp, Homo sapiens
  chr2:10154188-10154207
  hypo
  bladder_and_urothelial vs. prostate,breast
gacaggcgtgcatatgagc

SEQ ID NO: 455048 - DNA, 30 bp, Homo sapiens
  chr2:10154879-10154909
  hypo
  bladder_and_urothelial vs. breast,renal,prostate, lymphoid_neoplasm
cgtacgggcaggtcaggtgggcaggcgtgc

SEQ ID NO: 455049 - DNA, 93 bp, Homo sapiens
  chr2:10155172-10155265
  hypo
  bladder_and_urothelial vs. melanoma,breast,sarcoma, thyroid,lymphoid_neoplasm,multiple_myeloma,prostate,renal
cgtgcgtatgggcgagttaggtggacaggcatgtgtatggacgagtcagatgggcaggtgtgcgtatgggtgtgcgtatgggcgagtcaggtg

SEQ ID NO: 455050 - DNA, 12 bp, Homo sapiens
  chr2:10155388-10155400
  hypo
  bladder_and_urothelial vs. melanoma,breast,sarcoma, thyroid,lymphoid_neoplasm,multiple_myeloma,prostate,renal
gtgcttatgggc

SEQ ID NO: 455051 - DNA, 63 bp, Homo sapiens
  chr2:10156251-10156314
  hypo
  bladder_and_urothelial vs. sarcoma,prostate,breast, lymphoid_neoplasm,melanoma,multiple_myeloma
cgtatggctgtgcgtttgggcgagtcaggtgggcagacgtgcgtatgggcagtcaggtggaca

SEQ ID NO: 455052 - DNA, 28 bp, Homo sapiens
  chr2:10306818-10306846
  hypo
  bladder_and_urothelial vs. ovary
cgccctgttccctatggcgcaccagctg

SEQ ID NO: 455053 - DNA, 158 bp, Homo sapiens; identical to SEQ ID NO: 362825
  chr2:10306915-10307073
  hypo
  bladder_and_urothelial vs. ovary

SEQ ID NO: 455054 - DNA, 55 bp, Homo sapiens; identical to SEQ ID NO: 347881
  chr2:10600813-10600868
  hypo
  bladder_and_urothelial vs. anorectal

SEQ ID NO: 455055 - DNA, 291 bp, Homo sapiens; identical to SEQ ID NO: 337546
  chr2:10666473-10666764
  hypo
  bladder_and_urothelial vs. upper_gi,colorectal, pancreas_gallbladder

SEQ ID NO: 455056 - DNA, 309 bp, Homo sapiens
  chr2:24584022-24584331
  hypo
  bladder_and_urothelial vs. liver_bileduct
cgctagtcacactccgccgagcagtaggaagactctgtccccatagagcatagcacgacgaagctaaactttcctccccacccctcgccaagggacaggcgaagctcctactcagaatttgtctcttttctcccctcccggttcctggtctcctcacaaaagaccagacttcaactcaagccgccaccgtatcccaaaaccccaaaggtttgcccttgacaagaagcttcttcaaggggaaaggctttcttttgattggggtgagggaggagttagtgtttcctaatgaacgtaaccaaatgtcggcct

SEQ ID NO: 455057 - DNA, 496 bp, Homo sapiens; identical to SEQ ID NO: 362845
  chr2:25044264-25044760
  hypo
  bladder_and_urothelial vs. upper_gi,colorectal,breast

SEQ ID NO: 455058 - DNA, 191 bp, Homo sapiens
  chr2:25047277-25047468
  hypo
  bladder_and_urothelial vs. liver_bileduct
cgtgccacgtgctcaggcaacatgttggtgaccaaggcctcgttccagcgtcgcatctcatagacacgttccttctggtcgtggacctcaatcttccacaagaaaagtgtccgtgccagtttttctacctacagacacagacaaggcgaggcatgtgctctaagctggccactggatagaaggatgaaaaa

SEQ ID NO: 455059 - DNA, 3 bp, Homo sapiens
  chr2:25047485-25047488
  hypo
  bladder_and_urothelial vs. liver_bileduct
ggc

SEQ ID NO: 455060 - DNA, 99 bp, Homo sapiens; identical to SEQ ID NO: 337578
  chr2:27007597-27007696
  hypo
  bladder_and_urothelial vs. liver_bileduct

SEQ ID NO: 455061 - DNA, 38 bp, Homo sapiens; identical to SEQ ID NO: 454314
  chr2:30453530-30453568
  hypo
  bladder_and_urothelial vs. myeloid_neoplasm

SEQ ID NO: 455062 - DNA, 75 bp, Homo sapiens; identical to SEQ ID NO: 337592
  chr2:31550134-31550209
  hypo
  bladder_and_urothelial vs. head_and_neck,lung,cervical

SEQ ID NO: 455063 - DNA, 2 bp, Homo sapiens
  chr2:32504328-32504330
  hypo
cg

SEQ ID NO: 455064 - DNA, 42 bp, Homo sapiens; identical to SEQ ID NO: 337619
  chr2:54343989-54344031
  hypo

SEQ ID NO: 455065 - DNA, 428 bp, Homo sapiens; identical to SEQ ID NO: 357184
  chr2:61175657-61176085
  hypo
  bladder_and_urothelial vs. colorectal,liver_bileduct, upper_gi,breast

SEQ ID NO: 455066 - DNA, 66 bp, Homo sapiens; identical to SEQ ID NO: 337628
  chr2:62116634-62116700
  hypo
  bladder_and_urothelial vs. renal,melanoma

SEQ ID NO: 455067 - DNA, 312 bp, Homo sapiens
  chr2:68672378-68672690
  hypo
  bladder_and_urothelial vs. cervical,lymphoid_neoplasm, renal,multiple_myeloma,uterine,melanoma,thyroid,non_cancer, myeloid_neoplasm
cgaaaacccacaccaaaatcatcaccagcgtgcacatctgttcccttgttgagatttaatcactgaagagcaggtggaagccgtcctgaacgaattaccccatgtacctagaagcctcttcccaaatcaagcagtgatcacctcactcataaacagagcacgcacccaaaggttttgcttgatgtattttgagactagtttcacgtgttgctgctaaacgtttccagggagttgcaaaagttaatccttatggatcggtgattgaaatacagtgacatccctgctgctctgcagtgtgcgcaaaggtcaaat

SEQ ID NO: 455068 - DNA, 123 bp, Homo sapiens
  chr2:69928507-69928630
  hypo
  bladder_and_urothelial vs. upper_gi,melanoma,breast, liver_bileduct
cgtgtccctcccgctagcaaacaccattctattttctatctgtatgattttgactactctggctaccttgtaaaagcggaatcatttgtctttttgtgactggcttatttcacttagcgtaac

SEQ ID NO: 455069 - DNA, 318 bp, Homo sapiens; identical to SEQ ID NO: 454321
  chr2:70351179-70351497
  hypo
  bladder_and_urothelial vs. cervical,pancreas_gallbladder, melanoma,multiple_myeloma,ovary,non_cancer,breast,upper_gi, myeloid_neoplasm,thyroid,renal

SEQ ID NO: 455070 - DNA, 346 bp, Homo sapiens; identical to SEQ ID NO: 337646
  chr2:72359340-72359686
  hypo
  bladder_and_urothelial vs. breast

SEQ ID NO: 455071 - DNA, 359 bp, Homo sapiens
  chr2:74152840-74153199
  hypo
  bladder_and_urothelial vs. myeloid_neoplasm
cgctccagtagccattaacgccccaccctggttatccttaaaaaattcgattaaaaaaaaagttcttaatatataaacatgacctcagccatcctatatatacatcaacataagaaaaaggtcccgtgctttttatgggaacagcttcaagacaggtatcccagcccccggcccctccccagcccccttgcaatcagatccttgtcttctaaaacctgccacacctaagagcgctgcctgaaggccggtttggcctgttgactcctggttttgactgttggtgatttaagcgattggaactggaagcaccatttgacaacattttgtaaatcattacttctgaggttgttatgacgacg

SEQ ID NO: 455072 - DNA, 90 bp, Homo sapiens; identical to SEQ ID NO: 376348
  chr2:74153227-74153317
  hypo
  bladder_and_urothelial vs. myeloid_neoplasm

SEQ ID NO: 455073 - DNA, 236 bp, Homo sapiens; identical to SEQ ID NO: 453103
  chr2:74781700-74781936
  hypo
  bladder_and_urothelial vs. colorectal,upper_gi, multiple_myeloma

SEQ ID NO: 455074 - DNA, 75 bp, Homo sapiens
  chr2:85819578-85819653
  hypo
  bladder_and_urothelial vs. melanoma,prostate
cggtgtttgagatgagtcaggctgggagggttccacggcaggtggtatagaaagagagcagacaaggccgggcgc

SEQ ID NO: 455075 - DNA, 87 bp, Homo sapiens
  chr2:88591077-88591164
  hypo
  bladder_and_urothelial vs. pancreas_gallbladder
cgccactgcactccagcatgggcgacagagcaagactcagtaaataaataaaacaaaaaaagcatgcacgcacaaagcaacaaaaac

SEQ ID NO: 455076 - DNA, 209 bp, Homo sapiens
  chr2:113103038-113103247
  hypo
  bladder_and_urothelial vs. cervical,head_and_neck
cgcccgttttcgaatccatttggcacctccttcgcctaagaatttgcttttccaggcgtcccctttctgttccgtctctgtactgcactaacttcacctatacacaggtctgtatcctcctgttaaaaccactgaccaggactgccgcttctgggtgcgatacagtaacaggcattggattcctcctcttccctcaaacaactagaaag

SEQ ID NO: 455077 - DNA, 89 bp, Homo sapiens; identical to SEQ ID NO: 353164
  chr2:113103431-113103520
  hypo
  bladder_and_urothelial vs. cervical,head_and_neck

SEQ ID NO: 455078 - DNA, 98 bp, Homo sapiens
  chr2:127428888-127428986
  hypo
  bladder_and_urothelial vs. sarcoma
cggagggagagccagagcaggtgcaagcatgcgaggcaggcttccctgagcccgacagccagggacaaccagctaacacccaagttcagaaaacagtg

SEQ ID NO: 455079 - DNA, 74 bp, Homo sapiens; identical to SEQ ID NO: 337773
  chr2:135293582-135293656
  hypo
  bladder_and_urothelial vs. lung,breast,uterine,renal, sarcoma

SEQ ID NO: 455080 - DNA, 240 bp, Homo sapiens; identical to SEQ ID NO: 453133
  chr2:168149264-168149504
  hypo
  bladder_and_urothelial vs. ovary

SEQ ID NO: 455081 - DNA, 221 bp, Homo sapiens; identical to SEQ ID NO: 453136
  chr2:168149556-168149777
  hypo
  bladder_and_urothelial vs. ovary

SEQ ID NO: 455082 - DNA, 64 bp, Homo sapiens; identical to SEQ ID NO: 454336
  chr2:168149713-168149777
  hypo
  bladder_and_urothelial vs. ovary

SEQ ID NO: 455083 - DNA, 98 bp, Homo sapiens; identical to SEQ ID NO: 337807
  chr2:171815760-171815858
  hypo
  bladder_and_urothelial vs. colorectal,liver_bileduct, ovary,pancreas_gallbladder,upper_gi

SEQ ID NO: 455084 - DNA, 129 bp, Homo sapiens
  chr2:180886599-180886728
  hypo
  bladder_and_urothelial vs. cervical
cgcggggtcggtgtataataccccccgccgcgatgtggggagtgatatcaccctctctcaccctggatattacgaacaacctcgcggggggtggtggtccataatatccgggtggggggagaggctgat

SEQ ID NO: 455085 - DNA, 25 bp, Homo sapiens
  chr2:180886910-180886935
  hypo
  bladder_and_urothelial vs. cervical
ccttggctctgccacttactgcccc

SEQ ID NO: 455086 - DNA, 2 bp, Homo sapiens
  chr2:198456691-198456693
  hypo
  bladder_and_urothelial vs. melanoma,breast,renal, prostate,lymphoid_neoplasm,uterine,sarcoma
cc

SEQ ID NO: 455087 - DNA, 291 bp, Homo sapiens; identical to SEQ ID NO: 376548
  chr2:219256000-219256291
  hypo
  bladder_and_urothelial vs. cervical,lung,head_and_neck

SEQ ID NO: 455088 - DNA, 113 bp, Homo sapiens; identical to SEQ ID NO: 363075
  chr2:219294067-219294180
  hypo
  bladder_and_urothelial vs. upper_gi

SEQ ID NO: 455089 - DNA, 595 bp, Homo sapiens; identical to SEQ ID NO: 454343
  chr2:219757371-219757966
  hypo
  bladder_and_urothelial vs. anorectal, pancreas_gallbladder,lymphoid_neoplasm,prostate, multiple_myeloma,cervical,breast,non_cancer,renal,thyroid, uterine,colorectal,lung,upper_gi,myeloid_neoplasm

SEQ ID NO: 455090 - DNA, 38 bp, Homo sapiens; identical to SEQ ID NO: 376566
  chr2:223753603-223753641
  hypo
  bladder_and_urothelial vs. upper_gi

SEQ ID NO: 455091 - DNA, 2 bp, Homo sapiens
  chr2:225394299-225394301
  hypo
  bladder_and_urothelial vs. liver_bileduct,upper_gi, pancreas_gallbladder,colorectal
cg

SEQ ID NO: 455092 - DNA, 77 bp, Homo sapiens; identical to SEQ ID NO: 454345
  chr2:225906328-225906405
  hypo
  bladder_and_urothelial vs. lymphoid_neoplasm

SEQ ID NO: 455093 - DNA, 115 bp, Homo sapiens; identical to SEQ ID NO: 357491
  chr2:232527239-232527354
  hypo
  bladder_and_urothelial vs. multiple_myeloma,cervical, pancreas_gallbladder

SEQ ID NO: 455094 - DNA, 99 bp, Homo sapiens
  chr2:233198455-233198554
  hypo
  bladder_and_urothelial vs. melanoma
cgctgccgacggtgaggctgtgggtggtgccagccttccaggcctggctgggcagctctgggcttgtcaggctctgacccatcccgtcccgcagatggc

SEQ ID NO: 455095 - DNA, 129 bp, Homo sapiens; identical to SEQ ID NO: 353240
  chr2:233198583-233198712
  hypo
  bladder_and_urothelial vs. melanoma

SEQ ID NO: 455096 - DNA, 321 bp, Homo sapiens; identical to SEQ ID NO: 337906
  chr2:234751574-234751895
  hypo
  bladder_and_urothelial vs. head_and_neck,liver_bileduct, cervical

SEQ ID NO: 455097 - DNA, 788 bp, Homo sapiens; identical to SEQ ID NO: 363166
  chr2:241380563-241381351
  hypo
  bladder_and_urothelial vs. breast,upper_gi

SEQ ID NO: 455098 - DNA, 463 bp, Homo sapiens
  chr2:242004407-242004870
  hypo
  bladder_and_urothelial vs. breast,sarcoma,prostate, cervical
cgagggggtcccctctccctagagggcccaacggtctccaagggcagagcgtctggccgctgcttgcccaggccccttccctgaggaacagggaggggataaaatcccccggtgggcttgaaacacggtcacacattcaaaagtgtgaccctcctggaggtacgtggccagggacaaagaaggactctgccagcgatggctgtgtcaggcccaagagccagacccggctgagccgccgacgggagccaggcatgcatagctaacggctgaccagtcccctccccttgttttgacccaaaccctgaagagctcttcccaccgacggccctcaagatggagagagtggaggagagtggggtctctatctcctggaacccgcccaatggtccagccgccaggcagatgcttgatggctacgcggtcacctacgtctcctccgacggctcctaccgccgcacagact

SEQ ID NO: 455099 - DNA, 35 bp, Homo sapiens; identical to SEQ ID NO: 344204
  chr20:30996055-30996090
  hypo
  bladder_and_urothelial vs. ovary

SEQ ID NO: 455100 - DNA, 165 bp, Homo sapiens
  chr20:33879796-33879961
  hypo
  bladder_and_urothelial vs. breast,uterine
cggtctggcccggaggcctcctgcccctgagcctcgctgagctcagggcccccgcgcacatggctggtcatgtagtccacatccagggcgctcaggaagggcagctcccgctcctcggagatgacccgcaggtaggcagcctcaccccgctccaggagggcgtcg

SEQ ID NO: 455101 - DNA, 131 bp, Homo sapiens; identical to SEQ ID NO: 368322
  chr20:33880280-33880411
  hypo
  bladder_and_urothelial vs. breast,uterine

SEQ ID NO: 455102 - DNA, 187 bp, Homo sapiens
  chr20:36767690-36767877
  hypo
  bladder_and_urothelial vs. renal,colorectal,melanoma, liver_bileduct,prostate
cggggccattgctgtacgtaggctaccaattaaaacacacgcacacacatacacgagcctgccgggctgggaaaactggatgcttatcttcaaggctgcattaaagactctgagggcacataccctctgggtatttgtaggtgtgggtgatatcctcccgctcgtctcggcccacgctcttagtgct

SEQ ID NO: 455103 - DNA, 109 bp, Homo sapiens; identical to SEQ ID NO: 368336
  chr20:36767917-36768026
  hypo
  bladder_and_urothelial vs. renal,colorectal,melanoma, liver_bileduct,prostate

SEQ ID NO: 455104 - DNA, 161 bp, Homo sapiens; identical to SEQ ID NO: 344232
  chr20:36802873-36803034
  hypo
  bladder_and_urothelial vs. liver_bileduct

SEQ ID NO: 455105 - DNA, 148 bp, Homo sapiens; identical to SEQ ID NO: 344233
  chr20:37145099-37145247
  hypo
  bladder_and_urothelial vs. liver_bileduct

SEQ ID NO: 455106 - DNA, 173 bp, Homo sapiens
  chr20:42088459-42088632
  hypo
  bladder_and_urothelial vs. lymphoid_neoplasm
cggaccacctgttcgtacagaatacaggcttattgtagaaaatctttctagtcggtgcagttggcaagatttaaaggtatgttttgtaattcaagatagaaatgatatgactaatgctttaaagtaaactccttttatattcttatttctgggaatttattatggtatataga

SEQ ID NO: 455107 - DNA, 7 bp, Homo sapiens
  chr20:42088765-42088772
  hypo
  bladder_and_urothelial vs. lymphoid_neoplasm
atgaagc

SEQ ID NO: 455108 - DNA, 55 bp, Homo sapiens; identical to SEQ ID NO: 368349
  chr20:42833281-42833336
  hypo
  bladder_and_urothelial vs. prostate,lymphoid_neoplasm

SEQ ID NO: 455109 - DNA, 192 bp, Homo sapiens
  chr20:45833348-45833540
  hypo
  bladder_and_urothelial vs. prostate,sarcoma, lymphoid_neoplasm,non_cancer
cgaaggattacagcatggaaagcctcagcacagagccccacgtggggcaggcccacatcagcgacacttggaggaatataggtgacctttgcttctctagactaaagaaaataaataagaatatagatggggtcctgatgtaccctgatatgaaggtggcagctaaatgctgacctttggaaaactcaactc

SEQ ID NO: 455110 - DNA, 23 bp, Homo sapiens
  chr20:45833568-45833591
  hypo
  bladder_and_urothelial vs. prostate,sarcoma, lymphoid_neoplasm,non_cancer
aaaatggacggtcggccgggcgc

SEQ ID NO: 455111 - DNA, 167 bp, Homo sapiens
  chr20:46365433-46365600
  hypo
  bladder_and_urothelial vs. pancreas_gallbladder
cgtccctgctcacctgtccggtagccagtgctattgaggtacacggcaaaggtgcggctctcgtgctgtgcctgccaggagggcgaggagcagttctcattgttggtgtaggtgttgtggttgtggacgtacttgccagtgaggatggaggagcgtgaggggcagca

SEQ ID NO: 455112 - DNA, 125 bp, Homo sapiens; identical to SEQ ID NO: 368358
  chr20:46365635-46365760
  hypo
  bladder_and_urothelial vs. pancreas_gallbladder

SEQ ID NO: 455113 - DNA, 162 bp, Homo sapiens; identical to SEQ ID NO: 344300
  chr20:52214819-52214981
  hypo
  bladder_and_urothelial vs. renal,myeloid_neoplasm, sarcoma,melanoma

SEQ ID NO: 455114 - DNA, 174 bp, Homo sapiens; identical to SEQ ID NO: 344302
  chr20:52374073-52374247
  hypo
  bladder_and_urothelial vs. liver_bileduct, pancreas_gallbladder,melanoma

SEQ ID NO: 455115 - DNA, 62 bp, Homo sapiens; identical to SEQ ID NO: 344303
  chr20:55026786-55026848
  hypo
  bladder_and_urothelial vs. head_and_neck

SEQ ID NO: 455116 - DNA, 30 bp, Homo sapiens
  chr20:60281877-60281907
  hypo
  bladder_and_urothelial vs. anorectal
gaccgtcagcatccgacctccacattagcc

SEQ ID NO: 455117 - DNA, 111 bp, Homo sapiens; identical to SEQ ID NO: 368426
  chr20:60448951-60449062
  hypo
  bladder_and_urothelial vs. anorectal

SEQ ID NO: 455118 - DNA, 58 bp, Homo sapiens
  chr20:60470129-60470187
  hypo
  bladder_and_urothelial vs. anorectal
cgcatggcccgtgcagggcaggaatgcactggcgtgcggcacagcctcctctctctct

SEQ ID NO: 455119 - DNA, 77 bp, Homo sapiens; identical to SEQ ID NO: 383046
  chr20:60470257-60470334
  hypo
  bladder_and_urothelial vs. anorectal

SEQ ID NO: 455120 - DNA, 37 bp, Homo sapiens
  chr20:60502550-60502587
  hypo
  bladder_and_urothelial vs. thyroid,prostate,renal, non_cancer,lymphoid_neoplasm
cggccgcgcctgcttttctcacagacacttccaaaag

SEQ ID NO: 455121 - DNA, 266 bp, Homo sapiens; identical to SEQ ID NO: 368437
  chr20:60662808-60663074
  hypo
  bladder_and_urothelial vs. head_and_neck,cervical

SEQ ID NO: 455122 - DNA, 64 bp, Homo sapiens; identical to SEQ ID NO: 344363
  chr20:60842033-60842097
  hypo
  bladder_and_urothelial vs. upper_gi,colorectal, pancreas_gallbladder,ovary,uterine,prostate,sarcoma, lymphoid_neoplasm

SEQ ID NO: 455123 - DNA, 368 bp, Homo sapiens; identical to SEQ ID NO: 344364
  chr20:60842477-60842845
  hypo
  bladder_and_urothelial vs. colorectal

SEQ ID NO: 455124 - DNA, 237 bp, Homo sapiens
  chr20:61287746-61287983
  hypo
  bladder_and_urothelial vs. colorectal,lymphoid_neoplasm, prostate,upper_gi,thyroid,uterine,non_cancer,renal
cgctgaggccactcccactgcgtggctgaagcctcgaggtcaccaggcggaggcgcggagatgcccctgcatcagctgggggacaagccgctcaccttccccagccccaactcagccatggaaaacgggcttgaccacaccccacccagcaggagggcatccccgggcacacccctgagccccggctccctccgctccgctgcccatagccccctggacaccagcaagcagcccctc

SEQ ID NO: 455125 - DNA, 60 bp, Homo sapiens; identical to SEQ ID NO: 356344
  chr20:61288557-61288617
  hypo
  bladder_and_urothelial vs. colorectal,lymphoid_neoplasm, prostate,upper_gi,thyroid,uterine,non_cancer,renal

SEQ ID NO: 455126 - DNA, 242 bp, Homo sapiens
  chr20:61318783-61319025
  hypo
  bladder_and_urothelial vs. prostate,thyroid
agtggcgtccagggcagggcaggtgcgtcatccgggcgggatgcagagacacgtccttccaccaaccatctgaggagcacttggcacccacacaatgagcccggcaagggccacgccaggaggcagcgcacggggcagagcctctgagccagagagggggaggtcccttgggaggcccctgccatcccccgctctgggtgggcctctccagccagactctgcgccccaagggcagggctggg

SEQ ID NO: 455127 - DNA, 4 bp, Homo sapiens
  chr20:61319132-61319136
  hypo
  bladder_and_urothelial vs. prostate,thyroid
cagc

SEQ ID NO: 455128 - DNA, 566 bp, Homo sapiens; identical to SEQ ID NO: 344381
  chr20:61488430-61488996
  hypo
  bladder_and_urothelial vs. ovary

SEQ ID NO: 455129 - DNA, 7 bp, Homo sapiens
  chr20:62046195-62046202
  hypo
  bladder_and_urothelial vs. anorectal
cgtggcc

SEQ ID NO: 455130 - DNA, 58 bp, Homo sapiens
  chr21:19274771-19274829
  hypo
  bladder_and_urothelial vs. lymphoid_neoplasm,melanoma, multiple_myeloma,thyroid,sarcoma,non_cancer,renal
cgtgagccaccgcgcccagcctggagtgtttaattttatgtgtcaacttgtctgggct

SEQ ID NO: 455131 - DNA, 4 bp, Homo sapiens
  chr21:33954154-33954158
  hypo
  bladder_and_urothelial vs. melanoma,cervical,breast,lung, anorectal
cgtc

SEQ ID NO: 455132 - DNA, 108 bp, Homo sapiens; identical to SEQ ID NO: 356373
  chr21:33954435-33954543
  hypo
  bladder_and_urothelial vs. melanoma,cervical,breast,lung, anorectal

SEQ ID NO: 455133 - DNA, 42 bp, Homo sapiens; identical to SEQ ID NO: 344459
  chr21:35286360-35286402
  hypo
  bladder_and_urothelial vs. liver_bileduct,lung,breast

SEQ ID NO: 455134 - DNA, 122 bp, Homo sapiens
  chr21:38362977-38363099
  hypo
  bladder_and_urothelial vs. pancreas_gallbladder,breast, sarcoma,prostate
aatgcccgcatttctaccctgcccactagaaactgagggattgccacagctcccgtgaggttcagcaattccctgggacgacacagaactcagggagacactttactgttagaagattattg

SEQ ID NO: 455135 - DNA, 22 bp, Homo sapiens
  chr21:38363138-38363160
  hypo
  bladder_and_urothelial vs. pancreas_gallbladder,breast, sarcoma,prostate
cgcagcacggggggtgaagggc

SEQ ID NO: 455136 - DNA, 39 bp, Homo sapiens
  chr21:44482534-44482573
  hypo
  bladder_and_urothelial vs. lung
cgtgggagccgctcccacgtgaccaagagggtgaacagc

SEQ ID NO: 455137 - DNA, 206 bp, Homo sapiens
  chr21:44482687-44482893
  hypo
  bladder_and_urothelial vs. lung
aaaactgcccgccagccccactgagcatccgtgtgacccacaccggcccttcggtctctgctctccctcaggccaaagtcagctttttggctcttaacagacttttccggggccttaattttcacacgttttccctgctccctgcctgtgccacctgggctacatcccttggtgaggtcaggccacgtgtgcggacatcgtccccc

SEQ ID NO: 455138 - DNA, 159 bp, Homo sapiens; identical to SEQ ID NO: 368575
  chr21:44482954-44483113
  hypo
  bladder_and_urothelial vs. lung

SEQ ID NO: 455139 - DNA, 320 bp, Homo sapiens; identical to SEQ ID NO: 344523
  chr21:44840079-44840399
  hypo
  bladder_and_urothelial vs. upper_gi,colorectal,ovary, breast

SEQ ID NO: 455140 - DNA, 402 bp, Homo sapiens; identical to SEQ ID NO: 344529
  chr21:45167210-45167612
  hypo
  bladder_and_urothelial vs. upper_gi

SEQ ID NO: 455141 - DNA, 16 bp, Homo sapiens
  chr21:45195134-45195150
  hypo
  bladder_and_urothelial vs. prostate
cgcctggacctgttct

SEQ ID NO: 455142 - DNA, 26 bp, Homo sapiens
  chr21:45268743-45268769
  hypo
  bladder_and_urothelial vs. renal
cggcacctcgccctgcattctagcgg

SEQ ID NO: 455143 - DNA, 59 bp, Homo sapiens
  chr21:45583689-45583748
  hypo
  bladder_and_urothelial vs. uterine,renal
cgcgttcccgagcgtgcactgaaggtgttagcgcgtggcaccggagacaccaggctgga

SEQ ID NO: 455144 - DNA, 270 bp, Homo sapiens
  chr21:45750126-45750396
  hypo
  bladder_and_urothelial vs. prostate,melanoma,anorectal, liver_bileduct,thyroid
cggctgcccacagtctgctgcacggcctccagcccctctgcatccagctcccgcagcagcagcaggatggcagtcaggacgttctgagggcagaggggtgcggactaagcccacccggcacggcgaggctgcttccctccacaagggctggggcctggccagcggtgccccaccacggagcgactggtcccgggggtgtgggccgtccaagtgactgaccggcacactcggagaatctgagcagaggagccccgcctgtggacgcgtgtg

SEQ ID NO: 455145 - DNA, 15 bp, Homo sapiens
  chr21:46036558-46036573
  hypo
  bladder_and_urothelial vs. colorectal
cgagaccctgccctg

SEQ ID NO: 455146 - DNA, 43 bp, Homo sapiens
  chr21:46311711-46311754
  hypo
  bladder_and_urothelial vs. breast,melanoma,cervical, lymphoid_neoplasm,renal
cgcccgcctcacctgcagatgccgcactccaagaagcccttgc

SEQ ID NO: 455147 - DNA, 60 bp, Homo sapiens; identical to SEQ ID NO: 356423
  chr21:46319505-46319565
  hypo
  bladder_and_urothelial vs. melanoma,cervical,renal, anorectal

SEQ ID NO: 455148 - DNA, 663 bp, Homo sapiens; identical to SEQ ID NO: 368617
  chr21:46323288-46323951
  hypo
  bladder_and_urothelial vs. cervical,breast,prostate

SEQ ID NO: 455149 - DNA, 278 bp, Homo sapiens; identical to SEQ ID NO: 356427
  chr21:46397986-46398264
  hypo
  bladder_and_urothelial vs. liver_bileduct,breast,uterine, melanoma,colorectal,prostate,lymphoid_neoplasm,multiple_myeloma, pancreas_gallbladder

SEQ ID NO: 455150 - DNA, 60 bp, Homo sapiens
  chr21:46424401-46424461
  hypo
  bladder_and_urothelial vs. melanoma
cggtccacccccactgcggtgcagtgccagggtgagccagccacccccggcgggagaaac

SEQ ID NO: 455151 - DNA, 360 bp, Homo sapiens; identical to SEQ ID NO: 383290
  chr21:46424520-46424880
  hypo
  bladder_and_urothelial vs. melanoma

SEQ ID NO: 455152 - DNA, 771 bp, Homo sapiens; identical to SEQ ID NO: 368623
  chr21:46492439-46493210
  hypo
  bladder_and_urothelial vs. cervical,anorectal

SEQ ID NO: 455153 - DNA, 82 bp, Homo sapiens
  chr21:46812995-46813077
  hypo
  bladder_and_urothelial vs. cervical
cggcacgaggccgcccgcctgcagcaggcccgcaggggcacggtgggtccccgcccgctcctcatgccttgagcgcgtcatc

SEQ ID NO: 455154 - DNA, 192 bp, Homo sapiens; identical to SEQ ID NO: 346258
  chr21:46813106-46813298
  hypo
  bladder_and_urothelial vs. cervical

SEQ ID NO: 455155 - DNA, 261 bp, Homo sapiens; identical to SEQ ID NO: 346259
  chr21:46839249-46839510
  hypo
  bladder_and_urothelial vs. anorectal,cervical,uterine

SEQ ID NO: 455156 - DNA, 325 bp, Homo sapiens
  chr21:46844304-46844629
  hypo
cgcctggagcgcagctctgctgtgggttagccgtgggtctctgggcgagggttcccgggatacagacacctgccccaaggtgccccacagaggatgacccccagggcagccgtgcctgagcctgcgtggtcacctcccacagtgccaaggcgctcccccaaggcccctgcggcccacctgaccagtggagaactcgcgagcactcggccagtggtgcctccaatttgcagcctccaatccctggtcagaggtgtgacctgaccctggaccagagcgctgggccaggtcctggtggcttctgcccttcagcttggaagctcctgaa

SEQ ID NO: 455157 - DNA, 449 bp, Homo sapiens
  chr21:46844763-46845212
  hypo
aggcactgcctcgcccgcgcctctttctcccagacctgagccaccgctgccaggatccttccccagctggttttccttctctttgatgtgtttccactgagggtccaaaccggtccaggcgcgggttccagaactttcttcagatctctcgcacctgaaaatttcctctgtagccattcgcaggaggtttctcagatgccccgggctcgggggccagtcagtctcatgaggacggggtgggtctgacttgtggcatcgcggcctctccatcggtgctgctgggcctgtgagccaatgggtgggcagcaccacccaccgcctccttcctcacaccagtcttgggctgcgcagagccccagccatgtgtgtgctgagtgcagtgtgaccgcgtccgcccgtctccccggacacgcctgttggagccccggccgtgtgtgtgtgtgtgctgt

SEQ ID NO: 455158 - DNA, 8 bp, Homo sapiens
  chr21:46845243-46845251
  hypo
ctggacac

SEQ ID NO: 455159 - DNA, 55 bp, Homo sapiens
  chr21:46864076-46864131
  hypo
  bladder_and_urothelial vs. cervical
cgctccatggtacctcctgcctcccgaaatcacctctaagttcactttgtgccag

SEQ ID NO: 455160 - DNA, 231 bp, Homo sapiens
  chr21:46894937-46895168
  hypo
  bladder_and_urothelial vs. liver_bileduct,ovary
cggtccctgaggatgtttctcctccgggttttcctgaagtttaaaacatccagccgccttggcgcgtgttcggcccagccgggcgtgcgctggggaaacctgtgcggggagcatctgcggtgcggcctcctccagggcagggctctggccagaagagaggagcgcgttccccctcccgcctccgcatgtctgaccaccggccgaggcaggttcagaagcgtcactgtcctc

SEQ ID NO: 455161 - DNA, 216 bp, Homo sapiens
  chr21:46895491-46895707
  hypo
  bladder_and_urothelial vs. liver_bileduct,ovary
ggagagcccctcccagcagtggggtgacacatgtgcacacgcaggtgtggctccaagagctccctctatgccacgaagacatattcctggctggggacagggatgctgggctgggcagacgctcggagcctgggcacaggccccgctccggccctgcctggccgccgcgtgtctctggtgagaggatattcctttaaaacgaggtcctgccctgca

SEQ ID NO: 455162 - DNA, 151 bp, Homo sapiens
  chr21:46895736-46895887
  hypo
  bladder_and_urothelial vs. liver_bileduct,ovary
cttcccttcgccccatccctccgttagctcgtgcgtggccatcagggaatgaacgcgtgtgtgagcctgacgaccaggaggagaaggcggcgcagggagcgcgcggaaggctttccccagctcgggccacctgagaaaacacaggaggggc

SEQ ID NO: 455163 - DNA, 216 bp, Homo sapiens; identical to SEQ ID NO: 455161
  chr21:46895491-46895707
  hypo
  bladder_and_urothelial vs. ovary,renal,liver_bileduct, cervical,prostate,breast,uterine

SEQ ID NO: 455164 - DNA, 575 bp, Homo sapiens; identical to SEQ ID NO: 346266
  chr21:46895736-46896311
  hypo
  bladder_and_urothelial vs. ovary,renal,liver_bileduct, cervical,prostate,breast,uterine

SEQ ID NO: 455165 - DNA, 828 bp, Homo sapiens
  chr21:46906455-46907283
  hypo
  bladder_and_urothelial vs. anorectal,sarcoma,cervical
cgggagccagggctggaggtaacgagggtgccctgtgcacctcccgctgtgcatgtgggcctccccctgtgcatgtgggcccaaccccgaccaagttcgggctccgtggctctctcctcagttgtgtttctgtgtggctgaaatcgtgtcgtaaagttagaagaaaggctgctgtggggcctgcgttgcttggcagaatgttccttaccttttgatttgcagggtttagaaagcatcataagaaaacgtgtctacgctggggttgcagggccagcgggggctgggctgggtcctgacacgctctcctcaccccacgcaggggagcaagggagcccccggtcctgctggtgctcgtggggagagcggcctggcaggagcccccggacctgctggaccaccaggcccccctgggccccctgggcccccaggaccaggactccccgctggatttgtgagtaccgcctacacctgaccccctggagagccgggggctgccgttgccccagccctactacccctggcatctcactcacagagcagcacgtcctgggcggtggccttgctggcactgcctcatcctgggattccatattccgcatggtggggctcgagtctctcgcccgtcgcccgtgccccacggtgctgatggggatcttggcccagccatgccccagcacccgtgccctgaccaagagcgaatgagctgacccgagacgggctgccccgggggggctccacccaggccctgccaccaggtagacagtccccatctgagaacggcggctccccaggccaccgtggccccaaagcatgtcccaccctcctctc

SEQ ID NO: 455166 - DNA, 294 bp, Homo sapiens; identical to SEQ ID NO: 453887
  chr21:46912528-46912822
  hypo
  bladder_and_urothelial vs. ovary,renal,uterine,prostate, myeloid_neoplasm,liver_bileduct,thyroid,breast,cervical, melanoma,non_cancer,pancreas_gallbladder,sarcoma,upper_gi

SEQ ID NO: 455167 - DNA, 756 bp, Homo sapiens
  chr21:46912528-46913284
  hypo
  bladder_and_urothelial vs. ovary,pancreas_gallbladder, cervical,breast,liver_bileduct,prostate,uterine,renal, myeloid_neoplasm,melanoma,non_cancer,thyroid,lymphoid_neoplasm, upper_gi
aaggctgggtggggtccgggcaggcgcgagggtgcgtgatgaccccagctgacgccgtccctctttccccagggccggccgggtttcgcaggctttcccgtgagtaacctggtgccagagctgcatgctgcccggctggggaggggtctccacctggtagcacagagcagcccggtcgagctggggtgggccttgtcaggcccgagggatagcgacagtcactgcccccaaggaaatgatgggagtgggatgtgggcgagagccgctggcaggccctgtgctgggtgggcacccgtgagggtgaggcagctccttgcacctgcagaggcctgcagtgtccagagtgaggctggggccgggaggtgtcctggtgggggtcacctgcggaggcctgcagtgtccagagtgaggctggggccgcgaggggccctggtcgggctgtcgaggcaggcatattgcggggggcagctgtcgggggagatggagcagccgtcggggatgggggagatgccagccgctcgggcctcacggcctggcctccattccagggacctgcaggacccaagggcaacctgggctctaagggcgaacgaggctccccgggacccaaggtaaggggctcaggtgctgtccctcaaccccctttgtgacccaggggtggctccagcctgcccagatgaccactgttgggagggacctgggaccccccggctgctgctgtgacacgtgaggggtacatccctgctcgggccgtcc

SEQ ID NO: 455168 - DNA, 300 bp, Homo sapiens; identical to SEQ ID NO: 344621
  chr21:46924382-46924682
  hypo
  bladder_and_urothelial vs. liver_bileduct,ovary, pancreas_gallbladder,cervical

SEQ ID NO: 455169 - DNA, 11 bp, Homo sapiens
  chr21:47425511-47425522
  hypo
  bladder_and_urothelial vs. melanoma,prostate,breast, myeloid_neoplasm
cggggtgcacg

SEQ ID NO: 455170 - DNA, 51 bp, Homo sapiens; identical to SEQ ID NO: 368685
  chr21:47532134-47532185
  hypo

SEQ ID NO: 455171 - DNA, 96 bp, Homo sapiens
  chr21:47565081-47565177
  hypo
  bladder_and_urothelial vs. lymphoid_neoplasm
cggctgccatggcctgtgaatgtggggtcaccctggccgaaccctcaaaccctgctgggcccaagcacttgccggggtgagggcggtgctggtggt

SEQ ID NO: 455172 - DNA, 337 bp, Homo sapiens; identical to SEQ ID NO: 383361
  chr21:47565270-47565607
  hypo
  bladder_and_urothelial vs. lymphoid_neoplasm

SEQ ID NO: 455173 - DNA, 19 bp, Homo sapiens
  chr21:47602441-47602460
  hypo
  bladder_and_urothelial vs. liver_bileduct,prostate, multiple_myeloma,breast
cgcatcagggagctggccg

SEQ ID NO: 455174 - DNA, 384 bp, Homo sapiens; identical to SEQ ID NO: 349095
  chr21:47602705-47603089
  hypo
  bladder_and_urothelial vs. liver_bileduct,prostate, multiple_myeloma,breast

SEQ ID NO: 455175 - DNA, 106 bp, Homo sapiens; identical to SEQ ID NO: 344655
  chr22:18084157-18084263
  hypo
  bladder_and_urothelial vs. pancreas_gallbladder

SEQ ID NO: 455176 - DNA, 130 bp, Homo sapiens; identical to SEQ ID NO: 454357
  chr22:19706042-19706172
  hypo
  bladder_and_urothelial vs. myeloid_neoplasm,ovary

SEQ ID NO: 455177 - DNA, 91 bp, Homo sapiens
  chr22:19924393-19924484
  hypo
  bladder_and_urothelial vs. head_and_neck,cervical,ovary, lymphoid_neoplasm,lung,pancreas_gallbladder
cgccaaaacaaacaagtagattagaggcgtgggcttattcggtcatgctggaacctcctaatgctcaaggggtacaagtgtgtcgatatac

SEQ ID NO: 455178 - DNA, 137 bp, Homo sapiens; identical to SEQ ID NO: 453177
  chr22:22862472-22862609
  hypo
  bladder_and_urothelial vs. uterine,myeloid_neoplasm, prostate,non_cancer,multiple_myeloma,ovary,lymphoid_neoplasm, melanoma,colorectal

SEQ ID NO: 455179 - DNA, 86 bp, Homo sapiens; identical to SEQ ID NO: 344714
  chr22:29587127-29587213
  hypo
  bladder_and_urothelial vs. ovary

SEQ ID NO: 455180 - DNA, 80 bp, Homo sapiens
  chr22:30084279-30084359
  hypo
  bladder_and_urothelial vs. pancreas_gallbladder,upper_gi
cggcccctcggcactgaagatgtgtttcagtgcagctctcctcggcaccggattcgttgctgcaacagtgggagggaaga

SEQ ID NO: 455181 - DNA, 120 bp, Homo sapiens; identical to SEQ ID NO: 356519
  chr22:30084388-30084508
  hypo
  bladder_and_urothelial vs. pancreas_gallbladder,upper_gi

SEQ ID NO: 455182 - DNA, 821 bp, Homo sapiens; identical to SEQ ID NO: 344728
  chr22:30950922-30951743
  hypo
  bladder_and_urothelial vs. upper_gi

SEQ ID NO: 455183 - DNA, 16 bp, Homo sapiens
  chr22:32019755-32019771
  hypo
  bladder_and_urothelial vs. colorectal,upper_gi,breast, ovary
agcgcagtttcagagc

SEQ ID NO: 455184 - DNA, 106 bp, Homo sapiens; identical to SEQ ID NO: 349116
  chr22:41634855-41634961
  hypo
  bladder_and_urothelial vs. uterine,renal

SEQ ID NO: 455185 - DNA, 5 bp, Homo sapiens
  chr22:42109076-42109081
  hypo
  bladder_and_urothelial vs. breast
cgctg

SEQ ID NO: 455186 - DNA, 141 bp, Homo sapiens; identical to SEQ ID NO: 344800
  chr22:43351254-43351395
  hypo
  bladder_and_urothelial vs. colorectal,upper_gi

SEQ ID NO: 455187 - DNA, 39 bp, Homo sapiens; identical to SEQ ID NO: 368825
  chr22:43434578-43434617
  hypo
  bladder_and_urothelial vs. pancreas_gallbladder,renal

SEQ ID NO: 455188 - DNA, 108 bp, Homo sapiens; identical to SEQ ID NO: 344862
  chr22:49857262-49857370
  hypo
  bladder_and_urothelial vs. sarcoma

SEQ ID NO: 455189 - DNA, 469 bp, Homo sapiens
  chr22:49911038-49911507
  hypo
  bladder_and_urothelial vs. anorectal
cgccatctgagggacaaagtccccgagccccgatgcctgggcgcagagctggagactcggcttcttcttcgacctccccggccacttcccaacaccacatcacctcaacgcaggtataaggcacgtcccgtcattgcccccgttttagagctgagaaacatgaggaccagagaatcaaggctgtctgagccagagggcgcctcgctggcccctaccccaaaacagcacccgccctgccctggtcattactgccccccaaccttaaccaccctccccactgccctacagaagacccttagaagggggctgactgatggaccatggtgaaggccagcctggcctccttcagccacagtgtgaagcgcagttcaccaaaactggaaactgccatgcatcccggtgtcatcaaacaccacagcaaaagagccaggtgaacgcacggaacatcaagccgcaaccctccacacct

SEQ ID NO: 455190 - DNA, 193 bp, Homo sapiens; identical to SEQ ID NO: 368887
  chr22:49911586-49911779
  hypo
  bladder_and_urothelial vs. anorectal

SEQ ID NO: 455191 - DNA, 153 bp, Homo sapiens; identical to SEQ ID NO: 356600
  chr22:50899708-50899861
  hypo
  bladder_and_urothelial vs. lymphoid_neoplasm

SEQ ID NO: 455192 - DNA, 1 bp, Homo sapiens
  chr3:3167655-3167656
  hypo
c

SEQ ID NO: 455193 - DNA, 3 bp, Homo sapiens
  chr3:3167733-3167736
  hypo
cac

SEQ ID NO: 455194 - DNA, 191 bp, Homo sapiens; identical to SEQ ID NO: 338015
  chr3:4347767-4347958
  hypo
  bladder_and_urothelial vs. pancreas_gallbladder

SEQ ID NO: 455195 - DNA, 59 bp, Homo sapiens
  chr3:5165842-5165901
  hypo
  bladder_and_urothelial vs. pancreas_gallbladder,sarcoma, renal,upper_gi,liver_bileduct,non_cancer,lymphoid_neoplasm
cgcgcctggcctcctattgtaatattatgattttttgcgcttggaatgactatctttcc

SEQ ID NO: 455196 - DNA, 97 bp, Homo sapiens; identical to SEQ ID NO: 338026
  chr3:10638636-10638733
  hypo

SEQ ID NO: 455197 - DNA, 166 bp, Homo sapiens
  chr3:11581157-11581323
  hypo
  bladder_and_urothelial vs. head_and_neck,anorectal, cervical,melanoma,sarcoma,lymphoid_neoplasm
cgtcttaagctatattcgttttctcttatgaatttaaaaaataaaatctattgatgcgcatacaatcaaatatatgtaaaagtgcacatttctgagctttgagaaacgtactcgcttgtggaaccagcacagttcggcgacatcgagcaggtctgtctggcctgtc

SEQ ID NO: 455198 - DNA, 64 bp, Homo sapiens
  chr3:12586164-12586228
  hypo
  bladder_and_urothelial vs. melanoma
cgaaactctgtctcggggaaaaaaaaaaggtataatcctttcttttgctttctaattcatcctt

SEQ ID NO: 455199 - DNA, 33 bp, Homo sapiens; identical to SEQ ID NO: 338034
  chr3:12743274-12743307
  hypo
  bladder_and_urothelial vs. lung,liver_bileduct,breast, lymphoid_neoplasm

SEQ ID NO: 455200 - DNA, 271 bp, Homo sapiens
  chr3:13611739-13612010
  hypo
  bladder_and_urothelial vs. anorectal
cgcgtgcgtgccggtgtgcaccgtgtctgtgtgtgcacacccagtactgacaggcttcctttctgattcccccagggtcttacaggagaggggaccgtcctgggctggcctggaccatggtgctgctctgggagcctgcaggagcctggcttgctctgggcctggccctggccctgggccccagcgtggccgcagctgcccctcggcaggactgcacgggcgtggagtgcccgccgctggagaactgcattgaggaggcgctggagccggg

SEQ ID NO: 455201 - DNA, 186 bp, Homo sapiens; identical to SEQ ID NO: 363219
  chr3:13612341-13612527
  hypo
  bladder_and_urothelial vs. anorectal

SEQ ID NO: 455202 - DNA, 25 bp, Homo sapiens
  chr3:13679108-13679133
  hypo
  bladder_and_urothelial vs. cervical
cgccagcgcgcatcacgcactacca

SEQ ID NO: 455203 - DNA, 108 bp, Homo sapiens; identical to SEQ ID NO: 454364
  chr3:16925425-16925533
  hypo
  bladder_and_urothelial vs. pancreas_gallbladder

SEQ ID NO: 455204 - DNA, 74 bp, Homo sapiens; identical to SEQ ID NO: 454365
  chr3:16925583-16925657
  hypo
  bladder_and_urothelial vs. pancreas_gallbladder

SEQ ID NO: 455205 - DNA, 231 bp, Homo sapiens; identical to SEQ ID NO: 454366
  chr3:16925705-16925936
  hypo
  bladder_and_urothelial vs. pancreas_gallbladder

SEQ ID NO: 455206 - DNA, 256 bp, Homo sapiens; identical to SEQ ID NO: 454367
  chr3:16925965-16926221
  hypo
  bladder_and_urothelial vs. pancreas_gallbladder

SEQ ID NO: 455207 - DNA, 295 bp, Homo sapiens; identical to SEQ ID NO: 363238
  chr3:25728355-25728650
  hypo
  bladder_and_urothelial vs. head_and_neck

SEQ ID NO: 455208 - DNA, 333 bp, Homo sapiens
  chr3:53032401-53032734
  hypo
  bladder_and_urothelial vs. head_and_neck,prostate, lymphoid_neoplasm,sarcoma,breast,renal,melanoma,non_cancer, anorectal,multiple_myeloma,thyroid,lung,myeloid_neoplasm
cgtctcaaaaaaaagaaaagaaaagaaaaaatgtagatcaataatattattttgctgacgcattggagaaagtaaaggctgggtgcagcttcaagctgaggaccacccaccatgcccccatcatggtggttcccctaggtgctgaagggcccagccatagctctcgccctcgcagggtccctccagggtctctgctgtttcctacctaggggtgactgcagccatggctaagaaagcgccagcgcccacccacctgggccaatggactggttctgctcgtgccacgctggttctgctcctcgccatctcggcagttcagaaagaaccccaacg

SEQ ID NO: 455209 - DNA, 261 bp, Homo sapiens; identical to SEQ ID NO: 338120
  chr3:57679351-57679612
  hypo
  bladder_and_urothelial vs. melanoma,lymphoid_neoplasm, colorectal,renal,head_and_neck,sarcoma,lung,anorectal, multiple_myeloma,breast,uterine,non_cancer,ovary,thyroid, myeloid_neoplasm,cervical,prostate,liver_bileduct

SEQ ID NO: 455210 - DNA, 984 bp, Homo sapiens; identical to SEQ ID NO: 454371
  chr3:61546692-61547676
  hypo
  bladder_and_urothelial vs. colorectal,lung

SEQ ID NO: 455211 - DNA, 963 bp, Homo sapiens; identical to SEQ ID NO: 454372
  chr3:61547191-61548154
  hypo
  bladder_and_urothelial vs. lung,colorectal,cervical, ovary,breast,upper_gi,head_and_neck

SEQ ID NO: 455212 - DNA, 783 bp, Homo sapiens; identical to SEQ ID NO: 454373
  chr3:66550318-66551101
  hypo
  bladder_and_urothelial vs. upper_gi,head_and_neck, anorectal,breast,cervical,ovary,lung,sarcoma,colorectal, prostate,pancreas_gallbladder

SEQ ID NO: 455213 - DNA, 990 bp, Homo sapiens; identical to SEQ ID NO: 454374
  chr3:66550603-66551593
  hypo
  bladder_and_urothelial vs. upper_gi,colorectal

SEQ ID NO: 455214 - DNA, 766 bp, Homo sapiens; identical to SEQ ID NO: 454375
  chr3:66551122-66551888
  hypo
  bladder_and_urothelial vs. liver_bileduct,upper_gi, pancreas_gallbladder,head_and_neck

SEQ ID NO: 455215 - DNA, 768 bp, Homo sapiens; identical to SEQ ID NO: 454376
  chr3:67048599-67049367
  hypo
  bladder_and_urothelial vs. colorectal

SEQ ID NO: 455216 - DNA, 63 bp, Homo sapiens; identical to SEQ ID NO: 338141
  chr3:72703941-72704004
  hypo
  bladder_and_urothelial vs. lung,head_and_neck, pancreas_gallbladder,colorectal

SEQ ID NO: 455217 - DNA, 33 bp, Homo sapiens
  chr3:121637776-121637809
  hypo
  bladder_and_urothelial vs. breast,sarcoma
cgcctctgtctgggccttgctctggcccactgg

SEQ ID NO: 455218 - DNA, 25 bp, Homo sapiens
  chr3:121638077-121638102
  hypo
  bladder_and_urothelial vs. breast,sarcoma
ttattcccgctgcccatagcttggc

SEQ ID NO: 455219 - DNA, 421 bp, Homo sapiens
  chr3:127394412-127394833
  hypo
  bladder_and_urothelial vs. breast
cgcccaggcttgtttttcttaatagtccctgccatcgttaggtagtgggttgattgtcctgcctcactagagtataagttcagcaggacagggacctgtgtctcgttcactgctgtgctccagtgtgtgggacaagcccagccaccaagtcagctctccgttctgtgttgtctgtcttccgtgtgagtgagtatgtgcctgtgtgagtgcacacagacgtgcccattcgcctagcccttgactgggagggtgttggggtcagagtgggcccagggtaatttgggaaggcatcgccagagattcggagccccatgtgtgggaaggtggggaggagggacagggagattagaatttcccccaggccccttccctgctaactggtgagccctgcctcccccaggagcccgctgcgaggccaaca

SEQ ID NO: 455220 - DNA, 278 bp, Homo sapiens; identical to SEQ ID NO: 376862
  chr3:127394909-127395187
  hypo
  bladder_and_urothelial vs. breast

SEQ ID NO: 455221 - DNA, 58 bp, Homo sapiens
  chr3:128056326-128056384
  hypo
  bladder_and_urothelial vs. upper_gi,colorectal
cgccctctctcacaggaaggctcataaacacaaggatctcgctcaagccccggcacgt

SEQ ID NO: 455222 - DNA, 46 bp, Homo sapiens; identical to SEQ ID NO: 376870
  chr3:128056497-128056543
  hypo
  bladder_and_urothelial vs. upper_gi,colorectal

SEQ ID NO: 455223 - DNA, 185 bp, Homo sapiens; identical to SEQ ID NO: 338187
  chr3:128737561-128737746
  hypo
  bladder_and_urothelial vs. pancreas_gallbladder

SEQ ID NO: 455224 - DNA, 334 bp, Homo sapiens; identical to SEQ ID NO: 338189
  chr3:129290351-129290685
  hypo
  bladder_and_urothelial vs. cervical,pancreas_gallbladder, sarcoma,breast

SEQ ID NO: 455225 - DNA, 216 bp, Homo sapiens; identical to SEQ ID NO: 338193
  chr3:130424529-130424745
  hypo
  bladder_and_urothelial vs. lymphoid_neoplasm

SEQ ID NO: 455226 - DNA, 124 bp, Homo sapiens
  chr3:141174173-141174297
  hypo
  bladder_and_urothelial vs. melanoma,thyroid
cgtgctcgacatctgcgtgagtgtggtgagtggaagagcatcaggccatgtcccaggtctttccaaatcagactccattatttctgacattcctcttcctaaagaccagaggtaggaattcagg

SEQ ID NO: 455227 - DNA, 8 bp, Homo sapiens
  chr3:141174671-141174679
  hypo
  bladder_and_urothelial vs. melanoma,thyroid
gtttcagc

SEQ ID NO: 455228 - DNA, 26 bp, Homo sapiens
  chr3:142537613-142537639
  hypo
  bladder_and_urothelial vs. colorectal,upper_gi,lung
cggcaaaaagccaaattcaactagta

SEQ ID NO: 455229 - DNA, 308 bp, Homo sapiens
  chr3:142895557-142895865
  hypo
  bladder_and_urothelial vs. sarcoma,renal
cgagaaagggggcggctcagcagcagcagctgcagccgctgcagcctctggtggtggcgtgtcccctgacaactccatcgaacactcggactatcgcagcaaacttgcccagatccgtcacatataccactcggaactggagaagtatgagcaggcatgtaatgagttcacgacccatgtcatgaacctgctgagggagcagagccgcaccaggcccgtggcccccaaagagatggaacgcatggtgagcatcatccatcgaaagttcagcgccatccagatgcagctgaagcagagcacctgcgagg

SEQ ID NO: 455230 - DNA, 322 bp, Homo sapiens; identical to SEQ ID NO: 338223
  chr3:143316169-143316491
  hypo
  bladder_and_urothelial vs. head_and_neck

SEQ ID NO: 455231 - DNA, 87 bp, Homo sapiens
  chr3:148705325-148705412
  hypo
  bladder_and_urothelial vs. cervical,pancreas_gallbladder, melanoma,renal
cgggagatttcctctttgaactccttgaccgaggctcgatcgcagatcacaatttcctccttgtccttgggggtcttgacggtgacc

SEQ ID NO: 455232 - DNA, 66 bp, Homo sapiens; identical to SEQ ID NO: 363369
  chr3:148705462-148705528
  hypo
  bladder_and_urothelial vs. cervical,pancreas_gallbladder, melanoma,renal

SEQ ID NO: 455233 - DNA, 77 bp, Homo sapiens; identical to SEQ ID NO: 338228
  chr3:150187009-150187086
  hypo
  bladder_and_urothelial vs. upper_gi,colorectal, lymphoid_neoplasm,uterine,prostate,pancreas_gallbladder, multiple_myeloma,melanoma,ovary,renal,liver_bileduct

SEQ ID NO: 455234 - DNA, 124 bp, Homo sapiens; identical to SEQ ID NO: 338233
  chr3:151112517-151112641
  hypo
  bladder_and_urothelial vs. colorectal

SEQ ID NO: 455235 - DNA, 54 bp, Homo sapiens; identical to SEQ ID NO: 345815
  chr3:169540679-169540733
  hypo
  bladder_and_urothelial vs. sarcoma,melanoma,renal, prostate,non_cancer,thyroid

SEQ ID NO: 455236 - DNA, 283 bp, Homo sapiens; identical to SEQ ID NO: 453224
  chr3:170626174-170626457
  hypo
  bladder_and_urothelial vs. colorectal

SEQ ID NO: 455237 - DNA, 26 bp, Homo sapiens
  chr3:170626710-170626736
  hypo
  bladder_and_urothelial vs. colorectal
aggtttgttgcgttcgggtcgcagtc

SEQ ID NO: 455238 - DNA, 108 bp, Homo sapiens; identical to SEQ ID NO: 453226
  chr3:170626349-170626457
  hypo
  bladder_and_urothelial vs. colorectal

SEQ ID NO: 455239 - DNA, 508 bp, Homo sapiens; identical to SEQ ID NO: 357752
  chr3:170626710-170627218
  hypo
  bladder_and_urothelial vs. colorectal

SEQ ID NO: 455240 - DNA, 102 bp, Homo sapiens
  chr3:177238890-177238992
  hypo
cgacagagcgagactccgtctcaaaaaaaaaaaaagtccttgcaaaaacttgtctcagaaagggaaaaaaagtgagatacaaaggtagttagagcagcggtc

SEQ ID NO: 455241 - DNA, 3 bp, Homo sapiens
  chr3:183728804-183728807
  hypo
  bladder_and_urothelial vs. colorectal,ovary, head_and_neck,liver_bileduct,pancreas_gallbladder,cervical
cgg

SEQ ID NO: 455242 - DNA, 125 bp, Homo sapiens; identical to SEQ ID NO: 453236
  chr3:186079497-186079622
  hypo
  bladder_and_urothelial vs. ovary

SEQ ID NO: 455243 - DNA, 46 bp, Homo sapiens; identical to SEQ ID NO: 454388
  chr3:187455297-187455343
  hypo
  bladder_and_urothelial vs. renal,multiple_myeloma, colorectal,non_cancer,thyroid,upper_gi,lymphoid_neoplasm, myeloid_neoplasm,sarcoma,lung,liver_bileduct, pancreas_gallbladder,head_and_neck

SEQ ID NO: 455244 - DNA, 447 bp, Homo sapiens; identical to SEQ ID NO: 454389
  chr3:187456666-187457113
  hypo
  bladder_and_urothelial vs. non_cancer,thyroid,renal, colorectal,multiple_myeloma,lymphoid_neoplasm,upper_gi,sarcoma, pancreas_gallbladder,liver_bileduct,lung,breast, myeloid_neoplasm,prostate,uterine,melanoma,cervical

SEQ ID NO: 455245 - DNA, 380 bp, Homo sapiens; identical to SEQ ID NO: 454390
  chr3:187456733-187457113
  hypo
  bladder_and_urothelial vs. upper_gi,renal, pancreas_gallbladder,sarcoma,colorectal,breast,prostate, multiple_myeloma,non_cancer,thyroid,uterine,lymphoid_neoplasm, liver_bileduct,lung,myeloid_neoplasm,melanoma,cervical

SEQ ID NO: 455246 - DNA, 154 bp, Homo sapiens
  chr3:193922622-193922776
  hypo
  bladder_and_urothelial vs. colorectal,renal,sarcoma
cgaaactcgcctggacaagtccaacttcattcttttcagtacgactagctcctgtgcgctgcagaagactcgggctgatctgaaagcgcctctcctattcgagactctcaggttttaagtaggtcttccgcacctgcagatgaaaaaagatgtg

SEQ ID NO: 455247 - DNA, 296 bp, Homo sapiens; identical to SEQ ID NO: 338312
  chr3:194786359-194786655
  hypo
  bladder_and_urothelial vs. colorectal,breast

SEQ ID NO: 455248 - DNA, 1 bp, Homo sapiens
  chr3:195637231-195637232
  hypo
  bladder_and_urothelial vs. liver_bileduct
c

SEQ ID NO: 455249 - DNA, 83 bp, Homo sapiens; identical to SEQ ID NO: 353427
  chr3:195637425-195637508
  hypo
  bladder_and_urothelial vs. liver_bileduct

SEQ ID NO: 455250 - DNA, 254 bp, Homo sapiens; identical to SEQ ID NO: 376991
  chr3:195640380-195640634
  hypo
  bladder_and_urothelial vs. lung

SEQ ID NO: 455251 - DNA, 105 bp, Homo sapiens
  chr3:196754412-196754517
  hypo
  bladder_and_urothelial vs. head_and_neck,anorectal
cgccctctgagcagcgggtcctcctgaggctcccacctcctggcctgggcccggcgggaggcaagctggcctcgtggccagggagactcgggagatcctatcggc

SEQ ID NO: 455252 - DNA, 118 bp, Homo sapiens; identical to SEQ ID NO: 363449
  chr3:196754758-196754876
  hypo
  bladder_and_urothelial vs. head_and_neck,anorectal

SEQ ID NO: 455253 - DNA, 29 bp, Homo sapiens
  chr3:197327324-197327353
  hypo
  bladder_and_urothelial vs. renal
ttgttgttctgagacagggtttccctgtc

SEQ ID NO: 455254 - DNA, 635 bp, Homo sapiens; identical to SEQ ID NO: 453952
  chr4:513070-513705
  hypo
  bladder_and_urothelial vs. colorectal,upper_gi,uterine, breast

SEQ ID NO: 455255 - DNA, 221 bp, Homo sapiens; identical to SEQ ID NO: 353435
  chr4:513734-513955
  hypo
  bladder_and_urothelial vs. colorectal,upper_gi,uterine, breast

SEQ ID NO: 455256 - DNA, 148 bp, Homo sapiens
  chr4:617098-617246
  hypo
  bladder_and_urothelial vs. anorectal
cgccctgaacctactcacctacaatcacgacgggctcctggggcaggacaaagccacaggtgaggaacgcggtgctgcgggtggaagctgctgtcacagtcgtgttagggtgagtggactatggccgcagactgtgggctcctcccag

SEQ ID NO: 455257 - DNA, 18 bp, Homo sapiens
  chr4:617281-617299
  hypo
  bladder_and_urothelial vs. anorectal
gtccagcaccccttcccc

SEQ ID NO: 455258 - DNA, 44 bp, Homo sapiens
  chr4:628787-628831
  hypo
  bladder_and_urothelial vs. anorectal
gtctgcctccttacctgcctgcccgcgtgttctgtgctgcgcgt

SEQ ID NO: 455259 - DNA, 421 bp, Homo sapiens
  chr4:628950-629371
  hypo
  bladder_and_urothelial vs. anorectal
ttctgtgctgcgcgtccacctccttacctgcctgcccgcctgcccgcgtgttctgtgctgcgtgtccacctccttacctgcctgcccgcctgcctgcgtgttctgtgctgcgcgtctgcctccctgcctgcctccctgcccgcctgcccgcgtgttctgtgctgtgcgtccacctccttacctgcctgcctgcctgcccgcgtgttctgtgccacgcgtctgcctccctgcctgcctgcccgtgtgttctgtgctgtgcgtccacctccttacctgcctgcctgcctgcctgcgtgttctgtgccacgcgtctgcctccctgcctgcctgcccgtgtgttctgtgctgtgcgtccacctccttacctgcctgcctgcctgcccgcgtgttctgtgccacgcgtctgcctccctgcctgcct

SEQ ID NO: 455260 - DNA, 27 bp, Homo sapiens
  chr4:629407-629434
  hypo
  bladder_and_urothelial vs. anorectal
tgggctccacgtgctcatctgcacatc

SEQ ID NO: 455261 - DNA, 59 bp, Homo sapiens
  chr4:1290581-1290640
  hypo
  bladder_and_urothelial vs. upper_gi,ovary
cggaccccactgcctcgagacgctcccatcactcggctcccgtgacaccatcctctggg

SEQ ID NO: 455262 - DNA, 355 bp, Homo sapiens; identical to SEQ ID NO: 377041
  chr4:1290669-1291024
  hypo
  bladder_and_urothelial vs. upper_gi,ovary

SEQ ID NO: 455263 - DNA, 167 bp, Homo sapiens; identical to SEQ ID NO: 338374
  chr4:1326509-1326676
  hypo
  bladder_and_urothelial vs. liver_bileduct

SEQ ID NO: 455264 - DNA, 41 bp, Homo sapiens; identical to SEQ ID NO: 453958
  chr4:1791229-1791270
  hypo
  bladder_and_urothelial vs. breast

SEQ ID NO: 455265 - DNA, 107 bp, Homo sapiens; identical to SEQ ID NO: 363497
  chr4:1791344-1791451
  hypo
  bladder_and_urothelial vs. breast

SEQ ID NO: 455266 - DNA, 58 bp, Homo sapiens; identical to SEQ ID NO: 338392
  chr4:1911667-1911725
  hypo
  bladder_and_urothelial vs. lung,head_and_neck

SEQ ID NO: 455267 - DNA, 127 bp, Homo sapiens
  chr4:2524742-2524869
  hypo
  bladder_and_urothelial vs. lung,head_and_neck, pancreas_gallbladder,lymphoid_neoplasm,anorectal,liver_bileduct
cgtctcaaaaaaaaaaactcaaaccaatacataattgtataccttaagaaacaaacaaacaaaaaactaaataaaaagttagcagaaggaaggccataataaagattagagtcaagataggcccggc

SEQ ID NO: 455268 - DNA, 124 bp, Homo sapiens; identical to SEQ ID NO: 363522
  chr4:2907414-2907538
  hypo
  bladder_and_urothelial vs. head_and_neck

SEQ ID NO: 455269 - DNA, 222 bp, Homo sapiens
  chr4:3446222-3446444
  hypo
  bladder_and_urothelial vs. renal,uterine,prostate, non_cancer,melanoma,thyroid
acacccgagtgggaggaatggcctgaggtcacccagaaacaagggacaaggggtggaccccggccccgactccgctgtcgtggggcactgcgcggcccctggcccagctcctcggccctgcccccagcttgtctgagcagcccttgcctgaacgggggcacctgccacctgatcgtggccaccgggaccaccgtgtgtgcctgcccaccaggcttcgctgga

SEQ ID NO: 455270 - DNA, 110 bp, Homo sapiens
  chr4:3446334-3446444
  hypo
  bladder_and_urothelial vs. prostate,renal,uterine, non_cancer
cggccctgcccccagcttgtctgagcagcccttgcctgaacgggggcacctgccacctgatcgtggccaccgggaccaccgtgtgtgcctgcccaccaggcttcgctgga

SEQ ID NO: 455271 - DNA, 68 bp, Homo sapiens; identical to SEQ ID NO: 353477
  chr4:3447170-3447238
  hypo
  bladder_and_urothelial vs. prostate,renal,uterine, non_cancer

SEQ ID NO: 455272 - DNA, 161 bp, Homo sapiens; identical to SEQ ID NO: 338450
  chr4:8466231-8466392
  hypo
  bladder_and_urothelial vs. head_and_neck

SEQ ID NO: 455273 - DNA, 207 bp, Homo sapiens; identical to SEQ ID NO: 332046
  chr4:10090148-10090355
  hypo
  bladder_and_urothelial vs. ovary,upper_gi,colorectal, breast

SEQ ID NO: 455274 - DNA, 309 bp, Homo sapiens
  chr4:39447953-39448262
  hypo
  bladder_and_urothelial vs. sarcoma
cgagtctgtggcttcgtccccacagttcagcgatcctcatctgtacgtgtggaacgccactggcaacagactgttgcaccgagtggaaggggtgaggctgaaaacacgacccgctcaatgcacagattttgtaaacatcaaaaaacaacttgagatgttggcaagaatgaaagtcacccactaccggtttgctctggattgggcctcggtccttcccactggcaacctgtccgcggtgaaccgacaggccctgaggtactacaggtgcgtggtcagtgaggggctgaagcttggcatctccgcgatggt

SEQ ID NO: 455275 - DNA, 76 bp, Homo sapiens; identical to SEQ ID NO: 338489
  chr4:56222936-56223012
  hypo
  bladder_and_urothelial vs. liver_bileduct

SEQ ID NO: 455276 - DNA, 37 bp, Homo sapiens; identical to SEQ ID NO: 338501
  chr4:71566942-71566979
  hypo
  bladder_and_urothelial vs. colorectal

SEQ ID NO: 455277 - DNA, 115 bp, Homo sapiens; identical to SEQ ID NO: 338502
  chr4:71706531-71706646
  hypo
  bladder_and_urothelial vs. head_and_neck,liver_bileduct, lung,ovary,upper_gi,cervical

SEQ ID NO: 455278 - DNA, 113 bp, Homo sapiens; identical to SEQ ID NO: 338520
  chr4:100555198-100555311
  hypo
  bladder_and_urothelial vs. sarcoma

SEQ ID NO: 455279 - DNA, 60 bp, Homo sapiens; identical to SEQ ID NO: 338525
  chr4:104854506-104854566
  hypo
  bladder_and_urothelial vs. head_and_neck,lung

SEQ ID NO: 455280 - DNA, 24 bp, Homo sapiens
  chr4:113559165-113559189
  hypo
gcgaggctgggcacggtggctcac

SEQ ID NO: 455281 - DNA, 3 bp, Homo sapiens
  chr4:123866914-123866917
  hypo
cgg

SEQ ID NO: 455282 - DNA, 116 bp, Homo sapiens; identical to SEQ ID NO: 338551
  chr4:152591291-152591407
  hypo
  bladder_and_urothelial vs. liver_bileduct

SEQ ID NO: 455283 - DNA, 43 bp, Homo sapiens; identical to SEQ ID NO: 377209
  chr4:153247386-153247429
  hypo
  bladder_and_urothelial vs. ovary

SEQ ID NO: 455284 - DNA, 111 bp, Homo sapiens; identical to SEQ ID NO: 338557
  chr4:154421947-154422058
  hypo
  bladder_and_urothelial vs. liver_bileduct,uterine, cervical,melanoma,ovary,sarcoma,breast

SEQ ID NO: 455285 - DNA, 140 bp, Homo sapiens; identical to SEQ ID NO: 338574
  chr4:185765461-185765601
  hypo
  bladder_and_urothelial vs. cervical

SEQ ID NO: 455286 - DNA, 5 bp, Homo sapiens
  chr4:186347906-186347911
  hypo
  bladder_and_urothelial vs. pancreas_gallbladder
cgggc

SEQ ID NO: 455287 - DNA, 128 bp, Homo sapiens; identical to SEQ ID NO: 338576
  chr4:186348212-186348340
  hypo
  bladder_and_urothelial vs. liver_bileduct

SEQ ID NO: 455288 - DNA, 23 bp, Homo sapiens
  chr4:186348628-186348651
  hypo
  bladder_and_urothelial vs. breast,sarcoma,prostate
aaaggccgggcgcggtggctcac

SEQ ID NO: 455289 - DNA, 15 bp, Homo sapiens
  chr5:192159-192174
  hypo
  bladder_and_urothelial vs. pancreas_gallbladder,melanoma
cgaggcggtggtgca

SEQ ID NO: 455290 - DNA, 343 bp, Homo sapiens; identical to SEQ ID NO: 377243
  chr5:192307-192650
  hypo
  bladder_and_urothelial vs. pancreas_gallbladder,melanoma

SEQ ID NO: 455291 - DNA, 42 bp, Homo sapiens
  chr5:1729774-1729816
  hypo
  bladder_and_urothelial vs. anorectal
cgcggctgtgttagaggaggcgccggggcctgggtgcagaac

SEQ ID NO: 455292 - DNA, 331 bp, Homo sapiens
  chr5:1729886-1730217
  hypo
  bladder_and_urothelial vs. anorectal
cctccagacccagcctgtgtgcagaggggctggcggagctcggacgccgggctcgctggcctttgccgatggacctcgggtgtgtccaggccgggcgagggccggcagctccagtgaggcgggacctcactctatctgtgttgtgcatcctgttcgagtttctgggtcccgatcttgagcaagccaactgacctctctgatgttggtttgctcagatgtaacgtgcggttgacagcgtctatgctggagcacgtggcggcttaagagcaataggtgaaaggggtatctcagaagacgccctcaggacacggggatgccataggcctcgggt

SEQ ID NO: 455293 - DNA, 56 bp, Homo sapiens; identical to SEQ ID NO: 363716
  chr5:1730252-1730308
  hypo
  bladder_and_urothelial vs. anorectal

SEQ ID NO: 455294 - DNA, 62 bp, Homo sapiens; identical to SEQ ID NO: 338743
  chr5:74753672-74753734
  hypo
  bladder_and_urothelial vs. lymphoid_neoplasm,sarcoma, multiple_myeloma

SEQ ID NO: 455295 - DNA, 26 bp, Homo sapiens
  chr5:94982109-94982135
  hypo
  bladder_and_urothelial vs. multiple_myeloma,melanoma, renal
cgtgaaccaccgcgcccggccttaac

SEQ ID NO: 455296 - DNA, 391 bp, Homo sapiens; identical to SEQ ID NO: 338801
  chr5:135091190-135091581
  hypo
  bladder_and_urothelial vs. colorectal,head_and_neck, uterine

SEQ ID NO: 455297 - DNA, 121 bp, Homo sapiens
  chr5:137912553-137912674
  hypo
  bladder_and_urothelial vs. liver_bileduct
cgtgagccaccgcgcccaacccagttttagatttttaagaagaggaattaattgattcaacagatatgttttggcatgcctaccgtgtgtcagtcactctcccaggtggtaggaatacagc

SEQ ID NO: 455298 - DNA, 718 bp, Homo sapiens; identical to SEQ ID NO: 454427
  chr5:142783958-142784676
  hypo
  bladder_and_urothelial vs. lung

SEQ ID NO: 455299 - DNA, 215 bp, Homo sapiens; identical to SEQ ID NO: 454428
  chr5:142784461-142784676
  hypo
  bladder_and_urothelial vs. lung,liver_bileduct

SEQ ID NO: 455300 - DNA, 14 bp, Homo sapiens
  chr5:149810914-149810928
  hypo
  bladder_and_urothelial vs. melanoma
ccaatgatgctgac

SEQ ID NO: 455301 - DNA, 25 bp, Homo sapiens
  chr5:151150204-151150229
  hypo
  bladder_and_urothelial vs. pancreas_gallbladder,cervical, anorectal,head_and_neck,ovary,lymphoid_neoplasm, multiple_myeloma
cggctccccagaggccgaggccggc

SEQ ID NO: 455302 - DNA, 294 bp, Homo sapiens; identical to SEQ ID NO: 454431
  chr5:151150270-151150564
  hypo
  bladder_and_urothelial vs. pancreas_gallbladder,cervical, anorectal,head_and_neck,ovary,lymphoid_neoplasm, multiple_myeloma

SEQ ID NO: 455303 - DNA, 229 bp, Homo sapiens; identical to SEQ ID NO: 346758
  chr5:151150681-151150910
  hypo
  bladder_and_urothelial vs. pancreas_gallbladder,cervical, anorectal,head_and_neck,ovary,lymphoid_neoplasm, multiple_myeloma

SEQ ID NO: 455304 - DNA, 30 bp, Homo sapiens
  chr5:153786052-153786082
  hypo
  bladder_and_urothelial vs. breast
catttaaaatatttgttcagtgggccgggc

SEQ ID NO: 455305 - DNA, 62 bp, Homo sapiens
  chr5:156558383-156558445
  hypo
  bladder_and_urothelial vs. head_and_neck
cgctatgcggagatgtgtattatgtttaccattgttaaggaaattgagttttatggaagttt

SEQ ID NO: 455306 - DNA, 173 bp, Homo sapiens; identical to SEQ ID NO: 454433
  chr5:159343215-159343388
  hypo
  bladder_and_urothelial vs. ovary,lung,anorectal,uterine

SEQ ID NO: 455307 - DNA, 152 bp, Homo sapiens; identical to SEQ ID NO: 350210
  chr5:159343648-159343800
  hypo
  bladder_and_urothelial vs. ovary,lung,anorectal,uterine

SEQ ID NO: 455308 - DNA, 163 bp, Homo sapiens
  chr5:159776164-159776327
  hypo
  bladder_and_urothelial vs. anorectal
cgtggcatgtctatacctcgttggggtcatcctggtcggcatagattaggaagcccgtaaagaggctgtctgtccagtaagggtcatagaagagcccgttctgctctgagtagaagatctgcagccaaacttcgtcaccctgcttgagagccaggatggtgga

SEQ ID NO: 455309 - DNA, 147 bp, Homo sapiens; identical to SEQ ID NO: 353678
  chr5:159776588-159776735
  hypo
  bladder_and_urothelial vs. anorectal

SEQ ID NO: 455310 - DNA, 2 bp, Homo sapiens
  chr5:171382146-171382148
  hypo
  bladder_and_urothelial vs. sarcoma,lymphoid_neoplasm, uterine
cg

SEQ ID NO: 455311 - DNA, 158 bp, Homo sapiens; identical to SEQ ID NO: 338890
  chr5:177310267-177310425
  hypo
  bladder_and_urothelial vs. pancreas_gallbladder, colorectal,breast

SEQ ID NO: 455312 - DNA, 596 bp, Homo sapiens; identical to SEQ ID NO: 338922
  chr5:180218508-180219104
  hypo
  bladder_and_urothelial vs. lung,ovary,anorectal,cervical, liver_bileduct,breast,sarcoma,lymphoid_neoplasm,melanoma, head_and_neck,multiple_myeloma,prostate

SEQ ID NO: 455313 - DNA, 543 bp, Homo sapiens; identical to SEQ ID NO: 338928
  chr6:1080648-1081191
  hypo
  bladder_and_urothelial vs. head_and_neck,cervical, anorectal

SEQ ID NO: 455314 - DNA, 197 bp, Homo sapiens; identical to SEQ ID NO: 353723
  chr6:2920938-2921135
  hypo
  bladder_and_urothelial vs. melanoma,breast,prostate, liver_bileduct,sarcoma,renal,thyroid

SEQ ID NO: 455315 - DNA, 138 bp, Homo sapiens; identical to SEQ ID NO: 338938
  chr6:3263649-3263787
  hypo
  bladder_and_urothelial vs. head_and_neck,lung

SEQ ID NO: 455316 - DNA, 80 bp, Homo sapiens; identical to SEQ ID NO: 350268
  chr6:6009552-6009632
  hypo
  bladder_and_urothelial vs. colorectal,ovary

SEQ ID NO: 455317 - DNA, 430 bp, Homo sapiens; identical to SEQ ID NO: 338983
  chr6:11273720-11274150
  hypo
  bladder_and_urothelial vs. head_and_neck

SEQ ID NO: 455318 - DNA, 12 bp, Homo sapiens
  chr6:16197275-16197287
  hypo
  bladder_and_urothelial vs. renal
gttctaggtctc

SEQ ID NO: 455319 - DNA, 235 bp, Homo sapiens; identical to SEQ ID NO: 338995
  chr6:18368676-18368911
  hypo
  bladder_and_urothelial vs. head_and_neck,lung, pancreas_gallbladder,uterine,ovary,upper_gi

SEQ ID NO: 455320 - DNA, 134 bp, Homo sapiens; identical to SEQ ID NO: 454448
  chr6:27805774-27805908
  hypo
  bladder_and_urothelial vs. upper_gi

SEQ ID NO: 455321 - DNA, 535 bp, Homo sapiens; identical to SEQ ID NO: 358479
  chr6:27805936-27806471
  hypo
  bladder_and_urothelial vs. upper_gi

SEQ ID NO: 455322 - DNA, 97 bp, Homo sapiens
  chr6:33995852-33995949
  hypo
  bladder_and_urothelial vs. cervical,anorectal,renal
cggggcctggggcccgagagggcagaacggggccaggcactcacctggggcctcaaggttctcgcagagctcagacttggcctctccgttgggccgg

SEQ ID NO: 455323 - DNA, 54 bp, Homo sapiens; identical to SEQ ID NO: 339015
  chr6:34219827-34219881
  hypo
  bladder_and_urothelial vs. liver_bileduct,lung,upper_gi

SEQ ID NO: 455324 - DNA, 868 bp, Homo sapiens; identical to SEQ ID NO: 454457
  chr6:35655519-35656387
  hypo
  bladder_and_urothelial vs. colorectal,head_and_neck, cervical,lung

SEQ ID NO: 455325 - DNA, 863 bp, Homo sapiens; identical to SEQ ID NO: 454458
  chr6:35655904-35656767
  hypo
  bladder_and_urothelial vs. head_and_neck,colorectal, ovary

SEQ ID NO: 455326 - DNA, 223 bp, Homo sapiens; identical to SEQ ID NO: 339024
  chr6:36198250-36198473
  hypo
  bladder_and_urothelial vs. ovary,upper_gi

SEQ ID NO: 455327 - DNA, 108 bp, Homo sapiens
  chr6:36238212-36238320
  hypo
  bladder_and_urothelial vs. renal,breast,prostate,uterine
cgcagaaagtcagaggccgaggagatggaagaacaggtgttcaagggggacccggacacccctcactccatctccttctcgggcagtggattcctctccttctaccag

SEQ ID NO: 455328 - DNA, 314 bp, Homo sapiens
  chr6:37023826-37024140
  hypo
  bladder_and_urothelial vs. melanoma,sarcoma,renal, non_cancer,prostate
cggccacatcttctgagctgcggggtggaggcctggctgcccacctgcattccttactctgcgtacccatgatctcatcccggccctcagccacccacagggcaggaggctttgccccattgtgcagatgagacagccatgccctgccctgggatggtcatttggcctgggctcagggcactctagtgggccccaggctccggcggggtgagtggaatgtggtcacggaggccaccccacgctgtcttgttgggtttaatgagccccattggtctgtccataccctgaataagctctggtctaccgaccctcct

SEQ ID NO: 455329 - DNA, 49 bp, Homo sapiens; identical to SEQ ID NO: 339035
  chr6:38020529-38020578
  hypo
  bladder_and_urothelial vs. melanoma,sarcoma,ovary

SEQ ID NO: 455330 - DNA, 132 bp, Homo sapiens; identical to SEQ ID NO: 339036
  chr6:38084382-38084514
  hypo
  bladder_and_urothelial vs. upper_gi

SEQ ID NO: 455331 - DNA, 97 bp, Homo sapiens
  chr6:42762779-42762876
  hypo
  bladder_and_urothelial vs. lymphoid_neoplasm,melanoma, renal,pancreas_gallbladder
cgcatgaacgacagtcaaggtaactgaaaagatctacatctattgttagaaagttgtctaacttgttttccaaaactttctgctattagatttaaaa

SEQ ID NO: 455332 - DNA, 358 bp, Homo sapiens
  chr6:47202003-47202361
  hypo
  bladder_and_urothelial vs. head_and_neck,cervical,lung, colorectal
cgcacggcctaaaacctgtacttctgactctcaagataagttcaactttaaatctttggatacagcaagcttggtaaataattttcaaaaatcttgccagactacattttatcaggccttccccgaaacacacatttgatagcatcatgaggataaagggtggccgatagctctccaccgggcagtgcgagctgcaaagattttggaggcgtgtcttcgccagccaatggcgaggttactctcgggccagcgtatcttgaagttttggactggtcttcctgggcaggtaattcagatgactcaactctcagctacaactggactgtggacggggagggacgaatcccaggggctcttt

SEQ ID NO: 455333 - DNA, 155 bp, Homo sapiens; identical to SEQ ID NO: 353787
  chr6:47202453-47202608
  hypo
  bladder_and_urothelial vs. head_and_neck,cervical,lung, colorectal

SEQ ID NO: 455334 - DNA, 73 bp, Homo sapiens
  chr6:52344303-52344376
  hypo
  bladder_and_urothelial vs. melanoma,ovary
cgtttaaagaaagctcattagtttctgtcataaatgcatacctgtgaatttatcattggagggttaatactat

SEQ ID NO: 455335 - DNA, 159 bp, Homo sapiens; identical to SEQ ID NO: 348153
  chr6:52344405-52344564
  hypo
  bladder_and_urothelial vs. melanoma,ovary

SEQ ID NO: 455336 - DNA, 126 bp, Homo sapiens; identical to SEQ ID NO: 339076
  chr6:56894243-56894369
  hypo
  bladder_and_urothelial vs. head_and_neck,melanoma, pancreas_gallbladder

SEQ ID NO: 455337 - DNA, 9 bp, Homo sapiens
  chr6:73333099-73333108
  hypo
  bladder_and_urothelial vs. head_and_neck,anorectal, breast,lung,thyroid,multiple_myeloma
ttgtggcgc

SEQ ID NO: 455338 - DNA, 41 bp, Homo sapiens; identical to SEQ ID NO: 454461
  chr6:74019373-74019414
  hypo
  bladder_and_urothelial vs. anorectal

SEQ ID NO: 455339 - DNA, 102 bp, Homo sapiens; identical to SEQ ID NO: 346835
  chr6:74020094-74020196
  hypo
  bladder_and_urothelial vs. anorectal

SEQ ID NO: 455340 - DNA, 79 bp, Homo sapiens; identical to SEQ ID NO: 339100
  chr6:90359827-90359906
  hypo
  bladder_and_urothelial vs. liver_bileduct,lung

SEQ ID NO: 455341 - DNA, 155 bp, Homo sapiens; identical to SEQ ID NO: 345249
  chr6:106961023-106961178
  hypo
  bladder_and_urothelial vs. head_and_neck,cervical, pancreas_gallbladder,colorectal,prostate,myeloid_neoplasm, thyroid,lymphoid_neoplasm,non_cancer,upper_gi,renal,anorectal, liver_bileduct,lung,breast

SEQ ID NO: 455342 - DNA, 121 bp, Homo sapiens; identical to SEQ ID NO: 339114
  chr6:109058656-109058777
  hypo
  bladder_and_urothelial vs. lung,breast,ovary,uterine, head_and_neck,cervical,lymphoid_neoplasm,prostate,anorectal, melanoma,liver_bileduct

SEQ ID NO: 455343 - DNA, 114 bp, Homo sapiens; identical to SEQ ID NO: 339115
  chr6:109059982-109060096
  hypo
  bladder_and_urothelial vs. lung,head_and_neck,anorectal, cervical,lymphoid_neoplasm,breast,ovary,melanoma,uterine,renal, prostate,multiple_myeloma,non_cancer,thyroid

SEQ ID NO: 455344 - DNA, 94 bp, Homo sapiens; identical to SEQ ID NO: 339117
  chr6:110768091-110768185
  hypo
  bladder_and_urothelial vs. breast,renal,colorectal

SEQ ID NO: 455345 - DNA, 135 bp, Homo sapiens; identical to SEQ ID NO: 339137
  chr6:136901469-136901604
  hypo
  bladder_and_urothelial vs. lung

SEQ ID NO: 455346 - DNA, 139 bp, Homo sapiens
  chr6:158093637-158093776
  hypo
  bladder_and_urothelial vs. breast,pancreas_gallbladder, renal,liver_bileduct,uterine,prostate,melanoma,thyroid,sarcoma, non_cancer
cggtttctctcttctcgcaccccaccctccccgcccgtgccctgtccccatccctgtccctccccacctctgccccctcctctccaccttctctttgctggcgcctcccgctctccagtgcgaccaagaccagtgcatt

SEQ ID NO: 455347 - DNA, 172 bp, Homo sapiens; identical to SEQ ID NO: 348175
  chr6:158094082-158094254
  hypo
  bladder_and_urothelial vs. breast,pancreas_gallbladder, renal,liver_bileduct,uterine,prostate,melanoma,thyroid,sarcoma, non_cancer

SEQ ID NO: 455348 - DNA, 56 bp, Homo sapiens; identical to SEQ ID NO: 339169
  chr6:158321417-158321473
  hypo
  bladder_and_urothelial vs. head_and_neck

SEQ ID NO: 455349 - DNA, 264 bp, Homo sapiens
  chr6:167140099-167140363
  hypo
  bladder_and_urothelial vs. head_and_neck
cgtgatcaccttaaatcacataaacatgatcaccttaaacagagaactggatctcgtgtactgatgctgctggcagcattggaaagtgactcttacaacttcagttgcgataccggtttccataagcttctgtgaattcttgtcaaagctttaaaactgaacacggcaacaactctaggtgaggagtgtttggcagatgaaacccctccaccagggaggtgacgggtctcagggagtgtgtctggcgggtggggaggaatccca

SEQ ID NO: 455350 - DNA, 365 bp, Homo sapiens; identical to SEQ ID NO: 339205
  chr6:168672446-168672811
  hypo
  bladder_and_urothelial vs. colorectal

SEQ ID NO: 455351 - DNA, 87 bp, Homo sapiens; identical to SEQ ID NO: 454471
  chr7:149024-149111
  hypo
  bladder_and_urothelial vs. cervical,anorectal, liver_bileduct,head_and_neck,lung

SEQ ID NO: 455352 - DNA, 575 bp, Homo sapiens; identical to SEQ ID NO: 350498
  chr7:149220-149795
  hypo
  bladder_and_urothelial vs. cervical,anorectal, liver_bileduct,head_and_neck,lung

SEQ ID NO: 455353 - DNA, 551 bp, Homo sapiens
  chr7:287728-288279
  hypo
  bladder_and_urothelial vs. head_and_neck,anorectal, cervical
cgagccgtctgacaggtggagggggagggtgctccacgcagaggcgtggtcgggccttgggtcccgggtcggccctggcagacggcccacgtccctccacacctggtcacctcgcctcacaggacaatcaccacgtcctccgtcagcaagaaaagctctcgccctgcattctccatttaattaagcgagtgggagcctgtggtgtggttcagaaggagttccattaaaagtggctcctttaatttaattttgttttaaatttagccctggaatgagggcaggctttagctatgcaggcagttggtgctgtgtgcccatcagtgaggcatcgccagccccagtccctcaggggcctctcccacccccatcaccgtggggccaggcagagccaccggacctagggctgggtttattcggaggcagggacacagaggcccgctgagccgcacagagcacagaccctcccctgccccgttcttatttggaggcagggacacagaggcccgctgagccgcacagagcacagaccattccccgcccgtttcttgcca

SEQ ID NO: 455354 - DNA, 172 bp, Homo sapiens
  chr7:288328-288500
  hypo
  bladder_and_urothelial vs. head_and_neck,anorectal, cervical
catgaccaaggagatccgggacgtcacacgggacaagaagctctggaggaccttcttcatctctccaggtagcctggcacgggggcccgcattcatctctccaggtagcctggcacgggggcccgcattcatctctccaggtagcctggcacggggagcccacattcatctc

SEQ ID NO: 455355 - DNA, 222 bp, Homo sapiens
  chr7:288057-288279
  hypo
  bladder_and_urothelial vs. cervical,head_and_neck
cgccagccccagtccctcaggggcctctcccacccccatcaccgtggggccaggcagagccaccggacctagggctgggtttattcggaggcagggacacagaggcccgctgagccgcacagagcacagaccctcccctgccccgttcttatttggaggcagggacacagaggcccgctgagccgcacagagcacagaccattccccgcccgtttcttgcca

SEQ ID NO: 455356 - DNA, 468 bp, Homo sapiens; identical to SEQ ID NO: 348181
  chr7:288328-288796
  hypo
  bladder_and_urothelial vs. cervical,head_and_neck

SEQ ID NO: 455357 - DNA, 428 bp, Homo sapiens
  chr7:293618-294046
  hypo
  bladder_and_urothelial vs. cervical
cgcttcccgggcgaggggctgggcacagagcagggaggcacttgcctgaggtcacacagctccaagccctcctaaccccgcccgggaggcccctttaatacccgatttggatctgcaaagagaaatggctgtgggcccgagaaatgcctttctcttttaacacgataccatctgaaaccggcttaggcgaggacgggaggctgttaacagcagacgaattttaagcctccagccaatgagcgctcagatgaagattttcctcctgaaatggagctcctgccccggtgggggctgcctcgtccgactgtgggctgccgactaatctgtatcagcacgagacaggattgcagctggtctttccttgatcgttcgttcttacaataatgacccagcgttggcagtggggtgagggggcgcgggaaggaggg

SEQ ID NO: 455358 - DNA, 405 bp, Homo sapiens
  chr7:294114-294519
  hypo
  bladder_and_urothelial vs. cervical
gggccaggtcggcctggcacccaccccgtttcctctccgaacctcagcttgttcagctaagaaagggcagccgggaccggccaccctcctgttcactccgctgggaagcgccctgccgaacctgccttctgatcccacggggagcctgccctgcagccaggagagacccctggaatcactcagcctggctgcataggaatgctgggactgggggagctgtgagtgaggttcggggctccggccccaacaaaaccacgttctcaccagttctacagccccaggctttccagagtttctccacaaacaaataaagcaagaaaaactagatttaatcagcaaataaatacaggaatagcgccgtcggccgggcctccagcatcagagcagtgaacccgcactgctagc

SEQ ID NO: 455359 - DNA, 14 bp, Homo sapiens
  chr7:294032-294046
  hypo
  bladder_and_urothelial vs. cervical
cgcgggaaggaggg

SEQ ID NO: 455360 - DNA, 829 bp, Homo sapiens; identical to SEQ ID NO: 364187
  chr7:294114-294943
  hypo
  bladder_and_urothelial vs. cervical

SEQ ID NO: 455361 - DNA, 101 bp, Homo sapiens
  chr7:409502-409603
  hypo
  bladder_and_urothelial vs. melanoma
cgccgtggccagacgcccggcgatcgtccactgtgccgaggccccgggccccaggctggctgcagaggcgaacgacgcggccggccccgcgctgcagacgg

SEQ ID NO: 455362 - DNA, 46 bp, Homo sapiens
  chr7:409781-409827
  hypo
  bladder_and_urothelial vs. melanoma
ggccccaggtcccgcgggttataaagcaagggctggacccagcccg

SEQ ID NO: 455363 - DNA, 95 bp, Homo sapiens
  chr7:409892-409987
  hypo
  bladder_and_urothelial vs. melanoma
ataaatagactctttgtttcaaagaaaatgtttttaaaagcaaggcagccaagccgggcccaggtaacaagcagagggaggaggcctcagaggga

SEQ ID NO: 455364 - DNA, 52 bp, Homo sapiens; identical to SEQ ID NO: 364195
  chr7:431783-431835
  hypo
  bladder_and_urothelial vs. prostate,renal, lymphoid_neoplasm

SEQ ID NO: 455365 - DNA, 274 bp, Homo sapiens; identical to SEQ ID NO: 377920
  chr7:653522-653796
  hypo
  bladder_and_urothelial vs. colorectal

SEQ ID NO: 455366 - DNA, 124 bp, Homo sapiens
  chr7:1308164-1308288
  hypo
  bladder_and_urothelial vs. anorectal
cgcgaccctggcaggaggtctcagagaagacggctcgccacaggccctcagaacaccctcctggtctacagaggggacgctgaggctgggagcgggaatgtggctggtccctgctgctccctcg

SEQ ID NO: 455367 - DNA, 140 bp, Homo sapiens
  chr7:1315705-1315845
  hypo
  bladder_and_urothelial vs. anorectal
cgggtgacccgcctcggcccgctgagcagccgaacgcgctgacggatccattaggccgctcccggccccggccccctctccctccattcctggccggcgctgtaaatctccgccaatttcggtcctaatcatcattataa

SEQ ID NO: 455368 - DNA, 102 bp, Homo sapiens
  chr7:1460672-1460774
  hypo
  bladder_and_urothelial vs. thyroid,prostate,renal
cgtaacacgcatcccatgggcgtcccgtgccaggaattgagggggccacaccctactcaacgcgggggacagtctccgggctccgtggctcacggatggtgg

SEQ ID NO: 455369 - DNA, 30 bp, Homo sapiens
  chr7:1460958-1460988
  hypo
  bladder_and_urothelial vs. thyroid,prostate,renal
cagatgtgatgtatacctcgcacgaaagac

SEQ ID NO: 455370 - DNA, 1 bp, Homo sapiens
  chr7:1598548-1598549
  hypo
  bladder_and_urothelial vs. thyroid,renal,melanoma
c

SEQ ID NO: 455371 - DNA, 421 bp, Homo sapiens; identical to SEQ ID NO: 353892
  chr7:1641978-1642399
  hypo
  bladder_and_urothelial vs. renal

SEQ ID NO: 455372 - DNA, 313 bp, Homo sapiens
  chr7:1694568-1694881
  hypo
  bladder_and_urothelial vs. prostate,renal
cgaagggggtgcccagcctcgccccgcccagcgcacccctgcagcagcccgggagggcaggccgtggctcctgggaacacggcgcccagctgcaatccacattgctgctagtgaatatggacaattcagagacatgaaataaggcagacagagaaaaagcatcggtgactctgccaggctacatatgtgtgtgcgtgtctgcatatatatacacacacgtgtatacgcacacacagagccacacatcactcaacgacagggacacgttctgagaaatacatggttccgtgattttgtcatcgcgcgtacatcc

SEQ ID NO: 455373 - DNA, 207 bp, Homo sapiens
  chr7:1931663-1931870
  hypo
  bladder_and_urothelial vs. colorectal,ovary,melanoma, liver_bileduct,upper_gi,uterine,breast,pancreas_gallbladder, renal,lymphoid_neoplasm,cervical,prostate,multiple_myeloma, thyroid,sarcoma,non_cancer,lung,myeloid_neoplasm
cgccagccctgcgagctccgttcacggtgagcaccctacgcaggtgcaccgtcttccacccttcatacatcatgtttatggcaccttttccatatttaaacacgtacagacacgcagatgcttagcactgcgccacggtggtctactgcattcagcacagtcacgcactgcacacttttgcagcttggcagcagccggctaaaccat

SEQ ID NO: 455374 - DNA, 212 bp, Homo sapiens; identical to SEQ ID NO: 339312
  chr7:1932177-1932389
  hypo
  bladder_and_urothelial vs. upper_gi,colorectal, liver_bileduct,melanoma

SEQ ID NO: 455375 - DNA, 28 bp, Homo sapiens
  chr7:1962511-1962539
  hypo
  bladder_and_urothelial vs. cervical,anorectal,ovary, uterine
gtaatttttccttttggcgagctgacgc

SEQ ID NO: 455376 - DNA, 399 bp, Homo sapiens; identical to SEQ ID NO: 364276
  chr7:2770640-2771039
  hypo
  bladder_and_urothelial vs. liver_bileduct

SEQ ID NO: 455377 - DNA, 108 bp, Homo sapiens
  chr7:6443719-6443827
  hypo
  bladder_and_urothelial vs. melanoma,ovary,colorectal, sarcoma,lymphoid_neoplasm,multiple_myeloma,renal,uterine, myeloid_neoplasm,non_cancer,liver_bileduct,thyroid,upper_gi
gagggacagggagtgccacctccaggggagaactgggtgagcccaaatacggcaggagtggaggtgacattcatgtttggacctgtcgaacagtggcgaagctctgag

SEQ ID NO: 455378 - DNA, 101 bp, Homo sapiens
  chr7:6443856-6443957
  hypo
  bladder_and_urothelial vs. melanoma,ovary,colorectal, sarcoma,lymphoid_neoplasm,multiple_myeloma,renal,uterine, myeloid_neoplasm,non_cancer,liver_bileduct,thyroid,upper_gi
catcctggcccagagctaggggctgaagatggagatgttgggaccctagactggccctggaagagtagaggttggtgaaccacatgcccttaagatccttt

SEQ ID NO: 455379 - DNA, 61 bp, Homo sapiens
  chr7:6443990-6444051
  hypo
  bladder_and_urothelial vs. melanoma,ovary,colorectal, sarcoma,lymphoid_neoplasm,multiple_myeloma,renal,uterine, myeloid_neoplasm,non_cancer,liver_bileduct,thyroid,upper_gi
cccgacgctttgggaggctgacacaggaggagcgcttaagcccaggagttctagaccagcc

SEQ ID NO: 455380 - DNA, 3 bp, Homo sapiens
  chr7:6525091-6525094
  hypo
  bladder_and_urothelial vs. lymphoid_neoplasm,melanoma, multiple_myeloma,renal,sarcoma,thyroid,non_cancer
ttc

SEQ ID NO: 455381 - DNA, 31 bp, Homo sapiens; identical to SEQ ID NO: 339408
  chr7:7839208-7839239
  hypo
  bladder_and_urothelial vs. ovary,lung,anorectal, head_and_neck,lymphoid_neoplasm,pancreas_gallbladder

SEQ ID NO: 455382 - DNA, 60 bp, Homo sapiens; identical to SEQ ID NO: 454474
  chr7:19156644-19156704
  hypo
  bladder_and_urothelial vs. anorectal,uterine,melanoma, sarcoma

SEQ ID NO: 455383 - DNA, 60 bp, Homo sapiens; identical to SEQ ID NO: 454474
  chr7:19156644-19156704
  hypo
  bladder_and_urothelial vs. anorectal,sarcoma,uterine

SEQ ID NO: 455384 - DNA, 801 bp, Homo sapiens; identical to SEQ ID NO: 454476
  chr7:21984770-21985571
  hypo
  bladder_and_urothelial vs. head_and_neck,cervical,lung, anorectal,colorectal,melanoma,multiple_myeloma,upper_gi,renal, pancreas_gallbladder,uterine,ovary

SEQ ID NO: 455385 - DNA, 808 bp, Homo sapiens; identical to SEQ ID NO: 454477
  chr7:21985078-21985886
  hypo
  bladder_and_urothelial vs. head_and_neck,lung,anorectal, cervical,uterine,upper_gi,colorectal,renal

SEQ ID NO: 455386 - DNA, 761 bp, Homo sapiens; identical to SEQ ID NO: 454479
  chr7:23510081-23510842
  hypo
  bladder_and_urothelial vs. colorectal,cervical,upper_gi, anorectal,head_and_neck,uterine

SEQ ID NO: 455387 - DNA, 229 bp, Homo sapiens; identical to SEQ ID NO: 454480
  chr7:23513246-23513475
  hypo
  bladder_and_urothelial vs. cervical,anorectal,uterine, head_and_neck

SEQ ID NO: 455388 - DNA, 38 bp, Homo sapiens; identical to SEQ ID NO: 454485
  chr7:27278957-27278995
  hypo
  bladder_and_urothelial vs. ovary,multiple_myeloma, myeloid_neoplasm,thyroid,uterine

SEQ ID NO: 455389 - DNA, 136 bp, Homo sapiens; identical to SEQ ID NO: 350553
  chr7:27279659-27279795
  hypo
  bladder_and_urothelial vs. ovary,multiple_myeloma, myeloid_neoplasm,thyroid,uterine

SEQ ID NO: 455390 - DNA, 34 bp, Homo sapiens
  chr7:27686735-27686769
  hypo
  bladder_and_urothelial vs. colorectal,sarcoma, head_and_neck,breast,lymphoid_neoplasm
cgctttggaccattatgaaataaaataagggtta

SEQ ID NO: 455391 - DNA, 45 bp, Homo sapiens; identical to SEQ ID NO: 353958
  chr7:27686815-27686860
  hypo
  bladder_and_urothelial vs. colorectal,sarcoma, head_and_neck,breast,lymphoid_neoplasm

SEQ ID NO: 455392 - DNA, 126 bp, Homo sapiens; identical to SEQ ID NO: 339438
  chr7:27831654-27831780
  hypo
  bladder_and_urothelial vs. liver_bileduct,colorectal, melanoma,upper_gi,uterine,pancreas_gallbladder,cervical,sarcoma, ovary,renal,lymphoid_neoplasm,thyroid,non_cancer

SEQ ID NO: 455393 - DNA, 30 bp, Homo sapiens
  chr7:28989198-28989228
  hypo
  bladder_and_urothelial vs. anorectal
cgagagtgagacaccgtctcaaaaaaaaaa

SEQ ID NO: 455394 - DNA, 34 bp, Homo sapiens; identical to SEQ ID NO: 339447
  chr7:30341584-30341618
  hypo
  bladder_and_urothelial vs. colorectal

SEQ ID NO: 455395 - DNA, 277 bp, Homo sapiens; identical to SEQ ID NO: 339454
  chr7:31032061-31032338
  hypo
  bladder_and_urothelial vs. ovary

SEQ ID NO: 455396 - DNA, 7 bp, Homo sapiens
  chr7:37487365-37487372
  hypo
  bladder_and_urothelial vs. lymphoid_neoplasm,uterine, ovary,myeloid_neoplasm,thyroid,non_cancer,multiple_myeloma
cgctcgc

SEQ ID NO: 455397 - DNA, 58 bp, Homo sapiens; identical to SEQ ID NO: 339495
  chr7:47639927-47639985
  hypo
  bladder_and_urothelial vs. ovary

SEQ ID NO: 455398 - DNA, 102 bp, Homo sapiens; identical to SEQ ID NO: 345274
  chr7:50344738-50344840
  hypo
  bladder_and_urothelial vs. anorectal,multiple_myeloma

SEQ ID NO: 455399 - DNA, 90 bp, Homo sapiens; identical to SEQ ID NO: 354000
  chr7:66293278-66293368
  hypo
  bladder_and_urothelial vs. melanoma,pancreas_gallbladder, breast,uterine,colorectal

SEQ ID NO: 455400 - DNA, 118 bp, Homo sapiens
  chr7:67353388-67353506
  hypo
  bladder_and_urothelial vs. pancreas_gallbladder
cggtaggccaactgactgggaagtgaggagcacctcttcccggccgccaactgtctgggaaacgtggagaacttctgcacggctgccaattgtcagggaagtgaggagagcctctgcc

SEQ ID NO: 455401 - DNA, 3 bp, Homo sapiens
  chr7:128097690-128097693
  hypo
  bladder_and_urothelial vs. multiple_myeloma,sarcoma, melanoma,lymphoid_neoplasm,myeloid_neoplasm,non_cancer,thyroid
tgc

SEQ ID NO: 455402 - DNA, 188 bp, Homo sapiens; identical to SEQ ID NO: 339616
  chr7:128597312-128597500
  hypo
  bladder_and_urothelial vs. upper_gi

SEQ ID NO: 455403 - DNA, 56 bp, Homo sapiens; identical to SEQ ID NO: 339617
  chr7:128602091-128602147
  hypo
  bladder_and_urothelial vs. liver_bileduct, pancreas_gallbladder

SEQ ID NO: 455404 - DNA, 177 bp, Homo sapiens; identical to SEQ ID NO: 339636
  chr7:134898284-134898461
  hypo
  bladder_and_urothelial vs. liver_bileduct,upper_gi, pancreas_gallbladder,breast,colorectal,lung,lymphoid_neoplasm, prostate

SEQ ID NO: 455405 - DNA, 77 bp, Homo sapiens
  chr7:138993466-138993543
  hypo
  bladder_and_urothelial vs. pancreas_gallbladder, colorectal,upper_gi,breast
cggtcaggacttgaaatgtagatgtgggaatcatacaaaaataattcaaccttagaaattcaggtaagaggccgggc

SEQ ID NO: 455406 - DNA, 10 bp, Homo sapiens
  chr7:148841969-148841979
  hypo
  bladder_and_urothelial vs. sarcoma,myeloid_neoplasm, multiple_myeloma,non_cancer,melanoma,uterine,thyroid,renal
cgtgcccggc

SEQ ID NO: 455407 - DNA, 163 bp, Homo sapiens; identical to SEQ ID NO: 345926
  chr7:148851234-148851397
  hypo
  bladder_and_urothelial vs. liver_bileduct

SEQ ID NO: 455408 - DNA, 130 bp, Homo sapiens; identical to SEQ ID NO: 378333
  chr7:148884017-148884147
  hypo
  bladder_and_urothelial vs. renal

SEQ ID NO: 455409 - DNA, 219 bp, Homo sapiens; identical to SEQ ID NO: 339697
  chr7:152569939-152570158
  hypo
  bladder_and_urothelial vs. liver_bileduct

SEQ ID NO: 455410 - DNA, 28 bp, Homo sapiens
  chr7:155580882-155580910
  hypo
  bladder_and_urothelial vs. melanoma,prostate,renal, lymphoid_neoplasm,thyroid,pancreas_gallbladder,non_cancer, colorectal,cervical,liver_bileduct,multiple_myeloma,breast
agctaaaaatccaaccaaggccgggcgc

SEQ ID NO: 455411 - DNA, 1 bp, Homo sapiens
  chr7:155581242-155581243
  hypo
  bladder_and_urothelial vs. lymphoid_neoplasm,prostate, non_cancer,multiple_myeloma,breast
c

SEQ ID NO: 455412 - DNA, 39 bp, Homo sapiens; identical to SEQ ID NO: 345928
  chr7:155581980-155582019
  hypo
  bladder_and_urothelial vs. lymphoid_neoplasm,prostate, non_cancer,multiple_myeloma,breast

SEQ ID NO: 455413 - DNA, 239 bp, Homo sapiens
  chr7:155581980-155582219
  hypo
  bladder_and_urothelial vs. melanoma,uterine, lymphoid_neoplasm,prostate,multiple_myeloma,non_cancer,sarcoma, renal,myeloid_neoplasm,thyroid
tccaacaggcctttctggggcctgtcctgcttgccttgcggcagccaagggatataatgggtgccggccagcctcccctcccatgaccccgaggaagtccctccagcccctccctgagtctgctcctggcagaatccctctgtaagtggatgcggggtccagagatgccaccggctgggccagaccccatgaggagaagctgtgccggagcctgcaggactgggtccaggtcagggctc

SEQ ID NO: 455414 - DNA, 265 bp, Homo sapiens; identical to SEQ ID NO: 339713
  chr7:156347383-156347648
  hypo
  bladder_and_urothelial vs. pancreas_gallbladder

SEQ ID NO: 455415 - DNA, 1 bp, Homo sapiens
  chr7:156744694-156744695
  hypo
  bladder_and_urothelial vs. head_and_neck
c

SEQ ID NO: 455416 - DNA, 50 bp, Homo sapiens; identical to SEQ ID NO: 364570
  chr7:156744799-156744849
  hypo
  bladder_and_urothelial vs. head_and_neck

SEQ ID NO: 455417 - DNA, 150 bp, Homo sapiens; identical to SEQ ID NO: 364577
  chr7:157086147-157086297
  hypo
  bladder_and_urothelial vs. melanoma

SEQ ID NO: 455418 - DNA, 30 bp, Homo sapiens; identical to SEQ ID NO: 454497
  chr7:157129285-157129315
  hypo
  bladder_and_urothelial vs. cervical

SEQ ID NO: 455419 - DNA, 42 bp, Homo sapiens
  chr7:157262486-157262528
  hypo
  bladder_and_urothelial vs. lymphoid_neoplasm,thyroid, non_cancer,renal,myeloid_neoplasm
cggcggcgcctaattccaccttgtgtgccagtgcagttcata

SEQ ID NO: 455420 - DNA, 215 bp, Homo sapiens; identical to SEQ ID NO: 354106
  chr7:157263471-157263686
  hypo
  bladder_and_urothelial vs. thyroid,lymphoid_neoplasm, breast,non_cancer,renal,prostate

SEQ ID NO: 455421 - DNA, 218 bp, Homo sapiens; identical to SEQ ID NO: 339770
  chr7:157916520-157916738
  hypo
  bladder_and_urothelial vs. upper_gi,anorectal, head_and_neck,pancreas_gallbladder

SEQ ID NO: 455422 - DNA, 70 bp, Homo sapiens
  chr7:158349387-158349457
  hypo
  bladder_and_urothelial vs. pancreas_gallbladder, colorectal,anorectal
cgcgcaggtcagacggctcccgggcaggtcaggcggctcccgggcaggtcaggcggctcccgagcaggtt

SEQ ID NO: 455423 - DNA, 361 bp, Homo sapiens; identical to SEQ ID NO: 354138
  chr7:158349747-158350108
  hypo
  bladder_and_urothelial vs. pancreas_gallbladder, colorectal,anorectal

SEQ ID NO: 455424 - DNA, 313 bp, Homo sapiens; identical to SEQ ID NO: 339825
  chr8:6414561-6414874
  hypo
  bladder_and_urothelial vs. upper_gi

SEQ ID NO: 455425 - DNA, 197 bp, Homo sapiens; identical to SEQ ID NO: 454027
  chr8:23423722-23423919
  hypo
  bladder_and_urothelial vs. liver_bileduct,melanoma,renal

SEQ ID NO: 455426 - DNA, 576 bp, Homo sapiens; identical to SEQ ID NO: 333408
  chr8:26436208-26436784
  hypo
  bladder_and_urothelial vs. ovary,anorectal

SEQ ID NO: 455427 - DNA, 320 bp, Homo sapiens
  chr8:27779460-27779780
  hypo
  bladder_and_urothelial vs. pancreas_gallbladder, anorectal
cgccgtgtcgctctgctggcccgtgcggtcccgcagcagggccaccgcctgctcggtctgcaccgcctgcgcctgcagcccccacagcgcgccctccagccgctgcactgcgcccgccagcgccagcaacgagtctgactggttctgcagcgcgtcctgcaccttccacacctgctccgtcaggtccgcttgcagcggagcctgcagcagccgcagctgcaagtcccggaagctctcattcagccggttcacattgcgagtcagggccttcaggtcgtcaggggagctgcgcggcctggacactgcggaggaggaagagg

SEQ ID NO: 455428 - DNA, 18 bp, Homo sapiens
  chr8:27779809-27779827
  hypo
  bladder_and_urothelial vs. pancreas_gallbladder, anorectal
ccccgggtgacaagaggc

SEQ ID NO: 455429 - DNA, 3 bp, Homo sapiens
  chr8:41668165-41668168
  hypo
  bladder_and_urothelial vs. cervical,anorectal, lymphoid_neoplasm,colorectal,prostate
cgg

SEQ ID NO: 455430 - DNA, 39 bp, Homo sapiens; identical to SEQ ID NO: 354175
  chr8:41668308-41668347
  hypo
  bladder_and_urothelial vs. cervical,anorectal, lymphoid_neoplasm,colorectal,prostate

SEQ ID NO: 455431 - DNA, 172 bp, Homo sapiens; identical to SEQ ID NO: 348297
  chr8:42750012-42750184
  hypo
  bladder_and_urothelial vs. colorectal,head_and_neck, liver_bileduct,anorectal,melanoma,prostate,sarcoma,uterine, cervical,renal,lymphoid_neoplasm,non_cancer,multiple_myeloma

SEQ ID NO: 455432 - DNA, 188 bp, Homo sapiens; identical to SEQ ID NO: 454029
  chr8:49571728-49571916
  hypo
  bladder_and_urothelial vs. colorectal, pancreas_gallbladder,melanoma,prostate,lymphoid_neoplasm,renal, uterine,thyroid,upper_gi

SEQ ID NO: 455433 - DNA, 239 bp, Homo sapiens; identical to SEQ ID NO: 453448
  chr8:60030908-60031147
  hypo
  bladder_and_urothelial vs. non_cancer,myeloid_neoplasm

SEQ ID NO: 455434 - DNA, 200 bp, Homo sapiens; identical to SEQ ID NO: 453449
  chr8:60030947-60031147
  hypo
  bladder_and_urothelial vs. ovary

SEQ ID NO: 455435 - DNA, 115 bp, Homo sapiens; identical to SEQ ID NO: 346983
  chr8:60031791-60031906
  hypo
  bladder_and_urothelial vs. ovary

SEQ ID NO: 455436 - DNA, 69 bp, Homo sapiens; identical to SEQ ID NO: 339940
  chr8:66877733-66877802
  hypo
  bladder_and_urothelial vs. pancreas_gallbladder

SEQ ID NO: 455437 - DNA, 349 bp, Homo sapiens; identical to SEQ ID NO: 339943
  chr8:68115303-68115652
  hypo
  bladder_and_urothelial vs. liver_bileduct,ovary,breast, lymphoid_neoplasm,pancreas_gallbladder

SEQ ID NO: 455438 - DNA, 436 bp, Homo sapiens; identical to SEQ ID NO: 453464
  chr8:70745324-70745760
  hypo
  bladder_and_urothelial vs. ovary,uterine, myeloid_neoplasm,thyroid,prostate,non_cancer

SEQ ID NO: 455439 - DNA, 959 bp, Homo sapiens; identical to SEQ ID NO: 453465
  chr8:70745324-70746283
  hypo
  bladder_and_urothelial vs. uterine

SEQ ID NO: 455440 - DNA, 226 bp, Homo sapiens; identical to SEQ ID NO: 339949
  chr8:71447632-71447858
  hypo
  bladder_and_urothelial vs. lung,head_and_neck

SEQ ID NO: 455441 - DNA, 146 bp, Homo sapiens; identical to SEQ ID NO: 454043
  chr8:71447942-71448088
  hypo
  bladder_and_urothelial vs. pancreas_gallbladder, colorectal,sarcoma,uterine,breast,prostate,renal,melanoma, lymphoid_neoplasm

SEQ ID NO: 455442 - DNA, 50 bp, Homo sapiens; identical to SEQ ID NO: 354202
  chr8:71448124-71448174
  hypo
  bladder_and_urothelial vs. pancreas_gallbladder, colorectal,sarcoma,uterine,breast,prostate,renal,melanoma, lymphoid_neoplasm

SEQ ID NO: 455443 - DNA, 55 bp, Homo sapiens; identical to SEQ ID NO: 346990
  chr8:72756949-72757004
  hypo
  bladder_and_urothelial vs. sarcoma,renal,melanoma, myeloid_neoplasm,non_cancer

SEQ ID NO: 455444 - DNA, 2 bp, Homo sapiens
  chr8:90913515-90913517
  hypo
cg

SEQ ID NO: 455445 - DNA, 107 bp, Homo sapiens; identical to SEQ ID NO: 339972
  chr8:94684099-94684206
  hypo
  bladder_and_urothelial vs. head_and_neck

SEQ ID NO: 455446 - DNA, 137 bp, Homo sapiens
  chr8:94685461-94685598
  hypo
  bladder_and_urothelial vs. sarcoma,renal,head_and_neck, lymphoid_neoplasm,lung
cgtcaatatcacagtgtgtaaacactgtgcataattacaaatttcagagcgagggagcgatgtatcaccaatatcaccgtgtgtaaacactacatgtaattacaaatatcagagcgatatgtcatcaatatcacaac

SEQ ID NO: 455447 - DNA, 251 bp, Homo sapiens; identical to SEQ ID NO: 378643
  chr8:102450881-102451132
  hypo
  bladder_and_urothelial vs. melanoma

SEQ ID NO: 455448 - DNA, 126 bp, Homo sapiens; identical to SEQ ID NO: 364783
  chr8:103572766-103572892
  hypo
  bladder_and_urothelial vs. anorectal

SEQ ID NO: 455449 - DNA, 221 bp, Homo sapiens; identical to SEQ ID NO: 340002
  chr8:118531602-118531823
  hypo
  bladder_and_urothelial vs. liver_bileduct,head_and_neck, anorectal,cervical,lung,renal

SEQ ID NO: 455450 - DNA, 541 bp, Homo sapiens; identical to SEQ ID NO: 454513
  chr8:121823361-121823902
  hypo
  bladder_and_urothelial vs. liver_bileduct

SEQ ID NO: 455451 - DNA, 27 bp, Homo sapiens
  chr8:121823930-121823957
  hypo
  bladder_and_urothelial vs. liver_bileduct
ctcgctgctcagaaccagggcgtcctc

SEQ ID NO: 455452 - DNA, 44 bp, Homo sapiens; identical to SEQ ID NO: 454049
  chr8:126044399-126044443
  hypo
  bladder_and_urothelial vs. colorectal,melanoma,prostate, sarcoma,multiple_myeloma,lymphoid_neoplasm

SEQ ID NO: 455453 - DNA, 30 bp, Homo sapiens; identical to SEQ ID NO: 454050
  chr8:126044563-126044593
  hypo
  bladder_and_urothelial vs. colorectal,melanoma,prostate, sarcoma,multiple_myeloma,lymphoid_neoplasm

SEQ ID NO: 455454 - DNA, 631 bp, Homo sapiens
  chr8:128871653-128872284
  hypo
  bladder_and_urothelial vs. ovary,colorectal,uterine, sarcoma,multiple_myeloma,prostate
cgccgtggctgactccaaacttgaactctggtctctgtttttggagcttgcttccttcctacgaccctagactgctcctcctaaataattaagtggcaaacatggcacagacagtaacctcacataagaagctatgaggttaggacagaaatatccactgctggcctgcgaactattcacacaggtctgactccccgccagagtcctggctgccctggtcctgtggaatcccgtcatggcttctgtctaaacggagcaggctcagggccatgctgaacttggagaaatctgtgcaggagtcagatttgggctttagagtcacctggggttgaatctcgggcctgctatttattgaacctgtcctagcctcaatcgccttatctgtaccatggggatgataccatctaggtcgaaggtagttgcaggagattctcatgcacggaggcccttggccgtcatttgtttctttgtctctacaagcagagaggctgagtcatacagatcctgaggggagatcactttctcttccctcctttcgtgtgtcatctccacctgggtgtggtgagccccaggaataatgctgtgacatcaagccccgtgaacacctcctttcacacggaccccgtgactg

SEQ ID NO: 455455 - DNA, 191 bp, Homo sapiens; identical to SEQ ID NO: 345946
  chr8:128872459-128872650
  hypo
  bladder_and_urothelial vs. ovary,colorectal,uterine, sarcoma,multiple_myeloma,prostate

SEQ ID NO: 455456 - DNA, 171 bp, Homo sapiens; identical to SEQ ID NO: 340039
  chr8:134335659-134335830
  hypo
  bladder_and_urothelial vs. colorectal

SEQ ID NO: 455457 - DNA, 368 bp, Homo sapiens; identical to SEQ ID NO: 340046
  chr8:140785341-140785709
  hypo
  bladder_and_urothelial vs. melanoma

SEQ ID NO: 455458 - DNA, 327 bp, Homo sapiens; identical to SEQ ID NO: 354261
  chr8:142227279-142227606
  hypo
  bladder_and_urothelial vs. upper_gi,colorectal,ovary

SEQ ID NO: 455459 - DNA, 193 bp, Homo sapiens
  chr8:142367176-142367369
  hypo
  bladder_and_urothelial vs. pancreas_gallbladder
cggccacgtggtagaccacgaggctcgtgtggtgtggcatgtcgggccacagcgccacggccacttggcgggcgtggaagggcgtgaagcagacgagaaagatgatgagcaccgtgagcaggagctgcatggcccgcacgcggcgctggcgaccctggtggagcagacccggccgcgacagtgcacacatgat

SEQ ID NO: 455460 - DNA, 288 bp, Homo sapiens
  chr8:142367824-142368112
  hypo
  bladder_and_urothelial vs. pancreas_gallbladder
ctgccaggaagatggctccgtgcaccgccatcagcgccagccacaggcctgggaaggtgccatgcagctcctcgtccagccgggcaaacaggtggaacaggggcacctccagcccgctggcattggtccgcactgttgtcactgcggtggcattggggactgccccggccgagggccccgctggagacacagagggcatgacggcagccagcacaccccaggcctggaagcaaggagaccaggtcaccccaggcgccagcctggccttaagccctgccctgaggccca

SEQ ID NO: 455461 - DNA, 74 bp, Homo sapiens
  chr8:142439127-142439201
  hypo
  bladder_and_urothelial vs. breast,ovary,uterine
cgcacctgaggctgcgctggtcaggacaggttgggccatgctgcggaaacagccaggcctgaaccccaacgact

SEQ ID NO: 455462 - DNA, 23 bp, Homo sapiens
  chr8:142439349-142439372
  hypo
  bladder_and_urothelial vs. breast,ovary,uterine
tttgctgggcagagactcctcgc

SEQ ID NO: 455463 - DNA, 219 bp, Homo sapiens; identical to SEQ ID NO: 364865
  chr8:143089100-143089319
  hypo
  bladder_and_urothelial vs. cervical,anorectal

SEQ ID NO: 455464 - DNA, 56 bp, Homo sapiens
  chr8:143333267-143333323
  hypo
  bladder_and_urothelial vs. anorectal
cgcccgcgttctctgtctgcagggcccgggcaccatgtacccgccgcccatgttct

SEQ ID NO: 455465 - DNA, 66 bp, Homo sapiens
  chr8:144343416-144343482
  hypo
  bladder_and_urothelial vs. thyroid
cgctgagatgtgatcgtttctttcctgagaatgagctgaggtaaaaacatgctggggaggaagatg

SEQ ID NO: 455466 - DNA, 228 bp, Homo sapiens
  chr8:144343992-144344220
  hypo
  bladder_and_urothelial vs. thyroid
gccacgcctgtctccggcagcccctgcccgcacccgcacccctgcacctgccacgcccgtctccggcagcacctgccacgcccgtctccggcagcacctgccacgcccgtctccggcagcacctgccacgcccgtctccggcagcccctgcccgcacccgcacccctgcacctgccacgcccgtctccggcagcccctgcctgcacccgcacccctcacggctgtctc

SEQ ID NO: 455467 - DNA, 231 bp, Homo sapiens; identical to SEQ ID NO: 340121
  chr8:144351704-144351935
  hypo
  bladder_and_urothelial vs. liver_bileduct

SEQ ID NO: 455468 - DNA, 284 bp, Homo sapiens
  chr8:144359694-144359978
  hypo
  bladder_and_urothelial vs. myeloid_neoplasm
cgaagctctgggagagctcagctgggggtggctccaagtgctgagtgccagtgattctgccagtgccttctccctgccctgcctgtgccctccgggacagctggcagaccccggaccccagcctggctcctccgaggctgtccctctccaggtctcacctcccctcctactgtgactcatccagaaccccgggcctggcccccagatgtgcctgtggcgggcctctgaggtcactgtcctggtgaagacgaaggctaccgtccccgctttctggcagtgtctgc

SEQ ID NO: 455469 - DNA, 91 bp, Homo sapiens; identical to SEQ ID NO: 345960
  chr8:144360545-144360636
  hypo
  bladder_and_urothelial vs. myeloid_neoplasm

SEQ ID NO: 455470 - DNA, 207 bp, Homo sapiens; identical to SEQ ID NO: 348337
  chr8:144414283-144414490
  hypo
  bladder_and_urothelial vs. colorectal,breast,renal, uterine,sarcoma,melanoma,ovary,upper_gi,thyroid

SEQ ID NO: 455471 - DNA, 121 bp, Homo sapiens; identical to SEQ ID NO: 454515
  chr8:144636569-144636690
  hypo
  bladder_and_urothelial vs. liver_bileduct

SEQ ID NO: 455472 - DNA, 52 bp, Homo sapiens; identical to SEQ ID NO: 378809
  chr8:146079313-146079365
  hypo
  bladder_and_urothelial vs. multiple_myeloma,renal

SEQ ID NO: 455473 - DNA, 81 bp, Homo sapiens; identical to SEQ ID NO: 340155
  chr8:146176654-146176735
  hypo
  bladder_and_urothelial vs. liver_bileduct

SEQ ID NO: 455474 - DNA, 167 bp, Homo sapiens; identical to SEQ ID NO: 340170
  chr9:4864421-4864588
  hypo
  bladder_and_urothelial vs. head_and_neck,anorectal, cervical,colorectal,liver_bileduct

SEQ ID NO: 455475 - DNA, 381 bp, Homo sapiens; identical to SEQ ID NO: 454519
  chr9:71788570-71788951
  hypo
  bladder_and_urothelial vs. head_and_neck,renal

SEQ ID NO: 455476 - DNA, 36 bp, Homo sapiens
  chr9:80833898-80833934
  hypo
  bladder_and_urothelial vs. upper_gi,colorectal
cgtctgtggggatccgcaaagatatgggatccagtt

SEQ ID NO: 455477 - DNA, 182 bp, Homo sapiens; identical to SEQ ID NO: 364964
  chr9:80834011-80834193
  hypo
  bladder_and_urothelial vs. upper_gi,colorectal

SEQ ID NO: 455478 - DNA, 130 bp, Homo sapiens
  chr9:85843821-85843951
  hypo
  bladder_and_urothelial vs. breast,cervical
cgctgggagctgtagaccggagctgttcctattcggccatcttcatttcctcgctatttctaacgcatctgcagtgcttgtccccgctgaagtcttgaactcaaagtcattcaggatgattggaatccac

SEQ ID NO: 455479 - DNA, 78 bp, Homo sapiens; identical to SEQ ID NO: 340308
  chr9:125126554-125126632
  hypo
  bladder_and_urothelial vs. liver_bileduct

SEQ ID NO: 455480 - DNA, 34 bp, Homo sapiens
  chr9:128118022-128118056
  hypo
  bladder_and_urothelial vs. pancreas_gallbladder,cervical
cgcgagtgaagaacagcttcaagatgcacagctg

SEQ ID NO: 455481 - DNA, 36 bp, Homo sapiens; identical to SEQ ID NO: 365053
  chr9:128118095-128118131
  hypo
  bladder_and_urothelial vs. pancreas_gallbladder,cervical

SEQ ID NO: 455482 - DNA, 39 bp, Homo sapiens
  chr9:131461561-131461600
  hypo
  bladder_and_urothelial vs. liver_bileduct
cggcctctcaaagtgttgggattacaggcgagccgccgc

SEQ ID NO: 455483 - DNA, 495 bp, Homo sapiens; identical to SEQ ID NO: 340369
  chr9:133761121-133761616
  hypo
  bladder_and_urothelial vs. upper_gi,colorectal

SEQ ID NO: 455484 - DNA, 14 bp, Homo sapiens
  chr9:133779947-133779961
  hypo
  bladder_and_urothelial vs. prostate,cervical
ccctgggtctaggc

SEQ ID NO: 455485 - DNA, 275 bp, Homo sapiens
  chr9:138660497-138660772
  hypo
  bladder_and_urothelial vs. renal,prostate,thyroid, pancreas_gallbladder
cgaggtggaccgcacggctgcagtgagtgaggctgaggccctgcccaggcgggaggggcaccgtggggccggggagcgggggtccctgagggaagagacctgccccaggctgccggtgccgcccagcagcccacagaggccagcccgtctgcactgaccaaccacccaccccgccaggaccaccagaccatcctgcgcgcctgggccgtgaaggacttcgcccccaactgccccctctacgtccagatcctcaaacctgaaaacaagtttcacgt

SEQ ID NO: 455486 - DNA, 3 bp, Homo sapiens
  chr9:138660769-138660772
  hypo
  bladder_and_urothelial vs. prostate,renal,thyroid, pancreas_gallbladder
cgt

SEQ ID NO: 455487 - DNA, 252 bp, Homo sapiens; identical to SEQ ID NO: 340449
  chr9:139611146-139611398
  hypo
  bladder_and_urothelial vs. liver_bileduct

SEQ ID NO: 455488 - DNA, 206 bp, Homo sapiens; identical to SEQ ID NO: 454068
  chr9:139698453-139698659
  hypo
  bladder_and_urothelial vs. lymphoid_neoplasm,sarcoma, liver_bileduct,renal,non_cancer,multiple_myeloma, myeloid_neoplasm,uterine,melanoma

SEQ ID NO: 455489 - DNA, 21 bp, Homo sapiens
  chr9:139699253-139699274
  hypo
  bladder_and_urothelial vs. lymphoid_neoplasm,sarcoma, liver_bileduct,renal,non_cancer,multiple_myeloma, myeloid_neoplasm,uterine,melanoma
cggagaccctgaaatgtaagc

SEQ ID NO: 455490 - DNA, 74 bp, Homo sapiens
  chrX:44922889-44922963
  hypo
  bladder_and_urothelial vs. ovary
cgctgggaagtacagacactattttgataggcaataatcatataacaggaagtggaagtaatggaaacgtgcct

SEQ ID NO: 455491 - DNA, 17 bp, Homo sapiens
  chrX:44923014-44923031
  hypo
  bladder_and_urothelial vs. ovary
agcagcgcagaggagcc

SEQ ID NO: 455492 - DNA, 85 bp, Homo sapiens; identical to SEQ ID NO: 368940
  chrY:14532154-14532239
  hypo
  bladder_and_urothelial vs. ovary,breast,cervical

SEQ ID NO: 455493 - DNA, 624 bp, Homo sapiens; identical to SEQ ID NO: 454529
  chrY:16636060-16636684
  hypo
  bladder_and_urothelial vs. ovary,breast,cervical

SEQ ID NO: 455494 - DNA, 949 bp, Homo sapiens; identical to SEQ ID NO: 454530
  chrY:16636193-16637142
  hypo
  bladder_and_urothelial vs. ovary,breast,cervical

SEQ ID NO: 455495 - DNA, 191 bp, Homo sapiens
  chr1:1181916-1182107
  hyper
  breast vs. head_and_neck
cgcgggaggacgcgctggcggtggcgttggggggatctgcgcgctggccaggctgctgcgtcctctgtgcctcccgccgggccccgacgcccccgaggagcacgagctgcggcccgaggaggaccacgaccgcggcccaggcccagcgccgcatggctccgtcccgaggcggctcagcgcggcgagtctcg

SEQ ID NO: 455496 - DNA, 54 bp, Homo sapiens; identical to SEQ ID NO: 368955
  chr1:1182227-1182281
  hyper
  breast vs. head_and_neck

SEQ ID NO: 455497 - DNA, 443 bp, Homo sapiens; identical to SEQ ID NO: 344934
  chr1:2461988-2462431
  hyper
  breast vs. cervical

SEQ ID NO: 455498 - DNA, 220 bp, Homo sapiens
  chr1:6479997-6480217
  hyper
  breast vs. anorectal,upper_gi,myeloid_neoplasm,cervical, head_and_neck,colorectal,uterine
cgagctttaagggagcggctcgcccgccccgccccgccccgcggagtccggccgcccgctggtcccacctcctgcctttgttcctgcgcagggtggagccgggaggggagaccgcgacgcccccggggatcccgctccccgcctttgcgtcctgtctaccgcggggtggcggcccccagttttccccgagcacctgcgggagagtggtaaaggcgccatc

SEQ ID NO: 455499 - DNA, 54 bp, Homo sapiens
  chr1:6507073-6507127
  hyper
  breast vs. uterine,myeloid_neoplasm,thyroid,non_cancer, multiple_myeloma
cgctgagttcccaacgcagactgttggccccgcccaaatccacaggacaggtgg

SEQ ID NO: 455500 - DNA, 3 bp, Homo sapiens
  chr1:6509144-6509147
  hyper
  breast vs. sarcoma,anorectal,multiple_myeloma,cervical, thyroid,non_cancer,uterine,myeloid_neoplasm,prostate,lung
acc

SEQ ID NO: 455501 - DNA, 21 bp, Homo sapiens
  chr1:10949060-10949081
  hyper
  breast vs. ovary
gcaggcggcccctgggcggcc

SEQ ID NO: 455502 - DNA, 64 bp, Homo sapiens; identical to SEQ ID NO: 346318
  chr1:12123950-12124014
  hyper
  breast vs. lymphoid_neoplasm

SEQ ID NO: 455503 - DNA, 517 bp, Homo sapiens
  chr1:12226892-12227409
  hyper
  breast vs. ovary,bladder_and_urothelial,anorectal, colorectal
cgctggaggtatcggcccagcgatgctggagtggtcgggtcggaggcccagcagcgtctggggaggggcgtgggggaggcgtgtccaaggccggctggccccgccccgccccgccgcctggcctctggcccgctggggcgcgggctttcgctttcagtcgagggctagcgagcgcagcggagcctggagagaaggcgctgggctgcgagggcgcgagggcgcgagggcagggggcaaccggaccccgcccgcacccatggcgcccgtcgccgtctgggccgcgctggccgtcggactggagctctgggctgcggcgcacgccttgcccgcccaggtgggtgactcgcgcggcccacgggggacagccgccccgcatgtccacccggctggtgcgcagccttcgggtgcccgggccgcgctctcccggggcgctgtcacgggctgggaggctgggagtcccagtcgccgccccccatccgcatcagacacgcgcgcctctggggacccgctggggact

SEQ ID NO: 455504 - DNA, 207 bp, Homo sapiens
  chr1:12227438-12227645
  hyper
  breast vs. ovary,bladder_and_urothelial,anorectal, colorectal
caactctggcccccgaagcccctcttacccgcgtcgtgacaggggcgcaccctggttcctccgcgagcgcaggccggggcatttggggctgagcagcgggtcctgggcagacccccgctagacccgggacccctcttccctcaccccggcgactgccgcgacagcccttccctcccacgcggtggagaaggggctgtgccggggcgc

SEQ ID NO: 455505 - DNA, 247 bp, Homo sapiens
  chr1:12227162-12227409
  hyper
  breast vs. cervical,anorectal,ovary,colorectal, multiple_myeloma,bladder_and_urothelial,myeloid_neoplasm, non_cancer,upper_gi
cgtctgggccgcgctggccgtcggactggagctctgggctgcggcgcacgccttgcccgcccaggtgggtgactcgcgcggcccacgggggacagccgccccgcatgtccacccggctggtgcgcagccttcgggtgcccgggccgcgctctcccggggcgctgtcacgggctgggaggctgggagtcccagtcgccgccccccatccgcatcagacacgcgcgcctctggggacccgctggggact

SEQ ID NO: 455506 - DNA, 207 bp, Homo sapiens; identical to SEQ ID NO: 455504
  chr1:12227438-12227645
  hyper
  breast vs. cervical,anorectal,ovary,colorectal, multiple_myeloma,bladder_and_urothelial,myeloid_neoplasm, non_cancer,upper_gi

SEQ ID NO: 455507 - DNA, 210 bp, Homo sapiens
  chr1:19043143-19043353
  hyper
  breast vs. multiple_myeloma
aatacctccagcctgggtcctctctccacccactccattctctcaaaccctcatttccctctttgcctgcctcctcccatagctggcctcgcctctacccattctcttccccctaatctctctcattctcctctcctctctcattccgcacccaacaaacacctcttccccctccatcttcagcccctgcgcgccccccttgcccttgcc

SEQ ID NO: 455508 - DNA, 342 bp, Homo sapiens; identical to SEQ ID NO: 330719
  chr1:21563161-21563503
  hyper
  breast vs. lung

SEQ ID NO: 455509 - DNA, 80 bp, Homo sapiens
  chr1:23884853-23884933
  hyper
  breast vs. upper_gi
cggcaggagaggttcccggggtcccaggcagaacgggcgccagcacctgcgttctgggcgggggaggaaagaagaccaag

SEQ ID NO: 455510 - DNA, 67 bp, Homo sapiens
  chr1:23885004-23885071
  hyper
  breast vs. upper_gi
ttggtctgtacctccagctgataactccgcgccccacgctgcccccacccagttggcgccaaagacc

SEQ ID NO: 455511 - DNA, 468 bp, Homo sapiens; identical to SEQ ID NO: 356696
  chr1:23885100-23885568
  hyper
  breast vs. upper_gi

SEQ ID NO: 455512 - DNA, 2 bp, Homo sapiens
  chr1:30815842-30815844
  hyper
  breast vs. bladder_and_urothelial
cc

SEQ ID NO: 455513 - DNA, 262 bp, Homo sapiens; identical to SEQ ID NO: 452712
  chr1:32180427-32180689
  hyper
  breast vs. melanoma,colorectal,bladder_and_urothelial, uterine,ovary,upper_gi,pancreas_gallbladder,non_cancer,renal

SEQ ID NO: 455514 - DNA, 262 bp, Homo sapiens; identical to SEQ ID NO: 452712
  chr1:32180427-32180689
  hyper
  breast vs. melanoma,uterine,pancreas_gallbladder, bladder_and_urothelial,colorectal,multiple_myeloma,upper_gi, thyroid,renal,non_cancer

SEQ ID NO: 455515 - DNA, 23 bp, Homo sapiens
  chr1:32181494-32181517
  hyper
  breast vs. melanoma
ttctccttggaggtcccactggc

SEQ ID NO: 455516 - DNA, 1 bp, Homo sapiens
  chr1:32238716-32238717
  hyper
  breast vs. myeloid_neoplasm,non_cancer,thyroid, multiple_myeloma
c

SEQ ID NO: 455517 - DNA, 130 bp, Homo sapiens; identical to SEQ ID NO: 454093
  chr1:32410105-32410235
  hyper
  breast vs. upper_gi,colorectal,myeloid_neoplasm,thyroid, sarcoma,non_cancer,cervical,multiple_myeloma,ovary,renal

SEQ ID NO: 455518 - DNA, 3 bp, Homo sapiens
  chr1:35350989-35350992
  hyper
  breast vs. prostate,thyroid
cga

SEQ ID NO: 455519 - DNA, 21 bp, Homo sapiens
  chr1:36042458-36042479
  hyper
  breast vs. non_cancer,renal
cgggacgcggccgcgcggact

SEQ ID NO: 455520 - DNA, 237 bp, Homo sapiens; identical to SEQ ID NO: 349223
  chr1:41268046-41268283
  hyper
  breast vs. ovary

SEQ ID NO: 455521 - DNA, 1 bp, Homo sapiens
  chr1:41284752-41284753
  hyper
  breast vs. bladder_and_urothelial,multiple_myeloma, non_cancer,thyroid
c

SEQ ID NO: 455522 - DNA, 21 bp, Homo sapiens
  chr1:42128212-42128233
  hyper
  breast vs. head_and_neck
cgggatgccttcgcggccggg

SEQ ID NO: 455523 - DNA, 2 bp, Homo sapiens
  chr1:46951168-46951170
  hyper
  breast vs. multiple_myeloma
cg

SEQ ID NO: 455524 - DNA, 255 bp, Homo sapiens; identical to SEQ ID NO: 346339
  chr1:46957171-46957426
  hyper
  breast vs. myeloid_neoplasm

SEQ ID NO: 455525 - DNA, 32 bp, Homo sapiens
  chr1:52194847-52194879
  hyper
  breast vs. pancreas_gallbladder,lung
cgatgtctcaccggattaataaaaatataggc

SEQ ID NO: 455526 - DNA, 323 bp, Homo sapiens
  chr1:52194968-52195291
  hyper
  breast vs. pancreas_gallbladder,lung
tccgttatcaaggtgaaactccggggaccaggctccacagctgccataaactggatggcacgttagaagccggtgggtgtaggtgaggcacgctggcgcccgcgggcccttctccagccgctacccagtgggaatccgcggggctgaagccccgaaaccaggctgagcgtcccagagcgcaacctccctttcccccagcagcgccggcgccgcagaagccgcgtgtccccaggcgcactcccccaaggtgaacccccgccccccacggaggcggctgggtcgcgggtctgggcggggcgctccggacgccctcccgccgctgc

SEQ ID NO: 455527 - DNA, 387 bp, Homo sapiens
  chr1:52195348-52195735
  hyper
  breast vs. pancreas_gallbladder,lung
cgccaatcgtctgcctctcacctcctacagcaggtgacccatggccaatcgccaggggtctctttgccaggagccgccagggccagccaatcggggcgacccctccgccggggaggggacgggaaaggggtggggggtgaagggggtgaagggggtgtcccgggggacgggctgaacctcagtcaggaccgcctgcaccgcagtccggggatcgggtcgaggggagaagaaaaaggggtgctcgggagcagcccccggctacctcccctggaggcacagagggcgggggccttggcgaatggctttcttgctggccacttgcggagtgagtagaccccgagggtctgggagaggggccggcccctacccctgagtccccggggtccc

SEQ ID NO: 455528 - DNA, 137 bp, Homo sapiens; identical to SEQ ID NO: 452716
  chr1:53168691-53168828
  hyper
  breast vs. upper_gi

SEQ ID NO: 455529 - DNA, 1 bp, Homo sapiens
  chr1:60539349-60539350
  hyper
  breast vs. multiple_myeloma
c

SEQ ID NO: 455530 - DNA, 216 bp, Homo sapiens; identical to SEQ ID NO: 349250
  chr1:60539399-60539615
  hyper
  breast vs. multiple_myeloma

SEQ ID NO: 455531 - DNA, 61 bp, Homo sapiens
  chr1:66999412-66999473
  hyper
  breast vs. sarcoma,non_cancer,multiple_myeloma, myeloid_neoplasm
ggaattattaagtttttcttaaaaaaacaaaaaaagaaagaaagaaagaaaaagaaaagaa

SEQ ID NO: 455532 - DNA, 36 bp, Homo sapiens; identical to SEQ ID NO: 349259
  chr1:66999673-66999709
  hyper
  breast vs. sarcoma,non_cancer,multiple_myeloma, myeloid_neoplasm

SEQ ID NO: 455533 - DNA, 4 bp, Homo sapiens
  chr1:78511432-78511436
  hyper
  breast vs. sarcoma,pancreas_gallbladder,colorectal
cgtg

SEQ ID NO: 455534 - DNA, 78 bp, Homo sapiens
  chr1:85773944-85774022
  hyper
  breast vs. pancreas_gallbladder,bladder_and_urothelial, upper_gi,colorectal,melanoma
cgccctttactcagtaaggagggcccaggcgtccaaagcccaccagggggcagcggcggcattcttagccccacttct

SEQ ID NO: 455535 - DNA, 112 bp, Homo sapiens; identical to SEQ ID NO: 346347
  chr1:85774083-85774195
  hyper
  breast vs. pancreas_gallbladder,bladder_and_urothelial, upper_gi,colorectal,melanoma

SEQ ID NO: 455536 - DNA, 171 bp, Homo sapiens; identical to SEQ ID NO: 330889
  chr1:91170461-91170632
  hyper

SEQ ID NO: 455537 - DNA, 61 bp, Homo sapiens
  chr1:91185065-91185126
  hyper
  breast vs. multiple_myeloma
aaaaaaaaaaaaaaaaaaaaaaacagcactacttggagggtgggttgagctgtttctcatc

SEQ ID NO: 455538 - DNA, 171 bp, Homo sapiens
  chr1:92948154-92948325
  hyper
  breast vs. multiple_myeloma,ovary
cgtcactggccagctccgcgcaaacgaatctaagcgacaagcagctagggtcctgccgcctgggatggaggcagcagccccagcgggcaagctgtccaagtcccagagaagccggatgcctccttcccctacgaatcagctcccttctcccggaaagactctccaactccc

SEQ ID NO: 455539 - DNA, 142 bp, Homo sapiens; identical to SEQ ID NO: 344962
  chr1:92949466-92949608
  hyper
  breast vs. multiple_myeloma,non_cancer,myeloid_neoplasm, bladder_and_urothelial

SEQ ID NO: 455540 - DNA, 27 bp, Homo sapiens
  chr1:92949665-92949692
  hyper
cggggggaggggggaacagaacacaag

SEQ ID NO: 455541 - DNA, 228 bp, Homo sapiens; identical to SEQ ID NO: 452729
  chr1:92950207-92950435
  hyper

SEQ ID NO: 455542 - DNA, 228 bp, Homo sapiens; identical to SEQ ID NO: 452729
  chr1:92950207-92950435
  hyper

SEQ ID NO: 455543 - DNA, 148 bp, Homo sapiens; identical to SEQ ID NO: 349288
  chr1:95428574-95428722
  hyper
  breast vs. prostate

SEQ ID NO: 455544 - DNA, 289 bp, Homo sapiens; identical to SEQ ID NO: 452731
  chr1:101702081-101702370
  hyper
  breast vs. sarcoma

SEQ ID NO: 455545 - DNA, 152 bp, Homo sapiens; identical to SEQ ID NO: 452732
  chr1:101702796-101702948
  hyper
  breast vs. sarcoma

SEQ ID NO: 455546 - DNA, 393 bp, Homo sapiens; identical to SEQ ID NO: 452733
  chr1:101702796-101703189
  hyper
  breast vs. sarcoma

SEQ ID NO: 455547 - DNA, 185 bp, Homo sapiens
  chr1:101774910-101775095
  hyper
  breast vs. head_and_neck
cgcagcaaacgggaaaataccaatttagctctgtttgctgcagcttcgcagctttaccaggagagggcgccgacggacctgacttttgccttgcctcgcagtagagcccaactagagggtaaacagcagccacagtaagttctagctgttgcagaaataaattacaaatacatgtaggaaaaagg

SEQ ID NO: 455548 - DNA, 25 bp, Homo sapiens
  chr1:101775488-101775513
  hyper
  breast vs. head_and_neck
ctcttgtgttgcacttgtgtccccc

SEQ ID NO: 455549 - DNA, 244 bp, Homo sapiens; identical to SEQ ID NO: 346359
  chr1:103574168-103574412
  hyper
  breast vs. multiple_myeloma,prostate,myeloid_neoplasm, non_cancer

SEQ ID NO: 455550 - DNA, 66 bp, Homo sapiens
  chr1:110672768-110672834
  hyper
  breast vs. bladder_and_urothelial,multiple_myeloma, anorectal,non_cancer,cervical,myeloid_neoplasm,head_and_neck, uterine,renal
cggctcccacgcctcttgctggggagggtggctcatttttcacgggtgccgcgtgactttccagac

SEQ ID NO: 455551 - DNA, 818 bp, Homo sapiens; identical to SEQ ID NO: 330937
  chr1:113498720-113499538
  hyper
  breast vs. upper_gi

SEQ ID NO: 455552 - DNA, 5 bp, Homo sapiens
  chr1:147775358-147775363
  hyper
cggct

SEQ ID NO: 455553 - DNA, 29 bp, Homo sapiens
  chr1:147775495-147775524
  hyper
cggcaagatgtgcctctcaggttttccga

SEQ ID NO: 455554 - DNA, 84 bp, Homo sapiens; identical to SEQ ID NO: 330956
  chr1:150586185-150586269
  hyper
  breast vs. liver_bileduct

SEQ ID NO: 455555 - DNA, 26 bp, Homo sapiens
  chr1:151693837-151693863
  hyper
  breast vs. ovary,myeloid_neoplasm,non_cancer,uterine, upper_gi,sarcoma,bladder_and_urothelial,thyroid,cervical,lung
cgggaaaggcgatcctttagagaccc

SEQ ID NO: 455556 - DNA, 79 bp, Homo sapiens; identical to SEQ ID NO: 197752
  chr1:151694406-151694485
  hyper
  breast vs. ovary,myeloid_neoplasm,non_cancer,uterine, upper_gi,sarcoma,bladder_and_urothelial,thyroid,cervical,lung

SEQ ID NO: 455557 - DNA, 2 bp, Homo sapiens
  chr1:153651442-153651444
  hyper
  breast vs. anorectal
cg

SEQ ID NO: 455558 - DNA, 155 bp, Homo sapiens; identical to SEQ ID NO: 344973
  chr1:155043706-155043861
  hyper
  breast vs. lung,head_and_neck,upper_gi,colorectal, pancreas_gallbladder,bladder_and_urothelial,uterine,cervical, anorectal,ovary,multiple_myeloma,thyroid,prostate,renal, non_cancer,sarcoma

SEQ ID NO: 455559 - DNA, 97 bp, Homo sapiens
  chr1:156215233-156215330
  hyper
  breast vs. anorectal
cgatgcctccagtgctgttcgagagcagtgaggtgtgtcctctcctgtgcctccgccttccccgtccccactggaggggcctgggaacccaccggga

SEQ ID NO: 455560 - DNA, 27 bp, Homo sapiens
  chr1:156215871-156215898
  hyper
  breast vs. anorectal
tctgagctcaaggccgcggcctggggc

SEQ ID NO: 455561 - DNA, 43 bp, Homo sapiens
  chr1:156390054-156390097
  hyper
  breast vs. thyroid,non_cancer,multiple_myeloma
cgcggctctagcccctcgctcaagcctctccctcccgcccgtg

SEQ ID NO: 455562 - DNA, 104 bp, Homo sapiens
  chr1:158083079-158083183
  hyper
  breast vs. uterine,ovary
cgggcaaaggcaccgagctcttggtgtggttctcctgggataagcccacagtcacaaacttgtgcaggaatgggggtaccgggaagcagcccggtgttccaagc

SEQ ID NO: 455563 - DNA, 157 bp, Homo sapiens
  chr1:160040177-160040334
  hyper
  breast vs. bladder_and_urothelial,ovary
cgtgcggggcaaggaagcggagacccagacagctgcaggcgcagagagaaatatccaaagacagagacccagacagacccggggagaaagagagatgaagagacgatatgcgaaacgataggagctgagctggcagggtgacaggggaagggagaag

SEQ ID NO: 455564 - DNA, 52 bp, Homo sapiens; identical to SEQ ID NO: 369284
  chr1:160040504-160040556
  hyper
  breast vs. bladder_and_urothelial,ovary

SEQ ID NO: 455565 - DNA, 75 bp, Homo sapiens; identical to SEQ ID NO: 330994
  chr1:160040592-160040667
  hyper
  breast vs. ovary

SEQ ID NO: 455566 - DNA, 93 bp, Homo sapiens; identical to SEQ ID NO: 346376
  chr1:161276123-161276216
  hyper
  breast vs. multiple_myeloma,anorectal,thyroid,non_cancer, myeloid_neoplasm,prostate,lymphoid_neoplasm

SEQ ID NO: 455567 - DNA, 346 bp, Homo sapiens; identical to SEQ ID NO: 331030
  chr1:171220542-171220888
  hyper
  breast vs. lung

SEQ ID NO: 455568 - DNA, 23 bp, Homo sapiens
  chr1:201915641-201915664
  hyper
  breast vs. ovary
cgcagcagcctccctgaagccca

SEQ ID NO: 455569 - DNA, 289 bp, Homo sapiens; identical to SEQ ID NO: 356975
  chr1:201915739-201916028
  hyper
  breast vs. ovary

SEQ ID NO: 455570 - DNA, 198 bp, Homo sapiens
  chr1:220700617-220700815
  hyper
  breast vs. ovary
cgcgggtgcctacaggatgtcttgaggcaggtgggtggaagtgtgaggaagccacctggaagagggaggacagggcccaaatcagacacagctctccatcctccctaaacaggctcgcctaagtgacacttccttgtgtcccaggaagtgacgatcagccagtgtagatgttgtgactcgcgggtctcacccactccg

SEQ ID NO: 455571 - DNA, 936 bp, Homo sapiens; identical to SEQ ID NO: 331128
  chr1:225614356-225615292
  hyper
  breast vs. lung,upper_gi

SEQ ID NO: 455572 - DNA, 18 bp, Homo sapiens
  chr1:229543536-229543554
  hyper
  breast vs. thyroid,non_cancer,uterine
cactcacgcggctctccc

SEQ ID NO: 455573 - DNA, 103 bp, Homo sapiens; identical to SEQ ID NO: 349425
  chr1:229543603-229543706
  hyper
  breast vs. thyroid,non_cancer,uterine

SEQ ID NO: 455574 - DNA, 588 bp, Homo sapiens
  chr1:231175062-231175650
  hyper
  breast vs. ovary,colorectal,lung,melanoma
cgcggggctgagggacccggccgcctccctcgcccggggtgcgcgtctgctttcgcagccatctgtgcgccggggccatcccgcggtaatcggatcacggacgcgcggcctggggcgccggaaagggggccgggctgttccaatctgctgtctacactggcggcggacaaaagttgtcctcttcgtggtaggaaaacgcaatcgcgttaatccgttgggccgctgtgaaagcctttcccccaccgggaaggtctgtttcactcggggagaggtgacaaggccgcccccgcccccaggccaggcacgaaccccgcacagcgcttccgggcgcccaggtttccgagccagcggggccggactgagggcgccgggcataagaaagccgccctctgcgcgcggggctctcccgcgggggttccaatcgtgggcacggagcacgcgagaaaaatgggggtcgttgggaggacggcgccggcgcctggggcggaggagcccgaaagggcgggtgggcgcggggacttccggacagagcgcggtccccgcgaactttcccgggacggcgagcccggccgggaagagccccagctc

SEQ ID NO: 455575 - DNA, 286 bp, Homo sapiens
  chr1:231175692-231175978
  hyper
  breast vs. ovary,colorectal,lung,melanoma
cggcgtccaggttgggaggcttggcgggcagcgctgccgcccgggccccgccgccgcccgggcccccgcggctcagctcgtcctggatgcgcgacttctgcgcgtacagccgctccaggtgccgccagcccccagacgcgccgccgcccgacgccgagtgcagcagcccgctcaagctctttggcagcgggggcagcccgtccacccgcagcccccggaccgcgccgttgcccgcggccccgggcgccgcccgggccccactcatcgcgccgcggcccggccacgc

SEQ ID NO: 455576 - DNA, 166 bp, Homo sapiens
  chr1:231175484-231175650
  hyper
  breast vs. ovary,lung,colorectal,prostate
cgtgggcacggagcacgcgagaaaaatgggggtcgttgggaggacggcgccggcgcctggggcggaggagcccgaaagggcgggtgggcgcggggacttccggacagagcgcggtccccgcgaactttcccgggacggcgagcccggccgggaagagccccagctc

SEQ ID NO: 455577 - DNA, 709 bp, Homo sapiens; identical to SEQ ID NO: 349428
  chr1:231175692-231176401
  hyper
  breast vs. ovary,lung,colorectal,prostate

SEQ ID NO: 455578 - DNA, 28 bp, Homo sapiens
  chr10:6018609-6018637
  hyper
  breast vs. upper_gi
cgggacaaaacccctaggaatcgctcat

SEQ ID NO: 455579 - DNA, 298 bp, Homo sapiens; identical to SEQ ID NO: 350977
  chr10:6018666-6018964
  hyper
  breast vs. upper_gi

SEQ ID NO: 455580 - DNA, 667 bp, Homo sapiens
  chr10:6621854-6622521
  hyper
  breast vs. ovary
cgcaggccccctttcgttcaggtgagaaggaaaagggagaagaaaggaggaagcgcccccaggccggcggcccccacccggctaaggtcgccagcatcccgcatcccgtgcgacctgcgtcccagaaacccagcggggaaattcttcccggtgcgctcttgcgcccgcttggttccatttcctactccgcctgctcacccggcagccctcaccccttcccggaggctctccgaggggcccgggtagcccttctcgccacgggtctcggcccctccagcccgctccctcccggcggcggcgcggggcgcggggccctacctggagcgagcacggcgccgctgctgcccggtggcgctgggactgcgcggggactgcgcggggactgcgcggggactggcggggctggcggggctggcggggctggcggggctggcgggcccggcgcactgcgggtgcgcctagaaggcggtgcccgccagggggcgctcgccagcctccccgccagcccggcctcccgggacccggcacctctagccagggacgcgcgctcggtcccccgccgtgcgcccccggtcccgcgcccaggctcccgcccctggcctccttaccagccacttgtcgcccagctgcgaactggagcgggaggcggcggccggagggcccagga

SEQ ID NO: 455581 - DNA, 87 bp, Homo sapiens; identical to SEQ ID NO: 350979
  chr10:6622706-6622793
  hyper
  breast vs. ovary

SEQ ID NO: 455582 - DNA, 124 bp, Homo sapiens; identical to SEQ ID NO: 350983
  chr10:8086048-8086172
  hyper
  breast vs. multiple_myeloma,thyroid

SEQ ID NO: 455583 - DNA, 873 bp, Homo sapiens; identical to SEQ ID NO: 347076
  chr10:21815648-21816521
  hyper
  breast vs. head_and_neck,bladder_and_urothelial,uterine, cervical,colorectal,lung

SEQ ID NO: 455584 - DNA, 32 bp, Homo sapiens; identical to SEQ ID NO: 345349
  chr10:22626103-22626135
  hyper
  breast vs. prostate

SEQ ID NO: 455585 - DNA, 253 bp, Homo sapiens
  chr10:31609416-31609669
  hyper
  breast vs. lymphoid_neoplasm,sarcoma,multiple_myeloma, renal
tgggggagggggcggacggaccgacggacgcgcggggctgctacttgcaccgcagctgcagtgtttattgatttgtgctgctgtgccaagggaaacacacacccctctgcctggcgtgagagttaaaaaaaaagagagacagcccgagggatcgagacctgaacatgtggtggtggttgcacagtcgccttttccagtttggagagacgttgtaagttgattgtatttctggttatctcggggcgatgctatg

SEQ ID NO: 455586 - DNA, 35 bp, Homo sapiens
  chr10:43600323-43600358
  hyper
  breast vs. bladder_and_urothelial
gcccccttcccgaggaaagcggctggcccggtccc

SEQ ID NO: 455587 - DNA, 136 bp, Homo sapiens
  chr10:43697752-43697888
  hyper
  breast vs. thyroid,non_cancer,multiple_myeloma,anorectal, sarcoma,renal
cgtctgccccctgtggttgaaagggcgacagcgctgaaaggggtgtgaccccgaggggaggcgacgcgctcccgcgccctagtccacaggcatgcacgaccccacccagcacagggcctagggcatggggactggc

SEQ ID NO: 455588 - DNA, 125 bp, Homo sapiens
  chr10:43698155-43698280
  hyper
  breast vs. thyroid,non_cancer,multiple_myeloma,anorectal, sarcoma,renal
aaaccagcggattccgcccacgttgccagcctaggccccccaccacccgctcccaccacgcccctaacccggacccaacccacagctccagcccagacctcaccccagcctggtgtggcgtcacg

SEQ ID NO: 455589 - DNA, 147 bp, Homo sapiens
  chr10:73846836-73846983
  hyper
  breast vs. myeloid_neoplasm,thyroid,non_cancer
cggcgtcgcctctggcgcatccgggcccatcccccacagcacccccaacgatctcggggtccagccacaccctccgcccgccctgcctcacccctgcttccccagcccccaacccggcccggccgagaggaaggagccagccccgcc

SEQ ID NO: 455590 - DNA, 164 bp, Homo sapiens; identical to SEQ ID NO: 351056
  chr10:73847427-73847591
  hyper
  breast vs. myeloid_neoplasm,thyroid,non_cancer

SEQ ID NO: 455591 - DNA, 74 bp, Homo sapiens
  chr10:75670652-75670726
  hyper
  breast vs. head_and_neck
cggccaggtgcatgggaggaagcacggagaatttacaagcctctcgattcctcagtccagacgctgttgggtcc

SEQ ID NO: 455592 - DNA, 45 bp, Homo sapiens; identical to SEQ ID NO: 359601
  chr10:75670755-75670800
  hyper
  breast vs. head_and_neck

SEQ ID NO: 455593 - DNA, 57 bp, Homo sapiens; identical to SEQ ID NO: 345362
  chr10:93647662-93647719
  hyper
  breast vs. ovary

SEQ ID NO: 455594 - DNA, 231 bp, Homo sapiens
  chr10:98272415-98272646
  hyper
  breast vs. pancreas_gallbladder,colorectal,cervical
cgtgagcgtgagcacccctctgtccgtgctggaactgccccacactcatcagcttgctggaacatgcgcttggcccttcggaggctaacgcttcaacgactccagctcggaagccgctcccctcaggactcacgagccgatcagtggccccgaggaagcgggagctgcagcgcccgggcggcgattgcgcccgaaaggcccgtacgtcctggggcgccgcttcctggaggg

SEQ ID NO: 455595 - DNA, 420 bp, Homo sapiens
  chr10:98272768-98273188
  hyper
  breast vs. pancreas_gallbladder,colorectal,cervical
tgcccgctgtgacgcttttctttttaaaatctcccaagagtaaccacagatcttgggaaactttgcgcgaaacttaaaaatgctgtgaaatcggagccaggaactccatctgagcctcggagcgccgcgcccagtccagctcttctgctccggcccggagcgtctggcggtggccagtgctgcccactcgctgtcaggcggccctggcacccaccccggcccctgggcgccctctcggcctctggcacccgctctgattcgctttgggaacgcgccagctgtcgccccccggtgcgcaccgcaaacctggggccgggacatcccagcctcggagtggtttttaagcaattcctcggaggcattgtcttccgggggagccggggatctcaggggaggggaggggagacccgccccatagac

SEQ ID NO: 455596 - DNA, 8 bp, Homo sapiens
  chr10:102490242-102490250
  hyper
  breast vs. head_and_neck
cgctgcct

SEQ ID NO: 455597 - DNA, 331 bp, Homo sapiens
  chr10:102490316-102490647
  hyper
  breast vs. head_and_neck
cgcagtgatttattcgcttcacccggcggaatcaggtgctgaaccgagccccggaacgagagaacagatttctcccaggaaaggttttgtgaactaaacgatgctaattacggggtgggggatgcgtcgcccgggaaggggaggcgcgcggggccgagcgcggcctgggaggggagagaccggggctggccgaggccctcccggggcgcctcccctgcacctctcgccctggctttcgcctttccctgggaactttcccgtctgagttaactattaaccaccggcgagaggcaattttcttcggaatttcagcgatttccttttcgcagtg

SEQ ID NO: 455598 - DNA, 414 bp, Homo sapiens; identical to SEQ ID NO: 359652
  chr10:102490715-102491129
  hyper
  breast vs. head_and_neck

SEQ ID NO: 455599 - DNA, 34 bp, Homo sapiens
  chr10:102995986-102996020
  hyper
  breast vs. myeloid_neoplasm,thyroid,non_cancer
cgttaatggtagtcagctccctccctttcacaga

SEQ ID NO: 455600 - DNA, 21 bp, Homo sapiens
  chr10:103044414-103044435
  hyper
  breast vs. myeloid_neoplasm,thyroid,multiple_myeloma, non_cancer,sarcoma
tcccctctatgggccccgccc

SEQ ID NO: 455601 - DNA, 130 bp, Homo sapiens
  chr10:103985878-103986008
  hyper
  breast vs. anorectal
cgttttacgggagaaaaggctggggaagtgggcgggcgatggcctacgacgggacttggggcggggtgtgcgaaacgcctggcaggcgggcccttgagtatgaccaatcagaatgcggactgcgtcccag

SEQ ID NO: 455602 - DNA, 16 bp, Homo sapiens
  chr10:103986220-103986236
  hyper
  breast vs. anorectal
tcgccccgaggttcac

SEQ ID NO: 455603 - DNA, 737 bp, Homo sapiens; identical to SEQ ID NO: 334066
  chr10:111767130-111767867
  hyper
  breast vs. upper_gi,ovary,pancreas_gallbladder,lung, bladder_and_urothelial

SEQ ID NO: 455604 - DNA, 240 bp, Homo sapiens; identical to SEQ ID NO: 454122
  chr10:118891774-118892014
  hyper
  breast vs. multiple_myeloma,thyroid

SEQ ID NO: 455605 - DNA, 138 bp, Homo sapiens; identical to SEQ ID NO: 345371
  chr10:122708760-122708898
  hyper
  breast vs. multiple_myeloma

SEQ ID NO: 455606 - DNA, 129 bp, Homo sapiens; identical to SEQ ID NO: 351149
  chr11:8615887-8616016
  hyper
  breast vs. ovary

SEQ ID NO: 455607 - DNA, 57 bp, Homo sapiens
  chr11:35547041-35547098
  hyper
  breast vs. cervical
cggacgctactcacagtacctcttggcaaggacgagatgagaaggagctgaagaaaa

SEQ ID NO: 455608 - DNA, 209 bp, Homo sapiens
  chr11:35547127-35547336
  hyper
  breast vs. cervical
ctccatccttgccgcggctggtgcccgagcgtctactggggagggagaggagggacccagggaggccgggggcaggcgggttttacagggacctccccgagccccagctgagcgggagctcgggtttcagctcgccaggctctcccatcctcatctgaggggaaccaccttcagccagagcgacgtcagcccaaacctctcctctctgc

SEQ ID NO: 455609 - DNA, 18 bp, Homo sapiens
  chr11:35547575-35547593
  hyper
  breast vs. cervical
ccctctctgactgcacgc

SEQ ID NO: 455610 - DNA, 87 bp, Homo sapiens; identical to SEQ ID NO: 454128
  chr11:47208495-47208582
  hyper
  breast vs. uterine,thyroid,non_cancer,myeloid_neoplasm, upper_gi,multiple_myeloma,ovary

SEQ ID NO: 455611 - DNA, 20 bp, Homo sapiens
  chr11:60718609-60718629
  hyper
  breast vs. thyroid,multiple_myeloma,non_cancer,cervical
cggcgacgcgggcatctctc

SEQ ID NO: 455612 - DNA, 28 bp, Homo sapiens
  chr11:64479004-64479032
  hyper
  breast vs. colorectal
aggacccgcccgcacttcaccacttcac

SEQ ID NO: 455613 - DNA, 550 bp, Homo sapiens
  chr11:64512349-64512899
  hyper
  breast vs. ovary,anorectal,multiple_myeloma,non_cancer, myeloid_neoplasm,thyroid
cgcccccgcgccaggctgccccctcccccctccgcccctgcgcggagctccgcaccgccggctgcgccacccccaccgggggctccctctcgccccgcacgcggcggtccctgcggcagcttaacccctcccctgccgcgccgcccgggaggccagggccgcgggcggggggctgcgccactagctgccccgagggcgggcgaccggaggccccgccgcccgggacgcggaggggggaccgaaacgaagagcccctcccccaaccgcggacgccccagtgccccccgccctgcctgggtgtcgggcggaggaagccgggaggggcaggaagcggactgcggtggggaaggggcgccccgcccagcccccagctcgggttcctgttttcgagacaaaccgttcccatggggctaacccggcccgggaccgggcgtcttcctgcaggcagcgggtggcacaggcctagtggaggtcgggggcgtggggacagctggtccttgagatagtctgggggatgggctaggacaagatgggaatattttggggagag

SEQ ID NO: 455614 - DNA, 61 bp, Homo sapiens; identical to SEQ ID NO: 345394
  chr11:64513748-64513809
  hyper
  breast vs. multiple_myeloma,ovary,anorectal,non_cancer, thyroid,myeloid_neoplasm,uterine,cervical

SEQ ID NO: 455615 - DNA, 262 bp, Homo sapiens; identical to SEQ ID NO: 334296
  chr11:65582723-65582985
  hyper
  breast vs. liver_bileduct

SEQ ID NO: 455616 - DNA, 801 bp, Homo sapiens; identical to SEQ ID NO: 345395
  chr11:66079395-66080196
  hyper
  breast vs. upper_gi,pancreas_gallbladder,cervical, bladder_and_urothelial,colorectal,lung,uterine,prostate,ovary

SEQ ID NO: 455617 - DNA, 796 bp, Homo sapiens
  chr11:66079700-66080496
  hyper
  breast vs. upper_gi,pancreas_gallbladder,lung,colorectal, bladder_and_urothelial,cervical,ovary,uterine,melanoma,prostate
cgtgcgataagaggctcgctcggtagcgctcttcgcagagccgtatttgtgcgctacgccgcagccagggcgctctgggtgggcgggactccagggcccccaggggcgtggcttgcatctttcgtgggcggccccgggggcggggctccgtgtaggtgaaccgctacctccgctcgatgtgtgaggtgtgacagtcctacgagggcgcagttcttccacttttgtgagcttgagagggggcggagcttgtagctggggacggagcctgaagaggaggttgaggggaacttcacacgtttccctggagggcggagtttacatcatcccccaacagagttaagacctctgagggattccctgcagtgtccagggctctgtgaggcgaagcttgcagttgtgttgggcggggcctgtagcgccgcgtgaagagaatgtgtaaactcggggcgaagttcatacctcctagaagccgagactaatagttccgccaatctgcgcgcgccgagcggaggaggtggggcttgtaggttgtgggcgggggactgggcggggccaagagggcagggggcgggcacaatcgctgctggaatctttgagttggcaggggcggggcttgtggctttgtgggcggggcctctggagagctcccgggggctctcttctgttctgcagcgagtaggcgtggctcgtagctcccaggtccgggctgataccgctggagtatgcagttcgccgccgcgcccgaatgaggcggggcctgcgagtaagtgggctgagcccgggctgggcgcaggcc

SEQ ID NO: 455618 - DNA, 2 bp, Homo sapiens
  chr11:67232076-67232078
  hyper
  breast vs. liver_bileduct
cg

SEQ ID NO: 455619 - DNA, 120 bp, Homo sapiens
  chr11:67232283-67232403
  hyper
  breast vs. liver_bileduct
caacaacaggaagcccggcacgaagaagatggcgctggagacacctgcgggagggaccagagcccggtcagggcgagggggcggaggcttcgaggccttccgggctgccgctgactgccc

SEQ ID NO: 455620 - DNA, 127 bp, Homo sapiens; identical to SEQ ID NO: 345397
  chr11:67232464-67232591
  hyper
  breast vs. liver_bileduct

SEQ ID NO: 455621 - DNA, 58 bp, Homo sapiens
  chr11:69516911-69516969
  hyper
  breast vs. cervical,uterine
cggctctgggtgggagtcagcgtccagcgtgccgaccaccccctttctctgcagtcct

SEQ ID NO: 455622 - DNA, 201 bp, Homo sapiens
  chr11:69517461-69517662
  hyper
  breast vs. cervical,uterine
gcgcatctgcgtctaagccacaccgtgctcctggtagattaaaaattaattctaaaaaaaaaatctctcctatcccaaatgcactgttttctgccttgcttgacaattgatttgtttttaaaggaaagttatgggtagatcctcttttttctttcccattctttttttcttcttttatactggagggagggaaacggaggc

SEQ ID NO: 455623 - DNA, 162 bp, Homo sapiens
  chr11:74178245-74178407
  hyper
cgatcactgcgctcgggaggatcggggaggatccgggaggactagcttggtatttgcagcgcccacccctcccccactccccctcggttccacagtctcacggagagcgcgccgtggcccttggaagggaggcgggaagacccctcatttccaccccaggcc

SEQ ID NO: 455624 - DNA, 121 bp, Homo sapiens
  chr11:74178470-74178591
  hyper
cgtttgctcgctggacacggcgccctctgaccgagggtggcccaagcgctgcgaccctgtgcattccaccagccccgttccactccgcgggtgcccagcaccgcccagcgcgctctctggc

SEQ ID NO: 455625 - DNA, 76 bp, Homo sapiens
  chr11:76033216-76033292
  hyper
  breast vs. bladder_and_urothelial,anorectal, pancreas_gallbladder,multiple_myeloma
ggcccgtccgcaaccgaagaggaggcgaccgcagcctggaaaagaagagcccccagctgtttccttccacccgggc

SEQ ID NO: 455626 - DNA, 14 bp, Homo sapiens
  chr11:76033342-76033356
  hyper
  breast vs. bladder_and_urothelial,anorectal, pancreas_gallbladder,multiple_myeloma
cgcctgtgctggcg

SEQ ID NO: 455627 - DNA, 70 bp, Homo sapiens
  chr11:89224244-89224314
  hyper
  breast vs. ovary
cgaattaagacaaaacttccacttccagcttcccacccgtgcacgctcagagaatgaatcaaaatcactg

SEQ ID NO: 455628 - DNA, 11 bp, Homo sapiens
  chr11:89224788-89224799
  hyper
  breast vs. ovary
aggcgtccccc

SEQ ID NO: 455629 - DNA, 886 bp, Homo sapiens; identical to SEQ ID NO: 334351
  chr11:96122370-96123256
  hyper
  breast vs. lung,upper_gi,head_and_neck

SEQ ID NO: 455630 - DNA, 13 bp, Homo sapiens
  chr11:119613444-119613457
  hyper
  breast vs. bladder_and_urothelial,multiple_myeloma,ovary, non_cancer,myeloid_neoplasm,thyroid,uterine,anorectal
ggcttatcagcgc

SEQ ID NO: 455631 - DNA, 136 bp, Homo sapiens
  chr11:128391758-128391894
  hyper
  breast vs. upper_gi,pancreas_gallbladder,ovary, bladder_and_urothelial,colorectal,uterine,renal,melanoma,lung, sarcoma,anorectal,prostate
cggcctctggccgagagcttgggtgggggcctcggccgtcgccactcacccggggaggggaaaagctccagatcgactttttccgtcttgatgatggtgagagtcggcttgagatcgacggccgccttcatggtgc

SEQ ID NO: 455632 - DNA, 623 bp, Homo sapiens; identical to SEQ ID NO: 345404
  chr11:128392116-128392739
  hyper
  breast vs. upper_gi,pancreas_gallbladder,ovary, bladder_and_urothelial,colorectal,uterine,renal,melanoma,lung, sarcoma,anorectal,prostate

SEQ ID NO: 455633 - DNA, 17 bp, Homo sapiens
  chr11:133938756-133938773
  hyper
  breast vs. sarcoma,melanoma
cgccaagttcattgaaa

SEQ ID NO: 455634 - DNA, 161 bp, Homo sapiens; identical to SEQ ID NO: 345407
  chr11:133939437-133939598
  hyper
  breast vs. sarcoma,melanoma

SEQ ID NO: 455635 - DNA, 134 bp, Homo sapiens
  chr12:708894-709028
  hyper
  breast vs. liver_bileduct,pancreas_gallbladder,lung
cggaggccctcccagccccacgactgcgcttggcctactgcctctcctcctcagcttggttggacctgcaccccagcacgcccggggggctcacattcctccccgagatgccgccactgattcaccatggtgcc

SEQ ID NO: 455636 - DNA, 182 bp, Homo sapiens; identical to SEQ ID NO: 351282
  chr12:709062-709244
  hyper
  breast vs. liver_bileduct,pancreas_gallbladder,lung

SEQ ID NO: 455637 - DNA, 86 bp, Homo sapiens; identical to SEQ ID NO: 452813
  chr12:4377809-4377895
  hyper
  breast vs. lymphoid_neoplasm,ovary,myeloid_neoplasm, non_cancer,thyroid,colorectal

SEQ ID NO: 455638 - DNA, 142 bp, Homo sapiens; identical to SEQ ID NO: 452814
  chr12:4378558-4378700
  hyper
  breast vs. lymphoid_neoplasm,ovary,myeloid_neoplasm, non_cancer,thyroid,colorectal

SEQ ID NO: 455639 - DNA, 245 bp, Homo sapiens; identical to SEQ ID NO: 452815
  chr12:4378558-4378803
  hyper
  breast vs. lymphoid_neoplasm,myeloid_neoplasm,non_cancer, thyroid,colorectal,ovary,melanoma

SEQ ID NO: 455640 - DNA, 88 bp, Homo sapiens; identical to SEQ ID NO: 454142
  chr12:4378715-4378803
  hyper
  breast vs. colorectal,melanoma,non_cancer

SEQ ID NO: 455641 - DNA, 247 bp, Homo sapiens
  chr12:4379920-4380167
  hyper
  breast vs. ovary,colorectal
aagaaagtgtgcacttttgcctagaaggcaacatgcgttttcccgcgtgctaggtggagtgcattttaacaagacattagggttttaacacatggctggagtggcgaccaaaagggaaaactcagtttccagtccaagcctcctagagacattcctgccaacctccgcaccctctcacgccccaccccacgtgtgagagtctgcaaaaccaccggggattggattcgatggcgagcttcacgctcgg

SEQ ID NO: 455642 - DNA, 285 bp, Homo sapiens
  chr12:4380196-4380481
  hyper
  breast vs. ovary,colorectal
acaggggaacttcaagaggcgagcctgccacgcgggaagcgcccgaacttgcgggtctccatgaatgcagagggcgccgggaagggggggcatccggccgcgaccctctctgcccctcccattcgctgcccccctccccgctggaatttctctgtaaagcaagacggagtagggggagggggagagggaaggggcgagagggccctcggctcactcccgagacgtgaggactcgccacccaggcattctcctcggggtgggctgggccccgggacgaccacccgc

SEQ ID NO: 455643 - DNA, 266 bp, Homo sapiens
  chr12:4380215-4380481
  hyper
  breast vs. colorectal,ovary
cgagcctgccacgcgggaagcgcccgaacttgcgggtctccatgaatgcagagggcgccgggaagggggggcatccggccgcgaccctctctgcccctcccattcgctgcccccctccccgctggaatttctctgtaaagcaagacggagtagggggagggggagagggaaggggcgagagggccctcggctcactcccgagacgtgaggactcgccacccaggcattctcctcggggtgggctgggccccgggacgaccacccgc

SEQ ID NO: 455644 - DNA, 152 bp, Homo sapiens
  chr12:4381033-4381185
  hyper
  breast vs. colorectal,ovary
tcccctttctttacatataggagatgggatactcattcccgctgctattgataaggtcggaggcggccgggcctctccccagctttcgcccgccccagcgcccgctctccctccgccctcccttggcttccttttgatgtagtggggaacgc

SEQ ID NO: 455645 - DNA, 401 bp, Homo sapiens
  chr12:4381033-4381434
  hyper
  breast vs. colorectal,ovary
tcccctttctttacatataggagatgggatactcattcccgctgctattgataaggtcggaggcggccgggcctctccccagctttcgcccgccccagcgcccgctctccctccgccctcccttggcttccttttgatgtagtggggaacgcgtcctactaaaaaaaaaaaaaaaaaaaaaaaaaaaaagtaatctgcccggtaacaatcagcgcgcagtagcaggagccccagagctattggctatgcaaatagagggaggggagacggcgccccaaactcttcctcacccttttaaagcgatatcccctcctttcccccccaccaccccttccgccccaccctcgtttaaagaggctggctccggggcctgagttaatcgcttgcacctctagtttatt

SEQ ID NO: 455646 - DNA, 155 bp, Homo sapiens; identical to SEQ ID NO: 345415
  chr12:4384059-4384214
  hyper
  breast vs. anorectal,colorectal

SEQ ID NO: 455647 - DNA, 255 bp, Homo sapiens
  chr12:4384059-4384314
  hyper
  breast vs. anorectal
ttgctttgcaaactccctttggaaaggctgggaaacgtcgcccgcttaccctcgcaccccattatcccggccaccccacttctaatcgtgccctctcccccaccccccacctcacgaagattacttacagtttggttttccagcttcctcggtgcggagatttgggtggggtaggaagggggggagggggtgtgtgtaggggggataccgggtcacccctgaaggagaggtgggagccccccgtgcctctttcca

SEQ ID NO: 455648 - DNA, 79 bp, Homo sapiens; identical to SEQ ID NO: 351309
  chr12:4384533-4384612
  hyper
  breast vs. anorectal

SEQ ID NO: 455649 - DNA, 3 bp, Homo sapiens
  chr12:8088951-8088954
  hyper
  breast vs. upper_gi
aac

SEQ ID NO: 455650 - DNA, 43 bp, Homo sapiens
  chr12:30948583-30948626
  hyper
  breast vs. cervical,upper_gi,lung,pancreas_gallbladder
cgacgcaggggacgcccacttgtctgacgcaggggacgtggct

SEQ ID NO: 455651 - DNA, 308 bp, Homo sapiens
  chr12:30948670-30948978
  hyper
  breast vs. cervical,upper_gi,lung,pancreas_gallbladder
tggcacaggctcctcggcagcattatgggcagctggtagagcggccacttctgagagccggatgggccttccgaggtcgggccgtgccccgctgggcagcgcagagggggtgtgtagggcacgcgacttggagccaggtccagacccatcctggctcctctcagggctccttcccctgcccccattccaccccagccctgctggctgtcccgcaggacccagcgccgcggtagccttctctgaactgcggctcaggcggaggtgtcactcctgcctccagcccaggagggcaggtcaggttatgcaac

SEQ ID NO: 455652 - DNA, 490 bp, Homo sapiens; identical to SEQ ID NO: 360050
  chr12:30948988-30949478
  hyper
  breast vs. cervical,upper_gi,lung,pancreas_gallbladder

SEQ ID NO: 455653 - DNA, 67 bp, Homo sapiens; identical to SEQ ID NO: 372997
  chr12:49297935-49298002
  hyper
  breast vs. sarcoma

SEQ ID NO: 455654 - DNA, 61 bp, Homo sapiens
  chr12:49392537-49392598
  hyper
  breast vs. multiple_myeloma,thyroid,non_cancer,upper_gi, uterine,myeloid_neoplasm
ggcagccatgtgaaggggtgtgtgtgagtgtgtgcgcgtgtgcacgtgcgtatatgttagg

SEQ ID NO: 455655 - DNA, 61 bp, Homo sapiens; identical to SEQ ID NO: 455654
  chr12:49392537-49392598
  hyper
  breast vs. pancreas_gallbladder,cervical,upper_gi, anorectal

SEQ ID NO: 455656 - DNA, 295 bp, Homo sapiens; identical to SEQ ID NO: 351347
  chr12:49392636-49392931
  hyper
  breast vs. pancreas_gallbladder,cervical,upper_gi, anorectal

SEQ ID NO: 455657 - DNA, 145 bp, Homo sapiens
  chr12:49735822-49735967
  hyper
  breast vs. lung,cervical,uterine,ovary,multiple_myeloma, non_cancer,colorectal,myeloid_neoplasm,bladder_and_urothelial
cggagccagagaccgctgcccggtgcttcctcccatcttcttccatcccttccctcttgctccccctccctcctgcactccctccccggcggccgcggcctttattagggattccgcggctgtcggtcccgccatccatcctgtc

SEQ ID NO: 455658 - DNA, 647 bp, Homo sapiens
  chr12:49736083-49736730
  hyper
  breast vs. lung,cervical,uterine,ovary,multiple_myeloma, non_cancer,colorectal,myeloid_neoplasm,bladder_and_urothelial
ataatcaccggccgcccgtcactcagccggccgcccagggagctcctgggcccggcccgggagagggcggggtgcggctgcagcctaggcgcccaggacagggcgagggcggacctgcggcaggagcgcctcctgcggggcagtggaggactgtggcctgaggcattggccgaagggtgggggattatggccccgggcactccccgaagggaaactggggctagcggcttggggcctcccagtggggaagagggaacaaaagctgcggagaccggaggcccggggtccagggcgccccctgctgggaagctgggaaccaagccttagaggtccggcaggtacagatggaaccaggcccagggcgacccctcctagggaaaccaagggtttctagcctggcgcgcctcctgccggctttgaatgacactgcgcttctatgcccgctccgttcagtgaaatccaaccaatccgcatccgctcaaaaaaggctccaagtcctggcgaacccgaggggagccgagagggagttcaaggagtccaggttttactgcagattctttggcgctagctcccagctgacaaatcaacatctcaatctgacaattagtggtcaagatgcggggtgaggggctcttacagccccggcc

SEQ ID NO: 455659 - DNA, 540 bp, Homo sapiens
  chr12:49736253-49736793
  hyper
  breast vs. lung,uterine,bladder_and_urothelial,prostate, ovary,cervical,pancreas_gallbladder,sarcoma,colorectal, non_cancer
cgaagggtgggggattatggccccgggcactccccgaagggaaactggggctagcggcttggggcctcccagtggggaagagggaacaaaagctgcggagaccggaggcccggggtccagggcgccccctgctgggaagctgggaaccaagccttagaggtccggcaggtacagatggaaccaggcccagggcgacccctcctagggaaaccaagggtttctagcctggcgcgcctcctgccggctttgaatgacactgcgcttctatgcccgctccgttcagtgaaatccaaccaatccgcatccgctcaaaaaaggctccaagtcctggcgaacccgaggggagccgagagggagttcaaggagtccaggttttactgcagattctttggcgctagctcccagctgacaaatcaacatctcaatctgacaattagtggtcaagatgcggggtgaggggctcttacagccccggccgcttagccctcccggcgggaggcagaggggtgggcggtgctggcagtgatgaacgactccagg

SEQ ID NO: 455660 - DNA, 336 bp, Homo sapiens; identical to SEQ ID NO: 345425
  chr12:49736828-49737164
  hyper
  breast vs. lung,uterine,bladder_and_urothelial,prostate, ovary,cervical,pancreas_gallbladder,sarcoma,colorectal, non_cancer

SEQ ID NO: 455661 - DNA, 3 bp, Homo sapiens
  chr12:52401537-52401540
  hyper
  breast vs. anorectal,head_and_neck,melanoma,thyroid
tcc

SEQ ID NO: 455662 - DNA, 54 bp, Homo sapiens; identical to SEQ ID NO: 347231
  chr12:52401605-52401659
  hyper
  breast vs. anorectal,head_and_neck,melanoma,thyroid

SEQ ID NO: 455663 - DNA, 122 bp, Homo sapiens
  chr12:54088960-54089082
  hyper
  breast vs. uterine,myeloid_neoplasm,thyroid,ovary, non_cancer
cagggcccggccggacgagatttactgggcctcgaacacggcgacagttcaaacctttgattaatcatgtttttctgcctaccccataatttagttgctctttttccctccctgcctttttt

SEQ ID NO: 455664 - DNA, 15 bp, Homo sapiens
  chr12:54089645-54089660
  hyper
  breast vs. uterine,myeloid_neoplasm,thyroid,ovary, non_cancer
agcgagtttgggaac

SEQ ID NO: 455665 - DNA, 58 bp, Homo sapiens
  chr12:54144782-54144840
  hyper
  breast vs. ovary
cgcgcagactgtccctgtggaggagaaaggcacatgagcagccaaagggacggacact

SEQ ID NO: 455666 - DNA, 156 bp, Homo sapiens; identical to SEQ ID NO: 454151
  chr12:54338511-54338667
  hyper
  breast vs. thyroid,multiple_myeloma

SEQ ID NO: 455667 - DNA, 65 bp, Homo sapiens
  chr12:54343505-54343570
  hyper
  breast vs. upper_gi,multiple_myeloma
cgtgactaggtctttctgaccttgacatcacagggagcacagggaaggggggggaggggtggaaa

SEQ ID NO: 455668 - DNA, 61 bp, Homo sapiens
  chr12:54402812-54402873
  hyper
  breast vs. prostate
gccgccgccgccgccgcccgctcgccgcccgccgccgccgccgcccgcgccccagccccgg

SEQ ID NO: 455669 - DNA, 206 bp, Homo sapiens
  chr12:54422141-54422347
  hyper
  breast vs. bladder_and_urothelial
ttcctgacatctggcttgcgattggctgggagggggtcagctgactttgtcattttgtctgtcctggattggagccgtccctataaccatctagttccgagtacaaactggagacagaaataaatattaaagaaatcatagaccgaccaggtaaaggcaaagggatgaattcctacttcactaacccttccttatcctgccacctc

SEQ ID NO: 455670 - DNA, 56 bp, Homo sapiens
  chr12:54422376-54422432
  hyper
  breast vs. bladder_and_urothelial
cgccctcaattccaccgcctatgatccagtgaggcatttctcgacctatggagcgg

SEQ ID NO: 455671 - DNA, 404 bp, Homo sapiens; identical to SEQ ID NO: 351372
  chr12:54422525-54422929
  hyper
  breast vs. bladder_and_urothelial

SEQ ID NO: 455672 - DNA, 30 bp, Homo sapiens
  chr12:54521011-54521041
  hyper
  breast vs. cervical
gagcggtcccctgctgtcctgggcccttac

SEQ ID NO: 455673 - DNA, 189 bp, Homo sapiens; identical to SEQ ID NO: 351378
  chr12:57619157-57619346
  hyper
  breast vs. pancreas_gallbladder,uterine

SEQ ID NO: 455674 - DNA, 321 bp, Homo sapiens
  chr12:111844290-111844611
  hyper
  breast vs. lymphoid_neoplasm,anorectal,liver_bileduct, upper_gi,pancreas_gallbladder,colorectal
cgtgttagggagagcgttggggtaactgaggccgtgggatgggggagagggcatcgctgacgcccccagcccaccctacggtagcctcgccggttgggggcggccctcccctcaacttgtgcctggggaggagcggtcaggggtcacccattgctaccctgaaagtgaaagtagtcaaactgaggctgtgagcacagatgagcccttgggtgtgggggcagcgggggaggatgcgccggcccctccccactccccattccgggccatgtggctaagagggtagcgccctgattcaggaagcccctctccccagttcctgca

SEQ ID NO: 455675 - DNA, 99 bp, Homo sapiens; identical to SEQ ID NO: 351412
  chr12:111844690-111844789
  hyper
  breast vs. lymphoid_neoplasm,anorectal,liver_bileduct, upper_gi,pancreas_gallbladder,colorectal

SEQ ID NO: 455676 - DNA, 508 bp, Homo sapiens; identical to SEQ ID NO: 454154
  chr12:112204412-112204920
  hyper
  breast vs. head_and_neck,lung,upper_gi

SEQ ID NO: 455677 - DNA, 186 bp, Homo sapiens; identical to SEQ ID NO: 345433
  chr12:112204992-112205178
  hyper
  breast vs. head_and_neck,lung,upper_gi

SEQ ID NO: 455678 - DNA, 9 bp, Homo sapiens
  chr12:116946078-116946087
  hyper
  breast vs. uterine,multiple_myeloma,ovary,non_cancer, myeloid_neoplasm,renal
cgccaagct

SEQ ID NO: 455679 - DNA, 58 bp, Homo sapiens; identical to SEQ ID NO: 345435
  chr12:116946548-116946606
  hyper
  breast vs. uterine,multiple_myeloma,ovary,non_cancer, myeloid_neoplasm,renal

SEQ ID NO: 455680 - DNA, 14 bp, Homo sapiens
  chr13:22243231-22243245
  hyper
  breast vs. ovary,uterine,myeloid_neoplasm,thyroid, cervical
cgcttttttcccca

SEQ ID NO: 455681 - DNA, 142 bp, Homo sapiens; identical to SEQ ID NO: 351449
  chr13:22243864-22244006
  hyper
  breast vs. ovary,uterine,myeloid_neoplasm,thyroid, cervical

SEQ ID NO: 455682 - DNA, 35 bp, Homo sapiens
  chr13:78271860-78271895
  hyper
  breast vs. lung
cggtggtggctgccgcggccggaggcgagggcccg

SEQ ID NO: 455683 - DNA, 425 bp, Homo sapiens; identical to SEQ ID NO: 360317
  chr13:78272232-78272657
  hyper
  breast vs. lung

SEQ ID NO: 455684 - DNA, 148 bp, Homo sapiens; identical to SEQ ID NO: 454164
  chr13:95201113-95201261
  hyper
  breast vs. ovary

SEQ ID NO: 455685 - DNA, 288 bp, Homo sapiens; identical to SEQ ID NO: 454165
  chr13:95201339-95201627
  hyper
  breast vs. ovary

SEQ ID NO: 455686 - DNA, 230 bp, Homo sapiens; identical to SEQ ID NO: 454166
  chr13:95201662-95201892
  hyper
  breast vs. ovary

SEQ ID NO: 455687 - DNA, 8 bp, Homo sapiens
  chr13:95201912-95201920
  hyper
  breast vs. ovary
ccgggatc

SEQ ID NO: 455688 - DNA, 129 bp, Homo sapiens; identical to SEQ ID NO: 351508
  chr13:113547249-113547378
  hyper
  breast vs. liver_bileduct,pancreas_gallbladder

SEQ ID NO: 455689 - DNA, 11 bp, Homo sapiens
  chr14:22004982-22004993
  hyper
  breast vs. anorectal,cervical,multiple_myeloma
cgttctcagac

SEQ ID NO: 455690 - DNA, 4 bp, Homo sapiens
  chr14:22004995-22004999
  hyper
  breast vs. anorectal,cervical,multiple_myeloma
gctg

SEQ ID NO: 455691 - DNA, 53 bp, Homo sapiens
  chr14:38725469-38725522
  hyper
  breast vs. myeloid_neoplasm
cccggtgcagccctgagttattctggggtcaggaacacagctggcgccgggta

SEQ ID NO: 455692 - DNA, 102 bp, Homo sapiens
  chr14:51410195-51410297
  hyper
  breast vs. ovary
cgggggagtgtgtgtcttcggggaggacgagtccagggcattgcctggccctgggccgcctttgcgaaagactcacggaattccaggagctacacccactca

SEQ ID NO: 455693 - DNA, 225 bp, Homo sapiens
  chr14:51410345-51410570
  hyper
  breast vs. ovary
cctctgcaccacacttagccactcccagaggcctgagacttacgaccttttcccagctcggcgtttgtctcccctcccaaaataccaagctccagcaaggcaagatttttgtcccttttgtttagggctgagtgtccagggcagagaatagtgtccggcatacaggacaagaggcccccgtcacctcttgattaaatgctgagagtcaaagttccaaaaaagttt

SEQ ID NO: 455694 - DNA, 294 bp, Homo sapiens
  chr14:51410740-51411034
  hyper
  breast vs. ovary
cacgtctcctctggacttcggggcaaggaccgggtgcaagggaccactctgaggggttctccacctcgtcccgcccggccgcggccggagactccgactccgggctggaccccggcccgccgtcccgcccccggttaccttggggcacttgtcgtagtagtgctgctgcgtgcggatccagcgccccaccaggtggtcgcgcaccgtgtgcgccagcgcgaagtagtagtcgcgggtggtggccacgttgcggtccttgaccagcgtgaagtgcaggtgccggttgaaactctt

SEQ ID NO: 455695 - DNA, 260 bp, Homo sapiens; identical to SEQ ID NO: 334898
  chr14:52327346-52327606
  hyper
  breast vs. head_and_neck

SEQ ID NO: 455696 - DNA, 62 bp, Homo sapiens
  chr14:60794412-60794474
  hyper
  breast vs. uterine,bladder_and_urothelial,ovary, multiple_myeloma,non_cancer,upper_gi,cervical,colorectal, head_and_neck,pancreas_gallbladder,thyroid,lung,prostate, myeloid_neoplasm
cgctcaagactcagacccggactgatgagctaagactgcttgcaagagggagtgggagtcgt

SEQ ID NO: 455697 - DNA, 69 bp, Homo sapiens; identical to SEQ ID NO: 454176
  chr14:61109043-61109112
  hyper
  breast vs. myeloid_neoplasm

SEQ ID NO: 455698 - DNA, 307 bp, Homo sapiens
  chr14:88789656-88789963
  hyper
  breast vs. prostate,anorectal
ccccaccccggccgcggctcctcgcccccggcgacgccccccacttcccgctccccgaaagccattggatgtaggggtggcgcggcgcccgggcagcgcgcggcgagggcgaccctccccgcggcgcgccccagacgccgcgccccggcaagagggagcagggcgagcagcggaccgaggctcccagctgggaaggcgcgctgagcccccggcacccggctcggggcagcgggaggcggtcgcggacttgcccgcggggcggcgggaggcggtgggcggtggcggggaagccgcggaggggcgggga

SEQ ID NO: 455699 - DNA, 5 bp, Homo sapiens
  chr14:90084014-90084019
  hyper
  breast vs. multiple_myeloma,uterine, bladder_and_urothelial,non_cancer,thyroid
cgtgt

SEQ ID NO: 455700 - DNA, 40 bp, Homo sapiens; identical to SEQ ID NO: 454180
  chr14:90849401-90849441
  hyper
  breast vs. anorectal,upper_gi

SEQ ID NO: 455701 - DNA, 383 bp, Homo sapiens; identical to SEQ ID NO: 454181
  chr14:90849476-90849859
  hyper
  breast vs. anorectal,upper_gi

SEQ ID NO: 455702 - DNA, 54 bp, Homo sapiens; identical to SEQ ID NO: 454182
  chr14:90849897-90849951
  hyper
  breast vs. anorectal,upper_gi

SEQ ID NO: 455703 - DNA, 137 bp, Homo sapiens; identical to SEQ ID NO: 454183
  chr14:90849722-90849859
  hyper
  breast vs. anorectal

SEQ ID NO: 455704 - DNA, 54 bp, Homo sapiens; identical to SEQ ID NO: 454182
  chr14:90849897-90849951
  hyper
  breast vs. anorectal

SEQ ID NO: 455705 - DNA, 67 bp, Homo sapiens; identical to SEQ ID NO: 351606
  chr14:90850476-90850543
  hyper
  breast vs. anorectal

SEQ ID NO: 455706 - DNA, 6 bp, Homo sapiens
  chr15:41805862-41805868
  hyper
  breast vs. sarcoma,head_and_neck,bladder_and_urothelial, anorectal,myeloid_neoplasm,multiple_myeloma,cervical,thyroid, non_cancer
acccgc

SEQ ID NO: 455707 - DNA, 205 bp, Homo sapiens
  chr15:41805870-41806075
  hyper
  breast vs. sarcoma,head_and_neck,bladder_and_urothelial, anorectal,myeloid_neoplasm,multiple_myeloma,cervical,thyroid, non_cancer
ctccgaaccacaccagcagctgtccccagcagcccatccctgttgggtccacccggcaacaaaagcccttgcggtcgcggccacacccctgtcaacctaaagttgacagctcattttgccacggcagccctggccaccacttacaggggtgtgctgccgctggcgagacactccccggacctaaagctggtctggccacgcccac

SEQ ID NO: 455708 - DNA, 76 bp, Homo sapiens; identical to SEQ ID NO: 452900
  chr15:60289235-60289311
  hyper
  breast vs. uterine,ovary

SEQ ID NO: 455709 - DNA, 15 bp, Homo sapiens
  chr15:60289626-60289641
  hyper
  breast vs. uterine,ovary
aactcagcgggggac

SEQ ID NO: 455710 - DNA, 30 bp, Homo sapiens
  chr15:68260709-68260739
  hyper
  breast vs. ovary,anorectal
gagaggaagaagtgggggctgagctgatcc

SEQ ID NO: 455711 - DNA, 50 bp, Homo sapiens
  chr15:75250996-75251046
  hyper
  breast vs. uterine,ovary
cggccctcggtccctgctgttcagaaccgggatttaccctcttaccactt

SEQ ID NO: 455712 - DNA, 86 bp, Homo sapiens; identical to SEQ ID NO: 351723
  chr15:75251811-75251897
  hyper
  breast vs. uterine,ovary

SEQ ID NO: 455713 - DNA, 47 bp, Homo sapiens
  chr15:78236702-78236749
  hyper
  breast vs. colorectal
cggccggcctgcgctgtcttacccgccccgtacccccgcccctgtct

SEQ ID NO: 455714 - DNA, 279 bp, Homo sapiens
  chr15:89438052-89438331
  hyper
  breast vs. head_and_neck,ovary,bladder_and_urothelial, anorectal,sarcoma,uterine
cgccatctcccacccagggctctgccctccaccctccctacccttctggcctcgctgtccctggggcaagaaccccggtgagcgaggtctggaacccataggcatcagttgcctttgccccaggcgcccagagccggccagctgcggtccagaggcgcaggtccgccagccgcctcgcaggttgccctcagcccctcccaggactcccggggcccccggagcatccaacagatacccaggggcagggcctggggcgccgcggacggcactggaggcagc

SEQ ID NO: 455715 - DNA, 250 bp, Homo sapiens; identical to SEQ ID NO: 204020
  chr15:89438421-89438671
  hyper
  breast vs. head_and_neck,ovary,bladder_and_urothelial, anorectal,sarcoma,uterine

SEQ ID NO: 455716 - DNA, 107 bp, Homo sapiens
  chr15:89438673-89438780
  hyper
  breast vs. head_and_neck,ovary,bladder_and_urothelial, anorectal,sarcoma,uterine
cccctaagccacgtaccgtccccaggcagctcctcgacggctagagctctcgggggccgcgagctgtcccggtccaaggcagcagtctgatttcggggaaattaaaa

SEQ ID NO: 455717 - DNA, 101 bp, Homo sapiens; identical to SEQ ID NO: 345482
  chr15:89438863-89438964
  hyper
  breast vs. head_and_neck,ovary,bladder_and_urothelial, anorectal,sarcoma,uterine

SEQ ID NO: 455718 - DNA, 518 bp, Homo sapiens
  chr15:101459489-101460007
  hyper
  breast vs. pancreas_gallbladder
cgcgccgccctccccgcccgcccgcctcaggattgaggaagtgcgtctgggcccggccccggcgcggggggcagacggcggtgggacggccaggccccggccccgccagtgtgtccgcccggccccgcgtcccggagcgcccgcacccggccccgccgccgcctcaggtaagcgccgctcctgccggcgccccccggcggcctggctgcctcccggccccgcccggggaacccagagcccgcgcccggcgcccgcggggagcctcggcctctgcctgcccgcgggcccctgcgctccgggcggccgcgtggtcgggcacggggggccgttgcgcaggggccgcggcccgaggggcgcggagggcgtgtggggcgaccccggtctcacgtccccgctgcctcccgccgcgcccggagcccagccagcctgtgggaggggagcgcgcggggcccgagcagggaaccccgaaaccccgtccgggcagggtcgggaaagctgggaagcggaggcaagagaca

SEQ ID NO: 455719 - DNA, 50 bp, Homo sapiens; identical to SEQ ID NO: 351759
  chr15:101460335-101460385
  hyper
  breast vs. pancreas_gallbladder

SEQ ID NO: 455720 - DNA, 86 bp, Homo sapiens
  chr16:2040762-2040848
  hyper
  breast vs. non_cancer,myeloid_neoplasm,thyroid
cgtccctgggagggccctgctgctccttccctccggcaggggaggtggcagttgggtgccgagctctgggttttgtccaggtggca

SEQ ID NO: 455721 - DNA, 48 bp, Homo sapiens; identical to SEQ ID NO: 345484
  chr16:2042503-2042551
  hyper
  breast vs. anorectal

SEQ ID NO: 455722 - DNA, 275 bp, Homo sapiens
  chr16:2391769-2392044
  hyper
  breast vs. anorectal
cgggagtggggaggtgggtcggggtgtccctgggccggaccgggtcgtgggactgggtcgccccaggcaggagagcctgggaggggcgggcccccttggcgtggcagggagaggtggagtgagggactcccgggctccagcatgagggcgggcgccgcgcggggccgacagttgccgcgggccggggccaatgggtccccgagcgccgccagcggccggaccacagtgaggtgcgtccgtggtcccggcgccccgggtgagggagggctgctgcc

SEQ ID NO: 455723 - DNA, 7 bp, Homo sapiens
  chr16:3078144-3078151
  hyper
  breast vs. prostate,colorectal,bladder_and_urothelial, lung,renal,pancreas_gallbladder,upper_gi,cervical,uterine, anorectal,multiple_myeloma
cgggccc

SEQ ID NO: 455724 - DNA, 103 bp, Homo sapiens
  chr16:3078252-3078355
  hyper
  breast vs. prostate,colorectal,bladder_and_urothelial, lung,renal,pancreas_gallbladder,upper_gi,cervical,uterine, anorectal,multiple_myeloma
cgatcaccacctgcatgtcgtcctgcgggaggccgtggtcggctcagcgccggtcccgccccttgccccgccccgcacacgggccccgcccctcacctgccag

SEQ ID NO: 455725 - DNA, 335 bp, Homo sapiens; identical to SEQ ID NO: 351770
  chr16:3078384-3078719
  hyper
  breast vs. prostate,colorectal,bladder_and_urothelial, lung,renal,pancreas_gallbladder,upper_gi,cervical,uterine, anorectal,multiple_myeloma

SEQ ID NO: 455726 - DNA, 212 bp, Homo sapiens; identical to SEQ ID NO: 345485
  chr16:3222239-3222451
  hyper
  breast vs. thyroid,non_cancer,myeloid_neoplasm, multiple_myeloma

SEQ ID NO: 455727 - DNA, 18 bp, Homo sapiens
  chr16:3234164-3234182
  hyper
  breast vs. thyroid,non_cancer,multiple_myeloma
cgcacccaaagcgagaat

SEQ ID NO: 455728 - DNA, 49 bp, Homo sapiens; identical to SEQ ID NO: 452915
  chr16:4363872-4363921
  hyper
  breast vs. colorectal,liver_bileduct, pancreas_gallbladder,uterine

SEQ ID NO: 455729 - DNA, 158 bp, Homo sapiens; identical to SEQ ID NO: 345488
  chr16:4364080-4364238
  hyper
  breast vs. colorectal,liver_bileduct, pancreas_gallbladder,uterine

SEQ ID NO: 455730 - DNA, 10 bp, Homo sapiens
  chr16:23846783-23846793
  hyper
  breast vs. non_cancer,thyroid,myeloid_neoplasm,melanoma
cgctcctccc

SEQ ID NO: 455731 - DNA, 189 bp, Homo sapiens
  chr16:30620879-30621068
  hyper
  breast vs. lung,pancreas_gallbladder,liver_bileduct, upper_gi
cggatctagagcagccggttcccagtcatcggtgtttcgttccaaccaggagatgagggctggtttgggacctgcgcaccctggggaaagagaacaaatcagaaggccagctcctagatcacgccgagtagtatctccccgacggcacctcctgctaagcccctgcccacctcccctgacaacctggtc

SEQ ID NO: 455732 - DNA, 552 bp, Homo sapiens
  chr16:30621123-30621675
  hyper
  breast vs. lung,pancreas_gallbladder,liver_bileduct, upper_gi
cgcgccccgcggcagcggatggggccggcctcaccgagcgcgcccaggtgaccgtaggtctcccgcatcacgtcccggtacagggccctctgcgcgggccgcaggcagccccactcctccggggagaagtacacggccacgtccacgaacttcagagccctcggcctcctgccccttttccgactgggtctggcctttcctggtccctgcgcagggagcggagccgaaggtggcgccatgggacccgagaagccggcgccacggccttccgtgtccaggcctcggccctcgggcgctggcggcccctgggatcgaggagcccctgccggaccagggctgagcgtggccggggaggcccggagggaatcggaattggtcgcccgcggggctaacggaaaccttttgctgttattcaggaaactcctgcccgaacttgggtgaaaggcaccggaagatgccttcggggaaaatggcggcgctgctaccgcaccgcctttgcctggaacacaggcagcttccagctatcgattttattgaccggagcgccatgcc

SEQ ID NO: 455733 - DNA, 816 bp, Homo sapiens; identical to SEQ ID NO: 347377
  chr16:30621198-30622014
  hyper
  breast vs. lung,upper_gi,pancreas_gallbladder, liver_bileduct,ovary

SEQ ID NO: 455734 - DNA, 48 bp, Homo sapiens; identical to SEQ ID NO: 360839
  chr16:56666592-56666640
  hyper
  breast vs. pancreas_gallbladder

SEQ ID NO: 455735 - DNA, 165 bp, Homo sapiens
  chr16:56671950-56672115
  hyper
  breast vs. multiple_myeloma
cgagagtgagaggccgacccgtgttcccgtgttactgtgtacggagtagtgggtccgagggacctaggtgtggacagggacaggcaaggcgacagcgaggagaaacgaaaatcacatcggtggcggttgctctgcacacaactcgctcgctaccgcacgctccac

SEQ ID NO: 455736 - DNA, 29 bp, Homo sapiens
  chr16:56677568-56677597
  hyper
  breast vs. pancreas_gallbladder,colorectal,upper_gi, renal,bladder_and_urothelial
ccgcctcctaccggcccgcctgttttttc

SEQ ID NO: 455737 - DNA, 123 bp, Homo sapiens
  chr16:56703438-56703561
  hyper
  breast vs. bladder_and_urothelial,cervical,uterine, anorectal
cgggagtagcaggtaatctcagggaactgggcaggcccggcagggtgaaacaagcagctcacccgggtgcacagcccctcccgcgggagccgctgcgaaagggccgtccccgcggtgtgcacc

SEQ ID NO: 455738 - DNA, 216 bp, Homo sapiens; identical to SEQ ID NO: 351812
  chr16:56703621-56703837
  hyper
  breast vs. bladder_and_urothelial,cervical,uterine, anorectal

SEQ ID NO: 455739 - DNA, 61 bp, Homo sapiens
  chr16:56709754-56709815
  hyper
  breast vs. multiple_myeloma
cgcgaccacctgggaatgggaaatggccctcagggtggcaggggcggcgcgtacctctggc

SEQ ID NO: 455740 - DNA, 292 bp, Homo sapiens; identical to SEQ ID NO: 347382
  chr16:67204024-67204316
  hyper
  breast vs. lung

SEQ ID NO: 455741 - DNA, 489 bp, Homo sapiens
  chr16:67204318-67204807
  hyper
  breast vs. lung
ggcctccgcggtgtggctcctagtgcccggggaagaaccctcaccctccctattcccagcagccctggccgccccgcccccgccgcagctgctgcacccacccccaccctgcccggccctttctgcaccgtcatctcctgccccgccgaggcttgacccgtgagtggggacgcccaaaacgggccagaccgggagccccactcccggctgtgggagggaagggaaaccgagattgggcagaatcagcgccccaccacccgctgcggcgctcgggggtcgggggggcggggtgggtaggactgtgggccccgccctgccgcaggactctcaagctctgggactgggtggagggaggtaaggggcggggggggaaaatccgtgcagtcgcacatgcgcaaaggctcttcactgtcccaagaccctggcttcctggccaaagagcccgcgcagcgaggtggggttgggggctgggacccagctccgtgcccc

SEQ ID NO: 455742 - DNA, 256 bp, Homo sapiens
  chr16:67678786-67679042
  hyper
  breast vs. bladder_and_urothelial,lymphoid_neoplasm
ggcggggtggaagccgggggcaaggacccgctggaggcccgccacacccgcgaccctcccggccacgccactgcccaccccgacgtctaccctggcggagaagctcctgggcgacggggcgggcgggcaggtgggactcggcccccctcccacaaccccgctcccgggcaagctctcgagccgcgaggccggggcggggaggggccgggccgggggcggcctggcaggaagcggcgcgcaccttccgccgccggag

SEQ ID NO: 455743 - DNA, 3 bp, Homo sapiens
  chr16:68118222-68118225
  hyper
  breast vs. cervical,anorectal,upper_gi,uterine, multiple_myeloma,non_cancer,lung
cgt

SEQ ID NO: 455744 - DNA, 134 bp, Homo sapiens; identical to SEQ ID NO: 345495
  chr16:68118915-68119049
  hyper
  breast vs. cervical,anorectal,upper_gi,uterine, multiple_myeloma,non_cancer,lung

SEQ ID NO: 455745 - DNA, 116 bp, Homo sapiens
  chr16:84328207-84328323
  hyper
  breast vs. pancreas_gallbladder
cgccccagcctgcaaggaagtgctcattatggagagtggagagtgacaggccactcccggccacgtctccaagcaagccggtgccccctcctcctgctgccaccgcccactgagct

SEQ ID NO: 455746 - DNA, 178 bp, Homo sapiens; identical to SEQ ID NO: 452923
  chr16:85932121-85932299
  hyper
  breast vs. colorectal,upper_gi

SEQ ID NO: 455747 - DNA, 465 bp, Homo sapiens
  chr16:87417704-87418169
  hyper
  breast vs. cervical,ovary,lung,sarcoma,anorectal
cggcgaccacttcgcgccgcggcttttgtggagataggggtcgcccctcgcgcccgtgcgtcccgcttccggcgcccgaaactgtgccgcgccggccggtgagtagaaagatgcgccttacagcctccaaatacagaggcagcagccagaaccccaaagggcgcctagaagcccttttgtccattgaaacaacgcgcgttccatcgtctccgccttatggtaaccaaaaggcccgagctgcggagctctgcagggaccttcggggatcccgagctccctgcggaagccccggggagggcttggaggggcggcggccggcgcggcccaagagatccggggatgcgcgcccggtctggaaagggaggccctgccatgcggcgccgcccaaagggcgcctgttcctgcagctgctgggagccgcgcacgcctgctccagctgggctccgccgaggccgctgagcgggg

SEQ ID NO: 455748 - DNA, 50 bp, Homo sapiens; identical to SEQ ID NO: 351854
  chr16:87418200-87418250
  hyper
  breast vs. cervical,ovary,lung,sarcoma,anorectal

SEQ ID NO: 455749 - DNA, 99 bp, Homo sapiens
  chr16:89641257-89641356
  hyper
  breast vs. cervical,lung,ovary
cgccggcggggccctgagcctcctcgccctgtcggcggcggtcccctctgaccgcagggtcttcttctagagtcctgatcgccgaggctgagcggaggc

SEQ ID NO: 455750 - DNA, 5 bp, Homo sapiens
  chr16:89641413-89641418
  hyper
  breast vs. cervical,lung,ovary
cgtgg

SEQ ID NO: 455751 - DNA, 123 bp, Homo sapiens; identical to SEQ ID NO: 351864
  chr16:89641704-89641827
  hyper
  breast vs. cervical,lung,ovary

SEQ ID NO: 455752 - DNA, 23 bp, Homo sapiens
  chr17:8055144-8055167
  hyper
  breast vs. cervical
cgtccaaccacacccctactact

SEQ ID NO: 455753 - DNA, 69 bp, Homo sapiens; identical to SEQ ID NO: 345505
  chr17:8055823-8055892
  hyper
  breast vs. cervical

SEQ ID NO: 455754 - DNA, 2 bp, Homo sapiens
  chr17:8229957-8229959
  hyper
  breast vs. ovary
cg

SEQ ID NO: 455755 - DNA, 356 bp, Homo sapiens
  chr17:27038294-27038650
  hyper
  breast vs. cervical,anorectal,non_cancer, multiple_myeloma,myeloid_neoplasm,uterine,lymphoid_neoplasm, prostate,ovary,bladder_and_urothelial
cgatagccgagcgttccagctctggctggaaccagacttcccgcccatcccgcgggcgacccagcagggcctcaggaccccagtcctcaatcattggcccgcggctcgacgcgagcccgcccccggccctagctccgccccggccctagctccgccccggcccagcactgggccccgcctctctcgttggtttgcccgtctccctcgtcggtttgccggcttcccgcgtgcgccgctcggggtctgcgagccgggccgcgccctctgcccagcccctgccccgcccctcttaccgcggcatctgctctcatcccacgagcgggccttgggctcggtcttttccttagtccatcttt

SEQ ID NO: 455756 - DNA, 57 bp, Homo sapiens
  chr17:27893139-27893196
  hyper
  breast vs. lung,head_and_neck
cgctcgtagggccagggcaggccggcctcgaaccactctcggcagcgcagcacgggc

SEQ ID NO: 455757 - DNA, 387 bp, Homo sapiens; identical to SEQ ID NO: 360990
  chr17:27893344-27893731
  hyper
  breast vs. lung,head_and_neck

SEQ ID NO: 455758 - DNA, 53 bp, Homo sapiens; identical to SEQ ID NO: 347416
  chr17:27940911-27940964
  hyper
  breast vs. anorectal,cervical,renal

SEQ ID NO: 455759 - DNA, 4 bp, Homo sapiens
  chr17:27949429-27949433
  hyper
  breast vs. ovary
cgtg

SEQ ID NO: 455760 - DNA, 4 bp, Homo sapiens
  chr17:29335853-29335857
  hyper
  breast vs. pancreas_gallbladder
cgcc

SEQ ID NO: 455761 - DNA, 171 bp, Homo sapiens; identical to SEQ ID NO: 374094
  chr17:33213953-33214124
  hyper
  breast vs. head_and_neck

SEQ ID NO: 455762 - DNA, 122 bp, Homo sapiens; identical to SEQ ID NO: 351920
  chr17:35078956-35079078
  hyper
  breast vs. prostate,uterine,lung,multiple_myeloma,ovary

SEQ ID NO: 455763 - DNA, 2 bp, Homo sapiens
  chr17:36105728-36105730
  hyper
  breast vs. pancreas_gallbladder,colorectal,non_cancer, renal,liver_bileduct,multiple_myeloma,uterine
cc

SEQ ID NO: 455764 - DNA, 146 bp, Homo sapiens
  chr17:36714786-36714932
  hyper
  breast vs. head_and_neck,lung,upper_gi,anorectal
cgaaggggtgggatggcgaagggcaggggcgggatggcgaagggcaggggcagagggctaagttctggggaagaacagaggcaggaggagaacggatggggatcgtggagaggggagcgttaaaatgggccatgcaaagggggagc

SEQ ID NO: 455765 - DNA, 415 bp, Homo sapiens; identical to SEQ ID NO: 351925
  chr17:36715092-36715507
  hyper
  breast vs. head_and_neck,lung,upper_gi,anorectal

SEQ ID NO: 455766 - DNA, 446 bp, Homo sapiens
  chr17:36715092-36715538
  hyper
  breast vs. anorectal,upper_gi,lung,head_and_neck, cervical
tccatcatcccggaatggggacgggactggaatgaaggactcaagcgctggcatttgatagagcttctatggctgggacaggaagactaagttgatgatcgatccaaccctgttccaagcctgaatggcgggggtgggcaagatcttacccgttgcccagatggcaattctctgccccctccccagcctgtctctgctaattatcctcacctgacggcccctgggcctgcttgaggagcggactcggcgatgccaagctcctgacaggtgggaccatctgccaagcagggccggggagactgttggggctcaggagggaggagctgagaggacttgggggaagggctctcgctgactcagggaaagggatgcagggcaggaaggaactggaactgccccgagggatactgacgacggaggggctcagtgggtgactggggctccag

SEQ ID NO: 455767 - DNA, 241 bp, Homo sapiens; identical to SEQ ID NO: 361013
  chr17:36716048-36716289
  hyper
  breast vs. upper_gi,lung,bladder_and_urothelial, head_and_neck,cervical

SEQ ID NO: 455768 - DNA, 55 bp, Homo sapiens
  chr17:37365986-37366041
  hyper
  breast vs. myeloid_neoplasm,thyroid,non_cancer,cervical, multiple_myeloma,prostate,ovary,uterine,head_and_neck,renal
cgggggctgtaaaccggaaccggtggaggagggggcgctcatcaggaaaggcagc

SEQ ID NO: 455769 - DNA, 122 bp, Homo sapiens
  chr17:37760007-37760129
  hyper
  breast vs. cervical
cgtgagaaaccggtccggctttgcatctcatttacataaatatttattaatcgtcattaaactgaacagaaacacgcaatgcacttcgggtgtccgacgggagtttcatcttcgctacaaga

SEQ ID NO: 455770 - DNA, 37 bp, Homo sapiens
  chr17:40332770-40332807
  hyper
  breast vs. bladder_and_urothelial,anorectal
cgcacctccattctctcccctcgcctcgggtctcacc

SEQ ID NO: 455771 - DNA, 405 bp, Homo sapiens
  chr17:41984572-41984977
  hyper
  breast vs. ovary
ctcaccaccttggtgcctgaagccactttggagcccctaccgcaggggcggggaccagtgtcaatgggcagcggggcttggttctcccaaccagcaccccagaaagagggcccaggggcgggggcgggtggacagggagggaacgggcctgggtgaaaggggcctgtggagtttaaacccagtgaatagggtcctaagtgccgtgtcaggacgaaaagaaggcggaggtcttgggataggagctggcccgggggccgggggacgcctacctgcgccccgggaagcccctagctccgggcggctccagcgcagccgggcgctcagcgtttattgcttgtcaatcgctagcccggctcttaaagcggcaaggcctctccgcgagggggcggaggtccggaggagagg

SEQ ID NO: 455772 - DNA, 265 bp, Homo sapiens; identical to SEQ ID NO: 361039
  chr17:41985015-41985280
  hyper
  breast vs. ovary

SEQ ID NO: 455773 - DNA, 231 bp, Homo sapiens
  chr17:42081919-42082150
  hyper
  breast vs. head_and_neck,pancreas_gallbladder
cggaccccgccccgaccaggtccagccccgcccaacggcaagttaagagccccccagtgccagacgctccagacagactgccactcttggggggcaagagttggttgtcgtcatggcgacggcgctgatggctgtggttctgcgggcagctgctgtagccccgaggctgagaggccggggaggcactgggggcgcccgaaggctgagctgtggcgcgcggcggcgggcggc

SEQ ID NO: 455774 - DNA, 21 bp, Homo sapiens
  chr17:42091712-42091733
  hyper
  breast vs. prostate,melanoma,upper_gi,liver_bileduct, renal,sarcoma,colorectal,lung
cgaggcgctcaccttcagcca

SEQ ID NO: 455775 - DNA, 268 bp, Homo sapiens
  chr17:42091861-42092129
  hyper
  breast vs. prostate,melanoma,upper_gi,liver_bileduct, renal,sarcoma,colorectal,lung
cccccatgtcgaaatacaggtaaggcactgggatgtcgggcttcctgcgagccgggagtggggaagcaacgaggacagaatgaagcggtgggggaagaagcttgagaccccttgagttcccacaggctccactgctcccccaaaccagactcccctcccatgggcaggaccgccctaccagatttggtccgacacccagaccagaacccctcccagggaggtcccaattcctcccagttcaagggtcccgacttctagcccccaattt

SEQ ID NO: 455776 - DNA, 170 bp, Homo sapiens; identical to SEQ ID NO: 345520
  chr17:42092357-42092527
  hyper
  breast vs. prostate,melanoma,upper_gi,liver_bileduct, renal,sarcoma,colorectal,lung

SEQ ID NO: 455777 - DNA, 198 bp, Homo sapiens
  chr17:42988798-42988996
  hyper
  breast vs. cervical,colorectal,pancreas_gallbladder
cgcatctgcctctccagggactcgttctgtgggatggagccggccggtcccgcggagccccgacccgacttggggaggtttcgaggcccggcccccggccccaggccccgcctctagcccgggggtaacgttcaggccccgccctcgacccaggtcctcgtccctggcccttctcccctggcatctcctggggtggcc

SEQ ID NO: 455778 - DNA, 89 bp, Homo sapiens; identical to SEQ ID NO: 345522
  chr17:42989016-42989105
  hyper
  breast vs. cervical,colorectal,pancreas_gallbladder

SEQ ID NO: 455779 - DNA, 182 bp, Homo sapiens
  chr17:46659093-46659275
  hyper
  breast vs. bladder_and_urothelial,cervical
cggcagagccaccgcgggtttgggtatccttgatcctggcgcccaagagcagagatttttctcctctgcgccctggaagtcaccacctgccaatcccaccaaggcgccgcacccccctcacccctccagccgcctgagatggagaacagggtttatgggcgactcccaggacgggtttcacc

SEQ ID NO: 455780 - DNA, 46 bp, Homo sapiens
  chr17:46659384-46659430
  hyper
  breast vs. bladder_and_urothelial,cervical
cgctcccgggtctttccgtggcttcccagccgccttctcctggcag

SEQ ID NO: 455781 - DNA, 170 bp, Homo sapiens; identical to SEQ ID NO: 351973
  chr17:46724200-46724370
  hyper
  breast vs. colorectal

SEQ ID NO: 455782 - DNA, 349 bp, Homo sapiens
  chr17:46806440-46806789
  hyper
  breast vs. prostate
cgtccggggggaggggaggcgtggtgggcggaggaagaggggacgaggagccgggccccacctccttctcctcctctccctccctagctttctgtctcctgcgctttgacaggtttaacgagagaataaaaagctctctctataaagtgtccatctcctgggggggaaggggagtcgggggtggggctgggaggccgctcccggcctcagaggagaacccgggaatgcgcctgtgtaagaggaggctgggaaatgggggttaataggtatttctggcagcccctggctttgggtcctgggtactagcaccccagttcattcccggtacccttcctgtcccagatgtcct

SEQ ID NO: 455783 - DNA, 82 bp, Homo sapiens
  chr17:46826849-46826931
  hyper
  breast vs. myeloid_neoplasm,multiple_myeloma
cggaattccgaccttattgaaaaaaatgaggagaggtttgttttgtttcttaatcatttcttcgccatctctgactctcttt

SEQ ID NO: 455784 - DNA, 325 bp, Homo sapiens
  chr17:46829655-46829980
  hyper
  breast vs. anorectal,multiple_myeloma,non_cancer
acctgggacaaggtagtggctgggttaggggctggggtgtgtcttggagcccccaggtgacaggagagggaggaagggagtgactggtgaaacattaaccccctcagggttctgaagggaaggggaacatccttagaggacacagggagaagacaaacgtcccttcatcctgagattcacttggaaatcccctgaacttccaactcctggctgatgaaacggagcaagttgtctctgccttatggcctccatcaccaagcctgaaggagagtctctcagcccggtttgggagtaaacccaaaaccgttcattcgtcagggaatgc

SEQ ID NO: 455785 - DNA, 106 bp, Homo sapiens
  chr17:46829874-46829980
  hyper
  breast vs. anorectal
cggagcaagttgtctctgccttatggcctccatcaccaagcctgaaggagagtctctcagcccggtttgggagtaaacccaaaaccgttcattcgtcagggaatgc

SEQ ID NO: 455786 - DNA, 45 bp, Homo sapiens; identical to SEQ ID NO: 351976
  chr17:46830655-46830700
  hyper
  breast vs. anorectal

SEQ ID NO: 455787 - DNA, 507 bp, Homo sapiens
  chr17:46831220-46831727
  hyper
  breast vs. myeloid_neoplasm
cgctgcagagccccgtgcttagtgaccaaaataatgtcccgcctgcctcatcttcctctcggatttttgccaaggccaaactgcgcgtgtcccagaaaaaaaccctcggacacttggcctctgccctgtctcagccgagtgactaggatgactgggaagtgaatcacaggaaaatcacccaagcccactcttctccacagccggtgagcagaaggaaggaagcaaagaaggaagggaggaagggaagaagggagagttcagttccctttcgtcgttcacacagtggtcctccacaccaggaaacctaagggctctgtggagggccaggtgccgtggcagcaacactcctcagggcctgtttcagcaccccatttacgtggcacatgaaaaattcaggatgaacgccctggctgaaagctcttcctgggtttgggacatcagaagaccttcccgggatgggctcttgtctctgcagtagctatgacctgcacataaacctgtttccta

SEQ ID NO: 455788 - DNA, 132 bp, Homo sapiens
  chr17:46831595-46831727
  hyper
  breast vs. myeloid_neoplasm,thyroid,multiple_myeloma
cgtggcacatgaaaaattcaggatgaacgccctggctgaaagctcttcctgggtttgggacatcagaagaccttcccgggatgggctcttgtctctgcagtagctatgacctgcacataaacctgtttccta

SEQ ID NO: 455789 - DNA, 55 bp, Homo sapiens; identical to SEQ ID NO: 351978
  chr17:46832887-46832942
  hyper
  breast vs. multiple_myeloma,myeloid_neoplasm

SEQ ID NO: 455790 - DNA, 197 bp, Homo sapiens; identical to SEQ ID NO: 345532
  chr17:48619736-48619933
  hyper
  breast vs. melanoma,sarcoma,colorectal,lymphoid_neoplasm, multiple_myeloma,pancreas_gallbladder

SEQ ID NO: 455791 - DNA, 80 bp, Homo sapiens
  chr17:58498618-58498698
  hyper
  breast vs. anorectal,non_cancer,thyroid,myeloid_neoplasm, multiple_myeloma,lymphoid_neoplasm,sarcoma
cgacaacaataacaacaagacgtttgctgaacatgctggcatagaggacaagttaaaaagtttctggactcaaagggtgc

SEQ ID NO: 455792 - DNA, 15 bp, Homo sapiens
  chr17:59532358-59532373
  hyper
  breast vs. myeloid_neoplasm,thyroid,non_cancer
actcctaggtttccg

SEQ ID NO: 455793 - DNA, 132 bp, Homo sapiens
  chr17:59532387-59532519
  hyper
  breast vs. myeloid_neoplasm,thyroid,non_cancer
ttcgcacgtggcccgaggcgggtgctggcgctggccatgtccagcgagtctcactccctgcaggctgtggccgaagactggtccgcctgtcaaccttatctttatgggtttttcccaacccagactggcccc

SEQ ID NO: 455794 - DNA, 1 bp, Homo sapiens
  chr17:59532591-59532592
  hyper
  breast vs. myeloid_neoplasm,thyroid,non_cancer
c

SEQ ID NO: 455795 - DNA, 112 bp, Homo sapiens; identical to SEQ ID NO: 454237
  chr17:61777761-61777873
  hyper
  breast vs. cervical,sarcoma,anorectal,multiple_myeloma, non_cancer

SEQ ID NO: 455796 - DNA, 76 bp, Homo sapiens; identical to SEQ ID NO: 345537
  chr17:61778423-61778499
  hyper
  breast vs. cervical,sarcoma,anorectal,multiple_myeloma, non_cancer

SEQ ID NO: 455797 - DNA, 1 bp, Homo sapiens
  chr17:73073429-73073430
  hyper
  breast vs. thyroid,colorectal,upper_gi,prostate,uterine, multiple_myeloma,non_cancer
c

SEQ ID NO: 455798 - DNA, 65 bp, Homo sapiens; identical to SEQ ID NO: 347468
  chr17:73073967-73074032
  hyper
  breast vs. thyroid,colorectal,upper_gi,prostate,uterine, multiple_myeloma,non_cancer

SEQ ID NO: 455799 - DNA, 81 bp, Homo sapiens; identical to SEQ ID NO: 454240
  chr17:73584287-73584368
  hyper
  breast vs. cervical

SEQ ID NO: 455800 - DNA, 170 bp, Homo sapiens; identical to SEQ ID NO: 352021
  chr17:73584951-73585121
  hyper
  breast vs. cervical

SEQ ID NO: 455801 - DNA, 92 bp, Homo sapiens
  chr17:74965156-74965248
  hyper
  breast vs. ovary,uterine,cervical,anorectal
cgcagccggcctcggctgtttaccaggcacccgttacgctaattgaaatgtgccaaatagctgcccggggcggggccgagcggagcagcggg

SEQ ID NO: 455802 - DNA, 3 bp, Homo sapiens
  chr17:74965753-74965756
  hyper
  breast vs. ovary,uterine,cervical,anorectal
ccc

SEQ ID NO: 455803 - DNA, 221 bp, Homo sapiens
  chr17:80186335-80186556
  hyper
  breast vs. bladder_and_urothelial,upper_gi,colorectal, anorectal,multiple_myeloma,head_and_neck,lung
cgcaggccgcgggccgctcccctagccaggaagagccgccgtccgcaccgggaccggagaggaagcggaggtctgaagggggacaggtcggacgtggcctcagagagggaggatgtgggccccggagctgagccaggcggccggaaccccacgggacccgcgcgcacctccccaccaaaggggccccggcgttggggggcgaggggtcgctgccctggagg

SEQ ID NO: 455804 - DNA, 517 bp, Homo sapiens; identical to SEQ ID NO: 347473
  chr17:80186618-80187135
  hyper
  breast vs. bladder_and_urothelial,upper_gi,colorectal, anorectal,multiple_myeloma,head_and_neck,lung

SEQ ID NO: 455805 - DNA, 238 bp, Homo sapiens; identical to SEQ ID NO: 345538
  chr18:2848166-2848404
  hyper
  breast vs. uterine

SEQ ID NO: 455806 - DNA, 8 bp, Homo sapiens
  chr18:31739025-31739033
  hyper
  breast vs. melanoma,sarcoma
cgggttgc

SEQ ID NO: 455807 - DNA, 53 bp, Homo sapiens; identical to SEQ ID NO: 352104
  chr18:53257322-53257375
  hyper
  breast vs. cervical,head_and_neck,prostate

SEQ ID NO: 455808 - DNA, 45 bp, Homo sapiens
  chr18:53446783-53446828
  hyper
  breast vs. anorectal
cgacttaacgtttcaggaatatgaattctatgttcagaaaatttc

SEQ ID NO: 455809 - DNA, 63 bp, Homo sapiens
  chr18:77153122-77153185
  hyper
  breast vs. multiple_myeloma,myeloid_neoplasm
cgctgtgggccagaatgcaaaactgcaggaacagaacattcgcaggaacagaacacagtcgta

SEQ ID NO: 455810 - DNA, 34 bp, Homo sapiens; identical to SEQ ID NO: 361317
  chr18:77153516-77153550
  hyper
  breast vs. multiple_myeloma,myeloid_neoplasm

SEQ ID NO: 455811 - DNA, 15 bp, Homo sapiens
  chr19:1856948-1856963
  hyper
  breast vs. colorectal,multiple_myeloma,myeloid_neoplasm, thyroid,upper_gi,non_cancer,pancreas_gallbladder,renal, anorectal,cervical
cggggtggggggggc

SEQ ID NO: 455812 - DNA, 109 bp, Homo sapiens; identical to SEQ ID NO: 345559
  chr19:1857456-1857565
  hyper
  breast vs. colorectal,multiple_myeloma,myeloid_neoplasm, thyroid,upper_gi,non_cancer,pancreas_gallbladder,renal, anorectal,cervical

SEQ ID NO: 455813 - DNA, 116 bp, Homo sapiens; identical to SEQ ID NO: 345560
  chr19:1979018-1979134
  hyper
  breast vs. liver_bileduct,melanoma,renal, lymphoid_neoplasm,thyroid

SEQ ID NO: 455814 - DNA, 50 bp, Homo sapiens
  chr19:2302510-2302560
  hyper
  breast vs. anorectal
cgcgaagccggagctggggttggcgaccgagaaccttcctgcctcccctc

SEQ ID NO: 455815 - DNA, 112 bp, Homo sapiens; identical to SEQ ID NO: 374542
  chr19:2302951-2303063
  hyper
  breast vs. anorectal

SEQ ID NO: 455816 - DNA, 212 bp, Homo sapiens
  chr19:10197461-10197673
  hyper
  breast vs. cervical,bladder_and_urothelial
cgtaaagggatgaaaggcggggggggggcggcggaggccaaaaccaagggtcaagttcgggccgggagaacggtgcctagagatgggggagggatgatcccgtttccccttcccccaccggaacccccctgtctccatcccagctggagaagagcgtccggcgcctccgggagaagtttcatgggaaggtatcctccaagaaggcgggggct

SEQ ID NO: 455817 - DNA, 4 bp, Homo sapiens
  chr19:10197819-10197823
  hyper
  breast vs. cervical,bladder_and_urothelial
cccc

SEQ ID NO: 455818 - DNA, 24 bp, Homo sapiens
  chr19:10397603-10397627
  hyper
  breast vs. thyroid,myeloid_neoplasm,multiple_myeloma, non_cancer
cgaggaggcggggctgcgggcctc

SEQ ID NO: 455819 - DNA, 164 bp, Homo sapiens
  chr19:11529251-11529415
  hyper
  breast vs. renal,liver_bileduct
cgcccactgcacctggcggcctgtgctcggctctccagctccgccctcaactggtcgcttccggccccgcgccacccaccaaaccccctcctcacctggctgcccccggggccctccgccgggctcctgcgctgactgcgctgccgccgcagggagacactgta

SEQ ID NO: 455820 - DNA, 190 bp, Homo sapiens
  chr19:13213427-13213617
  hyper
  breast vs. pancreas_gallbladder,cervical,upper_gi, bladder_and_urothelial,anorectal
cgtcaggccaggctctgctgtctcgcgagggtccggcctcaatgctccaggccccggcgttgggccgcgcctcctcgtgggcctcggaaggccaggatagccgaggtctccgcgtaggtcccccccagggaaagtgagcggctcccgggccggcccgccttctccccgcccccggcggcccggtttcctc

SEQ ID NO: 455821 - DNA, 112 bp, Homo sapiens; identical to SEQ ID NO: 345573
  chr19:13213834-13213946
  hyper
  breast vs. pancreas_gallbladder,cervical,upper_gi, bladder_and_urothelial,anorectal

SEQ ID NO: 455822 - DNA, 224 bp, Homo sapiens
  chr19:13983612-13983836
  hyper
  breast vs. pancreas_gallbladder,upper_gi,head_and_neck
cgagagagggcgccccactccagctccagacagaggggtgggaacgtgaccccgacccggggcgggtgagagggcgggctctggggaaagggctctagaaggtgccgggaggcgggaggggggcttcgggagggcgagttagccgggatcgggcttgaggggccctacgaaattcggtttgggggcgtgcccggtcggggcggaccttagtggggggttgggct

SEQ ID NO: 455823 - DNA, 434 bp, Homo sapiens
  chr19:13983865-13984299
  hyper
  breast vs. pancreas_gallbladder,upper_gi,head_and_neck
tctatagagcaggcttttgtggagggctctaagggggcgggccctaagggagctgggctctttgaggactggcttaggggtttggcggtgggctccgtgggagtctatatgggcgggttttagagggagtgtgttctggggaacaggtcaaaagcgacggggctctaaggggcagggcctgggctggggccttggctggtggctccagactgtgggtggggctctcgggggcggggctctcgggggcgcgtcctcgggggctcggccgggttccgttgccaccaccgtgaggggtgtggtgggggggtggttcacgcagctcggcacacttgggggtccctcatctaccttggggttatgccaggcggttattttgggcctcagtattcccctcggtgaaatgccaggggccaggaaattacttatttttttgc

SEQ ID NO: 455824 - DNA, 33 bp, Homo sapiens
  chr19:14584167-14584200
  hyper
  breast vs. thyroid,cervical
cgaggggccggtgcgcccctcaccagcattggg

SEQ ID NO: 455825 - DNA, 1 bp, Homo sapiens
  chr19:14584882-14584883
  hyper
  breast vs. thyroid,cervical
c

SEQ ID NO: 455826 - DNA, 106 bp, Homo sapiens; identical to SEQ ID NO: 352228
  chr19:15695669-15695775
  hyper
  breast vs. melanoma,upper_gi,colorectal,prostate, myeloid_neoplasm,uterine,ovary,thyroid,renal,multiple_myeloma

SEQ ID NO: 455827 - DNA, 162 bp, Homo sapiens; identical to SEQ ID NO: 454282
  chr19:16186802-16186964
  hyper
  breast vs. lung,lymphoid_neoplasm

SEQ ID NO: 455828 - DNA, 102 bp, Homo sapiens; identical to SEQ ID NO: 205249
  chr19:16187000-16187102
  hyper
  breast vs. lung,lymphoid_neoplasm

SEQ ID NO: 455829 - DNA, 517 bp, Homo sapiens; identical to SEQ ID NO: 454284
  chr19:16187104-16187621
  hyper
  breast vs. lung,lymphoid_neoplasm

SEQ ID NO: 455830 - DNA, 148 bp, Homo sapiens; identical to SEQ ID NO: 454285
  chr19:16187640-16187788
  hyper
  breast vs. lung,lymphoid_neoplasm

SEQ ID NO: 455831 - DNA, 329 bp, Homo sapiens; identical to SEQ ID NO: 454286
  chr19:16187292-16187621
  hyper
  breast vs. lung,lymphoid_neoplasm,melanoma,sarcoma

SEQ ID NO: 455832 - DNA, 634 bp, Homo sapiens; identical to SEQ ID NO: 345579
  chr19:16187640-16188274
  hyper
  breast vs. lung,lymphoid_neoplasm,melanoma,sarcoma

SEQ ID NO: 455833 - DNA, 31 bp, Homo sapiens
  chr19:17007056-17007087
  hyper
  breast vs. ovary,bladder_and_urothelial,uterine,cervical
cgtcctgctgtaaaggccccggggccacaga

SEQ ID NO: 455834 - DNA, 215 bp, Homo sapiens
  chr19:17008145-17008360
  hyper
  breast vs. uterine,cervical,anorectal, bladder_and_urothelial,ovary,multiple_myeloma,thyroid, non_cancer,melanoma,sarcoma
cgccgctcgaccccgccctcaccacactgaccaccctcaacccattgcgcccagtccccaccacagtgaccacaccctcactggctcggccctgcccccagtatactgaccattccccagccacttcccttccgcacttaccactcccccagccacgcccctccccgctgaccgctcctccagccccgcctcccccgtacaggcagagcgcccgc

SEQ ID NO: 455835 - DNA, 31 bp, Homo sapiens; identical to SEQ ID NO: 55797
  chr19:17008820-17008851
  hyper
  breast vs. uterine,cervical,anorectal, bladder_and_urothelial,ovary,multiple_myeloma,thyroid, non_cancer,melanoma,sarcoma

SEQ ID NO: 455836 - DNA, 133 bp, Homo sapiens
  chr19:17958343-17958476
  hyper
  breast vs. lymphoid_neoplasm,multiple_myeloma,thyroid, non_cancer,myeloid_neoplasm
cggcatcccctgtttataatcctcaacgttctgcatcctggtatggtcgggtaccctgtgtctggaccgggaaggcctggagggtaggggctgggaactccgccccccaatccctccttcccaatccctcctc

SEQ ID NO: 455837 - DNA, 91 bp, Homo sapiens
  chr19:19729161-19729252
  hyper
  breast vs. ovary,bladder_and_urothelial,upper_gi,lung, prostate
cgttccgtttgaaccccatacatcccttcgtcctcgggacccccctccagccctcctcaagcgcccctcgtcagtctggcctccacgcccc

SEQ ID NO: 455838 - DNA, 136 bp, Homo sapiens
  chr19:19729395-19729531
  hyper
  breast vs. ovary,bladder_and_urothelial,upper_gi,lung, prostate
gcggggcggggggcgatggcgcggggcgcggcggggcggccatgagcggcagggccgggcgggcgctgtgagggtgccgtcgagcctggagcactaccactggcgccgcagccaaccgccgctgcctgagcgccgc

SEQ ID NO: 455839 - DNA, 147 bp, Homo sapiens; identical to SEQ ID NO: 352245
  chr19:19729585-19729732
  hyper
  breast vs. ovary,bladder_and_urothelial,upper_gi,lung, prostate

SEQ ID NO: 455840 - DNA, 68 bp, Homo sapiens; identical to SEQ ID NO: 347581
  chr19:23598868-23598936
  hyper
  breast vs. ovary

SEQ ID NO: 455841 - DNA, 61 bp, Homo sapiens
  chr19:30718934-30718995
  hyper
  breast vs. ovary
ggtggggtgtgcgtgcgtgcgtgtgtatgtgcgtgcgtgtgtgtgtgtggaaggggtggtg

SEQ ID NO: 455842 - DNA, 296 bp, Homo sapiens
  chr19:38701255-38701551
  hyper
  breast vs. multiple_myeloma,thyroid,non_cancer,anorectal, renal
atgtctgggtctgggatgacacctcctgacacccccgttccccaccccagcctcaggaggggccaacccaccgtcctcttcccagcccttcccttcccccggcccggctcccgcctccctcccggctgcgcccgctgcagctgcagcagcccgttgccagggcaaccacagctggctgggcgggagcccctccaccccatcccccttctcctcctttctggcaaagcagggcggagctgggacaaagccggggagaggcagggtgcaggcaggggaagaaggaggtggatggaggt

SEQ ID NO: 455843 - DNA, 116 bp, Homo sapiens
  chr19:38701435-38701551
  hyper
  breast vs. anorectal,multiple_myeloma
cgggagcccctccaccccatcccccttctcctcctttctggcaaagcagggcggagctgggacaaagccggggagaggcagggtgcaggcaggggaagaaggaggtggatggaggt

SEQ ID NO: 455844 - DNA, 31 bp, Homo sapiens; identical to SEQ ID NO: 352303
  chr19:38702212-38702243
  hyper
  breast vs. anorectal,multiple_myeloma

SEQ ID NO: 455845 - DNA, 68 bp, Homo sapiens; identical to SEQ ID NO: 345595
  chr19:44711963-44712031
  hyper
  breast vs. pancreas_gallbladder,prostate,liver_bileduct, colorectal

SEQ ID NO: 455846 - DNA, 3 bp, Homo sapiens
  chr19:45655296-45655299
  hyper
  breast vs. anorectal
cgg

SEQ ID NO: 455847 - DNA, 173 bp, Homo sapiens
  chr19:46180187-46180360
  hyper
  breast vs. uterine,ovary,upper_gi,pancreas_gallbladder, cervical,lung,head_and_neck,colorectal
cggtctggcccctccctaggccctcgctgcctgccgcacggcccagatcgtgacccagtactgcgtgggtgccaactacacgtggctgctggtggagggcgtctacctgcacagtctcctggtgctcgtgggaggctccgaggagggccacttccgctactacctgctcctcg

SEQ ID NO: 455848 - DNA, 79 bp, Homo sapiens; identical to SEQ ID NO: 352338
  chr19:46180559-46180638
  hyper
  breast vs. uterine,ovary,upper_gi,pancreas_gallbladder, cervical,lung,head_and_neck,colorectal

SEQ ID NO: 455849 - DNA, 4 bp, Homo sapiens
  chr19:46379840-46379844
  hyper
  breast vs. pancreas_gallbladder,myeloid_neoplasm, non_cancer,multiple_myeloma,cervical
cgcc

SEQ ID NO: 455850 - DNA, 70 bp, Homo sapiens
  chr19:46907118-46907188
  hyper
  breast vs. bladder_and_urothelial,renal, pancreas_gallbladder,colorectal
cgtgaggattggaggagccacgtggaaaatgctgctgcccggagcccaggtggctgcgctggccagggag

SEQ ID NO: 455851 - DNA, 250 bp, Homo sapiens
  chr19:46907822-46908072
  hyper
  breast vs. bladder_and_urothelial,renal, pancreas_gallbladder,colorectal
tttgcagtcatcgtaaacggggcggcatggaaagccctcactgagaaggtgccaaagaccccaaggaggtgaggggttgcggccggcagatgcctggggaaagcgcatgaccggaagcgcaggaagagccaggttaaaagccccaagccagagtgtgataatatggggctgttaatgtgtgactactgcccctcccgtgccaggctcggtgctggcgtaggggaggcagtggggccaaagaaggccacct

SEQ ID NO: 455852 - DNA, 57 bp, Homo sapiens; identical to SEQ ID NO: 453034
  chr19:46929939-46929996
  hyper
  breast vs. ovary

SEQ ID NO: 455853 - DNA, 75 bp, Homo sapiens
  chr19:46992624-46992699
  hyper
  breast vs. cervical
cggccctcctcgggccccctgcttgccggacttttgtcccccagcaggtctcaccccctaatgcatggatttcgt

SEQ ID NO: 455854 - DNA, 83 bp, Homo sapiens; identical to SEQ ID NO: 336190
  chr19:47676020-47676103
  hyper
  breast vs. liver_bileduct

SEQ ID NO: 455855 - DNA, 94 bp, Homo sapiens
  chr19:49127280-49127374
  hyper
  breast vs. lymphoid_neoplasm,melanoma,prostate, colorectal,multiple_myeloma,uterine,upper_gi,anorectal,thyroid, non_cancer
cgcgtgttagagtctctgtctttgcagctaaagacctcctccctcacgccccttttcttttgtgaattcaatggatgagacaggcccactctcc

SEQ ID NO: 455856 - DNA, 550 bp, Homo sapiens; identical to SEQ ID NO: 336209
  chr19:49467064-49467614
  hyper
  breast vs. upper_gi,colorectal,pancreas_gallbladder, bladder_and_urothelial

SEQ ID NO: 455857 - DNA, 3 bp, Homo sapiens
  chr19:50016553-50016556
  hyper
  breast vs. upper_gi,lung
ggc

SEQ ID NO: 455858 - DNA, 412 bp, Homo sapiens
  chr19:50832540-50832952
  hyper
  breast vs. uterine
cgagtcggggccgccaatgagacggagcgattggctctttctaagagagcagggaggaggggcggggcggggcgtcaagggaggcgggaccggttactactaattgtgttcggcagcactggtagccaggggaaggcggggctagatacgatagagagagaccttactgaactgaaaaaagtgcgggcggggtagagggaggaggggacacatccaagctatttaaagacgcccgactggcctggaggggcggggccaccatgagagaggccgtcctgattgggctgagaaaggggcggagagaaacaaaacagatcgcacgccctcacctaaaacaccgctaggcaggacctggtggggaggagcattgcttggaagagacagggccgcagaaagtagaaacggtccagat

SEQ ID NO: 455859 - DNA, 192 bp, Homo sapiens
  chr19:50833042-50833234
  hyper
  breast vs. uterine
cttagactcggtgagaaggtgttgaaacttgagagagtcctggaaacccgagagggtctggataggcctaagggagggagcggggctgaggctccaaggcgggcctggttagtcggggctgggcccggagaatgagtgtccggatggatgagtggtactgaggaaggtgagtggggtcgacaaatagaaaac

SEQ ID NO: 455860 - DNA, 16 bp, Homo sapiens
  chr19:50833813-50833829
  hyper
  breast vs. melanoma,uterine,sarcoma
cgaggcgagaacttct

SEQ ID NO: 455861 - DNA, 446 bp, Homo sapiens; identical to SEQ ID NO: 352368
  chr19:50833970-50834416
  hyper
  breast vs. melanoma,uterine,sarcoma

SEQ ID NO: 455862 - DNA, 119 bp, Homo sapiens; identical to SEQ ID NO: 336251
  chr19:52715152-52715271
  hyper
  breast vs. lung,pancreas_gallbladder,head_and_neck,ovary

SEQ ID NO: 455863 - DNA, 29 bp, Homo sapiens
  chr19:58239193-58239222
  hyper
  breast vs. prostate,sarcoma,multiple_myeloma, myeloid_neoplasm,melanoma,non_cancer,thyroid,lymphoid_neoplasm
ccgagtttcaaagggctgacaggacttcc

SEQ ID NO: 455864 - DNA, 538 bp, Homo sapiens; identical to SEQ ID NO: 352438
  chr19:59049765-59050303
  hyper
  breast vs. head_and_neck,ovary

SEQ ID NO: 455865 - DNA, 7 bp, Homo sapiens
  chr2:5866036-5866043
  hyper
  breast vs. cervical,melanoma,renal,multiple_myeloma
cgaaagg

SEQ ID NO: 455866 - DNA, 259 bp, Homo sapiens; identical to SEQ ID NO: 357078
  chr2:5866211-5866470
  hyper
  breast vs. cervical,melanoma,renal,multiple_myeloma

SEQ ID NO: 455867 - DNA, 213 bp, Homo sapiens; identical to SEQ ID NO: 331202
  chr2:10587836-10588049
  hyper
  breast vs. lung,upper_gi

SEQ ID NO: 455868 - DNA, 178 bp, Homo sapiens; identical to SEQ ID NO: 345000
  chr2:10588876-10589054
  hyper
  breast vs. pancreas_gallbladder,liver_bileduct, colorectal,ovary,upper_gi,sarcoma,renal,cervical,anorectal, lymphoid_neoplasm,uterine,non_cancer,myeloid_neoplasm,prostate, thyroid

SEQ ID NO: 455869 - DNA, 117 bp, Homo sapiens
  chr2:10589056-10589173
  hyper
  breast vs. pancreas_gallbladder,liver_bileduct, colorectal,ovary,upper_gi,sarcoma,renal,cervical,anorectal, lymphoid_neoplasm,uterine,non_cancer,myeloid_neoplasm,prostate, thyroid
gggagggaaggggcgtcccgggggtcgccagcacgctgcgggcagggctggcagccgcctccacgcccccgcgctggaagcctcgtctttgtaacatcgaggtatcctgtaactaga

SEQ ID NO: 455870 - DNA, 197 bp, Homo sapiens; identical to SEQ ID NO: 345002
  chr2:10589298-10589495
  hyper
  breast vs. pancreas_gallbladder,liver_bileduct, colorectal,ovary,upper_gi,sarcoma,renal,cervical,anorectal, lymphoid_neoplasm,uterine,non_cancer,myeloid_neoplasm,prostate, thyroid

SEQ ID NO: 455871 - DNA, 34 bp, Homo sapiens
  chr2:19557652-19557686
  hyper
  breast vs. bladder_and_urothelial
cgcggtcggctgcggctgtggccattcactccct

SEQ ID NO: 455872 - DNA, 235 bp, Homo sapiens
  chr2:19557727-19557962
  hyper
  breast vs. bladder_and_urothelial
ggagcgcgtctcaggaaagtttgtgcccgctgaagttgctctggtttcttaaagggggcccacagattgactttcaaagtccgtgggcacctcgcccgtgattccgcagagccgggcgggctggccgcagtagcggaggcccgccccccttaatccccagcggtcagaggccgaggaccccgcgcaggaagtcctgaggcagcacccccaaccaccctgctctcactttcacaaa

SEQ ID NO: 455873 - DNA, 341 bp, Homo sapiens
  chr2:19558041-19558382
  hyper
  breast vs. bladder_and_urothelial
aacctgggagtcctgcccgcattcgctttgctgagcccaggcgcccaggactgcaattaccttgttccgcagaggtcctggggctgagcacgtctctggggctttagctgaaggggactggggaagccggaggccctggagcccacaggcgcccctggagctctagtgtcccgactcctctcctgccgcggggactccaagcgccggacacgcgggagcgagcgctcagcagccccggatcctgcacgccggggacggtgagcctcgctcgcggctccctcgctgggtctgaaccaggagcagctgagaacgtgccggggagaggccgagctccgactcac

SEQ ID NO: 455874 - DNA, 214 bp, Homo sapiens
  chr2:19558168-19558382
  hyper
  breast vs. uterine,bladder_and_urothelial
cggaggccctggagcccacaggcgcccctggagctctagtgtcccgactcctctcctgccgcggggactccaagcgccggacacgcgggagcgagcgctcagcagccccggatcctgcacgccggggacggtgagcctcgctcgcggctccctcgctgggtctgaaccaggagcagctgagaacgtgccggggagaggccgagctccgactcac

SEQ ID NO: 455875 - DNA, 288 bp, Homo sapiens
  chr2:25354461-25354749
  hyper
  breast vs. bladder_and_urothelial
cggagtccgttttcctcgggagaagtccgccaggaagttgggagcgcagaggaagcccaggctggaagggggcgtgaccctgccctgcctgcgcgcggtgcacagaggaggagggtgccagccttggatctcgggtgtcccgccccaccgctctcagggcccacagtactggagatgttcaacacgctgctgaggcagctgcggctcagcatcgactacgcgctgaccgggagctacgacggggcggtcagcctcggcaccaagatcatcaaggagcacgaggagcgc

SEQ ID NO: 455876 - DNA, 44 bp, Homo sapiens; identical to SEQ ID NO: 357130
  chr2:25354957-25355001
  hyper
  breast vs. bladder_and_urothelial

SEQ ID NO: 455877 - DNA, 89 bp, Homo sapiens
  chr2:27473102-27473191
  hyper
  breast vs. pancreas_gallbladder
cggaggggaaaagggtcttcccgtcctgaccccagtcctgagactccctgcaaagacttccggctgcctctgccgctgcggtggcgtat

SEQ ID NO: 455878 - DNA, 22 bp, Homo sapiens
  chr2:27473358-27473380
  hyper
  breast vs. pancreas_gallbladder
ccttggccttcgcctcttaaac

SEQ ID NO: 455879 - DNA, 59 bp, Homo sapiens
  chr2:27938267-27938326
  hyper
  breast vs. ovary,sarcoma,bladder_and_urothelial,lung, uterine
cgtgctggactctttcaccctgcacgggggagaagccctcctcccgggagcctgtttgg

SEQ ID NO: 455880 - DNA, 22 bp, Homo sapiens
  chr2:29337909-29337931
  hyper
  breast vs. cervical
cgtgggtgtagcacggattagg

SEQ ID NO: 455881 - DNA, 38 bp, Homo sapiens; identical to SEQ ID NO: 454314
  chr2:30453530-30453568
  hyper
  breast vs. ovary,myeloid_neoplasm,non_cancer,uterine, thyroid

SEQ ID NO: 455882 - DNA, 4 bp, Homo sapiens
  chr2:30454906-30454910
  hyper
  breast vs. ovary,anorectal
tcac

SEQ ID NO: 455883 - DNA, 462 bp, Homo sapiens
  chr2:30454942-30455404
  hyper
  breast vs. head_and_neck
cggagagctgcaggaggcgcgcgccccacttggcgcaggggggctcctgctcttcccgggcccctcctctttttctttttgtttgcatgcaagtctcaacgtcgaggccggcagcagcggggctgagctggtgcggccgcagggtttgcagagctccgggggggtggggggcgggaaacgctctccccacacgtaaccccactaaagccacaagcagcagggcacgcgctgcagcctctcaacccctgccctctccaccgcccctaaaaaccgacgcacattggtgggggccgggactgggaggagccgccttcgccgtgctgaaggggaaggagcccgggccgggcgcggggcgtcggaggtttgccccggactggggatcggagccgggagggatgcagagagaggcaggcccctgactgctgggacttccttgctggcagtttcttccttcctgctctg

SEQ ID NO: 455884 - DNA, 64 bp, Homo sapiens; identical to SEQ ID NO: 454317
  chr2:43019535-43019599
  hyper
  breast vs. cervical,anorectal

SEQ ID NO: 455885 - DNA, 29 bp, Homo sapiens
  chr2:45177234-45177263
  hyper
  breast vs. anorectal,uterine,ovary
cactgtgccgggcggggctcggcgggagc

SEQ ID NO: 455886 - DNA, 61 bp, Homo sapiens
  chr2:56149749-56149810
  hyper
  breast vs. bladder_and_urothelial,ovary,multiple_myeloma
cggtagccaacgaacgaggcagcaaagacgtaaaaactgctgtagaattgcatttcacgtt

SEQ ID NO: 455887 - DNA, 90 bp, Homo sapiens
  chr2:56150447-56150537
  hyper
  breast vs. bladder_and_urothelial,ovary,multiple_myeloma
gtcccctttcttaacagcaagctaacgcggcggtcccctggagctgctcagcgtcccagcttctaaccagctcctatggaatccaggtgc

SEQ ID NO: 455888 - DNA, 18 bp, Homo sapiens
  chr2:56150681-56150699
  hyper
  breast vs. bladder_and_urothelial,ovary,multiple_myeloma
cgaggctgcacacctcca

SEQ ID NO: 455889 - DNA, 90 bp, Homo sapiens; identical to SEQ ID NO: 455887
  chr2:56150447-56150537
  hyper
  breast vs. ovary,bladder_and_urothelial,multiple_myeloma

SEQ ID NO: 455890 - DNA, 18 bp, Homo sapiens
  chr2:56150681-56150699
  hyper
  breast vs. ovary,bladder_and_urothelial,multiple_myeloma
cgaggctgcacacctcca

SEQ ID NO: 455891 - DNA, 413 bp, Homo sapiens
  chr2:74729488-74729901
  hyper
  breast vs. liver_bileduct,upper_gi,pancreas_gallbladder, colorectal,cervical
cggattgccggcccggacattccactgaattctgtgaatgtgtagcagggttggaggaccctcggaataacccccttggggaggtggacaaggacaatctcagcgaagagcttgctcccctcctccccacccttaggaaacgtccgtgaaccggagtgagagggcagtgggagttcagggagcaaagtccaggcggaggagcgtgaggcggggcttccgtccgtcccgcacacttctgggattgttttctctttcagaaagcgctactgcggagtgaaccggtccttatatcttagtttcgtgactttgggggcggcaggcctgtgagttgttttccgccctggacgctgttttgcaaagatctctgcgcgcccaccgccaccctcccgggcgtgcgggccgggaagcagcca

SEQ ID NO: 455892 - DNA, 239 bp, Homo sapiens
  chr2:74729933-74730172
  hyper
  breast vs. liver_bileduct,upper_gi,pancreas_gallbladder, colorectal,cervical
ttttctccccccaactccccaagactcacttctagggaagtcctttttcccatcaagccctgggaaagactggccaggctgagagagggacccgtcctcctctgtgccaaaggcgggagcaaatcctggtgctgtcgcctttggatgtgagtcctggaaatggcgggggtgaggaaggtgggcaggggcaaggtttggccctcaggcgagaaccgacgccttgtcccggaagcgcagca

SEQ ID NO: 455893 - DNA, 44 bp, Homo sapiens
  chr2:74729857-74729901
  hyper
  breast vs. colorectal,cervical
cgcccaccgccaccctcccgggcgtgcgggccgggaagcagcca

SEQ ID NO: 455894 - DNA, 239 bp, Homo sapiens; identical to SEQ ID NO: 455892
  chr2:74729933-74730172
  hyper
  breast vs. colorectal,cervical

SEQ ID NO: 455895 - DNA, 79 bp, Homo sapiens; identical to SEQ ID NO: 345021
  chr2:74730644-74730723
  hyper
  breast vs. colorectal,cervical

SEQ ID NO: 455896 - DNA, 236 bp, Homo sapiens; identical to SEQ ID NO: 453103
  chr2:74781700-74781936
  hyper
  breast vs. uterine,upper_gi,colorectal,lymphoid_neoplasm, multiple_myeloma,pancreas_gallbladder,renal,myeloid_neoplasm, thyroid,non_cancer,ovary

SEQ ID NO: 455897 - DNA, 123 bp, Homo sapiens; identical to SEQ ID NO: 453104
  chr2:74782349-74782472
  hyper
  breast vs. uterine,upper_gi,colorectal,lymphoid_neoplasm, multiple_myeloma,pancreas_gallbladder,renal,myeloid_neoplasm, thyroid,non_cancer,ovary

SEQ ID NO: 455898 - DNA, 59 bp, Homo sapiens; identical to SEQ ID NO: 345026
  chr2:96991316-96991375
  hyper
  breast vs. non_cancer,multiple_myeloma,myeloid_neoplasm, thyroid,uterine,ovary,prostate,lymphoid_neoplasm,anorectal

SEQ ID NO: 455899 - DNA, 31 bp, Homo sapiens; identical to SEQ ID NO: 453113
  chr2:118981062-118981093
  hyper
  breast vs. prostate,thyroid,non_cancer,myeloid_neoplasm, multiple_myeloma

SEQ ID NO: 455900 - DNA, 122 bp, Homo sapiens
  chr2:127863367-127863489
  hyper
  breast vs. sarcoma,cervical,head_and_neck
cggcggccgcgcagcgggtgggagagggggcaggcctggccgcggggcactggggggccaccctggcagaaacacagattctgcaatctcagatttcagagttggagtcgtcaggggaagtg

SEQ ID NO: 455901 - DNA, 427 bp, Homo sapiens; identical to SEQ ID NO: 357297
  chr2:127863878-127864305
  hyper
  breast vs. sarcoma,cervical,head_and_neck

SEQ ID NO: 455902 - DNA, 1 bp, Homo sapiens
  chr2:145282267-145282268
  hyper
  breast vs. melanoma,lymphoid_neoplasm,non_cancer, myeloid_neoplasm,uterine,renal,bladder_and_urothelial
c

SEQ ID NO: 455903 - DNA, 63 bp, Homo sapiens
  chr2:172964685-172964748
  hyper
  breast vs. myeloid_neoplasm
cgctcctgggggagcgcggtgggggtaagataagggatgggggctccgagggctgggaactgc

SEQ ID NO: 455904 - DNA, 86 bp, Homo sapiens; identical to SEQ ID NO: 453138
  chr2:173099596-173099682
  hyper
  breast vs. colorectal,pancreas_gallbladder,ovary

SEQ ID NO: 455905 - DNA, 42 bp, Homo sapiens; identical to SEQ ID NO: 454338
  chr2:175190730-175190772
  hyper
  breast vs. anorectal

SEQ ID NO: 455906 - DNA, 22 bp, Homo sapiens
  chr2:177001081-177001103
  hyper
  breast vs. colorectal
cgggggagagagaaagcagaag

SEQ ID NO: 455907 - DNA, 5 bp, Homo sapiens
  chr2:182321353-182321358
  hyper
  breast vs. myeloid_neoplasm
cgtgg

SEQ ID NO: 455908 - DNA, 34 bp, Homo sapiens; identical to SEQ ID NO: 345053
  chr2:182323095-182323129
  hyper
  breast vs. thyroid

SEQ ID NO: 455909 - DNA, 72 bp, Homo sapiens; identical to SEQ ID NO: 453142
  chr2:182818959-182819031
  hyper
  breast vs. renal

SEQ ID NO: 455910 - DNA, 129 bp, Homo sapiens
  chr2:219735657-219735786
  hyper
  breast vs. myeloid_neoplasm,multiple_myeloma,thyroid
cgctgcgggctgagtggggctggtcctcctcccttccaccccaagcccttttttgggttacacccctgacctgctattctctgctttccagggctgtgggcagccccttggttatggaccctaccagca

SEQ ID NO: 455911 - DNA, 208 bp, Homo sapiens; identical to SEQ ID NO: 331604
  chr2:219762346-219762554
  hyper
  breast vs. upper_gi

SEQ ID NO: 455912 - DNA, 169 bp, Homo sapiens; identical to SEQ ID NO: 369927
  chr2:219763161-219763330
  hyper
  breast vs. upper_gi

SEQ ID NO: 455913 - DNA, 394 bp, Homo sapiens
  chr2:220348591-220348985
  hyper
  breast vs. bladder_and_urothelial,multiple_myeloma, prostate,uterine,myeloid_neoplasm,thyroid,non_cancer,melanoma
cggagccccggggccggcaccgccgagcgggggcgcccctcgagatccccgtggccaggcttggggcccgtaggctacaggagtctccttccctgtctgccctcagcgaggcccagccatccagccctgcacggcccagcgcccccaaacccagtacccctaagtctgcagaaccttctgccaccacacctagtgatgctccgcagccccccgcaccccagcctgcccaagacaaggctccagagcccaggccagaaccagtccgagcctccaagcctgcaccacccccccaggccctgcaaaccctagcgctgcccctcacaccctatgctcagatcattcagtccctccagctgtcaggccacgcccagggcccctcgcagggccctgccgc

SEQ ID NO: 455914 - DNA, 30 bp, Homo sapiens
  chr2:220348955-220348985
  hyper
  breast vs. bladder_and_urothelial,prostate,thyroid, non_cancer
cgcccagggcccctcgcagggccctgccgc

SEQ ID NO: 455915 - DNA, 221 bp, Homo sapiens
  chr2:233740556-233740777
  hyper
  breast vs. ovary,lung,bladder_and_urothelial
cgctaccggcaacttgcttaacctagaggtggggggtgacgtccctgtcggccccgtcacctggggccccagcacctctccttggctttgcagacgatgttccacaggagcccgtgcccacgctgtggaacgagccggccgagctgccgtcgggagaaggccccgtggagagcaccagccccggccgggagcccgtggacaccggtcccccagcccccacc

SEQ ID NO: 455916 - DNA, 168 bp, Homo sapiens; identical to SEQ ID NO: 357500
  chr2:233741586-233741754
  hyper
  breast vs. upper_gi,colorectal

SEQ ID NO: 455917 - DNA, 206 bp, Homo sapiens
  chr2:241771771-241771977
  hyper
  breast vs. ovary
ccgctccgctgtaggccccgcctgctataggccccgccccgctgtaggccccgcctgctataggccccgcctgctgtaggccccgcctgctataggccccgctccgctgtaggccccaccccgcaggaaacctcgccccgctggtggcgcgccctggttgccgtggcaacctcctccctccgccgccgggttgccggcttcgctag

SEQ ID NO: 455918 - DNA, 2 bp, Homo sapiens
  chr2:241772136-241772138
  hyper
  breast vs. ovary
cc

SEQ ID NO: 455919 - DNA, 7 bp, Homo sapiens
  chr20:291046-291053
  hyper
  breast vs. ovary,multiple_myeloma,sarcoma, myeloid_neoplasm,thyroid,non_cancer,uterine,renal
cgccggc

SEQ ID NO: 455920 - DNA, 17 bp, Homo sapiens
  chr20:2668754-2668771
  hyper
  breast vs. bladder_and_urothelial,multiple_myeloma
cggggatctgacaggaa

SEQ ID NO: 455921 - DNA, 2 bp, Homo sapiens
  chr20:2781970-2781972
  hyper
  breast vs. myeloid_neoplasm,non_cancer,thyroid
tc

SEQ ID NO: 455922 - DNA, 126 bp, Homo sapiens
  chr20:3229128-3229254
  hyper
  breast vs. cervical,multiple_myeloma,thyroid,colorectal
cggaggctacaccctttcccccgggccagcttccacatctgcccagtggggcatttccccttgtcccacccagcgactggttgacaggaagcagggtgtctatggactggcggcgggcgccccttt

SEQ ID NO: 455923 - DNA, 155 bp, Homo sapiens
  chr20:3229326-3229481
  hyper
  breast vs. cervical,multiple_myeloma,thyroid,colorectal
gaaccgcctggcgagtggaacccgagcttgcacggggacagctgatgcctttctggtcgctcctctagagctccgcgggctccggcaaacccccccgttagaacttgcggttccaacgcgcagcgccaaatctggcccttacttgacccgtcagc

SEQ ID NO: 455924 - DNA, 32 bp, Homo sapiens
  chr20:3229526-3229558
  hyper
  breast vs. cervical,multiple_myeloma,thyroid,colorectal
cgccaagctttcactgcgcggaaacgcgccca

SEQ ID NO: 455925 - DNA, 144 bp, Homo sapiens; identical to SEQ ID NO: 352449
  chr20:3229659-3229803
  hyper
  breast vs. cervical,multiple_myeloma,thyroid,colorectal

SEQ ID NO: 455926 - DNA, 206 bp, Homo sapiens; identical to SEQ ID NO: 453161
  chr20:21080357-21080563
  hyper
  breast vs. thyroid,colorectal,non_cancer, myeloid_neoplasm,multiple_myeloma,lymphoid_neoplasm,upper_gi

SEQ ID NO: 455927 - DNA, 1 bp, Homo sapiens
  chr20:22567354-22567355
  hyper
  breast vs. pancreas_gallbladder,upper_gi
c

SEQ ID NO: 455928 - DNA, 67 bp, Homo sapiens; identical to SEQ ID NO: 453167
  chr20:22567768-22567835
  hyper
  breast vs. pancreas_gallbladder,upper_gi

SEQ ID NO: 455929 - DNA, 585 bp, Homo sapiens
  chr20:30193272-30193857
  hyper
  breast vs. lung,liver_bileduct,cervical,uterine
cgggcgaggtggtgcgctgtctgtctgagcagagcgtggccatctcgcgctgcgccgggggcgccggggcgcgcctgcctgccctgctggacgagcagcaggtaaacgtgctgctctacgacatgaacggctgttactcacgcctcaaggagctggtgcccaccctgccccagaaccgcaaggtgagcaaggtggagattctccagcacgtcatcgactacatcagggaccttcagttggagctgaactcggaatccgaagttggaacccccgggggccgagggctgccggtccgggctccgctcagcaccctcaacggcgagatcagcgccctgacggccgaggtgagatccagatccgaccactagatcatccttataccgacggggaaacggaggccagagagggcgtgggcgcttgcaccacttccgtcccatccttgcgggtacctggctatgcgggggtgcctaaggagcctggaaaaagcgctcccccgtcgtgcttcctggggaagggggcgttcgctgcgctcggagcggcgtcccttccaacccgccggtctcatttcttctcgttttcacaggc

SEQ ID NO: 455930 - DNA, 189 bp, Homo sapiens; identical to SEQ ID NO: 345629
  chr20:30193992-30194181
  hyper
  breast vs. lung,liver_bileduct,cervical,uterine

SEQ ID NO: 455931 - DNA, 62 bp, Homo sapiens; identical to SEQ ID NO: 453168
  chr20:30639044-30639106
  hyper
  breast vs. multiple_myeloma,thyroid,non_cancer,prostate, myeloid_neoplasm

SEQ ID NO: 455932 - DNA, 139 bp, Homo sapiens; identical to SEQ ID NO: 453169
  chr20:30639494-30639633
  hyper
  breast vs. multiple_myeloma,thyroid,non_cancer,prostate, myeloid_neoplasm

SEQ ID NO: 455933 - DNA, 322 bp, Homo sapiens; identical to SEQ ID NO: 336420
  chr20:32307879-32308201
  hyper
  breast vs. pancreas_gallbladder,colorectal

SEQ ID NO: 455934 - DNA, 63 bp, Homo sapiens
  chr20:37274639-37274702
  hyper
  breast vs. prostate,liver_bileduct,upper_gi, lymphoid_neoplasm,colorectal,melanoma,lung,sarcoma, head_and_neck,uterine,anorectal,multiple_myeloma,renal, pancreas_gallbladder,non_cancer,ovary
cgcccccagaagtcctatccccctgccaaaacttgatcctttctggccaggtcgcctctttcc

SEQ ID NO: 455935 - DNA, 546 bp, Homo sapiens; identical to SEQ ID NO: 205802
  chr20:37274731-37275277
  hyper
  breast vs. prostate,liver_bileduct,upper_gi, lymphoid_neoplasm,colorectal,melanoma,lung,sarcoma, head_and_neck,uterine,anorectal,multiple_myeloma,renal, pancreas_gallbladder,non_cancer,ovary

SEQ ID NO: 455936 - DNA, 390 bp, Homo sapiens
  chr20:37433723-37434113
  hyper
  breast vs. ovary
cgtcagacgtcagcagaggtacgaccacttccttcctccagcgcttcacctcccttctttccagaaagaggaaatgatgcgagtccacaccgcaggccacagcccccatgtctcggccccagcagctgggggacctggccccacagatctgtccccagcgcaaggccagggccggcccctggacctcctgggaagccttcagactcaggccgcgcaggccttcaagctaggaaccctgagttcctggccctggcattcattctgtgtgaccttgagcaggttaccactcctctctgggcttcaggattcccgtctgtcaaatgggagcagggataccgtccttggcttccctctttccatggtcggggtgggggttaggaaaactatttt

SEQ ID NO: 455937 - DNA, 27 bp, Homo sapiens
  chr20:37434086-37434113
  hyper
  breast vs. ovary
cggggtgggggttaggaaaactatttt

SEQ ID NO: 455938 - DNA, 139 bp, Homo sapiens; identical to SEQ ID NO: 361897
  chr20:48789173-48789312
  hyper
  breast vs. bladder_and_urothelial,upper_gi, liver_bileduct

SEQ ID NO: 455939 - DNA, 4 bp, Homo sapiens
  chr20:50157660-50157664
  hyper
  breast vs. anorectal,myeloid_neoplasm
cgtg

SEQ ID NO: 455940 - DNA, 316 bp, Homo sapiens
  chr20:50158039-50158355
  hyper
  breast vs. anorectal,myeloid_neoplasm
aagcattgggcccagcccggggaagtccccagcccccagcaactgagggcagttggaggcacagagtgacaaagttcaggcagaaagagcctgtgtccttctgaatccatgctgcagctgcccctcaccctaccccatcccaccacatccattaggactaagcgtagaagatcacttaatatagctcagaccaatcctcttgtgagtggtaagtgatgggttcagcagcagaacccagggaggaaatgggccggccttataataccaaaggttttaaccctctccagcatcagacagacaacctcttcctcagttt

SEQ ID NO: 455941 - DNA, 297 bp, Homo sapiens
  chr20:50722302-50722599
  hyper
  breast vs. anorectal
cgctgtggctgctgcgctgcacaggctgcgcttttagattcggacttaattggtctgggctgggacctgggcactgggatgtttttttaaaaaagccgtctccctccctcaccacccccatcacacacacaggtcattctgatgtgcatccaagctgagaagcacgacctccactcctggttctcaaccctgctgcatacccaaatttaaattttaaatgaggagtgtctccaactgcagggagaaatgcagattccgaaagttctggattcaggtggccgaggccagaaatgtgtg

SEQ ID NO: 455942 - DNA, 57 bp, Homo sapiens
  chr20:55532724-55532781
  hyper
  breast vs. bladder_and_urothelial
cgggtgtttactgggtcatttaaccgggtttctattttttaaagtttccttttctac

SEQ ID NO: 455943 - DNA, 52 bp, Homo sapiens; identical to SEQ ID NO: 361918
  chr20:55532850-55532902
  hyper
  breast vs. bladder_and_urothelial

SEQ ID NO: 455944 - DNA, 1 bp, Homo sapiens
  chr20:57224597-57224598
  hyper
  breast vs. thyroid,myeloid_neoplasm,non_cancer, multiple_myeloma
c

SEQ ID NO: 455945 - DNA, 113 bp, Homo sapiens; identical to SEQ ID NO: 345643
  chr20:57225466-57225579
  hyper
  breast vs. thyroid,myeloid_neoplasm,non_cancer, multiple_myeloma

SEQ ID NO: 455946 - DNA, 115 bp, Homo sapiens; identical to SEQ ID NO: 345644
  chr20:58514400-58514515
  hyper
  breast vs. prostate,colorectal,uterine,renal,sarcoma, pancreas_gallbladder

SEQ ID NO: 455947 - DNA, 71 bp, Homo sapiens
  chr20:61585229-61585300
  hyper
  breast vs. anorectal
cgccaattagaggggagggctgccctcagcgggccctgccccttgctctcttcctcttcccccacccacgt

SEQ ID NO: 455948 - DNA, 272 bp, Homo sapiens
  chr20:62185051-62185323
  hyper
  breast vs. bladder_and_urothelial,ovary,cervical,uterine
cggggccttgctgggcagagcccgcggcgggggaagccgcccctctcctctgtccaggcgctgggtggtccatccgcctggtcaccggccactgcctctctcccaaattcctccgagggattcccgaggagtgcgctcggactggggggttgagcaggaactccctcccagtcacccgaggctcctgcgccccgcccgaagccgggggtgcgtggggagtggtgcgcccgcggaagggctccgggacgggaaccccccttggagcctggctc

SEQ ID NO: 455949 - DNA, 395 bp, Homo sapiens
  chr21:46352279-46352674
  hyper
  breast vs. bladder_and_urothelial,anorectal
cgctccgagcctggccgcctccctggggcgcgtgaagggagctttccttccccgggaaaggccggggccagagacccgcactcggaccaggcgggggctgcggggccagagtgggctggggagggctgggagggcgtctggggccggctcctccaggctgggggccgccagctccgggaaggcagtcctggcctgcggatggggccgcgcgtggggcccggcggggcggcctcgggaggcgtccaggctgcgggagcgggaggagcggccgtgcgggcgccagcgccgtgggtggaggtcgccgtccctcctgaggggcagccggtgcatttgggacccgggagcagagcccgcgcctccccagcggcctccccgggggtctcaccgggtctccc

SEQ ID NO: 455950 - DNA, 23 bp, Homo sapiens
  chr21:46352868-46352891
  hyper
  breast vs. bladder_and_urothelial,anorectal
cagcagaggacggggccggggcc

SEQ ID NO: 455951 - DNA, 10 bp, Homo sapiens
  chr22:19711681-19711691
  hyper
ggccgccccg

SEQ ID NO: 455952 - DNA, 70 bp, Homo sapiens
  chr22:21386510-21386580
  hyper
  breast vs. multiple_myeloma,thyroid
cgagccggacccggaacaggagccgcggctctgcgtcggggcgggtgtggcccaggcagccacctggcca

SEQ ID NO: 455953 - DNA, 137 bp, Homo sapiens; identical to SEQ ID NO: 453177
  chr22:22862472-22862609
  hyper
  breast vs. uterine,prostate,myeloid_neoplasm,non_cancer

SEQ ID NO: 455954 - DNA, 60 bp, Homo sapiens; identical to SEQ ID NO: 352583
  chr22:24181727-24181787
  hyper
  breast vs. cervical,anorectal,multiple_myeloma, lymphoid_neoplasm

SEQ ID NO: 455955 - DNA, 97 bp, Homo sapiens
  chr22:27053098-27053195
  hyper
  breast vs. anorectal
cgcccctggtccgcggtcgcgcgcagcccccgcgcctctccagccctgagctctctgcggcctaatgtggacgggcaagcgttgccatgacagcgcc

SEQ ID NO: 455956 - DNA, 268 bp, Homo sapiens
  chr22:27053250-27053518
  hyper
  breast vs. anorectal
gggggctgcggagtgctccctccaagaccggttgcaccccgctttcctggccaggactctgggcgcgggtaaggaggggttgggtgtgaggttgtaggggcgcaaggaggcgggaggagggtggaggtgagggccgggggtggggcgcctccgcccgccagccgctcccgcattaaaatttcatgggcgctgcagcagctacaaagacgacgccggctgcgctcgcgggaccagagggagggaggctgcggacgagtgcggggaggag

SEQ ID NO: 455957 - DNA, 307 bp, Homo sapiens
  chr22:29467406-29467713
  hyper
  breast vs. head_and_neck,pancreas_gallbladder
cgcgggctctgggagtggataagggggtggcgcccgggggttgagggggcccaggggcgagtgtacccaaggcgtgccggtcccgcccagccgcgctctgggtgcggcgagtctgcacactggtgcagatgttcccgccgccgcgccgggcgcaggtctgcacttgcaagcccgggaccagggacttgaaagcgcccggcgcgccgcctggacctgccccgccgggcgtcaccgctgcgctttaggcgggaactgtaggaaaatcccctctgcctggcgggagggcgggggaggaggacggcccacg

SEQ ID NO: 455958 - DNA, 149 bp, Homo sapiens; identical to SEQ ID NO: 352604
  chr22:29467742-29467891
  hyper
  breast vs. head_and_neck,pancreas_gallbladder

SEQ ID NO: 455959 - DNA, 5 bp, Homo sapiens
  chr22:38220591-38220596
  hyper
  breast vs. thyroid,non_cancer
cgttc

SEQ ID NO: 455960 - DNA, 14 bp, Homo sapiens
  chr22:42354024-42354038
  hyper
  breast vs. lymphoid_neoplasm,multiple_myeloma,non_cancer, pancreas_gallbladder,colorectal,upper_gi,thyroid
gcctgggccctccc

SEQ ID NO: 455961 - DNA, 1 bp, Homo sapiens
  chr22:42679388-42679389
  hyper
  breast vs. bladder_and_urothelial,colorectal
c

SEQ ID NO: 455962 - DNA, 4 bp, Homo sapiens
  chr3:9904708-9904712
  hyper
  breast vs. bladder_and_urothelial,prostate,anorectal, upper_gi,pancreas_gallbladder,colorectal,non_cancer,cervical, thyroid,multiple_myeloma,head_and_neck,renal
ggcc

SEQ ID NO: 455963 - DNA, 413 bp, Homo sapiens
  chr3:10206343-10206756
  hyper
  breast vs. liver_bileduct,bladder_and_urothelial, pancreas_gallbladder,upper_gi,sarcoma,anorectal,non_cancer, prostate,renal,thyroid
cgcatgatgcatggtgtagtgccgatggaagtggggtcagaaggcctcctgccgctgcggcagaattcccgtgtggccttctcccaccagggcctcagtttcccctcgcagttccgattctctggccggcgctggggtggagccggcggggccgtcgtgccgcccgtggccgctggggacgctggtgccctcccgccccgcccacttccccgccggtccgcccctggctagagaagccgcagcccgcagtgtccgacccagtcgtcccgcgccggagccggccccgtagcgtgccatggcctgctacatctaccagctgccctcctgggtgctggacgacctgtgccgcaacatggacgcgctcagcgagtgggactggatggagttcggtgagtgcggcccggggaggggag

SEQ ID NO: 455964 - DNA, 370 bp, Homo sapiens
  chr3:16553609-16553979
  hyper
  breast vs. lymphoid_neoplasm,multiple_myeloma, myeloid_neoplasm
cgtaacccctctctggggtttggtgacatctggggtcacttgaacttcgttgggattcagctgttcagagatacaaattaggaatcccggcagcagagaggccctacccacaggcccagaggtcgctcacattacacccggcttccttcctggcaaggccttaacttatcctgagatgacacacgatggcaggggttggaagatgcctagtctagttgagcgcccagctcctgaaacagctgtaccgactacaagggttccagcacatgagttgctggaaactggggtgaccactgacagagattgagccagactttttttttaaaaaagtacttcttgtttgtttgttttaagcccccgaagaaactca

SEQ ID NO: 455965 - DNA, 340 bp, Homo sapiens; identical to SEQ ID NO: 349744
  chr3:16926663-16927003
  hyper
  breast vs. liver_bileduct,pancreas_gallbladder,ovary

SEQ ID NO: 455966 - DNA, 159 bp, Homo sapiens
  chr3:42542869-42543028
  hyper
  breast vs. ovary
cgcacattctgctcagggctctgggacccgctgccctctccgcctctccactgaactccgcctctccttctgtcacacggctccgccagccactctatcctgccgccgcgaccacatctccagcctcgattgtgcaggctcgagcccgtagaaagaggg

SEQ ID NO: 455967 - DNA, 129 bp, Homo sapiens; identical to SEQ ID NO: 281069
  chr3:42543580-42543709
  hyper
  breast vs. ovary

SEQ ID NO: 455968 - DNA, 82 bp, Homo sapiens; identical to SEQ ID NO: 454369
  chr3:50377892-50377974
  hyper
  breast vs. anorectal

SEQ ID NO: 455969 - DNA, 167 bp, Homo sapiens; identical to SEQ ID NO: 346566
  chr3:50378002-50378169
  hyper
  breast vs. anorectal

SEQ ID NO: 455970 - DNA, 2 bp, Homo sapiens
  chr3:50402119-50402121
  hyper
  breast vs. cervical
cg

SEQ ID NO: 455971 - DNA, 25 bp, Homo sapiens
  chr3:50604957-50604982
  hyper
  breast vs. lymphoid_neoplasm,lung,pancreas_gallbladder, uterine,cervical,multiple_myeloma,bladder_and_urothelial, colorectal
cggggcggggggaacccccaagccc

SEQ ID NO: 455972 - DNA, 768 bp, Homo sapiens; identical to SEQ ID NO: 454376
  chr3:67048599-67049367
  hyper
  breast vs. lymphoid_neoplasm

SEQ ID NO: 455973 - DNA, 153 bp, Homo sapiens
  chr3:72149806-72149959
  hyper
  breast vs. bladder_and_urothelial,lymphoid_neoplasm,lung
cgggtaagagaataataaatcggtcacttcactatccaattagcagctgttgctccccgctggaggaagaaaacaaacaggaagaccctgccctgttttgtttaggatcaaactcgcctctgtaccacctaccggagggactctggggtttga

SEQ ID NO: 455974 - DNA, 96 bp, Homo sapiens; identical to SEQ ID NO: 349792
  chr3:72150077-72150173
  hyper
  breast vs. bladder_and_urothelial,lymphoid_neoplasm,lung

SEQ ID NO: 455975 - DNA, 102 bp, Homo sapiens
  chr3:99594790-99594892
  hyper
  breast vs. sarcoma,upper_gi,bladder_and_urothelial
cgctttgcgaaacctgtctgcagtttgtgatgctgagacagctttaacagccacccacagacttgctacctggctgtctgacagcagtgccccttggtggag

SEQ ID NO: 455976 - DNA, 438 bp, Homo sapiens; identical to SEQ ID NO: 345099
  chr3:124773932-124774370
  hyper
  breast vs. cervical,anorectal,liver_bileduct,upper_gi, pancreas_gallbladder,non_cancer,uterine,myeloid_neoplasm,renal, thyroid,bladder_and_urothelial

SEQ ID NO: 455977 - DNA, 3 bp, Homo sapiens
  chr3:126113959-126113962
  hyper
  breast vs. sarcoma,uterine,ovary
ccc

SEQ ID NO: 455978 - DNA, 123 bp, Homo sapiens
  chr3:127794271-127794394
  hyper
  breast vs. sarcoma,anorectal,cervical,thyroid, myeloid_neoplasm,renal,non_cancer,lung,pancreas_gallbladder, bladder_and_urothelial,prostate,head_and_neck,multiple_myeloma
cggtacacgcctttggcaattttgcatcaaaaaactaagtgtatgcacattttttttaattgaaagcccaactcagccttcccccactgctccttccccgcatgcacggggggacacacgcct

SEQ ID NO: 455979 - DNA, 132 bp, Homo sapiens
  chr3:127794860-127794992
  hyper
  breast vs. sarcoma,anorectal,cervical,thyroid, myeloid_neoplasm,renal,non_cancer,lung,pancreas_gallbladder, bladder_and_urothelial,prostate,head_and_neck,multiple_myeloma
cattgggaagccctccggccccctctctgcacacctggcacacggctcctccctggcggcatgtgggtatttgggttgggcgagcctctccctcccgattcccgagttccgagtgggtcccggcggaccagc

SEQ ID NO: 455980 - DNA, 289 bp, Homo sapiens
  chr3:127794860-127795149
  hyper
  breast vs. cervical,thyroid,anorectal,myeloid_neoplasm, renal,sarcoma,bladder_and_urothelial,non_cancer, pancreas_gallbladder,lung,multiple_myeloma,head_and_neck, prostate
cattgggaagccctccggccccctctctgcacacctggcacacggctcctccctggcggcatgtgggtatttgggttgggcgagcctctccctcccgattcccgagttccgagtgggtcccggcggaccagcgctattctggaggggcagtgcctcagaggcaggtcgcttcgagtggggatttgtgcgctctggcgcggaggaggggggtgggaagccggctcttgccctcctcacccggtggggagcgagcagggccaacggtgcgctgagagcgctcagggcgtcc

SEQ ID NO: 455981 - DNA, 44 bp, Homo sapiens; identical to SEQ ID NO: 345102
  chr3:127795229-127795273
  hyper
  breast vs. cervical,thyroid,anorectal,myeloid_neoplasm, renal,sarcoma,bladder_and_urothelial,non_cancer, pancreas_gallbladder,lung,multiple_myeloma,head_and_neck, prostate

SEQ ID NO: 455982 - DNA, 49 bp, Homo sapiens; identical to SEQ ID NO: 453213
  chr3:129694299-129694348
  hyper
  breast vs. multiple_myeloma,prostate,non_cancer, myeloid_neoplasm,sarcoma,thyroid,renal

SEQ ID NO: 455983 - DNA, 49 bp, Homo sapiens; identical to SEQ ID NO: 453213
  chr3:129694299-129694348
  hyper
  breast vs. sarcoma,multiple_myeloma,prostate

SEQ ID NO: 455984 - DNA, 475 bp, Homo sapiens
  chr3:131080684-131081159
  hyper
  breast vs. pancreas_gallbladder
cggcaccgcccacgctcggattggtccgaggtgagattcgcccttgtgccctcgtaggccttcggaacagcggaagagcagtgtcgggccatggccagggcccgcaggctggagctggccgaggccctggcgctggggccaggctagaggcatgcctgctatgcgctcctgcacgcgccggaccctggaattctctctggccgcctccctctgcgctacgccatactggtgaggagggcgcgcgcccggccactctccgctctggccttgcaccttccttgcggcgctactctcgggtgtccctgccaatcccagcttcctcctctctcagatgcagatgcgctttgatgggcgcctgggcttccctggcggattcgtggactcgcaagacagcagcctggaggacgggctgaaccgtggtctgctggaactgctgggcgaggcggcggccgccttccgcgtggagcgccctgac

SEQ ID NO: 455985 - DNA, 1 bp, Homo sapiens
  chr3:136537591-136537592
  hyper
  breast vs. ovary
c

SEQ ID NO: 455986 - DNA, 306 bp, Homo sapiens; identical to SEQ ID NO: 357696
  chr3:136538179-136538485
  hyper
  breast vs. ovary

SEQ ID NO: 455987 - DNA, 13 bp, Homo sapiens
  chr3:138679565-138679578
  hyper
  breast vs. myeloid_neoplasm,multiple_myeloma,thyroid
cgggcacagacgc

SEQ ID NO: 455988 - DNA, 15 bp, Homo sapiens
  chr3:142837817-142837832
  hyper
  breast vs. ovary
cgggacaagtatttt

SEQ ID NO: 455989 - DNA, 347 bp, Homo sapiens
  chr3:147138422-147138769
  hyper
  breast vs. prostate
cgagtctccgagctcaataacgcaaggatggctgaagagcgtctgctccatgtctctttgccggactcaacgaccctcacccactgccaccgagtgctaggcccacagaggcctggcagaagccactcacccctcactactcatgactaggaagaaagtggccggggcatgagggttcgagttctgtcctaggtcccggaagccagggctcccagcgtctagtcaggggcgcagaaaccctcgttcctccaaacccccgccacagggaccactccagaagaaacccattcgtgatttgggtccctttgtgtttgagtattgtggggagtgggctatctagactctaa

SEQ ID NO: 455990 - DNA, 4 bp, Homo sapiens
  chr3:157812151-157812155
  hyper
  breast vs. thyroid,non_cancer,myeloid_neoplasm
cgca

SEQ ID NO: 455991 - DNA, 80 bp, Homo sapiens
  chr3:159480852-159480932
  hyper
  breast vs. lung
cgctgaggtcatcctcagcgtgcagcccggaggggaagggaaacgtgagctaaagcaacaggttccacccacagcctgaa

SEQ ID NO: 455992 - DNA, 660 bp, Homo sapiens; identical to SEQ ID NO: 345115
  chr3:159480975-159481635
  hyper
  breast vs. lung

SEQ ID NO: 455993 - DNA, 48 bp, Homo sapiens; identical to SEQ ID NO: 454385
  chr3:181444767-181444815
  hyper
  breast vs. anorectal

SEQ ID NO: 455994 - DNA, 586 bp, Homo sapiens
  chr3:182971342-182971928
  hyper
  breast vs. lung
agtttgctgtaagtttccttactttgttactgaggcccccagagctccacgcataagtggtgtgaccagaaaccttttaacaagacccgcctgagcctgcgttagagctcccgctcggaaagtaaaagaccatcctaatccgcggcgctgcggaaccggtgtcccgtgtgggaggaaccgcggcgttccctgggcgtagggcccgcgaggccagcacagtccgcctcttggcggagcgccctgggccggtggttccgcgcggagttagtctgtggtcagttacgtggtgaaaacacggctgtgccgcggccgcatctttccgcggccgaggcctctctgggtgggagtgttggcttcctttccggatcgctaaatggggaaagttctggccgctcggcgggatacgtctccaggccacggatggttcgttctccgtgccgcggccccgagctgggctccctgggtctccagcgcgggctcccggcattgggggctgcgggccggcccctccgccccgcccccgccccgccgcgcctcctcggccgagcggctcgcggtctccggcgcgggaggctccgagtctgcc

SEQ ID NO: 455995 - DNA, 809 bp, Homo sapiens; identical to SEQ ID NO: 345120
  chr3:183165024-183165833
  hyper
  breast vs. liver_bileduct

SEQ ID NO: 455996 - DNA, 112 bp, Homo sapiens
  chr3:193775965-193776077
  hyper
  breast vs. head_and_neck,cervical,bladder_and_urothelial, multiple_myeloma,pancreas_gallbladder,anorectal,upper_gi, non_cancer,thyroid,lung
cgctgaaggacccacccagggaggaggctgagccgcgctccctctagcctccccagaggtgcattcgttaggttcccgccccggccccagccccagccccagcatcagctcc

SEQ ID NO: 455997 - DNA, 114 bp, Homo sapiens
  chr4:27086319-27086433
  hyper
  breast vs. ovary
cgtttctttctctccttacgcttatcggttttaacacatgccatttaccacctcccacccgctgattagggggctggaaacgggcttacatcactgtcagggcaggagaggaaa

SEQ ID NO: 455998 - DNA, 267 bp, Homo sapiens
  chr4:27086484-27086751
  hyper
  breast vs. ovary
gcagtgcttaggagaatgcgggacccaaatgaaattccgcgtctccccgcggcgggtgccgcagagccaccggcgaggggcgggcgccaccacgtgactgattattcaaatggaccgatgattaactcggtttatattgatgcaaataatcctgccggagcctgcaacggctaatgcattttggaactgtggtttttccattgatagcacaaaatattgtagaggaaagccattttcataatattaataatggaattacagaatcag

SEQ ID NO: 455999 - DNA, 77 bp, Homo sapiens; identical to SEQ ID NO: 370411
  chr4:27086840-27086917
  hyper
  breast vs. ovary

SEQ ID NO: 456000 - DNA, 202 bp, Homo sapiens
  chr4:30723862-30724064
  hyper
  breast vs. cervical
ctacgagctgaccctgcgagtgcgcgacggcggcgacccgcctcgctcctcgcaggccatcctacgggtcctcatcaccgacgtgaacgacaacagcccccgcttcgagaagagcgtgtacgaggccgacttggctgagaacagcgccccggggacccccatcctgcaactgcgcgcagccgacttggacgtgggggtcaac

SEQ ID NO: 456001 - DNA, 91 bp, Homo sapiens
  chr4:30724126-30724217
  hyper
  breast vs. cervical
cgagacgtccggctggctcagcgtcctgcaccggatcgaccgcgaggaggtgaaccagctgcgcttcacggtcatggcccgcgaccgcggg

SEQ ID NO: 456002 - DNA, 3 bp, Homo sapiens
  chr4:42155097-42155100
  hyper
  breast vs. prostate
gac

SEQ ID NO: 456003 - DNA, 194 bp, Homo sapiens; identical to SEQ ID NO: 453245
  chr4:55094321-55094515
  hyper
  breast vs. ovary

SEQ ID NO: 456004 - DNA, 70 bp, Homo sapiens; identical to SEQ ID NO: 357882
  chr4:55094684-55094754
  hyper
  breast vs. ovary

SEQ ID NO: 456005 - DNA, 6 bp, Homo sapiens
  chr4:57521376-57521382
  hyper
  breast vs. sarcoma,myeloid_neoplasm,non_cancer, multiple_myeloma
cgggga

SEQ ID NO: 456006 - DNA, 133 bp, Homo sapiens; identical to SEQ ID NO: 199452
  chr4:76555905-76556038
  hyper
  breast vs. lung,renal,ovary,non_cancer, pancreas_gallbladder,thyroid,multiple_myeloma,colorectal, upper_gi,prostate,bladder_and_urothelial,uterine

SEQ ID NO: 456007 - DNA, 92 bp, Homo sapiens; identical to SEQ ID NO: 453254
  chr4:102711787-102711879
  hyper
  breast vs. myeloid_neoplasm

SEQ ID NO: 456008 - DNA, 11 bp, Homo sapiens
  chr4:113443992-113444003
  hyper
  breast vs. non_cancer
cgtgtctacag

SEQ ID NO: 456009 - DNA, 194 bp, Homo sapiens
  chr4:187026475-187026669
  hyper
  breast vs. lung
cgccgccagccgcgccgcgggagcagtggggaccctgctctcttggcccagtagccctagagcgggtaaagccccgccccagccccccactccctccggcgggggctgctcccctgctcgcctggtggtcccagcgcggccgccctcgggccccggcggggtctgggccgcgctccccaggaacccgctccagc

SEQ ID NO: 456010 - DNA, 287 bp, Homo sapiens
  chr5:1874606-1874893
  hyper
  breast vs. ovary,melanoma,uterine,renal,sarcoma, bladder_and_urothelial,multiple_myeloma,thyroid,non_cancer, myeloid_neoplasm
cggtgagggactgggagaccgggatggggagagagagggaggccgggctgtctcgtcagcagcaggcgtgcccagggaaacgcaggtggcatacatcgcatgcataatctcaggagacggccactttaaatcttaattggttgccttttaaatatcatttaagggctggcttccctgcctctctctctagttaagaaggtgtcgtgtcaaactctattaccttgctggacgtctctcccttaagttaaaaaaaaaaaaaaaaaaagaaaagaaaaaagaaaaaaaaa

SEQ ID NO: 456011 - DNA, 19 bp, Homo sapiens
  chr5:1879488-1879507
  hyper
  breast vs. melanoma
cggtttgcacggtgaccgc

SEQ ID NO: 456012 - DNA, 87 bp, Homo sapiens; identical to SEQ ID NO: 358057
  chr5:1879747-1879834
  hyper
  breast vs. melanoma

SEQ ID NO: 456013 - DNA, 33 bp, Homo sapiens
  chr5:6583144-6583177
  hyper
  breast vs. anorectal,ovary
cgcttctcgggcgtcggggctcgccgcagtcac

SEQ ID NO: 456014 - DNA, 25 bp, Homo sapiens
  chr5:6583754-6583779
  hyper
  breast vs. anorectal,ovary
tgagagccaccgggctgcggtgcgc

SEQ ID NO: 456015 - DNA, 171 bp, Homo sapiens
  chr5:10564301-10564472
  hyper
  breast vs. lymphoid_neoplasm,thyroid,myeloid_neoplasm, non_cancer,ovary,sarcoma,anorectal,renal
cgcgaggggaaggccccgggggaaggcgtgtccccgcgccccgccccgccccgcctcggaaagcccccgcggtcccgcccaccccaggggctcgctcagcctccggagacttttttctttgagcgcagccgcctggtgccggtttccgccgagctggagcgcgcgggccac

SEQ ID NO: 456016 - DNA, 22 bp, Homo sapiens
  chr5:40680513-40680535
  hyper
  breast vs. lymphoid_neoplasm,upper_gi,multiple_myeloma, non_cancer,myeloid_neoplasm,colorectal,thyroid,anorectal
cgggtccaggacatctgagggc

SEQ ID NO: 456017 - DNA, 337 bp, Homo sapiens
  chr5:40680627-40680964
  hyper
  breast vs. lymphoid_neoplasm,upper_gi,multiple_myeloma, non_cancer,myeloid_neoplasm,colorectal,thyroid,anorectal
gggatgcggccctcgccgaagagagccaagaagggaagagcgcgctctccaaattgcttttgtaacttgttttcagtgagcattttattgattcagaatctatcgagaatagcactagcgagctacttttcccttgagatgggtcttattcatcttggcaatggagtgagttggattgtggggaggaagaggaatgggaaaatcagtttataaatattaatgtcagcaagagtgtgctgttggcaggacgtatcgcgagcctggagattttggtggccgcagttggtaagtggctacaatccagaaagtaggatcgagttgctccccttgtcttatc

SEQ ID NO: 456018 - DNA, 89 bp, Homo sapiens
  chr5:40680875-40680964
  hyper
  breast vs. myeloid_neoplasm,cervical,multiple_myeloma, lymphoid_neoplasm,non_cancer,pancreas_gallbladder,upper_gi, colorectal,thyroid,anorectal
cgtatcgcgagcctggagattttggtggccgcagttggtaagtggctacaatccagaaagtaggatcgagttgctccccttgtcttatc

SEQ ID NO: 456019 - DNA, 99 bp, Homo sapiens; identical to SEQ ID NO: 453281
  chr5:42950747-42950846
  hyper
  breast vs. sarcoma,non_cancer,myeloid_neoplasm,thyroid, multiple_myeloma

SEQ ID NO: 456020 - DNA, 3 bp, Homo sapiens
  chr5:42993305-42993308
  hyper
  breast vs. multiple_myeloma
cgc

SEQ ID NO: 456021 - DNA, 175 bp, Homo sapiens; identical to SEQ ID NO: 346682
  chr5:42995428-42995603
  hyper
  breast vs. lymphoid_neoplasm

SEQ ID NO: 456022 - DNA, 338 bp, Homo sapiens
  chr5:43007481-43007819
  hyper
  breast vs. colorectal,head_and_neck, bladder_and_urothelial,cervical,multiple_myeloma,anorectal, myeloid_neoplasm
cgaacctaggcaggcagcgtggggtggagttggcaaacgtcctgcaacccatgaagagccgctatggtaccactagcggttctaggacccaaaaactaacgaaactgctcaggagaagctgcaggcttgacccaccagaggtgctgccaccgagatcaattctgctcggacgaatgagcggtgctatgactcagaaagtgccagtccgaggaaccagggatactgggacatagtgaaaggagttagccagctttagggagactgtaagggaagggtccccagagaacctccgactggtgttttgtgcagataagggaacttgcacaagggacttgcct

SEQ ID NO: 456023 - DNA, 48 bp, Homo sapiens
  chr5:43007771-43007819
  hyper
  breast vs. colorectal,head_and_neck,cervical, bladder_and_urothelial,multiple_myeloma,myeloid_neoplasm, thyroid,non_cancer,prostate
cgactggtgttttgtgcagataagggaacttgcacaagggacttgcct

SEQ ID NO: 456024 - DNA, 2 bp, Homo sapiens
  chr5:43008736-43008738
  hyper
  breast vs. colorectal,multiple_myeloma,cervical, lymphoid_neoplasm,uterine,bladder_and_urothelial,head_and_neck, non_cancer,myeloid_neoplasm
cg

SEQ ID NO: 456025 - DNA, 388 bp, Homo sapiens
  chr5:43017314-43017702
  hyper
  breast vs. colorectal,cervical,anorectal,prostate, non_cancer,thyroid,myeloid_neoplasm,lymphoid_neoplasm,uterine, multiple_myeloma,head_and_neck,bladder_and_urothelial
atccaacgctggaatctttcagcccattttcctccccggctgtttttgaactactatccccaaatatcgaggatatctgacagagtgaaccatcagaataaggagcgattgccacagagttccatccagtaggggagggacttgatgtgcggggcaagcctgatgcccgggtcaggcgactgtgcctttcattctccacggagatcttgaacctagagtttccaagttccgaagagatgcggttgtcgacagctctcctagaatctctgatggctctgaacggggacaaaggtctagggcagagggatggtgtggaaggacccagccacggccattggaagagcagtttcctgcaatgtaatgctgtttgcgaccagcataagcttta

SEQ ID NO: 456026 - DNA, 304 bp, Homo sapiens
  chr5:43019347-43019651
  hyper
  breast vs. cervical,colorectal
cttaggtgtaacatgtaccggtttagatctgacagagatatcacaattgtaggattgcatcttttagcaaggtttgtaatttcttctttctaggattggttctctgtaatttttgcttatttttaaattctctctttgtcttttgctctgagaacgatgttaccgatgtgtttgctttccatgtttacttgcattttagcctttatttttttaattttgattttatttaaatgttatgtattttttttctactaattttgagcgtctcagcttcctgcttctttacttacattctctcaggatc

SEQ ID NO: 456027 - DNA, 304 bp, Homo sapiens; identical to SEQ ID NO: 456026
  chr5:43019347-43019651
  hyper
  breast vs. cervical

SEQ ID NO: 456028 - DNA, 260 bp, Homo sapiens
  chr5:43019887-43020147
  hyper
  breast vs. cervical
aagaacttcctaaaccatgttttactgtgcagaacggtgattgcacggagccgctgtacgcactagtaatttcatagcaccgttagctggcgctttttctgtcacaacacattaaaacgggttaaaatactgcaagcggattaaacacattaagaggattaaaacattaaaatgtctcaacacatttttctgacacaacacatttaaacggagtgggttcattcctccgaagaggatgtttaggcgtggaagcaccgctg

SEQ ID NO: 456029 - DNA, 9 bp, Homo sapiens
  chr5:43020294-43020303
  hyper
  breast vs. cervical
agccctagc

SEQ ID NO: 456030 - DNA, 7 bp, Homo sapiens
  chr5:43396922-43396929
  hyper
  breast vs. cervical,melanoma,anorectal,prostate,sarcoma
cgcgcta

SEQ ID NO: 456031 - DNA, 76 bp, Homo sapiens; identical to SEQ ID NO: 454408
  chr5:54518558-54518634
  hyper
  breast vs. myeloid_neoplasm

SEQ ID NO: 456032 - DNA, 10 bp, Homo sapiens
  chr5:77140518-77140528
  hyper
  breast vs. ovary
cgcaactttg

SEQ ID NO: 456033 - DNA, 38 bp, Homo sapiens
  chr5:77268330-77268368
  hyper
  breast vs. thyroid,ovary,myeloid_neoplasm,non_cancer, uterine
cgagttcacagatggtaaatcgcgtggagagaaatgag

SEQ ID NO: 456034 - DNA, 15 bp, Homo sapiens
  chr5:77269447-77269462
  hyper
  breast vs. thyroid,myeloid_neoplasm,non_cancer, multiple_myeloma,ovary,uterine
ttccccgcggggctc

SEQ ID NO: 456035 - DNA, 58 bp, Homo sapiens; identical to SEQ ID NO: 453320
  chr5:114515671-114515729
  hyper
  breast vs. prostate,non_cancer

SEQ ID NO: 456036 - DNA, 68 bp, Homo sapiens; identical to SEQ ID NO: 454414
  chr5:114515769-114515837
  hyper
  breast vs. prostate,non_cancer

SEQ ID NO: 456037 - DNA, 58 bp, Homo sapiens; identical to SEQ ID NO: 453320
  chr5:114515671-114515729
  hyper
  breast vs. prostate,ovary,thyroid,myeloid_neoplasm, non_cancer

SEQ ID NO: 456038 - DNA, 132 bp, Homo sapiens; identical to SEQ ID NO: 453321
  chr5:114515769-114515901
  hyper
  breast vs. prostate,ovary,thyroid,myeloid_neoplasm, non_cancer

SEQ ID NO: 456039 - DNA, 44 bp, Homo sapiens; identical to SEQ ID NO: 346728
  chr5:114516274-114516318
  hyper
  breast vs. prostate,ovary,thyroid,myeloid_neoplasm, non_cancer

SEQ ID NO: 456040 - DNA, 89 bp, Homo sapiens; identical to SEQ ID NO: 370831
  chr5:118788280-118788369
  hyper
  breast vs. upper_gi

SEQ ID NO: 456041 - DNA, 73 bp, Homo sapiens; identical to SEQ ID NO: 345194
  chr5:134880614-134880687
  hyper
  breast vs. thyroid,myeloid_neoplasm,non_cancer

SEQ ID NO: 456042 - DNA, 625 bp, Homo sapiens
  chr5:142781875-142782500
  hyper
  breast vs. anorectal,multiple_myeloma
gtttaagttgcaaataacccagccacattaattggccctaatgaaccatgccagagggtcttaagtggtattacaaggttgcaattatcaagtctgcaaccccaaacgtcaaactagcacttgtaaaaatcgcagcacaaaaccattacggttacagggggtctttttctaaaaggggccacttagaaacctcaggcgcgaattaacaacaaacgctaaagagcaagcccttgcggggcgggggtggagaagagaaaaaagtgcgaggttaaaagagaagtacgtccagacctgttgagttctctctccgacacgcccacttctaacagataacgccggccccggccgcagtctccaagttgcgggctgtcagccccccgcgtgtgcaccctcacgcgccccgcacgccctcctcaagccaggcgccgccggggcctccccggagcccgggctcgcgctcgggcgcgccggggtggcgtgcaaatattcgggcgagtaaaattcagacgcggcttagcgttcaccacgaaaacgggtgtcgggcgacccccttggagggaaaggggacactagggggagaaaagaggccaggattcccgcgaggaatgagaggctcgaagccccc

SEQ ID NO: 456043 - DNA, 78 bp, Homo sapiens
  chr5:142782625-142782703
  hyper
  breast vs. anorectal,multiple_myeloma
cgtcgcccggcccttgccagccccccacccccactccccgaggctaataaaagtttgtaggctcccgcggcggccccc

SEQ ID NO: 456044 - DNA, 3 bp, Homo sapiens
  chr5:145713896-145713899
  hyper
  breast vs. multiple_myeloma
ttc

SEQ ID NO: 456045 - DNA, 111 bp, Homo sapiens
  chr5:148206075-148206186
  hyper
  breast vs. prostate,bladder_and_urothelial,ovary,lung, sarcoma,anorectal
cgccccttcgcggctgccggcgtgccattggccgaaagttcccgtacgtcacggcgagggcagttcccctaaagtcctgtgcacataacgggcagaacgcactgcgaagcg

SEQ ID NO: 456046 - DNA, 36 bp, Homo sapiens; identical to SEQ ID NO: 350191
  chr5:148206432-148206468
  hyper
  breast vs. prostate,bladder_and_urothelial,ovary,lung, sarcoma,anorectal

SEQ ID NO: 456047 - DNA, 98 bp, Homo sapiens; identical to SEQ ID NO: 350197
  chr5:151066500-151066598
  hyper
  breast vs. melanoma,sarcoma,myeloid_neoplasm

SEQ ID NO: 456048 - DNA, 173 bp, Homo sapiens; identical to SEQ ID NO: 350200
  chr5:152870319-152870492
  hyper
  breast vs. bladder_and_urothelial,uterine

SEQ ID NO: 456049 - DNA, 834 bp, Homo sapiens
  chr5:158634816-158635650
  hyper
  breast vs. lung,pancreas_gallbladder,head_and_neck, colorectal,lymphoid_neoplasm,ovary
cgcaaagacagggagtctactctgaatacaaaggccatctttcaacttaaggaacagagagaggaaataaaactgctacctctgccatcggccgctcagcctgggtcacgactgcagcaccgacagctcattcttttgggcatgattcaagattcagtaaaactgcacactccgtattttaaaaaataaaaagacacacagtcctctccttccctttcagactagtttcctctttactgcagactgcgacgcaaggccatccactaatctttgatgcctgctcactgcacaggccccttcctctctccccgcacctcctcccacaacgcctgcagatctcagatgcgtttgaactacagtaaccccaacccagctcgcggcaagcaggcagcgcagcagcagtagcagcagcaaccgggccgccgccgccgcggggctaagagattacgttcagcaaaaactcttccaggaaagaggctcgagagctcccctcctatctcgccaagggtgctgactctgtcgcgccacgccacgtaccaaaaggctcgcgaagaaaaacgcgggcgaagttcagcatccccgaacagaaagggaactcattccagaaagggggttcacgggtctgagggtccttgggtggggaaagcagtattggagggagaagacagaagggatggcaagacagaggaaaccacggggacaaaaaggaagggatgaggagccctcttactataaaagggactgacggacgggatgcagagcaatgggcccccctcgaaaaatggactggcaggcccttccgcacccccaaacaacctcgcaccacctgaaagc

SEQ ID NO: 456050 - DNA, 824 bp, Homo sapiens
  chr5:158635191-158636015
  hyper
  breast vs. lung,head_and_neck,upper_gi
cgcggcaagcaggcagcgcagcagcagtagcagcagcaaccgggccgccgccgccgcggggctaagagattacgttcagcaaaaactcttccaggaaagaggctcgagagctcccctcctatctcgccaagggtgctgactctgtcgcgccacgccacgtaccaaaaggctcgcgaagaaaaacgcgggcgaagttcagcatccccgaacagaaagggaactcattccagaaagggggttcacgggtctgagggtccttgggtggggaaagcagtattggagggagaagacagaagggatggcaagacagaggaaaccacggggacaaaaaggaagggatgaggagccctcttactataaaagggactgacggacgggatgcagagcaatgggcccccctcgaaaaatggactggcaggcccttccgcacccccaaacaacctcgcaccacctgaaagcggggagcttgagtttggggctgcgtagatcaaagcagggtaagacgaagggaaagagggaggggagcttggaagcaaagtgaacaaagaggcaaaagaggcaaagttggaaatggaaacgagaaagggagctggaaaggggccgctctggaagggtcttgaaaaaggcctagaaatgggatgctggggaggcaaagggggacagccccgaggaagggcatctcaggaatgtaagggagcgctccaggccctgggaagaggaagggatgggagggcggggaggcagccgaggcccgggagctggaacagagggggctttgcgcggggcccaggaggggagagcagggtcggagggaggcgaccacc

SEQ ID NO: 456051 - DNA, 476 bp, Homo sapiens
  chr5:174119512-174119988
  hyper
  breast vs. colorectal
cgtgtcctcctgtgcagacgaggaaactgagtcacacgagaggaagcaattgctgatagttcacagttgccacgccctcctcatgcctttacagacatcccaggcctttgatcaaactagggagaggttagaagaaaggcgagacgggcctcagaagaatttggatctgttgaaaaaggattttaggacaagaacgaaacaagacgcgttttcatgggaacgcaaacccagtaacttctcagagccagggcttcgcagagaaactgcatcaaaaggaaaagagtctggtcccaacctttatttctcccaaggcatgaaactcctgatttcaaaccacttctctttgcctctgaaagaaaacaagaaaaagatggggctgtgtagttcttccaacagtgaaaaaaagaaagaaaagagagaagaagaaaactgtttcgggtttcgaaacagaaagggcctccttcccctttatcgat

SEQ ID NO: 456052 - DNA, 77 bp, Homo sapiens
  chr5:174120134-174120211
  hyper
  breast vs. colorectal
ctcaagtctcagggcgaagtcctgctgctttgagacgtttacagctttgattgaggaaagctattcagggctggggc

SEQ ID NO: 456053 - DNA, 41 bp, Homo sapiens
  chr5:174119947-174119988
  hyper
  breast vs. colorectal,multiple_myeloma,myeloid_neoplasm
cgggtttcgaaacagaaagggcctccttcccctttatcgat

SEQ ID NO: 456054 - DNA, 234 bp, Homo sapiens
  chr5:174120134-174120368
  hyper
  breast vs. colorectal,multiple_myeloma,myeloid_neoplasm
ctcaagtctcagggcgaagtcctgctgctttgagacgtttacagctttgattgaggaaagctattcagggctggggcgaggatctgtttgttttcaggaggaagcctctgtgagcctgccccctcccccctgtgtttccagagttgctggagagataaaagccatacctccttttgaccttcattggacagtaggagccccgactcagcgtggaataataaaggcatatcatgc

SEQ ID NO: 456055 - DNA, 175 bp, Homo sapiens; identical to SEQ ID NO: 350219
  chr5:174120406-174120581
  hyper
  breast vs. colorectal,multiple_myeloma,myeloid_neoplasm

SEQ ID NO: 456056 - DNA, 64 bp, Homo sapiens
  chr5:180632796-180632860
  hyper
  breast vs. cervical
cgctctcttgtcccccagctgtctccacagccccgcagcagagctgcctgtgttatccgcttcc

SEQ ID NO: 456057 - DNA, 244 bp, Homo sapiens; identical to SEQ ID NO: 358355
  chr5:180633225-180633469
  hyper
  breast vs. cervical

SEQ ID NO: 456058 - DNA, 61 bp, Homo sapiens; identical to SEQ ID NO: 453345
  chr6:391113-391174
  hyper
  breast vs. lymphoid_neoplasm,thyroid,non_cancer,prostate, myeloid_neoplasm

SEQ ID NO: 456059 - DNA, 18 bp, Homo sapiens
  chr6:2903030-2903048
  hyper
  breast vs. pancreas_gallbladder,colorectal,upper_gi, myeloid_neoplasm,thyroid,uterine,non_cancer,multiple_myeloma
cgtgagccactgcgcccg

SEQ ID NO: 456060 - DNA, 156 bp, Homo sapiens; identical to SEQ ID NO: 200240
  chr6:2903557-2903713
  hyper
  breast vs. pancreas_gallbladder,colorectal,upper_gi, myeloid_neoplasm,thyroid,uterine,non_cancer,multiple_myeloma

SEQ ID NO: 456061 - DNA, 73 bp, Homo sapiens
  chr6:3231938-3232011
  hyper
  breast vs. renal,ovary,upper_gi
cctggcttttctagggcgccatttccctgctacaggcaatctcccctcccccacgctgtcaatgatttgtggg

SEQ ID NO: 456062 - DNA, 70 bp, Homo sapiens; identical to SEQ ID NO: 350259
  chr6:3232260-3232330
  hyper
  breast vs. renal,ovary,upper_gi

SEQ ID NO: 456063 - DNA, 230 bp, Homo sapiens
  chr6:5084683-5084913
  hyper
  breast vs. pancreas_gallbladder
cgtgccgcgtgggcgccggccccacggggccccctctccgccctccctgcgggatcccggggcgcggactcgcgggcgcgtcgggcgggacagggggaggggcgggacgtgctcccgggcctggcgcgaatggcctccggccgctctcggctgcgggccatggccgctccccggcgcgtccccacacggtccccgccccagtctggccgcagcccaccccgcgccgccac

SEQ ID NO: 456064 - DNA, 665 bp, Homo sapiens; identical to SEQ ID NO: 346775
  chr6:5084942-5085607
  hyper
  breast vs. pancreas_gallbladder

SEQ ID NO: 456065 - DNA, 10 bp, Homo sapiens
  chr6:5997274-5997284
  hyper
  breast vs. uterine
aattcaatcc

SEQ ID NO: 456066 - DNA, 116 bp, Homo sapiens; identical to SEQ ID NO: 453351
  chr6:5997274-5997390
  hyper
  breast vs. uterine

SEQ ID NO: 456067 - DNA, 113 bp, Homo sapiens; identical to SEQ ID NO: 453352
  chr6:5997401-5997514
  hyper
  breast vs. uterine

SEQ ID NO: 456068 - DNA, 115 bp, Homo sapiens
  chr6:26233864-26233979
  hyper
cgtcacgcagtgcagcccccacactatttacaaatacagtacctgagggccgatatcccaaagctaaggcttatcaaaggcctgcgaaaagacagacaccgggcaccaccagcag

SEQ ID NO: 456069 - DNA, 130 bp, Homo sapiens; identical to SEQ ID NO: 454440
  chr6:26271217-26271347
  hyper
  breast vs. thyroid,myeloid_neoplasm,non_cancer,anorectal

SEQ ID NO: 456070 - DNA, 327 bp, Homo sapiens; identical to SEQ ID NO: 454441
  chr6:26272105-26272432
  hyper
  breast vs. anorectal,myeloid_neoplasm,thyroid,non_cancer

SEQ ID NO: 456071 - DNA, 22 bp, Homo sapiens
  chr6:27064607-27064629
  hyper
  breast vs. multiple_myeloma
cgtgggcttctgaagagaaacc

SEQ ID NO: 456072 - DNA, 41 bp, Homo sapiens; identical to SEQ ID NO: 358541
  chr6:50674750-50674791
  hyper
  breast vs. prostate

SEQ ID NO: 456073 - DNA, 14 bp, Homo sapiens
  chr6:50803791-50803805
  hyper
  breast vs. myeloid_neoplasm
cggtgacttctcta

SEQ ID NO: 456074 - DNA, 44 bp, Homo sapiens
  chr6:50805695-50805739
  hyper
  breast vs. multiple_myeloma,renal,thyroid,non_cancer
cgaaaaatggggggagatctttgcgagaaaggctagaaaaaatc

SEQ ID NO: 456075 - DNA, 8 bp, Homo sapiens
  chr6:50805846-50805854
  hyper
  breast vs. multiple_myeloma,renal,thyroid,non_cancer
taactgtc

SEQ ID NO: 456076 - DNA, 194 bp, Homo sapiens
  chr6:50808438-50808632
  hyper
  breast vs. myeloid_neoplasm,anorectal,cervical
cgtttccaacgttgctgtttgtcatcttccacagacttgtaaaatttactacaactccagaggggaaaatagtaaatctctggctaaatttaggtctagagctcatttgaacttttacagtgggttttctatttatttgatttactcctgtctttggcttcggtgtcatattgttggtgttttatggccggctc

SEQ ID NO: 456077 - DNA, 637 bp, Homo sapiens
  chr6:52227115-52227752
  hyper
  breast vs. upper_gi,pancreas_gallbladder,ovary, bladder_and_urothelial,colorectal,cervical
cggggcccgagctcgggaggcggggacgtcaggatcgcggcgttggggagtcctcgcaccccgagctcagaggggaggtccagagtcgcagcgttgggaacctgaggccaggggccggagtttagggccccgatgttgagtctccgaatccaagcccggaaggggggacgacgggttaggatgctggggagccctggagctctgaacggctgtagtggggtggccaggactgcgatgctggggagtcatggagcctgagcctggagagctggcgggggtgtggggaccgcgatgttgggaaggctgagcccggagggcgggagattcaggaccaagacgtgggggagtccgacagggcagaacgaggggcgtcctgtccgcatttgtggggcgccctccgcagggcggaggggaacggaacctgggaggggagtgcggaggagaggaagcccggggcggtagggagagcccgaggaagggcagcccgaggtaggggaaccccggaaagagtagggtgggtctaggcatgtgctttcgccggggaaagatggagggggcttctctgagagggtgggcgcgaggagcggagttgtgatgggaaccgccggcagctggctaatgggcggatgctggggct

SEQ ID NO: 456078 - DNA, 133 bp, Homo sapiens
  chr6:52227876-52228009
  hyper
  breast vs. upper_gi,pancreas_gallbladder,ovary, bladder_and_urothelial,colorectal,cervical
agggaatctagtctagggagcaagaccgggcatccccagacggaggcgggtggggacctcgcactcagcgcgcttggggaatattcggagcctgggtttgggggctgctgcaccttgccgacccggtgcgggg

SEQ ID NO: 456079 - DNA, 249 bp, Homo sapiens
  chr6:56818408-56818657
  hyper
  breast vs. anorectal
cgttcgctgggcactaatatgaaatcacttaaaaggaaacatgccactttcggctaggggacagcatgttcgtcattcagtgtcctactggtttcttaacacgcatataattaatattggtactcaggaaagagaacttcttctgaccttgagcgtgcgcgctaaataaattacctcagaacgaaagtggtgcgatctcaaaacagcatctggggagaaaagagataaatgagacttcatttaactcct

SEQ ID NO: 456080 - DNA, 571 bp, Homo sapiens
  chr6:71123134-71123705
  hyper
  breast vs. upper_gi,lung,pancreas_gallbladder, liver_bileduct
cggccggggacctgttgatcgcaggtatagccggctggcccgggctccctcgggactggggcgactgcgcatgctcgctggccgcgctgggccagtagccgagccgcggtgacgaaccggctccgcggttgcggtgtttgcggttgctgtgatggcgatgtgagggggcccggggcgggatggtgctgacccgggtcgggccgtcttcttgcagctggacaacgagctcctccgttcgacaggcgggggaagaggccgagccgggcgagaggtaacccccttactgtcccctctggctcccccggctcccgacacccacgacccctccctccgtccctcttgcccaggggccaggaaggaagcggcctcctcttcgtccgccgttcgcccgccgcggcccctcacccgactgctggcggtcggagcctggccccggccccgttgaaggtcggtggggacggcggtgcggagcgctctgagggaggcgaggggccgcggcgcgctgctctcccggtgcccgcggccgcccctgcccctgcgcgcgtccctcgacccgttcttcctgaacctc

SEQ ID NO: 456081 - DNA, 289 bp, Homo sapiens; identical to SEQ ID NO: 350397
  chr6:71123746-71124035
  hyper
  breast vs. upper_gi,lung,pancreas_gallbladder, liver_bileduct

SEQ ID NO: 456082 - DNA, 164 bp, Homo sapiens
  chr6:73329621-73329785
  hyper
  breast vs. multiple_myeloma,lymphoid_neoplasm
cgtgtccctgtgtcctgccttcctgagacttcttgcctgcacgcggggcccagccgcgccagagagatggaagtgactttacctacccagcgaaagtagcagtctgcaacaaggaaaacagctaagttaagaggaagtggttttcattttactgcttgcagaaa

SEQ ID NO: 456083 - DNA, 82 bp, Homo sapiens; identical to SEQ ID NO: 346833
  chr6:73330126-73330208
  hyper
  breast vs. multiple_myeloma,lymphoid_neoplasm

SEQ ID NO: 456084 - DNA, 51 bp, Homo sapiens
  chr6:79620238-79620289
  hyper
  breast vs. bladder_and_urothelial
cgaattatacaacgtagacctaggtcgtgcgatagctacaaaatacctaag

SEQ ID NO: 456085 - DNA, 776 bp, Homo sapiens; identical to SEQ ID NO: 332857
  chr6:89855504-89856280
  hyper
  breast vs. head_and_neck,lung

SEQ ID NO: 456086 - DNA, 62 bp, Homo sapiens; identical to SEQ ID NO: 454467
  chr6:106959878-106959940
  hyper
  breast vs. cervical

SEQ ID NO: 456087 - DNA, 263 bp, Homo sapiens; identical to SEQ ID NO: 454466
  chr6:106960046-106960309
  hyper
  breast vs. cervical

SEQ ID NO: 456088 - DNA, 315 bp, Homo sapiens
  chr6:107810308-107810623
  hyper
  breast vs. ovary,colorectal,head_and_neck
cgggaggagaaagtgcaaccaggcggggaggggaggatcccaccggggcgtggcgagggcgttcggggtccgggtgagcgggaccctacgcgggaccgtgcgctcccagaagctcccactcagcccaaccttttgggcgaaacccaggacacccagataagggtgcaggcggggtcacgcgtaaagctgttactttgaagcagggcataagtgagagagagataaagagagaaggaccaaggggaaaaagaaatgaaggggctgaaggccgagatgtcctacttctaagtagttctttgagaggcaaaagcttca

SEQ ID NO: 456089 - DNA, 128 bp, Homo sapiens; identical to SEQ ID NO: 346850
  chr6:107810665-107810793
  hyper
  breast vs. ovary,colorectal,head_and_neck

SEQ ID NO: 456090 - DNA, 315 bp, Homo sapiens; identical to SEQ ID NO: 456088
  chr6:107810308-107810623
  hyper
  breast vs. ovary,uterine,colorectal, bladder_and_urothelial,sarcoma

SEQ ID NO: 456091 - DNA, 430 bp, Homo sapiens; identical to SEQ ID NO: 350445
  chr6:107810665-107811095
  hyper
  breast vs. ovary,uterine,colorectal, bladder_and_urothelial,sarcoma

SEQ ID NO: 456092 - DNA, 573 bp, Homo sapiens
  chr6:111408744-111409317
  hyper
  breast vs. ovary
cgatccccgaggtgttcgcgcgcgccagctgtcctcgcggccgcctgcgcgctggccgcctgcgcgctgccagcccgcccgcccgccaggggctccgccgccctcgcctcggcctcgttagcccgccaggagccccgcagctcctccgggagcccgctggtaactcgcgtccctcgcgcttctccggcgcctgaggggcccgcctcgggccatggtgctctcccaggaggagccggactccgcgcggggcacgagcgaggcgcagccgctcggccccgcgcccacgggggccgctccgccgcccggcccgggaccctcggacagccccgaggcggctgtcgagaaggtggaggtggagctggcggggccggcgaccgcggagccccatgagccccccgaaccccccgagggcggctggggctggctggtgatgctggcggccatgtggtgcaacgggtcggtgttcggcatccagaacgcttgcggggtgctcttcgtgtccatgctggaaaccttcggctccaaagacgatgacaagatggtctttaagacaggtgaggcgcggcgcccgcc

SEQ ID NO: 456093 - DNA, 179 bp, Homo sapiens
  chr6:111409368-111409547
  hyper
  breast vs. ovary
ggctgtgtctgcctccgagtgtgcatgtcggtgggtccctgtgccagagggtgcgagcaggggggtctttcgagttgcagacagagcctgccgcttctggggcctcggggtgcccgtctttatatggaatccagctgcagagctgtgtgtttgcaagcaggtcgcagaacttacttgcc

SEQ ID NO: 456094 - DNA, 265 bp, Homo sapiens
  chr6:111409052-111409317
  hyper
  breast vs. ovary,anorectal,uterine
cgggaccctcggacagccccgaggcggctgtcgagaaggtggaggtggagctggcggggccggcgaccgcggagccccatgagccccccgaaccccccgagggcggctggggctggctggtgatgctggcggccatgtggtgcaacgggtcggtgttcggcatccagaacgcttgcggggtgctcttcgtgtccatgctggaaaccttcggctccaaagacgatgacaagatggtctttaagacaggtgaggcgcggcgcccgcc

SEQ ID NO: 456095 - DNA, 274 bp, Homo sapiens
  chr6:111409368-111409642
  hyper
  breast vs. ovary,anorectal,uterine
ggctgtgtctgcctccgagtgtgcatgtcggtgggtccctgtgccagagggtgcgagcaggggggtctttcgagttgcagacagagcctgccgcttctggggcctcggggtgcccgtctttatatggaatccagctgcagagctgtgtgtttgcaagcaggtcgcagaacttacttgccgagatcgtcctcctttcccctcagcagagcagacgctaacagtccacaggagcccttccttttattgtttgaaaacaaacagaaccccagaacct

SEQ ID NO: 456096 - DNA, 440 bp, Homo sapiens; identical to SEQ ID NO: 453397
  chr6:127836226-127836666
  hyper
  breast vs. lung

SEQ ID NO: 456097 - DNA, 225 bp, Homo sapiens; identical to SEQ ID NO: 453398
  chr6:127836441-127836666
  hyper
  breast vs. lung

SEQ ID NO: 456098 - DNA, 31 bp, Homo sapiens; identical to SEQ ID NO: 350458
  chr6:127837749-127837780
  hyper
  breast vs. lung

SEQ ID NO: 456099 - DNA, 217 bp, Homo sapiens
  chr6:137310942-137311159
  hyper
  breast vs. ovary
accaggcgcagcgagtaaccctactccgtttctgaacgcacgcgggggcgctgccaatgtaaggctccctgttaggaacgggtcctagccctcagcggagggtcacaaagaaatgagactttcctggcaagactgtggaatcagatcgagccatttttaactgtaaatgtctggctttgcctgcagcatttcaaggaagacttgactgctgtgcgtt

SEQ ID NO: 456100 - DNA, 369 bp, Homo sapiens; identical to SEQ ID NO: 453400
  chr6:143247975-143248344
  hyper
  breast vs. pancreas_gallbladder,liver_bileduct, colorectal,uterine,upper_gi,cervical,renal,non_cancer

SEQ ID NO: 456101 - DNA, 369 bp, Homo sapiens; identical to SEQ ID NO: 453400
  chr6:143247975-143248344
  hyper
  breast vs. liver_bileduct

SEQ ID NO: 456102 - DNA, 208 bp, Homo sapiens; identical to SEQ ID NO: 350470
  chr6:143248451-143248659
  hyper
  breast vs. liver_bileduct

SEQ ID NO: 456103 - DNA, 173 bp, Homo sapiens; identical to SEQ ID NO: 371353
  chr6:150312215-150312388
  hyper
  breast vs. non_cancer,thyroid

SEQ ID NO: 456104 - DNA, 752 bp, Homo sapiens; identical to SEQ ID NO: 332955
  chr6:150921277-150922029
  hyper
  breast vs. lung,upper_gi

SEQ ID NO: 456105 - DNA, 520 bp, Homo sapiens; identical to SEQ ID NO: 346865
  chr6:158402113-158402633
  hyper
  breast vs. bladder_and_urothelial

SEQ ID NO: 456106 - DNA, 396 bp, Homo sapiens; identical to SEQ ID NO: 453404
  chr7:3082731-3083127
  hyper
  breast vs. non_cancer,myeloid_neoplasm,thyroid, bladder_and_urothelial,pancreas_gallbladder

SEQ ID NO: 456107 - DNA, 84 bp, Homo sapiens; identical to SEQ ID NO: 350505
  chr7:3083602-3083686
  hyper
  breast vs. non_cancer,myeloid_neoplasm,thyroid, bladder_and_urothelial,pancreas_gallbladder

SEQ ID NO: 456108 - DNA, 141 bp, Homo sapiens
  chr7:22893437-22893578
  hyper
  breast vs. lung,liver_bileduct,lymphoid_neoplasm, prostate,cervical
cgggagccagtcttctgctacgtaattagacgagtcttgaaagaagcacccaggggcgtggctgaagactttaagaaacaccaggcaagggaggggagtgggtaccagagacacctaacattatttgagtggcaggagctt

SEQ ID NO: 456109 - DNA, 700 bp, Homo sapiens
  chr7:22893607-22894307
  hyper
  breast vs. lung,liver_bileduct,lymphoid_neoplasm, prostate,cervical
tcacagccagcgagagtttggggcagactccccagactcggaggccggggcaaagtgggagccggggccaagtgggagccggggccgtgtggggtgggggggggggcccaaggcggggaaggcccgggccgccgacagggggcgcgcgagggcctccgggccccgcgggcggggcgggtgctggacccggaggggccttccggcaactttttggttggtgccgccccgcccaggccccttttaaacttgatctccgcagtgccctcccttttcggccgcggcgcgtgactgggtaagtgggctcggaccttctggacgcaggagccgaccacgtggctccggggctaccccgtgcgcttcctaggcgcgcctctcgctgcccccacgccgaggcctcggctcggcgccgcggggaagcctccgttagggcccctcgggggtgggggcgtcctcgtggcgcttgggcccttcgtcccgggttaggacggcccgtgtccttgtgcgcttgaaggggccgccccctttcctcgaggatcccacccccactcagcagaagccgccaggcgcccgtcacctcccgtgcctgagtccctgccgtccacgcattcggcctacaggcagcttttagtcctttttcaattaaatgattgcattttgaggatcaaattccaaccgcaggcggaggcgccgagccccggac

SEQ ID NO: 456110 - DNA, 867 bp, Homo sapiens
  chr7:22893828-22894695
  hyper
  breast vs. lung,prostate
cgccccgcccaggccccttttaaacttgatctccgcagtgccctcccttttcggccgcggcgcgtgactgggtaagtgggctcggaccttctggacgcaggagccgaccacgtggctccggggctaccccgtgcgcttcctaggcgcgcctctcgctgcccccacgccgaggcctcggctcggcgccgcggggaagcctccgttagggcccctcgggggtgggggcgtcctcgtggcgcttgggcccttcgtcccgggttaggacggcccgtgtccttgtgcgcttgaaggggccgccccctttcctcgaggatcccacccccactcagcagaagccgccaggcgcccgtcacctcccgtgcctgagtccctgccgtccacgcattcggcctacaggcagcttttagtcctttttcaattaaatgattgcattttgaggatcaaattccaaccgcaggcggaggcgccgagccccggacggtctctgggttcttggtgcactcggggctcctgcctgcccaggggctgtgaccgcgcggacggaagcctatttgggaagcgagtgagatctgatgtctgaagcgctttaagtttctaagcggggcagtataatagcggggttagcaaacacacggaggtcatttcactcgcgcagccatcccccaccgccaccagtgccgttcatttgctactggcccgcagtcagataatttaaaggcttggagggacgagtcttgctggagccgacgcctacagtaagttgagcggagtgctgtgagccctaataagggagcctgctttcctcccgaagattcgcttttttgggagtggccagagcgttattacagcacagggcccgcttccaac

SEQ ID NO: 456111 - DNA, 210 bp, Homo sapiens
  chr7:23052818-23053028
  hyper
  breast vs. lung,prostate,ovary,bladder_and_urothelial, melanoma,uterine
cgaggattcccgagtatgttaaaatgagcctcaggagaggaataactcatagaaagaaggggcaagggctcaagaagagatcttcagcgaaataaccaaggaaggaagcgtggctgctgtctgaacctctccgccctgcaggggaccaaagaccgactcgggccaacgctgctctccagggggcgagggcggggggtcgacagtgaccat

SEQ ID NO: 456112 - DNA, 595 bp, Homo sapiens; identical to SEQ ID NO: 346883
  chr7:23053080-23053675
  hyper
  breast vs. lung,prostate,ovary,bladder_and_urothelial, melanoma,uterine

SEQ ID NO: 456113 - DNA, 599 bp, Homo sapiens
  chr7:23053195-23053794
  hyper
  breast vs. ovary,prostate,lung,lymphoid_neoplasm, bladder_and_urothelial,uterine,melanoma,renal,sarcoma
cgggtcacagcaggaggctggactgctcctcgccgggaaggaaagacccgagtcgcgcgcacaaagctgccgccctccaggcagcgggcaggctgcgcccaacttcggggcgagcagcgccggccgcagcccacccgcccgccagccgcccccagcgccccgcgccgcctcgcacccacccatggcgcctcgcgcgggagccgttacccccagtggagccgcggccccagggacaaagtcccggtcctgtcctcgccgccgcctcgccccggctcctccctgacaaaaaaaagttatccgttgccggacgccctgggggcccggcgtgggtctctcggctggactcaccagggcggctgccggagctccacctgcaggacctcgactcgtgaggctctcagcgacagcgacggaggctgctctgcttcctcccgagtagcagcaccacctgctccccttcttcctagcagaacgggtcccggtgagccatcttccccctcctctcactgactgacaacccagccgggagagccaccactgccgccagcctctctgacaggcacgaccagggacccgtcctcaagcagccaaccaccacc

SEQ ID NO: 456114 - DNA, 246 bp, Homo sapiens; identical to SEQ ID NO: 350530
  chr7:23053819-23054065
  hyper
  breast vs. ovary,prostate,lung,lymphoid_neoplasm, bladder_and_urothelial,uterine,melanoma,renal,sarcoma

SEQ ID NO: 456115 - DNA, 523 bp, Homo sapiens
  chr7:23507580-23508103
  hyper
  breast vs. uterine
cgtttacgcacgcgttccaatacccctggcgagctcacagggcagaggcaaattcctctccactcggccgcgcccacggcctcccaaccccggacagagaaggaaaggagggacccccgcgtgtccgcagctgctttcgcctctcctgctcctggaggggtgggggaatcatccgctgcttcccaagccctgcaaaccccccaaactgcttgttgggacccatttcccgtaggagcaatttgacccgctcggaccgaggacattcagctgtgagctttcgagagattttgtaaccaataaccataatcccgcggcagaggccacagaaaagctttcaattcctgcccagcatcatcaacacacacacccccgccataaacttaaaagcaaggattaaagaccggaacaccacgccacacggcagggggtaagcaccagaggacaagaagttctcagctgagtctctccacccaataacggagtgagaacagaatcggggcaaacagaagcagcagctcacctt

SEQ ID NO: 456116 - DNA, 122 bp, Homo sapiens; identical to SEQ ID NO: 454478
  chr7:23507981-23508103
  hyper
  breast vs. ovary

SEQ ID NO: 456117 - DNA, 761 bp, Homo sapiens; identical to SEQ ID NO: 454479
  chr7:23510081-23510842
  hyper
  breast vs. colorectal,cervical,anorectal,uterine, head_and_neck,upper_gi,ovary,non_cancer

SEQ ID NO: 456118 - DNA, 229 bp, Homo sapiens; identical to SEQ ID NO: 454480
  chr7:23513246-23513475
  hyper
  breast vs. uterine,anorectal,head_and_neck,cervical, non_cancer,lymphoid_neoplasm

SEQ ID NO: 456119 - DNA, 53 bp, Homo sapiens; identical to SEQ ID NO: 345264
  chr7:23514425-23514478
  hyper
  breast vs. uterine,anorectal,cervical,head_and_neck, thyroid,non_cancer,lymphoid_neoplasm

SEQ ID NO: 456120 - DNA, 242 bp, Homo sapiens
  chr7:23514425-23514667
  hyper
  breast vs. uterine,cervical,ovary,sarcoma,anorectal, head_and_neck
ctggagtcacatcttcgtttccctgcccatttccaacatcttagagttgatgcgtccttttttacttaaaacaactacaaccaaccatgttctcaggtaccagaacttttctgggcttctagagaaatcgactcgccctgcccgctcccttcctaaacccctttgtggtccacagggttgttttaagcaaaatcaaacaacccctccaaaaaaagcaaacgaaaaattccgggtaaaatcaa

SEQ ID NO: 456121 - DNA, 843 bp, Homo sapiens
  chr7:25019058-25019901
  hyper
  breast vs. lung
cgttgtctcagtctctccggcgcgccccatcccgcggatgtggtaaagcttcgcgctcgccccaatttaccaggcttcctgagcctctagccccggcgtagcgcctccccgctgcccaggacagctccgcgcgccgcgtcctcccgcacctgcgccgcggcccctgcgctcggctcctcctggcggtcaatcctctgagccgtccctcgagggaaggtgtcctggggtgggtgagacccgggtcctccttccccgggagctgcagccggcacccaagctcccaggcttgggtctgccccagggccggagcctccccgggcgactcggacagaccccggtccggcagagaaccgcggcgccccgcaaacagcagcccttccgagcccgcgccgccgccaggccccccgacacccaggccccatttaggcgggcgccccgccactcacctgagcgctgtgcagccggagacgctccctagttccccggggccgggctccggggttagcgcacagaaccgggagaaggcaaccccggcttctccggtacccccgcaacgtgcagctgacagctcccgcaccggccgcaggagtcgggggcggggatggccacttgcagacagactgcggggccggagccgcgctgcgcaccggccgcgaagcgctcaagtcccctctcccgggccggctggcgggcgccaccagcacgcggccagttctgagtactttgcccagaacttctcggcgcgcgccgcccggcgattagcccgaggagccgcgcaagggcgggagcgcaggggaggggcctgagaggcccaggggcggggccccgagggggcgggagggc

SEQ ID NO: 456122 - DNA, 845 bp, Homo sapiens; identical to SEQ ID NO: 358785
  chr7:25019409-25020254
  hyper
  breast vs. lung,upper_gi,pancreas_gallbladder

SEQ ID NO: 456123 - DNA, 196 bp, Homo sapiens
  chr7:25896938-25897134
  hyper
  breast vs. anorectal,sarcoma
ttgtaacactttgggaagttattaaaaggaagatctactgcttcctccttttgggttaaactggatggcaatgtttgtcactggcccttattagagaagagtgtggcgaggtggagggccgttggacgctgggtttgtttgtgtgggtcttgttttttattacaagacacattatccttttaattacaagctgtag

SEQ ID NO: 456124 - DNA, 109 bp, Homo sapiens; identical to SEQ ID NO: 345266
  chr7:25897246-25897355
  hyper
  breast vs. anorectal,sarcoma

SEQ ID NO: 456125 - DNA, 225 bp, Homo sapiens
  chr7:26192423-26192648
  hyper
  breast vs. upper_gi
cgtccctcgcaccagcgtggatgcatggctggtgcacagcgtggctgccgggagcgcggacgaggcccacgggctgctcggcgccgccgccgcctcgtccaccggaggagccggcgccagcgtggacggcggcagccaggctgtgcaggggggcggcggggacccccgagcggctcggagtggccccttggacgccggggaagaggagaaggcacccgcggaacc

SEQ ID NO: 456126 - DNA, 20 bp, Homo sapiens
  chr7:26192666-26192686
  hyper
  breast vs. upper_gi
cgctggcggatgtgcgagcg

SEQ ID NO: 456127 - DNA, 112 bp, Homo sapiens
  chr7:26192748-26192860
  hyper
  breast vs. upper_gi
cttgtgtcggatctgagcaggggccactctcgctgtgtcctggcacccttagcccctggtctttgcaggttcgcagatgctgctgctctgattccgaatgaagggctactag

SEQ ID NO: 456128 - DNA, 91 bp, Homo sapiens
  chr7:27135176-27135267
  hyper
  breast vs. bladder_and_urothelial,head_and_neck,prostate, lymphoid_neoplasm,non_cancer,multiple_myeloma
cgtctgcttcctgatttaacgcgtaggggctgtaaggcgcactgaagttctgtgagccatagcttggaccacaacttgagtgggagtagga

SEQ ID NO: 456129 - DNA, 142 bp, Homo sapiens; identical to SEQ ID NO: 345270
  chr7:27136790-27136932
  hyper
  breast vs. bladder_and_urothelial,head_and_neck, anorectal,prostate,sarcoma,non_cancer,lymphoid_neoplasm, melanoma

SEQ ID NO: 456130 - DNA, 3 bp, Homo sapiens
  chr7:27191273-27191276
  hyper
  breast vs. sarcoma
aac

SEQ ID NO: 456131 - DNA, 5 bp, Homo sapiens
  chr7:27219316-27219321
  hyper
  breast vs. upper_gi,colorectal
cgacg

SEQ ID NO: 456132 - DNA, 78 bp, Homo sapiens
  chr7:27281871-27281949
  hyper
  breast vs. multiple_myeloma
cgtagcttgtaaaaagacttttcagccagtttgaggttagctgccaggggcagacagttgtaataatgccgacagaat

SEQ ID NO: 456133 - DNA, 52 bp, Homo sapiens; identical to SEQ ID NO: 453417
  chr7:42927739-42927791
  hyper
  breast vs. pancreas_gallbladder

SEQ ID NO: 456134 - DNA, 412 bp, Homo sapiens; identical to SEQ ID NO: 346903
  chr7:42928175-42928587
  hyper
  breast vs. pancreas_gallbladder

SEQ ID NO: 456135 - DNA, 80 bp, Homo sapiens
  chr7:99155672-99155752
  hyper
  breast vs. lymphoid_neoplasm,liver_bileduct,melanoma, sarcoma,anorectal
cgcaactgtcagtttcctccgtctctctcggttctattccaatctgctcatctcccctcccgtccccgctttccccaagg

SEQ ID NO: 456136 - DNA, 15 bp, Homo sapiens
  chr7:99156600-99156615
  hyper
  breast vs. lymphoid_neoplasm,liver_bileduct,melanoma, sarcoma,anorectal
ccgccgtcaggagcc

SEQ ID NO: 456137 - DNA, 216 bp, Homo sapiens
  chr7:99156600-99156816
  hyper
  breast vs. melanoma,sarcoma,anorectal,lymphoid_neoplasm
ccgccgtcaggagccggcgaccgtgccctggtgcgagctggtctgtatgtcctcactggtccttttgggactttgccttggcctaaaagggaagtgggaggagggcagcgccgggcaaggccttctgaggaccgagctgggagccgggcaggggcccagggcgagggtggtgggagggggacggcaccctcatgcgtccttgggcctgaaggacgc

SEQ ID NO: 456138 - DNA, 77 bp, Homo sapiens; identical to SEQ ID NO: 345277
  chr7:99156982-99157059
  hyper
  breast vs. melanoma,sarcoma,anorectal,lymphoid_neoplasm

SEQ ID NO: 456139 - DNA, 244 bp, Homo sapiens
  chr7:100167136-100167380
  hyper
  breast vs. cervical,prostate,pancreas_gallbladder, uterine,non_cancer,upper_gi
cgagcggggcgtggcaggagccagcagggtgcatggaggccccgttccaaagccctctaatcgccagcgccaccaccgctgccacaagtccgatcactggcctcacaccgaggctttctcggttgccccgacgacgtgtccggaccgcagtcagctgatcggtagagacgcccccacgctctctgcccctataaaggctcagtcttggggtcgaggccgcctctcttggacttccctactcaaa

SEQ ID NO: 456140 - DNA, 240 bp, Homo sapiens
  chr7:100167621-100167861
  hyper
  breast vs. cervical,prostate,pancreas_gallbladder, uterine,non_cancer,upper_gi
acccctgctggcctctccccgtgctcaagacacgagacccagccgtctctgcctcttctgcagccactttattgccttcgcccctgaatgaagcccgcaggcggcggccccggggagagccgggaatggccgccgtgcccctcagccagccgctgccctgggcctgccctgccgacgtgcggttctgcggccacctgcgcgcagacccgccgcgtcccgagtgttccgagagcgagcaga

SEQ ID NO: 456141 - DNA, 240 bp, Homo sapiens; identical to SEQ ID NO: 456140
  chr7:100167621-100167861
  hyper
  breast vs. pancreas_gallbladder,cervical

SEQ ID NO: 456142 - DNA, 145 bp, Homo sapiens; identical to SEQ ID NO: 350625
  chr7:100168054-100168199
  hyper
  breast vs. pancreas_gallbladder,cervical

SEQ ID NO: 456143 - DNA, 148 bp, Homo sapiens
  chr7:121956311-121956459
  hyper
  breast vs. myeloid_neoplasm
cgcactccggtgactactccctgaaagccaatgagcggttgaccctctggtgacatctggaacccaggttcagagtttcgctctcgcctctactcccttaatattttactcaatgtcacagaggagaacagcttaaggcagccctgct

SEQ ID NO: 456144 - DNA, 82 bp, Homo sapiens
  chr7:129421203-129421285
  hyper
  breast vs. cervical
cgttaacaccttgtcttgggctcgagcaaaagaagggggtgaggcagtggaagcggggcccgggaaatctatagtttcccca

SEQ ID NO: 456145 - DNA, 282 bp, Homo sapiens
  chr7:129421349-129421631
  hyper
  breast vs. cervical
gcccgactcccgggcagggcctgctgaagccgtagatgtcgcagccagatggatcgggaagcaagattcccaccccaggtggataactggacgagtctcagggcctcggggcccctctccccatgcagccagggatgggcacggtgagcgagaacccggacagcggagataatgagcacgtcacagagcccaacgggccaaaagggggtgatagctccacattaacccctccccgtcctactagcattcccccgcccatctaggtcgcctcgagcctccctg

SEQ ID NO: 456146 - DNA, 19 bp, Homo sapiens
  chr7:129423482-129423501
  hyper
  breast vs. thyroid,non_cancer
tgaaaaacgcaaaaggcac

SEQ ID NO: 456147 - DNA, 170 bp, Homo sapiens
  chr7:129424378-129424548
  hyper
  breast vs. non_cancer,myeloid_neoplasm,thyroid
cgggatgctgaagcctgcaggagttgaatcagagggcgagctgcagagcggaggcactggggcggcgggccttgcccgggctcttggctcccatgaatcctcgatgagtagagaatcgtcgctcggagcaaaggcgagaggagagagaagcgtgcgggtgcggcccttgc

SEQ ID NO: 456148 - DNA, 4 bp, Homo sapiens
  chr7:131514717-131514721
  hyper
  breast vs. bladder_and_urothelial
cgga

SEQ ID NO: 456149 - DNA, 27 bp, Homo sapiens
  chr7:149111880-149111907
  hyper
  breast vs. multiple_myeloma
cggaaacccgcggggcttttctacacc

SEQ ID NO: 456150 - DNA, 32 bp, Homo sapiens; identical to SEQ ID NO: 350667
  chr7:149112425-149112457
  hyper
  breast vs. multiple_myeloma

SEQ ID NO: 456151 - DNA, 351 bp, Homo sapiens; identical to SEQ ID NO: 333299
  chr7:150676178-150676529
  hyper
  breast vs. ovary

SEQ ID NO: 456152 - DNA, 15 bp, Homo sapiens
  chr7:156409835-156409850
  hyper
catgccgggactgac

SEQ ID NO: 456153 - DNA, 20 bp, Homo sapiens
  chr8:23020932-23020952
  hyper
  breast vs. colorectal,cervical,anorectal,renal,upper_gi, pancreas_gallbladder,non_cancer,myeloid_neoplasm,liver_bileduct
cgaacgaacgaacgaacgaa

SEQ ID NO: 456154 - DNA, 25 bp, Homo sapiens
  chr8:23021107-23021132
  hyper
  breast vs. colorectal,cervical,anorectal,renal,upper_gi, pancreas_gallbladder,non_cancer,myeloid_neoplasm,liver_bileduct
cggcccggtcgctcctgcccagccc

SEQ ID NO: 456155 - DNA, 127 bp, Homo sapiens; identical to SEQ ID NO: 345299
  chr8:23021590-23021717
  hyper
  breast vs. colorectal,cervical,anorectal,renal,upper_gi, pancreas_gallbladder,non_cancer,myeloid_neoplasm,liver_bileduct

SEQ ID NO: 456156 - DNA, 57 bp, Homo sapiens
  chr8:37655257-37655314
  hyper
  breast vs. thyroid
cgggggacaggcgcaccccagagaaaggcaccgcaggcgcccactcacctgcacagg

SEQ ID NO: 456157 - DNA, 6 bp, Homo sapiens
  chr8:38008624-38008630
  hyper
  breast vs. sarcoma,myeloid_neoplasm,thyroid
tggggc

SEQ ID NO: 456158 - DNA, 25 bp, Homo sapiens
  chr8:38323132-38323157
  hyper
cggcaaagacggccggcaatagcag

SEQ ID NO: 456159 - DNA, 6 bp, Homo sapiens
  chr8:55372563-55372569
  hyper
  breast vs. ovary
tgatcc

SEQ ID NO: 456160 - DNA, 173 bp, Homo sapiens
  chr8:56791852-56792025
  hyper
  breast vs. upper_gi
cggagaacttgccgggccatttgactctacgtcatcccctcccccatcaatgccctgaacagcctcctgtacacccttaaggaacttactttgtaatgattattaagaactcagcgagaccccgagcatcacctcggcatatcgcatcctttctctagagaacccctaatgtt

SEQ ID NO: 456161 - DNA, 731 bp, Homo sapiens
  chr8:56792065-56792796
  hyper
  breast vs. upper_gi
ccccttcctaataataccttggggatgggtcggaaggaaaggaaaggagacgcgagaggtgtagtcgatgtgcctgcgaagcccaggctcctctggagatccttccgtccgtccctacaggagaaggctggcccgggctgctccactccccggagctgcagactgagtcgccaggtttctgtgccttcaaagccctgcgcgacggccacaccaaacacccaaaccttgggcagggaccaaacggtcacttccccgccctccgggctcaatatgcaaatccgagcaccaggaagtagctgggacctctcggccgagcccagagacagccagttcctctcccgccgcgccgggccgcgctgccgctcgctccccggccgtggcgcctccgggccagacgcgctgcagcctccagcccgcggcaagcggggcggccgcgccacccccggccccgcgccagcagcccctcgccgcgcgtccagcgttcccggccagcagcctccccatacgcaggtcctgctgggccgccccgtcgcgccccccactctgaactcaagtcaccgtggagctccgccgccccgaaactttcaccgcgagcgggtgagtcctctgcgcgagcccaggggtgggcgcgggcacgcgggcagtgggtgcaggggccgcggctgtgccaccagccggagtcccgggcgcagggtagactcggggccgggggcatcggcgcggcccgcggc

SEQ ID NO: 456162 - DNA, 935 bp, Homo sapiens; identical to SEQ ID NO: 350750
  chr8:56792306-56793241
  hyper
  breast vs. upper_gi,lung,pancreas_gallbladder,ovary

SEQ ID NO: 456163 - DNA, 11 bp, Homo sapiens
  chr8:57069543-57069554
  hyper
  breast vs. prostate
cgaaaagtaga

SEQ ID NO: 456164 - DNA, 103 bp, Homo sapiens
  chr8:60030067-60030170
  hyper
  breast vs. myeloid_neoplasm,thyroid,non_cancer
cgaggagcttctccacggggaagtgtgtgtgtgagagcctgcctgtgtgtcaacactgtccaagactcggagctgcgactcggtcgcgtggtgcggagtccag

SEQ ID NO: 456165 - DNA, 239 bp, Homo sapiens; identical to SEQ ID NO: 453448
  chr8:60030908-60031147
  hyper
  breast vs. myeloid_neoplasm,thyroid,non_cancer,ovary

SEQ ID NO: 456166 - DNA, 200 bp, Homo sapiens; identical to SEQ ID NO: 453449
  chr8:60030947-60031147
  hyper
  breast vs. ovary,uterine,lung,non_cancer, myeloid_neoplasm

SEQ ID NO: 456167 - DNA, 115 bp, Homo sapiens; identical to SEQ ID NO: 346983
  chr8:60031791-60031906
  hyper
  breast vs. ovary,uterine,lung,non_cancer, myeloid_neoplasm

SEQ ID NO: 456168 - DNA, 350 bp, Homo sapiens; identical to SEQ ID NO: 453451
  chr8:60031791-60032141
  hyper
  breast vs. uterine,ovary,non_cancer,myeloid_neoplasm, thyroid

SEQ ID NO: 456169 - DNA, 103 bp, Homo sapiens; identical to SEQ ID NO: 453452
  chr8:60032288-60032391
  hyper
  breast vs. uterine,ovary,non_cancer,myeloid_neoplasm, thyroid

SEQ ID NO: 456170 - DNA, 229 bp, Homo sapiens; identical to SEQ ID NO: 453453
  chr8:60031912-60032141
  hyper
  breast vs. thyroid,myeloid_neoplasm,non_cancer,uterine

SEQ ID NO: 456171 - DNA, 203 bp, Homo sapiens; identical to SEQ ID NO: 453454
  chr8:60032288-60032491
  hyper
  breast vs. thyroid,myeloid_neoplasm,non_cancer,uterine

SEQ ID NO: 456172 - DNA, 55 bp, Homo sapiens; identical to SEQ ID NO: 346990
  chr8:72756949-72757004
  hyper
  breast vs. sarcoma

SEQ ID NO: 456173 - DNA, 197 bp, Homo sapiens
  chr8:82192428-82192625
  hyper
  breast vs. ovary,pancreas_gallbladder, bladder_and_urothelial,anorectal,upper_gi,cervical
cggcggtggatatgttgtcaaacggaggggtgcaggagaggcggggccaggcctccaggtgacccctctggcttcctgggcctgcagaggcgccgaaacgtgcaggcgccggcgtccatgaggcgtggggcgcgccgggcgagtccctgcttgcaggaggcgcccgagaggccgtcgcgtaccctggcaagaggagc

SEQ ID NO: 456174 - DNA, 99 bp, Homo sapiens; identical to SEQ ID NO: 345308
  chr8:82193698-82193797
  hyper
  breast vs. bladder_and_urothelial,ovary, pancreas_gallbladder,anorectal,upper_gi,colorectal, lymphoid_neoplasm,cervical,renal,prostate,non_cancer, myeloid_neoplasm,thyroid

SEQ ID NO: 456175 - DNA, 140 bp, Homo sapiens; identical to SEQ ID NO: 333501
  chr8:91014317-91014457
  hyper
  breast vs. liver_bileduct

SEQ ID NO: 456176 - DNA, 244 bp, Homo sapiens
  chr8:91657148-91657392
  hyper
  breast vs. liver_bileduct,bladder_and_urothelial
cgaggctccgcgttaggtatgttttatgtgtaggacagacttcccaggctgcgatggaaagtaatcgtaactcctgccgtcaatgtcacttctctgctggtatttatctgatagagcgccctcctagggccgccacaagaccgctcaaaaacagacttggagagggataggccagcgggaccccacttaccgaaaacactgcattctgaagcccaaaaggtatgggtgtcagtctggccagcgc

SEQ ID NO: 456177 - DNA, 245 bp, Homo sapiens; identical to SEQ ID NO: 350781
  chr8:91657421-91657666
  hyper
  breast vs. liver_bileduct,bladder_and_urothelial

SEQ ID NO: 456178 - DNA, 66 bp, Homo sapiens
  chr8:91996920-91996986
  hyper
  breast vs. sarcoma
cgtagctttgactaaaacaccagcaatgaaaaccttgtgccaccgggtggagggggcaaatcgtct

SEQ ID NO: 456179 - DNA, 45 bp, Homo sapiens; identical to SEQ ID NO: 371952
  chr8:99077294-99077339
  hyper
  breast vs. ovary

SEQ ID NO: 456180 - DNA, 59 bp, Homo sapiens; identical to SEQ ID NO: 350796
  chr8:99953137-99953196
  hyper
  breast vs. thyroid,myeloid_neoplasm

SEQ ID NO: 456181 - DNA, 40 bp, Homo sapiens
  chr8:114444541-114444581
  hyper
  breast vs. prostate,multiple_myeloma
tccccaaagacaagaccgcattcagggagaagagaaccag

SEQ ID NO: 456182 - DNA, 107 bp, Homo sapiens
  chr8:142427489-142427596
  hyper
  breast vs. colorectal,myeloid_neoplasm,non_cancer, multiple_myeloma,prostate,thyroid
cgggcggtggggctggtgggctgggcagggggtctgaactggagggactcgggcgccctcctcctcagggtgcaggacagcacctgcacggcggggccgcatttcca

SEQ ID NO: 456183 - DNA, 328 bp, Homo sapiens
  chr8:142427700-142428028
  hyper
  breast vs. colorectal,myeloid_neoplasm,non_cancer, multiple_myeloma,prostate,thyroid
gggggccagggggagctccgaggttctagggagggcgcgcaccgggagagggcgccgggccggccggcgggaggaaggaggggtcccgggcggcagcgcccccggccctcgccgcgccccgcacttccctttcctggctgggcttcctcttccccgcgcccgccctgcgcggcccctttgtttcccgggcagggcgcggctatatttaggcggcaggtgtgggagcccccggcagccgggtcgcccgccggtcacgccccccacgtgacgcccgggcgctataaatagccgcaggcggcggtggcggcagcgcctggagccggctccg

SEQ ID NO: 456184 - DNA, 77 bp, Homo sapiens; identical to SEQ ID NO: 345318
  chr8:145698674-145698751
  hyper
  breast vs. head_and_neck

SEQ ID NO: 456185 - DNA, 15 bp, Homo sapiens
  chr9:4300166-4300181
  hyper
  breast vs. pancreas_gallbladder,ovary
gccaattcgaaggcc

SEQ ID NO: 456186 - DNA, 41 bp, Homo sapiens; identical to SEQ ID NO: 359305
  chr9:35676180-35676221
  hyper
  breast vs. multiple_myeloma,non_cancer,cervical,prostate

SEQ ID NO: 456187 - DNA, 22 bp, Homo sapiens
  chr9:36036762-36036784
  hyper
  breast vs. prostate,melanoma,sarcoma,renal
cgacacacagttgggccataac

SEQ ID NO: 456188 - DNA, 63 bp, Homo sapiens
  chr9:37034135-37034198
  hyper
  breast vs. uterine,prostate,lymphoid_neoplasm
cgctcacaggtcggaataattcaagccttccgctcccccgccgagctggggtagctgatcact

SEQ ID NO: 456189 - DNA, 249 bp, Homo sapiens
  chr9:98783525-98783774
  hyper
  breast vs. ovary
cccaagcaacccgttcctccgaatcaggctgcttttctctgtaaagaaaagagaaagcaagcgattaactgatggcttggccggctggaaacgggaaagcgagttctccaggagccgcacacctcggggaagcccagtccctcccgggcagggagcgaggggcggtcctgggggctgcttcccgcggggagagaagggagggcggcgcagccctctgcggggtccgcccctcggttctccggacccccg

SEQ ID NO: 456190 - DNA, 55 bp, Homo sapiens; identical to SEQ ID NO: 372180
  chr9:101558601-101558656
  hyper
  breast vs. lung

SEQ ID NO: 456191 - DNA, 28 bp, Homo sapiens
  chr9:104248623-104248651
  hyper
  breast vs. ovary
gctggtttttcctggtcctgggagggac

SEQ ID NO: 456192 - DNA, 149 bp, Homo sapiens
  chr9:104248697-104248846
  hyper
  breast vs. ovary
cgcccgcagaaacccaacactgctgccgcgctctcggcgcgcccggcgaacctaaggtgtggacgcgccgcgagggtcccctgcttgcgggcggccattaggcgccaggccccttggcgcttcggccctgctaggctcggcgagggtct

SEQ ID NO: 456193 - DNA, 186 bp, Homo sapiens; identical to SEQ ID NO: 347048
  chr9:104248975-104249161
  hyper
  breast vs. ovary

SEQ ID NO: 456194 - DNA, 93 bp, Homo sapiens
  chr9:113800676-113800769
  hyper
  breast vs. ovary,uterine,cervical,pancreas_gallbladder, upper_gi,bladder_and_urothelial,anorectal,colorectal
cggcccgcgctccgcagcggggctggagacggagtcgccactcagggagcgtcagccgccagtcggcccctactgcccggctttggcgcgctg

SEQ ID NO: 456195 - DNA, 283 bp, Homo sapiens
  chr9:113800798-113801081
  hyper
  breast vs. ovary,uterine,cervical,pancreas_gallbladder, upper_gi,bladder_and_urothelial,anorectal,colorectal
agaggagcagcgccgacgccagcctcctctcttcctccgccttccttcttttctgcttgttccacgtagcacaagtcagcaacacccgaacccccagagtccgccctccccgctcccaagctggaccccttacctggtgtggcgcccccagcgcccctgacctctgcgccccctcctccattcattggctcgacagcccacggtggtggcagggccggggctggggggtggccttagcctcccattcattatctcagcagcctcccccgccccgcccccgagt

SEQ ID NO: 456196 - DNA, 66 bp, Homo sapiens; identical to SEQ ID NO: 359397
  chr9:113801414-113801480
  hyper
  breast vs. ovary,uterine,cervical,pancreas_gallbladder, upper_gi,bladder_and_urothelial,anorectal,colorectal

SEQ ID NO: 456197 - DNA, 193 bp, Homo sapiens
  chr9:129373418-129373611
  hyper
  breast vs. prostate,multiple_myeloma,thyroid
cggggaaggcatgcagaggggcccaaggggtgtggactcagcagccccaccccagaccagagaaggcagccaggctctggcgtccaccgagccagcgcccctatctgggcgcgggccgcatggcggcagaccaccctatatccgccttggtggcgtgggatatgactggcaggagcgcggaagaggcgctgag

SEQ ID NO: 456198 - DNA, 62 bp, Homo sapiens; identical to SEQ ID NO: 350941
  chr9:129373640-129373702
  hyper
  breast vs. prostate,multiple_myeloma,thyroid

SEQ ID NO: 456199 - DNA, 231 bp, Homo sapiens; identical to SEQ ID NO: 333788
  chr9:129393170-129393401
  hyper
  breast vs. uterine,cervical,renal,ovary,colorectal, lymphoid_neoplasm,bladder_and_urothelial

SEQ ID NO: 456200 - DNA, 136 bp, Homo sapiens
  chr9:129400713-129400849
  hyper
  breast vs. ovary,uterine,sarcoma,thyroid,renal, bladder_and_urothelial,multiple_myeloma,non_cancer,cervical, myeloid_neoplasm,prostate,liver_bileduct,head_and_neck,lung
cgcagccctgccaccctggggagctgaccccgaccccacccggccccccacgtcccagctcgggggctcacaaagggagaggagggaagagcaaaatcgcagagatttgtcttgtctggggctgacagcggagcga

SEQ ID NO: 456201 - DNA, 5 bp, Homo sapiens
  chr9:129445218-129445223
  hyper
  breast vs. multiple_myeloma,bladder_and_urothelial, uterine,myeloid_neoplasm,ovary,anorectal,thyroid,renal,cervical, sarcoma,prostate,non_cancer
cgcca

SEQ ID NO: 456202 - DNA, 5 bp, Homo sapiens
  chr9:131127222-131127227
  hyper
  breast vs. bladder_and_urothelial,ovary,cervical
cgtag

SEQ ID NO: 456203 - DNA, 138 bp, Homo sapiens; identical to SEQ ID NO: 359429
  chr9:131127341-131127479
  hyper
  breast vs. bladder_and_urothelial,ovary,cervical

SEQ ID NO: 456204 - DNA, 208 bp, Homo sapiens; identical to SEQ ID NO: 454524
  chr9:135645005-135645213
  hyper
  breast vs. liver_bileduct

SEQ ID NO: 456205 - DNA, 452 bp, Homo sapiens; identical to SEQ ID NO: 359456
  chr9:135645250-135645702
  hyper
  breast vs. liver_bileduct

SEQ ID NO: 456206 - DNA, 117 bp, Homo sapiens
  chrX:15755988-15756105
  hyper
  breast vs. bladder_and_urothelial,head_and_neck,prostate, liver_bileduct,upper_gi
cgagggaaagtcactttttagataaggctctgaagccccaggtctagtttcaatccactaatgcggccagcggcgagcaggaggagggaggattggtccggcgggggcggggccaga

SEQ ID NO: 456207 - DNA, 300 bp, Homo sapiens; identical to SEQ ID NO: 352654
  chrX:15756366-15756666
  hyper
  breast vs. bladder_and_urothelial,head_and_neck,prostate, liver_bileduct,upper_gi

SEQ ID NO: 456208 - DNA, 187 bp, Homo sapiens; identical to SEQ ID NO: 336699
  chrX:23801086-23801273
  hyper
  breast vs. prostate

SEQ ID NO: 456209 - DNA, 892 bp, Homo sapiens; identical to SEQ ID NO: 336707
  chrX:39933533-39934425
  hyper
  breast vs. prostate,upper_gi,head_and_neck

SEQ ID NO: 456210 - DNA, 744 bp, Homo sapiens
  chrX:39953894-39954638
  hyper
  breast vs. prostate
cgacgcgagcgggagcgagttaaagacacagtggaggcgaccgcgggcaggaagaaagagcgggctgcgcgggcctcgaggcgccgcacgcaacgcgccgccccgcgaagttacactcgcttccccgccgtccctcgctaccggcccctccccacttcccagcggcgctccccgcagcctggacagcgaggccccggcctgtgtgggaggcggaggccaggacggccctgcaaagggctggagagaatcgctaatgagctgtgcagcccattgatccggagaacacttcctaattaactctcagtcacctactggtgacagcgcctcaaaggacagcgctggggccagccgagccccagccgcgacttgccggccgggcgcctgctgcccaaaacccgcgcgctcccctaaacaccccaaggcaattggtgtgcgtggcggtgtatacccgcacactgaaggccagcctcggattaaacctggatggcatattaatcatcgccttccccccccactccgctctacgcgctgaaaccctgcccaaaataaacacgaaaaccaacactgcaaaacccacaccagataacaggtcgagagaggagtgggcagggtcaaggaacgagcgtattccctaagtgtccacgtacaggaatctttgaggctgacaattaaaatgccttccacgcaagcaattctgttggcaaaaccgaacccaacacttcgtaaggattgatttcggcccgc

SEQ ID NO: 456211 - DNA, 104 bp, Homo sapiens
  chrX:39956753-39956857
  hyper
  breast vs. prostate
cggccccgccgaggggtgggctctgggccgggtgggggcggggcggggcgggctcggggcctccgggcaggtggcgacagccccgtgcgatcctccgggctccc

SEQ ID NO: 456212 - DNA, 712 bp, Homo sapiens
  chrX:39957026-39957738
  hyper
  breast vs. prostate
cgcggcttgggctctccgcccggcggctcgcgggctccccctccgccgccgccgcccgcctagctcccgctctcggtcgcggtctgggctcctgcgcgtctcccccgcagccgccgagctcggcccgcgttcagcgaggagcgcagctctgcctcaccttgccgctgggagcccaggctccgtctgccgccgcacgccgcgatcccaacgcgtcccccctccctggttccctcctcttcctcctccccctccctccgcccgtcctccctcccgcccgccctacctccctccctcccaacagccgcctcccctccccccgcaggcgcagcgctcgggcgacagccgcccgcccgccgccgcctccagctctcgcaagtttgagctccgccagtctccgctcaccctccgctgcggcgcctccgcggcggggtttcgggaggggtgattccccaggaaaggtttgcccgagtttccccggccgtcatcgatgcacggcccggcacgttttggcctctctggatccgaaccccggaccacttgggtggcgccccccctcctcgtcccccggcctcccctccccagctcgggccgagttggctgcgcacgcccgacccgggcgcacgtcctgggcgagccggagaccgacttgggcggcggcggcggcgagggctgccggcagagccagagccgaagggatgggggcggcgggggc

SEQ ID NO: 456213 - DNA, 624 bp, Homo sapiens
  chrX:39957281-39957905
  hyper
  breast vs. prostate
cgcccgtcctccctcccgcccgccctacctccctccctcccaacagccgcctcccctccccccgcaggcgcagcgctcgggcgacagccgcccgcccgccgccgcctccagctctcgcaagtttgagctccgccagtctccgctcaccctccgctgcggcgcctccgcggcggggtttcgggaggggtgattccccaggaaaggtttgcccgagtttccccggccgtcatcgatgcacggcccggcacgttttggcctctctggatccgaaccccggaccacttgggtggcgccccccctcctcgtcccccggcctcccctccccagctcgggccgagttggctgcgcacgcccgacccgggcgcacgtcctgggcgagccggagaccgacttgggcggcggcggcggcgagggctgccggcagagccagagccgaagggatgggggcggcgggggcggctctcccagccgcgcgccgagactcccctcgctacccagaaggccagtggaggaccgcaattaccataaagcgcctcgcactccgctcagccaaagctgtcaaaccccagcggcagcagccgctgccgccgcctcttgccaccagcgctgcgctctcccggcctc

SEQ ID NO: 456214 - DNA, 151 bp, Homo sapiens; identical to SEQ ID NO: 352664
  chrX:39958064-39958215
  hyper
  breast vs. prostate

SEQ ID NO: 456215 - DNA, 155 bp, Homo sapiens
  chrX:39957750-39957905
  hyper
  breast vs. prostate
cgcgcgccgagactcccctcgctacccagaaggccagtggaggaccgcaattaccataaagcgcctcgcactccgctcagccaaagctgtcaaaccccagcggcagcagccgctgccgccgcctcttgccaccagcgctgcgctctcccggcctc

SEQ ID NO: 456216 - DNA, 514 bp, Homo sapiens; identical to SEQ ID NO: 362143
  chrX:39958064-39958578
  hyper
  breast vs. prostate

SEQ ID NO: 456217 - DNA, 187 bp, Homo sapiens
  chrX:40034239-40034426
  hyper
  breast vs. prostate
cgttttctagcccgagaaggggcaggcggccctcatggcgcctccttcggcggtttcctggcgaagcgcccatcctccccaagcaccaggaacggaggccgtccatattaatactcgcgggcagcctgttctgacctatactgtcattttttccatcggtcgggatcgggctgggggtggggtgggg

SEQ ID NO: 456218 - DNA, 90 bp, Homo sapiens
  chrX:40035057-40035147
  hyper
  breast vs. prostate
aagagccgcccttactcgactggggtgaggggcgggaaactttgcaagaagactgttccgcgccttccccgcgtggcacctcagaagaac

SEQ ID NO: 456219 - DNA, 599 bp, Homo sapiens
  chrX:40035057-40035656
  hyper
  breast vs. prostate
aagagccgcccttactcgactggggtgaggggcgggaaactttgcaagaagactgttccgcgccttccccgcgtggcacctcagaagaacgtgggtgggtttcccgtccgaggccagaccacgctaccctacttttccaggtttcggacctgaacctcgtggactacgggagggagagtacatttcgggccactgcggggggcggagggacaccaaagacaggcgtcttcaagggttctggcagatggccaagtttgtgtcctttccctcccacgctagagtagcgcacgccactttggggaagcgtgagaccgttcaccaccggccacgaggccaccaatgtcttccaggtggggccgatggtttgtctgcagcactcccttccgccttgcggtcctcgcctggctcccacagtcctggggagcccccagagctagcccgcgtcttccctcgcccgctcttccgggggaaagggaggctgtttgtgtggtgtgtagccccgctccggcttgcacccccgcgagccacctcgcagccctccccggcctcggcctcacggatcccctcccggagtagccccgcgggcccccccgccatgc

SEQ ID NO: 456220 - DNA, 564 bp, Homo sapiens
  chrX:40035161-40035725
  hyper
  breast vs. prostate
cgtccgaggccagaccacgctaccctacttttccaggtttcggacctgaacctcgtggactacgggagggagagtacatttcgggccactgcggggggcggagggacaccaaagacaggcgtcttcaagggttctggcagatggccaagtttgtgtcctttccctcccacgctagagtagcgcacgccactttggggaagcgtgagaccgttcaccaccggccacgaggccaccaatgtcttccaggtggggccgatggtttgtctgcagcactcccttccgccttgcggtcctcgcctggctcccacagtcctggggagcccccagagctagcccgcgtcttccctcgcccgctcttccgggggaaagggaggctgtttgtgtggtgtgtagccccgctccggcttgcacccccgcgagccacctcgcagccctccccggcctcggcctcacggatcccctcccggagtagccccgcgggcccccccgccatgcgtaatggggcgcccctgggacgcaggcggggatggcggttccggtcgttccgggatttgcgtgcaagaa

SEQ ID NO: 456221 - DNA, 282 bp, Homo sapiens
  chrX:40035852-40036134
  hyper
  breast vs. prostate
cgattcctcgtccggcccgtgccgcaccacgcggagctccgcgcgccctggctcccacaccggtccctccataactcgcgctcctccctcgctccgggctcggggagccgctcgctcccagcgcccagagtcagccggttccaccttcggctgcgagagccgccgccccgcgccacccccgcccggcccggcccttgtcccagcccggctcccccgccagctgcgccgccaccgccgcacgtgacccgcccccgtcgcggcttccgctgagctgcctgttcc

SEQ ID NO: 456222 - DNA, 60 bp, Homo sapiens
  chrX:40035665-40035725
  hyper
  breast vs. prostate
cgcccctgggacgcaggcggggatggcggttccggtcgttccgggatttgcgtgcaagaa

SEQ ID NO: 456223 - DNA, 721 bp, Homo sapiens; identical to SEQ ID NO: 347751
  chrX:40035852-40036573
  hyper
  breast vs. prostate

SEQ ID NO: 456224 - DNA, 76 bp, Homo sapiens
  chrX:68758240-68758316
  hyper
  breast vs. prostate
cgacaccggccgctgggtggcgctgtggctcctcctacccaggctggaggcaccagggaggcggaggcgcagccgc

SEQ ID NO: 456225 - DNA, 4 bp, Homo sapiens
  JH636052.4:5118715-5118719
  hyper
  breast vs. multiple_myeloma,anorectal,non_cancer, cervical
cgcc

SEQ ID NO: 456226 - DNA, 122 bp, Homo sapiens; identical to SEQ ID NO: 344922
  AEKP01184864.1_3582-5885:491-613
  hypo
  breast vs. liver_bileduct

SEQ ID NO: 456227 - DNA, 515 bp, Homo sapiens
  chr1:1047017-1047532
  hypo
  breast vs. liver_bileduct,head_and_neck, pancreas_gallbladder,lung
cggctggggcagtgggtagaccacacccacgctcaccgtaactccagccgcccaggcagcagtaactgaaaaggggaggcgggagggtccactggcgggtttctcacgctgctgaacctcggtaaacacagccccgagggctggctggagcttccactgcatccgtgtagctaatgctggtcatcttcgtagcaagcaaaggaagccaacgtgaaacgtagctttaagggcccaataagaactgtctggggcctctctacctaaagatccctctcgtgctttgatagaaaacaaataccgcaaaccccttgatggggtgtaaaggagacatccccctttgttgacatgcatggtagtcgctgcccacctacccgtgggctcagcacaccggagtcgggcggttgccgtaggtggctcagcagacgtgagcagggcaggatcgggcccatccccccaccgggaatgtcaggccaccatcaggtgatggtcaggtggctgttaactgtctaaaagaa

SEQ ID NO: 456228 - DNA, 237 bp, Homo sapiens
  chr1:1047619-1047856
  hypo
  breast vs. liver_bileduct,head_and_neck, pancreas_gallbladder,lung
ctcaggaactgggcgagttggctcaagcgtgtgcactgagaggcaaaatggcggcgtgtaaccgttctatgaccttctagggacgtttgacaggtaacggaagaacgcctcaggtgagcatgggcactactccagtgaacacacggcgcacggtccctccctccagtgaacacaacgcacacgctccctccctccagtgaacacacagcgcatgctccctccttccagtgaacacac

SEQ ID NO: 456229 - DNA, 158 bp, Homo sapiens
  chr1:1047374-1047532
  hypo
  breast vs. head_and_neck,lung,pancreas_gallbladder, liver_bileduct,upper_gi,bladder_and_urothelial
cgctgcccacctacccgtgggctcagcacaccggagtcgggcggttgccgtaggtggctcagcagacgtgagcagggcaggatcgggcccatccccccaccgggaatgtcaggccaccatcaggtgatggtcaggtggctgttaactgtctaaaagaa

SEQ ID NO: 456230 - DNA, 584 bp, Homo sapiens; identical to SEQ ID NO: 352709
  chr1:1047619-1048203
  hypo
  breast vs. head_and_neck,lung,pancreas_gallbladder, liver_bileduct,upper_gi,bladder_and_urothelial

SEQ ID NO: 456231 - DNA, 26 bp, Homo sapiens
  chr1:1049863-1049889
  hypo
  breast vs. liver_bileduct,sarcoma,uterine,renal,prostate, ovary,colorectal
cgcaaggcagggagcagctgggaggt

SEQ ID NO: 456232 - DNA, 191 bp, Homo sapiens; identical to SEQ ID NO: 455495
  chr1:1181916-1182107
  hypo
  breast vs. head_and_neck

SEQ ID NO: 456233 - DNA, 54 bp, Homo sapiens; identical to SEQ ID NO: 368955
  chr1:1182227-1182281
  hypo
  breast vs. head_and_neck

SEQ ID NO: 456234 - DNA, 110 bp, Homo sapiens
  chr1:1502406-1502516
  hypo
  breast vs. liver_bileduct,pancreas_gallbladder
cgccctacggacatacacgtgcctctgcaacatggctgcctgcaggatgcccactgccggccttccacagccacaaaagaacagacaagtagaataatccatccatgggg

SEQ ID NO: 456235 - DNA, 130 bp, Homo sapiens; identical to SEQ ID NO: 352717
  chr1:1502555-1502685
  hypo
  breast vs. liver_bileduct,pancreas_gallbladder

SEQ ID NO: 456236 - DNA, 120 bp, Homo sapiens
  chr1:1986115-1986235
  hypo
  breast vs. melanoma,colorectal,anorectal, lymphoid_neoplasm,cervical,head_and_neck
cgccacttcaccgctggcaccgtcgaggtctgggggcaggtctgactggtttcctttaccttagtgaagccggcggcctgcaccgacccggctcgcgcccatcccggggtcacccacatt

SEQ ID NO: 456237 - DNA, 13 bp, Homo sapiens
  chr1:1986391-1986404
  hypo
  breast vs. melanoma,colorectal,anorectal, lymphoid_neoplasm,cervical,head_and_neck
ttttttttaatac

SEQ ID NO: 456238 - DNA, 414 bp, Homo sapiens
  chr1:2013582-2013996
  hypo
  breast vs. renal,head_and_neck
tcaggggtgctggacgcgtcagacgggttctttgcagcccttggcagcgtcgcccgctctgtcccgcctgttgtgtgcgccttttccctgctccagggctgtgtatttggcaagagggaggctccgtggcacgatcacacgtgcaggagctgggggctgccagagcggctgttcaagatggacttggcaaatcacctctttcaagttgccggctacccggctgccgtagacagagtgaagtctggtagtttgtgtttatttatttatcttggccagcagagagaattgagtttgcatggagactgtaatttcattctgtgagtgtaagatcacgtccgcgttcctagcgaccggttttgtgatgtgggcagtgccgtgctggtaaatgctctgtgaggaaggaacgatggtggg

SEQ ID NO: 456239 - DNA, 174 bp, Homo sapiens; identical to SEQ ID NO: 375512
  chr1:2014025-2014199
  hypo
  breast vs. renal,head_and_neck

SEQ ID NO: 456240 - DNA, 574 bp, Homo sapiens; identical to SEQ ID NO: 336789
  chr1:2239631-2240205
  hypo
  breast vs. melanoma,bladder_and_urothelial, liver_bileduct,anorectal,cervical,renal

SEQ ID NO: 456241 - DNA, 476 bp, Homo sapiens; identical to SEQ ID NO: 362231
  chr1:2257929-2258405
  hypo
  breast vs. bladder_and_urothelial,cervical, lymphoid_neoplasm

SEQ ID NO: 456242 - DNA, 93 bp, Homo sapiens; identical to SEQ ID NO: 336796
  chr1:2330473-2330566
  hypo
  breast vs. lung,pancreas_gallbladder

SEQ ID NO: 456243 - DNA, 443 bp, Homo sapiens; identical to SEQ ID NO: 344934
  chr1:2461988-2462431
  hypo
  breast vs. cervical

SEQ ID NO: 456244 - DNA, 255 bp, Homo sapiens; identical to SEQ ID NO: 336806
  chr1:2520320-2520575
  hypo
  breast vs. head_and_neck,melanoma

SEQ ID NO: 456245 - DNA, 8 bp, Homo sapiens
  chr1:2520950-2520958
  hypo
  breast vs. head_and_neck,pancreas_gallbladder,uterine
cggaggcg

SEQ ID NO: 456246 - DNA, 38 bp, Homo sapiens
  chr1:2520987-2521025
  hypo
  breast vs. head_and_neck,pancreas_gallbladder,uterine
ccgccggcagcaacgagccattaaaactgcagttcctg

SEQ ID NO: 456247 - DNA, 39 bp, Homo sapiens; identical to SEQ ID NO: 352737
  chr1:2521063-2521102
  hypo
  breast vs. head_and_neck,pancreas_gallbladder,uterine

SEQ ID NO: 456248 - DNA, 5 bp, Homo sapiens
  chr1:3328265-3328270
  hypo
  breast vs. anorectal
cggcg

SEQ ID NO: 456249 - DNA, 215 bp, Homo sapiens; identical to SEQ ID NO: 454543
  chr1:3328319-3328534
  hypo
  breast vs. anorectal

SEQ ID NO: 456250 - DNA, 371 bp, Homo sapiens; identical to SEQ ID NO: 352754
  chr1:3328625-3328996
  hypo
  breast vs. anorectal

SEQ ID NO: 456251 - DNA, 644 bp, Homo sapiens; identical to SEQ ID NO: 362278
  chr1:3328625-3329269
  hypo
  breast vs. anorectal

SEQ ID NO: 456252 - DNA, 103 bp, Homo sapiens
  chr1:3342039-3342142
  hypo
cggggcacggggcaggggcgcgggctcccttccccccaccctctgtggcccggcctgccatgcagagccggggcctgcactgaggagcgcgtgtgccccttcc

SEQ ID NO: 456253 - DNA, 484 bp, Homo sapiens; identical to SEQ ID NO: 375586
  chr1:3342321-3342805
  hypo

SEQ ID NO: 456254 - DNA, 125 bp, Homo sapiens; identical to SEQ ID NO: 336862
  chr1:3697578-3697703
  hypo
  breast vs. lung,liver_bileduct,bladder_and_urothelial

SEQ ID NO: 456255 - DNA, 307 bp, Homo sapiens; identical to SEQ ID NO: 336864
  chr1:3705404-3705711
  hypo

SEQ ID NO: 456256 - DNA, 26 bp, Homo sapiens
  chr1:6046186-6046212
  hypo
  breast vs. pancreas_gallbladder,melanoma,colorectal
cgcatttgctaacagcacattttgtt

SEQ ID NO: 456257 - DNA, 121 bp, Homo sapiens; identical to SEQ ID NO: 352764
  chr1:6046277-6046398
  hypo
  breast vs. pancreas_gallbladder,melanoma,colorectal

SEQ ID NO: 456258 - DNA, 133 bp, Homo sapiens
  chr1:9402333-9402466
  hypo
  breast vs. lung
cgatccctccgtgagaatgaagaaatgcaacccatgagaagaggtttgcgtagtgacaagtccagaaactgtgtgcatcagcctggggcacccctagctgtgggcagaagctccatggtgcagctcatagtgg

SEQ ID NO: 456259 - DNA, 177 bp, Homo sapiens; identical to SEQ ID NO: 362331
  chr1:9402616-9402793
  hypo
  breast vs. lung

SEQ ID NO: 456260 - DNA, 259 bp, Homo sapiens; identical to SEQ ID NO: 336915
  chr1:11020521-11020780
  hypo
  breast vs. lymphoid_neoplasm

SEQ ID NO: 456261 - DNA, 162 bp, Homo sapiens; identical to SEQ ID NO: 362344
  chr1:11131899-11132061
  hypo
  breast vs. melanoma

SEQ ID NO: 456262 - DNA, 248 bp, Homo sapiens
  chr1:11141000-11141248
  hypo
  breast vs. upper_gi,anorectal,renal,pancreas_gallbladder, lung,prostate,ovary,colorectal,uterine,liver_bileduct,sarcoma, melanoma,bladder_and_urothelial,thyroid
cgggaatcaaaattgtgccctgggctctggaaaatgtttggctcttttcatgaatgtaaggagcaaacctaagaactagaacctggccagacacagagcccaagtgtcgcggtctgtgtgactgcggctgaggtgtaccttgaggcagatgtccctgctccgttgccacaccacctgcagctgcaccggctgcccgttgccgcgctcccacatctccagcctcattttgtcatagatatatagcaggt

SEQ ID NO: 456263 - DNA, 64 bp, Homo sapiens; identical to SEQ ID NO: 346318
  chr1:12123950-12124014
  hypo
  breast vs. lymphoid_neoplasm

SEQ ID NO: 456264 - DNA, 517 bp, Homo sapiens; identical to SEQ ID NO: 455503
  chr1:12226892-12227409
  hypo
  breast vs. ovary,bladder_and_urothelial,anorectal, colorectal

SEQ ID NO: 456265 - DNA, 207 bp, Homo sapiens; identical to SEQ ID NO: 455504
  chr1:12227438-12227645
  hypo
  breast vs. ovary,bladder_and_urothelial,anorectal, colorectal

SEQ ID NO: 456266 - DNA, 247 bp, Homo sapiens; identical to SEQ ID NO: 455505
  chr1:12227162-12227409
  hypo
  breast vs. cervical,anorectal,ovary,colorectal, multiple_myeloma,bladder_and_urothelial,myeloid_neoplasm, non_cancer,upper_gi

SEQ ID NO: 456267 - DNA, 207 bp, Homo sapiens; identical to SEQ ID NO: 455504
  chr1:12227438-12227645
  hypo
  breast vs. cervical,anorectal,ovary,colorectal, multiple_myeloma,bladder_and_urothelial,myeloid_neoplasm, non_cancer,upper_gi

SEQ ID NO: 456268 - DNA, 241 bp, Homo sapiens; identical to SEQ ID NO: 453546
  chr1:12304451-12304692
  hypo
  breast vs. upper_gi

SEQ ID NO: 456269 - DNA, 15 bp, Homo sapiens
  chr1:12304747-12304762
  hypo
  breast vs. upper_gi
agtttctcatttctc

SEQ ID NO: 456270 - DNA, 492 bp, Homo sapiens; identical to SEQ ID NO: 375703
  chr1:17736188-17736680
  hypo
  breast vs. ovary

SEQ ID NO: 456271 - DNA, 342 bp, Homo sapiens; identical to SEQ ID NO: 330719
  chr1:21563161-21563503
  hypo
  breast vs. lung

SEQ ID NO: 456272 - DNA, 84 bp, Homo sapiens
  chr1:21568244-21568328
  hypo
  breast vs. head_and_neck,lung
cggctccaatgtcttccttcaaagaggccacgctctctgcctacaggtcacgaagtcctggaagtactacaggatggtgagaaa

SEQ ID NO: 456273 - DNA, 5 bp, Homo sapiens
  chr1:21573347-21573352
  hypo
  breast vs. liver_bileduct,uterine,pancreas_gallbladder, lymphoid_neoplasm,upper_gi,renal,sarcoma,melanoma, bladder_and_urothelial,thyroid,prostate
cgcca

SEQ ID NO: 456274 - DNA, 235 bp, Homo sapiens
  chr1:21573434-21573669
  hypo
  breast vs. liver_bileduct,uterine,pancreas_gallbladder, lymphoid_neoplasm,upper_gi,renal,sarcoma,melanoma, bladder_and_urothelial,thyroid,prostate
tcatgcccggccacaggtgatatttgtatcaccattttatgaaggaggagaatgaacttaagaaaggttacgaaatttgcccaaggctacaaagctggtagtttgaaagaggctgggatttaaacctgtgcctgtaaccaggatgtcctgctgcctctcgtaaaagcccgcccaggtcccactctcctgagtcagactgtcatccccacccctgcccacctgcccaagaagaggg

SEQ ID NO: 456275 - DNA, 158 bp, Homo sapiens; identical to SEQ ID NO: 362397
  chr1:23693515-23693673
  hypo
  breast vs. lymphoid_neoplasm,melanoma

SEQ ID NO: 456276 - DNA, 247 bp, Homo sapiens; identical to SEQ ID NO: 336983
  chr1:25070663-25070910
  hypo
  breast vs. renal,prostate

SEQ ID NO: 456277 - DNA, 80 bp, Homo sapiens; identical to SEQ ID NO: 347804
  chr1:31863055-31863135
  hypo
  breast vs. melanoma

SEQ ID NO: 456278 - DNA, 30 bp, Homo sapiens; identical to SEQ ID NO: 454567
  chr1:35664856-35664886
  hypo
  breast vs. lymphoid_neoplasm

SEQ ID NO: 456279 - DNA, 229 bp, Homo sapiens; identical to SEQ ID NO: 337018
  chr1:36025968-36026197
  hypo

SEQ ID NO: 456280 - DNA, 130 bp, Homo sapiens; identical to SEQ ID NO: 337031
  chr1:40771005-40771135
  hypo
  breast vs. pancreas_gallbladder,upper_gi

SEQ ID NO: 456281 - DNA, 49 bp, Homo sapiens
  chr1:46744609-46744658
  hypo
  breast vs. ovary,anorectal,melanoma,colorectal,upper_gi, lymphoid_neoplasm
cggagccgccggatggcttccctggctgtgactgcatcctggtccagcc

SEQ ID NO: 456282 - DNA, 196 bp, Homo sapiens; identical to SEQ ID NO: 345706
  chr1:51763389-51763585
  hypo
  breast vs. prostate,uterine,non_cancer,myeloid_neoplasm, thyroid,cervical

SEQ ID NO: 456283 - DNA, 323 bp, Homo sapiens; identical to SEQ ID NO: 455526
  chr1:52194968-52195291
  hypo
  breast vs. pancreas_gallbladder,lung

SEQ ID NO: 456284 - DNA, 92 bp, Homo sapiens; identical to SEQ ID NO: 337096
  chr1:61833628-61833720
  hypo
  breast vs. bladder_and_urothelial,ovary,renal,cervical, lung,lymphoid_neoplasm,head_and_neck,liver_bileduct

SEQ ID NO: 456285 - DNA, 2 bp, Homo sapiens
  chr1:70710367-70710369
  hypo
  breast vs. lung
cg

SEQ ID NO: 456286 - DNA, 34 bp, Homo sapiens; identical to SEQ ID NO: 362487
  chr1:70710406-70710440
  hypo
  breast vs. lung

SEQ ID NO: 456287 - DNA, 289 bp, Homo sapiens; identical to SEQ ID NO: 452731
  chr1:101702081-101702370
  hypo
  breast vs. sarcoma

SEQ ID NO: 456288 - DNA, 152 bp, Homo sapiens; identical to SEQ ID NO: 452732
  chr1:101702796-101702948
  hypo
  breast vs. sarcoma

SEQ ID NO: 456289 - DNA, 393 bp, Homo sapiens; identical to SEQ ID NO: 452733
  chr1:101702796-101703189
  hypo
  breast vs. sarcoma

SEQ ID NO: 456290 - DNA, 818 bp, Homo sapiens; identical to SEQ ID NO: 330937
  chr1:113498720-113499538
  hypo
  breast vs. upper_gi

SEQ ID NO: 456291 - DNA, 18 bp, Homo sapiens
  chr1:150941408-150941426
  hypo
  breast vs. lung,head_and_neck,cervical,upper_gi,uterine, colorectal
cgaacgatgaggaagagc

SEQ ID NO: 456292 - DNA, 21 bp, Homo sapiens
  chr1:150941756-150941777
  hypo
  breast vs. lung,head_and_neck,cervical,upper_gi,uterine, colorectal
acatttactgttaggccggcc

SEQ ID NO: 456293 - DNA, 68 bp, Homo sapiens; identical to SEQ ID NO: 337162
  chr1:151373761-151373829
  hypo
  breast vs. lung,head_and_neck,cervical,prostate

SEQ ID NO: 456294 - DNA, 77 bp, Homo sapiens; identical to SEQ ID NO: 337164
  chr1:151597643-151597720
  hypo
  breast vs. bladder_and_urothelial,uterine,ovary, head_and_neck,liver_bileduct,pancreas_gallbladder,colorectal, upper_gi,prostate,sarcoma

SEQ ID NO: 456295 - DNA, 26 bp, Homo sapiens
  chr1:151693837-151693863
  hypo
  breast vs. ovary,myeloid_neoplasm,non_cancer,uterine, upper_gi,sarcoma,bladder_and_urothelial,thyroid,cervical,lung
cgggaaaggcgatcctttagagaccc

SEQ ID NO: 456296 - DNA, 2 bp, Homo sapiens
  chr1:153651442-153651444
  hypo
  breast vs. anorectal
cg

SEQ ID NO: 456297 - DNA, 207 bp, Homo sapiens; identical to SEQ ID NO: 337178
  chr1:155012870-155013077
  hypo
  breast vs. liver_bileduct

SEQ ID NO: 456298 - DNA, 92 bp, Homo sapiens
  chr1:156432033-156432125
  hypo
  breast vs. sarcoma
cggcattttgcagatgaggaaacccaaggcatgaagcctgactcctgtgtgctcccacaactaaggctagcacccacagccttaaccatgct

SEQ ID NO: 456299 - DNA, 86 bp, Homo sapiens; identical to SEQ ID NO: 337203
  chr1:160878353-160878439
  hypo
  breast vs. anorectal

SEQ ID NO: 456300 - DNA, 62 bp, Homo sapiens; identical to SEQ ID NO: 337246
  chr1:179333937-179333999
  hypo
  breast vs. liver_bileduct,upper_gi,sarcoma,uterine

SEQ ID NO: 456301 - DNA, 43 bp, Homo sapiens; identical to SEQ ID NO: 337247
  chr1:179835828-179835871
  hypo
  breast vs. ovary,lung,head_and_neck,liver_bileduct

SEQ ID NO: 456302 - DNA, 129 bp, Homo sapiens
  chr1:180919554-180919683
  hypo
  breast vs. liver_bileduct,lung,head_and_neck, pancreas_gallbladder,anorectal
cgaggtgaacggggccaaggtggcagggctgggcttggctcacattaaggagctcctggcccactcagagagcttgtcaatccgtgtcctgaggcagagacctgtcccacggtgacccagaagtgccgc

SEQ ID NO: 456303 - DNA, 47 bp, Homo sapiens; identical to SEQ ID NO: 352946
  chr1:180919718-180919765
  hypo
  breast vs. liver_bileduct,lung,head_and_neck, pancreas_gallbladder,anorectal

SEQ ID NO: 456304 - DNA, 13 bp, Homo sapiens
  chr1:180925259-180925272
  hypo
  breast vs. upper_gi,liver_bileduct,renal
cgctctctggctg

SEQ ID NO: 456305 - DNA, 3 bp, Homo sapiens
  chr1:180925402-180925405
  hypo
  breast vs. upper_gi,liver_bileduct,renal
gct

SEQ ID NO: 456306 - DNA, 146 bp, Homo sapiens; identical to SEQ ID NO: 337264
  chr1:197191306-197191452
  hypo
  breast vs. pancreas_gallbladder,head_and_neck

SEQ ID NO: 456307 - DNA, 280 bp, Homo sapiens
  chr1:204530924-204531204
  hypo
  breast vs. lung,head_and_neck,bladder_and_urothelial, upper_gi,liver_bileduct,ovary,cervical,colorectal,melanoma, uterine,pancreas_gallbladder,prostate,lymphoid_neoplasm, anorectal,sarcoma,renal
cgtgatgaagatgaacatggttcctgttctcctgtctagggaaactggttaagcatgtaaatattagcatagtgaatgttttgttgtgagactacatgctgctatgagaaatacagaagggggacgtaatgtagccaagagcttctgaacaacctccgggaagagatgagctgagattaaaggaaggttaggagttaggagaggaagggaaaagtgccgtagttaggaggaaacatgccaaggtcttgaggtgagaaaacagtggcatctgggaagaact

SEQ ID NO: 456308 - DNA, 6 bp, Homo sapiens
  chr1:204531595-204531601
  hypo
  breast vs. head_and_neck,lung,ovary,liver_bileduct, upper_gi,pancreas_gallbladder,uterine,bladder_and_urothelial, colorectal,prostate,lymphoid_neoplasm,renal,cervical,anorectal, melanoma,sarcoma
cgaccc

SEQ ID NO: 456309 - DNA, 79 bp, Homo sapiens; identical to SEQ ID NO: 345723
  chr1:204531757-204531836
  hypo
  breast vs. head_and_neck,lung,ovary,liver_bileduct, upper_gi,pancreas_gallbladder,uterine,bladder_and_urothelial, colorectal,prostate,lymphoid_neoplasm,renal,cervical,anorectal, melanoma,sarcoma

SEQ ID NO: 456310 - DNA, 137 bp, Homo sapiens; identical to SEQ ID NO: 337288
  chr1:204537877-204538014
  hypo
  breast vs. upper_gi,prostate,renal,pancreas_gallbladder, colorectal,lung,melanoma

SEQ ID NO: 456311 - DNA, 80 bp, Homo sapiens; identical to SEQ ID NO: 337289
  chr1:204540741-204540821
  hypo
  breast vs. lung

SEQ ID NO: 456312 - DNA, 157 bp, Homo sapiens; identical to SEQ ID NO: 337316
  chr1:214809726-214809883
  hypo
  breast vs. liver_bileduct,upper_gi

SEQ ID NO: 456313 - DNA, 936 bp, Homo sapiens; identical to SEQ ID NO: 331128
  chr1:225614356-225615292
  hypo
  breast vs. lung,upper_gi

SEQ ID NO: 456314 - DNA, 85 bp, Homo sapiens
  chr1:226062794-226062879
  hypo
  breast vs. melanoma,prostate,sarcoma,anorectal,thyroid, lymphoid_neoplasm
cggtcagttttttcctctgagtttgattcccctgaaggcaggccccgcaggccctgcaatcccccagcagagagcatgcatgcag

SEQ ID NO: 456315 - DNA, 135 bp, Homo sapiens; identical to SEQ ID NO: 352975
  chr1:226163215-226163350
  hypo
  breast vs. cervical

SEQ ID NO: 456316 - DNA, 295 bp, Homo sapiens
  chr1:226826337-226826632
  hypo
  breast vs. lung,upper_gi
cgagccgctgcagcagcaacacacaagacagaactttgtcatgaacttgtacaacccacactcctggactcggagacagctcgccagctcttgctggcagggagcagcgtgacctcgggcacacaagatggggacaagcaggtctacccacagcaggtctgctgtgaagatttgctgcacgcttggcatgacacctggcagacggcgggcactgttctctctctcagggcatgggaaatgctctctggagctatggggccgatggctaagggagagtcagtgagtgtccgccaag

SEQ ID NO: 456317 - DNA, 4 bp, Homo sapiens
  chr1:226826668-226826672
  hypo
  breast vs. lung,upper_gi
catc

SEQ ID NO: 456318 - DNA, 46 bp, Homo sapiens; identical to SEQ ID NO: 352980
  chr1:228083620-228083666
  hypo
  breast vs. prostate,uterine,lymphoid_neoplasm, head_and_neck,cervical,thyroid

SEQ ID NO: 456319 - DNA, 203 bp, Homo sapiens; identical to SEQ ID NO: 337351
  chr1:228361379-228361582
  hypo
  breast vs. myeloid_neoplasm,lymphoid_neoplasm

SEQ ID NO: 456320 - DNA, 128 bp, Homo sapiens; identical to SEQ ID NO: 337363
  chr1:229038524-229038652
  hypo
  breast vs. lung

SEQ ID NO: 456321 - DNA, 219 bp, Homo sapiens; identical to SEQ ID NO: 337369
  chr1:230308302-230308521
  hypo
  breast vs. lung,head_and_neck,upper_gi

SEQ ID NO: 456322 - DNA, 464 bp, Homo sapiens; identical to SEQ ID NO: 337376
  chr1:231038126-231038590
  hypo
  breast vs. upper_gi

SEQ ID NO: 456323 - DNA, 588 bp, Homo sapiens; identical to SEQ ID NO: 455574
  chr1:231175062-231175650
  hypo
  breast vs. ovary,colorectal,lung,melanoma

SEQ ID NO: 456324 - DNA, 286 bp, Homo sapiens; identical to SEQ ID NO: 455575
  chr1:231175692-231175978
  hypo
  breast vs. ovary,colorectal,lung,melanoma

SEQ ID NO: 456325 - DNA, 166 bp, Homo sapiens; identical to SEQ ID NO: 455576
  chr1:231175484-231175650
  hypo
  breast vs. ovary,lung,colorectal,prostate

SEQ ID NO: 456326 - DNA, 709 bp, Homo sapiens; identical to SEQ ID NO: 349428
  chr1:231175692-231176401
  hypo
  breast vs. ovary,lung,colorectal,prostate

SEQ ID NO: 456327 - DNA, 115 bp, Homo sapiens
  chr1:234881099-234881214
  hypo
  breast vs. pancreas_gallbladder
cgcgtattgtattcctgttgtatattgtacatgtaatgcatgctagctgccatttagaatggaaaagcatgccctcaccacagtcaggcccacattttgctttccgtgttaaaga

SEQ ID NO: 456328 - DNA, 31 bp, Homo sapiens; identical to SEQ ID NO: 362734
  chr1:245281788-245281819
  hypo
  breast vs. upper_gi,anorectal,lung,pancreas_gallbladder

SEQ ID NO: 456329 - DNA, 88 bp, Homo sapiens; identical to SEQ ID NO: 337437
  chr1:246655176-246655264
  hypo
  breast vs. lung

SEQ ID NO: 456330 - DNA, 70 bp, Homo sapiens; identical to SEQ ID NO: 453587
  chr10:5538706-5538776
  hypo
  breast vs. prostate,renal,sarcoma,uterine

SEQ ID NO: 456331 - DNA, 192 bp, Homo sapiens; identical to SEQ ID NO: 348414
  chr10:5538938-5539130
  hypo
  breast vs. prostate,renal,sarcoma,uterine

SEQ ID NO: 456332 - DNA, 381 bp, Homo sapiens; identical to SEQ ID NO: 453589
  chr10:5540271-5540652
  hypo
  breast vs. colorectal,prostate,uterine,renal, pancreas_gallbladder

SEQ ID NO: 456333 - DNA, 198 bp, Homo sapiens; identical to SEQ ID NO: 348416
  chr10:5541528-5541726
  hypo
  breast vs. prostate,colorectal,renal,sarcoma,uterine, lymphoid_neoplasm

SEQ ID NO: 456334 - DNA, 134 bp, Homo sapiens; identical to SEQ ID NO: 354500
  chr10:6003855-6003989
  hypo
  breast vs. liver_bileduct,head_and_neck,lung

SEQ ID NO: 456335 - DNA, 667 bp, Homo sapiens; identical to SEQ ID NO: 455580
  chr10:6621854-6622521
  hypo
  breast vs. ovary

SEQ ID NO: 456336 - DNA, 87 bp, Homo sapiens; identical to SEQ ID NO: 350979
  chr10:6622706-6622793
  hypo
  breast vs. ovary

SEQ ID NO: 456337 - DNA, 113 bp, Homo sapiens
  chr10:7985048-7985161
  hypo
  breast vs. head_and_neck
cggttgtgatcctgctcagatcaaaggagtccaatcctgtggttccggttccctgtagctccgtgagactctgagaactccactcggcctccagcgctgcctttgccgttgcc

SEQ ID NO: 456338 - DNA, 115 bp, Homo sapiens; identical to SEQ ID NO: 354511
  chr10:7985194-7985309
  hypo
  breast vs. head_and_neck

SEQ ID NO: 456339 - DNA, 380 bp, Homo sapiens; identical to SEQ ID NO: 340570
  chr10:12827582-12827962
  hypo

SEQ ID NO: 456340 - DNA, 873 bp, Homo sapiens; identical to SEQ ID NO: 347076
  chr10:21815648-21816521
  hypo
  breast vs. head_and_neck,bladder_and_urothelial,uterine, cervical,colorectal,lung

SEQ ID NO: 456341 - DNA, 92 bp, Homo sapiens
  chr10:22047245-22047337
  hypo
  breast vs. upper_gi,head_and_neck,pancreas_gallbladder, lung,renal,cervical,anorectal,colorectal,prostate, bladder_and_urothelial,ovary,uterine,lymphoid_neoplasm
cgactaacaatctagctacagggaaagaagcctcaagagacactgtgttaggatcacaccctggggctctctgcagcgcctcatggccagat

SEQ ID NO: 456342 - DNA, 54 bp, Homo sapiens; identical to SEQ ID NO: 340613
  chr10:27825982-27826036
  hypo
  breast vs. bladder_and_urothelial

SEQ ID NO: 456343 - DNA, 137 bp, Homo sapiens; identical to SEQ ID NO: 340620
  chr10:30736731-30736868
  hypo
  breast vs. pancreas_gallbladder,ovary

SEQ ID NO: 456344 - DNA, 253 bp, Homo sapiens; identical to SEQ ID NO: 455585
  chr10:31609416-31609669
  hypo
  breast vs. lymphoid_neoplasm,sarcoma,multiple_myeloma, renal

SEQ ID NO: 456345 - DNA, 35 bp, Homo sapiens; identical to SEQ ID NO: 455586
  chr10:43600323-43600358
  hypo
  breast vs. bladder_and_urothelial

SEQ ID NO: 456346 - DNA, 398 bp, Homo sapiens; identical to SEQ ID NO: 340646
  chr10:70184294-70184692
  hypo
  breast vs. pancreas_gallbladder

SEQ ID NO: 456347 - DNA, 62 bp, Homo sapiens
  chr10:74100516-74100578
  hypo
  breast vs. upper_gi,colorectal
cgcgctgtccctggcgccctcctcactcacatcaccctggttgtccctgcggtcctgccttt

SEQ ID NO: 456348 - DNA, 2 bp, Homo sapiens
  chr10:74100613-74100615
  hypo
  breast vs. upper_gi,colorectal
ac

SEQ ID NO: 456349 - DNA, 102 bp, Homo sapiens; identical to SEQ ID NO: 340668
  chr10:76287784-76287886
  hypo
  breast vs. liver_bileduct

SEQ ID NO: 456350 - DNA, 433 bp, Homo sapiens; identical to SEQ ID NO: 340678
  chr10:79610504-79610937
  hypo
  breast vs. sarcoma

SEQ ID NO: 456351 - DNA, 226 bp, Homo sapiens; identical to SEQ ID NO: 340681
  chr10:80855265-80855491
  hypo
  breast vs. liver_bileduct

SEQ ID NO: 456352 - DNA, 81 bp, Homo sapiens
  chr10:81023804-81023885
  hypo
  breast vs. colorectal,prostate,renal
cgaggaaaaattacatgcggaatggaaagcaggcgctcagggtggctcctgctggaatgagagctggagtgcaggctccgt

SEQ ID NO: 456353 - DNA, 69 bp, Homo sapiens; identical to SEQ ID NO: 365374
  chr10:81023914-81023983
  hypo
  breast vs. colorectal,prostate,renal

SEQ ID NO: 456354 - DNA, 185 bp, Homo sapiens; identical to SEQ ID NO: 340700
  chr10:93572713-93572898
  hypo
  breast vs. lung

SEQ ID NO: 456355 - DNA, 57 bp, Homo sapiens; identical to SEQ ID NO: 345362
  chr10:93647662-93647719
  hypo
  breast vs. ovary

SEQ ID NO: 456356 - DNA, 130 bp, Homo sapiens; identical to SEQ ID NO: 455601
  chr10:103985878-103986008
  hypo
  breast vs. anorectal

SEQ ID NO: 456357 - DNA, 16 bp, Homo sapiens
  chr10:103986220-103986236
  hypo
  breast vs. anorectal
tcgccccgaggttcac

SEQ ID NO: 456358 - DNA, 280 bp, Homo sapiens
  chr10:104416719-104416999
  hypo
  breast vs. bladder_and_urothelial,lymphoid_neoplasm, melanoma
cgcagcacttggtggccctgccgggcggcgcccaaccagtgcactcaagccccgtgttccccccatcgcagtatcccaatggctccgccgcccagcagcccatgctcccccagtatggcggccgcaagattctcgtctgttctgtggacaactgttactgttcttccgtggccaaccatggcggccaccagccctacccccgctccggccactttccctggacagtgccctcgcaggagtactcacacccgctcccgcccacaccctccgtcccccagtc

SEQ ID NO: 456359 - DNA, 142 bp, Homo sapiens; identical to SEQ ID NO: 354582
  chr10:104417062-104417204
  hypo
  breast vs. bladder_and_urothelial,lymphoid_neoplasm, melanoma

SEQ ID NO: 456360 - DNA, 737 bp, Homo sapiens; identical to SEQ ID NO: 334066
  chr10:111767130-111767867
  hypo
  breast vs. upper_gi,ovary,pancreas_gallbladder,lung, bladder_and_urothelial

SEQ ID NO: 456361 - DNA, 164 bp, Homo sapiens; identical to SEQ ID NO: 340740
  chr10:114200406-114200570
  hypo
  breast vs. pancreas_gallbladder,ovary,melanoma, head_and_neck,cervical

SEQ ID NO: 456362 - DNA, 28 bp, Homo sapiens
  chr10:121397997-121398025
  hypo
  breast vs. bladder_and_urothelial,lung,liver_bileduct
cgccgcaagactggcagcaagagaaagc

SEQ ID NO: 456363 - DNA, 216 bp, Homo sapiens; identical to SEQ ID NO: 365434
  chr10:121398054-121398270
  hypo
  breast vs. bladder_and_urothelial,lung,liver_bileduct

SEQ ID NO: 456364 - DNA, 319 bp, Homo sapiens; identical to SEQ ID NO: 340771
  chr10:126354246-126354565
  hypo
  breast vs. liver_bileduct

SEQ ID NO: 456365 - DNA, 38 bp, Homo sapiens
  chr10:129897014-129897052
  hypo
  breast vs. head_and_neck
cgctcatccattcattcgtgtttaccgagtgcctgctc

SEQ ID NO: 456366 - DNA, 203 bp, Homo sapiens
  chr10:133783038-133783241
  hypo
  breast vs. sarcoma,renal,colorectal,lymphoid_neoplasm, liver_bileduct,melanoma
cgcacacgggagggcgaggtggagacacgggcagcgctcaggtcccggcccaggaaactcagtggcttttatcccgtttccttcaaccccagatgtgagccctctggccaacctacctaacccacctgcccccagtggcattccggtctttccagtctgtccaacacacggcagccacagaacactgtctgcacgccaggact

SEQ ID NO: 456367 - DNA, 23 bp, Homo sapiens
  chr10:133783397-133783420
  hypo
  breast vs. sarcoma,renal,colorectal,lymphoid_neoplasm, liver_bileduct,melanoma
agcagccaggaaaggccaggcgc

SEQ ID NO: 456368 - DNA, 20 bp, Homo sapiens
  chr11:232844-232864
  hypo
  breast vs. bladder_and_urothelial,pancreas_gallbladder, liver_bileduct,uterine,lung,melanoma,head_and_neck,sarcoma, anorectal,colorectal,prostate,upper_gi,renal,ovary, lymphoid_neoplasm,cervical
cgataggttttggccgtccc

SEQ ID NO: 456369 - DNA, 150 bp, Homo sapiens; identical to SEQ ID NO: 346014
  chr11:233062-233212
  hypo
  breast vs. bladder_and_urothelial,pancreas_gallbladder, liver_bileduct,uterine,lung,melanoma,head_and_neck,sarcoma, anorectal,colorectal,prostate,upper_gi,renal,ovary, lymphoid_neoplasm,cervical

SEQ ID NO: 456370 - DNA, 162 bp, Homo sapiens; identical to SEQ ID NO: 340884
  chr11:455954-456116
  hypo
  breast vs. upper_gi,prostate,uterine

SEQ ID NO: 456371 - DNA, 264 bp, Homo sapiens
  chr11:1215132-1215396
  hypo
  breast vs. lymphoid_neoplasm,renal
cgctccagccttgtcaagcgcccgctggatggagctctgtgcggacgctggccacgtgtgttctgatgacgtgagggtcttgtgcgccctgtgagatgagacggtggggggtcagggacagatgtgacctgttgggaggaaagccccagggccatggtgccaccacccgagccacccgtaaggctgcccctggggcctggcaggtgtgtgcagcggctggggtgacccccactacatcaccttcgacggcacctactacacctt

SEQ ID NO: 456372 - DNA, 305 bp, Homo sapiens
  chr11:1215429-1215734
  hypo
  breast vs. lymphoid_neoplasm,renal
gattgtgcccgtgtatggccacttccgcgtgctcgtcgacaactacttctgcggtgcggaggacgggctctcctgcccgaggtccatcatcctggagtaccaccaggaccgcgtggtgctgacccgcaagccagtccacggggtgatgacaaacgaggtgggggcgcgcccggtgtgccgcggagggggtgggggacgcggctttcccggcaagagcctgagcagcggctgaccgcccgcccgcctgccttctgacttcccgtcgaccacgccctgcgtccagatcatcttcaacaacaaggtgg

SEQ ID NO: 456373 - DNA, 45 bp, Homo sapiens; identical to SEQ ID NO: 365569
  chr11:1464971-1465016
  hypo
  breast vs. prostate

SEQ ID NO: 456374 - DNA, 253 bp, Homo sapiens; identical to SEQ ID NO: 340959
  chr11:3145131-3145384
  hypo
  breast vs. bladder_and_urothelial,colorectal

SEQ ID NO: 456375 - DNA, 103 bp, Homo sapiens; identical to SEQ ID NO: 348470
  chr11:3697491-3697594
  hypo
  breast vs. lung,ovary,bladder_and_urothelial,cervical, upper_gi,prostate,pancreas_gallbladder,colorectal,head_and_neck, renal,uterine,sarcoma,anorectal

SEQ ID NO: 456376 - DNA, 129 bp, Homo sapiens; identical to SEQ ID NO: 351149
  chr11:8615887-8616016
  hypo
  breast vs. ovary

SEQ ID NO: 456377 - DNA, 122 bp, Homo sapiens; identical to SEQ ID NO: 454640
  chr11:9405271-9405393
  hypo

SEQ ID NO: 456378 - DNA, 311 bp, Homo sapiens; identical to SEQ ID NO: 454642
  chr11:9554670-9554981
  hypo
  breast vs. sarcoma,renal

SEQ ID NO: 456379 - DNA, 83 bp, Homo sapiens; identical to SEQ ID NO: 340984
  chr11:11960229-11960312
  hypo
  breast vs. head_and_neck,ovary,pancreas_gallbladder, cervical,liver_bileduct,prostate,lung,colorectal, lymphoid_neoplasm,renal,upper_gi

SEQ ID NO: 456380 - DNA, 171 bp, Homo sapiens; identical to SEQ ID NO: 341017
  chr11:31808842-31809013
  hypo
  breast vs. upper_gi,lung

SEQ ID NO: 456381 - DNA, 23 bp, Homo sapiens
  chr11:34535022-34535045
  hypo
  breast vs. cervical
cggcctgcggaggcaagcaggtc

SEQ ID NO: 456382 - DNA, 48 bp, Homo sapiens; identical to SEQ ID NO: 365647
  chr11:34535248-34535296
  hypo
  breast vs. cervical

SEQ ID NO: 456383 - DNA, 151 bp, Homo sapiens; identical to SEQ ID NO: 341050
  chr11:46783074-46783225
  hypo
  breast vs. upper_gi,liver_bileduct,lung,ovary

SEQ ID NO: 456384 - DNA, 46 bp, Homo sapiens; identical to SEQ ID NO: 354724
  chr11:57235458-57235504
  hypo
  breast vs. melanoma,cervical,renal,liver_bileduct

SEQ ID NO: 456385 - DNA, 137 bp, Homo sapiens; identical to SEQ ID NO: 341083
  chr11:63325873-63326010
  hypo
  breast vs. head_and_neck,pancreas_gallbladder,upper_gi, uterine,liver_bileduct,lung

SEQ ID NO: 456386 - DNA, 48 bp, Homo sapiens
  chr11:64054239-64054287
  hypo
  breast vs. bladder_and_urothelial,melanoma,uterine,renal, prostate
cgagatactccccgcgccaaccgcctggggcccttgcccttctggctt

SEQ ID NO: 456387 - DNA, 550 bp, Homo sapiens; identical to SEQ ID NO: 455613
  chr11:64512349-64512899
  hypo
  breast vs. ovary,anorectal,multiple_myeloma,non_cancer, myeloid_neoplasm,thyroid

SEQ ID NO: 456388 - DNA, 396 bp, Homo sapiens
  chr11:64875426-64875822
  hypo
  breast vs. melanoma,colorectal,renal,ovary
cgcgccatccaggacgactgccaggtcatcacggcccgcctggcccagcagctgcggcagcgctttaggtgtggcccctctgccctgaccccagcgctcccgccagccccgagccccatctgtgcccggctcctgggccctcctggagctgtccccctgccctgtgtgtgctttgctttcctgctcctgccccatccaccggcagccccggccctgcccttcactacctctccctcgtgcagggagggcggctcaggcgccccggagcaggcagagtgcgtggagctgctgctggccctgggcgagcctgcggaggagctgtgcgaggagttcctggcgcacgcccgcggccggctggagaaggagctgagaaacctggaggccgagctggggccc

SEQ ID NO: 456389 - DNA, 189 bp, Homo sapiens; identical to SEQ ID NO: 354749
  chr11:64876158-64876347
  hypo
  breast vs. melanoma,colorectal,renal,ovary

SEQ ID NO: 456390 - DNA, 33 bp, Homo sapiens
  chr11:65413830-65413863
  hypo
  breast vs. colorectal,pancreas_gallbladder,prostate
cgccacacaccacctacaggtgggcaccggagt

SEQ ID NO: 456391 - DNA, 188 bp, Homo sapiens; identical to SEQ ID NO: 314552
  chr11:65414113-65414301
  hypo
  breast vs. colorectal,pancreas_gallbladder,prostate

SEQ ID NO: 456392 - DNA, 262 bp, Homo sapiens; identical to SEQ ID NO: 334296
  chr11:65582723-65582985
  hypo
  breast vs. liver_bileduct

SEQ ID NO: 456393 - DNA, 801 bp, Homo sapiens; identical to SEQ ID NO: 345395
  chr11:66079395-66080196
  hypo
  breast vs. upper_gi,pancreas_gallbladder,cervical, bladder_and_urothelial,colorectal,lung,uterine,prostate,ovary

SEQ ID NO: 456394 - DNA, 796 bp, Homo sapiens; identical to SEQ ID NO: 455617
  chr11:66079700-66080496
  hypo
  breast vs. upper_gi,pancreas_gallbladder,lung,colorectal, bladder_and_urothelial,cervical,ovary,uterine,melanoma,prostate

SEQ ID NO: 456395 - DNA, 141 bp, Homo sapiens; identical to SEQ ID NO: 348509
  chr11:66513646-66513787
  hypo
  breast vs. uterine,sarcoma,melanoma,multiple_myeloma, lymphoid_neoplasm,non_cancer,thyroid,myeloid_neoplasm

SEQ ID NO: 456396 - DNA, 315 bp, Homo sapiens
  chr11:66626187-66626502
  hypo
  breast vs. renal
tcctcccgagcccgggctttccccaacgggaccttagagattggggtgaccggcgctggggacgctgggggctacacctgcatcgccaccaaccctgctggtgaggccacagcccgagtagaactgcgggtgctggccttgccccatggtgggaacagcagtgccgaggggggccgccccgggccctcggacatcgccgcctccgctcgcactgctgccgagggtgaggggacgctggagtctgagccagccgtgcaggtgacggaggtgaccgccacctcagggctggtgagctggggtcccgggcggccagcc

SEQ ID NO: 456397 - DNA, 339 bp, Homo sapiens
  chr11:66626187-66626526
  hypo
  breast vs. liver_bileduct,renal,prostate,melanoma, anorectal
tcctcccgagcccgggctttccccaacgggaccttagagattggggtgaccggcgctggggacgctgggggctacacctgcatcgccaccaaccctgctggtgaggccacagcccgagtagaactgcgggtgctggccttgccccatggtgggaacagcagtgccgaggggggccgccccgggccctcggacatcgccgcctccgctcgcactgctgccgagggtgaggggacgctggagtctgagccagccgtgcaggtgacggaggtgaccgccacctcagggctggtgagctggggtcccgggcggccagccgacccagtgtggatgttccaaatc

SEQ ID NO: 456398 - DNA, 72 bp, Homo sapiens
  chr11:67462547-67462619
  hypo
  breast vs. renal,prostate,melanoma,lymphoid_neoplasm
cgctttgtcctacctggccactttcctcacgggaatttaggcccctcttagcattggcgtgccggtataaac

SEQ ID NO: 456399 - DNA, 394 bp, Homo sapiens; identical to SEQ ID NO: 354771
  chr11:67462833-67463227
  hypo
  breast vs. renal,prostate,melanoma,lymphoid_neoplasm

SEQ ID NO: 456400 - DNA, 72 bp, Homo sapiens
  chr11:68564274-68564346
  hypo
  breast vs. bladder_and_urothelial,pancreas_gallbladder, uterine,cervical,colorectal
cgccgccccaccgtcctcgtcagacagcagcccgggcgggtggactcaccatggcataatagttgctgttca

SEQ ID NO: 456401 - DNA, 167 bp, Homo sapiens; identical to SEQ ID NO: 354776
  chr11:68564381-68564548
  hypo
  breast vs. bladder_and_urothelial,pancreas_gallbladder, uterine,cervical,colorectal

SEQ ID NO: 456402 - DNA, 206 bp, Homo sapiens
  chr11:70016958-70017164
  hypo
  breast vs. sarcoma,pancreas_gallbladder,cervical, head_and_neck,bladder_and_urothelial
cggggtgctgactagcactgggctctctctgcagtcatccagtttggcttcgtcaccctgtttgtcgcctccttccccctggccccactgtttgcgctgctgaacaacatcatcgagatccgcctggacgccaaaaagtttgtcactgagctccgaaggccggtagctgtcagagccaaagacatcggtgagtgaccccacgggcc

SEQ ID NO: 456403 - DNA, 522 bp, Homo sapiens; identical to SEQ ID NO: 454653
  chr11:71192127-71192649
  hypo
  breast vs. renal,sarcoma,lymphoid_neoplasm,prostate, non_cancer,anorectal,liver_bileduct,multiple_myeloma,cervical

SEQ ID NO: 456404 - DNA, 169 bp, Homo sapiens; identical to SEQ ID NO: 348516
  chr11:71192889-71193058
  hypo
  breast vs. renal,sarcoma,lymphoid_neoplasm,prostate, non_cancer,anorectal,liver_bileduct,multiple_myeloma,cervical

SEQ ID NO: 456405 - DNA, 211 bp, Homo sapiens; identical to SEQ ID NO: 365780
  chr11:75167782-75167993
  hypo
  breast vs. prostate

SEQ ID NO: 456406 - DNA, 31 bp, Homo sapiens
  chr11:75852075-75852106
  hypo
  breast vs. head_and_neck,liver_bileduct
cggaggccacgcgaatgtgcaccctagccaa

SEQ ID NO: 456407 - DNA, 886 bp, Homo sapiens; identical to SEQ ID NO: 334351
  chr11:96122370-96123256
  hypo
  breast vs. lung,upper_gi,head_and_neck

SEQ ID NO: 456408 - DNA, 326 bp, Homo sapiens; identical to SEQ ID NO: 341265
  chr11:121349234-121349560
  hypo
  breast vs. sarcoma

SEQ ID NO: 456409 - DNA, 136 bp, Homo sapiens; identical to SEQ ID NO: 455631
  chr11:128391758-128391894
  hypo
  breast vs. upper_gi,pancreas_gallbladder,ovary, bladder_and_urothelial,colorectal,uterine,renal,melanoma,lung, sarcoma,anorectal,prostate

SEQ ID NO: 456410 - DNA, 623 bp, Homo sapiens; identical to SEQ ID NO: 345404
  chr11:128392116-128392739
  hypo
  breast vs. upper_gi,pancreas_gallbladder,ovary, bladder_and_urothelial,colorectal,uterine,renal,melanoma,lung, sarcoma,anorectal,prostate

SEQ ID NO: 456411 - DNA, 67 bp, Homo sapiens
  chr11:130785392-130785459
  hypo
  breast vs. renal
cgctcatccttctccgaagctcctggaccaaccctttcatggctgcctccatttcttcctcaaaggc

SEQ ID NO: 456412 - DNA, 17 bp, Homo sapiens
  chr11:133938756-133938773
  hypo
  breast vs. sarcoma,melanoma
cgccaagttcattgaaa

SEQ ID NO: 456413 - DNA, 161 bp, Homo sapiens; identical to SEQ ID NO: 345407
  chr11:133939437-133939598
  hypo
  breast vs. sarcoma,melanoma

SEQ ID NO: 456414 - DNA, 151 bp, Homo sapiens; identical to SEQ ID NO: 341305
  chr12:287260-287411
  hypo
  breast vs. uterine

SEQ ID NO: 456415 - DNA, 235 bp, Homo sapiens; identical to SEQ ID NO: 341306
  chr12:417402-417637
  hypo
  breast vs. uterine

SEQ ID NO: 456416 - DNA, 134 bp, Homo sapiens; identical to SEQ ID NO: 455635
  chr12:708894-709028
  hypo
  breast vs. liver_bileduct,pancreas_gallbladder,lung

SEQ ID NO: 456417 - DNA, 182 bp, Homo sapiens; identical to SEQ ID NO: 351282
  chr12:709062-709244
  hypo
  breast vs. liver_bileduct,pancreas_gallbladder,lung

SEQ ID NO: 456418 - DNA, 74 bp, Homo sapiens; identical to SEQ ID NO: 341335
  chr12:3901132-3901206
  hypo
  breast vs. head_and_neck,lung

SEQ ID NO: 456419 - DNA, 86 bp, Homo sapiens; identical to SEQ ID NO: 452813
  chr12:4377809-4377895
  hypo
  breast vs. lymphoid_neoplasm,ovary,myeloid_neoplasm, non_cancer,thyroid,colorectal

SEQ ID NO: 456420 - DNA, 142 bp, Homo sapiens; identical to SEQ ID NO: 452814
  chr12:4378558-4378700
  hypo
  breast vs. lymphoid_neoplasm,ovary,myeloid_neoplasm, non_cancer,thyroid,colorectal

SEQ ID NO: 456421 - DNA, 245 bp, Homo sapiens; identical to SEQ ID NO: 452815
  chr12:4378558-4378803
  hypo
  breast vs. lymphoid_neoplasm,myeloid_neoplasm,non_cancer, thyroid,colorectal,ovary,melanoma

SEQ ID NO: 456422 - DNA, 88 bp, Homo sapiens; identical to SEQ ID NO: 454142
  chr12:4378715-4378803
  hypo
  breast vs. colorectal,melanoma,non_cancer

SEQ ID NO: 456423 - DNA, 285 bp, Homo sapiens; identical to SEQ ID NO: 455642
  chr12:4380196-4380481
  hypo
  breast vs. ovary,colorectal

SEQ ID NO: 456424 - DNA, 266 bp, Homo sapiens; identical to SEQ ID NO: 455643
  chr12:4380215-4380481
  hypo
  breast vs. colorectal,ovary

SEQ ID NO: 456425 - DNA, 267 bp, Homo sapiens; identical to SEQ ID NO: 341348
  chr12:6344323-6344590
  hypo
  breast vs. anorectal

SEQ ID NO: 456426 - DNA, 425 bp, Homo sapiens; identical to SEQ ID NO: 341363
  chr12:12618418-12618843
  hypo
  breast vs. ovary,lung

SEQ ID NO: 456427 - DNA, 86 bp, Homo sapiens; identical to SEQ ID NO: 354873
  chr12:13215310-13215396
  hypo
  breast vs. uterine,cervical,colorectal,melanoma

SEQ ID NO: 456428 - DNA, 238 bp, Homo sapiens
  chr12:47628809-47629047
  hypo
  breast vs. head_and_neck,liver_bileduct,upper_gi, cervical,pancreas_gallbladder,bladder_and_urothelial,colorectal, renal,sarcoma,uterine,prostate,anorectal,ovary
tgcaaaggaaggagctaggctgtgcgccctgggcgtcatgatccttctgcgggcctccgaagtgcggcagctgcttcacaataagttcgtggtcatcctgggggactctgtgcatagggcagtatacaaggacctggtgcttctgctgcagaaggaccgcctgctcactcccgggcagcttagagcaaggggggagctgaacttcgaacaagatgagctggtggacggaggccagcgg

SEQ ID NO: 456429 - DNA, 142 bp, Homo sapiens
  chr12:47629208-47629350
  hypo
  breast vs. head_and_neck,liver_bileduct,upper_gi, cervical,pancreas_gallbladder,bladder_and_urothelial,colorectal, renal,sarcoma,uterine,prostate,anorectal,ovary
gaattcctgcctctgggacatctccaggtatggtccgaactcctggagaagctacctggagaacctggagaacctgttccagtgcctgggccaggtgctgcccgagtcttgcctcctggtgtggaacacggccatgcctgtg

SEQ ID NO: 456430 - DNA, 112 bp, Homo sapiens
  chr12:47629379-47629491
  hypo
  breast vs. head_and_neck,liver_bileduct,upper_gi, cervical,pancreas_gallbladder,bladder_and_urothelial,colorectal, renal,sarcoma,uterine,prostate,anorectal,ovary
gcccaagctccggcggcagaaggccaccttcctgaaaaacgaagtggtcaaagccaacttccacagcgccaccgaggcacgtaaacataacttcgatgtactggacttgcat

SEQ ID NO: 456431 - DNA, 34 bp, Homo sapiens
  chr12:47629013-47629047
  hypo
  breast vs. head_and_neck,bladder_and_urothelial,upper_gi, pancreas_gallbladder,uterine,cervical,liver_bileduct,colorectal, sarcoma,ovary,anorectal,lymphoid_neoplasm,prostate,renal
cgaacaagatgagctggtggacggaggccagcgg

SEQ ID NO: 456432 - DNA, 142 bp, Homo sapiens; identical to SEQ ID NO: 456429
  chr12:47629208-47629350
  hypo
  breast vs. head_and_neck,bladder_and_urothelial,upper_gi, pancreas_gallbladder,uterine,cervical,liver_bileduct,colorectal, sarcoma,ovary,anorectal,lymphoid_neoplasm,prostate,renal

SEQ ID NO: 456433 - DNA, 112 bp, Homo sapiens; identical to SEQ ID NO: 456430
  chr12:47629379-47629491
  hypo
  breast vs. head_and_neck,bladder_and_urothelial,upper_gi, pancreas_gallbladder,uterine,cervical,liver_bileduct,colorectal, sarcoma,ovary,anorectal,lymphoid_neoplasm,prostate,renal

SEQ ID NO: 456434 - DNA, 243 bp, Homo sapiens; identical to SEQ ID NO: 348555
  chr12:47629544-47629787
  hypo
  breast vs. head_and_neck,bladder_and_urothelial,upper_gi, pancreas_gallbladder,uterine,cervical,liver_bileduct,colorectal, sarcoma,ovary,anorectal,lymphoid_neoplasm,prostate,renal

SEQ ID NO: 456435 - DNA, 37 bp, Homo sapiens; identical to SEQ ID NO: 348557
  chr12:51421646-51421683
  hypo
  breast vs. melanoma,prostate

SEQ ID NO: 456436 - DNA, 7 bp, Homo sapiens
  chr12:52388498-52388505
  hypo
  breast vs. upper_gi
cacgtgc

SEQ ID NO: 456437 - DNA, 3 bp, Homo sapiens
  chr12:52401537-52401540
  hypo
  breast vs. anorectal,head_and_neck,melanoma,thyroid
tcc

SEQ ID NO: 456438 - DNA, 58 bp, Homo sapiens; identical to SEQ ID NO: 455665
  chr12:54144782-54144840
  hypo
  breast vs. ovary

SEQ ID NO: 456439 - DNA, 40 bp, Homo sapiens; identical to SEQ ID NO: 454688
  chr12:90313473-90313513
  hypo
  breast vs. head_and_neck

SEQ ID NO: 456440 - DNA, 635 bp, Homo sapiens; identical to SEQ ID NO: 453627
  chr12:110352780-110353415
  hypo
  breast vs. liver_bileduct,lung

SEQ ID NO: 456441 - DNA, 380 bp, Homo sapiens; identical to SEQ ID NO: 341500
  chr12:111402659-111403039
  hypo
  breast vs. prostate

SEQ ID NO: 456442 - DNA, 321 bp, Homo sapiens; identical to SEQ ID NO: 455674
  chr12:111844290-111844611
  hypo
  breast vs. lymphoid_neoplasm,anorectal,liver_bileduct, upper_gi,pancreas_gallbladder,colorectal

SEQ ID NO: 456443 - DNA, 73 bp, Homo sapiens
  chr12:114290596-114290669
  hypo
  breast vs. bladder_and_urothelial,cervical
cgcacagctgcaaagaggccgcttgatgtcacaggccacactaaccagcgtgcagcacgttcctcctctgcac

SEQ ID NO: 456444 - DNA, 146 bp, Homo sapiens; identical to SEQ ID NO: 341524
  chr12:114334084-114334230
  hypo
  breast vs. liver_bileduct

SEQ ID NO: 456445 - DNA, 169 bp, Homo sapiens; identical to SEQ ID NO: 341528
  chr12:116394813-116394982
  hypo
  breast vs. upper_gi,liver_bileduct

SEQ ID NO: 456446 - DNA, 230 bp, Homo sapiens; identical to SEQ ID NO: 341529
  chr12:116443638-116443868
  hypo
  breast vs. head_and_neck,lung

SEQ ID NO: 456447 - DNA, 218 bp, Homo sapiens; identical to SEQ ID NO: 341538
  chr12:117466159-117466377
  hypo
  breast vs. bladder_and_urothelial,melanoma,ovary,renal, cervical,uterine,colorectal,anorectal,lymphoid_neoplasm, head_and_neck,lung

SEQ ID NO: 456448 - DNA, 46 bp, Homo sapiens; identical to SEQ ID NO: 354958
  chr12:120574393-120574439
  hypo
  breast vs. liver_bileduct

SEQ ID NO: 456449 - DNA, 200 bp, Homo sapiens; identical to SEQ ID NO: 341558
  chr12:121205162-121205362
  hypo
  breast vs. upper_gi,pancreas_gallbladder,prostate, bladder_and_urothelial,cervical,head_and_neck

SEQ ID NO: 456450 - DNA, 81 bp, Homo sapiens; identical to SEQ ID NO: 341559
  chr12:121328606-121328687
  hypo
  breast vs. lung,liver_bileduct,upper_gi,colorectal

SEQ ID NO: 456451 - DNA, 27 bp, Homo sapiens
  chr12:121667904-121667931
  hypo
  breast vs. prostate
ttaaaaaggaagcgctccaggccgggc

SEQ ID NO: 456452 - DNA, 40 bp, Homo sapiens
  chr12:122192684-122192724
  hypo
  breast vs. melanoma,cervical,renal,liver_bileduct,lung, colorectal,ovary,anorectal,head_and_neck,lymphoid_neoplasm, pancreas_gallbladder,uterine,upper_gi,myeloid_neoplasm,sarcoma, thyroid,non_cancer,bladder_and_urothelial
cgtgaattttggaaggatgctattcaacccagtacacctt

SEQ ID NO: 456453 - DNA, 117 bp, Homo sapiens
  chr12:122192843-122192960
  hypo
  breast vs. melanoma,cervical,renal,liver_bileduct,lung, colorectal,ovary,anorectal,head_and_neck,lymphoid_neoplasm, pancreas_gallbladder,uterine,upper_gi,myeloid_neoplasm,sarcoma, thyroid,non_cancer,bladder_and_urothelial
ctcagtttcttgacagatacagtgagcgtgacaggagctacttggcagggcagcttggagggcaggagaagctgtgtctggagactggttagactggtgcctgtttaaatattagca

SEQ ID NO: 456454 - DNA, 45 bp, Homo sapiens; identical to SEQ ID NO: 346063
  chr12:122192989-122193034
  hypo
  breast vs. melanoma,cervical,renal,liver_bileduct,lung, colorectal,ovary,anorectal,head_and_neck,lymphoid_neoplasm, pancreas_gallbladder,uterine,upper_gi,myeloid_neoplasm,sarcoma, thyroid,non_cancer,bladder_and_urothelial

SEQ ID NO: 456455 - DNA, 67 bp, Homo sapiens; identical to SEQ ID NO: 341576
  chr12:122474899-122474966
  hypo
  breast vs. lung

SEQ ID NO: 456456 - DNA, 286 bp, Homo sapiens; identical to SEQ ID NO: 341598
  chr12:124843509-124843795
  hypo
  breast vs. lung,pancreas_gallbladder

SEQ ID NO: 456457 - DNA, 33 bp, Homo sapiens
  chr12:124989213-124989246
  hypo
  breast vs. renal,lymphoid_neoplasm
cgcagtctgtccatcaatggactacgattcagc

SEQ ID NO: 456458 - DNA, 234 bp, Homo sapiens; identical to SEQ ID NO: 341647
  chr12:132249441-132249675
  hypo
  breast vs. lung,liver_bileduct

SEQ ID NO: 456459 - DNA, 200 bp, Homo sapiens; identical to SEQ ID NO: 341648
  chr12:132250682-132250882
  hypo
  breast vs. upper_gi,lung,liver_bileduct, bladder_and_urothelial,cervical

SEQ ID NO: 456460 - DNA, 109 bp, Homo sapiens; identical to SEQ ID NO: 346069
  chr12:132378083-132378192
  hypo
  breast vs. renal,bladder_and_urothelial, lymphoid_neoplasm,pancreas_gallbladder,thyroid,prostate, melanoma,anorectal,multiple_myeloma,non_cancer,cervical

SEQ ID NO: 456461 - DNA, 246 bp, Homo sapiens
  chr12:132592879-132593125
  hypo
  breast vs. bladder_and_urothelial
cggccacagatcgaggtttcaactggacttcaaacaaagcttcagtgcctagggccagatttgttctttccagccctgtgaggcctgaaattgcatcagcgagccaagtgtccccgtgcccctctgttagtggctgaggccgccagctgcatgggatgtgcaggcggtgatcaactttgcaaagcttaaacattattttcccttcttcctcccttccctttgaatattccctctcaggtaaaggtt

SEQ ID NO: 456462 - DNA, 180 bp, Homo sapiens
  chr12:133199822-133200002
  hypo
  breast vs. melanoma,renal,lymphoid_neoplasm
cgggcatcggcctcaggtcaccccacggcctgcacatgctgtgtggctcacaaatatccagctcatttttggagaaactggctcttctggttgagccgctgcttgggaaccagggccagagcttcccgtttctgacccctccaccactactcaaatgcccgcagctagcctcacagtgaa

SEQ ID NO: 456463 - DNA, 226 bp, Homo sapiens; identical to SEQ ID NO: 355024
  chr12:133200090-133200316
  hypo
  breast vs. melanoma,renal,lymphoid_neoplasm

SEQ ID NO: 456464 - DNA, 142 bp, Homo sapiens; identical to SEQ ID NO: 351449
  chr13:22243864-22244006
  hypo
  breast vs. ovary,uterine,myeloid_neoplasm,thyroid, cervical

SEQ ID NO: 456465 - DNA, 13 bp, Homo sapiens
  chr13:30106987-30107000
  hypo
  breast vs. lung,head_and_neck,colorectal
cgaatatgtcggg

SEQ ID NO: 456466 - DNA, 282 bp, Homo sapiens; identical to SEQ ID NO: 366215
  chr13:30107122-30107404
  hypo
  breast vs. lung,head_and_neck,colorectal

SEQ ID NO: 456467 - DNA, 64 bp, Homo sapiens; identical to SEQ ID NO: 341731
  chr13:44981967-44982031
  hypo
  breast vs. lung

SEQ ID NO: 456468 - DNA, 425 bp, Homo sapiens; identical to SEQ ID NO: 360317
  chr13:78272232-78272657
  hypo
  breast vs. lung

SEQ ID NO: 456469 - DNA, 288 bp, Homo sapiens; identical to SEQ ID NO: 454165
  chr13:95201339-95201627
  hypo
  breast vs. ovary

SEQ ID NO: 456470 - DNA, 230 bp, Homo sapiens; identical to SEQ ID NO: 454166
  chr13:95201662-95201892
  hypo
  breast vs. ovary

SEQ ID NO: 456471 - DNA, 73 bp, Homo sapiens; identical to SEQ ID NO: 355060
  chr13:96409644-96409717
  hypo
  breast vs. pancreas_gallbladder,liver_bileduct

SEQ ID NO: 456472 - DNA, 25 bp, Homo sapiens
  chr13:99851652-99851677
  hypo
aaacaaacgaacaaaacaagactgt

SEQ ID NO: 456473 - DNA, 97 bp, Homo sapiens; identical to SEQ ID NO: 355067
  chr13:99851706-99851803
  hypo

SEQ ID NO: 456474 - DNA, 77 bp, Homo sapiens; identical to SEQ ID NO: 341796
  chr13:111911450-111911527
  hypo
  breast vs. lung

SEQ ID NO: 456475 - DNA, 234 bp, Homo sapiens
  chr13:113400167-113400401
  hypo
  breast vs. liver_bileduct
cgtgcagcggaactccagaaattctccgtcttgcaaaactcagcctctgggccgttaaactaggtgtccccacctcccctcccccaggccctggtgaccaccgttctgctttctctgtctgtgattttgaccactttagatacgtcatttcagtggactcatcctgtgtcgttttgtggcggaatcacgttctgttgtgtgtatacaccacgtttttcttgtccgttcacctgt

SEQ ID NO: 456476 - DNA, 101 bp, Homo sapiens; identical to SEQ ID NO: 366292
  chr13:113400733-113400834
  hypo
  breast vs. liver_bileduct

SEQ ID NO: 456477 - DNA, 288 bp, Homo sapiens; identical to SEQ ID NO: 366302
  chr13:113667314-113667602
  hypo
  breast vs. liver_bileduct

SEQ ID NO: 456478 - DNA, 93 bp, Homo sapiens; identical to SEQ ID NO: 341830
  chr13:113887577-113887670
  hypo
  breast vs. upper_gi,lung,pancreas_gallbladder

SEQ ID NO: 456479 - DNA, 45 bp, Homo sapiens; identical to SEQ ID NO: 454739
  chr13:113985425-113985470
  hypo
  breast vs. melanoma,cervical,colorectal

SEQ ID NO: 456480 - DNA, 163 bp, Homo sapiens; identical to SEQ ID NO: 355095
  chr13:114123291-114123454
  hypo
  breast vs. melanoma

SEQ ID NO: 456481 - DNA, 677 bp, Homo sapiens; identical to SEQ ID NO: 341846
  chr13:114293940-114294617
  hypo
  breast vs. bladder_and_urothelial

SEQ ID NO: 456482 - DNA, 28 bp, Homo sapiens
  chr13:114305093-114305121
  hypo
  breast vs. sarcoma,melanoma
ctgggaggcggcttgcttgtctgtactc

SEQ ID NO: 456483 - DNA, 1 bp, Homo sapiens
  chr13:114802695-114802696
  hypo
  breast vs. anorectal
c

SEQ ID NO: 456484 - DNA, 225 bp, Homo sapiens; identical to SEQ ID NO: 455693
  chr14:51410345-51410570
  hypo
  breast vs. ovary

SEQ ID NO: 456485 - DNA, 294 bp, Homo sapiens; identical to SEQ ID NO: 455694
  chr14:51410740-51411034
  hypo
  breast vs. ovary

SEQ ID NO: 456486 - DNA, 297 bp, Homo sapiens
  chr14:55765714-55766011
  hypo
  breast vs. liver_bileduct
gttaatgcaggacattgctgaccagcaagaacttggggaggagatttcaacagcaatttcgaaacctgtagggtttggagaaaagtctgacgaggatgagctcatggcggaattagaagaactagaacaggaggaaccagacaagaatttgctggaagtcagtggccccgaaacagtccctctaccaaatgttccctctatagccctaccatcaaaacctgccaagaagaggaagacgacgacatgaaggatttggagaactgggctgggtccagcgcgggcaggatggatgtggtg

SEQ ID NO: 456487 - DNA, 55 bp, Homo sapiens; identical to SEQ ID NO: 346085
  chr14:55766084-55766139
  hypo
  breast vs. liver_bileduct

SEQ ID NO: 456488 - DNA, 62 bp, Homo sapiens; identical to SEQ ID NO: 341964
  chr14:73390972-73391034
  hypo
  breast vs. head_and_neck,pancreas_gallbladder

SEQ ID NO: 456489 - DNA, 307 bp, Homo sapiens; identical to SEQ ID NO: 455698
  chr14:88789656-88789963
  hypo
  breast vs. prostate,anorectal

SEQ ID NO: 456490 - DNA, 383 bp, Homo sapiens; identical to SEQ ID NO: 454181
  chr14:90849476-90849859
  hypo
  breast vs. anorectal,upper_gi

SEQ ID NO: 456491 - DNA, 54 bp, Homo sapiens; identical to SEQ ID NO: 454182
  chr14:90849897-90849951
  hypo
  breast vs. anorectal,upper_gi

SEQ ID NO: 456492 - DNA, 137 bp, Homo sapiens; identical to SEQ ID NO: 454183
  chr14:90849722-90849859
  hypo
  breast vs. anorectal

SEQ ID NO: 456493 - DNA, 54 bp, Homo sapiens; identical to SEQ ID NO: 454182
  chr14:90849897-90849951
  hypo
  breast vs. anorectal

SEQ ID NO: 456494 - DNA, 259 bp, Homo sapiens; identical to SEQ ID NO: 341995
  chr14:91757493-91757752
  hypo
  breast vs. cervical

SEQ ID NO: 456495 - DNA, 11 bp, Homo sapiens
  chr14:100643481-100643492
  hypo
  breast vs. renal
acacccacgcc

SEQ ID NO: 456496 - DNA, 206 bp, Homo sapiens
  chr14:100749240-100749446
  hypo
  breast vs. uterine,colorectal
cggggcagttcttgcggcttgctttctcacacacaggactgggaactcccaggatttggtctcacaccagcaagaaatgcttctgtaacctttcagctccaaggtgggctcaggagcaagagggcgttttaaagagagcctcacccactgttcagaaagcacagcccagtgaaatgcccacgcagccggacctatgagcccatgtc

SEQ ID NO: 456497 - DNA, 137 bp, Homo sapiens; identical to SEQ ID NO: 355178
  chr14:100749475-100749612
  hypo
  breast vs. uterine,colorectal

SEQ ID NO: 456498 - DNA, 604 bp, Homo sapiens; identical to SEQ ID NO: 342054
  chr14:102939202-102939806
  hypo
  breast vs. lung,head_and_neck,ovary,anorectal, liver_bileduct,bladder_and_urothelial,upper_gi,cervical, pancreas_gallbladder,sarcoma

SEQ ID NO: 456499 - DNA, 121 bp, Homo sapiens
  chr14:104159197-104159318
  hypo
  breast vs. melanoma,renal,liver_bileduct
cgtgctgtcagtttgacactaaaacctgaagcactcggtgcagttgctcgggcctcacacagacacatcaggtttacatctgaaagtactgcctcccttccccatcacggaggccgtttga

SEQ ID NO: 456500 - DNA, 106 bp, Homo sapiens; identical to SEQ ID NO: 355199
  chr14:104159437-104159543
  hypo
  breast vs. melanoma,renal,liver_bileduct

SEQ ID NO: 456501 - DNA, 130 bp, Homo sapiens
  chr14:104159892-104160022
  hypo
  breast vs. melanoma,lymphoid_neoplasm,renal,sarcoma, myeloid_neoplasm,liver_bileduct
cgaaataattgtctggccgactcgcgagctctgagtgccagccacactgacctggcccactgagagccagcagggctaggtaacctgtcttgggagtgtgagaccgccccgccctgccacgcccctcacc

SEQ ID NO: 456502 - DNA, 3 bp, Homo sapiens
  chr14:104160058-104160061
  hypo
  breast vs. melanoma,lymphoid_neoplasm,renal,sarcoma, myeloid_neoplasm,liver_bileduct
cct

SEQ ID NO: 456503 - DNA, 123 bp, Homo sapiens; identical to SEQ ID NO: 355201
  chr14:104160134-104160257
  hypo
  breast vs. melanoma,lymphoid_neoplasm,renal,sarcoma, myeloid_neoplasm,liver_bileduct

SEQ ID NO: 456504 - DNA, 336 bp, Homo sapiens; identical to SEQ ID NO: 454784
  chr14:104202370-104202706
  hypo
  breast vs. melanoma,liver_bileduct,lymphoid_neoplasm, uterine,colorectal,renal

SEQ ID NO: 456505 - DNA, 237 bp, Homo sapiens; identical to SEQ ID NO: 454786
  chr14:104618440-104618677
  hypo

SEQ ID NO: 456506 - DNA, 168 bp, Homo sapiens
  chr14:105240770-105240938
  hypo
  breast vs. lymphoid_neoplasm,renal
cgagacccaccctcccgccttccaccacaggcgactgtgcttttaaagcaaaggccccatctgcaggagaatcgtccccaaacacagtgacctggaactaaccaagtggctggaccctggcccccttcacagtaaatacctcctgggccaagtccccagaacaggttc

SEQ ID NO: 456507 - DNA, 133 bp, Homo sapiens
  chr14:105241177-105241310
  hypo
  breast vs. lymphoid_neoplasm,renal
tcacgtgcccaagaagacaggacatcgtcccctagagacagccccaggagtcgctacctggccccagcccttcagccccatctgggctcccactcactgtgaggaaggggtgcctggagttctgcaggacgcg

SEQ ID NO: 456508 - DNA, 227 bp, Homo sapiens; identical to SEQ ID NO: 348648
  chr14:105241428-105241655
  hypo
  breast vs. lymphoid_neoplasm,renal

SEQ ID NO: 456509 - DNA, 319 bp, Homo sapiens; identical to SEQ ID NO: 454794
  chr14:105546630-105546949
  hypo
  breast vs. renal

SEQ ID NO: 456510 - DNA, 174 bp, Homo sapiens
  chr14:105739056-105739230
  hypo
  breast vs. melanoma
cgcggcgtgccctccgtacggcagaccaggtagaggcaggcagcaatcacgtgggccatcttccggccgcgggtcaggtgcctgctcacggccatcttgaagaagttgaaggcggtgtccaggcagtgctggttcagctgcagctggttccccaggtggtggatgtggcgcctc

SEQ ID NO: 456511 - DNA, 194 bp, Homo sapiens
  chr15:22876766-22876960
  hypo
  breast vs. prostate,sarcoma,lymphoid_neoplasm, pancreas_gallbladder,colorectal
cgcacgagcaccacagcctctggcatggctaaaataaaaagaccggcatgtcaaataattttcaaggatttagagcaactggaaattacaagatggtacaagcacttggggaaactatatggcattttcttacaaaggttaacatgtatctacccctgagaagcagcagttcacccttaggtatttatccaaga

SEQ ID NO: 456512 - DNA, 130 bp, Homo sapiens; identical to SEQ ID NO: 366533
  chr15:22877052-22877182
  hypo
  breast vs. prostate,sarcoma,lymphoid_neoplasm, pancreas_gallbladder,colorectal

SEQ ID NO: 456513 - DNA, 136 bp, Homo sapiens; identical to SEQ ID NO: 355237
  chr15:31571220-31571356
  hypo

SEQ ID NO: 456514 - DNA, 1 bp, Homo sapiens
  chr15:40676552-40676553
  hypo
  breast vs. pancreas_gallbladder
c

SEQ ID NO: 456515 - DNA, 103 bp, Homo sapiens; identical to SEQ ID NO: 355245
  chr15:40676583-40676686
  hypo
  breast vs. pancreas_gallbladder

SEQ ID NO: 456516 - DNA, 76 bp, Homo sapiens; identical to SEQ ID NO: 452900
  chr15:60289235-60289311
  hypo
  breast vs. uterine,ovary

SEQ ID NO: 456517 - DNA, 76 bp, Homo sapiens; identical to SEQ ID NO: 342212
  chr15:63695768-63695844
  hypo
  breast vs. liver_bileduct

SEQ ID NO: 456518 - DNA, 48 bp, Homo sapiens; identical to SEQ ID NO: 366635
  chr15:76197521-76197569
  hypo
  breast vs. prostate

SEQ ID NO: 456519 - DNA, 106 bp, Homo sapiens; identical to SEQ ID NO: 342275
  chr15:90501638-90501744
  hypo
  breast vs. renal,sarcoma,melanoma

SEQ ID NO: 456520 - DNA, 518 bp, Homo sapiens; identical to SEQ ID NO: 455718
  chr15:101459489-101460007
  hypo
  breast vs. pancreas_gallbladder

SEQ ID NO: 456521 - DNA, 124 bp, Homo sapiens; identical to SEQ ID NO: 342322
  chr15:102226045-102226169
  hypo
  breast vs. pancreas_gallbladder,upper_gi,head_and_neck

SEQ ID NO: 456522 - DNA, 295 bp, Homo sapiens; identical to SEQ ID NO: 342323
  chr16:94400-94695
  hypo
  breast vs. upper_gi,liver_bileduct,pancreas_gallbladder, bladder_and_urothelial

SEQ ID NO: 456523 - DNA, 85 bp, Homo sapiens
  chr16:114357-114442
  hypo
  breast vs. colorectal
cgctgtgggaaggccctgcgggcagcccggggacccaagaggggcagagtgtggacacgcccgaagcgtacttgtcggctgctaa

SEQ ID NO: 456524 - DNA, 256 bp, Homo sapiens
  chr16:740914-741170
  hypo
  breast vs. lymphoid_neoplasm,pancreas_gallbladder
ttaagtctcaatttcagtattttaatgccatcacctattttaatccccaggtccatcatgacatctggtcatccctagacaagttccgagtgcccccagtcttcccctccttcctcactcctcgacctcgggagcagcctcccaacggctttcctgggtccgtctttcccctttgatcagaaacccgcacagaagtcaggcaccaggtcttctgcctgaggcctctggcagctcccactatgctgtgaatgaaccc

SEQ ID NO: 456525 - DNA, 12 bp, Homo sapiens
  chr16:741519-741531
  hypo
  breast vs. lymphoid_neoplasm,pancreas_gallbladder
agacggagtttc

SEQ ID NO: 456526 - DNA, 127 bp, Homo sapiens
  chr16:845724-845851
  hypo
  breast vs. thyroid
cgctggtgtccggcatcgcgccagccacgcgcagccgggccacgccccaggccctgctcctcgatgccctctgcctgctcctggacattcttgcacccaagctccgccccgtgagtgccgtccccgg

SEQ ID NO: 456527 - DNA, 53 bp, Homo sapiens; identical to SEQ ID NO: 342385
  chr16:1472227-1472280
  hypo
  breast vs. lymphoid_neoplasm,melanoma,sarcoma,renal, multiple_myeloma,non_cancer,myeloid_neoplasm

SEQ ID NO: 456528 - DNA, 301 bp, Homo sapiens; identical to SEQ ID NO: 342389
  chr16:1652282-1652583
  hypo
  breast vs. cervical

SEQ ID NO: 456529 - DNA, 422 bp, Homo sapiens; identical to SEQ ID NO: 342391
  chr16:1682411-1682833
  hypo
  breast vs. lung

SEQ ID NO: 456530 - DNA, 103 bp, Homo sapiens
  chr16:1704554-1704657
  hypo
  breast vs. lung
cgatcacattgttctgtggccaccgtctctgtccagctccagagcattttcatgacgctagaagaggccctgtgcacctcagcactcactcctctattctcca

SEQ ID NO: 456531 - DNA, 38 bp, Homo sapiens; identical to SEQ ID NO: 366755
  chr16:1704800-1704838
  hypo
  breast vs. lung

SEQ ID NO: 456532 - DNA, 195 bp, Homo sapiens
  chr16:1730112-1730307
  hypo
  breast vs. melanoma,colorectal,multiple_myeloma, lymphoid_neoplasm,sarcoma,cervical,non_cancer
cgatgtgggaccaggagtttaaactagtgctcagagcgaatccggtttctggttcctggtggccagagttttgcaccacccacatcagtggggggagggactgcatccccagccctgtcccagttgtgtgcatttagtacgtttcctttttgtttgtgctgcctggcactggctgcccggtaaatgatggtgttt

SEQ ID NO: 456533 - DNA, 105 bp, Homo sapiens; identical to SEQ ID NO: 346116
  chr16:1730761-1730866
  hypo
  breast vs. melanoma,colorectal,multiple_myeloma, lymphoid_neoplasm,sarcoma,cervical,non_cancer

SEQ ID NO: 456534 - DNA, 728 bp, Homo sapiens
  chr16:1737575-1738303
  hypo
  breast vs. melanoma,myeloid_neoplasm
cggtaccactttgcccgttccacatggtctcatgcccagtggggagcccggccccttgcggttagtgagccagcctctactcctggtcacagtgtgtggtgccagccatcatggctccccatgccaggttcctgcttctcatggtccttctcacggttgttgggagttttcctatctctccagtgctcttggaagacggtttatggtatattatcaagggaagcctgaaagggaaactgctagttgtgttcaccacccaacgagatctggagtcctgccttctttctacacttagtcacacagacctagccccacagccctctagttgcagggcttgattgagaaaagtatgcagaggccgagagtgtgtgtgaccgaccacatcatagccatcgaatgtttatcaattcccattcagtgtttcagtgaatcttcagtagtctctgtgttctttgttagtcacctggtttagatgttccatgaattgttcttcctcttctagcaatgatgaccaacgtctatgaattgttaatatttaccggggactgtgctaagtgctttgcatgtgtatttttcatttggtgttcgctataactaggagtaggttgttttgctcctttcacagaggaggaaacaggcttggaaaaggtcactggcatgcataaatcccaagctagtcagtagcagagctagtcggtagcagaactagtccgtagcagagctagtcg

SEQ ID NO: 456535 - DNA, 2 bp, Homo sapiens
  chr16:1738332-1738334
  hypo
  breast vs. melanoma,myeloid_neoplasm
tc

SEQ ID NO: 456536 - DNA, 280 bp, Homo sapiens; identical to SEQ ID NO: 342406
  chr16:2035689-2035969
  hypo
  breast vs. liver_bileduct

SEQ ID NO: 456537 - DNA, 48 bp, Homo sapiens; identical to SEQ ID NO: 345484
  chr16:2042503-2042551
  hypo
  breast vs. anorectal

SEQ ID NO: 456538 - DNA, 73 bp, Homo sapiens; identical to SEQ ID NO: 454826
  chr16:2278311-2278384
  hypo
  breast vs. renal,sarcoma,melanoma,lymphoid_neoplasm, non_cancer,uterine,myeloid_neoplasm,lung

SEQ ID NO: 456539 - DNA, 273 bp, Homo sapiens
  chr16:2546133-2546406
  hypo
  breast vs. liver_bileduct,upper_gi
cgagcacagcggcgctatggactctccaggatacaactgcttcgtggacaaagacaagatggacgctgccatccaggacctggggcccaaggagctgagctgcactgaactgcaggaactgaagcagctggcgcgccagggctactgggcccaaagccacgccctgcggggaaaggtgtaccagcgcctgatccgggacattccctgccgcacggtcacgcctgacgccagcgtgtacagcgacatcgtgggcaagatcgtgggcaagcacag

SEQ ID NO: 456540 - DNA, 532 bp, Homo sapiens; identical to SEQ ID NO: 366805
  chr16:2546506-2547038
  hypo
  breast vs. liver_bileduct,upper_gi

SEQ ID NO: 456541 - DNA, 50 bp, Homo sapiens; identical to SEQ ID NO: 454827
  chr16:2770043-2770093
  hypo
  breast vs. renal,uterine,melanoma,sarcoma,non_cancer, multiple_myeloma,prostate,lymphoid_neoplasm

SEQ ID NO: 456542 - DNA, 173 bp, Homo sapiens; identical to SEQ ID NO: 346133
  chr16:2806405-2806578
  hypo
  breast vs. renal,sarcoma,multiple_myeloma,anorectal, prostate,lymphoid_neoplasm,myeloid_neoplasm,non_cancer,lung, uterine,thyroid,ovary

SEQ ID NO: 456543 - DNA, 314 bp, Homo sapiens; identical to SEQ ID NO: 381088
  chr16:3193333-3193647
  hypo
  breast vs. lung

SEQ ID NO: 456544 - DNA, 97 bp, Homo sapiens; identical to SEQ ID NO: 366815
  chr16:3537877-3537974
  hypo
  breast vs. ovary

SEQ ID NO: 456545 - DNA, 179 bp, Homo sapiens; identical to SEQ ID NO: 342450
  chr16:3811586-3811765
  hypo
  breast vs. liver_bileduct

SEQ ID NO: 456546 - DNA, 263 bp, Homo sapiens; identical to SEQ ID NO: 342451
  chr16:3821348-3821611
  hypo
  breast vs. head_and_neck,prostate,colorectal

SEQ ID NO: 456547 - DNA, 59 bp, Homo sapiens; identical to SEQ ID NO: 342467
  chr16:4719497-4719556
  hypo
  breast vs. upper_gi

SEQ ID NO: 456548 - DNA, 105 bp, Homo sapiens
  chr16:4723492-4723597
  hypo
  breast vs. ovary
cggcagccctcggacgacgagaacagcgacaacagcaacgagtgtgtggtgtgcctgtccgacctgcgggacacgctgatcctgccctgccgccacctgtgcctc

SEQ ID NO: 456549 - DNA, 256 bp, Homo sapiens; identical to SEQ ID NO: 342470
  chr16:4787730-4787986
  hypo
  breast vs. pancreas_gallbladder,anorectal

SEQ ID NO: 456550 - DNA, 161 bp, Homo sapiens
  chr16:4845976-4846137
  hypo
  breast vs. melanoma,sarcoma,renal
cgtcgcccactgctgctgctgcagctcccccgggccccgcagggaaagccccaggaaggtgagcccctggaaggtgagccctgccggcctctgggacctgcacggaactgtactgggggtggaggcggaaggtgaggggagtggcgggaagggtgctcatc

SEQ ID NO: 456551 - DNA, 119 bp, Homo sapiens
  chr16:4920116-4920235
  hypo
  breast vs. ovary,melanoma,anorectal,uterine,colorectal, liver_bileduct,lymphoid_neoplasm,renal,sarcoma,upper_gi, cervical,multiple_myeloma,pancreas_gallbladder
cgttggctcctagctttcctctccacgtacggtgagctgatgaagacaggagttgcagtgagctgcagccggtggtgactgtgttttgttcttcagcatagaggcgcagactcgggagc

SEQ ID NO: 456552 - DNA, 201 bp, Homo sapiens
  chr16:4920289-4920490
  hypo
  breast vs. ovary,melanoma,anorectal,uterine,colorectal, liver_bileduct,lymphoid_neoplasm,renal,sarcoma,upper_gi, cervical,multiple_myeloma,pancreas_gallbladder
gcagcaaggatgccctgctcaagcgtgctcggaaacttcacctctatgaacaggtgggtgactctagagtgaagccctttggctttggggtcctggcggaggggtgactgagtcttaagcaatgatgcgtctgctgccccactgcctccttgtgatcaccccatcatgcgtcctgagcgtaagagcgatgtgtaaacctgc

SEQ ID NO: 456553 - DNA, 314 bp, Homo sapiens; identical to SEQ ID NO: 348729
  chr16:4920526-4920840
  hypo
  breast vs. ovary,melanoma,anorectal,uterine,colorectal, liver_bileduct,lymphoid_neoplasm,renal,sarcoma,upper_gi, cervical,multiple_myeloma,pancreas_gallbladder

SEQ ID NO: 456554 - DNA, 147 bp, Homo sapiens
  chr16:12132253-12132400
  hypo
  breast vs. colorectal,cervical,lymphoid_neoplasm, prostate,anorectal,melanoma,multiple_myeloma,sarcoma,upper_gi
cggggcagctcttctcaacaccccttcctggcacttgttcttgttggcattcggctttcaggtgtttggagaaccagaagcccttgcccgctttttgacttaaccccatgtttcaaagcagatcagtgtatatccctaaattaaatt

SEQ ID NO: 456555 - DNA, 376 bp, Homo sapiens; identical to SEQ ID NO: 355427
  chr16:12132450-12132826
  hypo
  breast vs. colorectal,cervical,lymphoid_neoplasm, prostate,anorectal,melanoma,multiple_myeloma,sarcoma,upper_gi

SEQ ID NO: 456556 - DNA, 96 bp, Homo sapiens; identical to SEQ ID NO: 342495
  chr16:12289463-12289559
  hypo
  breast vs. ovary,upper_gi

SEQ ID NO: 456557 - DNA, 108 bp, Homo sapiens; identical to SEQ ID NO: 342503
  chr16:15129362-15129470
  hypo
  breast vs. lung,cervical,head_and_neck,ovary,uterine, sarcoma,renal,liver_bileduct,melanoma,upper_gi, pancreas_gallbladder,colorectal,lymphoid_neoplasm, bladder_and_urothelial,prostate,myeloid_neoplasm,thyroid

SEQ ID NO: 456558 - DNA, 118 bp, Homo sapiens
  chr16:19708387-19708505
  hypo
  breast vs. pancreas_gallbladder,renal,melanoma, liver_bileduct
cgccagccagtttgcgagtccgtgcccagcaggtgccagcccgcgtgccctgtgccaaagcgcttttctcttgtagcccgcgggcctgggcgcccacagcacaacctgctccctgatg

SEQ ID NO: 456559 - DNA, 47 bp, Homo sapiens; identical to SEQ ID NO: 216831
  chr16:19708561-19708608
  hypo
  breast vs. pancreas_gallbladder,renal,melanoma, liver_bileduct

SEQ ID NO: 456560 - DNA, 106 bp, Homo sapiens; identical to SEQ ID NO: 342525
  chr16:23497832-23497938
  hypo
  breast vs. bladder_and_urothelial,liver_bileduct,renal, colorectal,upper_gi,pancreas_gallbladder

SEQ ID NO: 456561 - DNA, 10 bp, Homo sapiens
  chr16:23846783-23846793
  hypo
  breast vs. non_cancer,thyroid,myeloid_neoplasm,melanoma
cgctcctccc

SEQ ID NO: 456562 - DNA, 168 bp, Homo sapiens; identical to SEQ ID NO: 366888
  chr16:27750033-27750201
  hypo
  breast vs. liver_bileduct,uterine

SEQ ID NO: 456563 - DNA, 24 bp, Homo sapiens
  chr16:28878657-28878681
  hypo
  breast vs. liver_bileduct
cggccccgactcagcatcccctgc

SEQ ID NO: 456564 - DNA, 31 bp, Homo sapiens
  chr16:29153254-29153285
  hypo
  breast vs. renal
gtggaataatcctccgtggcacgagggggtg

SEQ ID NO: 456565 - DNA, 55 bp, Homo sapiens
  chr16:29153320-29153375
  hypo
  breast vs. renal
atcctccgtggcatgagggggcggtggaataatcctccgtggcacgagggggcag

SEQ ID NO: 456566 - DNA, 173 bp, Homo sapiens; identical to SEQ ID NO: 342548
  chr16:29857096-29857269
  hypo
  breast vs. head_and_neck,pancreas_gallbladder

SEQ ID NO: 456567 - DNA, 671 bp, Homo sapiens
  chr16:30566776-30567447
  hypo
  breast vs. lymphoid_neoplasm,uterine,anorectal
cgcccgcagtccgggcacgggtagggcttctcgccggtgtgggtgcgcacgtggcgccgcaggtccgaggggtaggcgaaggcgcggccacagtccgggcaggggaagggggtctcgccgctgtgcacgcgccggtgctggtagagggcagagctctggctgaagcggcggccacagtcggcgcagccatagggtttctcgccggtgtggacgcgcaggtgcgaagtcagcgccgagcgctgcgtgaaggcccggccacactccagacagcggtggggccgctccccacgatggatggcccggtgtttgctcagggaggaagcgtggccgaagcccttgccgcagtcagtgcagtggaagggcttctcgccagtgtgactgtagacgtgctccaccagtgtggagcgccaggcaaagctcttcccgcacacgtagcagccatgacgctggtcagctcgggggacaggggggtgggcacagagggaggggcgtccccggtgcggtgccttggacagctgctcccaaccataagggggcccggccgagggggcttggggagacttcagcccaggagacccggcggccacagggtcgggcttctccagggctcccgtcccttccctttgtctttcctttttcttgtttctggaatctgctgagagataaagagg

SEQ ID NO: 456568 - DNA, 105 bp, Homo sapiens; identical to SEQ ID NO: 366904
  chr16:30567509-30567614
  hypo
  breast vs. lymphoid_neoplasm,uterine,anorectal

SEQ ID NO: 456569 - DNA, 201 bp, Homo sapiens
  chr16:31138407-31138608
  hypo
  breast vs. liver_bileduct,melanoma,renal, bladder_and_urothelial
cggtaagtggggctgggaagctgcctgcaggtcccccgtctccccttgccgaggagcccctgctgagccgtgcactgtgcctcactcccaccctgcctgcagatcaccaaggtgaagtatgtggacaagatccacatcgggaactacgaaattgatgcctggtatttctcaccattccccgaagactatgggaaacagccc

SEQ ID NO: 456570 - DNA, 116 bp, Homo sapiens; identical to SEQ ID NO: 381217
  chr16:54128713-54128829
  hypo
  breast vs. lung

SEQ ID NO: 456571 - DNA, 48 bp, Homo sapiens; identical to SEQ ID NO: 360839
  chr16:56666592-56666640
  hypo
  breast vs. pancreas_gallbladder

SEQ ID NO: 456572 - DNA, 62 bp, Homo sapiens; identical to SEQ ID NO: 342611
  chr16:67472428-67472490
  hypo
  breast vs. liver_bileduct

SEQ ID NO: 456573 - DNA, 256 bp, Homo sapiens; identical to SEQ ID NO: 455742
  chr16:67678786-67679042
  hypo
  breast vs. bladder_and_urothelial,lymphoid_neoplasm

SEQ ID NO: 456574 - DNA, 134 bp, Homo sapiens; identical to SEQ ID NO: 345495
  chr16:68118915-68119049
  hypo
  breast vs. cervical,anorectal,upper_gi,uterine, multiple_myeloma,non_cancer,lung

SEQ ID NO: 456575 - DNA, 395 bp, Homo sapiens; identical to SEQ ID NO: 342630
  chr16:70433888-70434283
  hypo

SEQ ID NO: 456576 - DNA, 222 bp, Homo sapiens; identical to SEQ ID NO: 366977
  chr16:75222813-75223035
  hypo
  breast vs. melanoma

SEQ ID NO: 456577 - DNA, 78 bp, Homo sapiens
  chr16:81632835-81632913
  hypo
  breast vs. melanoma
cggggcaaggagaggtcatattacctgagggaaaccaggggagggagagtgtgaacggcatttgagatttcttctggg

SEQ ID NO: 456578 - DNA, 69 bp, Homo sapiens; identical to SEQ ID NO: 355504
  chr16:84780671-84780740
  hypo
  breast vs. ovary,head_and_neck,renal

SEQ ID NO: 456579 - DNA, 591 bp, Homo sapiens; identical to SEQ ID NO: 342685
  chr16:84822987-84823578
  hypo
  breast vs. upper_gi,lung

SEQ ID NO: 456580 - DNA, 177 bp, Homo sapiens
  chr16:85009963-85010140
  hypo
  breast vs. head_and_neck
cgggccaccttttctgggtctcgtgggcagtcgcctaaatcggaagcccacaaagggattcatccagaggagtgaggggggccccccaaagacggacttcatcccttcccatcgcagcctccgctcccatgtgggcttctcacttttcaatcgctcgatctcctggaagcagaaaga

SEQ ID NO: 456581 - DNA, 233 bp, Homo sapiens; identical to SEQ ID NO: 367009
  chr16:85010169-85010402
  hypo
  breast vs. head_and_neck

SEQ ID NO: 456582 - DNA, 167 bp, Homo sapiens
  chr16:85328796-85328963
  hypo
  breast vs. pancreas_gallbladder
cgcttcccagggcctccgcacacaccggtccaccttctgcctgaggatggcctgtgctgggcatttcctgggaatggaatcctgcagtacaagctcttttgtggcttctctcactcgggaccagcctggggcgaaaccctgtctctactaaaaatacaaacaaatca

SEQ ID NO: 456583 - DNA, 121 bp, Homo sapiens; identical to SEQ ID NO: 367013
  chr16:85328994-85329115
  hypo
  breast vs. pancreas_gallbladder

SEQ ID NO: 456584 - DNA, 209 bp, Homo sapiens
  chr16:85699437-85699646
  hypo
  breast vs. lung,head_and_neck,liver_bileduct, pancreas_gallbladder,colorectal,upper_gi,renal, bladder_and_urothelial,lymphoid_neoplasm,uterine,anorectal, ovary,cervical
cggttacttaaatgttccccgggtcttggttctttgcgctaggtctttgttaagtgtaagctctagagaccaggatctgcgtgctggacactcagcctgttaacttgcatttcttaatattttccttcactttgtctctaaaagaaccagccacgcagcaagcctctctggatgtggagaagccggttggtgttgctgcttccttgtct

SEQ ID NO: 456585 - DNA, 5 bp, Homo sapiens
  chr16:85741568-85741573
  hypo
  breast vs. cervical,sarcoma
gggcc

SEQ ID NO: 456586 - DNA, 178 bp, Homo sapiens; identical to SEQ ID NO: 452923
  chr16:85932121-85932299
  hypo
  breast vs. colorectal,upper_gi

SEQ ID NO: 456587 - DNA, 465 bp, Homo sapiens; identical to SEQ ID NO: 455747
  chr16:87417704-87418169
  hypo
  breast vs. cervical,ovary,lung,sarcoma,anorectal

SEQ ID NO: 456588 - DNA, 50 bp, Homo sapiens; identical to SEQ ID NO: 351854
  chr16:87418200-87418250
  hypo
  breast vs. cervical,ovary,lung,sarcoma,anorectal

SEQ ID NO: 456589 - DNA, 496 bp, Homo sapiens; identical to SEQ ID NO: 342727
  chr16:87738520-87739016
  hypo
  breast vs. head_and_neck

SEQ ID NO: 456590 - DNA, 268 bp, Homo sapiens
  chr16:88101544-88101812
  hypo
  breast vs. head_and_neck
gtcaatgccccctccgtccccaacagacccgccctccccccactgtctgcctccttgtgtcgtcagtccgtgacacgccacgtgtgtgatgaggaggtgcttggagtggcactgctctgcgtgtggccacgcacttcgtttccattttcacacgtagttcagagctgggtgtccgacagaggtgcccgaggtggaaagcgtcgtgcactcgtcccacctgtggcccctgcagagctccggctgtgtggcacgggctcctgagagctgg

SEQ ID NO: 456591 - DNA, 343 bp, Homo sapiens; identical to SEQ ID NO: 381384
  chr16:88101969-88102312
  hypo
  breast vs. head_and_neck

SEQ ID NO: 456592 - DNA, 171 bp, Homo sapiens
  chr16:88106152-88106323
  hypo
  breast vs. lung,upper_gi,bladder_and_urothelial, liver_bileduct,lymphoid_neoplasm,cervical,ovary,melanoma, head_and_neck,anorectal,uterine,colorectal
cggagagctccctgccccactcgttgaaggtctcagctcggggcagagccagtacctcgggctgctgtggccctagcgtccacgaaaacaaagcgcagggctgctgtgctctgtggatggcccagcgggcccaggccagcatctccatacctcgcaggcagaagcccccga

SEQ ID NO: 456593 - DNA, 96 bp, Homo sapiens; identical to SEQ ID NO: 346151
  chr16:88106398-88106494
  hypo
  breast vs. lung,upper_gi,bladder_and_urothelial, liver_bileduct,lymphoid_neoplasm,cervical,ovary,melanoma, head_and_neck,anorectal,uterine,colorectal

SEQ ID NO: 456594 - DNA, 328 bp, Homo sapiens; identical to SEQ ID NO: 342740
  chr16:88111298-88111626
  hypo
  breast vs. lung,head_and_neck,upper_gi

SEQ ID NO: 456595 - DNA, 47 bp, Homo sapiens
  chr16:88826974-88827021
  hypo
  breast vs. melanoma
cgaggggaacgacccgcctttaaggcagcaggacccagggagcccag

SEQ ID NO: 456596 - DNA, 252 bp, Homo sapiens
  chr16:88827070-88827322
  hypo
  breast vs. melanoma
caggaagcccaggacaggcagggtcccaagcggagacacccgcctttgacgcagcagcacccagggggcccgggacaggcaggggcccgaggggagccacccgccttcgacgcagcaggaggtaaacggaatgttcctcacctacttggagcccggccagcagcctggggcactgaggagcttctggaccatttaattagctcggtgtccaggtttaattagctcagtgtccaggaaactcagttttatggc

SEQ ID NO: 456597 - DNA, 235 bp, Homo sapiens; identical to SEQ ID NO: 342760
  chr16:88910584-88910819
  hypo
  breast vs. cervical

SEQ ID NO: 456598 - DNA, 188 bp, Homo sapiens
  chr16:88994153-88994341
  hypo
  breast vs. cervical
cgtccgcccgtgcggacacccgggagccaacactgacccgaagacaggtcagccagacttcccacctgctccctcaggaggtgggatccggtcccctcctgctgggctgcacgggccacgatggaaaggcgcctcgtgacacgctgcggtcagctcagaaaagccgcagatgctgacacgggcaaccc

SEQ ID NO: 456599 - DNA, 91 bp, Homo sapiens
  chr16:89220237-89220328
  hypo
  breast vs. melanoma,multiple_myeloma,renal
cgcccaaggcctgcacgcaccatggcttctgtggtaccagtgataacaccatgccgggcacctcctgcagtcaccacccctgggctgctag

SEQ ID NO: 456600 - DNA, 79 bp, Homo sapiens; identical to SEQ ID NO: 454865
  chr16:89254530-89254609
  hypo
  breast vs. renal

SEQ ID NO: 456601 - DNA, 144 bp, Homo sapiens; identical to SEQ ID NO: 355552
  chr16:89254764-89254908
  hypo
  breast vs. renal

SEQ ID NO: 456602 - DNA, 4 bp, Homo sapiens
  chr16:89883921-89883925
  hypo
cggc

SEQ ID NO: 456603 - DNA, 3 bp, Homo sapiens
  chr16:89884344-89884347
  hypo
gcc

SEQ ID NO: 456604 - DNA, 25 bp, Homo sapiens
  chr16:89899939-89899964
  hypo
  breast vs. melanoma
cgccctgctgggctcaggggcaggt

SEQ ID NO: 456605 - DNA, 489 bp, Homo sapiens; identical to SEQ ID NO: 454870
  chr16:89900815-89901304
  hypo
  breast vs. melanoma

SEQ ID NO: 456606 - DNA, 61 bp, Homo sapiens
  chr17:4236565-4236626
  hypo
  breast vs. lung,head_and_neck,prostate, pancreas_gallbladder,cervical,sarcoma,anorectal,uterine,renal, melanoma
cgttcacatcaaaagtaatgtaaagaatgtgtgtatctcagccatcattttaaaagaagag

SEQ ID NO: 456607 - DNA, 37 bp, Homo sapiens
  chr17:4446272-4446309
  hypo
  breast vs. liver_bileduct
cgcagccctcagcagtgttgcccttcaagacccggag

SEQ ID NO: 456608 - DNA, 138 bp, Homo sapiens; identical to SEQ ID NO: 355578
  chr17:4446376-4446514
  hypo
  breast vs. liver_bileduct

SEQ ID NO: 456609 - DNA, 273 bp, Homo sapiens
  chr17:8104639-8104912
  hypo
  breast vs. prostate,renal,melanoma,sarcoma,uterine, lymphoid_neoplasm,head_and_neck,non_cancer
ctgtccaccacttagaggggcatttttggtgatatctatagaccgtttacctgcgtgtacccagcattaccacgtctttctctagatgctggtactctccattgccatgtctttcttcagatgtcccctagaggacaactagagaccatcacaaaggtgcacaggaggcactcaaaagacactggccacagtgcaaagcattggaaataatctgcatgtgcatccagtagaagagctttaaaaaaaaccctagggatatccttattaaaaatt

SEQ ID NO: 456610 - DNA, 4 bp, Homo sapiens
  chr17:8104939-8104943
  hypo
  breast vs. prostate,renal,melanoma,sarcoma,uterine, lymphoid_neoplasm,head_and_neck,non_cancer
tcac

SEQ ID NO: 456611 - DNA, 144 bp, Homo sapiens
  chr17:8384370-8384514
  hypo
  breast vs. pancreas_gallbladder,upper_gi, lymphoid_neoplasm,colorectal,uterine,sarcoma,renal,anorectal, liver_bileduct,cervical,melanoma,prostate, bladder_and_urothelial
cgttggcgcaccccacggctcccccctgcggtgtgcagggctcagcaggactggcacgggtgcagtgcccgttagtgcacaccacggctcccacctgcggtgtgcagggctcggcaggactggcacggggtaccatggctgagg

SEQ ID NO: 456612 - DNA, 104 bp, Homo sapiens; identical to SEQ ID NO: 355601
  chr17:16282523-16282627
  hypo
  breast vs. melanoma

SEQ ID NO: 456613 - DNA, 232 bp, Homo sapiens; identical to SEQ ID NO: 355615
  chr17:21104115-21104347
  hypo
  breast vs. melanoma,renal

SEQ ID NO: 456614 - DNA, 49 bp, Homo sapiens
  chr17:26961722-26961771
  hypo
  breast vs. melanoma,colorectal,uterine,prostate, pancreas_gallbladder,anorectal,renal,upper_gi,head_and_neck, ovary,sarcoma,liver_bileduct,bladder_and_urothelial,cervical, lymphoid_neoplasm
cggcgcatgggtgtgttgccatagagacgacgggaacgctggatgtaga

SEQ ID NO: 456615 - DNA, 57 bp, Homo sapiens; identical to SEQ ID NO: 455756
  chr17:27893139-27893196
  hypo
  breast vs. lung,head_and_neck

SEQ ID NO: 456616 - DNA, 387 bp, Homo sapiens; identical to SEQ ID NO: 360990
  chr17:27893344-27893731
  hypo
  breast vs. lung,head_and_neck

SEQ ID NO: 456617 - DNA, 280 bp, Homo sapiens; identical to SEQ ID NO: 342951
  chr17:30347571-30347851
  hypo
  breast vs. liver_bileduct

SEQ ID NO: 456618 - DNA, 130 bp, Homo sapiens; identical to SEQ ID NO: 342960
  chr17:35545278-35545408
  hypo
  breast vs. lung,bladder_and_urothelial,ovary,upper_gi, sarcoma,anorectal,uterine,pancreas_gallbladder,cervical

SEQ ID NO: 456619 - DNA, 11 bp, Homo sapiens
  chr17:37880961-37880972
  hypo
  breast vs. liver_bileduct,head_and_neck
cgtacccttgt

SEQ ID NO: 456620 - DNA, 99 bp, Homo sapiens; identical to SEQ ID NO: 217757
  chr17:37881018-37881117
  hypo
  breast vs. liver_bileduct,head_and_neck

SEQ ID NO: 456621 - DNA, 37 bp, Homo sapiens; identical to SEQ ID NO: 455770
  chr17:40332770-40332807
  hypo
  breast vs. bladder_and_urothelial,anorectal

SEQ ID NO: 456622 - DNA, 170 bp, Homo sapiens; identical to SEQ ID NO: 345520
  chr17:42092357-42092527
  hypo
  breast vs. prostate,melanoma,upper_gi,liver_bileduct, renal,sarcoma,colorectal,lung

SEQ ID NO: 456623 - DNA, 107 bp, Homo sapiens; identical to SEQ ID NO: 343008
  chr17:46006406-46006513
  hypo
  breast vs. bladder_and_urothelial,head_and_neck, colorectal,liver_bileduct,cervical,lung,anorectal, lymphoid_neoplasm,uterine

SEQ ID NO: 456624 - DNA, 182 bp, Homo sapiens; identical to SEQ ID NO: 455779
  chr17:46659093-46659275
  hypo
  breast vs. bladder_and_urothelial,cervical

SEQ ID NO: 456625 - DNA, 46 bp, Homo sapiens; identical to SEQ ID NO: 455780
  chr17:46659384-46659430
  hypo
  breast vs. bladder_and_urothelial,cervical

SEQ ID NO: 456626 - DNA, 170 bp, Homo sapiens; identical to SEQ ID NO: 351973
  chr17:46724200-46724370
  hypo
  breast vs. colorectal

SEQ ID NO: 456627 - DNA, 163 bp, Homo sapiens; identical to SEQ ID NO: 381664
  chr17:47657789-47657952
  hypo
  breast vs. renal

SEQ ID NO: 456628 - DNA, 103 bp, Homo sapiens
  chr17:60766832-60766935
  hypo
  breast vs. bladder_and_urothelial,prostate,cervical, melanoma
cggggtgagggaagcagagcccagcctgaaccctgaccccttccctgtagacccctccctgagcccgtccccagcagcgctgccccccgccccgggcactgag

SEQ ID NO: 456629 - DNA, 224 bp, Homo sapiens; identical to SEQ ID NO: 348823
  chr17:60767107-60767331
  hypo
  breast vs. bladder_and_urothelial,prostate,cervical, melanoma

SEQ ID NO: 456630 - DNA, 112 bp, Homo sapiens; identical to SEQ ID NO: 454237
  chr17:61777761-61777873
  hypo
  breast vs. cervical,sarcoma,anorectal,multiple_myeloma, non_cancer

SEQ ID NO: 456631 - DNA, 76 bp, Homo sapiens; identical to SEQ ID NO: 345537
  chr17:61778423-61778499
  hypo
  breast vs. cervical,sarcoma,anorectal,multiple_myeloma, non_cancer

SEQ ID NO: 456632 - DNA, 57 bp, Homo sapiens; identical to SEQ ID NO: 343073
  chr17:66913081-66913138
  hypo
  breast vs. liver_bileduct

SEQ ID NO: 456633 - DNA, 184 bp, Homo sapiens
  chr17:72367880-72368064
  hypo
  breast vs. colorectal,liver_bileduct, pancreas_gallbladder,renal,prostate
cgcagtggccctggcgcgccttgccaccaggaccaggaggccctcctactactaccttctggcgctcacagcctcggatatcatcatccaggtggtcatcgtgttcgcgggcttcctcctgcagggagcagtgctggcccgccaggtgccccaggctgtggtgcgcacggccaacatcctggag

SEQ ID NO: 456634 - DNA, 345 bp, Homo sapiens; identical to SEQ ID NO: 355694
  chr17:72368130-72368475
  hypo
  breast vs. colorectal,liver_bileduct, pancreas_gallbladder,renal,prostate

SEQ ID NO: 456635 - DNA, 65 bp, Homo sapiens; identical to SEQ ID NO: 347468
  chr17:73073967-73074032
  hypo
  breast vs. thyroid,colorectal,upper_gi,prostate,uterine, multiple_myeloma,non_cancer

SEQ ID NO: 456636 - DNA, 127 bp, Homo sapiens; identical to SEQ ID NO: 343099
  chr17:73100161-73100288
  hypo
  breast vs. head_and_neck

SEQ ID NO: 456637 - DNA, 141 bp, Homo sapiens; identical to SEQ ID NO: 343103
  chr17:73242514-73242655
  hypo
  breast vs. pancreas_gallbladder

SEQ ID NO: 456638 - DNA, 81 bp, Homo sapiens; identical to SEQ ID NO: 454240
  chr17:73584287-73584368
  hypo
  breast vs. cervical

SEQ ID NO: 456639 - DNA, 170 bp, Homo sapiens; identical to SEQ ID NO: 352021
  chr17:73584951-73585121
  hypo
  breast vs. cervical

SEQ ID NO: 456640 - DNA, 2 bp, Homo sapiens
  chr17:73635994-73635996
  hypo
  breast vs. sarcoma,melanoma
cg

SEQ ID NO: 456641 - DNA, 307 bp, Homo sapiens
  chr17:74269555-74269862
  hypo
  breast vs. liver_bileduct
cggctgtctctgcagcagcccactcaagggagagaagcggagggcggcaaacagaaacctgcccagccggctgcaggggttcgcctccagccattggcactgcttccccggaatcccacgccaggggtcaggaaccaccctgagccagcagcaagagcgcagcaggcagctgccaccctcacccccagagtgctggacactgacagcacgggccccagcaccccaggctagaaggcaggtctagagccagaaggcagggcacccccaatctagctgaggccaggagagagctggtggggtgagcacc

SEQ ID NO: 456642 - DNA, 514 bp, Homo sapiens; identical to SEQ ID NO: 343157
  chr17:76425233-76425747
  hypo
  breast vs. upper_gi,liver_bileduct

SEQ ID NO: 456643 - DNA, 50 bp, Homo sapiens; identical to SEQ ID NO: 355744
  chr17:77808028-77808078
  hypo
  breast vs. melanoma,lymphoid_neoplasm

SEQ ID NO: 456644 - DNA, 117 bp, Homo sapiens
  chr17:78143796-78143913
  hypo
  breast vs. lymphoid_neoplasm
cgttcagttcagccagagattgggccacattcagtcctcgcttccctgggagggggaaggtaagtgcgcgcagtccatccggcgaagagcaggtcagcctacggagggctcagccta

SEQ ID NO: 456645 - DNA, 566 bp, Homo sapiens
  chr17:78271713-78272279
  hypo
  breast vs. upper_gi,bladder_and_urothelial,cervical, uterine,liver_bileduct,pancreas_gallbladder,colorectal,sarcoma, head_and_neck,lung,ovary,melanoma
cgctgccttgatgacagagtgagactctgtctctaaacaatgaaaataaattttacaagttgctttatatttagatttactgttgccagatggcctgggttcaaaccccagctctgtcagtcaggaccctgcgttgactacttagccaggacccctgcttctgagatccctcccctgtcctgggagtttgttgtggggattcggtgagggcctgcaaaggagctgacgccctaggctgggggctgagggaagccctgtctcctgcgtgagttaaactctgctcagccacgcgcggtgctcctcttgctctgtgtgcacggtgcttgcttcctgttgggactccagactcccagggagatgactccctggccagctcagctcactgcgggatctttattcccttccagctggcggctgtacctggtgaacctgtgccaaagatgcatggacacaaggacgtacacctggctgggcgccctgcctgtcctgcactgctgtatggagctggccccgcggcacaaggatgcctggagacagcctgaggacacctgggccgctctggaggg

SEQ ID NO: 456646 - DNA, 77 bp, Homo sapiens; identical to SEQ ID NO: 348852
  chr17:78272313-78272390
  hypo
  breast vs. upper_gi,bladder_and_urothelial,cervical, uterine,liver_bileduct,pancreas_gallbladder,colorectal,sarcoma, head_and_neck,lung,ovary,melanoma

SEQ ID NO: 456647 - DNA, 162 bp, Homo sapiens; identical to SEQ ID NO: 343198
  chr17:78590602-78590764
  hypo
  breast vs. colorectal,renal,melanoma,upper_gi, pancreas_gallbladder,lymphoid_neoplasm

SEQ ID NO: 456648 - DNA, 398 bp, Homo sapiens; identical to SEQ ID NO: 343239
  chr17:79873436-79873834
  hypo
  breast vs. bladder_and_urothelial,head_and_neck,uterine

SEQ ID NO: 456649 - DNA, 221 bp, Homo sapiens; identical to SEQ ID NO: 455803
  chr17:80186335-80186556
  hypo
  breast vs. bladder_and_urothelial,upper_gi,colorectal, anorectal,multiple_myeloma,head_and_neck,lung

SEQ ID NO: 456650 - DNA, 517 bp, Homo sapiens; identical to SEQ ID NO: 347473
  chr17:80186618-80187135
  hypo
  breast vs. bladder_and_urothelial,upper_gi,colorectal, anorectal,multiple_myeloma,head_and_neck,lung

SEQ ID NO: 456651 - DNA, 230 bp, Homo sapiens
  chr17:80394871-80395101
  hypo
  breast vs. melanoma,head_and_neck
cgactgggacccgggccggccgcatacactctggagtctcctacactgagacccgggcctggctgtctcaggcggctcccatgttggctctgggtacagccccgggaggcgtgtccagggccgtgttggccgcctcccctggagccactcacctgtttgctttctcacccagtcctcctcatgcagaagtaccggcggtgcggctttccgcagctgtgggcagccagtgc

SEQ ID NO: 456652 - DNA, 82 bp, Homo sapiens; identical to SEQ ID NO: 355773
  chr17:80395146-80395228
  hypo
  breast vs. melanoma,head_and_neck

SEQ ID NO: 456653 - DNA, 33 bp, Homo sapiens; identical to SEQ ID NO: 453753
  chr17:80797632-80797665
  hypo
  breast vs. melanoma,sarcoma,lymphoid_neoplasm,renal, myeloid_neoplasm,colorectal,liver_bileduct,non_cancer,prostate, multiple_myeloma

SEQ ID NO: 456654 - DNA, 216 bp, Homo sapiens; identical to SEQ ID NO: 343293
  chr18:196827-197043
  hypo
  breast vs. lung,pancreas_gallbladder,liver_bileduct, head_and_neck,upper_gi

SEQ ID NO: 456655 - DNA, 238 bp, Homo sapiens; identical to SEQ ID NO: 345538
  chr18:2848166-2848404
  hypo
  breast vs. uterine

SEQ ID NO: 456656 - DNA, 154 bp, Homo sapiens
  chr18:8612051-8612205
  hypo
  breast vs. melanoma,sarcoma,ovary,prostate,uterine, lymphoid_neoplasm
cgtttgttgagcacctactgtgtgttgggtgttatgctacccagtggggattcagtggtaaacaggacatcgactctgtccagaagtggatcggagcttctgggagctgcgtgaccgcttgtcagggcagtgacagatgtgtatgggtatttgg

SEQ ID NO: 456657 - DNA, 489 bp, Homo sapiens; identical to SEQ ID NO: 343317
  chr18:8625474-8625963
  hypo
  breast vs. sarcoma,head_and_neck

SEQ ID NO: 456658 - DNA, 3 bp, Homo sapiens
  chr18:9913003-9913006
  hypo
  breast vs. renal
atc

SEQ ID NO: 456659 - DNA, 5 bp, Homo sapiens
  chr18:13135171-13135176
  hypo
  breast vs. colorectal
cgagg

SEQ ID NO: 456660 - DNA, 110 bp, Homo sapiens; identical to SEQ ID NO: 355824
  chr18:13135194-13135304
  hypo
  breast vs. colorectal

SEQ ID NO: 456661 - DNA, 36 bp, Homo sapiens
  chr18:13425955-13425991
  hypo
  breast vs. prostate
cgagggcaggacggtggaccacagtgaccctgtggg

SEQ ID NO: 456662 - DNA, 52 bp, Homo sapiens
  chr18:13826252-13826304
  hypo
  breast vs. sarcoma,anorectal,pancreas_gallbladder
cgccggcatctgggctttctgcacgggctgcggcattgtcttcatcctgtac

SEQ ID NO: 456663 - DNA, 79 bp, Homo sapiens; identical to SEQ ID NO: 355828
  chr18:13826592-13826671
  hypo
  breast vs. sarcoma,anorectal,pancreas_gallbladder

SEQ ID NO: 456664 - DNA, 52 bp, Homo sapiens
  chr18:46142611-46142663
  hypo
  breast vs. melanoma
tgacttctcctgcaggtggctccttttcagccctctctggacatcggcggtt

SEQ ID NO: 456665 - DNA, 53 bp, Homo sapiens; identical to SEQ ID NO: 352104
  chr18:53257322-53257375
  hypo
  breast vs. cervical,head_and_neck,prostate

SEQ ID NO: 456666 - DNA, 84 bp, Homo sapiens; identical to SEQ ID NO: 367600
  chr18:54483312-54483396
  hypo
  breast vs. uterine,ovary,sarcoma

SEQ ID NO: 456667 - DNA, 115 bp, Homo sapiens; identical to SEQ ID NO: 346183
  chr18:55850987-55851102
  hypo
  breast vs. liver_bileduct

SEQ ID NO: 456668 - DNA, 98 bp, Homo sapiens; identical to SEQ ID NO: 343403
  chr18:60110139-60110237
  hypo
  breast vs. lung

SEQ ID NO: 456669 - DNA, 73 bp, Homo sapiens; identical to SEQ ID NO: 343414
  chr18:72632559-72632632
  hypo
  breast vs. lung,head_and_neck

SEQ ID NO: 456670 - DNA, 133 bp, Homo sapiens; identical to SEQ ID NO: 454945
  chr18:74113780-74113913
  hypo
  breast vs. liver_bileduct

SEQ ID NO: 456671 - DNA, 61 bp, Homo sapiens; identical to SEQ ID NO: 454946
  chr18:74113942-74114003
  hypo
  breast vs. liver_bileduct

SEQ ID NO: 456672 - DNA, 297 bp, Homo sapiens; identical to SEQ ID NO: 343445
  chr18:74569886-74570183
  hypo
  breast vs. pancreas_gallbladder,head_and_neck

SEQ ID NO: 456673 - DNA, 241 bp, Homo sapiens; identical to SEQ ID NO: 343461
  chr18:75873544-75873785
  hypo
  breast vs. colorectal

SEQ ID NO: 456674 - DNA, 138 bp, Homo sapiens
  chr18:76685353-76685491
  hypo
  breast vs. sarcoma,anorectal,pancreas_gallbladder
cgcaagagggcgtgaagccacgcggtcgcacacctggtaccgcgcacagtgagaaaggagggcaagtgcgctgagacccaggagggagggcagccctcccctgcgctgctgaggctcgtttctttcaatgtgtccctg

SEQ ID NO: 456675 - DNA, 279 bp, Homo sapiens
  chr18:76685836-76686115
  hypo
  breast vs. sarcoma,anorectal,pancreas_gallbladder
ccagcactcccacccctcgatgtgtgcccaggtcgaaggaaggcttgccacccgaaggcctgcacgggaaagctcacagcagcgttctccaaacagccaaaacgcggaagcaaccccgatgtgcgtgggctggtgaatgcaggcccagcgcggagtgcgcacagcccggaacggcattcagccaagaaaagacccacagccgggaacagcatattcagccaagaaaagaaagggcggcctggggcgctctgcaccgcgggtgagccgtgagaacacggc

SEQ ID NO: 456676 - DNA, 299 bp, Homo sapiens
  chr18:76685836-76686135
  hypo
  breast vs. pancreas_gallbladder,lymphoid_neoplasm
ccagcactcccacccctcgatgtgtgcccaggtcgaaggaaggcttgccacccgaaggcctgcacgggaaagctcacagcagcgttctccaaacagccaaaacgcggaagcaaccccgatgtgcgtgggctggtgaatgcaggcccagcgcggagtgcgcacagcccggaacggcattcagccaagaaaagacccacagccgggaacagcatattcagccaagaaaagaaagggcggcctggggcgctctgcaccgcgggtgagccgtgagaacacggcgctccgggagagaagccagc

SEQ ID NO: 456677 - DNA, 102 bp, Homo sapiens; identical to SEQ ID NO: 355890
  chr18:76686279-76686381
  hypo
  breast vs. pancreas_gallbladder,lymphoid_neoplasm

SEQ ID NO: 456678 - DNA, 266 bp, Homo sapiens; identical to SEQ ID NO: 453773
  chr18:77542640-77542906
  hypo
  breast vs. melanoma

SEQ ID NO: 456679 - DNA, 271 bp, Homo sapiens; identical to SEQ ID NO: 453774
  chr18:77542951-77543222
  hypo
  breast vs. melanoma

SEQ ID NO: 456680 - DNA, 2 bp, Homo sapiens
  chr18:77543376-77543378
  hypo
  breast vs. melanoma
ac

SEQ ID NO: 456681 - DNA, 113 bp, Homo sapiens; identical to SEQ ID NO: 343505
  chr18:77616298-77616411
  hypo
  breast vs. renal,melanoma

SEQ ID NO: 456682 - DNA, 54 bp, Homo sapiens; identical to SEQ ID NO: 355909
  chr19:403809-403863
  hypo
  breast vs. renal

SEQ ID NO: 456683 - DNA, 53 bp, Homo sapiens; identical to SEQ ID NO: 355910
  chr19:407832-407885
  hypo
  breast vs. lymphoid_neoplasm,renal,prostate,anorectal

SEQ ID NO: 456684 - DNA, 311 bp, Homo sapiens; identical to SEQ ID NO: 367701
  chr19:407832-408143
  hypo
  breast vs. lymphoid_neoplasm,renal

SEQ ID NO: 456685 - DNA, 99 bp, Homo sapiens; identical to SEQ ID NO: 454948
  chr19:549193-549292
  hypo
  breast vs. renal

SEQ ID NO: 456686 - DNA, 2 bp, Homo sapiens
  chr19:550028-550030
  hypo
  breast vs. renal
ac

SEQ ID NO: 456687 - DNA, 159 bp, Homo sapiens; identical to SEQ ID NO: 453776
  chr19:883424-883583
  hypo
  breast vs. sarcoma,melanoma,prostate

SEQ ID NO: 456688 - DNA, 45 bp, Homo sapiens; identical to SEQ ID NO: 453777
  chr19:884311-884356
  hypo
  breast vs. sarcoma,melanoma,prostate

SEQ ID NO: 456689 - DNA, 544 bp, Homo sapiens; identical to SEQ ID NO: 346191
  chr19:884311-884855
  hypo
  breast vs. sarcoma,prostate,melanoma,lymphoid_neoplasm

SEQ ID NO: 456690 - DNA, 11 bp, Homo sapiens
  chr19:957156-957167
  hypo
  breast vs. melanoma,prostate
cggagcctctt

SEQ ID NO: 456691 - DNA, 50 bp, Homo sapiens; identical to SEQ ID NO: 355928
  chr19:957401-957451
  hypo
  breast vs. melanoma,prostate

SEQ ID NO: 456692 - DNA, 229 bp, Homo sapiens
  chr19:1004547-1004776
  hypo
  breast vs. renal
cgcacgggccccgtgtgggtgacaggcagctcccaggtacacatgtctcggcactttaaggtgtggagccttcgccgggacccacggggcgccccggcctgggccacggtgggcagctggcgggacggccagctggacttggaaccgggaggtgcctctgcacggcccccgcccccacagggtgcccaggtctggcccaagctgcgtgtggtaacgctgttggaacacc

SEQ ID NO: 456693 - DNA, 279 bp, Homo sapiens; identical to SEQ ID NO: 218770
  chr19:1005441-1005720
  hypo
  breast vs. renal

SEQ ID NO: 456694 - DNA, 10 bp, Homo sapiens
  chr19:1030023-1030033
  hypo
  breast vs. head_and_neck,melanoma,liver_bileduct, anorectal,uterine,renal
cgtttatctc

SEQ ID NO: 456695 - DNA, 128 bp, Homo sapiens; identical to SEQ ID NO: 367734
  chr19:1030225-1030353
  hypo
  breast vs. head_and_neck,melanoma,liver_bileduct, anorectal,uterine,renal

SEQ ID NO: 456696 - DNA, 339 bp, Homo sapiens
  chr19:1166870-1167209
  hypo
  breast vs. sarcoma,colorectal,myeloid_neoplasm,prostate, bladder_and_urothelial,thyroid,non_cancer,upper_gi, lymphoid_neoplasm,multiple_myeloma,uterine
cggcctcaggccacaaggtctccccacctggctccttggggagtgccaagcgttgccagcagccgggctatgctgatcccagacaagtggctcgaccggtcaccactgtccttgagcttaagtccagccttggtgacaaaaatgtcacaaggacctgcatccgagccctgagggcatcaggtcctggaggaggaggaagagtcccttctggcttcgggctgggcttgaggacggcagctccaagaccgcttagagcgagacttcagcgctgactgctggagctacgcaccctgtcctgacaatggccgcacagttaggcgctgctccacgcctggagga

SEQ ID NO: 456697 - DNA, 303 bp, Homo sapiens; identical to SEQ ID NO: 343568
  chr19:1393952-1394255
  hypo
  breast vs. melanoma,sarcoma,uterine,multiple_myeloma

SEQ ID NO: 456698 - DNA, 23 bp, Homo sapiens
  chr19:1565869-1565892
  hypo
  breast vs. head_and_neck,renal,lymphoid_neoplasm, bladder_and_urothelial,anorectal
cgctgattcctgccagctcccca

SEQ ID NO: 456699 - DNA, 121 bp, Homo sapiens; identical to SEQ ID NO: 355941
  chr19:1565953-1566074
  hypo
  breast vs. head_and_neck,renal,lymphoid_neoplasm, bladder_and_urothelial,anorectal
